United States Patent Application Publication US 2015/0141320 A1 - sequence listing, part 42

SEQ ID NO: 1627871 - DNA, 15 bp, Homo sapiens
ggcctggcaggtaga

SEQ ID NO: 1627872 - DNA, 15 bp, Homo sapiens
tggcctggcaggtag

SEQ ID NO: 1627873 - DNA, 15 bp, Homo sapiens
ctggcctggcaggta

SEQ ID NO: 1627874 - DNA, 15 bp, Homo sapiens
cctggcctggcaggt

SEQ ID NO: 1627875 - DNA, 15 bp, Homo sapiens
gcctggcctggcagg

SEQ ID NO: 1627876 - DNA, 15 bp, Homo sapiens
tgcctggcctggcag

SEQ ID NO: 1627877 - DNA, 15 bp, Homo sapiens
ttgcctggcctggca

SEQ ID NO: 1627878 - DNA, 15 bp, Homo sapiens
tttgcctggcctggc

SEQ ID NO: 1627879 - DNA, 15 bp, Homo sapiens
ctttgcctggcctgg

SEQ ID NO: 1627880 - DNA, 15 bp, Homo sapiens
gctttgcctggcctg

SEQ ID NO: 1627881 - DNA, 15 bp, Homo sapiens
cgctttgcctggcct

SEQ ID NO: 1627882 - DNA, 15 bp, Homo sapiens
gcgctttgcctggcc

SEQ ID NO: 1627883 - DNA, 15 bp, Homo sapiens
ggcgctttgcctggc

SEQ ID NO: 1627884 - DNA, 15 bp, Homo sapiens
aggcgctttgcctgg

SEQ ID NO: 1627885 - DNA, 15 bp, Homo sapiens
aaggcgctttgcctg

SEQ ID NO: 1627886 - DNA, 15 bp, Homo sapiens
aaaggcgctttgcct

SEQ ID NO: 1627887 - DNA, 15 bp, Homo sapiens
taaaggcgctttgcc

SEQ ID NO: 1627888 - DNA, 15 bp, Homo sapiens
gtaaaggcgctttgc

SEQ ID NO: 1627889 - DNA, 15 bp, Homo sapiens
tgtaaaggcgctttg

SEQ ID NO: 1627890 - DNA, 15 bp, Homo sapiens
gtgtaaaggcgcttt

SEQ ID NO: 1627891 - DNA, 15 bp, Homo sapiens
tgtgtaaaggcgctt

SEQ ID NO: 1627892 - DNA, 15 bp, Homo sapiens
ctgtgtaaaggcgct

SEQ ID NO: 1627893 - DNA, 15 bp, Homo sapiens
cctgtgtaaaggcgc

SEQ ID NO: 1627894 - DNA, 15 bp, Homo sapiens
gcctgtgtaaaggcg

SEQ ID NO: 1627895 - DNA, 15 bp, Homo sapiens
ggcctgtgtaaaggc

SEQ ID NO: 1627896 - DNA, 15 bp, Homo sapiens
aggcctgtgtaaagg

SEQ ID NO: 1627897 - DNA, 15 bp, Homo sapiens
gaggcctgtgtaaag

SEQ ID NO: 1627898 - DNA, 15 bp, Homo sapiens
cgaggcctgtgtaaa

SEQ ID NO: 1627899 - DNA, 15 bp, Homo sapiens
ccgaggcctgtgtaa

SEQ ID NO: 1627900 - DNA, 15 bp, Homo sapiens
tccgaggcctgtgta

SEQ ID NO: 1627901 - DNA, 15 bp, Homo sapiens
ttccgaggcctgtgt

SEQ ID NO: 1627902 - DNA, 15 bp, Homo sapiens
tttccgaggcctgtg

SEQ ID NO: 1627903 - DNA, 15 bp, Homo sapiens
ttttccgaggcctgt

SEQ ID NO: 1627904 - DNA, 15 bp, Homo sapiens
gttttccgaggcctg

SEQ ID NO: 1627905 - DNA, 15 bp, Homo sapiens
tgttttccgaggcct

SEQ ID NO: 1627906 - DNA, 15 bp, Homo sapiens
ttgttttccgaggcc

SEQ ID NO: 1627907 - DNA, 15 bp, Homo sapiens
attgttttccgaggc

SEQ ID NO: 1627908 - DNA, 15 bp, Homo sapiens
cattgttttccgagg

SEQ ID NO: 1627909 - DNA, 15 bp, Homo sapiens
ccattgttttccgag

SEQ ID NO: 1627910 - DNA, 15 bp, Homo sapiens
tccattgttttccga

SEQ ID NO: 1627911 - DNA, 15 bp, Homo sapiens
ctccattgttttccg

SEQ ID NO: 1627912 - DNA, 15 bp, Homo sapiens
actccattgttttcc

SEQ ID NO: 1627913 - DNA, 15 bp, Homo sapiens
cactccattgttttc

SEQ ID NO: 1627914 - DNA, 15 bp, Homo sapiens
tcactccattgtttt

SEQ ID NO: 1627915 - DNA, 15 bp, Homo sapiens
ctcactccattgttt

SEQ ID NO: 1627916 - DNA, 15 bp, Homo sapiens
gctcactccattgtt

SEQ ID NO: 1627917 - DNA, 15 bp, Homo sapiens
tgctcactccattgt

SEQ ID NO: 1627918 - DNA, 15 bp, Homo sapiens
gtgctcactccattg

SEQ ID NO: 1627919 - DNA, 15 bp, Homo sapiens
tgtgctcactccatt

SEQ ID NO: 1627920 - DNA, 15 bp, Homo sapiens
ttgtgctcactccat

SEQ ID NO: 1627921 - DNA, 15 bp, Homo sapiens
cttgtgctcactcca

SEQ ID NO: 1627922 - DNA, 15 bp, Homo sapiens
tcttgtgctcactcc

SEQ ID NO: 1627923 - DNA, 15 bp, Homo sapiens
atcttgtgctcactc

SEQ ID NO: 1627924 - DNA, 15 bp, Homo sapiens
catcttgtgctcact

SEQ ID NO: 1627925 - DNA, 15 bp, Homo sapiens
gcatcttgtgctcac

SEQ ID NO: 1627926 - DNA, 15 bp, Homo sapiens
ggcatcttgtgctca

SEQ ID NO: 1627927 - DNA, 15 bp, Homo sapiens
gggcatcttgtgctc

SEQ ID NO: 1627928 - DNA, 15 bp, Homo sapiens
agggcatcttgtgct

SEQ ID NO: 1627929 - DNA, 15 bp, Homo sapiens
cagggcatcttgtgc

SEQ ID NO: 1627930 - DNA, 15 bp, Homo sapiens
acagggcatcttgtg

SEQ ID NO: 1627931 - DNA, 15 bp, Homo sapiens
cacagggcatcttgt

SEQ ID NO: 1627932 - DNA, 15 bp, Homo sapiens
gcacagggcatcttg

SEQ ID NO: 1627933 - DNA, 15 bp, Homo sapiens
tgcacagggcatctt

SEQ ID NO: 1627934 - DNA, 15 bp, Homo sapiens
ctgcacagggcatct

SEQ ID NO: 1627935 - DNA, 15 bp, Homo sapiens
gctgcacagggcatc

SEQ ID NO: 1627936 - DNA, 15 bp, Homo sapiens
agctgcacagggcat

SEQ ID NO: 1627937 - DNA, 15 bp, Homo sapiens
cagctgcacagggca

SEQ ID NO: 1627938 - DNA, 15 bp, Homo sapiens
gcagctgcacagggc

SEQ ID NO: 1627939 - DNA, 15 bp, Homo sapiens
ggcagctgcacaggg

SEQ ID NO: 1627940 - DNA, 15 bp, Homo sapiens
gggcagctgcacagg

SEQ ID NO: 1627941 - DNA, 15 bp, Homo sapiens
cgggcagctgcacag

SEQ ID NO: 1627942 - DNA, 15 bp, Homo sapiens
tcgggcagctgcaca

SEQ ID NO: 1627943 - DNA, 15 bp, Homo sapiens
ctcgggcagctgcac

SEQ ID NO: 1627944 - DNA, 15 bp, Homo sapiens
cctcgggcagctgca

SEQ ID NO: 1627945 - DNA, 15 bp, Homo sapiens
ccctcgggcagctgc

SEQ ID NO: 1627946 - DNA, 15 bp, Homo sapiens
accctcgggcagctg

SEQ ID NO: 1627947 - DNA, 15 bp, Homo sapiens
gaccctcgggcagct

SEQ ID NO: 1627948 - DNA, 15 bp, Homo sapiens
agaccctcgggcagc

SEQ ID NO: 1627949 - DNA, 15 bp, Homo sapiens
gagaccctcgggcag

SEQ ID NO: 1627950 - DNA, 15 bp, Homo sapiens
ggagaccctcgggca

SEQ ID NO: 1627951 - DNA, 15 bp, Homo sapiens
cggagaccctcgggc

SEQ ID NO: 1627952 - DNA, 15 bp, Homo sapiens
gcggagaccctcggg

SEQ ID NO: 1627953 - DNA, 15 bp, Homo sapiens
ggcggagaccctcgg

SEQ ID NO: 1627954 - DNA, 15 bp, Homo sapiens
gggcggagaccctcg

SEQ ID NO: 1627955 - DNA, 15 bp, Homo sapiens
tgggcggagaccctc

SEQ ID NO: 1627956 - DNA, 15 bp, Homo sapiens
gtgggcggagaccct

SEQ ID NO: 1627957 - DNA, 15 bp, Homo sapiens
ggtgggcggagaccc

SEQ ID NO: 1627958 - DNA, 15 bp, Homo sapiens
gggtgggcggagacc

SEQ ID NO: 1627959 - DNA, 15 bp, Homo sapiens
ggggtgggcggagac

SEQ ID NO: 1627960 - DNA, 15 bp, Homo sapiens
cggggtgggcggaga

SEQ ID NO: 1627961 - DNA, 15 bp, Homo sapiens
ccggggtgggcggag

SEQ ID NO: 1627962 - DNA, 15 bp, Homo sapiens
gccggggtgggcgga

SEQ ID NO: 1627963 - DNA, 15 bp, Homo sapiens
ggccggggtgggcgg

SEQ ID NO: 1627964 - DNA, 15 bp, Homo sapiens
cggccggggtgggcg

SEQ ID NO: 1627965 - DNA, 15 bp, Homo sapiens
ccggccggggtgggc

SEQ ID NO: 1627966 - DNA, 15 bp, Homo sapiens
tccggccggggtggg

SEQ ID NO: 1627967 - DNA, 15 bp, Homo sapiens
gtccggccggggtgg

SEQ ID NO: 1627968 - DNA, 15 bp, Homo sapiens
agtccggccggggtg

SEQ ID NO: 1627969 - DNA, 15 bp, Homo sapiens
aagtccggccggggt

SEQ ID NO: 1627970 - DNA, 15 bp, Homo sapiens
aaagtccggccgggg

SEQ ID NO: 1627971 - DNA, 15 bp, Homo sapiens
caaagtccggccggg

SEQ ID NO: 1627972 - DNA, 15 bp, Homo sapiens
tcaaagtccggccgg

SEQ ID NO: 1627973 - DNA, 15 bp, Homo sapiens
atcaaagtccggccg

SEQ ID NO: 1627974 - DNA, 15 bp, Homo sapiens
gatcaaagtccggcc

SEQ ID NO: 1627975 - DNA, 15 bp, Homo sapiens
ggatcaaagtccggc

SEQ ID NO: 1627976 - DNA, 15 bp, Homo sapiens
gggatcaaagtccgg

SEQ ID NO: 1627977 - DNA, 15 bp, Homo sapiens
ggggatcaaagtccg

SEQ ID NO: 1627978 - DNA, 15 bp, Homo sapiens
gggggatcaaagtcc

SEQ ID NO: 1627979 - DNA, 15 bp, Homo sapiens
ggggggatcaaagtc

SEQ ID NO: 1627980 - DNA, 15 bp, Homo sapiens
cggggggatcaaagt

SEQ ID NO: 1627981 - DNA, 15 bp, Homo sapiens
tcggggggatcaaag

SEQ ID NO: 1627982 - DNA, 15 bp, Homo sapiens
ttcggggggatcaaa

SEQ ID NO: 1627983 - DNA, 15 bp, Homo sapiens
cttcggggggatcaa

SEQ ID NO: 1627984 - DNA, 15 bp, Homo sapiens
acttcggggggatca

SEQ ID NO: 1627985 - DNA, 15 bp, Homo sapiens
gacttcggggggatc

SEQ ID NO: 1627986 - DNA, 15 bp, Homo sapiens
agacttcggggggat

SEQ ID NO: 1627987 - DNA, 15 bp, Homo sapiens
aagacttcgggggga

SEQ ID NO: 1627988 - DNA, 15 bp, Homo sapiens
gaagacttcgggggg

SEQ ID NO: 1627989 - DNA, 15 bp, Homo sapiens
tgaagacttcggggg

SEQ ID NO: 1627990 - DNA, 15 bp, Homo sapiens
gtgaagacttcgggg

SEQ ID NO: 1627991 - DNA, 15 bp, Homo sapiens
tgtgaagacttcggg

SEQ ID NO: 1627992 - DNA, 15 bp, Homo sapiens
ctgtgaagacttcgg

SEQ ID NO: 1627993 - DNA, 15 bp, Homo sapiens
cctgtgaagacttcg

SEQ ID NO: 1627994 - DNA, 15 bp, Homo sapiens
gcctgtgaagacttc

SEQ ID NO: 1627995 - DNA, 15 bp, Homo sapiens
tgcctgtgaagactt

SEQ ID NO: 1627996 - DNA, 15 bp, Homo sapiens
gtgcctgtgaagact

SEQ ID NO: 1627997 - DNA, 15 bp, Homo sapiens
agtgcctgtgaagac

SEQ ID NO: 1627998 - DNA, 15 bp, Homo sapiens
cagtgcctgtgaaga

SEQ ID NO: 1627999 - DNA, 15 bp, Homo sapiens
gcagtgcctgtgaag

SEQ ID NO: 1628000 - DNA, 15 bp, Homo sapiens
tgcagtgcctgtgaa

SEQ ID NO: 1628001 - DNA, 15 bp, Homo sapiens
atgcagtgcctgtga

SEQ ID NO: 1628002 - DNA, 15 bp, Homo sapiens
gatgcagtgcctgtg

SEQ ID NO: 1628003 - DNA, 15 bp, Homo sapiens
cgatgcagtgcctgt

SEQ ID NO: 1628004 - DNA, 15 bp, Homo sapiens
ccgatgcagtgcctg

SEQ ID NO: 1628005 - DNA, 15 bp, Homo sapiens
cccgatgcagtgcct

SEQ ID NO: 1628006 - DNA, 15 bp, Homo sapiens
acccgatgcagtgcc

SEQ ID NO: 1628007 - DNA, 15 bp, Homo sapiens
aacccgatgcagtgc

SEQ ID NO: 1628008 - DNA, 15 bp, Homo sapiens
caacccgatgcagtg

SEQ ID NO: 1628009 - DNA, 15 bp, Homo sapiens
acaacccgatgcagt

SEQ ID NO: 1628010 - DNA, 15 bp, Homo sapiens
gacaacccgatgcag

SEQ ID NO: 1628011 - DNA, 15 bp, Homo sapiens
agacaacccgatgca

SEQ ID NO: 1628012 - DNA, 15 bp, Homo sapiens
cagacaacccgatgc

SEQ ID NO: 1628013 - DNA, 15 bp, Homo sapiens
ccagacaacccgatg

SEQ ID NO: 1628014 - DNA, 15 bp, Homo sapiens
gccagacaacccgat

SEQ ID NO: 1628015 - DNA, 15 bp, Homo sapiens
cgccagacaacccga

SEQ ID NO: 1628016 - DNA, 15 bp, Homo sapiens
gcgccagacaacccg

SEQ ID NO: 1628017 - DNA, 15 bp, Homo sapiens
ggcgccagacaaccc

SEQ ID NO: 1628018 - DNA, 15 bp, Homo sapiens
gggcgccagacaacc

SEQ ID NO: 1628019 - DNA, 15 bp, Homo sapiens
agggcgccagacaac

SEQ ID NO: 1628020 - DNA, 15 bp, Homo sapiens
aagggcgccagacaa

SEQ ID NO: 1628021 - DNA, 15 bp, Homo sapiens
aaagggcgccagaca

SEQ ID NO: 1628022 - DNA, 15 bp, Homo sapiens
aaaagggcgccagac

SEQ ID NO: 1628023 - DNA, 15 bp, Homo sapiens
gaaaagggcgccaga

SEQ ID NO: 1628024 - DNA, 15 bp, Homo sapiens
ggaaaagggcgccag

SEQ ID NO: 1628025 - DNA, 15 bp, Homo sapiens
aggaaaagggcgcca

SEQ ID NO: 1628026 - DNA, 15 bp, Homo sapiens
gaggaaaagggcgcc

SEQ ID NO: 1628027 - DNA, 15 bp, Homo sapiens
ggaggaaaagggcgc

SEQ ID NO: 1628028 - DNA, 15 bp, Homo sapiens
tggaggaaaagggcg

SEQ ID NO: 1628029 - DNA, 15 bp, Homo sapiens
ctggaggaaaagggc

SEQ ID NO: 1628030 - DNA, 15 bp, Homo sapiens
gctggaggaaaaggg

SEQ ID NO: 1628031 - DNA, 15 bp, Homo sapiens
ggctggaggaaaagg

SEQ ID NO: 1628032 - DNA, 15 bp, Homo sapiens
aggctggaggaaaag

SEQ ID NO: 1628033 - DNA, 15 bp, Homo sapiens
taggctggaggaaaa

SEQ ID NO: 1628034 - DNA, 15 bp, Homo sapiens
ttaggctggaggaaa

SEQ ID NO: 1628035 - DNA, 15 bp, Homo sapiens
tttaggctggaggaa

SEQ ID NO: 1628036 - DNA, 15 bp, Homo sapiens
gtttaggctggagga

SEQ ID NO: 1628037 - DNA, 15 bp, Homo sapiens
agtttaggctggagg

SEQ ID NO: 1628038 - DNA, 15 bp, Homo sapiens
cagtttaggctggag

SEQ ID NO: 1628039 - DNA, 15 bp, Homo sapiens
tcagtttaggctgga

SEQ ID NO: 1628040 - DNA, 15 bp, Homo sapiens
gtcagtttaggctgg

SEQ ID NO: 1628041 - DNA, 15 bp, Homo sapiens
tgtcagtttaggctg

SEQ ID NO: 1628042 - DNA, 15 bp, Homo sapiens
atgtcagtttaggct

SEQ ID NO: 1628043 - DNA, 15 bp, Homo sapiens
gatgtcagtttaggc

SEQ ID NO: 1628044 - DNA, 15 bp, Homo sapiens
tgatgtcagtttagg

SEQ ID NO: 1628045 - DNA, 15 bp, Homo sapiens
atgatgtcagtttag

SEQ ID NO: 1628046 - DNA, 15 bp, Homo sapiens
gatgatgtcagttta

SEQ ID NO: 1628047 - DNA, 15 bp, Homo sapiens
ggatgatgtcagttt

SEQ ID NO: 1628048 - DNA, 15 bp, Homo sapiens
aggatgatgtcagtt

SEQ ID NO: 1628049 - DNA, 15 bp, Homo sapiens
taggatgatgtcagt

SEQ ID NO: 1628050 - DNA, 15 bp, Homo sapiens
ataggatgatgtcag

SEQ ID NO: 1628051 - DNA, 15 bp, Homo sapiens
cataggatgatgtca

SEQ ID NO: 1628052 - DNA, 15 bp, Homo sapiens
ccataggatgatgtc

SEQ ID NO: 1628053 - DNA, 15 bp, Homo sapiens
tccataggatgatgt

SEQ ID NO: 1628054 - DNA, 15 bp, Homo sapiens
gtccataggatgatg

SEQ ID NO: 1628055 - DNA, 15 bp, Homo sapiens
agtccataggatgat

SEQ ID NO: 1628056 - DNA, 15 bp, Homo sapiens
cagtccataggatga

SEQ ID NO: 1628057 - DNA, 15 bp, Homo sapiens
tcagtccataggatg

SEQ ID NO: 1628058 - DNA, 15 bp, Homo sapiens
ctcagtccataggat

SEQ ID NO: 1628059 - DNA, 15 bp, Homo sapiens
gctcagtccatagga

SEQ ID NO: 1628060 - DNA, 15 bp, Homo sapiens
ggctcagtccatagg

SEQ ID NO: 1628061 - DNA, 15 bp, Homo sapiens
cggctcagtccatag

SEQ ID NO: 1628062 - DNA, 15 bp, Homo sapiens
ccggctcagtccata

SEQ ID NO: 1628063 - DNA, 15 bp, Homo sapiens
gccggctcagtccat

SEQ ID NO: 1628064 - DNA, 15 bp, Homo sapiens
ggccggctcagtcca

SEQ ID NO: 1628065 - DNA, 15 bp, Homo sapiens
tggccggctcagtcc

SEQ ID NO: 1628066 - DNA, 15 bp, Homo sapiens
gtggccggctcagtc

SEQ ID NO: 1628067 - DNA, 15 bp, Homo sapiens
agtggccggctcagt

SEQ ID NO: 1628068 - DNA, 15 bp, Homo sapiens
gagtggccggctcag

SEQ ID NO: 1628069 - DNA, 15 bp, Homo sapiens
agagtggccggctca

SEQ ID NO: 1628070 - DNA, 15 bp, Homo sapiens
gagagtggccggctc

SEQ ID NO: 1628071 - DNA, 15 bp, Homo sapiens
agagagtggccggct

SEQ ID NO: 1628072 - DNA, 15 bp, Homo sapiens
cagagagtggccggc

SEQ ID NO: 1628073 - DNA, 15 bp, Homo sapiens
ccagagagtggccgg

SEQ ID NO: 1628074 - DNA, 15 bp, Homo sapiens
gccagagagtggccg

SEQ ID NO: 1628075 - DNA, 15 bp, Homo sapiens
ggccagagagtggcc

SEQ ID NO: 1628076 - DNA, 15 bp, Homo sapiens
cggccagagagtggc

SEQ ID NO: 1628077 - DNA, 15 bp, Homo sapiens
tcggccagagagtgg

SEQ ID NO: 1628078 - DNA, 15 bp, Homo sapiens
ttcggccagagagtg

SEQ ID NO: 1628079 - DNA, 15 bp, Homo sapiens
cttcggccagagagt

SEQ ID NO: 1628080 - DNA, 15 bp, Homo sapiens
acttcggccagagag

SEQ ID NO: 1628081 - DNA, 15 bp, Homo sapiens
cacttcggccagaga

SEQ ID NO: 1628082 - DNA, 15 bp, Homo sapiens
ccacttcggccagag

SEQ ID NO: 1628083 - DNA, 15 bp, Homo sapiens
gccacttcggccaga

SEQ ID NO: 1628084 - DNA, 15 bp, Homo sapiens
ggccacttcggccag

SEQ ID NO: 1628085 - DNA, 15 bp, Homo sapiens
cggccacttcggcca

SEQ ID NO: 1628086 - DNA, 15 bp, Homo sapiens
gcggccacttcggcc

SEQ ID NO: 1628087 - DNA, 15 bp, Homo sapiens
tgcggccacttcggc

SEQ ID NO: 1628088 - DNA, 15 bp, Homo sapiens
ctgcggccacttcgg

SEQ ID NO: 1628089 - DNA, 15 bp, Homo sapiens
cctgcggccacttcg

SEQ ID NO: 1628090 - DNA, 15 bp, Homo sapiens
gcctgcggccacttc

SEQ ID NO: 1628091 - DNA, 15 bp, Homo sapiens
agcctgcggccactt

SEQ ID NO: 1628092 - DNA, 15 bp, Homo sapiens
cagcctgcggccact

SEQ ID NO: 1628093 - DNA, 15 bp, Homo sapiens
acagcctgcggccac

SEQ ID NO: 1628094 - DNA, 15 bp, Homo sapiens
cacagcctgcggcca

SEQ ID NO: 1628095 - DNA, 15 bp, Homo sapiens
gcacagcctgcggcc

SEQ ID NO: 1628096 - DNA, 15 bp, Homo sapiens
ggcacagcctgcggc

SEQ ID NO: 1628097 - DNA, 15 bp, Homo sapiens
gggcacagcctgcgg

SEQ ID NO: 1628098 - DNA, 15 bp, Homo sapiens
ggggcacagcctgcg

SEQ ID NO: 1628099 - DNA, 15 bp, Homo sapiens
gggggcacagcctgc

SEQ ID NO: 1628100 - DNA, 15 bp, Homo sapiens
cgggggcacagcctg

SEQ ID NO: 1628101 - DNA, 15 bp, Homo sapiens
tcgggggcacagcct

SEQ ID NO: 1628102 - DNA, 15 bp, Homo sapiens
ctcgggggcacagcc

SEQ ID NO: 1628103 - DNA, 15 bp, Homo sapiens
gctcgggggcacagc

SEQ ID NO: 1628104 - DNA, 15 bp, Homo sapiens
agctcgggggcacag

SEQ ID NO: 1628105 - DNA, 15 bp, Homo sapiens
cagctcgggggcaca

SEQ ID NO: 1628106 - DNA, 15 bp, Homo sapiens
gcagctcgggggcac

SEQ ID NO: 1628107 - DNA, 15 bp, Homo sapiens
ggcagctcgggggca

SEQ ID NO: 1628108 - DNA, 15 bp, Homo sapiens
gggcagctcgggggc

SEQ ID NO: 1628109 - DNA, 15 bp, Homo sapiens
ggggcagctcggggg

SEQ ID NO: 1628110 - DNA, 15 bp, Homo sapiens
gggggcagctcgggg

SEQ ID NO: 1628111 - DNA, 15 bp, Homo sapiens
tgggggcagctcggg

SEQ ID NO: 1628112 - DNA, 15 bp, Homo sapiens
gtgggggcagctcgg

SEQ ID NO: 1628113 - DNA, 15 bp, Homo sapiens
ggtgggggcagctcg

SEQ ID NO: 1628114 - DNA, 15 bp, Homo sapiens
gggtgggggcagctc

SEQ ID NO: 1628115 - DNA, 15 bp, Homo sapiens
ggggtgggggcagct

SEQ ID NO: 1628116 - DNA, 15 bp, Homo sapiens
gggggtgggggcagc

SEQ ID NO: 1628117 - DNA, 15 bp, Homo sapiens
agggggtgggggcag

SEQ ID NO: 1628118 - DNA, 15 bp, Homo sapiens
gagggggtgggggca

SEQ ID NO: 1628119 - DNA, 15 bp, Homo sapiens
tgagggggtgggggc

SEQ ID NO: 1628120 - DNA, 15 bp, Homo sapiens
gtgagggggtggggg

SEQ ID NO: 1628121 - DNA, 15 bp, Homo sapiens
tgtgagggggtgggg

SEQ ID NO: 1628122 - DNA, 15 bp, Homo sapiens
ctgtgagggggtggg

SEQ ID NO: 1628123 - DNA, 15 bp, Homo sapiens
cctgtgagggggtgg

SEQ ID NO: 1628124 - DNA, 15 bp, Homo sapiens
ccctgtgagggggtg

SEQ ID NO: 1628125 - DNA, 15 bp, Homo sapiens
accctgtgagggggt

SEQ ID NO: 1628126 - DNA, 15 bp, Homo sapiens
gaccctgtgaggggg

SEQ ID NO: 1628127 - DNA, 15 bp, Homo sapiens
ggaccctgtgagggg

SEQ ID NO: 1628128 - DNA, 15 bp, Homo sapiens
gggaccctgtgaggg

SEQ ID NO: 1628129 - DNA, 15 bp, Homo sapiens
agggaccctgtgagg

SEQ ID NO: 1628130 - DNA, 15 bp, Homo sapiens
gagggaccctgtgag

SEQ ID NO: 1628131 - DNA, 15 bp, Homo sapiens
tgagggaccctgtga

SEQ ID NO: 1628132 - DNA, 15 bp, Homo sapiens
ctgagggaccctgtg

SEQ ID NO: 1628133 - DNA, 15 bp, Homo sapiens
tctgagggaccctgt

SEQ ID NO: 1628134 - DNA, 15 bp, Homo sapiens
atctgagggaccctg

SEQ ID NO: 1628135 - DNA, 15 bp, Homo sapiens
aatctgagggaccct

SEQ ID NO: 1628136 - DNA, 15 bp, Homo sapiens
taatctgagggaccc

SEQ ID NO: 1628137 - DNA, 15 bp, Homo sapiens
ataatctgagggacc

SEQ ID NO: 1628138 - DNA, 15 bp, Homo sapiens
tataatctgagggac

SEQ ID NO: 1628139 - DNA, 15 bp, Homo sapiens
ctataatctgaggga

SEQ ID NO: 1628140 - DNA, 15 bp, Homo sapiens
cctataatctgaggg

SEQ ID NO: 1628141 - DNA, 15 bp, Homo sapiens
acctataatctgagg

SEQ ID NO: 1628142 - DNA, 15 bp, Homo sapiens
cacctataatctgag

SEQ ID NO: 1628143 - DNA, 15 bp, Homo sapiens
gcacctataatctga

SEQ ID NO: 1628144 - DNA, 15 bp, Homo sapiens
ggcacctataatctg

SEQ ID NO: 1628145 - DNA, 15 bp, Homo sapiens
gggcacctataatct

SEQ ID NO: 1628146 - DNA, 15 bp, Homo sapiens
tgggcacctataatc

SEQ ID NO: 1628147 - DNA, 15 bp, Homo sapiens
ctgggcacctataat

SEQ ID NO: 1628148 - DNA, 15 bp, Homo sapiens
cctgggcacctataa

SEQ ID NO: 1628149 - DNA, 15 bp, Homo sapiens
gcctgggcacctata

SEQ ID NO: 1628150 - DNA, 15 bp, Homo sapiens
agcctgggcacctat

SEQ ID NO: 1628151 - DNA, 15 bp, Homo sapiens
cagcctgggcaccta

SEQ ID NO: 1628152 - DNA, 15 bp, Homo sapiens
tcagcctgggcacct

SEQ ID NO: 1628153 - DNA, 15 bp, Homo sapiens
ctcagcctgggcacc

SEQ ID NO: 1628154 - DNA, 15 bp, Homo sapiens
cctcagcctgggcac

SEQ ID NO: 1628155 - DNA, 15 bp, Homo sapiens
acctcagcctgggca

SEQ ID NO: 1628156 - DNA, 15 bp, Homo sapiens
cacctcagcctgggc

SEQ ID NO: 1628157 - DNA, 15 bp, Homo sapiens
tcacctcagcctggg

SEQ ID NO: 1628158 - DNA, 15 bp, Homo sapiens
ttcacctcagcctgg

SEQ ID NO: 1628159 - DNA, 15 bp, Homo sapiens
cttcacctcagcctg

SEQ ID NO: 1628160 - DNA, 15 bp, Homo sapiens
tcttcacctcagcct

SEQ ID NO: 1628161 - DNA, 15 bp, Homo sapiens
ctcttcacctcagcc

SEQ ID NO: 1628162 - DNA, 15 bp, Homo sapiens
cctcttcacctcagc

SEQ ID NO: 1628163 - DNA, 15 bp, Homo sapiens
gcctcttcacctcag

SEQ ID NO: 1628164 - DNA, 15 bp, Homo sapiens
ggcctcttcacctca

SEQ ID NO: 1628165 - DNA, 15 bp, Homo sapiens
aggcctcttcacctc

SEQ ID NO: 1628166 - DNA, 15 bp, Homo sapiens
caggcctcttcacct

SEQ ID NO: 1628167 - DNA, 15 bp, Homo sapiens
ccaggcctcttcacc

SEQ ID NO: 1628168 - DNA, 15 bp, Homo sapiens
cccaggcctcttcac

SEQ ID NO: 1628169 - DNA, 15 bp, Homo sapiens
ccccaggcctcttca

SEQ ID NO: 1628170 - DNA, 15 bp, Homo sapiens
cccccaggcctcttc

SEQ ID NO: 1628171 - DNA, 15 bp, Homo sapiens
gcccccaggcctctt

SEQ ID NO: 1628172 - DNA, 15 bp, Homo sapiens
ggcccccaggcctct

SEQ ID NO: 1628173 - DNA, 15 bp, Homo sapiens
gggcccccaggcctc

SEQ ID NO: 1628174 - DNA, 15 bp, Homo sapiens
agggcccccaggcct

SEQ ID NO: 1628175 - DNA, 15 bp, Homo sapiens
cagggcccccaggcc

SEQ ID NO: 1628176 - DNA, 15 bp, Homo sapiens
gcagggcccccaggc

SEQ ID NO: 1628177 - DNA, 15 bp, Homo sapiens
ggcagggcccccagg

SEQ ID NO: 1628178 - DNA, 15 bp, Homo sapiens
aggcagggcccccag

SEQ ID NO: 1628179 - DNA, 15 bp, Homo sapiens
aaggcagggccccca

SEQ ID NO: 1628180 - DNA, 15 bp, Homo sapiens
gaaggcagggccccc

SEQ ID NO: 1628181 - DNA, 15 bp, Homo sapiens
ggaaggcagggcccc

SEQ ID NO: 1628182 - DNA, 15 bp, Homo sapiens
cggaaggcagggccc

SEQ ID NO: 1628183 - DNA, 15 bp, Homo sapiens
ccggaaggcagggcc

SEQ ID NO: 1628184 - DNA, 15 bp, Homo sapiens
cccggaaggcagggc

SEQ ID NO: 1628185 - DNA, 15 bp, Homo sapiens
gcccggaaggcaggg

SEQ ID NO: 1628186 - DNA, 15 bp, Homo sapiens
cgcccggaaggcagg

SEQ ID NO: 1628187 - DNA, 15 bp, Homo sapiens
gcgcccggaaggcag

SEQ ID NO: 1628188 - DNA, 15 bp, Homo sapiens
agcgcccggaaggca

SEQ ID NO: 1628189 - DNA, 15 bp, Homo sapiens
gagcgcccggaaggc

SEQ ID NO: 1628190 - DNA, 15 bp, Homo sapiens
ggagcgcccggaagg

SEQ ID NO: 1628191 - DNA, 15 bp, Homo sapiens
aggagcgcccggaag

SEQ ID NO: 1628192 - DNA, 15 bp, Homo sapiens
caggagcgcccggaa

SEQ ID NO: 1628193 - DNA, 15 bp, Homo sapiens
ccaggagcgcccgga

SEQ ID NO: 1628194 - DNA, 15 bp, Homo sapiens
tccaggagcgcccgg

SEQ ID NO: 1628195 - DNA, 15 bp, Homo sapiens
gtccaggagcgcccg

SEQ ID NO: 1628196 - DNA, 15 bp, Homo sapiens
ggtccaggagcgccc

SEQ ID NO: 1628197 - DNA, 15 bp, Homo sapiens
gggtccaggagcgcc

SEQ ID NO: 1628198 - DNA, 15 bp, Homo sapiens
agggtccaggagcgc

SEQ ID NO: 1628199 - DNA, 15 bp, Homo sapiens
cagggtccaggagcg

SEQ ID NO: 1628200 - DNA, 15 bp, Homo sapiens
ccagggtccaggagc

SEQ ID NO: 1628201 - DNA, 15 bp, Homo sapiens
cccagggtccaggag

SEQ ID NO: 1628202 - DNA, 15 bp, Homo sapiens
ccccagggtccagga

SEQ ID NO: 1628203 - DNA, 15 bp, Homo sapiens
gccccagggtccagg

SEQ ID NO: 1628204 - DNA, 15 bp, Homo sapiens
tgccccagggtccag

SEQ ID NO: 1628205 - DNA, 15 bp, Homo sapiens
ttgccccagggtcca

SEQ ID NO: 1628206 - DNA, 15 bp, Homo sapiens
tttgccccagggtcc

SEQ ID NO: 1628207 - DNA, 15 bp, Homo sapiens
gtttgccccagggtc

SEQ ID NO: 1628208 - DNA, 15 bp, Homo sapiens
ggtttgccccagggt

SEQ ID NO: 1628209 - DNA, 15 bp, Homo sapiens
aggtttgccccaggg

SEQ ID NO: 1628210 - DNA, 15 bp, Homo sapiens
caggtttgccccagg

SEQ ID NO: 1628211 - DNA, 15 bp, Homo sapiens
acaggtttgccccag

SEQ ID NO: 1628212 - DNA, 15 bp, Homo sapiens
cacaggtttgcccca

SEQ ID NO: 1628213 - DNA, 15 bp, Homo sapiens
tcacaggtttgcccc

SEQ ID NO: 1628214 - DNA, 15 bp, Homo sapiens
gtcacaggtttgccc

SEQ ID NO: 1628215 - DNA, 15 bp, Homo sapiens
ggtcacaggtttgcc

SEQ ID NO: 1628216 - DNA, 15 bp, Homo sapiens
gggtcacaggtttgc

SEQ ID NO: 1628217 - DNA, 15 bp, Homo sapiens
agggtcacaggtttg

SEQ ID NO: 1628218 - DNA, 15 bp, Homo sapiens
aagggtcacaggttt

SEQ ID NO: 1628219 - DNA, 15 bp, Homo sapiens
aaagggtcacaggtt

SEQ ID NO: 1628220 - DNA, 15 bp, Homo sapiens
aaaagggtcacaggt

SEQ ID NO: 1628221 - DNA, 15 bp, Homo sapiens
gaaaagggtcacagg

SEQ ID NO: 1628222 - DNA, 15 bp, Homo sapiens
agaaaagggtcacag

SEQ ID NO: 1628223 - DNA, 15 bp, Homo sapiens
tagaaaagggtcaca

SEQ ID NO: 1628224 - DNA, 15 bp, Homo sapiens
gtagaaaagggtcac

SEQ ID NO: 1628225 - DNA, 15 bp, Homo sapiens
agtagaaaagggtca

SEQ ID NO: 1628226 - DNA, 15 bp, Homo sapiens
cagtagaaaagggtc

SEQ ID NO: 1628227 - DNA, 15 bp, Homo sapiens
ccagtagaaaagggt

SEQ ID NO: 1628228 - DNA, 15 bp, Homo sapiens
tccagtagaaaaggg

SEQ ID NO: 1628229 - DNA, 15 bp, Homo sapiens
ttccagtagaaaagg

SEQ ID NO: 1628230 - DNA, 15 bp, Homo sapiens
attccagtagaaaag

SEQ ID NO: 1628231 - DNA, 15 bp, Homo sapiens
tattccagtagaaaa

SEQ ID NO: 1628232 - DNA, 15 bp, Homo sapiens
ctattccagtagaaa

SEQ ID NO: 1628233 - DNA, 15 bp, Homo sapiens
tctattccagtagaa

SEQ ID NO: 1628234 - DNA, 15 bp, Homo sapiens
ttctattccagtaga

SEQ ID NO: 1628235 - DNA, 15 bp, Homo sapiens
tttctattccagtag

SEQ ID NO: 1628236 - DNA, 15 bp, Homo sapiens
atttctattccagta

SEQ ID NO: 1628237 - DNA, 15 bp, Homo sapiens
catttctattccagt

SEQ ID NO: 1628238 - DNA, 15 bp, Homo sapiens
tcatttctattccag

SEQ ID NO: 1628239 - DNA, 15 bp, Homo sapiens
ctcatttctattcca

SEQ ID NO: 1628240 - DNA, 15 bp, Homo sapiens
actcatttctattcc

SEQ ID NO: 1628241 - DNA, 15 bp, Homo sapiens
aactcatttctattc

SEQ ID NO: 1628242 - DNA, 15 bp, Homo sapiens
aaactcatttctatt

SEQ ID NO: 1628243 - DNA, 15 bp, Homo sapiens
aaaactcatttctat

SEQ ID NO: 1628244 - DNA, 15 bp, Homo sapiens
taaaactcatttcta

SEQ ID NO: 1628245 - DNA, 15 bp, Homo sapiens
ataaaactcatttct

SEQ ID NO: 1628246 - DNA, 15 bp, Homo sapiens
gataaaactcatttc

SEQ ID NO: 1628247 - DNA, 15 bp, Homo sapiens
tgataaaactcattt

SEQ ID NO: 1628248 - DNA, 15 bp, Homo sapiens
atgataaaactcatt

SEQ ID NO: 1628249 - DNA, 15 bp, Homo sapiens
gatgataaaactcat

SEQ ID NO: 1628250 - DNA, 15 bp, Homo sapiens
agatgataaaactca

SEQ ID NO: 1628251 - DNA, 15 bp, Homo sapiens
aagatgataaaactc

SEQ ID NO: 1628252 - DNA, 15 bp, Homo sapiens
aaagatgataaaact

SEQ ID NO: 1628253 - DNA, 15 bp, Homo sapiens
caaagatgataaaac

SEQ ID NO: 1628254 - DNA, 15 bp, Homo sapiens
tcaaagatgataaaa

SEQ ID NO: 1628255 - DNA, 15 bp, Homo sapiens
ttcaaagatgataaa

SEQ ID NO: 1628256 - DNA, 15 bp, Homo sapiens
tttcaaagatgataa

SEQ ID NO: 1628257 - DNA, 15 bp, Homo sapiens
ttttcaaagatgata

SEQ ID NO: 1628258 - DNA, 15 bp, Homo sapiens
tttttcaaagatgat

SEQ ID NO: 1628259 - DNA, 15 bp, Homo sapiens
atttttcaaagatga

SEQ ID NO: 1628260 - DNA, 15 bp, Homo sapiens
tatttttcaaagatg

SEQ ID NO: 1628261 - DNA, 15 bp, Homo sapiens
ttatttttcaaagat

SEQ ID NO: 1628262 - DNA, 15 bp, Homo sapiens
aattatttttcaaag

SEQ ID NO: 1628263 - DNA, 15 bp, Homo sapiens
gaattatttttcaaa

SEQ ID NO: 1628264 - DNA, 15 bp, Homo sapiens
tgaattatttttcaa

SEQ ID NO: 1628265 - DNA, 15 bp, Homo sapiens
gtgaattatttttca

SEQ ID NO: 1628266 - DNA, 15 bp, Homo sapiens
agtgaattatttttc

SEQ ID NO: 1628267 - DNA, 15 bp, Homo sapiens
gagtgaattattttt

SEQ ID NO: 1628268 - DNA, 15 bp, Homo sapiens
agagtgaattatttt

SEQ ID NO: 1628269 - DNA, 15 bp, Homo sapiens
aagagtgaattattt

SEQ ID NO: 1628270 - DNA, 15 bp, Homo sapiens
caagagtgaattatt

SEQ ID NO: 1628271 - DNA, 15 bp, Homo sapiens
tcaagagtgaattat

SEQ ID NO: 1628272 - DNA, 15 bp, Homo sapiens
ttcaagagtgaatta

SEQ ID NO: 1628273 - DNA, 15 bp, Homo sapiens
cttcaagagtgaatt

SEQ ID NO: 1628274 - DNA, 15 bp, Homo sapiens
acttcaagagtgaat

SEQ ID NO: 1628275 - DNA, 15 bp, Homo sapiens
tacttcaagagtgaa

SEQ ID NO: 1628276 - DNA, 15 bp, Homo sapiens
ttacttcaagagtga

SEQ ID NO: 1628277 - DNA, 15 bp, Homo sapiens
attacttcaagagtg

SEQ ID NO: 1628278 - DNA, 15 bp, Homo sapiens
tattacttcaagagt

SEQ ID NO: 1628279 - DNA, 15 bp, Homo sapiens
ttattacttcaagag

SEQ ID NO: 1628280 - DNA, 15 bp, Homo sapiens
tttattacttcaaga

SEQ ID NO: 1628281 - DNA, 15 bp, Homo sapiens
gtttattacttcaag

SEQ ID NO: 1628282 - DNA, 15 bp, Homo sapiens
cgtttattacttcaa

SEQ ID NO: 1628283 - DNA, 15 bp, Homo sapiens
acgtttattacttca

SEQ ID NO: 1628284 - DNA, 15 bp, Homo sapiens
aacgtttattacttc

SEQ ID NO: 1628285 - DNA, 15 bp, Homo sapiens
aaacgtttattactt

SEQ ID NO: 1628286 - DNA, 15 bp, Homo sapiens
taaacgtttattact

SEQ ID NO: 1628287 - DNA, 15 bp, Homo sapiens
ttaaacgtttattac

SEQ ID NO: 1628288 - DNA, 15 bp, Homo sapiens
tttaaacgtttatta

SEQ ID NO: 1628289 - DNA, 15 bp, Homo sapiens
ttttaaacgtttatt

SEQ ID NO: 1628290 - DNA, 15 bp, Homo sapiens
tttttaaacgtttat

SEQ ID NO: 1628291 - DNA, 15 bp, Homo sapiens
ttttttaaacgttta

SEQ ID NO: 1628292 - DNA, 15 bp, Homo sapiens
tttttttaaacgttt

SEQ ID NO: 1628293 - DNA, 15 bp, Homo sapiens
atttttttaaacgtt

SEQ ID NO: 1628294 - DNA, 15 bp, Homo sapiens
catttttttaaacgt

SEQ ID NO: 1628295 - DNA, 15 bp, Homo sapiens
ccatttttttaaacg

SEQ ID NO: 1628296 - DNA, 15 bp, Homo sapiens
cccatttttttaaac

SEQ ID NO: 1628297 - DNA, 15 bp, Homo sapiens
tcccatttttttaaa

SEQ ID NO: 1628298 - DNA, 15 bp, Homo sapiens
atcccatttttttaa

SEQ ID NO: 1628299 - DNA, 15 bp, Homo sapiens
catcccattttttta

SEQ ID NO: 1628300 - DNA, 15 bp, Homo sapiens
gcatcccattttttt

SEQ ID NO: 1628301 - DNA, 15 bp, Homo sapiens
ggcatcccatttttt

SEQ ID NO: 1628302 - DNA, 15 bp, Homo sapiens
aggcatcccattttt

SEQ ID NO: 1628303 - DNA, 15 bp, Homo sapiens
caggcatcccatttt

SEQ ID NO: 1628304 - DNA, 15 bp, Homo sapiens
gcaggcatcccattt

SEQ ID NO: 1628305 - DNA, 15 bp, Homo sapiens
ggcaggcatcccatt

SEQ ID NO: 1628306 - DNA, 15 bp, Homo sapiens
aggcaggcatcccat

SEQ ID NO: 1628307 - DNA, 15 bp, Homo sapiens
gaggcaggcatccca

SEQ ID NO: 1628308 - DNA, 15 bp, Homo sapiens
agaggcaggcatccc

SEQ ID NO: 1628309 - DNA, 15 bp, Homo sapiens
cagaggcaggcatcc

SEQ ID NO: 1628310 - DNA, 15 bp, Homo sapiens
acagaggcaggcatc

SEQ ID NO: 1628311 - DNA, 15 bp, Homo sapiens
cacagaggcaggcat

SEQ ID NO: 1628312 - DNA, 15 bp, Homo sapiens
tcacagaggcaggca

SEQ ID NO: 1628313 - DNA, 15 bp, Homo sapiens
gtcacagaggcaggc

SEQ ID NO: 1628314 - DNA, 15 bp, Homo sapiens
tgtcacagaggcagg

SEQ ID NO: 1628315 - DNA, 15 bp, Homo sapiens
ctgtcacagaggcag

SEQ ID NO: 1628316 - DNA, 15 bp, Homo sapiens
gctgtcacagaggca

SEQ ID NO: 1628317 - DNA, 15 bp, Homo sapiens
ggctgtcacagaggc

SEQ ID NO: 1628318 - DNA, 15 bp, Homo sapiens
aggctgtcacagagg

SEQ ID NO: 1628319 - DNA, 15 bp, Homo sapiens
aaggctgtcacagag

SEQ ID NO: 1628320 - DNA, 15 bp, Homo sapiens
caaggctgtcacaga

SEQ ID NO: 1628321 - DNA, 15 bp, Homo sapiens
acaaggctgtcacag

SEQ ID NO: 1628322 - DNA, 15 bp, Homo sapiens
aacaaggctgtcaca

SEQ ID NO: 1628323 - DNA, 15 bp, Homo sapiens
aaacaaggctgtcac

SEQ ID NO: 1628324 - DNA, 15 bp, Homo sapiens
caaacaaggctgtca

SEQ ID NO: 1628325 - DNA, 15 bp, Homo sapiens
gcaaacaaggctgtc

SEQ ID NO: 1628326 - DNA, 15 bp, Homo sapiens
agcaaacaaggctgt

SEQ ID NO: 1628327 - DNA, 15 bp, Homo sapiens
cagcaaacaaggctg

SEQ ID NO: 1628328 - DNA, 15 bp, Homo sapiens
tcagcaaacaaggct

SEQ ID NO: 1628329 - DNA, 15 bp, Homo sapiens
ctcagcaaacaaggc

SEQ ID NO: 1628330 - DNA, 15 bp, Homo sapiens
cctcagcaaacaagg

SEQ ID NO: 1628331 - DNA, 15 bp, Homo sapiens
acctcagcaaacaag

SEQ ID NO: 1628332 - DNA, 15 bp, Homo sapiens
gacctcagcaaacaa

SEQ ID NO: 1628333 - DNA, 15 bp, Homo sapiens
cgacctcagcaaaca

SEQ ID NO: 1628334 - DNA, 15 bp, Homo sapiens
acgacctcagcaaac

SEQ ID NO: 1628335 - DNA, 15 bp, Homo sapiens
cacgacctcagcaaa

SEQ ID NO: 1628336 - DNA, 15 bp, Homo sapiens
ccacgacctcagcaa

SEQ ID NO: 1628337 - DNA, 15 bp, Homo sapiens
cccacgacctcagca

SEQ ID NO: 1628338 - DNA, 15 bp, Homo sapiens
ccccacgacctcagc

SEQ ID NO: 1628339 - DNA, 15 bp, Homo sapiens
cccccacgacctcag

SEQ ID NO: 1628340 - DNA, 15 bp, Homo sapiens
acccccacgacctca

SEQ ID NO: 1628341 - DNA, 15 bp, Homo sapiens
cacccccacgacctc

SEQ ID NO: 1628342 - DNA, 15 bp, Homo sapiens
ccacccccacgacct

SEQ ID NO: 1628343 - DNA, 15 bp, Homo sapiens
cccacccccacgacc

SEQ ID NO: 1628344 - DNA, 15 bp, Homo sapiens
ccccacccccacgac

SEQ ID NO: 1628345 - DNA, 15 bp, Homo sapiens
cccccacccccacga

SEQ ID NO: 1628346 - DNA, 15 bp, Homo sapiens
gcccccacccccacg

SEQ ID NO: 1628347 - DNA, 15 bp, Homo sapiens
ggcccccacccccac

SEQ ID NO: 1628348 - DNA, 15 bp, Homo sapiens
aggcccccaccccca

SEQ ID NO: 1628349 - DNA, 15 bp, Homo sapiens
gaggcccccaccccc

SEQ ID NO: 1628350 - DNA, 15 bp, Homo sapiens
agaggcccccacccc

SEQ ID NO: 1628351 - DNA, 15 bp, Homo sapiens
cagaggcccccaccc

SEQ ID NO: 1628352 - DNA, 15 bp, Homo sapiens
ccagaggcccccacc

SEQ ID NO: 1628353 - DNA, 15 bp, Homo sapiens
cccagaggcccccac

SEQ ID NO: 1628354 - DNA, 15 bp, Homo sapiens
tcccagaggccccca

SEQ ID NO: 1628355 - DNA, 15 bp, Homo sapiens
ttcccagaggccccc

SEQ ID NO: 1628356 - DNA, 15 bp, Homo sapiens
cttcccagaggcccc

SEQ ID NO: 1628357 - DNA, 15 bp, Homo sapiens
acttcccagaggccc

SEQ ID NO: 1628358 - DNA, 15 bp, Homo sapiens
aacttcccagaggcc

SEQ ID NO: 1628359 - DNA, 15 bp, Homo sapiens
gaacttcccagaggc

SEQ ID NO: 1628360 - DNA, 15 bp, Homo sapiens
ggaacttcccagagg

SEQ ID NO: 1628361 - DNA, 15 bp, Homo sapiens
cggaacttcccagag

SEQ ID NO: 1628362 - DNA, 15 bp, Homo sapiens
ccggaacttcccaga

SEQ ID NO: 1628363 - DNA, 15 bp, Homo sapiens
cccggaacttcccag

SEQ ID NO: 1628364 - DNA, 15 bp, Homo sapiens
gcccggaacttccca

SEQ ID NO: 1628365 - DNA, 15 bp, Homo sapiens
agcccggaacttccc

SEQ ID NO: 1628366 - DNA, 15 bp, Homo sapiens
gagcccggaacttcc

SEQ ID NO: 1628367 - DNA, 15 bp, Homo sapiens
ggagcccggaacttc

SEQ ID NO: 1628368 - DNA, 15 bp, Homo sapiens
aggagcccggaactt

SEQ ID NO: 1628369 - DNA, 15 bp, Homo sapiens
gaggagcccggaact

SEQ ID NO: 1628370 - DNA, 15 bp, Homo sapiens
agaggagcccggaac

SEQ ID NO: 1628371 - DNA, 15 bp, Homo sapiens
aagaggagcccggaa

SEQ ID NO: 1628372 - DNA, 15 bp, Homo sapiens
gaagaggagcccgga

SEQ ID NO: 1628373 - DNA, 15 bp, Homo sapiens
agaagaggagcccgg

SEQ ID NO: 1628374 - DNA, 15 bp, Homo sapiens
gagaagaggagcccg

SEQ ID NO: 1628375 - DNA, 15 bp, Homo sapiens
agagaagaggagccc

SEQ ID NO: 1628376 - DNA, 15 bp, Homo sapiens
aagagaagaggagcc

SEQ ID NO: 1628377 - DNA, 15 bp, Homo sapiens
caagagaagaggagc

SEQ ID NO: 1628378 - DNA, 15 bp, Homo sapiens
ccaagagaagaggag

SEQ ID NO: 1628379 - DNA, 15 bp, Homo sapiens
accaagagaagagga

SEQ ID NO: 1628380 - DNA, 15 bp, Homo sapiens
gaccaagagaagagg

SEQ ID NO: 1628381 - DNA, 15 bp, Homo sapiens
tgaccaagagaagag

SEQ ID NO: 1628382 - DNA, 15 bp, Homo sapiens
ttgaccaagagaaga

SEQ ID NO: 1628383 - DNA, 15 bp, Homo sapiens
attgaccaagagaag

SEQ ID NO: 1628384 - DNA, 15 bp, Homo sapiens
tattgaccaagagaa

SEQ ID NO: 1628385 - DNA, 15 bp, Homo sapiens
ctattgaccaagaga

SEQ ID NO: 1628386 - DNA, 15 bp, Homo sapiens
gctattgaccaagag

SEQ ID NO: 1628387 - DNA, 15 bp, Homo sapiens
agctattgaccaaga

SEQ ID NO: 1628388 - DNA, 15 bp, Homo sapiens
gagctattgaccaag

SEQ ID NO: 1628389 - DNA, 15 bp, Homo sapiens
ggagctattgaccaa

SEQ ID NO: 1628390 - DNA, 15 bp, Homo sapiens
aggagctattgacca

SEQ ID NO: 1628391 - DNA, 15 bp, Homo sapiens
aaggagctattgacc

SEQ ID NO: 1628392 - DNA, 15 bp, Homo sapiens
aaaggagctattgac

SEQ ID NO: 1628393 - DNA, 15 bp, Homo sapiens
gaaaggagctattga

SEQ ID NO: 1628394 - DNA, 15 bp, Homo sapiens
agaaaggagctattg

SEQ ID NO: 1628395 - DNA, 15 bp, Homo sapiens
cagaaaggagctatt

SEQ ID NO: 1628396 - DNA, 15 bp, Homo sapiens
ccagaaaggagctat

SEQ ID NO: 1628397 - DNA, 15 bp, Homo sapiens
accagaaaggagcta

SEQ ID NO: 1628398 - DNA, 15 bp, Homo sapiens
caccagaaaggagct

SEQ ID NO: 1628399 - DNA, 15 bp, Homo sapiens
ccaccagaaaggagc

SEQ ID NO: 1628400 - DNA, 15 bp, Homo sapiens
gccaccagaaaggag

SEQ ID NO: 1628401 - DNA, 15 bp, Homo sapiens
agccaccagaaagga

SEQ ID NO: 1628402 - DNA, 15 bp, Homo sapiens
cagccaccagaaagg

SEQ ID NO: 1628403 - DNA, 15 bp, Homo sapiens
gcagccaccagaaag

SEQ ID NO: 1628404 - DNA, 15 bp, Homo sapiens
ggcagccaccagaaa

SEQ ID NO: 1628405 - DNA, 15 bp, Homo sapiens
tggcagccaccagaa

SEQ ID NO: 1628406 - DNA, 15 bp, Homo sapiens
ttggcagccaccaga

SEQ ID NO: 1628407 - DNA, 15 bp, Homo sapiens
cttggcagccaccag

SEQ ID NO: 1628408 - DNA, 15 bp, Homo sapiens
tcttggcagccacca

SEQ ID NO: 1628409 - DNA, 15 bp, Homo sapiens
ctcttggcagccacc

SEQ ID NO: 1628410 - DNA, 15 bp, Homo sapiens
gctcttggcagccac

SEQ ID NO: 1628411 - DNA, 15 bp, Homo sapiens
cgctcttggcagcca

SEQ ID NO: 1628412 - DNA, 15 bp, Homo sapiens
acgctcttggcagcc

SEQ ID NO: 1628413 - DNA, 15 bp, Homo sapiens
gacgctcttggcagc

SEQ ID NO: 1628414 - DNA, 15 bp, Homo sapiens
agacgctcttggcag

SEQ ID NO: 1628415 - DNA, 15 bp, Homo sapiens
gagacgctcttggca

SEQ ID NO: 1628416 - DNA, 15 bp, Homo sapiens
agagacgctcttggc

SEQ ID NO: 1628417 - DNA, 15 bp, Homo sapiens
gagagacgctcttgg

SEQ ID NO: 1628418 - DNA, 15 bp, Homo sapiens
ggagagacgctcttg

SEQ ID NO: 1628419 - DNA, 15 bp, Homo sapiens
gggagagacgctctt

SEQ ID NO: 1628420 - DNA, 15 bp, Homo sapiens
tgggagagacgctct

SEQ ID NO: 1628421 - DNA, 15 bp, Homo sapiens
ctgggagagacgctc

SEQ ID NO: 1628422 - DNA, 15 bp, Homo sapiens
cctgggagagacgct

SEQ ID NO: 1628423 - DNA, 15 bp, Homo sapiens
ccctgggagagacgc

SEQ ID NO: 1628424 - DNA, 15 bp, Homo sapiens
gccctgggagagacg

SEQ ID NO: 1628425 - DNA, 15 bp, Homo sapiens
ggccctgggagagac

SEQ ID NO: 1628426 - DNA, 15 bp, Homo sapiens
cggccctgggagaga

SEQ ID NO: 1628427 - DNA, 15 bp, Homo sapiens
ccggccctgggagag

SEQ ID NO: 1628428 - DNA, 15 bp, Homo sapiens
cccggccctgggaga

SEQ ID NO: 1628429 - DNA, 15 bp, Homo sapiens
gcccggccctgggag

SEQ ID NO: 1628430 - DNA, 15 bp, Homo sapiens
agcccggccctggga

SEQ ID NO: 1628431 - DNA, 15 bp, Homo sapiens
cagcccggccctggg

SEQ ID NO: 1628432 - DNA, 15 bp, Homo sapiens
gcagcccggccctgg

SEQ ID NO: 1628433 - DNA, 15 bp, Homo sapiens
agcagcccggccctg

SEQ ID NO: 1628434 - DNA, 15 bp, Homo sapiens
cagcagcccggccct

SEQ ID NO: 1628435 - DNA, 15 bp, Homo sapiens
ccagcagcccggccc

SEQ ID NO: 1628436 - DNA, 15 bp, Homo sapiens
gccagcagcccggcc

SEQ ID NO: 1628437 - DNA, 15 bp, Homo sapiens
agccagcagcccggc

SEQ ID NO: 1628438 - DNA, 15 bp, Homo sapiens
aagccagcagcccgg

SEQ ID NO: 1628439 - DNA, 15 bp, Homo sapiens
taagccagcagcccg

SEQ ID NO: 1628440 - DNA, 15 bp, Homo sapiens
gtaagccagcagccc

SEQ ID NO: 1628441 - DNA, 15 bp, Homo sapiens
ggtaagccagcagcc

SEQ ID NO: 1628442 - DNA, 15 bp, Homo sapiens
aggtaagccagcagc

SEQ ID NO: 1628443 - DNA, 15 bp, Homo sapiens
aaggtaagccagcag

SEQ ID NO: 1628444 - DNA, 15 bp, Homo sapiens
gaaggtaagccagca

SEQ ID NO: 1628445 - DNA, 15 bp, Homo sapiens
ggaaggtaagccagc

SEQ ID NO: 1628446 - DNA, 15 bp, Homo sapiens
aggaaggtaagccag

SEQ ID NO: 1628447 - DNA, 15 bp, Homo sapiens
caggaaggtaagcca

SEQ ID NO: 1628448 - DNA, 15 bp, Homo sapiens
acaggaaggtaagcc

SEQ ID NO: 1628449 - DNA, 15 bp, Homo sapiens
aacaggaaggtaagc

SEQ ID NO: 1628450 - DNA, 15 bp, Homo sapiens
caacaggaaggtaag

SEQ ID NO: 1628451 - DNA, 15 bp, Homo sapiens
acaacaggaaggtaa

SEQ ID NO: 1628452 - DNA, 15 bp, Homo sapiens
aacaacaggaaggta

SEQ ID NO: 1628453 - DNA, 15 bp, Homo sapiens
gaaaacaacaggaag

SEQ ID NO: 1628454 - DNA, 15 bp, Homo sapiens
tgaaaacaacaggaa

SEQ ID NO: 1628455 - DNA, 15 bp, Homo sapiens
ttgaaaacaacagga

SEQ ID NO: 1628456 - DNA, 15 bp, Homo sapiens
tttgaaaacaacagg

SEQ ID NO: 1628457 - DNA, 15 bp, Homo sapiens
atttgaaaacaacag

SEQ ID NO: 1628458 - DNA, 15 bp, Homo sapiens
aatttgaaaacaaca

SEQ ID NO: 1628459 - DNA, 15 bp, Homo sapiens
aaatttgaaaacaac

SEQ ID NO: 1628460 - DNA, 15 bp, Homo sapiens
gaaatttgaaaacaa

SEQ ID NO: 1628461 - DNA, 15 bp, Homo sapiens
tgaaatttgaaaaca

SEQ ID NO: 1628462 - DNA, 15 bp, Homo sapiens
ttgaaatttgaaaac

SEQ ID NO: 1628463 - DNA, 15 bp, Homo sapiens
gttgaaatttgaaaa

SEQ ID NO: 1628464 - DNA, 15 bp, Homo sapiens
ggttgaaatttgaaa

SEQ ID NO: 1628465 - DNA, 15 bp, Homo sapiens
aggttgaaatttgaa

SEQ ID NO: 1628466 - DNA, 15 bp, Homo sapiens
aaggttgaaatttga

SEQ ID NO: 1628467 - DNA, 15 bp, Homo sapiens
caaggttgaaatttg

SEQ ID NO: 1628468 - DNA, 15 bp, Homo sapiens
acaaggttgaaattt

SEQ ID NO: 1628469 - DNA, 15 bp, Homo sapiens
cacaaggttgaaatt

SEQ ID NO: 1628470 - DNA, 15 bp, Homo sapiens
gcacaaggttgaaat

SEQ ID NO: 1628471 - DNA, 15 bp, Homo sapiens
tgcacaaggttgaaa

SEQ ID NO: 1628472 - DNA, 15 bp, Homo sapiens
ttgcacaaggttgaa

SEQ ID NO: 1628473 - DNA, 15 bp, Homo sapiens
attgcacaaggttga

SEQ ID NO: 1628474 - DNA, 15 bp, Homo sapiens
cattgcacaaggttg

SEQ ID NO: 1628475 - DNA, 15 bp, Homo sapiens
acattgcacaaggtt

SEQ ID NO: 1628476 - DNA, 15 bp, Homo sapiens
aacattgcacaaggt

SEQ ID NO: 1628477 - DNA, 15 bp, Homo sapiens
caacattgcacaagg

SEQ ID NO: 1628478 - DNA, 15 bp, Homo sapiens
tcaacattgcacaag

SEQ ID NO: 1628479 - DNA, 15 bp, Homo sapiens
ctcaacattgcacaa

SEQ ID NO: 1628480 - DNA, 15 bp, Homo sapiens
actcaacattgcaca

SEQ ID NO: 1628481 - DNA, 15 bp, Homo sapiens
aactcaacattgcac

SEQ ID NO: 1628482 - DNA, 15 bp, Homo sapiens
aaactcaacattgca

SEQ ID NO: 1628483 - DNA, 15 bp, Homo sapiens
gaaactcaacattgc

SEQ ID NO: 1628484 - DNA, 15 bp, Homo sapiens
tgaaactcaacattg

SEQ ID NO: 1628485 - DNA, 15 bp, Homo sapiens
atgaaactcaacatt

SEQ ID NO: 1628486 - DNA, 15 bp, Homo sapiens
tatgaaactcaacat

SEQ ID NO: 1628487 - DNA, 15 bp, Homo sapiens
ctatgaaactcaaca

SEQ ID NO: 1628488 - DNA, 15 bp, Homo sapiens
tctatgaaactcaac

SEQ ID NO: 1628489 - DNA, 15 bp, Homo sapiens
ttctatgaaactcaa

SEQ ID NO: 1628490 - DNA, 15 bp, Homo sapiens
tttctatgaaactca

SEQ ID NO: 1628491 - DNA, 15 bp, Homo sapiens
atttctatgaaactc

SEQ ID NO: 1628492 - DNA, 15 bp, Homo sapiens
tatttctatgaaact

SEQ ID NO: 1628493 - DNA, 15 bp, Homo sapiens
gtatttctatgaaac

SEQ ID NO: 1628494 - DNA, 15 bp, Homo sapiens
agtatttctatgaaa

SEQ ID NO: 1628495 - DNA, 15 bp, Homo sapiens
cagtatttctatgaa

SEQ ID NO: 1628496 - DNA, 15 bp, Homo sapiens
gcagtatttctatga

SEQ ID NO: 1628497 - DNA, 15 bp, Homo sapiens
tgcagtatttctatg

SEQ ID NO: 1628498 - DNA, 15 bp, Homo sapiens
atgcagtatttctat

SEQ ID NO: 1628499 - DNA, 15 bp, Homo sapiens
catgcagtatttcta

SEQ ID NO: 1628500 - DNA, 15 bp, Homo sapiens
tcatgcagtatttct

SEQ ID NO: 1628501 - DNA, 15 bp, Homo sapiens
ctcatgcagtatttc

SEQ ID NO: 1628502 - DNA, 15 bp, Homo sapiens
actcatgcagtattt

SEQ ID NO: 1628503 - DNA, 15 bp, Homo sapiens
tactcatgcagtatt

SEQ ID NO: 1628504 - DNA, 15 bp, Homo sapiens
gtactcatgcagtat

SEQ ID NO: 1628505 - DNA, 15 bp, Homo sapiens
cgtactcatgcagta

SEQ ID NO: 1628506 - DNA, 15 bp, Homo sapiens
gcgtactcatgcagt

SEQ ID NO: 1628507 - DNA, 15 bp, Homo sapiens
ggcgtactcatgcag

SEQ ID NO: 1628508 - DNA, 15 bp, Homo sapiens
gggcgtactcatgca

SEQ ID NO: 1628509 - DNA, 15 bp, Homo sapiens
agggcgtactcatgc

SEQ ID NO: 1628510 - DNA, 15 bp, Homo sapiens
aagggcgtactcatg

SEQ ID NO: 1628511 - DNA, 15 bp, Homo sapiens
caagggcgtactcat

SEQ ID NO: 1628512 - DNA, 15 bp, Homo sapiens
acaagggcgtactca

SEQ ID NO: 1628513 - DNA, 15 bp, Homo sapiens
aacaagggcgtactc

SEQ ID NO: 1628514 - DNA, 15 bp, Homo sapiens
aaacaagggcgtact

SEQ ID NO: 1628515 - DNA, 15 bp, Homo sapiens
taaacaagggcgtac

SEQ ID NO: 1628516 - DNA, 15 bp, Homo sapiens
ctaaacaagggcgta

SEQ ID NO: 1628517 - DNA, 15 bp, Homo sapiens
tctaaacaagggcgt

SEQ ID NO: 1628518 - DNA, 15 bp, Homo sapiens
ttctaaacaagggcg

SEQ ID NO: 1628519 - DNA, 15 bp, Homo sapiens
cttctaaacaagggc

SEQ ID NO: 1628520 - DNA, 15 bp, Homo sapiens
gcttctaaacaaggg

SEQ ID NO: 1628521 - DNA, 15 bp, Homo sapiens
tgcttctaaacaagg

SEQ ID NO: 1628522 - DNA, 15 bp, Homo sapiens
ctgcttctaaacaag

SEQ ID NO: 1628523 - DNA, 15 bp, Homo sapiens
gctgcttctaaacaa

SEQ ID NO: 1628524 - DNA, 15 bp, Homo sapiens
tgctgcttctaaaca

SEQ ID NO: 1628525 - DNA, 15 bp, Homo sapiens
ctgctgcttctaaac

SEQ ID NO: 1628526 - DNA, 15 bp, Homo sapiens
cctgctgcttctaaa

SEQ ID NO: 1628527 - DNA, 15 bp, Homo sapiens
ccctgctgcttctaa

SEQ ID NO: 1628528 - DNA, 15 bp, Homo sapiens
accctgctgcttcta

SEQ ID NO: 1628529 - DNA, 15 bp, Homo sapiens
gaccctgctgcttct

SEQ ID NO: 1628530 - DNA, 15 bp, Homo sapiens
agaccctgctgcttc

SEQ ID NO: 1628531 - DNA, 15 bp, Homo sapiens
cagaccctgctgctt

SEQ ID NO: 1628532 - DNA, 15 bp, Homo sapiens
tcagaccctgctgct

SEQ ID NO: 1628533 - DNA, 15 bp, Homo sapiens
ctcagaccctgctgc

SEQ ID NO: 1628534 - DNA, 15 bp, Homo sapiens
actcagaccctgctg

SEQ ID NO: 1628535 - DNA, 15 bp, Homo sapiens
gactcagaccctgct

SEQ ID NO: 1628536 - DNA, 15 bp, Homo sapiens
ggactcagaccctgc

SEQ ID NO: 1628537 - DNA, 15 bp, Homo sapiens
gggactcagaccctg

SEQ ID NO: 1628538 - DNA, 15 bp, Homo sapiens
tgggactcagaccct

SEQ ID NO: 1628539 - DNA, 15 bp, Homo sapiens
atgggactcagaccc

SEQ ID NO: 1628540 - DNA, 15 bp, Homo sapiens
gatgggactcagacc

SEQ ID NO: 1628541 - DNA, 15 bp, Homo sapiens
ggatgggactcagac

SEQ ID NO: 1628542 - DNA, 15 bp, Homo sapiens
gggatgggactcaga

SEQ ID NO: 1628543 - DNA, 15 bp, Homo sapiens
tgggatgggactcag

SEQ ID NO: 1628544 - DNA, 15 bp, Homo sapiens
gtgggatgggactca

SEQ ID NO: 1628545 - DNA, 15 bp, Homo sapiens
tgtgggatgggactc

SEQ ID NO: 1628546 - DNA, 15 bp, Homo sapiens
ctgtgggatgggact

SEQ ID NO: 1628547 - DNA, 15 bp, Homo sapiens
gctgtgggatgggac

SEQ ID NO: 1628548 - DNA, 15 bp, Homo sapiens
ggctgtgggatggga

SEQ ID NO: 1628549 - DNA, 15 bp, Homo sapiens
gggctgtgggatggg

SEQ ID NO: 1628550 - DNA, 15 bp, Homo sapiens
ggggctgtgggatgg

SEQ ID NO: 1628551 - DNA, 15 bp, Homo sapiens
gggggctgtgggatg

SEQ ID NO: 1628552 - DNA, 15 bp, Homo sapiens
tgggggctgtgggat

SEQ ID NO: 1628553 - DNA, 15 bp, Homo sapiens
ctgggggctgtggga

SEQ ID NO: 1628554 - DNA, 15 bp, Homo sapiens
actgggggctgtggg

SEQ ID NO: 1628555 - DNA, 15 bp, Homo sapiens
cactgggggctgtgg

SEQ ID NO: 1628556 - DNA, 15 bp, Homo sapiens
gcactgggggctgtg

SEQ ID NO: 1628557 - DNA, 15 bp, Homo sapiens
tgcactgggggctgt

SEQ ID NO: 1628558 - DNA, 15 bp, Homo sapiens
ctgcactgggggctg

SEQ ID NO: 1628559 - DNA, 15 bp, Homo sapiens
tctgcactgggggct

SEQ ID NO: 1628560 - DNA, 15 bp, Homo sapiens
gtctgcactgggggc

SEQ ID NO: 1628561 - DNA, 15 bp, Homo sapiens
cgtctgcactggggg

SEQ ID NO: 1628562 - DNA, 15 bp, Homo sapiens
gcgtctgcactgggg

SEQ ID NO: 1628563 - DNA, 15 bp, Homo sapiens
agcgtctgcactggg

SEQ ID NO: 1628564 - DNA, 15 bp, Homo sapiens
aagcgtctgcactgg

SEQ ID NO: 1628565 - DNA, 15 bp, Homo sapiens
aaagcgtctgcactg

SEQ ID NO: 1628566 - DNA, 15 bp, Homo sapiens
aaaagcgtctgcact

SEQ ID NO: 1628567 - DNA, 15 bp, Homo sapiens
caaaagcgtctgcac

SEQ ID NO: 1628568 - DNA, 15 bp, Homo sapiens
gcaaaagcgtctgca

SEQ ID NO: 1628569 - DNA, 15 bp, Homo sapiens
ggcaaaagcgtctgc

SEQ ID NO: 1628570 - DNA, 15 bp, Homo sapiens
tggcaaaagcgtctg

SEQ ID NO: 1628571 - DNA, 15 bp, Homo sapiens
gtggcaaaagcgtct

SEQ ID NO: 1628572 - DNA, 15 bp, Homo sapiens
agtggcaaaagcgtc

SEQ ID NO: 1628573 - DNA, 15 bp, Homo sapiens
aagtggcaaaagcgt

SEQ ID NO: 1628574 - DNA, 15 bp, Homo sapiens
aaagtggcaaaagcg

SEQ ID NO: 1628575 - DNA, 15 bp, Homo sapiens
aaaagtggcaaaagc

SEQ ID NO: 1628576 - DNA, 15 bp, Homo sapiens
caaaagtggcaaaag

SEQ ID NO: 1628577 - DNA, 15 bp, Homo sapiens
gcaaaagtggcaaaa

SEQ ID NO: 1628578 - DNA, 15 bp, Homo sapiens
tgcaaaagtggcaaa

SEQ ID NO: 1628579 - DNA, 15 bp, Homo sapiens
atgcaaaagtggcaa

SEQ ID NO: 1628580 - DNA, 15 bp, Homo sapiens
catgcaaaagtggca

SEQ ID NO: 1628581 - DNA, 15 bp, Homo sapiens
ccatgcaaaagtggc

SEQ ID NO: 1628582 - DNA, 15 bp, Homo sapiens
cccatgcaaaagtgg

SEQ ID NO: 1628583 - DNA, 15 bp, Homo sapiens
ccccatgcaaaagtg

SEQ ID NO: 1628584 - DNA, 15 bp, Homo sapiens
gccccatgcaaaagt

SEQ ID NO: 1628585 - DNA, 15 bp, Homo sapiens
ggccccatgcaaaag

SEQ ID NO: 1628586 - DNA, 15 bp, Homo sapiens
gggccccatgcaaaa

SEQ ID NO: 1628587 - DNA, 15 bp, Homo sapiens
ggggccccatgcaaa

SEQ ID NO: 1628588 - DNA, 15 bp, Homo sapiens
gggggccccatgcaa

SEQ ID NO: 1628589 - DNA, 15 bp, Homo sapiens
agggggccccatgca

SEQ ID NO: 1628590 - DNA, 15 bp, Homo sapiens
cagggggccccatgc

SEQ ID NO: 1628591 - DNA, 15 bp, Homo sapiens
ccagggggccccatg

SEQ ID NO: 1628592 - DNA, 15 bp, Homo sapiens
tccagggggccccat

SEQ ID NO: 1628593 - DNA, 15 bp, Homo sapiens
atccagggggcccca

SEQ ID NO: 1628594 - DNA, 15 bp, Homo sapiens
catccagggggcccc

SEQ ID NO: 1628595 - DNA, 15 bp, Homo sapiens
acatccagggggccc

SEQ ID NO: 1628596 - DNA, 15 bp, Homo sapiens
cacatccagggggcc

SEQ ID NO: 1628597 - DNA, 15 bp, Homo sapiens
acacatccagggggc

SEQ ID NO: 1628598 - DNA, 15 bp, Homo sapiens
aacacatccaggggg

SEQ ID NO: 1628599 - DNA, 15 bp, Homo sapiens
aaacacatccagggg

SEQ ID NO: 1628600 - DNA, 15 bp, Homo sapiens
gaaacacatccaggg

SEQ ID NO: 1628601 - DNA, 15 bp, Homo sapiens
agaaacacatccagg

SEQ ID NO: 1628602 - DNA, 15 bp, Homo sapiens
cagaaacacatccag

SEQ ID NO: 1628603 - DNA, 15 bp, Homo sapiens
acagaaacacatcca

SEQ ID NO: 1628604 - DNA, 15 bp, Homo sapiens
cacagaaacacatcc

SEQ ID NO: 1628605 - DNA, 15 bp, Homo sapiens
gcacagaaacacatc

SEQ ID NO: 1628606 - DNA, 15 bp, Homo sapiens
tgcacagaaacacat

SEQ ID NO: 1628607 - DNA, 15 bp, Homo sapiens
atgcacagaaacaca

SEQ ID NO: 1628608 - DNA, 15 bp, Homo sapiens
aatgcacagaaacac

SEQ ID NO: 1628609 - DNA, 15 bp, Homo sapiens
aaatgcacagaaaca

SEQ ID NO: 1628610 - DNA, 15 bp, Homo sapiens
taaatgcacagaaac

SEQ ID NO: 1628611 - DNA, 15 bp, Homo sapiens
ataaatgcacagaaa

SEQ ID NO: 1628612 - DNA, 15 bp, Homo sapiens
gataaatgcacagaa

SEQ ID NO: 1628613 - DNA, 15 bp, Homo sapiens
agataaatgcacaga

SEQ ID NO: 1628614 - DNA, 15 bp, Homo sapiens
tagataaatgcacag

SEQ ID NO: 1628615 - DNA, 15 bp, Homo sapiens
gtagataaatgcaca

SEQ ID NO: 1628616 - DNA, 15 bp, Homo sapiens
tgtagataaatgcac

SEQ ID NO: 1628617 - DNA, 15 bp, Homo sapiens
ttgtagataaatgca

SEQ ID NO: 1628618 - DNA, 15 bp, Homo sapiens
tttgtagataaatgc

SEQ ID NO: 1628619 - DNA, 15 bp, Homo sapiens
atttgtagataaatg

SEQ ID NO: 1628620 - DNA, 15 bp, Homo sapiens
gatttgtagataaat

SEQ ID NO: 1628621 - DNA, 15 bp, Homo sapiens
ggatttgtagataaa

SEQ ID NO: 1628622 - DNA, 15 bp, Homo sapiens
aggatttgtagataa

SEQ ID NO: 1628623 - DNA, 15 bp, Homo sapiens
caggatttgtagata

SEQ ID NO: 1628624 - DNA, 15 bp, Homo sapiens
ccaggatttgtagat

SEQ ID NO: 1628625 - DNA, 15 bp, Homo sapiens
accaggatttgtaga

SEQ ID NO: 1628626 - DNA, 15 bp, Homo sapiens
caccaggatttgtag

SEQ ID NO: 1628627 - DNA, 15 bp, Homo sapiens
gcaccaggatttgta

SEQ ID NO: 1628628 - DNA, 15 bp, Homo sapiens
ggcaccaggatttgt

SEQ ID NO: 1628629 - DNA, 15 bp, Homo sapiens
gggcaccaggatttg

SEQ ID NO: 1628630 - DNA, 15 bp, Homo sapiens
tgggcaccaggattt

SEQ ID NO: 1628631 - DNA, 15 bp, Homo sapiens
atgggcaccaggatt

SEQ ID NO: 1628632 - DNA, 15 bp, Homo sapiens
tatgggcaccaggat

SEQ ID NO: 1628633 - DNA, 15 bp, Homo sapiens
ctatgggcaccagga

SEQ ID NO: 1628634 - DNA, 15 bp, Homo sapiens
cctatgggcaccagg

SEQ ID NO: 1628635 - DNA, 15 bp, Homo sapiens
tcctatgggcaccag

SEQ ID NO: 1628636 - DNA, 15 bp, Homo sapiens
gtcctatgggcacca

SEQ ID NO: 1628637 - DNA, 15 bp, Homo sapiens
tgtcctatgggcacc

SEQ ID NO: 1628638 - DNA, 15 bp, Homo sapiens
atgtcctatgggcac

SEQ ID NO: 1628639 - DNA, 15 bp, Homo sapiens
catgtcctatgggca

SEQ ID NO: 1628640 - DNA, 15 bp, Homo sapiens
gcatgtcctatgggc

SEQ ID NO: 1628641 - DNA, 15 bp, Homo sapiens
ggcatgtcctatggg

SEQ ID NO: 1628642 - DNA, 15 bp, Homo sapiens
gggcatgtcctatgg

SEQ ID NO: 1628643 - DNA, 15 bp, Homo sapiens
ggggcatgtcctatg

SEQ ID NO: 1628644 - DNA, 15 bp, Homo sapiens
cggggcatgtcctat

SEQ ID NO: 1628645 - DNA, 15 bp, Homo sapiens
acggggcatgtccta

SEQ ID NO: 1628646 - DNA, 15 bp, Homo sapiens
cacggggcatgtcct

SEQ ID NO: 1628647 - DNA, 15 bp, Homo sapiens
acacggggcatgtcc

SEQ ID NO: 1628648 - DNA, 15 bp, Homo sapiens
aacacggggcatgtc

SEQ ID NO: 1628649 - DNA, 15 bp, Homo sapiens
caacacggggcatgt

SEQ ID NO: 1628650 - DNA, 15 bp, Homo sapiens
acaacacggggcatg

SEQ ID NO: 1628651 - DNA, 15 bp, Homo sapiens
aacaacacggggcat

SEQ ID NO: 1628652 - DNA, 15 bp, Homo sapiens
gaacaacacggggca

SEQ ID NO: 1628653 - DNA, 15 bp, Homo sapiens
agaacaacacggggc

SEQ ID NO: 1628654 - DNA, 15 bp, Homo sapiens
tagaacaacacgggg

SEQ ID NO: 1628655 - DNA, 15 bp, Homo sapiens
ctagaacaacacggg

SEQ ID NO: 1628656 - DNA, 15 bp, Homo sapiens
cctagaacaacacgg

SEQ ID NO: 1628657 - DNA, 15 bp, Homo sapiens
gcctagaacaacacg

SEQ ID NO: 1628658 - DNA, 15 bp, Homo sapiens
ggcctagaacaacac

SEQ ID NO: 1628659 - DNA, 15 bp, Homo sapiens
aggcctagaacaaca

SEQ ID NO: 1628660 - DNA, 15 bp, Homo sapiens
aaggcctagaacaac

SEQ ID NO: 1628661 - DNA, 15 bp, Homo sapiens
aaaggcctagaacaa

SEQ ID NO: 1628662 - DNA, 15 bp, Homo sapiens
caaaggcctagaaca

SEQ ID NO: 1628663 - DNA, 15 bp, Homo sapiens
gcaaaggcctagaac

SEQ ID NO: 1628664 - DNA, 15 bp, Homo sapiens
agcaaaggcctagaa

SEQ ID NO: 1628665 - DNA, 15 bp, Homo sapiens
aagcaaaggcctaga

SEQ ID NO: 1628666 - DNA, 15 bp, Homo sapiens
aaagcaaaggcctag

SEQ ID NO: 1628667 - DNA, 15 bp, Homo sapiens
gaaagcaaaggccta

SEQ ID NO: 1628668 - DNA, 15 bp, Homo sapiens
agaaagcaaaggcct

SEQ ID NO: 1628669 - DNA, 15 bp, Homo sapiens
cagaaagcaaaggcc

SEQ ID NO: 1628670 - DNA, 15 bp, Homo sapiens
gagcagaaagcaaag

SEQ ID NO: 1628671 - DNA, 15 bp, Homo sapiens
cgagcagaaagcaaa

SEQ ID NO: 1628672 - DNA, 15 bp, Homo sapiens
acgagcagaaagcaa

SEQ ID NO: 1628673 - DNA, 15 bp, Homo sapiens
aacgagcagaaagca

SEQ ID NO: 1628674 - DNA, 15 bp, Homo sapiens
taacgagcagaaagc

SEQ ID NO: 1628675 - DNA, 15 bp, Homo sapiens
gtaacgagcagaaag

SEQ ID NO: 1628676 - DNA, 15 bp, Homo sapiens
tgtaacgagcagaaa

SEQ ID NO: 1628677 - DNA, 15 bp, Homo sapiens
atgtaacgagcagaa

SEQ ID NO: 1628678 - DNA, 15 bp, Homo sapiens
tatgtaacgagcaga

SEQ ID NO: 1628679 - DNA, 15 bp, Homo sapiens
ttatgtaacgagcag

SEQ ID NO: 1628680 - DNA, 15 bp, Homo sapiens
tttatgtaacgagca

SEQ ID NO: 1628681 - DNA, 15 bp, Homo sapiens
atttatgtaacgagc

SEQ ID NO: 1628682 - DNA, 15 bp, Homo sapiens
catttatgtaacgag

SEQ ID NO: 1628683 - DNA, 15 bp, Homo sapiens
ccatttatgtaacga

SEQ ID NO: 1628684 - DNA, 15 bp, Homo sapiens
accatttatgtaacg

SEQ ID NO: 1628685 - DNA, 15 bp, Homo sapiens
caccatttatgtaac

SEQ ID NO: 1628686 - DNA, 15 bp, Homo sapiens
tcaccatttatgtaa

SEQ ID NO: 1628687 - DNA, 15 bp, Homo sapiens
ttcaccatttatgta

SEQ ID NO: 1628688 - DNA, 15 bp, Homo sapiens
cttcaccatttatgt

SEQ ID NO: 1628689 - DNA, 15 bp, Homo sapiens
tcttcaccatttatg

SEQ ID NO: 1628690 - DNA, 15 bp, Homo sapiens
ttcttcaccatttat

SEQ ID NO: 1628691 - DNA, 15 bp, Homo sapiens
cttcttcaccattta

SEQ ID NO: 1628692 - DNA, 15 bp, Homo sapiens
tcttcttcaccattt

SEQ ID NO: 1628693 - DNA, 15 bp, Homo sapiens
ctcttcttcaccatt

SEQ ID NO: 1628694 - DNA, 15 bp, Homo sapiens
tctcttcttcaccat

SEQ ID NO: 1628695 - DNA, 15 bp, Homo sapiens
ttctcttcttcacca

SEQ ID NO: 1628696 - DNA, 15 bp, Homo sapiens
cttctcttcttcacc

SEQ ID NO: 1628697 - DNA, 15 bp, Homo sapiens
gcttctcttcttcac

SEQ ID NO: 1628698 - DNA, 15 bp, Homo sapiens
cgcttctcttcttca

SEQ ID NO: 1628699 - DNA, 15 bp, Homo sapiens
ccgcttctcttcttc

SEQ ID NO: 1628700 - DNA, 15 bp, Homo sapiens
cccgcttctcttctt

SEQ ID NO: 1628701 - DNA, 15 bp, Homo sapiens
acccgcttctcttct

SEQ ID NO: 1628702 - DNA, 15 bp, Homo sapiens
tacccgcttctcttc

SEQ ID NO: 1628703 - DNA, 15 bp, Homo sapiens
ttacccgcttctctt

SEQ ID NO: 1628704 - DNA, 15 bp, Homo sapiens
cttacccgcttctct

SEQ ID NO: 1628705 - DNA, 15 bp, Homo sapiens
tcttacccgcttctc

SEQ ID NO: 1628706 - DNA, 15 bp, Homo sapiens
ctcttacccgcttct

SEQ ID NO: 1628707 - DNA, 15 bp, Homo sapiens
tctcttacccgcttc

SEQ ID NO: 1628708 - DNA, 15 bp, Homo sapiens
ttctcttacccgctt

SEQ ID NO: 1628709 - DNA, 15 bp, Homo sapiens
gttctcttacccgct

SEQ ID NO: 1628710 - DNA, 15 bp, Homo sapiens
tgttctcttacccgc

SEQ ID NO: 1628711 - DNA, 15 bp, Homo sapiens
ctgttctcttacccg

SEQ ID NO: 1628712 - DNA, 15 bp, Homo sapiens
tctgttctcttaccc

SEQ ID NO: 1628713 - DNA, 15 bp, Homo sapiens
atctgttctcttacc

SEQ ID NO: 1628714 - DNA, 15 bp, Homo sapiens
aatctgttctcttac

SEQ ID NO: 1628715 - DNA, 15 bp, Homo sapiens
caatctgttctctta

SEQ ID NO: 1628716 - DNA, 15 bp, Homo sapiens
ccaatctgttctctt

SEQ ID NO: 1628717 - DNA, 15 bp, Homo sapiens
tccaatctgttctct

SEQ ID NO: 1628718 - DNA, 15 bp, Homo sapiens
ctccaatctgttctc

SEQ ID NO: 1628719 - DNA, 15 bp, Homo sapiens
gctccaatctgttct

SEQ ID NO: 1628720 - DNA, 15 bp, Homo sapiens
ggctccaatctgttc

SEQ ID NO: 1628721 - DNA, 15 bp, Homo sapiens
tggctccaatctgtt

SEQ ID NO: 1628722 - DNA, 15 bp, Homo sapiens
atggctccaatctgt

SEQ ID NO: 1628723 - DNA, 15 bp, Homo sapiens
gatggctccaatctg

SEQ ID NO: 1628724 - DNA, 15 bp, Homo sapiens
agatggctccaatct

SEQ ID NO: 1628725 - DNA, 15 bp, Homo sapiens
tagatggctccaatc

SEQ ID NO: 1628726 - DNA, 15 bp, Homo sapiens
ttagatggctccaat

SEQ ID NO: 1628727 - DNA, 15 bp, Homo sapiens
tttagatggctccaa

SEQ ID NO: 1628728 - DNA, 15 bp, Homo sapiens
ttttagatggctcca

SEQ ID NO: 1628729 - DNA, 15 bp, Homo sapiens
cttttagatggctcc

SEQ ID NO: 1628730 - DNA, 15 bp, Homo sapiens
acttttagatggctc

SEQ ID NO: 1628731 - DNA, 15 bp, Homo sapiens
aacttttagatggct

SEQ ID NO: 1628732 - DNA, 15 bp, Homo sapiens
gaacttttagatggc

SEQ ID NO: 1628733 - DNA, 15 bp, Homo sapiens
agaacttttagatgg

SEQ ID NO: 1628734 - DNA, 15 bp, Homo sapiens
gagaacttttagatg

SEQ ID NO: 1628735 - DNA, 15 bp, Homo sapiens
tgagaacttttagat

SEQ ID NO: 1628736 - DNA, 15 bp, Homo sapiens
atgagaacttttaga

SEQ ID NO: 1628737 - DNA, 15 bp, Homo sapiens
gatgagaacttttag

SEQ ID NO: 1628738 - DNA, 15 bp, Homo sapiens
agatgagaactttta

SEQ ID NO: 1628739 - DNA, 15 bp, Homo sapiens
aagatgagaactttt

SEQ ID NO: 1628740 - DNA, 15 bp, Homo sapiens
taagatgagaacttt

SEQ ID NO: 1628741 - DNA, 15 bp, Homo sapiens
ttaagatgagaactt

SEQ ID NO: 1628742 - DNA, 15 bp, Homo sapiens
cttaagatgagaact

SEQ ID NO: 1628743 - DNA, 15 bp, Homo sapiens
acttaagatgagaac

SEQ ID NO: 1628744 - DNA, 15 bp, Homo sapiens
cacttaagatgagaa

SEQ ID NO: 1628745 - DNA, 15 bp, Homo sapiens
acacttaagatgaga

SEQ ID NO: 1628746 - DNA, 15 bp, Homo sapiens
tacacttaagatgag

SEQ ID NO: 1628747 - DNA, 15 bp, Homo sapiens
ctacacttaagatga

SEQ ID NO: 1628748 - DNA, 15 bp, Homo sapiens
tctacacttaagatg

SEQ ID NO: 1628749 - DNA, 15 bp, Homo sapiens
atctacacttaagat

SEQ ID NO: 1628750 - DNA, 15 bp, Homo sapiens
gatctacacttaaga

SEQ ID NO: 1628751 - DNA, 15 bp, Homo sapiens
tgatctacacttaag

SEQ ID NO: 1628752 - DNA, 15 bp, Homo sapiens
atgatctacacttaa

SEQ ID NO: 1628753 - DNA, 15 bp, Homo sapiens
aatgatctacactta

SEQ ID NO: 1628754 - DNA, 15 bp, Homo sapiens
caatgatctacactt

SEQ ID NO: 1628755 - DNA, 15 bp, Homo sapiens
gcaatgatctacact

SEQ ID NO: 1628756 - DNA, 15 bp, Homo sapiens
tgcaatgatctacac

SEQ ID NO: 1628757 - DNA, 15 bp, Homo sapiens
ttgcaatgatctaca

SEQ ID NO: 1628758 - DNA, 15 bp, Homo sapiens
tttgcaatgatctac

SEQ ID NO: 1628759 - DNA, 15 bp, Homo sapiens
ctttgcaatgatcta

SEQ ID NO: 1628760 - DNA, 15 bp, Homo sapiens
cctttgcaatgatct

SEQ ID NO: 1628761 - DNA, 15 bp, Homo sapiens
tcctttgcaatgatc

SEQ ID NO: 1628762 - DNA, 15 bp, Homo sapiens
atcctttgcaatgat

SEQ ID NO: 1628763 - DNA, 15 bp, Homo sapiens
catcctttgcaatga

SEQ ID NO: 1628764 - DNA, 15 bp, Homo sapiens
ccatcctttgcaatg

SEQ ID NO: 1628765 - DNA, 15 bp, Homo sapiens
tccatcctttgcaat

SEQ ID NO: 1628766 - DNA, 15 bp, Homo sapiens
ttccatcctttgcaa

SEQ ID NO: 1628767 - DNA, 15 bp, Homo sapiens
attccatcctttgca

SEQ ID NO: 1628768 - DNA, 15 bp, Homo sapiens
aattccatcctttgc

SEQ ID NO: 1628769 - DNA, 15 bp, Homo sapiens
aaattccatcctttg

SEQ ID NO: 1628770 - DNA, 15 bp, Homo sapiens
aaaattccatccttt

SEQ ID NO: 1628771 - DNA, 15 bp, Homo sapiens
gaaaattccatcctt

SEQ ID NO: 1628772 - DNA, 15 bp, Homo sapiens
agaaaattccatcct

SEQ ID NO: 1628773 - DNA, 15 bp, Homo sapiens
gagaaaattccatcc

SEQ ID NO: 1628774 - DNA, 15 bp, Homo sapiens
ggagaaaattccatc

SEQ ID NO: 1628775 - DNA, 15 bp, Homo sapiens
cggagaaaattccat

SEQ ID NO: 1628776 - DNA, 15 bp, Homo sapiens
tcggagaaaattcca

SEQ ID NO: 1628777 - DNA, 15 bp, Homo sapiens
atcggagaaaattcc

SEQ ID NO: 1628778 - DNA, 15 bp, Homo sapiens
aatcggagaaaattc

SEQ ID NO: 1628779 - DNA, 15 bp, Homo sapiens
caatcggagaaaatt

SEQ ID NO: 1628780 - DNA, 15 bp, Homo sapiens
acaatcggagaaaat

SEQ ID NO: 1628781 - DNA, 15 bp, Homo sapiens
gacaatcggagaaaa

SEQ ID NO: 1628782 - DNA, 15 bp, Homo sapiens
tgacaatcggagaaa

SEQ ID NO: 1628783 - DNA, 15 bp, Homo sapiens
atgacaatcggagaa

SEQ ID NO: 1628784 - DNA, 15 bp, Homo sapiens
gatgacaatcggaga

SEQ ID NO: 1628785 - DNA, 15 bp, Homo sapiens
tgatgacaatcggag

SEQ ID NO: 1628786 - DNA, 15 bp, Homo sapiens
atgatgacaatcgga

SEQ ID NO: 1628787 - DNA, 15 bp, Homo sapiens
gatgatgacaatcgg

SEQ ID NO: 1628788 - DNA, 15 bp, Homo sapiens
cgatgatgacaatcg

SEQ ID NO: 1628789 - DNA, 15 bp, Homo sapiens
acgatgatgacaatc

SEQ ID NO: 1628790 - DNA, 15 bp, Homo sapiens
aacgatgatgacaat

SEQ ID NO: 1628791 - DNA, 15 bp, Homo sapiens
caacgatgatgacaa

SEQ ID NO: 1628792 - DNA, 15 bp, Homo sapiens
tcaacgatgatgaca

SEQ ID NO: 1628793 - DNA, 15 bp, Homo sapiens
atcaacgatgatgac

SEQ ID NO: 1628794 - DNA, 15 bp, Homo sapiens
catcaacgatgatga

SEQ ID NO: 1628795 - DNA, 15 bp, Homo sapiens
acatcaacgatgatg

SEQ ID NO: 1628796 - DNA, 15 bp, Homo sapiens
aacatcaacgatgat

SEQ ID NO: 1628797 - DNA, 15 bp, Homo sapiens
aaacatcaacgatga

SEQ ID NO: 1628798 - DNA, 15 bp, Homo sapiens
caaacatcaacgatg

SEQ ID NO: 1628799 - DNA, 15 bp, Homo sapiens
tcaaacatcaacgat

SEQ ID NO: 1628800 - DNA, 15 bp, Homo sapiens
ttcaaacatcaacga

SEQ ID NO: 1628801 - DNA, 15 bp, Homo sapiens
attcaaacatcaacg

SEQ ID NO: 1628802 - DNA, 15 bp, Homo sapiens
tattcaaacatcaac

SEQ ID NO: 1628803 - DNA, 15 bp, Homo sapiens
atattcaaacatcaa

SEQ ID NO: 1628804 - DNA, 15 bp, Homo sapiens
catattcaaacatca

SEQ ID NO: 1628805 - DNA, 15 bp, Homo sapiens
tcatattcaaacatc

SEQ ID NO: 1628806 - DNA, 15 bp, Homo sapiens
ctcatattcaaacat

SEQ ID NO: 1628807 - DNA, 15 bp, Homo sapiens
tctcatattcaaaca

SEQ ID NO: 1628808 - DNA, 15 bp, Homo sapiens
gtctcatattcaaac

SEQ ID NO: 1628809 - DNA, 15 bp, Homo sapiens
ggtctcatattcaaa

SEQ ID NO: 1628810 - DNA, 15 bp, Homo sapiens
tggtctcatattcaa

SEQ ID NO: 1628811 - DNA, 15 bp, Homo sapiens
atggtctcatattca

SEQ ID NO: 1628812 - DNA, 15 bp, Homo sapiens
aatggtctcatattc

SEQ ID NO: 1628813 - DNA, 15 bp, Homo sapiens
aaatggtctcatatt

SEQ ID NO: 1628814 - DNA, 15 bp, Homo sapiens
gaaatggtctcatat

SEQ ID NO: 1628815 - DNA, 15 bp, Homo sapiens
tgaaatggtctcata

SEQ ID NO: 1628816 - DNA, 15 bp, Homo sapiens
atgaaatggtctcat

SEQ ID NO: 1628817 - DNA, 15 bp, Homo sapiens
gatgaaatggtctca

SEQ ID NO: 1628818 - DNA, 15 bp, Homo sapiens
tgatgaaatggtctc

SEQ ID NO: 1628819 - DNA, 15 bp, Homo sapiens
ctgatgaaatggtct

SEQ ID NO: 1628820 - DNA, 15 bp, Homo sapiens
actgatgaaatggtc

SEQ ID NO: 1628821 - DNA, 15 bp, Homo sapiens
tactgatgaaatggt

SEQ ID NO: 1628822 - DNA, 15 bp, Homo sapiens
atactgatgaaatgg

SEQ ID NO: 1628823 - DNA, 15 bp, Homo sapiens
aatactgatgaaatg

SEQ ID NO: 1628824 - DNA, 15 bp, Homo sapiens
aaatactgatgaaat

SEQ ID NO: 1628825 - DNA, 15 bp, Homo sapiens
taaatactgatgaaa

SEQ ID NO: 1628826 - DNA, 15 bp, Homo sapiens
ttaaatactgatgaa

SEQ ID NO: 1628827 - DNA, 15 bp, Homo sapiens
cttaaatactgatga

SEQ ID NO: 1628828 - DNA, 15 bp, Homo sapiens
acttaaatactgatg

SEQ ID NO: 1628829 - DNA, 15 bp, Homo sapiens
cacttaaatactgat

SEQ ID NO: 1628830 - DNA, 15 bp, Homo sapiens
acacttaaatactga

SEQ ID NO: 1628831 - DNA, 15 bp, Homo sapiens
cacacttaaatactg

SEQ ID NO: 1628832 - DNA, 15 bp, Homo sapiens
gcacacttaaatact

SEQ ID NO: 1628833 - DNA, 15 bp, Homo sapiens
ggcacacttaaatac

SEQ ID NO: 1628834 - DNA, 15 bp, Homo sapiens
gggcacacttaaata

SEQ ID NO: 1628835 - DNA, 15 bp, Homo sapiens
cgggcacacttaaat

SEQ ID NO: 1628836 - DNA, 15 bp, Homo sapiens
gcgggcacacttaaa

SEQ ID NO: 1628837 - DNA, 15 bp, Homo sapiens
agcgggcacacttaa

SEQ ID NO: 1628838 - DNA, 15 bp, Homo sapiens
cagcgggcacactta

SEQ ID NO: 1628839 - DNA, 15 bp, Homo sapiens
ccagcgggcacactt

SEQ ID NO: 1628840 - DNA, 15 bp, Homo sapiens
cccagcgggcacact

SEQ ID NO: 1628841 - DNA, 15 bp, Homo sapiens
tcccagcgggcacac

SEQ ID NO: 1628842 - DNA, 15 bp, Homo sapiens
atcccagcgggcaca

SEQ ID NO: 1628843 - DNA, 15 bp, Homo sapiens
gatcccagcgggcac

SEQ ID NO: 1628844 - DNA, 15 bp, Homo sapiens
agatcccagcgggca

SEQ ID NO: 1628845 - DNA, 15 bp, Homo sapiens
tagatcccagcgggc

SEQ ID NO: 1628846 - DNA, 15 bp, Homo sapiens
ttagatcccagcggg

SEQ ID NO: 1628847 - DNA, 15 bp, Homo sapiens
gttagatcccagcgg

SEQ ID NO: 1628848 - DNA, 15 bp, Homo sapiens
agttagatcccagcg

SEQ ID NO: 1628849 - DNA, 15 bp, Homo sapiens
tagttagatcccagc

SEQ ID NO: 1628850 - DNA, 15 bp, Homo sapiens
ctagttagatcccag

SEQ ID NO: 1628851 - DNA, 15 bp, Homo sapiens
cctagttagatccca

SEQ ID NO: 1628852 - DNA, 15 bp, Homo sapiens
tcctagttagatccc

SEQ ID NO: 1628853 - DNA, 15 bp, Homo sapiens
ctcctagttagatcc

SEQ ID NO: 1628854 - DNA, 15 bp, Homo sapiens
tctcctagttagatc

SEQ ID NO: 1628855 - DNA, 15 bp, Homo sapiens
ctctcctagttagat

SEQ ID NO: 1628856 - DNA, 15 bp, Homo sapiens
cctctcctagttaga

SEQ ID NO: 1628857 - DNA, 15 bp, Homo sapiens
tcctctcctagttag

SEQ ID NO: 1628858 - DNA, 15 bp, Homo sapiens
ctcctctcctagtta

SEQ ID NO: 1628859 - DNA, 15 bp, Homo sapiens
tctcctctcctagtt

SEQ ID NO: 1628860 - DNA, 15 bp, Homo sapiens
ctctcctctcctagt

SEQ ID NO: 1628861 - DNA, 15 bp, Homo sapiens
cctctcctctcctag

SEQ ID NO: 1628862 - DNA, 15 bp, Homo sapiens
ccctctcctctccta

SEQ ID NO: 1628863 - DNA, 15 bp, Homo sapiens
accctctcctctcct

SEQ ID NO: 1628864 - DNA, 15 bp, Homo sapiens
taccctctcctctcc

SEQ ID NO: 1628865 - DNA, 15 bp, Homo sapiens
ataccctctcctctc

SEQ ID NO: 1628866 - DNA, 15 bp, Homo sapiens
aataccctctcctct

SEQ ID NO: 1628867 - DNA, 15 bp, Homo sapiens
gaataccctctcctc

SEQ ID NO: 1628868 - DNA, 15 bp, Homo sapiens
tgaataccctctcct

SEQ ID NO: 1628869 - DNA, 15 bp, Homo sapiens
gtgaataccctctcc

SEQ ID NO: 1628870 - DNA, 15 bp, Homo sapiens
agtgaataccctctc

SEQ ID NO: 1628871 - DNA, 15 bp, Homo sapiens
cagtgaataccctct

SEQ ID NO: 1628872 - DNA, 15 bp, Homo sapiens
gcagtgaataccctc

SEQ ID NO: 1628873 - DNA, 15 bp, Homo sapiens
ggcagtgaataccct

SEQ ID NO: 1628874 - DNA, 15 bp, Homo sapiens
cggcagtgaataccc

SEQ ID NO: 1628875 - DNA, 15 bp, Homo sapiens
tcggcagtgaatacc

SEQ ID NO: 1628876 - DNA, 15 bp, Homo sapiens
ttcggcagtgaatac

SEQ ID NO: 1628877 - DNA, 15 bp, Homo sapiens
gttcggcagtgaata

SEQ ID NO: 1628878 - DNA, 15 bp, Homo sapiens
tgttcggcagtgaat

SEQ ID NO: 1628879 - DNA, 15 bp, Homo sapiens
atgttcggcagtgaa

SEQ ID NO: 1628880 - DNA, 15 bp, Homo sapiens
aatgttcggcagtga

SEQ ID NO: 1628881 - DNA, 15 bp, Homo sapiens
aaatgttcggcagtg

SEQ ID NO: 1628882 - DNA, 15 bp, Homo sapiens
gaaatgttcggcagt

SEQ ID NO: 1628883 - DNA, 15 bp, Homo sapiens
tgaaatgttcggcag

SEQ ID NO: 1628884 - DNA, 15 bp, Homo sapiens
ttgaaatgttcggca

SEQ ID NO: 1628885 - DNA, 15 bp, Homo sapiens
tttgaaatgttcggc

SEQ ID NO: 1628886 - DNA, 15 bp, Homo sapiens
ctttgaaatgttcgg

SEQ ID NO: 1628887 - DNA, 15 bp, Homo sapiens
tctttgaaatgttcg

SEQ ID NO: 1628888 - DNA, 15 bp, Homo sapiens
ttctttgaaatgttc

SEQ ID NO: 1628889 - DNA, 15 bp, Homo sapiens
attctttgaaatgtt

SEQ ID NO: 1628890 - DNA, 15 bp, Homo sapiens
tattctttgaaatgt

SEQ ID NO: 1628891 - DNA, 15 bp, Homo sapiens
atattctttgaaatg

SEQ ID NO: 1628892 - DNA, 15 bp, Homo sapiens
tatattctttgaaat

SEQ ID NO: 1628893 - DNA, 15 bp, Homo sapiens
gtatattctttgaaa

SEQ ID NO: 1628894 - DNA, 15 bp, Homo sapiens
cgtatattctttgaa

SEQ ID NO: 1628895 - DNA, 15 bp, Homo sapiens
tcgtatattctttga

SEQ ID NO: 1628896 - DNA, 15 bp, Homo sapiens
ttcgtatattctttg

SEQ ID NO: 1628897 - DNA, 15 bp, Homo sapiens
gttcgtatattcttt

SEQ ID NO: 1628898 - DNA, 15 bp, Homo sapiens
tgttcgtatattctt

SEQ ID NO: 1628899 - DNA, 15 bp, Homo sapiens
ttgttcgtatattct

SEQ ID NO: 1628900 - DNA, 15 bp, Homo sapiens
cttgttcgtatattc

SEQ ID NO: 1628901 - DNA, 15 bp, Homo sapiens
gcttgttcgtatatt

SEQ ID NO: 1628902 - DNA, 15 bp, Homo sapiens
agcttgttcgtatat

SEQ ID NO: 1628903 - DNA, 15 bp, Homo sapiens
gagcttgttcgtata

SEQ ID NO: 1628904 - DNA, 15 bp, Homo sapiens
agagcttgttcgtat

SEQ ID NO: 1628905 - DNA, 15 bp, Homo sapiens
aagagcttgttcgta

SEQ ID NO: 1628906 - DNA, 15 bp, Homo sapiens
aaagagcttgttcgt

SEQ ID NO: 1628907 - DNA, 15 bp, Homo sapiens
aaaagagcttgttcg

SEQ ID NO: 1628908 - DNA, 15 bp, Homo sapiens
taaaagagcttgttc

SEQ ID NO: 1628909 - DNA, 15 bp, Homo sapiens
ataaaagagcttgtt

SEQ ID NO: 1628910 - DNA, 15 bp, Homo sapiens
cataaaagagcttgt

SEQ ID NO: 1628911 - DNA, 15 bp, Homo sapiens
ccataaaagagcttg

SEQ ID NO: 1628912 - DNA, 15 bp, Homo sapiens
accataaaagagctt

SEQ ID NO: 1628913 - DNA, 15 bp, Homo sapiens
gaccataaaagagct

SEQ ID NO: 1628914 - DNA, 15 bp, Homo sapiens
tgaccataaaagagc

SEQ ID NO: 1628915 - DNA, 15 bp, Homo sapiens
ctgaccataaaagag

SEQ ID NO: 1628916 - DNA, 15 bp, Homo sapiens
tctgaccataaaaga

SEQ ID NO: 1628917 - DNA, 15 bp, Homo sapiens
ttctgaccataaaag

SEQ ID NO: 1628918 - DNA, 15 bp, Homo sapiens
tttctgaccataaaa

SEQ ID NO: 1628919 - DNA, 15 bp, Homo sapiens
atttctgaccataaa

SEQ ID NO: 1628920 - DNA, 15 bp, Homo sapiens
catttctgaccataa

SEQ ID NO: 1628921 - DNA, 15 bp, Homo sapiens
acatttctgaccata

SEQ ID NO: 1628922 - DNA, 15 bp, Homo sapiens
aacatttctgaccat

SEQ ID NO: 1628923 - DNA, 15 bp, Homo sapiens
taacatttctgacca

SEQ ID NO: 1628924 - DNA, 15 bp, Homo sapiens
ctaacatttctgacc

SEQ ID NO: 1628925 - DNA, 15 bp, Homo sapiens
gctaacatttctgac

SEQ ID NO: 1628926 - DNA, 15 bp, Homo sapiens
ggctaacatttctga

SEQ ID NO: 1628927 - DNA, 15 bp, Homo sapiens
gggctaacatttctg

SEQ ID NO: 1628928 - DNA, 15 bp, Homo sapiens
agggctaacatttct

SEQ ID NO: 1628929 - DNA, 15 bp, Homo sapiens
aagggctaacatttc

SEQ ID NO: 1628930 - DNA, 15 bp, Homo sapiens
aaagggctaacattt

SEQ ID NO: 1628931 - DNA, 15 bp, Homo sapiens
aaaagggctaacatt

SEQ ID NO: 1628932 - DNA, 15 bp, Homo sapiens
gaaaagggctaacat

SEQ ID NO: 1628933 - DNA, 15 bp, Homo sapiens
ggaaaagggctaaca

SEQ ID NO: 1628934 - DNA, 15 bp, Homo sapiens
gggaaaagggctaac

SEQ ID NO: 1628935 - DNA, 15 bp, Homo sapiens
ggggaaaagggctaa

SEQ ID NO: 1628936 - DNA, 15 bp, Homo sapiens
aggggaaaagggcta

SEQ ID NO: 1628937 - DNA, 15 bp, Homo sapiens
aaggggaaaagggct

SEQ ID NO: 1628938 - DNA, 15 bp, Homo sapiens
taaggggaaaagggc

SEQ ID NO: 1628939 - DNA, 15 bp, Homo sapiens
ttaaggggaaaaggg

SEQ ID NO: 1628940 - DNA, 15 bp, Homo sapiens
tttaaggggaaaagg

SEQ ID NO: 1628941 - DNA, 15 bp, Homo sapiens
gtttaaggggaaaag

SEQ ID NO: 1628942 - DNA, 15 bp, Homo sapiens
agtttaaggggaaaa

SEQ ID NO: 1628943 - DNA, 15 bp, Homo sapiens
aagtttaaggggaaa

SEQ ID NO: 1628944 - DNA, 15 bp, Homo sapiens
caagtttaaggggaa

SEQ ID NO: 1628945 - DNA, 15 bp, Homo sapiens
acaagtttaagggga

SEQ ID NO: 1628946 - DNA, 15 bp, Homo sapiens
tacaagtttaagggg

SEQ ID NO: 1628947 - DNA, 15 bp, Homo sapiens
atacaagtttaaggg

SEQ ID NO: 1628948 - DNA, 15 bp, Homo sapiens
aatacaagtttaagg

SEQ ID NO: 1628949 - DNA, 15 bp, Homo sapiens
aaatacaagtttaag

SEQ ID NO: 1628950 - DNA, 15 bp, Homo sapiens
gaaatacaagtttaa

SEQ ID NO: 1628951 - DNA, 15 bp, Homo sapiens
ggaaatacaagttta

SEQ ID NO: 1628952 - DNA, 15 bp, Homo sapiens
aggaaatacaagttt

SEQ ID NO: 1628953 - DNA, 15 bp, Homo sapiens
aaggaaatacaagtt

SEQ ID NO: 1628954 - DNA, 15 bp, Homo sapiens
aaaggaaatacaagt

SEQ ID NO: 1628955 - DNA, 15 bp, Homo sapiens
gaaaggaaatacaag

SEQ ID NO: 1628956 - DNA, 15 bp, Homo sapiens
agaaaggaaatacaa

SEQ ID NO: 1628957 - DNA, 15 bp, Homo sapiens
aagaaaggaaataca

SEQ ID NO: 1628958 - DNA, 15 bp, Homo sapiens
gaagaaaggaaatac

SEQ ID NO: 1628959 - DNA, 15 bp, Homo sapiens
agaagaaaggaaata

SEQ ID NO: 1628960 - DNA, 15 bp, Homo sapiens
aagaagaaaggaaat

SEQ ID NO: 1628961 - DNA, 15 bp, Homo sapiens
agggaagaagaaagg

SEQ ID NO: 1628962 - DNA, 15 bp, Homo sapiens
gagggaagaagaaag

SEQ ID NO: 1628963 - DNA, 15 bp, Homo sapiens
ggagggaagaagaaa

SEQ ID NO: 1628964 - DNA, 15 bp, Homo sapiens
aggagggaagaagaa

SEQ ID NO: 1628965 - DNA, 15 bp, Homo sapiens
taggagggaagaaga

SEQ ID NO: 1628966 - DNA, 15 bp, Homo sapiens
ttaggagggaagaag

SEQ ID NO: 1628967 - DNA, 15 bp, Homo sapiens
tttaggagggaagaa

SEQ ID NO: 1628968 - DNA, 15 bp, Homo sapiens
ttttaggagggaaga

SEQ ID NO: 1628969 - DNA, 15 bp, Homo sapiens
attttaggagggaag

SEQ ID NO: 1628970 - DNA, 15 bp, Homo sapiens
aattttaggagggaa

SEQ ID NO: 1628971 - DNA, 15 bp, Homo sapiens
aaattttaggaggga

SEQ ID NO: 1628972 - DNA, 15 bp, Homo sapiens
aaaattttaggaggg

SEQ ID NO: 1628973 - DNA, 15 bp, Homo sapiens
taaaattttaggagg

SEQ ID NO: 1628974 - DNA, 15 bp, Homo sapiens
ataaaattttaggag

SEQ ID NO: 1628975 - DNA, 15 bp, Homo sapiens
gataaaattttagga

SEQ ID NO: 1628976 - DNA, 15 bp, Homo sapiens
agataaaattttagg

SEQ ID NO: 1628977 - DNA, 15 bp, Homo sapiens
tagataaaattttag

SEQ ID NO: 1628978 - DNA, 15 bp, Homo sapiens
ttagataaaatttta

SEQ ID NO: 1628979 - DNA, 15 bp, Homo sapiens
tttagataaaatttt

SEQ ID NO: 1628980 - DNA, 15 bp, Homo sapiens
atttagataaaattt

SEQ ID NO: 1628981 - DNA, 15 bp, Homo sapiens
catttagataaaatt

SEQ ID NO: 1628982 - DNA, 15 bp, Homo sapiens
tcatttagataaaat

SEQ ID NO: 1628983 - DNA, 15 bp, Homo sapiens
atcatttagataaaa

SEQ ID NO: 1628984 - DNA, 15 bp, Homo sapiens
tatcatttagataaa

SEQ ID NO: 1628985 - DNA, 15 bp, Homo sapiens
atatcatttagataa

SEQ ID NO: 1628986 - DNA, 15 bp, Homo sapiens
aatatcatttagata

SEQ ID NO: 1628987 - DNA, 15 bp, Homo sapiens
aaatatcatttagat

SEQ ID NO: 1628988 - DNA, 15 bp, Homo sapiens
taaatatcatttaga

SEQ ID NO: 1628989 - DNA, 15 bp, Homo sapiens
ataaatatcatttag

SEQ ID NO: 1628990 - DNA, 15 bp, Homo sapiens
tataaatatcattta

SEQ ID NO: 1628991 - DNA, 15 bp, Homo sapiens
atataaatatcattt

SEQ ID NO: 1628992 - DNA, 15 bp, Homo sapiens
aatataaatatcatt

SEQ ID NO: 1628993 - DNA, 15 bp, Homo sapiens
aaatataaatatcat

SEQ ID NO: 1628994 - DNA, 15 bp, Homo sapiens
caaatataaatatca

SEQ ID NO: 1628995 - DNA, 15 bp, Homo sapiens
tcaaatataaatatc

SEQ ID NO: 1628996 - DNA, 15 bp, Homo sapiens
atcaaatataaatat

SEQ ID NO: 1628997 - DNA, 15 bp, Homo sapiens
catcaaatataaata

SEQ ID NO: 1628998 - DNA, 15 bp, Homo sapiens
gcatcaaatataaat

SEQ ID NO: 1628999 - DNA, 15 bp, Homo sapiens
agcatcaaatataaa

SEQ ID NO: 1629000 - DNA, 15 bp, Homo sapiens
aagcatcaaatataa

SEQ ID NO: 1629001 - DNA, 15 bp, Homo sapiens
aaagcatcaaatata

SEQ ID NO: 1629002 - DNA, 15 bp, Homo sapiens
aaaagcatcaaatat

SEQ ID NO: 1629003 - DNA, 15 bp, Homo sapiens
taaaagcatcaaata

SEQ ID NO: 1629004 - DNA, 15 bp, Homo sapiens
ttaaaagcatcaaat

SEQ ID NO: 1629005 - DNA, 15 bp, Homo sapiens
cttaaaagcatcaaa

SEQ ID NO: 1629006 - DNA, 15 bp, Homo sapiens
gcttaaaagcatcaa

SEQ ID NO: 1629007 - DNA, 15 bp, Homo sapiens
ggcttaaaagcatca

SEQ ID NO: 1629008 - DNA, 15 bp, Homo sapiens
aggcttaaaagcatc

SEQ ID NO: 1629009 - DNA, 15 bp, Homo sapiens
aaggcttaaaagcat

SEQ ID NO: 1629010 - DNA, 15 bp, Homo sapiens
aaaggcttaaaagca

SEQ ID NO: 1629011 - DNA, 15 bp, Homo sapiens
aaaaggcttaaaagc

SEQ ID NO: 1629012 - DNA, 15 bp, Homo sapiens
taaaaggcttaaaag

SEQ ID NO: 1629013 - DNA, 15 bp, Homo sapiens
ataaaaggcttaaaa

SEQ ID NO: 1629014 - DNA, 15 bp, Homo sapiens
aataaaaggcttaaa

SEQ ID NO: 1629015 - DNA, 15 bp, Homo sapiens
taataaaaggcttaa

SEQ ID NO: 1629016 - DNA, 15 bp, Homo sapiens
ttaataaaaggctta

SEQ ID NO: 1629017 - DNA, 15 bp, Homo sapiens
attaataaaaggctt

SEQ ID NO: 1629018 - DNA, 15 bp, Homo sapiens
gattaataaaaggct

SEQ ID NO: 1629019 - DNA, 15 bp, Homo sapiens
tgattaataaaaggc

SEQ ID NO: 1629020 - DNA, 15 bp, Homo sapiens
gtgattaataaaagg

SEQ ID NO: 1629021 - DNA, 15 bp, Homo sapiens
agtgattaataaaag

SEQ ID NO: 1629022 - DNA, 15 bp, Homo sapiens
gagtgattaataaaa

SEQ ID NO: 1629023 - DNA, 15 bp, Homo sapiens
ggagtgattaataaa

SEQ ID NO: 1629024 - DNA, 15 bp, Homo sapiens
aggagtgattaataa

SEQ ID NO: 1629025 - DNA, 15 bp, Homo sapiens
taggagtgattaata

SEQ ID NO: 1629026 - DNA, 15 bp, Homo sapiens
ataggagtgattaat

SEQ ID NO: 1629027 - DNA, 15 bp, Homo sapiens
tataggagtgattaa

SEQ ID NO: 1629028 - DNA, 15 bp, Homo sapiens
gtataggagtgatta

SEQ ID NO: 1629029 - DNA, 15 bp, Homo sapiens
agtataggagtgatt

SEQ ID NO: 1629030 - DNA, 15 bp, Homo sapiens
aagtataggagtgat

SEQ ID NO: 1629031 - DNA, 15 bp, Homo sapiens
caagtataggagtga

SEQ ID NO: 1629032 - DNA, 15 bp, Homo sapiens
gcaagtataggagtg

SEQ ID NO: 1629033 - DNA, 15 bp, Homo sapiens
ggcaagtataggagt

SEQ ID NO: 1629034 - DNA, 15 bp, Homo sapiens
aggcaagtataggag

SEQ ID NO: 1629035 - DNA, 15 bp, Homo sapiens
caggcaagtatagga

SEQ ID NO: 1629036 - DNA, 15 bp, Homo sapiens
gcaggcaagtatagg

SEQ ID NO: 1629037 - DNA, 15 bp, Homo sapiens
tgcaggcaagtatag

SEQ ID NO: 1629038 - DNA, 15 bp, Homo sapiens
ttgcaggcaagtata

SEQ ID NO: 1629039 - DNA, 15 bp, Homo sapiens
gttgcaggcaagtat

SEQ ID NO: 1629040 - DNA, 15 bp, Homo sapiens
tgttgcaggcaagta

SEQ ID NO: 1629041 - DNA, 15 bp, Homo sapiens
atgttgcaggcaagt

SEQ ID NO: 1629042 - DNA, 15 bp, Homo sapiens
tatgttgcaggcaag

SEQ ID NO: 1629043 - DNA, 15 bp, Homo sapiens
ttatgttgcaggcaa

SEQ ID NO: 1629044 - DNA, 15 bp, Homo sapiens
tttatgttgcaggca

SEQ ID NO: 1629045 - DNA, 15 bp, Homo sapiens
atttatgttgcaggc

SEQ ID NO: 1629046 - DNA, 15 bp, Homo sapiens
tatttatgttgcagg

SEQ ID NO: 1629047 - DNA, 15 bp, Homo sapiens
atatttatgttgcag

SEQ ID NO: 1629048 - DNA, 15 bp, Homo sapiens
tatatttatgttgca

SEQ ID NO: 1629049 - DNA, 15 bp, Homo sapiens
atatatttatgttgc

SEQ ID NO: 1629050 - DNA, 15 bp, Homo sapiens
tatatatttatgttg

SEQ ID NO: 1629051 - DNA, 15 bp, Homo sapiens
ttatatatttatgtt

SEQ ID NO: 1629052 - DNA, 15 bp, Homo sapiens
cttatatatttatgt

SEQ ID NO: 1629053 - DNA, 15 bp, Homo sapiens
acttatatatttatg

SEQ ID NO: 1629054 - DNA, 15 bp, Homo sapiens
aacttatatatttat

SEQ ID NO: 1629055 - DNA, 15 bp, Homo sapiens
caacttatatattta

SEQ ID NO: 1629056 - DNA, 15 bp, Homo sapiens
tcaacttatatattt

SEQ ID NO: 1629057 - DNA, 15 bp, Homo sapiens
ttcaacttatatatt

SEQ ID NO: 1629058 - DNA, 15 bp, Homo sapiens
cttcaacttatatat

SEQ ID NO: 1629059 - DNA, 15 bp, Homo sapiens
gcttcaacttatata

SEQ ID NO: 1629060 - DNA, 15 bp, Homo sapiens
tgcttcaacttatat

SEQ ID NO: 1629061 - DNA, 15 bp, Homo sapiens
ttgcttcaacttata

SEQ ID NO: 1629062 - DNA, 15 bp, Homo sapiens
tttgcttcaacttat

SEQ ID NO: 1629063 - DNA, 15 bp, Homo sapiens
gtttgcttcaactta

SEQ ID NO: 1629064 - DNA, 15 bp, Homo sapiens
agtttgcttcaactt

SEQ ID NO: 1629065 - DNA, 15 bp, Homo sapiens
aagtttgcttcaact

SEQ ID NO: 1629066 - DNA, 15 bp, Homo sapiens
aaagtttgcttcaac

SEQ ID NO: 1629067 - DNA, 15 bp, Homo sapiens
aaaagtttgcttcaa

SEQ ID NO: 1629068 - DNA, 15 bp, Homo sapiens
aaaaagtttgcttca

SEQ ID NO: 1629069 - DNA, 15 bp, Homo sapiens
aaaaaagtttgcttc

SEQ ID NO: 1629070 - DNA, 15 bp, Homo sapiens
aaaaaaagtttgctt

SEQ ID NO: 1629071 - DNA, 15 bp, Homo sapiens
aaaaaaaagtttgct

SEQ ID NO: 1629072 - DNA, 15 bp, Homo sapiens
aaaaaaaaagtttgc

SEQ ID NO: 1629073 - DNA, 15 bp, Homo sapiens
aaaaaaaaaagtttg

SEQ ID NO: 1629074 - DNA, 15 bp, Homo sapiens
aaaaaaaaaaagttt

SEQ ID NO: 1629075 - DNA, 15 bp, Homo sapiens
taaaaaaaaaaagtt

SEQ ID NO: 1629076 - DNA, 15 bp, Homo sapiens
ataaaaaaaaaaagt

SEQ ID NO: 1629077 - DNA, 15 bp, Homo sapiens
aataaaaaaaaaaag

SEQ ID NO: 1629078 - DNA, 15 bp, Homo sapiens
aaataaaaaaaaaaa

SEQ ID NO: 1629079 - DNA, 15 bp, Homo sapiens
gaaataaaaaaaaaa

SEQ ID NO: 1629080 - DNA, 15 bp, Homo sapiens
agaaataaaaaaaaa

SEQ ID NO: 1629081 - DNA, 15 bp, Homo sapiens
aagaaataaaaaaaa

SEQ ID NO: 1629082 - DNA, 15 bp, Homo sapiens
caagaaataaaaaaa

SEQ ID NO: 1629083 - DNA, 15 bp, Homo sapiens
acaagaaataaaaaa

SEQ ID NO: 1629084 - DNA, 15 bp, Homo sapiens
cacaagaaataaaaa

SEQ ID NO: 1629085 - DNA, 15 bp, Homo sapiens
tcacaagaaataaaa

SEQ ID NO: 1629086 - DNA, 15 bp, Homo sapiens
gtcacaagaaataaa

SEQ ID NO: 1629087 - DNA, 15 bp, Homo sapiens
ggtcacaagaaataa

SEQ ID NO: 1629088 - DNA, 15 bp, Homo sapiens
tggtcacaagaaata

SEQ ID NO: 1629089 - DNA, 15 bp, Homo sapiens
atggtcacaagaaat

SEQ ID NO: 1629090 - DNA, 15 bp, Homo sapiens
gatggtcacaagaaa

SEQ ID NO: 1629091 - DNA, 15 bp, Homo sapiens
tgatggtcacaagaa

SEQ ID NO: 1629092 - DNA, 15 bp, Homo sapiens
ttgatggtcacaaga

SEQ ID NO: 1629093 - DNA, 15 bp, Homo sapiens
cttgatggtcacaag

SEQ ID NO: 1629094 - DNA, 15 bp, Homo sapiens
ccttgatggtcacaa

SEQ ID NO: 1629095 - DNA, 15 bp, Homo sapiens
cccttgatggtcaca

SEQ ID NO: 1629096 - DNA, 15 bp, Homo sapiens
acccttgatggtcac

SEQ ID NO: 1629097 - DNA, 15 bp, Homo sapiens
tacccttgatggtca

SEQ ID NO: 1629098 - DNA, 15 bp, Homo sapiens
ttacccttgatggtc

SEQ ID NO: 1629099 - DNA, 15 bp, Homo sapiens
tttacccttgatggt

SEQ ID NO: 1629100 - DNA, 15 bp, Homo sapiens
atttacccttgatgg

SEQ ID NO: 1629101 - DNA, 15 bp, Homo sapiens
aatttacccttgatg

SEQ ID NO: 1629102 - DNA, 15 bp, Homo sapiens
aaatttacccttgat

SEQ ID NO: 1629103 - DNA, 15 bp, Homo sapiens
aaaatttacccttga

SEQ ID NO: 1629104 - DNA, 15 bp, Homo sapiens
aaaaatttacccttg

SEQ ID NO: 1629105 - DNA, 15 bp, Homo sapiens
aaaaaatttaccctt

SEQ ID NO: 1629106 - DNA, 15 bp, Homo sapiens
aaaaaaatttaccct

SEQ ID NO: 1629107 - DNA, 15 bp, Homo sapiens
taaaaaaatttaccc

SEQ ID NO: 1629108 - DNA, 15 bp, Homo sapiens
ctaaaaaaatttacc

SEQ ID NO: 1629109 - DNA, 15 bp, Homo sapiens
cctaaaaaaatttac

SEQ ID NO: 1629110 - DNA, 15 bp, Homo sapiens
acctaaaaaaattta

SEQ ID NO: 1629111 - DNA, 15 bp, Homo sapiens
gacctaaaaaaattt

SEQ ID NO: 1629112 - DNA, 15 bp, Homo sapiens
agacctaaaaaaatt

SEQ ID NO: 1629113 - DNA, 15 bp, Homo sapiens
cagacctaaaaaaat

SEQ ID NO: 1629114 - DNA, 15 bp, Homo sapiens
ccagacctaaaaaaa

SEQ ID NO: 1629115 - DNA, 15 bp, Homo sapiens
cccagacctaaaaaa

SEQ ID NO: 1629116 - DNA, 15 bp, Homo sapiens
ccccagacctaaaaa

SEQ ID NO: 1629117 - DNA, 15 bp, Homo sapiens
gccccagacctaaaa

SEQ ID NO: 1629118 - DNA, 15 bp, Homo sapiens
agccccagacctaaa

SEQ ID NO: 1629119 - DNA, 15 bp, Homo sapiens
cagccccagacctaa

SEQ ID NO: 1629120 - DNA, 15 bp, Homo sapiens
gcagccccagaccta

SEQ ID NO: 1629121 - DNA, 15 bp, Homo sapiens
ggcagccccagacct

SEQ ID NO: 1629122 - DNA, 15 bp, Homo sapiens
tggcagccccagacc

SEQ ID NO: 1629123 - DNA, 15 bp, Homo sapiens
atggcagccccagac

SEQ ID NO: 1629124 - DNA, 15 bp, Homo sapiens
tatggcagccccaga

SEQ ID NO: 1629125 - DNA, 15 bp, Homo sapiens
ttatggcagccccag

SEQ ID NO: 1629126 - DNA, 15 bp, Homo sapiens
gttatggcagcccca

SEQ ID NO: 1629127 - DNA, 15 bp, Homo sapiens
tgttatggcagcccc

SEQ ID NO: 1629128 - DNA, 15 bp, Homo sapiens
ttgttatggcagccc

SEQ ID NO: 1629129 - DNA, 15 bp, Homo sapiens
tttgttatggcagcc

SEQ ID NO: 1629130 - DNA, 15 bp, Homo sapiens
ttttgttatggcagc

SEQ ID NO: 1629131 - DNA, 15 bp, Homo sapiens
attttgttatggcag

SEQ ID NO: 1629132 - DNA, 15 bp, Homo sapiens
tattttgttatggca

SEQ ID NO: 1629133 - DNA, 15 bp, Homo sapiens
gtattttgttatggc

SEQ ID NO: 1629134 - DNA, 15 bp, Homo sapiens
ggtattttgttatgg

SEQ ID NO: 1629135 - DNA, 15 bp, Homo sapiens
tggtattttgttatg

SEQ ID NO: 1629136 - DNA, 15 bp, Homo sapiens
gatggtattttgtta

SEQ ID NO: 1629137 - DNA, 15 bp, Homo sapiens
tgatggtattttgtt

SEQ ID NO: 1629138 - DNA, 15 bp, Homo sapiens
ttgatggtattttgt

SEQ ID NO: 1629139 - DNA, 15 bp, Homo sapiens
cttgatggtattttg

SEQ ID NO: 1629140 - DNA, 15 bp, Homo sapiens
ccttgatggtatttt

SEQ ID NO: 1629141 - DNA, 15 bp, Homo sapiens
gccttgatggtattt

SEQ ID NO: 1629142 - DNA, 15 bp, Homo sapiens
ggccttgatggtatt

SEQ ID NO: 1629143 - DNA, 15 bp, Homo sapiens
cggccttgatggtat

SEQ ID NO: 1629144 - DNA, 15 bp, Homo sapiens
ccggccttgatggta

SEQ ID NO: 1629145 - DNA, 15 bp, Homo sapiens
cccggccttgatggt

SEQ ID NO: 1629146 - DNA, 15 bp, Homo sapiens
gcccggccttgatgg

SEQ ID NO: 1629147 - DNA, 15 bp, Homo sapiens
cgcccggccttgatg

SEQ ID NO: 1629148 - DNA, 15 bp, Homo sapiens
acgcccggccttgat

SEQ ID NO: 1629149 - DNA, 15 bp, Homo sapiens
cacgcccggccttga

SEQ ID NO: 1629150 - DNA, 15 bp, Homo sapiens
ccacgcccggccttg

SEQ ID NO: 1629151 - DNA, 15 bp, Homo sapiens
caccacgcccggcct

SEQ ID NO: 1629152 - DNA, 15 bp, Homo sapiens
gtgccaccacgcccg

SEQ ID NO: 1629153 - DNA, 15 bp, Homo sapiens
gtgtgccaccacgcc

SEQ ID NO: 1629154 - DNA, 15 bp, Homo sapiens
gggctgggattacag

SEQ ID NO: 1629155 - DNA, 15 bp, Homo sapiens
agggctgggattaca

SEQ ID NO: 1629156 - DNA, 15 bp, Homo sapiens
cagggctgggattac

SEQ ID NO: 1629157 - DNA, 15 bp, Homo sapiens
acagggctgggatta

SEQ ID NO: 1629158 - DNA, 15 bp, Homo sapiens
cacagggctgggatt

SEQ ID NO: 1629159 - DNA, 15 bp, Homo sapiens
ccacagggctgggat

SEQ ID NO: 1629160 - DNA, 15 bp, Homo sapiens
cccacagggctggga

SEQ ID NO: 1629161 - DNA, 15 bp, Homo sapiens
tcccacagggctggg

SEQ ID NO: 1629162 - DNA, 15 bp, Homo sapiens
ctcccacagggctgg

SEQ ID NO: 1629163 - DNA, 15 bp, Homo sapiens
cctcccacagggctg

SEQ ID NO: 1629164 - DNA, 15 bp, Homo sapiens
gcctcccacagggct

SEQ ID NO: 1629165 - DNA, 15 bp, Homo sapiens
tggcctcccacaggg

SEQ ID NO: 1629166 - DNA, 15 bp, Homo sapiens
ttggcctcccacagg

SEQ ID NO: 1629167 - DNA, 15 bp, Homo sapiens
cttggcctcccacag

SEQ ID NO: 1629168 - DNA, 15 bp, Homo sapiens
tcttggcctcccaca

SEQ ID NO: 1629169 - DNA, 15 bp, Homo sapiens
gtcttggcctcccac

SEQ ID NO: 1629170 - DNA, 15 bp, Homo sapiens
ggtcttggcctccca

SEQ ID NO: 1629171 - DNA, 15 bp, Homo sapiens
cggtcttggcctccc

SEQ ID NO: 1629172 - DNA, 15 bp, Homo sapiens
ccggtcttggcctcc

SEQ ID NO: 1629173 - DNA, 15 bp, Homo sapiens
tccggtcttggcctc

SEQ ID NO: 1629174 - DNA, 15 bp, Homo sapiens
ctccggtcttggcct

SEQ ID NO: 1629175 - DNA, 15 bp, Homo sapiens
cctccggtcttggcc

SEQ ID NO: 1629176 - DNA, 15 bp, Homo sapiens
tcctccggtcttggc

SEQ ID NO: 1629177 - DNA, 15 bp, Homo sapiens
atcctccggtcttgg

SEQ ID NO: 1629178 - DNA, 15 bp, Homo sapiens
aatcctccggtcttg

SEQ ID NO: 1629179 - DNA, 15 bp, Homo sapiens
caatcctccggtctt

SEQ ID NO: 1629180 - DNA, 15 bp, Homo sapiens
gcaatcctccggtct

SEQ ID NO: 1629181 - DNA, 15 bp, Homo sapiens
agcaatcctccggtc

SEQ ID NO: 1629182 - DNA, 15 bp, Homo sapiens
aagcaatcctccggt

SEQ ID NO: 1629183 - DNA, 15 bp, Homo sapiens
caagcaatcctccgg

SEQ ID NO: 1629184 - DNA, 15 bp, Homo sapiens
tcaagcaatcctccg

SEQ ID NO: 1629185 - DNA, 15 bp, Homo sapiens
atcaagcaatcctcc

SEQ ID NO: 1629186 - DNA, 15 bp, Homo sapiens
catcaagcaatcctc

SEQ ID NO: 1629187 - DNA, 15 bp, Homo sapiens
gcatcaagcaatcct

SEQ ID NO: 1629188 - DNA, 15 bp, Homo sapiens
ggcatcaagcaatcc

SEQ ID NO: 1629189 - DNA, 15 bp, Homo sapiens
tggcatcaagcaatc

SEQ ID NO: 1629190 - DNA, 15 bp, Homo sapiens
ctggcatcaagcaat

SEQ ID NO: 1629191 - DNA, 15 bp, Homo sapiens
cctggcatcaagcaa

SEQ ID NO: 1629192 - DNA, 15 bp, Homo sapiens
tcctggcatcaagca

SEQ ID NO: 1629193 - DNA, 15 bp, Homo sapiens
ctcctggcatcaagc

SEQ ID NO: 1629194 - DNA, 15 bp, Homo sapiens
actcctggcatcaag

SEQ ID NO: 1629195 - DNA, 15 bp, Homo sapiens
aactcctggcatcaa

SEQ ID NO: 1629196 - DNA, 15 bp, Homo sapiens
gaactcctggcatca

SEQ ID NO: 1629197 - DNA, 15 bp, Homo sapiens
tgaactcctggcatc

SEQ ID NO: 1629198 - DNA, 15 bp, Homo sapiens
ttgaactcctggcat

SEQ ID NO: 1629199 - DNA, 15 bp, Homo sapiens
cttgaactcctggca

SEQ ID NO: 1629200 - DNA, 15 bp, Homo sapiens
actagtcttgaactc

SEQ ID NO: 1629201 - DNA, 15 bp, Homo sapiens
gactagtcttgaact

SEQ ID NO: 1629202 - DNA, 15 bp, Homo sapiens
agactagtcttgaac

SEQ ID NO: 1629203 - DNA, 15 bp, Homo sapiens
cagactagtcttgaa

SEQ ID NO: 1629204 - DNA, 15 bp, Homo sapiens
ccagactagtcttga

SEQ ID NO: 1629205 - DNA, 15 bp, Homo sapiens
cccagactagtcttg

SEQ ID NO: 1629206 - DNA, 15 bp, Homo sapiens
acccagactagtctt

SEQ ID NO: 1629207 - DNA, 15 bp, Homo sapiens
tacccagactagtct

SEQ ID NO: 1629208 - DNA, 15 bp, Homo sapiens
ttacccagactagtc

SEQ ID NO: 1629209 - DNA, 15 bp, Homo sapiens
attacccagactagt

SEQ ID NO: 1629210 - DNA, 15 bp, Homo sapiens
tattacccagactag

SEQ ID NO: 1629211 - DNA, 15 bp, Homo sapiens
atattacccagacta

SEQ ID NO: 1629212 - DNA, 15 bp, Homo sapiens
catattacccagact

SEQ ID NO: 1629213 - DNA, 15 bp, Homo sapiens
ccatattacccagac

SEQ ID NO: 1629214 - DNA, 15 bp, Homo sapiens
accatattacccaga

SEQ ID NO: 1629215 - DNA, 15 bp, Homo sapiens
caccatattacccag

SEQ ID NO: 1629216 - DNA, 15 bp, Homo sapiens
tcaccatattaccca

SEQ ID NO: 1629217 - DNA, 15 bp, Homo sapiens
ctcaccatattaccc

SEQ ID NO: 1629218 - DNA, 15 bp, Homo sapiens
tctcaccatattacc

SEQ ID NO: 1629219 - DNA, 15 bp, Homo sapiens
gtctcaccatattac

SEQ ID NO: 1629220 - DNA, 15 bp, Homo sapiens
ggtctcaccatatta

SEQ ID NO: 1629221 - DNA, 15 bp, Homo sapiens
agggtctcaccatat

SEQ ID NO: 1629222 - DNA, 15 bp, Homo sapiens
gagggtctcaccata

SEQ ID NO: 1629223 - DNA, 15 bp, Homo sapiens
tgagggtctcaccat

SEQ ID NO: 1629224 - DNA, 15 bp, Homo sapiens
atgagggtctcacca

SEQ ID NO: 1629225 - DNA, 15 bp, Homo sapiens
gatgagggtctcacc

SEQ ID NO: 1629226 - DNA, 15 bp, Homo sapiens
tgatgagggtctcac

SEQ ID NO: 1629227 - DNA, 15 bp, Homo sapiens
ttgatgagggtctca

SEQ ID NO: 1629228 - DNA, 15 bp, Homo sapiens
attgatgagggtctc

SEQ ID NO: 1629229 - DNA, 15 bp, Homo sapiens
tattgatgagggtct

SEQ ID NO: 1629230 - DNA, 15 bp, Homo sapiens
gtattgatgagggtc

SEQ ID NO: 1629231 - DNA, 15 bp, Homo sapiens
tgtattgatgagggt

SEQ ID NO: 1629232 - DNA, 15 bp, Homo sapiens
ttgtattgatgaggg

SEQ ID NO: 1629233 - DNA, 15 bp, Homo sapiens
tttgtattgatgagg

SEQ ID NO: 1629234 - DNA, 15 bp, Homo sapiens
ttttgtattgatgag

SEQ ID NO: 1629235 - DNA, 15 bp, Homo sapiens
tttttgtattgatga

SEQ ID NO: 1629236 - DNA, 15 bp, Homo sapiens
ttttttgtattgatg

SEQ ID NO: 1629237 - DNA, 15 bp, Homo sapiens
tttttttgtattgat

SEQ ID NO: 1629238 - DNA, 15 bp, Homo sapiens
ttttttttgtattga

SEQ ID NO: 1629239 - DNA, 15 bp, Homo sapiens
attttttttgtattg

SEQ ID NO: 1629240 - DNA, 15 bp, Homo sapiens
tattttttttgtatt

SEQ ID NO: 1629241 - DNA, 15 bp, Homo sapiens
gtattttttttgtat

SEQ ID NO: 1629242 - DNA, 15 bp, Homo sapiens
tgtattttttttgta

SEQ ID NO: 1629243 - DNA, 15 bp, Homo sapiens
ttgtattttttttgt

SEQ ID NO: 1629244 - DNA, 15 bp, Homo sapiens
tttgtattttttttg

SEQ ID NO: 1629245 - DNA, 15 bp, Homo sapiens
ccaccaccacgcctg

SEQ ID NO: 1629246 - DNA, 15 bp, Homo sapiens
cccaccaccacgcct

SEQ ID NO: 1629247 - DNA, 15 bp, Homo sapiens
gcccaccaccacgcc

SEQ ID NO: 1629248 - DNA, 15 bp, Homo sapiens
cgcccaccaccacgc

SEQ ID NO: 1629249 - DNA, 15 bp, Homo sapiens
gcgcccaccaccacg

SEQ ID NO: 1629250 - DNA, 15 bp, Homo sapiens
ggcgcccaccaccac

SEQ ID NO: 1629251 - DNA, 15 bp, Homo sapiens
cacaggcgcccacca

SEQ ID NO: 1629252 - DNA, 15 bp, Homo sapiens
ccacaggcgcccacc

SEQ ID NO: 1629253 - DNA, 15 bp, Homo sapiens
accacaggcgcccac

SEQ ID NO: 1629254 - DNA, 15 bp, Homo sapiens
gaccacaggcgccca

SEQ ID NO: 1629255 - DNA, 15 bp, Homo sapiens
ggaccacaggcgccc

SEQ ID NO: 1629256 - DNA, 15 bp, Homo sapiens
gggaccacaggcgcc

SEQ ID NO: 1629257 - DNA, 15 bp, Homo sapiens
tgggaccacaggcgc

SEQ ID NO: 1629258 - DNA, 15 bp, Homo sapiens
ttgggaccacaggcg

SEQ ID NO: 1629259 - DNA, 15 bp, Homo sapiens
gttgggaccacaggc

SEQ ID NO: 1629260 - DNA, 15 bp, Homo sapiens
agttgggaccacagg

SEQ ID NO: 1629261 - DNA, 15 bp, Homo sapiens
tagttgggaccacag

SEQ ID NO: 1629262 - DNA, 15 bp, Homo sapiens
gtagttgggaccaca

SEQ ID NO: 1629263 - DNA, 15 bp, Homo sapiens
agtagttgggaccac

SEQ ID NO: 1629264 - DNA, 15 bp, Homo sapiens
gagtagttgggacca

SEQ ID NO: 1629265 - DNA, 15 bp, Homo sapiens
tgagtagttgggacc

SEQ ID NO: 1629266 - DNA, 15 bp, Homo sapiens
ctgagtagttgggac

SEQ ID NO: 1629267 - DNA, 15 bp, Homo sapiens
tacctcagcctcctg

SEQ ID NO: 1629268 - DNA, 15 bp, Homo sapiens
ctacctcagcctcct

SEQ ID NO: 1629269 - DNA, 15 bp, Homo sapiens
cctacctcagcctcc

SEQ ID NO: 1629270 - DNA, 15 bp, Homo sapiens
tcctacctcagcctc

SEQ ID NO: 1629271 - DNA, 15 bp, Homo sapiens
atcctacctcagcct

SEQ ID NO: 1629272 - DNA, 15 bp, Homo sapiens
aatcctacctcagcc

SEQ ID NO: 1629273 - DNA, 15 bp, Homo sapiens
caatcctacctcagc

SEQ ID NO: 1629274 - DNA, 15 bp, Homo sapiens
gcaatcctacctcag

SEQ ID NO: 1629275 - DNA, 15 bp, Homo sapiens
agcaatcctacctca

SEQ ID NO: 1629276 - DNA, 15 bp, Homo sapiens
cagcaatcctacctc

SEQ ID NO: 1629277 - DNA, 15 bp, Homo sapiens
ccagcaatcctacct

SEQ ID NO: 1629278 - DNA, 15 bp, Homo sapiens
tccagcaatcctacc

SEQ ID NO: 1629279 - DNA, 15 bp, Homo sapiens
ttccagcaatcctac

SEQ ID NO: 1629280 - DNA, 15 bp, Homo sapiens
cttccagcaatccta

SEQ ID NO: 1629281 - DNA, 15 bp, Homo sapiens
gcttccagcaatcct

SEQ ID NO: 1629282 - DNA, 15 bp, Homo sapiens
ggcttccagcaatcc

SEQ ID NO: 1629283 - DNA, 15 bp, Homo sapiens
tggcttccagcaatc

SEQ ID NO: 1629284 - DNA, 15 bp, Homo sapiens
ttggcttccagcaat

SEQ ID NO: 1629285 - DNA, 15 bp, Homo sapiens
cttggcttccagcaa

SEQ ID NO: 1629286 - DNA, 15 bp, Homo sapiens
tcttggcttccagca

SEQ ID NO: 1629287 - DNA, 15 bp, Homo sapiens
ctcttggcttccagc

SEQ ID NO: 1629288 - DNA, 15 bp, Homo sapiens
cctcttggcttccag

SEQ ID NO: 1629289 - DNA, 15 bp, Homo sapiens
acctcttggcttcca

SEQ ID NO: 1629290 - DNA, 15 bp, Homo sapiens
aacctcttggcttcc

SEQ ID NO: 1629291 - DNA, 15 bp, Homo sapiens
caacctcttggcttc

SEQ ID NO: 1629292 - DNA, 15 bp, Homo sapiens
tcaacctcttggctt

SEQ ID NO: 1629293 - DNA, 15 bp, Homo sapiens
ctcaacctcttggct

SEQ ID NO: 1629294 - DNA, 15 bp, Homo sapiens
cctcaacctcttggc

SEQ ID NO: 1629295 - DNA, 15 bp, Homo sapiens
gcctcaacctcttgg

SEQ ID NO: 1629296 - DNA, 15 bp, Homo sapiens
agcctcaacctcttg

SEQ ID NO: 1629297 - DNA, 15 bp, Homo sapiens
atgatcacagctcac

SEQ ID NO: 1629298 - DNA, 15 bp, Homo sapiens
catgatcacagctca

SEQ ID NO: 1629299 - DNA, 15 bp, Homo sapiens
gcatgatcacagctc

SEQ ID NO: 1629300 - DNA, 15 bp, Homo sapiens
ggcatgatcacagct

SEQ ID NO: 1629301 - DNA, 15 bp, Homo sapiens
tggcatgatcacagc

SEQ ID NO: 1629302 - DNA, 15 bp, Homo sapiens
gtggcatgatcacag

SEQ ID NO: 1629303 - DNA, 15 bp, Homo sapiens
agtggcatgatcaca

SEQ ID NO: 1629304 - DNA, 15 bp, Homo sapiens
cagtggcatgatcac

SEQ ID NO: 1629305 - DNA, 15 bp, Homo sapiens
gcaggctggagtgca

SEQ ID NO: 1629306 - DNA, 15 bp, Homo sapiens
cgcaggctggagtgc

SEQ ID NO: 1629307 - DNA, 15 bp, Homo sapiens
tcgcaggctggagtg

SEQ ID NO: 1629308 - DNA, 15 bp, Homo sapiens
ctcgcaggctggagt

SEQ ID NO: 1629309 - DNA, 15 bp, Homo sapiens
tctcgcaggctggag

SEQ ID NO: 1629310 - DNA, 15 bp, Homo sapiens
gtctcgcaggctgga

SEQ ID NO: 1629311 - DNA, 15 bp, Homo sapiens
tgtctcgcaggctgg

SEQ ID NO: 1629312 - DNA, 15 bp, Homo sapiens
ctgtctcgcaggctg

SEQ ID NO: 1629313 - DNA, 15 bp, Homo sapiens
tctgtctcgcaggct

SEQ ID NO: 1629314 - DNA, 15 bp, Homo sapiens
ctctgtctcgcaggc

SEQ ID NO: 1629315 - DNA, 15 bp, Homo sapiens
actctgtctcgcagg

SEQ ID NO: 1629316 - DNA, 15 bp, Homo sapiens
aaatatcaaaagaga

SEQ ID NO: 1629317 - DNA, 15 bp, Homo sapiens
caaatatcaaaagag

SEQ ID NO: 1629318 - DNA, 15 bp, Homo sapiens
acaaatatcaaaaga

SEQ ID NO: 1629319 - DNA, 15 bp, Homo sapiens
aacaaatatcaaaag

SEQ ID NO: 1629320 - DNA, 15 bp, Homo sapiens
caacaaatatcaaaa

SEQ ID NO: 1629321 - DNA, 15 bp, Homo sapiens
tcaacaaatatcaaa

SEQ ID NO: 1629322 - DNA, 15 bp, Homo sapiens
atcaacaaatatcaa

SEQ ID NO: 1629323 - DNA, 15 bp, Homo sapiens
aatcaacaaatatca

SEQ ID NO: 1629324 - DNA, 15 bp, Homo sapiens
aaatcaacaaatatc

SEQ ID NO: 1629325 - DNA, 15 bp, Homo sapiens
taaatcaacaaatat

SEQ ID NO: 1629326 - DNA, 15 bp, Homo sapiens
ttaaatcaacaaata

SEQ ID NO: 1629327 - DNA, 15 bp, Homo sapiens
tttaaatcaacaaat

SEQ ID NO: 1629328 - DNA, 15 bp, Homo sapiens
atttaaatcaacaaa

SEQ ID NO: 1629329 - DNA, 15 bp, Homo sapiens
aatttaaatcaacaa

SEQ ID NO: 1629330 - DNA, 15 bp, Homo sapiens
gaatttaaatcaaca

SEQ ID NO: 1629331 - DNA, 15 bp, Homo sapiens
agaatttaaatcaac

SEQ ID NO: 1629332 - DNA, 15 bp, Homo sapiens
cagaatttaaatcaa

SEQ ID NO: 1629333 - DNA, 15 bp, Homo sapiens
acagaatttaaatca

SEQ ID NO: 1629334 - DNA, 15 bp, Homo sapiens
aacagaatttaaatc

SEQ ID NO: 1629335 - DNA, 15 bp, Homo sapiens
aaacagaatttaaat

SEQ ID NO: 1629336 - DNA, 15 bp, Homo sapiens
aaaacagaatttaaa

SEQ ID NO: 1629337 - DNA, 15 bp, Homo sapiens
taaaacagaatttaa

SEQ ID NO: 1629338 - DNA, 15 bp, Homo sapiens
ataaaacagaattta

SEQ ID NO: 1629339 - DNA, 15 bp, Homo sapiens
gataaaacagaattt

SEQ ID NO: 1629340 - DNA, 15 bp, Homo sapiens
tgataaaacagaatt

SEQ ID NO: 1629341 - DNA, 15 bp, Homo sapiens
ctgataaaacagaat

SEQ ID NO: 1629342 - DNA, 15 bp, Homo sapiens
tctgataaaacagaa

SEQ ID NO: 1629343 - DNA, 15 bp, Homo sapiens
ctctgataaaacaga

SEQ ID NO: 1629344 - DNA, 15 bp, Homo sapiens
cctctgataaaacag

SEQ ID NO: 1629345 - DNA, 15 bp, Homo sapiens
gcctctgataaaaca

SEQ ID NO: 1629346 - DNA, 15 bp, Homo sapiens
agcctctgataaaac

SEQ ID NO: 1629347 - DNA, 15 bp, Homo sapiens
tagcctctgataaaa

SEQ ID NO: 1629348 - DNA, 15 bp, Homo sapiens
ctagcctctgataaa

SEQ ID NO: 1629349 - DNA, 15 bp, Homo sapiens
cctagcctctgataa

SEQ ID NO: 1629350 - DNA, 15 bp, Homo sapiens
tcctagcctctgata

SEQ ID NO: 1629351 - DNA, 15 bp, Homo sapiens
atcctagcctctgat

SEQ ID NO: 1629352 - DNA, 15 bp, Homo sapiens
aatcctagcctctga

SEQ ID NO: 1629353 - DNA, 15 bp, Homo sapiens
caatcctagcctctg

SEQ ID NO: 1629354 - DNA, 15 bp, Homo sapiens
gcaatcctagcctct

SEQ ID NO: 1629355 - DNA, 15 bp, Homo sapiens
tgcaatcctagcctc

SEQ ID NO: 1629356 - DNA, 15 bp, Homo sapiens
ttgcaatcctagcct

SEQ ID NO: 1629357 - DNA, 15 bp, Homo sapiens
gttgcaatcctagcc

SEQ ID NO: 1629358 - DNA, 15 bp, Homo sapiens
ggttgcaatcctagc

SEQ ID NO: 1629359 - DNA, 15 bp, Homo sapiens
gggttgcaatcctag

SEQ ID NO: 1629360 - DNA, 15 bp, Homo sapiens
tgggttgcaatccta

SEQ ID NO: 1629361 - DNA, 15 bp, Homo sapiens
atgggttgcaatcct

SEQ ID NO: 1629362 - DNA, 15 bp, Homo sapiens
catgggttgcaatcc

SEQ ID NO: 1629363 - DNA, 15 bp, Homo sapiens
ccatgggttgcaatc

SEQ ID NO: 1629364 - DNA, 15 bp, Homo sapiens
accatgggttgcaat

SEQ ID NO: 1629365 - DNA, 15 bp, Homo sapiens
aaccatgggttgcaa

SEQ ID NO: 1629366 - DNA, 15 bp, Homo sapiens
aaaccatgggttgca

SEQ ID NO: 1629367 - DNA, 15 bp, Homo sapiens
aaaaccatgggttgc

SEQ ID NO: 1629368 - DNA, 15 bp, Homo sapiens
gaaaaccatgggttg

SEQ ID NO: 1629369 - DNA, 15 bp, Homo sapiens
agaaaaccatgggtt

SEQ ID NO: 1629370 - DNA, 15 bp, Homo sapiens
aagaaaaccatgggt

SEQ ID NO: 1629371 - DNA, 15 bp, Homo sapiens
aaagaaaaccatggg

SEQ ID NO: 1629372 - DNA, 15 bp, Homo sapiens
aaaagaaaaccatgg

SEQ ID NO: 1629373 - DNA, 15 bp, Homo sapiens
aaaaagaaaaccatg

SEQ ID NO: 1629374 - DNA, 15 bp, Homo sapiens
aaaaaagaaaaccat

SEQ ID NO: 1629375 - DNA, 15 bp, Homo sapiens
aaaaaaagaaaacca

SEQ ID NO: 1629376 - DNA, 15 bp, Homo sapiens
caaaaaaagaaaacc

SEQ ID NO: 1629377 - DNA, 15 bp, Homo sapiens
acaaaaaaagaaaac

SEQ ID NO: 1629378 - DNA, 15 bp, Homo sapiens
aacaaaaaaagaaaa

SEQ ID NO: 1629379 - DNA, 15 bp, Homo sapiens
aaacaaaaaaagaaa

SEQ ID NO: 1629380 - DNA, 15 bp, Homo sapiens
caaacaaaaaaagaa

SEQ ID NO: 1629381 - DNA, 15 bp, Homo sapiens
caaaaaacaaacaaa

SEQ ID NO: 1629382 - DNA, 15 bp, Homo sapiens
acaaaaaacaaacaa

SEQ ID NO: 1629383 - DNA, 15 bp, Homo sapiens
aacaaaaaacaaaca

SEQ ID NO: 1629384 - DNA, 15 bp, Homo sapiens
aaacaaaaaacaaac

SEQ ID NO: 1629385 - DNA, 15 bp, Homo sapiens
caaaacaaaaaacaa

SEQ ID NO: 1629386 - DNA, 15 bp, Homo sapiens
gaaaacaaaacaaaa

SEQ ID NO: 1629387 - DNA, 15 bp, Homo sapiens
agaaaacaaaacaaa

SEQ ID NO: 1629388 - DNA, 15 bp, Homo sapiens
tagaaaacaaaacaa

SEQ ID NO: 1629389 - DNA, 15 bp, Homo sapiens
atagaaaacaaaaca

SEQ ID NO: 1629390 - DNA, 15 bp, Homo sapiens
aatagaaaacaaaac

SEQ ID NO: 1629391 - DNA, 15 bp, Homo sapiens
aaatagaaaacaaaa

SEQ ID NO: 1629392 - DNA, 15 bp, Homo sapiens
aaaatagaaaacaaa

SEQ ID NO: 1629393 - DNA, 15 bp, Homo sapiens
gaaaatagaaaacaa

SEQ ID NO: 1629394 - DNA, 15 bp, Homo sapiens
agaaaatagaaaaca

SEQ ID NO: 1629395 - DNA, 15 bp, Homo sapiens
aagaaaatagaaaac

SEQ ID NO: 1629396 - DNA, 15 bp, Homo sapiens
caagaaaatagaaaa

SEQ ID NO: 1629397 - DNA, 15 bp, Homo sapiens
ccaagaaaatagaaa

SEQ ID NO: 1629398 - DNA, 15 bp, Homo sapiens
accaagaaaatagaa

SEQ ID NO: 1629399 - DNA, 15 bp, Homo sapiens
taccaagaaaataga

SEQ ID NO: 1629400 - DNA, 15 bp, Homo sapiens
ttaccaagaaaatag

SEQ ID NO: 1629401 - DNA, 15 bp, Homo sapiens
tttaccaagaaaata

SEQ ID NO: 1629402 - DNA, 15 bp, Homo sapiens
tatttaccaagaaaa

SEQ ID NO: 1629403 - DNA, 15 bp, Homo sapiens
atatttaccaagaaa

SEQ ID NO: 1629404 - DNA, 15 bp, Homo sapiens
aatatttaccaagaa

SEQ ID NO: 1629405 - DNA, 15 bp, Homo sapiens
gaatatttaccaaga

SEQ ID NO: 1629406 - DNA, 15 bp, Homo sapiens
ggaatatttaccaag

SEQ ID NO: 1629407 - DNA, 15 bp, Homo sapiens
aggaatatttaccaa

SEQ ID NO: 1629408 - DNA, 15 bp, Homo sapiens
gaggaatatttacca

SEQ ID NO: 1629409 - DNA, 15 bp, Homo sapiens
ggaggaatatttacc

SEQ ID NO: 1629410 - DNA, 15 bp, Homo sapiens
tggaggaatatttac

SEQ ID NO: 1629411 - DNA, 15 bp, Homo sapiens
atggaggaatattta

SEQ ID NO: 1629412 - DNA, 15 bp, Homo sapiens
gatggaggaatattt

SEQ ID NO: 1629413 - DNA, 15 bp, Homo sapiens
ggatggaggaatatt

SEQ ID NO: 1629414 - DNA, 15 bp, Homo sapiens
gggatggaggaatat

SEQ ID NO: 1629415 - DNA, 15 bp, Homo sapiens
agggatggaggaata

SEQ ID NO: 1629416 - DNA, 15 bp, Homo sapiens
aagggatggaggaat

SEQ ID NO: 1629417 - DNA, 15 bp, Homo sapiens
aaagggatggaggaa

SEQ ID NO: 1629418 - DNA, 15 bp, Homo sapiens
taaagggatggagga

SEQ ID NO: 1629419 - DNA, 15 bp, Homo sapiens
ataaagggatggagg

SEQ ID NO: 1629420 - DNA, 15 bp, Homo sapiens
aataaagggatggag

SEQ ID NO: 1629421 - DNA, 15 bp, Homo sapiens
aaataaagggatgga

SEQ ID NO: 1629422 - DNA, 15 bp, Homo sapiens
aaaataaagggatgg

SEQ ID NO: 1629423 - DNA, 15 bp, Homo sapiens
caaaataaagggatg

SEQ ID NO: 1629424 - DNA, 15 bp, Homo sapiens
tcaaaataaagggat

SEQ ID NO: 1629425 - DNA, 15 bp, Homo sapiens
ctcaaaataaaggga

SEQ ID NO: 1629426 - DNA, 15 bp, Homo sapiens
gctcaaaataaaggg

SEQ ID NO: 1629427 - DNA, 15 bp, Homo sapiens
ggctcaaaataaagg

SEQ ID NO: 1629428 - DNA, 15 bp, Homo sapiens
aggctcaaaataaag

SEQ ID NO: 1629429 - DNA, 15 bp, Homo sapiens
taggctcaaaataaa

SEQ ID NO: 1629430 - DNA, 15 bp, Homo sapiens
ataggctcaaaataa

SEQ ID NO: 1629431 - DNA, 15 bp, Homo sapiens
cataggctcaaaata

SEQ ID NO: 1629432 - DNA, 15 bp, Homo sapiens
acataggctcaaaat

SEQ ID NO: 1629433 - DNA, 15 bp, Homo sapiens
cacataggctcaaaa

SEQ ID NO: 1629434 - DNA, 15 bp, Homo sapiens
acacataggctcaaa

SEQ ID NO: 1629435 - DNA, 15 bp, Homo sapiens
cacacataggctcaa

SEQ ID NO: 1629436 - DNA, 15 bp, Homo sapiens
acacacataggctca

SEQ ID NO: 1629437 - DNA, 15 bp, Homo sapiens
gacacacataggctc

SEQ ID NO: 1629438 - DNA, 15 bp, Homo sapiens
agacacacataggct

SEQ ID NO: 1629439 - DNA, 15 bp, Homo sapiens
aagacacacataggc

SEQ ID NO: 1629440 - DNA, 15 bp, Homo sapiens
aaagacacacatagg

SEQ ID NO: 1629441 - DNA, 15 bp, Homo sapiens
caaagacacacatag

SEQ ID NO: 1629442 - DNA, 15 bp, Homo sapiens
gcaaagacacacata

SEQ ID NO: 1629443 - DNA, 15 bp, Homo sapiens
tgcaaagacacacat

SEQ ID NO: 1629444 - DNA, 15 bp, Homo sapiens
gtgcaaagacacaca

SEQ ID NO: 1629445 - DNA, 15 bp, Homo sapiens
tgtgcaaagacacac

SEQ ID NO: 1629446 - DNA, 15 bp, Homo sapiens
atgtgcaaagacaca

SEQ ID NO: 1629447 - DNA, 15 bp, Homo sapiens
catgtgcaaagacac

SEQ ID NO: 1629448 - DNA, 15 bp, Homo sapiens
tcatgtgcaaagaca

SEQ ID NO: 1629449 - DNA, 15 bp, Homo sapiens
ctcatgtgcaaagac

SEQ ID NO: 1629450 - DNA, 15 bp, Homo sapiens
tctcatgtgcaaaga

SEQ ID NO: 1629451 - DNA, 15 bp, Homo sapiens
atctcatgtgcaaag

SEQ ID NO: 1629452 - DNA, 15 bp, Homo sapiens
catctcatgtgcaaa

SEQ ID NO: 1629453 - DNA, 15 bp, Homo sapiens
ccatctcatgtgcaa

SEQ ID NO: 1629454 - DNA, 15 bp, Homo sapiens
cccatctcatgtgca

SEQ ID NO: 1629455 - DNA, 15 bp, Homo sapiens
acccatctcatgtgc

SEQ ID NO: 1629456 - DNA, 15 bp, Homo sapiens
gacccatctcatgtg

SEQ ID NO: 1629457 - DNA, 15 bp, Homo sapiens
agacccatctcatgt

SEQ ID NO: 1629458 - DNA, 15 bp, Homo sapiens
gagacccatctcatg

SEQ ID NO: 1629459 - DNA, 15 bp, Homo sapiens
ggagacccatctcat

SEQ ID NO: 1629460 - DNA, 15 bp, Homo sapiens
aggagacccatctca

SEQ ID NO: 1629461 - DNA, 15 bp, Homo sapiens
caggagacccatctc

SEQ ID NO: 1629462 - DNA, 15 bp, Homo sapiens
tcaggagacccatct

SEQ ID NO: 1629463 - DNA, 15 bp, Homo sapiens
ttcaggagacccatc

SEQ ID NO: 1629464 - DNA, 15 bp, Homo sapiens
attcaggagacccat

SEQ ID NO: 1629465 - DNA, 15 bp, Homo sapiens
tattcaggagaccca

SEQ ID NO: 1629466 - DNA, 15 bp, Homo sapiens
gtattcaggagaccc

SEQ ID NO: 1629467 - DNA, 15 bp, Homo sapiens
tgtattcaggagacc

SEQ ID NO: 1629468 - DNA, 15 bp, Homo sapiens
ctgtattcaggagac

SEQ ID NO: 1629469 - DNA, 15 bp, Homo sapiens
gctgtattcaggaga

SEQ ID NO: 1629470 - DNA, 15 bp, Homo sapiens
tgctgtattcaggag

SEQ ID NO: 1629471 - DNA, 15 bp, Homo sapiens
gtgctgtattcagga

SEQ ID NO: 1629472 - DNA, 15 bp, Homo sapiens
tgtgctgtattcagg

SEQ ID NO: 1629473 - DNA, 15 bp, Homo sapiens
gtgtgctgtattcag

SEQ ID NO: 1629474 - DNA, 15 bp, Homo sapiens
agtgtgctgtattca

SEQ ID NO: 1629475 - DNA, 15 bp, Homo sapiens
cagtgtgctgtattc

SEQ ID NO: 1629476 - DNA, 15 bp, Homo sapiens
tcagtgtgctgtatt

SEQ ID NO: 1629477 - DNA, 15 bp, Homo sapiens
atcagtgtgctgtat

SEQ ID NO: 1629478 - DNA, 15 bp, Homo sapiens
catcagtgtgctgta

SEQ ID NO: 1629479 - DNA, 15 bp, Homo sapiens
ccatcagtgtgctgt

SEQ ID NO: 1629480 - DNA, 15 bp, Homo sapiens
gccatcagtgtgctg

SEQ ID NO: 1629481 - DNA, 15 bp, Homo sapiens
agccatcagtgtgct

SEQ ID NO: 1629482 - DNA, 15 bp, Homo sapiens
aagccatcagtgtgc

SEQ ID NO: 1629483 - DNA, 15 bp, Homo sapiens
aaagccatcagtgtg

SEQ ID NO: 1629484 - DNA, 15 bp, Homo sapiens
aaaagccatcagtgt

SEQ ID NO: 1629485 - DNA, 15 bp, Homo sapiens
caaaagccatcagtg

SEQ ID NO: 1629486 - DNA, 15 bp, Homo sapiens
tcaaaagccatcagt

SEQ ID NO: 1629487 - DNA, 15 bp, Homo sapiens
gtcaaaagccatcag

SEQ ID NO: 1629488 - DNA, 15 bp, Homo sapiens
agtcaaaagccatca

SEQ ID NO: 1629489 - DNA, 15 bp, Homo sapiens
gagtcaaaagccatc

SEQ ID NO: 1629490 - DNA, 15 bp, Homo sapiens
agagtcaaaagccat

SEQ ID NO: 1629491 - DNA, 15 bp, Homo sapiens
aagagtcaaaagcca

SEQ ID NO: 1629492 - DNA, 15 bp, Homo sapiens
aaagagtcaaaagcc

SEQ ID NO: 1629493 - DNA, 15 bp, Homo sapiens
taaagagtcaaaagc

SEQ ID NO: 1629494 - DNA, 15 bp, Homo sapiens
ataaagagtcaaaag

SEQ ID NO: 1629495 - DNA, 15 bp, Homo sapiens
gataaagagtcaaaa

SEQ ID NO: 1629496 - DNA, 15 bp, Homo sapiens
ggataaagagtcaaa

SEQ ID NO: 1629497 - DNA, 15 bp, Homo sapiens
tggataaagagtcaa

SEQ ID NO: 1629498 - DNA, 15 bp, Homo sapiens
ttggataaagagtca

SEQ ID NO: 1629499 - DNA, 15 bp, Homo sapiens
attggataaagagtc

SEQ ID NO: 1629500 - DNA, 15 bp, Homo sapiens
aattggataaagagt

SEQ ID NO: 1629501 - DNA, 15 bp, Homo sapiens
aaattggataaagag

SEQ ID NO: 1629502 - DNA, 15 bp, Homo sapiens
caaattggataaaga

SEQ ID NO: 1629503 - DNA, 15 bp, Homo sapiens
acaaattggataaag

SEQ ID NO: 1629504 - DNA, 15 bp, Homo sapiens
aacaaattggataaa

SEQ ID NO: 1629505 - DNA, 15 bp, Homo sapiens
taacaaattggataa

SEQ ID NO: 1629506 - DNA, 15 bp, Homo sapiens
ctaacaaattggata

SEQ ID NO: 1629507 - DNA, 15 bp, Homo sapiens
actaacaaattggat

SEQ ID NO: 1629508 - DNA, 15 bp, Homo sapiens
gactaacaaattgga

SEQ ID NO: 1629509 - DNA, 15 bp, Homo sapiens
agactaacaaattgg

SEQ ID NO: 1629510 - DNA, 15 bp, Homo sapiens
tagactaacaaattg

SEQ ID NO: 1629511 - DNA, 15 bp, Homo sapiens
atagactaacaaatt

SEQ ID NO: 1629512 - DNA, 15 bp, Homo sapiens
catagactaacaaat

SEQ ID NO: 1629513 - DNA, 15 bp, Homo sapiens
acatagactaacaaa

SEQ ID NO: 1629514 - DNA, 15 bp, Homo sapiens
gacatagactaacaa

SEQ ID NO: 1629515 - DNA, 15 bp, Homo sapiens
agacatagactaaca

SEQ ID NO: 1629516 - DNA, 15 bp, Homo sapiens
aagacatagactaac

SEQ ID NO: 1629517 - DNA, 15 bp, Homo sapiens
aaagacatagactaa

SEQ ID NO: 1629518 - DNA, 15 bp, Homo sapiens
aaaagacatagacta

SEQ ID NO: 1629519 - DNA, 15 bp, Homo sapiens
taaaagacatagact

SEQ ID NO: 1629520 - DNA, 15 bp, Homo sapiens
ttaaaagacatagac

SEQ ID NO: 1629521 - DNA, 15 bp, Homo sapiens
attaaaagacataga

SEQ ID NO: 1629522 - DNA, 15 bp, Homo sapiens
aattaaaagacatag

SEQ ID NO: 1629523 - DNA, 15 bp, Homo sapiens
caattaaaagacata

SEQ ID NO: 1629524 - DNA, 15 bp, Homo sapiens
ccaattaaaagacat

SEQ ID NO: 1629525 - DNA, 15 bp, Homo sapiens
cccaattaaaagaca

SEQ ID NO: 1629526 - DNA, 15 bp, Homo sapiens
ccccaattaaaagac

SEQ ID NO: 1629527 - DNA, 15 bp, Homo sapiens
gccccaattaaaaga

SEQ ID NO: 1629528 - DNA, 15 bp, Homo sapiens
tgccccaattaaaag

SEQ ID NO: 1629529 - DNA, 15 bp, Homo sapiens
gtgccccaattaaaa

SEQ ID NO: 1629530 - DNA, 15 bp, Homo sapiens
agtgccccaattaaa

SEQ ID NO: 1629531 - DNA, 15 bp, Homo sapiens
aagtgccccaattaa

SEQ ID NO: 1629532 - DNA, 15 bp, Homo sapiens
taagtgccccaatta

SEQ ID NO: 1629533 - DNA, 15 bp, Homo sapiens
ctaagtgccccaatt

SEQ ID NO: 1629534 - DNA, 15 bp, Homo sapiens
gctaagtgccccaat

SEQ ID NO: 1629535 - DNA, 15 bp, Homo sapiens
ggctaagtgccccaa

SEQ ID NO: 1629536 - DNA, 15 bp, Homo sapiens
aggctaagtgcccca

SEQ ID NO: 1629537 - DNA, 15 bp, Homo sapiens
caggctaagtgcccc

SEQ ID NO: 1629538 - DNA, 15 bp, Homo sapiens
acaggctaagtgccc

SEQ ID NO: 1629539 - DNA, 15 bp, Homo sapiens
aacaggctaagtgcc

SEQ ID NO: 1629540 - DNA, 15 bp, Homo sapiens
aaacaggctaagtgc

SEQ ID NO: 1629541 - DNA, 15 bp, Homo sapiens
taaacaggctaagtg

SEQ ID NO: 1629542 - DNA, 15 bp, Homo sapiens
gtaaacaggctaagt

SEQ ID NO: 1629543 - DNA, 15 bp, Homo sapiens
tgtaaacaggctaag

SEQ ID NO: 1629544 - DNA, 15 bp, Homo sapiens
atgtaaacaggctaa

SEQ ID NO: 1629545 - DNA, 15 bp, Homo sapiens
aatgtaaacaggcta

SEQ ID NO: 1629546 - DNA, 15 bp, Homo sapiens
aaatgtaaacaggct

SEQ ID NO: 1629547 - DNA, 15 bp, Homo sapiens
taaatgtaaacaggc

SEQ ID NO: 1629548 - DNA, 15 bp, Homo sapiens
ttaaatgtaaacagg

SEQ ID NO: 1629549 - DNA, 15 bp, Homo sapiens
cttaaatgtaaacag

SEQ ID NO: 1629550 - DNA, 15 bp, Homo sapiens
ccttaaatgtaaaca

SEQ ID NO: 1629551 - DNA, 15 bp, Homo sapiens
accttaaatgtaaac

SEQ ID NO: 1629552 - DNA, 15 bp, Homo sapiens
aaccttaaatgtaaa

SEQ ID NO: 1629553 - DNA, 15 bp, Homo sapiens
taaccttaaatgtaa

SEQ ID NO: 1629554 - DNA, 15 bp, Homo sapiens
ttaaccttaaatgta

SEQ ID NO: 1629555 - DNA, 15 bp, Homo sapiens
attaaccttaaatgt

SEQ ID NO: 1629556 - DNA, 15 bp, Homo sapiens
tattaaccttaaatg

SEQ ID NO: 1629557 - DNA, 15 bp, Homo sapiens
atattaaccttaaat

SEQ ID NO: 1629558 - DNA, 15 bp, Homo sapiens
aatattaaccttaaa

SEQ ID NO: 1629559 - DNA, 15 bp, Homo sapiens
caatattaaccttaa

SEQ ID NO: 1629560 - DNA, 15 bp, Homo sapiens
acaatattaacctta

SEQ ID NO: 1629561 - DNA, 15 bp, Homo sapiens
aacaatattaacctt

SEQ ID NO: 1629562 - DNA, 15 bp, Homo sapiens
taacaatattaacct

SEQ ID NO: 1629563 - DNA, 15 bp, Homo sapiens
ataacaatattaacc

SEQ ID NO: 1629564 - DNA, 15 bp, Homo sapiens
tataacaatattaac

SEQ ID NO: 1629565 - DNA, 15 bp, Homo sapiens
atataacaatattaa

SEQ ID NO: 1629566 - DNA, 15 bp, Homo sapiens
catataacaatatta

SEQ ID NO: 1629567 - DNA, 15 bp, Homo sapiens
acatataacaatatt

SEQ ID NO: 1629568 - DNA, 15 bp, Homo sapiens
cacatataacaatat

SEQ ID NO: 1629569 - DNA, 15 bp, Homo sapiens
tcacatataacaata

SEQ ID NO: 1629570 - DNA, 15 bp, Homo sapiens
ttcacatataacaat

SEQ ID NO: 1629571 - DNA, 15 bp, Homo sapiens
attcacatataacaa

SEQ ID NO: 1629572 - DNA, 15 bp, Homo sapiens
aattcacatataaca

SEQ ID NO: 1629573 - DNA, 15 bp, Homo sapiens
aaattcacatataac

SEQ ID NO: 1629574 - DNA, 15 bp, Homo sapiens
caaattcacatataa

SEQ ID NO: 1629575 - DNA, 15 bp, Homo sapiens
tcaaattcacatata

SEQ ID NO: 1629576 - DNA, 15 bp, Homo sapiens
atcaaattcacatat

SEQ ID NO: 1629577 - DNA, 15 bp, Homo sapiens
gatcaaattcacata

SEQ ID NO: 1629578 - DNA, 15 bp, Homo sapiens
ggatcaaattcacat

SEQ ID NO: 1629579 - DNA, 15 bp, Homo sapiens
aggatcaaattcaca

SEQ ID NO: 1629580 - DNA, 15 bp, Homo sapiens
caggatcaaattcac

SEQ ID NO: 1629581 - DNA, 15 bp, Homo sapiens
acaggatcaaattca

SEQ ID NO: 1629582 - DNA, 15 bp, Homo sapiens
gacaggatcaaattc

SEQ ID NO: 1629583 - DNA, 15 bp, Homo sapiens
tgacaggatcaaatt

SEQ ID NO: 1629584 - DNA, 15 bp, Homo sapiens
atgacaggatcaaat

SEQ ID NO: 1629585 - DNA, 15 bp, Homo sapiens
gatgacaggatcaaa

SEQ ID NO: 1629586 - DNA, 15 bp, Homo sapiens
tgatgacaggatcaa

SEQ ID NO: 1629587 - DNA, 15 bp, Homo sapiens
atgatgacaggatca

SEQ ID NO: 1629588 - DNA, 15 bp, Homo sapiens
catgatgacaggatc

SEQ ID NO: 1629589 - DNA, 15 bp, Homo sapiens
tcatgatgacaggat

SEQ ID NO: 1629590 - DNA, 15 bp, Homo sapiens
atcatgatgacagga

SEQ ID NO: 1629591 - DNA, 15 bp, Homo sapiens
catcatgatgacagg

SEQ ID NO: 1629592 - DNA, 15 bp, Homo sapiens
gcatcatgatgacag

SEQ ID NO: 1629593 - DNA, 15 bp, Homo sapiens
ggcatcatgatgaca

SEQ ID NO: 1629594 - DNA, 15 bp, Homo sapiens
tggcatcatgatgac

SEQ ID NO: 1629595 - DNA, 15 bp, Homo sapiens
ctggcatcatgatga

SEQ ID NO: 1629596 - DNA, 15 bp, Homo sapiens
gctggcatcatgatg

SEQ ID NO: 1629597 - DNA, 15 bp, Homo sapiens
agctggcatcatgat

SEQ ID NO: 1629598 - DNA, 15 bp, Homo sapiens
tagctggcatcatga

SEQ ID NO: 1629599 - DNA, 15 bp, Homo sapiens
ctagctggcatcatg

SEQ ID NO: 1629600 - DNA, 15 bp, Homo sapiens
actagctggcatcat

SEQ ID NO: 1629601 - DNA, 15 bp, Homo sapiens
aactagctggcatca

SEQ ID NO: 1629602 - DNA, 15 bp, Homo sapiens
taactagctggcatc

SEQ ID NO: 1629603 - DNA, 15 bp, Homo sapiens
ataactagctggcat

SEQ ID NO: 1629604 - DNA, 15 bp, Homo sapiens
aataactagctggca

SEQ ID NO: 1629605 - DNA, 15 bp, Homo sapiens
aaataactagctggc

SEQ ID NO: 1629606 - DNA, 15 bp, Homo sapiens
aaaataactagctgg

SEQ ID NO: 1629607 - DNA, 15 bp, Homo sapiens
caaaataactagctg

SEQ ID NO: 1629608 - DNA, 15 bp, Homo sapiens
gcaaaataactagct

SEQ ID NO: 1629609 - DNA, 15 bp, Homo sapiens
tgcaaaataactagc

SEQ ID NO: 1629610 - DNA, 15 bp, Homo sapiens
gtgcaaaataactag

SEQ ID NO: 1629611 - DNA, 15 bp, Homo sapiens
tgtgcaaaataacta

SEQ ID NO: 1629612 - DNA, 15 bp, Homo sapiens
atgtgcaaaataact

SEQ ID NO: 1629613 - DNA, 15 bp, Homo sapiens
aatgtgcaaaataac

SEQ ID NO: 1629614 - DNA, 15 bp, Homo sapiens
taatgtgcaaaataa

SEQ ID NO: 1629615 - DNA, 15 bp, Homo sapiens
ctaatgtgcaaaata

SEQ ID NO: 1629616 - DNA, 15 bp, Homo sapiens
actaatgtgcaaaat

SEQ ID NO: 1629617 - DNA, 15 bp, Homo sapiens
aactaatgtgcaaaa

SEQ ID NO: 1629618 - DNA, 15 bp, Homo sapiens
caactaatgtgcaaa

SEQ ID NO: 1629619 - DNA, 15 bp, Homo sapiens
tcaactaatgtgcaa

SEQ ID NO: 1629620 - DNA, 15 bp, Homo sapiens
atcaactaatgtgca

SEQ ID NO: 1629621 - DNA, 15 bp, Homo sapiens
catcaactaatgtgc

SEQ ID NO: 1629622 - DNA, 15 bp, Homo sapiens
gcatcaactaatgtg

SEQ ID NO: 1629623 - DNA, 15 bp, Homo sapiens
tgcatcaactaatgt

SEQ ID NO: 1629624 - DNA, 15 bp, Homo sapiens
ctgcatcaactaatg

SEQ ID NO: 1629625 - DNA, 15 bp, Homo sapiens
actgcatcaactaat

SEQ ID NO: 1629626 - DNA, 15 bp, Homo sapiens
aactgcatcaactaa

SEQ ID NO: 1629627 - DNA, 15 bp, Homo sapiens
aaactgcatcaacta

SEQ ID NO: 1629628 - DNA, 15 bp, Homo sapiens
gaaactgcatcaact

SEQ ID NO: 1629629 - DNA, 15 bp, Homo sapiens
agaaactgcatcaac

SEQ ID NO: 1629630 - DNA, 15 bp, Homo sapiens
aagaaactgcatcaa

SEQ ID NO: 1629631 - DNA, 15 bp, Homo sapiens
gaagaaactgcatca

SEQ ID NO: 1629632 - DNA, 15 bp, Homo sapiens
tgaagaaactgcatc

SEQ ID NO: 1629633 - DNA, 15 bp, Homo sapiens
atgaagaaactgcat

SEQ ID NO: 1629634 - DNA, 15 bp, Homo sapiens
tatgaagaaactgca

SEQ ID NO: 1629635 - DNA, 15 bp, Homo sapiens
ctatgaagaaactgc

SEQ ID NO: 1629636 - DNA, 15 bp, Homo sapiens
actatgaagaaactg

SEQ ID NO: 1629637 - DNA, 15 bp, Homo sapiens
cactatgaagaaact

SEQ ID NO: 1629638 - DNA, 15 bp, Homo sapiens
acactatgaagaaac

SEQ ID NO: 1629639 - DNA, 15 bp, Homo sapiens
aacactatgaagaaa

SEQ ID NO: 1629640 - DNA, 15 bp, Homo sapiens
caacactatgaagaa

SEQ ID NO: 1629641 - DNA, 15 bp, Homo sapiens
acaacactatgaaga

SEQ ID NO: 1629642 - DNA, 15 bp, Homo sapiens
aacaacactatgaag

SEQ ID NO: 1629643 - DNA, 15 bp, Homo sapiens
caacaacactatgaa

SEQ ID NO: 1629644 - DNA, 15 bp, Homo sapiens
ccaacaacactatga

SEQ ID NO: 1629645 - DNA, 15 bp, Homo sapiens
accaacaacactatg

SEQ ID NO: 1629646 - DNA, 15 bp, Homo sapiens
gaccaacaacactat

SEQ ID NO: 1629647 - DNA, 15 bp, Homo sapiens
agaccaacaacacta

SEQ ID NO: 1629648 - DNA, 15 bp, Homo sapiens
aagaccaacaacact

SEQ ID NO: 1629649 - DNA, 15 bp, Homo sapiens
aaagaccaacaacac

SEQ ID NO: 1629650 - DNA, 15 bp, Homo sapiens
taaagaccaacaaca

SEQ ID NO: 1629651 - DNA, 15 bp, Homo sapiens
ataaagaccaacaac

SEQ ID NO: 1629652 - DNA, 15 bp, Homo sapiens
tataaagaccaacaa

SEQ ID NO: 1629653 - DNA, 15 bp, Homo sapiens
atataaagaccaaca

SEQ ID NO: 1629654 - DNA, 15 bp, Homo sapiens
aatataaagaccaac

SEQ ID NO: 1629655 - DNA, 15 bp, Homo sapiens
aaatataaagaccaa

SEQ ID NO: 1629656 - DNA, 15 bp, Homo sapiens
aaaatataaagacca

SEQ ID NO: 1629657 - DNA, 15 bp, Homo sapiens
caaaatataaagacc

SEQ ID NO: 1629658 - DNA, 15 bp, Homo sapiens
ccaaaatataaagac

SEQ ID NO: 1629659 - DNA, 15 bp, Homo sapiens
accaaaatataaaga

SEQ ID NO: 1629660 - DNA, 15 bp, Homo sapiens
taccaaaatataaag

SEQ ID NO: 1629661 - DNA, 15 bp, Homo sapiens
ataccaaaatataaa

SEQ ID NO: 1629662 - DNA, 15 bp, Homo sapiens
cataccaaaatataa

SEQ ID NO: 1629663 - DNA, 15 bp, Homo sapiens
acataccaaaatata

SEQ ID NO: 1629664 - DNA, 15 bp, Homo sapiens
aacataccaaaatat

SEQ ID NO: 1629665 - DNA, 15 bp, Homo sapiens
aaacataccaaaata

SEQ ID NO: 1629666 - DNA, 15 bp, Homo sapiens
aaaacataccaaaat

SEQ ID NO: 1629667 - DNA, 15 bp, Homo sapiens
aaaaacataccaaaa

SEQ ID NO: 1629668 - DNA, 15 bp, Homo sapiens
taaaaacataccaaa

SEQ ID NO: 1629669 - DNA, 15 bp, Homo sapiens
gtaaaaacataccaa

SEQ ID NO: 1629670 - DNA, 15 bp, Homo sapiens
tgtaaaaacatacca

SEQ ID NO: 1629671 - DNA, 15 bp, Homo sapiens
ctgtaaaaacatacc

SEQ ID NO: 1629672 - DNA, 15 bp, Homo sapiens
actgtaaaaacatac

SEQ ID NO: 1629673 - DNA, 15 bp, Homo sapiens
cactgtaaaaacata

SEQ ID NO: 1629674 - DNA, 15 bp, Homo sapiens
tcactgtaaaaacat

SEQ ID NO: 1629675 - DNA, 15 bp, Homo sapiens
gtcactgtaaaaaca

SEQ ID NO: 1629676 - DNA, 15 bp, Homo sapiens
agtcactgtaaaaac

SEQ ID NO: 1629677 - DNA, 15 bp, Homo sapiens
cagtcactgtaaaaa

SEQ ID NO: 1629678 - DNA, 15 bp, Homo sapiens
ccagtcactgtaaaa

SEQ ID NO: 1629679 - DNA, 15 bp, Homo sapiens
accagtcactgtaaa

SEQ ID NO: 1629680 - DNA, 15 bp, Homo sapiens
taccagtcactgtaa

SEQ ID NO: 1629681 - DNA, 15 bp, Homo sapiens
gtaccagtcactgta

SEQ ID NO: 1629682 - DNA, 15 bp, Homo sapiens
ggtaccagtcactgt

SEQ ID NO: 1629683 - DNA, 15 bp, Homo sapiens
gggtaccagtcactg

SEQ ID NO: 1629684 - DNA, 15 bp, Homo sapiens
tgggtaccagtcact

SEQ ID NO: 1629685 - DNA, 15 bp, Homo sapiens
atgggtaccagtcac

SEQ ID NO: 1629686 - DNA, 15 bp, Homo sapiens
aatgggtaccagtca

SEQ ID NO: 1629687 - DNA, 15 bp, Homo sapiens
aaatgggtaccagtc

SEQ ID NO: 1629688 - DNA, 15 bp, Homo sapiens
aaaatgggtaccagt

SEQ ID NO: 1629689 - DNA, 15 bp, Homo sapiens
aaaaatgggtaccag

SEQ ID NO: 1629690 - DNA, 15 bp, Homo sapiens
gaaaaatgggtacca

SEQ ID NO: 1629691 - DNA, 15 bp, Homo sapiens
ggaaaaatgggtacc

SEQ ID NO: 1629692 - DNA, 15 bp, Homo sapiens
aggaaaaatgggtac

SEQ ID NO: 1629693 - DNA, 15 bp, Homo sapiens
aaggaaaaatgggta

SEQ ID NO: 1629694 - DNA, 15 bp, Homo sapiens
aaaggaaaaatgggt

SEQ ID NO: 1629695 - DNA, 15 bp, Homo sapiens
gaaaggaaaaatggg

SEQ ID NO: 1629696 - DNA, 15 bp, Homo sapiens
ggaaaggaaaaatgg

SEQ ID NO: 1629697 - DNA, 15 bp, Homo sapiens
tggaaaggaaaaatg

SEQ ID NO: 1629698 - DNA, 15 bp, Homo sapiens
atggaaaggaaaaat

SEQ ID NO: 1629699 - DNA, 15 bp, Homo sapiens
tatggaaaggaaaaa

SEQ ID NO: 1629700 - DNA, 15 bp, Homo sapiens
atatggaaaggaaaa

SEQ ID NO: 1629701 - DNA, 15 bp, Homo sapiens
aatatggaaaggaaa

SEQ ID NO: 1629702 - DNA, 15 bp, Homo sapiens
aaatatggaaaggaa

SEQ ID NO: 1629703 - DNA, 15 bp, Homo sapiens
taaatatggaaagga

SEQ ID NO: 1629704 - DNA, 15 bp, Homo sapiens
ctaaatatggaaagg

SEQ ID NO: 1629705 - DNA, 15 bp, Homo sapiens
actaaatatggaaag

SEQ ID NO: 1629706 - DNA, 15 bp, Homo sapiens
cactaaatatggaaa

SEQ ID NO: 1629707 - DNA, 15 bp, Homo sapiens
gcactaaatatggaa

SEQ ID NO: 1629708 - DNA, 15 bp, Homo sapiens
agcactaaatatgga

SEQ ID NO: 1629709 - DNA, 15 bp, Homo sapiens
aagcactaaatatgg

SEQ ID NO: 1629710 - DNA, 15 bp, Homo sapiens
aaagcactaaatatg

SEQ ID NO: 1629711 - DNA, 15 bp, Homo sapiens
aaaagcactaaatat

SEQ ID NO: 1629712 - DNA, 15 bp, Homo sapiens
aaaaagcactaaata

SEQ ID NO: 1629713 - DNA, 15 bp, Homo sapiens
aaaaaagcactaaat

SEQ ID NO: 1629714 - DNA, 15 bp, Homo sapiens
gaaaaaagcactaaa

SEQ ID NO: 1629715 - DNA, 15 bp, Homo sapiens
tgaaaaaagcactaa

SEQ ID NO: 1629716 - DNA, 15 bp, Homo sapiens
ctgaaaaaagcacta

SEQ ID NO: 1629717 - DNA, 15 bp, Homo sapiens
cctgaaaaaagcact

SEQ ID NO: 1629718 - DNA, 15 bp, Homo sapiens
tcctgaaaaaagcac

SEQ ID NO: 1629719 - DNA, 15 bp, Homo sapiens
ctcctgaaaaaagca

SEQ ID NO: 1629720 - DNA, 15 bp, Homo sapiens
gctcctgaaaaaagc

SEQ ID NO: 1629721 - DNA, 15 bp, Homo sapiens
agctcctgaaaaaag

SEQ ID NO: 1629722 - DNA, 15 bp, Homo sapiens
gagctcctgaaaaaa

SEQ ID NO: 1629723 - DNA, 15 bp, Homo sapiens
agagctcctgaaaaa

SEQ ID NO: 1629724 - DNA, 15 bp, Homo sapiens
aagagctcctgaaaa

SEQ ID NO: 1629725 - DNA, 15 bp, Homo sapiens
caagagctcctgaaa

SEQ ID NO: 1629726 - DNA, 15 bp, Homo sapiens
acaagagctcctgaa

SEQ ID NO: 1629727 - DNA, 15 bp, Homo sapiens
tacaagagctcctga

SEQ ID NO: 1629728 - DNA, 15 bp, Homo sapiens
ttacaagagctcctg

SEQ ID NO: 1629729 - DNA, 15 bp, Homo sapiens
cttacaagagctcct

SEQ ID NO: 1629730 - DNA, 15 bp, Homo sapiens
ccttacaagagctcc

SEQ ID NO: 1629731 - DNA, 15 bp, Homo sapiens
gccttacaagagctc

SEQ ID NO: 1629732 - DNA, 15 bp, Homo sapiens
tgccttacaagagct

SEQ ID NO: 1629733 - DNA, 15 bp, Homo sapiens
ctgccttacaagagc

SEQ ID NO: 1629734 - DNA, 15 bp, Homo sapiens
cctgccttacaagag

SEQ ID NO: 1629735 - DNA, 15 bp, Homo sapiens
gcctgccttacaaga

SEQ ID NO: 1629736 - DNA, 15 bp, Homo sapiens
ggcctgccttacaag

SEQ ID NO: 1629737 - DNA, 15 bp, Homo sapiens
aggcctgccttacaa

SEQ ID NO: 1629738 - DNA, 15 bp, Homo sapiens
caggcctgccttaca

SEQ ID NO: 1629739 - DNA, 15 bp, Homo sapiens
ccaggcctgccttac

SEQ ID NO: 1629740 - DNA, 15 bp, Homo sapiens
accaggcctgcctta

SEQ ID NO: 1629741 - DNA, 15 bp, Homo sapiens
caccaggcctgcctt

SEQ ID NO: 1629742 - DNA, 15 bp, Homo sapiens
ccaccaggcctgcct

SEQ ID NO: 1629743 - DNA, 15 bp, Homo sapiens
accaccaggcctgcc

SEQ ID NO: 1629744 - DNA, 15 bp, Homo sapiens
caccaccaggcctgc

SEQ ID NO: 1629745 - DNA, 15 bp, Homo sapiens
tcaccaccaggcctg

SEQ ID NO: 1629746 - DNA, 15 bp, Homo sapiens
gtcaccaccaggcct

SEQ ID NO: 1629747 - DNA, 15 bp, Homo sapiens
tgtcaccaccaggcc

SEQ ID NO: 1629748 - DNA, 15 bp, Homo sapiens
ttgtcaccaccaggc

SEQ ID NO: 1629749 - DNA, 15 bp, Homo sapiens
tttgtcaccaccagg

SEQ ID NO: 1629750 - DNA, 15 bp, Homo sapiens
ttttgtcaccaccag

SEQ ID NO: 1629751 - DNA, 15 bp, Homo sapiens
attttgtcaccacca

SEQ ID NO: 1629752 - DNA, 15 bp, Homo sapiens
gattttgtcaccacc

SEQ ID NO: 1629753 - DNA, 15 bp, Homo sapiens
ggattttgtcaccac

SEQ ID NO: 1629754 - DNA, 15 bp, Homo sapiens
gggattttgtcacca

SEQ ID NO: 1629755 - DNA, 15 bp, Homo sapiens
agggattttgtcacc

SEQ ID NO: 1629756 - DNA, 15 bp, Homo sapiens
gagggattttgtcac

SEQ ID NO: 1629757 - DNA, 15 bp, Homo sapiens
tgagggattttgtca

SEQ ID NO: 1629758 - DNA, 15 bp, Homo sapiens
ctgagggattttgtc

SEQ ID NO: 1629759 - DNA, 15 bp, Homo sapiens
gctgagggattttgt

SEQ ID NO: 1629760 - DNA, 15 bp, Homo sapiens
tgctgagggattttg

SEQ ID NO: 1629761 - DNA, 15 bp, Homo sapiens
atgctgagggatttt

SEQ ID NO: 1629762 - DNA, 15 bp, Homo sapiens
aatgctgagggattt

SEQ ID NO: 1629763 - DNA, 15 bp, Homo sapiens
aaatgctgagggatt

SEQ ID NO: 1629764 - DNA, 15 bp, Homo sapiens
caaatgctgagggat

SEQ ID NO: 1629765 - DNA, 15 bp, Homo sapiens
gcaaatgctgaggga

SEQ ID NO: 1629766 - DNA, 15 bp, Homo sapiens
agcaaatgctgaggg

SEQ ID NO: 1629767 - DNA, 15 bp, Homo sapiens
aagcaaatgctgagg

SEQ ID NO: 1629768 - DNA, 15 bp, Homo sapiens
caagcaaatgctgag

SEQ ID NO: 1629769 - DNA, 15 bp, Homo sapiens
acaagcaaatgctga

SEQ ID NO: 1629770 - DNA, 15 bp, Homo sapiens
gacaagcaaatgctg

SEQ ID NO: 1629771 - DNA, 15 bp, Homo sapiens
agacaagcaaatgct

SEQ ID NO: 1629772 - DNA, 15 bp, Homo sapiens
cagacaagcaaatgc

SEQ ID NO: 1629773 - DNA, 15 bp, Homo sapiens
acagacaagcaaatg

SEQ ID NO: 1629774 - DNA, 15 bp, Homo sapiens
tacagacaagcaaat

SEQ ID NO: 1629775 - DNA, 15 bp, Homo sapiens
ctacagacaagcaaa

SEQ ID NO: 1629776 - DNA, 15 bp, Homo sapiens
tctacagacaagcaa

SEQ ID NO: 1629777 - DNA, 15 bp, Homo sapiens
ctctacagacaagca

SEQ ID NO: 1629778 - DNA, 15 bp, Homo sapiens
tctctacagacaagc

SEQ ID NO: 1629779 - DNA, 15 bp, Homo sapiens
ttctctacagacaag

SEQ ID NO: 1629780 - DNA, 15 bp, Homo sapiens
attctctacagacaa

SEQ ID NO: 1629781 - DNA, 15 bp, Homo sapiens
aattctctacagaca

SEQ ID NO: 1629782 - DNA, 15 bp, Homo sapiens
aaattctctacagac

SEQ ID NO: 1629783 - DNA, 15 bp, Homo sapiens
aaaattctctacaga

SEQ ID NO: 1629784 - DNA, 15 bp, Homo sapiens
taaaattctctacag

SEQ ID NO: 1629785 - DNA, 15 bp, Homo sapiens
ataaaattctctaca

SEQ ID NO: 1629786 - DNA, 15 bp, Homo sapiens
aataaaattctctac

SEQ ID NO: 1629787 - DNA, 15 bp, Homo sapiens
aaataaaattctcta

SEQ ID NO: 1629788 - DNA, 15 bp, Homo sapiens
gaaataaaattctct

SEQ ID NO: 1629789 - DNA, 15 bp, Homo sapiens
agaaataaaattctc

SEQ ID NO: 1629790 - DNA, 15 bp, Homo sapiens
gagaaataaaattct

SEQ ID NO: 1629791 - DNA, 15 bp, Homo sapiens
ggagaaataaaattc

SEQ ID NO: 1629792 - DNA, 15 bp, Homo sapiens
aggagaaataaaatt

SEQ ID NO: 1629793 - DNA, 15 bp, Homo sapiens
aaggagaaataaaat

SEQ ID NO: 1629794 - DNA, 15 bp, Homo sapiens
gaaggagaaataaaa

SEQ ID NO: 1629795 - DNA, 15 bp, Homo sapiens
cgaaggagaaataaa

SEQ ID NO: 1629796 - DNA, 15 bp, Homo sapiens
gcgaaggagaaataa

SEQ ID NO: 1629797 - DNA, 15 bp, Homo sapiens
agcgaaggagaaata

SEQ ID NO: 1629798 - DNA, 15 bp, Homo sapiens
aagcgaaggagaaat

SEQ ID NO: 1629799 - DNA, 15 bp, Homo sapiens
taagcgaaggagaaa

SEQ ID NO: 1629800 - DNA, 15 bp, Homo sapiens
ataagcgaaggagaa

SEQ ID NO: 1629801 - DNA, 15 bp, Homo sapiens
cataagcgaaggaga

SEQ ID NO: 1629802 - DNA, 15 bp, Homo sapiens
tcataagcgaaggag

SEQ ID NO: 1629803 - DNA, 15 bp, Homo sapiens
ttcataagcgaagga

SEQ ID NO: 1629804 - DNA, 15 bp, Homo sapiens
cttcataagcgaagg

SEQ ID NO: 1629805 - DNA, 15 bp, Homo sapiens
gcttcataagcgaag

SEQ ID NO: 1629806 - DNA, 15 bp, Homo sapiens
agcttcataagcgaa

SEQ ID NO: 1629807 - DNA, 15 bp, Homo sapiens
aagcttcataagcga

SEQ ID NO: 1629808 - DNA, 15 bp, Homo sapiens
taagcttcataagcg

SEQ ID NO: 1629809 - DNA, 15 bp, Homo sapiens
ctaagcttcataagc

SEQ ID NO: 1629810 - DNA, 15 bp, Homo sapiens
actaagcttcataag

SEQ ID NO: 1629811 - DNA, 15 bp, Homo sapiens
aactaagcttcataa

SEQ ID NO: 1629812 - DNA, 15 bp, Homo sapiens
aaactaagcttcata

SEQ ID NO: 1629813 - DNA, 15 bp, Homo sapiens
aaaactaagcttcat

SEQ ID NO: 1629814 - DNA, 15 bp, Homo sapiens
taaaactaagcttca

SEQ ID NO: 1629815 - DNA, 15 bp, Homo sapiens
ctaaaactaagcttc

SEQ ID NO: 1629816 - DNA, 15 bp, Homo sapiens
gctaaaactaagctt

SEQ ID NO: 1629817 - DNA, 15 bp, Homo sapiens
agctaaaactaagct

SEQ ID NO: 1629818 - DNA, 15 bp, Homo sapiens
cagctaaaactaagc

SEQ ID NO: 1629819 - DNA, 15 bp, Homo sapiens
ccagctaaaactaag

SEQ ID NO: 1629820 - DNA, 15 bp, Homo sapiens
tccagctaaaactaa

SEQ ID NO: 1629821 - DNA, 15 bp, Homo sapiens
atccagctaaaacta

SEQ ID NO: 1629822 - DNA, 15 bp, Homo sapiens
tatccagctaaaact

SEQ ID NO: 1629823 - DNA, 15 bp, Homo sapiens
atatccagctaaaac

SEQ ID NO: 1629824 - DNA, 15 bp, Homo sapiens
catatccagctaaaa

SEQ ID NO: 1629825 - DNA, 15 bp, Homo sapiens
tcatatccagctaaa

SEQ ID NO: 1629826 - DNA, 15 bp, Homo sapiens
ttcatatccagctaa

SEQ ID NO: 1629827 - DNA, 15 bp, Homo sapiens
tttcatatccagcta

SEQ ID NO: 1629828 - DNA, 15 bp, Homo sapiens
atttcatatccagct

SEQ ID NO: 1629829 - DNA, 15 bp, Homo sapiens
aatttcatatccagc

SEQ ID NO: 1629830 - DNA, 15 bp, Homo sapiens
gaatttcatatccag

SEQ ID NO: 1629831 - DNA, 15 bp, Homo sapiens
agaatttcatatcca

SEQ ID NO: 1629832 - DNA, 15 bp, Homo sapiens
cagaatttcatatcc

SEQ ID NO: 1629833 - DNA, 15 bp, Homo sapiens
ccagaatttcatatc

SEQ ID NO: 1629834 - DNA, 15 bp, Homo sapiens
cccagaatttcatat

SEQ ID NO: 1629835 - DNA, 15 bp, Homo sapiens
acccagaatttcata

SEQ ID NO: 1629836 - DNA, 15 bp, Homo sapiens
aacccagaatttcat

SEQ ID NO: 1629837 - DNA, 15 bp, Homo sapiens
caacccagaatttca

SEQ ID NO: 1629838 - DNA, 15 bp, Homo sapiens
tcaacccagaatttc

SEQ ID NO: 1629839 - DNA, 15 bp, Homo sapiens
ttcaacccagaattt

SEQ ID NO: 1629840 - DNA, 15 bp, Homo sapiens
tttcaacccagaatt

SEQ ID NO: 1629841 - DNA, 15 bp, Homo sapiens
ttttcaacccagaat

SEQ ID NO: 1629842 - DNA, 15 bp, Homo sapiens
attttcaacccagaa

SEQ ID NO: 1629843 - DNA, 15 bp, Homo sapiens
aattttcaacccaga

SEQ ID NO: 1629844 - DNA, 15 bp, Homo sapiens
taattttcaacccag

SEQ ID NO: 1629845 - DNA, 15 bp, Homo sapiens
ataattttcaaccca

SEQ ID NO: 1629846 - DNA, 15 bp, Homo sapiens
aataattttcaaccc

SEQ ID NO: 1629847 - DNA, 15 bp, Homo sapiens
aaataattttcaacc

SEQ ID NO: 1629848 - DNA, 15 bp, Homo sapiens
caaataattttcaac

SEQ ID NO: 1629849 - DNA, 15 bp, Homo sapiens
gcaaataattttcaa

SEQ ID NO: 1629850 - DNA, 15 bp, Homo sapiens
agcaaataattttca

SEQ ID NO: 1629851 - DNA, 15 bp, Homo sapiens
aagcaaataattttc

SEQ ID NO: 1629852 - DNA, 15 bp, Homo sapiens
aaagcaaataatttt

SEQ ID NO: 1629853 - DNA, 15 bp, Homo sapiens
taaagcaaataattt

SEQ ID NO: 1629854 - DNA, 15 bp, Homo sapiens
ttaaagcaaataatt

SEQ ID NO: 1629855 - DNA, 15 bp, Homo sapiens
cttaaagcaaataat

SEQ ID NO: 1629856 - DNA, 15 bp, Homo sapiens
tcttaaagcaaataa

SEQ ID NO: 1629857 - DNA, 15 bp, Homo sapiens
ttcttaaagcaaata

SEQ ID NO: 1629858 - DNA, 15 bp, Homo sapiens
attcttaaagcaaat

SEQ ID NO: 1629859 - DNA, 15 bp, Homo sapiens
cattcttaaagcaaa

SEQ ID NO: 1629860 - DNA, 15 bp, Homo sapiens
acattcttaaagcaa

SEQ ID NO: 1629861 - DNA, 15 bp, Homo sapiens
aacattcttaaagca

SEQ ID NO: 1629862 - DNA, 15 bp, Homo sapiens
caacattcttaaagc

SEQ ID NO: 1629863 - DNA, 15 bp, Homo sapiens
ccaacattcttaaag

SEQ ID NO: 1629864 - DNA, 15 bp, Homo sapiens
tccaacattcttaaa

SEQ ID NO: 1629865 - DNA, 15 bp, Homo sapiens
atccaacattcttaa

SEQ ID NO: 1629866 - DNA, 15 bp, Homo sapiens
tatccaacattctta

SEQ ID NO: 1629867 - DNA, 15 bp, Homo sapiens
atatccaacattctt

SEQ ID NO: 1629868 - DNA, 15 bp, Homo sapiens
aatatccaacattct

SEQ ID NO: 1629869 - DNA, 15 bp, Homo sapiens
caatatccaacattc

SEQ ID NO: 1629870 - DNA, 15 bp, Homo sapiens
ccaatatccaacatt

SEQ ID NO: 1629871 - DNA, 15 bp, Homo sapiens
gccaatatccaacat

SEQ ID NO: 1629872 - DNA, 15 bp, Homo sapiens
ggccaatatccaaca

SEQ ID NO: 1629873 - DNA, 15 bp, Homo sapiens
gggccaatatccaac

SEQ ID NO: 1629874 - DNA, 15 bp, Homo sapiens
ggggccaatatccaa

SEQ ID NO: 1629875 - DNA, 15 bp, Homo sapiens
gggggccaatatcca

SEQ ID NO: 1629876 - DNA, 15 bp, Homo sapiens
cgggggccaatatcc

SEQ ID NO: 1629877 - DNA, 15 bp, Homo sapiens
gcgggggccaatatc

SEQ ID NO: 1629878 - DNA, 15 bp, Homo sapiens
agcgggggccaatat

SEQ ID NO: 1629879 - DNA, 15 bp, Homo sapiens
gagcgggggccaata

SEQ ID NO: 1629880 - DNA, 15 bp, Homo sapiens
agagcgggggccaat

SEQ ID NO: 1629881 - DNA, 15 bp, Homo sapiens
gagagcgggggccaa

SEQ ID NO: 1629882 - DNA, 15 bp, Homo sapiens
agagagcgggggcca

SEQ ID NO: 1629883 - DNA, 15 bp, Homo sapiens
aagagagcgggggcc

SEQ ID NO: 1629884 - DNA, 15 bp, Homo sapiens
gaagagagcgggggc

SEQ ID NO: 1629885 - DNA, 15 bp, Homo sapiens
agaagagagcggggg

SEQ ID NO: 1629886 - DNA, 15 bp, Homo sapiens
cagaagagagcgggg

SEQ ID NO: 1629887 - DNA, 15 bp, Homo sapiens
ccagaagagagcggg

SEQ ID NO: 1629888 - DNA, 15 bp, Homo sapiens
gccagaagagagcgg

SEQ ID NO: 1629889 - DNA, 15 bp, Homo sapiens
agccagaagagagcg

SEQ ID NO: 1629890 - DNA, 15 bp, Homo sapiens
aagccagaagagagc

SEQ ID NO: 1629891 - DNA, 15 bp, Homo sapiens
caagccagaagagag

SEQ ID NO: 1629892 - DNA, 15 bp, Homo sapiens
acaagccagaagaga

SEQ ID NO: 1629893 - DNA, 15 bp, Homo sapiens
tacaagccagaagag

SEQ ID NO: 1629894 - DNA, 15 bp, Homo sapiens
ctacaagccagaaga

SEQ ID NO: 1629895 - DNA, 15 bp, Homo sapiens
cctacaagccagaag

SEQ ID NO: 1629896 - DNA, 15 bp, Homo sapiens
ccctacaagccagaa

SEQ ID NO: 1629897 - DNA, 15 bp, Homo sapiens
accctacaagccaga

SEQ ID NO: 1629898 - DNA, 15 bp, Homo sapiens
taccctacaagccag

SEQ ID NO: 1629899 - DNA, 15 bp, Homo sapiens
ataccctacaagcca

SEQ ID NO: 1629900 - DNA, 15 bp, Homo sapiens
cataccctacaagcc

SEQ ID NO: 1629901 - DNA, 15 bp, Homo sapiens
acataccctacaagc

SEQ ID NO: 1629902 - DNA, 15 bp, Homo sapiens
tacataccctacaag

SEQ ID NO: 1629903 - DNA, 15 bp, Homo sapiens
gtacataccctacaa

SEQ ID NO: 1629904 - DNA, 15 bp, Homo sapiens
tgtacataccctaca

SEQ ID NO: 1629905 - DNA, 15 bp, Homo sapiens
ctgtacataccctac

SEQ ID NO: 1629906 - DNA, 15 bp, Homo sapiens
tctgtacatacccta

SEQ ID NO: 1629907 - DNA, 15 bp, Homo sapiens
ttctgtacataccct

SEQ ID NO: 1629908 - DNA, 15 bp, Homo sapiens
tttctgtacataccc

SEQ ID NO: 1629909 - DNA, 15 bp, Homo sapiens
ctttctgtacatacc

SEQ ID NO: 1629910 - DNA, 15 bp, Homo sapiens
tctttctgtacatac

SEQ ID NO: 1629911 - DNA, 15 bp, Homo sapiens
atctttctgtacata

SEQ ID NO: 1629912 - DNA, 15 bp, Homo sapiens
gatctttctgtacat

SEQ ID NO: 1629913 - DNA, 15 bp, Homo sapiens
ggatctttctgtaca

SEQ ID NO: 1629914 - DNA, 15 bp, Homo sapiens
tggatctttctgtac

SEQ ID NO: 1629915 - DNA, 15 bp, Homo sapiens
gtggatctttctgta

SEQ ID NO: 1629916 - DNA, 15 bp, Homo sapiens
agtggatctttctgt

SEQ ID NO: 1629917 - DNA, 15 bp, Homo sapiens
cagtggatctttctg

SEQ ID NO: 1629918 - DNA, 15 bp, Homo sapiens
acagtggatctttct

SEQ ID NO: 1629919 - DNA, 15 bp, Homo sapiens
aacagtggatctttc

SEQ ID NO: 1629920 - DNA, 15 bp, Homo sapiens
taacagtggatcttt

SEQ ID NO: 1629921 - DNA, 15 bp, Homo sapiens
ctaacagtggatctt

SEQ ID NO: 1629922 - DNA, 15 bp, Homo sapiens
actaacagtggatct

SEQ ID NO: 1629923 - DNA, 15 bp, Homo sapiens
gactaacagtggatc

SEQ ID NO: 1629924 - DNA, 15 bp, Homo sapiens
agactaacagtggat

SEQ ID NO: 1629925 - DNA, 15 bp, Homo sapiens
cagactaacagtgga

SEQ ID NO: 1629926 - DNA, 15 bp, Homo sapiens
tcagactaacagtgg

SEQ ID NO: 1629927 - DNA, 15 bp, Homo sapiens
atcagactaacagtg

SEQ ID NO: 1629928 - DNA, 15 bp, Homo sapiens
catcagactaacagt

SEQ ID NO: 1629929 - DNA, 15 bp, Homo sapiens
ccatcagactaacag

SEQ ID NO: 1629930 - DNA, 15 bp, Homo sapiens
tccatcagactaaca

SEQ ID NO: 1629931 - DNA, 15 bp, Homo sapiens
gtccatcagactaac

SEQ ID NO: 1629932 - DNA, 15 bp, Homo sapiens
agtccatcagactaa

SEQ ID NO: 1629933 - DNA, 15 bp, Homo sapiens
aagtccatcagacta

SEQ ID NO: 1629934 - DNA, 15 bp, Homo sapiens
gaagtccatcagact

SEQ ID NO: 1629935 - DNA, 15 bp, Homo sapiens
ggaagtccatcagac

SEQ ID NO: 1629936 - DNA, 15 bp, Homo sapiens
aggaagtccatcaga

SEQ ID NO: 1629937 - DNA, 15 bp, Homo sapiens
aaggaagtccatcag

SEQ ID NO: 1629938 - DNA, 15 bp, Homo sapiens
aaaggaagtccatca

SEQ ID NO: 1629939 - DNA, 15 bp, Homo sapiens
aaaaggaagtccatc

SEQ ID NO: 1629940 - DNA, 15 bp, Homo sapiens
caaaaggaagtccat

SEQ ID NO: 1629941 - DNA, 15 bp, Homo sapiens
acaaaaggaagtcca

SEQ ID NO: 1629942 - DNA, 15 bp, Homo sapiens
tacaaaaggaagtcc

SEQ ID NO: 1629943 - DNA, 15 bp, Homo sapiens
ttacaaaaggaagtc

SEQ ID NO: 1629944 - DNA, 15 bp, Homo sapiens
cttacaaaaggaagt

SEQ ID NO: 1629945 - DNA, 15 bp, Homo sapiens
acttacaaaaggaag

SEQ ID NO: 1629946 - DNA, 15 bp, Homo sapiens
tacttacaaaaggaa

SEQ ID NO: 1629947 - DNA, 15 bp, Homo sapiens
ttacttacaaaagga

SEQ ID NO: 1629948 - DNA, 15 bp, Homo sapiens
gttacttacaaaagg

SEQ ID NO: 1629949 - DNA, 15 bp, Homo sapiens
ggttacttacaaaag

SEQ ID NO: 1629950 - DNA, 15 bp, Homo sapiens
aggttacttacaaaa

SEQ ID NO: 1629951 - DNA, 15 bp, Homo sapiens
caggttacttacaaa

SEQ ID NO: 1629952 - DNA, 15 bp, Homo sapiens
tcaggttacttacaa

SEQ ID NO: 1629953 - DNA, 15 bp, Homo sapiens
gtcaggttacttaca

SEQ ID NO: 1629954 - DNA, 15 bp, Homo sapiens
ggtcaggttacttac

SEQ ID NO: 1629955 - DNA, 15 bp, Homo sapiens
aggtcaggttactta

SEQ ID NO: 1629956 - DNA, 15 bp, Homo sapiens
aaggtcaggttactt

SEQ ID NO: 1629957 - DNA, 15 bp, Homo sapiens
aaaggtcaggttact

SEQ ID NO: 1629958 - DNA, 15 bp, Homo sapiens
gaaaggtcaggttac

SEQ ID NO: 1629959 - DNA, 15 bp, Homo sapiens
agaaaggtcaggtta

SEQ ID NO: 1629960 - DNA, 15 bp, Homo sapiens
gagaaaggtcaggtt

SEQ ID NO: 1629961 - DNA, 15 bp, Homo sapiens
agagaaaggtcaggt

SEQ ID NO: 1629962 - DNA, 15 bp, Homo sapiens
gagagaaaggtcagg

SEQ ID NO: 1629963 - DNA, 15 bp, Homo sapiens
agagagaaaggtcag

SEQ ID NO: 1629964 - DNA, 15 bp, Homo sapiens
cagagagaaaggtca

SEQ ID NO: 1629965 - DNA, 15 bp, Homo sapiens
ccagagagaaaggtc

SEQ ID NO: 1629966 - DNA, 15 bp, Homo sapiens
gccagagagaaaggt

SEQ ID NO: 1629967 - DNA, 15 bp, Homo sapiens
agccagagagaaagg

SEQ ID NO: 1629968 - DNA, 15 bp, Homo sapiens
cagccagagagaaag

SEQ ID NO: 1629969 - DNA, 15 bp, Homo sapiens
gcagccagagagaaa

SEQ ID NO: 1629970 - DNA, 15 bp, Homo sapiens
ggcagccagagagaa

SEQ ID NO: 1629971 - DNA, 15 bp, Homo sapiens
gggcagccagagaga

SEQ ID NO: 1629972 - DNA, 15 bp, Homo sapiens
agggcagccagagag

SEQ ID NO: 1629973 - DNA, 15 bp, Homo sapiens
aagggcagccagaga

SEQ ID NO: 1629974 - DNA, 15 bp, Homo sapiens
taagggcagccagag

SEQ ID NO: 1629975 - DNA, 15 bp, Homo sapiens
ttaagggcagccaga

SEQ ID NO: 1629976 - DNA, 15 bp, Homo sapiens
gttaagggcagccag

SEQ ID NO: 1629977 - DNA, 15 bp, Homo sapiens
tgttaagggcagcca

SEQ ID NO: 1629978 - DNA, 15 bp, Homo sapiens
atgttaagggcagcc

SEQ ID NO: 1629979 - DNA, 15 bp, Homo sapiens
aatgttaagggcagc

SEQ ID NO: 1629980 - DNA, 15 bp, Homo sapiens
aaatgttaagggcag

SEQ ID NO: 1629981 - DNA, 15 bp, Homo sapiens
aaaatgttaagggca

SEQ ID NO: 1629982 - DNA, 15 bp, Homo sapiens
aaaaatgttaagggc

SEQ ID NO: 1629983 - DNA, 15 bp, Homo sapiens
aaaaaatgttaaggg

SEQ ID NO: 1629984 - DNA, 15 bp, Homo sapiens
aaaaaaatgttaagg

SEQ ID NO: 1629985 - DNA, 15 bp, Homo sapiens
gaaaaaaatgttaag

SEQ ID NO: 1629986 - DNA, 15 bp, Homo sapiens
agaaaaaaatgttaa

SEQ ID NO: 1629987 - DNA, 15 bp, Homo sapiens
aagaaaaaaatgtta

SEQ ID NO: 1629988 - DNA, 15 bp, Homo sapiens
gaagaaaaaaatgtt

SEQ ID NO: 1629989 - DNA, 15 bp, Homo sapiens
tgaagaaaaaaatgt

SEQ ID NO: 1629990 - DNA, 15 bp, Homo sapiens
atgaagaaaaaaatg

SEQ ID NO: 1629991 - DNA, 15 bp, Homo sapiens
aatgaagaaaaaaat

SEQ ID NO: 1629992 - DNA, 15 bp, Homo sapiens
aaatgaagaaaaaaa

SEQ ID NO: 1629993 - DNA, 15 bp, Homo sapiens
gaaatgaagaaaaaa

SEQ ID NO: 1629994 - DNA, 15 bp, Homo sapiens
tgaaatgaagaaaaa

SEQ ID NO: 1629995 - DNA, 15 bp, Homo sapiens
ttgaaatgaagaaaa

SEQ ID NO: 1629996 - DNA, 15 bp, Homo sapiens
gttgaaatgaagaaa

SEQ ID NO: 1629997 - DNA, 15 bp, Homo sapiens
ggttgaaatgaagaa

SEQ ID NO: 1629998 - DNA, 15 bp, Homo sapiens
aggttgaaatgaaga

SEQ ID NO: 1629999 - DNA, 15 bp, Homo sapiens
aaggttgaaatgaag

SEQ ID NO: 1630000 - DNA, 15 bp, Homo sapiens
caaggttgaaatgaa

SEQ ID NO: 1630001 - DNA, 15 bp, Homo sapiens
ccaaggttgaaatga

SEQ ID NO: 1630002 - DNA, 15 bp, Homo sapiens
accaaggttgaaatg

SEQ ID NO: 1630003 - DNA, 15 bp, Homo sapiens
caccaaggttgaaat

SEQ ID NO: 1630004 - DNA, 15 bp, Homo sapiens
tcaccaaggttgaaa

SEQ ID NO: 1630005 - DNA, 15 bp, Homo sapiens
ttcaccaaggttgaa

SEQ ID NO: 1630006 - DNA, 15 bp, Homo sapiens
attcaccaaggttga

SEQ ID NO: 1630007 - DNA, 15 bp, Homo sapiens
gattcaccaaggttg

SEQ ID NO: 1630008 - DNA, 15 bp, Homo sapiens
agattcaccaaggtt

SEQ ID NO: 1630009 - DNA, 15 bp, Homo sapiens
cagattcaccaaggt

SEQ ID NO: 1630010 - DNA, 15 bp, Homo sapiens
tcagattcaccaagg

SEQ ID NO: 1630011 - DNA, 15 bp, Homo sapiens
atcagattcaccaag

SEQ ID NO: 1630012 - DNA, 15 bp, Homo sapiens
catcagattcaccaa

SEQ ID NO: 1630013 - DNA, 15 bp, Homo sapiens
tcatcagattcacca

SEQ ID NO: 1630014 - DNA, 15 bp, Homo sapiens
atcatcagattcacc

SEQ ID NO: 1630015 - DNA, 15 bp, Homo sapiens
aatcatcagattcac

SEQ ID NO: 1630016 - DNA, 15 bp, Homo sapiens
taatcatcagattca

SEQ ID NO: 1630017 - DNA, 15 bp, Homo sapiens
ataatcatcagattc

SEQ ID NO: 1630018 - DNA, 15 bp, Homo sapiens
cataatcatcagatt

SEQ ID NO: 1630019 - DNA, 15 bp, Homo sapiens
acataatcatcagat

SEQ ID NO: 1630020 - DNA, 15 bp, Homo sapiens
cacataatcatcaga

SEQ ID NO: 1630021 - DNA, 15 bp, Homo sapiens
acacataatcatcag

SEQ ID NO: 1630022 - DNA, 15 bp, Homo sapiens
gacacataatcatca

SEQ ID NO: 1630023 - DNA, 15 bp, Homo sapiens
cgacacataatcatc

SEQ ID NO: 1630024 - DNA, 15 bp, Homo sapiens
acgacacataatcat

SEQ ID NO: 1630025 - DNA, 15 bp, Homo sapiens
tacgacacataatca

SEQ ID NO: 1630026 - DNA, 15 bp, Homo sapiens
ttacgacacataatc

SEQ ID NO: 1630027 - DNA, 15 bp, Homo sapiens
cttacgacacataat

SEQ ID NO: 1630028 - DNA, 15 bp, Homo sapiens
ccttacgacacataa

SEQ ID NO: 1630029 - DNA, 15 bp, Homo sapiens
accttacgacacata

SEQ ID NO: 1630030 - DNA, 15 bp, Homo sapiens
aaccttacgacacat

SEQ ID NO: 1630031 - DNA, 15 bp, Homo sapiens
caaccttacgacaca

SEQ ID NO: 1630032 - DNA, 15 bp, Homo sapiens
gcaaccttacgacac

SEQ ID NO: 1630033 - DNA, 15 bp, Homo sapiens
agcaaccttacgaca

SEQ ID NO: 1630034 - DNA, 15 bp, Homo sapiens
gagcaaccttacgac

SEQ ID NO: 1630035 - DNA, 15 bp, Homo sapiens
agagcaaccttacga

SEQ ID NO: 1630036 - DNA, 15 bp, Homo sapiens
aagagcaaccttacg

SEQ ID NO: 1630037 - DNA, 15 bp, Homo sapiens
gaagagcaaccttac

SEQ ID NO: 1630038 - DNA, 15 bp, Homo sapiens
agaagagcaacctta

SEQ ID NO: 1630039 - DNA, 15 bp, Homo sapiens
gagaagagcaacctt

SEQ ID NO: 1630040 - DNA, 15 bp, Homo sapiens
cgagaagagcaacct

SEQ ID NO: 1630041 - DNA, 15 bp, Homo sapiens
tcgagaagagcaacc

SEQ ID NO: 1630042 - DNA, 15 bp, Homo sapiens
ctcgagaagagcaac

SEQ ID NO: 1630043 - DNA, 15 bp, Homo sapiens
cctcgagaagagcaa

SEQ ID NO: 1630044 - DNA, 15 bp, Homo sapiens
tcctcgagaagagca

SEQ ID NO: 1630045 - DNA, 15 bp, Homo sapiens
ctcctcgagaagagc

SEQ ID NO: 1630046 - DNA, 15 bp, Homo sapiens
actcctcgagaagag

SEQ ID NO: 1630047 - DNA, 15 bp, Homo sapiens
tactcctcgagaaga

SEQ ID NO: 1630048 - DNA, 15 bp, Homo sapiens
atactcctcgagaag

SEQ ID NO: 1630049 - DNA, 15 bp, Homo sapiens
gatactcctcgagaa

SEQ ID NO: 1630050 - DNA, 15 bp, Homo sapiens
tgatactcctcgaga

SEQ ID NO: 1630051 - DNA, 15 bp, Homo sapiens
ctgatactcctcgag

SEQ ID NO: 1630052 - DNA, 15 bp, Homo sapiens
gctgatactcctcga

SEQ ID NO: 1630053 - DNA, 15 bp, Homo sapiens
ggctgatactcctcg

SEQ ID NO: 1630054 - DNA, 15 bp, Homo sapiens
tggctgatactcctc

SEQ ID NO: 1630055 - DNA, 15 bp, Homo sapiens
ctggctgatactcct

SEQ ID NO: 1630056 - DNA, 15 bp, Homo sapiens
actggctgatactcc

SEQ ID NO: 1630057 - DNA, 15 bp, Homo sapiens
gactggctgatactc

SEQ ID NO: 1630058 - DNA, 15 bp, Homo sapiens
agactggctgatact

SEQ ID NO: 1630059 - DNA, 15 bp, Homo sapiens
cagactggctgatac

SEQ ID NO: 1630060 - DNA, 15 bp, Homo sapiens
ccagactggctgata

SEQ ID NO: 1630061 - DNA, 15 bp, Homo sapiens
accagactggctgat

SEQ ID NO: 1630062 - DNA, 15 bp, Homo sapiens
taccagactggctga

SEQ ID NO: 1630063 - DNA, 15 bp, Homo sapiens
ctaccagactggctg

SEQ ID NO: 1630064 - DNA, 15 bp, Homo sapiens
tctaccagactggct

SEQ ID NO: 1630065 - DNA, 15 bp, Homo sapiens
ttctaccagactggc

SEQ ID NO: 1630066 - DNA, 15 bp, Homo sapiens
attctaccagactgg

SEQ ID NO: 1630067 - DNA, 15 bp, Homo sapiens
cattctaccagactg

SEQ ID NO: 1630068 - DNA, 15 bp, Homo sapiens
tcattctaccagact

SEQ ID NO: 1630069 - DNA, 15 bp, Homo sapiens
ttcattctaccagac

SEQ ID NO: 1630070 - DNA, 15 bp, Homo sapiens
attcattctaccaga

SEQ ID NO: 1630071 - DNA, 15 bp, Homo sapiens
tattcattctaccag

SEQ ID NO: 1630072 - DNA, 15 bp, Homo sapiens
ttattcattctacca

SEQ ID NO: 1630073 - DNA, 15 bp, Homo sapiens
tttattcattctacc

SEQ ID NO: 1630074 - DNA, 15 bp, Homo sapiens
ttttattcattctac

SEQ ID NO: 1630075 - DNA, 15 bp, Homo sapiens
cttttattcattcta

SEQ ID NO: 1630076 - DNA, 15 bp, Homo sapiens
gcttttattcattct

SEQ ID NO: 1630077 - DNA, 15 bp, Homo sapiens
ggcttttattcattc

SEQ ID NO: 1630078 - DNA, 15 bp, Homo sapiens
tggcttttattcatt

SEQ ID NO: 1630079 - DNA, 15 bp, Homo sapiens
gtggcttttattcat

SEQ ID NO: 1630080 - DNA, 15 bp, Homo sapiens
agtggcttttattca

SEQ ID NO: 1630081 - DNA, 15 bp, Homo sapiens
tagtggcttttattc

SEQ ID NO: 1630082 - DNA, 15 bp, Homo sapiens
atagtggcttttatt

SEQ ID NO: 1630083 - DNA, 15 bp, Homo sapiens
tatagtggcttttat

SEQ ID NO: 1630084 - DNA, 15 bp, Homo sapiens
ttatagtggctttta

SEQ ID NO: 1630085 - DNA, 15 bp, Homo sapiens
cttatagtggctttt

SEQ ID NO: 1630086 - DNA, 15 bp, Homo sapiens
ccttatagtggcttt

SEQ ID NO: 1630087 - DNA, 15 bp, Homo sapiens
accttatagtggctt

SEQ ID NO: 1630088 - DNA, 15 bp, Homo sapiens
gaccttatagtggct

SEQ ID NO: 1630089 - DNA, 15 bp, Homo sapiens
agaccttatagtggc

SEQ ID NO: 1630090 - DNA, 15 bp, Homo sapiens
cagaccttatagtgg

SEQ ID NO: 1630091 - DNA, 15 bp, Homo sapiens
acagaccttatagtg

SEQ ID NO: 1630092 - DNA, 15 bp, Homo sapiens
aacagaccttatagt

SEQ ID NO: 1630093 - DNA, 15 bp, Homo sapiens
aaacagaccttatag

SEQ ID NO: 1630094 - DNA, 15 bp, Homo sapiens
taaacagaccttata

SEQ ID NO: 1630095 - DNA, 15 bp, Homo sapiens
gtaaacagaccttat

SEQ ID NO: 1630096 - DNA, 15 bp, Homo sapiens
ggtaaacagacctta

SEQ ID NO: 1630097 - DNA, 15 bp, Homo sapiens
gggtaaacagacctt

SEQ ID NO: 1630098 - DNA, 15 bp, Homo sapiens
agggtaaacagacct

SEQ ID NO: 1630099 - DNA, 15 bp, Homo sapiens
cagggtaaacagacc

SEQ ID NO: 1630100 - DNA, 15 bp, Homo sapiens
tcagggtaaacagac

SEQ ID NO: 1630101 - DNA, 15 bp, Homo sapiens
ctcagggtaaacaga

SEQ ID NO: 1630102 - DNA, 15 bp, Homo sapiens
tctcagggtaaacag

SEQ ID NO: 1630103 - DNA, 15 bp, Homo sapiens
ttctcagggtaaaca

SEQ ID NO: 1630104 - DNA, 15 bp, Homo sapiens
cttctcagggtaaac

SEQ ID NO: 1630105 - DNA, 15 bp, Homo sapiens
ccttctcagggtaaa

SEQ ID NO: 1630106 - DNA, 15 bp, Homo sapiens
cccttctcagggtaa

SEQ ID NO: 1630107 - DNA, 15 bp, Homo sapiens
ccccttctcagggta

SEQ ID NO: 1630108 - DNA, 15 bp, Homo sapiens
tccccttctcagggt

SEQ ID NO: 1630109 - DNA, 15 bp, Homo sapiens
gtccccttctcaggg

SEQ ID NO: 1630110 - DNA, 15 bp, Homo sapiens
agtccccttctcagg

SEQ ID NO: 1630111 - DNA, 15 bp, Homo sapiens
cagtccccttctcag

SEQ ID NO: 1630112 - DNA, 15 bp, Homo sapiens
gcagtccccttctca

SEQ ID NO: 1630113 - DNA, 15 bp, Homo sapiens
ggcagtccccttctc

SEQ ID NO: 1630114 - DNA, 15 bp, Homo sapiens
gggcagtccccttct

SEQ ID NO: 1630115 - DNA, 15 bp, Homo sapiens
tgggcagtccccttc

SEQ ID NO: 1630116 - DNA, 15 bp, Homo sapiens
ttgggcagtcccctt

SEQ ID NO: 1630117 - DNA, 15 bp, Homo sapiens
gttgggcagtcccct

SEQ ID NO: 1630118 - DNA, 15 bp, Homo sapiens
agttgggcagtcccc

SEQ ID NO: 1630119 - DNA, 15 bp, Homo sapiens
gagttgggcagtccc

SEQ ID NO: 1630120 - DNA, 15 bp, Homo sapiens
agagttgggcagtcc

SEQ ID NO: 1630121 - DNA, 15 bp, Homo sapiens
gagagttgggcagtc

SEQ ID NO: 1630122 - DNA, 15 bp, Homo sapiens
ggagagttgggcagt

SEQ ID NO: 1630123 - DNA, 15 bp, Homo sapiens
gggagagttgggcag

SEQ ID NO: 1630124 - DNA, 15 bp, Homo sapiens
agggagagttgggca

SEQ ID NO: 1630125 - DNA, 15 bp, Homo sapiens
tagggagagttgggc

SEQ ID NO: 1630126 - DNA, 15 bp, Homo sapiens
atagggagagttggg

SEQ ID NO: 1630127 - DNA, 15 bp, Homo sapiens
ttatagggagagttg

SEQ ID NO: 1630128 - DNA, 15 bp, Homo sapiens
tttatagggagagtt

SEQ ID NO: 1630129 - DNA, 15 bp, Homo sapiens
ttttatagggagagt

SEQ ID NO: 1630130 - DNA, 15 bp, Homo sapiens
attttatagggagag

SEQ ID NO: 1630131 - DNA, 15 bp, Homo sapiens
cattttatagggaga

SEQ ID NO: 1630132 - DNA, 15 bp, Homo sapiens
gcattttatagggag

SEQ ID NO: 1630133 - DNA, 15 bp, Homo sapiens
ggcattttataggga

SEQ ID NO: 1630134 - DNA, 15 bp, Homo sapiens
tggcattttataggg

SEQ ID NO: 1630135 - DNA, 15 bp, Homo sapiens
ttggcattttatagg

SEQ ID NO: 1630136 - DNA, 15 bp, Homo sapiens
cttggcattttatag

SEQ ID NO: 1630137 - DNA, 15 bp, Homo sapiens
acttggcattttata

SEQ ID NO: 1630138 - DNA, 15 bp, Homo sapiens
cacttggcattttat

SEQ ID NO: 1630139 - DNA, 15 bp, Homo sapiens
ccacttggcatttta

SEQ ID NO: 1630140 - DNA, 15 bp, Homo sapiens
gccacttggcatttt

SEQ ID NO: 1630141 - DNA, 15 bp, Homo sapiens
cgccacttggcattt

SEQ ID NO: 1630142 - DNA, 15 bp, Homo sapiens
gcgccacttggcatt

SEQ ID NO: 1630143 - DNA, 15 bp, Homo sapiens
tgcgccacttggcat

SEQ ID NO: 1630144 - DNA, 15 bp, Homo sapiens
gtgcgccacttggca

SEQ ID NO: 1630145 - DNA, 15 bp, Homo sapiens
ggtgcgccacttggc

SEQ ID NO: 1630146 - DNA, 15 bp, Homo sapiens
gggtgcgccacttgg

SEQ ID NO: 1630147 - DNA, 15 bp, Homo sapiens
agggtgcgccacttg

SEQ ID NO: 1630148 - DNA, 15 bp, Homo sapiens
tagggtgcgccactt

SEQ ID NO: 1630149 - DNA, 15 bp, Homo sapiens
gtagggtgcgccact

SEQ ID NO: 1630150 - DNA, 15 bp, Homo sapiens
tgtagggtgcgccac

SEQ ID NO: 1630151 - DNA, 15 bp, Homo sapiens
atgtagggtgcgcca

SEQ ID NO: 1630152 - DNA, 15 bp, Homo sapiens
catgtagggtgcgcc

SEQ ID NO: 1630153 - DNA, 15 bp, Homo sapiens
tcatgtagggtgcgc

SEQ ID NO: 1630154 - DNA, 15 bp, Homo sapiens
ttcatgtagggtgcg

SEQ ID NO: 1630155 - DNA, 15 bp, Homo sapiens
cttcatgtagggtgc

SEQ ID NO: 1630156 - DNA, 15 bp, Homo sapiens
gcttcatgtagggtg

SEQ ID NO: 1630157 - DNA, 15 bp, Homo sapiens
tgcttcatgtagggt

SEQ ID NO: 1630158 - DNA, 15 bp, Homo sapiens
ctgcttcatgtaggg

SEQ ID NO: 1630159 - DNA, 15 bp, Homo sapiens
gctgcttcatgtagg

SEQ ID NO: 1630160 - DNA, 15 bp, Homo sapiens
agctgcttcatgtag

SEQ ID NO: 1630161 - DNA, 15 bp, Homo sapiens
cagctgcttcatgta

SEQ ID NO: 1630162 - DNA, 15 bp, Homo sapiens
tcagctgcttcatgt

SEQ ID NO: 1630163 - DNA, 15 bp, Homo sapiens
atcagctgcttcatg

SEQ ID NO: 1630164 - DNA, 15 bp, Homo sapiens
tatcagctgcttcat

SEQ ID NO: 1630165 - DNA, 15 bp, Homo sapiens
atatcagctgcttca

SEQ ID NO: 1630166 - DNA, 15 bp, Homo sapiens
catatcagctgcttc

SEQ ID NO: 1630167 - DNA, 15 bp, Homo sapiens
gcatatcagctgctt

SEQ ID NO: 1630168 - DNA, 15 bp, Homo sapiens
agcatatcagctgct

SEQ ID NO: 1630169 - DNA, 15 bp, Homo sapiens
aagcatatcagctgc

SEQ ID NO: 1630170 - DNA, 15 bp, Homo sapiens
gaagcatatcagctg

SEQ ID NO: 1630171 - DNA, 15 bp, Homo sapiens
tgaagcatatcagct

SEQ ID NO: 1630172 - DNA, 15 bp, Homo sapiens
atgaagcatatcagc

SEQ ID NO: 1630173 - DNA, 15 bp, Homo sapiens
tatgaagcatatcag

SEQ ID NO: 1630174 - DNA, 15 bp, Homo sapiens
atatgaagcatatca

SEQ ID NO: 1630175 - DNA, 15 bp, Homo sapiens
catatgaagcatatc

SEQ ID NO: 1630176 - DNA, 15 bp, Homo sapiens
gcatatgaagcatat

SEQ ID NO: 1630177 - DNA, 15 bp, Homo sapiens
tgcatatgaagcata

SEQ ID NO: 1630178 - DNA, 15 bp, Homo sapiens
ttgcatatgaagcat

SEQ ID NO: 1630179 - DNA, 15 bp, Homo sapiens
cttgcatatgaagca

SEQ ID NO: 1630180 - DNA, 15 bp, Homo sapiens
acttgcatatgaagc

SEQ ID NO: 1630181 - DNA, 15 bp, Homo sapiens
gacttgcatatgaag

SEQ ID NO: 1630182 - DNA, 15 bp, Homo sapiens
tgacttgcatatgaa

SEQ ID NO: 1630183 - DNA, 15 bp, Homo sapiens
atgacttgcatatga

SEQ ID NO: 1630184 - DNA, 15 bp, Homo sapiens
catgacttgcatatg

SEQ ID NO: 1630185 - DNA, 15 bp, Homo sapiens
acatgacttgcatat

SEQ ID NO: 1630186 - DNA, 15 bp, Homo sapiens
aacatgacttgcata

SEQ ID NO: 1630187 - DNA, 15 bp, Homo sapiens
caacatgacttgcat

SEQ ID NO: 1630188 - DNA, 15 bp, Homo sapiens
ccaacatgacttgca

SEQ ID NO: 1630189 - DNA, 15 bp, Homo sapiens
tccaacatgacttgc

SEQ ID NO: 1630190 - DNA, 15 bp, Homo sapiens
gtccaacatgacttg

SEQ ID NO: 1630191 - DNA, 15 bp, Homo sapiens
agtccaacatgactt

SEQ ID NO: 1630192 - DNA, 15 bp, Homo sapiens
cagtccaacatgact

SEQ ID NO: 1630193 - DNA, 15 bp, Homo sapiens
ccagtccaacatgac

SEQ ID NO: 1630194 - DNA, 15 bp, Homo sapiens
gccagtccaacatga

SEQ ID NO: 1630195 - DNA, 15 bp, Homo sapiens
agccagtccaacatg

SEQ ID NO: 1630196 - DNA, 15 bp, Homo sapiens
aagccagtccaacat

SEQ ID NO: 1630197 - DNA, 15 bp, Homo sapiens
aaagccagtccaaca

SEQ ID NO: 1630198 - DNA, 15 bp, Homo sapiens
taaagccagtccaac

SEQ ID NO: 1630199 - DNA, 15 bp, Homo sapiens
gtaaagccagtccaa

SEQ ID NO: 1630200 - DNA, 15 bp, Homo sapiens
ggtaaagccagtcca

SEQ ID NO: 1630201 - DNA, 15 bp, Homo sapiens
tggtaaagccagtcc

SEQ ID NO: 1630202 - DNA, 15 bp, Homo sapiens
atggtaaagccagtc

SEQ ID NO: 1630203 - DNA, 15 bp, Homo sapiens
catggtaaagccagt

SEQ ID NO: 1630204 - DNA, 15 bp, Homo sapiens
tcatggtaaagccag

SEQ ID NO: 1630205 - DNA, 15 bp, Homo sapiens
atcatggtaaagcca

SEQ ID NO: 1630206 - DNA, 15 bp, Homo sapiens
tatcatggtaaagcc

SEQ ID NO: 1630207 - DNA, 15 bp, Homo sapiens
atatcatggtaaagc

SEQ ID NO: 1630208 - DNA, 15 bp, Homo sapiens
aatatcatggtaaag

SEQ ID NO: 1630209 - DNA, 15 bp, Homo sapiens
cgaatatcatggtaa

SEQ ID NO: 1630210 - DNA, 15 bp, Homo sapiens
gcgaatatcatggta

SEQ ID NO: 1630211 - DNA, 15 bp, Homo sapiens
ggcgaatatcatggt

SEQ ID NO: 1630212 - DNA, 15 bp, Homo sapiens
gggcgaatatcatgg

SEQ ID NO: 1630213 - DNA, 15 bp, Homo sapiens
tgggcgaatatcatg

SEQ ID NO: 1630214 - DNA, 15 bp, Homo sapiens
gtgggcgaatatcat

SEQ ID NO: 1630215 - DNA, 15 bp, Homo sapiens
agtgggcgaatatca

SEQ ID NO: 1630216 - DNA, 15 bp, Homo sapiens
cagtgggcgaatatc

SEQ ID NO: 1630217 - DNA, 15 bp, Homo sapiens
tcagtgggcgaatat

SEQ ID NO: 1630218 - DNA, 15 bp, Homo sapiens
ttcagtgggcgaata

SEQ ID NO: 1630219 - DNA, 15 bp, Homo sapiens
attcagtgggcgaat

SEQ ID NO: 1630220 - DNA, 15 bp, Homo sapiens
tattcagtgggcgaa

SEQ ID NO: 1630221 - DNA, 15 bp, Homo sapiens
atattcagtgggcga

SEQ ID NO: 1630222 - DNA, 15 bp, Homo sapiens
catattcagtgggcg

SEQ ID NO: 1630223 - DNA, 15 bp, Homo sapiens
gcatattcagtgggc

SEQ ID NO: 1630224 - DNA, 15 bp, Homo sapiens
ggcatattcagtggg

SEQ ID NO: 1630225 - DNA, 15 bp, Homo sapiens
gggcatattcagtgg

SEQ ID NO: 1630226 - DNA, 15 bp, Homo sapiens
tgggcatattcagtg

SEQ ID NO: 1630227 - DNA, 15 bp, Homo sapiens
atgggcatattcagt

SEQ ID NO: 1630228 - DNA, 15 bp, Homo sapiens
aatgggcatattcag

SEQ ID NO: 1630229 - DNA, 15 bp, Homo sapiens
taatgggcatattca

SEQ ID NO: 1630230 - DNA, 15 bp, Homo sapiens
gtaatgggcatattc

SEQ ID NO: 1630231 - DNA, 15 bp, Homo sapiens
ggtaatgggcatatt

SEQ ID NO: 1630232 - DNA, 15 bp, Homo sapiens
gggtaatgggcatat

SEQ ID NO: 1630233 - DNA, 15 bp, Homo sapiens
tgggtaatgggcata

SEQ ID NO: 1630234 - DNA, 15 bp, Homo sapiens
ctgggtaatgggcat

SEQ ID NO: 1630235 - DNA, 15 bp, Homo sapiens
tctgggtaatgggca

SEQ ID NO: 1630236 - DNA, 15 bp, Homo sapiens
gtctgggtaatgggc

SEQ ID NO: 1630237 - DNA, 15 bp, Homo sapiens
ggtctgggtaatggg

SEQ ID NO: 1630238 - DNA, 15 bp, Homo sapiens
tggtctgggtaatgg

SEQ ID NO: 1630239 - DNA, 15 bp, Homo sapiens
atggtctgggtaatg

SEQ ID NO: 1630240 - DNA, 15 bp, Homo sapiens
catggtctgggtaat

SEQ ID NO: 1630241 - DNA, 15 bp, Homo sapiens
ccatggtctgggtaa

SEQ ID NO: 1630242 - DNA, 15 bp, Homo sapiens
accatggtctgggta

SEQ ID NO: 1630243 - DNA, 15 bp, Homo sapiens
taccatggtctgggt

SEQ ID NO: 1630244 - DNA, 15 bp, Homo sapiens
ttaccatggtctggg

SEQ ID NO: 1630245 - DNA, 15 bp, Homo sapiens
tttaccatggtctgg

SEQ ID NO: 1630246 - DNA, 15 bp, Homo sapiens
atttaccatggtctg

SEQ ID NO: 1630247 - DNA, 15 bp, Homo sapiens
catttaccatggtct

SEQ ID NO: 1630248 - DNA, 15 bp, Homo sapiens
gcatttaccatggtc

SEQ ID NO: 1630249 - DNA, 15 bp, Homo sapiens
agcatttaccatggt

SEQ ID NO: 1630250 - DNA, 15 bp, Homo sapiens
tagcatttaccatgg

SEQ ID NO: 1630251 - DNA, 15 bp, Homo sapiens
gtagcatttaccatg

SEQ ID NO: 1630252 - DNA, 15 bp, Homo sapiens
cgtagcatttaccat

SEQ ID NO: 1630253 - DNA, 15 bp, Homo sapiens
ccgtagcatttacca

SEQ ID NO: 1630254 - DNA, 15 bp, Homo sapiens
accgtagcatttacc

SEQ ID NO: 1630255 - DNA, 15 bp, Homo sapiens
aaccgtagcatttac

SEQ ID NO: 1630256 - DNA, 15 bp, Homo sapiens
gaaccgtagcattta

SEQ ID NO: 1630257 - DNA, 15 bp, Homo sapiens
tgaaccgtagcattt

SEQ ID NO: 1630258 - DNA, 15 bp, Homo sapiens
ttgaaccgtagcatt

SEQ ID NO: 1630259 - DNA, 15 bp, Homo sapiens
tttgaaccgtagcat

SEQ ID NO: 1630260 - DNA, 15 bp, Homo sapiens
ctttgaaccgtagca

SEQ ID NO: 1630261 - DNA, 15 bp, Homo sapiens
cctttgaaccgtagc

SEQ ID NO: 1630262 - DNA, 15 bp, Homo sapiens
ccctttgaaccgtag

SEQ ID NO: 1630263 - DNA, 15 bp, Homo sapiens
tccctttgaaccgta

SEQ ID NO: 1630264 - DNA, 15 bp, Homo sapiens
gtccctttgaaccgt

SEQ ID NO: 1630265 - DNA, 15 bp, Homo sapiens
ggtccctttgaaccg

SEQ ID NO: 1630266 - DNA, 15 bp, Homo sapiens
gggtccctttgaacc

SEQ ID NO: 1630267 - DNA, 15 bp, Homo sapiens
agggtccctttgaac

SEQ ID NO: 1630268 - DNA, 15 bp, Homo sapiens
aagggtccctttgaa

SEQ ID NO: 1630269 - DNA, 15 bp, Homo sapiens
gaagggtccctttga

SEQ ID NO: 1630270 - DNA, 15 bp, Homo sapiens
agaagggtccctttg

SEQ ID NO: 1630271 - DNA, 15 bp, Homo sapiens
tagaagggtcccttt

SEQ ID NO: 1630272 - DNA, 15 bp, Homo sapiens
gtagaagggtccctt

SEQ ID NO: 1630273 - DNA, 15 bp, Homo sapiens
tgtagaagggtccct

SEQ ID NO: 1630274 - DNA, 15 bp, Homo sapiens
atgtagaagggtccc

SEQ ID NO: 1630275 - DNA, 15 bp, Homo sapiens
catgtagaagggtcc

SEQ ID NO: 1630276 - DNA, 15 bp, Homo sapiens
ccatgtagaagggtc

SEQ ID NO: 1630277 - DNA, 15 bp, Homo sapiens
cccatgtagaagggt

SEQ ID NO: 1630278 - DNA, 15 bp, Homo sapiens
acccatgtagaaggg

SEQ ID NO: 1630279 - DNA, 15 bp, Homo sapiens
tacccatgtagaagg

SEQ ID NO: 1630280 - DNA, 15 bp, Homo sapiens
atacccatgtagaag

SEQ ID NO: 1630281 - DNA, 15 bp, Homo sapiens
gatacccatgtagaa

SEQ ID NO: 1630282 - DNA, 15 bp, Homo sapiens
ggatacccatgtaga

SEQ ID NO: 1630283 - DNA, 15 bp, Homo sapiens
aggatacccatgtag

SEQ ID NO: 1630284 - DNA, 15 bp, Homo sapiens
caggatacccatgta

SEQ ID NO: 1630285 - DNA, 15 bp, Homo sapiens
ccaggatacccatgt

SEQ ID NO: 1630286 - DNA, 15 bp, Homo sapiens
cccaggatacccatg

SEQ ID NO: 1630287 - DNA, 15 bp, Homo sapiens
acccaggatacccat

SEQ ID NO: 1630288 - DNA, 15 bp, Homo sapiens
cacccaggataccca

SEQ ID NO: 1630289 - DNA, 15 bp, Homo sapiens
gcacccaggataccc

SEQ ID NO: 1630290 - DNA, 15 bp, Homo sapiens
ggcacccaggatacc

SEQ ID NO: 1630291 - DNA, 15 bp, Homo sapiens
tggcacccaggatac

SEQ ID NO: 1630292 - DNA, 15 bp, Homo sapiens
atggcacccaggata

SEQ ID NO: 1630293 - DNA, 15 bp, Homo sapiens
aatggcacccaggat

SEQ ID NO: 1630294 - DNA, 15 bp, Homo sapiens
taatggcacccagga

SEQ ID NO: 1630295 - DNA, 15 bp, Homo sapiens
gtaatggcacccagg

SEQ ID NO: 1630296 - DNA, 15 bp, Homo sapiens
agtaatggcacccag

SEQ ID NO: 1630297 - DNA, 15 bp, Homo sapiens
gagtaatggcaccca

SEQ ID NO: 1630298 - DNA, 15 bp, Homo sapiens
ggagtaatggcaccc

SEQ ID NO: 1630299 - DNA, 15 bp, Homo sapiens
aggagtaatggcacc

SEQ ID NO: 1630300 - DNA, 15 bp, Homo sapiens
taggagtaatggcac

SEQ ID NO: 1630301 - DNA, 15 bp, Homo sapiens
gtaggagtaatggca

SEQ ID NO: 1630302 - DNA, 15 bp, Homo sapiens
tgtaggagtaatggc

SEQ ID NO: 1630303 - DNA, 15 bp, Homo sapiens
ctgtaggagtaatgg

SEQ ID NO: 1630304 - DNA, 15 bp, Homo sapiens
tctgtaggagtaatg

SEQ ID NO: 1630305 - DNA, 15 bp, Homo sapiens
ttctgtaggagtaat

SEQ ID NO: 1630306 - DNA, 15 bp, Homo sapiens
attctgtaggagtaa

SEQ ID NO: 1630307 - DNA, 15 bp, Homo sapiens
gattctgtaggagta

SEQ ID NO: 1630308 - DNA, 15 bp, Homo sapiens
tgattctgtaggagt

SEQ ID NO: 1630309 - DNA, 15 bp, Homo sapiens
ttgattctgtaggag

SEQ ID NO: 1630310 - DNA, 15 bp, Homo sapiens
tttgattctgtagga

SEQ ID NO: 1630311 - DNA, 15 bp, Homo sapiens
gtttgattctgtagg

SEQ ID NO: 1630312 - DNA, 15 bp, Homo sapiens
tgtttgattctgtag

SEQ ID NO: 1630313 - DNA, 15 bp, Homo sapiens
ttgtttgattctgta

SEQ ID NO: 1630314 - DNA, 15 bp, Homo sapiens
attgtttgattctgt

SEQ ID NO: 1630315 - DNA, 15 bp, Homo sapiens
cattgtttgattctg

SEQ ID NO: 1630316 - DNA, 15 bp, Homo sapiens
ccattgtttgattct

SEQ ID NO: 1630317 - DNA, 15 bp, Homo sapiens
accattgtttgattc

SEQ ID NO: 1630318 - DNA, 15 bp, Homo sapiens
aaccattgtttgatt

SEQ ID NO: 1630319 - DNA, 15 bp, Homo sapiens
gaaccattgtttgat

SEQ ID NO: 1630320 - DNA, 15 bp, Homo sapiens
tgaaccattgtttga

SEQ ID NO: 1630321 - DNA, 15 bp, Homo sapiens
ttgaaccattgtttg

SEQ ID NO: 1630322 - DNA, 15 bp, Homo sapiens
cttgaaccattgttt

SEQ ID NO: 1630323 - DNA, 15 bp, Homo sapiens
tcttgaaccattgtt

SEQ ID NO: 1630324 - DNA, 15 bp, Homo sapiens
ttcttgaaccattgt

SEQ ID NO: 1630325 - DNA, 15 bp, Homo sapiens
cttcttgaaccattg

SEQ ID NO: 1630326 - DNA, 15 bp, Homo sapiens
gcttcttgaaccatt

SEQ ID NO: 1630327 - DNA, 15 bp, Homo sapiens
ggcttcttgaaccat

SEQ ID NO: 1630328 - DNA, 15 bp, Homo sapiens
aggcttcttgaacca

SEQ ID NO: 1630329 - DNA, 15 bp, Homo sapiens
aaggcttcttgaacc

SEQ ID NO: 1630330 - DNA, 15 bp, Homo sapiens
taaggcttcttgaac

SEQ ID NO: 1630331 - DNA, 15 bp, Homo sapiens
ataaggcttcttgaa

SEQ ID NO: 1630332 - DNA, 15 bp, Homo sapiens
gataaggcttcttga

SEQ ID NO: 1630333 - DNA, 15 bp, Homo sapiens
tgataaggcttcttg

SEQ ID NO: 1630334 - DNA, 15 bp, Homo sapiens
ttgataaggcttctt

SEQ ID NO: 1630335 - DNA, 15 bp, Homo sapiens
tttgataaggcttct

SEQ ID NO: 1630336 - DNA, 15 bp, Homo sapiens
atttgataaggcttc

SEQ ID NO: 1630337 - DNA, 15 bp, Homo sapiens
tatttgataaggctt

SEQ ID NO: 1630338 - DNA, 15 bp, Homo sapiens
atatttgataaggct

SEQ ID NO: 1630339 - DNA, 15 bp, Homo sapiens
catatttgataaggc

SEQ ID NO: 1630340 - DNA, 15 bp, Homo sapiens
gcatatttgataagg

SEQ ID NO: 1630341 - DNA, 15 bp, Homo sapiens
agcatatttgataag

SEQ ID NO: 1630342 - DNA, 15 bp, Homo sapiens
cagcatatttgataa

SEQ ID NO: 1630343 - DNA, 15 bp, Homo sapiens
acagcatatttgata

SEQ ID NO: 1630344 - DNA, 15 bp, Homo sapiens
aacagcatatttgat

SEQ ID NO: 1630345 - DNA, 15 bp, Homo sapiens
caacagcatatttga

SEQ ID NO: 1630346 - DNA, 15 bp, Homo sapiens
gcaacagcatatttg

SEQ ID NO: 1630347 - DNA, 15 bp, Homo sapiens
tgcaacagcatattt

SEQ ID NO: 1630348 - DNA, 15 bp, Homo sapiens
ctgcaacagcatatt

SEQ ID NO: 1630349 - DNA, 15 bp, Homo sapiens
gctgcaacagcatat

SEQ ID NO: 1630350 - DNA, 15 bp, Homo sapiens
agctgcaacagcata

SEQ ID NO: 1630351 - DNA, 15 bp, Homo sapiens
aagctgcaacagcat

SEQ ID NO: 1630352 - DNA, 15 bp, Homo sapiens
aaagctgcaacagca

SEQ ID NO: 1630353 - DNA, 15 bp, Homo sapiens
aaaagctgcaacagc

SEQ ID NO: 1630354 - DNA, 15 bp, Homo sapiens
gaaaagctgcaacag

SEQ ID NO: 1630355 - DNA, 15 bp, Homo sapiens
ggaaaagctgcaaca

SEQ ID NO: 1630356 - DNA, 15 bp, Homo sapiens
aggaaaagctgcaac

SEQ ID NO: 1630357 - DNA, 15 bp, Homo sapiens
gaggaaaagctgcaa

SEQ ID NO: 1630358 - DNA, 15 bp, Homo sapiens
tgaggaaaagctgca

SEQ ID NO: 1630359 - DNA, 15 bp, Homo sapiens
atgaggaaaagctgc

SEQ ID NO: 1630360 - DNA, 15 bp, Homo sapiens
catgaggaaaagctg

SEQ ID NO: 1630361 - DNA, 15 bp, Homo sapiens
tcatgaggaaaagct

SEQ ID NO: 1630362 - DNA, 15 bp, Homo sapiens
ctcatgaggaaaagc

SEQ ID NO: 1630363 - DNA, 15 bp, Homo sapiens
actcatgaggaaaag

SEQ ID NO: 1630364 - DNA, 15 bp, Homo sapiens
gactcatgaggaaaa

SEQ ID NO: 1630365 - DNA, 15 bp, Homo sapiens
agactcatgaggaaa

SEQ ID NO: 1630366 - DNA, 15 bp, Homo sapiens
aagactcatgaggaa

SEQ ID NO: 1630367 - DNA, 15 bp, Homo sapiens
taagactcatgagga

SEQ ID NO: 1630368 - DNA, 15 bp, Homo sapiens
gtaagactcatgagg

SEQ ID NO: 1630369 - DNA, 15 bp, Homo sapiens
tgtaagactcatgag

SEQ ID NO: 1630370 - DNA, 15 bp, Homo sapiens
ctgtaagactcatga

SEQ ID NO: 1630371 - DNA, 15 bp, Homo sapiens
cctgtaagactcatg

SEQ ID NO: 1630372 - DNA, 15 bp, Homo sapiens
acctgtaagactcat

SEQ ID NO: 1630373 - DNA, 15 bp, Homo sapiens
cacctgtaagactca

SEQ ID NO: 1630374 - DNA, 15 bp, Homo sapiens
gcacctgtaagactc

SEQ ID NO: 1630375 - DNA, 15 bp, Homo sapiens
agcacctgtaagact

SEQ ID NO: 1630376 - DNA, 15 bp, Homo sapiens
tagcacctgtaagac

SEQ ID NO: 1630377 - DNA, 15 bp, Homo sapiens
ttagcacctgtaaga

SEQ ID NO: 1630378 - DNA, 15 bp, Homo sapiens
attagcacctgtaag

SEQ ID NO: 1630379 - DNA, 15 bp, Homo sapiens
tattagcacctgtaa

SEQ ID NO: 1630380 - DNA, 15 bp, Homo sapiens
ttattagcacctgta

SEQ ID NO: 1630381 - DNA, 15 bp, Homo sapiens
tttattagcacctgt

SEQ ID NO: 1630382 - DNA, 15 bp, Homo sapiens
ttttattagcacctg

SEQ ID NO: 1630383 - DNA, 15 bp, Homo sapiens
gttttattagcacct

SEQ ID NO: 1630384 - DNA, 15 bp, Homo sapiens
tgttttattagcacc

SEQ ID NO: 1630385 - DNA, 15 bp, Homo sapiens
atgttttattagcac

SEQ ID NO: 1630386 - DNA, 15 bp, Homo sapiens
tatgttttattagca

SEQ ID NO: 1630387 - DNA, 15 bp, Homo sapiens
ttatgttttattagc

SEQ ID NO: 1630388 - DNA, 15 bp, Homo sapiens
cttatgttttattag

SEQ ID NO: 1630389 - DNA, 15 bp, Homo sapiens
ccttatgttttatta

SEQ ID NO: 1630390 - DNA, 15 bp, Homo sapiens
tccttatgttttatt

SEQ ID NO: 1630391 - DNA, 15 bp, Homo sapiens
atccttatgttttat

SEQ ID NO: 1630392 - DNA, 15 bp, Homo sapiens
tatccttatgtttta

SEQ ID NO: 1630393 - DNA, 15 bp, Homo sapiens
ttatccttatgtttt

SEQ ID NO: 1630394 - DNA, 15 bp, Homo sapiens
attatccttatgttt

SEQ ID NO: 1630395 - DNA, 15 bp, Homo sapiens
aattatccttatgtt

SEQ ID NO: 1630396 - DNA, 15 bp, Homo sapiens
taattatccttatgt

SEQ ID NO: 1630397 - DNA, 15 bp, Homo sapiens
ttaattatccttatg

SEQ ID NO: 1630398 - DNA, 15 bp, Homo sapiens
gttaattatccttat

SEQ ID NO: 1630399 - DNA, 15 bp, Homo sapiens
ggttaattatcctta

SEQ ID NO: 1630400 - DNA, 15 bp, Homo sapiens
tggttaattatcctt

SEQ ID NO: 1630401 - DNA, 15 bp, Homo sapiens
ttggttaattatcct

SEQ ID NO: 1630402 - DNA, 15 bp, Homo sapiens
tttggttaattatcc

SEQ ID NO: 1630403 - DNA, 15 bp, Homo sapiens
ttttggttaattatc

SEQ ID NO: 1630404 - DNA, 15 bp, Homo sapiens
tttttggttaattat

SEQ ID NO: 1630405 - DNA, 15 bp, Homo sapiens
ttttttggttaatta

SEQ ID NO: 1630406 - DNA, 15 bp, Homo sapiens
tttttttggttaatt

SEQ ID NO: 1630407 - DNA, 15 bp, Homo sapiens
ttttttttggttaat

SEQ ID NO: 1630408 - DNA, 15 bp, Homo sapiens
attttttttggttaa

SEQ ID NO: 1630409 - DNA, 15 bp, Homo sapiens
cattttttttggtta

SEQ ID NO: 1630410 - DNA, 15 bp, Homo sapiens
tcattttttttggtt

SEQ ID NO: 1630411 - DNA, 15 bp, Homo sapiens
ctcattttttttggt

SEQ ID NO: 1630412 - DNA, 15 bp, Homo sapiens
tctcattttttttgg

SEQ ID NO: 1630413 - DNA, 15 bp, Homo sapiens
ttctcattttttttg

SEQ ID NO: 1630414 - DNA, 15 bp, Homo sapiens
tttctcatttttttt

SEQ ID NO: 1630415 - DNA, 15 bp, Homo sapiens
ctttctcattttttt

SEQ ID NO: 1630416 - DNA, 15 bp, Homo sapiens
cctttctcatttttt

SEQ ID NO: 1630417 - DNA, 15 bp, Homo sapiens
gcctttctcattttt

SEQ ID NO: 1630418 - DNA, 15 bp, Homo sapiens
tgcctttctcatttt

SEQ ID NO: 1630419 - DNA, 15 bp, Homo sapiens
ttgcctttctcattt

SEQ ID NO: 1630420 - DNA, 15 bp, Homo sapiens
tttgcctttctcatt

SEQ ID NO: 1630421 - DNA, 15 bp, Homo sapiens
ttttgcctttctcat

SEQ ID NO: 1630422 - DNA, 15 bp, Homo sapiens
cttttgcctttctca

SEQ ID NO: 1630423 - DNA, 15 bp, Homo sapiens
ccttttgcctttctc

SEQ ID NO: 1630424 - DNA, 15 bp, Homo sapiens
cccttttgcctttct

SEQ ID NO: 1630425 - DNA, 15 bp, Homo sapiens
ccccttttgcctttc

SEQ ID NO: 1630426 - DNA, 15 bp, Homo sapiens
tccccttttgccttt

SEQ ID NO: 1630427 - DNA, 15 bp, Homo sapiens
ctccccttttgcctt

SEQ ID NO: 1630428 - DNA, 15 bp, Homo sapiens
actccccttttgcct

SEQ ID NO: 1630429 - DNA, 15 bp, Homo sapiens
gactccccttttgcc

SEQ ID NO: 1630430 - DNA, 15 bp, Homo sapiens
tgactccccttttgc

SEQ ID NO: 1630431 - DNA, 15 bp, Homo sapiens
ttgactccccttttg

SEQ ID NO: 1630432 - DNA, 15 bp, Homo sapiens
tttgactcccctttt

SEQ ID NO: 1630433 - DNA, 15 bp, Homo sapiens
ctttgactccccttt

SEQ ID NO: 1630434 - DNA, 15 bp, Homo sapiens
cctttgactcccctt

SEQ ID NO: 1630435 - DNA, 15 bp, Homo sapiens
tcctttgactcccct

SEQ ID NO: 1630436 - DNA, 15 bp, Homo sapiens
gtcctttgactcccc

SEQ ID NO: 1630437 - DNA, 15 bp, Homo sapiens
agtcctttgactccc

SEQ ID NO: 1630438 - DNA, 15 bp, Homo sapiens
gagtcctttgactcc

SEQ ID NO: 1630439 - DNA, 15 bp, Homo sapiens
tgagtcctttgactc

SEQ ID NO: 1630440 - DNA, 15 bp, Homo sapiens
atgagtcctttgact

SEQ ID NO: 1630441 - DNA, 15 bp, Homo sapiens
gatgagtcctttgac

SEQ ID NO: 1630442 - DNA, 15 bp, Homo sapiens
agatgagtcctttga

SEQ ID NO: 1630443 - DNA, 15 bp, Homo sapiens
aagatgagtcctttg

SEQ ID NO: 1630444 - DNA, 15 bp, Homo sapiens
taagatgagtccttt

SEQ ID NO: 1630445 - DNA, 15 bp, Homo sapiens
ctaagatgagtcctt

SEQ ID NO: 1630446 - DNA, 15 bp, Homo sapiens
tctaagatgagtcct

SEQ ID NO: 1630447 - DNA, 15 bp, Homo sapiens
ttctaagatgagtcc

SEQ ID NO: 1630448 - DNA, 15 bp, Homo sapiens
cttctaagatgagtc

SEQ ID NO: 1630449 - DNA, 15 bp, Homo sapiens
ccttctaagatgagt

SEQ ID NO: 1630450 - DNA, 15 bp, Homo sapiens
cccttctaagatgag

SEQ ID NO: 1630451 - DNA, 15 bp, Homo sapiens
acccttctaagatga

SEQ ID NO: 1630452 - DNA, 15 bp, Homo sapiens
tacccttctaagatg

SEQ ID NO: 1630453 - DNA, 15 bp, Homo sapiens
ctacccttctaagat

SEQ ID NO: 1630454 - DNA, 15 bp, Homo sapiens
tctacccttctaaga

SEQ ID NO: 1630455 - DNA, 15 bp, Homo sapiens
ttctacccttctaag

SEQ ID NO: 1630456 - DNA, 15 bp, Homo sapiens
tttctacccttctaa

SEQ ID NO: 1630457 - DNA, 15 bp, Homo sapiens
atttctacccttcta

SEQ ID NO: 1630458 - DNA, 15 bp, Homo sapiens
gatttctacccttct

SEQ ID NO: 1630459 - DNA, 15 bp, Homo sapiens
agatttctacccttc

SEQ ID NO: 1630460 - DNA, 15 bp, Homo sapiens
aagatttctaccctt

SEQ ID NO: 1630461 - DNA, 15 bp, Homo sapiens
aaagatttctaccct

SEQ ID NO: 1630462 - DNA, 15 bp, Homo sapiens
taaagatttctaccc

SEQ ID NO: 1630463 - DNA, 15 bp, Homo sapiens
ctaaagatttctacc

SEQ ID NO: 1630464 - DNA, 15 bp, Homo sapiens
tctaaagatttctac

SEQ ID NO: 1630465 - DNA, 15 bp, Homo sapiens
atctaaagatttcta

SEQ ID NO: 1630466 - DNA, 15 bp, Homo sapiens
catctaaagatttct

SEQ ID NO: 1630467 - DNA, 15 bp, Homo sapiens
ccatctaaagatttc

SEQ ID NO: 1630468 - DNA, 15 bp, Homo sapiens
accatctaaagattt

SEQ ID NO: 1630469 - DNA, 15 bp, Homo sapiens
aaccatctaaagatt

SEQ ID NO: 1630470 - DNA, 15 bp, Homo sapiens
taaccatctaaagat

SEQ ID NO: 1630471 - DNA, 15 bp, Homo sapiens
ataaccatctaaaga

SEQ ID NO: 1630472 - DNA, 15 bp, Homo sapiens
aataaccatctaaag

SEQ ID NO: 1630473 - DNA, 15 bp, Homo sapiens
taataaccatctaaa

SEQ ID NO: 1630474 - DNA, 15 bp, Homo sapiens
ttaataaccatctaa

SEQ ID NO: 1630475 - DNA, 15 bp, Homo sapiens
cttaataaccatcta

SEQ ID NO: 1630476 - DNA, 15 bp, Homo sapiens
tcttaataaccatct

SEQ ID NO: 1630477 - DNA, 15 bp, Homo sapiens
ttcttaataaccatc

SEQ ID NO: 1630478 - DNA, 15 bp, Homo sapiens
tttcttaataaccat

SEQ ID NO: 1630479 - DNA, 15 bp, Homo sapiens
atttcttaataacca

SEQ ID NO: 1630480 - DNA, 15 bp, Homo sapiens
catttcttaataacc

SEQ ID NO: 1630481 - DNA, 15 bp, Homo sapiens
tcatttcttaataac

SEQ ID NO: 1630482 - DNA, 15 bp, Homo sapiens
ttcatttcttaataa

SEQ ID NO: 1630483 - DNA, 15 bp, Homo sapiens
tttcatttcttaata

SEQ ID NO: 1630484 - DNA, 15 bp, Homo sapiens
atttcatttcttaat

SEQ ID NO: 1630485 - DNA, 15 bp, Homo sapiens
tatttcatttcttaa

SEQ ID NO: 1630486 - DNA, 15 bp, Homo sapiens
ctatttcatttctta

SEQ ID NO: 1630487 - DNA, 15 bp, Homo sapiens
gctatttcatttctt

SEQ ID NO: 1630488 - DNA, 15 bp, Homo sapiens
ggctatttcatttct

SEQ ID NO: 1630489 - DNA, 15 bp, Homo sapiens
tggctatttcatttc

SEQ ID NO: 1630490 - DNA, 15 bp, Homo sapiens
ctggctatttcattt

SEQ ID NO: 1630491 - DNA, 15 bp, Homo sapiens
cctggctatttcatt

SEQ ID NO: 1630492 - DNA, 15 bp, Homo sapiens
gcctggctatttcat

SEQ ID NO: 1630493 - DNA, 15 bp, Homo sapiens
tgcctggctatttca

SEQ ID NO: 1630494 - DNA, 15 bp, Homo sapiens
gtgcctggctatttc

SEQ ID NO: 1630495 - DNA, 15 bp, Homo sapiens
tgtgcctggctattt

SEQ ID NO: 1630496 - DNA, 15 bp, Homo sapiens
ctgtgcctggctatt

SEQ ID NO: 1630497 - DNA, 15 bp, Homo sapiens
cctgtgcctggctat

SEQ ID NO: 1630498 - DNA, 15 bp, Homo sapiens
ccctgtgcctggcta

SEQ ID NO: 1630499 - DNA, 15 bp, Homo sapiens
gccctgtgcctggct

SEQ ID NO: 1630500 - DNA, 15 bp, Homo sapiens
agccctgtgcctggc

SEQ ID NO: 1630501 - DNA, 15 bp, Homo sapiens
gagccctgtgcctgg

SEQ ID NO: 1630502 - DNA, 15 bp, Homo sapiens
tgagccctgtgcctg

SEQ ID NO: 1630503 - DNA, 15 bp, Homo sapiens
atgagccctgtgcct

SEQ ID NO: 1630504 - DNA, 15 bp, Homo sapiens
aatgagccctgtgcc

SEQ ID NO: 1630505 - DNA, 15 bp, Homo sapiens
gaatgagccctgtgc

SEQ ID NO: 1630506 - DNA, 15 bp, Homo sapiens
ggaatgagccctgtg

SEQ ID NO: 1630507 - DNA, 15 bp, Homo sapiens
aggaatgagccctgt

SEQ ID NO: 1630508 - DNA, 15 bp, Homo sapiens
taggaatgagccctg

SEQ ID NO: 1630509 - DNA, 15 bp, Homo sapiens
ataggaatgagccct

SEQ ID NO: 1630510 - DNA, 15 bp, Homo sapiens
tataggaatgagccc

SEQ ID NO: 1630511 - DNA, 15 bp, Homo sapiens
ttataggaatgagcc

SEQ ID NO: 1630512 - DNA, 15 bp, Homo sapiens
attataggaatgagc

SEQ ID NO: 1630513 - DNA, 15 bp, Homo sapiens
gattataggaatgag

SEQ ID NO: 1630514 - DNA, 15 bp, Homo sapiens
ggattataggaatga

SEQ ID NO: 1630515 - DNA, 15 bp, Homo sapiens
gggattataggaatg

SEQ ID NO: 1630516 - DNA, 15 bp, Homo sapiens
tgggattataggaat

SEQ ID NO: 1630517 - DNA, 15 bp, Homo sapiens
acccaaagtgctggg

SEQ ID NO: 1630518 - DNA, 15 bp, Homo sapiens
cacccaaagtgctgg

SEQ ID NO: 1630519 - DNA, 15 bp, Homo sapiens
tcacccaaagtgctg

SEQ ID NO: 1630520 - DNA, 15 bp, Homo sapiens
gtcacccaaagtgct

SEQ ID NO: 1630521 - DNA, 15 bp, Homo sapiens
ggtcacccaaagtgc

SEQ ID NO: 1630522 - DNA, 15 bp, Homo sapiens
cggtcacccaaagtg

SEQ ID NO: 1630523 - DNA, 15 bp, Homo sapiens
tcggtcacccaaagt

SEQ ID NO: 1630524 - DNA, 15 bp, Homo sapiens
ctcggtcacccaaag

SEQ ID NO: 1630525 - DNA, 15 bp, Homo sapiens
cctcggtcacccaaa

SEQ ID NO: 1630526 - DNA, 15 bp, Homo sapiens
gcctcggtcacccaa

SEQ ID NO: 1630527 - DNA, 15 bp, Homo sapiens
tgcctcggtcaccca

SEQ ID NO: 1630528 - DNA, 15 bp, Homo sapiens
ctgcctcggtcaccc

SEQ ID NO: 1630529 - DNA, 15 bp, Homo sapiens
cctgcctcggtcacc

SEQ ID NO: 1630530 - DNA, 15 bp, Homo sapiens
gcctgcctcggtcac

SEQ ID NO: 1630531 - DNA, 15 bp, Homo sapiens
tgcctgcctcggtca

SEQ ID NO: 1630532 - DNA, 15 bp, Homo sapiens
ctgcctgcctcggtc

SEQ ID NO: 1630533 - DNA, 15 bp, Homo sapiens
tctgcctgcctcggt

SEQ ID NO: 1630534 - DNA, 15 bp, Homo sapiens
gatctgcctgcctcg

SEQ ID NO: 1630535 - DNA, 15 bp, Homo sapiens
tgatctgcctgcctc

SEQ ID NO: 1630536 - DNA, 15 bp, Homo sapiens
agtgatctgcctgcc

SEQ ID NO: 1630537 - DNA, 15 bp, Homo sapiens
aagtgatctgcctgc

SEQ ID NO: 1630538 - DNA, 15 bp, Homo sapiens
caagtgatctgcctg

SEQ ID NO: 1630539 - DNA, 15 bp, Homo sapiens
tcaagtgatctgcct

SEQ ID NO: 1630540 - DNA, 15 bp, Homo sapiens
gaccatgttggccag

SEQ ID NO: 1630541 - DNA, 15 bp, Homo sapiens
tgaccatgttggcca

SEQ ID NO: 1630542 - DNA, 15 bp, Homo sapiens
ttgaccatgttggcc

SEQ ID NO: 1630543 - DNA, 15 bp, Homo sapiens
tttgaccatgttggc

SEQ ID NO: 1630544 - DNA, 15 bp, Homo sapiens
gtttgaccatgttgg

SEQ ID NO: 1630545 - DNA, 15 bp, Homo sapiens
ggtttgaccatgttg

SEQ ID NO: 1630546 - DNA, 15 bp, Homo sapiens
gggtttgaccatgtt

SEQ ID NO: 1630547 - DNA, 15 bp, Homo sapiens
ggggtttgaccatgt

SEQ ID NO: 1630548 - DNA, 15 bp, Homo sapiens
tggggtttgaccatg

SEQ ID NO: 1630549 - DNA, 15 bp, Homo sapiens
atggggtttgaccat

SEQ ID NO: 1630550 - DNA, 15 bp, Homo sapiens
gatggggtttgacca

SEQ ID NO: 1630551 - DNA, 15 bp, Homo sapiens
agatggggtttgacc

SEQ ID NO: 1630552 - DNA, 15 bp, Homo sapiens
aagatggggtttgac

SEQ ID NO: 1630553 - DNA, 15 bp, Homo sapiens
aaagatggggtttga

SEQ ID NO: 1630554 - DNA, 15 bp, Homo sapiens
taaagatggggtttg

SEQ ID NO: 1630555 - DNA, 15 bp, Homo sapiens
ataaagatggggttt

SEQ ID NO: 1630556 - DNA, 15 bp, Homo sapiens
cataaagatggggtt

SEQ ID NO: 1630557 - DNA, 15 bp, Homo sapiens
tcataaagatggggt

SEQ ID NO: 1630558 - DNA, 15 bp, Homo sapiens
ttcataaagatgggg

SEQ ID NO: 1630559 - DNA, 15 bp, Homo sapiens
tttcataaagatggg

SEQ ID NO: 1630560 - DNA, 15 bp, Homo sapiens
ttttcataaagatgg

SEQ ID NO: 1630561 - DNA, 15 bp, Homo sapiens
tttttcataaagatg

SEQ ID NO: 1630562 - DNA, 15 bp, Homo sapiens
atttttcataaagat

SEQ ID NO: 1630563 - DNA, 15 bp, Homo sapiens
tatttttcataaaga

SEQ ID NO: 1630564 - DNA, 15 bp, Homo sapiens
gtatttttcataaag

SEQ ID NO: 1630565 - DNA, 15 bp, Homo sapiens
tgtatttttcataaa

SEQ ID NO: 1630566 - DNA, 15 bp, Homo sapiens
ttgtatttttcataa

SEQ ID NO: 1630567 - DNA, 15 bp, Homo sapiens
tttgtatttttcata

SEQ ID NO: 1630568 - DNA, 15 bp, Homo sapiens
ttttgtatttttcat

SEQ ID NO: 1630569 - DNA, 15 bp, Homo sapiens
tttttgtatttttca

SEQ ID NO: 1630570 - DNA, 15 bp, Homo sapiens
atttttgtatttttc

SEQ ID NO: 1630571 - DNA, 15 bp, Homo sapiens
tcggctaatttttgt

SEQ ID NO: 1630572 - DNA, 15 bp, Homo sapiens
ttcggctaatttttg

SEQ ID NO: 1630573 - DNA, 15 bp, Homo sapiens
attcggctaattttt

SEQ ID NO: 1630574 - DNA, 15 bp, Homo sapiens
cattcggctaatttt

SEQ ID NO: 1630575 - DNA, 15 bp, Homo sapiens
acattcggctaattt

SEQ ID NO: 1630576 - DNA, 15 bp, Homo sapiens
cacattcggctaatt

SEQ ID NO: 1630577 - DNA, 15 bp, Homo sapiens
ccacattcggctaat

SEQ ID NO: 1630578 - DNA, 15 bp, Homo sapiens
accacattcggctaa

SEQ ID NO: 1630579 - DNA, 15 bp, Homo sapiens
caccacattcggcta

SEQ ID NO: 1630580 - DNA, 15 bp, Homo sapiens
ccaccacattcggct

SEQ ID NO: 1630581 - DNA, 15 bp, Homo sapiens
gccaccacattcggc

SEQ ID NO: 1630582 - DNA, 15 bp, Homo sapiens
tgccaccacattcgg

SEQ ID NO: 1630583 - DNA, 15 bp, Homo sapiens
atgccaccacattcg

SEQ ID NO: 1630584 - DNA, 15 bp, Homo sapiens
catgccaccacattc

SEQ ID NO: 1630585 - DNA, 15 bp, Homo sapiens
acatgccaccacatt

SEQ ID NO: 1630586 - DNA, 15 bp, Homo sapiens
cacatgccaccacat

SEQ ID NO: 1630587 - DNA, 15 bp, Homo sapiens
gcacatgccaccaca

SEQ ID NO: 1630588 - DNA, 15 bp, Homo sapiens
cttacaggcacatgc

SEQ ID NO: 1630589 - DNA, 15 bp, Homo sapiens
tcttacaggcacatg

SEQ ID NO: 1630590 - DNA, 15 bp, Homo sapiens
ctcttacaggcacat

SEQ ID NO: 1630591 - DNA, 15 bp, Homo sapiens
actcttacaggcaca

SEQ ID NO: 1630592 - DNA, 15 bp, Homo sapiens
tactcttacaggcac

SEQ ID NO: 1630593 - DNA, 15 bp, Homo sapiens
atactcttacaggca

SEQ ID NO: 1630594 - DNA, 15 bp, Homo sapiens
catactcttacaggc

SEQ ID NO: 1630595 - DNA, 15 bp, Homo sapiens
tcatactcttacagg

SEQ ID NO: 1630596 - DNA, 15 bp, Homo sapiens
ttcatactcttacag

SEQ ID NO: 1630597 - DNA, 15 bp, Homo sapiens
attcatactcttaca

SEQ ID NO: 1630598 - DNA, 15 bp, Homo sapiens
aattcatactcttac

SEQ ID NO: 1630599 - DNA, 15 bp, Homo sapiens
gaattcatactctta

SEQ ID NO: 1630600 - DNA, 15 bp, Homo sapiens
ggaattcatactctt

SEQ ID NO: 1630601 - DNA, 15 bp, Homo sapiens
gggaattcatactct

SEQ ID NO: 1630602 - DNA, 15 bp, Homo sapiens
ggggaattcatactc

SEQ ID NO: 1630603 - DNA, 15 bp, Homo sapiens
aggggaattcatact

SEQ ID NO: 1630604 - DNA, 15 bp, Homo sapiens
caggggaattcatac

SEQ ID NO: 1630605 - DNA, 15 bp, Homo sapiens
ccaggggaattcata

SEQ ID NO: 1630606 - DNA, 15 bp, Homo sapiens
tccaggggaattcat

SEQ ID NO: 1630607 - DNA, 15 bp, Homo sapiens
ctccaggggaattca

SEQ ID NO: 1630608 - DNA, 15 bp, Homo sapiens
actccaggggaattc

SEQ ID NO: 1630609 - DNA, 15 bp, Homo sapiens
gactccaggggaatt

SEQ ID NO: 1630610 - DNA, 15 bp, Homo sapiens
agactccaggggaat

SEQ ID NO: 1630611 - DNA, 15 bp, Homo sapiens
cagactccaggggaa

SEQ ID NO: 1630612 - DNA, 15 bp, Homo sapiens
acagactccagggga

SEQ ID NO: 1630613 - DNA, 15 bp, Homo sapiens
cacagactccagggg

SEQ ID NO: 1630614 - DNA, 15 bp, Homo sapiens
ccacagactccaggg

SEQ ID NO: 1630615 - DNA, 15 bp, Homo sapiens
accacagactccagg

SEQ ID NO: 1630616 - DNA, 15 bp, Homo sapiens
aaccacagactccag

SEQ ID NO: 1630617 - DNA, 15 bp, Homo sapiens
aaaccacagactcca

SEQ ID NO: 1630618 - DNA, 15 bp, Homo sapiens
gaaaccacagactcc

SEQ ID NO: 1630619 - DNA, 15 bp, Homo sapiens
ggaaaccacagactc

SEQ ID NO: 1630620 - DNA, 15 bp, Homo sapiens
tggaaaccacagact

SEQ ID NO: 1630621 - DNA, 15 bp, Homo sapiens
ttggaaaccacagac

SEQ ID NO: 1630622 - DNA, 15 bp, Homo sapiens
cttggaaaccacaga

SEQ ID NO: 1630623 - DNA, 15 bp, Homo sapiens
ccttggaaaccacag

SEQ ID NO: 1630624 - DNA, 15 bp, Homo sapiens
cccttggaaaccaca

SEQ ID NO: 1630625 - DNA, 15 bp, Homo sapiens
gcccttggaaaccac

SEQ ID NO: 1630626 - DNA, 15 bp, Homo sapiens
agcccttggaaacca

SEQ ID NO: 1630627 - DNA, 15 bp, Homo sapiens
gagcccttggaaacc

SEQ ID NO: 1630628 - DNA, 15 bp, Homo sapiens
agagcccttggaaac

SEQ ID NO: 1630629 - DNA, 15 bp, Homo sapiens
tagagcccttggaaa

SEQ ID NO: 1630630 - DNA, 15 bp, Homo sapiens
atagagcccttggaa

SEQ ID NO: 1630631 - DNA, 15 bp, Homo sapiens
catagagcccttgga

SEQ ID NO: 1630632 - DNA, 15 bp, Homo sapiens
gcatagagcccttgg

SEQ ID NO: 1630633 - DNA, 15 bp, Homo sapiens
tgcatagagcccttg

SEQ ID NO: 1630634 - DNA, 15 bp, Homo sapiens
gtgcatagagccctt

SEQ ID NO: 1630635 - DNA, 15 bp, Homo sapiens
agtgcatagagccct

SEQ ID NO: 1630636 - DNA, 15 bp, Homo sapiens
gagtgcatagagccc

SEQ ID NO: 1630637 - DNA, 15 bp, Homo sapiens
tgagtgcatagagcc

SEQ ID NO: 1630638 - DNA, 15 bp, Homo sapiens
atgagtgcatagagc

SEQ ID NO: 1630639 - DNA, 15 bp, Homo sapiens
catgagtgcatagag

SEQ ID NO: 1630640 - DNA, 15 bp, Homo sapiens
gcatgagtgcataga

SEQ ID NO: 1630641 - DNA, 15 bp, Homo sapiens
agcatgagtgcatag

SEQ ID NO: 1630642 - DNA, 15 bp, Homo sapiens
tagcatgagtgcata

SEQ ID NO: 1630643 - DNA, 15 bp, Homo sapiens
ctagcatgagtgcat

SEQ ID NO: 1630644 - DNA, 15 bp, Homo sapiens
gctagcatgagtgca

SEQ ID NO: 1630645 - DNA, 15 bp, Homo sapiens
ggctagcatgagtgc

SEQ ID NO: 1630646 - DNA, 15 bp, Homo sapiens
gggctagcatgagtg

SEQ ID NO: 1630647 - DNA, 15 bp, Homo sapiens
tgggctagcatgagt

SEQ ID NO: 1630648 - DNA, 15 bp, Homo sapiens
gtgggctagcatgag

SEQ ID NO: 1630649 - DNA, 15 bp, Homo sapiens
tgtgggctagcatga

SEQ ID NO: 1630650 - DNA, 15 bp, Homo sapiens
gtgtgggctagcatg

SEQ ID NO: 1630651 - DNA, 15 bp, Homo sapiens
agtgtgggctagcat

SEQ ID NO: 1630652 - DNA, 15 bp, Homo sapiens
aagtgtgggctagca

SEQ ID NO: 1630653 - DNA, 15 bp, Homo sapiens
caagtgtgggctagc

SEQ ID NO: 1630654 - DNA, 15 bp, Homo sapiens
ccaagtgtgggctag

SEQ ID NO: 1630655 - DNA, 15 bp, Homo sapiens
gccaagtgtgggcta

SEQ ID NO: 1630656 - DNA, 15 bp, Homo sapiens
ggccaagtgtgggct

SEQ ID NO: 1630657 - DNA, 15 bp, Homo sapiens
aggccaagtgtgggc

SEQ ID NO: 1630658 - DNA, 15 bp, Homo sapiens
aaggccaagtgtggg

SEQ ID NO: 1630659 - DNA, 15 bp, Homo sapiens
aaaggccaagtgtgg

SEQ ID NO: 1630660 - DNA, 15 bp, Homo sapiens
taaaggccaagtgtg

SEQ ID NO: 1630661 - DNA, 15 bp, Homo sapiens
ctaaaggccaagtgt

SEQ ID NO: 1630662 - DNA, 15 bp, Homo sapiens
tctaaaggccaagtg

SEQ ID NO: 1630663 - DNA, 15 bp, Homo sapiens
atctaaaggccaagt

SEQ ID NO: 1630664 - DNA, 15 bp, Homo sapiens
catctaaaggccaag

SEQ ID NO: 1630665 - DNA, 15 bp, Homo sapiens
acatctaaaggccaa

SEQ ID NO: 1630666 - DNA, 15 bp, Homo sapiens
aacatctaaaggcca

SEQ ID NO: 1630667 - DNA, 15 bp, Homo sapiens
aaacatctaaaggcc

SEQ ID NO: 1630668 - DNA, 15 bp, Homo sapiens
taaacatctaaaggc

SEQ ID NO: 1630669 - DNA, 15 bp, Homo sapiens
ttaaacatctaaagg

SEQ ID NO: 1630670 - DNA, 15 bp, Homo sapiens
gttaaacatctaaag

SEQ ID NO: 1630671 - DNA, 15 bp, Homo sapiens
agttaaacatctaaa

SEQ ID NO: 1630672 - DNA, 15 bp, Homo sapiens
aagttaaacatctaa

SEQ ID NO: 1630673 - DNA, 15 bp, Homo sapiens
aaagttaaacatcta

SEQ ID NO: 1630674 - DNA, 15 bp, Homo sapiens
aaaagttaaacatct

SEQ ID NO: 1630675 - DNA, 15 bp, Homo sapiens
taaaagttaaacatc

SEQ ID NO: 1630676 - DNA, 15 bp, Homo sapiens
ttaaaagttaaacat

SEQ ID NO: 1630677 - DNA, 15 bp, Homo sapiens
attaaaagttaaaca

SEQ ID NO: 1630678 - DNA, 15 bp, Homo sapiens
gattaaaagttaaac

SEQ ID NO: 1630679 - DNA, 15 bp, Homo sapiens
cgattaaaagttaaa

SEQ ID NO: 1630680 - DNA, 15 bp, Homo sapiens
tcgattaaaagttaa

SEQ ID NO: 1630681 - DNA, 15 bp, Homo sapiens
ttcgattaaaagtta

SEQ ID NO: 1630682 - DNA, 15 bp, Homo sapiens
attcgattaaaagtt

SEQ ID NO: 1630683 - DNA, 15 bp, Homo sapiens
aattcgattaaaagt

SEQ ID NO: 1630684 - DNA, 15 bp, Homo sapiens
gaattcgattaaaag

SEQ ID NO: 1630685 - DNA, 15 bp, Homo sapiens
ggaattcgattaaaa

SEQ ID NO: 1630686 - DNA, 15 bp, Homo sapiens
aggaattcgattaaa

SEQ ID NO: 1630687 - DNA, 15 bp, Homo sapiens
gaggaattcgattaa

SEQ ID NO: 1630688 - DNA, 15 bp, Homo sapiens
tgaggaattcgatta

SEQ ID NO: 1630689 - DNA, 15 bp, Homo sapiens
atgaggaattcgatt

SEQ ID NO: 1630690 - DNA, 15 bp, Homo sapiens
tatgaggaattcgat

SEQ ID NO: 1630691 - DNA, 15 bp, Homo sapiens
gtatgaggaattcga

SEQ ID NO: 1630692 - DNA, 15 bp, Homo sapiens
agtatgaggaattcg

SEQ ID NO: 1630693 - DNA, 15 bp, Homo sapiens
aagtatgaggaattc

SEQ ID NO: 1630694 - DNA, 15 bp, Homo sapiens
caagtatgaggaatt

SEQ ID NO: 1630695 - DNA, 15 bp, Homo sapiens
gcaagtatgaggaat

SEQ ID NO: 1630696 - DNA, 15 bp, Homo sapiens
agcaagtatgaggaa

SEQ ID NO: 1630697 - DNA, 15 bp, Homo sapiens
aagcaagtatgagga

SEQ ID NO: 1630698 - DNA, 15 bp, Homo sapiens
taagcaagtatgagg

SEQ ID NO: 1630699 - DNA, 15 bp, Homo sapiens
ataagcaagtatgag

SEQ ID NO: 1630700 - DNA, 15 bp, Homo sapiens
tataagcaagtatga

SEQ ID NO: 1630701 - DNA, 15 bp, Homo sapiens
atataagcaagtatg

SEQ ID NO: 1630702 - DNA, 15 bp, Homo sapiens
catataagcaagtat

SEQ ID NO: 1630703 - DNA, 15 bp, Homo sapiens
ccatataagcaagta

SEQ ID NO: 1630704 - DNA, 15 bp, Homo sapiens
tccatataagcaagt

SEQ ID NO: 1630705 - DNA, 15 bp, Homo sapiens
ctccatataagcaag

SEQ ID NO: 1630706 - DNA, 15 bp, Homo sapiens
cctccatataagcaa

SEQ ID NO: 1630707 - DNA, 15 bp, Homo sapiens
gcctccatataagca

SEQ ID NO: 1630708 - DNA, 15 bp, Homo sapiens
ggcctccatataagc

SEQ ID NO: 1630709 - DNA, 15 bp, Homo sapiens
aggcctccatataag

SEQ ID NO: 1630710 - DNA, 15 bp, Homo sapiens
aaggcctccatataa

SEQ ID NO: 1630711 - DNA, 15 bp, Homo sapiens
taaggcctccatata

SEQ ID NO: 1630712 - DNA, 15 bp, Homo sapiens
ataaggcctccatat

SEQ ID NO: 1630713 - DNA, 15 bp, Homo sapiens
gataaggcctccata

SEQ ID NO: 1630714 - DNA, 15 bp, Homo sapiens
agataaggcctccat

SEQ ID NO: 1630715 - DNA, 15 bp, Homo sapiens
aagataaggcctcca

SEQ ID NO: 1630716 - DNA, 15 bp, Homo sapiens
gaagataaggcctcc

SEQ ID NO: 1630717 - DNA, 15 bp, Homo sapiens
ggaagataaggcctc

SEQ ID NO: 1630718 - DNA, 15 bp, Homo sapiens
gggaagataaggcct

SEQ ID NO: 1630719 - DNA, 15 bp, Homo sapiens
tgggaagataaggcc

SEQ ID NO: 1630720 - DNA, 15 bp, Homo sapiens
atgggaagataaggc

SEQ ID NO: 1630721 - DNA, 15 bp, Homo sapiens
aatgggaagataagg

SEQ ID NO: 1630722 - DNA, 15 bp, Homo sapiens
caatgggaagataag

SEQ ID NO: 1630723 - DNA, 15 bp, Homo sapiens
tcaatgggaagataa

SEQ ID NO: 1630724 - DNA, 15 bp, Homo sapiens
gtcaatgggaagata

SEQ ID NO: 1630725 - DNA, 15 bp, Homo sapiens
tgtcaatgggaagat

SEQ ID NO: 1630726 - DNA, 15 bp, Homo sapiens
gtgtcaatgggaaga

SEQ ID NO: 1630727 - DNA, 15 bp, Homo sapiens
tgtgtcaatgggaag

SEQ ID NO: 1630728 - DNA, 15 bp, Homo sapiens
ctgtgtcaatgggaa

SEQ ID NO: 1630729 - DNA, 15 bp, Homo sapiens
cctgtgtcaatggga

SEQ ID NO: 1630730 - DNA, 15 bp, Homo sapiens
acctgtgtcaatggg

SEQ ID NO: 1630731 - DNA, 15 bp, Homo sapiens
cacctgtgtcaatgg

SEQ ID NO: 1630732 - DNA, 15 bp, Homo sapiens
tcacctgtgtcaatg

SEQ ID NO: 1630733 - DNA, 15 bp, Homo sapiens
ctcacctgtgtcaat

SEQ ID NO: 1630734 - DNA, 15 bp, Homo sapiens
gctcacctgtgtcaa

SEQ ID NO: 1630735 - DNA, 15 bp, Homo sapiens
ggctcacctgtgtca

SEQ ID NO: 1630736 - DNA, 15 bp, Homo sapiens
tggctcacctgtgtc

SEQ ID NO: 1630737 - DNA, 15 bp, Homo sapiens
ctggctcacctgtgt

SEQ ID NO: 1630738 - DNA, 15 bp, Homo sapiens
actggctcacctgtg

SEQ ID NO: 1630739 - DNA, 15 bp, Homo sapiens
cactggctcacctgt

SEQ ID NO: 1630740 - DNA, 15 bp, Homo sapiens
acactggctcacctg

SEQ ID NO: 1630741 - DNA, 15 bp, Homo sapiens
aacactggctcacct

SEQ ID NO: 1630742 - DNA, 15 bp, Homo sapiens
gaacactggctcacc

SEQ ID NO: 1630743 - DNA, 15 bp, Homo sapiens
tgaacactggctcac

SEQ ID NO: 1630744 - DNA, 15 bp, Homo sapiens
atgaacactggctca

SEQ ID NO: 1630745 - DNA, 15 bp, Homo sapiens
catgaacactggctc

SEQ ID NO: 1630746 - DNA, 15 bp, Homo sapiens
acatgaacactggct

SEQ ID NO: 1630747 - DNA, 15 bp, Homo sapiens
aacatgaacactggc

SEQ ID NO: 1630748 - DNA, 15 bp, Homo sapiens
gaacatgaacactgg

SEQ ID NO: 1630749 - DNA, 15 bp, Homo sapiens
agaacatgaacactg

SEQ ID NO: 1630750 - DNA, 15 bp, Homo sapiens
cagaacatgaacact

SEQ ID NO: 1630751 - DNA, 15 bp, Homo sapiens
acagaacatgaacac

SEQ ID NO: 1630752 - DNA, 15 bp, Homo sapiens
gacagaacatgaaca

SEQ ID NO: 1630753 - DNA, 15 bp, Homo sapiens
agacagaacatgaac

SEQ ID NO: 1630754 - DNA, 15 bp, Homo sapiens
aagacagaacatgaa

SEQ ID NO: 1630755 - DNA, 15 bp, Homo sapiens
aaagacagaacatga

SEQ ID NO: 1630756 - DNA, 15 bp, Homo sapiens
aaaagacagaacatg

SEQ ID NO: 1630757 - DNA, 15 bp, Homo sapiens
gaaaagacagaacat

SEQ ID NO: 1630758 - DNA, 15 bp, Homo sapiens
agaaaagacagaaca

SEQ ID NO: 1630759 - DNA, 15 bp, Homo sapiens
aagaaaagacagaac

SEQ ID NO: 1630760 - DNA, 15 bp, Homo sapiens
caagaaaagacagaa

SEQ ID NO: 1630761 - DNA, 15 bp, Homo sapiens
tcaagaaaagacaga

SEQ ID NO: 1630762 - DNA, 15 bp, Homo sapiens
ttcaagaaaagacag

SEQ ID NO: 1630763 - DNA, 15 bp, Homo sapiens
tttcaagaaaagaca

SEQ ID NO: 1630764 - DNA, 15 bp, Homo sapiens
ttttcaagaaaagac

SEQ ID NO: 1630765 - DNA, 15 bp, Homo sapiens
tttttcaagaaaaga

SEQ ID NO: 1630766 - DNA, 15 bp, Homo sapiens
ctttttcaagaaaag

SEQ ID NO: 1630767 - DNA, 15 bp, Homo sapiens
actttttcaagaaaa

SEQ ID NO: 1630768 - DNA, 15 bp, Homo sapiens
gactttttcaagaaa

SEQ ID NO: 1630769 - DNA, 15 bp, Homo sapiens
ggactttttcaagaa

SEQ ID NO: 1630770 - DNA, 15 bp, Homo sapiens
tggactttttcaaga

SEQ ID NO: 1630771 - DNA, 15 bp, Homo sapiens
atggactttttcaag

SEQ ID NO: 1630772 - DNA, 15 bp, Homo sapiens
gatggactttttcaa

SEQ ID NO: 1630773 - DNA, 15 bp, Homo sapiens
agatggactttttca

SEQ ID NO: 1630774 - DNA, 15 bp, Homo sapiens
aagatggactttttc

SEQ ID NO: 1630775 - DNA, 15 bp, Homo sapiens
aaagatggacttttt

SEQ ID NO: 1630776 - DNA, 15 bp, Homo sapiens
gaaagatggactttt

SEQ ID NO: 1630777 - DNA, 15 bp, Homo sapiens
ggaaagatggacttt

SEQ ID NO: 1630778 - DNA, 15 bp, Homo sapiens
aggaaagatggactt

SEQ ID NO: 1630779 - DNA, 15 bp, Homo sapiens
aaggaaagatggact

SEQ ID NO: 1630780 - DNA, 15 bp, Homo sapiens
taaggaaagatggac

SEQ ID NO: 1630781 - DNA, 15 bp, Homo sapiens
ctaaggaaagatgga

SEQ ID NO: 1630782 - DNA, 15 bp, Homo sapiens
tctaaggaaagatgg

SEQ ID NO: 1630783 - DNA, 15 bp, Homo sapiens
ctctaaggaaagatg

SEQ ID NO: 1630784 - DNA, 15 bp, Homo sapiens
actctaaggaaagat

SEQ ID NO: 1630785 - DNA, 15 bp, Homo sapiens
aactctaaggaaaga

SEQ ID NO: 1630786 - DNA, 15 bp, Homo sapiens
gaactctaaggaaag

SEQ ID NO: 1630787 - DNA, 15 bp, Homo sapiens
tgaactctaaggaaa

SEQ ID NO: 1630788 - DNA, 15 bp, Homo sapiens
ctgaactctaaggaa

SEQ ID NO: 1630789 - DNA, 15 bp, Homo sapiens
cctgaactctaagga

SEQ ID NO: 1630790 - DNA, 15 bp, Homo sapiens
gcctgaactctaagg

SEQ ID NO: 1630791 - DNA, 15 bp, Homo sapiens
agcctgaactctaag

SEQ ID NO: 1630792 - DNA, 15 bp, Homo sapiens
tagcctgaactctaa

SEQ ID NO: 1630793 - DNA, 15 bp, Homo sapiens
ctagcctgaactcta

SEQ ID NO: 1630794 - DNA, 15 bp, Homo sapiens
actagcctgaactct

SEQ ID NO: 1630795 - DNA, 15 bp, Homo sapiens
aactagcctgaactc

SEQ ID NO: 1630796 - DNA, 15 bp, Homo sapiens
taactagcctgaact

SEQ ID NO: 1630797 - DNA, 15 bp, Homo sapiens
ctaactagcctgaac

SEQ ID NO: 1630798 - DNA, 15 bp, Homo sapiens
actaactagcctgaa

SEQ ID NO: 1630799 - DNA, 15 bp, Homo sapiens
aactaactagcctga

SEQ ID NO: 1630800 - DNA, 15 bp, Homo sapiens
caactaactagcctg

SEQ ID NO: 1630801 - DNA, 15 bp, Homo sapiens
gcaactaactagcct

SEQ ID NO: 1630802 - DNA, 15 bp, Homo sapiens
ggcaactaactagcc

SEQ ID NO: 1630803 - DNA, 15 bp, Homo sapiens
gggcaactaactagc

SEQ ID NO: 1630804 - DNA, 15 bp, Homo sapiens
agggcaactaactag

SEQ ID NO: 1630805 - DNA, 15 bp, Homo sapiens
cagggcaactaacta

SEQ ID NO: 1630806 - DNA, 15 bp, Homo sapiens
gcagggcaactaact

SEQ ID NO: 1630807 - DNA, 15 bp, Homo sapiens
tgcagggcaactaac

SEQ ID NO: 1630808 - DNA, 15 bp, Homo sapiens
gtgcagggcaactaa

SEQ ID NO: 1630809 - DNA, 15 bp, Homo sapiens
ggtgcagggcaacta

SEQ ID NO: 1630810 - DNA, 15 bp, Homo sapiens
gggtgcagggcaact

SEQ ID NO: 1630811 - DNA, 15 bp, Homo sapiens
agggtgcagggcaac

SEQ ID NO: 1630812 - DNA, 15 bp, Homo sapiens
gagggtgcagggcaa

SEQ ID NO: 1630813 - DNA, 15 bp, Homo sapiens
tgagggtgcagggca

SEQ ID NO: 1630814 - DNA, 15 bp, Homo sapiens
ctgagggtgcagggc

SEQ ID NO: 1630815 - DNA, 15 bp, Homo sapiens
gctgagggtgcaggg

SEQ ID NO: 1630816 - DNA, 15 bp, Homo sapiens
agctgagggtgcagg

SEQ ID NO: 1630817 - DNA, 15 bp, Homo sapiens
gagctgagggtgcag

SEQ ID NO: 1630818 - DNA, 15 bp, Homo sapiens
agagctgagggtgca

SEQ ID NO: 1630819 - DNA, 15 bp, Homo sapiens
aagagctgagggtgc

SEQ ID NO: 1630820 - DNA, 15 bp, Homo sapiens
gaagagctgagggtg

SEQ ID NO: 1630821 - DNA, 15 bp, Homo sapiens
tgaagagctgagggt

SEQ ID NO: 1630822 - DNA, 15 bp, Homo sapiens
ttgaagagctgaggg

SEQ ID NO: 1630823 - DNA, 15 bp, Homo sapiens
attgaagagctgagg

SEQ ID NO: 1630824 - DNA, 15 bp, Homo sapiens
tattgaagagctgag

SEQ ID NO: 1630825 - DNA, 15 bp, Homo sapiens
ttattgaagagctga

SEQ ID NO: 1630826 - DNA, 15 bp, Homo sapiens
tttattgaagagctg

SEQ ID NO: 1630827 - DNA, 15 bp, Homo sapiens
atttattgaagagct

SEQ ID NO: 1630828 - DNA, 15 bp, Homo sapiens
aatttattgaagagc

SEQ ID NO: 1630829 - DNA, 15 bp, Homo sapiens
gaatttattgaagag

SEQ ID NO: 1630830 - DNA, 15 bp, Homo sapiens
tgaatttattgaaga

SEQ ID NO: 1630831 - DNA, 15 bp, Homo sapiens
ttgaatttattgaag

SEQ ID NO: 1630832 - DNA, 15 bp, Homo sapiens
cttgaatttattgaa

SEQ ID NO: 1630833 - DNA, 15 bp, Homo sapiens
ccttgaatttattga

SEQ ID NO: 1630834 - DNA, 15 bp, Homo sapiens
accttgaatttattg

SEQ ID NO: 1630835 - DNA, 15 bp, Homo sapiens
aaccttgaatttatt

SEQ ID NO: 1630836 - DNA, 15 bp, Homo sapiens
aaaccttgaatttat

SEQ ID NO: 1630837 - DNA, 15 bp, Homo sapiens
caaaccttgaattta

SEQ ID NO: 1630838 - DNA, 15 bp, Homo sapiens
acaaaccttgaattt

SEQ ID NO: 1630839 - DNA, 15 bp, Homo sapiens
aacaaaccttgaatt

SEQ ID NO: 1630840 - DNA, 15 bp, Homo sapiens
aaacaaaccttgaat

SEQ ID NO: 1630841 - DNA, 15 bp, Homo sapiens
aaaacaaaccttgaa

SEQ ID NO: 1630842 - DNA, 15 bp, Homo sapiens
caaaacaaaccttga

SEQ ID NO: 1630843 - DNA, 15 bp, Homo sapiens
tcaaaacaaaccttg

SEQ ID NO: 1630844 - DNA, 15 bp, Homo sapiens
atcaaaacaaacctt

SEQ ID NO: 1630845 - DNA, 15 bp, Homo sapiens
aatcaaaacaaacct

SEQ ID NO: 1630846 - DNA, 15 bp, Homo sapiens
aaatcaaaacaaacc

SEQ ID NO: 1630847 - DNA, 15 bp, Homo sapiens
aaaatcaaaacaaac

SEQ ID NO: 1630848 - DNA, 15 bp, Homo sapiens
aaaaatcaaaacaaa

SEQ ID NO: 1630849 - DNA, 15 bp, Homo sapiens
aaaaaatcaaaacaa

SEQ ID NO: 1630850 - DNA, 15 bp, Homo sapiens
aaaaaaatcaaaaca

SEQ ID NO: 1630851 - DNA, 15 bp, Homo sapiens
caaaaaaatcaaaac

SEQ ID NO: 1630852 - DNA, 15 bp, Homo sapiens
tcaaaaaaatcaaaa

SEQ ID NO: 1630853 - DNA, 15 bp, Homo sapiens
ctcaaaaaaatcaaa

SEQ ID NO: 1630854 - DNA, 15 bp, Homo sapiens
tctcaaaaaaatcaa

SEQ ID NO: 1630855 - DNA, 15 bp, Homo sapiens
gtctcaaaaaaatca

SEQ ID NO: 1630856 - DNA, 15 bp, Homo sapiens
tgtctcaaaaaaatc

SEQ ID NO: 1630857 - DNA, 15 bp, Homo sapiens
ctgtctcaaaaaaat

SEQ ID NO: 1630858 - DNA, 15 bp, Homo sapiens
gccattgcactccag

SEQ ID NO: 1630859 - DNA, 15 bp, Homo sapiens
tggtgagccaagatc

SEQ ID NO: 1630860 - DNA, 15 bp, Homo sapiens
gtggtgagccaagat

SEQ ID NO: 1630861 - DNA, 15 bp, Homo sapiens
tgtggtgagccaaga

SEQ ID NO: 1630862 - DNA, 15 bp, Homo sapiens
ttgtggtgagccaag

SEQ ID NO: 1630863 - DNA, 15 bp, Homo sapiens
gttgtggtgagccaa

SEQ ID NO: 1630864 - DNA, 15 bp, Homo sapiens
agttgtggtgagcca

SEQ ID NO: 1630865 - DNA, 15 bp, Homo sapiens
cagttgtggtgagcc

SEQ ID NO: 1630866 - DNA, 15 bp, Homo sapiens
gcagttgtggtgagc

SEQ ID NO: 1630867 - DNA, 15 bp, Homo sapiens
tgcagttgtggtgag

SEQ ID NO: 1630868 - DNA, 15 bp, Homo sapiens
ctgcagttgtggtga

SEQ ID NO: 1630869 - DNA, 15 bp, Homo sapiens
gctgcagttgtggtg

SEQ ID NO: 1630870 - DNA, 15 bp, Homo sapiens
ggctgcagttgtggt

SEQ ID NO: 1630871 - DNA, 15 bp, Homo sapiens
aggctgcagttgtgg

SEQ ID NO: 1630872 - DNA, 15 bp, Homo sapiens
gaggctgcagttgtg

SEQ ID NO: 1630873 - DNA, 15 bp, Homo sapiens
ggaggctgcagttgt

SEQ ID NO: 1630874 - DNA, 15 bp, Homo sapiens
gggaggctgcagttg

SEQ ID NO: 1630875 - DNA, 15 bp, Homo sapiens
tgggaggctgcagtt

SEQ ID NO: 1630876 - DNA, 15 bp, Homo sapiens
ctgggaggctgcagt

SEQ ID NO: 1630877 - DNA, 15 bp, Homo sapiens
cctgggaggctgcag

SEQ ID NO: 1630878 - DNA, 15 bp, Homo sapiens
acctgggaggctgca

SEQ ID NO: 1630879 - DNA, 15 bp, Homo sapiens
aacctgggaggctgc

SEQ ID NO: 1630880 - DNA, 15 bp, Homo sapiens
gaacctgggaggctg

SEQ ID NO: 1630881 - DNA, 15 bp, Homo sapiens
tgaacctgggaggct

SEQ ID NO: 1630882 - DNA, 15 bp, Homo sapiens
gcttgaacctgggag

SEQ ID NO: 1630883 - DNA, 15 bp, Homo sapiens
tgcttgaacctggga

SEQ ID NO: 1630884 - DNA, 15 bp, Homo sapiens
ttgcttgaacctggg

SEQ ID NO: 1630885 - DNA, 15 bp, Homo sapiens
attgcttgaacctgg

SEQ ID NO: 1630886 - DNA, 15 bp, Homo sapiens
aattgcttgaacctg

SEQ ID NO: 1630887 - DNA, 15 bp, Homo sapiens
gtaggagaattgctt

SEQ ID NO: 1630888 - DNA, 15 bp, Homo sapiens
ggtaggagaattgct

SEQ ID NO: 1630889 - DNA, 15 bp, Homo sapiens
aggtaggagaattgc

SEQ ID NO: 1630890 - DNA, 15 bp, Homo sapiens
gaggtaggagaattg

SEQ ID NO: 1630891 - DNA, 15 bp, Homo sapiens
tgaggtaggagaatt

SEQ ID NO: 1630892 - DNA, 15 bp, Homo sapiens
ctgaggtaggagaat

SEQ ID NO: 1630893 - DNA, 15 bp, Homo sapiens
gctgaggtaggagaa

SEQ ID NO: 1630894 - DNA, 15 bp, Homo sapiens
ggctgaggtaggaga

SEQ ID NO: 1630895 - DNA, 15 bp, Homo sapiens
tcaggaggctgaggt

SEQ ID NO: 1630896 - DNA, 15 bp, Homo sapiens
agtcccagttactca

SEQ ID NO: 1630897 - DNA, 15 bp, Homo sapiens
tagtcccagttactc

SEQ ID NO: 1630898 - DNA, 15 bp, Homo sapiens
gtagtcccagttact

SEQ ID NO: 1630899 - DNA, 15 bp, Homo sapiens
tgtagtcccagttac

SEQ ID NO: 1630900 - DNA, 15 bp, Homo sapiens
ctgtagtcccagtta

SEQ ID NO: 1630901 - DNA, 15 bp, Homo sapiens
cctgtagtcccagtt

SEQ ID NO: 1630902 - DNA, 15 bp, Homo sapiens
gcctgtagtcccagt

SEQ ID NO: 1630903 - DNA, 15 bp, Homo sapiens
tgggtgtggtggcat

SEQ ID NO: 1630904 - DNA, 15 bp, Homo sapiens
ttgggtgtggtggca

SEQ ID NO: 1630905 - DNA, 15 bp, Homo sapiens
gttgggtgtggtggc

SEQ ID NO: 1630906 - DNA, 15 bp, Homo sapiens
agttgggtgtggtgg

SEQ ID NO: 1630907 - DNA, 15 bp, Homo sapiens
tagttgggtgtggtg

SEQ ID NO: 1630908 - DNA, 15 bp, Homo sapiens
ttagttgggtgtggt

SEQ ID NO: 1630909 - DNA, 15 bp, Homo sapiens
attagttgggtgtgg

SEQ ID NO: 1630910 - DNA, 15 bp, Homo sapiens
aattagttgggtgtg

SEQ ID NO: 1630911 - DNA, 15 bp, Homo sapiens
aaattagttgggtgt

SEQ ID NO: 1630912 - DNA, 15 bp, Homo sapiens
aaaattagttgggtg

SEQ ID NO: 1630913 - DNA, 15 bp, Homo sapiens
aaaaattagttgggt

SEQ ID NO: 1630914 - DNA, 15 bp, Homo sapiens
caaaaattagttggg

SEQ ID NO: 1630915 - DNA, 15 bp, Homo sapiens
acaaaaattagttgg

SEQ ID NO: 1630916 - DNA, 15 bp, Homo sapiens
tacaaaaattagttg

SEQ ID NO: 1630917 - DNA, 15 bp, Homo sapiens
atacaaaaattagtt

SEQ ID NO: 1630918 - DNA, 15 bp, Homo sapiens
aatacaaaaattagt

SEQ ID NO: 1630919 - DNA, 15 bp, Homo sapiens
tcctatctctactaa

SEQ ID NO: 1630920 - DNA, 15 bp, Homo sapiens
atcctatctctacta

SEQ ID NO: 1630921 - DNA, 15 bp, Homo sapiens
aatcctatctctact

SEQ ID NO: 1630922 - DNA, 15 bp, Homo sapiens
aaatcctatctctac

SEQ ID NO: 1630923 - DNA, 15 bp, Homo sapiens
gaaatcctatctcta

SEQ ID NO: 1630924 - DNA, 15 bp, Homo sapiens
tgaaatcctatctct

SEQ ID NO: 1630925 - DNA, 15 bp, Homo sapiens
gtgaaatcctatctc

SEQ ID NO: 1630926 - DNA, 15 bp, Homo sapiens
ggtgaaatcctatct

SEQ ID NO: 1630927 - DNA, 15 bp, Homo sapiens
tggtgaaatcctatc

SEQ ID NO: 1630928 - DNA, 15 bp, Homo sapiens
atggtgaaatcctat

SEQ ID NO: 1630929 - DNA, 15 bp, Homo sapiens
catggtgaaatccta

SEQ ID NO: 1630930 - DNA, 15 bp, Homo sapiens
gcatggtgaaatcct

SEQ ID NO: 1630931 - DNA, 15 bp, Homo sapiens
agcatggtgaaatcc

SEQ ID NO: 1630932 - DNA, 15 bp, Homo sapiens
cagcatggtgaaatc

SEQ ID NO: 1630933 - DNA, 15 bp, Homo sapiens
ccagcatggtgaaat

SEQ ID NO: 1630934 - DNA, 15 bp, Homo sapiens
gccagcatggtgaaa

SEQ ID NO: 1630935 - DNA, 15 bp, Homo sapiens
ggccagcatggtgaa

SEQ ID NO: 1630936 - DNA, 15 bp, Homo sapiens
tggccagcatggtga

SEQ ID NO: 1630937 - DNA, 15 bp, Homo sapiens
ctggccagcatggtg

SEQ ID NO: 1630938 - DNA, 15 bp, Homo sapiens
cctggccagcatggt

SEQ ID NO: 1630939 - DNA, 15 bp, Homo sapiens
gcctggccagcatgg

SEQ ID NO: 1630940 - DNA, 15 bp, Homo sapiens
agcctggccagcatg

SEQ ID NO: 1630941 - DNA, 15 bp, Homo sapiens
cagcctggccagcat

SEQ ID NO: 1630942 - DNA, 15 bp, Homo sapiens
ccagcctggccagca

SEQ ID NO: 1630943 - DNA, 15 bp, Homo sapiens
accagcctggccagc

SEQ ID NO: 1630944 - DNA, 15 bp, Homo sapiens
gaccagcctggccag

SEQ ID NO: 1630945 - DNA, 15 bp, Homo sapiens
taggagttcaagacc

SEQ ID NO: 1630946 - DNA, 15 bp, Homo sapiens
tctaggagttcaaga

SEQ ID NO: 1630947 - DNA, 15 bp, Homo sapiens
gtctaggagttcaag

SEQ ID NO: 1630948 - DNA, 15 bp, Homo sapiens
ggtctaggagttcaa

SEQ ID NO: 1630949 - DNA, 15 bp, Homo sapiens
aggtctaggagttca

SEQ ID NO: 1630950 - DNA, 15 bp, Homo sapiens
gaggtctaggagttc

SEQ ID NO: 1630951 - DNA, 15 bp, Homo sapiens
tgaggtctaggagtt

SEQ ID NO: 1630952 - DNA, 15 bp, Homo sapiens
ctgaggtctaggagt

SEQ ID NO: 1630953 - DNA, 15 bp, Homo sapiens
cctgaggtctaggag

SEQ ID NO: 1630954 - DNA, 15 bp, Homo sapiens
acctgaggtctagga

SEQ ID NO: 1630955 - DNA, 15 bp, Homo sapiens
cacctgaggtctagg

SEQ ID NO: 1630956 - DNA, 15 bp, Homo sapiens
tcacctgaggtctag

SEQ ID NO: 1630957 - DNA, 15 bp, Homo sapiens
atcacctgaggtcta

SEQ ID NO: 1630958 - DNA, 15 bp, Homo sapiens
gatcacctgaggtct

SEQ ID NO: 1630959 - DNA, 15 bp, Homo sapiens
ggccaaggtgggcag

SEQ ID NO: 1630960 - DNA, 15 bp, Homo sapiens
tggccaaggtgggca

SEQ ID NO: 1630961 - DNA, 15 bp, Homo sapiens
gtggccaaggtgggc

SEQ ID NO: 1630962 - DNA, 15 bp, Homo sapiens
ggtggccaaggtggg

SEQ ID NO: 1630963 - DNA, 15 bp, Homo sapiens
gggtggccaaggtgg

SEQ ID NO: 1630964 - DNA, 15 bp, Homo sapiens
tgggtggccaaggtg

SEQ ID NO: 1630965 - DNA, 15 bp, Homo sapiens
ttgggtggccaaggt

SEQ ID NO: 1630966 - DNA, 15 bp, Homo sapiens
tttgggtggccaagg

SEQ ID NO: 1630967 - DNA, 15 bp, Homo sapiens
ctttgggtggccaag

SEQ ID NO: 1630968 - DNA, 15 bp, Homo sapiens
actttgggtggccaa

SEQ ID NO: 1630969 - DNA, 15 bp, Homo sapiens
cactttgggtggcca

SEQ ID NO: 1630970 - DNA, 15 bp, Homo sapiens
gcactttgggtggcc

SEQ ID NO: 1630971 - DNA, 15 bp, Homo sapiens
agcactttgggtggc

SEQ ID NO: 1630972 - DNA, 15 bp, Homo sapiens
tagcactttgggtgg

SEQ ID NO: 1630973 - DNA, 15 bp, Homo sapiens
ctagcactttgggtg

SEQ ID NO: 1630974 - DNA, 15 bp, Homo sapiens
cctagcactttgggt

SEQ ID NO: 1630975 - DNA, 15 bp, Homo sapiens
acctgtaatcctagc

SEQ ID NO: 1630976 - DNA, 15 bp, Homo sapiens
cacctgtaatcctag

SEQ ID NO: 1630977 - DNA, 15 bp, Homo sapiens
gcatggtggctcaca

SEQ ID NO: 1630978 - DNA, 15 bp, Homo sapiens
gaggccaggcatggt

SEQ ID NO: 1630979 - DNA, 15 bp, Homo sapiens
tgaggccaggcatgg

SEQ ID NO: 1630980 - DNA, 15 bp, Homo sapiens
ttgaggccaggcatg

SEQ ID NO: 1630981 - DNA, 15 bp, Homo sapiens
cttgaggccaggcat

SEQ ID NO: 1630982 - DNA, 15 bp, Homo sapiens
acttgaggccaggca

SEQ ID NO: 1630983 - DNA, 15 bp, Homo sapiens
aacttgaggccaggc

SEQ ID NO: 1630984 - DNA, 15 bp, Homo sapiens
taacttgaggccagg

SEQ ID NO: 1630985 - DNA, 15 bp, Homo sapiens
ataacttgaggccag

SEQ ID NO: 1630986 - DNA, 15 bp, Homo sapiens
cataacttgaggcca

SEQ ID NO: 1630987 - DNA, 15 bp, Homo sapiens
tcataacttgaggcc

SEQ ID NO: 1630988 - DNA, 15 bp, Homo sapiens
atcataacttgaggc

SEQ ID NO: 1630989 - DNA, 15 bp, Homo sapiens
aatcataacttgagg

SEQ ID NO: 1630990 - DNA, 15 bp, Homo sapiens
aaatcataacttgag

SEQ ID NO: 1630991 - DNA, 15 bp, Homo sapiens
aaaatcataacttga

SEQ ID NO: 1630992 - DNA, 15 bp, Homo sapiens
aaaaatcataacttg

SEQ ID NO: 1630993 - DNA, 15 bp, Homo sapiens
aaaaaatcataactt

SEQ ID NO: 1630994 - DNA, 15 bp, Homo sapiens
taaaaaatcataact

SEQ ID NO: 1630995 - DNA, 15 bp, Homo sapiens
ctaaaaaatcataac

SEQ ID NO: 1630996 - DNA, 15 bp, Homo sapiens
actaaaaaatcataa

SEQ ID NO: 1630997 - DNA, 15 bp, Homo sapiens
aactaaaaaatcata

SEQ ID NO: 1630998 - DNA, 15 bp, Homo sapiens
aaactaaaaaatcat

SEQ ID NO: 1630999 - DNA, 15 bp, Homo sapiens
taaactaaaaaatca

SEQ ID NO: 1631000 - DNA, 15 bp, Homo sapiens
ataaactaaaaaatc

SEQ ID NO: 1631001 - DNA, 15 bp, Homo sapiens
gataaactaaaaaat

SEQ ID NO: 1631002 - DNA, 15 bp, Homo sapiens
cgataaactaaaaaa

SEQ ID NO: 1631003 - DNA, 15 bp, Homo sapiens
ccgataaactaaaaa

SEQ ID NO: 1631004 - DNA, 15 bp, Homo sapiens
accgataaactaaaa

SEQ ID NO: 1631005 - DNA, 15 bp, Homo sapiens
taccgataaactaaa

SEQ ID NO: 1631006 - DNA, 15 bp, Homo sapiens
ataccgataaactaa

SEQ ID NO: 1631007 - DNA, 15 bp, Homo sapiens
aataccgataaacta

SEQ ID NO: 1631008 - DNA, 15 bp, Homo sapiens
aaataccgataaact

SEQ ID NO: 1631009 - DNA, 15 bp, Homo sapiens
aaaataccgataaac

SEQ ID NO: 1631010 - DNA, 15 bp, Homo sapiens
aaaaataccgataaa

SEQ ID NO: 1631011 - DNA, 15 bp, Homo sapiens
gaaaaataccgataa

SEQ ID NO: 1631012 - DNA, 15 bp, Homo sapiens
agaaaaataccgata

SEQ ID NO: 1631013 - DNA, 15 bp, Homo sapiens
aagaaaaataccgat

SEQ ID NO: 1631014 - DNA, 15 bp, Homo sapiens
taagaaaaataccga

SEQ ID NO: 1631015 - DNA, 15 bp, Homo sapiens
ataagaaaaataccg

SEQ ID NO: 1631016 - DNA, 15 bp, Homo sapiens
aataagaaaaatacc

SEQ ID NO: 1631017 - DNA, 15 bp, Homo sapiens
caataagaaaaatac

SEQ ID NO: 1631018 - DNA, 15 bp, Homo sapiens
acaataagaaaaata

SEQ ID NO: 1631019 - DNA, 15 bp, Homo sapiens
aacaataagaaaaat

SEQ ID NO: 1631020 - DNA, 15 bp, Homo sapiens
taacaataagaaaaa

SEQ ID NO: 1631021 - DNA, 15 bp, Homo sapiens
ataacaataagaaaa

SEQ ID NO: 1631022 - DNA, 15 bp, Homo sapiens
cataacaataagaaa

SEQ ID NO: 1631023 - DNA, 15 bp, Homo sapiens
cacataacaataaga

SEQ ID NO: 1631024 - DNA, 15 bp, Homo sapiens
ccacataacaataag

SEQ ID NO: 1631025 - DNA, 15 bp, Homo sapiens
tccacataacaataa

SEQ ID NO: 1631026 - DNA, 15 bp, Homo sapiens
ctccacataacaata

SEQ ID NO: 1631027 - DNA, 15 bp, Homo sapiens
cctccacataacaat

SEQ ID NO: 1631028 - DNA, 15 bp, Homo sapiens
tcctccacataacaa

SEQ ID NO: 1631029 - DNA, 15 bp, Homo sapiens
gtcctccacataaca

SEQ ID NO: 1631030 - DNA, 15 bp, Homo sapiens
tgtcctccacataac

SEQ ID NO: 1631031 - DNA, 15 bp, Homo sapiens
gtgtcctccacataa

SEQ ID NO: 1631032 - DNA, 15 bp, Homo sapiens
agtgtcctccacata

SEQ ID NO: 1631033 - DNA, 15 bp, Homo sapiens
cagtgtcctccacat

SEQ ID NO: 1631034 - DNA, 15 bp, Homo sapiens
gcagtgtcctccaca

SEQ ID NO: 1631035 - DNA, 15 bp, Homo sapiens
cgcagtgtcctccac

SEQ ID NO: 1631036 - DNA, 15 bp, Homo sapiens
acgcagtgtcctcca

SEQ ID NO: 1631037 - DNA, 15 bp, Homo sapiens
aacgcagtgtcctcc

SEQ ID NO: 1631038 - DNA, 15 bp, Homo sapiens
aaacgcagtgtcctc

SEQ ID NO: 1631039 - DNA, 15 bp, Homo sapiens
caaacgcagtgtcct

SEQ ID NO: 1631040 - DNA, 15 bp, Homo sapiens
gcaaacgcagtgtcc

SEQ ID NO: 1631041 - DNA, 15 bp, Homo sapiens
ggcaaacgcagtgtc

SEQ ID NO: 1631042 - DNA, 15 bp, Homo sapiens
tggcaaacgcagtgt

SEQ ID NO: 1631043 - DNA, 15 bp, Homo sapiens
ctggcaaacgcagtg

SEQ ID NO: 1631044 - DNA, 15 bp, Homo sapiens
cctggcaaacgcagt

SEQ ID NO: 1631045 - DNA, 15 bp, Homo sapiens
acctggcaaacgcag

SEQ ID NO: 1631046 - DNA, 15 bp, Homo sapiens
aacctggcaaacgca

SEQ ID NO: 1631047 - DNA, 15 bp, Homo sapiens
aaacctggcaaacgc

SEQ ID NO: 1631048 - DNA, 15 bp, Homo sapiens
aaaacctggcaaacg

SEQ ID NO: 1631049 - DNA, 15 bp, Homo sapiens
aaaaacctggcaaac

SEQ ID NO: 1631050 - DNA, 15 bp, Homo sapiens
aaaaaacctggcaaa

SEQ ID NO: 1631051 - DNA, 15 bp, Homo sapiens
caaaaaacctggcaa

SEQ ID NO: 1631052 - DNA, 15 bp, Homo sapiens
acaaaaaacctggca

SEQ ID NO: 1631053 - DNA, 15 bp, Homo sapiens
aacaaaaaacctggc

SEQ ID NO: 1631054 - DNA, 15 bp, Homo sapiens
aaacaaaaaacctgg

SEQ ID NO: 1631055 - DNA, 15 bp, Homo sapiens
aaaacaaaaaacctg

SEQ ID NO: 1631056 - DNA, 15 bp, Homo sapiens
aaaaacaaaaaacct

SEQ ID NO: 1631057 - DNA, 15 bp, Homo sapiens
caaaaacaaaaaacc

SEQ ID NO: 1631058 - DNA, 15 bp, Homo sapiens
acaaaaacaaaaaac

SEQ ID NO: 1631059 - DNA, 15 bp, Homo sapiens
atctcaaaaaacaaa

SEQ ID NO: 1631060 - DNA, 15 bp, Homo sapiens
catctcaaaaaacaa

SEQ ID NO: 1631061 - DNA, 15 bp, Homo sapiens
ccatctcaaaaaaca

SEQ ID NO: 1631062 - DNA, 15 bp, Homo sapiens
tccatctcaaaaaac

SEQ ID NO: 1631063 - DNA, 15 bp, Homo sapiens
tactccatctcaaaa

SEQ ID NO: 1631064 - DNA, 15 bp, Homo sapiens
atactccatctcaaa

SEQ ID NO: 1631065 - DNA, 15 bp, Homo sapiens
aatactccatctcaa

SEQ ID NO: 1631066 - DNA, 15 bp, Homo sapiens
caatactccatctca

SEQ ID NO: 1631067 - DNA, 15 bp, Homo sapiens
gcaatactccatctc

SEQ ID NO: 1631068 - DNA, 15 bp, Homo sapiens
agcaatactccatct

SEQ ID NO: 1631069 - DNA, 15 bp, Homo sapiens
gagcaatactccatc

SEQ ID NO: 1631070 - DNA, 15 bp, Homo sapiens
agagcaatactccat

SEQ ID NO: 1631071 - DNA, 15 bp, Homo sapiens
cagagcaatactcca

SEQ ID NO: 1631072 - DNA, 15 bp, Homo sapiens
acagagcaatactcc

SEQ ID NO: 1631073 - DNA, 15 bp, Homo sapiens
gacagagcaatactc

SEQ ID NO: 1631074 - DNA, 15 bp, Homo sapiens
cgacagagcaatact

SEQ ID NO: 1631075 - DNA, 15 bp, Homo sapiens
gcgacagagcaatac

SEQ ID NO: 1631076 - DNA, 15 bp, Homo sapiens
ggcgacagagcaata

SEQ ID NO: 1631077 - DNA, 15 bp, Homo sapiens
gggcgacagagcaat

SEQ ID NO: 1631078 - DNA, 15 bp, Homo sapiens
cctccagcctgggcg

SEQ ID NO: 1631079 - DNA, 15 bp, Homo sapiens
tcctccagcctgggc

SEQ ID NO: 1631080 - DNA, 15 bp, Homo sapiens
gtcctccagcctggg

SEQ ID NO: 1631081 - DNA, 15 bp, Homo sapiens
tgtcctccagcctgg

SEQ ID NO: 1631082 - DNA, 15 bp, Homo sapiens
ctgtcctccagcctg

SEQ ID NO: 1631083 - DNA, 15 bp, Homo sapiens
actgtcctccagcct

SEQ ID NO: 1631084 - DNA, 15 bp, Homo sapiens
cactgtcctccagcc

SEQ ID NO: 1631085 - DNA, 15 bp, Homo sapiens
tcactgtcctccagc

SEQ ID NO: 1631086 - DNA, 15 bp, Homo sapiens
atcactgtcctccag

SEQ ID NO: 1631087 - DNA, 15 bp, Homo sapiens
catcactgtcctcca

SEQ ID NO: 1631088 - DNA, 15 bp, Homo sapiens
gcatcactgtcctcc

SEQ ID NO: 1631089 - DNA, 15 bp, Homo sapiens
cgcatcactgtcctc

SEQ ID NO: 1631090 - DNA, 15 bp, Homo sapiens
tcgcatcactgtcct

SEQ ID NO: 1631091 - DNA, 15 bp, Homo sapiens
atcgcatcactgtcc

SEQ ID NO: 1631092 - DNA, 15 bp, Homo sapiens
gatcgcatcactgtc

SEQ ID NO: 1631093 - DNA, 15 bp, Homo sapiens
agatcgcatcactgt

SEQ ID NO: 1631094 - DNA, 15 bp, Homo sapiens
aagatcgcatcactg

SEQ ID NO: 1631095 - DNA, 15 bp, Homo sapiens
caagatcgcatcact

SEQ ID NO: 1631096 - DNA, 15 bp, Homo sapiens
ccaagatcgcatcac

SEQ ID NO: 1631097 - DNA, 15 bp, Homo sapiens
gccaagatcgcatca

SEQ ID NO: 1631098 - DNA, 15 bp, Homo sapiens
agccaagatcgcatc

SEQ ID NO: 1631099 - DNA, 15 bp, Homo sapiens
gagccaagatcgcat

SEQ ID NO: 1631100 - DNA, 15 bp, Homo sapiens
cgagccaagatcgca

SEQ ID NO: 1631101 - DNA, 15 bp, Homo sapiens
gcgagccaagatcgc

SEQ ID NO: 1631102 - DNA, 15 bp, Homo sapiens
agcgagccaagatcg

SEQ ID NO: 1631103 - DNA, 15 bp, Homo sapiens
cagcgagccaagatc

SEQ ID NO: 1631104 - DNA, 15 bp, Homo sapiens
gcagcgagccaagat

SEQ ID NO: 1631105 - DNA, 15 bp, Homo sapiens
tgcagcgagccaaga

SEQ ID NO: 1631106 - DNA, 15 bp, Homo sapiens
ttgcagcgagccaag

SEQ ID NO: 1631107 - DNA, 15 bp, Homo sapiens
attgcagcgagccaa

SEQ ID NO: 1631108 - DNA, 15 bp, Homo sapiens
gattgcagcgagcca

SEQ ID NO: 1631109 - DNA, 15 bp, Homo sapiens
agattgcagcgagcc

SEQ ID NO: 1631110 - DNA, 15 bp, Homo sapiens
gagattgcagcgagc

SEQ ID NO: 1631111 - DNA, 15 bp, Homo sapiens
agagattgcagcgag

SEQ ID NO: 1631112 - DNA, 15 bp, Homo sapiens
cagagattgcagcga

SEQ ID NO: 1631113 - DNA, 15 bp, Homo sapiens
gcagagattgcagcg

SEQ ID NO: 1631114 - DNA, 15 bp, Homo sapiens
ggcagagattgcagc

SEQ ID NO: 1631115 - DNA, 15 bp, Homo sapiens
ctgggaggcagagat

SEQ ID NO: 1631116 - DNA, 15 bp, Homo sapiens
cctgggaggcagaga

SEQ ID NO: 1631117 - DNA, 15 bp, Homo sapiens
tttgaacctgggagg

SEQ ID NO: 1631118 - DNA, 15 bp, Homo sapiens
atttgaacctgggag

SEQ ID NO: 1631119 - DNA, 15 bp, Homo sapiens
catttgaacctggga

SEQ ID NO: 1631120 - DNA, 15 bp, Homo sapiens
tcatttgaacctggg

SEQ ID NO: 1631121 - DNA, 15 bp, Homo sapiens
atcatttgaacctgg

SEQ ID NO: 1631122 - DNA, 15 bp, Homo sapiens
aatcatttgaacctg

SEQ ID NO: 1631123 - DNA, 15 bp, Homo sapiens
gaatcatttgaacct

SEQ ID NO: 1631124 - DNA, 15 bp, Homo sapiens
aactgtaatcccagc

SEQ ID NO: 1631125 - DNA, 15 bp, Homo sapiens
caactgtaatcccag

SEQ ID NO: 1631126 - DNA, 15 bp, Homo sapiens
gcaactgtaatccca

SEQ ID NO: 1631127 - DNA, 15 bp, Homo sapiens
tgcaactgtaatccc

SEQ ID NO: 1631128 - DNA, 15 bp, Homo sapiens
atgcaactgtaatcc

SEQ ID NO: 1631129 - DNA, 15 bp, Homo sapiens
catgcaactgtaatc

SEQ ID NO: 1631130 - DNA, 15 bp, Homo sapiens
tcatgcaactgtaat

SEQ ID NO: 1631131 - DNA, 15 bp, Homo sapiens
gtcatgcaactgtaa

SEQ ID NO: 1631132 - DNA, 15 bp, Homo sapiens
tgtcatgcaactgta

SEQ ID NO: 1631133 - DNA, 15 bp, Homo sapiens
gtgtcatgcaactgt

SEQ ID NO: 1631134 - DNA, 15 bp, Homo sapiens
ggtgtcatgcaactg

SEQ ID NO: 1631135 - DNA, 15 bp, Homo sapiens
tggtgtcatgcaact

SEQ ID NO: 1631136 - DNA, 15 bp, Homo sapiens
gtggtgtcatgcaac

SEQ ID NO: 1631137 - DNA, 15 bp, Homo sapiens
tgtggtgtcatgcaa

SEQ ID NO: 1631138 - DNA, 15 bp, Homo sapiens
gtgtggtgtcatgca

SEQ ID NO: 1631139 - DNA, 15 bp, Homo sapiens
ggtgtggtgtcatgc

SEQ ID NO: 1631140 - DNA, 15 bp, Homo sapiens
aggtgtggtgtcatg

SEQ ID NO: 1631141 - DNA, 15 bp, Homo sapiens
caggtgtggtgtcat

SEQ ID NO: 1631142 - DNA, 15 bp, Homo sapiens
ccaggtgtggtgtca

SEQ ID NO: 1631143 - DNA, 15 bp, Homo sapiens
gccaggtgtggtgtc

SEQ ID NO: 1631144 - DNA, 15 bp, Homo sapiens
agccaggtgtggtgt

SEQ ID NO: 1631145 - DNA, 15 bp, Homo sapiens
gactctactaaaaat

SEQ ID NO: 1631146 - DNA, 15 bp, Homo sapiens
tgactctactaaaaa

SEQ ID NO: 1631147 - DNA, 15 bp, Homo sapiens
ctgactctactaaaa

SEQ ID NO: 1631148 - DNA, 15 bp, Homo sapiens
tctgactctactaaa

SEQ ID NO: 1631149 - DNA, 15 bp, Homo sapiens
ctctgactctactaa

SEQ ID NO: 1631150 - DNA, 15 bp, Homo sapiens
actctgactctacta

SEQ ID NO: 1631151 - DNA, 15 bp, Homo sapiens
aactctgactctact

SEQ ID NO: 1631152 - DNA, 15 bp, Homo sapiens
aaactctgactctac

SEQ ID NO: 1631153 - DNA, 15 bp, Homo sapiens
gaaactctgactcta

SEQ ID NO: 1631154 - DNA, 15 bp, Homo sapiens
tgaaactctgactct

SEQ ID NO: 1631155 - DNA, 15 bp, Homo sapiens
gtgaaactctgactc

SEQ ID NO: 1631156 - DNA, 15 bp, Homo sapiens
ggtgaaactctgact

SEQ ID NO: 1631157 - DNA, 15 bp, Homo sapiens
cggtgaaactctgac

SEQ ID NO: 1631158 - DNA, 15 bp, Homo sapiens
acggtgaaactctga

SEQ ID NO: 1631159 - DNA, 15 bp, Homo sapiens
cacggtgaaactctg

SEQ ID NO: 1631160 - DNA, 15 bp, Homo sapiens
acacggtgaaactct

SEQ ID NO: 1631161 - DNA, 15 bp, Homo sapiens
caacacggtgaaact

SEQ ID NO: 1631162 - DNA, 15 bp, Homo sapiens
accaacacggtgaaa

SEQ ID NO: 1631163 - DNA, 15 bp, Homo sapiens
gaccaacacggtgaa

SEQ ID NO: 1631164 - DNA, 15 bp, Homo sapiens
tgaccaacacggtga

SEQ ID NO: 1631165 - DNA, 15 bp, Homo sapiens
ctgaccaacacggtg

SEQ ID NO: 1631166 - DNA, 15 bp, Homo sapiens
cctgaccaacacggt

SEQ ID NO: 1631167 - DNA, 15 bp, Homo sapiens
gcctgaccaacacgg

SEQ ID NO: 1631168 - DNA, 15 bp, Homo sapiens
agcctgaccaacacg

SEQ ID NO: 1631169 - DNA, 15 bp, Homo sapiens
cagcctgaccaacac

SEQ ID NO: 1631170 - DNA, 15 bp, Homo sapiens
tcagcctgaccaaca

SEQ ID NO: 1631171 - DNA, 15 bp, Homo sapiens
atcagcctgaccaac

SEQ ID NO: 1631172 - DNA, 15 bp, Homo sapiens
gatcagcctgaccaa

SEQ ID NO: 1631173 - DNA, 15 bp, Homo sapiens
agatcagcctgacca

SEQ ID NO: 1631174 - DNA, 15 bp, Homo sapiens
gagatcagcctgacc

SEQ ID NO: 1631175 - DNA, 15 bp, Homo sapiens
tgagatcagcctgac

SEQ ID NO: 1631176 - DNA, 15 bp, Homo sapiens
ttgagatcagcctga

SEQ ID NO: 1631177 - DNA, 15 bp, Homo sapiens
tttgagatcagcctg

SEQ ID NO: 1631178 - DNA, 15 bp, Homo sapiens
aaggtgggtggatca

SEQ ID NO: 1631179 - DNA, 15 bp, Homo sapiens
caaggtgggtggatc

SEQ ID NO: 1631180 - DNA, 15 bp, Homo sapiens
gcgtggtggctcatg

SEQ ID NO: 1631181 - DNA, 15 bp, Homo sapiens
ggcgtggtggctcat

SEQ ID NO: 1631182 - DNA, 15 bp, Homo sapiens
cagccgggcgtggtg

SEQ ID NO: 1631183 - DNA, 15 bp, Homo sapiens
gcagccgggcgtggt

SEQ ID NO: 1631184 - DNA, 15 bp, Homo sapiens
ggcagccgggcgtgg

SEQ ID NO: 1631185 - DNA, 15 bp, Homo sapiens
aggcagccgggcgtg

SEQ ID NO: 1631186 - DNA, 15 bp, Homo sapiens
aaggcagccgggcgt

SEQ ID NO: 1631187 - DNA, 15 bp, Homo sapiens
aaaggcagccgggcg

SEQ ID NO: 1631188 - DNA, 15 bp, Homo sapiens
caaaggcagccgggc

SEQ ID NO: 1631189 - DNA, 15 bp, Homo sapiens
gcaaaggcagccggg

SEQ ID NO: 1631190 - DNA, 15 bp, Homo sapiens
ggcaaaggcagccgg

SEQ ID NO: 1631191 - DNA, 15 bp, Homo sapiens
tggcaaaggcagccg

SEQ ID NO: 1631192 - DNA, 15 bp, Homo sapiens
ctggcaaaggcagcc

SEQ ID NO: 1631193 - DNA, 15 bp, Homo sapiens
actggcaaaggcagc

SEQ ID NO: 1631194 - DNA, 15 bp, Homo sapiens
aactggcaaaggcag

SEQ ID NO: 1631195 - DNA, 15 bp, Homo sapiens
aaactggcaaaggca

SEQ ID NO: 1631196 - DNA, 15 bp, Homo sapiens
aaaactggcaaaggc

SEQ ID NO: 1631197 - DNA, 15 bp, Homo sapiens
gaaaactggcaaagg

SEQ ID NO: 1631198 - DNA, 15 bp, Homo sapiens
agaaaactggcaaag

SEQ ID NO: 1631199 - DNA, 15 bp, Homo sapiens
tagaaaactggcaaa

SEQ ID NO: 1631200 - DNA, 15 bp, Homo sapiens
gtagaaaactggcaa

SEQ ID NO: 1631201 - DNA, 15 bp, Homo sapiens
tgtagaaaactggca

SEQ ID NO: 1631202 - DNA, 15 bp, Homo sapiens
atgtagaaaactggc

SEQ ID NO: 1631203 - DNA, 15 bp, Homo sapiens
gatgtagaaaactgg

SEQ ID NO: 1631204 - DNA, 15 bp, Homo sapiens
ggatgtagaaaactg

SEQ ID NO: 1631205 - DNA, 15 bp, Homo sapiens
aggatgtagaaaact

SEQ ID NO: 1631206 - DNA, 15 bp, Homo sapiens
taggatgtagaaaac

SEQ ID NO: 1631207 - DNA, 15 bp, Homo sapiens
ataggatgtagaaaa

SEQ ID NO: 1631208 - DNA, 15 bp, Homo sapiens
cataggatgtagaaa

SEQ ID NO: 1631209 - DNA, 15 bp, Homo sapiens
acataggatgtagaa

SEQ ID NO: 1631210 - DNA, 15 bp, Homo sapiens
cacataggatgtaga

SEQ ID NO: 1631211 - DNA, 15 bp, Homo sapiens
ccacataggatgtag

SEQ ID NO: 1631212 - DNA, 15 bp, Homo sapiens
tccacataggatgta

SEQ ID NO: 1631213 - DNA, 15 bp, Homo sapiens
ttccacataggatgt

SEQ ID NO: 1631214 - DNA, 15 bp, Homo sapiens
gttccacataggatg

SEQ ID NO: 1631215 - DNA, 15 bp, Homo sapiens
ggttccacataggat

SEQ ID NO: 1631216 - DNA, 15 bp, Homo sapiens
gggttccacatagga

SEQ ID NO: 1631217 - DNA, 15 bp, Homo sapiens
tgggttccacatagg

SEQ ID NO: 1631218 - DNA, 15 bp, Homo sapiens
ctgggttccacatag

SEQ ID NO: 1631219 - DNA, 15 bp, Homo sapiens
tctgggttccacata

SEQ ID NO: 1631220 - DNA, 15 bp, Homo sapiens
ttctgggttccacat

SEQ ID NO: 1631221 - DNA, 15 bp, Homo sapiens
tttctgggttccaca

SEQ ID NO: 1631222 - DNA, 15 bp, Homo sapiens
atttctgggttccac

SEQ ID NO: 1631223 - DNA, 15 bp, Homo sapiens
gatttctgggttcca

SEQ ID NO: 1631224 - DNA, 15 bp, Homo sapiens
ggatttctgggttcc

SEQ ID NO: 1631225 - DNA, 15 bp, Homo sapiens
gggatttctgggttc

SEQ ID NO: 1631226 - DNA, 15 bp, Homo sapiens
agggatttctgggtt

SEQ ID NO: 1631227 - DNA, 15 bp, Homo sapiens
cagggatttctgggt

SEQ ID NO: 1631228 - DNA, 15 bp, Homo sapiens
tcagggatttctggg

SEQ ID NO: 1631229 - DNA, 15 bp, Homo sapiens
atcagggatttctgg

SEQ ID NO: 1631230 - DNA, 15 bp, Homo sapiens
catcagggatttctg

SEQ ID NO: 1631231 - DNA, 15 bp, Homo sapiens
acatcagggatttct

SEQ ID NO: 1631232 - DNA, 15 bp, Homo sapiens
gacatcagggatttc

SEQ ID NO: 1631233 - DNA, 15 bp, Homo sapiens
ggacatcagggattt

SEQ ID NO: 1631234 - DNA, 15 bp, Homo sapiens
tggacatcagggatt

SEQ ID NO: 1631235 - DNA, 15 bp, Homo sapiens
atggacatcagggat

SEQ ID NO: 1631236 - DNA, 15 bp, Homo sapiens
aatggacatcaggga

SEQ ID NO: 1631237 - DNA, 15 bp, Homo sapiens
aaatggacatcaggg

SEQ ID NO: 1631238 - DNA, 15 bp, Homo sapiens
caaatggacatcagg

SEQ ID NO: 1631239 - DNA, 15 bp, Homo sapiens
acaaatggacatcag

SEQ ID NO: 1631240 - DNA, 15 bp, Homo sapiens
cacaaatggacatca

SEQ ID NO: 1631241 - DNA, 15 bp, Homo sapiens
acacaaatggacatc

SEQ ID NO: 1631242 - DNA, 15 bp, Homo sapiens
aacacaaatggacat

SEQ ID NO: 1631243 - DNA, 15 bp, Homo sapiens
caacacaaatggaca

SEQ ID NO: 1631244 - DNA, 15 bp, Homo sapiens
acaacacaaatggac

SEQ ID NO: 1631245 - DNA, 15 bp, Homo sapiens
tacaacacaaatgga

SEQ ID NO: 1631246 - DNA, 15 bp, Homo sapiens
ctacaacacaaatgg

SEQ ID NO: 1631247 - DNA, 15 bp, Homo sapiens
actacaacacaaatg

SEQ ID NO: 1631248 - DNA, 15 bp, Homo sapiens
aactacaacacaaat

SEQ ID NO: 1631249 - DNA, 15 bp, Homo sapiens
taactacaacacaaa

SEQ ID NO: 1631250 - DNA, 15 bp, Homo sapiens
ataactacaacacaa

SEQ ID NO: 1631251 - DNA, 15 bp, Homo sapiens
gataactacaacaca

SEQ ID NO: 1631252 - DNA, 15 bp, Homo sapiens
agataactacaacac

SEQ ID NO: 1631253 - DNA, 15 bp, Homo sapiens
tagataactacaaca

SEQ ID NO: 1631254 - DNA, 15 bp, Homo sapiens
ctagataactacaac

SEQ ID NO: 1631255 - DNA, 15 bp, Homo sapiens
actagataactacaa

SEQ ID NO: 1631256 - DNA, 15 bp, Homo sapiens
aactagataactaca

SEQ ID NO: 1631257 - DNA, 15 bp, Homo sapiens
aaactagataactac

SEQ ID NO: 1631258 - DNA, 15 bp, Homo sapiens
aaaactagataacta

SEQ ID NO: 1631259 - DNA, 15 bp, Homo sapiens
aaaaactagataact

SEQ ID NO: 1631260 - DNA, 15 bp, Homo sapiens
aaaaaactagataac

SEQ ID NO: 1631261 - DNA, 15 bp, Homo sapiens
aaaaaaactagataa

SEQ ID NO: 1631262 - DNA, 15 bp, Homo sapiens
aaaaaaaactagata

SEQ ID NO: 1631263 - DNA, 15 bp, Homo sapiens
gaaaaaaaactagat

SEQ ID NO: 1631264 - DNA, 15 bp, Homo sapiens
agaaaaaaaactaga

SEQ ID NO: 1631265 - DNA, 15 bp, Homo sapiens
tagaaaaaaaactag

SEQ ID NO: 1631266 - DNA, 15 bp, Homo sapiens
ctagaaaaaaaacta

SEQ ID NO: 1631267 - DNA, 15 bp, Homo sapiens
actagaaaaaaaact

SEQ ID NO: 1631268 - DNA, 15 bp, Homo sapiens
aactagaaaaaaaac

SEQ ID NO: 1631269 - DNA, 15 bp, Homo sapiens
caactagaaaaaaaa

SEQ ID NO: 1631270 - DNA, 15 bp, Homo sapiens
aacaactagaaaaaa

SEQ ID NO: 1631271 - DNA, 15 bp, Homo sapiens
taacaactagaaaaa

SEQ ID NO: 1631272 - DNA, 15 bp, Homo sapiens
gtaacaactagaaaa

SEQ ID NO: 1631273 - DNA, 15 bp, Homo sapiens
tgtaacaactagaaa

SEQ ID NO: 1631274 - DNA, 15 bp, Homo sapiens
ctgtaacaactagaa

SEQ ID NO: 1631275 - DNA, 15 bp, Homo sapiens
actgtaacaactaga

SEQ ID NO: 1631276 - DNA, 15 bp, Homo sapiens
cactgtaacaactag

SEQ ID NO: 1631277 - DNA, 15 bp, Homo sapiens
ccactgtaacaacta

SEQ ID NO: 1631278 - DNA, 15 bp, Homo sapiens
cccactgtaacaact

SEQ ID NO: 1631279 - DNA, 15 bp, Homo sapiens
tcccactgtaacaac

SEQ ID NO: 1631280 - DNA, 15 bp, Homo sapiens
ttcccactgtaacaa

SEQ ID NO: 1631281 - DNA, 15 bp, Homo sapiens
attcccactgtaaca

SEQ ID NO: 1631282 - DNA, 15 bp, Homo sapiens
tattcccactgtaac

SEQ ID NO: 1631283 - DNA, 15 bp, Homo sapiens
ttattcccactgtaa

SEQ ID NO: 1631284 - DNA, 15 bp, Homo sapiens
attattcccactgta

SEQ ID NO: 1631285 - DNA, 15 bp, Homo sapiens
cattattcccactgt

SEQ ID NO: 1631286 - DNA, 15 bp, Homo sapiens
ccattattcccactg

SEQ ID NO: 1631287 - DNA, 15 bp, Homo sapiens
accattattcccact

SEQ ID NO: 1631288 - DNA, 15 bp, Homo sapiens
gaccattattcccac

SEQ ID NO: 1631289 - DNA, 15 bp, Homo sapiens
agaccattattccca

SEQ ID NO: 1631290 - DNA, 15 bp, Homo sapiens
aagaccattattccc

SEQ ID NO: 1631291 - DNA, 15 bp, Homo sapiens
aaagaccattattcc

SEQ ID NO: 1631292 - DNA, 15 bp, Homo sapiens
gaaagaccattattc

SEQ ID NO: 1631293 - DNA, 15 bp, Homo sapiens
tgaaagaccattatt

SEQ ID NO: 1631294 - DNA, 15 bp, Homo sapiens
gtgaaagaccattat

SEQ ID NO: 1631295 - DNA, 15 bp, Homo sapiens
agtgaaagaccatta

SEQ ID NO: 1631296 - DNA, 15 bp, Homo sapiens
tagtgaaagaccatt

SEQ ID NO: 1631297 - DNA, 15 bp, Homo sapiens
atagtgaaagaccat

SEQ ID NO: 1631298 - DNA, 15 bp, Homo sapiens
gatagtgaaagacca

SEQ ID NO: 1631299 - DNA, 15 bp, Homo sapiens
agatagtgaaagacc

SEQ ID NO: 1631300 - DNA, 15 bp, Homo sapiens
aagatagtgaaagac

SEQ ID NO: 1631301 - DNA, 15 bp, Homo sapiens
gaagatagtgaaaga

SEQ ID NO: 1631302 - DNA, 15 bp, Homo sapiens
agaagatagtgaaag

SEQ ID NO: 1631303 - DNA, 15 bp, Homo sapiens
tagaagatagtgaaa

SEQ ID NO: 1631304 - DNA, 15 bp, Homo sapiens
gtagaagatagtgaa

SEQ ID NO: 1631305 - DNA, 15 bp, Homo sapiens
tgtagaagatagtga

SEQ ID NO: 1631306 - DNA, 15 bp, Homo sapiens
atgtagaagatagtg

SEQ ID NO: 1631307 - DNA, 15 bp, Homo sapiens
aatgtagaagatagt

SEQ ID NO: 1631308 - DNA, 15 bp, Homo sapiens
gaatgtagaagatag

SEQ ID NO: 1631309 - DNA, 15 bp, Homo sapiens
agaatgtagaagata

SEQ ID NO: 1631310 - DNA, 15 bp, Homo sapiens
cagaatgtagaagat

SEQ ID NO: 1631311 - DNA, 15 bp, Homo sapiens
tcagaatgtagaaga

SEQ ID NO: 1631312 - DNA, 15 bp, Homo sapiens
gtcagaatgtagaag

SEQ ID NO: 1631313 - DNA, 15 bp, Homo sapiens
ggtcagaatgtagaa

SEQ ID NO: 1631314 - DNA, 15 bp, Homo sapiens
gggtcagaatgtaga

SEQ ID NO: 1631315 - DNA, 15 bp, Homo sapiens
tgggtcagaatgtag

SEQ ID NO: 1631316 - DNA, 15 bp, Homo sapiens
ttgggtcagaatgta

SEQ ID NO: 1631317 - DNA, 15 bp, Homo sapiens
tttgggtcagaatgt

SEQ ID NO: 1631318 - DNA, 15 bp, Homo sapiens
ctttgggtcagaatg

SEQ ID NO: 1631319 - DNA, 15 bp, Homo sapiens
gctttgggtcagaat

SEQ ID NO: 1631320 - DNA, 15 bp, Homo sapiens
ggctttgggtcagaa

SEQ ID NO: 1631321 - DNA, 15 bp, Homo sapiens
tggctttgggtcaga

SEQ ID NO: 1631322 - DNA, 15 bp, Homo sapiens
ttggctttgggtcag

SEQ ID NO: 1631323 - DNA, 15 bp, Homo sapiens
tttggctttgggtca

SEQ ID NO: 1631324 - DNA, 15 bp, Homo sapiens
atttggctttgggtc

SEQ ID NO: 1631325 - DNA, 15 bp, Homo sapiens
catttggctttgggt

SEQ ID NO: 1631326 - DNA, 15 bp, Homo sapiens
acatttggctttggg

SEQ ID NO: 1631327 - DNA, 15 bp, Homo sapiens
gacatttggctttgg

SEQ ID NO: 1631328 - DNA, 15 bp, Homo sapiens
tgacatttggctttg

SEQ ID NO: 1631329 - DNA, 15 bp, Homo sapiens
atgacatttggcttt

SEQ ID NO: 1631330 - DNA, 15 bp, Homo sapiens
tatgacatttggctt

SEQ ID NO: 1631331 - DNA, 15 bp, Homo sapiens
ttatgacatttggct

SEQ ID NO: 1631332 - DNA, 15 bp, Homo sapiens
attatgacatttggc

SEQ ID NO: 1631333 - DNA, 15 bp, Homo sapiens
tattatgacatttgg

SEQ ID NO: 1631334 - DNA, 15 bp, Homo sapiens
ttattatgacatttg

SEQ ID NO: 1631335 - DNA, 15 bp, Homo sapiens
gttattatgacattt

SEQ ID NO: 1631336 - DNA, 15 bp, Homo sapiens
ggttattatgacatt

SEQ ID NO: 1631337 - DNA, 15 bp, Homo sapiens
aggttattatgacat

SEQ ID NO: 1631338 - DNA, 15 bp, Homo sapiens
aaggttattatgaca

SEQ ID NO: 1631339 - DNA, 15 bp, Homo sapiens
aaaggttattatgac

SEQ ID NO: 1631340 - DNA, 15 bp, Homo sapiens
gaaaggttattatga

SEQ ID NO: 1631341 - DNA, 15 bp, Homo sapiens
agaaaggttattatg

SEQ ID NO: 1631342 - DNA, 15 bp, Homo sapiens
cagaaaggttattat

SEQ ID NO: 1631343 - DNA, 15 bp, Homo sapiens
tcagaaaggttatta

SEQ ID NO: 1631344 - DNA, 15 bp, Homo sapiens
ttcagaaaggttatt

SEQ ID NO: 1631345 - DNA, 15 bp, Homo sapiens
tttcagaaaggttat

SEQ ID NO: 1631346 - DNA, 15 bp, Homo sapiens
gtttcagaaaggtta

SEQ ID NO: 1631347 - DNA, 15 bp, Homo sapiens
tgtttcagaaaggtt

SEQ ID NO: 1631348 - DNA, 15 bp, Homo sapiens
atgtttcagaaaggt

SEQ ID NO: 1631349 - DNA, 15 bp, Homo sapiens
tatgtttcagaaagg

SEQ ID NO: 1631350 - DNA, 15 bp, Homo sapiens
ttatgtttcagaaag

SEQ ID NO: 1631351 - DNA, 15 bp, Homo sapiens
tttatgtttcagaaa

SEQ ID NO: 1631352 - DNA, 15 bp, Homo sapiens
atttatgtttcagaa

SEQ ID NO: 1631353 - DNA, 15 bp, Homo sapiens
aatttatgtttcaga

SEQ ID NO: 1631354 - DNA, 15 bp, Homo sapiens
caatttatgtttcag

SEQ ID NO: 1631355 - DNA, 15 bp, Homo sapiens
ccaatttatgtttca

SEQ ID NO: 1631356 - DNA, 15 bp, Homo sapiens
tccaatttatgtttc

SEQ ID NO: 1631357 - DNA, 15 bp, Homo sapiens
atccaatttatgttt

SEQ ID NO: 1631358 - DNA, 15 bp, Homo sapiens
gatccaatttatgtt

SEQ ID NO: 1631359 - DNA, 15 bp, Homo sapiens
tgatccaatttatgt

SEQ ID NO: 1631360 - DNA, 15 bp, Homo sapiens
atgatccaatttatg

SEQ ID NO: 1631361 - DNA, 15 bp, Homo sapiens
tatgatccaatttat

SEQ ID NO: 1631362 - DNA, 15 bp, Homo sapiens
ttatgatccaattta

SEQ ID NO: 1631363 - DNA, 15 bp, Homo sapiens
gttatgatccaattt

SEQ ID NO: 1631364 - DNA, 15 bp, Homo sapiens
tgttatgatccaatt

SEQ ID NO: 1631365 - DNA, 15 bp, Homo sapiens
gtgttatgatccaat

SEQ ID NO: 1631366 - DNA, 15 bp, Homo sapiens
agtgttatgatccaa

SEQ ID NO: 1631367 - DNA, 15 bp, Homo sapiens
gagtgttatgatcca

SEQ ID NO: 1631368 - DNA, 15 bp, Homo sapiens
ggagtgttatgatcc

SEQ ID NO: 1631369 - DNA, 15 bp, Homo sapiens
aggagtgttatgatc

SEQ ID NO: 1631370 - DNA, 15 bp, Homo sapiens
aaggagtgttatgat

SEQ ID NO: 1631371 - DNA, 15 bp, Homo sapiens
aaaggagtgttatga

SEQ ID NO: 1631372 - DNA, 15 bp, Homo sapiens
caaaggagtgttatg

SEQ ID NO: 1631373 - DNA, 15 bp, Homo sapiens
gcaaaggagtgttat

SEQ ID NO: 1631374 - DNA, 15 bp, Homo sapiens
agcaaaggagtgtta

SEQ ID NO: 1631375 - DNA, 15 bp, Homo sapiens
aagcaaaggagtgtt

SEQ ID NO: 1631376 - DNA, 15 bp, Homo sapiens
aaagcaaaggagtgt

SEQ ID NO: 1631377 - DNA, 15 bp, Homo sapiens
gaaagcaaaggagtg

SEQ ID NO: 1631378 - DNA, 15 bp, Homo sapiens
agaaagcaaaggagt

SEQ ID NO: 1631379 - DNA, 15 bp, Homo sapiens
tagaaagcaaaggag

SEQ ID NO: 1631380 - DNA, 15 bp, Homo sapiens
atagaaagcaaagga

SEQ ID NO: 1631381 - DNA, 15 bp, Homo sapiens
gatagaaagcaaagg

SEQ ID NO: 1631382 - DNA, 15 bp, Homo sapiens
ggatagaaagcaaag

SEQ ID NO: 1631383 - DNA, 15 bp, Homo sapiens
aggatagaaagcaaa

SEQ ID NO: 1631384 - DNA, 15 bp, Homo sapiens
aaggatagaaagcaa

SEQ ID NO: 1631385 - DNA, 15 bp, Homo sapiens
gaaggatagaaagca

SEQ ID NO: 1631386 - DNA, 15 bp, Homo sapiens
tgaaggatagaaagc

SEQ ID NO: 1631387 - DNA, 15 bp, Homo sapiens
ctgaaggatagaaag

SEQ ID NO: 1631388 - DNA, 15 bp, Homo sapiens
actgaaggatagaaa

SEQ ID NO: 1631389 - DNA, 15 bp, Homo sapiens
cactgaaggatagaa

SEQ ID NO: 1631390 - DNA, 15 bp, Homo sapiens
ccactgaaggataga

SEQ ID NO: 1631391 - DNA, 15 bp, Homo sapiens
accactgaaggatag

SEQ ID NO: 1631392 - DNA, 15 bp, Homo sapiens
aaccactgaaggata

SEQ ID NO: 1631393 - DNA, 15 bp, Homo sapiens
aaaccactgaaggat

SEQ ID NO: 1631394 - DNA, 15 bp, Homo sapiens
gaaaccactgaagga

SEQ ID NO: 1631395 - DNA, 15 bp, Homo sapiens
agaaaccactgaagg

SEQ ID NO: 1631396 - DNA, 15 bp, Homo sapiens
tagaaaccactgaag

SEQ ID NO: 1631397 - DNA, 15 bp, Homo sapiens
ttagaaaccactgaa

SEQ ID NO: 1631398 - DNA, 15 bp, Homo sapiens
attagaaaccactga

SEQ ID NO: 1631399 - DNA, 15 bp, Homo sapiens
gattagaaaccactg

SEQ ID NO: 1631400 - DNA, 15 bp, Homo sapiens
tgattagaaaccact

SEQ ID NO: 1631401 - DNA, 15 bp, Homo sapiens
atgattagaaaccac

SEQ ID NO: 1631402 - DNA, 15 bp, Homo sapiens
tatgattagaaacca

SEQ ID NO: 1631403 - DNA, 15 bp, Homo sapiens
gtatgattagaaacc

SEQ ID NO: 1631404 - DNA, 15 bp, Homo sapiens
tgtatgattagaaac

SEQ ID NO: 1631405 - DNA, 15 bp, Homo sapiens
atgtatgattagaaa

SEQ ID NO: 1631406 - DNA, 15 bp, Homo sapiens
gatgtatgattagaa

SEQ ID NO: 1631407 - DNA, 15 bp, Homo sapiens
tgatgtatgattaga

SEQ ID NO: 1631408 - DNA, 15 bp, Homo sapiens
ttgatgtatgattag

SEQ ID NO: 1631409 - DNA, 15 bp, Homo sapiens
tttgatgtatgatta

SEQ ID NO: 1631410 - DNA, 15 bp, Homo sapiens
gtttgatgtatgatt

SEQ ID NO: 1631411 - DNA, 15 bp, Homo sapiens
agtttgatgtatgat

SEQ ID NO: 1631412 - DNA, 15 bp, Homo sapiens
aagtttgatgtatga

SEQ ID NO: 1631413 - DNA, 15 bp, Homo sapiens
aaagtttgatgtatg

SEQ ID NO: 1631414 - DNA, 15 bp, Homo sapiens
taaagtttgatgtat

SEQ ID NO: 1631415 - DNA, 15 bp, Homo sapiens
ttaaagtttgatgta

SEQ ID NO: 1631416 - DNA, 15 bp, Homo sapiens
tttaaagtttgatgt

SEQ ID NO: 1631417 - DNA, 15 bp, Homo sapiens
ttttaaagtttgatg

SEQ ID NO: 1631418 - DNA, 15 bp, Homo sapiens
tttttaaagtttgat

SEQ ID NO: 1631419 - DNA, 15 bp, Homo sapiens
atttttaaagtttga

SEQ ID NO: 1631420 - DNA, 15 bp, Homo sapiens
tatttttaaagtttg

SEQ ID NO: 1631421 - DNA, 15 bp, Homo sapiens
ttatttttaaagttt

SEQ ID NO: 1631422 - DNA, 15 bp, Homo sapiens
attatttttaaagtt

SEQ ID NO: 1631423 - DNA, 15 bp, Homo sapiens
tattatttttaaagt

SEQ ID NO: 1631424 - DNA, 15 bp, Homo sapiens
ttattatttttaaag

SEQ ID NO: 1631425 - DNA, 15 bp, Homo sapiens
tttattatttttaaa

SEQ ID NO: 1631426 - DNA, 15 bp, Homo sapiens
ttttattatttttaa

SEQ ID NO: 1631427 - DNA, 15 bp, Homo sapiens
attttattattttta

SEQ ID NO: 1631428 - DNA, 15 bp, Homo sapiens
aattttattattttt

SEQ ID NO: 1631429 - DNA, 15 bp, Homo sapiens
gaattttattatttt

SEQ ID NO: 1631430 - DNA, 15 bp, Homo sapiens
tgaattttattattt

SEQ ID NO: 1631431 - DNA, 15 bp, Homo sapiens
ttgaattttattatt

SEQ ID NO: 1631432 - DNA, 15 bp, Homo sapiens
tttgaattttattat

SEQ ID NO: 1631433 - DNA, 15 bp, Homo sapiens
ttttgaattttatta

SEQ ID NO: 1631434 - DNA, 15 bp, Homo sapiens
attttgaattttatt

SEQ ID NO: 1631435 - DNA, 15 bp, Homo sapiens
aattttgaattttat

SEQ ID NO: 1631436 - DNA, 15 bp, Homo sapiens
aaattttgaatttta

SEQ ID NO: 1631437 - DNA, 15 bp, Homo sapiens
aaaattttgaatttt

SEQ ID NO: 1631438 - DNA, 15 bp, Homo sapiens
aaaaattttgaattt

SEQ ID NO: 1631439 - DNA, 15 bp, Homo sapiens
gaaaaattttgaatt

SEQ ID NO: 1631440 - DNA, 15 bp, Homo sapiens
agaaaaattttgaat

SEQ ID NO: 1631441 - DNA, 15 bp, Homo sapiens
aagaaaaattttgaa

SEQ ID NO: 1631442 - DNA, 15 bp, Homo sapiens
aaagaaaaattttga

SEQ ID NO: 1631443 - DNA, 15 bp, Homo sapiens
aaaagaaaaattttg

SEQ ID NO: 1631444 - DNA, 15 bp, Homo sapiens
caaaagaaaaatttt

SEQ ID NO: 1631445 - DNA, 15 bp, Homo sapiens
gcaaaagaaaaattt

SEQ ID NO: 1631446 - DNA, 15 bp, Homo sapiens
agcaaaagaaaaatt

SEQ ID NO: 1631447 - DNA, 15 bp, Homo sapiens
aagcaaaagaaaaat

SEQ ID NO: 1631448 - DNA, 15 bp, Homo sapiens
caagcaaaagaaaaa

SEQ ID NO: 1631449 - DNA, 15 bp, Homo sapiens
acaagcaaaagaaaa

SEQ ID NO: 1631450 - DNA, 15 bp, Homo sapiens
tacaagcaaaagaaa

SEQ ID NO: 1631451 - DNA, 15 bp, Homo sapiens
ttacaagcaaaagaa

SEQ ID NO: 1631452 - DNA, 15 bp, Homo sapiens
attacaagcaaaaga

SEQ ID NO: 1631453 - DNA, 15 bp, Homo sapiens
tattacaagcaaaag

SEQ ID NO: 1631454 - DNA, 15 bp, Homo sapiens
atattacaagcaaaa

SEQ ID NO: 1631455 - DNA, 15 bp, Homo sapiens
gatattacaagcaaa

SEQ ID NO: 1631456 - DNA, 15 bp, Homo sapiens
ggatattacaagcaa

SEQ ID NO: 1631457 - DNA, 15 bp, Homo sapiens
aggatattacaagca

SEQ ID NO: 1631458 - DNA, 15 bp, Homo sapiens
caggatattacaagc

SEQ ID NO: 1631459 - DNA, 15 bp, Homo sapiens
gcaggatattacaag

SEQ ID NO: 1631460 - DNA, 15 bp, Homo sapiens
tgcaggatattacaa

SEQ ID NO: 1631461 - DNA, 15 bp, Homo sapiens
atgcaggatattaca

SEQ ID NO: 1631462 - DNA, 15 bp, Homo sapiens
catgcaggatattac

SEQ ID NO: 1631463 - DNA, 15 bp, Homo sapiens
tcatgcaggatatta

SEQ ID NO: 1631464 - DNA, 15 bp, Homo sapiens
atcatgcaggatatt

SEQ ID NO: 1631465 - DNA, 15 bp, Homo sapiens
gatcatgcaggatat

SEQ ID NO: 1631466 - DNA, 15 bp, Homo sapiens
agatcatgcaggata

SEQ ID NO: 1631467 - DNA, 15 bp, Homo sapiens
aagatcatgcaggat

SEQ ID NO: 1631468 - DNA, 15 bp, Homo sapiens
caagatcatgcagga

SEQ ID NO: 1631469 - DNA, 15 bp, Homo sapiens
ccaagatcatgcagg

SEQ ID NO: 1631470 - DNA, 15 bp, Homo sapiens
cccaagatcatgcag

SEQ ID NO: 1631471 - DNA, 15 bp, Homo sapiens
acccaagatcatgca

SEQ ID NO: 1631472 - DNA, 15 bp, Homo sapiens
gacccaagatcatgc

SEQ ID NO: 1631473 - DNA, 15 bp, Homo sapiens
agacccaagatcatg

SEQ ID NO: 1631474 - DNA, 15 bp, Homo sapiens
aagacccaagatcat

SEQ ID NO: 1631475 - DNA, 15 bp, Homo sapiens
aaagacccaagatca

SEQ ID NO: 1631476 - DNA, 15 bp, Homo sapiens
aaaagacccaagatc

SEQ ID NO: 1631477 - DNA, 15 bp, Homo sapiens
aaaaagacccaagat

SEQ ID NO: 1631478 - DNA, 15 bp, Homo sapiens
caaaaagacccaaga

SEQ ID NO: 1631479 - DNA, 15 bp, Homo sapiens
gcaaaaagacccaag

SEQ ID NO: 1631480 - DNA, 15 bp, Homo sapiens
agcaaaaagacccaa

SEQ ID NO: 1631481 - DNA, 15 bp, Homo sapiens
cagcaaaaagaccca

SEQ ID NO: 1631482 - DNA, 15 bp, Homo sapiens
acagcaaaaagaccc

SEQ ID NO: 1631483 - DNA, 15 bp, Homo sapiens
gacagcaaaaagacc

SEQ ID NO: 1631484 - DNA, 15 bp, Homo sapiens
agacagcaaaaagac

SEQ ID NO: 1631485 - DNA, 15 bp, Homo sapiens
aagacagcaaaaaga

SEQ ID NO: 1631486 - DNA, 15 bp, Homo sapiens
aaagacagcaaaaag

SEQ ID NO: 1631487 - DNA, 15 bp, Homo sapiens
aaaagacagcaaaaa

SEQ ID NO: 1631488 - DNA, 15 bp, Homo sapiens
aaaaagacagcaaaa

SEQ ID NO: 1631489 - DNA, 15 bp, Homo sapiens
aaaaaagacagcaaa

SEQ ID NO: 1631490 - DNA, 15 bp, Homo sapiens
aaaaaaagacagcaa

SEQ ID NO: 1631491 - DNA, 15 bp, Homo sapiens
aaaaaaaagacagca

SEQ ID NO: 1631492 - DNA, 15 bp, Homo sapiens
gaaaaaaaagacagc

SEQ ID NO: 1631493 - DNA, 15 bp, Homo sapiens
agaaaaaaaagacag

SEQ ID NO: 1631494 - DNA, 15 bp, Homo sapiens
tagaaaaaaaagaca

SEQ ID NO: 1631495 - DNA, 15 bp, Homo sapiens
atagaaaaaaaagac

SEQ ID NO: 1631496 - DNA, 15 bp, Homo sapiens
gatagaaaaaaaaga

SEQ ID NO: 1631497 - DNA, 15 bp, Homo sapiens
agatagaaaaaaaag

SEQ ID NO: 1631498 - DNA, 15 bp, Homo sapiens
aagatagaaaaaaaa

SEQ ID NO: 1631499 - DNA, 15 bp, Homo sapiens
aaagatagaaaaaaa

SEQ ID NO: 1631500 - DNA, 15 bp, Homo sapiens
aaaagatagaaaaaa

SEQ ID NO: 1631501 - DNA, 15 bp, Homo sapiens
gaaaagatagaaaaa

SEQ ID NO: 1631502 - DNA, 15 bp, Homo sapiens
tgaaaagatagaaaa

SEQ ID NO: 1631503 - DNA, 15 bp, Homo sapiens
ttgaaaagatagaaa

SEQ ID NO: 1631504 - DNA, 15 bp, Homo sapiens
tttgaaaagatagaa

SEQ ID NO: 1631505 - DNA, 15 bp, Homo sapiens
gtttgaaaagataga

SEQ ID NO: 1631506 - DNA, 15 bp, Homo sapiens
tgtttgaaaagatag

SEQ ID NO: 1631507 - DNA, 15 bp, Homo sapiens
gtgtttgaaaagata

SEQ ID NO: 1631508 - DNA, 15 bp, Homo sapiens
tgtgtttgaaaagat

SEQ ID NO: 1631509 - DNA, 15 bp, Homo sapiens
atgtgtttgaaaaga

SEQ ID NO: 1631510 - DNA, 15 bp, Homo sapiens
gatgtgtttgaaaag

SEQ ID NO: 1631511 - DNA, 15 bp, Homo sapiens
agatgtgtttgaaaa

SEQ ID NO: 1631512 - DNA, 15 bp, Homo sapiens
gagatgtgtttgaaa

SEQ ID NO: 1631513 - DNA, 15 bp, Homo sapiens
tgagatgtgtttgaa

SEQ ID NO: 1631514 - DNA, 15 bp, Homo sapiens
atgagatgtgtttga

SEQ ID NO: 1631515 - DNA, 15 bp, Homo sapiens
catgagatgtgtttg

SEQ ID NO: 1631516 - DNA, 15 bp, Homo sapiens
gcatgagatgtgttt

SEQ ID NO: 1631517 - DNA, 15 bp, Homo sapiens
ggcatgagatgtgtt

SEQ ID NO: 1631518 - DNA, 15 bp, Homo sapiens
tggcatgagatgtgt

SEQ ID NO: 1631519 - DNA, 15 bp, Homo sapiens
atggcatgagatgtg

SEQ ID NO: 1631520 - DNA, 15 bp, Homo sapiens
aatggcatgagatgt

SEQ ID NO: 1631521 - DNA, 15 bp, Homo sapiens
gaatggcatgagatg

SEQ ID NO: 1631522 - DNA, 15 bp, Homo sapiens
agaatggcatgagat

SEQ ID NO: 1631523 - DNA, 15 bp, Homo sapiens
gagaatggcatgaga

SEQ ID NO: 1631524 - DNA, 15 bp, Homo sapiens
ggagaatggcatgag

SEQ ID NO: 1631525 - DNA, 15 bp, Homo sapiens
aaggagaatggcatg

SEQ ID NO: 1631526 - DNA, 15 bp, Homo sapiens
taaggagaatggcat

SEQ ID NO: 1631527 - DNA, 15 bp, Homo sapiens
ataaggagaatggca

SEQ ID NO: 1631528 - DNA, 15 bp, Homo sapiens
aataaggagaatggc

SEQ ID NO: 1631529 - DNA, 15 bp, Homo sapiens
aaataaggagaatgg

SEQ ID NO: 1631530 - DNA, 15 bp, Homo sapiens
aaaataaggagaatg

SEQ ID NO: 1631531 - DNA, 15 bp, Homo sapiens
gaaaataaggagaat

SEQ ID NO: 1631532 - DNA, 15 bp, Homo sapiens
agaaaataaggagaa

SEQ ID NO: 1631533 - DNA, 15 bp, Homo sapiens
tagaaaataaggaga

SEQ ID NO: 1631534 - DNA, 15 bp, Homo sapiens
atagaaaataaggag

SEQ ID NO: 1631535 - DNA, 15 bp, Homo sapiens
tatagaaaataagga

SEQ ID NO: 1631536 - DNA, 15 bp, Homo sapiens
gtatagaaaataagg

SEQ ID NO: 1631537 - DNA, 15 bp, Homo sapiens
agtatagaaaataag

SEQ ID NO: 1631538 - DNA, 15 bp, Homo sapiens
gagtatagaaaataa

SEQ ID NO: 1631539 - DNA, 15 bp, Homo sapiens
ggagtatagaaaata

SEQ ID NO: 1631540 - DNA, 15 bp, Homo sapiens
tggagtatagaaaat

SEQ ID NO: 1631541 - DNA, 15 bp, Homo sapiens
ctggagtatagaaaa

SEQ ID NO: 1631542 - DNA, 15 bp, Homo sapiens
gctggagtatagaaa

SEQ ID NO: 1631543 - DNA, 15 bp, Homo sapiens
ggctggagtatagaa

SEQ ID NO: 1631544 - DNA, 15 bp, Homo sapiens
tggctggagtataga

SEQ ID NO: 1631545 - DNA, 15 bp, Homo sapiens
ttggctggagtatag

SEQ ID NO: 1631546 - DNA, 15 bp, Homo sapiens
cttggctggagtata

SEQ ID NO: 1631547 - DNA, 15 bp, Homo sapiens
ccttggctggagtat

SEQ ID NO: 1631548 - DNA, 15 bp, Homo sapiens
tccttggctggagta

SEQ ID NO: 1631549 - DNA, 15 bp, Homo sapiens
ctccttggctggagt

SEQ ID NO: 1631550 - DNA, 15 bp, Homo sapiens
actccttggctggag

SEQ ID NO: 1631551 - DNA, 15 bp, Homo sapiens
aactccttggctgga

SEQ ID NO: 1631552 - DNA, 15 bp, Homo sapiens
caactccttggctgg

SEQ ID NO: 1631553 - DNA, 15 bp, Homo sapiens
ccaactccttggctg

SEQ ID NO: 1631554 - DNA, 15 bp, Homo sapiens
gccaactccttggct

SEQ ID NO: 1631555 - DNA, 15 bp, Homo sapiens
tgccaactccttggc

SEQ ID NO: 1631556 - DNA, 15 bp, Homo sapiens
ttgccaactccttgg

SEQ ID NO: 1631557 - DNA, 15 bp, Homo sapiens
attgccaactccttg

SEQ ID NO: 1631558 - DNA, 15 bp, Homo sapiens
gattgccaactcctt

SEQ ID NO: 1631559 - DNA, 15 bp, Homo sapiens
agattgccaactcct

SEQ ID NO: 1631560 - DNA, 15 bp, Homo sapiens
aagattgccaactcc

SEQ ID NO: 1631561 - DNA, 15 bp, Homo sapiens
aaagattgccaactc

SEQ ID NO: 1631562 - DNA, 15 bp, Homo sapiens
aaaagattgccaact

SEQ ID NO: 1631563 - DNA, 15 bp, Homo sapiens
gaaaagattgccaac

SEQ ID NO: 1631564 - DNA, 15 bp, Homo sapiens
agaaaagattgccaa

SEQ ID NO: 1631565 - DNA, 15 bp, Homo sapiens
aagaaaagattgcca

SEQ ID NO: 1631566 - DNA, 15 bp, Homo sapiens
taagaaaagattgcc

SEQ ID NO: 1631567 - DNA, 15 bp, Homo sapiens
ataagaaaagattgc

SEQ ID NO: 1631568 - DNA, 15 bp, Homo sapiens
tataagaaaagattg

SEQ ID NO: 1631569 - DNA, 15 bp, Homo sapiens
ttataagaaaagatt

SEQ ID NO: 1631570 - DNA, 15 bp, Homo sapiens
tttataagaaaagat

SEQ ID NO: 1631571 - DNA, 15 bp, Homo sapiens
ctttataagaaaaga

SEQ ID NO: 1631572 - DNA, 15 bp, Homo sapiens
cctttataagaaaag

SEQ ID NO: 1631573 - DNA, 15 bp, Homo sapiens
ccctttataagaaaa

SEQ ID NO: 1631574 - DNA, 15 bp, Homo sapiens
gccctttataagaaa

SEQ ID NO: 1631575 - DNA, 15 bp, Homo sapiens
ggccctttataagaa

SEQ ID NO: 1631576 - DNA, 15 bp, Homo sapiens
aggccctttataaga

SEQ ID NO: 1631577 - DNA, 15 bp, Homo sapiens
caggccctttataag

SEQ ID NO: 1631578 - DNA, 15 bp, Homo sapiens
tcaggccctttataa

SEQ ID NO: 1631579 - DNA, 15 bp, Homo sapiens
atcaggccctttata

SEQ ID NO: 1631580 - DNA, 15 bp, Homo sapiens
gtatcaggcccttta

SEQ ID NO: 1631581 - DNA, 15 bp, Homo sapiens
agtatcaggcccttt

SEQ ID NO: 1631582 - DNA, 15 bp, Homo sapiens
gagtatcaggccctt

SEQ ID NO: 1631583 - DNA, 15 bp, Homo sapiens
tgagtatcaggccct

SEQ ID NO: 1631584 - DNA, 15 bp, Homo sapiens
atgagtatcaggccc

SEQ ID NO: 1631585 - DNA, 15 bp, Homo sapiens
aatgagtatcaggcc

SEQ ID NO: 1631586 - DNA, 15 bp, Homo sapiens
taatgagtatcaggc

SEQ ID NO: 1631587 - DNA, 15 bp, Homo sapiens
ataatgagtatcagg

SEQ ID NO: 1631588 - DNA, 15 bp, Homo sapiens
aataatgagtatcag

SEQ ID NO: 1631589 - DNA, 15 bp, Homo sapiens
aaataatgagtatca

SEQ ID NO: 1631590 - DNA, 15 bp, Homo sapiens
aaaataatgagtatc

SEQ ID NO: 1631591 - DNA, 15 bp, Homo sapiens
taaaataatgagtat

SEQ ID NO: 1631592 - DNA, 15 bp, Homo sapiens
ctaaaataatgagta

SEQ ID NO: 1631593 - DNA, 15 bp, Homo sapiens
cctaaaataatgagt

SEQ ID NO: 1631594 - DNA, 15 bp, Homo sapiens
gcctaaaataatgag

SEQ ID NO: 1631595 - DNA, 15 bp, Homo sapiens
agcctaaaataatga

SEQ ID NO: 1631596 - DNA, 15 bp, Homo sapiens
aagcctaaaataatg

SEQ ID NO: 1631597 - DNA, 15 bp, Homo sapiens
aaagcctaaaataat

SEQ ID NO: 1631598 - DNA, 15 bp, Homo sapiens
aaaagcctaaaataa

SEQ ID NO: 1631599 - DNA, 15 bp, Homo sapiens
caaaagcctaaaata

SEQ ID NO: 1631600 - DNA, 15 bp, Homo sapiens
ccaaaagcctaaaat

SEQ ID NO: 1631601 - DNA, 15 bp, Homo sapiens
cccaaaagcctaaaa

SEQ ID NO: 1631602 - DNA, 15 bp, Homo sapiens
gcccaaaagcctaaa

SEQ ID NO: 1631603 - DNA, 15 bp, Homo sapiens
ggcccaaaagcctaa

SEQ ID NO: 1631604 - DNA, 15 bp, Homo sapiens
tggcccaaaagccta

SEQ ID NO: 1631605 - DNA, 15 bp, Homo sapiens
gtggcccaaaagcct

SEQ ID NO: 1631606 - DNA, 15 bp, Homo sapiens
tgtggcccaaaagcc

SEQ ID NO: 1631607 - DNA, 15 bp, Homo sapiens
atgtggcccaaaagc

SEQ ID NO: 1631608 - DNA, 15 bp, Homo sapiens
catgtggcccaaaag

SEQ ID NO: 1631609 - DNA, 15 bp, Homo sapiens
ccatgtggcccaaaa

SEQ ID NO: 1631610 - DNA, 15 bp, Homo sapiens
accatgtggcccaaa

SEQ ID NO: 1631611 - DNA, 15 bp, Homo sapiens
gaccatgtggcccaa

SEQ ID NO: 1631612 - DNA, 15 bp, Homo sapiens
agaccatgtggccca

SEQ ID NO: 1631613 - DNA, 15 bp, Homo sapiens
gagaccatgtggccc

SEQ ID NO: 1631614 - DNA, 15 bp, Homo sapiens
agagaccatgtggcc

SEQ ID NO: 1631615 - DNA, 15 bp, Homo sapiens
cagagaccatgtggc

SEQ ID NO: 1631616 - DNA, 15 bp, Homo sapiens
acagagaccatgtgg

SEQ ID NO: 1631617 - DNA, 15 bp, Homo sapiens
aacagagaccatgtg

SEQ ID NO: 1631618 - DNA, 15 bp, Homo sapiens
caacagagaccatgt

SEQ ID NO: 1631619 - DNA, 15 bp, Homo sapiens
gcaacagagaccatg

SEQ ID NO: 1631620 - DNA, 15 bp, Homo sapiens
gtagttgcaacagag

SEQ ID NO: 1631621 - DNA, 15 bp, Homo sapiens
tgtagttgcaacaga

SEQ ID NO: 1631622 - DNA, 15 bp, Homo sapiens
ttgtagttgcaacag

SEQ ID NO: 1631623 - DNA, 15 bp, Homo sapiens
gttgtagttgcaaca

SEQ ID NO: 1631624 - DNA, 15 bp, Homo sapiens
agttgtagttgcaac

SEQ ID NO: 1631625 - DNA, 15 bp, Homo sapiens
gagttgtagttgcaa

SEQ ID NO: 1631626 - DNA, 15 bp, Homo sapiens
agagttgtagttgca

SEQ ID NO: 1631627 - DNA, 15 bp, Homo sapiens
aagagttgtagttgc

SEQ ID NO: 1631628 - DNA, 15 bp, Homo sapiens
gaagagttgtagttg

SEQ ID NO: 1631629 - DNA, 15 bp, Homo sapiens
agaagagttgtagtt

SEQ ID NO: 1631630 - DNA, 15 bp, Homo sapiens
cagaagagttgtagt

SEQ ID NO: 1631631 - DNA, 15 bp, Homo sapiens
acagaagagttgtag

SEQ ID NO: 1631632 - DNA, 15 bp, Homo sapiens
aacagaagagttgta

SEQ ID NO: 1631633 - DNA, 15 bp, Homo sapiens
caacagaagagttgt

SEQ ID NO: 1631634 - DNA, 15 bp, Homo sapiens
tcaacagaagagttg

SEQ ID NO: 1631635 - DNA, 15 bp, Homo sapiens
ttcaacagaagagtt

SEQ ID NO: 1631636 - DNA, 15 bp, Homo sapiens
cttcaacagaagagt

SEQ ID NO: 1631637 - DNA, 15 bp, Homo sapiens
gcttcaacagaagag

SEQ ID NO: 1631638 - DNA, 15 bp, Homo sapiens
tgcttcaacagaaga

SEQ ID NO: 1631639 - DNA, 15 bp, Homo sapiens
gtgcttcaacagaag

SEQ ID NO: 1631640 - DNA, 15 bp, Homo sapiens
cgtgcttcaacagaa

SEQ ID NO: 1631641 - DNA, 15 bp, Homo sapiens
tcgtgcttcaacaga

SEQ ID NO: 1631642 - DNA, 15 bp, Homo sapiens
ttcgtgcttcaacag

SEQ ID NO: 1631643 - DNA, 15 bp, Homo sapiens
cttcgtgcttcaaca

SEQ ID NO: 1631644 - DNA, 15 bp, Homo sapiens
gcttcgtgcttcaac

SEQ ID NO: 1631645 - DNA, 15 bp, Homo sapiens
tgcttcgtgcttcaa

SEQ ID NO: 1631646 - DNA, 15 bp, Homo sapiens
ctgcttcgtgcttca

SEQ ID NO: 1631647 - DNA, 15 bp, Homo sapiens
gctgcttcgtgcttc

SEQ ID NO: 1631648 - DNA, 15 bp, Homo sapiens
agctgcttcgtgctt

SEQ ID NO: 1631649 - DNA, 15 bp, Homo sapiens
tagctgcttcgtgct

SEQ ID NO: 1631650 - DNA, 15 bp, Homo sapiens
atagctgcttcgtgc

SEQ ID NO: 1631651 - DNA, 15 bp, Homo sapiens
tatagctgcttcgtg

SEQ ID NO: 1631652 - DNA, 15 bp, Homo sapiens
ctatagctgcttcgt

SEQ ID NO: 1631653 - DNA, 15 bp, Homo sapiens
tctatagctgcttcg

SEQ ID NO: 1631654 - DNA, 15 bp, Homo sapiens
gtctatagctgcttc

SEQ ID NO: 1631655 - DNA, 15 bp, Homo sapiens
tgtctatagctgctt

SEQ ID NO: 1631656 - DNA, 15 bp, Homo sapiens
ttgtctatagctgct

SEQ ID NO: 1631657 - DNA, 15 bp, Homo sapiens
attgtctatagctgc

SEQ ID NO: 1631658 - DNA, 15 bp, Homo sapiens
tattgtctatagctg

SEQ ID NO: 1631659 - DNA, 15 bp, Homo sapiens
atattgtctatagct

SEQ ID NO: 1631660 - DNA, 15 bp, Homo sapiens
tatattgtctatagc

SEQ ID NO: 1631661 - DNA, 15 bp, Homo sapiens
atatattgtctatag

SEQ ID NO: 1631662 - DNA, 15 bp, Homo sapiens
tatatattgtctata

SEQ ID NO: 1631663 - DNA, 15 bp, Homo sapiens
ttatatattgtctat

SEQ ID NO: 1631664 - DNA, 15 bp, Homo sapiens
atttatatattgtct

SEQ ID NO: 1631665 - DNA, 15 bp, Homo sapiens
catttatatattgtc

SEQ ID NO: 1631666 - DNA, 15 bp, Homo sapiens
gcatttatatattgt

SEQ ID NO: 1631667 - DNA, 15 bp, Homo sapiens
tgcatttatatattg

SEQ ID NO: 1631668 - DNA, 15 bp, Homo sapiens
atgcatttatatatt

SEQ ID NO: 1631669 - DNA, 15 bp, Homo sapiens
aatgcatttatatat

SEQ ID NO: 1631670 - DNA, 15 bp, Homo sapiens
taatgcatttatata

SEQ ID NO: 1631671 - DNA, 15 bp, Homo sapiens
ctaatgcatttatat

SEQ ID NO: 1631672 - DNA, 15 bp, Homo sapiens
gctaatgcatttata

SEQ ID NO: 1631673 - DNA, 15 bp, Homo sapiens
agctaatgcatttat

SEQ ID NO: 1631674 - DNA, 15 bp, Homo sapiens
aagctaatgcattta

SEQ ID NO: 1631675 - DNA, 15 bp, Homo sapiens
aaagctaatgcattt

SEQ ID NO: 1631676 - DNA, 15 bp, Homo sapiens
caaagctaatgcatt

SEQ ID NO: 1631677 - DNA, 15 bp, Homo sapiens
gcaaagctaatgcat

SEQ ID NO: 1631678 - DNA, 15 bp, Homo sapiens
agcaaagctaatgca

SEQ ID NO: 1631679 - DNA, 15 bp, Homo sapiens
cagcaaagctaatgc

SEQ ID NO: 1631680 - DNA, 15 bp, Homo sapiens
acagcaaagctaatg

SEQ ID NO: 1631681 - DNA, 15 bp, Homo sapiens
tacagcaaagctaat

SEQ ID NO: 1631682 - DNA, 15 bp, Homo sapiens
atacagcaaagctaa

SEQ ID NO: 1631683 - DNA, 15 bp, Homo sapiens
aatacagcaaagcta

SEQ ID NO: 1631684 - DNA, 15 bp, Homo sapiens
gaatacagcaaagct

SEQ ID NO: 1631685 - DNA, 15 bp, Homo sapiens
ggaatacagcaaagc

SEQ ID NO: 1631686 - DNA, 15 bp, Homo sapiens
tggaatacagcaaag

SEQ ID NO: 1631687 - DNA, 15 bp, Homo sapiens
ttggaatacagcaaa

SEQ ID NO: 1631688 - DNA, 15 bp, Homo sapiens
attggaatacagcaa

SEQ ID NO: 1631689 - DNA, 15 bp, Homo sapiens
tattggaatacagca

SEQ ID NO: 1631690 - DNA, 15 bp, Homo sapiens
ttattggaatacagc

SEQ ID NO: 1631691 - DNA, 15 bp, Homo sapiens
tttattggaatacag

SEQ ID NO: 1631692 - DNA, 15 bp, Homo sapiens
ttttattggaataca

SEQ ID NO: 1631693 - DNA, 15 bp, Homo sapiens
gttttattggaatac

SEQ ID NO: 1631694 - DNA, 15 bp, Homo sapiens
agttttattggaata

SEQ ID NO: 1631695 - DNA, 15 bp, Homo sapiens
aagttttattggaat

SEQ ID NO: 1631696 - DNA, 15 bp, Homo sapiens
taataaagttttatt

SEQ ID NO: 1631697 - DNA, 15 bp, Homo sapiens
ttaataaagttttat

SEQ ID NO: 1631698 - DNA, 15 bp, Homo sapiens
attaataaagtttta

SEQ ID NO: 1631699 - DNA, 15 bp, Homo sapiens
cattaataaagtttt

SEQ ID NO: 1631700 - DNA, 15 bp, Homo sapiens
ccattaataaagttt

SEQ ID NO: 1631701 - DNA, 15 bp, Homo sapiens
tccattaataaagtt

SEQ ID NO: 1631702 - DNA, 15 bp, Homo sapiens
gtccattaataaagt

SEQ ID NO: 1631703 - DNA, 15 bp, Homo sapiens
tgtccattaataaag

SEQ ID NO: 1631704 - DNA, 15 bp, Homo sapiens
atgtccattaataaa

SEQ ID NO: 1631705 - DNA, 15 bp, Homo sapiens
aatgtccattaataa

SEQ ID NO: 1631706 - DNA, 15 bp, Homo sapiens
caatgtccattaata

SEQ ID NO: 1631707 - DNA, 15 bp, Homo sapiens
tcaatgtccattaat

SEQ ID NO: 1631708 - DNA, 15 bp, Homo sapiens
ttcaatgtccattaa

SEQ ID NO: 1631709 - DNA, 15 bp, Homo sapiens
tttcaatgtccatta

SEQ ID NO: 1631710 - DNA, 15 bp, Homo sapiens
atttcaatgtccatt

SEQ ID NO: 1631711 - DNA, 15 bp, Homo sapiens
aatttcaatgtccat

SEQ ID NO: 1631712 - DNA, 15 bp, Homo sapiens
aaatttcaatgtcca

SEQ ID NO: 1631713 - DNA, 15 bp, Homo sapiens
caaatttcaatgtcc

SEQ ID NO: 1631714 - DNA, 15 bp, Homo sapiens
tcaaatttcaatgtc

SEQ ID NO: 1631715 - DNA, 15 bp, Homo sapiens
ttcaaatttcaatgt

SEQ ID NO: 1631716 - DNA, 15 bp, Homo sapiens
attcaaatttcaatg

SEQ ID NO: 1631717 - DNA, 15 bp, Homo sapiens
aattcaaatttcaat

SEQ ID NO: 1631718 - DNA, 15 bp, Homo sapiens
aaattcaaatttcaa

SEQ ID NO: 1631719 - DNA, 15 bp, Homo sapiens
taaattcaaatttca

SEQ ID NO: 1631720 - DNA, 15 bp, Homo sapiens
ttaaattcaaatttc

SEQ ID NO: 1631721 - DNA, 15 bp, Homo sapiens
attaaattcaaattt

SEQ ID NO: 1631722 - DNA, 15 bp, Homo sapiens
tattaaattcaaatt

SEQ ID NO: 1631723 - DNA, 15 bp, Homo sapiens
atattaaattcaaat

SEQ ID NO: 1631724 - DNA, 15 bp, Homo sapiens
tatattaaattcaaa

SEQ ID NO: 1631725 - DNA, 15 bp, Homo sapiens
atatattaaattcaa

SEQ ID NO: 1631726 - DNA, 15 bp, Homo sapiens
aatatattaaattca

SEQ ID NO: 1631727 - DNA, 15 bp, Homo sapiens
aaatatattaaattc

SEQ ID NO: 1631728 - DNA, 15 bp, Homo sapiens
aaaatatattaaatt

SEQ ID NO: 1631729 - DNA, 15 bp, Homo sapiens
aaaaaatatattaaa

SEQ ID NO: 1631730 - DNA, 15 bp, Homo sapiens
caaaaaatatattaa

SEQ ID NO: 1631731 - DNA, 15 bp, Homo sapiens
acaaaaaatatatta

SEQ ID NO: 1631732 - DNA, 15 bp, Homo sapiens
aacaaaaaatatatt

SEQ ID NO: 1631733 - DNA, 15 bp, Homo sapiens
aaacaaaaaatatat

SEQ ID NO: 1631734 - DNA, 15 bp, Homo sapiens
caaacaaaaaatata

SEQ ID NO: 1631735 - DNA, 15 bp, Homo sapiens
acaaacaaaaaatat

SEQ ID NO: 1631736 - DNA, 15 bp, Homo sapiens
gacaaacaaaaaata

SEQ ID NO: 1631737 - DNA, 15 bp, Homo sapiens
tgacaaacaaaaaat

SEQ ID NO: 1631738 - DNA, 15 bp, Homo sapiens
atgacaaacaaaaaa

SEQ ID NO: 1631739 - DNA, 15 bp, Homo sapiens
catgacaaacaaaaa

SEQ ID NO: 1631740 - DNA, 15 bp, Homo sapiens
tcatgacaaacaaaa

SEQ ID NO: 1631741 - DNA, 15 bp, Homo sapiens
ttcatgacaaacaaa

SEQ ID NO: 1631742 - DNA, 15 bp, Homo sapiens
tttcatgacaaacaa

SEQ ID NO: 1631743 - DNA, 15 bp, Homo sapiens
atttcatgacaaaca

SEQ ID NO: 1631744 - DNA, 15 bp, Homo sapiens
tatttcatgacaaac

SEQ ID NO: 1631745 - DNA, 15 bp, Homo sapiens
atatttcatgacaaa

SEQ ID NO: 1631746 - DNA, 15 bp, Homo sapiens
aatatttcatgacaa

SEQ ID NO: 1631747 - DNA, 15 bp, Homo sapiens
gaatatttcatgaca

SEQ ID NO: 1631748 - DNA, 15 bp, Homo sapiens
agaatatttcatgac

SEQ ID NO: 1631749 - DNA, 15 bp, Homo sapiens
tagaatatttcatga

SEQ ID NO: 1631750 - DNA, 15 bp, Homo sapiens
atagaatatttcatg

SEQ ID NO: 1631751 - DNA, 15 bp, Homo sapiens
tatagaatatttcat

SEQ ID NO: 1631752 - DNA, 15 bp, Homo sapiens
ttatagaatatttca

SEQ ID NO: 1631753 - DNA, 15 bp, Homo sapiens
attatagaatatttc

SEQ ID NO: 1631754 - DNA, 15 bp, Homo sapiens
aattatagaatattt

SEQ ID NO: 1631755 - DNA, 15 bp, Homo sapiens
aaattatagaatatt

SEQ ID NO: 1631756 - DNA, 15 bp, Homo sapiens
aaaattatagaatat

SEQ ID NO: 1631757 - DNA, 15 bp, Homo sapiens
aaaaattatagaata

SEQ ID NO: 1631758 - DNA, 15 bp, Homo sapiens
aaaaaattatagaat

SEQ ID NO: 1631759 - DNA, 15 bp, Homo sapiens
aaaaaaattatagaa

SEQ ID NO: 1631760 - DNA, 15 bp, Homo sapiens
gaaaaaaattataga

SEQ ID NO: 1631761 - DNA, 15 bp, Homo sapiens
agaaaaaaattatag

SEQ ID NO: 1631762 - DNA, 15 bp, Homo sapiens
aagaaaaaaattata

SEQ ID NO: 1631763 - DNA, 15 bp, Homo sapiens
gaagaaaaaaattat

SEQ ID NO: 1631764 - DNA, 15 bp, Homo sapiens
ggaagaaaaaaatta

SEQ ID NO: 1631765 - DNA, 15 bp, Homo sapiens
tggaagaaaaaaatt

SEQ ID NO: 1631766 - DNA, 15 bp, Homo sapiens
ttggaagaaaaaaat

SEQ ID NO: 1631767 - DNA, 15 bp, Homo sapiens
gttggaagaaaaaaa

SEQ ID NO: 1631768 - DNA, 15 bp, Homo sapiens
ggttggaagaaaaaa

SEQ ID NO: 1631769 - DNA, 15 bp, Homo sapiens
tggttggaagaaaaa

SEQ ID NO: 1631770 - DNA, 15 bp, Homo sapiens
atggttggaagaaaa

SEQ ID NO: 1631771 - DNA, 15 bp, Homo sapiens
aatggttggaagaaa

SEQ ID NO: 1631772 - DNA, 15 bp, Homo sapiens
aaatggttggaagaa

SEQ ID NO: 1631773 - DNA, 15 bp, Homo sapiens
taaatggttggaaga

SEQ ID NO: 1631774 - DNA, 15 bp, Homo sapiens
ttaaatggttggaag

SEQ ID NO: 1631775 - DNA, 15 bp, Homo sapiens
tttaaatggttggaa

SEQ ID NO: 1631776 - DNA, 15 bp, Homo sapiens
ttttaaatggttgga

SEQ ID NO: 1631777 - DNA, 15 bp, Homo sapiens
tttttaaatggttgg

SEQ ID NO: 1631778 - DNA, 15 bp, Homo sapiens
atttttaaatggttg

SEQ ID NO: 1631779 - DNA, 15 bp, Homo sapiens
catttttaaatggtt

SEQ ID NO: 1631780 - DNA, 15 bp, Homo sapiens
acatttttaaatggt

SEQ ID NO: 1631781 - DNA, 15 bp, Homo sapiens
tacatttttaaatgg

SEQ ID NO: 1631782 - DNA, 15 bp, Homo sapiens
ttacatttttaaatg

SEQ ID NO: 1631783 - DNA, 15 bp, Homo sapiens
tttacatttttaaat

SEQ ID NO: 1631784 - DNA, 15 bp, Homo sapiens
ttttacatttttaaa

SEQ ID NO: 1631785 - DNA, 15 bp, Homo sapiens
cttttacatttttaa

SEQ ID NO: 1631786 - DNA, 15 bp, Homo sapiens
tcttttacattttta

SEQ ID NO: 1631787 - DNA, 15 bp, Homo sapiens
atcttttacattttt

SEQ ID NO: 1631788 - DNA, 15 bp, Homo sapiens
gatcttttacatttt

SEQ ID NO: 1631789 - DNA, 15 bp, Homo sapiens
tgatcttttacattt

SEQ ID NO: 1631790 - DNA, 15 bp, Homo sapiens
ctgatcttttacatt

SEQ ID NO: 1631791 - DNA, 15 bp, Homo sapiens
gctgatcttttacat

SEQ ID NO: 1631792 - DNA, 15 bp, Homo sapiens
agctgatcttttaca

SEQ ID NO: 1631793 - DNA, 15 bp, Homo sapiens
cagctgatcttttac

SEQ ID NO: 1631794 - DNA, 15 bp, Homo sapiens
ccagctgatctttta

SEQ ID NO: 1631795 - DNA, 15 bp, Homo sapiens
cccagctgatctttt

SEQ ID NO: 1631796 - DNA, 15 bp, Homo sapiens
acccagctgatcttt

SEQ ID NO: 1631797 - DNA, 15 bp, Homo sapiens
cacccagctgatctt

SEQ ID NO: 1631798 - DNA, 15 bp, Homo sapiens
acacccagctgatct

SEQ ID NO: 1631799 - DNA, 15 bp, Homo sapiens
cacacccagctgatc

SEQ ID NO: 1631800 - DNA, 15 bp, Homo sapiens
ccacacccagctgat

SEQ ID NO: 1631801 - DNA, 15 bp, Homo sapiens
accacacccagctga

SEQ ID NO: 1631802 - DNA, 15 bp, Homo sapiens
caccacacccagctg

SEQ ID NO: 1631803 - DNA, 15 bp, Homo sapiens
ggtgtgagccaccac

SEQ ID NO: 1631804 - DNA, 15 bp, Homo sapiens
tctcgtgatccaccc

SEQ ID NO: 1631805 - DNA, 15 bp, Homo sapiens
atctcgtgatccacc

SEQ ID NO: 1631806 - DNA, 15 bp, Homo sapiens
gatctcgtgatccac

SEQ ID NO: 1631807 - DNA, 15 bp, Homo sapiens
tgatctcgtgatcca

SEQ ID NO: 1631808 - DNA, 15 bp, Homo sapiens
ctgatctcgtgatcc

SEQ ID NO: 1631809 - DNA, 15 bp, Homo sapiens
cctgatctcgtgatc

SEQ ID NO: 1631810 - DNA, 15 bp, Homo sapiens
tcctgatctcgtgat

SEQ ID NO: 1631811 - DNA, 15 bp, Homo sapiens
ttcctgatctcgtga

SEQ ID NO: 1631812 - DNA, 15 bp, Homo sapiens
attcctgatctcgtg

SEQ ID NO: 1631813 - DNA, 15 bp, Homo sapiens
aattcctgatctcgt

SEQ ID NO: 1631814 - DNA, 15 bp, Homo sapiens
gaattcctgatctcg

SEQ ID NO: 1631815 - DNA, 15 bp, Homo sapiens
tgaattcctgatctc

SEQ ID NO: 1631816 - DNA, 15 bp, Homo sapiens
ttgaattcctgatct

SEQ ID NO: 1631817 - DNA, 15 bp, Homo sapiens
cttgaattcctgatc

SEQ ID NO: 1631818 - DNA, 15 bp, Homo sapiens
tcttgaattcctgat

SEQ ID NO: 1631819 - DNA, 15 bp, Homo sapiens
gtcttgaattcctga

SEQ ID NO: 1631820 - DNA, 15 bp, Homo sapiens
cgctggtcttgaatt

SEQ ID NO: 1631821 - DNA, 15 bp, Homo sapiens
acgctggtcttgaat

SEQ ID NO: 1631822 - DNA, 15 bp, Homo sapiens
cacgctggtcttgaa

SEQ ID NO: 1631823 - DNA, 15 bp, Homo sapiens
ccacgctggtcttga

SEQ ID NO: 1631824 - DNA, 15 bp, Homo sapiens
gccacgctggtcttg

SEQ ID NO: 1631825 - DNA, 15 bp, Homo sapiens
ggccacgctggtctt

SEQ ID NO: 1631826 - DNA, 15 bp, Homo sapiens
tggccacgctggtct

SEQ ID NO: 1631827 - DNA, 15 bp, Homo sapiens
ttggccacgctggtc

SEQ ID NO: 1631828 - DNA, 15 bp, Homo sapiens
gttggccacgctggt

SEQ ID NO: 1631829 - DNA, 15 bp, Homo sapiens
tgttggccacgctgg

SEQ ID NO: 1631830 - DNA, 15 bp, Homo sapiens
atgttggccacgctg

SEQ ID NO: 1631831 - DNA, 15 bp, Homo sapiens
catgttggccacgct

SEQ ID NO: 1631832 - DNA, 15 bp, Homo sapiens
ccatgttggccacgc

SEQ ID NO: 1631833 - DNA, 15 bp, Homo sapiens
accatgttggccacg

SEQ ID NO: 1631834 - DNA, 15 bp, Homo sapiens
caccatgttggccac

SEQ ID NO: 1631835 - DNA, 15 bp, Homo sapiens
tcatgctcagctaat

SEQ ID NO: 1631836 - DNA, 15 bp, Homo sapiens
atcatgctcagctaa

SEQ ID NO: 1631837 - DNA, 15 bp, Homo sapiens
catcatgctcagcta

SEQ ID NO: 1631838 - DNA, 15 bp, Homo sapiens
ccatcatgctcagct

SEQ ID NO: 1631839 - DNA, 15 bp, Homo sapiens
accatcatgctcagc

SEQ ID NO: 1631840 - DNA, 15 bp, Homo sapiens
caccatcatgctcag

SEQ ID NO: 1631841 - DNA, 15 bp, Homo sapiens
gcaccatcatgctca

SEQ ID NO: 1631842 - DNA, 15 bp, Homo sapiens
tgcaccatcatgctc

SEQ ID NO: 1631843 - DNA, 15 bp, Homo sapiens
gtgcaccatcatgct

SEQ ID NO: 1631844 - DNA, 15 bp, Homo sapiens
tgtgcaccatcatgc

SEQ ID NO: 1631845 - DNA, 15 bp, Homo sapiens
gtgtgcaccatcatg

SEQ ID NO: 1631846 - DNA, 15 bp, Homo sapiens
agtgtgcaccatcat

SEQ ID NO: 1631847 - DNA, 15 bp, Homo sapiens
cagtgtgcaccatca

SEQ ID NO: 1631848 - DNA, 15 bp, Homo sapiens
acagtgtgcaccatc

SEQ ID NO: 1631849 - DNA, 15 bp, Homo sapiens
tacagtgtgcaccat

SEQ ID NO: 1631850 - DNA, 15 bp, Homo sapiens
ttacagtgtgcacca

SEQ ID NO: 1631851 - DNA, 15 bp, Homo sapiens
attacagtgtgcacc

SEQ ID NO: 1631852 - DNA, 15 bp, Homo sapiens
gattacagtgtgcac

SEQ ID NO: 1631853 - DNA, 15 bp, Homo sapiens
ggattacagtgtgca

SEQ ID NO: 1631854 - DNA, 15 bp, Homo sapiens
gggattacagtgtgc

SEQ ID NO: 1631855 - DNA, 15 bp, Homo sapiens
tgggattacagtgtg

SEQ ID NO: 1631856 - DNA, 15 bp, Homo sapiens
ctgggattacagtgt

SEQ ID NO: 1631857 - DNA, 15 bp, Homo sapiens
gctgggattacagtg

SEQ ID NO: 1631858 - DNA, 15 bp, Homo sapiens
gctgagtagctggga

SEQ ID NO: 1631859 - DNA, 15 bp, Homo sapiens
tgctgagtagctggg

SEQ ID NO: 1631860 - DNA, 15 bp, Homo sapiens
ctgctgagtagctgg

SEQ ID NO: 1631861 - DNA, 15 bp, Homo sapiens
cctgctgagtagctg

SEQ ID NO: 1631862 - DNA, 15 bp, Homo sapiens
gcctgctgagtagct

SEQ ID NO: 1631863 - DNA, 15 bp, Homo sapiens
agcctgctgagtagc

SEQ ID NO: 1631864 - DNA, 15 bp, Homo sapiens
cagcctgctgagtag

SEQ ID NO: 1631865 - DNA, 15 bp, Homo sapiens
acagcctgctgagta

SEQ ID NO: 1631866 - DNA, 15 bp, Homo sapiens
cacagcctgctgagt

SEQ ID NO: 1631867 - DNA, 15 bp, Homo sapiens
ccacagcctgctgag

SEQ ID NO: 1631868 - DNA, 15 bp, Homo sapiens
gccacagcctgctga

SEQ ID NO: 1631869 - DNA, 15 bp, Homo sapiens
tgccacagcctgctg

SEQ ID NO: 1631870 - DNA, 15 bp, Homo sapiens
ctgccacagcctgct

SEQ ID NO: 1631871 - DNA, 15 bp, Homo sapiens
cctgccacagcctgc

SEQ ID NO: 1631872 - DNA, 15 bp, Homo sapiens
tcctgccacagcctg

SEQ ID NO: 1631873 - DNA, 15 bp, Homo sapiens
ctcctgccacagcct

SEQ ID NO: 1631874 - DNA, 15 bp, Homo sapiens
tctcctgccacagcc

SEQ ID NO: 1631875 - DNA, 15 bp, Homo sapiens
ttctcctgccacagc

SEQ ID NO: 1631876 - DNA, 15 bp, Homo sapiens
attctcctgccacag

SEQ ID NO: 1631877 - DNA, 15 bp, Homo sapiens
gattctcctgccaca

SEQ ID NO: 1631878 - DNA, 15 bp, Homo sapiens
tgattctcctgccac

SEQ ID NO: 1631879 - DNA, 15 bp, Homo sapiens
gtgattctcctgcca

SEQ ID NO: 1631880 - DNA, 15 bp, Homo sapiens
cctctacctcctggg

SEQ ID NO: 1631881 - DNA, 15 bp, Homo sapiens
acctctacctcctgg

SEQ ID NO: 1631882 - DNA, 15 bp, Homo sapiens
aacctctacctcctg

SEQ ID NO: 1631883 - DNA, 15 bp, Homo sapiens
caacctctacctcct

SEQ ID NO: 1631884 - DNA, 15 bp, Homo sapiens
ctggcgcgatctcgg

SEQ ID NO: 1631885 - DNA, 15 bp, Homo sapiens
actggcgcgatctcg

SEQ ID NO: 1631886 - DNA, 15 bp, Homo sapiens
cactggcgcgatctc

SEQ ID NO: 1631887 - DNA, 15 bp, Homo sapiens
gcactggcgcgatct

SEQ ID NO: 1631888 - DNA, 15 bp, Homo sapiens
tgcactggcgcgatc

SEQ ID NO: 1631889 - DNA, 15 bp, Homo sapiens
gtgcactggcgcgat

SEQ ID NO: 1631890 - DNA, 15 bp, Homo sapiens
agtgcactggcgcga

SEQ ID NO: 1631891 - DNA, 15 bp, Homo sapiens
gagtgcactggcgcg

SEQ ID NO: 1631892 - DNA, 15 bp, Homo sapiens
ggagtgcactggcgc

SEQ ID NO: 1631893 - DNA, 15 bp, Homo sapiens
tggagtgcactggcg

SEQ ID NO: 1631894 - DNA, 15 bp, Homo sapiens
atggagtgcactggc

SEQ ID NO: 1631895 - DNA, 15 bp, Homo sapiens
gatggagtgcactgg

SEQ ID NO: 1631896 - DNA, 15 bp, Homo sapiens
ggatggagtgcactg

SEQ ID NO: 1631897 - DNA, 15 bp, Homo sapiens
aggatggagtgcact

SEQ ID NO: 1631898 - DNA, 15 bp, Homo sapiens
caggatggagtgcac

SEQ ID NO: 1631899 - DNA, 15 bp, Homo sapiens
tgcccaggatggagt

SEQ ID NO: 1631900 - DNA, 15 bp, Homo sapiens
ttgcccaggatggag

SEQ ID NO: 1631901 - DNA, 15 bp, Homo sapiens
gttgcccaggatgga

SEQ ID NO: 1631902 - DNA, 15 bp, Homo sapiens
tgttgcccaggatgg

SEQ ID NO: 1631903 - DNA, 15 bp, Homo sapiens
ctgttgcccaggatg

SEQ ID NO: 1631904 - DNA, 15 bp, Homo sapiens
tctgttgcccaggat

SEQ ID NO: 1631905 - DNA, 15 bp, Homo sapiens
ttctgttgcccagga

SEQ ID NO: 1631906 - DNA, 15 bp, Homo sapiens
gtcttgttctgttgc

SEQ ID NO: 1631907 - DNA, 15 bp, Homo sapiens
agtcttgttctgttg

SEQ ID NO: 1631908 - DNA, 15 bp, Homo sapiens
gagtcttgttctgtt

SEQ ID NO: 1631909 - DNA, 15 bp, Homo sapiens
ttggagtcttgttct

SEQ ID NO: 1631910 - DNA, 15 bp, Homo sapiens
gttggagtcttgttc

SEQ ID NO: 1631911 - DNA, 15 bp, Homo sapiens
agttggagtcttgtt

SEQ ID NO: 1631912 - DNA, 15 bp, Homo sapiens
gagttggagtcttgt

SEQ ID NO: 1631913 - DNA, 15 bp, Homo sapiens
cgagttggagtcttg

SEQ ID NO: 1631914 - DNA, 15 bp, Homo sapiens
tcgagttggagtctt

SEQ ID NO: 1631915 - DNA, 15 bp, Homo sapiens
ttcgagttggagtct

SEQ ID NO: 1631916 - DNA, 15 bp, Homo sapiens
tttcgagttggagtc

SEQ ID NO: 1631917 - DNA, 15 bp, Homo sapiens
ttttcgagttggagt

SEQ ID NO: 1631918 - DNA, 15 bp, Homo sapiens
tttttcgagttggag

SEQ ID NO: 1631919 - DNA, 15 bp, Homo sapiens
ttttttcgagttgga

SEQ ID NO: 1631920 - DNA, 15 bp, Homo sapiens
tttttttcgagttgg

SEQ ID NO: 1631921 - DNA, 15 bp, Homo sapiens
ttttttttcgagttg

SEQ ID NO: 1631922 - DNA, 15 bp, Homo sapiens
tttttttttcgagtt

SEQ ID NO: 1631923 - DNA, 15 bp, Homo sapiens
atttttttttcgagt

SEQ ID NO: 1631924 - DNA, 15 bp, Homo sapiens
gatttttttttcgag

SEQ ID NO: 1631925 - DNA, 15 bp, Homo sapiens
tgatttttttttcga

SEQ ID NO: 1631926 - DNA, 15 bp, Homo sapiens
ttgatttttttttcg

SEQ ID NO: 1631927 - DNA, 15 bp, Homo sapiens
attgatttttttttc

SEQ ID NO: 1631928 - DNA, 15 bp, Homo sapiens
ttattgatttttttt

SEQ ID NO: 1631929 - DNA, 15 bp, Homo sapiens
tttattgattttttt

SEQ ID NO: 1631930 - DNA, 15 bp, Homo sapiens
ttttattgatttttt

SEQ ID NO: 1631931 - DNA, 15 bp, Homo sapiens
tttttattgattttt

SEQ ID NO: 1631932 - DNA, 15 bp, Homo sapiens
atttttattgatttt

SEQ ID NO: 1631933 - DNA, 15 bp, Homo sapiens
catttttattgattt

SEQ ID NO: 1631934 - DNA, 15 bp, Homo sapiens
acatttttattgatt

SEQ ID NO: 1631935 - DNA, 15 bp, Homo sapiens
tacatttttattgat

SEQ ID NO: 1631936 - DNA, 15 bp, Homo sapiens
ttacatttttattga

SEQ ID NO: 1631937 - DNA, 15 bp, Homo sapiens
tttacatttttattg

SEQ ID NO: 1631938 - DNA, 15 bp, Homo sapiens
ttttacatttttatt

SEQ ID NO: 1631939 - DNA, 15 bp, Homo sapiens
cttttacatttttat

SEQ ID NO: 1631940 - DNA, 15 bp, Homo sapiens
atgatcttttacatt

SEQ ID NO: 1631941 - DNA, 15 bp, Homo sapiens
aatgatcttttacat

SEQ ID NO: 1631942 - DNA, 15 bp, Homo sapiens
gaatgatcttttaca

SEQ ID NO: 1631943 - DNA, 15 bp, Homo sapiens
agaatgatcttttac

SEQ ID NO: 1631944 - DNA, 15 bp, Homo sapiens
aagaatgatctttta

SEQ ID NO: 1631945 - DNA, 15 bp, Homo sapiens
taagaatgatctttt

SEQ ID NO: 1631946 - DNA, 15 bp, Homo sapiens
ctaagaatgatcttt

SEQ ID NO: 1631947 - DNA, 15 bp, Homo sapiens
gctaagaatgatctt

SEQ ID NO: 1631948 - DNA, 15 bp, Homo sapiens
agctaagaatgatct

SEQ ID NO: 1631949 - DNA, 15 bp, Homo sapiens
aagctaagaatgatc

SEQ ID NO: 1631950 - DNA, 15 bp, Homo sapiens
caagctaagaatgat

SEQ ID NO: 1631951 - DNA, 15 bp, Homo sapiens
ccaagctaagaatga

SEQ ID NO: 1631952 - DNA, 15 bp, Homo sapiens
tccaagctaagaatg

SEQ ID NO: 1631953 - DNA, 15 bp, Homo sapiens
ctccaagctaagaat

SEQ ID NO: 1631954 - DNA, 15 bp, Homo sapiens
cctccaagctaagaa

SEQ ID NO: 1631955 - DNA, 15 bp, Homo sapiens
gcctccaagctaaga

SEQ ID NO: 1631956 - DNA, 15 bp, Homo sapiens
agcctccaagctaag

SEQ ID NO: 1631957 - DNA, 15 bp, Homo sapiens
tagcctccaagctaa

SEQ ID NO: 1631958 - DNA, 15 bp, Homo sapiens
atagcctccaagcta

SEQ ID NO: 1631959 - DNA, 15 bp, Homo sapiens
ttatagcctccaagc

SEQ ID NO: 1631960 - DNA, 15 bp, Homo sapiens
tttatagcctccaag

SEQ ID NO: 1631961 - DNA, 15 bp, Homo sapiens
ttttatagcctccaa

SEQ ID NO: 1631962 - DNA, 15 bp, Homo sapiens
tttttatagcctcca

SEQ ID NO: 1631963 - DNA, 15 bp, Homo sapiens
ttttttatagcctcc

SEQ ID NO: 1631964 - DNA, 15 bp, Homo sapiens
cttttttatagcctc

SEQ ID NO: 1631965 - DNA, 15 bp, Homo sapiens
ccttttttatagcct

SEQ ID NO: 1631966 - DNA, 15 bp, Homo sapiens
tccttttttatagcc

SEQ ID NO: 1631967 - DNA, 15 bp, Homo sapiens
atccttttttatagc

SEQ ID NO: 1631968 - DNA, 15 bp, Homo sapiens
catccttttttatag

SEQ ID NO: 1631969 - DNA, 15 bp, Homo sapiens
gcatccttttttata

SEQ ID NO: 1631970 - DNA, 15 bp, Homo sapiens
tgcatccttttttat

SEQ ID NO: 1631971 - DNA, 15 bp, Homo sapiens
ctgcatcctttttta

SEQ ID NO: 1631972 - DNA, 15 bp, Homo sapiens
gctgcatcctttttt

SEQ ID NO: 1631973 - DNA, 15 bp, Homo sapiens
tgctgcatccttttt

SEQ ID NO: 1631974 - DNA, 15 bp, Homo sapiens
atgctgcatcctttt

SEQ ID NO: 1631975 - DNA, 15 bp, Homo sapiens
catgctgcatccttt

SEQ ID NO: 1631976 - DNA, 15 bp, Homo sapiens
acatgctgcatcctt

SEQ ID NO: 1631977 - DNA, 15 bp, Homo sapiens
gacatgctgcatcct

SEQ ID NO: 1631978 - DNA, 15 bp, Homo sapiens
tgacatgctgcatcc

SEQ ID NO: 1631979 - DNA, 15 bp, Homo sapiens
ctgacatgctgcatc

SEQ ID NO: 1631980 - DNA, 15 bp, Homo sapiens
tctgacatgctgcat

SEQ ID NO: 1631981 - DNA, 15 bp, Homo sapiens
atctgacatgctgca

SEQ ID NO: 1631982 - DNA, 15 bp, Homo sapiens
aatctgacatgctgc

SEQ ID NO: 1631983 - DNA, 15 bp, Homo sapiens
aaatctgacatgctg

SEQ ID NO: 1631984 - DNA, 15 bp, Homo sapiens
caaatctgacatgct

SEQ ID NO: 1631985 - DNA, 15 bp, Homo sapiens
ccaaatctgacatgc

SEQ ID NO: 1631986 - DNA, 15 bp, Homo sapiens
gccaaatctgacatg

SEQ ID NO: 1631987 - DNA, 15 bp, Homo sapiens
ggccaaatctgacat

SEQ ID NO: 1631988 - DNA, 15 bp, Homo sapiens
gggccaaatctgaca

SEQ ID NO: 1631989 - DNA, 15 bp, Homo sapiens
tgggccaaatctgac

SEQ ID NO: 1631990 - DNA, 15 bp, Homo sapiens
atgggccaaatctga

SEQ ID NO: 1631991 - DNA, 15 bp, Homo sapiens
aatgggccaaatctg

SEQ ID NO: 1631992 - DNA, 15 bp, Homo sapiens
taatgggccaaatct

SEQ ID NO: 1631993 - DNA, 15 bp, Homo sapiens
ctaatgggccaaatc

SEQ ID NO: 1631994 - DNA, 15 bp, Homo sapiens
gctaatgggccaaat

SEQ ID NO: 1631995 - DNA, 15 bp, Homo sapiens
agctaatgggccaaa

SEQ ID NO: 1631996 - DNA, 15 bp, Homo sapiens
cagctaatgggccaa

SEQ ID NO: 1631997 - DNA, 15 bp, Homo sapiens
gcagctaatgggcca

SEQ ID NO: 1631998 - DNA, 15 bp, Homo sapiens
tgcagctaatgggcc

SEQ ID NO: 1631999 - DNA, 15 bp, Homo sapiens
ctgcagctaatgggc

SEQ ID NO: 1632000 - DNA, 15 bp, Homo sapiens
actgcagctaatggg

SEQ ID NO: 1632001 - DNA, 15 bp, Homo sapiens
aactgcagctaatgg

SEQ ID NO: 1632002 - DNA, 15 bp, Homo sapiens
aaactgcagctaatg

SEQ ID NO: 1632003 - DNA, 15 bp, Homo sapiens
gaaactgcagctaat

SEQ ID NO: 1632004 - DNA, 15 bp, Homo sapiens
ggaaactgcagctaa

SEQ ID NO: 1632005 - DNA, 15 bp, Homo sapiens
aggaaactgcagcta

SEQ ID NO: 1632006 - DNA, 15 bp, Homo sapiens
caggaaactgcagct

SEQ ID NO: 1632007 - DNA, 15 bp, Homo sapiens
tcaggaaactgcagc

SEQ ID NO: 1632008 - DNA, 15 bp, Homo sapiens
gtcaggaaactgcag

SEQ ID NO: 1632009 - DNA, 15 bp, Homo sapiens
ggtcaggaaactgca

SEQ ID NO: 1632010 - DNA, 15 bp, Homo sapiens
aggtcaggaaactgc

SEQ ID NO: 1632011 - DNA, 15 bp, Homo sapiens
gaggtcaggaaactg

SEQ ID NO: 1632012 - DNA, 15 bp, Homo sapiens
agaggtcaggaaact

SEQ ID NO: 1632013 - DNA, 15 bp, Homo sapiens
tagaggtcaggaaac

SEQ ID NO: 1632014 - DNA, 15 bp, Homo sapiens
atagaggtcaggaaa

SEQ ID NO: 1632015 - DNA, 15 bp, Homo sapiens
gatagaggtcaggaa

SEQ ID NO: 1632016 - DNA, 15 bp, Homo sapiens
agatagaggtcagga

SEQ ID NO: 1632017 - DNA, 15 bp, Homo sapiens
tagatagaggtcagg

SEQ ID NO: 1632018 - DNA, 15 bp, Homo sapiens
gtagatagaggtcag

SEQ ID NO: 1632019 - DNA, 15 bp, Homo sapiens
ggtagatagaggtca

SEQ ID NO: 1632020 - DNA, 15 bp, Homo sapiens
aggtagatagaggtc

SEQ ID NO: 1632021 - DNA, 15 bp, Homo sapiens
gaggtagatagaggt

SEQ ID NO: 1632022 - DNA, 15 bp, Homo sapiens
tgaggtagatagagg

SEQ ID NO: 1632023 - DNA, 15 bp, Homo sapiens
ttgaggtagatagag

SEQ ID NO: 1632024 - DNA, 15 bp, Homo sapiens
attgaggtagataga

SEQ ID NO: 1632025 - DNA, 15 bp, Homo sapiens
aattgaggtagatag

SEQ ID NO: 1632026 - DNA, 15 bp, Homo sapiens
caattgaggtagata

SEQ ID NO: 1632027 - DNA, 15 bp, Homo sapiens
ccaattgaggtagat

SEQ ID NO: 1632028 - DNA, 15 bp, Homo sapiens
accaattgaggtaga

SEQ ID NO: 1632029 - DNA, 15 bp, Homo sapiens
aaccaattgaggtag

SEQ ID NO: 1632030 - DNA, 15 bp, Homo sapiens
gaaccaattgaggta

SEQ ID NO: 1632031 - DNA, 15 bp, Homo sapiens
agaaccaattgaggt

SEQ ID NO: 1632032 - DNA, 15 bp, Homo sapiens
aagaaccaattgagg

SEQ ID NO: 1632033 - DNA, 15 bp, Homo sapiens
aaagaaccaattgag

SEQ ID NO: 1632034 - DNA, 15 bp, Homo sapiens
taaagaaccaattga

SEQ ID NO: 1632035 - DNA, 15 bp, Homo sapiens
gtaaagaaccaattg

SEQ ID NO: 1632036 - DNA, 15 bp, Homo sapiens
agtaaagaaccaatt

SEQ ID NO: 1632037 - DNA, 15 bp, Homo sapiens
aagtaaagaaccaat

SEQ ID NO: 1632038 - DNA, 15 bp, Homo sapiens
taagtaaagaaccaa

SEQ ID NO: 1632039 - DNA, 15 bp, Homo sapiens
gtaagtaaagaacca

SEQ ID NO: 1632040 - DNA, 15 bp, Homo sapiens
tgtaagtaaagaacc

SEQ ID NO: 1632041 - DNA, 15 bp, Homo sapiens
atgtaagtaaagaac

SEQ ID NO: 1632042 - DNA, 15 bp, Homo sapiens
aatgtaagtaaagaa

SEQ ID NO: 1632043 - DNA, 15 bp, Homo sapiens
taatgtaagtaaaga

SEQ ID NO: 1632044 - DNA, 15 bp, Homo sapiens
gtaatgtaagtaaag

SEQ ID NO: 1632045 - DNA, 15 bp, Homo sapiens
tgtaatgtaagtaaa

SEQ ID NO: 1632046 - DNA, 15 bp, Homo sapiens
atgtaatgtaagtaa

SEQ ID NO: 1632047 - DNA, 15 bp, Homo sapiens
catgtaatgtaagta

SEQ ID NO: 1632048 - DNA, 15 bp, Homo sapiens
ccatgtaatgtaagt

SEQ ID NO: 1632049 - DNA, 15 bp, Homo sapiens
tccatgtaatgtaag

SEQ ID NO: 1632050 - DNA, 15 bp, Homo sapiens
ttccatgtaatgtaa

SEQ ID NO: 1632051 - DNA, 15 bp, Homo sapiens
tttccatgtaatgta

SEQ ID NO: 1632052 - DNA, 15 bp, Homo sapiens
ctttccatgtaatgt

SEQ ID NO: 1632053 - DNA, 15 bp, Homo sapiens
actttccatgtaatg

SEQ ID NO: 1632054 - DNA, 15 bp, Homo sapiens
cactttccatgtaat

SEQ ID NO: 1632055 - DNA, 15 bp, Homo sapiens
gcactttccatgtaa

SEQ ID NO: 1632056 - DNA, 15 bp, Homo sapiens
tgcactttccatgta

SEQ ID NO: 1632057 - DNA, 15 bp, Homo sapiens
ttgcactttccatgt

SEQ ID NO: 1632058 - DNA, 15 bp, Homo sapiens
tttgcactttccatg

SEQ ID NO: 1632059 - DNA, 15 bp, Homo sapiens
gtttgcactttccat

SEQ ID NO: 1632060 - DNA, 15 bp, Homo sapiens
agtttgcactttcca

SEQ ID NO: 1632061 - DNA, 15 bp, Homo sapiens
aagtttgcactttcc

SEQ ID NO: 1632062 - DNA, 15 bp, Homo sapiens
caagtttgcactttc

SEQ ID NO: 1632063 - DNA, 15 bp, Homo sapiens
ccaagtttgcacttt

SEQ ID NO: 1632064 - DNA, 15 bp, Homo sapiens
tccaagtttgcactt

SEQ ID NO: 1632065 - DNA, 15 bp, Homo sapiens
atccaagtttgcact

SEQ ID NO: 1632066 - DNA, 15 bp, Homo sapiens
catccaagtttgcac

SEQ ID NO: 1632067 - DNA, 15 bp, Homo sapiens
ccatccaagtttgca

SEQ ID NO: 1632068 - DNA, 15 bp, Homo sapiens
gccatccaagtttgc

SEQ ID NO: 1632069 - DNA, 15 bp, Homo sapiens
agccatccaagtttg

SEQ ID NO: 1632070 - DNA, 15 bp, Homo sapiens
aagccatccaagttt

SEQ ID NO: 1632071 - DNA, 15 bp, Homo sapiens
gaagccatccaagtt

SEQ ID NO: 1632072 - DNA, 15 bp, Homo sapiens
tgaagccatccaagt

SEQ ID NO: 1632073 - DNA, 15 bp, Homo sapiens
ttgaagccatccaag

SEQ ID NO: 1632074 - DNA, 15 bp, Homo sapiens
attgaagccatccaa

SEQ ID NO: 1632075 - DNA, 15 bp, Homo sapiens
cattgaagccatcca

SEQ ID NO: 1632076 - DNA, 15 bp, Homo sapiens
acattgaagccatcc

SEQ ID NO: 1632077 - DNA, 15 bp, Homo sapiens
gacattgaagccatc

SEQ ID NO: 1632078 - DNA, 15 bp, Homo sapiens
agacattgaagccat

SEQ ID NO: 1632079 - DNA, 15 bp, Homo sapiens
cagacattgaagcca

SEQ ID NO: 1632080 - DNA, 15 bp, Homo sapiens
ccagacattgaagcc

SEQ ID NO: 1632081 - DNA, 15 bp, Homo sapiens
gccagacattgaagc

SEQ ID NO: 1632082 - DNA, 15 bp, Homo sapiens
agccagacattgaag

SEQ ID NO: 1632083 - DNA, 15 bp, Homo sapiens
aagccagacattgaa

SEQ ID NO: 1632084 - DNA, 15 bp, Homo sapiens
gaagccagacattga

SEQ ID NO: 1632085 - DNA, 15 bp, Homo sapiens
agaagccagacattg

SEQ ID NO: 1632086 - DNA, 15 bp, Homo sapiens
aagaagccagacatt

SEQ ID NO: 1632087 - DNA, 15 bp, Homo sapiens
aaagaagccagacat

SEQ ID NO: 1632088 - DNA, 15 bp, Homo sapiens
aaaagaagccagaca

SEQ ID NO: 1632089 - DNA, 15 bp, Homo sapiens
taaaagaagccagac

SEQ ID NO: 1632090 - DNA, 15 bp, Homo sapiens
ataaaagaagccaga

SEQ ID NO: 1632091 - DNA, 15 bp, Homo sapiens
aataaaagaagccag

SEQ ID NO: 1632092 - DNA, 15 bp, Homo sapiens
aaataaaagaagcca

SEQ ID NO: 1632093 - DNA, 15 bp, Homo sapiens
taaataaaagaagcc

SEQ ID NO: 1632094 - DNA, 15 bp, Homo sapiens
ataaataaaagaagc

SEQ ID NO: 1632095 - DNA, 15 bp, Homo sapiens
aataaataaaagaag

SEQ ID NO: 1632096 - DNA, 15 bp, Homo sapiens
aaataaataaaagaa

SEQ ID NO: 1632097 - DNA, 15 bp, Homo sapiens
taaataaataaaaga

SEQ ID NO: 1632098 - DNA, 15 bp, Homo sapiens
gtctcaaaaaataaa

SEQ ID NO: 1632099 - DNA, 15 bp, Homo sapiens
cgtctcaaaaaataa

SEQ ID NO: 1632100 - DNA, 15 bp, Homo sapiens
ccgtctcaaaaaata

SEQ ID NO: 1632101 - DNA, 15 bp, Homo sapiens
cccgtctcaaaaaat

SEQ ID NO: 1632102 - DNA, 15 bp, Homo sapiens
cgagaccccgtctca

SEQ ID NO: 1632103 - DNA, 15 bp, Homo sapiens
gcgagaccccgtctc

SEQ ID NO: 1632104 - DNA, 15 bp, Homo sapiens
agcgagaccccgtct

SEQ ID NO: 1632105 - DNA, 15 bp, Homo sapiens
cagcgagaccccgtc

SEQ ID NO: 1632106 - DNA, 15 bp, Homo sapiens
acagcgagaccccgt

SEQ ID NO: 1632107 - DNA, 15 bp, Homo sapiens
cacagcgagaccccg

SEQ ID NO: 1632108 - DNA, 15 bp, Homo sapiens
ccacagcgagacccc

SEQ ID NO: 1632109 - DNA, 15 bp, Homo sapiens
gccacagcgagaccc

SEQ ID NO: 1632110 - DNA, 15 bp, Homo sapiens
ggccacagcgagacc

SEQ ID NO: 1632111 - DNA, 15 bp, Homo sapiens
gggccacagcgagac

SEQ ID NO: 1632112 - DNA, 15 bp, Homo sapiens
cgggccacagcgaga

SEQ ID NO: 1632113 - DNA, 15 bp, Homo sapiens
ccgggccacagcgag

SEQ ID NO: 1632114 - DNA, 15 bp, Homo sapiens
cccgggccacagcga

SEQ ID NO: 1632115 - DNA, 15 bp, Homo sapiens
gcccgggccacagcg

SEQ ID NO: 1632116 - DNA, 15 bp, Homo sapiens
agcccgggccacagc

SEQ ID NO: 1632117 - DNA, 15 bp, Homo sapiens
cagcccgggccacag

SEQ ID NO: 1632118 - DNA, 15 bp, Homo sapiens
ccagcccgggccaca

SEQ ID NO: 1632119 - DNA, 15 bp, Homo sapiens
tccagcccgggccac

SEQ ID NO: 1632120 - DNA, 15 bp, Homo sapiens
ctccagcccgggcca

SEQ ID NO: 1632121 - DNA, 15 bp, Homo sapiens
actccagcccgggcc

SEQ ID NO: 1632122 - DNA, 15 bp, Homo sapiens
cactccagcccgggc

SEQ ID NO: 1632123 - DNA, 15 bp, Homo sapiens
gcactccagcccggg

SEQ ID NO: 1632124 - DNA, 15 bp, Homo sapiens
tgcactccagcccgg

SEQ ID NO: 1632125 - DNA, 15 bp, Homo sapiens
ctgcactccagcccg

SEQ ID NO: 1632126 - DNA, 15 bp, Homo sapiens
agagatcgtgccact

SEQ ID NO: 1632127 - DNA, 15 bp, Homo sapiens
cagagatcgtgccac

SEQ ID NO: 1632128 - DNA, 15 bp, Homo sapiens
gcagagatcgtgcca

SEQ ID NO: 1632129 - DNA, 15 bp, Homo sapiens
agcagagatcgtgcc

SEQ ID NO: 1632130 - DNA, 15 bp, Homo sapiens
gagcagagatcgtgc

SEQ ID NO: 1632131 - DNA, 15 bp, Homo sapiens
tgagcagagatcgtg

SEQ ID NO: 1632132 - DNA, 15 bp, Homo sapiens
gtgagcagagatcgt

SEQ ID NO: 1632133 - DNA, 15 bp, Homo sapiens
agtgagcagagatcg

SEQ ID NO: 1632134 - DNA, 15 bp, Homo sapiens
cttgcagtgagcaga

SEQ ID NO: 1632135 - DNA, 15 bp, Homo sapiens
gcttgcagtgagcag

SEQ ID NO: 1632136 - DNA, 15 bp, Homo sapiens
agcttgcagtgagca

SEQ ID NO: 1632137 - DNA, 15 bp, Homo sapiens
gaggtggagcttgca

SEQ ID NO: 1632138 - DNA, 15 bp, Homo sapiens
ggaggtggagcttgc

SEQ ID NO: 1632139 - DNA, 15 bp, Homo sapiens
aggaggtggagcttg

SEQ ID NO: 1632140 - DNA, 15 bp, Homo sapiens
caggaggtggagctt

SEQ ID NO: 1632141 - DNA, 15 bp, Homo sapiens
ccaggaggtggagct

SEQ ID NO: 1632142 - DNA, 15 bp, Homo sapiens
cccaggaggtggagc

SEQ ID NO: 1632143 - DNA, 15 bp, Homo sapiens
gtgaacccaggaggt

SEQ ID NO: 1632144 - DNA, 15 bp, Homo sapiens
tgtgaacccaggagg

SEQ ID NO: 1632145 - DNA, 15 bp, Homo sapiens
gtgtgaacccaggag

SEQ ID NO: 1632146 - DNA, 15 bp, Homo sapiens
ggtgtgaacccagga

SEQ ID NO: 1632147 - DNA, 15 bp, Homo sapiens
tggtgtgaacccagg

SEQ ID NO: 1632148 - DNA, 15 bp, Homo sapiens
atggtgtgaacccag

SEQ ID NO: 1632149 - DNA, 15 bp, Homo sapiens
aatggtgtgaaccca

SEQ ID NO: 1632150 - DNA, 15 bp, Homo sapiens
ttcgggaggctgagg

SEQ ID NO: 1632151 - DNA, 15 bp, Homo sapiens
attcgggaggctgag

SEQ ID NO: 1632152 - DNA, 15 bp, Homo sapiens
tattcgggaggctga

SEQ ID NO: 1632153 - DNA, 15 bp, Homo sapiens
ctattcgggaggctg

SEQ ID NO: 1632154 - DNA, 15 bp, Homo sapiens
gctattcgggaggct

SEQ ID NO: 1632155 - DNA, 15 bp, Homo sapiens
agctattcgggaggc

SEQ ID NO: 1632156 - DNA, 15 bp, Homo sapiens
cagctattcgggagg

SEQ ID NO: 1632157 - DNA, 15 bp, Homo sapiens
ccagctattcgggag

SEQ ID NO: 1632158 - DNA, 15 bp, Homo sapiens
tccagctattcggga

SEQ ID NO: 1632159 - DNA, 15 bp, Homo sapiens
ttccagctattcggg

SEQ ID NO: 1632160 - DNA, 15 bp, Homo sapiens
gttccagctattcgg

SEQ ID NO: 1632161 - DNA, 15 bp, Homo sapiens
agttccagctattcg

SEQ ID NO: 1632162 - DNA, 15 bp, Homo sapiens
tagttccagctattc

SEQ ID NO: 1632163 - DNA, 15 bp, Homo sapiens
gtagttccagctatt

SEQ ID NO: 1632164 - DNA, 15 bp, Homo sapiens
tgtagttccagctat

SEQ ID NO: 1632165 - DNA, 15 bp, Homo sapiens
acctgtagttccagc

SEQ ID NO: 1632166 - DNA, 15 bp, Homo sapiens
cacctgtagttccag

SEQ ID NO: 1632167 - DNA, 15 bp, Homo sapiens
gcacctgtagttcca

SEQ ID NO: 1632168 - DNA, 15 bp, Homo sapiens
tgcacctgtagttcc

SEQ ID NO: 1632169 - DNA, 15 bp, Homo sapiens
gtgcacctgtagttc

SEQ ID NO: 1632170 - DNA, 15 bp, Homo sapiens
cgtgcacctgtagtt

SEQ ID NO: 1632171 - DNA, 15 bp, Homo sapiens
gcgtgcacctgtagt

SEQ ID NO: 1632172 - DNA, 15 bp, Homo sapiens
ggcgtgcacctgtag

SEQ ID NO: 1632173 - DNA, 15 bp, Homo sapiens
gtggtggcgtgcacc

SEQ ID NO: 1632174 - DNA, 15 bp, Homo sapiens
cgtggtggcgtgcac

SEQ ID NO: 1632175 - DNA, 15 bp, Homo sapiens
gcgtggtggcgtgca

SEQ ID NO: 1632176 - DNA, 15 bp, Homo sapiens
agcgtggtggcgtgc

SEQ ID NO: 1632177 - DNA, 15 bp, Homo sapiens
aagcgtggtggcgtg

SEQ ID NO: 1632178 - DNA, 15 bp, Homo sapiens
caagcgtggtggcgt

SEQ ID NO: 1632179 - DNA, 15 bp, Homo sapiens
ccaagcgtggtggcg

SEQ ID NO: 1632180 - DNA, 15 bp, Homo sapiens
gccaagcgtggtggc

SEQ ID NO: 1632181 - DNA, 15 bp, Homo sapiens
agccaagcgtggtgg

SEQ ID NO: 1632182 - DNA, 15 bp, Homo sapiens
tagccaagcgtggtg

SEQ ID NO: 1632183 - DNA, 15 bp, Homo sapiens
ttagccaagcgtggt

SEQ ID NO: 1632184 - DNA, 15 bp, Homo sapiens
attagccaagcgtgg

SEQ ID NO: 1632185 - DNA, 15 bp, Homo sapiens
aattagccaagcgtg

SEQ ID NO: 1632186 - DNA, 15 bp, Homo sapiens
aaattagccaagcgt

SEQ ID NO: 1632187 - DNA, 15 bp, Homo sapiens
aaaattagccaagcg

SEQ ID NO: 1632188 - DNA, 15 bp, Homo sapiens
aaaaattagccaagc

SEQ ID NO: 1632189 - DNA, 15 bp, Homo sapiens
aaaaaattagccaag

SEQ ID NO: 1632190 - DNA, 15 bp, Homo sapiens
taaaaaattagccaa

SEQ ID NO: 1632191 - DNA, 15 bp, Homo sapiens
ataaaaaattagcca

SEQ ID NO: 1632192 - DNA, 15 bp, Homo sapiens
tataaaaaattagcc

SEQ ID NO: 1632193 - DNA, 15 bp, Homo sapiens
actaacacagtgaaa

SEQ ID NO: 1632194 - DNA, 15 bp, Homo sapiens
aactaacacagtgaa

SEQ ID NO: 1632195 - DNA, 15 bp, Homo sapiens
taactaacacagtga

SEQ ID NO: 1632196 - DNA, 15 bp, Homo sapiens
ctaactaacacagtg

SEQ ID NO: 1632197 - DNA, 15 bp, Homo sapiens
gctaactaacacagt

SEQ ID NO: 1632198 - DNA, 15 bp, Homo sapiens
ggctaactaacacag

SEQ ID NO: 1632199 - DNA, 15 bp, Homo sapiens
tggctaactaacaca

SEQ ID NO: 1632200 - DNA, 15 bp, Homo sapiens
ctggctaactaacac

SEQ ID NO: 1632201 - DNA, 15 bp, Homo sapiens
cctggctaactaaca

SEQ ID NO: 1632202 - DNA, 15 bp, Homo sapiens
tcctggctaactaac

SEQ ID NO: 1632203 - DNA, 15 bp, Homo sapiens
atcctggctaactaa

SEQ ID NO: 1632204 - DNA, 15 bp, Homo sapiens
catcctggctaacta

SEQ ID NO: 1632205 - DNA, 15 bp, Homo sapiens
ccatcctggctaact

SEQ ID NO: 1632206 - DNA, 15 bp, Homo sapiens
tgggcggatcatgag

SEQ ID NO: 1632207 - DNA, 15 bp, Homo sapiens
atgggcggatcatga

SEQ ID NO: 1632208 - DNA, 15 bp, Homo sapiens
gatgggcggatcatg

SEQ ID NO: 1632209 - DNA, 15 bp, Homo sapiens
agatgggcggatcat

SEQ ID NO: 1632210 - DNA, 15 bp, Homo sapiens
gagatgggcggatca

SEQ ID NO: 1632211 - DNA, 15 bp, Homo sapiens
cgagatgggcggatc

SEQ ID NO: 1632212 - DNA, 15 bp, Homo sapiens
ccgagatgggcggat

SEQ ID NO: 1632213 - DNA, 15 bp, Homo sapiens
gccgagatgggcgga

SEQ ID NO: 1632214 - DNA, 15 bp, Homo sapiens
ggccgagatgggcgg

SEQ ID NO: 1632215 - DNA, 15 bp, Homo sapiens
aggccgagatgggcg

SEQ ID NO: 1632216 - DNA, 15 bp, Homo sapiens
gaggccgagatgggc

SEQ ID NO: 1632217 - DNA, 15 bp, Homo sapiens
ggaggccgagatggg

SEQ ID NO: 1632218 - DNA, 15 bp, Homo sapiens
gggaggccgagatgg

SEQ ID NO: 1632219 - DNA, 15 bp, Homo sapiens
tgggaggccgagatg

SEQ ID NO: 1632220 - DNA, 15 bp, Homo sapiens
ttgggaggccgagat

SEQ ID NO: 1632221 - DNA, 15 bp, Homo sapiens
tttgggaggccgaga

SEQ ID NO: 1632222 - DNA, 15 bp, Homo sapiens
cgggcacggtggctc

SEQ ID NO: 1632223 - DNA, 15 bp, Homo sapiens
ccgggcacggtggct

SEQ ID NO: 1632224 - DNA, 15 bp, Homo sapiens
gccgggcacggtggc

SEQ ID NO: 1632225 - DNA, 15 bp, Homo sapiens
ccagccgggcacggt

SEQ ID NO: 1632226 - DNA, 15 bp, Homo sapiens
gccagccgggcacgg

SEQ ID NO: 1632227 - DNA, 15 bp, Homo sapiens
agccagccgggcacg

SEQ ID NO: 1632228 - DNA, 15 bp, Homo sapiens
cagccagccgggcac

SEQ ID NO: 1632229 - DNA, 15 bp, Homo sapiens
ccagccagccgggca

SEQ ID NO: 1632230 - DNA, 15 bp, Homo sapiens
gccagccagccgggc

SEQ ID NO: 1632231 - DNA, 15 bp, Homo sapiens
agccagccagccggg

SEQ ID NO: 1632232 - DNA, 15 bp, Homo sapiens
aagccagccagccgg

SEQ ID NO: 1632233 - DNA, 15 bp, Homo sapiens
gaagccagccagccg

SEQ ID NO: 1632234 - DNA, 15 bp, Homo sapiens
agaagccagccagcc

SEQ ID NO: 1632235 - DNA, 15 bp, Homo sapiens
aagaagccagccagc

SEQ ID NO: 1632236 - DNA, 15 bp, Homo sapiens
aaagaagccagccag

SEQ ID NO: 1632237 - DNA, 15 bp, Homo sapiens
aaaagaagccagcca

SEQ ID NO: 1632238 - DNA, 15 bp, Homo sapiens
aaaaagaagccagcc

SEQ ID NO: 1632239 - DNA, 15 bp, Homo sapiens
taaaaagaagccagc

SEQ ID NO: 1632240 - DNA, 15 bp, Homo sapiens
gtaaaaagaagccag

SEQ ID NO: 1632241 - DNA, 15 bp, Homo sapiens
ggtaaaaagaagcca

SEQ ID NO: 1632242 - DNA, 15 bp, Homo sapiens
gggtaaaaagaagcc

SEQ ID NO: 1632243 - DNA, 15 bp, Homo sapiens
agggtaaaaagaagc

SEQ ID NO: 1632244 - DNA, 15 bp, Homo sapiens
aagggtaaaaagaag

SEQ ID NO: 1632245 - DNA, 15 bp, Homo sapiens
gaagggtaaaaagaa

SEQ ID NO: 1632246 - DNA, 15 bp, Homo sapiens
tgaagggtaaaaaga

SEQ ID NO: 1632247 - DNA, 15 bp, Homo sapiens
gtgaagggtaaaaag

SEQ ID NO: 1632248 - DNA, 15 bp, Homo sapiens
tgtgaagggtaaaaa

SEQ ID NO: 1632249 - DNA, 15 bp, Homo sapiens
atgtgaagggtaaaa

SEQ ID NO: 1632250 - DNA, 15 bp, Homo sapiens
gatgtgaagggtaaa

SEQ ID NO: 1632251 - DNA, 15 bp, Homo sapiens
agatgtgaagggtaa

SEQ ID NO: 1632252 - DNA, 15 bp, Homo sapiens
cagatgtgaagggta

SEQ ID NO: 1632253 - DNA, 15 bp, Homo sapiens
ccagatgtgaagggt

SEQ ID NO: 1632254 - DNA, 15 bp, Homo sapiens
gccagatgtgaaggg

SEQ ID NO: 1632255 - DNA, 15 bp, Homo sapiens
agccagatgtgaagg

SEQ ID NO: 1632256 - DNA, 15 bp, Homo sapiens
aagccagatgtgaag

SEQ ID NO: 1632257 - DNA, 15 bp, Homo sapiens
aaagccagatgtgaa

SEQ ID NO: 1632258 - DNA, 15 bp, Homo sapiens
taaagccagatgtga

SEQ ID NO: 1632259 - DNA, 15 bp, Homo sapiens
ttaaagccagatgtg

SEQ ID NO: 1632260 - DNA, 15 bp, Homo sapiens
tttaaagccagatgt

SEQ ID NO: 1632261 - DNA, 15 bp, Homo sapiens
atttaaagccagatg

SEQ ID NO: 1632262 - DNA, 15 bp, Homo sapiens
tatttaaagccagat

SEQ ID NO: 1632263 - DNA, 15 bp, Homo sapiens
gtatttaaagccaga

SEQ ID NO: 1632264 - DNA, 15 bp, Homo sapiens
agtatttaaagccag

SEQ ID NO: 1632265 - DNA, 15 bp, Homo sapiens
tagtatttaaagcca

SEQ ID NO: 1632266 - DNA, 15 bp, Homo sapiens
gtagtatttaaagcc

SEQ ID NO: 1632267 - DNA, 15 bp, Homo sapiens
ggtagtatttaaagc

SEQ ID NO: 1632268 - DNA, 15 bp, Homo sapiens
aggtagtatttaaag

SEQ ID NO: 1632269 - DNA, 15 bp, Homo sapiens
aaggtagtatttaaa

SEQ ID NO: 1632270 - DNA, 15 bp, Homo sapiens
aaaggtagtatttaa

SEQ ID NO: 1632271 - DNA, 15 bp, Homo sapiens
aaaaggtagtattta

SEQ ID NO: 1632272 - DNA, 15 bp, Homo sapiens
gaaaaggtagtattt

SEQ ID NO: 1632273 - DNA, 15 bp, Homo sapiens
tgaaaaggtagtatt

SEQ ID NO: 1632274 - DNA, 15 bp, Homo sapiens
gtgaaaaggtagtat

SEQ ID NO: 1632275 - DNA, 15 bp, Homo sapiens
tgtgaaaaggtagta

SEQ ID NO: 1632276 - DNA, 15 bp, Homo sapiens
ctgtgaaaaggtagt

SEQ ID NO: 1632277 - DNA, 15 bp, Homo sapiens
tctgtgaaaaggtag

SEQ ID NO: 1632278 - DNA, 15 bp, Homo sapiens
atctgtgaaaaggta

SEQ ID NO: 1632279 - DNA, 15 bp, Homo sapiens
aatctgtgaaaaggt

SEQ ID NO: 1632280 - DNA, 15 bp, Homo sapiens
aaatctgtgaaaagg

SEQ ID NO: 1632281 - DNA, 15 bp, Homo sapiens
gaaatctgtgaaaag

SEQ ID NO: 1632282 - DNA, 15 bp, Homo sapiens
agaaatctgtgaaaa

SEQ ID NO: 1632283 - DNA, 15 bp, Homo sapiens
aagaaatctgtgaaa

SEQ ID NO: 1632284 - DNA, 15 bp, Homo sapiens
gaagaaatctgtgaa

SEQ ID NO: 1632285 - DNA, 15 bp, Homo sapiens
agaagaaatctgtga

SEQ ID NO: 1632286 - DNA, 15 bp, Homo sapiens
gagaagaaatctgtg

SEQ ID NO: 1632287 - DNA, 15 bp, Homo sapiens
agagaagaaatctgt

SEQ ID NO: 1632288 - DNA, 15 bp, Homo sapiens
tagagaagaaatctg

SEQ ID NO: 1632289 - DNA, 15 bp, Homo sapiens
ttagagaagaaatct

SEQ ID NO: 1632290 - DNA, 15 bp, Homo sapiens
attagagaagaaatc

SEQ ID NO: 1632291 - DNA, 15 bp, Homo sapiens
gattagagaagaaat

SEQ ID NO: 1632292 - DNA, 15 bp, Homo sapiens
tgattagagaagaaa

SEQ ID NO: 1632293 - DNA, 15 bp, Homo sapiens
gtgattagagaagaa

SEQ ID NO: 1632294 - DNA, 15 bp, Homo sapiens
agtgattagagaaga

SEQ ID NO: 1632295 - DNA, 15 bp, Homo sapiens
gagtgattagagaag

SEQ ID NO: 1632296 - DNA, 15 bp, Homo sapiens
agagtgattagagaa

SEQ ID NO: 1632297 - DNA, 15 bp, Homo sapiens
aagagtgattagaga

SEQ ID NO: 1632298 - DNA, 15 bp, Homo sapiens
aaagagtgattagag

SEQ ID NO: 1632299 - DNA, 15 bp, Homo sapiens
gaaagagtgattaga

SEQ ID NO: 1632300 - DNA, 15 bp, Homo sapiens
agaaagagtgattag

SEQ ID NO: 1632301 - DNA, 15 bp, Homo sapiens
tagaaagagtgatta

SEQ ID NO: 1632302 - DNA, 15 bp, Homo sapiens
ttagaaagagtgatt

SEQ ID NO: 1632303 - DNA, 15 bp, Homo sapiens
tttagaaagagtgat

SEQ ID NO: 1632304 - DNA, 15 bp, Homo sapiens
ctttagaaagagtga

SEQ ID NO: 1632305 - DNA, 15 bp, Homo sapiens
actttagaaagagtg

SEQ ID NO: 1632306 - DNA, 15 bp, Homo sapiens
tactttagaaagagt

SEQ ID NO: 1632307 - DNA, 15 bp, Homo sapiens
ttactttagaaagag

SEQ ID NO: 1632308 - DNA, 15 bp, Homo sapiens
tttactttagaaaga

SEQ ID NO: 1632309 - DNA, 15 bp, Homo sapiens
atttactttagaaag

SEQ ID NO: 1632310 - DNA, 15 bp, Homo sapiens
tatttactttagaaa

SEQ ID NO: 1632311 - DNA, 15 bp, Homo sapiens
atatttactttagaa

SEQ ID NO: 1632312 - DNA, 15 bp, Homo sapiens
catatttactttaga

SEQ ID NO: 1632313 - DNA, 15 bp, Homo sapiens
gcatatttactttag

SEQ ID NO: 1632314 - DNA, 15 bp, Homo sapiens
agcatatttacttta

SEQ ID NO: 1632315 - DNA, 15 bp, Homo sapiens
cagcatatttacttt

SEQ ID NO: 1632316 - DNA, 15 bp, Homo sapiens
acagcatatttactt

SEQ ID NO: 1632317 - DNA, 15 bp, Homo sapiens
aacagcatatttact

SEQ ID NO: 1632318 - DNA, 15 bp, Homo sapiens
aaacagcatatttac

SEQ ID NO: 1632319 - DNA, 15 bp, Homo sapiens
aaaacagcatattta

SEQ ID NO: 1632320 - DNA, 15 bp, Homo sapiens
aaaaacagcatattt

SEQ ID NO: 1632321 - DNA, 15 bp, Homo sapiens
gaaaaacagcatatt

SEQ ID NO: 1632322 - DNA, 15 bp, Homo sapiens
tgaaaaacagcatat

SEQ ID NO: 1632323 - DNA, 15 bp, Homo sapiens
atgaaaaacagcata

SEQ ID NO: 1632324 - DNA, 15 bp, Homo sapiens
aatgaaaaacagcat

SEQ ID NO: 1632325 - DNA, 15 bp, Homo sapiens
taatgaaaaacagca

SEQ ID NO: 1632326 - DNA, 15 bp, Homo sapiens
ataatgaaaaacagc

SEQ ID NO: 1632327 - DNA, 15 bp, Homo sapiens
aataatgaaaaacag

SEQ ID NO: 1632328 - DNA, 15 bp, Homo sapiens
taataatgaaaaaca

SEQ ID NO: 1632329 - DNA, 15 bp, Homo sapiens
ctaataatgaaaaac

SEQ ID NO: 1632330 - DNA, 15 bp, Homo sapiens
actaataatgaaaaa

SEQ ID NO: 1632331 - DNA, 15 bp, Homo sapiens
gactaataatgaaaa

SEQ ID NO: 1632332 - DNA, 15 bp, Homo sapiens
tgactaataatgaaa

SEQ ID NO: 1632333 - DNA, 15 bp, Homo sapiens
atgactaataatgaa

SEQ ID NO: 1632334 - DNA, 15 bp, Homo sapiens
aatgactaataatga

SEQ ID NO: 1632335 - DNA, 15 bp, Homo sapiens
caatgactaataatg

SEQ ID NO: 1632336 - DNA, 15 bp, Homo sapiens
gcaatgactaataat

SEQ ID NO: 1632337 - DNA, 15 bp, Homo sapiens
tgcaatgactaataa

SEQ ID NO: 1632338 - DNA, 15 bp, Homo sapiens
atgcaatgactaata

SEQ ID NO: 1632339 - DNA, 15 bp, Homo sapiens
gatgcaatgactaat

SEQ ID NO: 1632340 - DNA, 15 bp, Homo sapiens
ggatgcaatgactaa

SEQ ID NO: 1632341 - DNA, 15 bp, Homo sapiens
aggatgcaatgacta

SEQ ID NO: 1632342 - DNA, 15 bp, Homo sapiens
taggatgcaatgact

SEQ ID NO: 1632343 - DNA, 15 bp, Homo sapiens
ataggatgcaatgac

SEQ ID NO: 1632344 - DNA, 15 bp, Homo sapiens
aataggatgcaatga

SEQ ID NO: 1632345 - DNA, 15 bp, Homo sapiens
aaataggatgcaatg

SEQ ID NO: 1632346 - DNA, 15 bp, Homo sapiens
gaaataggatgcaat

SEQ ID NO: 1632347 - DNA, 15 bp, Homo sapiens
agaaataggatgcaa

SEQ ID NO: 1632348 - DNA, 15 bp, Homo sapiens
aagaaataggatgca

SEQ ID NO: 1632349 - DNA, 15 bp, Homo sapiens
aaagaaataggatgc

SEQ ID NO: 1632350 - DNA, 15 bp, Homo sapiens
gaaagaaataggatg

SEQ ID NO: 1632351 - DNA, 15 bp, Homo sapiens
ggaaagaaataggat

SEQ ID NO: 1632352 - DNA, 15 bp, Homo sapiens
gggaaagaaatagga

SEQ ID NO: 1632353 - DNA, 15 bp, Homo sapiens
agggaaagaaatagg

SEQ ID NO: 1632354 - DNA, 15 bp, Homo sapiens
aagggaaagaaatag

SEQ ID NO: 1632355 - DNA, 15 bp, Homo sapiens
aaagggaaagaaata

SEQ ID NO: 1632356 - DNA, 15 bp, Homo sapiens
taaagggaaagaaat

SEQ ID NO: 1632357 - DNA, 15 bp, Homo sapiens
ttaaagggaaagaaa

SEQ ID NO: 1632358 - DNA, 15 bp, Homo sapiens
attaaagggaaagaa

SEQ ID NO: 1632359 - DNA, 15 bp, Homo sapiens
aattaaagggaaaga

SEQ ID NO: 1632360 - DNA, 15 bp, Homo sapiens
aaattaaagggaaag

SEQ ID NO: 1632361 - DNA, 15 bp, Homo sapiens
aaaattaaagggaaa

SEQ ID NO: 1632362 - DNA, 15 bp, Homo sapiens
gaaaattaaagggaa

SEQ ID NO: 1632363 - DNA, 15 bp, Homo sapiens
agaaaattaaaggga

SEQ ID NO: 1632364 - DNA, 15 bp, Homo sapiens
aagaaaattaaaggg

SEQ ID NO: 1632365 - DNA, 15 bp, Homo sapiens
taagaaaattaaagg

SEQ ID NO: 1632366 - DNA, 15 bp, Homo sapiens
ataagaaaattaaag

SEQ ID NO: 1632367 - DNA, 15 bp, Homo sapiens
gataagaaaattaaa

SEQ ID NO: 1632368 - DNA, 15 bp, Homo sapiens
tgataagaaaattaa

SEQ ID NO: 1632369 - DNA, 15 bp, Homo sapiens
gtgataagaaaatta

SEQ ID NO: 1632370 - DNA, 15 bp, Homo sapiens
tgtgataagaaaatt

SEQ ID NO: 1632371 - DNA, 15 bp, Homo sapiens
ttgtgataagaaaat

SEQ ID NO: 1632372 - DNA, 15 bp, Homo sapiens
attgtgataagaaaa

SEQ ID NO: 1632373 - DNA, 15 bp, Homo sapiens
cattgtgataagaaa

SEQ ID NO: 1632374 - DNA, 15 bp, Homo sapiens
acattgtgataagaa

SEQ ID NO: 1632375 - DNA, 15 bp, Homo sapiens
tacattgtgataaga

SEQ ID NO: 1632376 - DNA, 15 bp, Homo sapiens
atacattgtgataag

SEQ ID NO: 1632377 - DNA, 15 bp, Homo sapiens
tatacattgtgataa

SEQ ID NO: 1632378 - DNA, 15 bp, Homo sapiens
ttatacattgtgata

SEQ ID NO: 1632379 - DNA, 15 bp, Homo sapiens
attatacattgtgat

SEQ ID NO: 1632380 - DNA, 15 bp, Homo sapiens
aattatacattgtga

SEQ ID NO: 1632381 - DNA, 15 bp, Homo sapiens
taattatacattgtg

SEQ ID NO: 1632382 - DNA, 15 bp, Homo sapiens
ataattatacattgt

SEQ ID NO: 1632383 - DNA, 15 bp, Homo sapiens
tataattatacattg

SEQ ID NO: 1632384 - DNA, 15 bp, Homo sapiens
atataattatacatt

SEQ ID NO: 1632385 - DNA, 15 bp, Homo sapiens
catataattatacat

SEQ ID NO: 1632386 - DNA, 15 bp, Homo sapiens
acatataattataca

SEQ ID NO: 1632387 - DNA, 15 bp, Homo sapiens
aacatataattatac

SEQ ID NO: 1632388 - DNA, 15 bp, Homo sapiens
aaacatataattata

SEQ ID NO: 1632389 - DNA, 15 bp, Homo sapiens
aaaacatataattat

SEQ ID NO: 1632390 - DNA, 15 bp, Homo sapiens
aaaaacatataatta

SEQ ID NO: 1632391 - DNA, 15 bp, Homo sapiens
aaaaaacatataatt

SEQ ID NO: 1632392 - DNA, 15 bp, Homo sapiens
aaaaaaacatataat

SEQ ID NO: 1632393 - DNA, 15 bp, Homo sapiens
aaaaaaaacatataa

SEQ ID NO: 1632394 - DNA, 15 bp, Homo sapiens
aaaaaaaaacatata

SEQ ID NO: 1632395 - DNA, 15 bp, Homo sapiens
aaaaaaaaaacatat

SEQ ID NO: 1632396 - DNA, 15 bp, Homo sapiens
aaaaaaaaaaacata

SEQ ID NO: 1632397 - DNA, 15 bp, Homo sapiens
aaaaaaaaaaaacat

SEQ ID NO: 1632398 - DNA, 15 bp, Homo sapiens
aaccaaaaaaaaaaa

SEQ ID NO: 1632399 - DNA, 15 bp, Homo sapiens
taaccaaaaaaaaaa

SEQ ID NO: 1632400 - DNA, 15 bp, Homo sapiens
ataaccaaaaaaaaa

SEQ ID NO: 1632401 - DNA, 15 bp, Homo sapiens
aataaccaaaaaaaa

SEQ ID NO: 1632402 - DNA, 15 bp, Homo sapiens
caataaccaaaaaaa

SEQ ID NO: 1632403 - DNA, 15 bp, Homo sapiens
gcaataaccaaaaaa

SEQ ID NO: 1632404 - DNA, 15 bp, Homo sapiens
ggcaataaccaaaaa

SEQ ID NO: 1632405 - DNA, 15 bp, Homo sapiens
aggcaataaccaaaa

SEQ ID NO: 1632406 - DNA, 15 bp, Homo sapiens
caggcaataaccaaa

SEQ ID NO: 1632407 - DNA, 15 bp, Homo sapiens
acaggcaataaccaa

SEQ ID NO: 1632408 - DNA, 15 bp, Homo sapiens
gacaggcaataacca

SEQ ID NO: 1632409 - DNA, 15 bp, Homo sapiens
agacaggcaataacc

SEQ ID NO: 1632410 - DNA, 15 bp, Homo sapiens
gagacaggcaataac

SEQ ID NO: 1632411 - DNA, 15 bp, Homo sapiens
ggagacaggcaataa

SEQ ID NO: 1632412 - DNA, 15 bp, Homo sapiens
gggagacaggcaata

SEQ ID NO: 1632413 - DNA, 15 bp, Homo sapiens
agggagacaggcaat

SEQ ID NO: 1632414 - DNA, 15 bp, Homo sapiens
gagggagacaggcaa

SEQ ID NO: 1632415 - DNA, 15 bp, Homo sapiens
tgagggagacaggca

SEQ ID NO: 1632416 - DNA, 15 bp, Homo sapiens
ttgagggagacaggc

SEQ ID NO: 1632417 - DNA, 15 bp, Homo sapiens
attgagggagacagg

SEQ ID NO: 1632418 - DNA, 15 bp, Homo sapiens
tattgagggagacag

SEQ ID NO: 1632419 - DNA, 15 bp, Homo sapiens
ctattgagggagaca

SEQ ID NO: 1632420 - DNA, 15 bp, Homo sapiens
tctattgagggagac

SEQ ID NO: 1632421 - DNA, 15 bp, Homo sapiens
atctattgagggaga

SEQ ID NO: 1632422 - DNA, 15 bp, Homo sapiens
gatctattgagggag

SEQ ID NO: 1632423 - DNA, 15 bp, Homo sapiens
tgatctattgaggga

SEQ ID NO: 1632424 - DNA, 15 bp, Homo sapiens
atgatctattgaggg

SEQ ID NO: 1632425 - DNA, 15 bp, Homo sapiens
tatgatctattgagg

SEQ ID NO: 1632426 - DNA, 15 bp, Homo sapiens
ttatgatctattgag

SEQ ID NO: 1632427 - DNA, 15 bp, Homo sapiens
cttatgatctattga

SEQ ID NO: 1632428 - DNA, 15 bp, Homo sapiens
acttatgatctattg

SEQ ID NO: 1632429 - DNA, 15 bp, Homo sapiens
aacttatgatctatt

SEQ ID NO: 1632430 - DNA, 15 bp, Homo sapiens
gaacttatgatctat

SEQ ID NO: 1632431 - DNA, 15 bp, Homo sapiens
ggaacttatgatcta

SEQ ID NO: 1632432 - DNA, 15 bp, Homo sapiens
tggaacttatgatct

SEQ ID NO: 1632433 - DNA, 15 bp, Homo sapiens
atggaacttatgatc

SEQ ID NO: 1632434 - DNA, 15 bp, Homo sapiens
aatggaacttatgat

SEQ ID NO: 1632435 - DNA, 15 bp, Homo sapiens
aaatggaacttatga

SEQ ID NO: 1632436 - DNA, 15 bp, Homo sapiens
caaatggaacttatg

SEQ ID NO: 1632437 - DNA, 15 bp, Homo sapiens
tcaaatggaacttat

SEQ ID NO: 1632438 - DNA, 15 bp, Homo sapiens
atcaaatggaactta

SEQ ID NO: 1632439 - DNA, 15 bp, Homo sapiens
tatcaaatggaactt

SEQ ID NO: 1632440 - DNA, 15 bp, Homo sapiens
ttatcaaatggaact

SEQ ID NO: 1632441 - DNA, 15 bp, Homo sapiens
cttatcaaatggaac

SEQ ID NO: 1632442 - DNA, 15 bp, Homo sapiens
ccttatcaaatggaa

SEQ ID NO: 1632443 - DNA, 15 bp, Homo sapiens
accttatcaaatgga

SEQ ID NO: 1632444 - DNA, 15 bp, Homo sapiens
taccttatcaaatgg

SEQ ID NO: 1632445 - DNA, 15 bp, Homo sapiens
gtaccttatcaaatg

SEQ ID NO: 1632446 - DNA, 15 bp, Homo sapiens
tgtaccttatcaaat

SEQ ID NO: 1632447 - DNA, 15 bp, Homo sapiens
ttgtaccttatcaaa

SEQ ID NO: 1632448 - DNA, 15 bp, Homo sapiens
attgtaccttatcaa

SEQ ID NO: 1632449 - DNA, 15 bp, Homo sapiens
cattgtaccttatca

SEQ ID NO: 1632450 - DNA, 15 bp, Homo sapiens
acattgtaccttatc

SEQ ID NO: 1632451 - DNA, 15 bp, Homo sapiens
gacattgtaccttat

SEQ ID NO: 1632452 - DNA, 15 bp, Homo sapiens
agacattgtacctta

SEQ ID NO: 1632453 - DNA, 15 bp, Homo sapiens
cagacattgtacctt

SEQ ID NO: 1632454 - DNA, 15 bp, Homo sapiens
acagacattgtacct

SEQ ID NO: 1632455 - DNA, 15 bp, Homo sapiens
aacagacattgtacc

SEQ ID NO: 1632456 - DNA, 15 bp, Homo sapiens
caacagacattgtac

SEQ ID NO: 1632457 - DNA, 15 bp, Homo sapiens
ccaacagacattgta

SEQ ID NO: 1632458 - DNA, 15 bp, Homo sapiens
accaacagacattgt

SEQ ID NO: 1632459 - DNA, 15 bp, Homo sapiens
aaccaacagacattg

SEQ ID NO: 1632460 - DNA, 15 bp, Homo sapiens
aaaccaacagacatt

SEQ ID NO: 1632461 - DNA, 15 bp, Homo sapiens
taaaccaacagacat

SEQ ID NO: 1632462 - DNA, 15 bp, Homo sapiens
ataaaccaacagaca

SEQ ID NO: 1632463 - DNA, 15 bp, Homo sapiens
aataaaccaacagac

SEQ ID NO: 1632464 - DNA, 15 bp, Homo sapiens
taataaaccaacaga

SEQ ID NO: 1632465 - DNA, 15 bp, Homo sapiens
ctaataaaccaacag

SEQ ID NO: 1632466 - DNA, 15 bp, Homo sapiens
gctaataaaccaaca

SEQ ID NO: 1632467 - DNA, 15 bp, Homo sapiens
ggctaataaaccaac

SEQ ID NO: 1632468 - DNA, 15 bp, Homo sapiens
tggctaataaaccaa

SEQ ID NO: 1632469 - DNA, 15 bp, Homo sapiens
ctggctaataaacca

SEQ ID NO: 1632470 - DNA, 15 bp, Homo sapiens
actggctaataaacc

SEQ ID NO: 1632471 - DNA, 15 bp, Homo sapiens
cactggctaataaac

SEQ ID NO: 1632472 - DNA, 15 bp, Homo sapiens
gcactggctaataaa

SEQ ID NO: 1632473 - DNA, 15 bp, Homo sapiens
ggcactggctaataa

SEQ ID NO: 1632474 - DNA, 15 bp, Homo sapiens
aggcactggctaata

SEQ ID NO: 1632475 - DNA, 15 bp, Homo sapiens
taggcactggctaat

SEQ ID NO: 1632476 - DNA, 15 bp, Homo sapiens
ttaggcactggctaa

SEQ ID NO: 1632477 - DNA, 15 bp, Homo sapiens
gttaggcactggcta

SEQ ID NO: 1632478 - DNA, 15 bp, Homo sapiens
tgttaggcactggct

SEQ ID NO: 1632479 - DNA, 15 bp, Homo sapiens
gtgttaggcactggc

SEQ ID NO: 1632480 - DNA, 15 bp, Homo sapiens
agtgttaggcactgg

SEQ ID NO: 1632481 - DNA, 15 bp, Homo sapiens
tagtgttaggcactg

SEQ ID NO: 1632482 - DNA, 15 bp, Homo sapiens
gtagtgttaggcact

SEQ ID NO: 1632483 - DNA, 15 bp, Homo sapiens
ggtagtgttaggcac

SEQ ID NO: 1632484 - DNA, 15 bp, Homo sapiens
tggtagtgttaggca

SEQ ID NO: 1632485 - DNA, 15 bp, Homo sapiens
atggtagtgttaggc

SEQ ID NO: 1632486 - DNA, 15 bp, Homo sapiens
aatggtagtgttagg

SEQ ID NO: 1632487 - DNA, 15 bp, Homo sapiens
aaatggtagtgttag

SEQ ID NO: 1632488 - DNA, 15 bp, Homo sapiens
taaatggtagtgtta

SEQ ID NO: 1632489 - DNA, 15 bp, Homo sapiens
ttaaatggtagtgtt

SEQ ID NO: 1632490 - DNA, 15 bp, Homo sapiens
attaaatggtagtgt

SEQ ID NO: 1632491 - DNA, 15 bp, Homo sapiens
tattaaatggtagtg

SEQ ID NO: 1632492 - DNA, 15 bp, Homo sapiens
atattaaatggtagt

SEQ ID NO: 1632493 - DNA, 15 bp, Homo sapiens
catattaaatggtag

SEQ ID NO: 1632494 - DNA, 15 bp, Homo sapiens
acatattaaatggta

SEQ ID NO: 1632495 - DNA, 15 bp, Homo sapiens
tacatattaaatggt

SEQ ID NO: 1632496 - DNA, 15 bp, Homo sapiens
atacatattaaatgg

SEQ ID NO: 1632497 - DNA, 15 bp, Homo sapiens
aatacatattaaatg

SEQ ID NO: 1632498 - DNA, 15 bp, Homo sapiens
gaatacatattaaat

SEQ ID NO: 1632499 - DNA, 15 bp, Homo sapiens
tgaatacatattaaa

SEQ ID NO: 1632500 - DNA, 15 bp, Homo sapiens
ttgaatacatattaa

SEQ ID NO: 1632501 - DNA, 15 bp, Homo sapiens
attgaatacatatta

SEQ ID NO: 1632502 - DNA, 15 bp, Homo sapiens
cattgaatacatatt

SEQ ID NO: 1632503 - DNA, 15 bp, Homo sapiens
tcattgaatacatat

SEQ ID NO: 1632504 - DNA, 15 bp, Homo sapiens
ttcattgaatacata

SEQ ID NO: 1632505 - DNA, 15 bp, Homo sapiens
attcattgaatacat

SEQ ID NO: 1632506 - DNA, 15 bp, Homo sapiens
tattcattgaataca

SEQ ID NO: 1632507 - DNA, 15 bp, Homo sapiens
atattcattgaatac

SEQ ID NO: 1632508 - DNA, 15 bp, Homo sapiens
aatattcattgaata

SEQ ID NO: 1632509 - DNA, 15 bp, Homo sapiens
aaatattcattgaat

SEQ ID NO: 1632510 - DNA, 15 bp, Homo sapiens
caaatattcattgaa

SEQ ID NO: 1632511 - DNA, 15 bp, Homo sapiens
acaaatattcattga

SEQ ID NO: 1632512 - DNA, 15 bp, Homo sapiens
aacaaatattcattg

SEQ ID NO: 1632513 - DNA, 15 bp, Homo sapiens
taacaaatattcatt

SEQ ID NO: 1632514 - DNA, 15 bp, Homo sapiens
ttaacaaatattcat

SEQ ID NO: 1632515 - DNA, 15 bp, Homo sapiens
tttaacaaatattca

SEQ ID NO: 1632516 - DNA, 15 bp, Homo sapiens
atttaacaaatattc

SEQ ID NO: 1632517 - DNA, 15 bp, Homo sapiens
catttaacaaatatt

SEQ ID NO: 1632518 - DNA, 15 bp, Homo sapiens
acatttaacaaatat

SEQ ID NO: 1632519 - DNA, 15 bp, Homo sapiens
tacatttaacaaata

SEQ ID NO: 1632520 - DNA, 15 bp, Homo sapiens
atacatttaacaaat

SEQ ID NO: 1632521 - DNA, 15 bp, Homo sapiens
aatacatttaacaaa

SEQ ID NO: 1632522 - DNA, 15 bp, Homo sapiens
caatacatttaacaa

SEQ ID NO: 1632523 - DNA, 15 bp, Homo sapiens
tcaatacatttaaca

SEQ ID NO: 1632524 - DNA, 15 bp, Homo sapiens
atcaatacatttaac

SEQ ID NO: 1632525 - DNA, 15 bp, Homo sapiens
aatcaatacatttaa

SEQ ID NO: 1632526 - DNA, 15 bp, Homo sapiens
caatcaatacattta

SEQ ID NO: 1632527 - DNA, 15 bp, Homo sapiens
tcaatcaatacattt

SEQ ID NO: 1632528 - DNA, 15 bp, Homo sapiens
ttcaatcaatacatt

SEQ ID NO: 1632529 - DNA, 15 bp, Homo sapiens
attcaatcaatacat

SEQ ID NO: 1632530 - DNA, 15 bp, Homo sapiens
aattcaatcaataca

SEQ ID NO: 1632531 - DNA, 15 bp, Homo sapiens
aaattcaatcaatac

SEQ ID NO: 1632532 - DNA, 15 bp, Homo sapiens
taaattcaatcaata

SEQ ID NO: 1632533 - DNA, 15 bp, Homo sapiens
ttaaattcaatcaat

SEQ ID NO: 1632534 - DNA, 15 bp, Homo sapiens
tttaaattcaatcaa

SEQ ID NO: 1632535 - DNA, 15 bp, Homo sapiens
ctttaaattcaatca

SEQ ID NO: 1632536 - DNA, 15 bp, Homo sapiens
actttaaattcaatc

SEQ ID NO: 1632537 - DNA, 15 bp, Homo sapiens
cactttaaattcaat

SEQ ID NO: 1632538 - DNA, 15 bp, Homo sapiens
tcactttaaattcaa

SEQ ID NO: 1632539 - DNA, 15 bp, Homo sapiens
gtcactttaaattca

SEQ ID NO: 1632540 - DNA, 15 bp, Homo sapiens
agtcactttaaattc

SEQ ID NO: 1632541 - DNA, 15 bp, Homo sapiens
tagtcactttaaatt

SEQ ID NO: 1632542 - DNA, 15 bp, Homo sapiens
gtagtcactttaaat

SEQ ID NO: 1632543 - DNA, 15 bp, Homo sapiens
agtagtcactttaaa

SEQ ID NO: 1632544 - DNA, 15 bp, Homo sapiens
gagtagtcactttaa

SEQ ID NO: 1632545 - DNA, 15 bp, Homo sapiens
tgagtagtcacttta

SEQ ID NO: 1632546 - DNA, 15 bp, Homo sapiens
ctgagtagtcacttt

SEQ ID NO: 1632547 - DNA, 15 bp, Homo sapiens
gctgagtagtcactt

SEQ ID NO: 1632548 - DNA, 15 bp, Homo sapiens
ggctgagtagtcact

SEQ ID NO: 1632549 - DNA, 15 bp, Homo sapiens
aggctgagtagtcac

SEQ ID NO: 1632550 - DNA, 15 bp, Homo sapiens
taggctgagtagtca

SEQ ID NO: 1632551 - DNA, 15 bp, Homo sapiens
gtaggctgagtagtc

SEQ ID NO: 1632552 - DNA, 15 bp, Homo sapiens
agtaggctgagtagt

SEQ ID NO: 1632553 - DNA, 15 bp, Homo sapiens
aagtaggctgagtag

SEQ ID NO: 1632554 - DNA, 15 bp, Homo sapiens
gaagtaggctgagta

SEQ ID NO: 1632555 - DNA, 15 bp, Homo sapiens
agaagtaggctgagt

SEQ ID NO: 1632556 - DNA, 15 bp, Homo sapiens
cagaagtaggctgag

SEQ ID NO: 1632557 - DNA, 15 bp, Homo sapiens
gcagaagtaggctga

SEQ ID NO: 1632558 - DNA, 15 bp, Homo sapiens
ggcagaagtaggctg

SEQ ID NO: 1632559 - DNA, 15 bp, Homo sapiens
gggcagaagtaggct

SEQ ID NO: 1632560 - DNA, 15 bp, Homo sapiens
ggggcagaagtaggc

SEQ ID NO: 1632561 - DNA, 15 bp, Homo sapiens
aggggcagaagtagg

SEQ ID NO: 1632562 - DNA, 15 bp, Homo sapiens
aaggggcagaagtag

SEQ ID NO: 1632563 - DNA, 15 bp, Homo sapiens
caaggggcagaagta

SEQ ID NO: 1632564 - DNA, 15 bp, Homo sapiens
ccaaggggcagaagt

SEQ ID NO: 1632565 - DNA, 15 bp, Homo sapiens
tccaaggggcagaag

SEQ ID NO: 1632566 - DNA, 15 bp, Homo sapiens
ctccaaggggcagaa

SEQ ID NO: 1632567 - DNA, 15 bp, Homo sapiens
gctccaaggggcaga

SEQ ID NO: 1632568 - DNA, 15 bp, Homo sapiens
agctccaaggggcag

SEQ ID NO: 1632569 - DNA, 15 bp, Homo sapiens
aagctccaaggggca

SEQ ID NO: 1632570 - DNA, 15 bp, Homo sapiens
caagctccaaggggc

SEQ ID NO: 1632571 - DNA, 15 bp, Homo sapiens
ccaagctccaagggg

SEQ ID NO: 1632572 - DNA, 15 bp, Homo sapiens
atccaagctccaagg

SEQ ID NO: 1632573 - DNA, 15 bp, Homo sapiens
aatccaagctccaag

SEQ ID NO: 1632574 - DNA, 15 bp, Homo sapiens
caatccaagctccaa

SEQ ID NO: 1632575 - DNA, 15 bp, Homo sapiens
acaatccaagctcca

SEQ ID NO: 1632576 - DNA, 15 bp, Homo sapiens
aacaatccaagctcc

SEQ ID NO: 1632577 - DNA, 15 bp, Homo sapiens
aaacaatccaagctc

SEQ ID NO: 1632578 - DNA, 15 bp, Homo sapiens
gaaacaatccaagct

SEQ ID NO: 1632579 - DNA, 15 bp, Homo sapiens
agaaacaatccaagc

SEQ ID NO: 1632580 - DNA, 15 bp, Homo sapiens
aagaaacaatccaag

SEQ ID NO: 1632581 - DNA, 15 bp, Homo sapiens
gaagaaacaatccaa

SEQ ID NO: 1632582 - DNA, 15 bp, Homo sapiens
tgaagaaacaatcca

SEQ ID NO: 1632583 - DNA, 15 bp, Homo sapiens
ttgaagaaacaatcc

SEQ ID NO: 1632584 - DNA, 15 bp, Homo sapiens
tttgaagaaacaatc

SEQ ID NO: 1632585 - DNA, 15 bp, Homo sapiens
ctttgaagaaacaat

SEQ ID NO: 1632586 - DNA, 15 bp, Homo sapiens
cctttgaagaaacaa

SEQ ID NO: 1632587 - DNA, 15 bp, Homo sapiens
acctttgaagaaaca

SEQ ID NO: 1632588 - DNA, 15 bp, Homo sapiens
tacctttgaagaaac

SEQ ID NO: 1632589 - DNA, 15 bp, Homo sapiens
atacctttgaagaaa

SEQ ID NO: 1632590 - DNA, 15 bp, Homo sapiens
aatacctttgaagaa

SEQ ID NO: 1632591 - DNA, 15 bp, Homo sapiens
caatacctttgaaga

SEQ ID NO: 1632592 - DNA, 15 bp, Homo sapiens
tcaatacctttgaag

SEQ ID NO: 1632593 - DNA, 15 bp, Homo sapiens
atcaatacctttgaa

SEQ ID NO: 1632594 - DNA, 15 bp, Homo sapiens
gatcaatacctttga

SEQ ID NO: 1632595 - DNA, 15 bp, Homo sapiens
ggatcaatacctttg

SEQ ID NO: 1632596 - DNA, 15 bp, Homo sapiens
aggatcaataccttt

SEQ ID NO: 1632597 - DNA, 15 bp, Homo sapiens
aaggatcaatacctt

SEQ ID NO: 1632598 - DNA, 15 bp, Homo sapiens
aaaggatcaatacct

SEQ ID NO: 1632599 - DNA, 15 bp, Homo sapiens
aaaaggatcaatacc

SEQ ID NO: 1632600 - DNA, 15 bp, Homo sapiens
caaaaggatcaatac

SEQ ID NO: 1632601 - DNA, 15 bp, Homo sapiens
tcaaaaggatcaata

SEQ ID NO: 1632602 - DNA, 15 bp, Homo sapiens
gtcaaaaggatcaat

SEQ ID NO: 1632603 - DNA, 15 bp, Homo sapiens
agtcaaaaggatcaa

SEQ ID NO: 1632604 - DNA, 15 bp, Homo sapiens
tagtcaaaaggatca

SEQ ID NO: 1632605 - DNA, 15 bp, Homo sapiens
atagtcaaaaggatc

SEQ ID NO: 1632606 - DNA, 15 bp, Homo sapiens
aatagtcaaaaggat

SEQ ID NO: 1632607 - DNA, 15 bp, Homo sapiens
aaatagtcaaaagga

SEQ ID NO: 1632608 - DNA, 15 bp, Homo sapiens
aaaatagtcaaaagg

SEQ ID NO: 1632609 - DNA, 15 bp, Homo sapiens
taaaatagtcaaaag

SEQ ID NO: 1632610 - DNA, 15 bp, Homo sapiens
ttaaaatagtcaaaa

SEQ ID NO: 1632611 - DNA, 15 bp, Homo sapiens
attaaaatagtcaaa

SEQ ID NO: 1632612 - DNA, 15 bp, Homo sapiens
aattaaaatagtcaa

SEQ ID NO: 1632613 - DNA, 15 bp, Homo sapiens
taattaaaatagtca

SEQ ID NO: 1632614 - DNA, 15 bp, Homo sapiens
ataattaaaatagtc

SEQ ID NO: 1632615 - DNA, 15 bp, Homo sapiens
cataattaaaatagt

SEQ ID NO: 1632616 - DNA, 15 bp, Homo sapiens
tcataattaaaatag

SEQ ID NO: 1632617 - DNA, 15 bp, Homo sapiens
ttcataattaaaata

SEQ ID NO: 1632618 - DNA, 15 bp, Homo sapiens
attcataattaaaat

SEQ ID NO: 1632619 - DNA, 15 bp, Homo sapiens
aattcataattaaaa

SEQ ID NO: 1632620 - DNA, 15 bp, Homo sapiens
gaattcataattaaa

SEQ ID NO: 1632621 - DNA, 15 bp, Homo sapiens
tgaattcataattaa

SEQ ID NO: 1632622 - DNA, 15 bp, Homo sapiens
gtgaattcataatta

SEQ ID NO: 1632623 - DNA, 15 bp, Homo sapiens
agtgaattcataatt

SEQ ID NO: 1632624 - DNA, 15 bp, Homo sapiens
tagtgaattcataat

SEQ ID NO: 1632625 - DNA, 15 bp, Homo sapiens
ttagtgaattcataa

SEQ ID NO: 1632626 - DNA, 15 bp, Homo sapiens
tttagtgaattcata

SEQ ID NO: 1632627 - DNA, 15 bp, Homo sapiens
ctttagtgaattcat

SEQ ID NO: 1632628 - DNA, 15 bp, Homo sapiens
tctttagtgaattca

SEQ ID NO: 1632629 - DNA, 15 bp, Homo sapiens
gtctttagtgaattc

SEQ ID NO: 1632630 - DNA, 15 bp, Homo sapiens
tgtctttagtgaatt

SEQ ID NO: 1632631 - DNA, 15 bp, Homo sapiens
atgtctttagtgaat

SEQ ID NO: 1632632 - DNA, 15 bp, Homo sapiens
gatgtctttagtgaa

SEQ ID NO: 1632633 - DNA, 15 bp, Homo sapiens
agatgtctttagtga

SEQ ID NO: 1632634 - DNA, 15 bp, Homo sapiens
cagatgtctttagtg

SEQ ID NO: 1632635 - DNA, 15 bp, Homo sapiens
ccagatgtctttagt

SEQ ID NO: 1632636 - DNA, 15 bp, Homo sapiens
tccagatgtctttag

SEQ ID NO: 1632637 - DNA, 15 bp, Homo sapiens
ttccagatgtcttta

SEQ ID NO: 1632638 - DNA, 15 bp, Homo sapiens
cttccagatgtcttt

SEQ ID NO: 1632639 - DNA, 15 bp, Homo sapiens
ccttccagatgtctt

SEQ ID NO: 1632640 - DNA, 15 bp, Homo sapiens
gccttccagatgtct

SEQ ID NO: 1632641 - DNA, 15 bp, Homo sapiens
agccttccagatgtc

SEQ ID NO: 1632642 - DNA, 15 bp, Homo sapiens
aagccttccagatgt

SEQ ID NO: 1632643 - DNA, 15 bp, Homo sapiens
taagccttccagatg

SEQ ID NO: 1632644 - DNA, 15 bp, Homo sapiens
ataagccttccagat

SEQ ID NO: 1632645 - DNA, 15 bp, Homo sapiens
aataagccttccaga

SEQ ID NO: 1632646 - DNA, 15 bp, Homo sapiens
caataagccttccag

SEQ ID NO: 1632647 - DNA, 15 bp, Homo sapiens
acaataagccttcca

SEQ ID NO: 1632648 - DNA, 15 bp, Homo sapiens
cacaataagccttcc

SEQ ID NO: 1632649 - DNA, 15 bp, Homo sapiens
acacaataagccttc

SEQ ID NO: 1632650 - DNA, 15 bp, Homo sapiens
gacacaataagcctt

SEQ ID NO: 1632651 - DNA, 15 bp, Homo sapiens
tgacacaataagcct

SEQ ID NO: 1632652 - DNA, 15 bp, Homo sapiens
ttgacacaataagcc

SEQ ID NO: 1632653 - DNA, 15 bp, Homo sapiens
cttgacacaataagc

SEQ ID NO: 1632654 - DNA, 15 bp, Homo sapiens
gcttgacacaataag

SEQ ID NO: 1632655 - DNA, 15 bp, Homo sapiens
tgcttgacacaataa

SEQ ID NO: 1632656 - DNA, 15 bp, Homo sapiens
ctgcttgacacaata

SEQ ID NO: 1632657 - DNA, 15 bp, Homo sapiens
actgcttgacacaat

SEQ ID NO: 1632658 - DNA, 15 bp, Homo sapiens
cactgcttgacacaa

SEQ ID NO: 1632659 - DNA, 15 bp, Homo sapiens
gcactgcttgacaca

SEQ ID NO: 1632660 - DNA, 15 bp, Homo sapiens
ggcactgcttgacac

SEQ ID NO: 1632661 - DNA, 15 bp, Homo sapiens
tggcactgcttgaca

SEQ ID NO: 1632662 - DNA, 15 bp, Homo sapiens
ttggcactgcttgac

SEQ ID NO: 1632663 - DNA, 15 bp, Homo sapiens
tttggcactgcttga

SEQ ID NO: 1632664 - DNA, 15 bp, Homo sapiens
atttggcactgcttg

SEQ ID NO: 1632665 - DNA, 15 bp, Homo sapiens
gatttggcactgctt

SEQ ID NO: 1632666 - DNA, 15 bp, Homo sapiens
ggatttggcactgct

SEQ ID NO: 1632667 - DNA, 15 bp, Homo sapiens
tggatttggcactgc

SEQ ID NO: 1632668 - DNA, 15 bp, Homo sapiens
atggatttggcactg

SEQ ID NO: 1632669 - DNA, 15 bp, Homo sapiens
catggatttggcact

SEQ ID NO: 1632670 - DNA, 15 bp, Homo sapiens
ccatggatttggcac

SEQ ID NO: 1632671 - DNA, 15 bp, Homo sapiens
gccatggatttggca

SEQ ID NO: 1632672 - DNA, 15 bp, Homo sapiens
agccatggatttggc

SEQ ID NO: 1632673 - DNA, 15 bp, Homo sapiens
aagccatggatttgg

SEQ ID NO: 1632674 - DNA, 15 bp, Homo sapiens
caagccatggatttg

SEQ ID NO: 1632675 - DNA, 15 bp, Homo sapiens
tcaagccatggattt

SEQ ID NO: 1632676 - DNA, 15 bp, Homo sapiens
atcaagccatggatt

SEQ ID NO: 1632677 - DNA, 15 bp, Homo sapiens
catcaagccatggat

SEQ ID NO: 1632678 - DNA, 15 bp, Homo sapiens
tcatcaagccatgga

SEQ ID NO: 1632679 - DNA, 15 bp, Homo sapiens
ttcatcaagccatgg

SEQ ID NO: 1632680 - DNA, 15 bp, Homo sapiens
gttcatcaagccatg

SEQ ID NO: 1632681 - DNA, 15 bp, Homo sapiens
ggttcatcaagccat

SEQ ID NO: 1632682 - DNA, 15 bp, Homo sapiens
aggttcatcaagcca

SEQ ID NO: 1632683 - DNA, 15 bp, Homo sapiens
taggttcatcaagcc

SEQ ID NO: 1632684 - DNA, 15 bp, Homo sapiens
ctaggttcatcaagc

SEQ ID NO: 1632685 - DNA, 15 bp, Homo sapiens
tctaggttcatcaag

SEQ ID NO: 1632686 - DNA, 15 bp, Homo sapiens
atctaggttcatcaa

SEQ ID NO: 1632687 - DNA, 15 bp, Homo sapiens
gatctaggttcatca

SEQ ID NO: 1632688 - DNA, 15 bp, Homo sapiens
ggatctaggttcatc

SEQ ID NO: 1632689 - DNA, 15 bp, Homo sapiens
tggatctaggttcat

SEQ ID NO: 1632690 - DNA, 15 bp, Homo sapiens
atggatctaggttca

SEQ ID NO: 1632691 - DNA, 15 bp, Homo sapiens
gatggatctaggttc

SEQ ID NO: 1632692 - DNA, 15 bp, Homo sapiens
ggatggatctaggtt

SEQ ID NO: 1632693 - DNA, 15 bp, Homo sapiens
gggatggatctaggt

SEQ ID NO: 1632694 - DNA, 15 bp, Homo sapiens
ggggatggatctagg

SEQ ID NO: 1632695 - DNA, 15 bp, Homo sapiens
aggggatggatctag

SEQ ID NO: 1632696 - DNA, 15 bp, Homo sapiens
aaggggatggatcta

SEQ ID NO: 1632697 - DNA, 15 bp, Homo sapiens
gaaggggatggatct

SEQ ID NO: 1632698 - DNA, 15 bp, Homo sapiens
ggaaggggatggatc

SEQ ID NO: 1632699 - DNA, 15 bp, Homo sapiens
gggaaggggatggat

SEQ ID NO: 1632700 - DNA, 15 bp, Homo sapiens
ggggaaggggatgga

SEQ ID NO: 1632701 - DNA, 15 bp, Homo sapiens
aggggaaggggatgg

SEQ ID NO: 1632702 - DNA, 15 bp, Homo sapiens
aaggggaaggggatg

SEQ ID NO: 1632703 - DNA, 15 bp, Homo sapiens
aaaggggaaggggat

SEQ ID NO: 1632704 - DNA, 15 bp, Homo sapiens
gaaaggggaagggga

SEQ ID NO: 1632705 - DNA, 15 bp, Homo sapiens
ggaaaggggaagggg

SEQ ID NO: 1632706 - DNA, 15 bp, Homo sapiens
tggaaaggggaaggg

SEQ ID NO: 1632707 - DNA, 15 bp, Homo sapiens
atggaaaggggaagg

SEQ ID NO: 1632708 - DNA, 15 bp, Homo sapiens
tatggaaaggggaag

SEQ ID NO: 1632709 - DNA, 15 bp, Homo sapiens
atatggaaaggggaa

SEQ ID NO: 1632710 - DNA, 15 bp, Homo sapiens
gatatggaaagggga

SEQ ID NO: 1632711 - DNA, 15 bp, Homo sapiens
tgatatggaaagggg

SEQ ID NO: 1632712 - DNA, 15 bp, Homo sapiens
gtgatatggaaaggg

SEQ ID NO: 1632713 - DNA, 15 bp, Homo sapiens
tgtgatatggaaagg

SEQ ID NO: 1632714 - DNA, 15 bp, Homo sapiens
ctgtgatatggaaag

SEQ ID NO: 1632715 - DNA, 15 bp, Homo sapiens
tctgtgatatggaaa

SEQ ID NO: 1632716 - DNA, 15 bp, Homo sapiens
atctgtgatatggaa

SEQ ID NO: 1632717 - DNA, 15 bp, Homo sapiens
catctgtgatatgga

SEQ ID NO: 1632718 - DNA, 15 bp, Homo sapiens
tcatctgtgatatgg

SEQ ID NO: 1632719 - DNA, 15 bp, Homo sapiens
gtcatctgtgatatg

SEQ ID NO: 1632720 - DNA, 15 bp, Homo sapiens
tgtcatctgtgatat

SEQ ID NO: 1632721 - DNA, 15 bp, Homo sapiens
ttgtcatctgtgata

SEQ ID NO: 1632722 - DNA, 15 bp, Homo sapiens
gttgtcatctgtgat

SEQ ID NO: 1632723 - DNA, 15 bp, Homo sapiens
agttgtcatctgtga

SEQ ID NO: 1632724 - DNA, 15 bp, Homo sapiens
aagttgtcatctgtg

SEQ ID NO: 1632725 - DNA, 15 bp, Homo sapiens
caagttgtcatctgt

SEQ ID NO: 1632726 - DNA, 15 bp, Homo sapiens
tcaagttgtcatctg

SEQ ID NO: 1632727 - DNA, 15 bp, Homo sapiens
atcaagttgtcatct

SEQ ID NO: 1632728 - DNA, 15 bp, Homo sapiens
catcaagttgtcatc

SEQ ID NO: 1632729 - DNA, 15 bp, Homo sapiens
ccatcaagttgtcat

SEQ ID NO: 1632730 - DNA, 15 bp, Homo sapiens
accatcaagttgtca

SEQ ID NO: 1632731 - DNA, 15 bp, Homo sapiens
aaccatcaagttgtc

SEQ ID NO: 1632732 - DNA, 15 bp, Homo sapiens
caaccatcaagttgt

SEQ ID NO: 1632733 - DNA, 15 bp, Homo sapiens
ccaaccatcaagttg

SEQ ID NO: 1632734 - DNA, 15 bp, Homo sapiens
gccaaccatcaagtt

SEQ ID NO: 1632735 - DNA, 15 bp, Homo sapiens
ggccaaccatcaagt

SEQ ID NO: 1632736 - DNA, 15 bp, Homo sapiens
aggccaaccatcaag

SEQ ID NO: 1632737 - DNA, 15 bp, Homo sapiens
taggccaaccatcaa

SEQ ID NO: 1632738 - DNA, 15 bp, Homo sapiens
ataggccaaccatca

SEQ ID NO: 1632739 - DNA, 15 bp, Homo sapiens
cataggccaaccatc

SEQ ID NO: 1632740 - DNA, 15 bp, Homo sapiens
tcataggccaaccat

SEQ ID NO: 1632741 - DNA, 15 bp, Homo sapiens
gtcataggccaacca

SEQ ID NO: 1632742 - DNA, 15 bp, Homo sapiens
agtcataggccaacc

SEQ ID NO: 1632743 - DNA, 15 bp, Homo sapiens
aagtcataggccaac

SEQ ID NO: 1632744 - DNA, 15 bp, Homo sapiens
caagtcataggccaa

SEQ ID NO: 1632745 - DNA, 15 bp, Homo sapiens
acaagtcataggcca

SEQ ID NO: 1632746 - DNA, 15 bp, Homo sapiens
tacaagtcataggcc

SEQ ID NO: 1632747 - DNA, 15 bp, Homo sapiens
ttacaagtcataggc

SEQ ID NO: 1632748 - DNA, 15 bp, Homo sapiens
tttacaagtcatagg

SEQ ID NO: 1632749 - DNA, 15 bp, Homo sapiens
ttttacaagtcatag

SEQ ID NO: 1632750 - DNA, 15 bp, Homo sapiens
cttttacaagtcata

SEQ ID NO: 1632751 - DNA, 15 bp, Homo sapiens
acttttacaagtcat

SEQ ID NO: 1632752 - DNA, 15 bp, Homo sapiens
aacttttacaagtca

SEQ ID NO: 1632753 - DNA, 15 bp, Homo sapiens
caacttttacaagtc

SEQ ID NO: 1632754 - DNA, 15 bp, Homo sapiens
acaacttttacaagt

SEQ ID NO: 1632755 - DNA, 15 bp, Homo sapiens
gacaacttttacaag

SEQ ID NO: 1632756 - DNA, 15 bp, Homo sapiens
tgacaacttttacaa

SEQ ID NO: 1632757 - DNA, 15 bp, Homo sapiens
atgacaacttttaca

SEQ ID NO: 1632758 - DNA, 15 bp, Homo sapiens
tatgacaacttttac

SEQ ID NO: 1632759 - DNA, 15 bp, Homo sapiens
atatgacaactttta

SEQ ID NO: 1632760 - DNA, 15 bp, Homo sapiens
aatatgacaactttt

SEQ ID NO: 1632761 - DNA, 15 bp, Homo sapiens
aaatatgacaacttt

SEQ ID NO: 1632762 - DNA, 15 bp, Homo sapiens
caaatatgacaactt

SEQ ID NO: 1632763 - DNA, 15 bp, Homo sapiens
tcaaatatgacaact

SEQ ID NO: 1632764 - DNA, 15 bp, Homo sapiens
ttcaaatatgacaac

SEQ ID NO: 1632765 - DNA, 15 bp, Homo sapiens
attcaaatatgacaa

SEQ ID NO: 1632766 - DNA, 15 bp, Homo sapiens
aattcaaatatgaca

SEQ ID NO: 1632767 - DNA, 15 bp, Homo sapiens
gaattcaaatatgac

SEQ ID NO: 1632768 - DNA, 15 bp, Homo sapiens
agaattcaaatatga

SEQ ID NO: 1632769 - DNA, 15 bp, Homo sapiens
cagaattcaaatatg

SEQ ID NO: 1632770 - DNA, 15 bp, Homo sapiens
tcagaattcaaatat

SEQ ID NO: 1632771 - DNA, 15 bp, Homo sapiens
ttcagaattcaaata

SEQ ID NO: 1632772 - DNA, 15 bp, Homo sapiens
tttcagaattcaaat

SEQ ID NO: 1632773 - DNA, 15 bp, Homo sapiens
atttcagaattcaaa

SEQ ID NO: 1632774 - DNA, 15 bp, Homo sapiens
aatttcagaattcaa

SEQ ID NO: 1632775 - DNA, 15 bp, Homo sapiens
aaatttcagaattca

SEQ ID NO: 1632776 - DNA, 15 bp, Homo sapiens
gaaatttcagaattc

SEQ ID NO: 1632777 - DNA, 15 bp, Homo sapiens
agaaatttcagaatt

SEQ ID NO: 1632778 - DNA, 15 bp, Homo sapiens
gagaaatttcagaat

SEQ ID NO: 1632779 - DNA, 15 bp, Homo sapiens
agagaaatttcagaa

SEQ ID NO: 1632780 - DNA, 15 bp, Homo sapiens
tagagaaatttcaga

SEQ ID NO: 1632781 - DNA, 15 bp, Homo sapiens
ttagagaaatttcag

SEQ ID NO: 1632782 - DNA, 15 bp, Homo sapiens
attagagaaatttca

SEQ ID NO: 1632783 - DNA, 15 bp, Homo sapiens
aattagagaaatttc

SEQ ID NO: 1632784 - DNA, 15 bp, Homo sapiens
aaattagagaaattt

SEQ ID NO: 1632785 - DNA, 15 bp, Homo sapiens
aaaattagagaaatt

SEQ ID NO: 1632786 - DNA, 15 bp, Homo sapiens
gaaaattagagaaat

SEQ ID NO: 1632787 - DNA, 15 bp, Homo sapiens
agaaaattagagaaa

SEQ ID NO: 1632788 - DNA, 15 bp, Homo sapiens
aagaaaattagagaa

SEQ ID NO: 1632789 - DNA, 15 bp, Homo sapiens
caagaaaattagaga

SEQ ID NO: 1632790 - DNA, 15 bp, Homo sapiens
ccaagaaaattagag

SEQ ID NO: 1632791 - DNA, 15 bp, Homo sapiens
cccaagaaaattaga

SEQ ID NO: 1632792 - DNA, 15 bp, Homo sapiens
tcccaagaaaattag

SEQ ID NO: 1632793 - DNA, 15 bp, Homo sapiens
ttcccaagaaaatta

SEQ ID NO: 1632794 - DNA, 15 bp, Homo sapiens
cttcccaagaaaatt

SEQ ID NO: 1632795 - DNA, 15 bp, Homo sapiens
gcttcccaagaaaat

SEQ ID NO: 1632796 - DNA, 15 bp, Homo sapiens
tgcttcccaagaaaa

SEQ ID NO: 1632797 - DNA, 15 bp, Homo sapiens
ctgcttcccaagaaa

SEQ ID NO: 1632798 - DNA, 15 bp, Homo sapiens
tctgcttcccaagaa

SEQ ID NO: 1632799 - DNA, 15 bp, Homo sapiens
ttctgcttcccaaga

SEQ ID NO: 1632800 - DNA, 15 bp, Homo sapiens
tttctgcttcccaag

SEQ ID NO: 1632801 - DNA, 15 bp, Homo sapiens
ctttctgcttcccaa

SEQ ID NO: 1632802 - DNA, 15 bp, Homo sapiens
cctttctgcttccca

SEQ ID NO: 1632803 - DNA, 15 bp, Homo sapiens
tcctttctgcttccc

SEQ ID NO: 1632804 - DNA, 15 bp, Homo sapiens
ttcctttctgcttcc

SEQ ID NO: 1632805 - DNA, 15 bp, Homo sapiens
tttcctttctgcttc

SEQ ID NO: 1632806 - DNA, 15 bp, Homo sapiens
ttttcctttctgctt

SEQ ID NO: 1632807 - DNA, 15 bp, Homo sapiens
tttttcctttctgct

SEQ ID NO: 1632808 - DNA, 15 bp, Homo sapiens
atttttcctttctgc

SEQ ID NO: 1632809 - DNA, 15 bp, Homo sapiens
aatttttcctttctg

SEQ ID NO: 1632810 - DNA, 15 bp, Homo sapiens
taatttttcctttct

SEQ ID NO: 1632811 - DNA, 15 bp, Homo sapiens
ctaatttttcctttc

SEQ ID NO: 1632812 - DNA, 15 bp, Homo sapiens
actaatttttccttt

SEQ ID NO: 1632813 - DNA, 15 bp, Homo sapiens
tactaatttttcctt

SEQ ID NO: 1632814 - DNA, 15 bp, Homo sapiens
ctactaatttttcct

SEQ ID NO: 1632815 - DNA, 15 bp, Homo sapiens
actactaatttttcc

SEQ ID NO: 1632816 - DNA, 15 bp, Homo sapiens
aactactaatttttc

SEQ ID NO: 1632817 - DNA, 15 bp, Homo sapiens
caactactaattttt

SEQ ID NO: 1632818 - DNA, 15 bp, Homo sapiens
ccaactactaatttt

SEQ ID NO: 1632819 - DNA, 15 bp, Homo sapiens
gccaactactaattt

SEQ ID NO: 1632820 - DNA, 15 bp, Homo sapiens
ggccaactactaatt

SEQ ID NO: 1632821 - DNA, 15 bp, Homo sapiens
aggccaactactaat

SEQ ID NO: 1632822 - DNA, 15 bp, Homo sapiens
gaggccaactactaa

SEQ ID NO: 1632823 - DNA, 15 bp, Homo sapiens
tgaggccaactacta

SEQ ID NO: 1632824 - DNA, 15 bp, Homo sapiens
ttgaggccaactact

SEQ ID NO: 1632825 - DNA, 15 bp, Homo sapiens
tttgaggccaactac

SEQ ID NO: 1632826 - DNA, 15 bp, Homo sapiens
ctttgaggccaacta

SEQ ID NO: 1632827 - DNA, 15 bp, Homo sapiens
cctttgaggccaact

SEQ ID NO: 1632828 - DNA, 15 bp, Homo sapiens
ccctttgaggccaac

SEQ ID NO: 1632829 - DNA, 15 bp, Homo sapiens
tccctttgaggccaa

SEQ ID NO: 1632830 - DNA, 15 bp, Homo sapiens
gtccctttgaggcca

SEQ ID NO: 1632831 - DNA, 15 bp, Homo sapiens
tgtccctttgaggcc

SEQ ID NO: 1632832 - DNA, 15 bp, Homo sapiens
ctgtccctttgaggc

SEQ ID NO: 1632833 - DNA, 15 bp, Homo sapiens
actgtccctttgagg

SEQ ID NO: 1632834 - DNA, 15 bp, Homo sapiens
aactgtccctttgag

SEQ ID NO: 1632835 - DNA, 15 bp, Homo sapiens
caactgtccctttga

SEQ ID NO: 1632836 - DNA, 15 bp, Homo sapiens
tcaactgtccctttg

SEQ ID NO: 1632837 - DNA, 15 bp, Homo sapiens
ttcaactgtcccttt

SEQ ID NO: 1632838 - DNA, 15 bp, Homo sapiens
attcaactgtccctt

SEQ ID NO: 1632839 - DNA, 15 bp, Homo sapiens
aattcaactgtccct

SEQ ID NO: 1632840 - DNA, 15 bp, Homo sapiens
aaattcaactgtccc

SEQ ID NO: 1632841 - DNA, 15 bp, Homo sapiens
gaaattcaactgtcc

SEQ ID NO: 1632842 - DNA, 15 bp, Homo sapiens
tgaaattcaactgtc

SEQ ID NO: 1632843 - DNA, 15 bp, Homo sapiens
gtgaaattcaactgt

SEQ ID NO: 1632844 - DNA, 15 bp, Homo sapiens
tgtgaaattcaactg

SEQ ID NO: 1632845 - DNA, 15 bp, Homo sapiens
atgtgaaattcaact

SEQ ID NO: 1632846 - DNA, 15 bp, Homo sapiens
tatgtgaaattcaac

SEQ ID NO: 1632847 - DNA, 15 bp, Homo sapiens
atatgtgaaattcaa

SEQ ID NO: 1632848 - DNA, 15 bp, Homo sapiens
tatatgtgaaattca

SEQ ID NO: 1632849 - DNA, 15 bp, Homo sapiens
ttatatgtgaaattc

SEQ ID NO: 1632850 - DNA, 15 bp, Homo sapiens
attatatgtgaaatt

SEQ ID NO: 1632851 - DNA, 15 bp, Homo sapiens
cattatatgtgaaat

SEQ ID NO: 1632852 - DNA, 15 bp, Homo sapiens
tcattatatgtgaaa

SEQ ID NO: 1632853 - DNA, 15 bp, Homo sapiens
ctcattatatgtgaa

SEQ ID NO: 1632854 - DNA, 15 bp, Homo sapiens
gctcattatatgtga

SEQ ID NO: 1632855 - DNA, 15 bp, Homo sapiens
tgctcattatatgtg

SEQ ID NO: 1632856 - DNA, 15 bp, Homo sapiens
ttgctcattatatgt

SEQ ID NO: 1632857 - DNA, 15 bp, Homo sapiens
tttgctcattatatg

SEQ ID NO: 1632858 - DNA, 15 bp, Homo sapiens
ctttgctcattatat

SEQ ID NO: 1632859 - DNA, 15 bp, Homo sapiens
actttgctcattata

SEQ ID NO: 1632860 - DNA, 15 bp, Homo sapiens
tactttgctcattat

SEQ ID NO: 1632861 - DNA, 15 bp, Homo sapiens
ctactttgctcatta

SEQ ID NO: 1632862 - DNA, 15 bp, Homo sapiens
actactttgctcatt

SEQ ID NO: 1632863 - DNA, 15 bp, Homo sapiens
cactactttgctcat

SEQ ID NO: 1632864 - DNA, 15 bp, Homo sapiens
acactactttgctca

SEQ ID NO: 1632865 - DNA, 15 bp, Homo sapiens
cacactactttgctc

SEQ ID NO: 1632866 - DNA, 15 bp, Homo sapiens
tcacactactttgct

SEQ ID NO: 1632867 - DNA, 15 bp, Homo sapiens
ctcacactactttgc

SEQ ID NO: 1632868 - DNA, 15 bp, Homo sapiens
cctcacactactttg

SEQ ID NO: 1632869 - DNA, 15 bp, Homo sapiens
tcctcacactacttt

SEQ ID NO: 1632870 - DNA, 15 bp, Homo sapiens
ttcctcacactactt

SEQ ID NO: 1632871 - DNA, 15 bp, Homo sapiens
cttcctcacactact

SEQ ID NO: 1632872 - DNA, 15 bp, Homo sapiens
tcttcctcacactac

SEQ ID NO: 1632873 - DNA, 15 bp, Homo sapiens
ctcttcctcacacta

SEQ ID NO: 1632874 - DNA, 15 bp, Homo sapiens
tctcttcctcacact

SEQ ID NO: 1632875 - DNA, 15 bp, Homo sapiens
ctctcttcctcacac

SEQ ID NO: 1632876 - DNA, 15 bp, Homo sapiens
cctctcttcctcaca

SEQ ID NO: 1632877 - DNA, 15 bp, Homo sapiens
tcctctcttcctcac

SEQ ID NO: 1632878 - DNA, 15 bp, Homo sapiens
ctcctctcttcctca

SEQ ID NO: 1632879 - DNA, 15 bp, Homo sapiens
cctcctctcttcctc

SEQ ID NO: 1632880 - DNA, 15 bp, Homo sapiens
ccctcctctcttcct

SEQ ID NO: 1632881 - DNA, 15 bp, Homo sapiens
gccctcctctcttcc

SEQ ID NO: 1632882 - DNA, 15 bp, Homo sapiens
ggccctcctctcttc

SEQ ID NO: 1632883 - DNA, 15 bp, Homo sapiens
aggccctcctctctt

SEQ ID NO: 1632884 - DNA, 15 bp, Homo sapiens
aaggccctcctctct

SEQ ID NO: 1632885 - DNA, 15 bp, Homo sapiens
aaaggccctcctctc

SEQ ID NO: 1632886 - DNA, 15 bp, Homo sapiens
aaaaggccctcctct

SEQ ID NO: 1632887 - DNA, 15 bp, Homo sapiens
gaaaaggccctcctc

SEQ ID NO: 1632888 - DNA, 15 bp, Homo sapiens
agaaaaggccctcct

SEQ ID NO: 1632889 - DNA, 15 bp, Homo sapiens
aagaaaaggccctcc

SEQ ID NO: 1632890 - DNA, 15 bp, Homo sapiens
aaagaaaaggccctc

SEQ ID NO: 1632891 - DNA, 15 bp, Homo sapiens
aaaagaaaaggccct

SEQ ID NO: 1632892 - DNA, 15 bp, Homo sapiens
caaaagaaaaggccc

SEQ ID NO: 1632893 - DNA, 15 bp, Homo sapiens
tcaaaagaaaaggcc

SEQ ID NO: 1632894 - DNA, 15 bp, Homo sapiens
ctcaaaagaaaaggc

SEQ ID NO: 1632895 - DNA, 15 bp, Homo sapiens
cctcaaaagaaaagg

SEQ ID NO: 1632896 - DNA, 15 bp, Homo sapiens
acctcaaaagaaaag

SEQ ID NO: 1632897 - DNA, 15 bp, Homo sapiens
gacctcaaaagaaaa

SEQ ID NO: 1632898 - DNA, 15 bp, Homo sapiens
tgacctcaaaagaaa

SEQ ID NO: 1632899 - DNA, 15 bp, Homo sapiens
atgacctcaaaagaa

SEQ ID NO: 1632900 - DNA, 15 bp, Homo sapiens
tatgacctcaaaaga

SEQ ID NO: 1632901 - DNA, 15 bp, Homo sapiens
ttatgacctcaaaag

SEQ ID NO: 1632902 - DNA, 15 bp, Homo sapiens
gttatgacctcaaaa

SEQ ID NO: 1632903 - DNA, 15 bp, Homo sapiens
agttatgacctcaaa

SEQ ID NO: 1632904 - DNA, 15 bp, Homo sapiens
tagttatgacctcaa

SEQ ID NO: 1632905 - DNA, 15 bp, Homo sapiens
ttagttatgacctca

SEQ ID NO: 1632906 - DNA, 15 bp, Homo sapiens
tttagttatgacctc

SEQ ID NO: 1632907 - DNA, 15 bp, Homo sapiens
ttttagttatgacct

SEQ ID NO: 1632908 - DNA, 15 bp, Homo sapiens
cttttagttatgacc

SEQ ID NO: 1632909 - DNA, 15 bp, Homo sapiens
acttttagttatgac

SEQ ID NO: 1632910 - DNA, 15 bp, Homo sapiens
aacttttagttatga

SEQ ID NO: 1632911 - DNA, 15 bp, Homo sapiens
taacttttagttatg

SEQ ID NO: 1632912 - DNA, 15 bp, Homo sapiens
ctaacttttagttat

SEQ ID NO: 1632913 - DNA, 15 bp, Homo sapiens
cctaacttttagtta

SEQ ID NO: 1632914 - DNA, 15 bp, Homo sapiens
acctaacttttagtt

SEQ ID NO: 1632915 - DNA, 15 bp, Homo sapiens
cacctaacttttagt

SEQ ID NO: 1632916 - DNA, 15 bp, Homo sapiens
tcacctaacttttag

SEQ ID NO: 1632917 - DNA, 15 bp, Homo sapiens
ctcacctaactttta

SEQ ID NO: 1632918 - DNA, 15 bp, Homo sapiens
gctcacctaactttt

SEQ ID NO: 1632919 - DNA, 15 bp, Homo sapiens
tgctcacctaacttt

SEQ ID NO: 1632920 - DNA, 15 bp, Homo sapiens
ttgctcacctaactt

SEQ ID NO: 1632921 - DNA, 15 bp, Homo sapiens
tttgctcacctaact

SEQ ID NO: 1632922 - DNA, 15 bp, Homo sapiens
atttgctcacctaac

SEQ ID NO: 1632923 - DNA, 15 bp, Homo sapiens
catttgctcacctaa

SEQ ID NO: 1632924 - DNA, 15 bp, Homo sapiens
gcatttgctcaccta

SEQ ID NO: 1632925 - DNA, 15 bp, Homo sapiens
ggcatttgctcacct

SEQ ID NO: 1632926 - DNA, 15 bp, Homo sapiens
tggcatttgctcacc

SEQ ID NO: 1632927 - DNA, 15 bp, Homo sapiens
atggcatttgctcac

SEQ ID NO: 1632928 - DNA, 15 bp, Homo sapiens
tatggcatttgctca

SEQ ID NO: 1632929 - DNA, 15 bp, Homo sapiens
ttatggcatttgctc

SEQ ID NO: 1632930 - DNA, 15 bp, Homo sapiens
cttatggcatttgct

SEQ ID NO: 1632931 - DNA, 15 bp, Homo sapiens
gcttatggcatttgc

SEQ ID NO: 1632932 - DNA, 15 bp, Homo sapiens
tgcttatggcatttg

SEQ ID NO: 1632933 - DNA, 15 bp, Homo sapiens
atgcttatggcattt

SEQ ID NO: 1632934 - DNA, 15 bp, Homo sapiens
catgcttatggcatt

SEQ ID NO: 1632935 - DNA, 15 bp, Homo sapiens
tcatgcttatggcat

SEQ ID NO: 1632936 - DNA, 15 bp, Homo sapiens
ttcatgcttatggca

SEQ ID NO: 1632937 - DNA, 15 bp, Homo sapiens
tttcatgcttatggc

SEQ ID NO: 1632938 - DNA, 15 bp, Homo sapiens
ttttcatgcttatgg

SEQ ID NO: 1632939 - DNA, 15 bp, Homo sapiens
attttcatgcttatg

SEQ ID NO: 1632940 - DNA, 15 bp, Homo sapiens
tattttcatgcttat

SEQ ID NO: 1632941 - DNA, 15 bp, Homo sapiens
ctattttcatgctta

SEQ ID NO: 1632942 - DNA, 15 bp, Homo sapiens
gctattttcatgctt

SEQ ID NO: 1632943 - DNA, 15 bp, Homo sapiens
tgctattttcatgct

SEQ ID NO: 1632944 - DNA, 15 bp, Homo sapiens
ttgctattttcatgc

SEQ ID NO: 1632945 - DNA, 15 bp, Homo sapiens
tttgctattttcatg

SEQ ID NO: 1632946 - DNA, 15 bp, Homo sapiens
gtttgctattttcat

SEQ ID NO: 1632947 - DNA, 15 bp, Homo sapiens
ggtttgctattttca

SEQ ID NO: 1632948 - DNA, 15 bp, Homo sapiens
tggtttgctattttc

SEQ ID NO: 1632949 - DNA, 15 bp, Homo sapiens
ttggtttgctatttt

SEQ ID NO: 1632950 - DNA, 15 bp, Homo sapiens
cttggtttgctattt

SEQ ID NO: 1632951 - DNA, 15 bp, Homo sapiens
gcttggtttgctatt

SEQ ID NO: 1632952 - DNA, 15 bp, Homo sapiens
agcttggtttgctat

SEQ ID NO: 1632953 - DNA, 15 bp, Homo sapiens
aagcttggtttgcta

SEQ ID NO: 1632954 - DNA, 15 bp, Homo sapiens
gaagcttggtttgct

SEQ ID NO: 1632955 - DNA, 15 bp, Homo sapiens
agaagcttggtttgc

SEQ ID NO: 1632956 - DNA, 15 bp, Homo sapiens
aagaagcttggtttg

SEQ ID NO: 1632957 - DNA, 15 bp, Homo sapiens
caagaagcttggttt

SEQ ID NO: 1632958 - DNA, 15 bp, Homo sapiens
ccaagaagcttggtt

SEQ ID NO: 1632959 - DNA, 15 bp, Homo sapiens
accaagaagcttggt

SEQ ID NO: 1632960 - DNA, 15 bp, Homo sapiens
aaccaagaagcttgg

SEQ ID NO: 1632961 - DNA, 15 bp, Homo sapiens
aaaccaagaagcttg

SEQ ID NO: 1632962 - DNA, 15 bp, Homo sapiens
gaaaccaagaagctt

SEQ ID NO: 1632963 - DNA, 15 bp, Homo sapiens
agaaaccaagaagct

SEQ ID NO: 1632964 - DNA, 15 bp, Homo sapiens
tagaaaccaagaagc

SEQ ID NO: 1632965 - DNA, 15 bp, Homo sapiens
atagaaaccaagaag

SEQ ID NO: 1632966 - DNA, 15 bp, Homo sapiens
gatagaaaccaagaa

SEQ ID NO: 1632967 - DNA, 15 bp, Homo sapiens
ggatagaaaccaaga

SEQ ID NO: 1632968 - DNA, 15 bp, Homo sapiens
tggatagaaaccaag

SEQ ID NO: 1632969 - DNA, 15 bp, Homo sapiens
ttggatagaaaccaa

SEQ ID NO: 1632970 - DNA, 15 bp, Homo sapiens
tttggatagaaacca

SEQ ID NO: 1632971 - DNA, 15 bp, Homo sapiens
ctttggatagaaacc

SEQ ID NO: 1632972 - DNA, 15 bp, Homo sapiens
cctttggatagaaac

SEQ ID NO: 1632973 - DNA, 15 bp, Homo sapiens
gcctttggatagaaa

SEQ ID NO: 1632974 - DNA, 15 bp, Homo sapiens
agcctttggatagaa

SEQ ID NO: 1632975 - DNA, 15 bp, Homo sapiens
aagcctttggataga

SEQ ID NO: 1632976 - DNA, 15 bp, Homo sapiens
aaagcctttggatag

SEQ ID NO: 1632977 - DNA, 15 bp, Homo sapiens
caaagcctttggata

SEQ ID NO: 1632978 - DNA, 15 bp, Homo sapiens
acaaagcctttggat

SEQ ID NO: 1632979 - DNA, 15 bp, Homo sapiens
aacaaagcctttgga

SEQ ID NO: 1632980 - DNA, 15 bp, Homo sapiens
caacaaagcctttgg

SEQ ID NO: 1632981 - DNA, 15 bp, Homo sapiens
ccaacaaagcctttg

SEQ ID NO: 1632982 - DNA, 15 bp, Homo sapiens
cccaacaaagccttt

SEQ ID NO: 1632983 - DNA, 15 bp, Homo sapiens
tcccaacaaagcctt

SEQ ID NO: 1632984 - DNA, 15 bp, Homo sapiens
ttcccaacaaagcct

SEQ ID NO: 1632985 - DNA, 15 bp, Homo sapiens
tttcccaacaaagcc

SEQ ID NO: 1632986 - DNA, 15 bp, Homo sapiens
ttttcccaacaaagc

SEQ ID NO: 1632987 - DNA, 15 bp, Homo sapiens
cttttcccaacaaag

SEQ ID NO: 1632988 - DNA, 15 bp, Homo sapiens
acttttcccaacaaa

SEQ ID NO: 1632989 - DNA, 15 bp, Homo sapiens
tacttttcccaacaa

SEQ ID NO: 1632990 - DNA, 15 bp, Homo sapiens
atacttttcccaaca

SEQ ID NO: 1632991 - DNA, 15 bp, Homo sapiens
gatacttttcccaac

SEQ ID NO: 1632992 - DNA, 15 bp, Homo sapiens
tgatacttttcccaa

SEQ ID NO: 1632993 - DNA, 15 bp, Homo sapiens
ttgatacttttccca

SEQ ID NO: 1632994 - DNA, 15 bp, Homo sapiens
tttgatacttttccc

SEQ ID NO: 1632995 - DNA, 15 bp, Homo sapiens
ctttgatacttttcc

SEQ ID NO: 1632996 - DNA, 15 bp, Homo sapiens
actttgatacttttc

SEQ ID NO: 1632997 - DNA, 15 bp, Homo sapiens
cactttgatactttt

SEQ ID NO: 1632998 - DNA, 15 bp, Homo sapiens
acactttgatacttt

SEQ ID NO: 1632999 - DNA, 15 bp, Homo sapiens
cacactttgatactt

SEQ ID NO: 1633000 - DNA, 15 bp, Homo sapiens
acacactttgatact

SEQ ID NO: 1633001 - DNA, 15 bp, Homo sapiens
aacacactttgatac

SEQ ID NO: 1633002 - DNA, 15 bp, Homo sapiens
gaacacactttgata

SEQ ID NO: 1633003 - DNA, 15 bp, Homo sapiens
tgaacacactttgat

SEQ ID NO: 1633004 - DNA, 15 bp, Homo sapiens
atgaacacactttga

SEQ ID NO: 1633005 - DNA, 15 bp, Homo sapiens
aatgaacacactttg

SEQ ID NO: 1633006 - DNA, 15 bp, Homo sapiens
aaatgaacacacttt

SEQ ID NO: 1633007 - DNA, 15 bp, Homo sapiens
caaatgaacacactt

SEQ ID NO: 1633008 - DNA, 15 bp, Homo sapiens
acaaatgaacacact

SEQ ID NO: 1633009 - DNA, 15 bp, Homo sapiens
aacaaatgaacacac

SEQ ID NO: 1633010 - DNA, 15 bp, Homo sapiens
taacaaatgaacaca

SEQ ID NO: 1633011 - DNA, 15 bp, Homo sapiens
ataacaaatgaacac

SEQ ID NO: 1633012 - DNA, 15 bp, Homo sapiens
cataacaaatgaaca

SEQ ID NO: 1633013 - DNA, 15 bp, Homo sapiens
acataacaaatgaac

SEQ ID NO: 1633014 - DNA, 15 bp, Homo sapiens
tacataacaaatgaa

SEQ ID NO: 1633015 - DNA, 15 bp, Homo sapiens
ttacataacaaatga

SEQ ID NO: 1633016 - DNA, 15 bp, Homo sapiens
attacataacaaatg

SEQ ID NO: 1633017 - DNA, 15 bp, Homo sapiens
tattacataacaaat

SEQ ID NO: 1633018 - DNA, 15 bp, Homo sapiens
atattacataacaaa

SEQ ID NO: 1633019 - DNA, 15 bp, Homo sapiens
tatattacataacaa

SEQ ID NO: 1633020 - DNA, 15 bp, Homo sapiens
atatattacataaca

SEQ ID NO: 1633021 - DNA, 15 bp, Homo sapiens
tatatattacataac

SEQ ID NO: 1633022 - DNA, 15 bp, Homo sapiens
ttatatattacataa

SEQ ID NO: 1633023 - DNA, 15 bp, Homo sapiens
cttatatattacata

SEQ ID NO: 1633024 - DNA, 15 bp, Homo sapiens
ccttatatattacat

SEQ ID NO: 1633025 - DNA, 15 bp, Homo sapiens
accttatatattaca

SEQ ID NO: 1633026 - DNA, 15 bp, Homo sapiens
taccttatatattac

SEQ ID NO: 1633027 - DNA, 15 bp, Homo sapiens
ctaccttatatatta

SEQ ID NO: 1633028 - DNA, 15 bp, Homo sapiens
tctaccttatatatt

SEQ ID NO: 1633029 - DNA, 15 bp, Homo sapiens
ctctaccttatatat

SEQ ID NO: 1633030 - DNA, 15 bp, Homo sapiens
tctctaccttatata

SEQ ID NO: 1633031 - DNA, 15 bp, Homo sapiens
ttctctaccttatat

SEQ ID NO: 1633032 - DNA, 15 bp, Homo sapiens
gttctctaccttata

SEQ ID NO: 1633033 - DNA, 15 bp, Homo sapiens
ggttctctaccttat

SEQ ID NO: 1633034 - DNA, 15 bp, Homo sapiens
gggttctctacctta

SEQ ID NO: 1633035 - DNA, 15 bp, Homo sapiens
tgggttctctacctt

SEQ ID NO: 1633036 - DNA, 15 bp, Homo sapiens
ttgggttctctacct

SEQ ID NO: 1633037 - DNA, 15 bp, Homo sapiens
attgggttctctacc

SEQ ID NO: 1633038 - DNA, 15 bp, Homo sapiens
aattgggttctctac

SEQ ID NO: 1633039 - DNA, 15 bp, Homo sapiens
aaattgggttctcta

SEQ ID NO: 1633040 - DNA, 15 bp, Homo sapiens
caaattgggttctct

SEQ ID NO: 1633041 - DNA, 15 bp, Homo sapiens
tcaaattgggttctc

SEQ ID NO: 1633042 - DNA, 15 bp, Homo sapiens
ttcaaattgggttct

SEQ ID NO: 1633043 - DNA, 15 bp, Homo sapiens
cttcaaattgggttc

SEQ ID NO: 1633044 - DNA, 15 bp, Homo sapiens
ccttcaaattgggtt

SEQ ID NO: 1633045 - DNA, 15 bp, Homo sapiens
tccttcaaattgggt

SEQ ID NO: 1633046 - DNA, 15 bp, Homo sapiens
ctccttcaaattggg

SEQ ID NO: 1633047 - DNA, 15 bp, Homo sapiens
cctccttcaaattgg

SEQ ID NO: 1633048 - DNA, 15 bp, Homo sapiens
acctccttcaaattg

SEQ ID NO: 1633049 - DNA, 15 bp, Homo sapiens
cacctccttcaaatt

SEQ ID NO: 1633050 - DNA, 15 bp, Homo sapiens
ccacctccttcaaat

SEQ ID NO: 1633051 - DNA, 15 bp, Homo sapiens
tccacctccttcaaa

SEQ ID NO: 1633052 - DNA, 15 bp, Homo sapiens
ttccacctccttcaa

SEQ ID NO: 1633053 - DNA, 15 bp, Homo sapiens
attccacctccttca

SEQ ID NO: 1633054 - DNA, 15 bp, Homo sapiens
tattccacctccttc

SEQ ID NO: 1633055 - DNA, 15 bp, Homo sapiens
ttattccacctcctt

SEQ ID NO: 1633056 - DNA, 15 bp, Homo sapiens
gttattccacctcct

SEQ ID NO: 1633057 - DNA, 15 bp, Homo sapiens
agttattccacctcc

SEQ ID NO: 1633058 - DNA, 15 bp, Homo sapiens
aagttattccacctc

SEQ ID NO: 1633059 - DNA, 15 bp, Homo sapiens
aaagttattccacct

SEQ ID NO: 1633060 - DNA, 15 bp, Homo sapiens
gaaagttattccacc

SEQ ID NO: 1633061 - DNA, 15 bp, Homo sapiens
ggaaagttattccac

SEQ ID NO: 1633062 - DNA, 15 bp, Homo sapiens
tggaaagttattcca

SEQ ID NO: 1633063 - DNA, 15 bp, Homo sapiens
ttggaaagttattcc

SEQ ID NO: 1633064 - DNA, 15 bp, Homo sapiens
tttggaaagttattc

SEQ ID NO: 1633065 - DNA, 15 bp, Homo sapiens
ttttggaaagttatt

SEQ ID NO: 1633066 - DNA, 15 bp, Homo sapiens
attttggaaagttat

SEQ ID NO: 1633067 - DNA, 15 bp, Homo sapiens
tattttggaaagtta

SEQ ID NO: 1633068 - DNA, 15 bp, Homo sapiens
gtattttggaaagtt

SEQ ID NO: 1633069 - DNA, 15 bp, Homo sapiens
agtattttggaaagt

SEQ ID NO: 1633070 - DNA, 15 bp, Homo sapiens
aagtattttggaaag

SEQ ID NO: 1633071 - DNA, 15 bp, Homo sapiens
taagtattttggaaa

SEQ ID NO: 1633072 - DNA, 15 bp, Homo sapiens
ataagtattttggaa

SEQ ID NO: 1633073 - DNA, 15 bp, Homo sapiens
cataagtattttgga

SEQ ID NO: 1633074 - DNA, 15 bp, Homo sapiens
ccataagtattttgg

SEQ ID NO: 1633075 - DNA, 15 bp, Homo sapiens
gccataagtattttg

SEQ ID NO: 1633076 - DNA, 15 bp, Homo sapiens
agccataagtatttt

SEQ ID NO: 1633077 - DNA, 15 bp, Homo sapiens
tagccataagtattt

SEQ ID NO: 1633078 - DNA, 15 bp, Homo sapiens
ttagccataagtatt

SEQ ID NO: 1633079 - DNA, 15 bp, Homo sapiens
tttagccataagtat

SEQ ID NO: 1633080 - DNA, 15 bp, Homo sapiens
atttagccataagta

SEQ ID NO: 1633081 - DNA, 15 bp, Homo sapiens
aatttagccataagt

SEQ ID NO: 1633082 - DNA, 15 bp, Homo sapiens
gaatttagccataag

SEQ ID NO: 1633083 - DNA, 15 bp, Homo sapiens
agaatttagccataa

SEQ ID NO: 1633084 - DNA, 15 bp, Homo sapiens
gagaatttagccata

SEQ ID NO: 1633085 - DNA, 15 bp, Homo sapiens
tgagaatttagccat

SEQ ID NO: 1633086 - DNA, 15 bp, Homo sapiens
ctgagaatttagcca

SEQ ID NO: 1633087 - DNA, 15 bp, Homo sapiens
actgagaatttagcc

SEQ ID NO: 1633088 - DNA, 15 bp, Homo sapiens
aactgagaatttagc

SEQ ID NO: 1633089 - DNA, 15 bp, Homo sapiens
caactgagaatttag

SEQ ID NO: 1633090 - DNA, 15 bp, Homo sapiens
tcaactgagaattta

SEQ ID NO: 1633091 - DNA, 15 bp, Homo sapiens
atcaactgagaattt

SEQ ID NO: 1633092 - DNA, 15 bp, Homo sapiens
gatcaactgagaatt

SEQ ID NO: 1633093 - DNA, 15 bp, Homo sapiens
agatcaactgagaat

SEQ ID NO: 1633094 - DNA, 15 bp, Homo sapiens
aagatcaactgagaa

SEQ ID NO: 1633095 - DNA, 15 bp, Homo sapiens
caagatcaactgaga

SEQ ID NO: 1633096 - DNA, 15 bp, Homo sapiens
ccaagatcaactgag

SEQ ID NO: 1633097 - DNA, 15 bp, Homo sapiens
tccaagatcaactga

SEQ ID NO: 1633098 - DNA, 15 bp, Homo sapiens
ttccaagatcaactg

SEQ ID NO: 1633099 - DNA, 15 bp, Homo sapiens
attccaagatcaact

SEQ ID NO: 1633100 - DNA, 15 bp, Homo sapiens
tattccaagatcaac

SEQ ID NO: 1633101 - DNA, 15 bp, Homo sapiens
ttattccaagatcaa

SEQ ID NO: 1633102 - DNA, 15 bp, Homo sapiens
cttattccaagatca

SEQ ID NO: 1633103 - DNA, 15 bp, Homo sapiens
tcttattccaagatc

SEQ ID NO: 1633104 - DNA, 15 bp, Homo sapiens
atcttattccaagat

SEQ ID NO: 1633105 - DNA, 15 bp, Homo sapiens
aatcttattccaaga

SEQ ID NO: 1633106 - DNA, 15 bp, Homo sapiens
gaatcttattccaag

SEQ ID NO: 1633107 - DNA, 15 bp, Homo sapiens
tgaatcttattccaa

SEQ ID NO: 1633108 - DNA, 15 bp, Homo sapiens
ttgaatcttattcca

SEQ ID NO: 1633109 - DNA, 15 bp, Homo sapiens
cttgaatcttattcc

SEQ ID NO: 1633110 - DNA, 15 bp, Homo sapiens
tcttgaatcttattc

SEQ ID NO: 1633111 - DNA, 15 bp, Homo sapiens
ttcttgaatcttatt

SEQ ID NO: 1633112 - DNA, 15 bp, Homo sapiens
attcttgaatcttat

SEQ ID NO: 1633113 - DNA, 15 bp, Homo sapiens
gattcttgaatctta

SEQ ID NO: 1633114 - DNA, 15 bp, Homo sapiens
ggattcttgaatctt

SEQ ID NO: 1633115 - DNA, 15 bp, Homo sapiens
tggattcttgaatct

SEQ ID NO: 1633116 - DNA, 15 bp, Homo sapiens
ttggattcttgaatc

SEQ ID NO: 1633117 - DNA, 15 bp, Homo sapiens
tttggattcttgaat

SEQ ID NO: 1633118 - DNA, 15 bp, Homo sapiens
atttggattcttgaa

SEQ ID NO: 1633119 - DNA, 15 bp, Homo sapiens
catttggattcttga

SEQ ID NO: 1633120 - DNA, 15 bp, Homo sapiens
gcatttggattcttg

SEQ ID NO: 1633121 - DNA, 15 bp, Homo sapiens
tgcatttggattctt

SEQ ID NO: 1633122 - DNA, 15 bp, Homo sapiens
gtgcatttggattct

SEQ ID NO: 1633123 - DNA, 15 bp, Homo sapiens
ggtgcatttggattc

SEQ ID NO: 1633124 - DNA, 15 bp, Homo sapiens
gggtgcatttggatt

SEQ ID NO: 1633125 - DNA, 15 bp, Homo sapiens
agggtgcatttggat

SEQ ID NO: 1633126 - DNA, 15 bp, Homo sapiens
aagggtgcatttgga

SEQ ID NO: 1633127 - DNA, 15 bp, Homo sapiens
gaagggtgcatttgg

SEQ ID NO: 1633128 - DNA, 15 bp, Homo sapiens
agaagggtgcatttg

SEQ ID NO: 1633129 - DNA, 15 bp, Homo sapiens
aagaagggtgcattt

SEQ ID NO: 1633130 - DNA, 15 bp, Homo sapiens
aaagaagggtgcatt

SEQ ID NO: 1633131 - DNA, 15 bp, Homo sapiens
caaagaagggtgcat

SEQ ID NO: 1633132 - DNA, 15 bp, Homo sapiens
acaaagaagggtgca

SEQ ID NO: 1633133 - DNA, 15 bp, Homo sapiens
aacaaagaagggtgc

SEQ ID NO: 1633134 - DNA, 15 bp, Homo sapiens
taacaaagaagggtg

SEQ ID NO: 1633135 - DNA, 15 bp, Homo sapiens
ataacaaagaagggt

SEQ ID NO: 1633136 - DNA, 15 bp, Homo sapiens
gataacaaagaaggg

SEQ ID NO: 1633137 - DNA, 15 bp, Homo sapiens
agataacaaagaagg

SEQ ID NO: 1633138 - DNA, 15 bp, Homo sapiens
aagataacaaagaag

SEQ ID NO: 1633139 - DNA, 15 bp, Homo sapiens
caagataacaaagaa

SEQ ID NO: 1633140 - DNA, 15 bp, Homo sapiens
gcaagataacaaaga

SEQ ID NO: 1633141 - DNA, 15 bp, Homo sapiens
agcaagataacaaag

SEQ ID NO: 1633142 - DNA, 15 bp, Homo sapiens
tagcaagataacaaa

SEQ ID NO: 1633143 - DNA, 15 bp, Homo sapiens
ctagcaagataacaa

SEQ ID NO: 1633144 - DNA, 15 bp, Homo sapiens
tctagcaagataaca

SEQ ID NO: 1633145 - DNA, 15 bp, Homo sapiens
ttctagcaagataac

SEQ ID NO: 1633146 - DNA, 15 bp, Homo sapiens
tttctagcaagataa

SEQ ID NO: 1633147 - DNA, 15 bp, Homo sapiens
ttttctagcaagata

SEQ ID NO: 1633148 - DNA, 15 bp, Homo sapiens
gttttctagcaagat

SEQ ID NO: 1633149 - DNA, 15 bp, Homo sapiens
tgttttctagcaaga

SEQ ID NO: 1633150 - DNA, 15 bp, Homo sapiens
atgttttctagcaag

SEQ ID NO: 1633151 - DNA, 15 bp, Homo sapiens
catgttttctagcaa

SEQ ID NO: 1633152 - DNA, 15 bp, Homo sapiens
gcatgttttctagca

SEQ ID NO: 1633153 - DNA, 15 bp, Homo sapiens
agcatgttttctagc

SEQ ID NO: 1633154 - DNA, 15 bp, Homo sapiens
cagcatgttttctag

SEQ ID NO: 1633155 - DNA, 15 bp, Homo sapiens
ccagcatgttttcta

SEQ ID NO: 1633156 - DNA, 15 bp, Homo sapiens
cccagcatgttttct

SEQ ID NO: 1633157 - DNA, 15 bp, Homo sapiens
gcccagcatgttttc

SEQ ID NO: 1633158 - DNA, 15 bp, Homo sapiens
tgcccagcatgtttt

SEQ ID NO: 1633159 - DNA, 15 bp, Homo sapiens
atgcccagcatgttt

SEQ ID NO: 1633160 - DNA, 15 bp, Homo sapiens
catgcccagcatgtt

SEQ ID NO: 1633161 - DNA, 15 bp, Homo sapiens
ccatgcccagcatgt

SEQ ID NO: 1633162 - DNA, 15 bp, Homo sapiens
accatgcccagcatg

SEQ ID NO: 1633163 - DNA, 15 bp, Homo sapiens
caccatgcccagcat

SEQ ID NO: 1633164 - DNA, 15 bp, Homo sapiens
ccaccatgcccagca

SEQ ID NO: 1633165 - DNA, 15 bp, Homo sapiens
tgttgggattacagg

SEQ ID NO: 1633166 - DNA, 15 bp, Homo sapiens
gtgttgggattacag

SEQ ID NO: 1633167 - DNA, 15 bp, Homo sapiens
cgtgttgggattaca

SEQ ID NO: 1633168 - DNA, 15 bp, Homo sapiens
acgtgttgggattac

SEQ ID NO: 1633169 - DNA, 15 bp, Homo sapiens
aacgtgttgggatta

SEQ ID NO: 1633170 - DNA, 15 bp, Homo sapiens
caacgtgttgggatt

SEQ ID NO: 1633171 - DNA, 15 bp, Homo sapiens
tcaacgtgttgggat

SEQ ID NO: 1633172 - DNA, 15 bp, Homo sapiens
ctcaacgtgttggga

SEQ ID NO: 1633173 - DNA, 15 bp, Homo sapiens
tctcaacgtgttggg

SEQ ID NO: 1633174 - DNA, 15 bp, Homo sapiens
ctctcaacgtgttgg

SEQ ID NO: 1633175 - DNA, 15 bp, Homo sapiens
cctctcaacgtgttg

SEQ ID NO: 1633176 - DNA, 15 bp, Homo sapiens
gcctctcaacgtgtt

SEQ ID NO: 1633177 - DNA, 15 bp, Homo sapiens
ggcctctcaacgtgt

SEQ ID NO: 1633178 - DNA, 15 bp, Homo sapiens
cggcctctcaacgtg

SEQ ID NO: 1633179 - DNA, 15 bp, Homo sapiens
tcggcctctcaacgt

SEQ ID NO: 1633180 - DNA, 15 bp, Homo sapiens
ctcggcctctcaacg

SEQ ID NO: 1633181 - DNA, 15 bp, Homo sapiens
cctcggcctctcaac

SEQ ID NO: 1633182 - DNA, 15 bp, Homo sapiens
acctcggcctctcaa

SEQ ID NO: 1633183 - DNA, 15 bp, Homo sapiens
cacctcggcctctca

SEQ ID NO: 1633184 - DNA, 15 bp, Homo sapiens
ccacctcggcctctc

SEQ ID NO: 1633185 - DNA, 15 bp, Homo sapiens
cccacctcggcctct

SEQ ID NO: 1633186 - DNA, 15 bp, Homo sapiens
gcccacctcggcctc

SEQ ID NO: 1633187 - DNA, 15 bp, Homo sapiens
tctcgtgatctgccc

SEQ ID NO: 1633188 - DNA, 15 bp, Homo sapiens
atctcgtgatctgcc

SEQ ID NO: 1633189 - DNA, 15 bp, Homo sapiens
gatctcgtgatctgc

SEQ ID NO: 1633190 - DNA, 15 bp, Homo sapiens
tgatctcgtgatctg

SEQ ID NO: 1633191 - DNA, 15 bp, Homo sapiens
ctgatctcgtgatct

SEQ ID NO: 1633192 - DNA, 15 bp, Homo sapiens
ctcctgatctcgtga

SEQ ID NO: 1633193 - DNA, 15 bp, Homo sapiens
actcctgatctcgtg

SEQ ID NO: 1633194 - DNA, 15 bp, Homo sapiens
aactcctgatctcgt

SEQ ID NO: 1633195 - DNA, 15 bp, Homo sapiens
caactcctgatctcg

SEQ ID NO: 1633196 - DNA, 15 bp, Homo sapiens
ccaactcctgatctc

SEQ ID NO: 1633197 - DNA, 15 bp, Homo sapiens
tccaactcctgatct

SEQ ID NO: 1633198 - DNA, 15 bp, Homo sapiens
ctccaactcctgatc

SEQ ID NO: 1633199 - DNA, 15 bp, Homo sapiens
tctccaactcctgat

SEQ ID NO: 1633200 - DNA, 15 bp, Homo sapiens
gtctccaactcctga

SEQ ID NO: 1633201 - DNA, 15 bp, Homo sapiens
ggtctccaactcctg

SEQ ID NO: 1633202 - DNA, 15 bp, Homo sapiens
tggtctccaactcct

SEQ ID NO: 1633203 - DNA, 15 bp, Homo sapiens
atcaggctggtctcc

SEQ ID NO: 1633204 - DNA, 15 bp, Homo sapiens
gatcaggctggtctc

SEQ ID NO: 1633205 - DNA, 15 bp, Homo sapiens
tgatcaggctggtct

SEQ ID NO: 1633206 - DNA, 15 bp, Homo sapiens
ttgatcaggctggtc

SEQ ID NO: 1633207 - DNA, 15 bp, Homo sapiens
gttgatcaggctggt

SEQ ID NO: 1633208 - DNA, 15 bp, Homo sapiens
tgttgatcaggctgg

SEQ ID NO: 1633209 - DNA, 15 bp, Homo sapiens
atgttgatcaggctg

SEQ ID NO: 1633210 - DNA, 15 bp, Homo sapiens
catgttgatcaggct

SEQ ID NO: 1633211 - DNA, 15 bp, Homo sapiens
ccatgttgatcaggc

SEQ ID NO: 1633212 - DNA, 15 bp, Homo sapiens
accatgttgatcagg

SEQ ID NO: 1633213 - DNA, 15 bp, Homo sapiens
caccatgttgatcag

SEQ ID NO: 1633214 - DNA, 15 bp, Homo sapiens
tcaccatgttgatca

SEQ ID NO: 1633215 - DNA, 15 bp, Homo sapiens
ttcaccatgttgatc

SEQ ID NO: 1633216 - DNA, 15 bp, Homo sapiens
cttcaccatgttgat

SEQ ID NO: 1633217 - DNA, 15 bp, Homo sapiens
gcttcaccatgttga

SEQ ID NO: 1633218 - DNA, 15 bp, Homo sapiens
ggcttcaccatgttg

SEQ ID NO: 1633219 - DNA, 15 bp, Homo sapiens
gggcttcaccatgtt

SEQ ID NO: 1633220 - DNA, 15 bp, Homo sapiens
ggggcttcaccatgt

SEQ ID NO: 1633221 - DNA, 15 bp, Homo sapiens
cggggcttcaccatg

SEQ ID NO: 1633222 - DNA, 15 bp, Homo sapiens
acggggcttcaccat

SEQ ID NO: 1633223 - DNA, 15 bp, Homo sapiens
gacggggcttcacca

SEQ ID NO: 1633224 - DNA, 15 bp, Homo sapiens
agacggggcttcacc

SEQ ID NO: 1633225 - DNA, 15 bp, Homo sapiens
gagacggggcttcac

SEQ ID NO: 1633226 - DNA, 15 bp, Homo sapiens
agagacggggcttca

SEQ ID NO: 1633227 - DNA, 15 bp, Homo sapiens
tagagacggggcttc

SEQ ID NO: 1633228 - DNA, 15 bp, Homo sapiens
gtagagacggggctt

SEQ ID NO: 1633229 - DNA, 15 bp, Homo sapiens
agtagagacggggct

SEQ ID NO: 1633230 - DNA, 15 bp, Homo sapiens
tagtagagacggggc

SEQ ID NO: 1633231 - DNA, 15 bp, Homo sapiens
tctggctaatttttg

SEQ ID NO: 1633232 - DNA, 15 bp, Homo sapiens
gtctggctaattttt

SEQ ID NO: 1633233 - DNA, 15 bp, Homo sapiens
tgtctggctaatttt

SEQ ID NO: 1633234 - DNA, 15 bp, Homo sapiens
atgtctggctaattt

SEQ ID NO: 1633235 - DNA, 15 bp, Homo sapiens
tatgtctggctaatt

SEQ ID NO: 1633236 - DNA, 15 bp, Homo sapiens
ctatgtctggctaat

SEQ ID NO: 1633237 - DNA, 15 bp, Homo sapiens
actatgtctggctaa

SEQ ID NO: 1633238 - DNA, 15 bp, Homo sapiens
cactatgtctggcta

SEQ ID NO: 1633239 - DNA, 15 bp, Homo sapiens
ccactatgtctggct

SEQ ID NO: 1633240 - DNA, 15 bp, Homo sapiens
gccactatgtctggc

SEQ ID NO: 1633241 - DNA, 15 bp, Homo sapiens
tgccactatgtctgg

SEQ ID NO: 1633242 - DNA, 15 bp, Homo sapiens
gtgccactatgtctg

SEQ ID NO: 1633243 - DNA, 15 bp, Homo sapiens
cgtgccactatgtct

SEQ ID NO: 1633244 - DNA, 15 bp, Homo sapiens
gcgtgccactatgtc

SEQ ID NO: 1633245 - DNA, 15 bp, Homo sapiens
tgcgtgccactatgt

SEQ ID NO: 1633246 - DNA, 15 bp, Homo sapiens
gtgcgtgccactatg

SEQ ID NO: 1633247 - DNA, 15 bp, Homo sapiens
ggtgcgtgccactat

SEQ ID NO: 1633248 - DNA, 15 bp, Homo sapiens
aggtgcgtgccacta

SEQ ID NO: 1633249 - DNA, 15 bp, Homo sapiens
taggtgcgtgccact

SEQ ID NO: 1633250 - DNA, 15 bp, Homo sapiens
ataggtgcgtgccac

SEQ ID NO: 1633251 - DNA, 15 bp, Homo sapiens
tataggtgcgtgcca

SEQ ID NO: 1633252 - DNA, 15 bp, Homo sapiens
ttataggtgcgtgcc

SEQ ID NO: 1633253 - DNA, 15 bp, Homo sapiens
attataggtgcgtgc

SEQ ID NO: 1633254 - DNA, 15 bp, Homo sapiens
gattataggtgcgtg

SEQ ID NO: 1633255 - DNA, 15 bp, Homo sapiens
ggattataggtgcgt

SEQ ID NO: 1633256 - DNA, 15 bp, Homo sapiens
cggattataggtgcg

SEQ ID NO: 1633257 - DNA, 15 bp, Homo sapiens
acggattataggtgc

SEQ ID NO: 1633258 - DNA, 15 bp, Homo sapiens
cacggattataggtg

SEQ ID NO: 1633259 - DNA, 15 bp, Homo sapiens
gcacggattataggt

SEQ ID NO: 1633260 - DNA, 15 bp, Homo sapiens
agcacggattatagg

SEQ ID NO: 1633261 - DNA, 15 bp, Homo sapiens
tagcacggattatag

SEQ ID NO: 1633262 - DNA, 15 bp, Homo sapiens
gtagcacggattata

SEQ ID NO: 1633263 - DNA, 15 bp, Homo sapiens
agtagcacggattat

SEQ ID NO: 1633264 - DNA, 15 bp, Homo sapiens
gagtagcacggatta

SEQ ID NO: 1633265 - DNA, 15 bp, Homo sapiens
tgagtagcacggatt

SEQ ID NO: 1633266 - DNA, 15 bp, Homo sapiens
ctgagtagcacggat

SEQ ID NO: 1633267 - DNA, 15 bp, Homo sapiens
cctgagtagcacgga

SEQ ID NO: 1633268 - DNA, 15 bp, Homo sapiens
tcctgagtagcacgg

SEQ ID NO: 1633269 - DNA, 15 bp, Homo sapiens
ctcctgagtagcacg

SEQ ID NO: 1633270 - DNA, 15 bp, Homo sapiens
cctcctgagtagcac

SEQ ID NO: 1633271 - DNA, 15 bp, Homo sapiens
acctcctgagtagca

SEQ ID NO: 1633272 - DNA, 15 bp, Homo sapiens
tacctcctgagtagc

SEQ ID NO: 1633273 - DNA, 15 bp, Homo sapiens
ctacctcctgagtag

SEQ ID NO: 1633274 - DNA, 15 bp, Homo sapiens
cctacctcctgagta

SEQ ID NO: 1633275 - DNA, 15 bp, Homo sapiens
gcctacctcctgagt

SEQ ID NO: 1633276 - DNA, 15 bp, Homo sapiens
tgcctacctcctgag

SEQ ID NO: 1633277 - DNA, 15 bp, Homo sapiens
ctgcctacctcctga

SEQ ID NO: 1633278 - DNA, 15 bp, Homo sapiens
cctgcctacctcctg

SEQ ID NO: 1633279 - DNA, 15 bp, Homo sapiens
tcctgcctacctcct

SEQ ID NO: 1633280 - DNA, 15 bp, Homo sapiens
ctcctgcctacctcc

SEQ ID NO: 1633281 - DNA, 15 bp, Homo sapiens
tctcctgcctacctc

SEQ ID NO: 1633282 - DNA, 15 bp, Homo sapiens
ttctcctgcctacct

SEQ ID NO: 1633283 - DNA, 15 bp, Homo sapiens
attctcctgcctacc

SEQ ID NO: 1633284 - DNA, 15 bp, Homo sapiens
aattctcctgcctac

SEQ ID NO: 1633285 - DNA, 15 bp, Homo sapiens
caattctcctgccta

SEQ ID NO: 1633286 - DNA, 15 bp, Homo sapiens
cagcaattctcctgc

SEQ ID NO: 1633287 - DNA, 15 bp, Homo sapiens
ccagcaattctcctg

SEQ ID NO: 1633288 - DNA, 15 bp, Homo sapiens
tccagcaattctcct

SEQ ID NO: 1633289 - DNA, 15 bp, Homo sapiens
ttccagcaattctcc

SEQ ID NO: 1633290 - DNA, 15 bp, Homo sapiens
gttccagcaattctc

SEQ ID NO: 1633291 - DNA, 15 bp, Homo sapiens
ggttccagcaattct

SEQ ID NO: 1633292 - DNA, 15 bp, Homo sapiens
gggttccagcaattc

SEQ ID NO: 1633293 - DNA, 15 bp, Homo sapiens
cgggttccagcaatt

SEQ ID NO: 1633294 - DNA, 15 bp, Homo sapiens
ccgggttccagcaat

SEQ ID NO: 1633295 - DNA, 15 bp, Homo sapiens
cccgggttccagcaa

SEQ ID NO: 1633296 - DNA, 15 bp, Homo sapiens
tcccgggttccagca

SEQ ID NO: 1633297 - DNA, 15 bp, Homo sapiens
ctcccgggttccagc

SEQ ID NO: 1633298 - DNA, 15 bp, Homo sapiens
acctcccgggttcca

SEQ ID NO: 1633299 - DNA, 15 bp, Homo sapiens
cacctcccgggttcc

SEQ ID NO: 1633300 - DNA, 15 bp, Homo sapiens
actccacctcccggg

SEQ ID NO: 1633301 - DNA, 15 bp, Homo sapiens
aactccacctcccgg

SEQ ID NO: 1633302 - DNA, 15 bp, Homo sapiens
aaactccacctcccg

SEQ ID NO: 1633303 - DNA, 15 bp, Homo sapiens
caaactccacctccc

SEQ ID NO: 1633304 - DNA, 15 bp, Homo sapiens
gcaaactccacctcc

SEQ ID NO: 1633305 - DNA, 15 bp, Homo sapiens
tgcaaactccacctc

SEQ ID NO: 1633306 - DNA, 15 bp, Homo sapiens
ctgcaaactccacct

SEQ ID NO: 1633307 - DNA, 15 bp, Homo sapiens
actgcaaactccacc

SEQ ID NO: 1633308 - DNA, 15 bp, Homo sapiens
cactgcaaactccac

SEQ ID NO: 1633309 - DNA, 15 bp, Homo sapiens
tcactgcaaactcca

SEQ ID NO: 1633310 - DNA, 15 bp, Homo sapiens
ctcactgcaaactcc

SEQ ID NO: 1633311 - DNA, 15 bp, Homo sapiens
gctcactgcaaactc

SEQ ID NO: 1633312 - DNA, 15 bp, Homo sapiens
ggctcactgcaaact

SEQ ID NO: 1633313 - DNA, 15 bp, Homo sapiens
tggctcactgcaaac

SEQ ID NO: 1633314 - DNA, 15 bp, Homo sapiens
ttggctcactgcaaa

SEQ ID NO: 1633315 - DNA, 15 bp, Homo sapiens
ggattgcagtggtgt

SEQ ID NO: 1633316 - DNA, 15 bp, Homo sapiens
tggattgcagtggtg

SEQ ID NO: 1633317 - DNA, 15 bp, Homo sapiens
ctggattgcagtggt

SEQ ID NO: 1633318 - DNA, 15 bp, Homo sapiens
gctggattgcagtgg

SEQ ID NO: 1633319 - DNA, 15 bp, Homo sapiens
ggctggattgcagtg

SEQ ID NO: 1633320 - DNA, 15 bp, Homo sapiens
aggctggattgcagt

SEQ ID NO: 1633321 - DNA, 15 bp, Homo sapiens
caggctggattgcag

SEQ ID NO: 1633322 - DNA, 15 bp, Homo sapiens
ccaggctggattgca

SEQ ID NO: 1633323 - DNA, 15 bp, Homo sapiens
cccaggctggattgc

SEQ ID NO: 1633324 - DNA, 15 bp, Homo sapiens
acccaggctggattg

SEQ ID NO: 1633325 - DNA, 15 bp, Homo sapiens
cacccaggctggatt

SEQ ID NO: 1633326 - DNA, 15 bp, Homo sapiens
tcacccaggctggat

SEQ ID NO: 1633327 - DNA, 15 bp, Homo sapiens
tcttttttttttgag

SEQ ID NO: 1633328 - DNA, 15 bp, Homo sapiens
tttcttttttttttg

SEQ ID NO: 1633329 - DNA, 15 bp, Homo sapiens
ttttttcttttcttt

SEQ ID NO: 1633330 - DNA, 15 bp, Homo sapiens
cttttttcttttctt

SEQ ID NO: 1633331 - DNA, 15 bp, Homo sapiens
tcttttttcttttct

SEQ ID NO: 1633332 - DNA, 15 bp, Homo sapiens
ttcttttttcttttc

SEQ ID NO: 1633333 - DNA, 15 bp, Homo sapiens
cttttcttttttctt

SEQ ID NO: 1633334 - DNA, 15 bp, Homo sapiens
tcttttcttttttct

SEQ ID NO: 1633335 - DNA, 15 bp, Homo sapiens
ttcttttcttttttc

SEQ ID NO: 1633336 - DNA, 15 bp, Homo sapiens
ctttcttttcttttt

SEQ ID NO: 1633337 - DNA, 15 bp, Homo sapiens
ttctttcttttcttt

SEQ ID NO: 1633338 - DNA, 15 bp, Homo sapiens
tttttctttcttttc

SEQ ID NO: 1633339 - DNA, 15 bp, Homo sapiens
cttttttctttcttt

SEQ ID NO: 1633340 - DNA, 15 bp, Homo sapiens
ccttttttctttctt

SEQ ID NO: 1633341 - DNA, 15 bp, Homo sapiens
cccttttttctttct

SEQ ID NO: 1633342 - DNA, 15 bp, Homo sapiens
tcccttttttctttc

SEQ ID NO: 1633343 - DNA, 15 bp, Homo sapiens
ttcccttttttcttt

SEQ ID NO: 1633344 - DNA, 15 bp, Homo sapiens
cttcccttttttctt

SEQ ID NO: 1633345 - DNA, 15 bp, Homo sapiens
ccttcccttttttct

SEQ ID NO: 1633346 - DNA, 15 bp, Homo sapiens
cccttcccttttttc

SEQ ID NO: 1633347 - DNA, 15 bp, Homo sapiens
tcccttccctttttt

SEQ ID NO: 1633348 - DNA, 15 bp, Homo sapiens
ttcccttcccttttt

SEQ ID NO: 1633349 - DNA, 15 bp, Homo sapiens
cttcccttccctttt

SEQ ID NO: 1633350 - DNA, 15 bp, Homo sapiens
ccttcccttcccttt

SEQ ID NO: 1633351 - DNA, 15 bp, Homo sapiens
tccttcccttccctt

SEQ ID NO: 1633352 - DNA, 15 bp, Homo sapiens
tttccttcccttccc

SEQ ID NO: 1633353 - DNA, 15 bp, Homo sapiens
ctttccttcccttcc

SEQ ID NO: 1633354 - DNA, 15 bp, Homo sapiens
cctttccttcccttc

SEQ ID NO: 1633355 - DNA, 15 bp, Homo sapiens
ccctttccttccctt

SEQ ID NO: 1633356 - DNA, 15 bp, Homo sapiens
cccctttccttccct

SEQ ID NO: 1633357 - DNA, 15 bp, Homo sapiens
ccccctttccttccc

SEQ ID NO: 1633358 - DNA, 15 bp, Homo sapiens
cccccctttccttcc

SEQ ID NO: 1633359 - DNA, 15 bp, Homo sapiens
tcccccctttccttc

SEQ ID NO: 1633360 - DNA, 15 bp, Homo sapiens
ctcccccctttcctt

SEQ ID NO: 1633361 - DNA, 15 bp, Homo sapiens
cctcccccctttcct

SEQ ID NO: 1633362 - DNA, 15 bp, Homo sapiens
ccctcccccctttcc

SEQ ID NO: 1633363 - DNA, 15 bp, Homo sapiens
cccctcccccctttc

SEQ ID NO: 1633364 - DNA, 15 bp, Homo sapiens
tcccctccccccttt

SEQ ID NO: 1633365 - DNA, 15 bp, Homo sapiens
ctcccctcccccctt

SEQ ID NO: 1633366 - DNA, 15 bp, Homo sapiens
cctcccctcccccct

SEQ ID NO: 1633367 - DNA, 15 bp, Homo sapiens
ccctcccctcccccc

SEQ ID NO: 1633368 - DNA, 15 bp, Homo sapiens
tccctcccctccccc

SEQ ID NO: 1633369 - DNA, 15 bp, Homo sapiens
ttccctcccctcccc

SEQ ID NO: 1633370 - DNA, 15 bp, Homo sapiens
cttccctcccctccc

SEQ ID NO: 1633371 - DNA, 15 bp, Homo sapiens
ccttccctcccctcc

SEQ ID NO: 1633372 - DNA, 15 bp, Homo sapiens
cccttccctcccctc

SEQ ID NO: 1633373 - DNA, 15 bp, Homo sapiens
tcccttccctcccct

SEQ ID NO: 1633374 - DNA, 15 bp, Homo sapiens
ttcccttccctcccc

SEQ ID NO: 1633375 - DNA, 15 bp, Homo sapiens
ttcccttcccttccc

SEQ ID NO: 1633376 - DNA, 15 bp, Homo sapiens
cttcccttcccttcc

SEQ ID NO: 1633377 - DNA, 15 bp, Homo sapiens
ccttcccttcccttc

SEQ ID NO: 1633378 - DNA, 15 bp, Homo sapiens
cccttcccttccctt

SEQ ID NO: 1633379 - DNA, 15 bp, Homo sapiens
accttcccttccctt

SEQ ID NO: 1633380 - DNA, 15 bp, Homo sapiens
taccttcccttccct

SEQ ID NO: 1633381 - DNA, 15 bp, Homo sapiens
ttaccttcccttccc

SEQ ID NO: 1633382 - DNA, 15 bp, Homo sapiens
cttaccttcccttcc

SEQ ID NO: 1633383 - DNA, 15 bp, Homo sapiens
ccttaccttcccttc

SEQ ID NO: 1633384 - DNA, 15 bp, Homo sapiens
cccttaccttccctt

SEQ ID NO: 1633385 - DNA, 15 bp, Homo sapiens
tcccttaccttccct

SEQ ID NO: 1633386 - DNA, 15 bp, Homo sapiens
ttcccttaccttccc

SEQ ID NO: 1633387 - DNA, 15 bp, Homo sapiens
cttcccttaccttcc

SEQ ID NO: 1633388 - DNA, 15 bp, Homo sapiens
ccttcccttaccttc

SEQ ID NO: 1633389 - DNA, 15 bp, Homo sapiens
cccttcccttacctt

SEQ ID NO: 1633390 - DNA, 15 bp, Homo sapiens
tcccttcccttacct

SEQ ID NO: 1633391 - DNA, 15 bp, Homo sapiens
ttcccttcccttacc

SEQ ID NO: 1633392 - DNA, 15 bp, Homo sapiens
cttcccttcccttac

SEQ ID NO: 1633393 - DNA, 15 bp, Homo sapiens
ccttcccttccctta

SEQ ID NO: 1633394 - DNA, 15 bp, Homo sapiens
tttcccttcccttcc

SEQ ID NO: 1633395 - DNA, 15 bp, Homo sapiens
ttttcccttcccttc

SEQ ID NO: 1633396 - DNA, 15 bp, Homo sapiens
cttttcccttccctt

SEQ ID NO: 1633397 - DNA, 15 bp, Homo sapiens
ccttttcccttccct

SEQ ID NO: 1633398 - DNA, 15 bp, Homo sapiens
cccttttcccttccc

SEQ ID NO: 1633399 - DNA, 15 bp, Homo sapiens
tttcccttttccctt

SEQ ID NO: 1633400 - DNA, 15 bp, Homo sapiens
ttttcccttttccct

SEQ ID NO: 1633401 - DNA, 15 bp, Homo sapiens
gttttcccttttccc

SEQ ID NO: 1633402 - DNA, 15 bp, Homo sapiens
tgttttcccttttcc

SEQ ID NO: 1633403 - DNA, 15 bp, Homo sapiens
ttgttttcccttttc

SEQ ID NO: 1633404 - DNA, 15 bp, Homo sapiens
attgttttccctttt

SEQ ID NO: 1633405 - DNA, 15 bp, Homo sapiens
cattgttttcccttt

SEQ ID NO: 1633406 - DNA, 15 bp, Homo sapiens
acattgttttccctt

SEQ ID NO: 1633407 - DNA, 15 bp, Homo sapiens
cacattgttttccct

SEQ ID NO: 1633408 - DNA, 15 bp, Homo sapiens
gcacattgttttccc

SEQ ID NO: 1633409 - DNA, 15 bp, Homo sapiens
agcacattgttttcc

SEQ ID NO: 1633410 - DNA, 15 bp, Homo sapiens
aagcacattgttttc

SEQ ID NO: 1633411 - DNA, 15 bp, Homo sapiens
aaagcacattgtttt

SEQ ID NO: 1633412 - DNA, 15 bp, Homo sapiens
aaaagcacattgttt

SEQ ID NO: 1633413 - DNA, 15 bp, Homo sapiens
taaaagcacattgtt

SEQ ID NO: 1633414 - DNA, 15 bp, Homo sapiens
gtaaaagcacattgt

SEQ ID NO: 1633415 - DNA, 15 bp, Homo sapiens
ggtaaaagcacattg

SEQ ID NO: 1633416 - DNA, 15 bp, Homo sapiens
gggtaaaagcacatt

SEQ ID NO: 1633417 - DNA, 15 bp, Homo sapiens
tgggtaaaagcacat

SEQ ID NO: 1633418 - DNA, 15 bp, Homo sapiens
gtgggtaaaagcaca

SEQ ID NO: 1633419 - DNA, 15 bp, Homo sapiens
tgtgggtaaaagcac

SEQ ID NO: 1633420 - DNA, 15 bp, Homo sapiens
ctgtgggtaaaagca

SEQ ID NO: 1633421 - DNA, 15 bp, Homo sapiens
gctgtgggtaaaagc

SEQ ID NO: 1633422 - DNA, 15 bp, Homo sapiens
agctgtgggtaaaag

SEQ ID NO: 1633423 - DNA, 15 bp, Homo sapiens
cagctgtgggtaaaa

SEQ ID NO: 1633424 - DNA, 15 bp, Homo sapiens
tcagctgtgggtaaa

SEQ ID NO: 1633425 - DNA, 15 bp, Homo sapiens
atcagctgtgggtaa

SEQ ID NO: 1633426 - DNA, 15 bp, Homo sapiens
tatcagctgtgggta

SEQ ID NO: 1633427 - DNA, 15 bp, Homo sapiens
ttatcagctgtgggt

SEQ ID NO: 1633428 - DNA, 15 bp, Homo sapiens
cttatcagctgtggg

SEQ ID NO: 1633429 - DNA, 15 bp, Homo sapiens
gcttatcagctgtgg

SEQ ID NO: 1633430 - DNA, 15 bp, Homo sapiens
agcttatcagctgtg

SEQ ID NO: 1633431 - DNA, 15 bp, Homo sapiens
aagcttatcagctgt

SEQ ID NO: 1633432 - DNA, 15 bp, Homo sapiens
aaagcttatcagctg

SEQ ID NO: 1633433 - DNA, 15 bp, Homo sapiens
aaaagcttatcagct

SEQ ID NO: 1633434 - DNA, 15 bp, Homo sapiens
gaaaagcttatcagc

SEQ ID NO: 1633435 - DNA, 15 bp, Homo sapiens
agaaaagcttatcag

SEQ ID NO: 1633436 - DNA, 15 bp, Homo sapiens
tagaaaagcttatca

SEQ ID NO: 1633437 - DNA, 15 bp, Homo sapiens
ttagaaaagcttatc

SEQ ID NO: 1633438 - DNA, 15 bp, Homo sapiens
attagaaaagcttat

SEQ ID NO: 1633439 - DNA, 15 bp, Homo sapiens
aattagaaaagctta

SEQ ID NO: 1633440 - DNA, 15 bp, Homo sapiens
caattagaaaagctt

SEQ ID NO: 1633441 - DNA, 15 bp, Homo sapiens
acaattagaaaagct

SEQ ID NO: 1633442 - DNA, 15 bp, Homo sapiens
gacaattagaaaagc

SEQ ID NO: 1633443 - DNA, 15 bp, Homo sapiens
agacaattagaaaag

SEQ ID NO: 1633444 - DNA, 15 bp, Homo sapiens
tagacaattagaaaa

SEQ ID NO: 1633445 - DNA, 15 bp, Homo sapiens
gtagacaattagaaa

SEQ ID NO: 1633446 - DNA, 15 bp, Homo sapiens
ggtagacaattagaa

SEQ ID NO: 1633447 - DNA, 15 bp, Homo sapiens
aggtagacaattaga

SEQ ID NO: 1633448 - DNA, 15 bp, Homo sapiens
aaggtagacaattag

SEQ ID NO: 1633449 - DNA, 15 bp, Homo sapiens
aaaggtagacaatta

SEQ ID NO: 1633450 - DNA, 15 bp, Homo sapiens
caaaggtagacaatt

SEQ ID NO: 1633451 - DNA, 15 bp, Homo sapiens
ccaaaggtagacaat

SEQ ID NO: 1633452 - DNA, 15 bp, Homo sapiens
cccaaaggtagacaa

SEQ ID NO: 1633453 - DNA, 15 bp, Homo sapiens
acccaaaggtagaca

SEQ ID NO: 1633454 - DNA, 15 bp, Homo sapiens
aacccaaaggtagac

SEQ ID NO: 1633455 - DNA, 15 bp, Homo sapiens
taacccaaaggtaga

SEQ ID NO: 1633456 - DNA, 15 bp, Homo sapiens
ttaacccaaaggtag

SEQ ID NO: 1633457 - DNA, 15 bp, Homo sapiens
tttaacccaaaggta

SEQ ID NO: 1633458 - DNA, 15 bp, Homo sapiens
gtttaacccaaaggt

SEQ ID NO: 1633459 - DNA, 15 bp, Homo sapiens
agtttaacccaaagg

SEQ ID NO: 1633460 - DNA, 15 bp, Homo sapiens
aagtttaacccaaag

SEQ ID NO: 1633461 - DNA, 15 bp, Homo sapiens
aaagtttaacccaaa

SEQ ID NO: 1633462 - DNA, 15 bp, Homo sapiens
taaagtttaacccaa

SEQ ID NO: 1633463 - DNA, 15 bp, Homo sapiens
ataaagtttaaccca

SEQ ID NO: 1633464 - DNA, 15 bp, Homo sapiens
gataaagtttaaccc

SEQ ID NO: 1633465 - DNA, 15 bp, Homo sapiens
tgataaagtttaacc

SEQ ID NO: 1633466 - DNA, 15 bp, Homo sapiens
atgataaagtttaac

SEQ ID NO: 1633467 - DNA, 15 bp, Homo sapiens
aatgataaagtttaa

SEQ ID NO: 1633468 - DNA, 15 bp, Homo sapiens
caatgataaagttta

SEQ ID NO: 1633469 - DNA, 15 bp, Homo sapiens
tcaatgataaagttt

SEQ ID NO: 1633470 - DNA, 15 bp, Homo sapiens
ctcaatgataaagtt

SEQ ID NO: 1633471 - DNA, 15 bp, Homo sapiens
actcaatgataaagt

SEQ ID NO: 1633472 - DNA, 15 bp, Homo sapiens
cactcaatgataaag

SEQ ID NO: 1633473 - DNA, 15 bp, Homo sapiens
acactcaatgataaa

SEQ ID NO: 1633474 - DNA, 15 bp, Homo sapiens
aacactcaatgataa

SEQ ID NO: 1633475 - DNA, 15 bp, Homo sapiens
aaacactcaatgata

SEQ ID NO: 1633476 - DNA, 15 bp, Homo sapiens
aaaacactcaatgat

SEQ ID NO: 1633477 - DNA, 15 bp, Homo sapiens
aaaaacactcaatga

SEQ ID NO: 1633478 - DNA, 15 bp, Homo sapiens
taaaaacactcaatg

SEQ ID NO: 1633479 - DNA, 15 bp, Homo sapiens
ataaaaacactcaat

SEQ ID NO: 1633480 - DNA, 15 bp, Homo sapiens
gataaaaacactcaa

SEQ ID NO: 1633481 - DNA, 15 bp, Homo sapiens
ggataaaaacactca

SEQ ID NO: 1633482 - DNA, 15 bp, Homo sapiens
gggataaaaacactc

SEQ ID NO: 1633483 - DNA, 15 bp, Homo sapiens
tgggataaaaacact

SEQ ID NO: 1633484 - DNA, 15 bp, Homo sapiens
atgggataaaaacac

SEQ ID NO: 1633485 - DNA, 15 bp, Homo sapiens
aatgggataaaaaca

SEQ ID NO: 1633486 - DNA, 15 bp, Homo sapiens
taatgggataaaaac

SEQ ID NO: 1633487 - DNA, 15 bp, Homo sapiens
ataatgggataaaaa

SEQ ID NO: 1633488 - DNA, 15 bp, Homo sapiens
cataatgggataaaa

SEQ ID NO: 1633489 - DNA, 15 bp, Homo sapiens
tcataatgggataaa

SEQ ID NO: 1633490 - DNA, 15 bp, Homo sapiens
ttcataatgggataa

SEQ ID NO: 1633491 - DNA, 15 bp, Homo sapiens
tttcataatgggata

SEQ ID NO: 1633492 - DNA, 15 bp, Homo sapiens
ctttcataatgggat

SEQ ID NO: 1633493 - DNA, 15 bp, Homo sapiens
tctttcataatggga

SEQ ID NO: 1633494 - DNA, 15 bp, Homo sapiens
ttctttcataatggg

SEQ ID NO: 1633495 - DNA, 15 bp, Homo sapiens
attctttcataatgg

SEQ ID NO: 1633496 - DNA, 15 bp, Homo sapiens
aattctttcataatg

SEQ ID NO: 1633497 - DNA, 15 bp, Homo sapiens
taattctttcataat

SEQ ID NO: 1633498 - DNA, 15 bp, Homo sapiens
ttaattctttcataa

SEQ ID NO: 1633499 - DNA, 15 bp, Homo sapiens
cttaattctttcata

SEQ ID NO: 1633500 - DNA, 15 bp, Homo sapiens
ccttaattctttcat

SEQ ID NO: 1633501 - DNA, 15 bp, Homo sapiens
accttaattctttca

SEQ ID NO: 1633502 - DNA, 15 bp, Homo sapiens
aaccttaattctttc

SEQ ID NO: 1633503 - DNA, 15 bp, Homo sapiens
aaaccttaattcttt

SEQ ID NO: 1633504 - DNA, 15 bp, Homo sapiens
caaaccttaattctt

SEQ ID NO: 1633505 - DNA, 15 bp, Homo sapiens
tcaaaccttaattct

SEQ ID NO: 1633506 - DNA, 15 bp, Homo sapiens
ttcaaaccttaattc

SEQ ID NO: 1633507 - DNA, 15 bp, Homo sapiens
cttcaaaccttaatt

SEQ ID NO: 1633508 - DNA, 15 bp, Homo sapiens
ccttcaaaccttaat

SEQ ID NO: 1633509 - DNA, 15 bp, Homo sapiens
tccttcaaaccttaa

SEQ ID NO: 1633510 - DNA, 15 bp, Homo sapiens
gtccttcaaacctta

SEQ ID NO: 1633511 - DNA, 15 bp, Homo sapiens
agtccttcaaacctt

SEQ ID NO: 1633512 - DNA, 15 bp, Homo sapiens
cagtccttcaaacct

SEQ ID NO: 1633513 - DNA, 15 bp, Homo sapiens
tcagtccttcaaacc

SEQ ID NO: 1633514 - DNA, 15 bp, Homo sapiens
ctcagtccttcaaac

SEQ ID NO: 1633515 - DNA, 15 bp, Homo sapiens
cctcagtccttcaaa

SEQ ID NO: 1633516 - DNA, 15 bp, Homo sapiens
acctcagtccttcaa

SEQ ID NO: 1633517 - DNA, 15 bp, Homo sapiens
tacctcagtccttca

SEQ ID NO: 1633518 - DNA, 15 bp, Homo sapiens
ttacctcagtccttc

SEQ ID NO: 1633519 - DNA, 15 bp, Homo sapiens
cttacctcagtcctt

SEQ ID NO: 1633520 - DNA, 15 bp, Homo sapiens
ccttacctcagtcct

SEQ ID NO: 1633521 - DNA, 15 bp, Homo sapiens
cccttacctcagtcc

SEQ ID NO: 1633522 - DNA, 15 bp, Homo sapiens
acccttacctcagtc

SEQ ID NO: 1633523 - DNA, 15 bp, Homo sapiens
cacccttacctcagt

SEQ ID NO: 1633524 - DNA, 15 bp, Homo sapiens
ccacccttacctcag

SEQ ID NO: 1633525 - DNA, 15 bp, Homo sapiens
tccacccttacctca

SEQ ID NO: 1633526 - DNA, 15 bp, Homo sapiens
atccacccttacctc

SEQ ID NO: 1633527 - DNA, 15 bp, Homo sapiens
tatccacccttacct

SEQ ID NO: 1633528 - DNA, 15 bp, Homo sapiens
atatccacccttacc

SEQ ID NO: 1633529 - DNA, 15 bp, Homo sapiens
aatatccacccttac

SEQ ID NO: 1633530 - DNA, 15 bp, Homo sapiens
aaatatccaccctta

SEQ ID NO: 1633531 - DNA, 15 bp, Homo sapiens
taaatatccaccctt

SEQ ID NO: 1633532 - DNA, 15 bp, Homo sapiens
gtaaatatccaccct

SEQ ID NO: 1633533 - DNA, 15 bp, Homo sapiens
agtaaatatccaccc

SEQ ID NO: 1633534 - DNA, 15 bp, Homo sapiens
gagtaaatatccacc

SEQ ID NO: 1633535 - DNA, 15 bp, Homo sapiens
agagtaaatatccac

SEQ ID NO: 1633536 - DNA, 15 bp, Homo sapiens
aagagtaaatatcca

SEQ ID NO: 1633537 - DNA, 15 bp, Homo sapiens
taagagtaaatatcc

SEQ ID NO: 1633538 - DNA, 15 bp, Homo sapiens
ttaagagtaaatatc

SEQ ID NO: 1633539 - DNA, 15 bp, Homo sapiens
attaagagtaaatat

SEQ ID NO: 1633540 - DNA, 15 bp, Homo sapiens
aattaagagtaaata

SEQ ID NO: 1633541 - DNA, 15 bp, Homo sapiens
caattaagagtaaat

SEQ ID NO: 1633542 - DNA, 15 bp, Homo sapiens
tcaattaagagtaaa

SEQ ID NO: 1633543 - DNA, 15 bp, Homo sapiens
ctcaattaagagtaa

SEQ ID NO: 1633544 - DNA, 15 bp, Homo sapiens
actcaattaagagta

SEQ ID NO: 1633545 - DNA, 15 bp, Homo sapiens
tactcaattaagagt

SEQ ID NO: 1633546 - DNA, 15 bp, Homo sapiens
ctactcaattaagag

SEQ ID NO: 1633547 - DNA, 15 bp, Homo sapiens
gctactcaattaaga

SEQ ID NO: 1633548 - DNA, 15 bp, Homo sapiens
agctactcaattaag

SEQ ID NO: 1633549 - DNA, 15 bp, Homo sapiens
aagctactcaattaa

SEQ ID NO: 1633550 - DNA, 15 bp, Homo sapiens
taagctactcaatta

SEQ ID NO: 1633551 - DNA, 15 bp, Homo sapiens
ttaagctactcaatt

SEQ ID NO: 1633552 - DNA, 15 bp, Homo sapiens
gttaagctactcaat

SEQ ID NO: 1633553 - DNA, 15 bp, Homo sapiens
ggttaagctactcaa

SEQ ID NO: 1633554 - DNA, 15 bp, Homo sapiens
tggttaagctactca

SEQ ID NO: 1633555 - DNA, 15 bp, Homo sapiens
ttggttaagctactc

SEQ ID NO: 1633556 - DNA, 15 bp, Homo sapiens
cttggttaagctact

SEQ ID NO: 1633557 - DNA, 15 bp, Homo sapiens
acttggttaagctac

SEQ ID NO: 1633558 - DNA, 15 bp, Homo sapiens
gacttggttaagcta

SEQ ID NO: 1633559 - DNA, 15 bp, Homo sapiens
tgacttggttaagct

SEQ ID NO: 1633560 - DNA, 15 bp, Homo sapiens
ttgacttggttaagc

SEQ ID NO: 1633561 - DNA, 15 bp, Homo sapiens
cttgacttggttaag

SEQ ID NO: 1633562 - DNA, 15 bp, Homo sapiens
gcttgacttggttaa

SEQ ID NO: 1633563 - DNA, 15 bp, Homo sapiens
ggcttgacttggtta

SEQ ID NO: 1633564 - DNA, 15 bp, Homo sapiens
tggcttgacttggtt

SEQ ID NO: 1633565 - DNA, 15 bp, Homo sapiens
gtggcttgacttggt

SEQ ID NO: 1633566 - DNA, 15 bp, Homo sapiens
tgtggcttgacttgg

SEQ ID NO: 1633567 - DNA, 15 bp, Homo sapiens
ctgtggcttgacttg

SEQ ID NO: 1633568 - DNA, 15 bp, Homo sapiens
tctgtggcttgactt

SEQ ID NO: 1633569 - DNA, 15 bp, Homo sapiens
atctgtggcttgact

SEQ ID NO: 1633570 - DNA, 15 bp, Homo sapiens
aatctgtggcttgac

SEQ ID NO: 1633571 - DNA, 15 bp, Homo sapiens
taatctgtggcttga

SEQ ID NO: 1633572 - DNA, 15 bp, Homo sapiens
ctaatctgtggcttg

SEQ ID NO: 1633573 - DNA, 15 bp, Homo sapiens
gctaatctgtggctt

SEQ ID NO: 1633574 - DNA, 15 bp, Homo sapiens
agctaatctgtggct

SEQ ID NO: 1633575 - DNA, 15 bp, Homo sapiens
cagctaatctgtggc

SEQ ID NO: 1633576 - DNA, 15 bp, Homo sapiens
tcagctaatctgtgg

SEQ ID NO: 1633577 - DNA, 15 bp, Homo sapiens
ttcagctaatctgtg

SEQ ID NO: 1633578 - DNA, 15 bp, Homo sapiens
cttcagctaatctgt

SEQ ID NO: 1633579 - DNA, 15 bp, Homo sapiens
gcttcagctaatctg

SEQ ID NO: 1633580 - DNA, 15 bp, Homo sapiens
ggcttcagctaatct

SEQ ID NO: 1633581 - DNA, 15 bp, Homo sapiens
tggcttcagctaatc

SEQ ID NO: 1633582 - DNA, 15 bp, Homo sapiens
ttggcttcagctaat

SEQ ID NO: 1633583 - DNA, 15 bp, Homo sapiens
tttggcttcagctaa

SEQ ID NO: 1633584 - DNA, 15 bp, Homo sapiens
ttttggcttcagcta

SEQ ID NO: 1633585 - DNA, 15 bp, Homo sapiens
tttttggcttcagct

SEQ ID NO: 1633586 - DNA, 15 bp, Homo sapiens
ctttttggcttcagc

SEQ ID NO: 1633587 - DNA, 15 bp, Homo sapiens
gctttttggcttcag

SEQ ID NO: 1633588 - DNA, 15 bp, Homo sapiens
tgctttttggcttca

SEQ ID NO: 1633589 - DNA, 15 bp, Homo sapiens
gtgctttttggcttc

SEQ ID NO: 1633590 - DNA, 15 bp, Homo sapiens
agtgctttttggctt

SEQ ID NO: 1633591 - DNA, 15 bp, Homo sapiens
cagtgctttttggct

SEQ ID NO: 1633592 - DNA, 15 bp, Homo sapiens
ccagtgctttttggc

SEQ ID NO: 1633593 - DNA, 15 bp, Homo sapiens
gccagtgctttttgg

SEQ ID NO: 1633594 - DNA, 15 bp, Homo sapiens
tgccagtgctttttg

SEQ ID NO: 1633595 - DNA, 15 bp, Homo sapiens
ctgccagtgcttttt

SEQ ID NO: 1633596 - DNA, 15 bp, Homo sapiens
gctgccagtgctttt

SEQ ID NO: 1633597 - DNA, 15 bp, Homo sapiens
tgctgccagtgcttt

SEQ ID NO: 1633598 - DNA, 15 bp, Homo sapiens
atgctgccagtgctt

SEQ ID NO: 1633599 - DNA, 15 bp, Homo sapiens
aatgctgccagtgct

SEQ ID NO: 1633600 - DNA, 15 bp, Homo sapiens
aaatgctgccagtgc

SEQ ID NO: 1633601 - DNA, 15 bp, Homo sapiens
caaatgctgccagtg

SEQ ID NO: 1633602 - DNA, 15 bp, Homo sapiens
tcaaatgctgccagt

SEQ ID NO: 1633603 - DNA, 15 bp, Homo sapiens
ttcaaatgctgccag

SEQ ID NO: 1633604 - DNA, 15 bp, Homo sapiens
tttcaaatgctgcca

SEQ ID NO: 1633605 - DNA, 15 bp, Homo sapiens
atttcaaatgctgcc

SEQ ID NO: 1633606 - DNA, 15 bp, Homo sapiens
tatttcaaatgctgc

SEQ ID NO: 1633607 - DNA, 15 bp, Homo sapiens
ttatttcaaatgctg

SEQ ID NO: 1633608 - DNA, 15 bp, Homo sapiens
gttatttcaaatgct

SEQ ID NO: 1633609 - DNA, 15 bp, Homo sapiens
agttatttcaaatgc

SEQ ID NO: 1633610 - DNA, 15 bp, Homo sapiens
cagttatttcaaatg

SEQ ID NO: 1633611 - DNA, 15 bp, Homo sapiens
tcagttatttcaaat

SEQ ID NO: 1633612 - DNA, 15 bp, Homo sapiens
ctcagttatttcaaa

SEQ ID NO: 1633613 - DNA, 15 bp, Homo sapiens
tctcagttatttcaa

SEQ ID NO: 1633614 - DNA, 15 bp, Homo sapiens
ttctcagttatttca

SEQ ID NO: 1633615 - DNA, 15 bp, Homo sapiens
gttctcagttatttc

SEQ ID NO: 1633616 - DNA, 15 bp, Homo sapiens
tgttctcagttattt

SEQ ID NO: 1633617 - DNA, 15 bp, Homo sapiens
atgttctcagttatt

SEQ ID NO: 1633618 - DNA, 15 bp, Homo sapiens
tatgttctcagttat

SEQ ID NO: 1633619 - DNA, 15 bp, Homo sapiens
atatgttctcagtta

SEQ ID NO: 1633620 - DNA, 15 bp, Homo sapiens
aatatgttctcagtt

SEQ ID NO: 1633621 - DNA, 15 bp, Homo sapiens
taatatgttctcagt

SEQ ID NO: 1633622 - DNA, 15 bp, Homo sapiens
ataatatgttctcag

SEQ ID NO: 1633623 - DNA, 15 bp, Homo sapiens
tataatatgttctca

SEQ ID NO: 1633624 - DNA, 15 bp, Homo sapiens
gtataatatgttctc

SEQ ID NO: 1633625 - DNA, 15 bp, Homo sapiens
agtataatatgttct

SEQ ID NO: 1633626 - DNA, 15 bp, Homo sapiens
aagtataatatgttc

SEQ ID NO: 1633627 - DNA, 15 bp, Homo sapiens
taagtataatatgtt

SEQ ID NO: 1633628 - DNA, 15 bp, Homo sapiens
ttaagtataatatgt

SEQ ID NO: 1633629 - DNA, 15 bp, Homo sapiens
gttaagtataatatg

SEQ ID NO: 1633630 - DNA, 15 bp, Homo sapiens
tgttaagtataatat

SEQ ID NO: 1633631 - DNA, 15 bp, Homo sapiens
gtgttaagtataata

SEQ ID NO: 1633632 - DNA, 15 bp, Homo sapiens
agtgttaagtataat

SEQ ID NO: 1633633 - DNA, 15 bp, Homo sapiens
aagtgttaagtataa

SEQ ID NO: 1633634 - DNA, 15 bp, Homo sapiens
aaagtgttaagtata

SEQ ID NO: 1633635 - DNA, 15 bp, Homo sapiens
taaagtgttaagtat

SEQ ID NO: 1633636 - DNA, 15 bp, Homo sapiens
ataaagtgttaagta

SEQ ID NO: 1633637 - DNA, 15 bp, Homo sapiens
ataataaagtgttaa

SEQ ID NO: 1633638 - DNA, 15 bp, Homo sapiens
gataataaagtgtta

SEQ ID NO: 1633639 - DNA, 15 bp, Homo sapiens
agataataaagtgtt

SEQ ID NO: 1633640 - DNA, 15 bp, Homo sapiens
tagataataaagtgt

SEQ ID NO: 1633641 - DNA, 15 bp, Homo sapiens
ttagataataaagtg

SEQ ID NO: 1633642 - DNA, 15 bp, Homo sapiens
cttagataataaagt

SEQ ID NO: 1633643 - DNA, 15 bp, Homo sapiens
tcttagataataaag

SEQ ID NO: 1633644 - DNA, 15 bp, Homo sapiens
ctcttagataataaa

SEQ ID NO: 1633645 - DNA, 15 bp, Homo sapiens
tctcttagataataa

SEQ ID NO: 1633646 - DNA, 15 bp, Homo sapiens
ctctcttagataata

SEQ ID NO: 1633647 - DNA, 15 bp, Homo sapiens
cctctcttagataat

SEQ ID NO: 1633648 - DNA, 15 bp, Homo sapiens
gcctctcttagataa

SEQ ID NO: 1633649 - DNA, 15 bp, Homo sapiens
tgcctctcttagata

SEQ ID NO: 1633650 - DNA, 15 bp, Homo sapiens
gtgcctctcttagat

SEQ ID NO: 1633651 - DNA, 15 bp, Homo sapiens
agtgcctctcttaga

SEQ ID NO: 1633652 - DNA, 15 bp, Homo sapiens
aagtgcctctcttag

SEQ ID NO: 1633653 - DNA, 15 bp, Homo sapiens
caagtgcctctctta

SEQ ID NO: 1633654 - DNA, 15 bp, Homo sapiens
tcaagtgcctctctt

SEQ ID NO: 1633655 - DNA, 15 bp, Homo sapiens
ttcaagtgcctctct

SEQ ID NO: 1633656 - DNA, 15 bp, Homo sapiens
cttcaagtgcctctc

SEQ ID NO: 1633657 - DNA, 15 bp, Homo sapiens
acttcaagtgcctct

SEQ ID NO: 1633658 - DNA, 15 bp, Homo sapiens
aacttcaagtgcctc

SEQ ID NO: 1633659 - DNA, 15 bp, Homo sapiens
caacttcaagtgcct

SEQ ID NO: 1633660 - DNA, 15 bp, Homo sapiens
tcaacttcaagtgcc

SEQ ID NO: 1633661 - DNA, 15 bp, Homo sapiens
ctcaacttcaagtgc

SEQ ID NO: 1633662 - DNA, 15 bp, Homo sapiens
tctcaacttcaagtg

SEQ ID NO: 1633663 - DNA, 15 bp, Homo sapiens
gtctcaacttcaagt

SEQ ID NO: 1633664 - DNA, 15 bp, Homo sapiens
ggtctcaacttcaag

SEQ ID NO: 1633665 - DNA, 15 bp, Homo sapiens
aggtctcaacttcaa

SEQ ID NO: 1633666 - DNA, 15 bp, Homo sapiens
taggtctcaacttca

SEQ ID NO: 1633667 - DNA, 15 bp, Homo sapiens
ctaggtctcaacttc

SEQ ID NO: 1633668 - DNA, 15 bp, Homo sapiens
tctaggtctcaactt

SEQ ID NO: 1633669 - DNA, 15 bp, Homo sapiens
ttctaggtctcaact

SEQ ID NO: 1633670 - DNA, 15 bp, Homo sapiens
tttctaggtctcaac

SEQ ID NO: 1633671 - DNA, 15 bp, Homo sapiens
atttctaggtctcaa

SEQ ID NO: 1633672 - DNA, 15 bp, Homo sapiens
aatttctaggtctca

SEQ ID NO: 1633673 - DNA, 15 bp, Homo sapiens
aaatttctaggtctc

SEQ ID NO: 1633674 - DNA, 15 bp, Homo sapiens
caaatttctaggtct

SEQ ID NO: 1633675 - DNA, 15 bp, Homo sapiens
tcaaatttctaggtc

SEQ ID NO: 1633676 - DNA, 15 bp, Homo sapiens
atcaaatttctaggt

SEQ ID NO: 1633677 - DNA, 15 bp, Homo sapiens
aatcaaatttctagg

SEQ ID NO: 1633678 - DNA, 15 bp, Homo sapiens
gaatcaaatttctag

SEQ ID NO: 1633679 - DNA, 15 bp, Homo sapiens
agaatcaaatttcta

SEQ ID NO: 1633680 - DNA, 15 bp, Homo sapiens
cagaatcaaatttct

SEQ ID NO: 1633681 - DNA, 15 bp, Homo sapiens
ccagaatcaaatttc

SEQ ID NO: 1633682 - DNA, 15 bp, Homo sapiens
cccagaatcaaattt

SEQ ID NO: 1633683 - DNA, 15 bp, Homo sapiens
acccagaatcaaatt

SEQ ID NO: 1633684 - DNA, 15 bp, Homo sapiens
aacccagaatcaaat

SEQ ID NO: 1633685 - DNA, 15 bp, Homo sapiens
gaacccagaatcaaa

SEQ ID NO: 1633686 - DNA, 15 bp, Homo sapiens
agaacccagaatcaa

SEQ ID NO: 1633687 - DNA, 15 bp, Homo sapiens
aagaacccagaatca

SEQ ID NO: 1633688 - DNA, 15 bp, Homo sapiens
aaagaacccagaatc

SEQ ID NO: 1633689 - DNA, 15 bp, Homo sapiens
caaagaacccagaat

SEQ ID NO: 1633690 - DNA, 15 bp, Homo sapiens
acaaagaacccagaa

SEQ ID NO: 1633691 - DNA, 15 bp, Homo sapiens
aacaaagaacccaga

SEQ ID NO: 1633692 - DNA, 15 bp, Homo sapiens
aaacaaagaacccag

SEQ ID NO: 1633693 - DNA, 15 bp, Homo sapiens
gaaacaaagaaccca

SEQ ID NO: 1633694 - DNA, 15 bp, Homo sapiens
agaaacaaagaaccc

SEQ ID NO: 1633695 - DNA, 15 bp, Homo sapiens
tagaaacaaagaacc

SEQ ID NO: 1633696 - DNA, 15 bp, Homo sapiens
ttagaaacaaagaac

SEQ ID NO: 1633697 - DNA, 15 bp, Homo sapiens
cttagaaacaaagaa

SEQ ID NO: 1633698 - DNA, 15 bp, Homo sapiens
ccttagaaacaaaga

SEQ ID NO: 1633699 - DNA, 15 bp, Homo sapiens
cccttagaaacaaag

SEQ ID NO: 1633700 - DNA, 15 bp, Homo sapiens
ccccttagaaacaaa

SEQ ID NO: 1633701 - DNA, 15 bp, Homo sapiens
gccccttagaaacaa

SEQ ID NO: 1633702 - DNA, 15 bp, Homo sapiens
tgccccttagaaaca

SEQ ID NO: 1633703 - DNA, 15 bp, Homo sapiens
ctgccccttagaaac

SEQ ID NO: 1633704 - DNA, 15 bp, Homo sapiens
cctgccccttagaaa

SEQ ID NO: 1633705 - DNA, 15 bp, Homo sapiens
ccctgccccttagaa

SEQ ID NO: 1633706 - DNA, 15 bp, Homo sapiens
accctgccccttaga

SEQ ID NO: 1633707 - DNA, 15 bp, Homo sapiens
caccctgccccttag

SEQ ID NO: 1633708 - DNA, 15 bp, Homo sapiens
tcaccctgcccctta

SEQ ID NO: 1633709 - DNA, 15 bp, Homo sapiens
ttcaccctgcccctt

SEQ ID NO: 1633710 - DNA, 15 bp, Homo sapiens
gttcaccctgcccct

SEQ ID NO: 1633711 - DNA, 15 bp, Homo sapiens
ggttcaccctgcccc

SEQ ID NO: 1633712 - DNA, 15 bp, Homo sapiens
gggttcaccctgccc

SEQ ID NO: 1633713 - DNA, 15 bp, Homo sapiens
tgggttcaccctgcc

SEQ ID NO: 1633714 - DNA, 15 bp, Homo sapiens
ctgggttcaccctgc

SEQ ID NO: 1633715 - DNA, 15 bp, Homo sapiens
gctgggttcaccctg

SEQ ID NO: 1633716 - DNA, 15 bp, Homo sapiens
agctgggttcaccct

SEQ ID NO: 1633717 - DNA, 15 bp, Homo sapiens
tagctgggttcaccc

SEQ ID NO: 1633718 - DNA, 15 bp, Homo sapiens
atagctgggttcacc

SEQ ID NO: 1633719 - DNA, 15 bp, Homo sapiens
tatagctgggttcac

SEQ ID NO: 1633720 - DNA, 15 bp, Homo sapiens
ctatagctgggttca

SEQ ID NO: 1633721 - DNA, 15 bp, Homo sapiens
gctatagctgggttc

SEQ ID NO: 1633722 - DNA, 15 bp, Homo sapiens
tgctatagctgggtt

SEQ ID NO: 1633723 - DNA, 15 bp, Homo sapiens
atgctatagctgggt

SEQ ID NO: 1633724 - DNA, 15 bp, Homo sapiens
aatgctatagctggg

SEQ ID NO: 1633725 - DNA, 15 bp, Homo sapiens
gaatgctatagctgg

SEQ ID NO: 1633726 - DNA, 15 bp, Homo sapiens
tgaatgctatagctg

SEQ ID NO: 1633727 - DNA, 15 bp, Homo sapiens
gtgaatgctatagct

SEQ ID NO: 1633728 - DNA, 15 bp, Homo sapiens
tgtgaatgctatagc

SEQ ID NO: 1633729 - DNA, 15 bp, Homo sapiens
ctgtgaatgctatag

SEQ ID NO: 1633730 - DNA, 15 bp, Homo sapiens
tctgtgaatgctata

SEQ ID NO: 1633731 - DNA, 15 bp, Homo sapiens
atctgtgaatgctat

SEQ ID NO: 1633732 - DNA, 15 bp, Homo sapiens
catctgtgaatgcta

SEQ ID NO: 1633733 - DNA, 15 bp, Homo sapiens
gcatctgtgaatgct

SEQ ID NO: 1633734 - DNA, 15 bp, Homo sapiens
agcatctgtgaatgc

SEQ ID NO: 1633735 - DNA, 15 bp, Homo sapiens
tagcatctgtgaatg

SEQ ID NO: 1633736 - DNA, 15 bp, Homo sapiens
atagcatctgtgaat

SEQ ID NO: 1633737 - DNA, 15 bp, Homo sapiens
tatagcatctgtgaa

SEQ ID NO: 1633738 - DNA, 15 bp, Homo sapiens
ctatagcatctgtga

SEQ ID NO: 1633739 - DNA, 15 bp, Homo sapiens
tctatagcatctgtg

SEQ ID NO: 1633740 - DNA, 15 bp, Homo sapiens
ttctatagcatctgt

SEQ ID NO: 1633741 - DNA, 15 bp, Homo sapiens
attctatagcatctg

SEQ ID NO: 1633742 - DNA, 15 bp, Homo sapiens
aattctatagcatct

SEQ ID NO: 1633743 - DNA, 15 bp, Homo sapiens
taattctatagcatc

SEQ ID NO: 1633744 - DNA, 15 bp, Homo sapiens
ataattctatagcat

SEQ ID NO: 1633745 - DNA, 15 bp, Homo sapiens
tataattctatagca

SEQ ID NO: 1633746 - DNA, 15 bp, Homo sapiens
atataattctatagc

SEQ ID NO: 1633747 - DNA, 15 bp, Homo sapiens
tatataattctatag

SEQ ID NO: 1633748 - DNA, 15 bp, Homo sapiens
atatataattctata

SEQ ID NO: 1633749 - DNA, 15 bp, Homo sapiens
tatatataattctat

SEQ ID NO: 1633750 - DNA, 15 bp, Homo sapiens
atatatataattcta

SEQ ID NO: 1633751 - DNA, 15 bp, Homo sapiens
aatatatataattct

SEQ ID NO: 1633752 - DNA, 15 bp, Homo sapiens
gaatatatataattc

SEQ ID NO: 1633753 - DNA, 15 bp, Homo sapiens
agaatatatataatt

SEQ ID NO: 1633754 - DNA, 15 bp, Homo sapiens
tagaatatatataat

SEQ ID NO: 1633755 - DNA, 15 bp, Homo sapiens
atagaatatatataa

SEQ ID NO: 1633756 - DNA, 15 bp, Homo sapiens
tatagaatatatata

SEQ ID NO: 1633757 - DNA, 15 bp, Homo sapiens
atatagaatatatat

SEQ ID NO: 1633758 - DNA, 15 bp, Homo sapiens
tatatagaatatata

SEQ ID NO: 1633759 - DNA, 15 bp, Homo sapiens
atatatagaatatat

SEQ ID NO: 1633760 - DNA, 15 bp, Homo sapiens
tatatatagaatata

SEQ ID NO: 1633761 - DNA, 15 bp, Homo sapiens
ttatatatagaatat

SEQ ID NO: 1633762 - DNA, 15 bp, Homo sapiens
attatatatagaata

SEQ ID NO: 1633763 - DNA, 15 bp, Homo sapiens
aattatatatagaat

SEQ ID NO: 1633764 - DNA, 15 bp, Homo sapiens
taattatatatagaa

SEQ ID NO: 1633765 - DNA, 15 bp, Homo sapiens
ataattatatataga

SEQ ID NO: 1633766 - DNA, 15 bp, Homo sapiens
aatatatataattat

SEQ ID NO: 1633767 - DNA, 15 bp, Homo sapiens
taatatatataatta

SEQ ID NO: 1633768 - DNA, 15 bp, Homo sapiens
gtaatatatataatt

SEQ ID NO: 1633769 - DNA, 15 bp, Homo sapiens
tgtaatatatataat

SEQ ID NO: 1633770 - DNA, 15 bp, Homo sapiens
atgtaatatatataa

SEQ ID NO: 1633771 - DNA, 15 bp, Homo sapiens
aatgtaatatatata

SEQ ID NO: 1633772 - DNA, 15 bp, Homo sapiens
gaatgtaatatatat

SEQ ID NO: 1633773 - DNA, 15 bp, Homo sapiens
tgaatgtaatatata

SEQ ID NO: 1633774 - DNA, 15 bp, Homo sapiens
atgaatgtaatatat

SEQ ID NO: 1633775 - DNA, 15 bp, Homo sapiens
tatgaatgtaatata

SEQ ID NO: 1633776 - DNA, 15 bp, Homo sapiens
atatgaatgtaatat

SEQ ID NO: 1633777 - DNA, 15 bp, Homo sapiens
aatatgaatgtaata

SEQ ID NO: 1633778 - DNA, 15 bp, Homo sapiens
taatatgaatgtaat

SEQ ID NO: 1633779 - DNA, 15 bp, Homo sapiens
ttaatatgaatgtaa

SEQ ID NO: 1633780 - DNA, 15 bp, Homo sapiens
attaatatgaatgta

SEQ ID NO: 1633781 - DNA, 15 bp, Homo sapiens
tattaatatgaatgt

SEQ ID NO: 1633782 - DNA, 15 bp, Homo sapiens
atattaatatgaatg

SEQ ID NO: 1633783 - DNA, 15 bp, Homo sapiens
tatattaatatgaat

SEQ ID NO: 1633784 - DNA, 15 bp, Homo sapiens
atatattaatatgaa

SEQ ID NO: 1633785 - DNA, 15 bp, Homo sapiens
catatattaatatga

SEQ ID NO: 1633786 - DNA, 15 bp, Homo sapiens
acatatattaatatg

SEQ ID NO: 1633787 - DNA, 15 bp, Homo sapiens
aacatatattaatat

SEQ ID NO: 1633788 - DNA, 15 bp, Homo sapiens
taacatatattaata

SEQ ID NO: 1633789 - DNA, 15 bp, Homo sapiens
ttaacatatattaat

SEQ ID NO: 1633790 - DNA, 15 bp, Homo sapiens
attaacatatattaa

SEQ ID NO: 1633791 - DNA, 15 bp, Homo sapiens
tattaacatatatta

SEQ ID NO: 1633792 - DNA, 15 bp, Homo sapiens
atattaacatatatt

SEQ ID NO: 1633793 - DNA, 15 bp, Homo sapiens
tatattaacatatat

SEQ ID NO: 1633794 - DNA, 15 bp, Homo sapiens
atatattaacatata

SEQ ID NO: 1633795 - DNA, 15 bp, Homo sapiens
aatatattaacatat

SEQ ID NO: 1633796 - DNA, 15 bp, Homo sapiens
gaatatattaacata

SEQ ID NO: 1633797 - DNA, 15 bp, Homo sapiens
agaatatattaacat

SEQ ID NO: 1633798 - DNA, 15 bp, Homo sapiens
tagaatatattaaca

SEQ ID NO: 1633799 - DNA, 15 bp, Homo sapiens
atagaatatattaac

SEQ ID NO: 1633800 - DNA, 15 bp, Homo sapiens
tatagaatatattaa

SEQ ID NO: 1633801 - DNA, 15 bp, Homo sapiens
atatagaatatatta

SEQ ID NO: 1633802 - DNA, 15 bp, Homo sapiens
aatatagaatatatt

SEQ ID NO: 1633803 - DNA, 15 bp, Homo sapiens
taatatagaatatat

SEQ ID NO: 1633804 - DNA, 15 bp, Homo sapiens
ataatatagaatata

SEQ ID NO: 1633805 - DNA, 15 bp, Homo sapiens
aataatatagaatat

SEQ ID NO: 1633806 - DNA, 15 bp, Homo sapiens
gaataatatagaata

SEQ ID NO: 1633807 - DNA, 15 bp, Homo sapiens
tgaataatatagaat

SEQ ID NO: 1633808 - DNA, 15 bp, Homo sapiens
atgaataatatagaa

SEQ ID NO: 1633809 - DNA, 15 bp, Homo sapiens
tatgaataatataga

SEQ ID NO: 1633810 - DNA, 15 bp, Homo sapiens
atatgaataatatag

SEQ ID NO: 1633811 - DNA, 15 bp, Homo sapiens
tatatgaataatata

SEQ ID NO: 1633812 - DNA, 15 bp, Homo sapiens
ctatatgaataatat

SEQ ID NO: 1633813 - DNA, 15 bp, Homo sapiens
tctatatgaataata

SEQ ID NO: 1633814 - DNA, 15 bp, Homo sapiens
ttctatatgaataat

SEQ ID NO: 1633815 - DNA, 15 bp, Homo sapiens
attctatatgaataa

SEQ ID NO: 1633816 - DNA, 15 bp, Homo sapiens
aattctatatgaata

SEQ ID NO: 1633817 - DNA, 15 bp, Homo sapiens
gaattctatatgaat

SEQ ID NO: 1633818 - DNA, 15 bp, Homo sapiens
tgaattctatatgaa

SEQ ID NO: 1633819 - DNA, 15 bp, Homo sapiens
gtgaattctatatga

SEQ ID NO: 1633820 - DNA, 15 bp, Homo sapiens
tgtgaattctatatg

SEQ ID NO: 1633821 - DNA, 15 bp, Homo sapiens
ctgtgaattctatat

SEQ ID NO: 1633822 - DNA, 15 bp, Homo sapiens
tctgtgaattctata

SEQ ID NO: 1633823 - DNA, 15 bp, Homo sapiens
atctgtgaattctat

SEQ ID NO: 1633824 - DNA, 15 bp, Homo sapiens
tatctgtgaattcta

SEQ ID NO: 1633825 - DNA, 15 bp, Homo sapiens
ttatctgtgaattct

SEQ ID NO: 1633826 - DNA, 15 bp, Homo sapiens
attatctgtgaattc

SEQ ID NO: 1633827 - DNA, 15 bp, Homo sapiens
gattatctgtgaatt

SEQ ID NO: 1633828 - DNA, 15 bp, Homo sapiens
ggattatctgtgaat

SEQ ID NO: 1633829 - DNA, 15 bp, Homo sapiens
tggattatctgtgaa

SEQ ID NO: 1633830 - DNA, 15 bp, Homo sapiens
ttggattatctgtga

SEQ ID NO: 1633831 - DNA, 15 bp, Homo sapiens
cttggattatctgtg

SEQ ID NO: 1633832 - DNA, 15 bp, Homo sapiens
acttggattatctgt

SEQ ID NO: 1633833 - DNA, 15 bp, Homo sapiens
cacttggattatctg

SEQ ID NO: 1633834 - DNA, 15 bp, Homo sapiens
gcacttggattatct

SEQ ID NO: 1633835 - DNA, 15 bp, Homo sapiens
agcacttggattatc

SEQ ID NO: 1633836 - DNA, 15 bp, Homo sapiens
aagcacttggattat

SEQ ID NO: 1633837 - DNA, 15 bp, Homo sapiens
aaagcacttggatta

SEQ ID NO: 1633838 - DNA, 15 bp, Homo sapiens
aaaagcacttggatt

SEQ ID NO: 1633839 - DNA, 15 bp, Homo sapiens
aaaaagcacttggat

SEQ ID NO: 1633840 - DNA, 15 bp, Homo sapiens
aaaaaagcacttgga

SEQ ID NO: 1633841 - DNA, 15 bp, Homo sapiens
taaaaaagcacttgg

SEQ ID NO: 1633842 - DNA, 15 bp, Homo sapiens
gaagcttgggcccat

SEQ ID NO: 1633843 - DNA, 15 bp, Homo sapiens
tgaagcttgggccca

SEQ ID NO: 1633844 - DNA, 15 bp, Homo sapiens
ttgaagcttgggccc

SEQ ID NO: 1633845 - DNA, 15 bp, Homo sapiens
tttgaagcttgggcc

SEQ ID NO: 1633846 - DNA, 15 bp, Homo sapiens
ttttgaagcttgggc

SEQ ID NO: 1633847 - DNA, 15 bp, Homo sapiens
cttttgaagcttggg

SEQ ID NO: 1633848 - DNA, 15 bp, Homo sapiens
tcttttgaagcttgg

SEQ ID NO: 1633849 - DNA, 15 bp, Homo sapiens
ttcttttgaagcttg

SEQ ID NO: 1633850 - DNA, 15 bp, Homo sapiens
cttcttttgaagctt

SEQ ID NO: 1633851 - DNA, 15 bp, Homo sapiens
ccttcttttgaagct

SEQ ID NO: 1633852 - DNA, 15 bp, Homo sapiens
tccttcttttgaagc

SEQ ID NO: 1633853 - DNA, 15 bp, Homo sapiens
ttccttcttttgaag

SEQ ID NO: 1633854 - DNA, 15 bp, Homo sapiens
tttccttcttttgaa

SEQ ID NO: 1633855 - DNA, 15 bp, Homo sapiens
ttttccttcttttga

SEQ ID NO: 1633856 - DNA, 15 bp, Homo sapiens
attttccttcttttg

SEQ ID NO: 1633857 - DNA, 15 bp, Homo sapiens
aattttccttctttt

SEQ ID NO: 1633858 - DNA, 15 bp, Homo sapiens
taattttccttcttt

SEQ ID NO: 1633859 - DNA, 15 bp, Homo sapiens
gccatcctcccacct

SEQ ID NO: 1633860 - DNA, 15 bp, Homo sapiens
agccatcctcccacc

SEQ ID NO: 1633861 - DNA, 15 bp, Homo sapiens
aagccatcctcccac

SEQ ID NO: 1633862 - DNA, 15 bp, Homo sapiens
taagccatcctccca

SEQ ID NO: 1633863 - DNA, 15 bp, Homo sapiens
ttaagccatcctccc

SEQ ID NO: 1633864 - DNA, 15 bp, Homo sapiens
tttaagccatcctcc

SEQ ID NO: 1633865 - DNA, 15 bp, Homo sapiens
gtttaagccatcctc

SEQ ID NO: 1633866 - DNA, 15 bp, Homo sapiens
ggtttaagccatcct

SEQ ID NO: 1633867 - DNA, 15 bp, Homo sapiens
gggtttaagccatcc

SEQ ID NO: 1633868 - DNA, 15 bp, Homo sapiens
tgggtttaagccatc

SEQ ID NO: 1633869 - DNA, 15 bp, Homo sapiens
atgggtttaagccat

SEQ ID NO: 1633870 - DNA, 15 bp, Homo sapiens
tatgggtttaagcca

SEQ ID NO: 1633871 - DNA, 15 bp, Homo sapiens
ttatgggtttaagcc

SEQ ID NO: 1633872 - DNA, 15 bp, Homo sapiens
cttatgggtttaagc

SEQ ID NO: 1633873 - DNA, 15 bp, Homo sapiens
ccttatgggtttaag

SEQ ID NO: 1633874 - DNA, 15 bp, Homo sapiens
accttatgggtttaa

SEQ ID NO: 1633875 - DNA, 15 bp, Homo sapiens
caccttatgggttta

SEQ ID NO: 1633876 - DNA, 15 bp, Homo sapiens
ccaccttatgggttt

SEQ ID NO: 1633877 - DNA, 15 bp, Homo sapiens
tccaccttatgggtt

SEQ ID NO: 1633878 - DNA, 15 bp, Homo sapiens
ctccaccttatgggt

SEQ ID NO: 1633879 - DNA, 15 bp, Homo sapiens
tctccaccttatggg

SEQ ID NO: 1633880 - DNA, 15 bp, Homo sapiens
atctccaccttatgg

SEQ ID NO: 1633881 - DNA, 15 bp, Homo sapiens
aatctccaccttatg

SEQ ID NO: 1633882 - DNA, 15 bp, Homo sapiens
taatctccaccttat

SEQ ID NO: 1633883 - DNA, 15 bp, Homo sapiens
gtaatctccacctta

SEQ ID NO: 1633884 - DNA, 15 bp, Homo sapiens
tgtaatctccacctt

SEQ ID NO: 1633885 - DNA, 15 bp, Homo sapiens
ttgtaatctccacct

SEQ ID NO: 1633886 - DNA, 15 bp, Homo sapiens
attgtaatctccacc

SEQ ID NO: 1633887 - DNA, 15 bp, Homo sapiens
cattgtaatctccac

SEQ ID NO: 1633888 - DNA, 15 bp, Homo sapiens
tcattgtaatctcca

SEQ ID NO: 1633889 - DNA, 15 bp, Homo sapiens
ctcattgtaatctcc

SEQ ID NO: 1633890 - DNA, 15 bp, Homo sapiens
gctcattgtaatctc

SEQ ID NO: 1633891 - DNA, 15 bp, Homo sapiens
ggctcattgtaatct

SEQ ID NO: 1633892 - DNA, 15 bp, Homo sapiens
tggctcattgtaatc

SEQ ID NO: 1633893 - DNA, 15 bp, Homo sapiens
ttggctcattgtaat

SEQ ID NO: 1633894 - DNA, 15 bp, Homo sapiens
cttggctcattgtaa

SEQ ID NO: 1633895 - DNA, 15 bp, Homo sapiens
tcttggctcattgta

SEQ ID NO: 1633896 - DNA, 15 bp, Homo sapiens
atcttggctcattgt

SEQ ID NO: 1633897 - DNA, 15 bp, Homo sapiens
tgatcttggctcatt

SEQ ID NO: 1633898 - DNA, 15 bp, Homo sapiens
atgatcttggctcat

SEQ ID NO: 1633899 - DNA, 15 bp, Homo sapiens
ctgtccaggctggag

SEQ ID NO: 1633900 - DNA, 15 bp, Homo sapiens
actgtccaggctgga

SEQ ID NO: 1633901 - DNA, 15 bp, Homo sapiens
tactgtccaggctgg

SEQ ID NO: 1633902 - DNA, 15 bp, Homo sapiens
ctactgtccaggctg

SEQ ID NO: 1633903 - DNA, 15 bp, Homo sapiens
tctactgtccaggct

SEQ ID NO: 1633904 - DNA, 15 bp, Homo sapiens
ctctactgtccaggc

SEQ ID NO: 1633905 - DNA, 15 bp, Homo sapiens
gctctactgtccagg

SEQ ID NO: 1633906 - DNA, 15 bp, Homo sapiens
ggctctactgtccag

SEQ ID NO: 1633907 - DNA, 15 bp, Homo sapiens
tggctctactgtcca

SEQ ID NO: 1633908 - DNA, 15 bp, Homo sapiens
ctggctctactgtcc

SEQ ID NO: 1633909 - DNA, 15 bp, Homo sapiens
tctggctctactgtc

SEQ ID NO: 1633910 - DNA, 15 bp, Homo sapiens
ttctggctctactgt

SEQ ID NO: 1633911 - DNA, 15 bp, Homo sapiens
gttctggctctactg

SEQ ID NO: 1633912 - DNA, 15 bp, Homo sapiens
agttctggctctact

SEQ ID NO: 1633913 - DNA, 15 bp, Homo sapiens
aagttctggctctac

SEQ ID NO: 1633914 - DNA, 15 bp, Homo sapiens
gaagttctggctcta

SEQ ID NO: 1633915 - DNA, 15 bp, Homo sapiens
agaagttctggctct

SEQ ID NO: 1633916 - DNA, 15 bp, Homo sapiens
gagaagttctggctc

SEQ ID NO: 1633917 - DNA, 15 bp, Homo sapiens
agagaagttctggct

SEQ ID NO: 1633918 - DNA, 15 bp, Homo sapiens
gagagaagttctggc

SEQ ID NO: 1633919 - DNA, 15 bp, Homo sapiens
tgagagaagttctgg

SEQ ID NO: 1633920 - DNA, 15 bp, Homo sapiens
ttgagagaagttctg

SEQ ID NO: 1633921 - DNA, 15 bp, Homo sapiens
tttgagagaagttct

SEQ ID NO: 1633922 - DNA, 15 bp, Homo sapiens
ttttgagagaagttc

SEQ ID NO: 1633923 - DNA, 15 bp, Homo sapiens
tttttgagagaagtt

SEQ ID NO: 1633924 - DNA, 15 bp, Homo sapiens
ttttttgagagaagt

SEQ ID NO: 1633925 - DNA, 15 bp, Homo sapiens
tttttttgagagaag

SEQ ID NO: 1633926 - DNA, 15 bp, Homo sapiens
atttttttgagagaa

SEQ ID NO: 1633927 - DNA, 15 bp, Homo sapiens
tatttttttgagaga

SEQ ID NO: 1633928 - DNA, 15 bp, Homo sapiens
ttatttttttgagag

SEQ ID NO: 1633929 - DNA, 15 bp, Homo sapiens
ttttatttttttgag

SEQ ID NO: 1633930 - DNA, 15 bp, Homo sapiens
tttttatttttttga

SEQ ID NO: 1633931 - DNA, 15 bp, Homo sapiens
ttttttatttttttg

SEQ ID NO: 1633932 - DNA, 15 bp, Homo sapiens
cttttttattttttt

SEQ ID NO: 1633933 - DNA, 15 bp, Homo sapiens
tcttttttatttttt

SEQ ID NO: 1633934 - DNA, 15 bp, Homo sapiens
ttcttttttattttt

SEQ ID NO: 1633935 - DNA, 15 bp, Homo sapiens
tttcttttttatttt

SEQ ID NO: 1633936 - DNA, 15 bp, Homo sapiens
ctttcttttttattt

SEQ ID NO: 1633937 - DNA, 15 bp, Homo sapiens
tctttcttttttatt

SEQ ID NO: 1633938 - DNA, 15 bp, Homo sapiens
gtttctttctttttt

SEQ ID NO: 1633939 - DNA, 15 bp, Homo sapiens
agtttctttcttttt

SEQ ID NO: 1633940 - DNA, 15 bp, Homo sapiens
tagtttctttctttt

SEQ ID NO: 1633941 - DNA, 15 bp, Homo sapiens
atagtttctttcttt

SEQ ID NO: 1633942 - DNA, 15 bp, Homo sapiens
tatagtttctttctt

SEQ ID NO: 1633943 - DNA, 15 bp, Homo sapiens
gtatagtttctttct

SEQ ID NO: 1633944 - DNA, 15 bp, Homo sapiens
tgtatagtttctttc

SEQ ID NO: 1633945 - DNA, 15 bp, Homo sapiens
ttgtatagtttcttt

SEQ ID NO: 1633946 - DNA, 15 bp, Homo sapiens
attgtatagtttctt

SEQ ID NO: 1633947 - DNA, 15 bp, Homo sapiens
cattgtatagtttct

SEQ ID NO: 1633948 - DNA, 15 bp, Homo sapiens
gcattgtatagtttc

SEQ ID NO: 1633949 - DNA, 15 bp, Homo sapiens
agcattgtatagttt

SEQ ID NO: 1633950 - DNA, 15 bp, Homo sapiens
gagcattgtatagtt

SEQ ID NO: 1633951 - DNA, 15 bp, Homo sapiens
ggagcattgtatagt

SEQ ID NO: 1633952 - DNA, 15 bp, Homo sapiens
aggagcattgtatag

SEQ ID NO: 1633953 - DNA, 15 bp, Homo sapiens
caggagcattgtata

SEQ ID NO: 1633954 - DNA, 15 bp, Homo sapiens
acaggagcattgtat

SEQ ID NO: 1633955 - DNA, 15 bp, Homo sapiens
cacaggagcattgta

SEQ ID NO: 1633956 - DNA, 15 bp, Homo sapiens
tcacaggagcattgt

SEQ ID NO: 1633957 - DNA, 15 bp, Homo sapiens
atcacaggagcattg

SEQ ID NO: 1633958 - DNA, 15 bp, Homo sapiens
aatcacaggagcatt

SEQ ID NO: 1633959 - DNA, 15 bp, Homo sapiens
gaatcacaggagcat

SEQ ID NO: 1633960 - DNA, 15 bp, Homo sapiens
agaatcacaggagca

SEQ ID NO: 1633961 - DNA, 15 bp, Homo sapiens
tagaatcacaggagc

SEQ ID NO: 1633962 - DNA, 15 bp, Homo sapiens
ctagaatcacaggag

SEQ ID NO: 1633963 - DNA, 15 bp, Homo sapiens
actagaatcacagga

SEQ ID NO: 1633964 - DNA, 15 bp, Homo sapiens
cactagaatcacagg

SEQ ID NO: 1633965 - DNA, 15 bp, Homo sapiens
gcactagaatcacag

SEQ ID NO: 1633966 - DNA, 15 bp, Homo sapiens
agcactagaatcaca

SEQ ID NO: 1633967 - DNA, 15 bp, Homo sapiens
tagcactagaatcac

SEQ ID NO: 1633968 - DNA, 15 bp, Homo sapiens
atagcactagaatca

SEQ ID NO: 1633969 - DNA, 15 bp, Homo sapiens
catagcactagaatc

SEQ ID NO: 1633970 - DNA, 15 bp, Homo sapiens
acatagcactagaat

SEQ ID NO: 1633971 - DNA, 15 bp, Homo sapiens
tacatagcactagaa

SEQ ID NO: 1633972 - DNA, 15 bp, Homo sapiens
gtacatagcactaga

SEQ ID NO: 1633973 - DNA, 15 bp, Homo sapiens
tgtacatagcactag

SEQ ID NO: 1633974 - DNA, 15 bp, Homo sapiens
atgtacatagcacta

SEQ ID NO: 1633975 - DNA, 15 bp, Homo sapiens
tatgtacatagcact

SEQ ID NO: 1633976 - DNA, 15 bp, Homo sapiens
atatgtacatagcac

SEQ ID NO: 1633977 - DNA, 15 bp, Homo sapiens
tatatgtacatagca

SEQ ID NO: 1633978 - DNA, 15 bp, Homo sapiens
atatatgtacatagc

SEQ ID NO: 1633979 - DNA, 15 bp, Homo sapiens
gatatatgtacatag

SEQ ID NO: 1633980 - DNA, 15 bp, Homo sapiens
ggatatatgtacata

SEQ ID NO: 1633981 - DNA, 15 bp, Homo sapiens
aggatatatgtacat

SEQ ID NO: 1633982 - DNA, 15 bp, Homo sapiens
aaggatatatgtaca

SEQ ID NO: 1633983 - DNA, 15 bp, Homo sapiens
aaaggatatatgtac

SEQ ID NO: 1633984 - DNA, 15 bp, Homo sapiens
taaaggatatatgta

SEQ ID NO: 1633985 - DNA, 15 bp, Homo sapiens
ataaaggatatatgt

SEQ ID NO: 1633986 - DNA, 15 bp, Homo sapiens
tataaaggatatatg

SEQ ID NO: 1633987 - DNA, 15 bp, Homo sapiens
ctataaaggatatat

SEQ ID NO: 1633988 - DNA, 15 bp, Homo sapiens
cctataaaggatata

SEQ ID NO: 1633989 - DNA, 15 bp, Homo sapiens
ccctataaaggatat

SEQ ID NO: 1633990 - DNA, 15 bp, Homo sapiens
tccctataaaggata

SEQ ID NO: 1633991 - DNA, 15 bp, Homo sapiens
ttccctataaaggat

SEQ ID NO: 1633992 - DNA, 15 bp, Homo sapiens
attccctataaagga

SEQ ID NO: 1633993 - DNA, 15 bp, Homo sapiens
aattccctataaagg

SEQ ID NO: 1633994 - DNA, 15 bp, Homo sapiens
taattccctataaag

SEQ ID NO: 1633995 - DNA, 15 bp, Homo sapiens
ttaattccctataaa

SEQ ID NO: 1633996 - DNA, 15 bp, Homo sapiens
cttaattccctataa

SEQ ID NO: 1633997 - DNA, 15 bp, Homo sapiens
ccttaattccctata

SEQ ID NO: 1633998 - DNA, 15 bp, Homo sapiens
tccttaattccctat

SEQ ID NO: 1633999 - DNA, 15 bp, Homo sapiens
ctccttaattcccta

SEQ ID NO: 1634000 - DNA, 15 bp, Homo sapiens
cctccttaattccct

SEQ ID NO: 1634001 - DNA, 15 bp, Homo sapiens
acctccttaattccc

SEQ ID NO: 1634002 - DNA, 15 bp, Homo sapiens
aacctccttaattcc

SEQ ID NO: 1634003 - DNA, 15 bp, Homo sapiens
taacctccttaattc

SEQ ID NO: 1634004 - DNA, 15 bp, Homo sapiens
ataacctccttaatt

SEQ ID NO: 1634005 - DNA, 15 bp, Homo sapiens
tataacctccttaat

SEQ ID NO: 1634006 - DNA, 15 bp, Homo sapiens
ctataacctccttaa

SEQ ID NO: 1634007 - DNA, 15 bp, Homo sapiens
tctataacctcctta

SEQ ID NO: 1634008 - DNA, 15 bp, Homo sapiens
gtctataacctcctt

SEQ ID NO: 1634009 - DNA, 15 bp, Homo sapiens
tgtctataacctcct

SEQ ID NO: 1634010 - DNA, 15 bp, Homo sapiens
gtgtctataacctcc

SEQ ID NO: 1634011 - DNA, 15 bp, Homo sapiens
tgtgtctataacctc

SEQ ID NO: 1634012 - DNA, 15 bp, Homo sapiens
ttgtgtctataacct

SEQ ID NO: 1634013 - DNA, 15 bp, Homo sapiens
gttgtgtctataacc

SEQ ID NO: 1634014 - DNA, 15 bp, Homo sapiens
ggttgtgtctataac

SEQ ID NO: 1634015 - DNA, 15 bp, Homo sapiens
tggttgtgtctataa

SEQ ID NO: 1634016 - DNA, 15 bp, Homo sapiens
ctggttgtgtctata

SEQ ID NO: 1634017 - DNA, 15 bp, Homo sapiens
tctggttgtgtctat

SEQ ID NO: 1634018 - DNA, 15 bp, Homo sapiens
ttctggttgtgtcta

SEQ ID NO: 1634019 - DNA, 15 bp, Homo sapiens
cttctggttgtgtct

SEQ ID NO: 1634020 - DNA, 15 bp, Homo sapiens
tcttctggttgtgtc

SEQ ID NO: 1634021 - DNA, 15 bp, Homo sapiens
ctcttctggttgtgt

SEQ ID NO: 1634022 - DNA, 15 bp, Homo sapiens
cctcttctggttgtg

SEQ ID NO: 1634023 - DNA, 15 bp, Homo sapiens
tcctcttctggttgt

SEQ ID NO: 1634024 - DNA, 15 bp, Homo sapiens
ctcctcttctggttg

SEQ ID NO: 1634025 - DNA, 15 bp, Homo sapiens
cctcctcttctggtt

SEQ ID NO: 1634026 - DNA, 15 bp, Homo sapiens
gcctcctcttctggt

SEQ ID NO: 1634027 - DNA, 15 bp, Homo sapiens
tgcctcctcttctgg

SEQ ID NO: 1634028 - DNA, 15 bp, Homo sapiens
atgcctcctcttctg

SEQ ID NO: 1634029 - DNA, 15 bp, Homo sapiens
catgcctcctcttct

SEQ ID NO: 1634030 - DNA, 15 bp, Homo sapiens
ccatgcctcctcttc

SEQ ID NO: 1634031 - DNA, 15 bp, Homo sapiens
tccatgcctcctctt

SEQ ID NO: 1634032 - DNA, 15 bp, Homo sapiens
ttccatgcctcctct

SEQ ID NO: 1634033 - DNA, 15 bp, Homo sapiens
attccatgcctcctc

SEQ ID NO: 1634034 - DNA, 15 bp, Homo sapiens
tattccatgcctcct

SEQ ID NO: 1634035 - DNA, 15 bp, Homo sapiens
ctattccatgcctcc

SEQ ID NO: 1634036 - DNA, 15 bp, Homo sapiens
tctattccatgcctc

SEQ ID NO: 1634037 - DNA, 15 bp, Homo sapiens
gtctattccatgcct

SEQ ID NO: 1634038 - DNA, 15 bp, Homo sapiens
agtctattccatgcc

SEQ ID NO: 1634039 - DNA, 15 bp, Homo sapiens
tagtctattccatgc

SEQ ID NO: 1634040 - DNA, 15 bp, Homo sapiens
ttagtctattccatg

SEQ ID NO: 1634041 - DNA, 15 bp, Homo sapiens
attagtctattccat

SEQ ID NO: 1634042 - DNA, 15 bp, Homo sapiens
cattagtctattcca

SEQ ID NO: 1634043 - DNA, 15 bp, Homo sapiens
acattagtctattcc

SEQ ID NO: 1634044 - DNA, 15 bp, Homo sapiens
tacattagtctattc

SEQ ID NO: 1634045 - DNA, 15 bp, Homo sapiens
atacattagtctatt

SEQ ID NO: 1634046 - DNA, 15 bp, Homo sapiens
tatacattagtctat

SEQ ID NO: 1634047 - DNA, 15 bp, Homo sapiens
ttatacattagtcta

SEQ ID NO: 1634048 - DNA, 15 bp, Homo sapiens
attatacattagtct

SEQ ID NO: 1634049 - DNA, 15 bp, Homo sapiens
cattatacattagtc

SEQ ID NO: 1634050 - DNA, 15 bp, Homo sapiens
ccattatacattagt

SEQ ID NO: 1634051 - DNA, 15 bp, Homo sapiens
tccattatacattag

SEQ ID NO: 1634052 - DNA, 15 bp, Homo sapiens
atccattatacatta

SEQ ID NO: 1634053 - DNA, 15 bp, Homo sapiens
tatccattatacatt

SEQ ID NO: 1634054 - DNA, 15 bp, Homo sapiens
ctatccattatacat

SEQ ID NO: 1634055 - DNA, 15 bp, Homo sapiens
cctatccattataca

SEQ ID NO: 1634056 - DNA, 15 bp, Homo sapiens
tcctatccattatac

SEQ ID NO: 1634057 - DNA, 15 bp, Homo sapiens
ttcctatccattata

SEQ ID NO: 1634058 - DNA, 15 bp, Homo sapiens
tttcctatccattat

SEQ ID NO: 1634059 - DNA, 15 bp, Homo sapiens
ctttcctatccatta

SEQ ID NO: 1634060 - DNA, 15 bp, Homo sapiens
actttcctatccatt

SEQ ID NO: 1634061 - DNA, 15 bp, Homo sapiens
cactttcctatccat

SEQ ID NO: 1634062 - DNA, 15 bp, Homo sapiens
acactttcctatcca

SEQ ID NO: 1634063 - DNA, 15 bp, Homo sapiens
tacactttcctatcc

SEQ ID NO: 1634064 - DNA, 15 bp, Homo sapiens
atacactttcctatc

SEQ ID NO: 1634065 - DNA, 15 bp, Homo sapiens
gatacactttcctat

SEQ ID NO: 1634066 - DNA, 15 bp, Homo sapiens
agatacactttccta

SEQ ID NO: 1634067 - DNA, 15 bp, Homo sapiens
aagatacactttcct

SEQ ID NO: 1634068 - DNA, 15 bp, Homo sapiens
aaagatacactttcc

SEQ ID NO: 1634069 - DNA, 15 bp, Homo sapiens
aaaagatacactttc

SEQ ID NO: 1634070 - DNA, 15 bp, Homo sapiens
taaaagatacacttt

SEQ ID NO: 1634071 - DNA, 15 bp, Homo sapiens
gtaaaagatacactt

SEQ ID NO: 1634072 - DNA, 15 bp, Homo sapiens
tgtaaaagatacact

SEQ ID NO: 1634073 - DNA, 15 bp, Homo sapiens
ttgtaaaagatacac

SEQ ID NO: 1634074 - DNA, 15 bp, Homo sapiens
gttgtaaaagataca

SEQ ID NO: 1634075 - DNA, 15 bp, Homo sapiens
agttgtaaaagatac

SEQ ID NO: 1634076 - DNA, 15 bp, Homo sapiens
aagttgtaaaagata

SEQ ID NO: 1634077 - DNA, 15 bp, Homo sapiens
gaagttgtaaaagat

SEQ ID NO: 1634078 - DNA, 15 bp, Homo sapiens
agaagttgtaaaaga

SEQ ID NO: 1634079 - DNA, 15 bp, Homo sapiens
gagaagttgtaaaag

SEQ ID NO: 1634080 - DNA, 15 bp, Homo sapiens
agagaagttgtaaaa

SEQ ID NO: 1634081 - DNA, 15 bp, Homo sapiens
cagagaagttgtaaa

SEQ ID NO: 1634082 - DNA, 15 bp, Homo sapiens
acagagaagttgtaa

SEQ ID NO: 1634083 - DNA, 15 bp, Homo sapiens
tacagagaagttgta

SEQ ID NO: 1634084 - DNA, 15 bp, Homo sapiens
ttacagagaagttgt

SEQ ID NO: 1634085 - DNA, 15 bp, Homo sapiens
tttacagagaagttg

SEQ ID NO: 1634086 - DNA, 15 bp, Homo sapiens
ttttacagagaagtt

SEQ ID NO: 1634087 - DNA, 15 bp, Homo sapiens
tttttacagagaagt

SEQ ID NO: 1634088 - DNA, 15 bp, Homo sapiens
gtttttacagagaag

SEQ ID NO: 1634089 - DNA, 15 bp, Homo sapiens
tgtttttacagagaa

SEQ ID NO: 1634090 - DNA, 15 bp, Homo sapiens
gtgtttttacagaga

SEQ ID NO: 1634091 - DNA, 15 bp, Homo sapiens
ggtgtttttacagag

SEQ ID NO: 1634092 - DNA, 15 bp, Homo sapiens
aggtgtttttacaga

SEQ ID NO: 1634093 - DNA, 15 bp, Homo sapiens
aaggtgtttttacag

SEQ ID NO: 1634094 - DNA, 15 bp, Homo sapiens
gaaggtgtttttaca

SEQ ID NO: 1634095 - DNA, 15 bp, Homo sapiens
tgaaggtgtttttac

SEQ ID NO: 1634096 - DNA, 15 bp, Homo sapiens
gtgaaggtgttttta

SEQ ID NO: 1634097 - DNA, 15 bp, Homo sapiens
ggtgaaggtgttttt

SEQ ID NO: 1634098 - DNA, 15 bp, Homo sapiens
aggtgaaggtgtttt

SEQ ID NO: 1634099 - DNA, 15 bp, Homo sapiens
taggtgaaggtgttt

SEQ ID NO: 1634100 - DNA, 15 bp, Homo sapiens
gtaggtgaaggtgtt

SEQ ID NO: 1634101 - DNA, 15 bp, Homo sapiens
agtaggtgaaggtgt

SEQ ID NO: 1634102 - DNA, 15 bp, Homo sapiens
aagtaggtgaaggtg

SEQ ID NO: 1634103 - DNA, 15 bp, Homo sapiens
aaagtaggtgaaggt

SEQ ID NO: 1634104 - DNA, 15 bp, Homo sapiens
taaagtaggtgaagg

SEQ ID NO: 1634105 - DNA, 15 bp, Homo sapiens
ataaagtaggtgaag

SEQ ID NO: 1634106 - DNA, 15 bp, Homo sapiens
cataaagtaggtgaa

SEQ ID NO: 1634107 - DNA, 15 bp, Homo sapiens
tcataaagtaggtga

SEQ ID NO: 1634108 - DNA, 15 bp, Homo sapiens
ctcataaagtaggtg

SEQ ID NO: 1634109 - DNA, 15 bp, Homo sapiens
actcataaagtaggt

SEQ ID NO: 1634110 - DNA, 15 bp, Homo sapiens
aactcataaagtagg

SEQ ID NO: 1634111 - DNA, 15 bp, Homo sapiens
aaactcataaagtag

SEQ ID NO: 1634112 - DNA, 15 bp, Homo sapiens
caaactcataaagta

SEQ ID NO: 1634113 - DNA, 15 bp, Homo sapiens
gcaaactcataaagt

SEQ ID NO: 1634114 - DNA, 15 bp, Homo sapiens
ggcaaactcataaag

SEQ ID NO: 1634115 - DNA, 15 bp, Homo sapiens
aggcaaactcataaa

SEQ ID NO: 1634116 - DNA, 15 bp, Homo sapiens
gaggcaaactcataa

SEQ ID NO: 1634117 - DNA, 15 bp, Homo sapiens
tgaggcaaactcata

SEQ ID NO: 1634118 - DNA, 15 bp, Homo sapiens
ctgaggcaaactcat

SEQ ID NO: 1634119 - DNA, 15 bp, Homo sapiens
gctgaggcaaactca

SEQ ID NO: 1634120 - DNA, 15 bp, Homo sapiens
agctgaggcaaactc

SEQ ID NO: 1634121 - DNA, 15 bp, Homo sapiens
cagctgaggcaaact

SEQ ID NO: 1634122 - DNA, 15 bp, Homo sapiens
gcagctgaggcaaac

SEQ ID NO: 1634123 - DNA, 15 bp, Homo sapiens
ggcagctgaggcaaa

SEQ ID NO: 1634124 - DNA, 15 bp, Homo sapiens
tggcagctgaggcaa

SEQ ID NO: 1634125 - DNA, 15 bp, Homo sapiens
atggcagctgaggca

SEQ ID NO: 1634126 - DNA, 15 bp, Homo sapiens
tatggcagctgaggc

SEQ ID NO: 1634127 - DNA, 15 bp, Homo sapiens
ttatggcagctgagg

SEQ ID NO: 1634128 - DNA, 15 bp, Homo sapiens
gttatggcagctgag

SEQ ID NO: 1634129 - DNA, 15 bp, Homo sapiens
tgttatggcagctga

SEQ ID NO: 1634130 - DNA, 15 bp, Homo sapiens
ttgttatggcagctg

SEQ ID NO: 1634131 - DNA, 15 bp, Homo sapiens
tttgttatggcagct

SEQ ID NO: 1634132 - DNA, 15 bp, Homo sapiens
ttttgttatggcagc

SEQ ID NO: 1634133 - DNA, 15 bp, Homo sapiens
attttgttatggcag

SEQ ID NO: 1634134 - DNA, 15 bp, Homo sapiens
tattttgttatggca

SEQ ID NO: 1634135 - DNA, 15 bp, Homo sapiens
atattttgttatggc

SEQ ID NO: 1634136 - DNA, 15 bp, Homo sapiens
gatattttgttatgg

SEQ ID NO: 1634137 - DNA, 15 bp, Homo sapiens
tgatattttgttatg

SEQ ID NO: 1634138 - DNA, 15 bp, Homo sapiens
ctgatattttgttat

SEQ ID NO: 1634139 - DNA, 15 bp, Homo sapiens
tctgatattttgtta

SEQ ID NO: 1634140 - DNA, 15 bp, Homo sapiens
gtctgatattttgtt

SEQ ID NO: 1634141 - DNA, 15 bp, Homo sapiens
ggtctgatattttgt

SEQ ID NO: 1634142 - DNA, 15 bp, Homo sapiens
tggtctgatattttg

SEQ ID NO: 1634143 - DNA, 15 bp, Homo sapiens
ttggtctgatatttt

SEQ ID NO: 1634144 - DNA, 15 bp, Homo sapiens
cttggtctgatattt

SEQ ID NO: 1634145 - DNA, 15 bp, Homo sapiens
acttggtctgatatt

SEQ ID NO: 1634146 - DNA, 15 bp, Homo sapiens
cacttggtctgatat

SEQ ID NO: 1634147 - DNA, 15 bp, Homo sapiens
ccacttggtctgata

SEQ ID NO: 1634148 - DNA, 15 bp, Homo sapiens
gccacttggtctgat

SEQ ID NO: 1634149 - DNA, 15 bp, Homo sapiens
agccacttggtctga

SEQ ID NO: 1634150 - DNA, 15 bp, Homo sapiens
aagccacttggtctg

SEQ ID NO: 1634151 - DNA, 15 bp, Homo sapiens
taagccacttggtct

SEQ ID NO: 1634152 - DNA, 15 bp, Homo sapiens
ttaagccacttggtc

SEQ ID NO: 1634153 - DNA, 15 bp, Homo sapiens
tttaagccacttggt

SEQ ID NO: 1634154 - DNA, 15 bp, Homo sapiens
atttaagccacttgg

SEQ ID NO: 1634155 - DNA, 15 bp, Homo sapiens
tatttaagccacttg

SEQ ID NO: 1634156 - DNA, 15 bp, Homo sapiens
ttatttaagccactt

SEQ ID NO: 1634157 - DNA, 15 bp, Homo sapiens
gttatttaagccact

SEQ ID NO: 1634158 - DNA, 15 bp, Homo sapiens
tgttatttaagccac

SEQ ID NO: 1634159 - DNA, 15 bp, Homo sapiens
ttgttatttaagcca

SEQ ID NO: 1634160 - DNA, 15 bp, Homo sapiens
attgttatttaagcc

SEQ ID NO: 1634161 - DNA, 15 bp, Homo sapiens
aattgttatttaagc

SEQ ID NO: 1634162 - DNA, 15 bp, Homo sapiens
aaattgttatttaag

SEQ ID NO: 1634163 - DNA, 15 bp, Homo sapiens
taaattgttatttaa

SEQ ID NO: 1634164 - DNA, 15 bp, Homo sapiens
ataaattgttattta

SEQ ID NO: 1634165 - DNA, 15 bp, Homo sapiens
aataaattgttattt

SEQ ID NO: 1634166 - DNA, 15 bp, Homo sapiens
aaataaattgttatt

SEQ ID NO: 1634167 - DNA, 15 bp, Homo sapiens
aaaataaattgttat

SEQ ID NO: 1634168 - DNA, 15 bp, Homo sapiens
gaaaataaattgtta

SEQ ID NO: 1634169 - DNA, 15 bp, Homo sapiens
agaaaataaattgtt

SEQ ID NO: 1634170 - DNA, 15 bp, Homo sapiens
gagaaaataaattgt

SEQ ID NO: 1634171 - DNA, 15 bp, Homo sapiens
tgagaaaataaattg

SEQ ID NO: 1634172 - DNA, 15 bp, Homo sapiens
gtgagaaaataaatt

SEQ ID NO: 1634173 - DNA, 15 bp, Homo sapiens
tgtgagaaaataaat

SEQ ID NO: 1634174 - DNA, 15 bp, Homo sapiens
ctgtgagaaaataaa

SEQ ID NO: 1634175 - DNA, 15 bp, Homo sapiens
actgtgagaaaataa

SEQ ID NO: 1634176 - DNA, 15 bp, Homo sapiens
aactgtgagaaaata

SEQ ID NO: 1634177 - DNA, 15 bp, Homo sapiens
gaactgtgagaaaat

SEQ ID NO: 1634178 - DNA, 15 bp, Homo sapiens
agaactgtgagaaaa

SEQ ID NO: 1634179 - DNA, 15 bp, Homo sapiens
cagaactgtgagaaa

SEQ ID NO: 1634180 - DNA, 15 bp, Homo sapiens
ccagaactgtgagaa

SEQ ID NO: 1634181 - DNA, 15 bp, Homo sapiens
tccagaactgtgaga

SEQ ID NO: 1634182 - DNA, 15 bp, Homo sapiens
ctccagaactgtgag

SEQ ID NO: 1634183 - DNA, 15 bp, Homo sapiens
cctccagaactgtga

SEQ ID NO: 1634184 - DNA, 15 bp, Homo sapiens
gcctccagaactgtg

SEQ ID NO: 1634185 - DNA, 15 bp, Homo sapiens
agcctccagaactgt

SEQ ID NO: 1634186 - DNA, 15 bp, Homo sapiens
tagcctccagaactg

SEQ ID NO: 1634187 - DNA, 15 bp, Homo sapiens
ctagcctccagaact

SEQ ID NO: 1634188 - DNA, 15 bp, Homo sapiens
tctagcctccagaac

SEQ ID NO: 1634189 - DNA, 15 bp, Homo sapiens
ttctagcctccagaa

SEQ ID NO: 1634190 - DNA, 15 bp, Homo sapiens
cttctagcctccaga

SEQ ID NO: 1634191 - DNA, 15 bp, Homo sapiens
acttctagcctccag

SEQ ID NO: 1634192 - DNA, 15 bp, Homo sapiens
gacttctagcctcca

SEQ ID NO: 1634193 - DNA, 15 bp, Homo sapiens
agacttctagcctcc

SEQ ID NO: 1634194 - DNA, 15 bp, Homo sapiens
tagacttctagcctc

SEQ ID NO: 1634195 - DNA, 15 bp, Homo sapiens
ttagacttctagcct

SEQ ID NO: 1634196 - DNA, 15 bp, Homo sapiens
cttagacttctagcc

SEQ ID NO: 1634197 - DNA, 15 bp, Homo sapiens
tcttagacttctagc

SEQ ID NO: 1634198 - DNA, 15 bp, Homo sapiens
atcttagacttctag

SEQ ID NO: 1634199 - DNA, 15 bp, Homo sapiens
catcttagacttcta

SEQ ID NO: 1634200 - DNA, 15 bp, Homo sapiens
tcatcttagacttct

SEQ ID NO: 1634201 - DNA, 15 bp, Homo sapiens
ttcatcttagacttc

SEQ ID NO: 1634202 - DNA, 15 bp, Homo sapiens
tttcatcttagactt

SEQ ID NO: 1634203 - DNA, 15 bp, Homo sapiens
ctttcatcttagact

SEQ ID NO: 1634204 - DNA, 15 bp, Homo sapiens
actttcatcttagac

SEQ ID NO: 1634205 - DNA, 15 bp, Homo sapiens
cactttcatcttaga

SEQ ID NO: 1634206 - DNA, 15 bp, Homo sapiens
gcactttcatcttag

SEQ ID NO: 1634207 - DNA, 15 bp, Homo sapiens
ggcactttcatctta

SEQ ID NO: 1634208 - DNA, 15 bp, Homo sapiens
tggcactttcatctt

SEQ ID NO: 1634209 - DNA, 15 bp, Homo sapiens
ctggcactttcatct

SEQ ID NO: 1634210 - DNA, 15 bp, Homo sapiens
gctggcactttcatc

SEQ ID NO: 1634211 - DNA, 15 bp, Homo sapiens
tgctggcactttcat

SEQ ID NO: 1634212 - DNA, 15 bp, Homo sapiens
ttgctggcactttca

SEQ ID NO: 1634213 - DNA, 15 bp, Homo sapiens
cttgctggcactttc

SEQ ID NO: 1634214 - DNA, 15 bp, Homo sapiens
acttgctggcacttt

SEQ ID NO: 1634215 - DNA, 15 bp, Homo sapiens
aacttgctggcactt

SEQ ID NO: 1634216 - DNA, 15 bp, Homo sapiens
aaacttgctggcact

SEQ ID NO: 1634217 - DNA, 15 bp, Homo sapiens
caaacttgctggcac

SEQ ID NO: 1634218 - DNA, 15 bp, Homo sapiens
tcaaacttgctggca

SEQ ID NO: 1634219 - DNA, 15 bp, Homo sapiens
atcaaacttgctggc

SEQ ID NO: 1634220 - DNA, 15 bp, Homo sapiens
aatcaaacttgctgg

SEQ ID NO: 1634221 - DNA, 15 bp, Homo sapiens
aaatcaaacttgctg

SEQ ID NO: 1634222 - DNA, 15 bp, Homo sapiens
gaaatcaaacttgct

SEQ ID NO: 1634223 - DNA, 15 bp, Homo sapiens
agaaatcaaacttgc

SEQ ID NO: 1634224 - DNA, 15 bp, Homo sapiens
cagaaatcaaacttg

SEQ ID NO: 1634225 - DNA, 15 bp, Homo sapiens
ccagaaatcaaactt

SEQ ID NO: 1634226 - DNA, 15 bp, Homo sapiens
accagaaatcaaact

SEQ ID NO: 1634227 - DNA, 15 bp, Homo sapiens
caccagaaatcaaac

SEQ ID NO: 1634228 - DNA, 15 bp, Homo sapiens
tcaccagaaatcaaa

SEQ ID NO: 1634229 - DNA, 15 bp, Homo sapiens
ttcaccagaaatcaa

SEQ ID NO: 1634230 - DNA, 15 bp, Homo sapiens
cttcaccagaaatca

SEQ ID NO: 1634231 - DNA, 15 bp, Homo sapiens
acttcaccagaaatc

SEQ ID NO: 1634232 - DNA, 15 bp, Homo sapiens
gacttcaccagaaat

SEQ ID NO: 1634233 - DNA, 15 bp, Homo sapiens
agacttcaccagaaa

SEQ ID NO: 1634234 - DNA, 15 bp, Homo sapiens
gagacttcaccagaa

SEQ ID NO: 1634235 - DNA, 15 bp, Homo sapiens
agagacttcaccaga

SEQ ID NO: 1634236 - DNA, 15 bp, Homo sapiens
gagagacttcaccag

SEQ ID NO: 1634237 - DNA, 15 bp, Homo sapiens
agagagacttcacca

SEQ ID NO: 1634238 - DNA, 15 bp, Homo sapiens
aagagagacttcacc

SEQ ID NO: 1634239 - DNA, 15 bp, Homo sapiens
gaagagagacttcac

SEQ ID NO: 1634240 - DNA, 15 bp, Homo sapiens
ggaagagagacttca

SEQ ID NO: 1634241 - DNA, 15 bp, Homo sapiens
aggaagagagacttc

SEQ ID NO: 1634242 - DNA, 15 bp, Homo sapiens
aaggaagagagactt

SEQ ID NO: 1634243 - DNA, 15 bp, Homo sapiens
caaggaagagagact

SEQ ID NO: 1634244 - DNA, 15 bp, Homo sapiens
gcaaggaagagagac

SEQ ID NO: 1634245 - DNA, 15 bp, Homo sapiens
agcaaggaagagaga

SEQ ID NO: 1634246 - DNA, 15 bp, Homo sapiens
aagcaaggaagagag

SEQ ID NO: 1634247 - DNA, 15 bp, Homo sapiens
caagcaaggaagaga

SEQ ID NO: 1634248 - DNA, 15 bp, Homo sapiens
gcaagcaaggaagag

SEQ ID NO: 1634249 - DNA, 15 bp, Homo sapiens
ggcaagcaaggaaga

SEQ ID NO: 1634250 - DNA, 15 bp, Homo sapiens
tggcaagcaaggaag

SEQ ID NO: 1634251 - DNA, 15 bp, Homo sapiens
ttggcaagcaaggaa

SEQ ID NO: 1634252 - DNA, 15 bp, Homo sapiens
attggcaagcaagga

SEQ ID NO: 1634253 - DNA, 15 bp, Homo sapiens
cattggcaagcaagg

SEQ ID NO: 1634254 - DNA, 15 bp, Homo sapiens
ccattggcaagcaag

SEQ ID NO: 1634255 - DNA, 15 bp, Homo sapiens
gccattggcaagcaa

SEQ ID NO: 1634256 - DNA, 15 bp, Homo sapiens
ggccattggcaagca

SEQ ID NO: 1634257 - DNA, 15 bp, Homo sapiens
cggccattggcaagc

SEQ ID NO: 1634258 - DNA, 15 bp, Homo sapiens
gcggccattggcaag

SEQ ID NO: 1634259 - DNA, 15 bp, Homo sapiens
agcggccattggcaa

SEQ ID NO: 1634260 - DNA, 15 bp, Homo sapiens
aagcggccattggca

SEQ ID NO: 1634261 - DNA, 15 bp, Homo sapiens
aaagcggccattggc

SEQ ID NO: 1634262 - DNA, 15 bp, Homo sapiens
gaaagcggccattgg

SEQ ID NO: 1634263 - DNA, 15 bp, Homo sapiens
agaaagcggccattg

SEQ ID NO: 1634264 - DNA, 15 bp, Homo sapiens
gagaaagcggccatt

SEQ ID NO: 1634265 - DNA, 15 bp, Homo sapiens
tgagaaagcggccat

SEQ ID NO: 1634266 - DNA, 15 bp, Homo sapiens
gtgagaaagcggcca

SEQ ID NO: 1634267 - DNA, 15 bp, Homo sapiens
agtgagaaagcggcc

SEQ ID NO: 1634268 - DNA, 15 bp, Homo sapiens
cagtgagaaagcggc

SEQ ID NO: 1634269 - DNA, 15 bp, Homo sapiens
acagtgagaaagcgg

SEQ ID NO: 1634270 - DNA, 15 bp, Homo sapiens
cacagtgagaaagcg

SEQ ID NO: 1634271 - DNA, 15 bp, Homo sapiens
acacagtgagaaagc

SEQ ID NO: 1634272 - DNA, 15 bp, Homo sapiens
gacacagtgagaaag

SEQ ID NO: 1634273 - DNA, 15 bp, Homo sapiens
agacacagtgagaaa

SEQ ID NO: 1634274 - DNA, 15 bp, Homo sapiens
aagacacagtgagaa

SEQ ID NO: 1634275 - DNA, 15 bp, Homo sapiens
gaagacacagtgaga

SEQ ID NO: 1634276 - DNA, 15 bp, Homo sapiens
tgaagacacagtgag

SEQ ID NO: 1634277 - DNA, 15 bp, Homo sapiens
ttgaagacacagtga

SEQ ID NO: 1634278 - DNA, 15 bp, Homo sapiens
tttgaagacacagtg

SEQ ID NO: 1634279 - DNA, 15 bp, Homo sapiens
atttgaagacacagt

SEQ ID NO: 1634280 - DNA, 15 bp, Homo sapiens
catttgaagacacag

SEQ ID NO: 1634281 - DNA, 15 bp, Homo sapiens
acatttgaagacaca

SEQ ID NO: 1634282 - DNA, 15 bp, Homo sapiens
gacatttgaagacac

SEQ ID NO: 1634283 - DNA, 15 bp, Homo sapiens
ggacatttgaagaca

SEQ ID NO: 1634284 - DNA, 15 bp, Homo sapiens
aggacatttgaagac

SEQ ID NO: 1634285 - DNA, 15 bp, Homo sapiens
aaggacatttgaaga

SEQ ID NO: 1634286 - DNA, 15 bp, Homo sapiens
gaaggacatttgaag

SEQ ID NO: 1634287 - DNA, 15 bp, Homo sapiens
ggaaggacatttgaa

SEQ ID NO: 1634288 - DNA, 15 bp, Homo sapiens
aggaaggacatttga

SEQ ID NO: 1634289 - DNA, 15 bp, Homo sapiens
gaggaaggacatttg

SEQ ID NO: 1634290 - DNA, 15 bp, Homo sapiens
agaggaaggacattt

SEQ ID NO: 1634291 - DNA, 15 bp, Homo sapiens
cagaggaaggacatt

SEQ ID NO: 1634292 - DNA, 15 bp, Homo sapiens
tcagaggaaggacat

SEQ ID NO: 1634293 - DNA, 15 bp, Homo sapiens
ctcagaggaaggaca

SEQ ID NO: 1634294 - DNA, 15 bp, Homo sapiens
actcagaggaaggac

SEQ ID NO: 1634295 - DNA, 15 bp, Homo sapiens
tactcagaggaagga

SEQ ID NO: 1634296 - DNA, 15 bp, Homo sapiens
atactcagaggaagg

SEQ ID NO: 1634297 - DNA, 15 bp, Homo sapiens
catactcagaggaag

SEQ ID NO: 1634298 - DNA, 15 bp, Homo sapiens
acatactcagaggaa

SEQ ID NO: 1634299 - DNA, 15 bp, Homo sapiens
cacatactcagagga

SEQ ID NO: 1634300 - DNA, 15 bp, Homo sapiens
tcacatactcagagg

SEQ ID NO: 1634301 - DNA, 15 bp, Homo sapiens
ctcacatactcagag

SEQ ID NO: 1634302 - DNA, 15 bp, Homo sapiens
cctcacatactcaga

SEQ ID NO: 1634303 - DNA, 15 bp, Homo sapiens
tcctcacatactcag

SEQ ID NO: 1634304 - DNA, 15 bp, Homo sapiens
ctcctcacatactca

SEQ ID NO: 1634305 - DNA, 15 bp, Homo sapiens
tctcctcacatactc

SEQ ID NO: 1634306 - DNA, 15 bp, Homo sapiens
ctctcctcacatact

SEQ ID NO: 1634307 - DNA, 15 bp, Homo sapiens
tctctcctcacatac

SEQ ID NO: 1634308 - DNA, 15 bp, Homo sapiens
ctctctcctcacata

SEQ ID NO: 1634309 - DNA, 15 bp, Homo sapiens
tctctctcctcacat

SEQ ID NO: 1634310 - DNA, 15 bp, Homo sapiens
ctctctctcctcaca

SEQ ID NO: 1634311 - DNA, 15 bp, Homo sapiens
cctctctctcctcac

SEQ ID NO: 1634312 - DNA, 15 bp, Homo sapiens
acctctctctcctca

SEQ ID NO: 1634313 - DNA, 15 bp, Homo sapiens
aacctctctctcctc

SEQ ID NO: 1634314 - DNA, 15 bp, Homo sapiens
aaacctctctctcct

SEQ ID NO: 1634315 - DNA, 15 bp, Homo sapiens
caaacctctctctcc

SEQ ID NO: 1634316 - DNA, 15 bp, Homo sapiens
tcaaacctctctctc

SEQ ID NO: 1634317 - DNA, 15 bp, Homo sapiens
atcaaacctctctct

SEQ ID NO: 1634318 - DNA, 15 bp, Homo sapiens
catcaaacctctctc

SEQ ID NO: 1634319 - DNA, 15 bp, Homo sapiens
gcatcaaacctctct

SEQ ID NO: 1634320 - DNA, 15 bp, Homo sapiens
ggcatcaaacctctc

SEQ ID NO: 1634321 - DNA, 15 bp, Homo sapiens
aggcatcaaacctct

SEQ ID NO: 1634322 - DNA, 15 bp, Homo sapiens
gaggcatcaaacctc

SEQ ID NO: 1634323 - DNA, 15 bp, Homo sapiens
agaggcatcaaacct

SEQ ID NO: 1634324 - DNA, 15 bp, Homo sapiens
aagaggcatcaaacc

SEQ ID NO: 1634325 - DNA, 15 bp, Homo sapiens
gaagaggcatcaaac

SEQ ID NO: 1634326 - DNA, 15 bp, Homo sapiens
tgaagaggcatcaaa

SEQ ID NO: 1634327 - DNA, 15 bp, Homo sapiens
gtgaagaggcatcaa

SEQ ID NO: 1634328 - DNA, 15 bp, Homo sapiens
ggtgaagaggcatca

SEQ ID NO: 1634329 - DNA, 15 bp, Homo sapiens
aggtgaagaggcatc

SEQ ID NO: 1634330 - DNA, 15 bp, Homo sapiens
aaggtgaagaggcat

SEQ ID NO: 1634331 - DNA, 15 bp, Homo sapiens
gaaggtgaagaggca

SEQ ID NO: 1634332 - DNA, 15 bp, Homo sapiens
agaaggtgaagaggc

SEQ ID NO: 1634333 - DNA, 15 bp, Homo sapiens
aagaaggtgaagagg

SEQ ID NO: 1634334 - DNA, 15 bp, Homo sapiens
taagaaggtgaagag

SEQ ID NO: 1634335 - DNA, 15 bp, Homo sapiens
ataagaaggtgaaga

SEQ ID NO: 1634336 - DNA, 15 bp, Homo sapiens
tataagaaggtgaag

SEQ ID NO: 1634337 - DNA, 15 bp, Homo sapiens
ttataagaaggtgaa

SEQ ID NO: 1634338 - DNA, 15 bp, Homo sapiens
cttataagaaggtga

SEQ ID NO: 1634339 - DNA, 15 bp, Homo sapiens
ccttataagaaggtg

SEQ ID NO: 1634340 - DNA, 15 bp, Homo sapiens
tccttataagaaggt

SEQ ID NO: 1634341 - DNA, 15 bp, Homo sapiens
gtccttataagaagg

SEQ ID NO: 1634342 - DNA, 15 bp, Homo sapiens
tgtccttataagaag

SEQ ID NO: 1634343 - DNA, 15 bp, Homo sapiens
gtgtccttataagaa

SEQ ID NO: 1634344 - DNA, 15 bp, Homo sapiens
ggtgtccttataaga

SEQ ID NO: 1634345 - DNA, 15 bp, Homo sapiens
tggtgtccttataag

SEQ ID NO: 1634346 - DNA, 15 bp, Homo sapiens
ctggtgtccttataa

SEQ ID NO: 1634347 - DNA, 15 bp, Homo sapiens
actggtgtccttata

SEQ ID NO: 1634348 - DNA, 15 bp, Homo sapiens
gactggtgtccttat

SEQ ID NO: 1634349 - DNA, 15 bp, Homo sapiens
ggactggtgtcctta

SEQ ID NO: 1634350 - DNA, 15 bp, Homo sapiens
aggactggtgtcctt

SEQ ID NO: 1634351 - DNA, 15 bp, Homo sapiens
taggactggtgtcct

SEQ ID NO: 1634352 - DNA, 15 bp, Homo sapiens
gtaggactggtgtcc

SEQ ID NO: 1634353 - DNA, 15 bp, Homo sapiens
agtaggactggtgtc

SEQ ID NO: 1634354 - DNA, 15 bp, Homo sapiens
cagtaggactggtgt

SEQ ID NO: 1634355 - DNA, 15 bp, Homo sapiens
ccagtaggactggtg

SEQ ID NO: 1634356 - DNA, 15 bp, Homo sapiens
tccagtaggactggt

SEQ ID NO: 1634357 - DNA, 15 bp, Homo sapiens
atccagtaggactgg

SEQ ID NO: 1634358 - DNA, 15 bp, Homo sapiens
aatccagtaggactg

SEQ ID NO: 1634359 - DNA, 15 bp, Homo sapiens
taatccagtaggact

SEQ ID NO: 1634360 - DNA, 15 bp, Homo sapiens
ctaatccagtaggac

SEQ ID NO: 1634361 - DNA, 15 bp, Homo sapiens
cctaatccagtagga

SEQ ID NO: 1634362 - DNA, 15 bp, Homo sapiens
ccctaatccagtagg

SEQ ID NO: 1634363 - DNA, 15 bp, Homo sapiens
gccctaatccagtag

SEQ ID NO: 1634364 - DNA, 15 bp, Homo sapiens
agccctaatccagta

SEQ ID NO: 1634365 - DNA, 15 bp, Homo sapiens
gagccctaatccagt

SEQ ID NO: 1634366 - DNA, 15 bp, Homo sapiens
ggagccctaatccag

SEQ ID NO: 1634367 - DNA, 15 bp, Homo sapiens
tggagccctaatcca

SEQ ID NO: 1634368 - DNA, 15 bp, Homo sapiens
gtggagccctaatcc

SEQ ID NO: 1634369 - DNA, 15 bp, Homo sapiens
ggtggagccctaatc

SEQ ID NO: 1634370 - DNA, 15 bp, Homo sapiens
gggtggagccctaat

SEQ ID NO: 1634371 - DNA, 15 bp, Homo sapiens
agggtggagccctaa

SEQ ID NO: 1634372 - DNA, 15 bp, Homo sapiens
aagggtggagcccta

SEQ ID NO: 1634373 - DNA, 15 bp, Homo sapiens
taagggtggagccct

SEQ ID NO: 1634374 - DNA, 15 bp, Homo sapiens
ataagggtggagccc

SEQ ID NO: 1634375 - DNA, 15 bp, Homo sapiens
cataagggtggagcc

SEQ ID NO: 1634376 - DNA, 15 bp, Homo sapiens
tcataagggtggagc

SEQ ID NO: 1634377 - DNA, 15 bp, Homo sapiens
gtcataagggtggag

SEQ ID NO: 1634378 - DNA, 15 bp, Homo sapiens
ggtcataagggtgga

SEQ ID NO: 1634379 - DNA, 15 bp, Homo sapiens
aggtcataagggtgg

SEQ ID NO: 1634380 - DNA, 15 bp, Homo sapiens
gaggtcataagggtg

SEQ ID NO: 1634381 - DNA, 15 bp, Homo sapiens
tgaggtcataagggt

SEQ ID NO: 1634382 - DNA, 15 bp, Homo sapiens
atgaggtcataaggg

SEQ ID NO: 1634383 - DNA, 15 bp, Homo sapiens
aatgaggtcataagg

SEQ ID NO: 1634384 - DNA, 15 bp, Homo sapiens
aaatgaggtcataag

SEQ ID NO: 1634385 - DNA, 15 bp, Homo sapiens
taaatgaggtcataa

SEQ ID NO: 1634386 - DNA, 15 bp, Homo sapiens
ttaaatgaggtcata

SEQ ID NO: 1634387 - DNA, 15 bp, Homo sapiens
aggttaaatgaggtc

SEQ ID NO: 1634388 - DNA, 15 bp, Homo sapiens
aaggttaaatgaggt

SEQ ID NO: 1634389 - DNA, 15 bp, Homo sapiens
taaggttaaatgagg

SEQ ID NO: 1634390 - DNA, 15 bp, Homo sapiens
ttaaggttaaatgag

SEQ ID NO: 1634391 - DNA, 15 bp, Homo sapiens
attaaggttaaatga

SEQ ID NO: 1634392 - DNA, 15 bp, Homo sapiens
aattaaggttaaatg

SEQ ID NO: 1634393 - DNA, 15 bp, Homo sapiens
taattaaggttaaat

SEQ ID NO: 1634394 - DNA, 15 bp, Homo sapiens
gtaattaaggttaaa

SEQ ID NO: 1634395 - DNA, 15 bp, Homo sapiens
ggtaattaaggttaa

SEQ ID NO: 1634396 - DNA, 15 bp, Homo sapiens
aggtaattaaggtta

SEQ ID NO: 1634397 - DNA, 15 bp, Homo sapiens
gaggtaattaaggtt

SEQ ID NO: 1634398 - DNA, 15 bp, Homo sapiens
ggaggtaattaaggt

SEQ ID NO: 1634399 - DNA, 15 bp, Homo sapiens
aggaggtaattaagg

SEQ ID NO: 1634400 - DNA, 15 bp, Homo sapiens
aaggaggtaattaag

SEQ ID NO: 1634401 - DNA, 15 bp, Homo sapiens
taaggaggtaattaa

SEQ ID NO: 1634402 - DNA, 15 bp, Homo sapiens
ttaaggaggtaatta

SEQ ID NO: 1634403 - DNA, 15 bp, Homo sapiens
tttaaggaggtaatt

SEQ ID NO: 1634404 - DNA, 15 bp, Homo sapiens
ctttaaggaggtaat

SEQ ID NO: 1634405 - DNA, 15 bp, Homo sapiens
cctttaaggaggtaa

SEQ ID NO: 1634406 - DNA, 15 bp, Homo sapiens
acctttaaggaggta

SEQ ID NO: 1634407 - DNA, 15 bp, Homo sapiens
aacctttaaggaggt

SEQ ID NO: 1634408 - DNA, 15 bp, Homo sapiens
gaacctttaaggagg

SEQ ID NO: 1634409 - DNA, 15 bp, Homo sapiens
agaacctttaaggag

SEQ ID NO: 1634410 - DNA, 15 bp, Homo sapiens
tagaacctttaagga

SEQ ID NO: 1634411 - DNA, 15 bp, Homo sapiens
atagaacctttaagg

SEQ ID NO: 1634412 - DNA, 15 bp, Homo sapiens
gatagaacctttaag

SEQ ID NO: 1634413 - DNA, 15 bp, Homo sapiens
agatagaacctttaa

SEQ ID NO: 1634414 - DNA, 15 bp, Homo sapiens
gagatagaaccttta

SEQ ID NO: 1634415 - DNA, 15 bp, Homo sapiens
ggagatagaaccttt

SEQ ID NO: 1634416 - DNA, 15 bp, Homo sapiens
tggagatagaacctt

SEQ ID NO: 1634417 - DNA, 15 bp, Homo sapiens
ttggagatagaacct

SEQ ID NO: 1634418 - DNA, 15 bp, Homo sapiens
tttggagatagaacc

SEQ ID NO: 1634419 - DNA, 15 bp, Homo sapiens
atttggagatagaac

SEQ ID NO: 1634420 - DNA, 15 bp, Homo sapiens
tatttggagatagaa

SEQ ID NO: 1634421 - DNA, 15 bp, Homo sapiens
gtatttggagataga

SEQ ID NO: 1634422 - DNA, 15 bp, Homo sapiens
tgtatttggagatag

SEQ ID NO: 1634423 - DNA, 15 bp, Homo sapiens
ctgtatttggagata

SEQ ID NO: 1634424 - DNA, 15 bp, Homo sapiens
actgtatttggagat

SEQ ID NO: 1634425 - DNA, 15 bp, Homo sapiens
gactgtatttggaga

SEQ ID NO: 1634426 - DNA, 15 bp, Homo sapiens
tgactgtatttggag

SEQ ID NO: 1634427 - DNA, 15 bp, Homo sapiens
gtgactgtatttgga

SEQ ID NO: 1634428 - DNA, 15 bp, Homo sapiens
tgtgactgtatttgg

SEQ ID NO: 1634429 - DNA, 15 bp, Homo sapiens
atgtgactgtatttg

SEQ ID NO: 1634430 - DNA, 15 bp, Homo sapiens
aatgtgactgtattt

SEQ ID NO: 1634431 - DNA, 15 bp, Homo sapiens
aaatgtgactgtatt

SEQ ID NO: 1634432 - DNA, 15 bp, Homo sapiens
caaatgtgactgtat

SEQ ID NO: 1634433 - DNA, 15 bp, Homo sapiens
ccaaatgtgactgta

SEQ ID NO: 1634434 - DNA, 15 bp, Homo sapiens
tccaaatgtgactgt

SEQ ID NO: 1634435 - DNA, 15 bp, Homo sapiens
ctccaaatgtgactg

SEQ ID NO: 1634436 - DNA, 15 bp, Homo sapiens
actccaaatgtgact

SEQ ID NO: 1634437 - DNA, 15 bp, Homo sapiens
gactccaaatgtgac

SEQ ID NO: 1634438 - DNA, 15 bp, Homo sapiens
tgactccaaatgtga

SEQ ID NO: 1634439 - DNA, 15 bp, Homo sapiens
ctgactccaaatgtg

SEQ ID NO: 1634440 - DNA, 15 bp, Homo sapiens
tctgactccaaatgt

SEQ ID NO: 1634441 - DNA, 15 bp, Homo sapiens
gtctgactccaaatg

SEQ ID NO: 1634442 - DNA, 15 bp, Homo sapiens
ggtctgactccaaat

SEQ ID NO: 1634443 - DNA, 15 bp, Homo sapiens
aggtctgactccaaa

SEQ ID NO: 1634444 - DNA, 15 bp, Homo sapiens
taggtctgactccaa

SEQ ID NO: 1634445 - DNA, 15 bp, Homo sapiens
gtaggtctgactcca

SEQ ID NO: 1634446 - DNA, 15 bp, Homo sapiens
tgtaggtctgactcc

SEQ ID NO: 1634447 - DNA, 15 bp, Homo sapiens
ttgtaggtctgactc

SEQ ID NO: 1634448 - DNA, 15 bp, Homo sapiens
gttgtaggtctgact

SEQ ID NO: 1634449 - DNA, 15 bp, Homo sapiens
tgttgtaggtctgac

SEQ ID NO: 1634450 - DNA, 15 bp, Homo sapiens
atgttgtaggtctga

SEQ ID NO: 1634451 - DNA, 15 bp, Homo sapiens
tatgttgtaggtctg

SEQ ID NO: 1634452 - DNA, 15 bp, Homo sapiens
atatgttgtaggtct

SEQ ID NO: 1634453 - DNA, 15 bp, Homo sapiens
catatgttgtaggtc

SEQ ID NO: 1634454 - DNA, 15 bp, Homo sapiens
tcatatgttgtaggt

SEQ ID NO: 1634455 - DNA, 15 bp, Homo sapiens
ttcatatgttgtagg

SEQ ID NO: 1634456 - DNA, 15 bp, Homo sapiens
attcatatgttgtag

SEQ ID NO: 1634457 - DNA, 15 bp, Homo sapiens
aattcatatgttgta

SEQ ID NO: 1634458 - DNA, 15 bp, Homo sapiens
aaattcatatgttgt

SEQ ID NO: 1634459 - DNA, 15 bp, Homo sapiens
aaaattcatatgttg

SEQ ID NO: 1634460 - DNA, 15 bp, Homo sapiens
caaaattcatatgtt

SEQ ID NO: 1634461 - DNA, 15 bp, Homo sapiens
tcaaaattcatatgt

SEQ ID NO: 1634462 - DNA, 15 bp, Homo sapiens
ctcaaaattcatatg

SEQ ID NO: 1634463 - DNA, 15 bp, Homo sapiens
tctcaaaattcatat

SEQ ID NO: 1634464 - DNA, 15 bp, Homo sapiens
ctctcaaaattcata

SEQ ID NO: 1634465 - DNA, 15 bp, Homo sapiens
cctctcaaaattcat

SEQ ID NO: 1634466 - DNA, 15 bp, Homo sapiens
tcctctcaaaattca

SEQ ID NO: 1634467 - DNA, 15 bp, Homo sapiens
gtcctctcaaaattc

SEQ ID NO: 1634468 - DNA, 15 bp, Homo sapiens
tgtcctctcaaaatt

SEQ ID NO: 1634469 - DNA, 15 bp, Homo sapiens
gtgtcctctcaaaat

SEQ ID NO: 1634470 - DNA, 15 bp, Homo sapiens
tgtgtcctctcaaaa

SEQ ID NO: 1634471 - DNA, 15 bp, Homo sapiens
ttgtgtcctctcaaa

SEQ ID NO: 1634472 - DNA, 15 bp, Homo sapiens
attgtgtcctctcaa

SEQ ID NO: 1634473 - DNA, 15 bp, Homo sapiens
aattgtgtcctctca

SEQ ID NO: 1634474 - DNA, 15 bp, Homo sapiens
gaattgtgtcctctc

SEQ ID NO: 1634475 - DNA, 15 bp, Homo sapiens
tgaattgtgtcctct

SEQ ID NO: 1634476 - DNA, 15 bp, Homo sapiens
ctgaattgtgtcctc

SEQ ID NO: 1634477 - DNA, 15 bp, Homo sapiens
actgaattgtgtcct

SEQ ID NO: 1634478 - DNA, 15 bp, Homo sapiens
gactgaattgtgtcc

SEQ ID NO: 1634479 - DNA, 15 bp, Homo sapiens
agactgaattgtgtc

SEQ ID NO: 1634480 - DNA, 15 bp, Homo sapiens
tagactgaattgtgt

SEQ ID NO: 1634481 - DNA, 15 bp, Homo sapiens
atagactgaattgtg

SEQ ID NO: 1634482 - DNA, 15 bp, Homo sapiens
tatagactgaattgt

SEQ ID NO: 1634483 - DNA, 15 bp, Homo sapiens
ttatagactgaattg

SEQ ID NO: 1634484 - DNA, 15 bp, Homo sapiens
gttatagactgaatt

SEQ ID NO: 1634485 - DNA, 15 bp, Homo sapiens
tgttatagactgaat

SEQ ID NO: 1634486 - DNA, 15 bp, Homo sapiens
gtgttatagactgaa

SEQ ID NO: 1634487 - DNA, 15 bp, Homo sapiens
ggtgttatagactga

SEQ ID NO: 1634488 - DNA, 15 bp, Homo sapiens
aggtgttatagactg

SEQ ID NO: 1634489 - DNA, 15 bp, Homo sapiens
taggtgttatagact

SEQ ID NO: 1634490 - DNA, 15 bp, Homo sapiens
ctaggtgttatagac

SEQ ID NO: 1634491 - DNA, 15 bp, Homo sapiens
tctaggtgttataga

SEQ ID NO: 1634492 - DNA, 15 bp, Homo sapiens
atctaggtgttatag

SEQ ID NO: 1634493 - DNA, 15 bp, Homo sapiens
catctaggtgttata

SEQ ID NO: 1634494 - DNA, 15 bp, Homo sapiens
ccatctaggtgttat

SEQ ID NO: 1634495 - DNA, 15 bp, Homo sapiens
tccatctaggtgtta

SEQ ID NO: 1634496 - DNA, 15 bp, Homo sapiens
ttccatctaggtgtt

SEQ ID NO: 1634497 - DNA, 15 bp, Homo sapiens
cttccatctaggtgt

SEQ ID NO: 1634498 - DNA, 15 bp, Homo sapiens
ccttccatctaggtg

SEQ ID NO: 1634499 - DNA, 15 bp, Homo sapiens
gccttccatctaggt

SEQ ID NO: 1634500 - DNA, 15 bp, Homo sapiens
tgccttccatctagg

SEQ ID NO: 1634501 - DNA, 15 bp, Homo sapiens
ttgccttccatctag

SEQ ID NO: 1634502 - DNA, 15 bp, Homo sapiens
attgccttccatcta

SEQ ID NO: 1634503 - DNA, 15 bp, Homo sapiens
aattgccttccatct

SEQ ID NO: 1634504 - DNA, 15 bp, Homo sapiens
aaattgccttccatc

SEQ ID NO: 1634505 - DNA, 15 bp, Homo sapiens
gaaattgccttccat

SEQ ID NO: 1634506 - DNA, 15 bp, Homo sapiens
tgaaattgccttcca

SEQ ID NO: 1634507 - DNA, 15 bp, Homo sapiens
atgaaattgccttcc

SEQ ID NO: 1634508 - DNA, 15 bp, Homo sapiens
tatgaaattgccttc

SEQ ID NO: 1634509 - DNA, 15 bp, Homo sapiens
atatgaaattgcctt

SEQ ID NO: 1634510 - DNA, 15 bp, Homo sapiens
tatatgaaattgcct

SEQ ID NO: 1634511 - DNA, 15 bp, Homo sapiens
tttatatgaaattgc

SEQ ID NO: 1634512 - DNA, 15 bp, Homo sapiens
ctttatatgaaattg

SEQ ID NO: 1634513 - DNA, 15 bp, Homo sapiens
tctttatatgaaatt

SEQ ID NO: 1634514 - DNA, 15 bp, Homo sapiens
atctttatatgaaat

SEQ ID NO: 1634515 - DNA, 15 bp, Homo sapiens
catctttatatgaaa

SEQ ID NO: 1634516 - DNA, 15 bp, Homo sapiens
tcatctttatatgaa

SEQ ID NO: 1634517 - DNA, 15 bp, Homo sapiens
atcatctttatatga

SEQ ID NO: 1634518 - DNA, 15 bp, Homo sapiens
tatcatctttatatg

SEQ ID NO: 1634519 - DNA, 15 bp, Homo sapiens
atatcatctttatat

SEQ ID NO: 1634520 - DNA, 15 bp, Homo sapiens
catatcatctttata

SEQ ID NO: 1634521 - DNA, 15 bp, Homo sapiens
gcatatcatctttat

SEQ ID NO: 1634522 - DNA, 15 bp, Homo sapiens
tgcatatcatcttta

SEQ ID NO: 1634523 - DNA, 15 bp, Homo sapiens
ctgcatatcatcttt

SEQ ID NO: 1634524 - DNA, 15 bp, Homo sapiens
actgcatatcatctt

SEQ ID NO: 1634525 - DNA, 15 bp, Homo sapiens
gactgcatatcatct

SEQ ID NO: 1634526 - DNA, 15 bp, Homo sapiens
agactgcatatcatc

SEQ ID NO: 1634527 - DNA, 15 bp, Homo sapiens
tagactgcatatcat

SEQ ID NO: 1634528 - DNA, 15 bp, Homo sapiens
atagactgcatatca

SEQ ID NO: 1634529 - DNA, 15 bp, Homo sapiens
catagactgcatatc

SEQ ID NO: 1634530 - DNA, 15 bp, Homo sapiens
tcatagactgcatat

SEQ ID NO: 1634531 - DNA, 15 bp, Homo sapiens
gtcatagactgcata

SEQ ID NO: 1634532 - DNA, 15 bp, Homo sapiens
tgtcatagactgcat

SEQ ID NO: 1634533 - DNA, 15 bp, Homo sapiens
ctgtcatagactgca

SEQ ID NO: 1634534 - DNA, 15 bp, Homo sapiens
gctgtcatagactgc

SEQ ID NO: 1634535 - DNA, 15 bp, Homo sapiens
tgctgtcatagactg

SEQ ID NO: 1634536 - DNA, 15 bp, Homo sapiens
ttgctgtcatagact

SEQ ID NO: 1634537 - DNA, 15 bp, Homo sapiens
tttgctgtcatagac

SEQ ID NO: 1634538 - DNA, 15 bp, Homo sapiens
ctttgctgtcataga

SEQ ID NO: 1634539 - DNA, 15 bp, Homo sapiens
actttgctgtcatag

SEQ ID NO: 1634540 - DNA, 15 bp, Homo sapiens
tactttgctgtcata

SEQ ID NO: 1634541 - DNA, 15 bp, Homo sapiens
ctactttgctgtcat

SEQ ID NO: 1634542 - DNA, 15 bp, Homo sapiens
gctactttgctgtca

SEQ ID NO: 1634543 - DNA, 15 bp, Homo sapiens
agctactttgctgtc

SEQ ID NO: 1634544 - DNA, 15 bp, Homo sapiens
tagctactttgctgt

SEQ ID NO: 1634545 - DNA, 15 bp, Homo sapiens
ctagctactttgctg

SEQ ID NO: 1634546 - DNA, 15 bp, Homo sapiens
actagctactttgct

SEQ ID NO: 1634547 - DNA, 15 bp, Homo sapiens
cactagctactttgc

SEQ ID NO: 1634548 - DNA, 15 bp, Homo sapiens
ccactagctactttg

SEQ ID NO: 1634549 - DNA, 15 bp, Homo sapiens
tccactagctacttt

SEQ ID NO: 1634550 - DNA, 15 bp, Homo sapiens
ttccactagctactt

SEQ ID NO: 1634551 - DNA, 15 bp, Homo sapiens
tttccactagctact

SEQ ID NO: 1634552 - DNA, 15 bp, Homo sapiens
atttccactagctac

SEQ ID NO: 1634553 - DNA, 15 bp, Homo sapiens
gatttccactagcta

SEQ ID NO: 1634554 - DNA, 15 bp, Homo sapiens
tgatttccactagct

SEQ ID NO: 1634555 - DNA, 15 bp, Homo sapiens
gtgatttccactagc

SEQ ID NO: 1634556 - DNA, 15 bp, Homo sapiens
tgtgatttccactag

SEQ ID NO: 1634557 - DNA, 15 bp, Homo sapiens
ttgtgatttccacta

SEQ ID NO: 1634558 - DNA, 15 bp, Homo sapiens
gttgtgatttccact

SEQ ID NO: 1634559 - DNA, 15 bp, Homo sapiens
ggttgtgatttccac

SEQ ID NO: 1634560 - DNA, 15 bp, Homo sapiens
gggttgtgatttcca

SEQ ID NO: 1634561 - DNA, 15 bp, Homo sapiens
ggggttgtgatttcc

SEQ ID NO: 1634562 - DNA, 15 bp, Homo sapiens
aggggttgtgatttc

SEQ ID NO: 1634563 - DNA, 15 bp, Homo sapiens
taggggttgtgattt

SEQ ID NO: 1634564 - DNA, 15 bp, Homo sapiens
ttaggggttgtgatt

SEQ ID NO: 1634565 - DNA, 15 bp, Homo sapiens
attaggggttgtgat

SEQ ID NO: 1634566 - DNA, 15 bp, Homo sapiens
aattaggggttgtga

SEQ ID NO: 1634567 - DNA, 15 bp, Homo sapiens
gaattaggggttgtg

SEQ ID NO: 1634568 - DNA, 15 bp, Homo sapiens
agaattaggggttgt

SEQ ID NO: 1634569 - DNA, 15 bp, Homo sapiens
tagaattaggggttg

SEQ ID NO: 1634570 - DNA, 15 bp, Homo sapiens
atagaattaggggtt

SEQ ID NO: 1634571 - DNA, 15 bp, Homo sapiens
aatagaattaggggt

SEQ ID NO: 1634572 - DNA, 15 bp, Homo sapiens
aaatagaattagggg

SEQ ID NO: 1634573 - DNA, 15 bp, Homo sapiens
aaaatagaattaggg

SEQ ID NO: 1634574 - DNA, 15 bp, Homo sapiens
aaaaatagaattagg

SEQ ID NO: 1634575 - DNA, 15 bp, Homo sapiens
taaaaatagaattag

SEQ ID NO: 1634576 - DNA, 15 bp, Homo sapiens
ataaaaatagaatta

SEQ ID NO: 1634577 - DNA, 15 bp, Homo sapiens
cataaaaatagaatt

SEQ ID NO: 1634578 - DNA, 15 bp, Homo sapiens
acataaaaatagaat

SEQ ID NO: 1634579 - DNA, 15 bp, Homo sapiens
gacataaaaatagaa

SEQ ID NO: 1634580 - DNA, 15 bp, Homo sapiens
tgacataaaaataga

SEQ ID NO: 1634581 - DNA, 15 bp, Homo sapiens
atgacataaaaatag

SEQ ID NO: 1634582 - DNA, 15 bp, Homo sapiens
aatgacataaaaata

SEQ ID NO: 1634583 - DNA, 15 bp, Homo sapiens
gaatgacataaaaat

SEQ ID NO: 1634584 - DNA, 15 bp, Homo sapiens
ggaatgacataaaaa

SEQ ID NO: 1634585 - DNA, 15 bp, Homo sapiens
gggaatgacataaaa

SEQ ID NO: 1634586 - DNA, 15 bp, Homo sapiens
agggaatgacataaa

SEQ ID NO: 1634587 - DNA, 15 bp, Homo sapiens
tagggaatgacataa

SEQ ID NO: 1634588 - DNA, 15 bp, Homo sapiens
ttagggaatgacata

SEQ ID NO: 1634589 - DNA, 15 bp, Homo sapiens
cttagggaatgacat

SEQ ID NO: 1634590 - DNA, 15 bp, Homo sapiens
acttagggaatgaca

SEQ ID NO: 1634591 - DNA, 15 bp, Homo sapiens
gacttagggaatgac

SEQ ID NO: 1634592 - DNA, 15 bp, Homo sapiens
ggacttagggaatga

SEQ ID NO: 1634593 - DNA, 15 bp, Homo sapiens
tggacttagggaatg

SEQ ID NO: 1634594 - DNA, 15 bp, Homo sapiens
ctggacttagggaat

SEQ ID NO: 1634595 - DNA, 15 bp, Homo sapiens
cctggacttagggaa

SEQ ID NO: 1634596 - DNA, 15 bp, Homo sapiens
acctggacttaggga

SEQ ID NO: 1634597 - DNA, 15 bp, Homo sapiens
gacctggacttaggg

SEQ ID NO: 1634598 - DNA, 15 bp, Homo sapiens
ggacctggacttagg

SEQ ID NO: 1634599 - DNA, 15 bp, Homo sapiens
gggacctggacttag

SEQ ID NO: 1634600 - DNA, 15 bp, Homo sapiens
tgggacctggactta

SEQ ID NO: 1634601 - DNA, 15 bp, Homo sapiens
atgggacctggactt

SEQ ID NO: 1634602 - DNA, 15 bp, Homo sapiens
catgggacctggact

SEQ ID NO: 1634603 - DNA, 15 bp, Homo sapiens
acatgggacctggac

SEQ ID NO: 1634604 - DNA, 15 bp, Homo sapiens
cacatgggacctgga

SEQ ID NO: 1634605 - DNA, 15 bp, Homo sapiens
ccacatgggacctgg

SEQ ID NO: 1634606 - DNA, 15 bp, Homo sapiens
tccacatgggacctg

SEQ ID NO: 1634607 - DNA, 15 bp, Homo sapiens
atccacatgggacct

SEQ ID NO: 1634608 - DNA, 15 bp, Homo sapiens
tatccacatgggacc

SEQ ID NO: 1634609 - DNA, 15 bp, Homo sapiens
atatccacatgggac

SEQ ID NO: 1634610 - DNA, 15 bp, Homo sapiens
tatatccacatggga

SEQ ID NO: 1634611 - DNA, 15 bp, Homo sapiens
ctatatccacatggg

SEQ ID NO: 1634612 - DNA, 15 bp, Homo sapiens
gctatatccacatgg

SEQ ID NO: 1634613 - DNA, 15 bp, Homo sapiens
tgctatatccacatg

SEQ ID NO: 1634614 - DNA, 15 bp, Homo sapiens
atgctatatccacat

SEQ ID NO: 1634615 - DNA, 15 bp, Homo sapiens
aatgctatatccaca

SEQ ID NO: 1634616 - DNA, 15 bp, Homo sapiens
caatgctatatccac

SEQ ID NO: 1634617 - DNA, 15 bp, Homo sapiens
acaatgctatatcca

SEQ ID NO: 1634618 - DNA, 15 bp, Homo sapiens
aacaatgctatatcc

SEQ ID NO: 1634619 - DNA, 15 bp, Homo sapiens
gaacaatgctatatc

SEQ ID NO: 1634620 - DNA, 15 bp, Homo sapiens
tgaacaatgctatat

SEQ ID NO: 1634621 - DNA, 15 bp, Homo sapiens
ctgaacaatgctata

SEQ ID NO: 1634622 - DNA, 15 bp, Homo sapiens
cctgaacaatgctat

SEQ ID NO: 1634623 - DNA, 15 bp, Homo sapiens
ccctgaacaatgcta

SEQ ID NO: 1634624 - DNA, 15 bp, Homo sapiens
gccctgaacaatgct

SEQ ID NO: 1634625 - DNA, 15 bp, Homo sapiens
agccctgaacaatgc

SEQ ID NO: 1634626 - DNA, 15 bp, Homo sapiens
tagccctgaacaatg

SEQ ID NO: 1634627 - DNA, 15 bp, Homo sapiens
atagccctgaacaat

SEQ ID NO: 1634628 - DNA, 15 bp, Homo sapiens
gatagccctgaacaa

SEQ ID NO: 1634629 - DNA, 15 bp, Homo sapiens
agatagccctgaaca

SEQ ID NO: 1634630 - DNA, 15 bp, Homo sapiens
gagatagccctgaac

SEQ ID NO: 1634631 - DNA, 15 bp, Homo sapiens
agagatagccctgaa

SEQ ID NO: 1634632 - DNA, 15 bp, Homo sapiens
aagagatagccctga

SEQ ID NO: 1634633 - DNA, 15 bp, Homo sapiens
aaagagatagccctg

SEQ ID NO: 1634634 - DNA, 15 bp, Homo sapiens
caaagagatagccct

SEQ ID NO: 1634635 - DNA, 15 bp, Homo sapiens
gcaaagagatagccc

SEQ ID NO: 1634636 - DNA, 15 bp, Homo sapiens
agcaaagagatagcc

SEQ ID NO: 1634637 - DNA, 15 bp, Homo sapiens
cagcaaagagatagc

SEQ ID NO: 1634638 - DNA, 15 bp, Homo sapiens
acagcaaagagatag

SEQ ID NO: 1634639 - DNA, 15 bp, Homo sapiens
aacagcaaagagata

SEQ ID NO: 1634640 - DNA, 15 bp, Homo sapiens
gaacagcaaagagat

SEQ ID NO: 1634641 - DNA, 15 bp, Homo sapiens
agaacagcaaagaga

SEQ ID NO: 1634642 - DNA, 15 bp, Homo sapiens
aagaacagcaaagag

SEQ ID NO: 1634643 - DNA, 15 bp, Homo sapiens
aaagaacagcaaaga

SEQ ID NO: 1634644 - DNA, 15 bp, Homo sapiens
aaaagaacagcaaag

SEQ ID NO: 1634645 - DNA, 15 bp, Homo sapiens
aaaaaagaacagcaa

SEQ ID NO: 1634646 - DNA, 15 bp, Homo sapiens
aaaaaaagaacagca

SEQ ID NO: 1634647 - DNA, 15 bp, Homo sapiens
aaaaaaaagaacagc

SEQ ID NO: 1634648 - DNA, 15 bp, Homo sapiens
aaaaaaaaagaacag

SEQ ID NO: 1634649 - DNA, 15 bp, Homo sapiens
aaaaaaaaaagaaca

SEQ ID NO: 1634650 - DNA, 15 bp, Homo sapiens
aaaaaaaaaaagaac

SEQ ID NO: 1634651 - DNA, 15 bp, Homo sapiens
agtctaaaaaaaaaa

SEQ ID NO: 1634652 - DNA, 15 bp, Homo sapiens
gagtctaaaaaaaaa

SEQ ID NO: 1634653 - DNA, 15 bp, Homo sapiens
tgagtctaaaaaaaa

SEQ ID NO: 1634654 - DNA, 15 bp, Homo sapiens
gtgagtctaaaaaaa

SEQ ID NO: 1634655 - DNA, 15 bp, Homo sapiens
tgtgagtctaaaaaa

SEQ ID NO: 1634656 - DNA, 15 bp, Homo sapiens
gtgtgagtctaaaaa

SEQ ID NO: 1634657 - DNA, 15 bp, Homo sapiens
tgtgtgagtctaaaa

SEQ ID NO: 1634658 - DNA, 15 bp, Homo sapiens
ttgtgtgagtctaaa

SEQ ID NO: 1634659 - DNA, 15 bp, Homo sapiens
cttgtgtgagtctaa

SEQ ID NO: 1634660 - DNA, 15 bp, Homo sapiens
gcttgtgtgagtcta

SEQ ID NO: 1634661 - DNA, 15 bp, Homo sapiens
tgcttgtgtgagtct

SEQ ID NO: 1634662 - DNA, 15 bp, Homo sapiens
ttgcttgtgtgagtc

SEQ ID NO: 1634663 - DNA, 15 bp, Homo sapiens
attgcttgtgtgagt

SEQ ID NO: 1634664 - DNA, 15 bp, Homo sapiens
cattgcttgtgtgag

SEQ ID NO: 1634665 - DNA, 15 bp, Homo sapiens
acattgcttgtgtga

SEQ ID NO: 1634666 - DNA, 15 bp, Homo sapiens
cacattgcttgtgtg

SEQ ID NO: 1634667 - DNA, 15 bp, Homo sapiens
ccacattgcttgtgt

SEQ ID NO: 1634668 - DNA, 15 bp, Homo sapiens
tccacattgcttgtg

SEQ ID NO: 1634669 - DNA, 15 bp, Homo sapiens
ctccacattgcttgt

SEQ ID NO: 1634670 - DNA, 15 bp, Homo sapiens
tctccacattgcttg

SEQ ID NO: 1634671 - DNA, 15 bp, Homo sapiens
ttctccacattgctt

SEQ ID NO: 1634672 - DNA, 15 bp, Homo sapiens
cttctccacattgct

SEQ ID NO: 1634673 - DNA, 15 bp, Homo sapiens
ccttctccacattgc

SEQ ID NO: 1634674 - DNA, 15 bp, Homo sapiens
tccttctccacattg

SEQ ID NO: 1634675 - DNA, 15 bp, Homo sapiens
ttccttctccacatt

SEQ ID NO: 1634676 - DNA, 15 bp, Homo sapiens
gttccttctccacat

SEQ ID NO: 1634677 - DNA, 15 bp, Homo sapiens
tgttccttctccaca

SEQ ID NO: 1634678 - DNA, 15 bp, Homo sapiens
atgttccttctccac

SEQ ID NO: 1634679 - DNA, 15 bp, Homo sapiens
catgttccttctcca

SEQ ID NO: 1634680 - DNA, 15 bp, Homo sapiens
tcatgttccttctcc

SEQ ID NO: 1634681 - DNA, 15 bp, Homo sapiens
ttcatgttccttctc

SEQ ID NO: 1634682 - DNA, 15 bp, Homo sapiens
tttcatgttccttct

SEQ ID NO: 1634683 - DNA, 15 bp, Homo sapiens
ttttcatgttccttc

SEQ ID NO: 1634684 - DNA, 15 bp, Homo sapiens
gttttcatgttcctt

SEQ ID NO: 1634685 - DNA, 15 bp, Homo sapiens
tgttttcatgttcct

SEQ ID NO: 1634686 - DNA, 15 bp, Homo sapiens
atgttttcatgttcc

SEQ ID NO: 1634687 - DNA, 15 bp, Homo sapiens
gatgttttcatgttc

SEQ ID NO: 1634688 - DNA, 15 bp, Homo sapiens
agatgttttcatgtt

SEQ ID NO: 1634689 - DNA, 15 bp, Homo sapiens
aagatgttttcatgt

SEQ ID NO: 1634690 - DNA, 15 bp, Homo sapiens
aaagatgttttcatg

SEQ ID NO: 1634691 - DNA, 15 bp, Homo sapiens
caaagatgttttcat

SEQ ID NO: 1634692 - DNA, 15 bp, Homo sapiens
tcaaagatgttttca

SEQ ID NO: 1634693 - DNA, 15 bp, Homo sapiens
ctcaaagatgttttc

SEQ ID NO: 1634694 - DNA, 15 bp, Homo sapiens
tctcaaagatgtttt

SEQ ID NO: 1634695 - DNA, 15 bp, Homo sapiens
atctcaaagatgttt

SEQ ID NO: 1634696 - DNA, 15 bp, Homo sapiens
tatctcaaagatgtt

SEQ ID NO: 1634697 - DNA, 15 bp, Homo sapiens
ctatctcaaagatgt

SEQ ID NO: 1634698 - DNA, 15 bp, Homo sapiens
tctatctcaaagatg

SEQ ID NO: 1634699 - DNA, 15 bp, Homo sapiens
ctctatctcaaagat

SEQ ID NO: 1634700 - DNA, 15 bp, Homo sapiens
gctctatctcaaaga

SEQ ID NO: 1634701 - DNA, 15 bp, Homo sapiens
agctctatctcaaag

SEQ ID NO: 1634702 - DNA, 15 bp, Homo sapiens
aagctctatctcaaa

SEQ ID NO: 1634703 - DNA, 15 bp, Homo sapiens
taagctctatctcaa

SEQ ID NO: 1634704 - DNA, 15 bp, Homo sapiens
ttaagctctatctca

SEQ ID NO: 1634705 - DNA, 15 bp, Homo sapiens
attaagctctatctc

SEQ ID NO: 1634706 - DNA, 15 bp, Homo sapiens
tattaagctctatct

SEQ ID NO: 1634707 - DNA, 15 bp, Homo sapiens
gtattaagctctatc

SEQ ID NO: 1634708 - DNA, 15 bp, Homo sapiens
tgtattaagctctat

SEQ ID NO: 1634709 - DNA, 15 bp, Homo sapiens
ctgtattaagctcta

SEQ ID NO: 1634710 - DNA, 15 bp, Homo sapiens
tctgtattaagctct

SEQ ID NO: 1634711 - DNA, 15 bp, Homo sapiens
atctgtattaagctc

SEQ ID NO: 1634712 - DNA, 15 bp, Homo sapiens
catctgtattaagct

SEQ ID NO: 1634713 - DNA, 15 bp, Homo sapiens
acatctgtattaagc

SEQ ID NO: 1634714 - DNA, 15 bp, Homo sapiens
gacatctgtattaag

SEQ ID NO: 1634715 - DNA, 15 bp, Homo sapiens
tgacatctgtattaa

SEQ ID NO: 1634716 - DNA, 15 bp, Homo sapiens
ttgacatctgtatta

SEQ ID NO: 1634717 - DNA, 15 bp, Homo sapiens
attgacatctgtatt

SEQ ID NO: 1634718 - DNA, 15 bp, Homo sapiens
gattgacatctgtat

SEQ ID NO: 1634719 - DNA, 15 bp, Homo sapiens
agattgacatctgta

SEQ ID NO: 1634720 - DNA, 15 bp, Homo sapiens
gagattgacatctgt

SEQ ID NO: 1634721 - DNA, 15 bp, Homo sapiens
agagattgacatctg

SEQ ID NO: 1634722 - DNA, 15 bp, Homo sapiens
aagagattgacatct

SEQ ID NO: 1634723 - DNA, 15 bp, Homo sapiens
aaagagattgacatc

SEQ ID NO: 1634724 - DNA, 15 bp, Homo sapiens
caaagagattgacat

SEQ ID NO: 1634725 - DNA, 15 bp, Homo sapiens
acaaagagattgaca

SEQ ID NO: 1634726 - DNA, 15 bp, Homo sapiens
tacaaagagattgac

SEQ ID NO: 1634727 - DNA, 15 bp, Homo sapiens
ttacaaagagattga

SEQ ID NO: 1634728 - DNA, 15 bp, Homo sapiens
tttacaaagagattg

SEQ ID NO: 1634729 - DNA, 15 bp, Homo sapiens
atttacaaagagatt

SEQ ID NO: 1634730 - DNA, 15 bp, Homo sapiens
tatttacaaagagat

SEQ ID NO: 1634731 - DNA, 15 bp, Homo sapiens
ttatttacaaagaga

SEQ ID NO: 1634732 - DNA, 15 bp, Homo sapiens
cttatttacaaagag

SEQ ID NO: 1634733 - DNA, 15 bp, Homo sapiens
gcttatttacaaaga

SEQ ID NO: 1634734 - DNA, 15 bp, Homo sapiens
tgcttatttacaaag

SEQ ID NO: 1634735 - DNA, 15 bp, Homo sapiens
ttgcttatttacaaa

SEQ ID NO: 1634736 - DNA, 15 bp, Homo sapiens
attgcttatttacaa

SEQ ID NO: 1634737 - DNA, 15 bp, Homo sapiens
aattgcttatttaca

SEQ ID NO: 1634738 - DNA, 15 bp, Homo sapiens
taattgcttatttac

SEQ ID NO: 1634739 - DNA, 15 bp, Homo sapiens
ttaattgcttattta

SEQ ID NO: 1634740 - DNA, 15 bp, Homo sapiens
tttaattgcttattt

SEQ ID NO: 1634741 - DNA, 15 bp, Homo sapiens
ttttaattgcttatt

SEQ ID NO: 1634742 - DNA, 15 bp, Homo sapiens
cttttaattgcttat

SEQ ID NO: 1634743 - DNA, 15 bp, Homo sapiens
acttttaattgctta

SEQ ID NO: 1634744 - DNA, 15 bp, Homo sapiens
cacttttaattgctt

SEQ ID NO: 1634745 - DNA, 15 bp, Homo sapiens
ccacttttaattgct

SEQ ID NO: 1634746 - DNA, 15 bp, Homo sapiens
tccacttttaattgc

SEQ ID NO: 1634747 - DNA, 15 bp, Homo sapiens
ttccacttttaattg

SEQ ID NO: 1634748 - DNA, 15 bp, Homo sapiens
gttccacttttaatt

SEQ ID NO: 1634749 - DNA, 15 bp, Homo sapiens
ggttccacttttaat

SEQ ID NO: 1634750 - DNA, 15 bp, Homo sapiens
tggttccacttttaa

SEQ ID NO: 1634751 - DNA, 15 bp, Homo sapiens
gtggttccactttta

SEQ ID NO: 1634752 - DNA, 15 bp, Homo sapiens
agtggttccactttt

SEQ ID NO: 1634753 - DNA, 15 bp, Homo sapiens
cagtggttccacttt

SEQ ID NO: 1634754 - DNA, 15 bp, Homo sapiens
acagtggttccactt

SEQ ID NO: 1634755 - DNA, 15 bp, Homo sapiens
gacagtggttccact

SEQ ID NO: 1634756 - DNA, 15 bp, Homo sapiens
ggacagtggttccac

SEQ ID NO: 1634757 - DNA, 15 bp, Homo sapiens
tggacagtggttcca

SEQ ID NO: 1634758 - DNA, 15 bp, Homo sapiens
gtggacagtggttcc

SEQ ID NO: 1634759 - DNA, 15 bp, Homo sapiens
ggtggacagtggttc

SEQ ID NO: 1634760 - DNA, 15 bp, Homo sapiens
tggtggacagtggtt

SEQ ID NO: 1634761 - DNA, 15 bp, Homo sapiens
atggtggacagtggt

SEQ ID NO: 1634762 - DNA, 15 bp, Homo sapiens
catggtggacagtgg

SEQ ID NO: 1634763 - DNA, 15 bp, Homo sapiens
acatggtggacagtg

SEQ ID NO: 1634764 - DNA, 15 bp, Homo sapiens
cacatggtggacagt

SEQ ID NO: 1634765 - DNA, 15 bp, Homo sapiens
tcacatggtggacag

SEQ ID NO: 1634766 - DNA, 15 bp, Homo sapiens
ctcacatggtggaca

SEQ ID NO: 1634767 - DNA, 15 bp, Homo sapiens
tctcacatggtggac

SEQ ID NO: 1634768 - DNA, 15 bp, Homo sapiens
ttctcacatggtgga

SEQ ID NO: 1634769 - DNA, 15 bp, Homo sapiens
cttctcacatggtgg

SEQ ID NO: 1634770 - DNA, 15 bp, Homo sapiens
tcttctcacatggtg

SEQ ID NO: 1634771 - DNA, 15 bp, Homo sapiens
ctcttctcacatggt

SEQ ID NO: 1634772 - DNA, 15 bp, Homo sapiens
actcttctcacatgg

SEQ ID NO: 1634773 - DNA, 15 bp, Homo sapiens
cactcttctcacatg

SEQ ID NO: 1634774 - DNA, 15 bp, Homo sapiens
tcactcttctcacat

SEQ ID NO: 1634775 - DNA, 15 bp, Homo sapiens
gtcactcttctcaca

SEQ ID NO: 1634776 - DNA, 15 bp, Homo sapiens
agtcactcttctcac

SEQ ID NO: 1634777 - DNA, 15 bp, Homo sapiens
cagtcactcttctca

SEQ ID NO: 1634778 - DNA, 15 bp, Homo sapiens
ccagtcactcttctc

SEQ ID NO: 1634779 - DNA, 15 bp, Homo sapiens
gccagtcactcttct

SEQ ID NO: 1634780 - DNA, 15 bp, Homo sapiens
agccagtcactcttc

SEQ ID NO: 1634781 - DNA, 15 bp, Homo sapiens
tagccagtcactctt

SEQ ID NO: 1634782 - DNA, 15 bp, Homo sapiens
atagccagtcactct

SEQ ID NO: 1634783 - DNA, 15 bp, Homo sapiens
catagccagtcactc

SEQ ID NO: 1634784 - DNA, 15 bp, Homo sapiens
ccatagccagtcact

SEQ ID NO: 1634785 - DNA, 15 bp, Homo sapiens
gccatagccagtcac

SEQ ID NO: 1634786 - DNA, 15 bp, Homo sapiens
agccatagccagtca

SEQ ID NO: 1634787 - DNA, 15 bp, Homo sapiens
cagccatagccagtc

SEQ ID NO: 1634788 - DNA, 15 bp, Homo sapiens
ccagccatagccagt

SEQ ID NO: 1634789 - DNA, 15 bp, Homo sapiens
tccagccatagccag

SEQ ID NO: 1634790 - DNA, 15 bp, Homo sapiens
atccagccatagcca

SEQ ID NO: 1634791 - DNA, 15 bp, Homo sapiens
tatccagccatagcc

SEQ ID NO: 1634792 - DNA, 15 bp, Homo sapiens
atatccagccatagc

SEQ ID NO: 1634793 - DNA, 15 bp, Homo sapiens
aatatccagccatag

SEQ ID NO: 1634794 - DNA, 15 bp, Homo sapiens
aaatatccagccata

SEQ ID NO: 1634795 - DNA, 15 bp, Homo sapiens
aaaatatccagccat

SEQ ID NO: 1634796 - DNA, 15 bp, Homo sapiens
aaaaatatccagcca

SEQ ID NO: 1634797 - DNA, 15 bp, Homo sapiens
taaaaatatccagcc

SEQ ID NO: 1634798 - DNA, 15 bp, Homo sapiens
ttaaaaatatccagc

SEQ ID NO: 1634799 - DNA, 15 bp, Homo sapiens
tttaaaaatatccag

SEQ ID NO: 1634800 - DNA, 15 bp, Homo sapiens
atttaaaaatatcca

SEQ ID NO: 1634801 - DNA, 15 bp, Homo sapiens
tatttaaaaatatcc

SEQ ID NO: 1634802 - DNA, 15 bp, Homo sapiens
gtatttaaaaatatc

SEQ ID NO: 1634803 - DNA, 15 bp, Homo sapiens
tgtatttaaaaatat

SEQ ID NO: 1634804 - DNA, 15 bp, Homo sapiens
gtgtatttaaaaata

SEQ ID NO: 1634805 - DNA, 15 bp, Homo sapiens
tgtgtatttaaaaat

SEQ ID NO: 1634806 - DNA, 15 bp, Homo sapiens
atgtgtatttaaaaa

SEQ ID NO: 1634807 - DNA, 15 bp, Homo sapiens
tatgtgtatttaaaa

SEQ ID NO: 1634808 - DNA, 15 bp, Homo sapiens
ttatgtgtatttaaa

SEQ ID NO: 1634809 - DNA, 15 bp, Homo sapiens
tttatgtgtatttaa

SEQ ID NO: 1634810 - DNA, 15 bp, Homo sapiens
ttttatgtgtattta

SEQ ID NO: 1634811 - DNA, 15 bp, Homo sapiens
attttatgtgtattt

SEQ ID NO: 1634812 - DNA, 15 bp, Homo sapiens
cattttatgtgtatt

SEQ ID NO: 1634813 - DNA, 15 bp, Homo sapiens
acattttatgtgtat

SEQ ID NO: 1634814 - DNA, 15 bp, Homo sapiens
cacattttatgtgta

SEQ ID NO: 1634815 - DNA, 15 bp, Homo sapiens
ccacattttatgtgt

SEQ ID NO: 1634816 - DNA, 15 bp, Homo sapiens
accacattttatgtg

SEQ ID NO: 1634817 - DNA, 15 bp, Homo sapiens
taccacattttatgt

SEQ ID NO: 1634818 - DNA, 15 bp, Homo sapiens
ataccacattttatg

SEQ ID NO: 1634819 - DNA, 15 bp, Homo sapiens
tataccacattttat

SEQ ID NO: 1634820 - DNA, 15 bp, Homo sapiens
ttataccacatttta

SEQ ID NO: 1634821 - DNA, 15 bp, Homo sapiens
tttataccacatttt

SEQ ID NO: 1634822 - DNA, 15 bp, Homo sapiens
atttataccacattt

SEQ ID NO: 1634823 - DNA, 15 bp, Homo sapiens
catttataccacatt

SEQ ID NO: 1634824 - DNA, 15 bp, Homo sapiens
ccatttataccacat

SEQ ID NO: 1634825 - DNA, 15 bp, Homo sapiens
accatttataccaca

SEQ ID NO: 1634826 - DNA, 15 bp, Homo sapiens
taccatttataccac

SEQ ID NO: 1634827 - DNA, 15 bp, Homo sapiens
ctaccatttatacca

SEQ ID NO: 1634828 - DNA, 15 bp, Homo sapiens
tctaccatttatacc

SEQ ID NO: 1634829 - DNA, 15 bp, Homo sapiens
ttctaccatttatac

SEQ ID NO: 1634830 - DNA, 15 bp, Homo sapiens
attctaccatttata

SEQ ID NO: 1634831 - DNA, 15 bp, Homo sapiens
cattctaccatttat

SEQ ID NO: 1634832 - DNA, 15 bp, Homo sapiens
gcattctaccattta

SEQ ID NO: 1634833 - DNA, 15 bp, Homo sapiens
ggcattctaccattt

SEQ ID NO: 1634834 - DNA, 15 bp, Homo sapiens
tggcattctaccatt

SEQ ID NO: 1634835 - DNA, 15 bp, Homo sapiens
ctggcattctaccat

SEQ ID NO: 1634836 - DNA, 15 bp, Homo sapiens
cctggcattctacca

SEQ ID NO: 1634837 - DNA, 15 bp, Homo sapiens
ccctggcattctacc

SEQ ID NO: 1634838 - DNA, 15 bp, Homo sapiens
tccctggcattctac

SEQ ID NO: 1634839 - DNA, 15 bp, Homo sapiens
atccctggcattcta

SEQ ID NO: 1634840 - DNA, 15 bp, Homo sapiens
tatccctggcattct

SEQ ID NO: 1634841 - DNA, 15 bp, Homo sapiens
ctatccctggcattc

SEQ ID NO: 1634842 - DNA, 15 bp, Homo sapiens
tctatccctggcatt

SEQ ID NO: 1634843 - DNA, 15 bp, Homo sapiens
ttctatccctggcat

SEQ ID NO: 1634844 - DNA, 15 bp, Homo sapiens
cttctatccctggca

SEQ ID NO: 1634845 - DNA, 15 bp, Homo sapiens
ccttctatccctggc

SEQ ID NO: 1634846 - DNA, 15 bp, Homo sapiens
tccttctatccctgg

SEQ ID NO: 1634847 - DNA, 15 bp, Homo sapiens
ctccttctatccctg

SEQ ID NO: 1634848 - DNA, 15 bp, Homo sapiens
actccttctatccct

SEQ ID NO: 1634849 - DNA, 15 bp, Homo sapiens
tactccttctatccc

SEQ ID NO: 1634850 - DNA, 15 bp, Homo sapiens
atactccttctatcc

SEQ ID NO: 1634851 - DNA, 15 bp, Homo sapiens
gatactccttctatc

SEQ ID NO: 1634852 - DNA, 15 bp, Homo sapiens
agatactccttctat

SEQ ID NO: 1634853 - DNA, 15 bp, Homo sapiens
aagatactccttcta

SEQ ID NO: 1634854 - DNA, 15 bp, Homo sapiens
taagatactccttct

SEQ ID NO: 1634855 - DNA, 15 bp, Homo sapiens
ataagatactccttc

SEQ ID NO: 1634856 - DNA, 15 bp, Homo sapiens
tataagatactcctt

SEQ ID NO: 1634857 - DNA, 15 bp, Homo sapiens
ttataagatactcct

SEQ ID NO: 1634858 - DNA, 15 bp, Homo sapiens
cttataagatactcc

SEQ ID NO: 1634859 - DNA, 15 bp, Homo sapiens
acttataagatactc

SEQ ID NO: 1634860 - DNA, 15 bp, Homo sapiens
aacttataagatact

SEQ ID NO: 1634861 - DNA, 15 bp, Homo sapiens
taacttataagatac

SEQ ID NO: 1634862 - DNA, 15 bp, Homo sapiens
gtaacttataagata

SEQ ID NO: 1634863 - DNA, 15 bp, Homo sapiens
ggtaacttataagat

SEQ ID NO: 1634864 - DNA, 15 bp, Homo sapiens
aggtaacttataaga

SEQ ID NO: 1634865 - DNA, 15 bp, Homo sapiens
taggtaacttataag

SEQ ID NO: 1634866 - DNA, 15 bp, Homo sapiens
ctaggtaacttataa

SEQ ID NO: 1634867 - DNA, 15 bp, Homo sapiens
actaggtaacttata

SEQ ID NO: 1634868 - DNA, 15 bp, Homo sapiens
gactaggtaacttat

SEQ ID NO: 1634869 - DNA, 15 bp, Homo sapiens
tgactaggtaactta

SEQ ID NO: 1634870 - DNA, 15 bp, Homo sapiens
ttgactaggtaactt

SEQ ID NO: 1634871 - DNA, 15 bp, Homo sapiens
gttgactaggtaact

SEQ ID NO: 1634872 - DNA, 15 bp, Homo sapiens
cgttgactaggtaac

SEQ ID NO: 1634873 - DNA, 15 bp, Homo sapiens
acgttgactaggtaa

SEQ ID NO: 1634874 - DNA, 15 bp, Homo sapiens
aacgttgactaggta

SEQ ID NO: 1634875 - DNA, 15 bp, Homo sapiens
gaacgttgactaggt

SEQ ID NO: 1634876 - DNA, 15 bp, Homo sapiens
agaacgttgactagg

SEQ ID NO: 1634877 - DNA, 15 bp, Homo sapiens
cagaacgttgactag

SEQ ID NO: 1634878 - DNA, 15 bp, Homo sapiens
ccagaacgttgacta

SEQ ID NO: 1634879 - DNA, 15 bp, Homo sapiens
gccagaacgttgact

SEQ ID NO: 1634880 - DNA, 15 bp, Homo sapiens
agccagaacgttgac

SEQ ID NO: 1634881 - DNA, 15 bp, Homo sapiens
aagccagaacgttga

SEQ ID NO: 1634882 - DNA, 15 bp, Homo sapiens
gaagccagaacgttg

SEQ ID NO: 1634883 - DNA, 15 bp, Homo sapiens
agaagccagaacgtt

SEQ ID NO: 1634884 - DNA, 15 bp, Homo sapiens
cagaagccagaacgt

SEQ ID NO: 1634885 - DNA, 15 bp, Homo sapiens
ccagaagccagaacg

SEQ ID NO: 1634886 - DNA, 15 bp, Homo sapiens
cccagaagccagaac

SEQ ID NO: 1634887 - DNA, 15 bp, Homo sapiens
gcccagaagccagaa

SEQ ID NO: 1634888 - DNA, 15 bp, Homo sapiens
tgcccagaagccaga

SEQ ID NO: 1634889 - DNA, 15 bp, Homo sapiens
ctgcccagaagccag

SEQ ID NO: 1634890 - DNA, 15 bp, Homo sapiens
tctgcccagaagcca

SEQ ID NO: 1634891 - DNA, 15 bp, Homo sapiens
ttctgcccagaagcc

SEQ ID NO: 1634892 - DNA, 15 bp, Homo sapiens
tttctgcccagaagc

SEQ ID NO: 1634893 - DNA, 15 bp, Homo sapiens
ttttctgcccagaag

SEQ ID NO: 1634894 - DNA, 15 bp, Homo sapiens
gttttctgcccagaa

SEQ ID NO: 1634895 - DNA, 15 bp, Homo sapiens
agttttctgcccaga

SEQ ID NO: 1634896 - DNA, 15 bp, Homo sapiens
tagttttctgcccag

SEQ ID NO: 1634897 - DNA, 15 bp, Homo sapiens
atagttttctgccca

SEQ ID NO: 1634898 - DNA, 15 bp, Homo sapiens
gatagttttctgccc

SEQ ID NO: 1634899 - DNA, 15 bp, Homo sapiens
agatagttttctgcc

SEQ ID NO: 1634900 - DNA, 15 bp, Homo sapiens
tagatagttttctgc

SEQ ID NO: 1634901 - DNA, 15 bp, Homo sapiens
ttagatagttttctg

SEQ ID NO: 1634902 - DNA, 15 bp, Homo sapiens
tttagatagttttct

SEQ ID NO: 1634903 - DNA, 15 bp, Homo sapiens
gtttagatagttttc

SEQ ID NO: 1634904 - DNA, 15 bp, Homo sapiens
agtttagatagtttt

SEQ ID NO: 1634905 - DNA, 15 bp, Homo sapiens
gagtttagatagttt

SEQ ID NO: 1634906 - DNA, 15 bp, Homo sapiens
tgagtttagatagtt

SEQ ID NO: 1634907 - DNA, 15 bp, Homo sapiens
ctgagtttagatagt

SEQ ID NO: 1634908 - DNA, 15 bp, Homo sapiens
gctgagtttagatag

SEQ ID NO: 1634909 - DNA, 15 bp, Homo sapiens
ggctgagtttagata

SEQ ID NO: 1634910 - DNA, 15 bp, Homo sapiens
tggctgagtttagat

SEQ ID NO: 1634911 - DNA, 15 bp, Homo sapiens
ctggctgagtttaga

SEQ ID NO: 1634912 - DNA, 15 bp, Homo sapiens
tctggctgagtttag

SEQ ID NO: 1634913 - DNA, 15 bp, Homo sapiens
atctggctgagttta

SEQ ID NO: 1634914 - DNA, 15 bp, Homo sapiens
tatctggctgagttt

SEQ ID NO: 1634915 - DNA, 15 bp, Homo sapiens
ttatctggctgagtt

SEQ ID NO: 1634916 - DNA, 15 bp, Homo sapiens
attatctggctgagt

SEQ ID NO: 1634917 - DNA, 15 bp, Homo sapiens
gattatctggctgag

SEQ ID NO: 1634918 - DNA, 15 bp, Homo sapiens
tgattatctggctga

SEQ ID NO: 1634919 - DNA, 15 bp, Homo sapiens
ctgattatctggctg

SEQ ID NO: 1634920 - DNA, 15 bp, Homo sapiens
actgattatctggct

SEQ ID NO: 1634921 - DNA, 15 bp, Homo sapiens
aactgattatctggc

SEQ ID NO: 1634922 - DNA, 15 bp, Homo sapiens
aaactgattatctgg

SEQ ID NO: 1634923 - DNA, 15 bp, Homo sapiens
gaaactgattatctg

SEQ ID NO: 1634924 - DNA, 15 bp, Homo sapiens
tgaaactgattatct

SEQ ID NO: 1634925 - DNA, 15 bp, Homo sapiens
ttgaaactgattatc

SEQ ID NO: 1634926 - DNA, 15 bp, Homo sapiens
gttgaaactgattat

SEQ ID NO: 1634927 - DNA, 15 bp, Homo sapiens
agttgaaactgatta

SEQ ID NO: 1634928 - DNA, 15 bp, Homo sapiens
tagttgaaactgatt

SEQ ID NO: 1634929 - DNA, 15 bp, Homo sapiens
ttagttgaaactgat

SEQ ID NO: 1634930 - DNA, 15 bp, Homo sapiens
tttagttgaaactga

SEQ ID NO: 1634931 - DNA, 15 bp, Homo sapiens
atttagttgaaactg

SEQ ID NO: 1634932 - DNA, 15 bp, Homo sapiens
gatttagttgaaact

SEQ ID NO: 1634933 - DNA, 15 bp, Homo sapiens
tgatttagttgaaac

SEQ ID NO: 1634934 - DNA, 15 bp, Homo sapiens
ctgatttagttgaaa

SEQ ID NO: 1634935 - DNA, 15 bp, Homo sapiens
cctgatttagttgaa

SEQ ID NO: 1634936 - DNA, 15 bp, Homo sapiens
tcctgatttagttga

SEQ ID NO: 1634937 - DNA, 15 bp, Homo sapiens
ttcctgatttagttg

SEQ ID NO: 1634938 - DNA, 15 bp, Homo sapiens
tttcctgatttagtt

SEQ ID NO: 1634939 - DNA, 15 bp, Homo sapiens
ttttcctgatttagt

SEQ ID NO: 1634940 - DNA, 15 bp, Homo sapiens
gttttcctgatttag

SEQ ID NO: 1634941 - DNA, 15 bp, Homo sapiens
tgttttcctgattta

SEQ ID NO: 1634942 - DNA, 15 bp, Homo sapiens
atgttttcctgattt

SEQ ID NO: 1634943 - DNA, 15 bp, Homo sapiens
catgttttcctgatt

SEQ ID NO: 1634944 - DNA, 15 bp, Homo sapiens
ccatgttttcctgat

SEQ ID NO: 1634945 - DNA, 15 bp, Homo sapiens
tccatgttttcctga

SEQ ID NO: 1634946 - DNA, 15 bp, Homo sapiens
ttccatgttttcctg

SEQ ID NO: 1634947 - DNA, 15 bp, Homo sapiens
attccatgttttcct

SEQ ID NO: 1634948 - DNA, 15 bp, Homo sapiens
gattccatgttttcc

SEQ ID NO: 1634949 - DNA, 15 bp, Homo sapiens
tgattccatgttttc

SEQ ID NO: 1634950 - DNA, 15 bp, Homo sapiens
atgattccatgtttt

SEQ ID NO: 1634951 - DNA, 15 bp, Homo sapiens
gatgattccatgttt

SEQ ID NO: 1634952 - DNA, 15 bp, Homo sapiens
agatgattccatgtt

SEQ ID NO: 1634953 - DNA, 15 bp, Homo sapiens
aagatgattccatgt

SEQ ID NO: 1634954 - DNA, 15 bp, Homo sapiens
aaagatgattccatg

SEQ ID NO: 1634955 - DNA, 15 bp, Homo sapiens
taaagatgattccat

SEQ ID NO: 1634956 - DNA, 15 bp, Homo sapiens
ataaagatgattcca

SEQ ID NO: 1634957 - DNA, 15 bp, Homo sapiens
gataaagatgattcc

SEQ ID NO: 1634958 - DNA, 15 bp, Homo sapiens
agataaagatgattc

SEQ ID NO: 1634959 - DNA, 15 bp, Homo sapiens
tagataaagatgatt

SEQ ID NO: 1634960 - DNA, 15 bp, Homo sapiens
ctagataaagatgat

SEQ ID NO: 1634961 - DNA, 15 bp, Homo sapiens
cctagataaagatga

SEQ ID NO: 1634962 - DNA, 15 bp, Homo sapiens
acctagataaagatg

SEQ ID NO: 1634963 - DNA, 15 bp, Homo sapiens
tacctagataaagat

SEQ ID NO: 1634964 - DNA, 15 bp, Homo sapiens
ctacctagataaaga

SEQ ID NO: 1634965 - DNA, 15 bp, Homo sapiens
actacctagataaag

SEQ ID NO: 1634966 - DNA, 15 bp, Homo sapiens
cactacctagataaa

SEQ ID NO: 1634967 - DNA, 15 bp, Homo sapiens
acactacctagataa

SEQ ID NO: 1634968 - DNA, 15 bp, Homo sapiens
aacactacctagata

SEQ ID NO: 1634969 - DNA, 15 bp, Homo sapiens
taacactacctagat

SEQ ID NO: 1634970 - DNA, 15 bp, Homo sapiens
ataacactacctaga

SEQ ID NO: 1634971 - DNA, 15 bp, Homo sapiens
tataacactacctag

SEQ ID NO: 1634972 - DNA, 15 bp, Homo sapiens
ctataacactaccta

SEQ ID NO: 1634973 - DNA, 15 bp, Homo sapiens
actataacactacct

SEQ ID NO: 1634974 - DNA, 15 bp, Homo sapiens
aactataacactacc

SEQ ID NO: 1634975 - DNA, 15 bp, Homo sapiens
taactataacactac

SEQ ID NO: 1634976 - DNA, 15 bp, Homo sapiens
gtaactataacacta

SEQ ID NO: 1634977 - DNA, 15 bp, Homo sapiens
tgtaactataacact

SEQ ID NO: 1634978 - DNA, 15 bp, Homo sapiens
atgtaactataacac

SEQ ID NO: 1634979 - DNA, 15 bp, Homo sapiens
aatgtaactataaca

SEQ ID NO: 1634980 - DNA, 15 bp, Homo sapiens
caatgtaactataac

SEQ ID NO: 1634981 - DNA, 15 bp, Homo sapiens
gcaatgtaactataa

SEQ ID NO: 1634982 - DNA, 15 bp, Homo sapiens
ggcaatgtaactata

SEQ ID NO: 1634983 - DNA, 15 bp, Homo sapiens
aggcaatgtaactat

SEQ ID NO: 1634984 - DNA, 15 bp, Homo sapiens
gaggcaatgtaacta

SEQ ID NO: 1634985 - DNA, 15 bp, Homo sapiens
tgaggcaatgtaact

SEQ ID NO: 1634986 - DNA, 15 bp, Homo sapiens
atgaggcaatgtaac

SEQ ID NO: 1634987 - DNA, 15 bp, Homo sapiens
aatgaggcaatgtaa

SEQ ID NO: 1634988 - DNA, 15 bp, Homo sapiens
aaatgaggcaatgta

SEQ ID NO: 1634989 - DNA, 15 bp, Homo sapiens
taaatgaggcaatgt

SEQ ID NO: 1634990 - DNA, 15 bp, Homo sapiens
ataaatgaggcaatg

SEQ ID NO: 1634991 - DNA, 15 bp, Homo sapiens
gataaatgaggcaat

SEQ ID NO: 1634992 - DNA, 15 bp, Homo sapiens
agataaatgaggcaa

SEQ ID NO: 1634993 - DNA, 15 bp, Homo sapiens
tagataaatgaggca

SEQ ID NO: 1634994 - DNA, 15 bp, Homo sapiens
gtagataaatgaggc

SEQ ID NO: 1634995 - DNA, 15 bp, Homo sapiens
tgtagataaatgagg

SEQ ID NO: 1634996 - DNA, 15 bp, Homo sapiens
gtgtagataaatgag

SEQ ID NO: 1634997 - DNA, 15 bp, Homo sapiens
tgtgtagataaatga

SEQ ID NO: 1634998 - DNA, 15 bp, Homo sapiens
atgtgtagataaatg

SEQ ID NO: 1634999 - DNA, 15 bp, Homo sapiens
gatgtgtagataaat

SEQ ID NO: 1635000 - DNA, 15 bp, Homo sapiens
tgatgtgtagataaa

SEQ ID NO: 1635001 - DNA, 15 bp, Homo sapiens
ttgatgtgtagataa

SEQ ID NO: 1635002 - DNA, 15 bp, Homo sapiens
attgatgtgtagata

SEQ ID NO: 1635003 - DNA, 15 bp, Homo sapiens
tattgatgtgtagat

SEQ ID NO: 1635004 - DNA, 15 bp, Homo sapiens
ttattgatgtgtaga

SEQ ID NO: 1635005 - DNA, 15 bp, Homo sapiens
tttattgatgtgtag

SEQ ID NO: 1635006 - DNA, 15 bp, Homo sapiens
atttattgatgtgta

SEQ ID NO: 1635007 - DNA, 15 bp, Homo sapiens
aatttattgatgtgt

SEQ ID NO: 1635008 - DNA, 15 bp, Homo sapiens
gaatttattgatgtg

SEQ ID NO: 1635009 - DNA, 15 bp, Homo sapiens
agaatttattgatgt

SEQ ID NO: 1635010 - DNA, 15 bp, Homo sapiens
aagaatttattgatg

SEQ ID NO: 1635011 - DNA, 15 bp, Homo sapiens
aaagaatttattgat

SEQ ID NO: 1635012 - DNA, 15 bp, Homo sapiens
gaaagaatttattga

SEQ ID NO: 1635013 - DNA, 15 bp, Homo sapiens
agaaagaatttattg

SEQ ID NO: 1635014 - DNA, 15 bp, Homo sapiens
gagaaagaatttatt

SEQ ID NO: 1635015 - DNA, 15 bp, Homo sapiens
tgagaaagaatttat

SEQ ID NO: 1635016 - DNA, 15 bp, Homo sapiens
atgagaaagaattta

SEQ ID NO: 1635017 - DNA, 15 bp, Homo sapiens
aatgagaaagaattt

SEQ ID NO: 1635018 - DNA, 15 bp, Homo sapiens
caatgagaaagaatt

SEQ ID NO: 1635019 - DNA, 15 bp, Homo sapiens
gcaatgagaaagaat

SEQ ID NO: 1635020 - DNA, 15 bp, Homo sapiens
agcaatgagaaagaa

SEQ ID NO: 1635021 - DNA, 15 bp, Homo sapiens
tagcaatgagaaaga

SEQ ID NO: 1635022 - DNA, 15 bp, Homo sapiens
ttagcaatgagaaag

SEQ ID NO: 1635023 - DNA, 15 bp, Homo sapiens
attagcaatgagaaa

SEQ ID NO: 1635024 - DNA, 15 bp, Homo sapiens
tattagcaatgagaa

SEQ ID NO: 1635025 - DNA, 15 bp, Homo sapiens
atattagcaatgaga

SEQ ID NO: 1635026 - DNA, 15 bp, Homo sapiens
aatattagcaatgag

SEQ ID NO: 1635027 - DNA, 15 bp, Homo sapiens
aaatattagcaatga

SEQ ID NO: 1635028 - DNA, 15 bp, Homo sapiens
taaatattagcaatg

SEQ ID NO: 1635029 - DNA, 15 bp, Homo sapiens
ataaatattagcaat

SEQ ID NO: 1635030 - DNA, 15 bp, Homo sapiens
gataaatattagcaa

SEQ ID NO: 1635031 - DNA, 15 bp, Homo sapiens
tgataaatattagca

SEQ ID NO: 1635032 - DNA, 15 bp, Homo sapiens
atgataaatattagc

SEQ ID NO: 1635033 - DNA, 15 bp, Homo sapiens
aatgataaatattag

SEQ ID NO: 1635034 - DNA, 15 bp, Homo sapiens
gaatgataaatatta

SEQ ID NO: 1635035 - DNA, 15 bp, Homo sapiens
agaatgataaatatt

SEQ ID NO: 1635036 - DNA, 15 bp, Homo sapiens
aagaatgataaatat

SEQ ID NO: 1635037 - DNA, 15 bp, Homo sapiens
taagaatgataaata

SEQ ID NO: 1635038 - DNA, 15 bp, Homo sapiens
ataagaatgataaat

SEQ ID NO: 1635039 - DNA, 15 bp, Homo sapiens
gataagaatgataaa

SEQ ID NO: 1635040 - DNA, 15 bp, Homo sapiens
tgataagaatgataa

SEQ ID NO: 1635041 - DNA, 15 bp, Homo sapiens
atgataagaatgata

SEQ ID NO: 1635042 - DNA, 15 bp, Homo sapiens
tatgataagaatgat

SEQ ID NO: 1635043 - DNA, 15 bp, Homo sapiens
ctatgataagaatga

SEQ ID NO: 1635044 - DNA, 15 bp, Homo sapiens
actatgataagaatg

SEQ ID NO: 1635045 - DNA, 15 bp, Homo sapiens
tactatgataagaat

SEQ ID NO: 1635046 - DNA, 15 bp, Homo sapiens
atactatgataagaa

SEQ ID NO: 1635047 - DNA, 15 bp, Homo sapiens
tatactatgataaga

SEQ ID NO: 1635048 - DNA, 15 bp, Homo sapiens
ttatactatgataag

SEQ ID NO: 1635049 - DNA, 15 bp, Homo sapiens
cttatactatgataa

SEQ ID NO: 1635050 - DNA, 15 bp, Homo sapiens
gcttatactatgata

SEQ ID NO: 1635051 - DNA, 15 bp, Homo sapiens
tgcttatactatgat

SEQ ID NO: 1635052 - DNA, 15 bp, Homo sapiens
ttgcttatactatga

SEQ ID NO: 1635053 - DNA, 15 bp, Homo sapiens
tttgcttatactatg

SEQ ID NO: 1635054 - DNA, 15 bp, Homo sapiens
atttgcttatactat

SEQ ID NO: 1635055 - DNA, 15 bp, Homo sapiens
catttgcttatacta

SEQ ID NO: 1635056 - DNA, 15 bp, Homo sapiens
acatttgcttatact

SEQ ID NO: 1635057 - DNA, 15 bp, Homo sapiens
aacatttgcttatac

SEQ ID NO: 1635058 - DNA, 15 bp, Homo sapiens
aaacatttgcttata

SEQ ID NO: 1635059 - DNA, 15 bp, Homo sapiens
aaaacatttgcttat

SEQ ID NO: 1635060 - DNA, 15 bp, Homo sapiens
taaaacatttgctta

SEQ ID NO: 1635061 - DNA, 15 bp, Homo sapiens
ttaaaacatttgctt

SEQ ID NO: 1635062 - DNA, 15 bp, Homo sapiens
attaaaacatttgct

SEQ ID NO: 1635063 - DNA, 15 bp, Homo sapiens
aattaaaacatttgc

SEQ ID NO: 1635064 - DNA, 15 bp, Homo sapiens
gaattaaaacatttg

SEQ ID NO: 1635065 - DNA, 15 bp, Homo sapiens
agaattaaaacattt

SEQ ID NO: 1635066 - DNA, 15 bp, Homo sapiens
tagaattaaaacatt

SEQ ID NO: 1635067 - DNA, 15 bp, Homo sapiens
atagaattaaaacat

SEQ ID NO: 1635068 - DNA, 15 bp, Homo sapiens
aatagaattaaaaca

SEQ ID NO: 1635069 - DNA, 15 bp, Homo sapiens
taatagaattaaaac

SEQ ID NO: 1635070 - DNA, 15 bp, Homo sapiens
ataatagaattaaaa

SEQ ID NO: 1635071 - DNA, 15 bp, Homo sapiens
cataatagaattaaa

SEQ ID NO: 1635072 - DNA, 15 bp, Homo sapiens
ccataatagaattaa

SEQ ID NO: 1635073 - DNA, 15 bp, Homo sapiens
accataatagaatta

SEQ ID NO: 1635074 - DNA, 15 bp, Homo sapiens
taccataatagaatt

SEQ ID NO: 1635075 - DNA, 15 bp, Homo sapiens
ttaccataatagaat

SEQ ID NO: 1635076 - DNA, 15 bp, Homo sapiens
tttaccataatagaa

SEQ ID NO: 1635077 - DNA, 15 bp, Homo sapiens
ctttaccataataga

SEQ ID NO: 1635078 - DNA, 15 bp, Homo sapiens
tctttaccataatag

SEQ ID NO: 1635079 - DNA, 15 bp, Homo sapiens
atctttaccataata

SEQ ID NO: 1635080 - DNA, 15 bp, Homo sapiens
tatctttaccataat

SEQ ID NO: 1635081 - DNA, 15 bp, Homo sapiens
ttatctttaccataa

SEQ ID NO: 1635082 - DNA, 15 bp, Homo sapiens
tttatctttaccata

SEQ ID NO: 1635083 - DNA, 15 bp, Homo sapiens
ctttatctttaccat

SEQ ID NO: 1635084 - DNA, 15 bp, Homo sapiens
gctttatctttacca

SEQ ID NO: 1635085 - DNA, 15 bp, Homo sapiens
agctttatctttacc

SEQ ID NO: 1635086 - DNA, 15 bp, Homo sapiens
aagctttatctttac

SEQ ID NO: 1635087 - DNA, 15 bp, Homo sapiens
gaagctttatcttta

SEQ ID NO: 1635088 - DNA, 15 bp, Homo sapiens
agaagctttatcttt

SEQ ID NO: 1635089 - DNA, 15 bp, Homo sapiens
cagaagctttatctt

SEQ ID NO: 1635090 - DNA, 15 bp, Homo sapiens
acagaagctttatct

SEQ ID NO: 1635091 - DNA, 15 bp, Homo sapiens
tacagaagctttatc

SEQ ID NO: 1635092 - DNA, 15 bp, Homo sapiens
ttacagaagctttat

SEQ ID NO: 1635093 - DNA, 15 bp, Homo sapiens
attacagaagcttta

SEQ ID NO: 1635094 - DNA, 15 bp, Homo sapiens
aattacagaagcttt

SEQ ID NO: 1635095 - DNA, 15 bp, Homo sapiens
taattacagaagctt

SEQ ID NO: 1635096 - DNA, 15 bp, Homo sapiens
ttaattacagaagct

SEQ ID NO: 1635097 - DNA, 15 bp, Homo sapiens
tttaattacagaagc

SEQ ID NO: 1635098 - DNA, 15 bp, Homo sapiens
ttttaattacagaag

SEQ ID NO: 1635099 - DNA, 15 bp, Homo sapiens
gttttaattacagaa

SEQ ID NO: 1635100 - DNA, 15 bp, Homo sapiens
tgttttaattacaga

SEQ ID NO: 1635101 - DNA, 15 bp, Homo sapiens
gtgttttaattacag

SEQ ID NO: 1635102 - DNA, 15 bp, Homo sapiens
agtgttttaattaca

SEQ ID NO: 1635103 - DNA, 15 bp, Homo sapiens
aagtgttttaattac

SEQ ID NO: 1635104 - DNA, 15 bp, Homo sapiens
aaagtgttttaatta

SEQ ID NO: 1635105 - DNA, 15 bp, Homo sapiens
taaagtgttttaatt

SEQ ID NO: 1635106 - DNA, 15 bp, Homo sapiens
ttaaagtgttttaat

SEQ ID NO: 1635107 - DNA, 15 bp, Homo sapiens
attaaagtgttttaa

SEQ ID NO: 1635108 - DNA, 15 bp, Homo sapiens
gattaaagtgtttta

SEQ ID NO: 1635109 - DNA, 15 bp, Homo sapiens
agattaaagtgtttt

SEQ ID NO: 1635110 - DNA, 15 bp, Homo sapiens
cagattaaagtgttt

SEQ ID NO: 1635111 - DNA, 15 bp, Homo sapiens
ccagattaaagtgtt

SEQ ID NO: 1635112 - DNA, 15 bp, Homo sapiens
tccagattaaagtgt

SEQ ID NO: 1635113 - DNA, 15 bp, Homo sapiens
ttccagattaaagtg

SEQ ID NO: 1635114 - DNA, 15 bp, Homo sapiens
tttccagattaaagt

SEQ ID NO: 1635115 - DNA, 15 bp, Homo sapiens
ctttccagattaaag

SEQ ID NO: 1635116 - DNA, 15 bp, Homo sapiens
tctttccagattaaa

SEQ ID NO: 1635117 - DNA, 15 bp, Homo sapiens
gtctttccagattaa

SEQ ID NO: 1635118 - DNA, 15 bp, Homo sapiens
tgtctttccagatta

SEQ ID NO: 1635119 - DNA, 15 bp, Homo sapiens
ctgtctttccagatt

SEQ ID NO: 1635120 - DNA, 15 bp, Homo sapiens
gctgtctttccagat

SEQ ID NO: 1635121 - DNA, 15 bp, Homo sapiens
tgctgtctttccaga

SEQ ID NO: 1635122 - DNA, 15 bp, Homo sapiens
ctgctgtctttccag

SEQ ID NO: 1635123 - DNA, 15 bp, Homo sapiens
actgctgtctttcca

SEQ ID NO: 1635124 - DNA, 15 bp, Homo sapiens
tactgctgtctttcc

SEQ ID NO: 1635125 - DNA, 15 bp, Homo sapiens
ttactgctgtctttc

SEQ ID NO: 1635126 - DNA, 15 bp, Homo sapiens
tttactgctgtcttt

SEQ ID NO: 1635127 - DNA, 15 bp, Homo sapiens
gtttactgctgtctt

SEQ ID NO: 1635128 - DNA, 15 bp, Homo sapiens
ggtttactgctgtct

SEQ ID NO: 1635129 - DNA, 15 bp, Homo sapiens
gggtttactgctgtc

SEQ ID NO: 1635130 - DNA, 15 bp, Homo sapiens
agggtttactgctgt

SEQ ID NO: 1635131 - DNA, 15 bp, Homo sapiens
aagggtttactgctg

SEQ ID NO: 1635132 - DNA, 15 bp, Homo sapiens
gaagggtttactgct

SEQ ID NO: 1635133 - DNA, 15 bp, Homo sapiens
tgaagggtttactgc

SEQ ID NO: 1635134 - DNA, 15 bp, Homo sapiens
ttgaagggtttactg

SEQ ID NO: 1635135 - DNA, 15 bp, Homo sapiens
cttgaagggtttact

SEQ ID NO: 1635136 - DNA, 15 bp, Homo sapiens
gcttgaagggtttac

SEQ ID NO: 1635137 - DNA, 15 bp, Homo sapiens
tgcttgaagggttta

SEQ ID NO: 1635138 - DNA, 15 bp, Homo sapiens
ttgcttgaagggttt

SEQ ID NO: 1635139 - DNA, 15 bp, Homo sapiens
tttgcttgaagggtt

SEQ ID NO: 1635140 - DNA, 15 bp, Homo sapiens
ttttgcttgaagggt

SEQ ID NO: 1635141 - DNA, 15 bp, Homo sapiens
cttttgcttgaaggg

SEQ ID NO: 1635142 - DNA, 15 bp, Homo sapiens
gcttttgcttgaagg

SEQ ID NO: 1635143 - DNA, 15 bp, Homo sapiens
ggcttttgcttgaag

SEQ ID NO: 1635144 - DNA, 15 bp, Homo sapiens
gggcttttgcttgaa

SEQ ID NO: 1635145 - DNA, 15 bp, Homo sapiens
tgggcttttgcttga

SEQ ID NO: 1635146 - DNA, 15 bp, Homo sapiens
ttgggcttttgcttg

SEQ ID NO: 1635147 - DNA, 15 bp, Homo sapiens
cttgggcttttgctt

SEQ ID NO: 1635148 - DNA, 15 bp, Homo sapiens
acttgggcttttgct

SEQ ID NO: 1635149 - DNA, 15 bp, Homo sapiens
tacttgggcttttgc

SEQ ID NO: 1635150 - DNA, 15 bp, Homo sapiens
ctacttgggcttttg

SEQ ID NO: 1635151 - DNA, 15 bp, Homo sapiens
cctacttgggctttt

SEQ ID NO: 1635152 - DNA, 15 bp, Homo sapiens
acctacttgggcttt

SEQ ID NO: 1635153 - DNA, 15 bp, Homo sapiens
aacctacttgggctt

SEQ ID NO: 1635154 - DNA, 15 bp, Homo sapiens
gaacctacttgggct

SEQ ID NO: 1635155 - DNA, 15 bp, Homo sapiens
tgaacctacttgggc

SEQ ID NO: 1635156 - DNA, 15 bp, Homo sapiens
ttgaacctacttggg

SEQ ID NO: 1635157 - DNA, 15 bp, Homo sapiens
tttgaacctacttgg

SEQ ID NO: 1635158 - DNA, 15 bp, Homo sapiens
ttttgaacctacttg

SEQ ID NO: 1635159 - DNA, 15 bp, Homo sapiens
tttttgaacctactt

SEQ ID NO: 1635160 - DNA, 15 bp, Homo sapiens
atttttgaacctact

SEQ ID NO: 1635161 - DNA, 15 bp, Homo sapiens
tatttttgaacctac

SEQ ID NO: 1635162 - DNA, 15 bp, Homo sapiens
ttatttttgaaccta

SEQ ID NO: 1635163 - DNA, 15 bp, Homo sapiens
attatttttgaacct

SEQ ID NO: 1635164 - DNA, 15 bp, Homo sapiens
tattatttttgaacc

SEQ ID NO: 1635165 - DNA, 15 bp, Homo sapiens
ctattatttttgaac

SEQ ID NO: 1635166 - DNA, 15 bp, Homo sapiens
gctattatttttgaa

SEQ ID NO: 1635167 - DNA, 15 bp, Homo sapiens
ggctattatttttga

SEQ ID NO: 1635168 - DNA, 15 bp, Homo sapiens
tggctattatttttg

SEQ ID NO: 1635169 - DNA, 15 bp, Homo sapiens
ctggctattattttt

SEQ ID NO: 1635170 - DNA, 15 bp, Homo sapiens
tctggctattatttt

SEQ ID NO: 1635171 - DNA, 15 bp, Homo sapiens
ctctggctattattt

SEQ ID NO: 1635172 - DNA, 15 bp, Homo sapiens
tctctggctattatt

SEQ ID NO: 1635173 - DNA, 15 bp, Homo sapiens
ctctctggctattat

SEQ ID NO: 1635174 - DNA, 15 bp, Homo sapiens
cctctctggctatta

SEQ ID NO: 1635175 - DNA, 15 bp, Homo sapiens
acctctctggctatt

SEQ ID NO: 1635176 - DNA, 15 bp, Homo sapiens
aacctctctggctat

SEQ ID NO: 1635177 - DNA, 15 bp, Homo sapiens
taacctctctggcta

SEQ ID NO: 1635178 - DNA, 15 bp, Homo sapiens
ttaacctctctggct

SEQ ID NO: 1635179 - DNA, 15 bp, Homo sapiens
tttaacctctctggc

SEQ ID NO: 1635180 - DNA, 15 bp, Homo sapiens
ctttaacctctctgg

SEQ ID NO: 1635181 - DNA, 15 bp, Homo sapiens
cctttaacctctctg

SEQ ID NO: 1635182 - DNA, 15 bp, Homo sapiens
acctttaacctctct

SEQ ID NO: 1635183 - DNA, 15 bp, Homo sapiens
tacctttaacctctc

SEQ ID NO: 1635184 - DNA, 15 bp, Homo sapiens
ttacctttaacctct

SEQ ID NO: 1635185 - DNA, 15 bp, Homo sapiens
tttacctttaacctc

SEQ ID NO: 1635186 - DNA, 15 bp, Homo sapiens
gtttacctttaacct

SEQ ID NO: 1635187 - DNA, 15 bp, Homo sapiens
ggtttacctttaacc

SEQ ID NO: 1635188 - DNA, 15 bp, Homo sapiens
tggtttacctttaac

SEQ ID NO: 1635189 - DNA, 15 bp, Homo sapiens
ttggtttacctttaa

SEQ ID NO: 1635190 - DNA, 15 bp, Homo sapiens
attggtttaccttta

SEQ ID NO: 1635191 - DNA, 15 bp, Homo sapiens
tattggtttaccttt

SEQ ID NO: 1635192 - DNA, 15 bp, Homo sapiens
ctattggtttacctt

SEQ ID NO: 1635193 - DNA, 15 bp, Homo sapiens
tctattggtttacct

SEQ ID NO: 1635194 - DNA, 15 bp, Homo sapiens
ctctattggtttacc

SEQ ID NO: 1635195 - DNA, 15 bp, Homo sapiens
actctattggtttac

SEQ ID NO: 1635196 - DNA, 15 bp, Homo sapiens
cactctattggttta

SEQ ID NO: 1635197 - DNA, 15 bp, Homo sapiens
tcactctattggttt

SEQ ID NO: 1635198 - DNA, 15 bp, Homo sapiens
atcactctattggtt

SEQ ID NO: 1635199 - DNA, 15 bp, Homo sapiens
tatcactctattggt

SEQ ID NO: 1635200 - DNA, 15 bp, Homo sapiens
atatcactctattgg

SEQ ID NO: 1635201 - DNA, 15 bp, Homo sapiens
catatcactctattg

SEQ ID NO: 1635202 - DNA, 15 bp, Homo sapiens
acatatcactctatt

SEQ ID NO: 1635203 - DNA, 15 bp, Homo sapiens
aacatatcactctat

SEQ ID NO: 1635204 - DNA, 15 bp, Homo sapiens
taacatatcactcta

SEQ ID NO: 1635205 - DNA, 15 bp, Homo sapiens
gtaacatatcactct

SEQ ID NO: 1635206 - DNA, 15 bp, Homo sapiens
tgtaacatatcactc

SEQ ID NO: 1635207 - DNA, 15 bp, Homo sapiens
ctgtaacatatcact

SEQ ID NO: 1635208 - DNA, 15 bp, Homo sapiens
gctgtaacatatcac

SEQ ID NO: 1635209 - DNA, 15 bp, Homo sapiens
tgctgtaacatatca

SEQ ID NO: 1635210 - DNA, 15 bp, Homo sapiens
ttgctgtaacatatc

SEQ ID NO: 1635211 - DNA, 15 bp, Homo sapiens
gttgctgtaacatat

SEQ ID NO: 1635212 - DNA, 15 bp, Homo sapiens
agttgctgtaacata

SEQ ID NO: 1635213 - DNA, 15 bp, Homo sapiens
tagttgctgtaacat

SEQ ID NO: 1635214 - DNA, 15 bp, Homo sapiens
ttagttgctgtaaca

SEQ ID NO: 1635215 - DNA, 15 bp, Homo sapiens
cttagttgctgtaac

SEQ ID NO: 1635216 - DNA, 15 bp, Homo sapiens
ccttagttgctgtaa

SEQ ID NO: 1635217 - DNA, 15 bp, Homo sapiens
cccttagttgctgta

SEQ ID NO: 1635218 - DNA, 15 bp, Homo sapiens
tcccttagttgctgt

SEQ ID NO: 1635219 - DNA, 15 bp, Homo sapiens
ctcccttagttgctg

SEQ ID NO: 1635220 - DNA, 15 bp, Homo sapiens
tctcccttagttgct

SEQ ID NO: 1635221 - DNA, 15 bp, Homo sapiens
ctctcccttagttgc

SEQ ID NO: 1635222 - DNA, 15 bp, Homo sapiens
tctctcccttagttg

SEQ ID NO: 1635223 - DNA, 15 bp, Homo sapiens
ctctctcccttagtt

SEQ ID NO: 1635224 - DNA, 15 bp, Homo sapiens
cctctctcccttagt

SEQ ID NO: 1635225 - DNA, 15 bp, Homo sapiens
gcctctctcccttag

SEQ ID NO: 1635226 - DNA, 15 bp, Homo sapiens
tgcctctctccctta

SEQ ID NO: 1635227 - DNA, 15 bp, Homo sapiens
ctgcctctctccctt

SEQ ID NO: 1635228 - DNA, 15 bp, Homo sapiens
cctgcctctctccct

SEQ ID NO: 1635229 - DNA, 15 bp, Homo sapiens
tcctgcctctctccc

SEQ ID NO: 1635230 - DNA, 15 bp, Homo sapiens
ctcctgcctctctcc

SEQ ID NO: 1635231 - DNA, 15 bp, Homo sapiens
actcctgcctctctc

SEQ ID NO: 1635232 - DNA, 15 bp, Homo sapiens
aactcctgcctctct

SEQ ID NO: 1635233 - DNA, 15 bp, Homo sapiens
aaactcctgcctctc

SEQ ID NO: 1635234 - DNA, 15 bp, Homo sapiens
aaaactcctgcctct

SEQ ID NO: 1635235 - DNA, 15 bp, Homo sapiens
aaaaactcctgcctc

SEQ ID NO: 1635236 - DNA, 15 bp, Homo sapiens
aaaaaactcctgcct

SEQ ID NO: 1635237 - DNA, 15 bp, Homo sapiens
taaaaaactcctgcc

SEQ ID NO: 1635238 - DNA, 15 bp, Homo sapiens
ttaaaaaactcctgc

SEQ ID NO: 1635239 - DNA, 15 bp, Homo sapiens
tttaaaaaactcctg

SEQ ID NO: 1635240 - DNA, 15 bp, Homo sapiens
ttttaaaaaactcct

SEQ ID NO: 1635241 - DNA, 15 bp, Homo sapiens
cttttaaaaaactcc

SEQ ID NO: 1635242 - DNA, 15 bp, Homo sapiens
tcttttaaaaaactc

SEQ ID NO: 1635243 - DNA, 15 bp, Homo sapiens
ctcttttaaaaaact

SEQ ID NO: 1635244 - DNA, 15 bp, Homo sapiens
tctcttttaaaaaac

SEQ ID NO: 1635245 - DNA, 15 bp, Homo sapiens
ctctcttttaaaaaa

SEQ ID NO: 1635246 - DNA, 15 bp, Homo sapiens
tctctcttttaaaaa

SEQ ID NO: 1635247 - DNA, 15 bp, Homo sapiens
ttctctcttttaaaa

SEQ ID NO: 1635248 - DNA, 15 bp, Homo sapiens
cttctctcttttaaa

SEQ ID NO: 1635249 - DNA, 15 bp, Homo sapiens
tcttctctcttttaa

SEQ ID NO: 1635250 - DNA, 15 bp, Homo sapiens
ctcttctctctttta

SEQ ID NO: 1635251 - DNA, 15 bp, Homo sapiens
cctcttctctctttt

SEQ ID NO: 1635252 - DNA, 15 bp, Homo sapiens
tcctcttctctcttt

SEQ ID NO: 1635253 - DNA, 15 bp, Homo sapiens
ttcctcttctctctt

SEQ ID NO: 1635254 - DNA, 15 bp, Homo sapiens
attcctcttctctct

SEQ ID NO: 1635255 - DNA, 15 bp, Homo sapiens
aattcctcttctctc

SEQ ID NO: 1635256 - DNA, 15 bp, Homo sapiens
taattcctcttctct

SEQ ID NO: 1635257 - DNA, 15 bp, Homo sapiens
ataattcctcttctc

SEQ ID NO: 1635258 - DNA, 15 bp, Homo sapiens
tataattcctcttct

SEQ ID NO: 1635259 - DNA, 15 bp, Homo sapiens
ttataattcctcttc

SEQ ID NO: 1635260 - DNA, 15 bp, Homo sapiens
gttataattcctctt

SEQ ID NO: 1635261 - DNA, 15 bp, Homo sapiens
tgttataattcctct

SEQ ID NO: 1635262 - DNA, 15 bp, Homo sapiens
ttgttataattcctc

SEQ ID NO: 1635263 - DNA, 15 bp, Homo sapiens
gttgttataattcct

SEQ ID NO: 1635264 - DNA, 15 bp, Homo sapiens
tgttgttataattcc

SEQ ID NO: 1635265 - DNA, 15 bp, Homo sapiens
ctgttgttataattc

SEQ ID NO: 1635266 - DNA, 15 bp, Homo sapiens
tctgttgttataatt

SEQ ID NO: 1635267 - DNA, 15 bp, Homo sapiens
ttctgttgttataat

SEQ ID NO: 1635268 - DNA, 15 bp, Homo sapiens
tttctgttgttataa

SEQ ID NO: 1635269 - DNA, 15 bp, Homo sapiens
gtttctgttgttata

SEQ ID NO: 1635270 - DNA, 15 bp, Homo sapiens
tgtttctgttgttat

SEQ ID NO: 1635271 - DNA, 15 bp, Homo sapiens
ctgtttctgttgtta

SEQ ID NO: 1635272 - DNA, 15 bp, Homo sapiens
cctgtttctgttgtt

SEQ ID NO: 1635273 - DNA, 15 bp, Homo sapiens
acctgtttctgttgt

SEQ ID NO: 1635274 - DNA, 15 bp, Homo sapiens
aacctgtttctgttg

SEQ ID NO: 1635275 - DNA, 15 bp, Homo sapiens
taacctgtttctgtt

SEQ ID NO: 1635276 - DNA, 15 bp, Homo sapiens
ctaacctgtttctgt

SEQ ID NO: 1635277 - DNA, 15 bp, Homo sapiens
gctaacctgtttctg

SEQ ID NO: 1635278 - DNA, 15 bp, Homo sapiens
ggctaacctgtttct

SEQ ID NO: 1635279 - DNA, 15 bp, Homo sapiens
tggctaacctgtttc

SEQ ID NO: 1635280 - DNA, 15 bp, Homo sapiens
ctggctaacctgttt

SEQ ID NO: 1635281 - DNA, 15 bp, Homo sapiens
gctggctaacctgtt

SEQ ID NO: 1635282 - DNA, 15 bp, Homo sapiens
agctggctaacctgt

SEQ ID NO: 1635283 - DNA, 15 bp, Homo sapiens
cagctggctaacctg

SEQ ID NO: 1635284 - DNA, 15 bp, Homo sapiens
gcagctggctaacct

SEQ ID NO: 1635285 - DNA, 15 bp, Homo sapiens
ggcagctggctaacc

SEQ ID NO: 1635286 - DNA, 15 bp, Homo sapiens
tggcagctggctaac

SEQ ID NO: 1635287 - DNA, 15 bp, Homo sapiens
ctggcagctggctaa

SEQ ID NO: 1635288 - DNA, 15 bp, Homo sapiens
actggcagctggcta

SEQ ID NO: 1635289 - DNA, 15 bp, Homo sapiens
aactggcagctggct

SEQ ID NO: 1635290 - DNA, 15 bp, Homo sapiens
aaactggcagctggc

SEQ ID NO: 1635291 - DNA, 15 bp, Homo sapiens
taaactggcagctgg

SEQ ID NO: 1635292 - DNA, 15 bp, Homo sapiens
ctaaactggcagctg

SEQ ID NO: 1635293 - DNA, 15 bp, Homo sapiens
tctaaactggcagct

SEQ ID NO: 1635294 - DNA, 15 bp, Homo sapiens
atctaaactggcagc

SEQ ID NO: 1635295 - DNA, 15 bp, Homo sapiens
catctaaactggcag

SEQ ID NO: 1635296 - DNA, 15 bp, Homo sapiens
tcatctaaactggca

SEQ ID NO: 1635297 - DNA, 15 bp, Homo sapiens
ctcatctaaactggc

SEQ ID NO: 1635298 - DNA, 15 bp, Homo sapiens
gctcatctaaactgg

SEQ ID NO: 1635299 - DNA, 15 bp, Homo sapiens
tgctcatctaaactg

SEQ ID NO: 1635300 - DNA, 15 bp, Homo sapiens
atgctcatctaaact

SEQ ID NO: 1635301 - DNA, 15 bp, Homo sapiens
tatgctcatctaaac

SEQ ID NO: 1635302 - DNA, 15 bp, Homo sapiens
ttatgctcatctaaa

SEQ ID NO: 1635303 - DNA, 15 bp, Homo sapiens
attatgctcatctaa

SEQ ID NO: 1635304 - DNA, 15 bp, Homo sapiens
cattatgctcatcta

SEQ ID NO: 1635305 - DNA, 15 bp, Homo sapiens
tcattatgctcatct

SEQ ID NO: 1635306 - DNA, 15 bp, Homo sapiens
ctcattatgctcatc

SEQ ID NO: 1635307 - DNA, 15 bp, Homo sapiens
actcattatgctcat

SEQ ID NO: 1635308 - DNA, 15 bp, Homo sapiens
gactcattatgctca

SEQ ID NO: 1635309 - DNA, 15 bp, Homo sapiens
ggactcattatgctc

SEQ ID NO: 1635310 - DNA, 15 bp, Homo sapiens
gggactcattatgct

SEQ ID NO: 1635311 - DNA, 15 bp, Homo sapiens
agggactcattatgc

SEQ ID NO: 1635312 - DNA, 15 bp, Homo sapiens
aagggactcattatg

SEQ ID NO: 1635313 - DNA, 15 bp, Homo sapiens
taagggactcattat

SEQ ID NO: 1635314 - DNA, 15 bp, Homo sapiens
ctaagggactcatta

SEQ ID NO: 1635315 - DNA, 15 bp, Homo sapiens
tctaagggactcatt

SEQ ID NO: 1635316 - DNA, 15 bp, Homo sapiens
atctaagggactcat

SEQ ID NO: 1635317 - DNA, 15 bp, Homo sapiens
tatctaagggactca

SEQ ID NO: 1635318 - DNA, 15 bp, Homo sapiens
ctatctaagggactc

SEQ ID NO: 1635319 - DNA, 15 bp, Homo sapiens
tctatctaagggact

SEQ ID NO: 1635320 - DNA, 15 bp, Homo sapiens
atctatctaagggac

SEQ ID NO: 1635321 - DNA, 15 bp, Homo sapiens
gatctatctaaggga

SEQ ID NO: 1635322 - DNA, 15 bp, Homo sapiens
tgatctatctaaggg

SEQ ID NO: 1635323 - DNA, 15 bp, Homo sapiens
atgatctatctaagg

SEQ ID NO: 1635324 - DNA, 15 bp, Homo sapiens
aatgatctatctaag

SEQ ID NO: 1635325 - DNA, 15 bp, Homo sapiens
caatgatctatctaa

SEQ ID NO: 1635326 - DNA, 15 bp, Homo sapiens
ccaatgatctatcta

SEQ ID NO: 1635327 - DNA, 15 bp, Homo sapiens
accaatgatctatct

SEQ ID NO: 1635328 - DNA, 15 bp, Homo sapiens
caccaatgatctatc

SEQ ID NO: 1635329 - DNA, 15 bp, Homo sapiens
tcaccaatgatctat

SEQ ID NO: 1635330 - DNA, 15 bp, Homo sapiens
atcaccaatgatcta

SEQ ID NO: 1635331 - DNA, 15 bp, Homo sapiens
aatcaccaatgatct

SEQ ID NO: 1635332 - DNA, 15 bp, Homo sapiens
aaatcaccaatgatc

SEQ ID NO: 1635333 - DNA, 15 bp, Homo sapiens
aaaatcaccaatgat

SEQ ID NO: 1635334 - DNA, 15 bp, Homo sapiens
aaaaatcaccaatga

SEQ ID NO: 1635335 - DNA, 15 bp, Homo sapiens
taaaaatcaccaatg

SEQ ID NO: 1635336 - DNA, 15 bp, Homo sapiens
ataaaaatcaccaat

SEQ ID NO: 1635337 - DNA, 15 bp, Homo sapiens
gataaaaatcaccaa

SEQ ID NO: 1635338 - DNA, 15 bp, Homo sapiens
tgataaaaatcacca

SEQ ID NO: 1635339 - DNA, 15 bp, Homo sapiens
ttgataaaaatcacc

SEQ ID NO: 1635340 - DNA, 15 bp, Homo sapiens
tttgataaaaatcac

SEQ ID NO: 1635341 - DNA, 15 bp, Homo sapiens
ttttgataaaaatca

SEQ ID NO: 1635342 - DNA, 15 bp, Homo sapiens
gttttgataaaaatc

SEQ ID NO: 1635343 - DNA, 15 bp, Homo sapiens
tgttttgataaaaat

SEQ ID NO: 1635344 - DNA, 15 bp, Homo sapiens
gtgttttgataaaaa

SEQ ID NO: 1635345 - DNA, 15 bp, Homo sapiens
agtgttttgataaaa

SEQ ID NO: 1635346 - DNA, 15 bp, Homo sapiens
tagtgttttgataaa

SEQ ID NO: 1635347 - DNA, 15 bp, Homo sapiens
atagtgttttgataa

SEQ ID NO: 1635348 - DNA, 15 bp, Homo sapiens
gatagtgttttgata

SEQ ID NO: 1635349 - DNA, 15 bp, Homo sapiens
cgatagtgttttgat

SEQ ID NO: 1635350 - DNA, 15 bp, Homo sapiens
ccgatagtgttttga

SEQ ID NO: 1635351 - DNA, 15 bp, Homo sapiens
accgatagtgttttg

SEQ ID NO: 1635352 - DNA, 15 bp, Homo sapiens
caccgatagtgtttt

SEQ ID NO: 1635353 - DNA, 15 bp, Homo sapiens
ccaccgatagtgttt

SEQ ID NO: 1635354 - DNA, 15 bp, Homo sapiens
tccaccgatagtgtt

SEQ ID NO: 1635355 - DNA, 15 bp, Homo sapiens
ctccaccgatagtgt

SEQ ID NO: 1635356 - DNA, 15 bp, Homo sapiens
actccaccgatagtg

SEQ ID NO: 1635357 - DNA, 15 bp, Homo sapiens
aactccaccgatagt

SEQ ID NO: 1635358 - DNA, 15 bp, Homo sapiens
caactccaccgatag

SEQ ID NO: 1635359 - DNA, 15 bp, Homo sapiens
acaactccaccgata

SEQ ID NO: 1635360 - DNA, 15 bp, Homo sapiens
cacaactccaccgat

SEQ ID NO: 1635361 - DNA, 15 bp, Homo sapiens
ccacaactccaccga

SEQ ID NO: 1635362 - DNA, 15 bp, Homo sapiens
cccacaactccaccg

SEQ ID NO: 1635363 - DNA, 15 bp, Homo sapiens
tcccacaactccacc

SEQ ID NO: 1635364 - DNA, 15 bp, Homo sapiens
ctcccacaactccac

SEQ ID NO: 1635365 - DNA, 15 bp, Homo sapiens
actcccacaactcca

SEQ ID NO: 1635366 - DNA, 15 bp, Homo sapiens
cactcccacaactcc

SEQ ID NO: 1635367 - DNA, 15 bp, Homo sapiens
ccactcccacaactc

SEQ ID NO: 1635368 - DNA, 15 bp, Homo sapiens
accactcccacaact

SEQ ID NO: 1635369 - DNA, 15 bp, Homo sapiens
taccactcccacaac

SEQ ID NO: 1635370 - DNA, 15 bp, Homo sapiens
ctaccactcccacaa

SEQ ID NO: 1635371 - DNA, 15 bp, Homo sapiens
cctaccactcccaca

SEQ ID NO: 1635372 - DNA, 15 bp, Homo sapiens
gcctaccactcccac

SEQ ID NO: 1635373 - DNA, 15 bp, Homo sapiens
agcctaccactccca

SEQ ID NO: 1635374 - DNA, 15 bp, Homo sapiens
cagcctaccactccc

SEQ ID NO: 1635375 - DNA, 15 bp, Homo sapiens
tcagcctaccactcc

SEQ ID NO: 1635376 - DNA, 15 bp, Homo sapiens
gtcagcctaccactc

SEQ ID NO: 1635377 - DNA, 15 bp, Homo sapiens
agtcagcctaccact

SEQ ID NO: 1635378 - DNA, 15 bp, Homo sapiens
tagtcagcctaccac

SEQ ID NO: 1635379 - DNA, 15 bp, Homo sapiens
atagtcagcctacca

SEQ ID NO: 1635380 - DNA, 15 bp, Homo sapiens
tatagtcagcctacc

SEQ ID NO: 1635381 - DNA, 15 bp, Homo sapiens
ctatagtcagcctac

SEQ ID NO: 1635382 - DNA, 15 bp, Homo sapiens
actatagtcagccta

SEQ ID NO: 1635383 - DNA, 15 bp, Homo sapiens
cactatagtcagcct

SEQ ID NO: 1635384 - DNA, 15 bp, Homo sapiens
ccactatagtcagcc

SEQ ID NO: 1635385 - DNA, 15 bp, Homo sapiens
tccactatagtcagc

SEQ ID NO: 1635386 - DNA, 15 bp, Homo sapiens
atccactatagtcag

SEQ ID NO: 1635387 - DNA, 15 bp, Homo sapiens
aatccactatagtca

SEQ ID NO: 1635388 - DNA, 15 bp, Homo sapiens
caatccactatagtc

SEQ ID NO: 1635389 - DNA, 15 bp, Homo sapiens
ccaatccactatagt

SEQ ID NO: 1635390 - DNA, 15 bp, Homo sapiens
cccaatccactatag

SEQ ID NO: 1635391 - DNA, 15 bp, Homo sapiens
ccccaatccactata

SEQ ID NO: 1635392 - DNA, 15 bp, Homo sapiens
tccccaatccactat

SEQ ID NO: 1635393 - DNA, 15 bp, Homo sapiens
ttccccaatccacta

SEQ ID NO: 1635394 - DNA, 15 bp, Homo sapiens
attccccaatccact

SEQ ID NO: 1635395 - DNA, 15 bp, Homo sapiens
aattccccaatccac

SEQ ID NO: 1635396 - DNA, 15 bp, Homo sapiens
taattccccaatcca

SEQ ID NO: 1635397 - DNA, 15 bp, Homo sapiens
ttaattccccaatcc

SEQ ID NO: 1635398 - DNA, 15 bp, Homo sapiens
tttaattccccaatc

SEQ ID NO: 1635399 - DNA, 15 bp, Homo sapiens
atttaattccccaat

SEQ ID NO: 1635400 - DNA, 15 bp, Homo sapiens
tatttaattccccaa

SEQ ID NO: 1635401 - DNA, 15 bp, Homo sapiens
ctatttaattcccca

SEQ ID NO: 1635402 - DNA, 15 bp, Homo sapiens
actatttaattcccc

SEQ ID NO: 1635403 - DNA, 15 bp, Homo sapiens
cactatttaattccc

SEQ ID NO: 1635404 - DNA, 15 bp, Homo sapiens
tcactatttaattcc

SEQ ID NO: 1635405 - DNA, 15 bp, Homo sapiens
atcactatttaattc

SEQ ID NO: 1635406 - DNA, 15 bp, Homo sapiens
catcactatttaatt

SEQ ID NO: 1635407 - DNA, 15 bp, Homo sapiens
tcatcactatttaat

SEQ ID NO: 1635408 - DNA, 15 bp, Homo sapiens
ttcatcactatttaa

SEQ ID NO: 1635409 - DNA, 15 bp, Homo sapiens
gttcatcactattta

SEQ ID NO: 1635410 - DNA, 15 bp, Homo sapiens
ggttcatcactattt

SEQ ID NO: 1635411 - DNA, 15 bp, Homo sapiens
gggttcatcactatt

SEQ ID NO: 1635412 - DNA, 15 bp, Homo sapiens
tgggttcatcactat

SEQ ID NO: 1635413 - DNA, 15 bp, Homo sapiens
ttgggttcatcacta

SEQ ID NO: 1635414 - DNA, 15 bp, Homo sapiens
tttgggttcatcact

SEQ ID NO: 1635415 - DNA, 15 bp, Homo sapiens
ttttgggttcatcac

SEQ ID NO: 1635416 - DNA, 15 bp, Homo sapiens
gttttgggttcatca

SEQ ID NO: 1635417 - DNA, 15 bp, Homo sapiens
tgttttgggttcatc

SEQ ID NO: 1635418 - DNA, 15 bp, Homo sapiens
ctgttttgggttcat

SEQ ID NO: 1635419 - DNA, 15 bp, Homo sapiens
tctgttttgggttca

SEQ ID NO: 1635420 - DNA, 15 bp, Homo sapiens
ttctgttttgggttc

SEQ ID NO: 1635421 - DNA, 15 bp, Homo sapiens
tttctgttttgggtt

SEQ ID NO: 1635422 - DNA, 15 bp, Homo sapiens
ctttctgttttgggt

SEQ ID NO: 1635423 - DNA, 15 bp, Homo sapiens
actttctgttttggg

SEQ ID NO: 1635424 - DNA, 15 bp, Homo sapiens
gactttctgttttgg

SEQ ID NO: 1635425 - DNA, 15 bp, Homo sapiens
agactttctgttttg

SEQ ID NO: 1635426 - DNA, 15 bp, Homo sapiens
cagactttctgtttt

SEQ ID NO: 1635427 - DNA, 15 bp, Homo sapiens
tcagactttctgttt

SEQ ID NO: 1635428 - DNA, 15 bp, Homo sapiens
ttcagactttctgtt

SEQ ID NO: 1635429 - DNA, 15 bp, Homo sapiens
cttcagactttctgt

SEQ ID NO: 1635430 - DNA, 15 bp, Homo sapiens
tcttcagactttctg

SEQ ID NO: 1635431 - DNA, 15 bp, Homo sapiens
ttcttcagactttct

SEQ ID NO: 1635432 - DNA, 15 bp, Homo sapiens
tttcttcagactttc

SEQ ID NO: 1635433 - DNA, 15 bp, Homo sapiens
atttcttcagacttt

SEQ ID NO: 1635434 - DNA, 15 bp, Homo sapiens
aatttcttcagactt

SEQ ID NO: 1635435 - DNA, 15 bp, Homo sapiens
gaatttcttcagact

SEQ ID NO: 1635436 - DNA, 15 bp, Homo sapiens
ggaatttcttcagac

SEQ ID NO: 1635437 - DNA, 15 bp, Homo sapiens
gggaatttcttcaga

SEQ ID NO: 1635438 - DNA, 15 bp, Homo sapiens
agggaatttcttcag

SEQ ID NO: 1635439 - DNA, 15 bp, Homo sapiens
aagggaatttcttca

SEQ ID NO: 1635440 - DNA, 15 bp, Homo sapiens
aaagggaatttcttc

SEQ ID NO: 1635441 - DNA, 15 bp, Homo sapiens
caaagggaatttctt

SEQ ID NO: 1635442 - DNA, 15 bp, Homo sapiens
tcaaagggaatttct

SEQ ID NO: 1635443 - DNA, 15 bp, Homo sapiens
ctcaaagggaatttc

SEQ ID NO: 1635444 - DNA, 15 bp, Homo sapiens
gctcaaagggaattt

SEQ ID NO: 1635445 - DNA, 15 bp, Homo sapiens
ggctcaaagggaatt

SEQ ID NO: 1635446 - DNA, 15 bp, Homo sapiens
tggctcaaagggaat

SEQ ID NO: 1635447 - DNA, 15 bp, Homo sapiens
ttggctcaaagggaa

SEQ ID NO: 1635448 - DNA, 15 bp, Homo sapiens
tttggctcaaaggga

SEQ ID NO: 1635449 - DNA, 15 bp, Homo sapiens
ttttggctcaaaggg

SEQ ID NO: 1635450 - DNA, 15 bp, Homo sapiens
tttttggctcaaagg

SEQ ID NO: 1635451 - DNA, 15 bp, Homo sapiens
ttttttggctcaaag

SEQ ID NO: 1635452 - DNA, 15 bp, Homo sapiens
tttttttggctcaaa

SEQ ID NO: 1635453 - DNA, 15 bp, Homo sapiens
ttttttttggctcaa

SEQ ID NO: 1635454 - DNA, 15 bp, Homo sapiens
tttttttttggctca

SEQ ID NO: 1635455 - DNA, 15 bp, Homo sapiens
ttttttttttggctc

SEQ ID NO: 1635456 - DNA, 15 bp, Homo sapiens
tttttttttttggct

SEQ ID NO: 1635457 - DNA, 15 bp, Homo sapiens
ccttttttttttttg

SEQ ID NO: 1635458 - DNA, 15 bp, Homo sapiens
gcctttttttttttt

SEQ ID NO: 1635459 - DNA, 15 bp, Homo sapiens
ggccttttttttttt

SEQ ID NO: 1635460 - DNA, 15 bp, Homo sapiens
cggcctttttttttt

SEQ ID NO: 1635461 - DNA, 15 bp, Homo sapiens
ccggccttttttttt

SEQ ID NO: 1635462 - DNA, 15 bp, Homo sapiens
cccggcctttttttt

SEQ ID NO: 1635463 - DNA, 15 bp, Homo sapiens
acccggccttttttt

SEQ ID NO: 1635464 - DNA, 15 bp, Homo sapiens
cacccggcctttttt

SEQ ID NO: 1635465 - DNA, 15 bp, Homo sapiens
gcacccggccttttt

SEQ ID NO: 1635466 - DNA, 15 bp, Homo sapiens
tgcacccggcctttt

SEQ ID NO: 1635467 - DNA, 15 bp, Homo sapiens
ctgcacccggccttt

SEQ ID NO: 1635468 - DNA, 15 bp, Homo sapiens
actgcacccggcctt

SEQ ID NO: 1635469 - DNA, 15 bp, Homo sapiens
cactgcacccggcct

SEQ ID NO: 1635470 - DNA, 15 bp, Homo sapiens
gggtgtgagccactg

SEQ ID NO: 1635471 - DNA, 15 bp, Homo sapiens
tgggtgtgagccact

SEQ ID NO: 1635472 - DNA, 15 bp, Homo sapiens
atgggtgtgagccac

SEQ ID NO: 1635473 - DNA, 15 bp, Homo sapiens
tatgggtgtgagcca

SEQ ID NO: 1635474 - DNA, 15 bp, Homo sapiens
ttatgggtgtgagcc

SEQ ID NO: 1635475 - DNA, 15 bp, Homo sapiens
attatgggtgtgagc

SEQ ID NO: 1635476 - DNA, 15 bp, Homo sapiens
gattatgggtgtgag

SEQ ID NO: 1635477 - DNA, 15 bp, Homo sapiens
ggattatgggtgtga

SEQ ID NO: 1635478 - DNA, 15 bp, Homo sapiens
gggattatgggtgtg

SEQ ID NO: 1635479 - DNA, 15 bp, Homo sapiens
tgggattatgggtgt

SEQ ID NO: 1635480 - DNA, 15 bp, Homo sapiens
ctgggattatgggtg

SEQ ID NO: 1635481 - DNA, 15 bp, Homo sapiens
gctgggattatgggt

SEQ ID NO: 1635482 - DNA, 15 bp, Homo sapiens
tgtcttgaactcctg

SEQ ID NO: 1635483 - DNA, 15 bp, Homo sapiens
ttgtcttgaactcct

SEQ ID NO: 1635484 - DNA, 15 bp, Homo sapiens
cttgtcttgaactcc

SEQ ID NO: 1635485 - DNA, 15 bp, Homo sapiens
gcttgtcttgaactc

SEQ ID NO: 1635486 - DNA, 15 bp, Homo sapiens
ggcttgtcttgaact

SEQ ID NO: 1635487 - DNA, 15 bp, Homo sapiens
aggcttgtcttgaac

SEQ ID NO: 1635488 - DNA, 15 bp, Homo sapiens
caggcttgtcttgaa

SEQ ID NO: 1635489 - DNA, 15 bp, Homo sapiens
ccaggcttgtcttga

SEQ ID NO: 1635490 - DNA, 15 bp, Homo sapiens
gccaggcttgtcttg

SEQ ID NO: 1635491 - DNA, 15 bp, Homo sapiens
ggccaggcttgtctt

SEQ ID NO: 1635492 - DNA, 15 bp, Homo sapiens
tggccaggcttgtct

SEQ ID NO: 1635493 - DNA, 15 bp, Homo sapiens
ttggccaggcttgtc

SEQ ID NO: 1635494 - DNA, 15 bp, Homo sapiens
gttggccaggcttgt

SEQ ID NO: 1635495 - DNA, 15 bp, Homo sapiens
tgttggccaggcttg

SEQ ID NO: 1635496 - DNA, 15 bp, Homo sapiens
atgttggccaggctt

SEQ ID NO: 1635497 - DNA, 15 bp, Homo sapiens
gtcaccatgttggcc

SEQ ID NO: 1635498 - DNA, 15 bp, Homo sapiens
agtcaccatgttggc

SEQ ID NO: 1635499 - DNA, 15 bp, Homo sapiens
gagtcaccatgttgg

SEQ ID NO: 1635500 - DNA, 15 bp, Homo sapiens
agagtcaccatgttg

SEQ ID NO: 1635501 - DNA, 15 bp, Homo sapiens
tagagtcaccatgtt

SEQ ID NO: 1635502 - DNA, 15 bp, Homo sapiens
gtagagtcaccatgt

SEQ ID NO: 1635503 - DNA, 15 bp, Homo sapiens
agtagagtcaccatg

SEQ ID NO: 1635504 - DNA, 15 bp, Homo sapiens
tagtagagtcaccat

SEQ ID NO: 1635505 - DNA, 15 bp, Homo sapiens
ttagtagagtcacca

SEQ ID NO: 1635506 - DNA, 15 bp, Homo sapiens
tttagtagagtcacc

SEQ ID NO: 1635507 - DNA, 15 bp, Homo sapiens
gtttagtagagtcac

SEQ ID NO: 1635508 - DNA, 15 bp, Homo sapiens
tgtttagtagagtca

SEQ ID NO: 1635509 - DNA, 15 bp, Homo sapiens
atgtttagtagagtc

SEQ ID NO: 1635510 - DNA, 15 bp, Homo sapiens
aatgtttagtagagt

SEQ ID NO: 1635511 - DNA, 15 bp, Homo sapiens
caatgtttagtagag

SEQ ID NO: 1635512 - DNA, 15 bp, Homo sapiens
acaatgtttagtaga

SEQ ID NO: 1635513 - DNA, 15 bp, Homo sapiens
gacaatgtttagtag

SEQ ID NO: 1635514 - DNA, 15 bp, Homo sapiens
agacaatgtttagta

SEQ ID NO: 1635515 - DNA, 15 bp, Homo sapiens
gagacaatgtttagt

SEQ ID NO: 1635516 - DNA, 15 bp, Homo sapiens
agagacaatgtttag

SEQ ID NO: 1635517 - DNA, 15 bp, Homo sapiens
tagagacaatgttta

SEQ ID NO: 1635518 - DNA, 15 bp, Homo sapiens
gtagagacaatgttt

SEQ ID NO: 1635519 - DNA, 15 bp, Homo sapiens
agtagagacaatgtt

SEQ ID NO: 1635520 - DNA, 15 bp, Homo sapiens
tagtagagacaatgt

SEQ ID NO: 1635521 - DNA, 15 bp, Homo sapiens
ttagtagagacaatg

SEQ ID NO: 1635522 - DNA, 15 bp, Homo sapiens
tttagtagagacaat

SEQ ID NO: 1635523 - DNA, 15 bp, Homo sapiens
ttttagtagagacaa

SEQ ID NO: 1635524 - DNA, 15 bp, Homo sapiens
tcttttagtagagac

SEQ ID NO: 1635525 - DNA, 15 bp, Homo sapiens
atcttttagtagaga

SEQ ID NO: 1635526 - DNA, 15 bp, Homo sapiens
tatcttttagtagag

SEQ ID NO: 1635527 - DNA, 15 bp, Homo sapiens
gtatcttttagtaga

SEQ ID NO: 1635528 - DNA, 15 bp, Homo sapiens
tgtatcttttagtag

SEQ ID NO: 1635529 - DNA, 15 bp, Homo sapiens
ttgtatcttttagta

SEQ ID NO: 1635530 - DNA, 15 bp, Homo sapiens
tttgtatcttttagt

SEQ ID NO: 1635531 - DNA, 15 bp, Homo sapiens
ttttgtatcttttag

SEQ ID NO: 1635532 - DNA, 15 bp, Homo sapiens
tttttgtatctttta

SEQ ID NO: 1635533 - DNA, 15 bp, Homo sapiens
atttttgtatctttt

SEQ ID NO: 1635534 - DNA, 15 bp, Homo sapiens
aatttttgtatcttt

SEQ ID NO: 1635535 - DNA, 15 bp, Homo sapiens
taatttttgtatctt

SEQ ID NO: 1635536 - DNA, 15 bp, Homo sapiens
ctaatttttgtatct

SEQ ID NO: 1635537 - DNA, 15 bp, Homo sapiens
gctaatttttgtatc

SEQ ID NO: 1635538 - DNA, 15 bp, Homo sapiens
tccggctaatttttg

SEQ ID NO: 1635539 - DNA, 15 bp, Homo sapiens
ttccggctaattttt

SEQ ID NO: 1635540 - DNA, 15 bp, Homo sapiens
cttccggctaatttt

SEQ ID NO: 1635541 - DNA, 15 bp, Homo sapiens
acttccggctaattt

SEQ ID NO: 1635542 - DNA, 15 bp, Homo sapiens
cacttccggctaatt

SEQ ID NO: 1635543 - DNA, 15 bp, Homo sapiens
ccacttccggctaat

SEQ ID NO: 1635544 - DNA, 15 bp, Homo sapiens
accacttccggctaa

SEQ ID NO: 1635545 - DNA, 15 bp, Homo sapiens
caccacttccggcta

SEQ ID NO: 1635546 - DNA, 15 bp, Homo sapiens
ccaccacttccggct

SEQ ID NO: 1635547 - DNA, 15 bp, Homo sapiens
gccaccacttccggc

SEQ ID NO: 1635548 - DNA, 15 bp, Homo sapiens
tgccaccacttccgg

SEQ ID NO: 1635549 - DNA, 15 bp, Homo sapiens
ctgccaccacttccg

SEQ ID NO: 1635550 - DNA, 15 bp, Homo sapiens
gcctgccaccacttc

SEQ ID NO: 1635551 - DNA, 15 bp, Homo sapiens
tgcctgccaccactt

SEQ ID NO: 1635552 - DNA, 15 bp, Homo sapiens
ttgcctgccaccact

SEQ ID NO: 1635553 - DNA, 15 bp, Homo sapiens
gttgcctgccaccac

SEQ ID NO: 1635554 - DNA, 15 bp, Homo sapiens
agttgcctgccacca

SEQ ID NO: 1635555 - DNA, 15 bp, Homo sapiens
aagttgcctgccacc

SEQ ID NO: 1635556 - DNA, 15 bp, Homo sapiens
taagttgcctgccac

SEQ ID NO: 1635557 - DNA, 15 bp, Homo sapiens
ttaagttgcctgcca

SEQ ID NO: 1635558 - DNA, 15 bp, Homo sapiens
attaagttgcctgcc

SEQ ID NO: 1635559 - DNA, 15 bp, Homo sapiens
gattaagttgcctgc

SEQ ID NO: 1635560 - DNA, 15 bp, Homo sapiens
ggattaagttgcctg

SEQ ID NO: 1635561 - DNA, 15 bp, Homo sapiens
gggattaagttgcct

SEQ ID NO: 1635562 - DNA, 15 bp, Homo sapiens
tgggattaagttgcc

SEQ ID NO: 1635563 - DNA, 15 bp, Homo sapiens
ctgggattaagttgc

SEQ ID NO: 1635564 - DNA, 15 bp, Homo sapiens
gctgggattaagttg

SEQ ID NO: 1635565 - DNA, 15 bp, Homo sapiens
agctgggattaagtt

SEQ ID NO: 1635566 - DNA, 15 bp, Homo sapiens
tagctgggattaagt

SEQ ID NO: 1635567 - DNA, 15 bp, Homo sapiens
gtagctgggattaag

SEQ ID NO: 1635568 - DNA, 15 bp, Homo sapiens
tgcctcccaagtagc

SEQ ID NO: 1635569 - DNA, 15 bp, Homo sapiens
ctgcctcccaagtag

SEQ ID NO: 1635570 - DNA, 15 bp, Homo sapiens
tctgcctcccaagta

SEQ ID NO: 1635571 - DNA, 15 bp, Homo sapiens
ctctgcctcccaagt

SEQ ID NO: 1635572 - DNA, 15 bp, Homo sapiens
cctctgcctcccaag

SEQ ID NO: 1635573 - DNA, 15 bp, Homo sapiens
gcctctgcctcccaa

SEQ ID NO: 1635574 - DNA, 15 bp, Homo sapiens
tgcctctgcctccca

SEQ ID NO: 1635575 - DNA, 15 bp, Homo sapiens
ctgcctctgcctccc

SEQ ID NO: 1635576 - DNA, 15 bp, Homo sapiens
tcctgcctctgcctc

SEQ ID NO: 1635577 - DNA, 15 bp, Homo sapiens
ctcctgcctctgcct

SEQ ID NO: 1635578 - DNA, 15 bp, Homo sapiens
tctcctgcctctgcc

SEQ ID NO: 1635579 - DNA, 15 bp, Homo sapiens
ttctcctgcctctgc

SEQ ID NO: 1635580 - DNA, 15 bp, Homo sapiens
attctcctgcctctg

SEQ ID NO: 1635581 - DNA, 15 bp, Homo sapiens
aattctcctgcctct

SEQ ID NO: 1635582 - DNA, 15 bp, Homo sapiens
gtgcaacctccacct

SEQ ID NO: 1635583 - DNA, 15 bp, Homo sapiens
agtgcaacctccacc

SEQ ID NO: 1635584 - DNA, 15 bp, Homo sapiens
cagtgcaacctccac

SEQ ID NO: 1635585 - DNA, 15 bp, Homo sapiens
tcagtgcaacctcca

SEQ ID NO: 1635586 - DNA, 15 bp, Homo sapiens
ctcagtgcaacctcc

SEQ ID NO: 1635587 - DNA, 15 bp, Homo sapiens
gctcagtgcaacctc

SEQ ID NO: 1635588 - DNA, 15 bp, Homo sapiens
agctcagtgcaacct

SEQ ID NO: 1635589 - DNA, 15 bp, Homo sapiens
cagctcagtgcaacc

SEQ ID NO: 1635590 - DNA, 15 bp, Homo sapiens
tcagctcagtgcaac

SEQ ID NO: 1635591 - DNA, 15 bp, Homo sapiens
ctcagctcagtgcaa

SEQ ID NO: 1635592 - DNA, 15 bp, Homo sapiens
tctcagctcagtgca

SEQ ID NO: 1635593 - DNA, 15 bp, Homo sapiens
atctcagctcagtgc

SEQ ID NO: 1635594 - DNA, 15 bp, Homo sapiens
gatctcagctcagtg

SEQ ID NO: 1635595 - DNA, 15 bp, Homo sapiens
cgatctcagctcagt

SEQ ID NO: 1635596 - DNA, 15 bp, Homo sapiens
tcgatctcagctcag

SEQ ID NO: 1635597 - DNA, 15 bp, Homo sapiens
ctcgatctcagctca

SEQ ID NO: 1635598 - DNA, 15 bp, Homo sapiens
gctcgatctcagctc

SEQ ID NO: 1635599 - DNA, 15 bp, Homo sapiens
ggctcgatctcagct

SEQ ID NO: 1635600 - DNA, 15 bp, Homo sapiens
tggctcgatctcagc

SEQ ID NO: 1635601 - DNA, 15 bp, Homo sapiens
atggctcgatctcag

SEQ ID NO: 1635602 - DNA, 15 bp, Homo sapiens
aatggctcgatctca

SEQ ID NO: 1635603 - DNA, 15 bp, Homo sapiens
caatggctcgatctc

SEQ ID NO: 1635604 - DNA, 15 bp, Homo sapiens
gcaatggctcgatct

SEQ ID NO: 1635605 - DNA, 15 bp, Homo sapiens
tgcaatggctcgatc

SEQ ID NO: 1635606 - DNA, 15 bp, Homo sapiens
gtgcaatggctcgat

SEQ ID NO: 1635607 - DNA, 15 bp, Homo sapiens
agtgcaatggctcga

SEQ ID NO: 1635608 - DNA, 15 bp, Homo sapiens
gagtgcaatggctcg

SEQ ID NO: 1635609 - DNA, 15 bp, Homo sapiens
tgagtgcaatggctc

SEQ ID NO: 1635610 - DNA, 15 bp, Homo sapiens
ttgagtgcaatggct

SEQ ID NO: 1635611 - DNA, 15 bp, Homo sapiens
tttgagtgcaatggc

SEQ ID NO: 1635612 - DNA, 15 bp, Homo sapiens
gtttgagtgcaatgg

SEQ ID NO: 1635613 - DNA, 15 bp, Homo sapiens
ggtttgagtgcaatg

SEQ ID NO: 1635614 - DNA, 15 bp, Homo sapiens
aggtttgagtgcaat

SEQ ID NO: 1635615 - DNA, 15 bp, Homo sapiens
caggtttgagtgcaa

SEQ ID NO: 1635616 - DNA, 15 bp, Homo sapiens
ccaggtttgagtgca

SEQ ID NO: 1635617 - DNA, 15 bp, Homo sapiens
cccaggtttgagtgc

SEQ ID NO: 1635618 - DNA, 15 bp, Homo sapiens
ccccaggtttgagtg

SEQ ID NO: 1635619 - DNA, 15 bp, Homo sapiens
cccccaggtttgagt

SEQ ID NO: 1635620 - DNA, 15 bp, Homo sapiens
tcccccaggtttgag

SEQ ID NO: 1635621 - DNA, 15 bp, Homo sapiens
gtcccccaggtttga

SEQ ID NO: 1635622 - DNA, 15 bp, Homo sapiens
tgtcccccaggtttg

SEQ ID NO: 1635623 - DNA, 15 bp, Homo sapiens
ttgtcccccaggttt

SEQ ID NO: 1635624 - DNA, 15 bp, Homo sapiens
cttgtcccccaggtt

SEQ ID NO: 1635625 - DNA, 15 bp, Homo sapiens
tcttgtcccccaggt

SEQ ID NO: 1635626 - DNA, 15 bp, Homo sapiens
ctcttgtcccccagg

SEQ ID NO: 1635627 - DNA, 15 bp, Homo sapiens
cctcttgtcccccag

SEQ ID NO: 1635628 - DNA, 15 bp, Homo sapiens
ccctcttgtccccca

SEQ ID NO: 1635629 - DNA, 15 bp, Homo sapiens
tccctcttgtccccc

SEQ ID NO: 1635630 - DNA, 15 bp, Homo sapiens
ctccctcttgtcccc

SEQ ID NO: 1635631 - DNA, 15 bp, Homo sapiens
tctccctcttgtccc

SEQ ID NO: 1635632 - DNA, 15 bp, Homo sapiens
gtctccctcttgtcc

SEQ ID NO: 1635633 - DNA, 15 bp, Homo sapiens
agtctccctcttgtc

SEQ ID NO: 1635634 - DNA, 15 bp, Homo sapiens
aagtctccctcttgt

SEQ ID NO: 1635635 - DNA, 15 bp, Homo sapiens
gaagtctccctcttg

SEQ ID NO: 1635636 - DNA, 15 bp, Homo sapiens
agaagtctccctctt

SEQ ID NO: 1635637 - DNA, 15 bp, Homo sapiens
gagaagtctccctct

SEQ ID NO: 1635638 - DNA, 15 bp, Homo sapiens
agagaagtctccctc

SEQ ID NO: 1635639 - DNA, 15 bp, Homo sapiens
tagagaagtctccct

SEQ ID NO: 1635640 - DNA, 15 bp, Homo sapiens
ttagagaagtctccc

SEQ ID NO: 1635641 - DNA, 15 bp, Homo sapiens
tttagagaagtctcc

SEQ ID NO: 1635642 - DNA, 15 bp, Homo sapiens
ttttagagaagtctc

SEQ ID NO: 1635643 - DNA, 15 bp, Homo sapiens
tttttagagaagtct

SEQ ID NO: 1635644 - DNA, 15 bp, Homo sapiens
ttttttagagaagtc

SEQ ID NO: 1635645 - DNA, 15 bp, Homo sapiens
tttttttagagaagt

SEQ ID NO: 1635646 - DNA, 15 bp, Homo sapiens
ttttttttagagaag

SEQ ID NO: 1635647 - DNA, 15 bp, Homo sapiens
tttttttttagagaa

SEQ ID NO: 1635648 - DNA, 15 bp, Homo sapiens
aatttttttttttta

SEQ ID NO: 1635649 - DNA, 15 bp, Homo sapiens
ggaattttttttttt

SEQ ID NO: 1635650 - DNA, 15 bp, Homo sapiens
gggaatttttttttt

SEQ ID NO: 1635651 - DNA, 15 bp, Homo sapiens
agggaattttttttt

SEQ ID NO: 1635652 - DNA, 15 bp, Homo sapiens
aagggaatttttttt

SEQ ID NO: 1635653 - DNA, 15 bp, Homo sapiens
aaagggaattttttt

SEQ ID NO: 1635654 - DNA, 15 bp, Homo sapiens
caaagggaatttttt

SEQ ID NO: 1635655 - DNA, 15 bp, Homo sapiens
tcaaagggaattttt

SEQ ID NO: 1635656 - DNA, 15 bp, Homo sapiens
ctcaaagggaatttt

SEQ ID NO: 1635657 - DNA, 15 bp, Homo sapiens
tgctcaaagggaatt

SEQ ID NO: 1635658 - DNA, 15 bp, Homo sapiens
atgctcaaagggaat

SEQ ID NO: 1635659 - DNA, 15 bp, Homo sapiens
gatgctcaaagggaa

SEQ ID NO: 1635660 - DNA, 15 bp, Homo sapiens
agatgctcaaaggga

SEQ ID NO: 1635661 - DNA, 15 bp, Homo sapiens
gagatgctcaaaggg

SEQ ID NO: 1635662 - DNA, 15 bp, Homo sapiens
agagatgctcaaagg

SEQ ID NO: 1635663 - DNA, 15 bp, Homo sapiens
tagagatgctcaaag

SEQ ID NO: 1635664 - DNA, 15 bp, Homo sapiens
gtagagatgctcaaa

SEQ ID NO: 1635665 - DNA, 15 bp, Homo sapiens
agtagagatgctcaa

SEQ ID NO: 1635666 - DNA, 15 bp, Homo sapiens
cagtagagatgctca

SEQ ID NO: 1635667 - DNA, 15 bp, Homo sapiens
acagtagagatgctc

SEQ ID NO: 1635668 - DNA, 15 bp, Homo sapiens
tacagtagagatgct

SEQ ID NO: 1635669 - DNA, 15 bp, Homo sapiens
ctacagtagagatgc

SEQ ID NO: 1635670 - DNA, 15 bp, Homo sapiens
tctacagtagagatg

SEQ ID NO: 1635671 - DNA, 15 bp, Homo sapiens
ctctacagtagagat

SEQ ID NO: 1635672 - DNA, 15 bp, Homo sapiens
tctctacagtagaga

SEQ ID NO: 1635673 - DNA, 15 bp, Homo sapiens
atctctacagtagag

SEQ ID NO: 1635674 - DNA, 15 bp, Homo sapiens
catctctacagtaga

SEQ ID NO: 1635675 - DNA, 15 bp, Homo sapiens
tcatctctacagtag

SEQ ID NO: 1635676 - DNA, 15 bp, Homo sapiens
ttcatctctacagta

SEQ ID NO: 1635677 - DNA, 15 bp, Homo sapiens
tttcatctctacagt

SEQ ID NO: 1635678 - DNA, 15 bp, Homo sapiens
atttcatctctacag

SEQ ID NO: 1635679 - DNA, 15 bp, Homo sapiens
tatttcatctctaca

SEQ ID NO: 1635680 - DNA, 15 bp, Homo sapiens
ttatttcatctctac

SEQ ID NO: 1635681 - DNA, 15 bp, Homo sapiens
cttatttcatctcta

SEQ ID NO: 1635682 - DNA, 15 bp, Homo sapiens
tcttatttcatctct

SEQ ID NO: 1635683 - DNA, 15 bp, Homo sapiens
ctcttatttcatctc

SEQ ID NO: 1635684 - DNA, 15 bp, Homo sapiens
tctcttatttcatct

SEQ ID NO: 1635685 - DNA, 15 bp, Homo sapiens
ctctcttatttcatc

SEQ ID NO: 1635686 - DNA, 15 bp, Homo sapiens
tctctcttatttcat

SEQ ID NO: 1635687 - DNA, 15 bp, Homo sapiens
ttctctcttatttca

SEQ ID NO: 1635688 - DNA, 15 bp, Homo sapiens
cttctctcttatttc

SEQ ID NO: 1635689 - DNA, 15 bp, Homo sapiens
acttctctcttattt

SEQ ID NO: 1635690 - DNA, 15 bp, Homo sapiens
cacttctctcttatt

SEQ ID NO: 1635691 - DNA, 15 bp, Homo sapiens
ccacttctctcttat

SEQ ID NO: 1635692 - DNA, 15 bp, Homo sapiens
tccacttctctctta

SEQ ID NO: 1635693 - DNA, 15 bp, Homo sapiens
atccacttctctctt

SEQ ID NO: 1635694 - DNA, 15 bp, Homo sapiens
aatccacttctctct

SEQ ID NO: 1635695 - DNA, 15 bp, Homo sapiens
gaatccacttctctc

SEQ ID NO: 1635696 - DNA, 15 bp, Homo sapiens
agaatccacttctct

SEQ ID NO: 1635697 - DNA, 15 bp, Homo sapiens
aagaatccacttctc

SEQ ID NO: 1635698 - DNA, 15 bp, Homo sapiens
aaagaatccacttct

SEQ ID NO: 1635699 - DNA, 15 bp, Homo sapiens
taaagaatccacttc

SEQ ID NO: 1635700 - DNA, 15 bp, Homo sapiens
ctaaagaatccactt

SEQ ID NO: 1635701 - DNA, 15 bp, Homo sapiens
actaaagaatccact

SEQ ID NO: 1635702 - DNA, 15 bp, Homo sapiens
tactaaagaatccac

SEQ ID NO: 1635703 - DNA, 15 bp, Homo sapiens
atactaaagaatcca

SEQ ID NO: 1635704 - DNA, 15 bp, Homo sapiens
tatactaaagaatcc

SEQ ID NO: 1635705 - DNA, 15 bp, Homo sapiens
ctatactaaagaatc

SEQ ID NO: 1635706 - DNA, 15 bp, Homo sapiens
tctatactaaagaat

SEQ ID NO: 1635707 - DNA, 15 bp, Homo sapiens
ctctatactaaagaa

SEQ ID NO: 1635708 - DNA, 15 bp, Homo sapiens
tctctatactaaaga

SEQ ID NO: 1635709 - DNA, 15 bp, Homo sapiens
atctctatactaaag

SEQ ID NO: 1635710 - DNA, 15 bp, Homo sapiens
catctctatactaaa

SEQ ID NO: 1635711 - DNA, 15 bp, Homo sapiens
ccatctctatactaa

SEQ ID NO: 1635712 - DNA, 15 bp, Homo sapiens
tccatctctatacta

SEQ ID NO: 1635713 - DNA, 15 bp, Homo sapiens
ttccatctctatact

SEQ ID NO: 1635714 - DNA, 15 bp, Homo sapiens
tttccatctctatac

SEQ ID NO: 1635715 - DNA, 15 bp, Homo sapiens
ctttccatctctata

SEQ ID NO: 1635716 - DNA, 15 bp, Homo sapiens
cctttccatctctat

SEQ ID NO: 1635717 - DNA, 15 bp, Homo sapiens
acctttccatctcta

SEQ ID NO: 1635718 - DNA, 15 bp, Homo sapiens
tacctttccatctct

SEQ ID NO: 1635719 - DNA, 15 bp, Homo sapiens
atacctttccatctc

SEQ ID NO: 1635720 - DNA, 15 bp, Homo sapiens
catacctttccatct

SEQ ID NO: 1635721 - DNA, 15 bp, Homo sapiens
ccatacctttccatc

SEQ ID NO: 1635722 - DNA, 15 bp, Homo sapiens
tccatacctttccat

SEQ ID NO: 1635723 - DNA, 15 bp, Homo sapiens
ctccatacctttcca

SEQ ID NO: 1635724 - DNA, 15 bp, Homo sapiens
gctccatacctttcc

SEQ ID NO: 1635725 - DNA, 15 bp, Homo sapiens
agctccatacctttc

SEQ ID NO: 1635726 - DNA, 15 bp, Homo sapiens
tagctccataccttt

SEQ ID NO: 1635727 - DNA, 15 bp, Homo sapiens
ctagctccatacctt

SEQ ID NO: 1635728 - DNA, 15 bp, Homo sapiens
tctagctccatacct

SEQ ID NO: 1635729 - DNA, 15 bp, Homo sapiens
ttctagctccatacc

SEQ ID NO: 1635730 - DNA, 15 bp, Homo sapiens
gttctagctccatac

SEQ ID NO: 1635731 - DNA, 15 bp, Homo sapiens
tgttctagctccata

SEQ ID NO: 1635732 - DNA, 15 bp, Homo sapiens
atgttctagctccat

SEQ ID NO: 1635733 - DNA, 15 bp, Homo sapiens
catgttctagctcca

SEQ ID NO: 1635734 - DNA, 15 bp, Homo sapiens
acatgttctagctcc

SEQ ID NO: 1635735 - DNA, 15 bp, Homo sapiens
cacatgttctagctc

SEQ ID NO: 1635736 - DNA, 15 bp, Homo sapiens
ccacatgttctagct

SEQ ID NO: 1635737 - DNA, 15 bp, Homo sapiens
cccacatgttctagc

SEQ ID NO: 1635738 - DNA, 15 bp, Homo sapiens
acccacatgttctag

SEQ ID NO: 1635739 - DNA, 15 bp, Homo sapiens
aacccacatgttcta

SEQ ID NO: 1635740 - DNA, 15 bp, Homo sapiens
caacccacatgttct

SEQ ID NO: 1635741 - DNA, 15 bp, Homo sapiens
acaacccacatgttc

SEQ ID NO: 1635742 - DNA, 15 bp, Homo sapiens
cacaacccacatgtt

SEQ ID NO: 1635743 - DNA, 15 bp, Homo sapiens
tcacaacccacatgt

SEQ ID NO: 1635744 - DNA, 15 bp, Homo sapiens
ttcacaacccacatg

SEQ ID NO: 1635745 - DNA, 15 bp, Homo sapiens
gttcacaacccacat

SEQ ID NO: 1635746 - DNA, 15 bp, Homo sapiens
tgttcacaacccaca

SEQ ID NO: 1635747 - DNA, 15 bp, Homo sapiens
ctgttcacaacccac

SEQ ID NO: 1635748 - DNA, 15 bp, Homo sapiens
actgttcacaaccca

SEQ ID NO: 1635749 - DNA, 15 bp, Homo sapiens
cactgttcacaaccc

SEQ ID NO: 1635750 - DNA, 15 bp, Homo sapiens
ccactgttcacaacc

SEQ ID NO: 1635751 - DNA, 15 bp, Homo sapiens
gccactgttcacaac

SEQ ID NO: 1635752 - DNA, 15 bp, Homo sapiens
agccactgttcacaa

SEQ ID NO: 1635753 - DNA, 15 bp, Homo sapiens
tagccactgttcaca

SEQ ID NO: 1635754 - DNA, 15 bp, Homo sapiens
ttagccactgttcac

SEQ ID NO: 1635755 - DNA, 15 bp, Homo sapiens
gttagccactgttca

SEQ ID NO: 1635756 - DNA, 15 bp, Homo sapiens
agttagccactgttc

SEQ ID NO: 1635757 - DNA, 15 bp, Homo sapiens
tagttagccactgtt

SEQ ID NO: 1635758 - DNA, 15 bp, Homo sapiens
ttagttagccactgt

SEQ ID NO: 1635759 - DNA, 15 bp, Homo sapiens
tttagttagccactg

SEQ ID NO: 1635760 - DNA, 15 bp, Homo sapiens
gtttagttagccact

SEQ ID NO: 1635761 - DNA, 15 bp, Homo sapiens
ggtttagttagccac

SEQ ID NO: 1635762 - DNA, 15 bp, Homo sapiens
tggtttagttagcca

SEQ ID NO: 1635763 - DNA, 15 bp, Homo sapiens
ctggtttagttagcc

SEQ ID NO: 1635764 - DNA, 15 bp, Homo sapiens
cctggtttagttagc

SEQ ID NO: 1635765 - DNA, 15 bp, Homo sapiens
tcctggtttagttag

SEQ ID NO: 1635766 - DNA, 15 bp, Homo sapiens
gtcctggtttagtta

SEQ ID NO: 1635767 - DNA, 15 bp, Homo sapiens
ggtcctggtttagtt

SEQ ID NO: 1635768 - DNA, 15 bp, Homo sapiens
tggtcctggtttagt

SEQ ID NO: 1635769 - DNA, 15 bp, Homo sapiens
ctggtcctggtttag

SEQ ID NO: 1635770 - DNA, 15 bp, Homo sapiens
actggtcctggttta

SEQ ID NO: 1635771 - DNA, 15 bp, Homo sapiens
tactggtcctggttt

SEQ ID NO: 1635772 - DNA, 15 bp, Homo sapiens
ttactggtcctggtt

SEQ ID NO: 1635773 - DNA, 15 bp, Homo sapiens
gttactggtcctggt

SEQ ID NO: 1635774 - DNA, 15 bp, Homo sapiens
ggttactggtcctgg

SEQ ID NO: 1635775 - DNA, 15 bp, Homo sapiens
aggttactggtcctg

SEQ ID NO: 1635776 - DNA, 15 bp, Homo sapiens
taggttactggtcct

SEQ ID NO: 1635777 - DNA, 15 bp, Homo sapiens
ctaggttactggtcc

SEQ ID NO: 1635778 - DNA, 15 bp, Homo sapiens
tctaggttactggtc

SEQ ID NO: 1635779 - DNA, 15 bp, Homo sapiens
atctaggttactggt

SEQ ID NO: 1635780 - DNA, 15 bp, Homo sapiens
tatctaggttactgg

SEQ ID NO: 1635781 - DNA, 15 bp, Homo sapiens
atatctaggttactg

SEQ ID NO: 1635782 - DNA, 15 bp, Homo sapiens
gatatctaggttact

SEQ ID NO: 1635783 - DNA, 15 bp, Homo sapiens
tgatatctaggttac

SEQ ID NO: 1635784 - DNA, 15 bp, Homo sapiens
gtgatatctaggtta

SEQ ID NO: 1635785 - DNA, 15 bp, Homo sapiens
tgtgatatctaggtt

SEQ ID NO: 1635786 - DNA, 15 bp, Homo sapiens
atgtgatatctaggt

SEQ ID NO: 1635787 - DNA, 15 bp, Homo sapiens
aatgtgatatctagg

SEQ ID NO: 1635788 - DNA, 15 bp, Homo sapiens
caatgtgatatctag

SEQ ID NO: 1635789 - DNA, 15 bp, Homo sapiens
ccaatgtgatatcta

SEQ ID NO: 1635790 - DNA, 15 bp, Homo sapiens
cccaatgtgatatct

SEQ ID NO: 1635791 - DNA, 15 bp, Homo sapiens
gcccaatgtgatatc

SEQ ID NO: 1635792 - DNA, 15 bp, Homo sapiens
agcccaatgtgatat

SEQ ID NO: 1635793 - DNA, 15 bp, Homo sapiens
aagcccaatgtgata

SEQ ID NO: 1635794 - DNA, 15 bp, Homo sapiens
taagcccaatgtgat

SEQ ID NO: 1635795 - DNA, 15 bp, Homo sapiens
ttaagcccaatgtga

SEQ ID NO: 1635796 - DNA, 15 bp, Homo sapiens
attaagcccaatgtg

SEQ ID NO: 1635797 - DNA, 15 bp, Homo sapiens
aattaagcccaatgt

SEQ ID NO: 1635798 - DNA, 15 bp, Homo sapiens
caattaagcccaatg

SEQ ID NO: 1635799 - DNA, 15 bp, Homo sapiens
gcaattaagcccaat

SEQ ID NO: 1635800 - DNA, 15 bp, Homo sapiens
agcaattaagcccaa

SEQ ID NO: 1635801 - DNA, 15 bp, Homo sapiens
cagcaattaagccca

SEQ ID NO: 1635802 - DNA, 15 bp, Homo sapiens
ccagcaattaagccc

SEQ ID NO: 1635803 - DNA, 15 bp, Homo sapiens
cccagcaattaagcc

SEQ ID NO: 1635804 - DNA, 15 bp, Homo sapiens
acccagcaattaagc

SEQ ID NO: 1635805 - DNA, 15 bp, Homo sapiens
aacccagcaattaag

SEQ ID NO: 1635806 - DNA, 15 bp, Homo sapiens
taacccagcaattaa

SEQ ID NO: 1635807 - DNA, 15 bp, Homo sapiens
ataacccagcaatta

SEQ ID NO: 1635808 - DNA, 15 bp, Homo sapiens
aataacccagcaatt

SEQ ID NO: 1635809 - DNA, 15 bp, Homo sapiens
gaataacccagcaat

SEQ ID NO: 1635810 - DNA, 15 bp, Homo sapiens
tgaataacccagcaa

SEQ ID NO: 1635811 - DNA, 15 bp, Homo sapiens
atgaataacccagca

SEQ ID NO: 1635812 - DNA, 15 bp, Homo sapiens
aatgaataacccagc

SEQ ID NO: 1635813 - DNA, 15 bp, Homo sapiens
gaatgaataacccag

SEQ ID NO: 1635814 - DNA, 15 bp, Homo sapiens
tgaatgaataaccca

SEQ ID NO: 1635815 - DNA, 15 bp, Homo sapiens
atgaatgaataaccc

SEQ ID NO: 1635816 - DNA, 15 bp, Homo sapiens
aatgaatgaataacc

SEQ ID NO: 1635817 - DNA, 15 bp, Homo sapiens
gaatgaatgaataac

SEQ ID NO: 1635818 - DNA, 15 bp, Homo sapiens
tgaatgaatgaataa

SEQ ID NO: 1635819 - DNA, 15 bp, Homo sapiens
ctgaatgaatgaata

SEQ ID NO: 1635820 - DNA, 15 bp, Homo sapiens
cctgaatgaatgaat

SEQ ID NO: 1635821 - DNA, 15 bp, Homo sapiens
gcctgaatgaatgaa

SEQ ID NO: 1635822 - DNA, 15 bp, Homo sapiens
tgcctgaatgaatga

SEQ ID NO: 1635823 - DNA, 15 bp, Homo sapiens
ttgcctgaatgaatg

SEQ ID NO: 1635824 - DNA, 15 bp, Homo sapiens
gttgcctgaatgaat

SEQ ID NO: 1635825 - DNA, 15 bp, Homo sapiens
tgttgcctgaatgaa

SEQ ID NO: 1635826 - DNA, 15 bp, Homo sapiens
atgttgcctgaatga

SEQ ID NO: 1635827 - DNA, 15 bp, Homo sapiens
catgttgcctgaatg

SEQ ID NO: 1635828 - DNA, 15 bp, Homo sapiens
acatgttgcctgaat

SEQ ID NO: 1635829 - DNA, 15 bp, Homo sapiens
tacatgttgcctgaa

SEQ ID NO: 1635830 - DNA, 15 bp, Homo sapiens
atacatgttgcctga

SEQ ID NO: 1635831 - DNA, 15 bp, Homo sapiens
aatacatgttgcctg

SEQ ID NO: 1635832 - DNA, 15 bp, Homo sapiens
aaatacatgttgcct

SEQ ID NO: 1635833 - DNA, 15 bp, Homo sapiens
caaatacatgttgcc

SEQ ID NO: 1635834 - DNA, 15 bp, Homo sapiens
acaaatacatgttgc

SEQ ID NO: 1635835 - DNA, 15 bp, Homo sapiens
aacaaatacatgttg

SEQ ID NO: 1635836 - DNA, 15 bp, Homo sapiens
caacaaatacatgtt

SEQ ID NO: 1635837 - DNA, 15 bp, Homo sapiens
tcaacaaatacatgt

SEQ ID NO: 1635838 - DNA, 15 bp, Homo sapiens
ctcaacaaatacatg

SEQ ID NO: 1635839 - DNA, 15 bp, Homo sapiens
tctcaacaaatacat

SEQ ID NO: 1635840 - DNA, 15 bp, Homo sapiens
ctctcaacaaataca

SEQ ID NO: 1635841 - DNA, 15 bp, Homo sapiens
gctctcaacaaatac

SEQ ID NO: 1635842 - DNA, 15 bp, Homo sapiens
ggctctcaacaaata

SEQ ID NO: 1635843 - DNA, 15 bp, Homo sapiens
aggctctcaacaaat

SEQ ID NO: 1635844 - DNA, 15 bp, Homo sapiens
caggctctcaacaaa

SEQ ID NO: 1635845 - DNA, 15 bp, Homo sapiens
tcaggctctcaacaa

SEQ ID NO: 1635846 - DNA, 15 bp, Homo sapiens
ttcaggctctcaaca

SEQ ID NO: 1635847 - DNA, 15 bp, Homo sapiens
attcaggctctcaac

SEQ ID NO: 1635848 - DNA, 15 bp, Homo sapiens
cattcaggctctcaa

SEQ ID NO: 1635849 - DNA, 15 bp, Homo sapiens
acattcaggctctca

SEQ ID NO: 1635850 - DNA, 15 bp, Homo sapiens
cacattcaggctctc

SEQ ID NO: 1635851 - DNA, 15 bp, Homo sapiens
gcacattcaggctct

SEQ ID NO: 1635852 - DNA, 15 bp, Homo sapiens
ggcacattcaggctc

SEQ ID NO: 1635853 - DNA, 15 bp, Homo sapiens
tggcacattcaggct

SEQ ID NO: 1635854 - DNA, 15 bp, Homo sapiens
ctggcacattcaggc

SEQ ID NO: 1635855 - DNA, 15 bp, Homo sapiens
cctggcacattcagg

SEQ ID NO: 1635856 - DNA, 15 bp, Homo sapiens
acctggcacattcag

SEQ ID NO: 1635857 - DNA, 15 bp, Homo sapiens
tacctggcacattca

SEQ ID NO: 1635858 - DNA, 15 bp, Homo sapiens
ttacctggcacattc

SEQ ID NO: 1635859 - DNA, 15 bp, Homo sapiens
attacctggcacatt

SEQ ID NO: 1635860 - DNA, 15 bp, Homo sapiens
tattacctggcacat

SEQ ID NO: 1635861 - DNA, 15 bp, Homo sapiens
ctattacctggcaca

SEQ ID NO: 1635862 - DNA, 15 bp, Homo sapiens
tctattacctggcac

SEQ ID NO: 1635863 - DNA, 15 bp, Homo sapiens
ttctattacctggca

SEQ ID NO: 1635864 - DNA, 15 bp, Homo sapiens
tttctattacctggc

SEQ ID NO: 1635865 - DNA, 15 bp, Homo sapiens
gtttctattacctgg

SEQ ID NO: 1635866 - DNA, 15 bp, Homo sapiens
tgtttctattacctg

SEQ ID NO: 1635867 - DNA, 15 bp, Homo sapiens
gtgtttctattacct

SEQ ID NO: 1635868 - DNA, 15 bp, Homo sapiens
tgtgtttctattacc

SEQ ID NO: 1635869 - DNA, 15 bp, Homo sapiens
ttgtgtttctattac

SEQ ID NO: 1635870 - DNA, 15 bp, Homo sapiens
tttgtgtttctatta

SEQ ID NO: 1635871 - DNA, 15 bp, Homo sapiens
ctttgtgtttctatt

SEQ ID NO: 1635872 - DNA, 15 bp, Homo sapiens
cctttgtgtttctat

SEQ ID NO: 1635873 - DNA, 15 bp, Homo sapiens
acctttgtgtttcta

SEQ ID NO: 1635874 - DNA, 15 bp, Homo sapiens
cacctttgtgtttct

SEQ ID NO: 1635875 - DNA, 15 bp, Homo sapiens
ccacctttgtgtttc

SEQ ID NO: 1635876 - DNA, 15 bp, Homo sapiens
accacctttgtgttt

SEQ ID NO: 1635877 - DNA, 15 bp, Homo sapiens
aaccacctttgtgtt

SEQ ID NO: 1635878 - DNA, 15 bp, Homo sapiens
taaccacctttgtgt

SEQ ID NO: 1635879 - DNA, 15 bp, Homo sapiens
ttaaccacctttgtg

SEQ ID NO: 1635880 - DNA, 15 bp, Homo sapiens
tttaaccacctttgt

SEQ ID NO: 1635881 - DNA, 15 bp, Homo sapiens
ttttaaccacctttg

SEQ ID NO: 1635882 - DNA, 15 bp, Homo sapiens
attttaaccaccttt

SEQ ID NO: 1635883 - DNA, 15 bp, Homo sapiens
tattttaaccacctt

SEQ ID NO: 1635884 - DNA, 15 bp, Homo sapiens
ctattttaaccacct

SEQ ID NO: 1635885 - DNA, 15 bp, Homo sapiens
tctattttaaccacc

SEQ ID NO: 1635886 - DNA, 15 bp, Homo sapiens
gtctattttaaccac

SEQ ID NO: 1635887 - DNA, 15 bp, Homo sapiens
ggtctattttaacca

SEQ ID NO: 1635888 - DNA, 15 bp, Homo sapiens
aggtctattttaacc

SEQ ID NO: 1635889 - DNA, 15 bp, Homo sapiens
aaggtctattttaac

SEQ ID NO: 1635890 - DNA, 15 bp, Homo sapiens
caaggtctattttaa

SEQ ID NO: 1635891 - DNA, 15 bp, Homo sapiens
ccaaggtctatttta

SEQ ID NO: 1635892 - DNA, 15 bp, Homo sapiens
gccaaggtctatttt

SEQ ID NO: 1635893 - DNA, 15 bp, Homo sapiens
ggccaaggtctattt

SEQ ID NO: 1635894 - DNA, 15 bp, Homo sapiens
aggccaaggtctatt

SEQ ID NO: 1635895 - DNA, 15 bp, Homo sapiens
gaggccaaggtctat

SEQ ID NO: 1635896 - DNA, 15 bp, Homo sapiens
agaggccaaggtcta

SEQ ID NO: 1635897 - DNA, 15 bp, Homo sapiens
cagaggccaaggtct

SEQ ID NO: 1635898 - DNA, 15 bp, Homo sapiens
acagaggccaaggtc

SEQ ID NO: 1635899 - DNA, 15 bp, Homo sapiens
gacagaggccaaggt

SEQ ID NO: 1635900 - DNA, 15 bp, Homo sapiens
agacagaggccaagg

SEQ ID NO: 1635901 - DNA, 15 bp, Homo sapiens
aagacagaggccaag

SEQ ID NO: 1635902 - DNA, 15 bp, Homo sapiens
gaagacagaggccaa

SEQ ID NO: 1635903 - DNA, 15 bp, Homo sapiens
tgaagacagaggcca

SEQ ID NO: 1635904 - DNA, 15 bp, Homo sapiens
ctgaagacagaggcc

SEQ ID NO: 1635905 - DNA, 15 bp, Homo sapiens
cctgaagacagaggc

SEQ ID NO: 1635906 - DNA, 15 bp, Homo sapiens
tcctgaagacagagg

SEQ ID NO: 1635907 - DNA, 15 bp, Homo sapiens
ttcctgaagacagag

SEQ ID NO: 1635908 - DNA, 15 bp, Homo sapiens
cttcctgaagacaga

SEQ ID NO: 1635909 - DNA, 15 bp, Homo sapiens
gcttcctgaagacag

SEQ ID NO: 1635910 - DNA, 15 bp, Homo sapiens
agcttcctgaagaca

SEQ ID NO: 1635911 - DNA, 15 bp, Homo sapiens
aagcttcctgaagac

SEQ ID NO: 1635912 - DNA, 15 bp, Homo sapiens
gaagcttcctgaaga

SEQ ID NO: 1635913 - DNA, 15 bp, Homo sapiens
ggaagcttcctgaag

SEQ ID NO: 1635914 - DNA, 15 bp, Homo sapiens
tggaagcttcctgaa

SEQ ID NO: 1635915 - DNA, 15 bp, Homo sapiens
actggaagcttcctg

SEQ ID NO: 1635916 - DNA, 15 bp, Homo sapiens
gactggaagcttcct

SEQ ID NO: 1635917 - DNA, 15 bp, Homo sapiens
agactggaagcttcc

SEQ ID NO: 1635918 - DNA, 15 bp, Homo sapiens
cagactggaagcttc

SEQ ID NO: 1635919 - DNA, 15 bp, Homo sapiens
tcagactggaagctt

SEQ ID NO: 1635920 - DNA, 15 bp, Homo sapiens
ttcagactggaagct

SEQ ID NO: 1635921 - DNA, 15 bp, Homo sapiens
cttcagactggaagc

SEQ ID NO: 1635922 - DNA, 15 bp, Homo sapiens
tcttcagactggaag

SEQ ID NO: 1635923 - DNA, 15 bp, Homo sapiens
ctcttcagactggaa

SEQ ID NO: 1635924 - DNA, 15 bp, Homo sapiens
cctcttcagactgga

SEQ ID NO: 1635925 - DNA, 15 bp, Homo sapiens
ccctcttcagactgg

SEQ ID NO: 1635926 - DNA, 15 bp, Homo sapiens
tccctcttcagactg

SEQ ID NO: 1635927 - DNA, 15 bp, Homo sapiens
atccctcttcagact

SEQ ID NO: 1635928 - DNA, 15 bp, Homo sapiens
catccctcttcagac

SEQ ID NO: 1635929 - DNA, 15 bp, Homo sapiens
tcatccctcttcaga

SEQ ID NO: 1635930 - DNA, 15 bp, Homo sapiens
ttcatccctcttcag

SEQ ID NO: 1635931 - DNA, 15 bp, Homo sapiens
cttcatccctcttca

SEQ ID NO: 1635932 - DNA, 15 bp, Homo sapiens
tcttcatccctcttc

SEQ ID NO: 1635933 - DNA, 15 bp, Homo sapiens
gtcttcatccctctt

SEQ ID NO: 1635934 - DNA, 15 bp, Homo sapiens
tgtcttcatccctct

SEQ ID NO: 1635935 - DNA, 15 bp, Homo sapiens
atgtcttcatccctc

SEQ ID NO: 1635936 - DNA, 15 bp, Homo sapiens
tatgtcttcatccct

SEQ ID NO: 1635937 - DNA, 15 bp, Homo sapiens
atatgtcttcatccc

SEQ ID NO: 1635938 - DNA, 15 bp, Homo sapiens
tatatgtcttcatcc

SEQ ID NO: 1635939 - DNA, 15 bp, Homo sapiens
atatatgtcttcatc

SEQ ID NO: 1635940 - DNA, 15 bp, Homo sapiens
aatatatgtcttcat

SEQ ID NO: 1635941 - DNA, 15 bp, Homo sapiens
taatatatgtcttca

SEQ ID NO: 1635942 - DNA, 15 bp, Homo sapiens
ttaatatatgtcttc

SEQ ID NO: 1635943 - DNA, 15 bp, Homo sapiens
attaatatatgtctt

SEQ ID NO: 1635944 - DNA, 15 bp, Homo sapiens
gattaatatatgtct

SEQ ID NO: 1635945 - DNA, 15 bp, Homo sapiens
tgattaatatatgtc

SEQ ID NO: 1635946 - DNA, 15 bp, Homo sapiens
ttgattaatatatgt

SEQ ID NO: 1635947 - DNA, 15 bp, Homo sapiens
tttgattaatatatg

SEQ ID NO: 1635948 - DNA, 15 bp, Homo sapiens
gtttgattaatatat

SEQ ID NO: 1635949 - DNA, 15 bp, Homo sapiens
tgtttgattaatata

SEQ ID NO: 1635950 - DNA, 15 bp, Homo sapiens
ttgtttgattaatat

SEQ ID NO: 1635951 - DNA, 15 bp, Homo sapiens
attgtttgattaata

SEQ ID NO: 1635952 - DNA, 15 bp, Homo sapiens
gattgtttgattaat

SEQ ID NO: 1635953 - DNA, 15 bp, Homo sapiens
ggattgtttgattaa

SEQ ID NO: 1635954 - DNA, 15 bp, Homo sapiens
gggattgtttgatta

SEQ ID NO: 1635955 - DNA, 15 bp, Homo sapiens
tgggattgtttgatt

SEQ ID NO: 1635956 - DNA, 15 bp, Homo sapiens
gtgggattgtttgat

SEQ ID NO: 1635957 - DNA, 15 bp, Homo sapiens
tgtgggattgtttga

SEQ ID NO: 1635958 - DNA, 15 bp, Homo sapiens
ttgtgggattgtttg

SEQ ID NO: 1635959 - DNA, 15 bp, Homo sapiens
tttgtgggattgttt

SEQ ID NO: 1635960 - DNA, 15 bp, Homo sapiens
atttgtgggattgtt

SEQ ID NO: 1635961 - DNA, 15 bp, Homo sapiens
catttgtgggattgt

SEQ ID NO: 1635962 - DNA, 15 bp, Homo sapiens
gcatttgtgggattg

SEQ ID NO: 1635963 - DNA, 15 bp, Homo sapiens
tgcatttgtgggatt

SEQ ID NO: 1635964 - DNA, 15 bp, Homo sapiens
ctgcatttgtgggat

SEQ ID NO: 1635965 - DNA, 15 bp, Homo sapiens
cctgcatttgtggga

SEQ ID NO: 1635966 - DNA, 15 bp, Homo sapiens
acctgcatttgtggg

SEQ ID NO: 1635967 - DNA, 15 bp, Homo sapiens
tacctgcatttgtgg

SEQ ID NO: 1635968 - DNA, 15 bp, Homo sapiens
atacctgcatttgtg

SEQ ID NO: 1635969 - DNA, 15 bp, Homo sapiens
tatacctgcatttgt

SEQ ID NO: 1635970 - DNA, 15 bp, Homo sapiens
ttatacctgcatttg

SEQ ID NO: 1635971 - DNA, 15 bp, Homo sapiens
attatacctgcattt

SEQ ID NO: 1635972 - DNA, 15 bp, Homo sapiens
gattatacctgcatt

SEQ ID NO: 1635973 - DNA, 15 bp, Homo sapiens
agattatacctgcat

SEQ ID NO: 1635974 - DNA, 15 bp, Homo sapiens
cagattatacctgca

SEQ ID NO: 1635975 - DNA, 15 bp, Homo sapiens
gcagattatacctgc

SEQ ID NO: 1635976 - DNA, 15 bp, Homo sapiens
tgcagattatacctg

SEQ ID NO: 1635977 - DNA, 15 bp, Homo sapiens
atgcagattatacct

SEQ ID NO: 1635978 - DNA, 15 bp, Homo sapiens
tatgcagattatacc

SEQ ID NO: 1635979 - DNA, 15 bp, Homo sapiens
ttatgcagattatac

SEQ ID NO: 1635980 - DNA, 15 bp, Homo sapiens
tttatgcagattata

SEQ ID NO: 1635981 - DNA, 15 bp, Homo sapiens
gtttatgcagattat

SEQ ID NO: 1635982 - DNA, 15 bp, Homo sapiens
agtttatgcagatta

SEQ ID NO: 1635983 - DNA, 15 bp, Homo sapiens
cagtttatgcagatt

SEQ ID NO: 1635984 - DNA, 15 bp, Homo sapiens
tcagtttatgcagat

SEQ ID NO: 1635985 - DNA, 15 bp, Homo sapiens
gtcagtttatgcaga

SEQ ID NO: 1635986 - DNA, 15 bp, Homo sapiens
tgtcagtttatgcag

SEQ ID NO: 1635987 - DNA, 15 bp, Homo sapiens
ttgtcagtttatgca

SEQ ID NO: 1635988 - DNA, 15 bp, Homo sapiens
tttgtcagtttatgc

SEQ ID NO: 1635989 - DNA, 15 bp, Homo sapiens
atttgtcagtttatg

SEQ ID NO: 1635990 - DNA, 15 bp, Homo sapiens
tatttgtcagtttat

SEQ ID NO: 1635991 - DNA, 15 bp, Homo sapiens
atatttgtcagttta

SEQ ID NO: 1635992 - DNA, 15 bp, Homo sapiens
tatatttgtcagttt

SEQ ID NO: 1635993 - DNA, 15 bp, Homo sapiens
atatatttgtcagtt

SEQ ID NO: 1635994 - DNA, 15 bp, Homo sapiens
gatatatttgtcagt

SEQ ID NO: 1635995 - DNA, 15 bp, Homo sapiens
agatatatttgtcag

SEQ ID NO: 1635996 - DNA, 15 bp, Homo sapiens
tagatatatttgtca

SEQ ID NO: 1635997 - DNA, 15 bp, Homo sapiens
gtagatatatttgtc

SEQ ID NO: 1635998 - DNA, 15 bp, Homo sapiens
agtagatatatttgt

SEQ ID NO: 1635999 - DNA, 15 bp, Homo sapiens
aagtagatatatttg

SEQ ID NO: 1636000 - DNA, 15 bp, Homo sapiens
aaagtagatatattt

SEQ ID NO: 1636001 - DNA, 15 bp, Homo sapiens
caaagtagatatatt

SEQ ID NO: 1636002 - DNA, 15 bp, Homo sapiens
ccaaagtagatatat

SEQ ID NO: 1636003 - DNA, 15 bp, Homo sapiens
tccaaagtagatata

SEQ ID NO: 1636004 - DNA, 15 bp, Homo sapiens
ctccaaagtagatat

SEQ ID NO: 1636005 - DNA, 15 bp, Homo sapiens
actccaaagtagata

SEQ ID NO: 1636006 - DNA, 15 bp, Homo sapiens
gactccaaagtagat

SEQ ID NO: 1636007 - DNA, 15 bp, Homo sapiens
tgactccaaagtaga

SEQ ID NO: 1636008 - DNA, 15 bp, Homo sapiens
ttgactccaaagtag

SEQ ID NO: 1636009 - DNA, 15 bp, Homo sapiens
cttgactccaaagta

SEQ ID NO: 1636010 - DNA, 15 bp, Homo sapiens
tcttgactccaaagt

SEQ ID NO: 1636011 - DNA, 15 bp, Homo sapiens
ttcttgactccaaag

SEQ ID NO: 1636012 - DNA, 15 bp, Homo sapiens
tttcttgactccaaa

SEQ ID NO: 1636013 - DNA, 15 bp, Homo sapiens
atttcttgactccaa

SEQ ID NO: 1636014 - DNA, 15 bp, Homo sapiens
aatttcttgactcca

SEQ ID NO: 1636015 - DNA, 15 bp, Homo sapiens
taatttcttgactcc

SEQ ID NO: 1636016 - DNA, 15 bp, Homo sapiens
ttaatttcttgactc

SEQ ID NO: 1636017 - DNA, 15 bp, Homo sapiens
cttaatttcttgact

SEQ ID NO: 1636018 - DNA, 15 bp, Homo sapiens
tcttaatttcttgac

SEQ ID NO: 1636019 - DNA, 15 bp, Homo sapiens
ctcttaatttcttga

SEQ ID NO: 1636020 - DNA, 15 bp, Homo sapiens
tctcttaatttcttg

SEQ ID NO: 1636021 - DNA, 15 bp, Homo sapiens
ttctcttaatttctt

SEQ ID NO: 1636022 - DNA, 15 bp, Homo sapiens
tttctcttaatttct

SEQ ID NO: 1636023 - DNA, 15 bp, Homo sapiens
atttctcttaatttc

SEQ ID NO: 1636024 - DNA, 15 bp, Homo sapiens
gatttctcttaattt

SEQ ID NO: 1636025 - DNA, 15 bp, Homo sapiens
tgatttctcttaatt

SEQ ID NO: 1636026 - DNA, 15 bp, Homo sapiens
gtgatttctcttaat

SEQ ID NO: 1636027 - DNA, 15 bp, Homo sapiens
agtgatttctcttaa

SEQ ID NO: 1636028 - DNA, 15 bp, Homo sapiens
cagtgatttctctta

SEQ ID NO: 1636029 - DNA, 15 bp, Homo sapiens
tcagtgatttctctt

SEQ ID NO: 1636030 - DNA, 15 bp, Homo sapiens
atcagtgatttctct

SEQ ID NO: 1636031 - DNA, 15 bp, Homo sapiens
catcagtgatttctc

SEQ ID NO: 1636032 - DNA, 15 bp, Homo sapiens
acatcagtgatttct

SEQ ID NO: 1636033 - DNA, 15 bp, Homo sapiens
cacatcagtgatttc

SEQ ID NO: 1636034 - DNA, 15 bp, Homo sapiens
tcacatcagtgattt

SEQ ID NO: 1636035 - DNA, 15 bp, Homo sapiens
atcacatcagtgatt

SEQ ID NO: 1636036 - DNA, 15 bp, Homo sapiens
gatcacatcagtgat

SEQ ID NO: 1636037 - DNA, 15 bp, Homo sapiens
tgatcacatcagtga

SEQ ID NO: 1636038 - DNA, 15 bp, Homo sapiens
ctgatcacatcagtg

SEQ ID NO: 1636039 - DNA, 15 bp, Homo sapiens
actgatcacatcagt

SEQ ID NO: 1636040 - DNA, 15 bp, Homo sapiens
cactgatcacatcag

SEQ ID NO: 1636041 - DNA, 15 bp, Homo sapiens
tcactgatcacatca

SEQ ID NO: 1636042 - DNA, 15 bp, Homo sapiens
ttcactgatcacatc

SEQ ID NO: 1636043 - DNA, 15 bp, Homo sapiens
gttcactgatcacat

SEQ ID NO: 1636044 - DNA, 15 bp, Homo sapiens
tgttcactgatcaca

SEQ ID NO: 1636045 - DNA, 15 bp, Homo sapiens
ttgttcactgatcac

SEQ ID NO: 1636046 - DNA, 15 bp, Homo sapiens
cttgttcactgatca

SEQ ID NO: 1636047 - DNA, 15 bp, Homo sapiens
acttgttcactgatc

SEQ ID NO: 1636048 - DNA, 15 bp, Homo sapiens
tacttgttcactgat

SEQ ID NO: 1636049 - DNA, 15 bp, Homo sapiens
ttacttgttcactga

SEQ ID NO: 1636050 - DNA, 15 bp, Homo sapiens
cttacttgttcactg

SEQ ID NO: 1636051 - DNA, 15 bp, Homo sapiens
tcttacttgttcact

SEQ ID NO: 1636052 - DNA, 15 bp, Homo sapiens
atcttacttgttcac

SEQ ID NO: 1636053 - DNA, 15 bp, Homo sapiens
aatcttacttgttca

SEQ ID NO: 1636054 - DNA, 15 bp, Homo sapiens
aaatcttacttgttc

SEQ ID NO: 1636055 - DNA, 15 bp, Homo sapiens
taaatcttacttgtt

SEQ ID NO: 1636056 - DNA, 15 bp, Homo sapiens
ataaatcttacttgt

SEQ ID NO: 1636057 - DNA, 15 bp, Homo sapiens
aataaatcttacttg

SEQ ID NO: 1636058 - DNA, 15 bp, Homo sapiens
taataaatcttactt

SEQ ID NO: 1636059 - DNA, 15 bp, Homo sapiens
ctaataaatcttact

SEQ ID NO: 1636060 - DNA, 15 bp, Homo sapiens
cctaataaatcttac

SEQ ID NO: 1636061 - DNA, 15 bp, Homo sapiens
tcctaataaatctta

SEQ ID NO: 1636062 - DNA, 15 bp, Homo sapiens
ttcctaataaatctt

SEQ ID NO: 1636063 - DNA, 15 bp, Homo sapiens
cttcctaataaatct

SEQ ID NO: 1636064 - DNA, 15 bp, Homo sapiens
tcttcctaataaatc

SEQ ID NO: 1636065 - DNA, 15 bp, Homo sapiens
atcttcctaataaat

SEQ ID NO: 1636066 - DNA, 15 bp, Homo sapiens
catcttcctaataaa

SEQ ID NO: 1636067 - DNA, 15 bp, Homo sapiens
ccatcttcctaataa

SEQ ID NO: 1636068 - DNA, 15 bp, Homo sapiens
tccatcttcctaata

SEQ ID NO: 1636069 - DNA, 15 bp, Homo sapiens
ttccatcttcctaat

SEQ ID NO: 1636070 - DNA, 15 bp, Homo sapiens
cttccatcttcctaa

SEQ ID NO: 1636071 - DNA, 15 bp, Homo sapiens
ccttccatcttccta

SEQ ID NO: 1636072 - DNA, 15 bp, Homo sapiens
tccttccatcttcct

SEQ ID NO: 1636073 - DNA, 15 bp, Homo sapiens
atccttccatcttcc

SEQ ID NO: 1636074 - DNA, 15 bp, Homo sapiens
catccttccatcttc

SEQ ID NO: 1636075 - DNA, 15 bp, Homo sapiens
tcatccttccatctt

SEQ ID NO: 1636076 - DNA, 15 bp, Homo sapiens
gtcatccttccatct

SEQ ID NO: 1636077 - DNA, 15 bp, Homo sapiens
tgtcatccttccatc

SEQ ID NO: 1636078 - DNA, 15 bp, Homo sapiens
atgtcatccttccat

SEQ ID NO: 1636079 - DNA, 15 bp, Homo sapiens
aatgtcatccttcca

SEQ ID NO: 1636080 - DNA, 15 bp, Homo sapiens
taatgtcatccttcc

SEQ ID NO: 1636081 - DNA, 15 bp, Homo sapiens
gtaatgtcatccttc

SEQ ID NO: 1636082 - DNA, 15 bp, Homo sapiens
agtaatgtcatcctt

SEQ ID NO: 1636083 - DNA, 15 bp, Homo sapiens
aagtaatgtcatcct

SEQ ID NO: 1636084 - DNA, 15 bp, Homo sapiens
gaagtaatgtcatcc

SEQ ID NO: 1636085 - DNA, 15 bp, Homo sapiens
tgaagtaatgtcatc

SEQ ID NO: 1636086 - DNA, 15 bp, Homo sapiens
ttgaagtaatgtcat

SEQ ID NO: 1636087 - DNA, 15 bp, Homo sapiens
tttgaagtaatgtca

SEQ ID NO: 1636088 - DNA, 15 bp, Homo sapiens
atttgaagtaatgtc

SEQ ID NO: 1636089 - DNA, 15 bp, Homo sapiens
tatttgaagtaatgt

SEQ ID NO: 1636090 - DNA, 15 bp, Homo sapiens
atatttgaagtaatg

SEQ ID NO: 1636091 - DNA, 15 bp, Homo sapiens
tatatttgaagtaat

SEQ ID NO: 1636092 - DNA, 15 bp, Homo sapiens
atatatttgaagtaa

SEQ ID NO: 1636093 - DNA, 15 bp, Homo sapiens
aatatatttgaagta

SEQ ID NO: 1636094 - DNA, 15 bp, Homo sapiens
taatatatttgaagt

SEQ ID NO: 1636095 - DNA, 15 bp, Homo sapiens
gtaatatatttgaag

SEQ ID NO: 1636096 - DNA, 15 bp, Homo sapiens
tgtaatatatttgaa

SEQ ID NO: 1636097 - DNA, 15 bp, Homo sapiens
ctgtaatatatttga

SEQ ID NO: 1636098 - DNA, 15 bp, Homo sapiens
cctgtaatatatttg

SEQ ID NO: 1636099 - DNA, 15 bp, Homo sapiens
tcctgtaatatattt

SEQ ID NO: 1636100 - DNA, 15 bp, Homo sapiens
ttcctgtaatatatt

SEQ ID NO: 1636101 - DNA, 15 bp, Homo sapiens
tttcctgtaatatat

SEQ ID NO: 1636102 - DNA, 15 bp, Homo sapiens
gtttcctgtaatata

SEQ ID NO: 1636103 - DNA, 15 bp, Homo sapiens
ggtttcctgtaatat

SEQ ID NO: 1636104 - DNA, 15 bp, Homo sapiens
gggtttcctgtaata

SEQ ID NO: 1636105 - DNA, 15 bp, Homo sapiens
ggggtttcctgtaat

SEQ ID NO: 1636106 - DNA, 15 bp, Homo sapiens
tggggtttcctgtaa

SEQ ID NO: 1636107 - DNA, 15 bp, Homo sapiens
ttggggtttcctgta

SEQ ID NO: 1636108 - DNA, 15 bp, Homo sapiens
gttggggtttcctgt

SEQ ID NO: 1636109 - DNA, 15 bp, Homo sapiens
ggttggggtttcctg

SEQ ID NO: 1636110 - DNA, 15 bp, Homo sapiens
tggttggggtttcct

SEQ ID NO: 1636111 - DNA, 15 bp, Homo sapiens
atggttggggtttcc

SEQ ID NO: 1636112 - DNA, 15 bp, Homo sapiens
catggttggggtttc

SEQ ID NO: 1636113 - DNA, 15 bp, Homo sapiens
ccatggttggggttt

SEQ ID NO: 1636114 - DNA, 15 bp, Homo sapiens
accatggttggggtt

SEQ ID NO: 1636115 - DNA, 15 bp, Homo sapiens
taccatggttggggt

SEQ ID NO: 1636116 - DNA, 15 bp, Homo sapiens
ttaccatggttgggg

SEQ ID NO: 1636117 - DNA, 15 bp, Homo sapiens
gttaccatggttggg

SEQ ID NO: 1636118 - DNA, 15 bp, Homo sapiens
tgttaccatggttgg

SEQ ID NO: 1636119 - DNA, 15 bp, Homo sapiens
ttgttaccatggttg

SEQ ID NO: 1636120 - DNA, 15 bp, Homo sapiens
gttgttaccatggtt

SEQ ID NO: 1636121 - DNA, 15 bp, Homo sapiens
tgttgttaccatggt

SEQ ID NO: 1636122 - DNA, 15 bp, Homo sapiens
atgttgttaccatgg

SEQ ID NO: 1636123 - DNA, 15 bp, Homo sapiens
gatgttgttaccatg

SEQ ID NO: 1636124 - DNA, 15 bp, Homo sapiens
tgatgttgttaccat

SEQ ID NO: 1636125 - DNA, 15 bp, Homo sapiens
ctgatgttgttacca

SEQ ID NO: 1636126 - DNA, 15 bp, Homo sapiens
cctgatgttgttacc

SEQ ID NO: 1636127 - DNA, 15 bp, Homo sapiens
gcctgatgttgttac

SEQ ID NO: 1636128 - DNA, 15 bp, Homo sapiens
ggcctgatgttgtta

SEQ ID NO: 1636129 - DNA, 15 bp, Homo sapiens
aggcctgatgttgtt

SEQ ID NO: 1636130 - DNA, 15 bp, Homo sapiens
taggcctgatgttgt

SEQ ID NO: 1636131 - DNA, 15 bp, Homo sapiens
ataggcctgatgttg

SEQ ID NO: 1636132 - DNA, 15 bp, Homo sapiens
gataggcctgatgtt

SEQ ID NO: 1636133 - DNA, 15 bp, Homo sapiens
agataggcctgatgt

SEQ ID NO: 1636134 - DNA, 15 bp, Homo sapiens
aagataggcctgatg

SEQ ID NO: 1636135 - DNA, 15 bp, Homo sapiens
aaagataggcctgat

SEQ ID NO: 1636136 - DNA, 15 bp, Homo sapiens
taaagataggcctga

SEQ ID NO: 1636137 - DNA, 15 bp, Homo sapiens
gtaaagataggcctg

SEQ ID NO: 1636138 - DNA, 15 bp, Homo sapiens
tgtaaagataggcct

SEQ ID NO: 1636139 - DNA, 15 bp, Homo sapiens
atgtaaagataggcc

SEQ ID NO: 1636140 - DNA, 15 bp, Homo sapiens
tatgtaaagataggc

SEQ ID NO: 1636141 - DNA, 15 bp, Homo sapiens
atatgtaaagatagg

SEQ ID NO: 1636142 - DNA, 15 bp, Homo sapiens
catatgtaaagatag

SEQ ID NO: 1636143 - DNA, 15 bp, Homo sapiens
acatatgtaaagata

SEQ ID NO: 1636144 - DNA, 15 bp, Homo sapiens
aacatatgtaaagat

SEQ ID NO: 1636145 - DNA, 15 bp, Homo sapiens
aaacatatgtaaaga

SEQ ID NO: 1636146 - DNA, 15 bp, Homo sapiens
taaacatatgtaaag

SEQ ID NO: 1636147 - DNA, 15 bp, Homo sapiens
ttaaacatatgtaaa

SEQ ID NO: 1636148 - DNA, 15 bp, Homo sapiens
attaaacatatgtaa

SEQ ID NO: 1636149 - DNA, 15 bp, Homo sapiens
tattaaacatatgta

SEQ ID NO: 1636150 - DNA, 15 bp, Homo sapiens
ttattaaacatatgt

SEQ ID NO: 1636151 - DNA, 15 bp, Homo sapiens
attattaaacatatg

SEQ ID NO: 1636152 - DNA, 15 bp, Homo sapiens
cattattaaacatat

SEQ ID NO: 1636153 - DNA, 15 bp, Homo sapiens
gcattattaaacata

SEQ ID NO: 1636154 - DNA, 15 bp, Homo sapiens
agcattattaaacat

SEQ ID NO: 1636155 - DNA, 15 bp, Homo sapiens
aagcattattaaaca

SEQ ID NO: 1636156 - DNA, 15 bp, Homo sapiens
taagcattattaaac

SEQ ID NO: 1636157 - DNA, 15 bp, Homo sapiens
ttaagcattattaaa

SEQ ID NO: 1636158 - DNA, 15 bp, Homo sapiens
gttaagcattattaa

SEQ ID NO: 1636159 - DNA, 15 bp, Homo sapiens
agttaagcattatta

SEQ ID NO: 1636160 - DNA, 15 bp, Homo sapiens
aagttaagcattatt

SEQ ID NO: 1636161 - DNA, 15 bp, Homo sapiens
gaagttaagcattat

SEQ ID NO: 1636162 - DNA, 15 bp, Homo sapiens
tgaagttaagcatta

SEQ ID NO: 1636163 - DNA, 15 bp, Homo sapiens
gtgaagttaagcatt

SEQ ID NO: 1636164 - DNA, 15 bp, Homo sapiens
agtgaagttaagcat

SEQ ID NO: 1636165 - DNA, 15 bp, Homo sapiens
aagtgaagttaagca

SEQ ID NO: 1636166 - DNA, 15 bp, Homo sapiens
aaagtgaagttaagc

SEQ ID NO: 1636167 - DNA, 15 bp, Homo sapiens
aaaagtgaagttaag

SEQ ID NO: 1636168 - DNA, 15 bp, Homo sapiens
caaaagtgaagttaa

SEQ ID NO: 1636169 - DNA, 15 bp, Homo sapiens
gcaaaagtgaagtta

SEQ ID NO: 1636170 - DNA, 15 bp, Homo sapiens
agcaaaagtgaagtt

SEQ ID NO: 1636171 - DNA, 15 bp, Homo sapiens
gagcaaaagtgaagt

SEQ ID NO: 1636172 - DNA, 15 bp, Homo sapiens
ggagcaaaagtgaag

SEQ ID NO: 1636173 - DNA, 15 bp, Homo sapiens
aggagcaaaagtgaa

SEQ ID NO: 1636174 - DNA, 15 bp, Homo sapiens
taggagcaaaagtga

SEQ ID NO: 1636175 - DNA, 15 bp, Homo sapiens
ataggagcaaaagtg

SEQ ID NO: 1636176 - DNA, 15 bp, Homo sapiens
gataggagcaaaagt

SEQ ID NO: 1636177 - DNA, 15 bp, Homo sapiens
ggataggagcaaaag

SEQ ID NO: 1636178 - DNA, 15 bp, Homo sapiens
aggataggagcaaaa

SEQ ID NO: 1636179 - DNA, 15 bp, Homo sapiens
gaggataggagcaaa

SEQ ID NO: 1636180 - DNA, 15 bp, Homo sapiens
ggaggataggagcaa

SEQ ID NO: 1636181 - DNA, 15 bp, Homo sapiens
gggaggataggagca

SEQ ID NO: 1636182 - DNA, 15 bp, Homo sapiens
ggggaggataggagc

SEQ ID NO: 1636183 - DNA, 15 bp, Homo sapiens
tggggaggataggag

SEQ ID NO: 1636184 - DNA, 15 bp, Homo sapiens
ttggggaggatagga

SEQ ID NO: 1636185 - DNA, 15 bp, Homo sapiens
tttggggaggatagg

SEQ ID NO: 1636186 - DNA, 15 bp, Homo sapiens
ctttggggaggatag

SEQ ID NO: 1636187 - DNA, 15 bp, Homo sapiens
gctttggggaggata

SEQ ID NO: 1636188 - DNA, 15 bp, Homo sapiens
tgctttggggaggat

SEQ ID NO: 1636189 - DNA, 15 bp, Homo sapiens
ttgctttggggagga

SEQ ID NO: 1636190 - DNA, 15 bp, Homo sapiens
attgctttggggagg

SEQ ID NO: 1636191 - DNA, 15 bp, Homo sapiens
gattgctttggggag

SEQ ID NO: 1636192 - DNA, 15 bp, Homo sapiens
agattgctttgggga

SEQ ID NO: 1636193 - DNA, 15 bp, Homo sapiens
aagattgctttgggg

SEQ ID NO: 1636194 - DNA, 15 bp, Homo sapiens
gaagattgctttggg

SEQ ID NO: 1636195 - DNA, 15 bp, Homo sapiens
tgaagattgctttgg

SEQ ID NO: 1636196 - DNA, 15 bp, Homo sapiens
ttgaagattgctttg

SEQ ID NO: 1636197 - DNA, 15 bp, Homo sapiens
cttgaagattgcttt

SEQ ID NO: 1636198 - DNA, 15 bp, Homo sapiens
acttgaagattgctt

SEQ ID NO: 1636199 - DNA, 15 bp, Homo sapiens
aacttgaagattgct

SEQ ID NO: 1636200 - DNA, 15 bp, Homo sapiens
gaacttgaagattgc

SEQ ID NO: 1636201 - DNA, 15 bp, Homo sapiens
agaacttgaagattg

SEQ ID NO: 1636202 - DNA, 15 bp, Homo sapiens
aagaacttgaagatt

SEQ ID NO: 1636203 - DNA, 15 bp, Homo sapiens
gaagaacttgaagat

SEQ ID NO: 1636204 - DNA, 15 bp, Homo sapiens
agaagaacttgaaga

SEQ ID NO: 1636205 - DNA, 15 bp, Homo sapiens
cagaagaacttgaag

SEQ ID NO: 1636206 - DNA, 15 bp, Homo sapiens
acagaagaacttgaa

SEQ ID NO: 1636207 - DNA, 15 bp, Homo sapiens
tacagaagaacttga

SEQ ID NO: 1636208 - DNA, 15 bp, Homo sapiens
atacagaagaacttg

SEQ ID NO: 1636209 - DNA, 15 bp, Homo sapiens
gatacagaagaactt

SEQ ID NO: 1636210 - DNA, 15 bp, Homo sapiens
agatacagaagaact

SEQ ID NO: 1636211 - DNA, 15 bp, Homo sapiens
aagatacagaagaac

SEQ ID NO: 1636212 - DNA, 15 bp, Homo sapiens
aaagatacagaagaa

SEQ ID NO: 1636213 - DNA, 15 bp, Homo sapiens
caaagatacagaaga

SEQ ID NO: 1636214 - DNA, 15 bp, Homo sapiens
acaaagatacagaag

SEQ ID NO: 1636215 - DNA, 15 bp, Homo sapiens
aacaaagatacagaa

SEQ ID NO: 1636216 - DNA, 15 bp, Homo sapiens
aaacaaagatacaga

SEQ ID NO: 1636217 - DNA, 15 bp, Homo sapiens
aaaacaaagatacag

SEQ ID NO: 1636218 - DNA, 15 bp, Homo sapiens
taaaacaaagataca

SEQ ID NO: 1636219 - DNA, 15 bp, Homo sapiens
ataaaacaaagatac

SEQ ID NO: 1636220 - DNA, 15 bp, Homo sapiens
aataaaacaaagata

SEQ ID NO: 1636221 - DNA, 15 bp, Homo sapiens
aaataaaacaaagat

SEQ ID NO: 1636222 - DNA, 15 bp, Homo sapiens
aaaataaaacaaaga

SEQ ID NO: 1636223 - DNA, 15 bp, Homo sapiens
gaaaataaaacaaag

SEQ ID NO: 1636224 - DNA, 15 bp, Homo sapiens
agaaaataaaacaaa

SEQ ID NO: 1636225 - DNA, 15 bp, Homo sapiens
aagaaaataaaacaa

SEQ ID NO: 1636226 - DNA, 15 bp, Homo sapiens
aaagaaaataaaaca

SEQ ID NO: 1636227 - DNA, 15 bp, Homo sapiens
caaagaaaataaaac

SEQ ID NO: 1636228 - DNA, 15 bp, Homo sapiens
acaaagaaaataaaa

SEQ ID NO: 1636229 - DNA, 15 bp, Homo sapiens
aacaaagaaaataaa

SEQ ID NO: 1636230 - DNA, 15 bp, Homo sapiens
gaacaaagaaaataa

SEQ ID NO: 1636231 - DNA, 15 bp, Homo sapiens
agaacaaagaaaata

SEQ ID NO: 1636232 - DNA, 15 bp, Homo sapiens
aagaacaaagaaaat

SEQ ID NO: 1636233 - DNA, 15 bp, Homo sapiens
aaagaacaaagaaaa

SEQ ID NO: 1636234 - DNA, 15 bp, Homo sapiens
aaaagaacaaagaaa

SEQ ID NO: 1636235 - DNA, 15 bp, Homo sapiens
aaaaagaacaaagaa

SEQ ID NO: 1636236 - DNA, 15 bp, Homo sapiens
aaaaaagaacaaaga

SEQ ID NO: 1636237 - DNA, 15 bp, Homo sapiens
caaaaaagaacaaag

SEQ ID NO: 1636238 - DNA, 15 bp, Homo sapiens
acaaaaaagaacaaa

SEQ ID NO: 1636239 - DNA, 15 bp, Homo sapiens
gacaaaaaagaacaa

SEQ ID NO: 1636240 - DNA, 15 bp, Homo sapiens
agacaaaaaagaaca

SEQ ID NO: 1636241 - DNA, 15 bp, Homo sapiens
gagacaaaaaagaac

SEQ ID NO: 1636242 - DNA, 15 bp, Homo sapiens
tgagacaaaaaagaa

SEQ ID NO: 1636243 - DNA, 15 bp, Homo sapiens
atgagacaaaaaaga

SEQ ID NO: 1636244 - DNA, 15 bp, Homo sapiens
aatgagacaaaaaag

SEQ ID NO: 1636245 - DNA, 15 bp, Homo sapiens
aaatgagacaaaaaa

SEQ ID NO: 1636246 - DNA, 15 bp, Homo sapiens
gaaatgagacaaaaa

SEQ ID NO: 1636247 - DNA, 15 bp, Homo sapiens
ggaaatgagacaaaa

SEQ ID NO: 1636248 - DNA, 15 bp, Homo sapiens
aggaaatgagacaaa

SEQ ID NO: 1636249 - DNA, 15 bp, Homo sapiens
taggaaatgagacaa

SEQ ID NO: 1636250 - DNA, 15 bp, Homo sapiens
ataggaaatgagaca

SEQ ID NO: 1636251 - DNA, 15 bp, Homo sapiens
tataggaaatgagac

SEQ ID NO: 1636252 - DNA, 15 bp, Homo sapiens
gtataggaaatgaga

SEQ ID NO: 1636253 - DNA, 15 bp, Homo sapiens
agtataggaaatgag

SEQ ID NO: 1636254 - DNA, 15 bp, Homo sapiens
cagtataggaaatga

SEQ ID NO: 1636255 - DNA, 15 bp, Homo sapiens
acagtataggaaatg

SEQ ID NO: 1636256 - DNA, 15 bp, Homo sapiens
aacagtataggaaat

SEQ ID NO: 1636257 - DNA, 15 bp, Homo sapiens
aaacagtataggaaa

SEQ ID NO: 1636258 - DNA, 15 bp, Homo sapiens
aaaacagtataggaa

SEQ ID NO: 1636259 - DNA, 15 bp, Homo sapiens
aaaaacagtatagga

SEQ ID NO: 1636260 - DNA, 15 bp, Homo sapiens
taaaaacagtatagg

SEQ ID NO: 1636261 - DNA, 15 bp, Homo sapiens
ataaaaacagtatag

SEQ ID NO: 1636262 - DNA, 15 bp, Homo sapiens
aataaaaacagtata

SEQ ID NO: 1636263 - DNA, 15 bp, Homo sapiens
gaataaaaacagtat

SEQ ID NO: 1636264 - DNA, 15 bp, Homo sapiens
ggaataaaaacagta

SEQ ID NO: 1636265 - DNA, 15 bp, Homo sapiens
tggaataaaaacagt

SEQ ID NO: 1636266 - DNA, 15 bp, Homo sapiens
atggaataaaaacag

SEQ ID NO: 1636267 - DNA, 15 bp, Homo sapiens
tatggaataaaaaca

SEQ ID NO: 1636268 - DNA, 15 bp, Homo sapiens
gtatggaataaaaac

SEQ ID NO: 1636269 - DNA, 15 bp, Homo sapiens
agtatggaataaaaa

SEQ ID NO: 1636270 - DNA, 15 bp, Homo sapiens
aagtatggaataaaa

SEQ ID NO: 1636271 - DNA, 15 bp, Homo sapiens
aaagtatggaataaa

SEQ ID NO: 1636272 - DNA, 15 bp, Homo sapiens
caaagtatggaataa

SEQ ID NO: 1636273 - DNA, 15 bp, Homo sapiens
tcaaagtatggaata

SEQ ID NO: 1636274 - DNA, 15 bp, Homo sapiens
gtcaaagtatggaat

SEQ ID NO: 1636275 - DNA, 15 bp, Homo sapiens
tgtcaaagtatggaa

SEQ ID NO: 1636276 - DNA, 15 bp, Homo sapiens
ctgtcaaagtatgga

SEQ ID NO: 1636277 - DNA, 15 bp, Homo sapiens
actgtcaaagtatgg

SEQ ID NO: 1636278 - DNA, 15 bp, Homo sapiens
aactgtcaaagtatg

SEQ ID NO: 1636279 - DNA, 15 bp, Homo sapiens
gaactgtcaaagtat

SEQ ID NO: 1636280 - DNA, 15 bp, Homo sapiens
tgaactgtcaaagta

SEQ ID NO: 1636281 - DNA, 15 bp, Homo sapiens
ctgaactgtcaaagt

SEQ ID NO: 1636282 - DNA, 15 bp, Homo sapiens
actgaactgtcaaag

SEQ ID NO: 1636283 - DNA, 15 bp, Homo sapiens
cactgaactgtcaaa

SEQ ID NO: 1636284 - DNA, 15 bp, Homo sapiens
tcactgaactgtcaa

SEQ ID NO: 1636285 - DNA, 15 bp, Homo sapiens
ttcactgaactgtca

SEQ ID NO: 1636286 - DNA, 15 bp, Homo sapiens
gttcactgaactgtc

SEQ ID NO: 1636287 - DNA, 15 bp, Homo sapiens
agttcactgaactgt

SEQ ID NO: 1636288 - DNA, 15 bp, Homo sapiens
gagttcactgaactg

SEQ ID NO: 1636289 - DNA, 15 bp, Homo sapiens
ggagttcactgaact

SEQ ID NO: 1636290 - DNA, 15 bp, Homo sapiens
aggagttcactgaac

SEQ ID NO: 1636291 - DNA, 15 bp, Homo sapiens
aaggagttcactgaa

SEQ ID NO: 1636292 - DNA, 15 bp, Homo sapiens
aaaggagttcactga

SEQ ID NO: 1636293 - DNA, 15 bp, Homo sapiens
caaaggagttcactg

SEQ ID NO: 1636294 - DNA, 15 bp, Homo sapiens
tcaaaggagttcact

SEQ ID NO: 1636295 - DNA, 15 bp, Homo sapiens
atcaaaggagttcac

SEQ ID NO: 1636296 - DNA, 15 bp, Homo sapiens
tatcaaaggagttca

SEQ ID NO: 1636297 - DNA, 15 bp, Homo sapiens
ctatcaaaggagttc

SEQ ID NO: 1636298 - DNA, 15 bp, Homo sapiens
tctatcaaaggagtt

SEQ ID NO: 1636299 - DNA, 15 bp, Homo sapiens
atctatcaaaggagt

SEQ ID NO: 1636300 - DNA, 15 bp, Homo sapiens
gatctatcaaaggag

SEQ ID NO: 1636301 - DNA, 15 bp, Homo sapiens
ggatctatcaaagga

SEQ ID NO: 1636302 - DNA, 15 bp, Homo sapiens
gggatctatcaaagg

SEQ ID NO: 1636303 - DNA, 15 bp, Homo sapiens
tgggatctatcaaag

SEQ ID NO: 1636304 - DNA, 15 bp, Homo sapiens
ttgggatctatcaaa

SEQ ID NO: 1636305 - DNA, 15 bp, Homo sapiens
cttgggatctatcaa

SEQ ID NO: 1636306 - DNA, 15 bp, Homo sapiens
acttgggatctatca

SEQ ID NO: 1636307 - DNA, 15 bp, Homo sapiens
gacttgggatctatc

SEQ ID NO: 1636308 - DNA, 15 bp, Homo sapiens
ggacttgggatctat

SEQ ID NO: 1636309 - DNA, 15 bp, Homo sapiens
aggacttgggatcta

SEQ ID NO: 1636310 - DNA, 15 bp, Homo sapiens
gaggacttgggatct

SEQ ID NO: 1636311 - DNA, 15 bp, Homo sapiens
ggaggacttgggatc

SEQ ID NO: 1636312 - DNA, 15 bp, Homo sapiens
aggaggacttgggat

SEQ ID NO: 1636313 - DNA, 15 bp, Homo sapiens
aaggaggacttggga

SEQ ID NO: 1636314 - DNA, 15 bp, Homo sapiens
aaaggaggacttggg

SEQ ID NO: 1636315 - DNA, 15 bp, Homo sapiens
aaaaggaggacttgg

SEQ ID NO: 1636316 - DNA, 15 bp, Homo sapiens
aaaaaggaggacttg

SEQ ID NO: 1636317 - DNA, 15 bp, Homo sapiens
gaaaaaggaggactt

SEQ ID NO: 1636318 - DNA, 15 bp, Homo sapiens
tgaaaaaggaggact

SEQ ID NO: 1636319 - DNA, 15 bp, Homo sapiens
ttgaaaaaggaggac

SEQ ID NO: 1636320 - DNA, 15 bp, Homo sapiens
attgaaaaaggagga

SEQ ID NO: 1636321 - DNA, 15 bp, Homo sapiens
tattgaaaaaggagg

SEQ ID NO: 1636322 - DNA, 15 bp, Homo sapiens
atattgaaaaaggag

SEQ ID NO: 1636323 - DNA, 15 bp, Homo sapiens
aatattgaaaaagga

SEQ ID NO: 1636324 - DNA, 15 bp, Homo sapiens
aaatattgaaaaagg

SEQ ID NO: 1636325 - DNA, 15 bp, Homo sapiens
taaatattgaaaaag

SEQ ID NO: 1636326 - DNA, 15 bp, Homo sapiens
gtaaatattgaaaaa

SEQ ID NO: 1636327 - DNA, 15 bp, Homo sapiens
tgtaaatattgaaaa

SEQ ID NO: 1636328 - DNA, 15 bp, Homo sapiens
gtgtaaatattgaaa

SEQ ID NO: 1636329 - DNA, 15 bp, Homo sapiens
agtgtaaatattgaa

SEQ ID NO: 1636330 - DNA, 15 bp, Homo sapiens
aagtgtaaatattga

SEQ ID NO: 1636331 - DNA, 15 bp, Homo sapiens
taagtgtaaatattg

SEQ ID NO: 1636332 - DNA, 15 bp, Homo sapiens
ataagtgtaaatatt

SEQ ID NO: 1636333 - DNA, 15 bp, Homo sapiens
tataagtgtaaatat

SEQ ID NO: 1636334 - DNA, 15 bp, Homo sapiens
ttataagtgtaaata

SEQ ID NO: 1636335 - DNA, 15 bp, Homo sapiens
attataagtgtaaat

SEQ ID NO: 1636336 - DNA, 15 bp, Homo sapiens
gattataagtgtaaa

SEQ ID NO: 1636337 - DNA, 15 bp, Homo sapiens
tgattataagtgtaa

SEQ ID NO: 1636338 - DNA, 15 bp, Homo sapiens
atgattataagtgta

SEQ ID NO: 1636339 - DNA, 15 bp, Homo sapiens
aatgattataagtgt

SEQ ID NO: 1636340 - DNA, 15 bp, Homo sapiens
aaatgattataagtg

SEQ ID NO: 1636341 - DNA, 15 bp, Homo sapiens
aaaatgattataagt

SEQ ID NO: 1636342 - DNA, 15 bp, Homo sapiens
aaaaatgattataag

SEQ ID NO: 1636343 - DNA, 15 bp, Homo sapiens
caaaaatgattataa

SEQ ID NO: 1636344 - DNA, 15 bp, Homo sapiens
tcaaaaatgattata

SEQ ID NO: 1636345 - DNA, 15 bp, Homo sapiens
atcaaaaatgattat

SEQ ID NO: 1636346 - DNA, 15 bp, Homo sapiens
gatcaaaaatgatta

SEQ ID NO: 1636347 - DNA, 15 bp, Homo sapiens
tgatcaaaaatgatt

SEQ ID NO: 1636348 - DNA, 15 bp, Homo sapiens
gtgatcaaaaatgat

SEQ ID NO: 1636349 - DNA, 15 bp, Homo sapiens
agtgatcaaaaatga

SEQ ID NO: 1636350 - DNA, 15 bp, Homo sapiens
gagtgatcaaaaatg

SEQ ID NO: 1636351 - DNA, 15 bp, Homo sapiens
ggagtgatcaaaaat

SEQ ID NO: 1636352 - DNA, 15 bp, Homo sapiens
tggagtgatcaaaaa

SEQ ID NO: 1636353 - DNA, 15 bp, Homo sapiens
ttggagtgatcaaaa

SEQ ID NO: 1636354 - DNA, 15 bp, Homo sapiens
tttggagtgatcaaa

SEQ ID NO: 1636355 - DNA, 15 bp, Homo sapiens
ttttggagtgatcaa

SEQ ID NO: 1636356 - DNA, 15 bp, Homo sapiens
gttttggagtgatca

SEQ ID NO: 1636357 - DNA, 15 bp, Homo sapiens
agttttggagtgatc

SEQ ID NO: 1636358 - DNA, 15 bp, Homo sapiens
cagttttggagtgat

SEQ ID NO: 1636359 - DNA, 15 bp, Homo sapiens
tcagttttggagtga

SEQ ID NO: 1636360 - DNA, 15 bp, Homo sapiens
ctcagttttggagtg

SEQ ID NO: 1636361 - DNA, 15 bp, Homo sapiens
tctcagttttggagt

SEQ ID NO: 1636362 - DNA, 15 bp, Homo sapiens
ttctcagttttggag

SEQ ID NO: 1636363 - DNA, 15 bp, Homo sapiens
gttctcagttttgga

SEQ ID NO: 1636364 - DNA, 15 bp, Homo sapiens
agttctcagttttgg

SEQ ID NO: 1636365 - DNA, 15 bp, Homo sapiens
aagttctcagttttg

SEQ ID NO: 1636366 - DNA, 15 bp, Homo sapiens
aaagttctcagtttt

SEQ ID NO: 1636367 - DNA, 15 bp, Homo sapiens
caaagttctcagttt

SEQ ID NO: 1636368 - DNA, 15 bp, Homo sapiens
tcaaagttctcagtt

SEQ ID NO: 1636369 - DNA, 15 bp, Homo sapiens
ctcaaagttctcagt

SEQ ID NO: 1636370 - DNA, 15 bp, Homo sapiens
actcaaagttctcag

SEQ ID NO: 1636371 - DNA, 15 bp, Homo sapiens
cactcaaagttctca

SEQ ID NO: 1636372 - DNA, 15 bp, Homo sapiens
acactcaaagttctc

SEQ ID NO: 1636373 - DNA, 15 bp, Homo sapiens
tacactcaaagttct

SEQ ID NO: 1636374 - DNA, 15 bp, Homo sapiens
ctacactcaaagttc

SEQ ID NO: 1636375 - DNA, 15 bp, Homo sapiens
tctacactcaaagtt

SEQ ID NO: 1636376 - DNA, 15 bp, Homo sapiens
atctacactcaaagt

SEQ ID NO: 1636377 - DNA, 15 bp, Homo sapiens
aatctacactcaaag

SEQ ID NO: 1636378 - DNA, 15 bp, Homo sapiens
aaatctacactcaaa

SEQ ID NO: 1636379 - DNA, 15 bp, Homo sapiens
aaaatctacactcaa

SEQ ID NO: 1636380 - DNA, 15 bp, Homo sapiens
gaaaatctacactca

SEQ ID NO: 1636381 - DNA, 15 bp, Homo sapiens
agaaaatctacactc

SEQ ID NO: 1636382 - DNA, 15 bp, Homo sapiens
tagaaaatctacact

SEQ ID NO: 1636383 - DNA, 15 bp, Homo sapiens
ctagaaaatctacac

SEQ ID NO: 1636384 - DNA, 15 bp, Homo sapiens
cctagaaaatctaca

SEQ ID NO: 1636385 - DNA, 15 bp, Homo sapiens
gcctagaaaatctac

SEQ ID NO: 1636386 - DNA, 15 bp, Homo sapiens
agcctagaaaatcta

SEQ ID NO: 1636387 - DNA, 15 bp, Homo sapiens
aagcctagaaaatct

SEQ ID NO: 1636388 - DNA, 15 bp, Homo sapiens
gaagcctagaaaatc

SEQ ID NO: 1636389 - DNA, 15 bp, Homo sapiens
agaagcctagaaaat

SEQ ID NO: 1636390 - DNA, 15 bp, Homo sapiens
aagaagcctagaaaa

SEQ ID NO: 1636391 - DNA, 15 bp, Homo sapiens
taagaagcctagaaa

SEQ ID NO: 1636392 - DNA, 15 bp, Homo sapiens
ataagaagcctagaa

SEQ ID NO: 1636393 - DNA, 15 bp, Homo sapiens
aataagaagcctaga

SEQ ID NO: 1636394 - DNA, 15 bp, Homo sapiens
aaataagaagcctag

SEQ ID NO: 1636395 - DNA, 15 bp, Homo sapiens
aaaataagaagccta

SEQ ID NO: 1636396 - DNA, 15 bp, Homo sapiens
taaaataagaagcct

SEQ ID NO: 1636397 - DNA, 15 bp, Homo sapiens
ataaaataagaagcc

SEQ ID NO: 1636398 - DNA, 15 bp, Homo sapiens
aataaaataagaagc

SEQ ID NO: 1636399 - DNA, 15 bp, Homo sapiens
aaataaaataagaag

SEQ ID NO: 1636400 - DNA, 15 bp, Homo sapiens
aaaataaaataagaa

SEQ ID NO: 1636401 - DNA, 15 bp, Homo sapiens
aaaaataaaataaga

SEQ ID NO: 1636402 - DNA, 15 bp, Homo sapiens
taaaaataaaataag

SEQ ID NO: 1636403 - DNA, 15 bp, Homo sapiens
ctaaaaataaaataa

SEQ ID NO: 1636404 - DNA, 15 bp, Homo sapiens
tctaaaaataaaata

SEQ ID NO: 1636405 - DNA, 15 bp, Homo sapiens
gtctaaaaataaaat

SEQ ID NO: 1636406 - DNA, 15 bp, Homo sapiens
tgtctaaaaataaaa

SEQ ID NO: 1636407 - DNA, 15 bp, Homo sapiens
atgtctaaaaataaa

SEQ ID NO: 1636408 - DNA, 15 bp, Homo sapiens
aatgtctaaaaataa

SEQ ID NO: 1636409 - DNA, 15 bp, Homo sapiens
taatgtctaaaaata

SEQ ID NO: 1636410 - DNA, 15 bp, Homo sapiens
ataatgtctaaaaat

SEQ ID NO: 1636411 - DNA, 15 bp, Homo sapiens
tataatgtctaaaaa

SEQ ID NO: 1636412 - DNA, 15 bp, Homo sapiens
atataatgtctaaaa

SEQ ID NO: 1636413 - DNA, 15 bp, Homo sapiens
tatataatgtctaaa

SEQ ID NO: 1636414 - DNA, 15 bp, Homo sapiens
ctatataatgtctaa

SEQ ID NO: 1636415 - DNA, 15 bp, Homo sapiens
tctatataatgtcta

SEQ ID NO: 1636416 - DNA, 15 bp, Homo sapiens
ttctatataatgtct

SEQ ID NO: 1636417 - DNA, 15 bp, Homo sapiens
tttctatataatgtc

SEQ ID NO: 1636418 - DNA, 15 bp, Homo sapiens
ttttctatataatgt

SEQ ID NO: 1636419 - DNA, 15 bp, Homo sapiens
tttttctatataatg

SEQ ID NO: 1636420 - DNA, 15 bp, Homo sapiens
atttttctatataat

SEQ ID NO: 1636421 - DNA, 15 bp, Homo sapiens
aatttttctatataa

SEQ ID NO: 1636422 - DNA, 15 bp, Homo sapiens
taatttttctatata

SEQ ID NO: 1636423 - DNA, 15 bp, Homo sapiens
ctaatttttctatat

SEQ ID NO: 1636424 - DNA, 15 bp, Homo sapiens
tctaatttttctata

SEQ ID NO: 1636425 - DNA, 15 bp, Homo sapiens
ctctaatttttctat

SEQ ID NO: 1636426 - DNA, 15 bp, Homo sapiens
cctctaatttttcta

SEQ ID NO: 1636427 - DNA, 15 bp, Homo sapiens
ccctctaatttttct

SEQ ID NO: 1636428 - DNA, 15 bp, Homo sapiens
tccctctaatttttc

SEQ ID NO: 1636429 - DNA, 15 bp, Homo sapiens
ttccctctaattttt

SEQ ID NO: 1636430 - DNA, 15 bp, Homo sapiens
cttccctctaatttt

SEQ ID NO: 1636431 - DNA, 15 bp, Homo sapiens
ccttccctctaattt

SEQ ID NO: 1636432 - DNA, 15 bp, Homo sapiens
cccttccctctaatt

SEQ ID NO: 1636433 - DNA, 15 bp, Homo sapiens
tcccttccctctaat

SEQ ID NO: 1636434 - DNA, 15 bp, Homo sapiens
ttcccttccctctaa

SEQ ID NO: 1636435 - DNA, 15 bp, Homo sapiens
tttcccttccctcta

SEQ ID NO: 1636436 - DNA, 15 bp, Homo sapiens
ttttcccttccctct

SEQ ID NO: 1636437 - DNA, 15 bp, Homo sapiens
cttttcccttccctc

SEQ ID NO: 1636438 - DNA, 15 bp, Homo sapiens
tcttttcccttccct

SEQ ID NO: 1636439 - DNA, 15 bp, Homo sapiens
ttcttttcccttccc

SEQ ID NO: 1636440 - DNA, 15 bp, Homo sapiens
cttcttttcccttcc

SEQ ID NO: 1636441 - DNA, 15 bp, Homo sapiens
ccttcttttcccttc

SEQ ID NO: 1636442 - DNA, 15 bp, Homo sapiens
tccttcttttccctt

SEQ ID NO: 1636443 - DNA, 15 bp, Homo sapiens
atccttcttttccct

SEQ ID NO: 1636444 - DNA, 15 bp, Homo sapiens
catccttcttttccc

SEQ ID NO: 1636445 - DNA, 15 bp, Homo sapiens
ccatccttcttttcc

SEQ ID NO: 1636446 - DNA, 15 bp, Homo sapiens
gccatccttcttttc

SEQ ID NO: 1636447 - DNA, 15 bp, Homo sapiens
tgccatccttctttt

SEQ ID NO: 1636448 - DNA, 15 bp, Homo sapiens
ttgccatccttcttt

SEQ ID NO: 1636449 - DNA, 15 bp, Homo sapiens
gttgccatccttctt

SEQ ID NO: 1636450 - DNA, 15 bp, Homo sapiens
tgttgccatccttct

SEQ ID NO: 1636451 - DNA, 15 bp, Homo sapiens
atgttgccatccttc

SEQ ID NO: 1636452 - DNA, 15 bp, Homo sapiens
catgttgccatcctt

SEQ ID NO: 1636453 - DNA, 15 bp, Homo sapiens
ccatgttgccatcct

SEQ ID NO: 1636454 - DNA, 15 bp, Homo sapiens
accatgttgccatcc

SEQ ID NO: 1636455 - DNA, 15 bp, Homo sapiens
taccatgttgccatc

SEQ ID NO: 1636456 - DNA, 15 bp, Homo sapiens
ttaccatgttgccat

SEQ ID NO: 1636457 - DNA, 15 bp, Homo sapiens
gttaccatgttgcca

SEQ ID NO: 1636458 - DNA, 15 bp, Homo sapiens
agttaccatgttgcc

SEQ ID NO: 1636459 - DNA, 15 bp, Homo sapiens
cagttaccatgttgc

SEQ ID NO: 1636460 - DNA, 15 bp, Homo sapiens
ccagttaccatgttg

SEQ ID NO: 1636461 - DNA, 15 bp, Homo sapiens
cccagttaccatgtt

SEQ ID NO: 1636462 - DNA, 15 bp, Homo sapiens
tcccagttaccatgt

SEQ ID NO: 1636463 - DNA, 15 bp, Homo sapiens
gtcccagttaccatg

SEQ ID NO: 1636464 - DNA, 15 bp, Homo sapiens
tgtcccagttaccat

SEQ ID NO: 1636465 - DNA, 15 bp, Homo sapiens
ctgtcccagttacca

SEQ ID NO: 1636466 - DNA, 15 bp, Homo sapiens
actgtcccagttacc

SEQ ID NO: 1636467 - DNA, 15 bp, Homo sapiens
cactgtcccagttac

SEQ ID NO: 1636468 - DNA, 15 bp, Homo sapiens
acactgtcccagtta

SEQ ID NO: 1636469 - DNA, 15 bp, Homo sapiens
aacactgtcccagtt

SEQ ID NO: 1636470 - DNA, 15 bp, Homo sapiens
gaacactgtcccagt

SEQ ID NO: 1636471 - DNA, 15 bp, Homo sapiens
tgaacactgtcccag

SEQ ID NO: 1636472 - DNA, 15 bp, Homo sapiens
ttgaacactgtccca

SEQ ID NO: 1636473 - DNA, 15 bp, Homo sapiens
tttgaacactgtccc

SEQ ID NO: 1636474 - DNA, 15 bp, Homo sapiens
ttttgaacactgtcc

SEQ ID NO: 1636475 - DNA, 15 bp, Homo sapiens
cttttgaacactgtc

SEQ ID NO: 1636476 - DNA, 15 bp, Homo sapiens
ccttttgaacactgt

SEQ ID NO: 1636477 - DNA, 15 bp, Homo sapiens
accttttgaacactg

SEQ ID NO: 1636478 - DNA, 15 bp, Homo sapiens
gaccttttgaacact

SEQ ID NO: 1636479 - DNA, 15 bp, Homo sapiens
agaccttttgaacac

SEQ ID NO: 1636480 - DNA, 15 bp, Homo sapiens
tagaccttttgaaca

SEQ ID NO: 1636481 - DNA, 15 bp, Homo sapiens
ttagaccttttgaac

SEQ ID NO: 1636482 - DNA, 15 bp, Homo sapiens
cttagaccttttgaa

SEQ ID NO: 1636483 - DNA, 15 bp, Homo sapiens
acttagaccttttga

SEQ ID NO: 1636484 - DNA, 15 bp, Homo sapiens
gacttagaccttttg

SEQ ID NO: 1636485 - DNA, 15 bp, Homo sapiens
ggacttagacctttt

SEQ ID NO: 1636486 - DNA, 15 bp, Homo sapiens
aggacttagaccttt

SEQ ID NO: 1636487 - DNA, 15 bp, Homo sapiens
taggacttagacctt

SEQ ID NO: 1636488 - DNA, 15 bp, Homo sapiens
gtaggacttagacct

SEQ ID NO: 1636489 - DNA, 15 bp, Homo sapiens
agtaggacttagacc

SEQ ID NO: 1636490 - DNA, 15 bp, Homo sapiens
aagtaggacttagac

SEQ ID NO: 1636491 - DNA, 15 bp, Homo sapiens
gaagtaggacttaga

SEQ ID NO: 1636492 - DNA, 15 bp, Homo sapiens
agaagtaggacttag

SEQ ID NO: 1636493 - DNA, 15 bp, Homo sapiens
gagaagtaggactta

SEQ ID NO: 1636494 - DNA, 15 bp, Homo sapiens
tgagaagtaggactt

SEQ ID NO: 1636495 - DNA, 15 bp, Homo sapiens
gtgagaagtaggact

SEQ ID NO: 1636496 - DNA, 15 bp, Homo sapiens
agtgagaagtaggac

SEQ ID NO: 1636497 - DNA, 15 bp, Homo sapiens
gagtgagaagtagga

SEQ ID NO: 1636498 - DNA, 15 bp, Homo sapiens
ggagtgagaagtagg

SEQ ID NO: 1636499 - DNA, 15 bp, Homo sapiens
tggagtgagaagtag

SEQ ID NO: 1636500 - DNA, 15 bp, Homo sapiens
atggagtgagaagta

SEQ ID NO: 1636501 - DNA, 15 bp, Homo sapiens
tatggagtgagaagt

SEQ ID NO: 1636502 - DNA, 15 bp, Homo sapiens
gtatggagtgagaag

SEQ ID NO: 1636503 - DNA, 15 bp, Homo sapiens
tgtatggagtgagaa

SEQ ID NO: 1636504 - DNA, 15 bp, Homo sapiens
ttgtatggagtgaga

SEQ ID NO: 1636505 - DNA, 15 bp, Homo sapiens
tttgtatggagtgag

SEQ ID NO: 1636506 - DNA, 15 bp, Homo sapiens
atttgtatggagtga

SEQ ID NO: 1636507 - DNA, 15 bp, Homo sapiens
aatttgtatggagtg

SEQ ID NO: 1636508 - DNA, 15 bp, Homo sapiens
taatttgtatggagt

SEQ ID NO: 1636509 - DNA, 15 bp, Homo sapiens
ataatttgtatggag

SEQ ID NO: 1636510 - DNA, 15 bp, Homo sapiens
gataatttgtatgga

SEQ ID NO: 1636511 - DNA, 15 bp, Homo sapiens
agataatttgtatgg

SEQ ID NO: 1636512 - DNA, 15 bp, Homo sapiens
cagataatttgtatg

SEQ ID NO: 1636513 - DNA, 15 bp, Homo sapiens
gcagataatttgtat

SEQ ID NO: 1636514 - DNA, 15 bp, Homo sapiens
tgcagataatttgta

SEQ ID NO: 1636515 - DNA, 15 bp, Homo sapiens
ttgcagataatttgt

SEQ ID NO: 1636516 - DNA, 15 bp, Homo sapiens
attgcagataatttg

SEQ ID NO: 1636517 - DNA, 15 bp, Homo sapiens
aattgcagataattt

SEQ ID NO: 1636518 - DNA, 15 bp, Homo sapiens
aaattgcagataatt

SEQ ID NO: 1636519 - DNA, 15 bp, Homo sapiens
aaaattgcagataat

SEQ ID NO: 1636520 - DNA, 15 bp, Homo sapiens
aaaaattgcagataa

SEQ ID NO: 1636521 - DNA, 15 bp, Homo sapiens
aaaaaattgcagata

SEQ ID NO: 1636522 - DNA, 15 bp, Homo sapiens
aaaaaaattgcagat

SEQ ID NO: 1636523 - DNA, 15 bp, Homo sapiens
taaaaaaattgcaga

SEQ ID NO: 1636524 - DNA, 15 bp, Homo sapiens
ataaaaaaattgcag

SEQ ID NO: 1636525 - DNA, 15 bp, Homo sapiens
aataaaaaaattgca

SEQ ID NO: 1636526 - DNA, 15 bp, Homo sapiens
aaataaaaaaattgc

SEQ ID NO: 1636527 - DNA, 15 bp, Homo sapiens
aaaataaaaaaattg

SEQ ID NO: 1636528 - DNA, 15 bp, Homo sapiens
aaaaataaaaaaatt

SEQ ID NO: 1636529 - DNA, 15 bp, Homo sapiens
caaaaataaaaaaat

SEQ ID NO: 1636530 - DNA, 15 bp, Homo sapiens
tgtctcaaaaataaa

SEQ ID NO: 1636531 - DNA, 15 bp, Homo sapiens
ctgtctcaaaaataa

SEQ ID NO: 1636532 - DNA, 15 bp, Homo sapiens
cctgtctcaaaaata

SEQ ID NO: 1636533 - DNA, 15 bp, Homo sapiens
gcctgtctcaaaaat

SEQ ID NO: 1636534 - DNA, 15 bp, Homo sapiens
taagagcctgtctca

SEQ ID NO: 1636535 - DNA, 15 bp, Homo sapiens
ataagagcctgtctc

SEQ ID NO: 1636536 - DNA, 15 bp, Homo sapiens
gataagagcctgtct

SEQ ID NO: 1636537 - DNA, 15 bp, Homo sapiens
agataagagcctgtc

SEQ ID NO: 1636538 - DNA, 15 bp, Homo sapiens
gagataagagcctgt

SEQ ID NO: 1636539 - DNA, 15 bp, Homo sapiens
agagataagagcctg

SEQ ID NO: 1636540 - DNA, 15 bp, Homo sapiens
gagagataagagcct

SEQ ID NO: 1636541 - DNA, 15 bp, Homo sapiens
tgagagataagagcc

SEQ ID NO: 1636542 - DNA, 15 bp, Homo sapiens
gtgagagataagagc

SEQ ID NO: 1636543 - DNA, 15 bp, Homo sapiens
ggtgagagataagag

SEQ ID NO: 1636544 - DNA, 15 bp, Homo sapiens
aggtgagagataaga

SEQ ID NO: 1636545 - DNA, 15 bp, Homo sapiens
caggtgagagataag

SEQ ID NO: 1636546 - DNA, 15 bp, Homo sapiens
cccaggtgagagata

SEQ ID NO: 1636547 - DNA, 15 bp, Homo sapiens
gcccaggtgagagat

SEQ ID NO: 1636548 - DNA, 15 bp, Homo sapiens
agcccaggtgagaga

SEQ ID NO: 1636549 - DNA, 15 bp, Homo sapiens
tagcccaggtgagag

SEQ ID NO: 1636550 - DNA, 15 bp, Homo sapiens
ctagcccaggtgaga

SEQ ID NO: 1636551 - DNA, 15 bp, Homo sapiens
tctagcccaggtgag

SEQ ID NO: 1636552 - DNA, 15 bp, Homo sapiens
ctctagcccaggtga

SEQ ID NO: 1636553 - DNA, 15 bp, Homo sapiens
actctagcccaggtg

SEQ ID NO: 1636554 - DNA, 15 bp, Homo sapiens
cactctagcccaggt

SEQ ID NO: 1636555 - DNA, 15 bp, Homo sapiens
gcactctagcccagg

SEQ ID NO: 1636556 - DNA, 15 bp, Homo sapiens
tgcactctagcccag

SEQ ID NO: 1636557 - DNA, 15 bp, Homo sapiens
ctgcactctagccca

SEQ ID NO: 1636558 - DNA, 15 bp, Homo sapiens
actgcactctagccc

SEQ ID NO: 1636559 - DNA, 15 bp, Homo sapiens
gtgccactgcactct

SEQ ID NO: 1636560 - DNA, 15 bp, Homo sapiens
atgattgtgccactg

SEQ ID NO: 1636561 - DNA, 15 bp, Homo sapiens
tatgattgtgccact

SEQ ID NO: 1636562 - DNA, 15 bp, Homo sapiens
ctatgattgtgccac

SEQ ID NO: 1636563 - DNA, 15 bp, Homo sapiens
gctatgattgtgcca

SEQ ID NO: 1636564 - DNA, 15 bp, Homo sapiens
agctatgattgtgcc

SEQ ID NO: 1636565 - DNA, 15 bp, Homo sapiens
gagctatgattgtgc

SEQ ID NO: 1636566 - DNA, 15 bp, Homo sapiens
tgagctatgattgtg

SEQ ID NO: 1636567 - DNA, 15 bp, Homo sapiens
tagtgagctatgatt

SEQ ID NO: 1636568 - DNA, 15 bp, Homo sapiens
atagtgagctatgat

SEQ ID NO: 1636569 - DNA, 15 bp, Homo sapiens
tatagtgagctatga

SEQ ID NO: 1636570 - DNA, 15 bp, Homo sapiens
ttatagtgagctatg

SEQ ID NO: 1636571 - DNA, 15 bp, Homo sapiens
gttatagtgagctat

SEQ ID NO: 1636572 - DNA, 15 bp, Homo sapiens
ggttatagtgagcta

SEQ ID NO: 1636573 - DNA, 15 bp, Homo sapiens
aggttatagtgagct

SEQ ID NO: 1636574 - DNA, 15 bp, Homo sapiens
aaggttatagtgagc

SEQ ID NO: 1636575 - DNA, 15 bp, Homo sapiens
caaggttatagtgag

SEQ ID NO: 1636576 - DNA, 15 bp, Homo sapiens
tcaaggttatagtga

SEQ ID NO: 1636577 - DNA, 15 bp, Homo sapiens
ttcaaggttatagtg

SEQ ID NO: 1636578 - DNA, 15 bp, Homo sapiens
gttcaaggttatagt

SEQ ID NO: 1636579 - DNA, 15 bp, Homo sapiens
agttcaaggttatag

SEQ ID NO: 1636580 - DNA, 15 bp, Homo sapiens
gagttcaaggttata

SEQ ID NO: 1636581 - DNA, 15 bp, Homo sapiens
ggagttcaaggttat

SEQ ID NO: 1636582 - DNA, 15 bp, Homo sapiens
tggagttcaaggtta

SEQ ID NO: 1636583 - DNA, 15 bp, Homo sapiens
ctggagttcaaggtt

SEQ ID NO: 1636584 - DNA, 15 bp, Homo sapiens
cctggagttcaaggt

SEQ ID NO: 1636585 - DNA, 15 bp, Homo sapiens
ccctggagttcaagg

SEQ ID NO: 1636586 - DNA, 15 bp, Homo sapiens
gccctggagttcaag

SEQ ID NO: 1636587 - DNA, 15 bp, Homo sapiens
agccctggagttcaa

SEQ ID NO: 1636588 - DNA, 15 bp, Homo sapiens
gagccctggagttca

SEQ ID NO: 1636589 - DNA, 15 bp, Homo sapiens
tgagccctggagttc

SEQ ID NO: 1636590 - DNA, 15 bp, Homo sapiens
ccttgagccctggag

SEQ ID NO: 1636591 - DNA, 15 bp, Homo sapiens
cccttgagccctgga

SEQ ID NO: 1636592 - DNA, 15 bp, Homo sapiens
tcccttgagccctgg

SEQ ID NO: 1636593 - DNA, 15 bp, Homo sapiens
atcccttgagccctg

SEQ ID NO: 1636594 - DNA, 15 bp, Homo sapiens
gatcccttgagccct

SEQ ID NO: 1636595 - DNA, 15 bp, Homo sapiens
tggaaggatcccttg

SEQ ID NO: 1636596 - DNA, 15 bp, Homo sapiens
atggaaggatccctt

SEQ ID NO: 1636597 - DNA, 15 bp, Homo sapiens
aatggaaggatccct

SEQ ID NO: 1636598 - DNA, 15 bp, Homo sapiens
aaatggaaggatccc

SEQ ID NO: 1636599 - DNA, 15 bp, Homo sapiens
gaaatggaaggatcc

SEQ ID NO: 1636600 - DNA, 15 bp, Homo sapiens
cgaaatggaaggatc

SEQ ID NO: 1636601 - DNA, 15 bp, Homo sapiens
ccgaaatggaaggat

SEQ ID NO: 1636602 - DNA, 15 bp, Homo sapiens
gccgaaatggaagga

SEQ ID NO: 1636603 - DNA, 15 bp, Homo sapiens
ggccgaaatggaagg

SEQ ID NO: 1636604 - DNA, 15 bp, Homo sapiens
aggccgaaatggaag

SEQ ID NO: 1636605 - DNA, 15 bp, Homo sapiens
gaggccgaaatggaa

SEQ ID NO: 1636606 - DNA, 15 bp, Homo sapiens
ggaggccgaaatgga

SEQ ID NO: 1636607 - DNA, 15 bp, Homo sapiens
gggaggccgaaatgg

SEQ ID NO: 1636608 - DNA, 15 bp, Homo sapiens
cgggaggccgaaatg

SEQ ID NO: 1636609 - DNA, 15 bp, Homo sapiens
tcgggaggccgaaat

SEQ ID NO: 1636610 - DNA, 15 bp, Homo sapiens
ctcgggaggccgaaa

SEQ ID NO: 1636611 - DNA, 15 bp, Homo sapiens
actcgggaggccgaa

SEQ ID NO: 1636612 - DNA, 15 bp, Homo sapiens
tactcgggaggccga

SEQ ID NO: 1636613 - DNA, 15 bp, Homo sapiens
ctactcgggaggccg

SEQ ID NO: 1636614 - DNA, 15 bp, Homo sapiens
actactcgggaggcc

SEQ ID NO: 1636615 - DNA, 15 bp, Homo sapiens
taactactcgggagg

SEQ ID NO: 1636616 - DNA, 15 bp, Homo sapiens
ctaactactcgggag

SEQ ID NO: 1636617 - DNA, 15 bp, Homo sapiens
cctaactactcggga

SEQ ID NO: 1636618 - DNA, 15 bp, Homo sapiens
tcctaactactcggg

SEQ ID NO: 1636619 - DNA, 15 bp, Homo sapiens
gtcctaactactcgg

SEQ ID NO: 1636620 - DNA, 15 bp, Homo sapiens
agtcctaactactcg

SEQ ID NO: 1636621 - DNA, 15 bp, Homo sapiens
tagtcctaactactc

SEQ ID NO: 1636622 - DNA, 15 bp, Homo sapiens
gtagtcctaactact

SEQ ID NO: 1636623 - DNA, 15 bp, Homo sapiens
tgtagtcctaactac

SEQ ID NO: 1636624 - DNA, 15 bp, Homo sapiens
ctgtagtcctaacta

SEQ ID NO: 1636625 - DNA, 15 bp, Homo sapiens
cctgtagtcctaact

SEQ ID NO: 1636626 - DNA, 15 bp, Homo sapiens
acctgtagtcctaac

SEQ ID NO: 1636627 - DNA, 15 bp, Homo sapiens
cacctgtagtcctaa

SEQ ID NO: 1636628 - DNA, 15 bp, Homo sapiens
acacctgtagtccta

SEQ ID NO: 1636629 - DNA, 15 bp, Homo sapiens
cacacctgtagtcct

SEQ ID NO: 1636630 - DNA, 15 bp, Homo sapiens
acacacctgtagtcc

SEQ ID NO: 1636631 - DNA, 15 bp, Homo sapiens
cacacacctgtagtc

SEQ ID NO: 1636632 - DNA, 15 bp, Homo sapiens
gcacacacctgtagt

SEQ ID NO: 1636633 - DNA, 15 bp, Homo sapiens
ggcacacacctgtag

SEQ ID NO: 1636634 - DNA, 15 bp, Homo sapiens
tggcacacacctgta

SEQ ID NO: 1636635 - DNA, 15 bp, Homo sapiens
gtggcacacacctgt

SEQ ID NO: 1636636 - DNA, 15 bp, Homo sapiens
agtggcacacacctg

SEQ ID NO: 1636637 - DNA, 15 bp, Homo sapiens
tagtggcacacacct

SEQ ID NO: 1636638 - DNA, 15 bp, Homo sapiens
gtagtggcacacacc

SEQ ID NO: 1636639 - DNA, 15 bp, Homo sapiens
tgtagtggcacacac

SEQ ID NO: 1636640 - DNA, 15 bp, Homo sapiens
gtgtagtggcacaca

SEQ ID NO: 1636641 - DNA, 15 bp, Homo sapiens
tgtgtagtggcacac

SEQ ID NO: 1636642 - DNA, 15 bp, Homo sapiens
gtgtgtagtggcaca

SEQ ID NO: 1636643 - DNA, 15 bp, Homo sapiens
tgtgtgtagtggcac

SEQ ID NO: 1636644 - DNA, 15 bp, Homo sapiens
ctgtgtgtagtggca

SEQ ID NO: 1636645 - DNA, 15 bp, Homo sapiens
gctgtgtgtagtggc

SEQ ID NO: 1636646 - DNA, 15 bp, Homo sapiens
agctgtgtgtagtgg

SEQ ID NO: 1636647 - DNA, 15 bp, Homo sapiens
tagctgtgtgtagtg

SEQ ID NO: 1636648 - DNA, 15 bp, Homo sapiens
ctagctgtgtgtagt

SEQ ID NO: 1636649 - DNA, 15 bp, Homo sapiens
actagctgtgtgtag

SEQ ID NO: 1636650 - DNA, 15 bp, Homo sapiens
aactagctgtgtgta

SEQ ID NO: 1636651 - DNA, 15 bp, Homo sapiens
aaactagctgtgtgt

SEQ ID NO: 1636652 - DNA, 15 bp, Homo sapiens
aaaactagctgtgtg

SEQ ID NO: 1636653 - DNA, 15 bp, Homo sapiens
aaaaactagctgtgt

SEQ ID NO: 1636654 - DNA, 15 bp, Homo sapiens
taaaaactagctgtg

SEQ ID NO: 1636655 - DNA, 15 bp, Homo sapiens
ttaaaaactagctgt

SEQ ID NO: 1636656 - DNA, 15 bp, Homo sapiens
attaaaaactagctg

SEQ ID NO: 1636657 - DNA, 15 bp, Homo sapiens
aattaaaaactagct

SEQ ID NO: 1636658 - DNA, 15 bp, Homo sapiens
aaattaaaaactagc

SEQ ID NO: 1636659 - DNA, 15 bp, Homo sapiens
aaaattaaaaactag

SEQ ID NO: 1636660 - DNA, 15 bp, Homo sapiens
aaaaaattaaaaact

SEQ ID NO: 1636661 - DNA, 15 bp, Homo sapiens
aaaaaaattaaaaac

SEQ ID NO: 1636662 - DNA, 15 bp, Homo sapiens
taaaaaaaaattaaa

SEQ ID NO: 1636663 - DNA, 15 bp, Homo sapiens
ataaaaaaaaattaa

SEQ ID NO: 1636664 - DNA, 15 bp, Homo sapiens
aataaaaaaaaatta

SEQ ID NO: 1636665 - DNA, 15 bp, Homo sapiens
aaataaaaaaaaatt

SEQ ID NO: 1636666 - DNA, 15 bp, Homo sapiens
aaaataaaaaaaaat

SEQ ID NO: 1636667 - DNA, 15 bp, Homo sapiens
gaaaataaaaaaaaa

SEQ ID NO: 1636668 - DNA, 15 bp, Homo sapiens
tgaaaataaaaaaaa

SEQ ID NO: 1636669 - DNA, 15 bp, Homo sapiens
atgaaaataaaaaaa

SEQ ID NO: 1636670 - DNA, 15 bp, Homo sapiens
tatgaaaataaaaaa

SEQ ID NO: 1636671 - DNA, 15 bp, Homo sapiens
ctatgaaaataaaaa

SEQ ID NO: 1636672 - DNA, 15 bp, Homo sapiens
tctatgaaaataaaa

SEQ ID NO: 1636673 - DNA, 15 bp, Homo sapiens
gtctatgaaaataaa

SEQ ID NO: 1636674 - DNA, 15 bp, Homo sapiens
tgtctatgaaaataa

SEQ ID NO: 1636675 - DNA, 15 bp, Homo sapiens
gtgtctatgaaaata

SEQ ID NO: 1636676 - DNA, 15 bp, Homo sapiens
tgtgtctatgaaaat

SEQ ID NO: 1636677 - DNA, 15 bp, Homo sapiens
ctgtgtctatgaaaa

SEQ ID NO: 1636678 - DNA, 15 bp, Homo sapiens
cctgtgtctatgaaa

SEQ ID NO: 1636679 - DNA, 15 bp, Homo sapiens
ccctgtgtctatgaa

SEQ ID NO: 1636680 - DNA, 15 bp, Homo sapiens
accctgtgtctatga

SEQ ID NO: 1636681 - DNA, 15 bp, Homo sapiens
gaccctgtgtctatg

SEQ ID NO: 1636682 - DNA, 15 bp, Homo sapiens
agaccctgtgtctat

SEQ ID NO: 1636683 - DNA, 15 bp, Homo sapiens
gagaccctgtgtcta

SEQ ID NO: 1636684 - DNA, 15 bp, Homo sapiens
tgagaccctgtgtct

SEQ ID NO: 1636685 - DNA, 15 bp, Homo sapiens
gtgagaccctgtgtc

SEQ ID NO: 1636686 - DNA, 15 bp, Homo sapiens
agtgagaccctgtgt

SEQ ID NO: 1636687 - DNA, 15 bp, Homo sapiens
tagtgagaccctgtg

SEQ ID NO: 1636688 - DNA, 15 bp, Homo sapiens
agcaacatagtgaga

SEQ ID NO: 1636689 - DNA, 15 bp, Homo sapiens
gagcaacatagtgag

SEQ ID NO: 1636690 - DNA, 15 bp, Homo sapiens
tgagcaacatagtga

SEQ ID NO: 1636691 - DNA, 15 bp, Homo sapiens
ttgagcaacatagtg

SEQ ID NO: 1636692 - DNA, 15 bp, Homo sapiens
tttgagcaacatagt

SEQ ID NO: 1636693 - DNA, 15 bp, Homo sapiens
gtttgagcaacatag

SEQ ID NO: 1636694 - DNA, 15 bp, Homo sapiens
agtttgagcaacata

SEQ ID NO: 1636695 - DNA, 15 bp, Homo sapiens
cagtttgagcaacat

SEQ ID NO: 1636696 - DNA, 15 bp, Homo sapiens
ccagtttgagcaaca

SEQ ID NO: 1636697 - DNA, 15 bp, Homo sapiens
accagtttgagcaac

SEQ ID NO: 1636698 - DNA, 15 bp, Homo sapiens
gaccagtttgagcaa

SEQ ID NO: 1636699 - DNA, 15 bp, Homo sapiens
agaccagtttgagca

SEQ ID NO: 1636700 - DNA, 15 bp, Homo sapiens
aagaccagtttgagc

SEQ ID NO: 1636701 - DNA, 15 bp, Homo sapiens
caagaccagtttgag

SEQ ID NO: 1636702 - DNA, 15 bp, Homo sapiens
tcaagaccagtttga

SEQ ID NO: 1636703 - DNA, 15 bp, Homo sapiens
ttcaagaccagtttg

SEQ ID NO: 1636704 - DNA, 15 bp, Homo sapiens
gttcaagaccagttt

SEQ ID NO: 1636705 - DNA, 15 bp, Homo sapiens
agttcaagaccagtt

SEQ ID NO: 1636706 - DNA, 15 bp, Homo sapiens
gagttcaagaccagt

SEQ ID NO: 1636707 - DNA, 15 bp, Homo sapiens
gggccaggagttcaa

SEQ ID NO: 1636708 - DNA, 15 bp, Homo sapiens
ggggccaggagttca

SEQ ID NO: 1636709 - DNA, 15 bp, Homo sapiens
tggggccaggagttc

SEQ ID NO: 1636710 - DNA, 15 bp, Homo sapiens
gcttggggccaggag

SEQ ID NO: 1636711 - DNA, 15 bp, Homo sapiens
tgcttggggccagga

SEQ ID NO: 1636712 - DNA, 15 bp, Homo sapiens
ttgcttggggccagg

SEQ ID NO: 1636713 - DNA, 15 bp, Homo sapiens
attgcttggggccag

SEQ ID NO: 1636714 - DNA, 15 bp, Homo sapiens
gattgcttggggcca

SEQ ID NO: 1636715 - DNA, 15 bp, Homo sapiens
ggattgcttggggcc

SEQ ID NO: 1636716 - DNA, 15 bp, Homo sapiens
aggattgcttggggc

SEQ ID NO: 1636717 - DNA, 15 bp, Homo sapiens
gaggattgcttgggg

SEQ ID NO: 1636718 - DNA, 15 bp, Homo sapiens
ggaggattgcttggg

SEQ ID NO: 1636719 - DNA, 15 bp, Homo sapiens
aggaggattgcttgg

SEQ ID NO: 1636720 - DNA, 15 bp, Homo sapiens
tagaactttgggagg

SEQ ID NO: 1636721 - DNA, 15 bp, Homo sapiens
ctagaactttgggag

SEQ ID NO: 1636722 - DNA, 15 bp, Homo sapiens
tctagaactttggga

SEQ ID NO: 1636723 - DNA, 15 bp, Homo sapiens
ttctagaactttggg

SEQ ID NO: 1636724 - DNA, 15 bp, Homo sapiens
attctagaactttgg

SEQ ID NO: 1636725 - DNA, 15 bp, Homo sapiens
aattctagaactttg

SEQ ID NO: 1636726 - DNA, 15 bp, Homo sapiens
caattctagaacttt

SEQ ID NO: 1636727 - DNA, 15 bp, Homo sapiens
acaattctagaactt

SEQ ID NO: 1636728 - DNA, 15 bp, Homo sapiens
aacaattctagaact

SEQ ID NO: 1636729 - DNA, 15 bp, Homo sapiens
taacaattctagaac

SEQ ID NO: 1636730 - DNA, 15 bp, Homo sapiens
gtaacaattctagaa

SEQ ID NO: 1636731 - DNA, 15 bp, Homo sapiens
tgtaacaattctaga

SEQ ID NO: 1636732 - DNA, 15 bp, Homo sapiens
ctgtaacaattctag

SEQ ID NO: 1636733 - DNA, 15 bp, Homo sapiens
cctgtaacaattcta

SEQ ID NO: 1636734 - DNA, 15 bp, Homo sapiens
tcctgtaacaattct

SEQ ID NO: 1636735 - DNA, 15 bp, Homo sapiens
ttcctgtaacaattc

SEQ ID NO: 1636736 - DNA, 15 bp, Homo sapiens
tttcctgtaacaatt

SEQ ID NO: 1636737 - DNA, 15 bp, Homo sapiens
ctttcctgtaacaat

SEQ ID NO: 1636738 - DNA, 15 bp, Homo sapiens
tctttcctgtaacaa

SEQ ID NO: 1636739 - DNA, 15 bp, Homo sapiens
ctctttcctgtaaca

SEQ ID NO: 1636740 - DNA, 15 bp, Homo sapiens
cctctttcctgtaac

SEQ ID NO: 1636741 - DNA, 15 bp, Homo sapiens
acctctttcctgtaa

SEQ ID NO: 1636742 - DNA, 15 bp, Homo sapiens
gacctctttcctgta

SEQ ID NO: 1636743 - DNA, 15 bp, Homo sapiens
ggacctctttcctgt

SEQ ID NO: 1636744 - DNA, 15 bp, Homo sapiens
gggacctctttcctg

SEQ ID NO: 1636745 - DNA, 15 bp, Homo sapiens
tgggacctctttcct

SEQ ID NO: 1636746 - DNA, 15 bp, Homo sapiens
ttgggacctctttcc

SEQ ID NO: 1636747 - DNA, 15 bp, Homo sapiens
attgggacctctttc

SEQ ID NO: 1636748 - DNA, 15 bp, Homo sapiens
gattgggacctcttt

SEQ ID NO: 1636749 - DNA, 15 bp, Homo sapiens
ggattgggacctctt

SEQ ID NO: 1636750 - DNA, 15 bp, Homo sapiens
tggattgggacctct

SEQ ID NO: 1636751 - DNA, 15 bp, Homo sapiens
ctggattgggacctc

SEQ ID NO: 1636752 - DNA, 15 bp, Homo sapiens
cctggattgggacct

SEQ ID NO: 1636753 - DNA, 15 bp, Homo sapiens
gcctggattgggacc

SEQ ID NO: 1636754 - DNA, 15 bp, Homo sapiens
ggcctggattgggac

SEQ ID NO: 1636755 - DNA, 15 bp, Homo sapiens
gggcctggattggga

SEQ ID NO: 1636756 - DNA, 15 bp, Homo sapiens
tgggcctggattggg

SEQ ID NO: 1636757 - DNA, 15 bp, Homo sapiens
ttgggcctggattgg

SEQ ID NO: 1636758 - DNA, 15 bp, Homo sapiens
tttgggcctggattg

SEQ ID NO: 1636759 - DNA, 15 bp, Homo sapiens
ctttgggcctggatt

SEQ ID NO: 1636760 - DNA, 15 bp, Homo sapiens
tctttgggcctggat

SEQ ID NO: 1636761 - DNA, 15 bp, Homo sapiens
ctctttgggcctgga

SEQ ID NO: 1636762 - DNA, 15 bp, Homo sapiens
tctctttgggcctgg

SEQ ID NO: 1636763 - DNA, 15 bp, Homo sapiens
atctctttgggcctg

SEQ ID NO: 1636764 - DNA, 15 bp, Homo sapiens
aatctctttgggcct

SEQ ID NO: 1636765 - DNA, 15 bp, Homo sapiens
aaatctctttgggcc

SEQ ID NO: 1636766 - DNA, 15 bp, Homo sapiens
aaaatctctttgggc

SEQ ID NO: 1636767 - DNA, 15 bp, Homo sapiens
taaaatctctttggg

SEQ ID NO: 1636768 - DNA, 15 bp, Homo sapiens
ataaaatctctttgg

SEQ ID NO: 1636769 - DNA, 15 bp, Homo sapiens
aataaaatctctttg

SEQ ID NO: 1636770 - DNA, 15 bp, Homo sapiens
aaataaaatctcttt

SEQ ID NO: 1636771 - DNA, 15 bp, Homo sapiens
taaataaaatctctt

SEQ ID NO: 1636772 - DNA, 15 bp, Homo sapiens
ataaataaaatctct

SEQ ID NO: 1636773 - DNA, 15 bp, Homo sapiens
cataaataaaatctc

SEQ ID NO: 1636774 - DNA, 15 bp, Homo sapiens
acataaataaaatct

SEQ ID NO: 1636775 - DNA, 15 bp, Homo sapiens
tacataaataaaatc

SEQ ID NO: 1636776 - DNA, 15 bp, Homo sapiens
gtacataaataaaat

SEQ ID NO: 1636777 - DNA, 15 bp, Homo sapiens
agtacataaataaaa

SEQ ID NO: 1636778 - DNA, 15 bp, Homo sapiens
tagtacataaataaa

SEQ ID NO: 1636779 - DNA, 15 bp, Homo sapiens
ctagtacataaataa

SEQ ID NO: 1636780 - DNA, 15 bp, Homo sapiens
actagtacataaata

SEQ ID NO: 1636781 - DNA, 15 bp, Homo sapiens
cactagtacataaat

SEQ ID NO: 1636782 - DNA, 15 bp, Homo sapiens
acactagtacataaa

SEQ ID NO: 1636783 - DNA, 15 bp, Homo sapiens
cacactagtacataa

SEQ ID NO: 1636784 - DNA, 15 bp, Homo sapiens
ccacactagtacata

SEQ ID NO: 1636785 - DNA, 15 bp, Homo sapiens
tccacactagtacat

SEQ ID NO: 1636786 - DNA, 15 bp, Homo sapiens
ctccacactagtaca

SEQ ID NO: 1636787 - DNA, 15 bp, Homo sapiens
gctccacactagtac

SEQ ID NO: 1636788 - DNA, 15 bp, Homo sapiens
ggctccacactagta

SEQ ID NO: 1636789 - DNA, 15 bp, Homo sapiens
aggctccacactagt

SEQ ID NO: 1636790 - DNA, 15 bp, Homo sapiens
taggctccacactag

SEQ ID NO: 1636791 - DNA, 15 bp, Homo sapiens
ctaggctccacacta

SEQ ID NO: 1636792 - DNA, 15 bp, Homo sapiens
gctaggctccacact

SEQ ID NO: 1636793 - DNA, 15 bp, Homo sapiens
ggctaggctccacac

SEQ ID NO: 1636794 - DNA, 15 bp, Homo sapiens
aggctaggctccaca

SEQ ID NO: 1636795 - DNA, 15 bp, Homo sapiens
taggctaggctccac

SEQ ID NO: 1636796 - DNA, 15 bp, Homo sapiens
ctaggctaggctcca

SEQ ID NO: 1636797 - DNA, 15 bp, Homo sapiens
cctaggctaggctcc

SEQ ID NO: 1636798 - DNA, 15 bp, Homo sapiens
tcctaggctaggctc

SEQ ID NO: 1636799 - DNA, 15 bp, Homo sapiens
gtcctaggctaggct

SEQ ID NO: 1636800 - DNA, 15 bp, Homo sapiens
tgtcctaggctaggc

SEQ ID NO: 1636801 - DNA, 15 bp, Homo sapiens
gtgtcctaggctagg

SEQ ID NO: 1636802 - DNA, 15 bp, Homo sapiens
tgtgtcctaggctag

SEQ ID NO: 1636803 - DNA, 15 bp, Homo sapiens
atgtgtcctaggcta

SEQ ID NO: 1636804 - DNA, 15 bp, Homo sapiens
gatgtgtcctaggct

SEQ ID NO: 1636805 - DNA, 15 bp, Homo sapiens
tgatgtgtcctaggc

SEQ ID NO: 1636806 - DNA, 15 bp, Homo sapiens
ttgatgtgtcctagg

SEQ ID NO: 1636807 - DNA, 15 bp, Homo sapiens
cttgatgtgtcctag

SEQ ID NO: 1636808 - DNA, 15 bp, Homo sapiens
gcttgatgtgtccta

SEQ ID NO: 1636809 - DNA, 15 bp, Homo sapiens
tgcttgatgtgtcct

SEQ ID NO: 1636810 - DNA, 15 bp, Homo sapiens
ctgcttgatgtgtcc

SEQ ID NO: 1636811 - DNA, 15 bp, Homo sapiens
tctgcttgatgtgtc

SEQ ID NO: 1636812 - DNA, 15 bp, Homo sapiens
ttctgcttgatgtgt

SEQ ID NO: 1636813 - DNA, 15 bp, Homo sapiens
cttctgcttgatgtg

SEQ ID NO: 1636814 - DNA, 15 bp, Homo sapiens
acttctgcttgatgt

SEQ ID NO: 1636815 - DNA, 15 bp, Homo sapiens
cacttctgcttgatg

SEQ ID NO: 1636816 - DNA, 15 bp, Homo sapiens
gcacttctgcttgat

SEQ ID NO: 1636817 - DNA, 15 bp, Homo sapiens
tgcacttctgcttga

SEQ ID NO: 1636818 - DNA, 15 bp, Homo sapiens
ctgcacttctgcttg

SEQ ID NO: 1636819 - DNA, 15 bp, Homo sapiens
tctgcacttctgctt

SEQ ID NO: 1636820 - DNA, 15 bp, Homo sapiens
atctgcacttctgct

SEQ ID NO: 1636821 - DNA, 15 bp, Homo sapiens
tatctgcacttctgc

SEQ ID NO: 1636822 - DNA, 15 bp, Homo sapiens
ttatctgcacttctg

SEQ ID NO: 1636823 - DNA, 15 bp, Homo sapiens
cttatctgcacttct

SEQ ID NO: 1636824 - DNA, 15 bp, Homo sapiens
ccttatctgcacttc

SEQ ID NO: 1636825 - DNA, 15 bp, Homo sapiens
accttatctgcactt

SEQ ID NO: 1636826 - DNA, 15 bp, Homo sapiens
gaccttatctgcact

SEQ ID NO: 1636827 - DNA, 15 bp, Homo sapiens
tcagaccttatctgc

SEQ ID NO: 1636828 - DNA, 15 bp, Homo sapiens
gtcagaccttatctg

SEQ ID NO: 1636829 - DNA, 15 bp, Homo sapiens
agtcagaccttatct

SEQ ID NO: 1636830 - DNA, 15 bp, Homo sapiens
gagtcagaccttatc

SEQ ID NO: 1636831 - DNA, 15 bp, Homo sapiens
agagtcagaccttat

SEQ ID NO: 1636832 - DNA, 15 bp, Homo sapiens
aagagtcagacctta

SEQ ID NO: 1636833 - DNA, 15 bp, Homo sapiens
aaagagtcagacctt

SEQ ID NO: 1636834 - DNA, 15 bp, Homo sapiens
gaaagagtcagacct

SEQ ID NO: 1636835 - DNA, 15 bp, Homo sapiens
ggaaagagtcagacc

SEQ ID NO: 1636836 - DNA, 15 bp, Homo sapiens
tggaaagagtcagac

SEQ ID NO: 1636837 - DNA, 15 bp, Homo sapiens
ctggaaagagtcaga

SEQ ID NO: 1636838 - DNA, 15 bp, Homo sapiens
actggaaagagtcag

SEQ ID NO: 1636839 - DNA, 15 bp, Homo sapiens
tactggaaagagtca

SEQ ID NO: 1636840 - DNA, 15 bp, Homo sapiens
gtactggaaagagtc

SEQ ID NO: 1636841 - DNA, 15 bp, Homo sapiens
tgtactggaaagagt

SEQ ID NO: 1636842 - DNA, 15 bp, Homo sapiens
ctgtactggaaagag

SEQ ID NO: 1636843 - DNA, 15 bp, Homo sapiens
gctgtactggaaaga

SEQ ID NO: 1636844 - DNA, 15 bp, Homo sapiens
agctgtactggaaag

SEQ ID NO: 1636845 - DNA, 15 bp, Homo sapiens
tagctgtactggaaa

SEQ ID NO: 1636846 - DNA, 15 bp, Homo sapiens
ctagctgtactggaa

SEQ ID NO: 1636847 - DNA, 15 bp, Homo sapiens
cctagctgtactgga

SEQ ID NO: 1636848 - DNA, 15 bp, Homo sapiens
ccctagctgtactgg

SEQ ID NO: 1636849 - DNA, 15 bp, Homo sapiens
accctagctgtactg

SEQ ID NO: 1636850 - DNA, 15 bp, Homo sapiens
caccctagctgtact

SEQ ID NO: 1636851 - DNA, 15 bp, Homo sapiens
gcaccctagctgtac

SEQ ID NO: 1636852 - DNA, 15 bp, Homo sapiens
ggcaccctagctgta

SEQ ID NO: 1636853 - DNA, 15 bp, Homo sapiens
aggcaccctagctgt

SEQ ID NO: 1636854 - DNA, 15 bp, Homo sapiens
caggcaccctagctg

SEQ ID NO: 1636855 - DNA, 15 bp, Homo sapiens
ccaggcaccctagct

SEQ ID NO: 1636856 - DNA, 15 bp, Homo sapiens
gccaggcaccctagc

SEQ ID NO: 1636857 - DNA, 15 bp, Homo sapiens
agccaggcaccctag

SEQ ID NO: 1636858 - DNA, 15 bp, Homo sapiens
gagccaggcacccta

SEQ ID NO: 1636859 - DNA, 15 bp, Homo sapiens
agagccaggcaccct

SEQ ID NO: 1636860 - DNA, 15 bp, Homo sapiens
gagagccaggcaccc

SEQ ID NO: 1636861 - DNA, 15 bp, Homo sapiens
ggagagccaggcacc

SEQ ID NO: 1636862 - DNA, 15 bp, Homo sapiens
tggagagccaggcac

SEQ ID NO: 1636863 - DNA, 15 bp, Homo sapiens
gtggagagccaggca

SEQ ID NO: 1636864 - DNA, 15 bp, Homo sapiens
tgtggagagccaggc

SEQ ID NO: 1636865 - DNA, 15 bp, Homo sapiens
atgtggagagccagg

SEQ ID NO: 1636866 - DNA, 15 bp, Homo sapiens
catgtggagagccag

SEQ ID NO: 1636867 - DNA, 15 bp, Homo sapiens
acatgtggagagcca

SEQ ID NO: 1636868 - DNA, 15 bp, Homo sapiens
gacatgtggagagcc

SEQ ID NO: 1636869 - DNA, 15 bp, Homo sapiens
ggacatgtggagagc

SEQ ID NO: 1636870 - DNA, 15 bp, Homo sapiens
gggacatgtggagag

SEQ ID NO: 1636871 - DNA, 15 bp, Homo sapiens
ggggacatgtggaga

SEQ ID NO: 1636872 - DNA, 15 bp, Homo sapiens
tggggacatgtggag

SEQ ID NO: 1636873 - DNA, 15 bp, Homo sapiens
ctggggacatgtgga

SEQ ID NO: 1636874 - DNA, 15 bp, Homo sapiens
tctggggacatgtgg

SEQ ID NO: 1636875 - DNA, 15 bp, Homo sapiens
gtctggggacatgtg

SEQ ID NO: 1636876 - DNA, 15 bp, Homo sapiens
ggtctggggacatgt

SEQ ID NO: 1636877 - DNA, 15 bp, Homo sapiens
aggtctggggacatg

SEQ ID NO: 1636878 - DNA, 15 bp, Homo sapiens
aaggtctggggacat

SEQ ID NO: 1636879 - DNA, 15 bp, Homo sapiens
taaggtctggggaca

SEQ ID NO: 1636880 - DNA, 15 bp, Homo sapiens
ataaggtctggggac

SEQ ID NO: 1636881 - DNA, 15 bp, Homo sapiens
gataaggtctgggga

SEQ ID NO: 1636882 - DNA, 15 bp, Homo sapiens
agataaggtctgggg

SEQ ID NO: 1636883 - DNA, 15 bp, Homo sapiens
tagataaggtctggg

SEQ ID NO: 1636884 - DNA, 15 bp, Homo sapiens
ctagataaggtctgg

SEQ ID NO: 1636885 - DNA, 15 bp, Homo sapiens
tctagataaggtctg

SEQ ID NO: 1636886 - DNA, 15 bp, Homo sapiens
ttctagataaggtct

SEQ ID NO: 1636887 - DNA, 15 bp, Homo sapiens
attctagataaggtc

SEQ ID NO: 1636888 - DNA, 15 bp, Homo sapiens
gattctagataaggt

SEQ ID NO: 1636889 - DNA, 15 bp, Homo sapiens
agattctagataagg

SEQ ID NO: 1636890 - DNA, 15 bp, Homo sapiens
tagattctagataag

SEQ ID NO: 1636891 - DNA, 15 bp, Homo sapiens
ttagattctagataa

SEQ ID NO: 1636892 - DNA, 15 bp, Homo sapiens
attagattctagata

SEQ ID NO: 1636893 - DNA, 15 bp, Homo sapiens
cattagattctagat

SEQ ID NO: 1636894 - DNA, 15 bp, Homo sapiens
acattagattctaga

SEQ ID NO: 1636895 - DNA, 15 bp, Homo sapiens
gacattagattctag

SEQ ID NO: 1636896 - DNA, 15 bp, Homo sapiens
agacattagattcta

SEQ ID NO: 1636897 - DNA, 15 bp, Homo sapiens
gagacattagattct

SEQ ID NO: 1636898 - DNA, 15 bp, Homo sapiens
ggagacattagattc

SEQ ID NO: 1636899 - DNA, 15 bp, Homo sapiens
tggagacattagatt

SEQ ID NO: 1636900 - DNA, 15 bp, Homo sapiens
ttggagacattagat

SEQ ID NO: 1636901 - DNA, 15 bp, Homo sapiens
cttggagacattaga

SEQ ID NO: 1636902 - DNA, 15 bp, Homo sapiens
ccttggagacattag

SEQ ID NO: 1636903 - DNA, 15 bp, Homo sapiens
accttggagacatta

SEQ ID NO: 1636904 - DNA, 15 bp, Homo sapiens
taccttggagacatt

SEQ ID NO: 1636905 - DNA, 15 bp, Homo sapiens
ctaccttggagacat

SEQ ID NO: 1636906 - DNA, 15 bp, Homo sapiens
cctaccttggagaca

SEQ ID NO: 1636907 - DNA, 15 bp, Homo sapiens
acctaccttggagac

SEQ ID NO: 1636908 - DNA, 15 bp, Homo sapiens
tacctaccttggaga

SEQ ID NO: 1636909 - DNA, 15 bp, Homo sapiens
gtacctaccttggag

SEQ ID NO: 1636910 - DNA, 15 bp, Homo sapiens
tgtacctaccttgga

SEQ ID NO: 1636911 - DNA, 15 bp, Homo sapiens
atgtacctaccttgg

SEQ ID NO: 1636912 - DNA, 15 bp, Homo sapiens
aatgtacctaccttg

SEQ ID NO: 1636913 - DNA, 15 bp, Homo sapiens
caatgtacctacctt

SEQ ID NO: 1636914 - DNA, 15 bp, Homo sapiens
tcaatgtacctacct

SEQ ID NO: 1636915 - DNA, 15 bp, Homo sapiens
ttcaatgtacctacc

SEQ ID NO: 1636916 - DNA, 15 bp, Homo sapiens
attcaatgtacctac

SEQ ID NO: 1636917 - DNA, 15 bp, Homo sapiens
tattcaatgtaccta

SEQ ID NO: 1636918 - DNA, 15 bp, Homo sapiens
ttattcaatgtacct

SEQ ID NO: 1636919 - DNA, 15 bp, Homo sapiens
attattcaatgtacc

SEQ ID NO: 1636920 - DNA, 15 bp, Homo sapiens
aattattcaatgtac

SEQ ID NO: 1636921 - DNA, 15 bp, Homo sapiens
gaaaattattcaatg

SEQ ID NO: 1636922 - DNA, 15 bp, Homo sapiens
tgaaaattattcaat

SEQ ID NO: 1636923 - DNA, 15 bp, Homo sapiens
ttgaaaattattcaa

SEQ ID NO: 1636924 - DNA, 15 bp, Homo sapiens
tttgaaaattattca

SEQ ID NO: 1636925 - DNA, 15 bp, Homo sapiens
ttttgaaaattattc

SEQ ID NO: 1636926 - DNA, 15 bp, Homo sapiens
cttttgaaaattatt

SEQ ID NO: 1636927 - DNA, 15 bp, Homo sapiens
acttttgaaaattat

SEQ ID NO: 1636928 - DNA, 15 bp, Homo sapiens
gacttttgaaaatta

SEQ ID NO: 1636929 - DNA, 15 bp, Homo sapiens
tgacttttgaaaatt

SEQ ID NO: 1636930 - DNA, 15 bp, Homo sapiens
ttgacttttgaaaat

SEQ ID NO: 1636931 - DNA, 15 bp, Homo sapiens
cttgacttttgaaaa

SEQ ID NO: 1636932 - DNA, 15 bp, Homo sapiens
ccttgacttttgaaa

SEQ ID NO: 1636933 - DNA, 15 bp, Homo sapiens
tccttgacttttgaa

SEQ ID NO: 1636934 - DNA, 15 bp, Homo sapiens
ttccttgacttttga

SEQ ID NO: 1636935 - DNA, 15 bp, Homo sapiens
cttccttgacttttg

SEQ ID NO: 1636936 - DNA, 15 bp, Homo sapiens
gcttccttgactttt

SEQ ID NO: 1636937 - DNA, 15 bp, Homo sapiens
tgcttccttgacttt

SEQ ID NO: 1636938 - DNA, 15 bp, Homo sapiens
ctgcttccttgactt

SEQ ID NO: 1636939 - DNA, 15 bp, Homo sapiens
actgcttccttgact

SEQ ID NO: 1636940 - DNA, 15 bp, Homo sapiens
aactgcttccttgac

SEQ ID NO: 1636941 - DNA, 15 bp, Homo sapiens
aaactgcttccttga

SEQ ID NO: 1636942 - DNA, 15 bp, Homo sapiens
taaactgcttccttg

SEQ ID NO: 1636943 - DNA, 15 bp, Homo sapiens
ataaactgcttcctt

SEQ ID NO: 1636944 - DNA, 15 bp, Homo sapiens
cataaactgcttcct

SEQ ID NO: 1636945 - DNA, 15 bp, Homo sapiens
tcataaactgcttcc

SEQ ID NO: 1636946 - DNA, 15 bp, Homo sapiens
gtcataaactgcttc

SEQ ID NO: 1636947 - DNA, 15 bp, Homo sapiens
ggtcataaactgctt

SEQ ID NO: 1636948 - DNA, 15 bp, Homo sapiens
aggtcataaactgct

SEQ ID NO: 1636949 - DNA, 15 bp, Homo sapiens
aaggtcataaactgc

SEQ ID NO: 1636950 - DNA, 15 bp, Homo sapiens
taaggtcataaactg

SEQ ID NO: 1636951 - DNA, 15 bp, Homo sapiens
ttaaggtcataaact

SEQ ID NO: 1636952 - DNA, 15 bp, Homo sapiens
tttaaggtcataaac

SEQ ID NO: 1636953 - DNA, 15 bp, Homo sapiens
ctttaaggtcataaa

SEQ ID NO: 1636954 - DNA, 15 bp, Homo sapiens
actttaaggtcataa

SEQ ID NO: 1636955 - DNA, 15 bp, Homo sapiens
tactttaaggtcata

SEQ ID NO: 1636956 - DNA, 15 bp, Homo sapiens
ctactttaaggtcat

SEQ ID NO: 1636957 - DNA, 15 bp, Homo sapiens
actactttaaggtca

SEQ ID NO: 1636958 - DNA, 15 bp, Homo sapiens
aactactttaaggtc

SEQ ID NO: 1636959 - DNA, 15 bp, Homo sapiens
taactactttaaggt

SEQ ID NO: 1636960 - DNA, 15 bp, Homo sapiens
ctaactactttaagg

SEQ ID NO: 1636961 - DNA, 15 bp, Homo sapiens
gctaactactttaag

SEQ ID NO: 1636962 - DNA, 15 bp, Homo sapiens
tgctaactactttaa

SEQ ID NO: 1636963 - DNA, 15 bp, Homo sapiens
ttgctaactacttta

SEQ ID NO: 1636964 - DNA, 15 bp, Homo sapiens
tttgctaactacttt

SEQ ID NO: 1636965 - DNA, 15 bp, Homo sapiens
gtttgctaactactt

SEQ ID NO: 1636966 - DNA, 15 bp, Homo sapiens
agtttgctaactact

SEQ ID NO: 1636967 - DNA, 15 bp, Homo sapiens
aagtttgctaactac

SEQ ID NO: 1636968 - DNA, 15 bp, Homo sapiens
taagtttgctaacta

SEQ ID NO: 1636969 - DNA, 15 bp, Homo sapiens
ttaagtttgctaact

SEQ ID NO: 1636970 - DNA, 15 bp, Homo sapiens
attaagtttgctaac

SEQ ID NO: 1636971 - DNA, 15 bp, Homo sapiens
tattaagtttgctaa

SEQ ID NO: 1636972 - DNA, 15 bp, Homo sapiens
atattaagtttgcta

SEQ ID NO: 1636973 - DNA, 15 bp, Homo sapiens
gatattaagtttgct

SEQ ID NO: 1636974 - DNA, 15 bp, Homo sapiens
agatattaagtttgc

SEQ ID NO: 1636975 - DNA, 15 bp, Homo sapiens
cagatattaagtttg

SEQ ID NO: 1636976 - DNA, 15 bp, Homo sapiens
tcagatattaagttt

SEQ ID NO: 1636977 - DNA, 15 bp, Homo sapiens
gtcagatattaagtt

SEQ ID NO: 1636978 - DNA, 15 bp, Homo sapiens
ggtcagatattaagt

SEQ ID NO: 1636979 - DNA, 15 bp, Homo sapiens
aggtcagatattaag

SEQ ID NO: 1636980 - DNA, 15 bp, Homo sapiens
caggtcagatattaa

SEQ ID NO: 1636981 - DNA, 15 bp, Homo sapiens
tcaggtcagatatta

SEQ ID NO: 1636982 - DNA, 15 bp, Homo sapiens
gtcaggtcagatatt

SEQ ID NO: 1636983 - DNA, 15 bp, Homo sapiens
agtcaggtcagatat

SEQ ID NO: 1636984 - DNA, 15 bp, Homo sapiens
tagtcaggtcagata

SEQ ID NO: 1636985 - DNA, 15 bp, Homo sapiens
ttagtcaggtcagat

SEQ ID NO: 1636986 - DNA, 15 bp, Homo sapiens
attagtcaggtcaga

SEQ ID NO: 1636987 - DNA, 15 bp, Homo sapiens
aattagtcaggtcag

SEQ ID NO: 1636988 - DNA, 15 bp, Homo sapiens
aaattagtcaggtca

SEQ ID NO: 1636989 - DNA, 15 bp, Homo sapiens
taaattagtcaggtc

SEQ ID NO: 1636990 - DNA, 15 bp, Homo sapiens
ctaaattagtcaggt

SEQ ID NO: 1636991 - DNA, 15 bp, Homo sapiens
tctaaattagtcagg

SEQ ID NO: 1636992 - DNA, 15 bp, Homo sapiens
gtctaaattagtcag

SEQ ID NO: 1636993 - DNA, 15 bp, Homo sapiens
ggtctaaattagtca

SEQ ID NO: 1636994 - DNA, 15 bp, Homo sapiens
tggtctaaattagtc

SEQ ID NO: 1636995 - DNA, 15 bp, Homo sapiens
ttggtctaaattagt

SEQ ID NO: 1636996 - DNA, 15 bp, Homo sapiens
tttggtctaaattag

SEQ ID NO: 1636997 - DNA, 15 bp, Homo sapiens
atttggtctaaatta

SEQ ID NO: 1636998 - DNA, 15 bp, Homo sapiens
catttggtctaaatt

SEQ ID NO: 1636999 - DNA, 15 bp, Homo sapiens
acatttggtctaaat

SEQ ID NO: 1637000 - DNA, 15 bp, Homo sapiens
aacatttggtctaaa

SEQ ID NO: 1637001 - DNA, 15 bp, Homo sapiens
aaacatttggtctaa

SEQ ID NO: 1637002 - DNA, 15 bp, Homo sapiens
taaacatttggtcta

SEQ ID NO: 1637003 - DNA, 15 bp, Homo sapiens
gtaaacatttggtct

SEQ ID NO: 1637004 - DNA, 15 bp, Homo sapiens
tgtaaacatttggtc

SEQ ID NO: 1637005 - DNA, 15 bp, Homo sapiens
atgtaaacatttggt

SEQ ID NO: 1637006 - DNA, 15 bp, Homo sapiens
aatgtaaacatttgg

SEQ ID NO: 1637007 - DNA, 15 bp, Homo sapiens
aaatgtaaacatttg

SEQ ID NO: 1637008 - DNA, 15 bp, Homo sapiens
aaaatgtaaacattt

SEQ ID NO: 1637009 - DNA, 15 bp, Homo sapiens
aaaaatgtaaacatt

SEQ ID NO: 1637010 - DNA, 15 bp, Homo sapiens
caaaaatgtaaacat

SEQ ID NO: 1637011 - DNA, 15 bp, Homo sapiens
tcaaaaatgtaaaca

SEQ ID NO: 1637012 - DNA, 15 bp, Homo sapiens
ttcaaaaatgtaaac

SEQ ID NO: 1637013 - DNA, 15 bp, Homo sapiens
cttcaaaaatgtaaa

SEQ ID NO: 1637014 - DNA, 15 bp, Homo sapiens
tcttcaaaaatgtaa

SEQ ID NO: 1637015 - DNA, 15 bp, Homo sapiens
atcttcaaaaatgta

SEQ ID NO: 1637016 - DNA, 15 bp, Homo sapiens
tatcttcaaaaatgt

SEQ ID NO: 1637017 - DNA, 15 bp, Homo sapiens
atatcttcaaaaatg

SEQ ID NO: 1637018 - DNA, 15 bp, Homo sapiens
aatatcttcaaaaat

SEQ ID NO: 1637019 - DNA, 15 bp, Homo sapiens
aaatatcttcaaaaa

SEQ ID NO: 1637020 - DNA, 15 bp, Homo sapiens
aaaatatcttcaaaa

SEQ ID NO: 1637021 - DNA, 15 bp, Homo sapiens
aaaaatatcttcaaa

SEQ ID NO: 1637022 - DNA, 15 bp, Homo sapiens
taaaaatatcttcaa

SEQ ID NO: 1637023 - DNA, 15 bp, Homo sapiens
ataaaaatatcttca

SEQ ID NO: 1637024 - DNA, 15 bp, Homo sapiens
aataaaaatatcttc

SEQ ID NO: 1637025 - DNA, 15 bp, Homo sapiens
aaataaaaatatctt

SEQ ID NO: 1637026 - DNA, 15 bp, Homo sapiens
aaaataaaaatatct

SEQ ID NO: 1637027 - DNA, 15 bp, Homo sapiens
taaaataaaaatatc

SEQ ID NO: 1637028 - DNA, 15 bp, Homo sapiens
ataaaataaaaatat

SEQ ID NO: 1637029 - DNA, 15 bp, Homo sapiens
gataaaataaaaata

SEQ ID NO: 1637030 - DNA, 15 bp, Homo sapiens
tgataaaataaaaat

SEQ ID NO: 1637031 - DNA, 15 bp, Homo sapiens
ctgataaaataaaaa

SEQ ID NO: 1637032 - DNA, 15 bp, Homo sapiens
actgataaaataaaa

SEQ ID NO: 1637033 - DNA, 15 bp, Homo sapiens
tactgataaaataaa

SEQ ID NO: 1637034 - DNA, 15 bp, Homo sapiens
ttactgataaaataa

SEQ ID NO: 1637035 - DNA, 15 bp, Homo sapiens
attactgataaaata

SEQ ID NO: 1637036 - DNA, 15 bp, Homo sapiens
gattactgataaaat

SEQ ID NO: 1637037 - DNA, 15 bp, Homo sapiens
agattactgataaaa

SEQ ID NO: 1637038 - DNA, 15 bp, Homo sapiens
aagattactgataaa

SEQ ID NO: 1637039 - DNA, 15 bp, Homo sapiens
aaagattactgataa

SEQ ID NO: 1637040 - DNA, 15 bp, Homo sapiens
taaagattactgata

SEQ ID NO: 1637041 - DNA, 15 bp, Homo sapiens
ttaaagattactgat

SEQ ID NO: 1637042 - DNA, 15 bp, Homo sapiens
tttaaagattactga

SEQ ID NO: 1637043 - DNA, 15 bp, Homo sapiens
ttttaaagattactg

SEQ ID NO: 1637044 - DNA, 15 bp, Homo sapiens
gttttaaagattact

SEQ ID NO: 1637045 - DNA, 15 bp, Homo sapiens
agttttaaagattac

SEQ ID NO: 1637046 - DNA, 15 bp, Homo sapiens
tagttttaaagatta

SEQ ID NO: 1637047 - DNA, 15 bp, Homo sapiens
atagttttaaagatt

SEQ ID NO: 1637048 - DNA, 15 bp, Homo sapiens
aatagttttaaagat

SEQ ID NO: 1637049 - DNA, 15 bp, Homo sapiens
aaatagttttaaaga

SEQ ID NO: 1637050 - DNA, 15 bp, Homo sapiens
gaaaatagttttaaa

SEQ ID NO: 1637051 - DNA, 15 bp, Homo sapiens
agaaaatagttttaa

SEQ ID NO: 1637052 - DNA, 15 bp, Homo sapiens
tagaaaatagtttta

SEQ ID NO: 1637053 - DNA, 15 bp, Homo sapiens
atagaaaatagtttt

SEQ ID NO: 1637054 - DNA, 15 bp, Homo sapiens
aatagaaaatagttt

SEQ ID NO: 1637055 - DNA, 15 bp, Homo sapiens
aaatagaaaatagtt

SEQ ID NO: 1637056 - DNA, 15 bp, Homo sapiens
aaaatagaaaatagt

SEQ ID NO: 1637057 - DNA, 15 bp, Homo sapiens
gaaaatagaaaatag

SEQ ID NO: 1637058 - DNA, 15 bp, Homo sapiens
ggaaaatagaaaata

SEQ ID NO: 1637059 - DNA, 15 bp, Homo sapiens
tggaaaatagaaaat

SEQ ID NO: 1637060 - DNA, 15 bp, Homo sapiens
ttggaaaatagaaaa

SEQ ID NO: 1637061 - DNA, 15 bp, Homo sapiens
tttggaaaatagaaa

SEQ ID NO: 1637062 - DNA, 15 bp, Homo sapiens
ctttggaaaatagaa

SEQ ID NO: 1637063 - DNA, 15 bp, Homo sapiens
tctttggaaaataga

SEQ ID NO: 1637064 - DNA, 15 bp, Homo sapiens
atctttggaaaatag

SEQ ID NO: 1637065 - DNA, 15 bp, Homo sapiens
aatctttggaaaata

SEQ ID NO: 1637066 - DNA, 15 bp, Homo sapiens
taatctttggaaaat

SEQ ID NO: 1637067 - DNA, 15 bp, Homo sapiens
gtaatctttggaaaa

SEQ ID NO: 1637068 - DNA, 15 bp, Homo sapiens
agtaatctttggaaa

SEQ ID NO: 1637069 - DNA, 15 bp, Homo sapiens
aagtaatctttggaa

SEQ ID NO: 1637070 - DNA, 15 bp, Homo sapiens
taagtaatctttgga

SEQ ID NO: 1637071 - DNA, 15 bp, Homo sapiens
ttaagtaatctttgg

SEQ ID NO: 1637072 - DNA, 15 bp, Homo sapiens
cttaagtaatctttg

SEQ ID NO: 1637073 - DNA, 15 bp, Homo sapiens
acttaagtaatcttt

SEQ ID NO: 1637074 - DNA, 15 bp, Homo sapiens
gacttaagtaatctt

SEQ ID NO: 1637075 - DNA, 15 bp, Homo sapiens
tgacttaagtaatct

SEQ ID NO: 1637076 - DNA, 15 bp, Homo sapiens
ttgacttaagtaatc

SEQ ID NO: 1637077 - DNA, 15 bp, Homo sapiens
tttgacttaagtaat

SEQ ID NO: 1637078 - DNA, 15 bp, Homo sapiens
atttgacttaagtaa

SEQ ID NO: 1637079 - DNA, 15 bp, Homo sapiens
catttgacttaagta

SEQ ID NO: 1637080 - DNA, 15 bp, Homo sapiens
tcatttgacttaagt

SEQ ID NO: 1637081 - DNA, 15 bp, Homo sapiens
ttcatttgacttaag

SEQ ID NO: 1637082 - DNA, 15 bp, Homo sapiens
gttcatttgacttaa

SEQ ID NO: 1637083 - DNA, 15 bp, Homo sapiens
agttcatttgactta

SEQ ID NO: 1637084 - DNA, 15 bp, Homo sapiens
tagttcatttgactt

SEQ ID NO: 1637085 - DNA, 15 bp, Homo sapiens
ttagttcatttgact

SEQ ID NO: 1637086 - DNA, 15 bp, Homo sapiens
tttagttcatttgac

SEQ ID NO: 1637087 - DNA, 15 bp, Homo sapiens
ttttagttcatttga

SEQ ID NO: 1637088 - DNA, 15 bp, Homo sapiens
cttttagttcatttg

SEQ ID NO: 1637089 - DNA, 15 bp, Homo sapiens
ccttttagttcattt

SEQ ID NO: 1637090 - DNA, 15 bp, Homo sapiens
gccttttagttcatt

SEQ ID NO: 1637091 - DNA, 15 bp, Homo sapiens
tgccttttagttcat

SEQ ID NO: 1637092 - DNA, 15 bp, Homo sapiens
atgccttttagttca

SEQ ID NO: 1637093 - DNA, 15 bp, Homo sapiens
aatgccttttagttc

SEQ ID NO: 1637094 - DNA, 15 bp, Homo sapiens
taatgccttttagtt

SEQ ID NO: 1637095 - DNA, 15 bp, Homo sapiens
ataatgccttttagt

SEQ ID NO: 1637096 - DNA, 15 bp, Homo sapiens
tataatgccttttag

SEQ ID NO: 1637097 - DNA, 15 bp, Homo sapiens
gtataatgcctttta

SEQ ID NO: 1637098 - DNA, 15 bp, Homo sapiens
tgtataatgcctttt

SEQ ID NO: 1637099 - DNA, 15 bp, Homo sapiens
atgtataatgccttt

SEQ ID NO: 1637100 - DNA, 15 bp, Homo sapiens
aatgtataatgcctt

SEQ ID NO: 1637101 - DNA, 15 bp, Homo sapiens
aaatgtataatgcct

SEQ ID NO: 1637102 - DNA, 15 bp, Homo sapiens
aaaatgtataatgcc

SEQ ID NO: 1637103 - DNA, 15 bp, Homo sapiens
taaaatgtataatgc

SEQ ID NO: 1637104 - DNA, 15 bp, Homo sapiens
ctaaaatgtataatg

SEQ ID NO: 1637105 - DNA, 15 bp, Homo sapiens
actaaaatgtataat

SEQ ID NO: 1637106 - DNA, 15 bp, Homo sapiens
aactaaaatgtataa

SEQ ID NO: 1637107 - DNA, 15 bp, Homo sapiens
aaactaaaatgtata

SEQ ID NO: 1637108 - DNA, 15 bp, Homo sapiens
aaaactaaaatgtat

SEQ ID NO: 1637109 - DNA, 15 bp, Homo sapiens
gaaaactaaaatgta

SEQ ID NO: 1637110 - DNA, 15 bp, Homo sapiens
agaaaactaaaatgt

SEQ ID NO: 1637111 - DNA, 15 bp, Homo sapiens
cagaaaactaaaatg

SEQ ID NO: 1637112 - DNA, 15 bp, Homo sapiens
tcagaaaactaaaat

SEQ ID NO: 1637113 - DNA, 15 bp, Homo sapiens
atcagaaaactaaaa

SEQ ID NO: 1637114 - DNA, 15 bp, Homo sapiens
catcagaaaactaaa

SEQ ID NO: 1637115 - DNA, 15 bp, Homo sapiens
tcatcagaaaactaa

SEQ ID NO: 1637116 - DNA, 15 bp, Homo sapiens
ttcatcagaaaacta

SEQ ID NO: 1637117 - DNA, 15 bp, Homo sapiens
tttcatcagaaaact

SEQ ID NO: 1637118 - DNA, 15 bp, Homo sapiens
atttcatcagaaaac

SEQ ID NO: 1637119 - DNA, 15 bp, Homo sapiens
tatttcatcagaaaa

SEQ ID NO: 1637120 - DNA, 15 bp, Homo sapiens
atatttcatcagaaa

SEQ ID NO: 1637121 - DNA, 15 bp, Homo sapiens
gatatttcatcagaa

SEQ ID NO: 1637122 - DNA, 15 bp, Homo sapiens
agatatttcatcaga

SEQ ID NO: 1637123 - DNA, 15 bp, Homo sapiens
cagatatttcatcag

SEQ ID NO: 1637124 - DNA, 15 bp, Homo sapiens
tcagatatttcatca

SEQ ID NO: 1637125 - DNA, 15 bp, Homo sapiens
atcagatatttcatc

SEQ ID NO: 1637126 - DNA, 15 bp, Homo sapiens
aatcagatatttcat

SEQ ID NO: 1637127 - DNA, 15 bp, Homo sapiens
aaatcagatatttca

SEQ ID NO: 1637128 - DNA, 15 bp, Homo sapiens
taaatcagatatttc

SEQ ID NO: 1637129 - DNA, 15 bp, Homo sapiens
ttaaatcagatattt

SEQ ID NO: 1637130 - DNA, 15 bp, Homo sapiens
cttaaatcagatatt

SEQ ID NO: 1637131 - DNA, 15 bp, Homo sapiens
gcttaaatcagatat

SEQ ID NO: 1637132 - DNA, 15 bp, Homo sapiens
tgcttaaatcagata

SEQ ID NO: 1637133 - DNA, 15 bp, Homo sapiens
gtgcttaaatcagat

SEQ ID NO: 1637134 - DNA, 15 bp, Homo sapiens
agtgcttaaatcaga

SEQ ID NO: 1637135 - DNA, 15 bp, Homo sapiens
aagtgcttaaatcag

SEQ ID NO: 1637136 - DNA, 15 bp, Homo sapiens
taagtgcttaaatca

SEQ ID NO: 1637137 - DNA, 15 bp, Homo sapiens
ataagtgcttaaatc

SEQ ID NO: 1637138 - DNA, 15 bp, Homo sapiens
aataagtgcttaaat

SEQ ID NO: 1637139 - DNA, 15 bp, Homo sapiens
taataagtgcttaaa

SEQ ID NO: 1637140 - DNA, 15 bp, Homo sapiens
ataataagtgcttaa

SEQ ID NO: 1637141 - DNA, 15 bp, Homo sapiens
aataataagtgctta

SEQ ID NO: 1637142 - DNA, 15 bp, Homo sapiens
aaataataagtgctt

SEQ ID NO: 1637143 - DNA, 15 bp, Homo sapiens
aaaataataagtgct

SEQ ID NO: 1637144 - DNA, 15 bp, Homo sapiens
aaaaataataagtgc

SEQ ID NO: 1637145 - DNA, 15 bp, Homo sapiens
caaaaataataagtg

SEQ ID NO: 1637146 - DNA, 15 bp, Homo sapiens
tcaaaaataataagt

SEQ ID NO: 1637147 - DNA, 15 bp, Homo sapiens
ttcaaaaataataag

SEQ ID NO: 1637148 - DNA, 15 bp, Homo sapiens
gttcaaaaataataa

SEQ ID NO: 1637149 - DNA, 15 bp, Homo sapiens
tggttcaaaaataat

SEQ ID NO: 1637150 - DNA, 15 bp, Homo sapiens
ttggttcaaaaataa

SEQ ID NO: 1637151 - DNA, 15 bp, Homo sapiens
attggttcaaaaata

SEQ ID NO: 1637152 - DNA, 15 bp, Homo sapiens
aattggttcaaaaat

SEQ ID NO: 1637153 - DNA, 15 bp, Homo sapiens
taattggttcaaaaa

SEQ ID NO: 1637154 - DNA, 15 bp, Homo sapiens
ttaattggttcaaaa

SEQ ID NO: 1637155 - DNA, 15 bp, Homo sapiens
tttaattggttcaaa

SEQ ID NO: 1637156 - DNA, 15 bp, Homo sapiens
ctttaattggttcaa

SEQ ID NO: 1637157 - DNA, 15 bp, Homo sapiens
gctttaattggttca

SEQ ID NO: 1637158 - DNA, 15 bp, Homo sapiens
agctttaattggttc

SEQ ID NO: 1637159 - DNA, 15 bp, Homo sapiens
aagctttaattggtt

SEQ ID NO: 1637160 - DNA, 15 bp, Homo sapiens
aaagctttaattggt

SEQ ID NO: 1637161 - DNA, 15 bp, Homo sapiens
aaaagctttaattgg

SEQ ID NO: 1637162 - DNA, 15 bp, Homo sapiens
aaaaagctttaattg

SEQ ID NO: 1637163 - DNA, 15 bp, Homo sapiens
aaaaaagctttaatt

SEQ ID NO: 1637164 - DNA, 15 bp, Homo sapiens
taaaaaagctttaat

SEQ ID NO: 1637165 - DNA, 15 bp, Homo sapiens
ataaaaaagctttaa

SEQ ID NO: 1637166 - DNA, 15 bp, Homo sapiens
tataaaaaagcttta

SEQ ID NO: 1637167 - DNA, 15 bp, Homo sapiens
atataaaaaagcttt

SEQ ID NO: 1637168 - DNA, 15 bp, Homo sapiens
gatataaaaaagctt

SEQ ID NO: 1637169 - DNA, 15 bp, Homo sapiens
tgatataaaaaagct

SEQ ID NO: 1637170 - DNA, 15 bp, Homo sapiens
gtgatataaaaaagc

SEQ ID NO: 1637171 - DNA, 15 bp, Homo sapiens
tgtgatataaaaaag

SEQ ID NO: 1637172 - DNA, 15 bp, Homo sapiens
gtgtgatataaaaaa

SEQ ID NO: 1637173 - DNA, 15 bp, Homo sapiens
tgtgtgatataaaaa

SEQ ID NO: 1637174 - DNA, 15 bp, Homo sapiens
gtgtgtgatataaaa

SEQ ID NO: 1637175 - DNA, 15 bp, Homo sapiens
tgtgtgtgatataaa

SEQ ID NO: 1637176 - DNA, 15 bp, Homo sapiens
gtgtgtgtgatataa

SEQ ID NO: 1637177 - DNA, 15 bp, Homo sapiens
tgtgtgtgtgatata

SEQ ID NO: 1637178 - DNA, 15 bp, Homo sapiens
ttgtgtgtgtgatat

SEQ ID NO: 1637179 - DNA, 15 bp, Homo sapiens
gttgtgtgtgtgata

SEQ ID NO: 1637180 - DNA, 15 bp, Homo sapiens
tgttgtgtgtgtgat

SEQ ID NO: 1637181 - DNA, 15 bp, Homo sapiens
gtgttgtgtgtgtga

SEQ ID NO: 1637182 - DNA, 15 bp, Homo sapiens
tgtgttgtgtgtgtg

SEQ ID NO: 1637183 - DNA, 15 bp, Homo sapiens
ttatatgtgttgtgt

SEQ ID NO: 1637184 - DNA, 15 bp, Homo sapiens
tttatatgtgttgtg

SEQ ID NO: 1637185 - DNA, 15 bp, Homo sapiens
atttatatgtgttgt

SEQ ID NO: 1637186 - DNA, 15 bp, Homo sapiens
tatttatatgtgttg

SEQ ID NO: 1637187 - DNA, 15 bp, Homo sapiens
gtatttatatgtgtt

SEQ ID NO: 1637188 - DNA, 15 bp, Homo sapiens
tgtatttatatgtgt

SEQ ID NO: 1637189 - DNA, 15 bp, Homo sapiens
gtgtatttatatgtg

SEQ ID NO: 1637190 - DNA, 15 bp, Homo sapiens
tgtgtatttatatgt

SEQ ID NO: 1637191 - DNA, 15 bp, Homo sapiens
ctgtgtatttatatg

SEQ ID NO: 1637192 - DNA, 15 bp, Homo sapiens
tctgtgtatttatat

SEQ ID NO: 1637193 - DNA, 15 bp, Homo sapiens
gtctgtgtatttata

SEQ ID NO: 1637194 - DNA, 15 bp, Homo sapiens
tgtctgtgtatttat

SEQ ID NO: 1637195 - DNA, 15 bp, Homo sapiens
ctgtctgtgtattta

SEQ ID NO: 1637196 - DNA, 15 bp, Homo sapiens
cctgtctgtgtattt

SEQ ID NO: 1637197 - DNA, 15 bp, Homo sapiens
gcctgtctgtgtatt

SEQ ID NO: 1637198 - DNA, 15 bp, Homo sapiens
agcctgtctgtgtat

SEQ ID NO: 1637199 - DNA, 15 bp, Homo sapiens
cagcctgtctgtgta

SEQ ID NO: 1637200 - DNA, 15 bp, Homo sapiens
ccagcctgtctgtgt

SEQ ID NO: 1637201 - DNA, 15 bp, Homo sapiens
cccagcctgtctgtg

SEQ ID NO: 1637202 - DNA, 15 bp, Homo sapiens
acccagcctgtctgt

SEQ ID NO: 1637203 - DNA, 15 bp, Homo sapiens
cacccagcctgtctg

SEQ ID NO: 1637204 - DNA, 15 bp, Homo sapiens
gcacccagcctgtct

SEQ ID NO: 1637205 - DNA, 15 bp, Homo sapiens
tgcacccagcctgtc

SEQ ID NO: 1637206 - DNA, 15 bp, Homo sapiens
ctgcacccagcctgt

SEQ ID NO: 1637207 - DNA, 15 bp, Homo sapiens
actgcacccagcctg

SEQ ID NO: 1637208 - DNA, 15 bp, Homo sapiens
cactgcacccagcct

SEQ ID NO: 1637209 - DNA, 15 bp, Homo sapiens
agtgtgagccactgc

SEQ ID NO: 1637210 - DNA, 15 bp, Homo sapiens
aagtgtgagccactg

SEQ ID NO: 1637211 - DNA, 15 bp, Homo sapiens
caagtgtgagccact

SEQ ID NO: 1637212 - DNA, 15 bp, Homo sapiens
acaagtgtgagccac

SEQ ID NO: 1637213 - DNA, 15 bp, Homo sapiens
tacaagtgtgagcca

SEQ ID NO: 1637214 - DNA, 15 bp, Homo sapiens
ttacaagtgtgagcc

SEQ ID NO: 1637215 - DNA, 15 bp, Homo sapiens
attacaagtgtgagc

SEQ ID NO: 1637216 - DNA, 15 bp, Homo sapiens
gattacaagtgtgag

SEQ ID NO: 1637217 - DNA, 15 bp, Homo sapiens
ggattacaagtgtga

SEQ ID NO: 1637218 - DNA, 15 bp, Homo sapiens
gggattacaagtgtg

SEQ ID NO: 1637219 - DNA, 15 bp, Homo sapiens
tgggattacaagtgt

SEQ ID NO: 1637220 - DNA, 15 bp, Homo sapiens
ctgggattacaagtg

SEQ ID NO: 1637221 - DNA, 15 bp, Homo sapiens
ccacccaaagtgctg

SEQ ID NO: 1637222 - DNA, 15 bp, Homo sapiens
gccacccaaagtgct

SEQ ID NO: 1637223 - DNA, 15 bp, Homo sapiens
ggccacccaaagtgc

SEQ ID NO: 1637224 - DNA, 15 bp, Homo sapiens
tggccacccaaagtg

SEQ ID NO: 1637225 - DNA, 15 bp, Homo sapiens
ttggccacccaaagt

SEQ ID NO: 1637226 - DNA, 15 bp, Homo sapiens
cttggccacccaaag

SEQ ID NO: 1637227 - DNA, 15 bp, Homo sapiens
ccttggccacccaaa

SEQ ID NO: 1637228 - DNA, 15 bp, Homo sapiens
gccttggccacccaa

SEQ ID NO: 1637229 - DNA, 15 bp, Homo sapiens
tgccttggccaccca

SEQ ID NO: 1637230 - DNA, 15 bp, Homo sapiens
ctgccttggccaccc

SEQ ID NO: 1637231 - DNA, 15 bp, Homo sapiens
cctgccttggccacc

SEQ ID NO: 1637232 - DNA, 15 bp, Homo sapiens
gcctgccttggccac

SEQ ID NO: 1637233 - DNA, 15 bp, Homo sapiens
cgcctgccttggcca

SEQ ID NO: 1637234 - DNA, 15 bp, Homo sapiens
cgtgatccgcctgcc

SEQ ID NO: 1637235 - DNA, 15 bp, Homo sapiens
acgtgatccgcctgc

SEQ ID NO: 1637236 - DNA, 15 bp, Homo sapiens
cacgtgatccgcctg

SEQ ID NO: 1637237 - DNA, 15 bp, Homo sapiens
tcacgtgatccgcct

SEQ ID NO: 1637238 - DNA, 15 bp, Homo sapiens
ctcacgtgatccgcc

SEQ ID NO: 1637239 - DNA, 15 bp, Homo sapiens
cctcacgtgatccgc

SEQ ID NO: 1637240 - DNA, 15 bp, Homo sapiens
acctcacgtgatccg

SEQ ID NO: 1637241 - DNA, 15 bp, Homo sapiens
gacctcacgtgatcc

SEQ ID NO: 1637242 - DNA, 15 bp, Homo sapiens
tgacctcacgtgatc

SEQ ID NO: 1637243 - DNA, 15 bp, Homo sapiens
ctgacctcacgtgat

SEQ ID NO: 1637244 - DNA, 15 bp, Homo sapiens
cctgacctcacgtga

SEQ ID NO: 1637245 - DNA, 15 bp, Homo sapiens
tcctgacctcacgtg

SEQ ID NO: 1637246 - DNA, 15 bp, Homo sapiens
ctcctgacctcacgt

SEQ ID NO: 1637247 - DNA, 15 bp, Homo sapiens
actcctgacctcacg

SEQ ID NO: 1637248 - DNA, 15 bp, Homo sapiens
aactcctgacctcac

SEQ ID NO: 1637249 - DNA, 15 bp, Homo sapiens
ctctcaaactcctga

SEQ ID NO: 1637250 - DNA, 15 bp, Homo sapiens
gctctcaaactcctg

SEQ ID NO: 1637251 - DNA, 15 bp, Homo sapiens
tgctctcaaactcct

SEQ ID NO: 1637252 - DNA, 15 bp, Homo sapiens
ctgctctcaaactcc

SEQ ID NO: 1637253 - DNA, 15 bp, Homo sapiens
gctgctctcaaactc

SEQ ID NO: 1637254 - DNA, 15 bp, Homo sapiens
ggctgctctcaaact

SEQ ID NO: 1637255 - DNA, 15 bp, Homo sapiens
aggctgctctcaaac

SEQ ID NO: 1637256 - DNA, 15 bp, Homo sapiens
caggctgctctcaaa

SEQ ID NO: 1637257 - DNA, 15 bp, Homo sapiens
ccaggctgctctcaa

SEQ ID NO: 1637258 - DNA, 15 bp, Homo sapiens
accaggctgctctca

SEQ ID NO: 1637259 - DNA, 15 bp, Homo sapiens
gaccaggctgctctc

SEQ ID NO: 1637260 - DNA, 15 bp, Homo sapiens
tgaccaggctgctct

SEQ ID NO: 1637261 - DNA, 15 bp, Homo sapiens
ttgaccaggctgctc

SEQ ID NO: 1637262 - DNA, 15 bp, Homo sapiens
attgaccaggctgct

SEQ ID NO: 1637263 - DNA, 15 bp, Homo sapiens
cattgaccaggctgc

SEQ ID NO: 1637264 - DNA, 15 bp, Homo sapiens
acattgaccaggctg

SEQ ID NO: 1637265 - DNA, 15 bp, Homo sapiens
cacattgaccaggct

SEQ ID NO: 1637266 - DNA, 15 bp, Homo sapiens
ccacattgaccaggc

SEQ ID NO: 1637267 - DNA, 15 bp, Homo sapiens
accacattgaccagg

SEQ ID NO: 1637268 - DNA, 15 bp, Homo sapiens
taccacattgaccag

SEQ ID NO: 1637269 - DNA, 15 bp, Homo sapiens
ttaccacattgacca

SEQ ID NO: 1637270 - DNA, 15 bp, Homo sapiens
tttaccacattgacc

SEQ ID NO: 1637271 - DNA, 15 bp, Homo sapiens
ttttaccacattgac

SEQ ID NO: 1637272 - DNA, 15 bp, Homo sapiens
gttttaccacattga

SEQ ID NO: 1637273 - DNA, 15 bp, Homo sapiens
ggttttaccacattg

SEQ ID NO: 1637274 - DNA, 15 bp, Homo sapiens
gggttttaccacatt

SEQ ID NO: 1637275 - DNA, 15 bp, Homo sapiens
ggggttttaccacat

SEQ ID NO: 1637276 - DNA, 15 bp, Homo sapiens
tggggttttaccaca

SEQ ID NO: 1637277 - DNA, 15 bp, Homo sapiens
atggggttttaccac

SEQ ID NO: 1637278 - DNA, 15 bp, Homo sapiens
ggagatggggtttta

SEQ ID NO: 1637279 - DNA, 15 bp, Homo sapiens
tggagatggggtttt

SEQ ID NO: 1637280 - DNA, 15 bp, Homo sapiens
gtggagatggggttt

SEQ ID NO: 1637281 - DNA, 15 bp, Homo sapiens
agtggagatggggtt

SEQ ID NO: 1637282 - DNA, 15 bp, Homo sapiens
tagtggagatggggt

SEQ ID NO: 1637283 - DNA, 15 bp, Homo sapiens
ttagtggagatgggg

SEQ ID NO: 1637284 - DNA, 15 bp, Homo sapiens
tttagtggagatggg

SEQ ID NO: 1637285 - DNA, 15 bp, Homo sapiens
ttttagtggagatgg

SEQ ID NO: 1637286 - DNA, 15 bp, Homo sapiens
tttttagtggagatg

SEQ ID NO: 1637287 - DNA, 15 bp, Homo sapiens
atttttagtggagat

SEQ ID NO: 1637288 - DNA, 15 bp, Homo sapiens
tatttttagtggaga

SEQ ID NO: 1637289 - DNA, 15 bp, Homo sapiens
gtatttttagtggag

SEQ ID NO: 1637290 - DNA, 15 bp, Homo sapiens
tgtatttttagtgga

SEQ ID NO: 1637291 - DNA, 15 bp, Homo sapiens
ttgtatttttagtgg

SEQ ID NO: 1637292 - DNA, 15 bp, Homo sapiens
tttgtatttttagtg

SEQ ID NO: 1637293 - DNA, 15 bp, Homo sapiens
tcctccaccatgccc

SEQ ID NO: 1637294 - DNA, 15 bp, Homo sapiens
atcctccaccatgcc

SEQ ID NO: 1637295 - DNA, 15 bp, Homo sapiens
catcctccaccatgc

SEQ ID NO: 1637296 - DNA, 15 bp, Homo sapiens
gcatcctccaccatg

SEQ ID NO: 1637297 - DNA, 15 bp, Homo sapiens
ggcatcctccaccat

SEQ ID NO: 1637298 - DNA, 15 bp, Homo sapiens
aggcatcctccacca

SEQ ID NO: 1637299 - DNA, 15 bp, Homo sapiens
acaggcatcctccac

SEQ ID NO: 1637300 - DNA, 15 bp, Homo sapiens
tacaggcatcctcca

SEQ ID NO: 1637301 - DNA, 15 bp, Homo sapiens
ttacaggcatcctcc

SEQ ID NO: 1637302 - DNA, 15 bp, Homo sapiens
attacaggcatcctc

SEQ ID NO: 1637303 - DNA, 15 bp, Homo sapiens
gattacaggcatcct

SEQ ID NO: 1637304 - DNA, 15 bp, Homo sapiens
ctatcctcctgcctc

SEQ ID NO: 1637305 - DNA, 15 bp, Homo sapiens
gctatcctcctgcct

SEQ ID NO: 1637306 - DNA, 15 bp, Homo sapiens
agctatcctcctgcc

SEQ ID NO: 1637307 - DNA, 15 bp, Homo sapiens
aagctatcctcctgc

SEQ ID NO: 1637308 - DNA, 15 bp, Homo sapiens
caagctatcctcctg

SEQ ID NO: 1637309 - DNA, 15 bp, Homo sapiens
tcaagctatcctcct

SEQ ID NO: 1637310 - DNA, 15 bp, Homo sapiens
ttcaagctatcctcc

SEQ ID NO: 1637311 - DNA, 15 bp, Homo sapiens
gttcaagctatcctc

SEQ ID NO: 1637312 - DNA, 15 bp, Homo sapiens
ggttcaagctatcct

SEQ ID NO: 1637313 - DNA, 15 bp, Homo sapiens
gggttcaagctatcc

SEQ ID NO: 1637314 - DNA, 15 bp, Homo sapiens
tgggttcaagctatc

SEQ ID NO: 1637315 - DNA, 15 bp, Homo sapiens
ctgggttcaagctat

SEQ ID NO: 1637316 - DNA, 15 bp, Homo sapiens
cctgggttcaagcta

SEQ ID NO: 1637317 - DNA, 15 bp, Homo sapiens
tcctgggttcaagct

SEQ ID NO: 1637318 - DNA, 15 bp, Homo sapiens
cctggagtgcagtgg

SEQ ID NO: 1637319 - DNA, 15 bp, Homo sapiens
gcctggagtgcagtg

SEQ ID NO: 1637320 - DNA, 15 bp, Homo sapiens
agcctggagtgcagt

SEQ ID NO: 1637321 - DNA, 15 bp, Homo sapiens
cagcctggagtgcag

SEQ ID NO: 1637322 - DNA, 15 bp, Homo sapiens
ccagcctggagtgca

SEQ ID NO: 1637323 - DNA, 15 bp, Homo sapiens
cccagcctggagtgc

SEQ ID NO: 1637324 - DNA, 15 bp, Homo sapiens
acccagcctggagtg

SEQ ID NO: 1637325 - DNA, 15 bp, Homo sapiens
cacccagcctggagt

SEQ ID NO: 1637326 - DNA, 15 bp, Homo sapiens
tcacccagcctggag

SEQ ID NO: 1637327 - DNA, 15 bp, Homo sapiens
gtcacccagcctgga

SEQ ID NO: 1637328 - DNA, 15 bp, Homo sapiens
tgtcacccagcctgg

SEQ ID NO: 1637329 - DNA, 15 bp, Homo sapiens
ctgtcacccagcctg

SEQ ID NO: 1637330 - DNA, 15 bp, Homo sapiens
tctgtcacccagcct

SEQ ID NO: 1637331 - DNA, 15 bp, Homo sapiens
ctctgtcacccagcc

SEQ ID NO: 1637332 - DNA, 15 bp, Homo sapiens
cctctgtcacccagc

SEQ ID NO: 1637333 - DNA, 15 bp, Homo sapiens
ccctctgtcacccag

SEQ ID NO: 1637334 - DNA, 15 bp, Homo sapiens
tccctctgtcaccca

SEQ ID NO: 1637335 - DNA, 15 bp, Homo sapiens
ctccctctgtcaccc

SEQ ID NO: 1637336 - DNA, 15 bp, Homo sapiens
tctccctctgtcacc

SEQ ID NO: 1637337 - DNA, 15 bp, Homo sapiens
gtctccctctgtcac

SEQ ID NO: 1637338 - DNA, 15 bp, Homo sapiens
ggtctccctctgtca

SEQ ID NO: 1637339 - DNA, 15 bp, Homo sapiens
gggtctccctctgtc

SEQ ID NO: 1637340 - DNA, 15 bp, Homo sapiens
agggtctccctctgt

SEQ ID NO: 1637341 - DNA, 15 bp, Homo sapiens
cagggtctccctctg

SEQ ID NO: 1637342 - DNA, 15 bp, Homo sapiens
acagggtctccctct

SEQ ID NO: 1637343 - DNA, 15 bp, Homo sapiens
gacagggtctccctc

SEQ ID NO: 1637344 - DNA, 15 bp, Homo sapiens
tgagacagggtctcc

SEQ ID NO: 1637345 - DNA, 15 bp, Homo sapiens
aattttttgagacag

SEQ ID NO: 1637346 - DNA, 15 bp, Homo sapiens
taattttttgagaca

SEQ ID NO: 1637347 - DNA, 15 bp, Homo sapiens
ttaattttttgagac

SEQ ID NO: 1637348 - DNA, 15 bp, Homo sapiens
attaattttttgaga

SEQ ID NO: 1637349 - DNA, 15 bp, Homo sapiens
tattaattttttgag

SEQ ID NO: 1637350 - DNA, 15 bp, Homo sapiens
ttattaattttttga

SEQ ID NO: 1637351 - DNA, 15 bp, Homo sapiens
tttattaattttttg

SEQ ID NO: 1637352 - DNA, 15 bp, Homo sapiens
atttattaatttttt

SEQ ID NO: 1637353 - DNA, 15 bp, Homo sapiens
tatttattaattttt

SEQ ID NO: 1637354 - DNA, 15 bp, Homo sapiens
ttatttattaatttt

SEQ ID NO: 1637355 - DNA, 15 bp, Homo sapiens
tttatttattaattt

SEQ ID NO: 1637356 - DNA, 15 bp, Homo sapiens
atttatttattaatt

SEQ ID NO: 1637357 - DNA, 15 bp, Homo sapiens
tatttatttattaat

SEQ ID NO: 1637358 - DNA, 15 bp, Homo sapiens
gtatttatttattaa

SEQ ID NO: 1637359 - DNA, 15 bp, Homo sapiens
tgtatttatttatta

SEQ ID NO: 1637360 - DNA, 15 bp, Homo sapiens
gtgtatttatttatt

SEQ ID NO: 1637361 - DNA, 15 bp, Homo sapiens
tgtgtatttatttat

SEQ ID NO: 1637362 - DNA, 15 bp, Homo sapiens
ctgtgtatttattta

SEQ ID NO: 1637363 - DNA, 15 bp, Homo sapiens
tctgtgtatttattt

SEQ ID NO: 1637364 - DNA, 15 bp, Homo sapiens
ttctgtgtatttatt

SEQ ID NO: 1637365 - DNA, 15 bp, Homo sapiens
cttctgtgtatttat

SEQ ID NO: 1637366 - DNA, 15 bp, Homo sapiens
tcttctgtgtattta

SEQ ID NO: 1637367 - DNA, 15 bp, Homo sapiens
ttcttctgtgtattt

SEQ ID NO: 1637368 - DNA, 15 bp, Homo sapiens
cttcttctgtgtatt

SEQ ID NO: 1637369 - DNA, 15 bp, Homo sapiens
tcttcttctgtgtat

SEQ ID NO: 1637370 - DNA, 15 bp, Homo sapiens
atcttcttctgtgta

SEQ ID NO: 1637371 - DNA, 15 bp, Homo sapiens
tatcttcttctgtgt

SEQ ID NO: 1637372 - DNA, 15 bp, Homo sapiens
ttatcttcttctgtg

SEQ ID NO: 1637373 - DNA, 15 bp, Homo sapiens
tttatcttcttctgt

SEQ ID NO: 1637374 - DNA, 15 bp, Homo sapiens
ctttatcttcttctg

SEQ ID NO: 1637375 - DNA, 15 bp, Homo sapiens
cctttatcttcttct

SEQ ID NO: 1637376 - DNA, 15 bp, Homo sapiens
tcctttatcttcttc

SEQ ID NO: 1637377 - DNA, 15 bp, Homo sapiens
gtcctttatcttctt

SEQ ID NO: 1637378 - DNA, 15 bp, Homo sapiens
agtcctttatcttct

SEQ ID NO: 1637379 - DNA, 15 bp, Homo sapiens
aagtcctttatcttc

SEQ ID NO: 1637380 - DNA, 15 bp, Homo sapiens
taagtcctttatctt

SEQ ID NO: 1637381 - DNA, 15 bp, Homo sapiens
ataagtcctttatct

SEQ ID NO: 1637382 - DNA, 15 bp, Homo sapiens
gataagtcctttatc

SEQ ID NO: 1637383 - DNA, 15 bp, Homo sapiens
ggataagtcctttat

SEQ ID NO: 1637384 - DNA, 15 bp, Homo sapiens
gggataagtccttta

SEQ ID NO: 1637385 - DNA, 15 bp, Homo sapiens
ggggataagtccttt

SEQ ID NO: 1637386 - DNA, 15 bp, Homo sapiens
aggggataagtcctt

SEQ ID NO: 1637387 - DNA, 15 bp, Homo sapiens
taggggataagtcct

SEQ ID NO: 1637388 - DNA, 15 bp, Homo sapiens
ttaggggataagtcc

SEQ ID NO: 1637389 - DNA, 15 bp, Homo sapiens
cttaggggataagtc

SEQ ID NO: 1637390 - DNA, 15 bp, Homo sapiens
ccttaggggataagt

SEQ ID NO: 1637391 - DNA, 15 bp, Homo sapiens
gccttaggggataag

SEQ ID NO: 1637392 - DNA, 15 bp, Homo sapiens
tgccttaggggataa

SEQ ID NO: 1637393 - DNA, 15 bp, Homo sapiens
ctgccttaggggata

SEQ ID NO: 1637394 - DNA, 15 bp, Homo sapiens
cctgccttaggggat

SEQ ID NO: 1637395 - DNA, 15 bp, Homo sapiens
tcctgccttagggga

SEQ ID NO: 1637396 - DNA, 15 bp, Homo sapiens
ttcctgccttagggg

SEQ ID NO: 1637397 - DNA, 15 bp, Homo sapiens
attcctgccttaggg

SEQ ID NO: 1637398 - DNA, 15 bp, Homo sapiens
gattcctgccttagg

SEQ ID NO: 1637399 - DNA, 15 bp, Homo sapiens
tgattcctgccttag

SEQ ID NO: 1637400 - DNA, 15 bp, Homo sapiens
ttgattcctgcctta

SEQ ID NO: 1637401 - DNA, 15 bp, Homo sapiens
tttgattcctgcctt

SEQ ID NO: 1637402 - DNA, 15 bp, Homo sapiens
gtttgattcctgcct

SEQ ID NO: 1637403 - DNA, 15 bp, Homo sapiens
ggtttgattcctgcc

SEQ ID NO: 1637404 - DNA, 15 bp, Homo sapiens
gggtttgattcctgc

SEQ ID NO: 1637405 - DNA, 15 bp, Homo sapiens
agggtttgattcctg

SEQ ID NO: 1637406 - DNA, 15 bp, Homo sapiens
cagggtttgattcct

SEQ ID NO: 1637407 - DNA, 15 bp, Homo sapiens
tcagggtttgattcc

SEQ ID NO: 1637408 - DNA, 15 bp, Homo sapiens
ttcagggtttgattc

SEQ ID NO: 1637409 - DNA, 15 bp, Homo sapiens
gttcagggtttgatt

SEQ ID NO: 1637410 - DNA, 15 bp, Homo sapiens
tgttcagggtttgat

SEQ ID NO: 1637411 - DNA, 15 bp, Homo sapiens
gtgttcagggtttga

SEQ ID NO: 1637412 - DNA, 15 bp, Homo sapiens
tgtgttcagggtttg

SEQ ID NO: 1637413 - DNA, 15 bp, Homo sapiens
ctgtgttcagggttt

SEQ ID NO: 1637414 - DNA, 15 bp, Homo sapiens
cctgtgttcagggtt

SEQ ID NO: 1637415 - DNA, 15 bp, Homo sapiens
gcctgtgttcagggt

SEQ ID NO: 1637416 - DNA, 15 bp, Homo sapiens
ggcctgtgttcaggg

SEQ ID NO: 1637417 - DNA, 15 bp, Homo sapiens
tggcctgtgttcagg

SEQ ID NO: 1637418 - DNA, 15 bp, Homo sapiens
gtggcctgtgttcag

SEQ ID NO: 1637419 - DNA, 15 bp, Homo sapiens
ggtggcctgtgttca

SEQ ID NO: 1637420 - DNA, 15 bp, Homo sapiens
tggtggcctgtgttc

SEQ ID NO: 1637421 - DNA, 15 bp, Homo sapiens
atggtggcctgtgtt

SEQ ID NO: 1637422 - DNA, 15 bp, Homo sapiens
aatggtggcctgtgt

SEQ ID NO: 1637423 - DNA, 15 bp, Homo sapiens
caatggtggcctgtg

SEQ ID NO: 1637424 - DNA, 15 bp, Homo sapiens
acaatggtggcctgt

SEQ ID NO: 1637425 - DNA, 15 bp, Homo sapiens
cacaatggtggcctg

SEQ ID NO: 1637426 - DNA, 15 bp, Homo sapiens
tcacaatggtggcct

SEQ ID NO: 1637427 - DNA, 15 bp, Homo sapiens
ttcacaatggtggcc

SEQ ID NO: 1637428 - DNA, 15 bp, Homo sapiens
tttcacaatggtggc

SEQ ID NO: 1637429 - DNA, 15 bp, Homo sapiens
ttttcacaatggtgg

SEQ ID NO: 1637430 - DNA, 15 bp, Homo sapiens
cttttcacaatggtg

SEQ ID NO: 1637431 - DNA, 15 bp, Homo sapiens
tcttttcacaatggt

SEQ ID NO: 1637432 - DNA, 15 bp, Homo sapiens
ttcttttcacaatgg

SEQ ID NO: 1637433 - DNA, 15 bp, Homo sapiens
tttcttttcacaatg

SEQ ID NO: 1637434 - DNA, 15 bp, Homo sapiens
ttttcttttcacaat

SEQ ID NO: 1637435 - DNA, 15 bp, Homo sapiens
tttttcttttcacaa

SEQ ID NO: 1637436 - DNA, 15 bp, Homo sapiens
ctttttcttttcaca

SEQ ID NO: 1637437 - DNA, 15 bp, Homo sapiens
gctttttcttttcac

SEQ ID NO: 1637438 - DNA, 15 bp, Homo sapiens
tgctttttcttttca

SEQ ID NO: 1637439 - DNA, 15 bp, Homo sapiens
gtgctttttcttttc

SEQ ID NO: 1637440 - DNA, 15 bp, Homo sapiens
tgtgctttttctttt

SEQ ID NO: 1637441 - DNA, 15 bp, Homo sapiens
ctgtgctttttcttt

SEQ ID NO: 1637442 - DNA, 15 bp, Homo sapiens
gctgtgctttttctt

SEQ ID NO: 1637443 - DNA, 15 bp, Homo sapiens
ggctgtgctttttct

SEQ ID NO: 1637444 - DNA, 15 bp, Homo sapiens
tggctgtgctttttc

SEQ ID NO: 1637445 - DNA, 15 bp, Homo sapiens
gtggctgtgcttttt

SEQ ID NO: 1637446 - DNA, 15 bp, Homo sapiens
tgtggctgtgctttt

SEQ ID NO: 1637447 - DNA, 15 bp, Homo sapiens
atgtggctgtgcttt

SEQ ID NO: 1637448 - DNA, 15 bp, Homo sapiens
catgtggctgtgctt

SEQ ID NO: 1637449 - DNA, 15 bp, Homo sapiens
ccatgtggctgtgct

SEQ ID NO: 1637450 - DNA, 15 bp, Homo sapiens
accatgtggctgtgc

SEQ ID NO: 1637451 - DNA, 15 bp, Homo sapiens
aaccatgtggctgtg

SEQ ID NO: 1637452 - DNA, 15 bp, Homo sapiens
taaccatgtggctgt

SEQ ID NO: 1637453 - DNA, 15 bp, Homo sapiens
gtaaccatgtggctg

SEQ ID NO: 1637454 - DNA, 15 bp, Homo sapiens
tgtaaccatgtggct

SEQ ID NO: 1637455 - DNA, 15 bp, Homo sapiens
ttgtaaccatgtggc

SEQ ID NO: 1637456 - DNA, 15 bp, Homo sapiens
cttgtaaccatgtgg

SEQ ID NO: 1637457 - DNA, 15 bp, Homo sapiens
ccttgtaaccatgtg

SEQ ID NO: 1637458 - DNA, 15 bp, Homo sapiens
accttgtaaccatgt

SEQ ID NO: 1637459 - DNA, 15 bp, Homo sapiens
gaccttgtaaccatg

SEQ ID NO: 1637460 - DNA, 15 bp, Homo sapiens
tgaccttgtaaccat

SEQ ID NO: 1637461 - DNA, 15 bp, Homo sapiens
ttgaccttgtaacca

SEQ ID NO: 1637462 - DNA, 15 bp, Homo sapiens
cttgaccttgtaacc

SEQ ID NO: 1637463 - DNA, 15 bp, Homo sapiens
gcttgaccttgtaac

SEQ ID NO: 1637464 - DNA, 15 bp, Homo sapiens
agcttgaccttgtaa

SEQ ID NO: 1637465 - DNA, 15 bp, Homo sapiens
gagcttgaccttgta

SEQ ID NO: 1637466 - DNA, 15 bp, Homo sapiens
ggagcttgaccttgt

SEQ ID NO: 1637467 - DNA, 15 bp, Homo sapiens
gggagcttgaccttg

SEQ ID NO: 1637468 - DNA, 15 bp, Homo sapiens
tgggagcttgacctt

SEQ ID NO: 1637469 - DNA, 15 bp, Homo sapiens
ttgggagcttgacct

SEQ ID NO: 1637470 - DNA, 15 bp, Homo sapiens
cttgggagcttgacc

SEQ ID NO: 1637471 - DNA, 15 bp, Homo sapiens
ccttgggagcttgac

SEQ ID NO: 1637472 - DNA, 15 bp, Homo sapiens
tccttgggagcttga

SEQ ID NO: 1637473 - DNA, 15 bp, Homo sapiens
gtccttgggagcttg

SEQ ID NO: 1637474 - DNA, 15 bp, Homo sapiens
tgtccttgggagctt

SEQ ID NO: 1637475 - DNA, 15 bp, Homo sapiens
atgtccttgggagct

SEQ ID NO: 1637476 - DNA, 15 bp, Homo sapiens
tatgtccttgggagc

SEQ ID NO: 1637477 - DNA, 15 bp, Homo sapiens
gtatgtccttgggag

SEQ ID NO: 1637478 - DNA, 15 bp, Homo sapiens
tgtatgtccttggga

SEQ ID NO: 1637479 - DNA, 15 bp, Homo sapiens
ttgtatgtccttggg

SEQ ID NO: 1637480 - DNA, 15 bp, Homo sapiens
tttgtatgtccttgg

SEQ ID NO: 1637481 - DNA, 15 bp, Homo sapiens
ttttgtatgtccttg

SEQ ID NO: 1637482 - DNA, 15 bp, Homo sapiens
gttttgtatgtcctt

SEQ ID NO: 1637483 - DNA, 15 bp, Homo sapiens
tgttttgtatgtcct

SEQ ID NO: 1637484 - DNA, 15 bp, Homo sapiens
ttgttttgtatgtcc

SEQ ID NO: 1637485 - DNA, 15 bp, Homo sapiens
cttgttttgtatgtc

SEQ ID NO: 1637486 - DNA, 15 bp, Homo sapiens
tcttgttttgtatgt

SEQ ID NO: 1637487 - DNA, 15 bp, Homo sapiens
ttcttgttttgtatg

SEQ ID NO: 1637488 - DNA, 15 bp, Homo sapiens
cttcttgttttgtat

SEQ ID NO: 1637489 - DNA, 15 bp, Homo sapiens
ccttcttgttttgta

SEQ ID NO: 1637490 - DNA, 15 bp, Homo sapiens
tccttcttgttttgt

SEQ ID NO: 1637491 - DNA, 15 bp, Homo sapiens
ttccttcttgttttg

SEQ ID NO: 1637492 - DNA, 15 bp, Homo sapiens
tttccttcttgtttt

SEQ ID NO: 1637493 - DNA, 15 bp, Homo sapiens
gtttccttcttgttt

SEQ ID NO: 1637494 - DNA, 15 bp, Homo sapiens
ggtttccttcttgtt

SEQ ID NO: 1637495 - DNA, 15 bp, Homo sapiens
aggtttccttcttgt

SEQ ID NO: 1637496 - DNA, 15 bp, Homo sapiens
gaggtttccttcttg

SEQ ID NO: 1637497 - DNA, 15 bp, Homo sapiens
tgaggtttccttctt

SEQ ID NO: 1637498 - DNA, 15 bp, Homo sapiens
atgaggtttccttct

SEQ ID NO: 1637499 - DNA, 15 bp, Homo sapiens
gatgaggtttccttc

SEQ ID NO: 1637500 - DNA, 15 bp, Homo sapiens
ggatgaggtttcctt

SEQ ID NO: 1637501 - DNA, 15 bp, Homo sapiens
tggatgaggtttcct

SEQ ID NO: 1637502 - DNA, 15 bp, Homo sapiens
ctggatgaggtttcc

SEQ ID NO: 1637503 - DNA, 15 bp, Homo sapiens
actggatgaggtttc

SEQ ID NO: 1637504 - DNA, 15 bp, Homo sapiens
aactggatgaggttt

SEQ ID NO: 1637505 - DNA, 15 bp, Homo sapiens
aaactggatgaggtt

SEQ ID NO: 1637506 - DNA, 15 bp, Homo sapiens
aaaactggatgaggt

SEQ ID NO: 1637507 - DNA, 15 bp, Homo sapiens
aaaaactggatgagg

SEQ ID NO: 1637508 - DNA, 15 bp, Homo sapiens
aaaaaactggatgag

SEQ ID NO: 1637509 - DNA, 15 bp, Homo sapiens
gaaaaaactggatga

SEQ ID NO: 1637510 - DNA, 15 bp, Homo sapiens
tgaaaaaactggatg

SEQ ID NO: 1637511 - DNA, 15 bp, Homo sapiens
ctgaaaaaactggat

SEQ ID NO: 1637512 - DNA, 15 bp, Homo sapiens
cctgaaaaaactgga

SEQ ID NO: 1637513 - DNA, 15 bp, Homo sapiens
ccctgaaaaaactgg

SEQ ID NO: 1637514 - DNA, 15 bp, Homo sapiens
tccctgaaaaaactg

SEQ ID NO: 1637515 - DNA, 15 bp, Homo sapiens
gtccctgaaaaaact

SEQ ID NO: 1637516 - DNA, 15 bp, Homo sapiens
ggtccctgaaaaaac

SEQ ID NO: 1637517 - DNA, 15 bp, Homo sapiens
aggtccctgaaaaaa

SEQ ID NO: 1637518 - DNA, 15 bp, Homo sapiens
caggtccctgaaaaa

SEQ ID NO: 1637519 - DNA, 15 bp, Homo sapiens
gcaggtccctgaaaa

SEQ ID NO: 1637520 - DNA, 15 bp, Homo sapiens
tgcaggtccctgaaa

SEQ ID NO: 1637521 - DNA, 15 bp, Homo sapiens
ctgcaggtccctgaa

SEQ ID NO: 1637522 - DNA, 15 bp, Homo sapiens
gctgcaggtccctga

SEQ ID NO: 1637523 - DNA, 15 bp, Homo sapiens
tgctgcaggtccctg

SEQ ID NO: 1637524 - DNA, 15 bp, Homo sapiens
ttgctgcaggtccct

SEQ ID NO: 1637525 - DNA, 15 bp, Homo sapiens
tttgctgcaggtccc

SEQ ID NO: 1637526 - DNA, 15 bp, Homo sapiens
ctttgctgcaggtcc

SEQ ID NO: 1637527 - DNA, 15 bp, Homo sapiens
actttgctgcaggtc

SEQ ID NO: 1637528 - DNA, 15 bp, Homo sapiens
aactttgctgcaggt

SEQ ID NO: 1637529 - DNA, 15 bp, Homo sapiens
aaactttgctgcagg

SEQ ID NO: 1637530 - DNA, 15 bp, Homo sapiens
caaactttgctgcag

SEQ ID NO: 1637531 - DNA, 15 bp, Homo sapiens
acaaactttgctgca

SEQ ID NO: 1637532 - DNA, 15 bp, Homo sapiens
tacaaactttgctgc

SEQ ID NO: 1637533 - DNA, 15 bp, Homo sapiens
gtacaaactttgctg

SEQ ID NO: 1637534 - DNA, 15 bp, Homo sapiens
ggtacaaactttgct

SEQ ID NO: 1637535 - DNA, 15 bp, Homo sapiens
aggtacaaactttgc

SEQ ID NO: 1637536 - DNA, 15 bp, Homo sapiens
caggtacaaactttg

SEQ ID NO: 1637537 - DNA, 15 bp, Homo sapiens
tcaggtacaaacttt

SEQ ID NO: 1637538 - DNA, 15 bp, Homo sapiens
atcaggtacaaactt

SEQ ID NO: 1637539 - DNA, 15 bp, Homo sapiens
tatcaggtacaaact

SEQ ID NO: 1637540 - DNA, 15 bp, Homo sapiens
ttatcaggtacaaac

SEQ ID NO: 1637541 - DNA, 15 bp, Homo sapiens
tttatcaggtacaaa

SEQ ID NO: 1637542 - DNA, 15 bp, Homo sapiens
atttatcaggtacaa

SEQ ID NO: 1637543 - DNA, 15 bp, Homo sapiens
aatttatcaggtaca

SEQ ID NO: 1637544 - DNA, 15 bp, Homo sapiens
aaatttatcaggtac

SEQ ID NO: 1637545 - DNA, 15 bp, Homo sapiens
taaatttatcaggta

SEQ ID NO: 1637546 - DNA, 15 bp, Homo sapiens
gtaaatttatcaggt

SEQ ID NO: 1637547 - DNA, 15 bp, Homo sapiens
agtaaatttatcagg

SEQ ID NO: 1637548 - DNA, 15 bp, Homo sapiens
cagtaaatttatcag

SEQ ID NO: 1637549 - DNA, 15 bp, Homo sapiens
ccagtaaatttatca

SEQ ID NO: 1637550 - DNA, 15 bp, Homo sapiens
cccagtaaatttatc

SEQ ID NO: 1637551 - DNA, 15 bp, Homo sapiens
gcccagtaaatttat

SEQ ID NO: 1637552 - DNA, 15 bp, Homo sapiens
ggcccagtaaattta

SEQ ID NO: 1637553 - DNA, 15 bp, Homo sapiens
tggcccagtaaattt

SEQ ID NO: 1637554 - DNA, 15 bp, Homo sapiens
atggcccagtaaatt

SEQ ID NO: 1637555 - DNA, 15 bp, Homo sapiens
gatggcccagtaaat

SEQ ID NO: 1637556 - DNA, 15 bp, Homo sapiens
agatggcccagtaaa

SEQ ID NO: 1637557 - DNA, 15 bp, Homo sapiens
aagatggcccagtaa

SEQ ID NO: 1637558 - DNA, 15 bp, Homo sapiens
caagatggcccagta

SEQ ID NO: 1637559 - DNA, 15 bp, Homo sapiens
tcaagatggcccagt

SEQ ID NO: 1637560 - DNA, 15 bp, Homo sapiens
ttcaagatggcccag

SEQ ID NO: 1637561 - DNA, 15 bp, Homo sapiens
gttcaagatggccca

SEQ ID NO: 1637562 - DNA, 15 bp, Homo sapiens
tgttcaagatggccc

SEQ ID NO: 1637563 - DNA, 15 bp, Homo sapiens
ctgttcaagatggcc

SEQ ID NO: 1637564 - DNA, 15 bp, Homo sapiens
gctgttcaagatggc

SEQ ID NO: 1637565 - DNA, 15 bp, Homo sapiens
tgctgttcaagatgg

SEQ ID NO: 1637566 - DNA, 15 bp, Homo sapiens
ctgctgttcaagatg

SEQ ID NO: 1637567 - DNA, 15 bp, Homo sapiens
cctgctgttcaagat

SEQ ID NO: 1637568 - DNA, 15 bp, Homo sapiens
acctgctgttcaaga

SEQ ID NO: 1637569 - DNA, 15 bp, Homo sapiens
aacctgctgttcaag

SEQ ID NO: 1637570 - DNA, 15 bp, Homo sapiens
aaacctgctgttcaa

SEQ ID NO: 1637571 - DNA, 15 bp, Homo sapiens
taaacctgctgttca

SEQ ID NO: 1637572 - DNA, 15 bp, Homo sapiens
gtaaacctgctgttc

SEQ ID NO: 1637573 - DNA, 15 bp, Homo sapiens
tgtaaacctgctgtt

SEQ ID NO: 1637574 - DNA, 15 bp, Homo sapiens
ctgtaaacctgctgt

SEQ ID NO: 1637575 - DNA, 15 bp, Homo sapiens
cctgtaaacctgctg

SEQ ID NO: 1637576 - DNA, 15 bp, Homo sapiens
acctgtaaacctgct

SEQ ID NO: 1637577 - DNA, 15 bp, Homo sapiens
cacctgtaaacctgc

SEQ ID NO: 1637578 - DNA, 15 bp, Homo sapiens
acacctgtaaacctg

SEQ ID NO: 1637579 - DNA, 15 bp, Homo sapiens
gacacctgtaaacct

SEQ ID NO: 1637580 - DNA, 15 bp, Homo sapiens
ggacacctgtaaacc

SEQ ID NO: 1637581 - DNA, 15 bp, Homo sapiens
aggacacctgtaaac

SEQ ID NO: 1637582 - DNA, 15 bp, Homo sapiens
taggacacctgtaaa

SEQ ID NO: 1637583 - DNA, 15 bp, Homo sapiens
ttaggacacctgtaa

SEQ ID NO: 1637584 - DNA, 15 bp, Homo sapiens
cttaggacacctgta

SEQ ID NO: 1637585 - DNA, 15 bp, Homo sapiens
gcttaggacacctgt

SEQ ID NO: 1637586 - DNA, 15 bp, Homo sapiens
agcttaggacacctg

SEQ ID NO: 1637587 - DNA, 15 bp, Homo sapiens
gagcttaggacacct

SEQ ID NO: 1637588 - DNA, 15 bp, Homo sapiens
tgagcttaggacacc

SEQ ID NO: 1637589 - DNA, 15 bp, Homo sapiens
atgagcttaggacac

SEQ ID NO: 1637590 - DNA, 15 bp, Homo sapiens
catgagcttaggaca

SEQ ID NO: 1637591 - DNA, 15 bp, Homo sapiens
acatgagcttaggac

SEQ ID NO: 1637592 - DNA, 15 bp, Homo sapiens
aacatgagcttagga

SEQ ID NO: 1637593 - DNA, 15 bp, Homo sapiens
gaacatgagcttagg

SEQ ID NO: 1637594 - DNA, 15 bp, Homo sapiens
agaacatgagcttag

SEQ ID NO: 1637595 - DNA, 15 bp, Homo sapiens
tagaacatgagctta

SEQ ID NO: 1637596 - DNA, 15 bp, Homo sapiens
atagaacatgagctt

SEQ ID NO: 1637597 - DNA, 15 bp, Homo sapiens
gatagaacatgagct

SEQ ID NO: 1637598 - DNA, 15 bp, Homo sapiens
ggatagaacatgagc

SEQ ID NO: 1637599 - DNA, 15 bp, Homo sapiens
aggatagaacatgag

SEQ ID NO: 1637600 - DNA, 15 bp, Homo sapiens
taggatagaacatga

SEQ ID NO: 1637601 - DNA, 15 bp, Homo sapiens
ttaggatagaacatg

SEQ ID NO: 1637602 - DNA, 15 bp, Homo sapiens
cttaggatagaacat

SEQ ID NO: 1637603 - DNA, 15 bp, Homo sapiens
tcttaggatagaaca

SEQ ID NO: 1637604 - DNA, 15 bp, Homo sapiens
atcttaggatagaac

SEQ ID NO: 1637605 - DNA, 15 bp, Homo sapiens
tatcttaggatagaa

SEQ ID NO: 1637606 - DNA, 15 bp, Homo sapiens
gtatcttaggataga

SEQ ID NO: 1637607 - DNA, 15 bp, Homo sapiens
ggtatcttaggatag

SEQ ID NO: 1637608 - DNA, 15 bp, Homo sapiens
gggtatcttaggata

SEQ ID NO: 1637609 - DNA, 15 bp, Homo sapiens
ggggtatcttaggat

SEQ ID NO: 1637610 - DNA, 15 bp, Homo sapiens
aggggtatcttagga

SEQ ID NO: 1637611 - DNA, 15 bp, Homo sapiens
gaggggtatcttagg

SEQ ID NO: 1637612 - DNA, 15 bp, Homo sapiens
agaggggtatcttag

SEQ ID NO: 1637613 - DNA, 15 bp, Homo sapiens
aagaggggtatctta

SEQ ID NO: 1637614 - DNA, 15 bp, Homo sapiens
aaagaggggtatctt

SEQ ID NO: 1637615 - DNA, 15 bp, Homo sapiens
taaagaggggtatct

SEQ ID NO: 1637616 - DNA, 15 bp, Homo sapiens
ataaagaggggtatc

SEQ ID NO: 1637617 - DNA, 15 bp, Homo sapiens
cataaagaggggtat

SEQ ID NO: 1637618 - DNA, 15 bp, Homo sapiens
tcataaagaggggta

SEQ ID NO: 1637619 - DNA, 15 bp, Homo sapiens
gtcataaagaggggt

SEQ ID NO: 1637620 - DNA, 15 bp, Homo sapiens
tgtcataaagagggg

SEQ ID NO: 1637621 - DNA, 15 bp, Homo sapiens
ctgtcataaagaggg

SEQ ID NO: 1637622 - DNA, 15 bp, Homo sapiens
tctgtcataaagagg

SEQ ID NO: 1637623 - DNA, 15 bp, Homo sapiens
ttctgtcataaagag

SEQ ID NO: 1637624 - DNA, 15 bp, Homo sapiens
gttctgtcataaaga

SEQ ID NO: 1637625 - DNA, 15 bp, Homo sapiens
tgttctgtcataaag

SEQ ID NO: 1637626 - DNA, 15 bp, Homo sapiens
ttgttctgtcataaa

SEQ ID NO: 1637627 - DNA, 15 bp, Homo sapiens
attgttctgtcataa

SEQ ID NO: 1637628 - DNA, 15 bp, Homo sapiens
tattgttctgtcata

SEQ ID NO: 1637629 - DNA, 15 bp, Homo sapiens
gtattgttctgtcat

SEQ ID NO: 1637630 - DNA, 15 bp, Homo sapiens
tgtattgttctgtca

SEQ ID NO: 1637631 - DNA, 15 bp, Homo sapiens
ctgtattgttctgtc

SEQ ID NO: 1637632 - DNA, 15 bp, Homo sapiens
tctgtattgttctgt

SEQ ID NO: 1637633 - DNA, 15 bp, Homo sapiens
ttctgtattgttctg

SEQ ID NO: 1637634 - DNA, 15 bp, Homo sapiens
tttctgtattgttct

SEQ ID NO: 1637635 - DNA, 15 bp, Homo sapiens
ctttctgtattgttc

SEQ ID NO: 1637636 - DNA, 15 bp, Homo sapiens
tctttctgtattgtt

SEQ ID NO: 1637637 - DNA, 15 bp, Homo sapiens
gtctttctgtattgt

SEQ ID NO: 1637638 - DNA, 15 bp, Homo sapiens
tgtctttctgtattg

SEQ ID NO: 1637639 - DNA, 15 bp, Homo sapiens
gtgtctttctgtatt

SEQ ID NO: 1637640 - DNA, 15 bp, Homo sapiens
tgtgtctttctgtat

SEQ ID NO: 1637641 - DNA, 15 bp, Homo sapiens
gtgtgtctttctgta

SEQ ID NO: 1637642 - DNA, 15 bp, Homo sapiens
tgtgtgtctttctgt

SEQ ID NO: 1637643 - DNA, 15 bp, Homo sapiens
ttgtgtgtctttctg

SEQ ID NO: 1637644 - DNA, 15 bp, Homo sapiens
gttgtgtgtctttct

SEQ ID NO: 1637645 - DNA, 15 bp, Homo sapiens
tgttgtgtgtctttc

SEQ ID NO: 1637646 - DNA, 15 bp, Homo sapiens
ctgttgtgtgtcttt

SEQ ID NO: 1637647 - DNA, 15 bp, Homo sapiens
tctgttgtgtgtctt

SEQ ID NO: 1637648 - DNA, 15 bp, Homo sapiens
atctgttgtgtgtct

SEQ ID NO: 1637649 - DNA, 15 bp, Homo sapiens
aatctgttgtgtgtc

SEQ ID NO: 1637650 - DNA, 15 bp, Homo sapiens
aaatctgttgtgtgt

SEQ ID NO: 1637651 - DNA, 15 bp, Homo sapiens
caaatctgttgtgtg

SEQ ID NO: 1637652 - DNA, 15 bp, Homo sapiens
gcaaatctgttgtgt

SEQ ID NO: 1637653 - DNA, 15 bp, Homo sapiens
agcaaatctgttgtg

SEQ ID NO: 1637654 - DNA, 15 bp, Homo sapiens
tagcaaatctgttgt

SEQ ID NO: 1637655 - DNA, 15 bp, Homo sapiens
gtagcaaatctgttg

SEQ ID NO: 1637656 - DNA, 15 bp, Homo sapiens
tgtagcaaatctgtt

SEQ ID NO: 1637657 - DNA, 15 bp, Homo sapiens
ttgtagcaaatctgt

SEQ ID NO: 1637658 - DNA, 15 bp, Homo sapiens
gttgtagcaaatctg

SEQ ID NO: 1637659 - DNA, 15 bp, Homo sapiens
agttgtagcaaatct

SEQ ID NO: 1637660 - DNA, 15 bp, Homo sapiens
aagttgtagcaaatc

SEQ ID NO: 1637661 - DNA, 15 bp, Homo sapiens
taagttgtagcaaat

SEQ ID NO: 1637662 - DNA, 15 bp, Homo sapiens
ttaagttgtagcaaa

SEQ ID NO: 1637663 - DNA, 15 bp, Homo sapiens
cttaagttgtagcaa

SEQ ID NO: 1637664 - DNA, 15 bp, Homo sapiens
tcttaagttgtagca

SEQ ID NO: 1637665 - DNA, 15 bp, Homo sapiens
gtcttaagttgtagc

SEQ ID NO: 1637666 - DNA, 15 bp, Homo sapiens
agtcttaagttgtag

SEQ ID NO: 1637667 - DNA, 15 bp, Homo sapiens
tagtcttaagttgta

SEQ ID NO: 1637668 - DNA, 15 bp, Homo sapiens
ctagtcttaagttgt

SEQ ID NO: 1637669 - DNA, 15 bp, Homo sapiens
gctagtcttaagttg

SEQ ID NO: 1637670 - DNA, 15 bp, Homo sapiens
ggctagtcttaagtt

SEQ ID NO: 1637671 - DNA, 15 bp, Homo sapiens
aggctagtcttaagt

SEQ ID NO: 1637672 - DNA, 15 bp, Homo sapiens
gaggctagtcttaag

SEQ ID NO: 1637673 - DNA, 15 bp, Homo sapiens
tgaggctagtcttaa

SEQ ID NO: 1637674 - DNA, 15 bp, Homo sapiens
atgaggctagtctta

SEQ ID NO: 1637675 - DNA, 15 bp, Homo sapiens
tatgaggctagtctt

SEQ ID NO: 1637676 - DNA, 15 bp, Homo sapiens
ttatgaggctagtct

SEQ ID NO: 1637677 - DNA, 15 bp, Homo sapiens
tttatgaggctagtc

SEQ ID NO: 1637678 - DNA, 15 bp, Homo sapiens
atttatgaggctagt

SEQ ID NO: 1637679 - DNA, 15 bp, Homo sapiens
gatttatgaggctag

SEQ ID NO: 1637680 - DNA, 15 bp, Homo sapiens
ggatttatgaggcta

SEQ ID NO: 1637681 - DNA, 15 bp, Homo sapiens
tggatttatgaggct

SEQ ID NO: 1637682 - DNA, 15 bp, Homo sapiens
atggatttatgaggc

SEQ ID NO: 1637683 - DNA, 15 bp, Homo sapiens
aatggatttatgagg

SEQ ID NO: 1637684 - DNA, 15 bp, Homo sapiens
aaatggatttatgag

SEQ ID NO: 1637685 - DNA, 15 bp, Homo sapiens
aaaatggatttatga

SEQ ID NO: 1637686 - DNA, 15 bp, Homo sapiens
aaaaatggatttatg

SEQ ID NO: 1637687 - DNA, 15 bp, Homo sapiens
aaaaaatggatttat

SEQ ID NO: 1637688 - DNA, 15 bp, Homo sapiens
gaaaaaatggattta

SEQ ID NO: 1637689 - DNA, 15 bp, Homo sapiens
tgaaaaaatggattt

SEQ ID NO: 1637690 - DNA, 15 bp, Homo sapiens
gtgaaaaaatggatt

SEQ ID NO: 1637691 - DNA, 15 bp, Homo sapiens
agtgaaaaaatggat

SEQ ID NO: 1637692 - DNA, 15 bp, Homo sapiens
tagtgaaaaaatgga

SEQ ID NO: 1637693 - DNA, 15 bp, Homo sapiens
ttagtgaaaaaatgg

SEQ ID NO: 1637694 - DNA, 15 bp, Homo sapiens
attagtgaaaaaatg

SEQ ID NO: 1637695 - DNA, 15 bp, Homo sapiens
gattagtgaaaaaat

SEQ ID NO: 1637696 - DNA, 15 bp, Homo sapiens
tgattagtgaaaaaa

SEQ ID NO: 1637697 - DNA, 15 bp, Homo sapiens
ttgattagtgaaaaa

SEQ ID NO: 1637698 - DNA, 15 bp, Homo sapiens
tttgattagtgaaaa

SEQ ID NO: 1637699 - DNA, 15 bp, Homo sapiens
ttttgattagtgaaa

SEQ ID NO: 1637700 - DNA, 15 bp, Homo sapiens
gttttgattagtgaa

SEQ ID NO: 1637701 - DNA, 15 bp, Homo sapiens
agttttgattagtga

SEQ ID NO: 1637702 - DNA, 15 bp, Homo sapiens
aagttttgattagtg

SEQ ID NO: 1637703 - DNA, 15 bp, Homo sapiens
aaagttttgattagt

SEQ ID NO: 1637704 - DNA, 15 bp, Homo sapiens
taaagttttgattag

SEQ ID NO: 1637705 - DNA, 15 bp, Homo sapiens
gtaaagttttgatta

SEQ ID NO: 1637706 - DNA, 15 bp, Homo sapiens
tgtaaagttttgatt

SEQ ID NO: 1637707 - DNA, 15 bp, Homo sapiens
ctgtaaagttttgat

SEQ ID NO: 1637708 - DNA, 15 bp, Homo sapiens
tctgtaaagttttga

SEQ ID NO: 1637709 - DNA, 15 bp, Homo sapiens
ctctgtaaagttttg

SEQ ID NO: 1637710 - DNA, 15 bp, Homo sapiens
cctctgtaaagtttt

SEQ ID NO: 1637711 - DNA, 15 bp, Homo sapiens
tcctctgtaaagttt

SEQ ID NO: 1637712 - DNA, 15 bp, Homo sapiens
ttcctctgtaaagtt

SEQ ID NO: 1637713 - DNA, 15 bp, Homo sapiens
tttcctctgtaaagt

SEQ ID NO: 1637714 - DNA, 15 bp, Homo sapiens
atttcctctgtaaag

SEQ ID NO: 1637715 - DNA, 15 bp, Homo sapiens
catttcctctgtaaa

SEQ ID NO: 1637716 - DNA, 15 bp, Homo sapiens
tcatttcctctgtaa

SEQ ID NO: 1637717 - DNA, 15 bp, Homo sapiens
ttcatttcctctgta

SEQ ID NO: 1637718 - DNA, 15 bp, Homo sapiens
gttcatttcctctgt

SEQ ID NO: 1637719 - DNA, 15 bp, Homo sapiens
tgttcatttcctctg

SEQ ID NO: 1637720 - DNA, 15 bp, Homo sapiens
ctgttcatttcctct

SEQ ID NO: 1637721 - DNA, 15 bp, Homo sapiens
actgttcatttcctc

SEQ ID NO: 1637722 - DNA, 15 bp, Homo sapiens
cactgttcatttcct

SEQ ID NO: 1637723 - DNA, 15 bp, Homo sapiens
tcactgttcatttcc

SEQ ID NO: 1637724 - DNA, 15 bp, Homo sapiens
atcactgttcatttc

SEQ ID NO: 1637725 - DNA, 15 bp, Homo sapiens
aatcactgttcattt

SEQ ID NO: 1637726 - DNA, 15 bp, Homo sapiens
aaatcactgttcatt

SEQ ID NO: 1637727 - DNA, 15 bp, Homo sapiens
aaaatcactgttcat

SEQ ID NO: 1637728 - DNA, 15 bp, Homo sapiens
aaaaatcactgttca

SEQ ID NO: 1637729 - DNA, 15 bp, Homo sapiens
caaaaatcactgttc

SEQ ID NO: 1637730 - DNA, 15 bp, Homo sapiens
gcaaaaatcactgtt

SEQ ID NO: 1637731 - DNA, 15 bp, Homo sapiens
ggcaaaaatcactgt

SEQ ID NO: 1637732 - DNA, 15 bp, Homo sapiens
tggcaaaaatcactg

SEQ ID NO: 1637733 - DNA, 15 bp, Homo sapiens
atggcaaaaatcact

SEQ ID NO: 1637734 - DNA, 15 bp, Homo sapiens
gatggcaaaaatcac

SEQ ID NO: 1637735 - DNA, 15 bp, Homo sapiens
ggatggcaaaaatca

SEQ ID NO: 1637736 - DNA, 15 bp, Homo sapiens
tggatggcaaaaatc

SEQ ID NO: 1637737 - DNA, 15 bp, Homo sapiens
atggatggcaaaaat

SEQ ID NO: 1637738 - DNA, 15 bp, Homo sapiens
aatggatggcaaaaa

SEQ ID NO: 1637739 - DNA, 15 bp, Homo sapiens
gaatggatggcaaaa

SEQ ID NO: 1637740 - DNA, 15 bp, Homo sapiens
tgaatggatggcaaa

SEQ ID NO: 1637741 - DNA, 15 bp, Homo sapiens
ttgaatggatggcaa

SEQ ID NO: 1637742 - DNA, 15 bp, Homo sapiens
gttgaatggatggca

SEQ ID NO: 1637743 - DNA, 15 bp, Homo sapiens
ggttgaatggatggc

SEQ ID NO: 1637744 - DNA, 15 bp, Homo sapiens
tggttgaatggatgg

SEQ ID NO: 1637745 - DNA, 15 bp, Homo sapiens
ctggttgaatggatg

SEQ ID NO: 1637746 - DNA, 15 bp, Homo sapiens
actggttgaatggat

SEQ ID NO: 1637747 - DNA, 15 bp, Homo sapiens
aactggttgaatgga

SEQ ID NO: 1637748 - DNA, 15 bp, Homo sapiens
aaactggttgaatgg

SEQ ID NO: 1637749 - DNA, 15 bp, Homo sapiens
aaaactggttgaatg

SEQ ID NO: 1637750 - DNA, 15 bp, Homo sapiens
taaaactggttgaat

SEQ ID NO: 1637751 - DNA, 15 bp, Homo sapiens
ataaaactggttgaa

SEQ ID NO: 1637752 - DNA, 15 bp, Homo sapiens
tataaaactggttga

SEQ ID NO: 1637753 - DNA, 15 bp, Homo sapiens
ctataaaactggttg

SEQ ID NO: 1637754 - DNA, 15 bp, Homo sapiens
tctataaaactggtt

SEQ ID NO: 1637755 - DNA, 15 bp, Homo sapiens
ctctataaaactggt

SEQ ID NO: 1637756 - DNA, 15 bp, Homo sapiens
tctctataaaactgg

SEQ ID NO: 1637757 - DNA, 15 bp, Homo sapiens
ctctctataaaactg

SEQ ID NO: 1637758 - DNA, 15 bp, Homo sapiens
tctctctataaaact

SEQ ID NO: 1637759 - DNA, 15 bp, Homo sapiens
ctctctctataaaac

SEQ ID NO: 1637760 - DNA, 15 bp, Homo sapiens
tctctctctataaaa

SEQ ID NO: 1637761 - DNA, 15 bp, Homo sapiens
ctctctctctataaa

SEQ ID NO: 1637762 - DNA, 15 bp, Homo sapiens
tctctctctctataa

SEQ ID NO: 1637763 - DNA, 15 bp, Homo sapiens
ctctctctctctata

SEQ ID NO: 1637764 - DNA, 15 bp, Homo sapiens
tctctctctctctat

SEQ ID NO: 1637765 - DNA, 15 bp, Homo sapiens
tttcctctctctctc

SEQ ID NO: 1637766 - DNA, 15 bp, Homo sapiens
ctttcctctctctct

SEQ ID NO: 1637767 - DNA, 15 bp, Homo sapiens
gctttcctctctctc

SEQ ID NO: 1637768 - DNA, 15 bp, Homo sapiens
tgctttcctctctct

SEQ ID NO: 1637769 - DNA, 15 bp, Homo sapiens
atgctttcctctctc

SEQ ID NO: 1637770 - DNA, 15 bp, Homo sapiens
aatgctttcctctct

SEQ ID NO: 1637771 - DNA, 15 bp, Homo sapiens
caatgctttcctctc

SEQ ID NO: 1637772 - DNA, 15 bp, Homo sapiens
gcaatgctttcctct

SEQ ID NO: 1637773 - DNA, 15 bp, Homo sapiens
ggcaatgctttcctc

SEQ ID NO: 1637774 - DNA, 15 bp, Homo sapiens
aggcaatgctttcct

SEQ ID NO: 1637775 - DNA, 15 bp, Homo sapiens
caggcaatgctttcc

SEQ ID NO: 1637776 - DNA, 15 bp, Homo sapiens
tcaggcaatgctttc

SEQ ID NO: 1637777 - DNA, 15 bp, Homo sapiens
ctcaggcaatgcttt

SEQ ID NO: 1637778 - DNA, 15 bp, Homo sapiens
cctcaggcaatgctt

SEQ ID NO: 1637779 - DNA, 15 bp, Homo sapiens
gcctcaggcaatgct

SEQ ID NO: 1637780 - DNA, 15 bp, Homo sapiens
tgcctcaggcaatgc

SEQ ID NO: 1637781 - DNA, 15 bp, Homo sapiens
ctgcctcaggcaatg

SEQ ID NO: 1637782 - DNA, 15 bp, Homo sapiens
cctgcctcaggcaat

SEQ ID NO: 1637783 - DNA, 15 bp, Homo sapiens
ccctgcctcaggcaa

SEQ ID NO: 1637784 - DNA, 15 bp, Homo sapiens
accctgcctcaggca

SEQ ID NO: 1637785 - DNA, 15 bp, Homo sapiens
caccctgcctcaggc

SEQ ID NO: 1637786 - DNA, 15 bp, Homo sapiens
ccaccctgcctcagg

SEQ ID NO: 1637787 - DNA, 15 bp, Homo sapiens
cccaccctgcctcag

SEQ ID NO: 1637788 - DNA, 15 bp, Homo sapiens
ccccaccctgcctca

SEQ ID NO: 1637789 - DNA, 15 bp, Homo sapiens
tccccaccctgcctc

SEQ ID NO: 1637790 - DNA, 15 bp, Homo sapiens
ttccccaccctgcct

SEQ ID NO: 1637791 - DNA, 15 bp, Homo sapiens
cttccccaccctgcc

SEQ ID NO: 1637792 - DNA, 15 bp, Homo sapiens
ccttccccaccctgc

SEQ ID NO: 1637793 - DNA, 15 bp, Homo sapiens
gccttccccaccctg

SEQ ID NO: 1637794 - DNA, 15 bp, Homo sapiens
ggccttccccaccct

SEQ ID NO: 1637795 - DNA, 15 bp, Homo sapiens
gggccttccccaccc

SEQ ID NO: 1637796 - DNA, 15 bp, Homo sapiens
cgggccttccccacc

SEQ ID NO: 1637797 - DNA, 15 bp, Homo sapiens
ccgggccttccccac

SEQ ID NO: 1637798 - DNA, 15 bp, Homo sapiens
gccgggccttcccca

SEQ ID NO: 1637799 - DNA, 15 bp, Homo sapiens
tgccgggccttcccc

SEQ ID NO: 1637800 - DNA, 15 bp, Homo sapiens
gtgccgggccttccc

SEQ ID NO: 1637801 - DNA, 15 bp, Homo sapiens
agtgccgggccttcc

SEQ ID NO: 1637802 - DNA, 15 bp, Homo sapiens
gagtgccgggccttc

SEQ ID NO: 1637803 - DNA, 15 bp, Homo sapiens
tcggagtgccgggcc

SEQ ID NO: 1637804 - DNA, 15 bp, Homo sapiens
ctcggagtgccgggc

SEQ ID NO: 1637805 - DNA, 15 bp, Homo sapiens
actcggagtgccggg

SEQ ID NO: 1637806 - DNA, 15 bp, Homo sapiens
cactcggagtgccgg

SEQ ID NO: 1637807 - DNA, 15 bp, Homo sapiens
gcactcggagtgccg

SEQ ID NO: 1637808 - DNA, 15 bp, Homo sapiens
ggcactcggagtgcc

SEQ ID NO: 1637809 - DNA, 15 bp, Homo sapiens
tggcactcggagtgc

SEQ ID NO: 1637810 - DNA, 15 bp, Homo sapiens
ctggcactcggagtg

SEQ ID NO: 1637811 - DNA, 15 bp, Homo sapiens
tctggcactcggagt

SEQ ID NO: 1637812 - DNA, 15 bp, Homo sapiens
ctctggcactcggag

SEQ ID NO: 1637813 - DNA, 15 bp, Homo sapiens
tctctggcactcgga

SEQ ID NO: 1637814 - DNA, 15 bp, Homo sapiens
ttctctggcactcgg

SEQ ID NO: 1637815 - DNA, 15 bp, Homo sapiens
tttctctggcactcg

SEQ ID NO: 1637816 - DNA, 15 bp, Homo sapiens
ctttctctggcactc

SEQ ID NO: 1637817 - DNA, 15 bp, Homo sapiens
gctttctctggcact

SEQ ID NO: 1637818 - DNA, 15 bp, Homo sapiens
ggctttctctggcac

SEQ ID NO: 1637819 - DNA, 15 bp, Homo sapiens
gggctttctctggca

SEQ ID NO: 1637820 - DNA, 15 bp, Homo sapiens
ggggctttctctggc

SEQ ID NO: 1637821 - DNA, 15 bp, Homo sapiens
tggggctttctctgg

SEQ ID NO: 1637822 - DNA, 15 bp, Homo sapiens
gtggggctttctctg

SEQ ID NO: 1637823 - DNA, 15 bp, Homo sapiens
ggtggggctttctct

SEQ ID NO: 1637824 - DNA, 15 bp, Homo sapiens
gggtggggctttctc

SEQ ID NO: 1637825 - DNA, 15 bp, Homo sapiens
tgggtggggctttct

SEQ ID NO: 1637826 - DNA, 15 bp, Homo sapiens
atgggtggggctttc

SEQ ID NO: 1637827 - DNA, 15 bp, Homo sapiens
aatgggtggggcttt

SEQ ID NO: 1637828 - DNA, 15 bp, Homo sapiens
caatgggtggggctt

SEQ ID NO: 1637829 - DNA, 15 bp, Homo sapiens
gcaatgggtggggct

SEQ ID NO: 1637830 - DNA, 15 bp, Homo sapiens
tgcaatgggtggggc

SEQ ID NO: 1637831 - DNA, 15 bp, Homo sapiens
ctgcaatgggtgggg

SEQ ID NO: 1637832 - DNA, 15 bp, Homo sapiens
gctgcaatgggtggg

SEQ ID NO: 1637833 - DNA, 15 bp, Homo sapiens
tgctgcaatgggtgg

SEQ ID NO: 1637834 - DNA, 15 bp, Homo sapiens
ttgctgcaatgggtg

SEQ ID NO: 1637835 - DNA, 15 bp, Homo sapiens
gttgctgcaatgggt

SEQ ID NO: 1637836 - DNA, 15 bp, Homo sapiens
tgttgctgcaatggg

SEQ ID NO: 1637837 - DNA, 15 bp, Homo sapiens
gtgttgctgcaatgg

SEQ ID NO: 1637838 - DNA, 15 bp, Homo sapiens
agtgttgctgcaatg

SEQ ID NO: 1637839 - DNA, 15 bp, Homo sapiens
cagtgttgctgcaat

SEQ ID NO: 1637840 - DNA, 15 bp, Homo sapiens
tcagtgttgctgcaa

SEQ ID NO: 1637841 - DNA, 15 bp, Homo sapiens
ttcagtgttgctgca

SEQ ID NO: 1637842 - DNA, 15 bp, Homo sapiens
tttcagtgttgctgc

SEQ ID NO: 1637843 - DNA, 15 bp, Homo sapiens
ttttcagtgttgctg

SEQ ID NO: 1637844 - DNA, 15 bp, Homo sapiens
cttttcagtgttgct

SEQ ID NO: 1637845 - DNA, 15 bp, Homo sapiens
acttttcagtgttgc

SEQ ID NO: 1637846 - DNA, 15 bp, Homo sapiens
aacttttcagtgttg

SEQ ID NO: 1637847 - DNA, 15 bp, Homo sapiens
gaacttttcagtgtt

SEQ ID NO: 1637848 - DNA, 15 bp, Homo sapiens
tgaacttttcagtgt

SEQ ID NO: 1637849 - DNA, 15 bp, Homo sapiens
atgaacttttcagtg

SEQ ID NO: 1637850 - DNA, 15 bp, Homo sapiens
catgaacttttcagt

SEQ ID NO: 1637851 - DNA, 15 bp, Homo sapiens
gcatgaacttttcag

SEQ ID NO: 1637852 - DNA, 15 bp, Homo sapiens
tgcatgaacttttca

SEQ ID NO: 1637853 - DNA, 15 bp, Homo sapiens
ctgcatgaacttttc

SEQ ID NO: 1637854 - DNA, 15 bp, Homo sapiens
gctgcatgaactttt

SEQ ID NO: 1637855 - DNA, 15 bp, Homo sapiens
agctgcatgaacttt

SEQ ID NO: 1637856 - DNA, 15 bp, Homo sapiens
cagctgcatgaactt

SEQ ID NO: 1637857 - DNA, 15 bp, Homo sapiens
gcagctgcatgaact

SEQ ID NO: 1637858 - DNA, 15 bp, Homo sapiens
agcagctgcatgaac

SEQ ID NO: 1637859 - DNA, 15 bp, Homo sapiens
aagcagctgcatgaa

SEQ ID NO: 1637860 - DNA, 15 bp, Homo sapiens
caagcagctgcatga

SEQ ID NO: 1637861 - DNA, 15 bp, Homo sapiens
acaagcagctgcatg

SEQ ID NO: 1637862 - DNA, 15 bp, Homo sapiens
gacaagcagctgcat

SEQ ID NO: 1637863 - DNA, 15 bp, Homo sapiens
tgacaagcagctgca

SEQ ID NO: 1637864 - DNA, 15 bp, Homo sapiens
ctgacaagcagctgc

SEQ ID NO: 1637865 - DNA, 15 bp, Homo sapiens
actgacaagcagctg

SEQ ID NO: 1637866 - DNA, 15 bp, Homo sapiens
gactgacaagcagct

SEQ ID NO: 1637867 - DNA, 15 bp, Homo sapiens
tgactgacaagcagc

SEQ ID NO: 1637868 - DNA, 15 bp, Homo sapiens
atgactgacaagcag

SEQ ID NO: 1637869 - DNA, 15 bp, Homo sapiens
catgactgacaagca

SEQ ID NO: 1637870 - DNA, 15 bp, Homo sapiens
tcatgactgacaagc

SEQ ID NO: 1637871 - DNA, 15 bp, Homo sapiens
ttcatgactgacaag

SEQ ID NO: 1637872 - DNA, 15 bp, Homo sapiens
gttcatgactgacaa

SEQ ID NO: 1637873 - DNA, 15 bp, Homo sapiens
cgttcatgactgaca

SEQ ID NO: 1637874 - DNA, 15 bp, Homo sapiens
ccgttcatgactgac

SEQ ID NO: 1637875 - DNA, 15 bp, Homo sapiens
tccgttcatgactga

SEQ ID NO: 1637876 - DNA, 15 bp, Homo sapiens
atccgttcatgactg

SEQ ID NO: 1637877 - DNA, 15 bp, Homo sapiens
aatccgttcatgact

SEQ ID NO: 1637878 - DNA, 15 bp, Homo sapiens
aaatccgttcatgac

SEQ ID NO: 1637879 - DNA, 15 bp, Homo sapiens
aaaatccgttcatga

SEQ ID NO: 1637880 - DNA, 15 bp, Homo sapiens
aaaaatccgttcatg

SEQ ID NO: 1637881 - DNA, 15 bp, Homo sapiens
aaaaaatccgttcat

SEQ ID NO: 1637882 - DNA, 15 bp, Homo sapiens
gaaaaaatccgttca

SEQ ID NO: 1637883 - DNA, 15 bp, Homo sapiens
ggaaaaaatccgttc

SEQ ID NO: 1637884 - DNA, 15 bp, Homo sapiens
tggaaaaaatccgtt

SEQ ID NO: 1637885 - DNA, 15 bp, Homo sapiens
ctggaaaaaatccgt

SEQ ID NO: 1637886 - DNA, 15 bp, Homo sapiens
gctggaaaaaatccg

SEQ ID NO: 1637887 - DNA, 15 bp, Homo sapiens
tgctggaaaaaatcc

SEQ ID NO: 1637888 - DNA, 15 bp, Homo sapiens
ctgctggaaaaaatc

SEQ ID NO: 1637889 - DNA, 15 bp, Homo sapiens
actgctggaaaaaat

SEQ ID NO: 1637890 - DNA, 15 bp, Homo sapiens
gactgctggaaaaaa

SEQ ID NO: 1637891 - DNA, 15 bp, Homo sapiens
ggactgctggaaaaa

SEQ ID NO: 1637892 - DNA, 15 bp, Homo sapiens
gggactgctggaaaa

SEQ ID NO: 1637893 - DNA, 15 bp, Homo sapiens
tgggactgctggaaa

SEQ ID NO: 1637894 - DNA, 15 bp, Homo sapiens
atgggactgctggaa

SEQ ID NO: 1637895 - DNA, 15 bp, Homo sapiens
gatgggactgctgga

SEQ ID NO: 1637896 - DNA, 15 bp, Homo sapiens
tgatgggactgctgg

SEQ ID NO: 1637897 - DNA, 15 bp, Homo sapiens
ctgatgggactgctg

SEQ ID NO: 1637898 - DNA, 15 bp, Homo sapiens
gctgatgggactgct

SEQ ID NO: 1637899 - DNA, 15 bp, Homo sapiens
agctgatgggactgc

SEQ ID NO: 1637900 - DNA, 15 bp, Homo sapiens
gagctgatgggactg

SEQ ID NO: 1637901 - DNA, 15 bp, Homo sapiens
agagctgatgggact

SEQ ID NO: 1637902 - DNA, 15 bp, Homo sapiens
gagagctgatgggac

SEQ ID NO: 1637903 - DNA, 15 bp, Homo sapiens
tgagagctgatggga

SEQ ID NO: 1637904 - DNA, 15 bp, Homo sapiens
atgagagctgatggg

SEQ ID NO: 1637905 - DNA, 15 bp, Homo sapiens
aatgagagctgatgg

SEQ ID NO: 1637906 - DNA, 15 bp, Homo sapiens
aaatgagagctgatg

SEQ ID NO: 1637907 - DNA, 15 bp, Homo sapiens
gaaatgagagctgat

SEQ ID NO: 1637908 - DNA, 15 bp, Homo sapiens
ggaaatgagagctga

SEQ ID NO: 1637909 - DNA, 15 bp, Homo sapiens
gggaaatgagagctg

SEQ ID NO: 1637910 - DNA, 15 bp, Homo sapiens
agggaaatgagagct

SEQ ID NO: 1637911 - DNA, 15 bp, Homo sapiens
aagggaaatgagagc

SEQ ID NO: 1637912 - DNA, 15 bp, Homo sapiens
aaagggaaatgagag

SEQ ID NO: 1637913 - DNA, 15 bp, Homo sapiens
aaaagggaaatgaga

SEQ ID NO: 1637914 - DNA, 15 bp, Homo sapiens
aaaaagggaaatgag

SEQ ID NO: 1637915 - DNA, 15 bp, Homo sapiens
taaaaagggaaatga

SEQ ID NO: 1637916 - DNA, 15 bp, Homo sapiens
ctaaaaagggaaatg

SEQ ID NO: 1637917 - DNA, 15 bp, Homo sapiens
cctaaaaagggaaat

SEQ ID NO: 1637918 - DNA, 15 bp, Homo sapiens
tcctaaaaagggaaa

SEQ ID NO: 1637919 - DNA, 15 bp, Homo sapiens
ctcctaaaaagggaa

SEQ ID NO: 1637920 - DNA, 15 bp, Homo sapiens
cctcctaaaaaggga

SEQ ID NO: 1637921 - DNA, 15 bp, Homo sapiens
ccctcctaaaaaggg

SEQ ID NO: 1637922 - DNA, 15 bp, Homo sapiens
tccctcctaaaaagg

SEQ ID NO: 1637923 - DNA, 15 bp, Homo sapiens
ttccctcctaaaaag

SEQ ID NO: 1637924 - DNA, 15 bp, Homo sapiens
tttccctcctaaaaa

SEQ ID NO: 1637925 - DNA, 15 bp, Homo sapiens
ttttccctcctaaaa

SEQ ID NO: 1637926 - DNA, 15 bp, Homo sapiens
cttttccctcctaaa

SEQ ID NO: 1637927 - DNA, 15 bp, Homo sapiens
gcttttccctcctaa

SEQ ID NO: 1637928 - DNA, 15 bp, Homo sapiens
agcttttccctccta

SEQ ID NO: 1637929 - DNA, 15 bp, Homo sapiens
gagcttttccctcct

SEQ ID NO: 1637930 - DNA, 15 bp, Homo sapiens
ggagcttttccctcc

SEQ ID NO: 1637931 - DNA, 15 bp, Homo sapiens
gggagcttttccctc

SEQ ID NO: 1637932 - DNA, 15 bp, Homo sapiens
ggggagcttttccct

SEQ ID NO: 1637933 - DNA, 15 bp, Homo sapiens
tggggagcttttccc

SEQ ID NO: 1637934 - DNA, 15 bp, Homo sapiens
atggggagcttttcc

SEQ ID NO: 1637935 - DNA, 15 bp, Homo sapiens
catggggagcttttc

SEQ ID NO: 1637936 - DNA, 15 bp, Homo sapiens
acatggggagctttt

SEQ ID NO: 1637937 - DNA, 15 bp, Homo sapiens
aacatggggagcttt

SEQ ID NO: 1637938 - DNA, 15 bp, Homo sapiens
gaacatggggagctt

SEQ ID NO: 1637939 - DNA, 15 bp, Homo sapiens
agaacatggggagct

SEQ ID NO: 1637940 - DNA, 15 bp, Homo sapiens
tagaacatggggagc

SEQ ID NO: 1637941 - DNA, 15 bp, Homo sapiens
gtagaacatggggag

SEQ ID NO: 1637942 - DNA, 15 bp, Homo sapiens
tgtagaacatgggga

SEQ ID NO: 1637943 - DNA, 15 bp, Homo sapiens
ttgtagaacatgggg

SEQ ID NO: 1637944 - DNA, 15 bp, Homo sapiens
attgtagaacatggg

SEQ ID NO: 1637945 - DNA, 15 bp, Homo sapiens
gattgtagaacatgg

SEQ ID NO: 1637946 - DNA, 15 bp, Homo sapiens
ggattgtagaacatg

SEQ ID NO: 1637947 - DNA, 15 bp, Homo sapiens
aggattgtagaacat

SEQ ID NO: 1637948 - DNA, 15 bp, Homo sapiens
gaggattgtagaaca

SEQ ID NO: 1637949 - DNA, 15 bp, Homo sapiens
agaggattgtagaac

SEQ ID NO: 1637950 - DNA, 15 bp, Homo sapiens
tagaggattgtagaa

SEQ ID NO: 1637951 - DNA, 15 bp, Homo sapiens
gtagaggattgtaga

SEQ ID NO: 1637952 - DNA, 15 bp, Homo sapiens
tgtagaggattgtag

SEQ ID NO: 1637953 - DNA, 15 bp, Homo sapiens
atgtagaggattgta

SEQ ID NO: 1637954 - DNA, 15 bp, Homo sapiens
catgtagaggattgt

SEQ ID NO: 1637955 - DNA, 15 bp, Homo sapiens
gcatgtagaggattg

SEQ ID NO: 1637956 - DNA, 15 bp, Homo sapiens
ggcatgtagaggatt

SEQ ID NO: 1637957 - DNA, 15 bp, Homo sapiens
aggcatgtagaggat

SEQ ID NO: 1637958 - DNA, 15 bp, Homo sapiens
taggcatgtagagga

SEQ ID NO: 1637959 - DNA, 15 bp, Homo sapiens
ttaggcatgtagagg

SEQ ID NO: 1637960 - DNA, 15 bp, Homo sapiens
attaggcatgtagag

SEQ ID NO: 1637961 - DNA, 15 bp, Homo sapiens
aattaggcatgtaga

SEQ ID NO: 1637962 - DNA, 15 bp, Homo sapiens
gaattaggcatgtag

SEQ ID NO: 1637963 - DNA, 15 bp, Homo sapiens
agaattaggcatgta

SEQ ID NO: 1637964 - DNA, 15 bp, Homo sapiens
cagaattaggcatgt

SEQ ID NO: 1637965 - DNA, 15 bp, Homo sapiens
acagaattaggcatg

SEQ ID NO: 1637966 - DNA, 15 bp, Homo sapiens
gacagaattaggcat

SEQ ID NO: 1637967 - DNA, 15 bp, Homo sapiens
tgacagaattaggca

SEQ ID NO: 1637968 - DNA, 15 bp, Homo sapiens
ttgacagaattaggc

SEQ ID NO: 1637969 - DNA, 15 bp, Homo sapiens
gttgacagaattagg

SEQ ID NO: 1637970 - DNA, 15 bp, Homo sapiens
ggttgacagaattag

SEQ ID NO: 1637971 - DNA, 15 bp, Homo sapiens
tggttgacagaatta

SEQ ID NO: 1637972 - DNA, 15 bp, Homo sapiens
atggttgacagaatt

SEQ ID NO: 1637973 - DNA, 15 bp, Homo sapiens
tatggttgacagaat

SEQ ID NO: 1637974 - DNA, 15 bp, Homo sapiens
ctatggttgacagaa

SEQ ID NO: 1637975 - DNA, 15 bp, Homo sapiens
gctatggttgacaga

SEQ ID NO: 1637976 - DNA, 15 bp, Homo sapiens
ggctatggttgacag

SEQ ID NO: 1637977 - DNA, 15 bp, Homo sapiens
tggctatggttgaca

SEQ ID NO: 1637978 - DNA, 15 bp, Homo sapiens
atggctatggttgac

SEQ ID NO: 1637979 - DNA, 15 bp, Homo sapiens
gatggctatggttga

SEQ ID NO: 1637980 - DNA, 15 bp, Homo sapiens
tgatggctatggttg

SEQ ID NO: 1637981 - DNA, 15 bp, Homo sapiens
ctgatggctatggtt

SEQ ID NO: 1637982 - DNA, 15 bp, Homo sapiens
gctgatggctatggt

SEQ ID NO: 1637983 - DNA, 15 bp, Homo sapiens
tgctgatggctatgg

SEQ ID NO: 1637984 - DNA, 15 bp, Homo sapiens
ttgctgatggctatg

SEQ ID NO: 1637985 - DNA, 15 bp, Homo sapiens
tttgctgatggctat

SEQ ID NO: 1637986 - DNA, 15 bp, Homo sapiens
ctttgctgatggcta

SEQ ID NO: 1637987 - DNA, 15 bp, Homo sapiens
cactctttgctgatg

SEQ ID NO: 1637988 - DNA, 15 bp, Homo sapiens
gcactctttgctgat

SEQ ID NO: 1637989 - DNA, 15 bp, Homo sapiens
tgcactctttgctga

SEQ ID NO: 1637990 - DNA, 15 bp, Homo sapiens
ttgcactctttgctg

SEQ ID NO: 1637991 - DNA, 15 bp, Homo sapiens
cttgcactctttgct

SEQ ID NO: 1637992 - DNA, 15 bp, Homo sapiens
ccttgcactctttgc

SEQ ID NO: 1637993 - DNA, 15 bp, Homo sapiens
gccttgcactctttg

SEQ ID NO: 1637994 - DNA, 15 bp, Homo sapiens
tgccttgcactcttt

SEQ ID NO: 1637995 - DNA, 15 bp, Homo sapiens
ctgccttgcactctt

SEQ ID NO: 1637996 - DNA, 15 bp, Homo sapiens
tctgccttgcactct

SEQ ID NO: 1637997 - DNA, 15 bp, Homo sapiens
atctgccttgcactc

SEQ ID NO: 1637998 - DNA, 15 bp, Homo sapiens
gatctgccttgcact

SEQ ID NO: 1637999 - DNA, 15 bp, Homo sapiens
tgatctgccttgcac

SEQ ID NO: 1638000 - DNA, 15 bp, Homo sapiens
ttgatctgccttgca

SEQ ID NO: 1638001 - DNA, 15 bp, Homo sapiens
attgatctgccttgc

SEQ ID NO: 1638002 - DNA, 15 bp, Homo sapiens
gattgatctgccttg

SEQ ID NO: 1638003 - DNA, 15 bp, Homo sapiens
ggattgatctgcctt

SEQ ID NO: 1638004 - DNA, 15 bp, Homo sapiens
tggattgatctgcct

SEQ ID NO: 1638005 - DNA, 15 bp, Homo sapiens
ttggattgatctgcc

SEQ ID NO: 1638006 - DNA, 15 bp, Homo sapiens
tttggattgatctgc

SEQ ID NO: 1638007 - DNA, 15 bp, Homo sapiens
ctttggattgatctg

SEQ ID NO: 1638008 - DNA, 15 bp, Homo sapiens
tctttggattgatct

SEQ ID NO: 1638009 - DNA, 15 bp, Homo sapiens
ctctttggattgatc

SEQ ID NO: 1638010 - DNA, 15 bp, Homo sapiens
tctctttggattgat

SEQ ID NO: 1638011 - DNA, 15 bp, Homo sapiens
ttctctttggattga

SEQ ID NO: 1638012 - DNA, 15 bp, Homo sapiens
attctctttggattg

SEQ ID NO: 1638013 - DNA, 15 bp, Homo sapiens
tattctctttggatt

SEQ ID NO: 1638014 - DNA, 15 bp, Homo sapiens
ctattctctttggat

SEQ ID NO: 1638015 - DNA, 15 bp, Homo sapiens
gctattctctttgga

SEQ ID NO: 1638016 - DNA, 15 bp, Homo sapiens
cgctattctctttgg

SEQ ID NO: 1638017 - DNA, 15 bp, Homo sapiens
ccgctattctctttg

SEQ ID NO: 1638018 - DNA, 15 bp, Homo sapiens
accgctattctcttt

SEQ ID NO: 1638019 - DNA, 15 bp, Homo sapiens
aaccgctattctctt

SEQ ID NO: 1638020 - DNA, 15 bp, Homo sapiens
taaccgctattctct

SEQ ID NO: 1638021 - DNA, 15 bp, Homo sapiens
ttaaccgctattctc

SEQ ID NO: 1638022 - DNA, 15 bp, Homo sapiens
gttaaccgctattct

SEQ ID NO: 1638023 - DNA, 15 bp, Homo sapiens
tgttaaccgctattc

SEQ ID NO: 1638024 - DNA, 15 bp, Homo sapiens
atgttaaccgctatt

SEQ ID NO: 1638025 - DNA, 15 bp, Homo sapiens
gatgttaaccgctat

SEQ ID NO: 1638026 - DNA, 15 bp, Homo sapiens
ggatgttaaccgcta

SEQ ID NO: 1638027 - DNA, 15 bp, Homo sapiens
aggatgttaaccgct

SEQ ID NO: 1638028 - DNA, 15 bp, Homo sapiens
taggatgttaaccgc

SEQ ID NO: 1638029 - DNA, 15 bp, Homo sapiens
ataggatgttaaccg

SEQ ID NO: 1638030 - DNA, 15 bp, Homo sapiens
tataggatgttaacc

SEQ ID NO: 1638031 - DNA, 15 bp, Homo sapiens
ttataggatgttaac

SEQ ID NO: 1638032 - DNA, 15 bp, Homo sapiens
attataggatgttaa

SEQ ID NO: 1638033 - DNA, 15 bp, Homo sapiens
cattataggatgtta

SEQ ID NO: 1638034 - DNA, 15 bp, Homo sapiens
gcattataggatgtt

SEQ ID NO: 1638035 - DNA, 15 bp, Homo sapiens
ggcattataggatgt

SEQ ID NO: 1638036 - DNA, 15 bp, Homo sapiens
tggcattataggatg

SEQ ID NO: 1638037 - DNA, 15 bp, Homo sapiens
ttggcattataggat

SEQ ID NO: 1638038 - DNA, 15 bp, Homo sapiens
tttggcattatagga

SEQ ID NO: 1638039 - DNA, 15 bp, Homo sapiens
gtttggcattatagg

SEQ ID NO: 1638040 - DNA, 15 bp, Homo sapiens
ggtttggcattatag

SEQ ID NO: 1638041 - DNA, 15 bp, Homo sapiens
aggtttggcattata

SEQ ID NO: 1638042 - DNA, 15 bp, Homo sapiens
caggtttggcattat

SEQ ID NO: 1638043 - DNA, 15 bp, Homo sapiens
acaggtttggcatta

SEQ ID NO: 1638044 - DNA, 15 bp, Homo sapiens
aacaggtttggcatt

SEQ ID NO: 1638045 - DNA, 15 bp, Homo sapiens
gaacaggtttggcat

SEQ ID NO: 1638046 - DNA, 15 bp, Homo sapiens
agaacaggtttggca

SEQ ID NO: 1638047 - DNA, 15 bp, Homo sapiens
aagaacaggtttggc

SEQ ID NO: 1638048 - DNA, 15 bp, Homo sapiens
taagaacaggtttgg

SEQ ID NO: 1638049 - DNA, 15 bp, Homo sapiens
ctaagaacaggtttg

SEQ ID NO: 1638050 - DNA, 15 bp, Homo sapiens
gctaagaacaggttt

SEQ ID NO: 1638051 - DNA, 15 bp, Homo sapiens
ggctaagaacaggtt

SEQ ID NO: 1638052 - DNA, 15 bp, Homo sapiens
cggctaagaacaggt

SEQ ID NO: 1638053 - DNA, 15 bp, Homo sapiens
tcggctaagaacagg

SEQ ID NO: 1638054 - DNA, 15 bp, Homo sapiens
ttcggctaagaacag

SEQ ID NO: 1638055 - DNA, 15 bp, Homo sapiens
tttcggctaagaaca

SEQ ID NO: 1638056 - DNA, 15 bp, Homo sapiens
ctttcggctaagaac

SEQ ID NO: 1638057 - DNA, 15 bp, Homo sapiens
cctttcggctaagaa

SEQ ID NO: 1638058 - DNA, 15 bp, Homo sapiens
ccctttcggctaaga

SEQ ID NO: 1638059 - DNA, 15 bp, Homo sapiens
tcagtaaagtccctc

SEQ ID NO: 1638060 - DNA, 15 bp, Homo sapiens
ctcagtaaagtccct

SEQ ID NO: 1638061 - DNA, 15 bp, Homo sapiens
tctcagtaaagtccc

SEQ ID NO: 1638062 - DNA, 15 bp, Homo sapiens
ctctcagtaaagtcc

SEQ ID NO: 1638063 - DNA, 15 bp, Homo sapiens
cctctcagtaaagtc

SEQ ID NO: 1638064 - DNA, 15 bp, Homo sapiens
ccctctcagtaaagt

SEQ ID NO: 1638065 - DNA, 15 bp, Homo sapiens
tccctctcagtaaag

SEQ ID NO: 1638066 - DNA, 15 bp, Homo sapiens
gtccctctcagtaaa

SEQ ID NO: 1638067 - DNA, 15 bp, Homo sapiens
ggtccctctcagtaa

SEQ ID NO: 1638068 - DNA, 15 bp, Homo sapiens
aggtccctctcagta

SEQ ID NO: 1638069 - DNA, 15 bp, Homo sapiens
gaggtccctctcagt

SEQ ID NO: 1638070 - DNA, 15 bp, Homo sapiens
agaggtccctctcag

SEQ ID NO: 1638071 - DNA, 15 bp, Homo sapiens
tagaggtccctctca

SEQ ID NO: 1638072 - DNA, 15 bp, Homo sapiens
ttagaggtccctctc

SEQ ID NO: 1638073 - DNA, 15 bp, Homo sapiens
gttagaggtccctct

SEQ ID NO: 1638074 - DNA, 15 bp, Homo sapiens
ggttagaggtccctc

SEQ ID NO: 1638075 - DNA, 15 bp, Homo sapiens
gggttagaggtccct

SEQ ID NO: 1638076 - DNA, 15 bp, Homo sapiens
ggggttagaggtccc

SEQ ID NO: 1638077 - DNA, 15 bp, Homo sapiens
gggggttagaggtcc

SEQ ID NO: 1638078 - DNA, 15 bp, Homo sapiens
agggggttagaggtc

SEQ ID NO: 1638079 - DNA, 15 bp, Homo sapiens
tagggggttagaggt

SEQ ID NO: 1638080 - DNA, 15 bp, Homo sapiens
ttagggggttagagg

SEQ ID NO: 1638081 - DNA, 15 bp, Homo sapiens
tttagggggttagag

SEQ ID NO: 1638082 - DNA, 15 bp, Homo sapiens
atttagggggttaga

SEQ ID NO: 1638083 - DNA, 15 bp, Homo sapiens
gatttagggggttag

SEQ ID NO: 1638084 - DNA, 15 bp, Homo sapiens
agatttagggggtta

SEQ ID NO: 1638085 - DNA, 15 bp, Homo sapiens
aagatttagggggtt

SEQ ID NO: 1638086 - DNA, 15 bp, Homo sapiens
taagatttagggggt

SEQ ID NO: 1638087 - DNA, 15 bp, Homo sapiens
ttaagatttaggggg

SEQ ID NO: 1638088 - DNA, 15 bp, Homo sapiens
tttaagatttagggg

SEQ ID NO: 1638089 - DNA, 15 bp, Homo sapiens
ttttaagatttaggg

SEQ ID NO: 1638090 - DNA, 15 bp, Homo sapiens
cttttaagatttagg

SEQ ID NO: 1638091 - DNA, 15 bp, Homo sapiens
ccttttaagatttag

SEQ ID NO: 1638092 - DNA, 15 bp, Homo sapiens
cccttttaagattta

SEQ ID NO: 1638093 - DNA, 15 bp, Homo sapiens
tcccttttaagattt

SEQ ID NO: 1638094 - DNA, 15 bp, Homo sapiens
gtcccttttaagatt

SEQ ID NO: 1638095 - DNA, 15 bp, Homo sapiens
agtcccttttaagat

SEQ ID NO: 1638096 - DNA, 15 bp, Homo sapiens
gagtcccttttaaga

SEQ ID NO: 1638097 - DNA, 15 bp, Homo sapiens
agagtcccttttaag

SEQ ID NO: 1638098 - DNA, 15 bp, Homo sapiens
tagagtcccttttaa

SEQ ID NO: 1638099 - DNA, 15 bp, Homo sapiens
ttagagtccctttta

SEQ ID NO: 1638100 - DNA, 15 bp, Homo sapiens
attagagtccctttt

SEQ ID NO: 1638101 - DNA, 15 bp, Homo sapiens
gattagagtcccttt

SEQ ID NO: 1638102 - DNA, 15 bp, Homo sapiens
ggattagagtccctt

SEQ ID NO: 1638103 - DNA, 15 bp, Homo sapiens
aggattagagtccct

SEQ ID NO: 1638104 - DNA, 15 bp, Homo sapiens
gaggattagagtccc

SEQ ID NO: 1638105 - DNA, 15 bp, Homo sapiens
ggaggattagagtcc

SEQ ID NO: 1638106 - DNA, 15 bp, Homo sapiens
aggaggattagagtc

SEQ ID NO: 1638107 - DNA, 15 bp, Homo sapiens
taggaggattagagt

SEQ ID NO: 1638108 - DNA, 15 bp, Homo sapiens
ttaggaggattagag

SEQ ID NO: 1638109 - DNA, 15 bp, Homo sapiens
cttaggaggattaga

SEQ ID NO: 1638110 - DNA, 15 bp, Homo sapiens
acttaggaggattag

SEQ ID NO: 1638111 - DNA, 15 bp, Homo sapiens
aacttaggaggatta

SEQ ID NO: 1638112 - DNA, 15 bp, Homo sapiens
caacttaggaggatt

SEQ ID NO: 1638113 - DNA, 15 bp, Homo sapiens
ccaacttaggaggat

SEQ ID NO: 1638114 - DNA, 15 bp, Homo sapiens
cccaacttaggagga

SEQ ID NO: 1638115 - DNA, 15 bp, Homo sapiens
gcccaacttaggagg

SEQ ID NO: 1638116 - DNA, 15 bp, Homo sapiens
ggcccaacttaggag

SEQ ID NO: 1638117 - DNA, 15 bp, Homo sapiens
aggcccaacttagga

SEQ ID NO: 1638118 - DNA, 15 bp, Homo sapiens
gaggcccaacttagg

SEQ ID NO: 1638119 - DNA, 15 bp, Homo sapiens
agaggcccaacttag

SEQ ID NO: 1638120 - DNA, 15 bp, Homo sapiens
tagaggcccaactta

SEQ ID NO: 1638121 - DNA, 15 bp, Homo sapiens
ttagaggcccaactt

SEQ ID NO: 1638122 - DNA, 15 bp, Homo sapiens
gttagaggcccaact

SEQ ID NO: 1638123 - DNA, 15 bp, Homo sapiens
ggttagaggcccaac

SEQ ID NO: 1638124 - DNA, 15 bp, Homo sapiens
gggttagaggcccaa

SEQ ID NO: 1638125 - DNA, 15 bp, Homo sapiens
tgggttagaggccca

SEQ ID NO: 1638126 - DNA, 15 bp, Homo sapiens
ctgggttagaggccc

SEQ ID NO: 1638127 - DNA, 15 bp, Homo sapiens
actgggttagaggcc

SEQ ID NO: 1638128 - DNA, 15 bp, Homo sapiens
cactgggttagaggc

SEQ ID NO: 1638129 - DNA, 15 bp, Homo sapiens
acactgggttagagg

SEQ ID NO: 1638130 - DNA, 15 bp, Homo sapiens
gacactgggttagag

SEQ ID NO: 1638131 - DNA, 15 bp, Homo sapiens
tgacactgggttaga

SEQ ID NO: 1638132 - DNA, 15 bp, Homo sapiens
ctgacactgggttag

SEQ ID NO: 1638133 - DNA, 15 bp, Homo sapiens
actgacactgggtta

SEQ ID NO: 1638134 - DNA, 15 bp, Homo sapiens
gactgacactgggtt

SEQ ID NO: 1638135 - DNA, 15 bp, Homo sapiens
tgactgacactgggt

SEQ ID NO: 1638136 - DNA, 15 bp, Homo sapiens
ttgactgacactggg

SEQ ID NO: 1638137 - DNA, 15 bp, Homo sapiens
cttgactgacactgg

SEQ ID NO: 1638138 - DNA, 15 bp, Homo sapiens
gcttgactgacactg

SEQ ID NO: 1638139 - DNA, 15 bp, Homo sapiens
tgcttgactgacact

SEQ ID NO: 1638140 - DNA, 15 bp, Homo sapiens
atgcttgactgacac

SEQ ID NO: 1638141 - DNA, 15 bp, Homo sapiens
gatgcttgactgaca

SEQ ID NO: 1638142 - DNA, 15 bp, Homo sapiens
ggatgcttgactgac

SEQ ID NO: 1638143 - DNA, 15 bp, Homo sapiens
aggatgcttgactga

SEQ ID NO: 1638144 - DNA, 15 bp, Homo sapiens
aaggatgcttgactg

SEQ ID NO: 1638145 - DNA, 15 bp, Homo sapiens
caaggatgcttgact

SEQ ID NO: 1638146 - DNA, 15 bp, Homo sapiens
gcaaggatgcttgac

SEQ ID NO: 1638147 - DNA, 15 bp, Homo sapiens
ggcaaggatgcttga

SEQ ID NO: 1638148 - DNA, 15 bp, Homo sapiens
aggcaaggatgcttg

SEQ ID NO: 1638149 - DNA, 15 bp, Homo sapiens
aaggcaaggatgctt

SEQ ID NO: 1638150 - DNA, 15 bp, Homo sapiens
aaaggcaaggatgct

SEQ ID NO: 1638151 - DNA, 15 bp, Homo sapiens
aaaaggcaaggatgc

SEQ ID NO: 1638152 - DNA, 15 bp, Homo sapiens
taaaaggcaaggatg

SEQ ID NO: 1638153 - DNA, 15 bp, Homo sapiens
ataaaaggcaaggat

SEQ ID NO: 1638154 - DNA, 15 bp, Homo sapiens
aataaaaggcaagga

SEQ ID NO: 1638155 - DNA, 15 bp, Homo sapiens
caataaaaggcaagg

SEQ ID NO: 1638156 - DNA, 15 bp, Homo sapiens
tcaataaaaggcaag

SEQ ID NO: 1638157 - DNA, 15 bp, Homo sapiens
ctcaataaaaggcaa

SEQ ID NO: 1638158 - DNA, 15 bp, Homo sapiens
tctcaataaaaggca

SEQ ID NO: 1638159 - DNA, 15 bp, Homo sapiens
ctctcaataaaaggc

SEQ ID NO: 1638160 - DNA, 15 bp, Homo sapiens
cctctcaataaaagg

SEQ ID NO: 1638161 - DNA, 15 bp, Homo sapiens
tcctctcaataaaag

SEQ ID NO: 1638162 - DNA, 15 bp, Homo sapiens
ttcctctcaataaaa

SEQ ID NO: 1638163 - DNA, 15 bp, Homo sapiens
cttcctctcaataaa

SEQ ID NO: 1638164 - DNA, 15 bp, Homo sapiens
gcttcctctcaataa

SEQ ID NO: 1638165 - DNA, 15 bp, Homo sapiens
agcttcctctcaata

SEQ ID NO: 1638166 - DNA, 15 bp, Homo sapiens
aagcttcctctcaat

SEQ ID NO: 1638167 - DNA, 15 bp, Homo sapiens
aaagcttcctctcaa

SEQ ID NO: 1638168 - DNA, 15 bp, Homo sapiens
taaagcttcctctca

SEQ ID NO: 1638169 - DNA, 15 bp, Homo sapiens
ttaaagcttcctctc

SEQ ID NO: 1638170 - DNA, 15 bp, Homo sapiens
gttaaagcttcctct

SEQ ID NO: 1638171 - DNA, 15 bp, Homo sapiens
ggttaaagcttcctc

SEQ ID NO: 1638172 - DNA, 15 bp, Homo sapiens
gggttaaagcttcct

SEQ ID NO: 1638173 - DNA, 15 bp, Homo sapiens
agggttaaagcttcc

SEQ ID NO: 1638174 - DNA, 15 bp, Homo sapiens
gagggttaaagcttc

SEQ ID NO: 1638175 - DNA, 15 bp, Homo sapiens
agagggttaaagctt

SEQ ID NO: 1638176 - DNA, 15 bp, Homo sapiens
gagagggttaaagct

SEQ ID NO: 1638177 - DNA, 15 bp, Homo sapiens
agagagggttaaagc

SEQ ID NO: 1638178 - DNA, 15 bp, Homo sapiens
aagagagggttaaag

SEQ ID NO: 1638179 - DNA, 15 bp, Homo sapiens
taagagagggttaaa

SEQ ID NO: 1638180 - DNA, 15 bp, Homo sapiens
gtaagagagggttaa

SEQ ID NO: 1638181 - DNA, 15 bp, Homo sapiens
cgtaagagagggtta

SEQ ID NO: 1638182 - DNA, 15 bp, Homo sapiens
tcgtaagagagggtt

SEQ ID NO: 1638183 - DNA, 15 bp, Homo sapiens
ctcgtaagagagggt

SEQ ID NO: 1638184 - DNA, 15 bp, Homo sapiens
tctcgtaagagaggg

SEQ ID NO: 1638185 - DNA, 15 bp, Homo sapiens
ctctcgtaagagagg

SEQ ID NO: 1638186 - DNA, 15 bp, Homo sapiens
tctctcgtaagagag

SEQ ID NO: 1638187 - DNA, 15 bp, Homo sapiens
gtctctcgtaagaga

SEQ ID NO: 1638188 - DNA, 15 bp, Homo sapiens
agtctctcgtaagag

SEQ ID NO: 1638189 - DNA, 15 bp, Homo sapiens
gagtctctcgtaaga

SEQ ID NO: 1638190 - DNA, 15 bp, Homo sapiens
agagtctctcgtaag

SEQ ID NO: 1638191 - DNA, 15 bp, Homo sapiens
tagagtctctcgtaa

SEQ ID NO: 1638192 - DNA, 15 bp, Homo sapiens
ttagagtctctcgta

SEQ ID NO: 1638193 - DNA, 15 bp, Homo sapiens
gttagagtctctcgt

SEQ ID NO: 1638194 - DNA, 15 bp, Homo sapiens
agttagagtctctcg

SEQ ID NO: 1638195 - DNA, 15 bp, Homo sapiens
gagttagagtctctc

SEQ ID NO: 1638196 - DNA, 15 bp, Homo sapiens
ggagttagagtctct

SEQ ID NO: 1638197 - DNA, 15 bp, Homo sapiens
gggagttagagtctc

SEQ ID NO: 1638198 - DNA, 15 bp, Homo sapiens
ggggagttagagtct

SEQ ID NO: 1638199 - DNA, 15 bp, Homo sapiens
aggggagttagagtc

SEQ ID NO: 1638200 - DNA, 15 bp, Homo sapiens
taggggagttagagt

SEQ ID NO: 1638201 - DNA, 15 bp, Homo sapiens
ttaggggagttagag

SEQ ID NO: 1638202 - DNA, 15 bp, Homo sapiens
cttaggggagttaga

SEQ ID NO: 1638203 - DNA, 15 bp, Homo sapiens
acttaggggagttag

SEQ ID NO: 1638204 - DNA, 15 bp, Homo sapiens
aacttaggggagtta

SEQ ID NO: 1638205 - DNA, 15 bp, Homo sapiens
caacttaggggagtt

SEQ ID NO: 1638206 - DNA, 15 bp, Homo sapiens
tcaacttaggggagt

SEQ ID NO: 1638207 - DNA, 15 bp, Homo sapiens
ctcaacttaggggag

SEQ ID NO: 1638208 - DNA, 15 bp, Homo sapiens
gctcaacttagggga

SEQ ID NO: 1638209 - DNA, 15 bp, Homo sapiens
agctcaacttagggg

SEQ ID NO: 1638210 - DNA, 15 bp, Homo sapiens
tagctcaacttaggg

SEQ ID NO: 1638211 - DNA, 15 bp, Homo sapiens
atagctcaacttagg

SEQ ID NO: 1638212 - DNA, 15 bp, Homo sapiens
tatagctcaacttag

SEQ ID NO: 1638213 - DNA, 15 bp, Homo sapiens
ttatagctcaactta

SEQ ID NO: 1638214 - DNA, 15 bp, Homo sapiens
gttatagctcaactt

SEQ ID NO: 1638215 - DNA, 15 bp, Homo sapiens
ggttatagctcaact

SEQ ID NO: 1638216 - DNA, 15 bp, Homo sapiens
tggttatagctcaac

SEQ ID NO: 1638217 - DNA, 15 bp, Homo sapiens
ttggttatagctcaa

SEQ ID NO: 1638218 - DNA, 15 bp, Homo sapiens
attggttatagctca

SEQ ID NO: 1638219 - DNA, 15 bp, Homo sapiens
gattggttatagctc

SEQ ID NO: 1638220 - DNA, 15 bp, Homo sapiens
ggattggttatagct

SEQ ID NO: 1638221 - DNA, 15 bp, Homo sapiens
gggattggttatagc

SEQ ID NO: 1638222 - DNA, 15 bp, Homo sapiens
tgggattggttatag

SEQ ID NO: 1638223 - DNA, 15 bp, Homo sapiens
atgggattggttata

SEQ ID NO: 1638224 - DNA, 15 bp, Homo sapiens
gatgggattggttat

SEQ ID NO: 1638225 - DNA, 15 bp, Homo sapiens
ggatgggattggtta

SEQ ID NO: 1638226 - DNA, 15 bp, Homo sapiens
aggatgggattggtt

SEQ ID NO: 1638227 - DNA, 15 bp, Homo sapiens
aaggatgggattggt

SEQ ID NO: 1638228 - DNA, 15 bp, Homo sapiens
aaaggatgggattgg

SEQ ID NO: 1638229 - DNA, 15 bp, Homo sapiens
caaaggatgggattg

SEQ ID NO: 1638230 - DNA, 15 bp, Homo sapiens
gcaaaggatgggatt

SEQ ID NO: 1638231 - DNA, 15 bp, Homo sapiens
ggcaaaggatgggat

SEQ ID NO: 1638232 - DNA, 15 bp, Homo sapiens
aggcaaaggatggga

SEQ ID NO: 1638233 - DNA, 15 bp, Homo sapiens
caggcaaaggatggg

SEQ ID NO: 1638234 - DNA, 15 bp, Homo sapiens
tcaggcaaaggatgg

SEQ ID NO: 1638235 - DNA, 15 bp, Homo sapiens
ctcaggcaaaggatg

SEQ ID NO: 1638236 - DNA, 15 bp, Homo sapiens
actcaggcaaaggat

SEQ ID NO: 1638237 - DNA, 15 bp, Homo sapiens
tactcaggcaaagga

SEQ ID NO: 1638238 - DNA, 15 bp, Homo sapiens
gtactcaggcaaagg

SEQ ID NO: 1638239 - DNA, 15 bp, Homo sapiens
ggtactcaggcaaag

SEQ ID NO: 1638240 - DNA, 15 bp, Homo sapiens
gggtactcaggcaaa

SEQ ID NO: 1638241 - DNA, 15 bp, Homo sapiens
ggggtactcaggcaa

SEQ ID NO: 1638242 - DNA, 15 bp, Homo sapiens
tggggtactcaggca

SEQ ID NO: 1638243 - DNA, 15 bp, Homo sapiens
gtggggtactcaggc

SEQ ID NO: 1638244 - DNA, 15 bp, Homo sapiens
ggtggggtactcagg

SEQ ID NO: 1638245 - DNA, 15 bp, Homo sapiens
tggtggggtactcag

SEQ ID NO: 1638246 - DNA, 15 bp, Homo sapiens
gtggtggggtactca

SEQ ID NO: 1638247 - DNA, 15 bp, Homo sapiens
agtggtggggtactc

SEQ ID NO: 1638248 - DNA, 15 bp, Homo sapiens
aagtggtggggtact

SEQ ID NO: 1638249 - DNA, 15 bp, Homo sapiens
taagtggtggggtac

SEQ ID NO: 1638250 - DNA, 15 bp, Homo sapiens
gtaagtggtggggta

SEQ ID NO: 1638251 - DNA, 15 bp, Homo sapiens
ggtaagtggtggggt

SEQ ID NO: 1638252 - DNA, 15 bp, Homo sapiens
gggtaagtggtgggg

SEQ ID NO: 1638253 - DNA, 15 bp, Homo sapiens
tgggtaagtggtggg

SEQ ID NO: 1638254 - DNA, 15 bp, Homo sapiens
ttgggtaagtggtgg

SEQ ID NO: 1638255 - DNA, 15 bp, Homo sapiens
tttgggtaagtggtg

SEQ ID NO: 1638256 - DNA, 15 bp, Homo sapiens
ctttgggtaagtggt

SEQ ID NO: 1638257 - DNA, 15 bp, Homo sapiens
actttgggtaagtgg

SEQ ID NO: 1638258 - DNA, 15 bp, Homo sapiens
aactttgggtaagtg

SEQ ID NO: 1638259 - DNA, 15 bp, Homo sapiens
caactttgggtaagt

SEQ ID NO: 1638260 - DNA, 15 bp, Homo sapiens
acaactttgggtaag

SEQ ID NO: 1638261 - DNA, 15 bp, Homo sapiens
gacaactttgggtaa

SEQ ID NO: 1638262 - DNA, 15 bp, Homo sapiens
ggacaactttgggta

SEQ ID NO: 1638263 - DNA, 15 bp, Homo sapiens
tggacaactttgggt

SEQ ID NO: 1638264 - DNA, 15 bp, Homo sapiens
ttggacaactttggg

SEQ ID NO: 1638265 - DNA, 15 bp, Homo sapiens
attggacaactttgg

SEQ ID NO: 1638266 - DNA, 15 bp, Homo sapiens
aattggacaactttg

SEQ ID NO: 1638267 - DNA, 15 bp, Homo sapiens
taattggacaacttt

SEQ ID NO: 1638268 - DNA, 15 bp, Homo sapiens
ctaattggacaactt

SEQ ID NO: 1638269 - DNA, 15 bp, Homo sapiens
actaattggacaact

SEQ ID NO: 1638270 - DNA, 15 bp, Homo sapiens
tactaattggacaac

SEQ ID NO: 1638271 - DNA, 15 bp, Homo sapiens
ttactaattggacaa

SEQ ID NO: 1638272 - DNA, 15 bp, Homo sapiens
attactaattggaca

SEQ ID NO: 1638273 - DNA, 15 bp, Homo sapiens
cattactaattggac

SEQ ID NO: 1638274 - DNA, 15 bp, Homo sapiens
gcattactaattgga

SEQ ID NO: 1638275 - DNA, 15 bp, Homo sapiens
agcattactaattgg

SEQ ID NO: 1638276 - DNA, 15 bp, Homo sapiens
cagcattactaattg

SEQ ID NO: 1638277 - DNA, 15 bp, Homo sapiens
gcagcattactaatt

SEQ ID NO: 1638278 - DNA, 15 bp, Homo sapiens
tgcagcattactaat

SEQ ID NO: 1638279 - DNA, 15 bp, Homo sapiens
ctgcagcattactaa

SEQ ID NO: 1638280 - DNA, 15 bp, Homo sapiens
actgcagcattacta

SEQ ID NO: 1638281 - DNA, 15 bp, Homo sapiens
gactgcagcattact

SEQ ID NO: 1638282 - DNA, 15 bp, Homo sapiens
agactgcagcattac

SEQ ID NO: 1638283 - DNA, 15 bp, Homo sapiens
tagactgcagcatta

SEQ ID NO: 1638284 - DNA, 15 bp, Homo sapiens
atagactgcagcatt

SEQ ID NO: 1638285 - DNA, 15 bp, Homo sapiens
aatagactgcagcat

SEQ ID NO: 1638286 - DNA, 15 bp, Homo sapiens
aaatagactgcagca

SEQ ID NO: 1638287 - DNA, 15 bp, Homo sapiens
gaaatagactgcagc

SEQ ID NO: 1638288 - DNA, 15 bp, Homo sapiens
ggaaatagactgcag

SEQ ID NO: 1638289 - DNA, 15 bp, Homo sapiens
aggaaatagactgca

SEQ ID NO: 1638290 - DNA, 15 bp, Homo sapiens
aaggaaatagactgc

SEQ ID NO: 1638291 - DNA, 15 bp, Homo sapiens
aaaggaaatagactg

SEQ ID NO: 1638292 - DNA, 15 bp, Homo sapiens
caaaggaaatagact

SEQ ID NO: 1638293 - DNA, 15 bp, Homo sapiens
acaaaggaaatagac

SEQ ID NO: 1638294 - DNA, 15 bp, Homo sapiens
cacaaaggaaataga

SEQ ID NO: 1638295 - DNA, 15 bp, Homo sapiens
gcacaaaggaaatag

SEQ ID NO: 1638296 - DNA, 15 bp, Homo sapiens
agcacaaaggaaata

SEQ ID NO: 1638297 - DNA, 15 bp, Homo sapiens
cagcacaaaggaaat

SEQ ID NO: 1638298 - DNA, 15 bp, Homo sapiens
ccagcacaaaggaaa

SEQ ID NO: 1638299 - DNA, 15 bp, Homo sapiens
cccagcacaaaggaa

SEQ ID NO: 1638300 - DNA, 15 bp, Homo sapiens
ccccagcacaaagga

SEQ ID NO: 1638301 - DNA, 15 bp, Homo sapiens
cccccagcacaaagg

SEQ ID NO: 1638302 - DNA, 15 bp, Homo sapiens
acccccagcacaaag

SEQ ID NO: 1638303 - DNA, 15 bp, Homo sapiens
gacccccagcacaaa

SEQ ID NO: 1638304 - DNA, 15 bp, Homo sapiens
agacccccagcacaa

SEQ ID NO: 1638305 - DNA, 15 bp, Homo sapiens
gagacccccagcaca

SEQ ID NO: 1638306 - DNA, 15 bp, Homo sapiens
ggagacccccagcac

SEQ ID NO: 1638307 - DNA, 15 bp, Homo sapiens
aggagacccccagca

SEQ ID NO: 1638308 - DNA, 15 bp, Homo sapiens
gaggagacccccagc

SEQ ID NO: 1638309 - DNA, 15 bp, Homo sapiens
tgaggagacccccag

SEQ ID NO: 1638310 - DNA, 15 bp, Homo sapiens
ctgaggagaccccca

SEQ ID NO: 1638311 - DNA, 15 bp, Homo sapiens
actgaggagaccccc

SEQ ID NO: 1638312 - DNA, 15 bp, Homo sapiens
tactgaggagacccc

SEQ ID NO: 1638313 - DNA, 15 bp, Homo sapiens
atactgaggagaccc

SEQ ID NO: 1638314 - DNA, 15 bp, Homo sapiens
gatactgaggagacc

SEQ ID NO: 1638315 - DNA, 15 bp, Homo sapiens
tgatactgaggagac

SEQ ID NO: 1638316 - DNA, 15 bp, Homo sapiens
atgatactgaggaga

SEQ ID NO: 1638317 - DNA, 15 bp, Homo sapiens
gatgatactgaggag

SEQ ID NO: 1638318 - DNA, 15 bp, Homo sapiens
ggatgatactgagga

SEQ ID NO: 1638319 - DNA, 15 bp, Homo sapiens
gggatgatactgagg

SEQ ID NO: 1638320 - DNA, 15 bp, Homo sapiens
agggatgatactgag

SEQ ID NO: 1638321 - DNA, 15 bp, Homo sapiens
aagggatgatactga

SEQ ID NO: 1638322 - DNA, 15 bp, Homo sapiens
gaagggatgatactg

SEQ ID NO: 1638323 - DNA, 15 bp, Homo sapiens
cgaagggatgatact

SEQ ID NO: 1638324 - DNA, 15 bp, Homo sapiens
tcgaagggatgatac

SEQ ID NO: 1638325 - DNA, 15 bp, Homo sapiens
ctcgaagggatgata

SEQ ID NO: 1638326 - DNA, 15 bp, Homo sapiens
actcgaagggatgat

SEQ ID NO: 1638327 - DNA, 15 bp, Homo sapiens
aactcgaagggatga

SEQ ID NO: 1638328 - DNA, 15 bp, Homo sapiens
aaactcgaagggatg

SEQ ID NO: 1638329 - DNA, 15 bp, Homo sapiens
gaaactcgaagggat

SEQ ID NO: 1638330 - DNA, 15 bp, Homo sapiens
tgaaactcgaaggga

SEQ ID NO: 1638331 - DNA, 15 bp, Homo sapiens
gtgaaactcgaaggg

SEQ ID NO: 1638332 - DNA, 15 bp, Homo sapiens
ggtgaaactcgaagg

SEQ ID NO: 1638333 - DNA, 15 bp, Homo sapiens
tggtgaaactcgaag

SEQ ID NO: 1638334 - DNA, 15 bp, Homo sapiens
ctggtgaaactcgaa

SEQ ID NO: 1638335 - DNA, 15 bp, Homo sapiens
tctggtgaaactcga

SEQ ID NO: 1638336 - DNA, 15 bp, Homo sapiens
ttctggtgaaactcg

SEQ ID NO: 1638337 - DNA, 15 bp, Homo sapiens
tttctggtgaaactc

SEQ ID NO: 1638338 - DNA, 15 bp, Homo sapiens
ctttctggtgaaact

SEQ ID NO: 1638339 - DNA, 15 bp, Homo sapiens
tctttctggtgaaac

SEQ ID NO: 1638340 - DNA, 15 bp, Homo sapiens
atctttctggtgaaa

SEQ ID NO: 1638341 - DNA, 15 bp, Homo sapiens
catctttctggtgaa

SEQ ID NO: 1638342 - DNA, 15 bp, Homo sapiens
acatctttctggtga

SEQ ID NO: 1638343 - DNA, 15 bp, Homo sapiens
aacatctttctggtg

SEQ ID NO: 1638344 - DNA, 15 bp, Homo sapiens
taacatctttctggt

SEQ ID NO: 1638345 - DNA, 15 bp, Homo sapiens
ataacatctttctgg

SEQ ID NO: 1638346 - DNA, 15 bp, Homo sapiens
gataacatctttctg

SEQ ID NO: 1638347 - DNA, 15 bp, Homo sapiens
tgataacatctttct

SEQ ID NO: 1638348 - DNA, 15 bp, Homo sapiens
ctgataacatctttc

SEQ ID NO: 1638349 - DNA, 15 bp, Homo sapiens
cctgataacatcttt

SEQ ID NO: 1638350 - DNA, 15 bp, Homo sapiens
gcctgataacatctt

SEQ ID NO: 1638351 - DNA, 15 bp, Homo sapiens
ggcctgataacatct

SEQ ID NO: 1638352 - DNA, 15 bp, Homo sapiens
gggcctgataacatc

SEQ ID NO: 1638353 - DNA, 15 bp, Homo sapiens
ggggcctgataacat

SEQ ID NO: 1638354 - DNA, 15 bp, Homo sapiens
tggggcctgataaca

SEQ ID NO: 1638355 - DNA, 15 bp, Homo sapiens
gtggggcctgataac

SEQ ID NO: 1638356 - DNA, 15 bp, Homo sapiens
ggtggggcctgataa

SEQ ID NO: 1638357 - DNA, 15 bp, Homo sapiens
tggtggggcctgata

SEQ ID NO: 1638358 - DNA, 15 bp, Homo sapiens
gtggtggggcctgat

SEQ ID NO: 1638359 - DNA, 15 bp, Homo sapiens
agtggtggggcctga

SEQ ID NO: 1638360 - DNA, 15 bp, Homo sapiens
aagtggtggggcctg

SEQ ID NO: 1638361 - DNA, 15 bp, Homo sapiens
taagtggtggggcct

SEQ ID NO: 1638362 - DNA, 15 bp, Homo sapiens
gtaagtggtggggcc

SEQ ID NO: 1638363 - DNA, 15 bp, Homo sapiens
ggtaagtggtggggc

SEQ ID NO: 1638364 - DNA, 15 bp, Homo sapiens
taactttgggtaagt

SEQ ID NO: 1638365 - DNA, 15 bp, Homo sapiens
ctaactttgggtaag

SEQ ID NO: 1638366 - DNA, 15 bp, Homo sapiens
gctaactttgggtaa

SEQ ID NO: 1638367 - DNA, 15 bp, Homo sapiens
ggctaactttgggta

SEQ ID NO: 1638368 - DNA, 15 bp, Homo sapiens
aggctaactttgggt

SEQ ID NO: 1638369 - DNA, 15 bp, Homo sapiens
aaggctaactttggg

SEQ ID NO: 1638370 - DNA, 15 bp, Homo sapiens
aaaggctaactttgg

SEQ ID NO: 1638371 - DNA, 15 bp, Homo sapiens
caaaggctaactttg

SEQ ID NO: 1638372 - DNA, 15 bp, Homo sapiens
ccaaaggctaacttt

SEQ ID NO: 1638373 - DNA, 15 bp, Homo sapiens
tccaaaggctaactt

SEQ ID NO: 1638374 - DNA, 15 bp, Homo sapiens
atccaaaggctaact

SEQ ID NO: 1638375 - DNA, 15 bp, Homo sapiens
aatccaaaggctaac

SEQ ID NO: 1638376 - DNA, 15 bp, Homo sapiens
caatccaaaggctaa

SEQ ID NO: 1638377 - DNA, 15 bp, Homo sapiens
ccaatccaaaggcta

SEQ ID NO: 1638378 - DNA, 15 bp, Homo sapiens
cccaatccaaaggct

SEQ ID NO: 1638379 - DNA, 15 bp, Homo sapiens
ccccaatccaaaggc

SEQ ID NO: 1638380 - DNA, 15 bp, Homo sapiens
cccccaatccaaagg

SEQ ID NO: 1638381 - DNA, 15 bp, Homo sapiens
acccccaatccaaag

SEQ ID NO: 1638382 - DNA, 15 bp, Homo sapiens
aacccccaatccaaa

SEQ ID NO: 1638383 - DNA, 15 bp, Homo sapiens
aaacccccaatccaa

SEQ ID NO: 1638384 - DNA, 15 bp, Homo sapiens
gaaacccccaatcca

SEQ ID NO: 1638385 - DNA, 15 bp, Homo sapiens
agaaacccccaatcc

SEQ ID NO: 1638386 - DNA, 15 bp, Homo sapiens
cagaaacccccaatc

SEQ ID NO: 1638387 - DNA, 15 bp, Homo sapiens
gcagaaacccccaat

SEQ ID NO: 1638388 - DNA, 15 bp, Homo sapiens
tgcagaaacccccaa

SEQ ID NO: 1638389 - DNA, 15 bp, Homo sapiens
atgcagaaaccccca

SEQ ID NO: 1638390 - DNA, 15 bp, Homo sapiens
aatgcagaaaccccc

SEQ ID NO: 1638391 - DNA, 15 bp, Homo sapiens
taatgcagaaacccc

SEQ ID NO: 1638392 - DNA, 15 bp, Homo sapiens
ataatgcagaaaccc

SEQ ID NO: 1638393 - DNA, 15 bp, Homo sapiens
tataatgcagaaacc

SEQ ID NO: 1638394 - DNA, 15 bp, Homo sapiens
ctataatgcagaaac

SEQ ID NO: 1638395 - DNA, 15 bp, Homo sapiens
actataatgcagaaa

SEQ ID NO: 1638396 - DNA, 15 bp, Homo sapiens
gactataatgcagaa

SEQ ID NO: 1638397 - DNA, 15 bp, Homo sapiens
tgactataatgcaga

SEQ ID NO: 1638398 - DNA, 15 bp, Homo sapiens
gtgactataatgcag

SEQ ID NO: 1638399 - DNA, 15 bp, Homo sapiens
agtgactataatgca

SEQ ID NO: 1638400 - DNA, 15 bp, Homo sapiens
aagtgactataatgc

SEQ ID NO: 1638401 - DNA, 15 bp, Homo sapiens
gaagtgactataatg

SEQ ID NO: 1638402 - DNA, 15 bp, Homo sapiens
tgaagtgactataat

SEQ ID NO: 1638403 - DNA, 15 bp, Homo sapiens
ctgaagtgactataa

SEQ ID NO: 1638404 - DNA, 15 bp, Homo sapiens
actgaagtgactata

SEQ ID NO: 1638405 - DNA, 15 bp, Homo sapiens
cactgaagtgactat

SEQ ID NO: 1638406 - DNA, 15 bp, Homo sapiens
ccactgaagtgacta

SEQ ID NO: 1638407 - DNA, 15 bp, Homo sapiens
accactgaagtgact

SEQ ID NO: 1638408 - DNA, 15 bp, Homo sapiens
aaccactgaagtgac

SEQ ID NO: 1638409 - DNA, 15 bp, Homo sapiens
caaccactgaagtga

SEQ ID NO: 1638410 - DNA, 15 bp, Homo sapiens
gcaaccactgaagtg

SEQ ID NO: 1638411 - DNA, 15 bp, Homo sapiens
ggcaaccactgaagt

SEQ ID NO: 1638412 - DNA, 15 bp, Homo sapiens
tggcaaccactgaag

SEQ ID NO: 1638413 - DNA, 15 bp, Homo sapiens
ttggcaaccactgaa

SEQ ID NO: 1638414 - DNA, 15 bp, Homo sapiens
tttggcaaccactga

SEQ ID NO: 1638415 - DNA, 15 bp, Homo sapiens
ttttggcaaccactg

SEQ ID NO: 1638416 - DNA, 15 bp, Homo sapiens
tttttggcaaccact

SEQ ID NO: 1638417 - DNA, 15 bp, Homo sapiens
ctttttggcaaccac

SEQ ID NO: 1638418 - DNA, 15 bp, Homo sapiens
tctttttggcaacca

SEQ ID NO: 1638419 - DNA, 15 bp, Homo sapiens
atctttttggcaacc

SEQ ID NO: 1638420 - DNA, 15 bp, Homo sapiens
catctttttggcaac

SEQ ID NO: 1638421 - DNA, 15 bp, Homo sapiens
acatctttttggcaa

SEQ ID NO: 1638422 - DNA, 15 bp, Homo sapiens
aacatctttttggca

SEQ ID NO: 1638423 - DNA, 15 bp, Homo sapiens
taacatctttttggc

SEQ ID NO: 1638424 - DNA, 15 bp, Homo sapiens
ataacatctttttgg

SEQ ID NO: 1638425 - DNA, 15 bp, Homo sapiens
tataacatctttttg

SEQ ID NO: 1638426 - DNA, 15 bp, Homo sapiens
ctataacatcttttt

SEQ ID NO: 1638427 - DNA, 15 bp, Homo sapiens
cctataacatctttt

SEQ ID NO: 1638428 - DNA, 15 bp, Homo sapiens
tcctataacatcttt

SEQ ID NO: 1638429 - DNA, 15 bp, Homo sapiens
gtcctataacatctt

SEQ ID NO: 1638430 - DNA, 15 bp, Homo sapiens
ggtcctataacatct

SEQ ID NO: 1638431 - DNA, 15 bp, Homo sapiens
gggtcctataacatc

SEQ ID NO: 1638432 - DNA, 15 bp, Homo sapiens
ggggtcctataacat

SEQ ID NO: 1638433 - DNA, 15 bp, Homo sapiens
gggggtcctataaca

SEQ ID NO: 1638434 - DNA, 15 bp, Homo sapiens
tgggggtcctataac

SEQ ID NO: 1638435 - DNA, 15 bp, Homo sapiens
ttgggggtcctataa

SEQ ID NO: 1638436 - DNA, 15 bp, Homo sapiens
gttgggggtcctata

SEQ ID NO: 1638437 - DNA, 15 bp, Homo sapiens
tgttgggggtcctat

SEQ ID NO: 1638438 - DNA, 15 bp, Homo sapiens
gtgttgggggtccta

SEQ ID NO: 1638439 - DNA, 15 bp, Homo sapiens
agtgttgggggtcct

SEQ ID NO: 1638440 - DNA, 15 bp, Homo sapiens
aagtgttgggggtcc

SEQ ID NO: 1638441 - DNA, 15 bp, Homo sapiens
taagtgttgggggtc

SEQ ID NO: 1638442 - DNA, 15 bp, Homo sapiens
gtaagtgttgggggt

SEQ ID NO: 1638443 - DNA, 15 bp, Homo sapiens
ggtaagtgttggggg

SEQ ID NO: 1638444 - DNA, 15 bp, Homo sapiens
gggtaagtgttgggg

SEQ ID NO: 1638445 - DNA, 15 bp, Homo sapiens
tgggtaagtgttggg

SEQ ID NO: 1638446 - DNA, 15 bp, Homo sapiens
ttgggtaagtgttgg

SEQ ID NO: 1638447 - DNA, 15 bp, Homo sapiens
tttgggtaagtgttg

SEQ ID NO: 1638448 - DNA, 15 bp, Homo sapiens
ttttgggtaagtgtt

SEQ ID NO: 1638449 - DNA, 15 bp, Homo sapiens
attttgggtaagtgt

SEQ ID NO: 1638450 - DNA, 15 bp, Homo sapiens
aattttgggtaagtg

SEQ ID NO: 1638451 - DNA, 15 bp, Homo sapiens
taattttgggtaagt

SEQ ID NO: 1638452 - DNA, 15 bp, Homo sapiens
ttaattttgggtaag

SEQ ID NO: 1638453 - DNA, 15 bp, Homo sapiens
gttaattttgggtaa

SEQ ID NO: 1638454 - DNA, 15 bp, Homo sapiens
ggttaattttgggta

SEQ ID NO: 1638455 - DNA, 15 bp, Homo sapiens
aggttaattttgggt

SEQ ID NO: 1638456 - DNA, 15 bp, Homo sapiens
aaggttaattttggg

SEQ ID NO: 1638457 - DNA, 15 bp, Homo sapiens
aaaggttaattttgg

SEQ ID NO: 1638458 - DNA, 15 bp, Homo sapiens
caaaggttaattttg

SEQ ID NO: 1638459 - DNA, 15 bp, Homo sapiens
ccaaaggttaatttt

SEQ ID NO: 1638460 - DNA, 15 bp, Homo sapiens
cccaaaggttaattt

SEQ ID NO: 1638461 - DNA, 15 bp, Homo sapiens
acccaaaggttaatt

SEQ ID NO: 1638462 - DNA, 15 bp, Homo sapiens
gacccaaaggttaat

SEQ ID NO: 1638463 - DNA, 15 bp, Homo sapiens
tgacccaaaggttaa

SEQ ID NO: 1638464 - DNA, 15 bp, Homo sapiens
ctgacccaaaggtta

SEQ ID NO: 1638465 - DNA, 15 bp, Homo sapiens
cctgacccaaaggtt

SEQ ID NO: 1638466 - DNA, 15 bp, Homo sapiens
acctgacccaaaggt

SEQ ID NO: 1638467 - DNA, 15 bp, Homo sapiens
tacctgacccaaagg

SEQ ID NO: 1638468 - DNA, 15 bp, Homo sapiens
atacctgacccaaag

SEQ ID NO: 1638469 - DNA, 15 bp, Homo sapiens
aatacctgacccaaa

SEQ ID NO: 1638470 - DNA, 15 bp, Homo sapiens
aaatacctgacccaa

SEQ ID NO: 1638471 - DNA, 15 bp, Homo sapiens
gaaatacctgaccca

SEQ ID NO: 1638472 - DNA, 15 bp, Homo sapiens
agaaatacctgaccc

SEQ ID NO: 1638473 - DNA, 15 bp, Homo sapiens
cagaaatacctgacc

SEQ ID NO: 1638474 - DNA, 15 bp, Homo sapiens
gcagaaatacctgac

SEQ ID NO: 1638475 - DNA, 15 bp, Homo sapiens
tgcagaaatacctga

SEQ ID NO: 1638476 - DNA, 15 bp, Homo sapiens
gtgcagaaatacctg

SEQ ID NO: 1638477 - DNA, 15 bp, Homo sapiens
agtgcagaaatacct

SEQ ID NO: 1638478 - DNA, 15 bp, Homo sapiens
tagtgcagaaatacc

SEQ ID NO: 1638479 - DNA, 15 bp, Homo sapiens
atagtgcagaaatac

SEQ ID NO: 1638480 - DNA, 15 bp, Homo sapiens
tatagtgcagaaata

SEQ ID NO: 1638481 - DNA, 15 bp, Homo sapiens
ctatagtgcagaaat

SEQ ID NO: 1638482 - DNA, 15 bp, Homo sapiens
actatagtgcagaaa

SEQ ID NO: 1638483 - DNA, 15 bp, Homo sapiens
gactatagtgcagaa

SEQ ID NO: 1638484 - DNA, 15 bp, Homo sapiens
ggactatagtgcaga

SEQ ID NO: 1638485 - DNA, 15 bp, Homo sapiens
gggactatagtgcag

SEQ ID NO: 1638486 - DNA, 15 bp, Homo sapiens
agggactatagtgca

SEQ ID NO: 1638487 - DNA, 15 bp, Homo sapiens
aagggactatagtgc

SEQ ID NO: 1638488 - DNA, 15 bp, Homo sapiens
gaagggactatagtg

SEQ ID NO: 1638489 - DNA, 15 bp, Homo sapiens
agaagggactatagt

SEQ ID NO: 1638490 - DNA, 15 bp, Homo sapiens
cagaagggactatag

SEQ ID NO: 1638491 - DNA, 15 bp, Homo sapiens
acagaagggactata

SEQ ID NO: 1638492 - DNA, 15 bp, Homo sapiens
cacagaagggactat

SEQ ID NO: 1638493 - DNA, 15 bp, Homo sapiens
tcacagaagggacta

SEQ ID NO: 1638494 - DNA, 15 bp, Homo sapiens
atcacagaagggact

SEQ ID NO: 1638495 - DNA, 15 bp, Homo sapiens
tatcacagaagggac

SEQ ID NO: 1638496 - DNA, 15 bp, Homo sapiens
ttatcacagaaggga

SEQ ID NO: 1638497 - DNA, 15 bp, Homo sapiens
attatcacagaaggg

SEQ ID NO: 1638498 - DNA, 15 bp, Homo sapiens
gattatcacagaagg

SEQ ID NO: 1638499 - DNA, 15 bp, Homo sapiens
tgattatcacagaag

SEQ ID NO: 1638500 - DNA, 15 bp, Homo sapiens
ctgattatcacagaa

SEQ ID NO: 1638501 - DNA, 15 bp, Homo sapiens
tctgattatcacaga

SEQ ID NO: 1638502 - DNA, 15 bp, Homo sapiens
ttctgattatcacag

SEQ ID NO: 1638503 - DNA, 15 bp, Homo sapiens
tttctgattatcaca

SEQ ID NO: 1638504 - DNA, 15 bp, Homo sapiens
ctttctgattatcac

SEQ ID NO: 1638505 - DNA, 15 bp, Homo sapiens
tctttctgattatca

SEQ ID NO: 1638506 - DNA, 15 bp, Homo sapiens
atctttctgattatc

SEQ ID NO: 1638507 - DNA, 15 bp, Homo sapiens
catctttctgattat

SEQ ID NO: 1638508 - DNA, 15 bp, Homo sapiens
acatctttctgatta

SEQ ID NO: 1638509 - DNA, 15 bp, Homo sapiens
aacatctttctgatt

SEQ ID NO: 1638510 - DNA, 15 bp, Homo sapiens
taacatctttctgat

SEQ ID NO: 1638511 - DNA, 15 bp, Homo sapiens
ataacatctttctga

SEQ ID NO: 1638512 - DNA, 15 bp, Homo sapiens
tataacatctttctg

SEQ ID NO: 1638513 - DNA, 15 bp, Homo sapiens
ctataacatctttct

SEQ ID NO: 1638514 - DNA, 15 bp, Homo sapiens
cctataacatctttc

SEQ ID NO: 1638515 - DNA, 15 bp, Homo sapiens
ttcctataacatctt

SEQ ID NO: 1638516 - DNA, 15 bp, Homo sapiens
tttcctataacatct

SEQ ID NO: 1638517 - DNA, 15 bp, Homo sapiens
ttttcctataacatc

SEQ ID NO: 1638518 - DNA, 15 bp, Homo sapiens
cttttcctataacat

SEQ ID NO: 1638519 - DNA, 15 bp, Homo sapiens
ccttttcctataaca

SEQ ID NO: 1638520 - DNA, 15 bp, Homo sapiens
tccttttcctataac

SEQ ID NO: 1638521 - DNA, 15 bp, Homo sapiens
atccttttcctataa

SEQ ID NO: 1638522 - DNA, 15 bp, Homo sapiens
gatccttttcctata

SEQ ID NO: 1638523 - DNA, 15 bp, Homo sapiens
ggatccttttcctat

SEQ ID NO: 1638524 - DNA, 15 bp, Homo sapiens
aggatccttttccta

SEQ ID NO: 1638525 - DNA, 15 bp, Homo sapiens
caggatccttttcct

SEQ ID NO: 1638526 - DNA, 15 bp, Homo sapiens
tcaggatccttttcc

SEQ ID NO: 1638527 - DNA, 15 bp, Homo sapiens
atcaggatccttttc

SEQ ID NO: 1638528 - DNA, 15 bp, Homo sapiens
gatcaggatcctttt

SEQ ID NO: 1638529 - DNA, 15 bp, Homo sapiens
ggatcaggatccttt

SEQ ID NO: 1638530 - DNA, 15 bp, Homo sapiens
tggatcaggatcctt

SEQ ID NO: 1638531 - DNA, 15 bp, Homo sapiens
ctggatcaggatcct

SEQ ID NO: 1638532 - DNA, 15 bp, Homo sapiens
cctggatcaggatcc

SEQ ID NO: 1638533 - DNA, 15 bp, Homo sapiens
gcctggatcaggatc

SEQ ID NO: 1638534 - DNA, 15 bp, Homo sapiens
ggcctggatcaggat

SEQ ID NO: 1638535 - DNA, 15 bp, Homo sapiens
gggcctggatcagga

SEQ ID NO: 1638536 - DNA, 15 bp, Homo sapiens
ggggcctggatcagg

SEQ ID NO: 1638537 - DNA, 15 bp, Homo sapiens
gggggcctggatcag

SEQ ID NO: 1638538 - DNA, 15 bp, Homo sapiens
tgggggcctggatca

SEQ ID NO: 1638539 - DNA, 15 bp, Homo sapiens
ctgggggcctggatc

SEQ ID NO: 1638540 - DNA, 15 bp, Homo sapiens
cctgggggcctggat

SEQ ID NO: 1638541 - DNA, 15 bp, Homo sapiens
tcctgggggcctgga

SEQ ID NO: 1638542 - DNA, 15 bp, Homo sapiens
ctcctgggggcctgg

SEQ ID NO: 1638543 - DNA, 15 bp, Homo sapiens
tctcctgggggcctg

SEQ ID NO: 1638544 - DNA, 15 bp, Homo sapiens
ctctcctgggggcct

SEQ ID NO: 1638545 - DNA, 15 bp, Homo sapiens
cctctcctgggggcc

SEQ ID NO: 1638546 - DNA, 15 bp, Homo sapiens
ccctctcctgggggc

SEQ ID NO: 1638547 - DNA, 15 bp, Homo sapiens
accctctcctggggg

SEQ ID NO: 1638548 - DNA, 15 bp, Homo sapiens
aaccctctcctgggg

SEQ ID NO: 1638549 - DNA, 15 bp, Homo sapiens
gaaccctctcctggg

SEQ ID NO: 1638550 - DNA, 15 bp, Homo sapiens
agaaccctctcctgg

SEQ ID NO: 1638551 - DNA, 15 bp, Homo sapiens
aagaaccctctcctg

SEQ ID NO: 1638552 - DNA, 15 bp, Homo sapiens
caagaaccctctcct

SEQ ID NO: 1638553 - DNA, 15 bp, Homo sapiens
ccaagaaccctctcc

SEQ ID NO: 1638554 - DNA, 15 bp, Homo sapiens
tccaagaaccctctc

SEQ ID NO: 1638555 - DNA, 15 bp, Homo sapiens
atccaagaaccctct

SEQ ID NO: 1638556 - DNA, 15 bp, Homo sapiens
gatccaagaaccctc

SEQ ID NO: 1638557 - DNA, 15 bp, Homo sapiens
agatccaagaaccct

SEQ ID NO: 1638558 - DNA, 15 bp, Homo sapiens
aagatccaagaaccc

SEQ ID NO: 1638559 - DNA, 15 bp, Homo sapiens
caagatccaagaacc

SEQ ID NO: 1638560 - DNA, 15 bp, Homo sapiens
acaagatccaagaac

SEQ ID NO: 1638561 - DNA, 15 bp, Homo sapiens
cacaagatccaagaa

SEQ ID NO: 1638562 - DNA, 15 bp, Homo sapiens
gcacaagatccaaga

SEQ ID NO: 1638563 - DNA, 15 bp, Homo sapiens
tgcacaagatccaag

SEQ ID NO: 1638564 - DNA, 15 bp, Homo sapiens
ttgcacaagatccaa

SEQ ID NO: 1638565 - DNA, 15 bp, Homo sapiens
cttgcacaagatcca

SEQ ID NO: 1638566 - DNA, 15 bp, Homo sapiens
tcttgcacaagatcc

SEQ ID NO: 1638567 - DNA, 15 bp, Homo sapiens
ttcttgcacaagatc

SEQ ID NO: 1638568 - DNA, 15 bp, Homo sapiens
tttcttgcacaagat

SEQ ID NO: 1638569 - DNA, 15 bp, Homo sapiens
ctttcttgcacaaga

SEQ ID NO: 1638570 - DNA, 15 bp, Homo sapiens
tctttcttgcacaag

SEQ ID NO: 1638571 - DNA, 15 bp, Homo sapiens
ttctttcttgcacaa

SEQ ID NO: 1638572 - DNA, 15 bp, Homo sapiens
attctttcttgcaca

SEQ ID NO: 1638573 - DNA, 15 bp, Homo sapiens
aattctttcttgcac

SEQ ID NO: 1638574 - DNA, 15 bp, Homo sapiens
gaattctttcttgca

SEQ ID NO: 1638575 - DNA, 15 bp, Homo sapiens
tgaattctttcttgc

SEQ ID NO: 1638576 - DNA, 15 bp, Homo sapiens
ctgaattctttcttg

SEQ ID NO: 1638577 - DNA, 15 bp, Homo sapiens
cctgaattctttctt

SEQ ID NO: 1638578 - DNA, 15 bp, Homo sapiens
ccctgaattctttct

SEQ ID NO: 1638579 - DNA, 15 bp, Homo sapiens
gccctgaattctttc

SEQ ID NO: 1638580 - DNA, 15 bp, Homo sapiens
cgccctgaattcttt

SEQ ID NO: 1638581 - DNA, 15 bp, Homo sapiens
tcgccctgaattctt

SEQ ID NO: 1638582 - DNA, 15 bp, Homo sapiens
ctcgccctgaattct

SEQ ID NO: 1638583 - DNA, 15 bp, Homo sapiens
actcgccctgaattc

SEQ ID NO: 1638584 - DNA, 15 bp, Homo sapiens
gactcgccctgaatt

SEQ ID NO: 1638585 - DNA, 15 bp, Homo sapiens
ggactcgccctgaat

SEQ ID NO: 1638586 - DNA, 15 bp, Homo sapiens
cggactcgccctgaa

SEQ ID NO: 1638587 - DNA, 15 bp, Homo sapiens
gcggactcgccctga

SEQ ID NO: 1638588 - DNA, 15 bp, Homo sapiens
tgcggactcgccctg

SEQ ID NO: 1638589 - DNA, 15 bp, Homo sapiens
ctgcggactcgccct

SEQ ID NO: 1638590 - DNA, 15 bp, Homo sapiens
actgcggactcgccc

SEQ ID NO: 1638591 - DNA, 15 bp, Homo sapiens
cactgcggactcgcc

SEQ ID NO: 1638592 - DNA, 15 bp, Homo sapiens
gcactgcggactcgc

SEQ ID NO: 1638593 - DNA, 15 bp, Homo sapiens
tgcactgcggactcg

SEQ ID NO: 1638594 - DNA, 15 bp, Homo sapiens
ttgcactgcggactc

SEQ ID NO: 1638595 - DNA, 15 bp, Homo sapiens
tttgcactgcggact

SEQ ID NO: 1638596 - DNA, 15 bp, Homo sapiens
ctttgcactgcggac

SEQ ID NO: 1638597 - DNA, 15 bp, Homo sapiens
gctttgcactgcgga

SEQ ID NO: 1638598 - DNA, 15 bp, Homo sapiens
tgctttgcactgcgg

SEQ ID NO: 1638599 - DNA, 15 bp, Homo sapiens
ttgctttgcactgcg

SEQ ID NO: 1638600 - DNA, 15 bp, Homo sapiens
tttgctttgcactgc

SEQ ID NO: 1638601 - DNA, 15 bp, Homo sapiens
ttttgctttgcactg

SEQ ID NO: 1638602 - DNA, 15 bp, Homo sapiens
gttttgctttgcact

SEQ ID NO: 1638603 - DNA, 15 bp, Homo sapiens
ggttttgctttgcac

SEQ ID NO: 1638604 - DNA, 15 bp, Homo sapiens
tggttttgctttgca

SEQ ID NO: 1638605 - DNA, 15 bp, Homo sapiens
ttggttttgctttgc

SEQ ID NO: 1638606 - DNA, 15 bp, Homo sapiens
cttggttttgctttg

SEQ ID NO: 1638607 - DNA, 15 bp, Homo sapiens
acttggttttgcttt

SEQ ID NO: 1638608 - DNA, 15 bp, Homo sapiens
aacttggttttgctt

SEQ ID NO: 1638609 - DNA, 15 bp, Homo sapiens
aaacttggttttgct

SEQ ID NO: 1638610 - DNA, 15 bp, Homo sapiens
taaacttggttttgc

SEQ ID NO: 1638611 - DNA, 15 bp, Homo sapiens
ataaacttggttttg

SEQ ID NO: 1638612 - DNA, 15 bp, Homo sapiens
aataaacttggtttt

SEQ ID NO: 1638613 - DNA, 15 bp, Homo sapiens
taataaacttggttt

SEQ ID NO: 1638614 - DNA, 15 bp, Homo sapiens
ctaataaacttggtt

SEQ ID NO: 1638615 - DNA, 15 bp, Homo sapiens
cctaataaacttggt

SEQ ID NO: 1638616 - DNA, 15 bp, Homo sapiens
tcctaataaacttgg

SEQ ID NO: 1638617 - DNA, 15 bp, Homo sapiens
ttcctaataaacttg

SEQ ID NO: 1638618 - DNA, 15 bp, Homo sapiens
tttcctaataaactt

SEQ ID NO: 1638619 - DNA, 15 bp, Homo sapiens
ctttcctaataaact

SEQ ID NO: 1638620 - DNA, 15 bp, Homo sapiens
actttcctaataaac

SEQ ID NO: 1638621 - DNA, 15 bp, Homo sapiens
tactttcctaataaa

SEQ ID NO: 1638622 - DNA, 15 bp, Homo sapiens
ttactttcctaataa

SEQ ID NO: 1638623 - DNA, 15 bp, Homo sapiens
tttactttcctaata

SEQ ID NO: 1638624 - DNA, 15 bp, Homo sapiens
ctttactttcctaat

SEQ ID NO: 1638625 - DNA, 15 bp, Homo sapiens
cctttactttcctaa

SEQ ID NO: 1638626 - DNA, 15 bp, Homo sapiens
tcctttactttccta

SEQ ID NO: 1638627 - DNA, 15 bp, Homo sapiens
ctcctttactttcct

SEQ ID NO: 1638628 - DNA, 15 bp, Homo sapiens
actcctttactttcc

SEQ ID NO: 1638629 - DNA, 15 bp, Homo sapiens
tactcctttactttc

SEQ ID NO: 1638630 - DNA, 15 bp, Homo sapiens
ttactcctttacttt

SEQ ID NO: 1638631 - DNA, 15 bp, Homo sapiens
gttactcctttactt

SEQ ID NO: 1638632 - DNA, 15 bp, Homo sapiens
tgttactcctttact

SEQ ID NO: 1638633 - DNA, 15 bp, Homo sapiens
ctgttactcctttac

SEQ ID NO: 1638634 - DNA, 15 bp, Homo sapiens
tctgttactccttta

SEQ ID NO: 1638635 - DNA, 15 bp, Homo sapiens
ttctgttactccttt

SEQ ID NO: 1638636 - DNA, 15 bp, Homo sapiens
attctgttactcctt

SEQ ID NO: 1638637 - DNA, 15 bp, Homo sapiens
cattctgttactcct

SEQ ID NO: 1638638 - DNA, 15 bp, Homo sapiens
ccattctgttactcc

SEQ ID NO: 1638639 - DNA, 15 bp, Homo sapiens
gccattctgttactc

SEQ ID NO: 1638640 - DNA, 15 bp, Homo sapiens
agccattctgttact

SEQ ID NO: 1638641 - DNA, 15 bp, Homo sapiens
tagccattctgttac

SEQ ID NO: 1638642 - DNA, 15 bp, Homo sapiens
gtagccattctgtta

SEQ ID NO: 1638643 - DNA, 15 bp, Homo sapiens
agtagccattctgtt

SEQ ID NO: 1638644 - DNA, 15 bp, Homo sapiens
gagtagccattctgt

SEQ ID NO: 1638645 - DNA, 15 bp, Homo sapiens
ggagtagccattctg

SEQ ID NO: 1638646 - DNA, 15 bp, Homo sapiens
tggagtagccattct

SEQ ID NO: 1638647 - DNA, 15 bp, Homo sapiens
atggagtagccattc

SEQ ID NO: 1638648 - DNA, 15 bp, Homo sapiens
tatggagtagccatt

SEQ ID NO: 1638649 - DNA, 15 bp, Homo sapiens
ctatggagtagccat

SEQ ID NO: 1638650 - DNA, 15 bp, Homo sapiens
tctatggagtagcca

SEQ ID NO: 1638651 - DNA, 15 bp, Homo sapiens
gtctatggagtagcc

SEQ ID NO: 1638652 - DNA, 15 bp, Homo sapiens
tgtctatggagtagc

SEQ ID NO: 1638653 - DNA, 15 bp, Homo sapiens
ctgtctatggagtag

SEQ ID NO: 1638654 - DNA, 15 bp, Homo sapiens
tctgtctatggagta

SEQ ID NO: 1638655 - DNA, 15 bp, Homo sapiens
ctctgtctatggagt

SEQ ID NO: 1638656 - DNA, 15 bp, Homo sapiens
actctgtctatggag

SEQ ID NO: 1638657 - DNA, 15 bp, Homo sapiens
tactctgtctatgga

SEQ ID NO: 1638658 - DNA, 15 bp, Homo sapiens
ttactctgtctatgg

SEQ ID NO: 1638659 - DNA, 15 bp, Homo sapiens
gttactctgtctatg

SEQ ID NO: 1638660 - DNA, 15 bp, Homo sapiens
ggttactctgtctat

SEQ ID NO: 1638661 - DNA, 15 bp, Homo sapiens
gggttactctgtcta

SEQ ID NO: 1638662 - DNA, 15 bp, Homo sapiens
ggggttactctgtct

SEQ ID NO: 1638663 - DNA, 15 bp, Homo sapiens
tggggttactctgtc

SEQ ID NO: 1638664 - DNA, 15 bp, Homo sapiens
ttggggttactctgt

SEQ ID NO: 1638665 - DNA, 15 bp, Homo sapiens
cttggggttactctg

SEQ ID NO: 1638666 - DNA, 15 bp, Homo sapiens
ccttggggttactct

SEQ ID NO: 1638667 - DNA, 15 bp, Homo sapiens
cccttggggttactc

SEQ ID NO: 1638668 - DNA, 15 bp, Homo sapiens
gcccttggggttact

SEQ ID NO: 1638669 - DNA, 15 bp, Homo sapiens
agcccttggggttac

SEQ ID NO: 1638670 - DNA, 15 bp, Homo sapiens
cagcccttggggtta

SEQ ID NO: 1638671 - DNA, 15 bp, Homo sapiens
gcagcccttggggtt

SEQ ID NO: 1638672 - DNA, 15 bp, Homo sapiens
agcagcccttggggt

SEQ ID NO: 1638673 - DNA, 15 bp, Homo sapiens
cagcagcccttgggg

SEQ ID NO: 1638674 - DNA, 15 bp, Homo sapiens
ccagcagcccttggg

SEQ ID NO: 1638675 - DNA, 15 bp, Homo sapiens
accagcagcccttgg

SEQ ID NO: 1638676 - DNA, 15 bp, Homo sapiens
aaccagcagcccttg

SEQ ID NO: 1638677 - DNA, 15 bp, Homo sapiens
caaccagcagccctt

SEQ ID NO: 1638678 - DNA, 15 bp, Homo sapiens
gcaaccagcagccct

SEQ ID NO: 1638679 - DNA, 15 bp, Homo sapiens
ggcaaccagcagccc

SEQ ID NO: 1638680 - DNA, 15 bp, Homo sapiens
gggcaaccagcagcc

SEQ ID NO: 1638681 - DNA, 15 bp, Homo sapiens
tgggcaaccagcagc

SEQ ID NO: 1638682 - DNA, 15 bp, Homo sapiens
atgggcaaccagcag

SEQ ID NO: 1638683 - DNA, 15 bp, Homo sapiens
aatgggcaaccagca

SEQ ID NO: 1638684 - DNA, 15 bp, Homo sapiens
aaatgggcaaccagc

SEQ ID NO: 1638685 - DNA, 15 bp, Homo sapiens
aaaatgggcaaccag

SEQ ID NO: 1638686 - DNA, 15 bp, Homo sapiens
aaaaatgggcaacca

SEQ ID NO: 1638687 - DNA, 15 bp, Homo sapiens
caaaaatgggcaacc

SEQ ID NO: 1638688 - DNA, 15 bp, Homo sapiens
acaaaaatgggcaac

SEQ ID NO: 1638689 - DNA, 15 bp, Homo sapiens
cacaaaaatgggcaa

SEQ ID NO: 1638690 - DNA, 15 bp, Homo sapiens
acacaaaaatgggca

SEQ ID NO: 1638691 - DNA, 15 bp, Homo sapiens
aacacaaaaatgggc

SEQ ID NO: 1638692 - DNA, 15 bp, Homo sapiens
aaacacaaaaatggg

SEQ ID NO: 1638693 - DNA, 15 bp, Homo sapiens
aaaaaacacaaaaat

SEQ ID NO: 1638694 - DNA, 15 bp, Homo sapiens
aaaaaaacacaaaaa

SEQ ID NO: 1638695 - DNA, 15 bp, Homo sapiens
gaaaaaaacacaaaa

SEQ ID NO: 1638696 - DNA, 15 bp, Homo sapiens
agaaaaaaacacaaa

SEQ ID NO: 1638697 - DNA, 15 bp, Homo sapiens
aagaaaaaaacacaa

SEQ ID NO: 1638698 - DNA, 15 bp, Homo sapiens
caagaaaaaaacaca

SEQ ID NO: 1638699 - DNA, 15 bp, Homo sapiens
tcaagaaaaaaacac

SEQ ID NO: 1638700 - DNA, 15 bp, Homo sapiens
atcaagaaaaaaaca

SEQ ID NO: 1638701 - DNA, 15 bp, Homo sapiens
catcaagaaaaaaac

SEQ ID NO: 1638702 - DNA, 15 bp, Homo sapiens
tcatcaagaaaaaaa

SEQ ID NO: 1638703 - DNA, 15 bp, Homo sapiens
atcatcaagaaaaaa

SEQ ID NO: 1638704 - DNA, 15 bp, Homo sapiens
tatcatcaagaaaaa

SEQ ID NO: 1638705 - DNA, 15 bp, Homo sapiens
atatcatcaagaaaa

SEQ ID NO: 1638706 - DNA, 15 bp, Homo sapiens
tatatcatcaagaaa

SEQ ID NO: 1638707 - DNA, 15 bp, Homo sapiens
gtatatcatcaagaa

SEQ ID NO: 1638708 - DNA, 15 bp, Homo sapiens
agtatatcatcaaga

SEQ ID NO: 1638709 - DNA, 15 bp, Homo sapiens
tagtatatcatcaag

SEQ ID NO: 1638710 - DNA, 15 bp, Homo sapiens
ttagtatatcatcaa

SEQ ID NO: 1638711 - DNA, 15 bp, Homo sapiens
tttagtatatcatca

SEQ ID NO: 1638712 - DNA, 15 bp, Homo sapiens
gtttagtatatcatc

SEQ ID NO: 1638713 - DNA, 15 bp, Homo sapiens
tgtttagtatatcat

SEQ ID NO: 1638714 - DNA, 15 bp, Homo sapiens
ttgtttagtatatca

SEQ ID NO: 1638715 - DNA, 15 bp, Homo sapiens
cttgtttagtatatc

SEQ ID NO: 1638716 - DNA, 15 bp, Homo sapiens
ccttgtttagtatat

SEQ ID NO: 1638717 - DNA, 15 bp, Homo sapiens
cccttgtttagtata

SEQ ID NO: 1638718 - DNA, 15 bp, Homo sapiens
ccccttgtttagtat

SEQ ID NO: 1638719 - DNA, 15 bp, Homo sapiens
accccttgtttagta

SEQ ID NO: 1638720 - DNA, 15 bp, Homo sapiens
caccccttgtttagt

SEQ ID NO: 1638721 - DNA, 15 bp, Homo sapiens
ccaccccttgtttag

SEQ ID NO: 1638722 - DNA, 15 bp, Homo sapiens
tccaccccttgttta

SEQ ID NO: 1638723 - DNA, 15 bp, Homo sapiens
atccaccccttgttt

SEQ ID NO: 1638724 - DNA, 15 bp, Homo sapiens
aatccaccccttgtt

SEQ ID NO: 1638725 - DNA, 15 bp, Homo sapiens
caatccaccccttgt

SEQ ID NO: 1638726 - DNA, 15 bp, Homo sapiens
acaatccaccccttg

SEQ ID NO: 1638727 - DNA, 15 bp, Homo sapiens
aacaatccacccctt

SEQ ID NO: 1638728 - DNA, 15 bp, Homo sapiens
gaacaatccacccct

SEQ ID NO: 1638729 - DNA, 15 bp, Homo sapiens
tgaacaatccacccc

SEQ ID NO: 1638730 - DNA, 15 bp, Homo sapiens
atgaacaatccaccc

SEQ ID NO: 1638731 - DNA, 15 bp, Homo sapiens
catgaacaatccacc

SEQ ID NO: 1638732 - DNA, 15 bp, Homo sapiens
gcatgaacaatccac

SEQ ID NO: 1638733 - DNA, 15 bp, Homo sapiens
ggcatgaacaatcca

SEQ ID NO: 1638734 - DNA, 15 bp, Homo sapiens
aggcatgaacaatcc

SEQ ID NO: 1638735 - DNA, 15 bp, Homo sapiens
aaggcatgaacaatc

SEQ ID NO: 1638736 - DNA, 15 bp, Homo sapiens
gaaggcatgaacaat

SEQ ID NO: 1638737 - DNA, 15 bp, Homo sapiens
ggaaggcatgaacaa

SEQ ID NO: 1638738 - DNA, 15 bp, Homo sapiens
gggaaggcatgaaca

SEQ ID NO: 1638739 - DNA, 15 bp, Homo sapiens
tgggaaggcatgaac

SEQ ID NO: 1638740 - DNA, 15 bp, Homo sapiens
atgggaaggcatgaa

SEQ ID NO: 1638741 - DNA, 15 bp, Homo sapiens
aatgggaaggcatga

SEQ ID NO: 1638742 - DNA, 15 bp, Homo sapiens
aaatgggaaggcatg

SEQ ID NO: 1638743 - DNA, 15 bp, Homo sapiens
aaaatgggaaggcat

SEQ ID NO: 1638744 - DNA, 15 bp, Homo sapiens
taaaatgggaaggca

SEQ ID NO: 1638745 - DNA, 15 bp, Homo sapiens
ctaaaatgggaaggc

SEQ ID NO: 1638746 - DNA, 15 bp, Homo sapiens
tctaaaatgggaagg

SEQ ID NO: 1638747 - DNA, 15 bp, Homo sapiens
gtctaaaatgggaag

SEQ ID NO: 1638748 - DNA, 15 bp, Homo sapiens
ggtctaaaatgggaa

SEQ ID NO: 1638749 - DNA, 15 bp, Homo sapiens
tggtctaaaatggga

SEQ ID NO: 1638750 - DNA, 15 bp, Homo sapiens
atggtctaaaatggg

SEQ ID NO: 1638751 - DNA, 15 bp, Homo sapiens
tatggtctaaaatgg

SEQ ID NO: 1638752 - DNA, 15 bp, Homo sapiens
atatggtctaaaatg

SEQ ID NO: 1638753 - DNA, 15 bp, Homo sapiens
tatatggtctaaaat

SEQ ID NO: 1638754 - DNA, 15 bp, Homo sapiens
ctatatggtctaaaa

SEQ ID NO: 1638755 - DNA, 15 bp, Homo sapiens
cctatatggtctaaa

SEQ ID NO: 1638756 - DNA, 15 bp, Homo sapiens
ccctatatggtctaa

SEQ ID NO: 1638757 - DNA, 15 bp, Homo sapiens
accctatatggtcta

SEQ ID NO: 1638758 - DNA, 15 bp, Homo sapiens
taccctatatggtct

SEQ ID NO: 1638759 - DNA, 15 bp, Homo sapiens
ttaccctatatggtc

SEQ ID NO: 1638760 - DNA, 15 bp, Homo sapiens
gttaccctatatggt

SEQ ID NO: 1638761 - DNA, 15 bp, Homo sapiens
agttaccctatatgg

SEQ ID NO: 1638762 - DNA, 15 bp, Homo sapiens
aagttaccctatatg

SEQ ID NO: 1638763 - DNA, 15 bp, Homo sapiens
gaagttaccctatat

SEQ ID NO: 1638764 - DNA, 15 bp, Homo sapiens
ggaagttaccctata

SEQ ID NO: 1638765 - DNA, 15 bp, Homo sapiens
aggaagttaccctat

SEQ ID NO: 1638766 - DNA, 15 bp, Homo sapiens
caggaagttacccta

SEQ ID NO: 1638767 - DNA, 15 bp, Homo sapiens
tcaggaagttaccct

SEQ ID NO: 1638768 - DNA, 15 bp, Homo sapiens
gtcaggaagttaccc

SEQ ID NO: 1638769 - DNA, 15 bp, Homo sapiens
tgtcaggaagttacc

SEQ ID NO: 1638770 - DNA, 15 bp, Homo sapiens
atgtcaggaagttac

SEQ ID NO: 1638771 - DNA, 15 bp, Homo sapiens
aatgtcaggaagtta

SEQ ID NO: 1638772 - DNA, 15 bp, Homo sapiens
caatgtcaggaagtt

SEQ ID NO: 1638773 - DNA, 15 bp, Homo sapiens
gcaatgtcaggaagt

SEQ ID NO: 1638774 - DNA, 15 bp, Homo sapiens
ggcaatgtcaggaag

SEQ ID NO: 1638775 - DNA, 15 bp, Homo sapiens
tggcaatgtcaggaa

SEQ ID NO: 1638776 - DNA, 15 bp, Homo sapiens
atggcaatgtcagga

SEQ ID NO: 1638777 - DNA, 15 bp, Homo sapiens
catggcaatgtcagg

SEQ ID NO: 1638778 - DNA, 15 bp, Homo sapiens
ccatggcaatgtcag

SEQ ID NO: 1638779 - DNA, 15 bp, Homo sapiens
gccatggcaatgtca

SEQ ID NO: 1638780 - DNA, 15 bp, Homo sapiens
tgccatggcaatgtc

SEQ ID NO: 1638781 - DNA, 15 bp, Homo sapiens
atgccatggcaatgt

SEQ ID NO: 1638782 - DNA, 15 bp, Homo sapiens
aatgccatggcaatg

SEQ ID NO: 1638783 - DNA, 15 bp, Homo sapiens
aaatgccatggcaat

SEQ ID NO: 1638784 - DNA, 15 bp, Homo sapiens
caaatgccatggcaa

SEQ ID NO: 1638785 - DNA, 15 bp, Homo sapiens
acaaatgccatggca

SEQ ID NO: 1638786 - DNA, 15 bp, Homo sapiens
tacaaatgccatggc

SEQ ID NO: 1638787 - DNA, 15 bp, Homo sapiens
ttacaaatgccatgg

SEQ ID NO: 1638788 - DNA, 15 bp, Homo sapiens
tttacaaatgccatg

SEQ ID NO: 1638789 - DNA, 15 bp, Homo sapiens
gtttacaaatgccat

SEQ ID NO: 1638790 - DNA, 15 bp, Homo sapiens
agtttacaaatgcca

SEQ ID NO: 1638791 - DNA, 15 bp, Homo sapiens
cagtttacaaatgcc

SEQ ID NO: 1638792 - DNA, 15 bp, Homo sapiens
acagtttacaaatgc

SEQ ID NO: 1638793 - DNA, 15 bp, Homo sapiens
gacagtttacaaatg

SEQ ID NO: 1638794 - DNA, 15 bp, Homo sapiens
tgacagtttacaaat

SEQ ID NO: 1638795 - DNA, 15 bp, Homo sapiens
atgacagtttacaaa

SEQ ID NO: 1638796 - DNA, 15 bp, Homo sapiens
catgacagtttacaa

SEQ ID NO: 1638797 - DNA, 15 bp, Homo sapiens
ccatgacagtttaca

SEQ ID NO: 1638798 - DNA, 15 bp, Homo sapiens
accatgacagtttac

SEQ ID NO: 1638799 - DNA, 15 bp, Homo sapiens
caccatgacagttta

SEQ ID NO: 1638800 - DNA, 15 bp, Homo sapiens
gcaccatgacagttt

SEQ ID NO: 1638801 - DNA, 15 bp, Homo sapiens
agcaccatgacagtt

SEQ ID NO: 1638802 - DNA, 15 bp, Homo sapiens
cagcaccatgacagt

SEQ ID NO: 1638803 - DNA, 15 bp, Homo sapiens
tcagcaccatgacag

SEQ ID NO: 1638804 - DNA, 15 bp, Homo sapiens
atcagcaccatgaca

SEQ ID NO: 1638805 - DNA, 15 bp, Homo sapiens
catcagcaccatgac

SEQ ID NO: 1638806 - DNA, 15 bp, Homo sapiens
ccatcagcaccatga

SEQ ID NO: 1638807 - DNA, 15 bp, Homo sapiens
cccatcagcaccatg

SEQ ID NO: 1638808 - DNA, 15 bp, Homo sapiens
tcccatcagcaccat

SEQ ID NO: 1638809 - DNA, 15 bp, Homo sapiens
ttcccatcagcacca

SEQ ID NO: 1638810 - DNA, 15 bp, Homo sapiens
attcccatcagcacc

SEQ ID NO: 1638811 - DNA, 15 bp, Homo sapiens
cattcccatcagcac

SEQ ID NO: 1638812 - DNA, 15 bp, Homo sapiens
acattcccatcagca

SEQ ID NO: 1638813 - DNA, 15 bp, Homo sapiens
tacattcccatcagc

SEQ ID NO: 1638814 - DNA, 15 bp, Homo sapiens
ctacattcccatcag

SEQ ID NO: 1638815 - DNA, 15 bp, Homo sapiens
gctacattcccatca

SEQ ID NO: 1638816 - DNA, 15 bp, Homo sapiens
tgctacattcccatc

SEQ ID NO: 1638817 - DNA, 15 bp, Homo sapiens
ctgctacattcccat

SEQ ID NO: 1638818 - DNA, 15 bp, Homo sapiens
actgctacattccca

SEQ ID NO: 1638819 - DNA, 15 bp, Homo sapiens
cactgctacattccc

SEQ ID NO: 1638820 - DNA, 15 bp, Homo sapiens
tcactgctacattcc

SEQ ID NO: 1638821 - DNA, 15 bp, Homo sapiens
ctcactgctacattc

SEQ ID NO: 1638822 - DNA, 15 bp, Homo sapiens
cctcactgctacatt

SEQ ID NO: 1638823 - DNA, 15 bp, Homo sapiens
tcctcactgctacat

SEQ ID NO: 1638824 - DNA, 15 bp, Homo sapiens
atcctcactgctaca

SEQ ID NO: 1638825 - DNA, 15 bp, Homo sapiens
catcctcactgctac

SEQ ID NO: 1638826 - DNA, 15 bp, Homo sapiens
ccatcctcactgcta

SEQ ID NO: 1638827 - DNA, 15 bp, Homo sapiens
gccatcctcactgct

SEQ ID NO: 1638828 - DNA, 15 bp, Homo sapiens
ggccatcctcactgc

SEQ ID NO: 1638829 - DNA, 15 bp, Homo sapiens
tggccatcctcactg

SEQ ID NO: 1638830 - DNA, 15 bp, Homo sapiens
gtggccatcctcact

SEQ ID NO: 1638831 - DNA, 15 bp, Homo sapiens
tgtggccatcctcac

SEQ ID NO: 1638832 - DNA, 15 bp, Homo sapiens
gtgtggccatcctca

SEQ ID NO: 1638833 - DNA, 15 bp, Homo sapiens
agtgtggccatcctc

SEQ ID NO: 1638834 - DNA, 15 bp, Homo sapiens
tagtgtggccatcct

SEQ ID NO: 1638835 - DNA, 15 bp, Homo sapiens
ttagtgtggccatcc

SEQ ID NO: 1638836 - DNA, 15 bp, Homo sapiens
attagtgtggccatc

SEQ ID NO: 1638837 - DNA, 15 bp, Homo sapiens
cattagtgtggccat

SEQ ID NO: 1638838 - DNA, 15 bp, Homo sapiens
acattagtgtggcca

SEQ ID NO: 1638839 - DNA, 15 bp, Homo sapiens
cacattagtgtggcc

SEQ ID NO: 1638840 - DNA, 15 bp, Homo sapiens
acacattagtgtggc

SEQ ID NO: 1638841 - DNA, 15 bp, Homo sapiens
aacacattagtgtgg

SEQ ID NO: 1638842 - DNA, 15 bp, Homo sapiens
aaacacattagtgtg

SEQ ID NO: 1638843 - DNA, 15 bp, Homo sapiens
aaaacacattagtgt

SEQ ID NO: 1638844 - DNA, 15 bp, Homo sapiens
taaaacacattagtg

SEQ ID NO: 1638845 - DNA, 15 bp, Homo sapiens
ttaaaacacattagt

SEQ ID NO: 1638846 - DNA, 15 bp, Homo sapiens
cttaaaacacattag

SEQ ID NO: 1638847 - DNA, 15 bp, Homo sapiens
gcttaaaacacatta

SEQ ID NO: 1638848 - DNA, 15 bp, Homo sapiens
ggcttaaaacacatt

SEQ ID NO: 1638849 - DNA, 15 bp, Homo sapiens
aggcttaaaacacat

SEQ ID NO: 1638850 - DNA, 15 bp, Homo sapiens
aaggcttaaaacaca

SEQ ID NO: 1638851 - DNA, 15 bp, Homo sapiens
aaaggcttaaaacac

SEQ ID NO: 1638852 - DNA, 15 bp, Homo sapiens
aaaaggcttaaaaca

SEQ ID NO: 1638853 - DNA, 15 bp, Homo sapiens
gaaaaggcttaaaac

SEQ ID NO: 1638854 - DNA, 15 bp, Homo sapiens
ggaaaaggcttaaaa

SEQ ID NO: 1638855 - DNA, 15 bp, Homo sapiens
aggaaaaggcttaaa

SEQ ID NO: 1638856 - DNA, 15 bp, Homo sapiens
gaggaaaaggcttaa

SEQ ID NO: 1638857 - DNA, 15 bp, Homo sapiens
tgaggaaaaggctta

SEQ ID NO: 1638858 - DNA, 15 bp, Homo sapiens
ctgaggaaaaggctt

SEQ ID NO: 1638859 - DNA, 15 bp, Homo sapiens
gctgaggaaaaggct

SEQ ID NO: 1638860 - DNA, 15 bp, Homo sapiens
ggctgaggaaaaggc

SEQ ID NO: 1638861 - DNA, 15 bp, Homo sapiens
tggctgaggaaaagg

SEQ ID NO: 1638862 - DNA, 15 bp, Homo sapiens
ttggctgaggaaaag

SEQ ID NO: 1638863 - DNA, 15 bp, Homo sapiens
tttggctgaggaaaa

SEQ ID NO: 1638864 - DNA, 15 bp, Homo sapiens
gtttggctgaggaaa

SEQ ID NO: 1638865 - DNA, 15 bp, Homo sapiens
agtttggctgaggaa

SEQ ID NO: 1638866 - DNA, 15 bp, Homo sapiens
tagtttggctgagga

SEQ ID NO: 1638867 - DNA, 15 bp, Homo sapiens
gtagtttggctgagg

SEQ ID NO: 1638868 - DNA, 15 bp, Homo sapiens
tgtagtttggctgag

SEQ ID NO: 1638869 - DNA, 15 bp, Homo sapiens
ttgtagtttggctga

SEQ ID NO: 1638870 - DNA, 15 bp, Homo sapiens
tttgtagtttggctg

SEQ ID NO: 1638871 - DNA, 15 bp, Homo sapiens
ttttgtagtttggct

SEQ ID NO: 1638872 - DNA, 15 bp, Homo sapiens
tttttgtagtttggc

SEQ ID NO: 1638873 - DNA, 15 bp, Homo sapiens
ttttttgtagtttgg

SEQ ID NO: 1638874 - DNA, 15 bp, Homo sapiens
cttttttgtagtttg

SEQ ID NO: 1638875 - DNA, 15 bp, Homo sapiens
gcttttttgtagttt

SEQ ID NO: 1638876 - DNA, 15 bp, Homo sapiens
tgcttttttgtagtt

SEQ ID NO: 1638877 - DNA, 15 bp, Homo sapiens
ttgcttttttgtagt

SEQ ID NO: 1638878 - DNA, 15 bp, Homo sapiens
tttgcttttttgtag

SEQ ID NO: 1638879 - DNA, 15 bp, Homo sapiens
ttttgcttttttgta

SEQ ID NO: 1638880 - DNA, 15 bp, Homo sapiens
tttttgcttttttgt

SEQ ID NO: 1638881 - DNA, 15 bp, Homo sapiens
atttttgcttttttg

SEQ ID NO: 1638882 - DNA, 15 bp, Homo sapiens
aatttttgctttttt

SEQ ID NO: 1638883 - DNA, 15 bp, Homo sapiens
taatttttgcttttt

SEQ ID NO: 1638884 - DNA, 15 bp, Homo sapiens
gtaatttttgctttt

SEQ ID NO: 1638885 - DNA, 15 bp, Homo sapiens
agtaatttttgcttt

SEQ ID NO: 1638886 - DNA, 15 bp, Homo sapiens
aaagtaatttttgct

SEQ ID NO: 1638887 - DNA, 15 bp, Homo sapiens
caaagtaatttttgc

SEQ ID NO: 1638888 - DNA, 15 bp, Homo sapiens
acaaagtaatttttg

SEQ ID NO: 1638889 - DNA, 15 bp, Homo sapiens
aacaaagtaattttt

SEQ ID NO: 1638890 - DNA, 15 bp, Homo sapiens
aaacaaagtaatttt

SEQ ID NO: 1638891 - DNA, 15 bp, Homo sapiens
gaaacaaagtaattt

SEQ ID NO: 1638892 - DNA, 15 bp, Homo sapiens
tgaaacaaagtaatt

SEQ ID NO: 1638893 - DNA, 15 bp, Homo sapiens
ttgaaacaaagtaat

SEQ ID NO: 1638894 - DNA, 15 bp, Homo sapiens
attgaaacaaagtaa

SEQ ID NO: 1638895 - DNA, 15 bp, Homo sapiens
tattgaaacaaagta

SEQ ID NO: 1638896 - DNA, 15 bp, Homo sapiens
atattgaaacaaagt

SEQ ID NO: 1638897 - DNA, 15 bp, Homo sapiens
aatattgaaacaaag

SEQ ID NO: 1638898 - DNA, 15 bp, Homo sapiens
taatattgaaacaaa

SEQ ID NO: 1638899 - DNA, 15 bp, Homo sapiens
gtaatattgaaacaa

SEQ ID NO: 1638900 - DNA, 15 bp, Homo sapiens
ggtaatattgaaaca

SEQ ID NO: 1638901 - DNA, 15 bp, Homo sapiens
gggtaatattgaaac

SEQ ID NO: 1638902 - DNA, 15 bp, Homo sapiens
ggggtaatattgaaa

SEQ ID NO: 1638903 - DNA, 15 bp, Homo sapiens
aggggtaatattgaa

SEQ ID NO: 1638904 - DNA, 15 bp, Homo sapiens
taggggtaatattga

SEQ ID NO: 1638905 - DNA, 15 bp, Homo sapiens
gtaggggtaatattg

SEQ ID NO: 1638906 - DNA, 15 bp, Homo sapiens
agtaggggtaatatt

SEQ ID NO: 1638907 - DNA, 15 bp, Homo sapiens
cagtaggggtaatat

SEQ ID NO: 1638908 - DNA, 15 bp, Homo sapiens
ccagtaggggtaata

SEQ ID NO: 1638909 - DNA, 15 bp, Homo sapiens
gccagtaggggtaat

SEQ ID NO: 1638910 - DNA, 15 bp, Homo sapiens
agccagtaggggtaa

SEQ ID NO: 1638911 - DNA, 15 bp, Homo sapiens
tagccagtaggggta

SEQ ID NO: 1638912 - DNA, 15 bp, Homo sapiens
ttagccagtaggggt

SEQ ID NO: 1638913 - DNA, 15 bp, Homo sapiens
gttagccagtagggg

SEQ ID NO: 1638914 - DNA, 15 bp, Homo sapiens
tgttagccagtaggg

SEQ ID NO: 1638915 - DNA, 15 bp, Homo sapiens
gtgttagccagtagg

SEQ ID NO: 1638916 - DNA, 15 bp, Homo sapiens
tgtgttagccagtag

SEQ ID NO: 1638917 - DNA, 15 bp, Homo sapiens
gtgtgttagccagta

SEQ ID NO: 1638918 - DNA, 15 bp, Homo sapiens
agtgtgttagccagt

SEQ ID NO: 1638919 - DNA, 15 bp, Homo sapiens
tagtgtgttagccag

SEQ ID NO: 1638920 - DNA, 15 bp, Homo sapiens
ctagtgtgttagcca

SEQ ID NO: 1638921 - DNA, 15 bp, Homo sapiens
gctagtgtgttagcc

SEQ ID NO: 1638922 - DNA, 15 bp, Homo sapiens
tgctagtgtgttagc

SEQ ID NO: 1638923 - DNA, 15 bp, Homo sapiens
ctgctagtgtgttag

SEQ ID NO: 1638924 - DNA, 15 bp, Homo sapiens
cctgctagtgtgtta

SEQ ID NO: 1638925 - DNA, 15 bp, Homo sapiens
acctgctagtgtgtt

SEQ ID NO: 1638926 - DNA, 15 bp, Homo sapiens
gacctgctagtgtgt

SEQ ID NO: 1638927 - DNA, 15 bp, Homo sapiens
tgacctgctagtgtg

SEQ ID NO: 1638928 - DNA, 15 bp, Homo sapiens
atgacctgctagtgt

SEQ ID NO: 1638929 - DNA, 15 bp, Homo sapiens
gatgacctgctagtg

SEQ ID NO: 1638930 - DNA, 15 bp, Homo sapiens
tgatgacctgctagt

SEQ ID NO: 1638931 - DNA, 15 bp, Homo sapiens
ctgatgacctgctag

SEQ ID NO: 1638932 - DNA, 15 bp, Homo sapiens
tctgatgacctgcta

SEQ ID NO: 1638933 - DNA, 15 bp, Homo sapiens
ttctgatgacctgct

SEQ ID NO: 1638934 - DNA, 15 bp, Homo sapiens
attctgatgacctgc

SEQ ID NO: 1638935 - DNA, 15 bp, Homo sapiens
tattctgatgacctg

SEQ ID NO: 1638936 - DNA, 15 bp, Homo sapiens
atattctgatgacct

SEQ ID NO: 1638937 - DNA, 15 bp, Homo sapiens
aatattctgatgacc

SEQ ID NO: 1638938 - DNA, 15 bp, Homo sapiens
aaatattctgatgac

SEQ ID NO: 1638939 - DNA, 15 bp, Homo sapiens
caaatattctgatga

SEQ ID NO: 1638940 - DNA, 15 bp, Homo sapiens
gcaaatattctgatg

SEQ ID NO: 1638941 - DNA, 15 bp, Homo sapiens
ggcaaatattctgat

SEQ ID NO: 1638942 - DNA, 15 bp, Homo sapiens
tggcaaatattctga

SEQ ID NO: 1638943 - DNA, 15 bp, Homo sapiens
atggcaaatattctg

SEQ ID NO: 1638944 - DNA, 15 bp, Homo sapiens
aatggcaaatattct

SEQ ID NO: 1638945 - DNA, 15 bp, Homo sapiens
gaatggcaaatattc

SEQ ID NO: 1638946 - DNA, 15 bp, Homo sapiens
ggaatggcaaatatt

SEQ ID NO: 1638947 - DNA, 15 bp, Homo sapiens
aggaatggcaaatat

SEQ ID NO: 1638948 - DNA, 15 bp, Homo sapiens
taggaatggcaaata

SEQ ID NO: 1638949 - DNA, 15 bp, Homo sapiens
gtaggaatggcaaat

SEQ ID NO: 1638950 - DNA, 15 bp, Homo sapiens
tgtaggaatggcaaa

SEQ ID NO: 1638951 - DNA, 15 bp, Homo sapiens
ttgtaggaatggcaa

SEQ ID NO: 1638952 - DNA, 15 bp, Homo sapiens
tttgtaggaatggca

SEQ ID NO: 1638953 - DNA, 15 bp, Homo sapiens
ttttgtaggaatggc

SEQ ID NO: 1638954 - DNA, 15 bp, Homo sapiens
attttgtaggaatgg

SEQ ID NO: 1638955 - DNA, 15 bp, Homo sapiens
aattttgtaggaatg

SEQ ID NO: 1638956 - DNA, 15 bp, Homo sapiens
gaattttgtaggaat

SEQ ID NO: 1638957 - DNA, 15 bp, Homo sapiens
ggaattttgtaggaa

SEQ ID NO: 1638958 - DNA, 15 bp, Homo sapiens
tggaattttgtagga

SEQ ID NO: 1638959 - DNA, 15 bp, Homo sapiens
ttggaattttgtagg

SEQ ID NO: 1638960 - DNA, 15 bp, Homo sapiens
cttggaattttgtag

SEQ ID NO: 1638961 - DNA, 15 bp, Homo sapiens
tcttggaattttgta

SEQ ID NO: 1638962 - DNA, 15 bp, Homo sapiens
atcttggaattttgt

SEQ ID NO: 1638963 - DNA, 15 bp, Homo sapiens
aatcttggaattttg

SEQ ID NO: 1638964 - DNA, 15 bp, Homo sapiens
gaatcttggaatttt

SEQ ID NO: 1638965 - DNA, 15 bp, Homo sapiens
agaatcttggaattt

SEQ ID NO: 1638966 - DNA, 15 bp, Homo sapiens
cagaatcttggaatt

SEQ ID NO: 1638967 - DNA, 15 bp, Homo sapiens
acagaatcttggaat

SEQ ID NO: 1638968 - DNA, 15 bp, Homo sapiens
cacagaatcttggaa

SEQ ID NO: 1638969 - DNA, 15 bp, Homo sapiens
tcacagaatcttgga

SEQ ID NO: 1638970 - DNA, 15 bp, Homo sapiens
atcacagaatcttgg

SEQ ID NO: 1638971 - DNA, 15 bp, Homo sapiens
catcacagaatcttg

SEQ ID NO: 1638972 - DNA, 15 bp, Homo sapiens
tcatcacagaatctt

SEQ ID NO: 1638973 - DNA, 15 bp, Homo sapiens
atcatcacagaatct

SEQ ID NO: 1638974 - DNA, 15 bp, Homo sapiens
gatcatcacagaatc

SEQ ID NO: 1638975 - DNA, 15 bp, Homo sapiens
ggatcatcacagaat

SEQ ID NO: 1638976 - DNA, 15 bp, Homo sapiens
aggatcatcacagaa

SEQ ID NO: 1638977 - DNA, 15 bp, Homo sapiens
aaggatcatcacaga

SEQ ID NO: 1638978 - DNA, 15 bp, Homo sapiens
aaaggatcatcacag

SEQ ID NO: 1638979 - DNA, 15 bp, Homo sapiens
caaaggatcatcaca

SEQ ID NO: 1638980 - DNA, 15 bp, Homo sapiens
tcaaaggatcatcac

SEQ ID NO: 1638981 - DNA, 15 bp, Homo sapiens
ctcaaaggatcatca

SEQ ID NO: 1638982 - DNA, 15 bp, Homo sapiens
actcaaaggatcatc

SEQ ID NO: 1638983 - DNA, 15 bp, Homo sapiens
tactcaaaggatcat

SEQ ID NO: 1638984 - DNA, 15 bp, Homo sapiens
atactcaaaggatca

SEQ ID NO: 1638985 - DNA, 15 bp, Homo sapiens
tatactcaaaggatc

SEQ ID NO: 1638986 - DNA, 15 bp, Homo sapiens
ttatactcaaaggat

SEQ ID NO: 1638987 - DNA, 15 bp, Homo sapiens
cttatactcaaagga

SEQ ID NO: 1638988 - DNA, 15 bp, Homo sapiens
tcttatactcaaagg

SEQ ID NO: 1638989 - DNA, 15 bp, Homo sapiens
ttcttatactcaaag

SEQ ID NO: 1638990 - DNA, 15 bp, Homo sapiens
attcttatactcaaa

SEQ ID NO: 1638991 - DNA, 15 bp, Homo sapiens
gattcttatactcaa

SEQ ID NO: 1638992 - DNA, 15 bp, Homo sapiens
tgattcttatactca

SEQ ID NO: 1638993 - DNA, 15 bp, Homo sapiens
gtgattcttatactc

SEQ ID NO: 1638994 - DNA, 15 bp, Homo sapiens
tgtgattcttatact

SEQ ID NO: 1638995 - DNA, 15 bp, Homo sapiens
ctgtgattcttatac

SEQ ID NO: 1638996 - DNA, 15 bp, Homo sapiens
tctgtgattcttata

SEQ ID NO: 1638997 - DNA, 15 bp, Homo sapiens
ctctgtgattcttat

SEQ ID NO: 1638998 - DNA, 15 bp, Homo sapiens
tctctgtgattctta

SEQ ID NO: 1638999 - DNA, 15 bp, Homo sapiens
atctctgtgattctt

SEQ ID NO: 1639000 - DNA, 15 bp, Homo sapiens
tatctctgtgattct

SEQ ID NO: 1639001 - DNA, 15 bp, Homo sapiens
gtatctctgtgattc

SEQ ID NO: 1639002 - DNA, 15 bp, Homo sapiens
tgtatctctgtgatt

SEQ ID NO: 1639003 - DNA, 15 bp, Homo sapiens
gtgtatctctgtgat

SEQ ID NO: 1639004 - DNA, 15 bp, Homo sapiens
tgtgtatctctgtga

SEQ ID NO: 1639005 - DNA, 15 bp, Homo sapiens
gtgtgtatctctgtg

SEQ ID NO: 1639006 - DNA, 15 bp, Homo sapiens
tgtgtgtatctctgt

SEQ ID NO: 1639007 - DNA, 15 bp, Homo sapiens
ttgtgtgtatctctg

SEQ ID NO: 1639008 - DNA, 15 bp, Homo sapiens
attgtgtgtatctct

SEQ ID NO: 1639009 - DNA, 15 bp, Homo sapiens
aattgtgtgtatctc

SEQ ID NO: 1639010 - DNA, 15 bp, Homo sapiens
caattgtgtgtatct

SEQ ID NO: 1639011 - DNA, 15 bp, Homo sapiens
acaattgtgtgtatc

SEQ ID NO: 1639012 - DNA, 15 bp, Homo sapiens
aacaattgtgtgtat

SEQ ID NO: 1639013 - DNA, 15 bp, Homo sapiens
taacaattgtgtgta

SEQ ID NO: 1639014 - DNA, 15 bp, Homo sapiens
gtaacaattgtgtgt

SEQ ID NO: 1639015 - DNA, 15 bp, Homo sapiens
tgtaacaattgtgtg

SEQ ID NO: 1639016 - DNA, 15 bp, Homo sapiens
atgtaacaattgtgt

SEQ ID NO: 1639017 - DNA, 15 bp, Homo sapiens
catgtaacaattgtg

SEQ ID NO: 1639018 - DNA, 15 bp, Homo sapiens
gcatgtaacaattgt

SEQ ID NO: 1639019 - DNA, 15 bp, Homo sapiens
agcatgtaacaattg

SEQ ID NO: 1639020 - DNA, 15 bp, Homo sapiens
gagcatgtaacaatt

SEQ ID NO: 1639021 - DNA, 15 bp, Homo sapiens
agagcatgtaacaat

SEQ ID NO: 1639022 - DNA, 15 bp, Homo sapiens
tagagcatgtaacaa

SEQ ID NO: 1639023 - DNA, 15 bp, Homo sapiens
atagagcatgtaaca

SEQ ID NO: 1639024 - DNA, 15 bp, Homo sapiens
aatagagcatgtaac

SEQ ID NO: 1639025 - DNA, 15 bp, Homo sapiens
aaatagagcatgtaa

SEQ ID NO: 1639026 - DNA, 15 bp, Homo sapiens
taaatagagcatgta

SEQ ID NO: 1639027 - DNA, 15 bp, Homo sapiens
ttaaatagagcatgt

SEQ ID NO: 1639028 - DNA, 15 bp, Homo sapiens
cttaaatagagcatg

SEQ ID NO: 1639029 - DNA, 15 bp, Homo sapiens
acttaaatagagcat

SEQ ID NO: 1639030 - DNA, 15 bp, Homo sapiens
aacttaaatagagca

SEQ ID NO: 1639031 - DNA, 15 bp, Homo sapiens
aaacttaaatagagc

SEQ ID NO: 1639032 - DNA, 15 bp, Homo sapiens
aaaacttaaatagag

SEQ ID NO: 1639033 - DNA, 15 bp, Homo sapiens
gaaaacttaaataga

SEQ ID NO: 1639034 - DNA, 15 bp, Homo sapiens
agaaaacttaaatag

SEQ ID NO: 1639035 - DNA, 15 bp, Homo sapiens
tagaaaacttaaata

SEQ ID NO: 1639036 - DNA, 15 bp, Homo sapiens
atagaaaacttaaat

SEQ ID NO: 1639037 - DNA, 15 bp, Homo sapiens
catagaaaacttaaa

SEQ ID NO: 1639038 - DNA, 15 bp, Homo sapiens
acatagaaaacttaa

SEQ ID NO: 1639039 - DNA, 15 bp, Homo sapiens
aacatagaaaactta

SEQ ID NO: 1639040 - DNA, 15 bp, Homo sapiens
taacatagaaaactt

SEQ ID NO: 1639041 - DNA, 15 bp, Homo sapiens
ataacatagaaaact

SEQ ID NO: 1639042 - DNA, 15 bp, Homo sapiens
tataacatagaaaac

SEQ ID NO: 1639043 - DNA, 15 bp, Homo sapiens
atataacatagaaaa

SEQ ID NO: 1639044 - DNA, 15 bp, Homo sapiens
aatataacatagaaa

SEQ ID NO: 1639045 - DNA, 15 bp, Homo sapiens
aaatataacatagaa

SEQ ID NO: 1639046 - DNA, 15 bp, Homo sapiens
aaaatataacataga

SEQ ID NO: 1639047 - DNA, 15 bp, Homo sapiens
gaaaatataacatag

SEQ ID NO: 1639048 - DNA, 15 bp, Homo sapiens
agaaaatataacata

SEQ ID NO: 1639049 - DNA, 15 bp, Homo sapiens
gagaaaatataacat

SEQ ID NO: 1639050 - DNA, 15 bp, Homo sapiens
agagaaaatataaca

SEQ ID NO: 1639051 - DNA, 15 bp, Homo sapiens
aagagaaaatataac

SEQ ID NO: 1639052 - DNA, 15 bp, Homo sapiens
aaagagaaaatataa

SEQ ID NO: 1639053 - DNA, 15 bp, Homo sapiens
taaagagaaaatata

SEQ ID NO: 1639054 - DNA, 15 bp, Homo sapiens
ataaagagaaaatat

SEQ ID NO: 1639055 - DNA, 15 bp, Homo sapiens
tataaagagaaaata

SEQ ID NO: 1639056 - DNA, 15 bp, Homo sapiens
gtataaagagaaaat

SEQ ID NO: 1639057 - DNA, 15 bp, Homo sapiens
ggtataaagagaaaa

SEQ ID NO: 1639058 - DNA, 15 bp, Homo sapiens
gggtataaagagaaa

SEQ ID NO: 1639059 - DNA, 15 bp, Homo sapiens
ggggtataaagagaa

SEQ ID NO: 1639060 - DNA, 15 bp, Homo sapiens
gggggtataaagaga

SEQ ID NO: 1639061 - DNA, 15 bp, Homo sapiens
ggggggtataaagag

SEQ ID NO: 1639062 - DNA, 15 bp, Homo sapiens
tggggggtataaaga

SEQ ID NO: 1639063 - DNA, 15 bp, Homo sapiens
gtggggggtataaag

SEQ ID NO: 1639064 - DNA, 15 bp, Homo sapiens
ggtggggggtataaa

SEQ ID NO: 1639065 - DNA, 15 bp, Homo sapiens
gggtggggggtataa

SEQ ID NO: 1639066 - DNA, 15 bp, Homo sapiens
ggggtggggggtata

SEQ ID NO: 1639067 - DNA, 15 bp, Homo sapiens
tggggtggggggtat

SEQ ID NO: 1639068 - DNA, 15 bp, Homo sapiens
atggggtggggggta

SEQ ID NO: 1639069 - DNA, 15 bp, Homo sapiens
aatggggtggggggt

SEQ ID NO: 1639070 - DNA, 15 bp, Homo sapiens
aaatggggtgggggg

SEQ ID NO: 1639071 - DNA, 15 bp, Homo sapiens
gaaatggggtggggg

SEQ ID NO: 1639072 - DNA, 15 bp, Homo sapiens
ggaaatggggtgggg

SEQ ID NO: 1639073 - DNA, 15 bp, Homo sapiens
aggaaatggggtggg

SEQ ID NO: 1639074 - DNA, 15 bp, Homo sapiens
caggaaatggggtgg

SEQ ID NO: 1639075 - DNA, 15 bp, Homo sapiens
tcaggaaatggggtg

SEQ ID NO: 1639076 - DNA, 15 bp, Homo sapiens
gtcaggaaatggggt

SEQ ID NO: 1639077 - DNA, 15 bp, Homo sapiens
agtcaggaaatgggg

SEQ ID NO: 1639078 - DNA, 15 bp, Homo sapiens
gagtcaggaaatggg

SEQ ID NO: 1639079 - DNA, 15 bp, Homo sapiens
agagtcaggaaatgg

SEQ ID NO: 1639080 - DNA, 15 bp, Homo sapiens
aagagtcaggaaatg

SEQ ID NO: 1639081 - DNA, 15 bp, Homo sapiens
aaagagtcaggaaat

SEQ ID NO: 1639082 - DNA, 15 bp, Homo sapiens
gaaagagtcaggaaa

SEQ ID NO: 1639083 - DNA, 15 bp, Homo sapiens
agaaagagtcaggaa

SEQ ID NO: 1639084 - DNA, 15 bp, Homo sapiens
aagaaagagtcagga

SEQ ID NO: 1639085 - DNA, 15 bp, Homo sapiens
aaagaaagagtcagg

SEQ ID NO: 1639086 - DNA, 15 bp, Homo sapiens
aaaagaaagagtcag

SEQ ID NO: 1639087 - DNA, 15 bp, Homo sapiens
aaaaagaaagagtca

SEQ ID NO: 1639088 - DNA, 15 bp, Homo sapiens
taaaaagaaagagtc

SEQ ID NO: 1639089 - DNA, 15 bp, Homo sapiens
ttaaaaagaaagagt

SEQ ID NO: 1639090 - DNA, 15 bp, Homo sapiens
tttaaaaagaaagag

SEQ ID NO: 1639091 - DNA, 15 bp, Homo sapiens
ctttaaaaagaaaga

SEQ ID NO: 1639092 - DNA, 15 bp, Homo sapiens
cctttaaaaagaaag

SEQ ID NO: 1639093 - DNA, 15 bp, Homo sapiens
ccctttaaaaagaaa

SEQ ID NO: 1639094 - DNA, 15 bp, Homo sapiens
accctttaaaaagaa

SEQ ID NO: 1639095 - DNA, 15 bp, Homo sapiens
gaccctttaaaaaga

SEQ ID NO: 1639096 - DNA, 15 bp, Homo sapiens
agaccctttaaaaag

SEQ ID NO: 1639097 - DNA, 15 bp, Homo sapiens
aagaccctttaaaaa

SEQ ID NO: 1639098 - DNA, 15 bp, Homo sapiens
aaagaccctttaaaa

SEQ ID NO: 1639099 - DNA, 15 bp, Homo sapiens
caaagaccctttaaa

SEQ ID NO: 1639100 - DNA, 15 bp, Homo sapiens
ccaaagaccctttaa

SEQ ID NO: 1639101 - DNA, 15 bp, Homo sapiens
cccaaagacccttta

SEQ ID NO: 1639102 - DNA, 15 bp, Homo sapiens
tcccaaagacccttt

SEQ ID NO: 1639103 - DNA, 15 bp, Homo sapiens
atcccaaagaccctt

SEQ ID NO: 1639104 - DNA, 15 bp, Homo sapiens
gatcccaaagaccct

SEQ ID NO: 1639105 - DNA, 15 bp, Homo sapiens
tgatcccaaagaccc

SEQ ID NO: 1639106 - DNA, 15 bp, Homo sapiens
atgatcccaaagacc

SEQ ID NO: 1639107 - DNA, 15 bp, Homo sapiens
catgatcccaaagac

SEQ ID NO: 1639108 - DNA, 15 bp, Homo sapiens
tcatgatcccaaaga

SEQ ID NO: 1639109 - DNA, 15 bp, Homo sapiens
ttcatgatcccaaag

SEQ ID NO: 1639110 - DNA, 15 bp, Homo sapiens
tttcatgatcccaaa

SEQ ID NO: 1639111 - DNA, 15 bp, Homo sapiens
ctttcatgatcccaa

SEQ ID NO: 1639112 - DNA, 15 bp, Homo sapiens
gctttcatgatccca

SEQ ID NO: 1639113 - DNA, 15 bp, Homo sapiens
tgctttcatgatccc

SEQ ID NO: 1639114 - DNA, 15 bp, Homo sapiens
ttgctttcatgatcc

SEQ ID NO: 1639115 - DNA, 15 bp, Homo sapiens
tttgctttcatgatc

SEQ ID NO: 1639116 - DNA, 15 bp, Homo sapiens
ttttgctttcatgat

SEQ ID NO: 1639117 - DNA, 15 bp, Homo sapiens
attttgctttcatga

SEQ ID NO: 1639118 - DNA, 15 bp, Homo sapiens
cattttgctttcatg

SEQ ID NO: 1639119 - DNA, 15 bp, Homo sapiens
gcattttgctttcat

SEQ ID NO: 1639120 - DNA, 15 bp, Homo sapiens
tgcattttgctttca

SEQ ID NO: 1639121 - DNA, 15 bp, Homo sapiens
ctgcattttgctttc

SEQ ID NO: 1639122 - DNA, 15 bp, Homo sapiens
gctgcattttgcttt

SEQ ID NO: 1639123 - DNA, 15 bp, Homo sapiens
tgctgcattttgctt

SEQ ID NO: 1639124 - DNA, 15 bp, Homo sapiens
atgctgcattttgct

SEQ ID NO: 1639125 - DNA, 15 bp, Homo sapiens
gatgctgcattttgc

SEQ ID NO: 1639126 - DNA, 15 bp, Homo sapiens
ggatgctgcattttg

SEQ ID NO: 1639127 - DNA, 15 bp, Homo sapiens
aggatgctgcatttt

SEQ ID NO: 1639128 - DNA, 15 bp, Homo sapiens
gaggatgctgcattt

SEQ ID NO: 1639129 - DNA, 15 bp, Homo sapiens
tgaggatgctgcatt

SEQ ID NO: 1639130 - DNA, 15 bp, Homo sapiens
ctgaggatgctgcat

SEQ ID NO: 1639131 - DNA, 15 bp, Homo sapiens
actgaggatgctgca

SEQ ID NO: 1639132 - DNA, 15 bp, Homo sapiens
cactgaggatgctgc

SEQ ID NO: 1639133 - DNA, 15 bp, Homo sapiens
acactgaggatgctg

SEQ ID NO: 1639134 - DNA, 15 bp, Homo sapiens
gacactgaggatgct

SEQ ID NO: 1639135 - DNA, 15 bp, Homo sapiens
tgacactgaggatgc

SEQ ID NO: 1639136 - DNA, 15 bp, Homo sapiens
gtgacactgaggatg

SEQ ID NO: 1639137 - DNA, 15 bp, Homo sapiens
tgtgacactgaggat

SEQ ID NO: 1639138 - DNA, 15 bp, Homo sapiens
gtgtgacactgagga

SEQ ID NO: 1639139 - DNA, 15 bp, Homo sapiens
tgtgtgacactgagg

SEQ ID NO: 1639140 - DNA, 15 bp, Homo sapiens
gtgtgtgacactgag

SEQ ID NO: 1639141 - DNA, 15 bp, Homo sapiens
cgtgtgtgacactga

SEQ ID NO: 1639142 - DNA, 15 bp, Homo sapiens
acgtgtgtgacactg

SEQ ID NO: 1639143 - DNA, 15 bp, Homo sapiens
gacgtgtgtgacact

SEQ ID NO: 1639144 - DNA, 15 bp, Homo sapiens
ggacgtgtgtgacac

SEQ ID NO: 1639145 - DNA, 15 bp, Homo sapiens
tggacgtgtgtgaca

SEQ ID NO: 1639146 - DNA, 15 bp, Homo sapiens
atggacgtgtgtgac

SEQ ID NO: 1639147 - DNA, 15 bp, Homo sapiens
catggacgtgtgtga

SEQ ID NO: 1639148 - DNA, 15 bp, Homo sapiens
acatggacgtgtgtg

SEQ ID NO: 1639149 - DNA, 15 bp, Homo sapiens
cacatggacgtgtgt

SEQ ID NO: 1639150 - DNA, 15 bp, Homo sapiens
tcacatggacgtgtg

SEQ ID NO: 1639151 - DNA, 15 bp, Homo sapiens
ttcacatggacgtgt

SEQ ID NO: 1639152 - DNA, 15 bp, Homo sapiens
cttcacatggacgtg

SEQ ID NO: 1639153 - DNA, 15 bp, Homo sapiens
tcttcacatggacgt

SEQ ID NO: 1639154 - DNA, 15 bp, Homo sapiens
ctcttcacatggacg

SEQ ID NO: 1639155 - DNA, 15 bp, Homo sapiens
tctcttcacatggac

SEQ ID NO: 1639156 - DNA, 15 bp, Homo sapiens
gtctcttcacatgga

SEQ ID NO: 1639157 - DNA, 15 bp, Homo sapiens
ggtctcttcacatgg

SEQ ID NO: 1639158 - DNA, 15 bp, Homo sapiens
tggtctcttcacatg

SEQ ID NO: 1639159 - DNA, 15 bp, Homo sapiens
gtggtctcttcacat

SEQ ID NO: 1639160 - DNA, 15 bp, Homo sapiens
aaagcctgtttggtg

SEQ ID NO: 1639161 - DNA, 15 bp, Homo sapiens
caaagcctgtttggt

SEQ ID NO: 1639162 - DNA, 15 bp, Homo sapiens
acaaagcctgtttgg

SEQ ID NO: 1639163 - DNA, 15 bp, Homo sapiens
cacaaagcctgtttg

SEQ ID NO: 1639164 - DNA, 15 bp, Homo sapiens
acacaaagcctgttt

SEQ ID NO: 1639165 - DNA, 15 bp, Homo sapiens
cacacaaagcctgtt

SEQ ID NO: 1639166 - DNA, 15 bp, Homo sapiens
tcacacaaagcctgt

SEQ ID NO: 1639167 - DNA, 15 bp, Homo sapiens
ctcacacaaagcctg

SEQ ID NO: 1639168 - DNA, 15 bp, Homo sapiens
gctcacacaaagcct

SEQ ID NO: 1639169 - DNA, 15 bp, Homo sapiens
tgctcacacaaagcc

SEQ ID NO: 1639170 - DNA, 15 bp, Homo sapiens
ttgctcacacaaagc

SEQ ID NO: 1639171 - DNA, 15 bp, Homo sapiens
attgctcacacaaag

SEQ ID NO: 1639172 - DNA, 15 bp, Homo sapiens
tattgctcacacaaa

SEQ ID NO: 1639173 - DNA, 15 bp, Homo sapiens
ttattgctcacacaa

SEQ ID NO: 1639174 - DNA, 15 bp, Homo sapiens
tttattgctcacaca

SEQ ID NO: 1639175 - DNA, 15 bp, Homo sapiens
ctttattgctcacac

SEQ ID NO: 1639176 - DNA, 15 bp, Homo sapiens
gctttattgctcaca

SEQ ID NO: 1639177 - DNA, 15 bp, Homo sapiens
agctttattgctcac

SEQ ID NO: 1639178 - DNA, 15 bp, Homo sapiens
aagctttattgctca

SEQ ID NO: 1639179 - DNA, 15 bp, Homo sapiens
aaagctttattgctc

SEQ ID NO: 1639180 - DNA, 15 bp, Homo sapiens
aaaagctttattgct

SEQ ID NO: 1639181 - DNA, 15 bp, Homo sapiens
aaaaagctttattgc

SEQ ID NO: 1639182 - DNA, 15 bp, Homo sapiens
taaaaagctttattg

SEQ ID NO: 1639183 - DNA, 15 bp, Homo sapiens
ttaaaaagctttatt

SEQ ID NO: 1639184 - DNA, 15 bp, Homo sapiens
attaaaaagctttat

SEQ ID NO: 1639185 - DNA, 15 bp, Homo sapiens
tattaaaaagcttta

SEQ ID NO: 1639186 - DNA, 15 bp, Homo sapiens
ttattaaaaagcttt

SEQ ID NO: 1639187 - DNA, 15 bp, Homo sapiens
gttattaaaaagctt

SEQ ID NO: 1639188 - DNA, 15 bp, Homo sapiens
ggttattaaaaagct

SEQ ID NO: 1639189 - DNA, 15 bp, Homo sapiens
aggttattaaaaagc

SEQ ID NO: 1639190 - DNA, 15 bp, Homo sapiens
caggttattaaaaag

SEQ ID NO: 1639191 - DNA, 15 bp, Homo sapiens
ccaggttattaaaaa

SEQ ID NO: 1639192 - DNA, 15 bp, Homo sapiens
cccaggttattaaaa

SEQ ID NO: 1639193 - DNA, 15 bp, Homo sapiens
acccaggttattaaa

SEQ ID NO: 1639194 - DNA, 15 bp, Homo sapiens
cacccaggttattaa

SEQ ID NO: 1639195 - DNA, 15 bp, Homo sapiens
gcacccaggttatta

SEQ ID NO: 1639196 - DNA, 15 bp, Homo sapiens
cgcacccaggttatt

SEQ ID NO: 1639197 - DNA, 15 bp, Homo sapiens
ccgcacccaggttat

SEQ ID NO: 1639198 - DNA, 15 bp, Homo sapiens
cccgcacccaggtta

SEQ ID NO: 1639199 - DNA, 15 bp, Homo sapiens
gcccgcacccaggtt

SEQ ID NO: 1639200 - DNA, 15 bp, Homo sapiens
tgcccgcacccaggt

SEQ ID NO: 1639201 - DNA, 15 bp, Homo sapiens
ctgcccgcacccagg

SEQ ID NO: 1639202 - DNA, 15 bp, Homo sapiens
cctgcccgcacccag

SEQ ID NO: 1639203 - DNA, 15 bp, Homo sapiens
gcctgcccgcaccca

SEQ ID NO: 1639204 - DNA, 15 bp, Homo sapiens
agcctgcccgcaccc

SEQ ID NO: 1639205 - DNA, 15 bp, Homo sapiens
cagcctgcccgcacc

SEQ ID NO: 1639206 - DNA, 15 bp, Homo sapiens
tcagcctgcccgcac

SEQ ID NO: 1639207 - DNA, 15 bp, Homo sapiens
ctcagcctgcccgca

SEQ ID NO: 1639208 - DNA, 15 bp, Homo sapiens
actcagcctgcccgc

SEQ ID NO: 1639209 - DNA, 15 bp, Homo sapiens
gactcagcctgcccg

SEQ ID NO: 1639210 - DNA, 15 bp, Homo sapiens
agactcagcctgccc

SEQ ID NO: 1639211 - DNA, 15 bp, Homo sapiens
cagactcagcctgcc

SEQ ID NO: 1639212 - DNA, 15 bp, Homo sapiens
tcagactcagcctgc

SEQ ID NO: 1639213 - DNA, 15 bp, Homo sapiens
ttcagactcagcctg

SEQ ID NO: 1639214 - DNA, 15 bp, Homo sapiens
tttcagactcagcct

SEQ ID NO: 1639215 - DNA, 15 bp, Homo sapiens
ttttcagactcagcc

SEQ ID NO: 1639216 - DNA, 15 bp, Homo sapiens
cttttcagactcagc

SEQ ID NO: 1639217 - DNA, 15 bp, Homo sapiens
tcttttcagactcag

SEQ ID NO: 1639218 - DNA, 15 bp, Homo sapiens
ctcttttcagactca

SEQ ID NO: 1639219 - DNA, 15 bp, Homo sapiens
tctcttttcagactc

SEQ ID NO: 1639220 - DNA, 15 bp, Homo sapiens
ctctcttttcagact

SEQ ID NO: 1639221 - DNA, 15 bp, Homo sapiens
actctcttttcagac

SEQ ID NO: 1639222 - DNA, 15 bp, Homo sapiens
gactctcttttcaga

SEQ ID NO: 1639223 - DNA, 15 bp, Homo sapiens
tgactctcttttcag

SEQ ID NO: 1639224 - DNA, 15 bp, Homo sapiens
ctgactctcttttca

SEQ ID NO: 1639225 - DNA, 15 bp, Homo sapiens
gctgactctcttttc

SEQ ID NO: 1639226 - DNA, 15 bp, Homo sapiens
tgctgactctctttt

SEQ ID NO: 1639227 - DNA, 15 bp, Homo sapiens
ttgctgactctcttt

SEQ ID NO: 1639228 - DNA, 15 bp, Homo sapiens
tttgctgactctctt

SEQ ID NO: 1639229 - DNA, 15 bp, Homo sapiens
ctttgctgactctct

SEQ ID NO: 1639230 - DNA, 15 bp, Homo sapiens
cctttgctgactctc

SEQ ID NO: 1639231 - DNA, 15 bp, Homo sapiens
ccctttgctgactct

SEQ ID NO: 1639232 - DNA, 15 bp, Homo sapiens
tccctttgctgactc

SEQ ID NO: 1639233 - DNA, 15 bp, Homo sapiens
ctccctttgctgact

SEQ ID NO: 1639234 - DNA, 15 bp, Homo sapiens
tctccctttgctgac

SEQ ID NO: 1639235 - DNA, 15 bp, Homo sapiens
atctccctttgctga

SEQ ID NO: 1639236 - DNA, 15 bp, Homo sapiens
tatctccctttgctg

SEQ ID NO: 1639237 - DNA, 15 bp, Homo sapiens
ctatctccctttgct

SEQ ID NO: 1639238 - DNA, 15 bp, Homo sapiens
cctatctccctttgc

SEQ ID NO: 1639239 - DNA, 15 bp, Homo sapiens
ccctatctccctttg

SEQ ID NO: 1639240 - DNA, 15 bp, Homo sapiens
cccctatctcccttt

SEQ ID NO: 1639241 - DNA, 15 bp, Homo sapiens
acccctatctccctt

SEQ ID NO: 1639242 - DNA, 15 bp, Homo sapiens
cacccctatctccct

SEQ ID NO: 1639243 - DNA, 15 bp, Homo sapiens
ccacccctatctccc

SEQ ID NO: 1639244 - DNA, 15 bp, Homo sapiens
cccacccctatctcc

SEQ ID NO: 1639245 - DNA, 15 bp, Homo sapiens
ccccacccctatctc

SEQ ID NO: 1639246 - DNA, 15 bp, Homo sapiens
gccccacccctatct

SEQ ID NO: 1639247 - DNA, 15 bp, Homo sapiens
tgccccacccctatc

SEQ ID NO: 1639248 - DNA, 15 bp, Homo sapiens
ctgccccacccctat

SEQ ID NO: 1639249 - DNA, 15 bp, Homo sapiens
actgccccaccccta

SEQ ID NO: 1639250 - DNA, 15 bp, Homo sapiens
aactgccccacccct

SEQ ID NO: 1639251 - DNA, 15 bp, Homo sapiens
aaactgccccacccc

SEQ ID NO: 1639252 - DNA, 15 bp, Homo sapiens
aaaactgccccaccc

SEQ ID NO: 1639253 - DNA, 15 bp, Homo sapiens
taaaactgccccacc

SEQ ID NO: 1639254 - DNA, 15 bp, Homo sapiens
ataaaactgccccac

SEQ ID NO: 1639255 - DNA, 15 bp, Homo sapiens
tataaaactgcccca

SEQ ID NO: 1639256 - DNA, 15 bp, Homo sapiens
ctataaaactgcccc

SEQ ID NO: 1639257 - DNA, 15 bp, Homo sapiens
cctataaaactgccc

SEQ ID NO: 1639258 - DNA, 15 bp, Homo sapiens
tcctataaaactgcc

SEQ ID NO: 1639259 - DNA, 15 bp, Homo sapiens
atcctataaaactgc

SEQ ID NO: 1639260 - DNA, 15 bp, Homo sapiens
aatcctataaaactg

SEQ ID NO: 1639261 - DNA, 15 bp, Homo sapiens
aaatcctataaaact

SEQ ID NO: 1639262 - DNA, 15 bp, Homo sapiens
caaatcctataaaac

SEQ ID NO: 1639263 - DNA, 15 bp, Homo sapiens
ccaaatcctataaaa

SEQ ID NO: 1639264 - DNA, 15 bp, Homo sapiens
cccaaatcctataaa

SEQ ID NO: 1639265 - DNA, 15 bp, Homo sapiens
acccaaatcctataa

SEQ ID NO: 1639266 - DNA, 15 bp, Homo sapiens
tacccaaatcctata

SEQ ID NO: 1639267 - DNA, 15 bp, Homo sapiens
ctacccaaatcctat

SEQ ID NO: 1639268 - DNA, 15 bp, Homo sapiens
cctacccaaatccta

SEQ ID NO: 1639269 - DNA, 15 bp, Homo sapiens
acctacccaaatcct

SEQ ID NO: 1639270 - DNA, 15 bp, Homo sapiens
tacctacccaaatcc

SEQ ID NO: 1639271 - DNA, 15 bp, Homo sapiens
ctacctacccaaatc

SEQ ID NO: 1639272 - DNA, 15 bp, Homo sapiens
actacctacccaaat

SEQ ID NO: 1639273 - DNA, 15 bp, Homo sapiens
cactacctacccaaa

SEQ ID NO: 1639274 - DNA, 15 bp, Homo sapiens
ccactacctacccaa

SEQ ID NO: 1639275 - DNA, 15 bp, Homo sapiens
tccactacctaccca

SEQ ID NO: 1639276 - DNA, 15 bp, Homo sapiens
ttccactacctaccc

SEQ ID NO: 1639277 - DNA, 15 bp, Homo sapiens
tttccactacctacc

SEQ ID NO: 1639278 - DNA, 15 bp, Homo sapiens
ttttccactacctac

SEQ ID NO: 1639279 - DNA, 15 bp, Homo sapiens
attttccactaccta

SEQ ID NO: 1639280 - DNA, 15 bp, Homo sapiens
aattttccactacct

SEQ ID NO: 1639281 - DNA, 15 bp, Homo sapiens
taattttccactacc

SEQ ID NO: 1639282 - DNA, 15 bp, Homo sapiens
gtaattttccactac

SEQ ID NO: 1639283 - DNA, 15 bp, Homo sapiens
agtaattttccacta

SEQ ID NO: 1639284 - DNA, 15 bp, Homo sapiens
cagtaattttccact

SEQ ID NO: 1639285 - DNA, 15 bp, Homo sapiens
acagtaattttccac

SEQ ID NO: 1639286 - DNA, 15 bp, Homo sapiens
gacagtaattttcca

SEQ ID NO: 1639287 - DNA, 15 bp, Homo sapiens
tgacagtaattttcc

SEQ ID NO: 1639288 - DNA, 15 bp, Homo sapiens
ttgacagtaattttc

SEQ ID NO: 1639289 - DNA, 15 bp, Homo sapiens
tttgacagtaatttt

SEQ ID NO: 1639290 - DNA, 15 bp, Homo sapiens
ctttgacagtaattt

SEQ ID NO: 1639291 - DNA, 15 bp, Homo sapiens
cctttgacagtaatt

SEQ ID NO: 1639292 - DNA, 15 bp, Homo sapiens
ccctttgacagtaat

SEQ ID NO: 1639293 - DNA, 15 bp, Homo sapiens
cccctttgacagtaa

SEQ ID NO: 1639294 - DNA, 15 bp, Homo sapiens
ccccctttgacagta

SEQ ID NO: 1639295 - DNA, 15 bp, Homo sapiens
accccctttgacagt

SEQ ID NO: 1639296 - DNA, 15 bp, Homo sapiens
aaccccctttgacag

SEQ ID NO: 1639297 - DNA, 15 bp, Homo sapiens
caaccccctttgaca

SEQ ID NO: 1639298 - DNA, 15 bp, Homo sapiens
acaaccccctttgac

SEQ ID NO: 1639299 - DNA, 15 bp, Homo sapiens
aacaaccccctttga

SEQ ID NO: 1639300 - DNA, 15 bp, Homo sapiens
gaacaaccccctttg

SEQ ID NO: 1639301 - DNA, 15 bp, Homo sapiens
agaacaacccccttt

SEQ ID NO: 1639302 - DNA, 15 bp, Homo sapiens
gagaacaaccccctt

SEQ ID NO: 1639303 - DNA, 15 bp, Homo sapiens
agagaacaaccccct

SEQ ID NO: 1639304 - DNA, 15 bp, Homo sapiens
cagagaacaaccccc

SEQ ID NO: 1639305 - DNA, 15 bp, Homo sapiens
ccagagaacaacccc

SEQ ID NO: 1639306 - DNA, 15 bp, Homo sapiens
gccagagaacaaccc

SEQ ID NO: 1639307 - DNA, 15 bp, Homo sapiens
cgccagagaacaacc

SEQ ID NO: 1639308 - DNA, 15 bp, Homo sapiens
ccgccagagaacaac

SEQ ID NO: 1639309 - DNA, 15 bp, Homo sapiens
cccgccagagaacaa

SEQ ID NO: 1639310 - DNA, 15 bp, Homo sapiens
gcccgccagagaaca

SEQ ID NO: 1639311 - DNA, 15 bp, Homo sapiens
tgcccgccagagaac

SEQ ID NO: 1639312 - DNA, 15 bp, Homo sapiens
ctgcccgccagagaa

SEQ ID NO: 1639313 - DNA, 15 bp, Homo sapiens
cctgcccgccagaga

SEQ ID NO: 1639314 - DNA, 15 bp, Homo sapiens
ccctgcccgccagag

SEQ ID NO: 1639315 - DNA, 15 bp, Homo sapiens
cccctgcccgccaga

SEQ ID NO: 1639316 - DNA, 15 bp, Homo sapiens
acccctgcccgccag

SEQ ID NO: 1639317 - DNA, 15 bp, Homo sapiens
cacccctgcccgcca

SEQ ID NO: 1639318 - DNA, 15 bp, Homo sapiens
ccacccctgcccgcc

SEQ ID NO: 1639319 - DNA, 15 bp, Homo sapiens
tccacccctgcccgc

SEQ ID NO: 1639320 - DNA, 15 bp, Homo sapiens
ctccacccctgcccg

SEQ ID NO: 1639321 - DNA, 15 bp, Homo sapiens
cctccacccctgccc

SEQ ID NO: 1639322 - DNA, 15 bp, Homo sapiens
tcctccacccctgcc

SEQ ID NO: 1639323 - DNA, 15 bp, Homo sapiens
gtcctccacccctgc

SEQ ID NO: 1639324 - DNA, 15 bp, Homo sapiens
tgtcctccacccctg

SEQ ID NO: 1639325 - DNA, 15 bp, Homo sapiens
gtgtcctccacccct

SEQ ID NO: 1639326 - DNA, 15 bp, Homo sapiens
tgtgtcctccacccc

SEQ ID NO: 1639327 - DNA, 15 bp, Homo sapiens
ttgtgtcctccaccc

SEQ ID NO: 1639328 - DNA, 15 bp, Homo sapiens
cttgtgtcctccacc

SEQ ID NO: 1639329 - DNA, 15 bp, Homo sapiens
ccttgtgtcctccac

SEQ ID NO: 1639330 - DNA, 15 bp, Homo sapiens
accttgtgtcctcca

SEQ ID NO: 1639331 - DNA, 15 bp, Homo sapiens
caccttgtgtcctcc

SEQ ID NO: 1639332 - DNA, 15 bp, Homo sapiens
gcaccttgtgtcctc

SEQ ID NO: 1639333 - DNA, 15 bp, Homo sapiens
agcaccttgtgtcct

SEQ ID NO: 1639334 - DNA, 15 bp, Homo sapiens
gagcaccttgtgtcc

SEQ ID NO: 1639335 - DNA, 15 bp, Homo sapiens
tgagcaccttgtgtc

SEQ ID NO: 1639336 - DNA, 15 bp, Homo sapiens
ctgagcaccttgtgt

SEQ ID NO: 1639337 - DNA, 15 bp, Homo sapiens
actgagcaccttgtg

SEQ ID NO: 1639338 - DNA, 15 bp, Homo sapiens
cactgagcaccttgt

SEQ ID NO: 1639339 - DNA, 15 bp, Homo sapiens
ccactgagcaccttg

SEQ ID NO: 1639340 - DNA, 15 bp, Homo sapiens
cccactgagcacctt

SEQ ID NO: 1639341 - DNA, 15 bp, Homo sapiens
ccccactgagcacct

SEQ ID NO: 1639342 - DNA, 15 bp, Homo sapiens
cccccactgagcacc

SEQ ID NO: 1639343 - DNA, 15 bp, Homo sapiens
tcccccactgagcac

SEQ ID NO: 1639344 - DNA, 15 bp, Homo sapiens
ctcccccactgagca

SEQ ID NO: 1639345 - DNA, 15 bp, Homo sapiens
gctcccccactgagc

SEQ ID NO: 1639346 - DNA, 15 bp, Homo sapiens
agctcccccactgag

SEQ ID NO: 1639347 - DNA, 15 bp, Homo sapiens
aagctcccccactga

SEQ ID NO: 1639348 - DNA, 15 bp, Homo sapiens
gaagctcccccactg

SEQ ID NO: 1639349 - DNA, 15 bp, Homo sapiens
agaagctcccccact

SEQ ID NO: 1639350 - DNA, 15 bp, Homo sapiens
cagaagctcccccac

SEQ ID NO: 1639351 - DNA, 15 bp, Homo sapiens
tcagaagctccccca

SEQ ID NO: 1639352 - DNA, 15 bp, Homo sapiens
ctcagaagctccccc

SEQ ID NO: 1639353 - DNA, 15 bp, Homo sapiens
gctcagaagctcccc

SEQ ID NO: 1639354 - DNA, 15 bp, Homo sapiens
ggctcagaagctccc

SEQ ID NO: 1639355 - DNA, 15 bp, Homo sapiens
tggctcagaagctcc

SEQ ID NO: 1639356 - DNA, 15 bp, Homo sapiens
ctggctcagaagctc

SEQ ID NO: 1639357 - DNA, 15 bp, Homo sapiens
cctggctcagaagct

SEQ ID NO: 1639358 - DNA, 15 bp, Homo sapiens
tcctggctcagaagc

SEQ ID NO: 1639359 - DNA, 15 bp, Homo sapiens
ctcctggctcagaag

SEQ ID NO: 1639360 - DNA, 15 bp, Homo sapiens
tctcctggctcagaa

SEQ ID NO: 1639361 - DNA, 15 bp, Homo sapiens
ttctcctggctcaga

SEQ ID NO: 1639362 - DNA, 15 bp, Homo sapiens
attctcctggctcag

SEQ ID NO: 1639363 - DNA, 15 bp, Homo sapiens
cattctcctggctca

SEQ ID NO: 1639364 - DNA, 15 bp, Homo sapiens
tcattctcctggctc

SEQ ID NO: 1639365 - DNA, 15 bp, Homo sapiens
ttcattctcctggct

SEQ ID NO: 1639366 - DNA, 15 bp, Homo sapiens
attcattctcctggc

SEQ ID NO: 1639367 - DNA, 15 bp, Homo sapiens
aattcattctcctgg

SEQ ID NO: 1639368 - DNA, 15 bp, Homo sapiens
aaattcattctcctg

SEQ ID NO: 1639369 - DNA, 15 bp, Homo sapiens
gaaattcattctcct

SEQ ID NO: 1639370 - DNA, 15 bp, Homo sapiens
tgaaattcattctcc

SEQ ID NO: 1639371 - DNA, 15 bp, Homo sapiens
gtgaaattcattctc

SEQ ID NO: 1639372 - DNA, 15 bp, Homo sapiens
tgtgaaattcattct

SEQ ID NO: 1639373 - DNA, 15 bp, Homo sapiens
ttgtgaaattcattc

SEQ ID NO: 1639374 - DNA, 15 bp, Homo sapiens
tttgtgaaattcatt

SEQ ID NO: 1639375 - DNA, 15 bp, Homo sapiens
atttgtgaaattcat

SEQ ID NO: 1639376 - DNA, 15 bp, Homo sapiens
catttgtgaaattca

SEQ ID NO: 1639377 - DNA, 15 bp, Homo sapiens
acatttgtgaaattc

SEQ ID NO: 1639378 - DNA, 15 bp, Homo sapiens
gacatttgtgaaatt

SEQ ID NO: 1639379 - DNA, 15 bp, Homo sapiens
tgacatttgtgaaat

SEQ ID NO: 1639380 - DNA, 15 bp, Homo sapiens
atgacatttgtgaaa

SEQ ID NO: 1639381 - DNA, 15 bp, Homo sapiens
gatgacatttgtgaa

SEQ ID NO: 1639382 - DNA, 15 bp, Homo sapiens
tgatgacatttgtga

SEQ ID NO: 1639383 - DNA, 15 bp, Homo sapiens
ctgatgacatttgtg

SEQ ID NO: 1639384 - DNA, 15 bp, Homo sapiens
gctgatgacatttgt

SEQ ID NO: 1639385 - DNA, 15 bp, Homo sapiens
agctgatgacatttg

SEQ ID NO: 1639386 - DNA, 15 bp, Homo sapiens
tagctgatgacattt

SEQ ID NO: 1639387 - DNA, 15 bp, Homo sapiens
ttagctgatgacatt

SEQ ID NO: 1639388 - DNA, 15 bp, Homo sapiens
cttagctgatgacat

SEQ ID NO: 1639389 - DNA, 15 bp, Homo sapiens
ccttagctgatgaca

SEQ ID NO: 1639390 - DNA, 15 bp, Homo sapiens
gccttagctgatgac

SEQ ID NO: 1639391 - DNA, 15 bp, Homo sapiens
tgccttagctgatga

SEQ ID NO: 1639392 - DNA, 15 bp, Homo sapiens
ctgccttagctgatg

SEQ ID NO: 1639393 - DNA, 15 bp, Homo sapiens
cctgccttagctgat

SEQ ID NO: 1639394 - DNA, 15 bp, Homo sapiens
tcctgccttagctga

SEQ ID NO: 1639395 - DNA, 15 bp, Homo sapiens
ttcctgccttagctg

SEQ ID NO: 1639396 - DNA, 15 bp, Homo sapiens
gttcctgccttagct

SEQ ID NO: 1639397 - DNA, 15 bp, Homo sapiens
ggttcctgccttagc

SEQ ID NO: 1639398 - DNA, 15 bp, Homo sapiens
tggttcctgccttag

SEQ ID NO: 1639399 - DNA, 15 bp, Homo sapiens
ctggttcctgcctta

SEQ ID NO: 1639400 - DNA, 15 bp, Homo sapiens
gctggttcctgcctt

SEQ ID NO: 1639401 - DNA, 15 bp, Homo sapiens
ggctggttcctgcct

SEQ ID NO: 1639402 - DNA, 15 bp, Homo sapiens
tggctggttcctgcc

SEQ ID NO: 1639403 - DNA, 15 bp, Homo sapiens
atggctggttcctgc

SEQ ID NO: 1639404 - DNA, 15 bp, Homo sapiens
aatggctggttcctg

SEQ ID NO: 1639405 - DNA, 15 bp, Homo sapiens
aaatggctggttcct

SEQ ID NO: 1639406 - DNA, 15 bp, Homo sapiens
aaaatggctggttcc

SEQ ID NO: 1639407 - DNA, 15 bp, Homo sapiens
gaaaatggctggttc

SEQ ID NO: 1639408 - DNA, 15 bp, Homo sapiens
tgaaaatggctggtt

SEQ ID NO: 1639409 - DNA, 15 bp, Homo sapiens
gtgaaaatggctggt

SEQ ID NO: 1639410 - DNA, 15 bp, Homo sapiens
agtgaaaatggctgg

SEQ ID NO: 1639411 - DNA, 15 bp, Homo sapiens
aagtgaaaatggctg

SEQ ID NO: 1639412 - DNA, 15 bp, Homo sapiens
taagtgaaaatggct

SEQ ID NO: 1639413 - DNA, 15 bp, Homo sapiens
ataagtgaaaatggc

SEQ ID NO: 1639414 - DNA, 15 bp, Homo sapiens
aataagtgaaaatgg

SEQ ID NO: 1639415 - DNA, 15 bp, Homo sapiens
aaataagtgaaaatg

SEQ ID NO: 1639416 - DNA, 15 bp, Homo sapiens
aaaataagtgaaaat

SEQ ID NO: 1639417 - DNA, 15 bp, Homo sapiens
caaaataagtgaaaa

SEQ ID NO: 1639418 - DNA, 15 bp, Homo sapiens
acaaaataagtgaaa

SEQ ID NO: 1639419 - DNA, 15 bp, Homo sapiens
cacaaaataagtgaa

SEQ ID NO: 1639420 - DNA, 15 bp, Homo sapiens
tcacaaaataagtga

SEQ ID NO: 1639421 - DNA, 15 bp, Homo sapiens
atcacaaaataagtg

SEQ ID NO: 1639422 - DNA, 15 bp, Homo sapiens
aatcacaaaataagt

SEQ ID NO: 1639423 - DNA, 15 bp, Homo sapiens
gaatcacaaaataag

SEQ ID NO: 1639424 - DNA, 15 bp, Homo sapiens
agaatcacaaaataa

SEQ ID NO: 1639425 - DNA, 15 bp, Homo sapiens
aagaatcacaaaata

SEQ ID NO: 1639426 - DNA, 15 bp, Homo sapiens
gaagaatcacaaaat

SEQ ID NO: 1639427 - DNA, 15 bp, Homo sapiens
tgaagaatcacaaaa

SEQ ID NO: 1639428 - DNA, 15 bp, Homo sapiens
ctgaagaatcacaaa

SEQ ID NO: 1639429 - DNA, 15 bp, Homo sapiens
actgaagaatcacaa

SEQ ID NO: 1639430 - DNA, 15 bp, Homo sapiens
aactgaagaatcaca

SEQ ID NO: 1639431 - DNA, 15 bp, Homo sapiens
caactgaagaatcac

SEQ ID NO: 1639432 - DNA, 15 bp, Homo sapiens
gcaactgaagaatca

SEQ ID NO: 1639433 - DNA, 15 bp, Homo sapiens
agcaactgaagaatc

SEQ ID NO: 1639434 - DNA, 15 bp, Homo sapiens
aagcaactgaagaat

SEQ ID NO: 1639435 - DNA, 15 bp, Homo sapiens
gaagcaactgaagaa

SEQ ID NO: 1639436 - DNA, 15 bp, Homo sapiens
tgaagcaactgaaga

SEQ ID NO: 1639437 - DNA, 15 bp, Homo sapiens
ctgaagcaactgaag

SEQ ID NO: 1639438 - DNA, 15 bp, Homo sapiens
cctgaagcaactgaa

SEQ ID NO: 1639439 - DNA, 15 bp, Homo sapiens
gcctgaagcaactga

SEQ ID NO: 1639440 - DNA, 15 bp, Homo sapiens
ggcctgaagcaactg

SEQ ID NO: 1639441 - DNA, 15 bp, Homo sapiens
tggcctgaagcaact

SEQ ID NO: 1639442 - DNA, 15 bp, Homo sapiens
atggcctgaagcaac

SEQ ID NO: 1639443 - DNA, 15 bp, Homo sapiens
gatggcctgaagcaa

SEQ ID NO: 1639444 - DNA, 15 bp, Homo sapiens
agatggcctgaagca

SEQ ID NO: 1639445 - DNA, 15 bp, Homo sapiens
cagatggcctgaagc

SEQ ID NO: 1639446 - DNA, 15 bp, Homo sapiens
ccagatggcctgaag

SEQ ID NO: 1639447 - DNA, 15 bp, Homo sapiens
tccagatggcctgaa

SEQ ID NO: 1639448 - DNA, 15 bp, Homo sapiens
atccagatggcctga

SEQ ID NO: 1639449 - DNA, 15 bp, Homo sapiens
catccagatggcctg

SEQ ID NO: 1639450 - DNA, 15 bp, Homo sapiens
acatccagatggcct

SEQ ID NO: 1639451 - DNA, 15 bp, Homo sapiens
tacatccagatggcc

SEQ ID NO: 1639452 - DNA, 15 bp, Homo sapiens
atacatccagatggc

SEQ ID NO: 1639453 - DNA, 15 bp, Homo sapiens
tatacatccagatgg

SEQ ID NO: 1639454 - DNA, 15 bp, Homo sapiens
gtatacatccagatg

SEQ ID NO: 1639455 - DNA, 15 bp, Homo sapiens
tgtatacatccagat

SEQ ID NO: 1639456 - DNA, 15 bp, Homo sapiens
atgtatacatccaga

SEQ ID NO: 1639457 - DNA, 15 bp, Homo sapiens
catgtatacatccag

SEQ ID NO: 1639458 - DNA, 15 bp, Homo sapiens
gcatgtatacatcca

SEQ ID NO: 1639459 - DNA, 15 bp, Homo sapiens
tgcatgtatacatcc

SEQ ID NO: 1639460 - DNA, 15 bp, Homo sapiens
ctgcatgtatacatc

SEQ ID NO: 1639461 - DNA, 15 bp, Homo sapiens
cctgcatgtatacat

SEQ ID NO: 1639462 - DNA, 15 bp, Homo sapiens
gcctgcatgtataca

SEQ ID NO: 1639463 - DNA, 15 bp, Homo sapiens
agcctgcatgtatac

SEQ ID NO: 1639464 - DNA, 15 bp, Homo sapiens
aagcctgcatgtata

SEQ ID NO: 1639465 - DNA, 15 bp, Homo sapiens
caagcctgcatgtat

SEQ ID NO: 1639466 - DNA, 15 bp, Homo sapiens
ccaagcctgcatgta

SEQ ID NO: 1639467 - DNA, 15 bp, Homo sapiens
cccaagcctgcatgt

SEQ ID NO: 1639468 - DNA, 15 bp, Homo sapiens
gcccaagcctgcatg

SEQ ID NO: 1639469 - DNA, 15 bp, Homo sapiens
agcccaagcctgcat

SEQ ID NO: 1639470 - DNA, 15 bp, Homo sapiens
gagcccaagcctgca

SEQ ID NO: 1639471 - DNA, 15 bp, Homo sapiens
tgagcccaagcctgc

SEQ ID NO: 1639472 - DNA, 15 bp, Homo sapiens
ctgagcccaagcctg

SEQ ID NO: 1639473 - DNA, 15 bp, Homo sapiens
tctgagcccaagcct

SEQ ID NO: 1639474 - DNA, 15 bp, Homo sapiens
ctctgagcccaagcc

SEQ ID NO: 1639475 - DNA, 15 bp, Homo sapiens
cctctgagcccaagc

SEQ ID NO: 1639476 - DNA, 15 bp, Homo sapiens
gcctctgagcccaag

SEQ ID NO: 1639477 - DNA, 15 bp, Homo sapiens
ggcctctgagcccaa

SEQ ID NO: 1639478 - DNA, 15 bp, Homo sapiens
aggcctctgagccca

SEQ ID NO: 1639479 - DNA, 15 bp, Homo sapiens
caggcctctgagccc

SEQ ID NO: 1639480 - DNA, 15 bp, Homo sapiens
tcaggcctctgagcc

SEQ ID NO: 1639481 - DNA, 15 bp, Homo sapiens
gtcaggcctctgagc

SEQ ID NO: 1639482 - DNA, 15 bp, Homo sapiens
tgtcaggcctctgag

SEQ ID NO: 1639483 - DNA, 15 bp, Homo sapiens
atgtcaggcctctga

SEQ ID NO: 1639484 - DNA, 15 bp, Homo sapiens
aatgtcaggcctctg

SEQ ID NO: 1639485 - DNA, 15 bp, Homo sapiens
gaatgtcaggcctct

SEQ ID NO: 1639486 - DNA, 15 bp, Homo sapiens
ggaatgtcaggcctc

SEQ ID NO: 1639487 - DNA, 15 bp, Homo sapiens
aggaatgtcaggcct

SEQ ID NO: 1639488 - DNA, 15 bp, Homo sapiens
caggaatgtcaggcc

SEQ ID NO: 1639489 - DNA, 15 bp, Homo sapiens
acaggaatgtcaggc

SEQ ID NO: 1639490 - DNA, 15 bp, Homo sapiens
gacaggaatgtcagg

SEQ ID NO: 1639491 - DNA, 15 bp, Homo sapiens
agacaggaatgtcag

SEQ ID NO: 1639492 - DNA, 15 bp, Homo sapiens
aagacaggaatgtca

SEQ ID NO: 1639493 - DNA, 15 bp, Homo sapiens
aaagacaggaatgtc

SEQ ID NO: 1639494 - DNA, 15 bp, Homo sapiens
aaaagacaggaatgt

SEQ ID NO: 1639495 - DNA, 15 bp, Homo sapiens
aaaaagacaggaatg

SEQ ID NO: 1639496 - DNA, 15 bp, Homo sapiens
taaaaagacaggaat

SEQ ID NO: 1639497 - DNA, 15 bp, Homo sapiens
ataaaaagacaggaa

SEQ ID NO: 1639498 - DNA, 15 bp, Homo sapiens
tataaaaagacagga

SEQ ID NO: 1639499 - DNA, 15 bp, Homo sapiens
atataaaaagacagg

SEQ ID NO: 1639500 - DNA, 15 bp, Homo sapiens
aatataaaaagacag

SEQ ID NO: 1639501 - DNA, 15 bp, Homo sapiens
taatataaaaagaca

SEQ ID NO: 1639502 - DNA, 15 bp, Homo sapiens
ttaatataaaaagac

SEQ ID NO: 1639503 - DNA, 15 bp, Homo sapiens
attaatataaaaaga

SEQ ID NO: 1639504 - DNA, 15 bp, Homo sapiens
tattaatataaaaag

SEQ ID NO: 1639505 - DNA, 15 bp, Homo sapiens
ttattaatataaaaa

SEQ ID NO: 1639506 - DNA, 15 bp, Homo sapiens
cttattaatataaaa

SEQ ID NO: 1639507 - DNA, 15 bp, Homo sapiens
tcttattaatataaa

SEQ ID NO: 1639508 - DNA, 15 bp, Homo sapiens
ttcttattaatataa

SEQ ID NO: 1639509 - DNA, 15 bp, Homo sapiens
tttcttattaatata

SEQ ID NO: 1639510 - DNA, 15 bp, Homo sapiens
ttttcttattaatat

SEQ ID NO: 1639511 - DNA, 15 bp, Homo sapiens
tttttcttattaata

SEQ ID NO: 1639512 - DNA, 15 bp, Homo sapiens
atttttcttattaat

SEQ ID NO: 1639513 - DNA, 15 bp, Homo sapiens
tatttttcttattaa

SEQ ID NO: 1639514 - DNA, 15 bp, Homo sapiens
ttatttttcttatta

SEQ ID NO: 1639515 - DNA, 15 bp, Homo sapiens
tttatttttcttatt

SEQ ID NO: 1639516 - DNA, 15 bp, Homo sapiens
ttttatttttcttat

SEQ ID NO: 1639517 - DNA, 15 bp, Homo sapiens
gttttatttttctta

SEQ ID NO: 1639518 - DNA, 15 bp, Homo sapiens
tgttttatttttctt

SEQ ID NO: 1639519 - DNA, 15 bp, Homo sapiens
ttgttttatttttct

SEQ ID NO: 1639520 - DNA, 15 bp, Homo sapiens
tttgttttatttttc

SEQ ID NO: 1639521 - DNA, 15 bp, Homo sapiens
ttttgttttattttt

SEQ ID NO: 1639522 - DNA, 15 bp, Homo sapiens
attttgttttatttt

SEQ ID NO: 1639523 - DNA, 15 bp, Homo sapiens
tattttgttttattt

SEQ ID NO: 1639524 - DNA, 15 bp, Homo sapiens
ctattttgttttatt

SEQ ID NO: 1639525 - DNA, 15 bp, Homo sapiens
actattttgttttat

SEQ ID NO: 1639526 - DNA, 15 bp, Homo sapiens
cactattttgtttta

SEQ ID NO: 1639527 - DNA, 15 bp, Homo sapiens
acactattttgtttt

SEQ ID NO: 1639528 - DNA, 15 bp, Homo sapiens
aacactattttgttt

SEQ ID NO: 1639529 - DNA, 15 bp, Homo sapiens
caacactattttgtt

SEQ ID NO: 1639530 - DNA, 15 bp, Homo sapiens
tcaacactattttgt

SEQ ID NO: 1639531 - DNA, 15 bp, Homo sapiens
ttcaacactattttg

SEQ ID NO: 1639532 - DNA, 15 bp, Homo sapiens
cttcaacactatttt

SEQ ID NO: 1639533 - DNA, 15 bp, Homo sapiens
acttcaacactattt

SEQ ID NO: 1639534 - DNA, 15 bp, Homo sapiens
cacttcaacactatt

SEQ ID NO: 1639535 - DNA, 15 bp, Homo sapiens
acacttcaacactat

SEQ ID NO: 1639536 - DNA, 15 bp, Homo sapiens
aacacttcaacacta

SEQ ID NO: 1639537 - DNA, 15 bp, Homo sapiens
caacacttcaacact

SEQ ID NO: 1639538 - DNA, 15 bp, Homo sapiens
ccaacacttcaacac

SEQ ID NO: 1639539 - DNA, 15 bp, Homo sapiens
cccaacacttcaaca

SEQ ID NO: 1639540 - DNA, 15 bp, Homo sapiens
ccccaacacttcaac

SEQ ID NO: 1639541 - DNA, 15 bp, Homo sapiens
gccccaacacttcaa

SEQ ID NO: 1639542 - DNA, 15 bp, Homo sapiens
cgccccaacacttca

SEQ ID NO: 1639543 - DNA, 15 bp, Homo sapiens
ccgccccaacacttc

SEQ ID NO: 1639544 - DNA, 15 bp, Homo sapiens
accgccccaacactt

SEQ ID NO: 1639545 - DNA, 15 bp, Homo sapiens
caccgccccaacact

SEQ ID NO: 1639546 - DNA, 15 bp, Homo sapiens
tcaccgccccaacac

SEQ ID NO: 1639547 - DNA, 15 bp, Homo sapiens
ttcaccgccccaaca

SEQ ID NO: 1639548 - DNA, 15 bp, Homo sapiens
tttcaccgccccaac

SEQ ID NO: 1639549 - DNA, 15 bp, Homo sapiens
ttttcaccgccccaa

SEQ ID NO: 1639550 - DNA, 15 bp, Homo sapiens
tttttcaccgcccca

SEQ ID NO: 1639551 - DNA, 15 bp, Homo sapiens
atttttcaccgcccc

SEQ ID NO: 1639552 - DNA, 15 bp, Homo sapiens
aatttttcaccgccc

SEQ ID NO: 1639553 - DNA, 15 bp, Homo sapiens
aaatttttcaccgcc

SEQ ID NO: 1639554 - DNA, 15 bp, Homo sapiens
aaaatttttcaccgc

SEQ ID NO: 1639555 - DNA, 15 bp, Homo sapiens
aaaaatttttcaccg

SEQ ID NO: 1639556 - DNA, 15 bp, Homo sapiens
aaaaaatttttcacc

SEQ ID NO: 1639557 - DNA, 15 bp, Homo sapiens
caaaaaatttttcac

SEQ ID NO: 1639558 - DNA, 15 bp, Homo sapiens
ccaaaaaatttttca

SEQ ID NO: 1639559 - DNA, 15 bp, Homo sapiens
cccaaaaaatttttc

SEQ ID NO: 1639560 - DNA, 15 bp, Homo sapiens
ccccaaaaaattttt

SEQ ID NO: 1639561 - DNA, 15 bp, Homo sapiens
cccccaaaaaatttt

SEQ ID NO: 1639562 - DNA, 15 bp, Homo sapiens
ccccccaaaaaattt

SEQ ID NO: 1639563 - DNA, 15 bp, Homo sapiens
accccccaaaaaatt

SEQ ID NO: 1639564 - DNA, 15 bp, Homo sapiens
caccccccaaaaaat

SEQ ID NO: 1639565 - DNA, 15 bp, Homo sapiens
ccaccccccaaaaaa

SEQ ID NO: 1639566 - DNA, 15 bp, Homo sapiens
accaccccccaaaaa

SEQ ID NO: 1639567 - DNA, 15 bp, Homo sapiens
taccaccccccaaaa

SEQ ID NO: 1639568 - DNA, 15 bp, Homo sapiens
ataccaccccccaaa

SEQ ID NO: 1639569 - DNA, 15 bp, Homo sapiens
cataccaccccccaa

SEQ ID NO: 1639570 - DNA, 15 bp, Homo sapiens
ccataccacccccca

SEQ ID NO: 1639571 - DNA, 15 bp, Homo sapiens
tccataccacccccc

SEQ ID NO: 1639572 - DNA, 15 bp, Homo sapiens
ctccataccaccccc

SEQ ID NO: 1639573 - DNA, 15 bp, Homo sapiens
tctccataccacccc

SEQ ID NO: 1639574 - DNA, 15 bp, Homo sapiens
ctctccataccaccc

SEQ ID NO: 1639575 - DNA, 15 bp, Homo sapiens
actctccataccacc

SEQ ID NO: 1639576 - DNA, 15 bp, Homo sapiens
aactctccataccac

SEQ ID NO: 1639577 - DNA, 15 bp, Homo sapiens
taactctccatacca

SEQ ID NO: 1639578 - DNA, 15 bp, Homo sapiens
gtaactctccatacc

SEQ ID NO: 1639579 - DNA, 15 bp, Homo sapiens
agtaactctccatac

SEQ ID NO: 1639580 - DNA, 15 bp, Homo sapiens
cagtaactctccata

SEQ ID NO: 1639581 - DNA, 15 bp, Homo sapiens
ccagtaactctccat

SEQ ID NO: 1639582 - DNA, 15 bp, Homo sapiens
cccagtaactctcca

SEQ ID NO: 1639583 - DNA, 15 bp, Homo sapiens
acccagtaactctcc

SEQ ID NO: 1639584 - DNA, 15 bp, Homo sapiens
cacccagtaactctc

SEQ ID NO: 1639585 - DNA, 15 bp, Homo sapiens
tcacccagtaactct

SEQ ID NO: 1639586 - DNA, 15 bp, Homo sapiens
atcacccagtaactc

SEQ ID NO: 1639587 - DNA, 15 bp, Homo sapiens
catcacccagtaact

SEQ ID NO: 1639588 - DNA, 15 bp, Homo sapiens
acatcacccagtaac

SEQ ID NO: 1639589 - DNA, 15 bp, Homo sapiens
aacatcacccagtaa

SEQ ID NO: 1639590 - DNA, 15 bp, Homo sapiens
aaacatcacccagta

SEQ ID NO: 1639591 - DNA, 15 bp, Homo sapiens
gaaacatcacccagt

SEQ ID NO: 1639592 - DNA, 15 bp, Homo sapiens
agaaacatcacccag

SEQ ID NO: 1639593 - DNA, 15 bp, Homo sapiens
aagaaacatcaccca

SEQ ID NO: 1639594 - DNA, 15 bp, Homo sapiens
taagaaacatcaccc

SEQ ID NO: 1639595 - DNA, 15 bp, Homo sapiens
ctaagaaacatcacc

SEQ ID NO: 1639596 - DNA, 15 bp, Homo sapiens
cctaagaaacatcac

SEQ ID NO: 1639597 - DNA, 15 bp, Homo sapiens
ccctaagaaacatca

SEQ ID NO: 1639598 - DNA, 15 bp, Homo sapiens
accctaagaaacatc

SEQ ID NO: 1639599 - DNA, 15 bp, Homo sapiens
aaccctaagaaacat

SEQ ID NO: 1639600 - DNA, 15 bp, Homo sapiens
caaccctaagaaaca

SEQ ID NO: 1639601 - DNA, 15 bp, Homo sapiens
gcaaccctaagaaac

SEQ ID NO: 1639602 - DNA, 15 bp, Homo sapiens
agcaaccctaagaaa

SEQ ID NO: 1639603 - DNA, 15 bp, Homo sapiens
aagcaaccctaagaa

SEQ ID NO: 1639604 - DNA, 15 bp, Homo sapiens
aaagcaaccctaaga

SEQ ID NO: 1639605 - DNA, 15 bp, Homo sapiens
caaagcaaccctaag

SEQ ID NO: 1639606 - DNA, 15 bp, Homo sapiens
tcaaagcaaccctaa

SEQ ID NO: 1639607 - DNA, 15 bp, Homo sapiens
ctcaaagcaacccta

SEQ ID NO: 1639608 - DNA, 15 bp, Homo sapiens
actcaaagcaaccct

SEQ ID NO: 1639609 - DNA, 15 bp, Homo sapiens
cactcaaagcaaccc

SEQ ID NO: 1639610 - DNA, 15 bp, Homo sapiens
ccactcaaagcaacc

SEQ ID NO: 1639611 - DNA, 15 bp, Homo sapiens
cccactcaaagcaac

SEQ ID NO: 1639612 - DNA, 15 bp, Homo sapiens
tcccactcaaagcaa

SEQ ID NO: 1639613 - DNA, 15 bp, Homo sapiens
atcccactcaaagca

SEQ ID NO: 1639614 - DNA, 15 bp, Homo sapiens
aatcccactcaaagc

SEQ ID NO: 1639615 - DNA, 15 bp, Homo sapiens
taatcccactcaaag

SEQ ID NO: 1639616 - DNA, 15 bp, Homo sapiens
ctaatcccactcaaa

SEQ ID NO: 1639617 - DNA, 15 bp, Homo sapiens
cctaatcccactcaa

SEQ ID NO: 1639618 - DNA, 15 bp, Homo sapiens
ccctaatcccactca

SEQ ID NO: 1639619 - DNA, 15 bp, Homo sapiens
cccctaatcccactc

SEQ ID NO: 1639620 - DNA, 15 bp, Homo sapiens
acccctaatcccact

SEQ ID NO: 1639621 - DNA, 15 bp, Homo sapiens
cacccctaatcccac

SEQ ID NO: 1639622 - DNA, 15 bp, Homo sapiens
ccacccctaatccca

SEQ ID NO: 1639623 - DNA, 15 bp, Homo sapiens
gccacccctaatccc

SEQ ID NO: 1639624 - DNA, 15 bp, Homo sapiens
cgccacccctaatcc

SEQ ID NO: 1639625 - DNA, 15 bp, Homo sapiens
acgccacccctaatc

SEQ ID NO: 1639626 - DNA, 15 bp, Homo sapiens
cacgccacccctaat

SEQ ID NO: 1639627 - DNA, 15 bp, Homo sapiens
ccacgccacccctaa

SEQ ID NO: 1639628 - DNA, 15 bp, Homo sapiens
cccacgccaccccta

SEQ ID NO: 1639629 - DNA, 15 bp, Homo sapiens
tcccacgccacccct

SEQ ID NO: 1639630 - DNA, 15 bp, Homo sapiens
ttcccacgccacccc

SEQ ID NO: 1639631 - DNA, 15 bp, Homo sapiens
gttcccacgccaccc

SEQ ID NO: 1639632 - DNA, 15 bp, Homo sapiens
ggttcccacgccacc

SEQ ID NO: 1639633 - DNA, 15 bp, Homo sapiens
aggttcccacgccac

SEQ ID NO: 1639634 - DNA, 15 bp, Homo sapiens
taggttcccacgcca

SEQ ID NO: 1639635 - DNA, 15 bp, Homo sapiens
ctaggttcccacgcc

SEQ ID NO: 1639636 - DNA, 15 bp, Homo sapiens
tctaggttcccacgc

SEQ ID NO: 1639637 - DNA, 15 bp, Homo sapiens
ctctaggttcccacg

SEQ ID NO: 1639638 - DNA, 15 bp, Homo sapiens
actctaggttcccac

SEQ ID NO: 1639639 - DNA, 15 bp, Homo sapiens
cactctaggttccca

SEQ ID NO: 1639640 - DNA, 15 bp, Homo sapiens
ccactctaggttccc

SEQ ID NO: 1639641 - DNA, 15 bp, Homo sapiens
cccactctaggttcc

SEQ ID NO: 1639642 - DNA, 15 bp, Homo sapiens
tcccactctaggttc

SEQ ID NO: 1639643 - DNA, 15 bp, Homo sapiens
ctcccactctaggtt

SEQ ID NO: 1639644 - DNA, 15 bp, Homo sapiens
tctcccactctaggt

SEQ ID NO: 1639645 - DNA, 15 bp, Homo sapiens
ctctcccactctagg

SEQ ID NO: 1639646 - DNA, 15 bp, Homo sapiens
tctctcccactctag

SEQ ID NO: 1639647 - DNA, 15 bp, Homo sapiens
atctctcccactcta

SEQ ID NO: 1639648 - DNA, 15 bp, Homo sapiens
tatctctcccactct

SEQ ID NO: 1639649 - DNA, 15 bp, Homo sapiens
ttatctctcccactc

SEQ ID NO: 1639650 - DNA, 15 bp, Homo sapiens
tttatctctcccact

SEQ ID NO: 1639651 - DNA, 15 bp, Homo sapiens
ctttatctctcccac

SEQ ID NO: 1639652 - DNA, 15 bp, Homo sapiens
gctttatctctccca

SEQ ID NO: 1639653 - DNA, 15 bp, Homo sapiens
agctttatctctccc

SEQ ID NO: 1639654 - DNA, 15 bp, Homo sapiens
cagctttatctctcc

SEQ ID NO: 1639655 - DNA, 15 bp, Homo sapiens
tcagctttatctctc

SEQ ID NO: 1639656 - DNA, 15 bp, Homo sapiens
ttcagctttatctct

SEQ ID NO: 1639657 - DNA, 15 bp, Homo sapiens
cttcagctttatctc

SEQ ID NO: 1639658 - DNA, 15 bp, Homo sapiens
ccttcagctttatct

SEQ ID NO: 1639659 - DNA, 15 bp, Homo sapiens
tccttcagctttatc

SEQ ID NO: 1639660 - DNA, 15 bp, Homo sapiens
ttccttcagctttat

SEQ ID NO: 1639661 - DNA, 15 bp, Homo sapiens
cttccttcagcttta

SEQ ID NO: 1639662 - DNA, 15 bp, Homo sapiens
tcttccttcagcttt

SEQ ID NO: 1639663 - DNA, 15 bp, Homo sapiens
atcttccttcagctt

SEQ ID NO: 1639664 - DNA, 15 bp, Homo sapiens
aatcttccttcagct

SEQ ID NO: 1639665 - DNA, 15 bp, Homo sapiens
aaatcttccttcagc

SEQ ID NO: 1639666 - DNA, 15 bp, Homo sapiens
aaaatcttccttcag

SEQ ID NO: 1639667 - DNA, 15 bp, Homo sapiens
caaaatcttccttca

SEQ ID NO: 1639668 - DNA, 15 bp, Homo sapiens
acaaaatcttccttc

SEQ ID NO: 1639669 - DNA, 15 bp, Homo sapiens
cacaaaatcttcctt

SEQ ID NO: 1639670 - DNA, 15 bp, Homo sapiens
ccacaaaatcttcct

SEQ ID NO: 1639671 - DNA, 15 bp, Homo sapiens
accacaaaatcttcc

SEQ ID NO: 1639672 - DNA, 15 bp, Homo sapiens
taccacaaaatcttc

SEQ ID NO: 1639673 - DNA, 15 bp, Homo sapiens
ttaccacaaaatctt

SEQ ID NO: 1639674 - DNA, 15 bp, Homo sapiens
cttaccacaaaatct

SEQ ID NO: 1639675 - DNA, 15 bp, Homo sapiens
ccttaccacaaaatc

SEQ ID NO: 1639676 - DNA, 15 bp, Homo sapiens
cccttaccacaaaat

SEQ ID NO: 1639677 - DNA, 15 bp, Homo sapiens
ccccttaccacaaaa

SEQ ID NO: 1639678 - DNA, 15 bp, Homo sapiens
accccttaccacaaa

SEQ ID NO: 1639679 - DNA, 15 bp, Homo sapiens
caccccttaccacaa

SEQ ID NO: 1639680 - DNA, 15 bp, Homo sapiens
tcaccccttaccaca

SEQ ID NO: 1639681 - DNA, 15 bp, Homo sapiens
atcaccccttaccac

SEQ ID NO: 1639682 - DNA, 15 bp, Homo sapiens
tatcaccccttacca

SEQ ID NO: 1639683 - DNA, 15 bp, Homo sapiens
atatcaccccttacc

SEQ ID NO: 1639684 - DNA, 15 bp, Homo sapiens
aatatcaccccttac

SEQ ID NO: 1639685 - DNA, 15 bp, Homo sapiens
caatatcacccctta

SEQ ID NO: 1639686 - DNA, 15 bp, Homo sapiens
acaatatcacccctt

SEQ ID NO: 1639687 - DNA, 15 bp, Homo sapiens
cacaatatcacccct

SEQ ID NO: 1639688 - DNA, 15 bp, Homo sapiens
ccacaatatcacccc

SEQ ID NO: 1639689 - DNA, 15 bp, Homo sapiens
tccacaatatcaccc

SEQ ID NO: 1639690 - DNA, 15 bp, Homo sapiens
atccacaatatcacc

SEQ ID NO: 1639691 - DNA, 15 bp, Homo sapiens
aatccacaatatcac

SEQ ID NO: 1639692 - DNA, 15 bp, Homo sapiens
aaatccacaatatca

SEQ ID NO: 1639693 - DNA, 15 bp, Homo sapiens
caaatccacaatatc

SEQ ID NO: 1639694 - DNA, 15 bp, Homo sapiens
acaaatccacaatat

SEQ ID NO: 1639695 - DNA, 15 bp, Homo sapiens
aacaaatccacaata

SEQ ID NO: 1639696 - DNA, 15 bp, Homo sapiens
taacaaatccacaat

SEQ ID NO: 1639697 - DNA, 15 bp, Homo sapiens
ctaacaaatccacaa

SEQ ID NO: 1639698 - DNA, 15 bp, Homo sapiens
tctaacaaatccaca

SEQ ID NO: 1639699 - DNA, 15 bp, Homo sapiens
ttctaacaaatccac

SEQ ID NO: 1639700 - DNA, 15 bp, Homo sapiens
cttctaacaaatcca

SEQ ID NO: 1639701 - DNA, 15 bp, Homo sapiens
ccttctaacaaatcc

SEQ ID NO: 1639702 - DNA, 15 bp, Homo sapiens
tccttctaacaaatc

SEQ ID NO: 1639703 - DNA, 15 bp, Homo sapiens
ttccttctaacaaat

SEQ ID NO: 1639704 - DNA, 15 bp, Homo sapiens
attccttctaacaaa

SEQ ID NO: 1639705 - DNA, 15 bp, Homo sapiens
tattccttctaacaa

SEQ ID NO: 1639706 - DNA, 15 bp, Homo sapiens
atattccttctaaca

SEQ ID NO: 1639707 - DNA, 15 bp, Homo sapiens
aatattccttctaac

SEQ ID NO: 1639708 - DNA, 15 bp, Homo sapiens
aaatattccttctaa

SEQ ID NO: 1639709 - DNA, 15 bp, Homo sapiens
caaatattccttcta

SEQ ID NO: 1639710 - DNA, 15 bp, Homo sapiens
acaaatattccttct

SEQ ID NO: 1639711 - DNA, 15 bp, Homo sapiens
gacaaatattccttc

SEQ ID NO: 1639712 - DNA, 15 bp, Homo sapiens
tgacaaatattcctt

SEQ ID NO: 1639713 - DNA, 15 bp, Homo sapiens
gtgacaaatattcct

SEQ ID NO: 1639714 - DNA, 15 bp, Homo sapiens
tgtgacaaatattcc

SEQ ID NO: 1639715 - DNA, 15 bp, Homo sapiens
atgtgacaaatattc

SEQ ID NO: 1639716 - DNA, 15 bp, Homo sapiens
tatgtgacaaatatt

SEQ ID NO: 1639717 - DNA, 15 bp, Homo sapiens
ctatgtgacaaatat

SEQ ID NO: 1639718 - DNA, 15 bp, Homo sapiens
tctatgtgacaaata

SEQ ID NO: 1639719 - DNA, 15 bp, Homo sapiens
ttctatgtgacaaat

SEQ ID NO: 1639720 - DNA, 15 bp, Homo sapiens
attctatgtgacaaa

SEQ ID NO: 1639721 - DNA, 15 bp, Homo sapiens
cattctatgtgacaa

SEQ ID NO: 1639722 - DNA, 15 bp, Homo sapiens
tcattctatgtgaca

SEQ ID NO: 1639723 - DNA, 15 bp, Homo sapiens
atcattctatgtgac

SEQ ID NO: 1639724 - DNA, 15 bp, Homo sapiens
aatcattctatgtga

SEQ ID NO: 1639725 - DNA, 15 bp, Homo sapiens
caatcattctatgtg

SEQ ID NO: 1639726 - DNA, 15 bp, Homo sapiens
ccaatcattctatgt

SEQ ID NO: 1639727 - DNA, 15 bp, Homo sapiens
accaatcattctatg

SEQ ID NO: 1639728 - DNA, 15 bp, Homo sapiens
caccaatcattctat

SEQ ID NO: 1639729 - DNA, 15 bp, Homo sapiens
tcaccaatcattcta

SEQ ID NO: 1639730 - DNA, 15 bp, Homo sapiens
atcaccaatcattct

SEQ ID NO: 1639731 - DNA, 15 bp, Homo sapiens
catcaccaatcattc

SEQ ID NO: 1639732 - DNA, 15 bp, Homo sapiens
ccatcaccaatcatt

SEQ ID NO: 1639733 - DNA, 15 bp, Homo sapiens
gccatcaccaatcat

SEQ ID NO: 1639734 - DNA, 15 bp, Homo sapiens
ggccatcaccaatca

SEQ ID NO: 1639735 - DNA, 15 bp, Homo sapiens
aggccatcaccaatc

SEQ ID NO: 1639736 - DNA, 15 bp, Homo sapiens
caggccatcaccaat

SEQ ID NO: 1639737 - DNA, 15 bp, Homo sapiens
ccaggccatcaccaa

SEQ ID NO: 1639738 - DNA, 15 bp, Homo sapiens
tccaggccatcacca

SEQ ID NO: 1639739 - DNA, 15 bp, Homo sapiens
atccaggccatcacc

SEQ ID NO: 1639740 - DNA, 15 bp, Homo sapiens
tatccaggccatcac

SEQ ID NO: 1639741 - DNA, 15 bp, Homo sapiens
gtatccaggccatca

SEQ ID NO: 1639742 - DNA, 15 bp, Homo sapiens
tgtatccaggccatc

SEQ ID NO: 1639743 - DNA, 15 bp, Homo sapiens
ctgtatccaggccat

SEQ ID NO: 1639744 - DNA, 15 bp, Homo sapiens
actgtatccaggcca

SEQ ID NO: 1639745 - DNA, 15 bp, Homo sapiens
aactgtatccaggcc

SEQ ID NO: 1639746 - DNA, 15 bp, Homo sapiens
aaactgtatccaggc

SEQ ID NO: 1639747 - DNA, 15 bp, Homo sapiens
aaaactgtatccagg

SEQ ID NO: 1639748 - DNA, 15 bp, Homo sapiens
caaaactgtatccag

SEQ ID NO: 1639749 - DNA, 15 bp, Homo sapiens
acaaaactgtatcca

SEQ ID NO: 1639750 - DNA, 15 bp, Homo sapiens
tacaaaactgtatcc

SEQ ID NO: 1639751 - DNA, 15 bp, Homo sapiens
atacaaaactgtatc

SEQ ID NO: 1639752 - DNA, 15 bp, Homo sapiens
catacaaaactgtat

SEQ ID NO: 1639753 - DNA, 15 bp, Homo sapiens
tcatacaaaactgta

SEQ ID NO: 1639754 - DNA, 15 bp, Homo sapiens
ttcatacaaaactgt

SEQ ID NO: 1639755 - DNA, 15 bp, Homo sapiens
attcatacaaaactg

SEQ ID NO: 1639756 - DNA, 15 bp, Homo sapiens
aattcatacaaaact

SEQ ID NO: 1639757 - DNA, 15 bp, Homo sapiens
caattcatacaaaac

SEQ ID NO: 1639758 - DNA, 15 bp, Homo sapiens
tcaattcatacaaaa

SEQ ID NO: 1639759 - DNA, 15 bp, Homo sapiens
ctcaattcatacaaa

SEQ ID NO: 1639760 - DNA, 15 bp, Homo sapiens
tctcaattcatacaa

SEQ ID NO: 1639761 - DNA, 15 bp, Homo sapiens
ttctcaattcataca

SEQ ID NO: 1639762 - DNA, 15 bp, Homo sapiens
tttctcaattcatac

SEQ ID NO: 1639763 - DNA, 15 bp, Homo sapiens
gtttctcaattcata

SEQ ID NO: 1639764 - DNA, 15 bp, Homo sapiens
agtttctcaattcat

SEQ ID NO: 1639765 - DNA, 15 bp, Homo sapiens
tagtttctcaattca

SEQ ID NO: 1639766 - DNA, 15 bp, Homo sapiens
ttagtttctcaattc

SEQ ID NO: 1639767 - DNA, 15 bp, Homo sapiens
tttagtttctcaatt

SEQ ID NO: 1639768 - DNA, 15 bp, Homo sapiens
gtttagtttctcaat

SEQ ID NO: 1639769 - DNA, 15 bp, Homo sapiens
tgtttagtttctcaa

SEQ ID NO: 1639770 - DNA, 15 bp, Homo sapiens
ctgtttagtttctca

SEQ ID NO: 1639771 - DNA, 15 bp, Homo sapiens
tctgtttagtttctc

SEQ ID NO: 1639772 - DNA, 15 bp, Homo sapiens
ttctgtttagtttct

SEQ ID NO: 1639773 - DNA, 15 bp, Homo sapiens
cttctgtttagtttc

SEQ ID NO: 1639774 - DNA, 15 bp, Homo sapiens
tcttctgtttagttt

SEQ ID NO: 1639775 - DNA, 15 bp, Homo sapiens
gtcttctgtttagtt

SEQ ID NO: 1639776 - DNA, 15 bp, Homo sapiens
tgtcttctgtttagt

SEQ ID NO: 1639777 - DNA, 15 bp, Homo sapiens
gtgtcttctgtttag

SEQ ID NO: 1639778 - DNA, 15 bp, Homo sapiens
tgtgtcttctgttta

SEQ ID NO: 1639779 - DNA, 15 bp, Homo sapiens
ttgtgtcttctgttt

SEQ ID NO: 1639780 - DNA, 15 bp, Homo sapiens
cttgtgtcttctgtt

SEQ ID NO: 1639781 - DNA, 15 bp, Homo sapiens
ccttgtgtcttctgt

SEQ ID NO: 1639782 - DNA, 15 bp, Homo sapiens
accttgtgtcttctg

SEQ ID NO: 1639783 - DNA, 15 bp, Homo sapiens
gaccttgtgtcttct

SEQ ID NO: 1639784 - DNA, 15 bp, Homo sapiens
ggaccttgtgtcttc

SEQ ID NO: 1639785 - DNA, 15 bp, Homo sapiens
gggaccttgtgtctt

SEQ ID NO: 1639786 - DNA, 15 bp, Homo sapiens
tgggaccttgtgtct

SEQ ID NO: 1639787 - DNA, 15 bp, Homo sapiens
ttgggaccttgtgtc

SEQ ID NO: 1639788 - DNA, 15 bp, Homo sapiens
attgggaccttgtgt

SEQ ID NO: 1639789 - DNA, 15 bp, Homo sapiens
tattgggaccttgtg

SEQ ID NO: 1639790 - DNA, 15 bp, Homo sapiens
ttattgggaccttgt

SEQ ID NO: 1639791 - DNA, 15 bp, Homo sapiens
gttattgggaccttg

SEQ ID NO: 1639792 - DNA, 15 bp, Homo sapiens
tgttattgggacctt

SEQ ID NO: 1639793 - DNA, 15 bp, Homo sapiens
ctgttattgggacct

SEQ ID NO: 1639794 - DNA, 15 bp, Homo sapiens
tctgttattgggacc

SEQ ID NO: 1639795 - DNA, 15 bp, Homo sapiens
ttctgttattgggac

SEQ ID NO: 1639796 - DNA, 15 bp, Homo sapiens
cttctgttattggga

SEQ ID NO: 1639797 - DNA, 15 bp, Homo sapiens
ccttctgttattggg

SEQ ID NO: 1639798 - DNA, 15 bp, Homo sapiens
tccttctgttattgg

SEQ ID NO: 1639799 - DNA, 15 bp, Homo sapiens
ctccttctgttattg

SEQ ID NO: 1639800 - DNA, 15 bp, Homo sapiens
tctccttctgttatt

SEQ ID NO: 1639801 - DNA, 15 bp, Homo sapiens
ttctccttctgttat

SEQ ID NO: 1639802 - DNA, 15 bp, Homo sapiens
tttctccttctgtta

SEQ ID NO: 1639803 - DNA, 15 bp, Homo sapiens
ttttctccttctgtt

SEQ ID NO: 1639804 - DNA, 15 bp, Homo sapiens
tttttctccttctgt

SEQ ID NO: 1639805 - DNA, 15 bp, Homo sapiens
gtttttctccttctg

SEQ ID NO: 1639806 - DNA, 15 bp, Homo sapiens
tgtttttctccttct

SEQ ID NO: 1639807 - DNA, 15 bp, Homo sapiens
ctgtttttctccttc

SEQ ID NO: 1639808 - DNA, 15 bp, Homo sapiens
cctgtttttctcctt

SEQ ID NO: 1639809 - DNA, 15 bp, Homo sapiens
acctgtttttctcct

SEQ ID NO: 1639810 - DNA, 15 bp, Homo sapiens
tacctgtttttctcc

SEQ ID NO: 1639811 - DNA, 15 bp, Homo sapiens
atacctgtttttctc

SEQ ID NO: 1639812 - DNA, 15 bp, Homo sapiens
aatacctgtttttct

SEQ ID NO: 1639813 - DNA, 15 bp, Homo sapiens
taatacctgtttttc

SEQ ID NO: 1639814 - DNA, 15 bp, Homo sapiens
ttaatacctgttttt

SEQ ID NO: 1639815 - DNA, 15 bp, Homo sapiens
tttaatacctgtttt

SEQ ID NO: 1639816 - DNA, 15 bp, Homo sapiens
ctttaatacctgttt

SEQ ID NO: 1639817 - DNA, 15 bp, Homo sapiens
cctttaatacctgtt

SEQ ID NO: 1639818 - DNA, 15 bp, Homo sapiens
tcctttaatacctgt

SEQ ID NO: 1639819 - DNA, 15 bp, Homo sapiens
gtcctttaatacctg

SEQ ID NO: 1639820 - DNA, 15 bp, Homo sapiens
agtcctttaatacct

SEQ ID NO: 1639821 - DNA, 15 bp, Homo sapiens
tagtcctttaatacc

SEQ ID NO: 1639822 - DNA, 15 bp, Homo sapiens
ttagtcctttaatac

SEQ ID NO: 1639823 - DNA, 15 bp, Homo sapiens
cttagtcctttaata

SEQ ID NO: 1639824 - DNA, 15 bp, Homo sapiens
tcttagtcctttaat

SEQ ID NO: 1639825 - DNA, 15 bp, Homo sapiens
ttcttagtcctttaa

SEQ ID NO: 1639826 - DNA, 15 bp, Homo sapiens
attcttagtccttta

SEQ ID NO: 1639827 - DNA, 15 bp, Homo sapiens
aattcttagtccttt

SEQ ID NO: 1639828 - DNA, 15 bp, Homo sapiens
caattcttagtcctt

SEQ ID NO: 1639829 - DNA, 15 bp, Homo sapiens
ccaattcttagtcct

SEQ ID NO: 1639830 - DNA, 15 bp, Homo sapiens
cccaattcttagtcc

SEQ ID NO: 1639831 - DNA, 15 bp, Homo sapiens
tcccaattcttagtc

SEQ ID NO: 1639832 - DNA, 15 bp, Homo sapiens
ctcccaattcttagt

SEQ ID NO: 1639833 - DNA, 15 bp, Homo sapiens
cctcccaattcttag

SEQ ID NO: 1639834 - DNA, 15 bp, Homo sapiens
tcctcccaattctta

SEQ ID NO: 1639835 - DNA, 15 bp, Homo sapiens
gtcctcccaattctt

SEQ ID NO: 1639836 - DNA, 15 bp, Homo sapiens
agtcctcccaattct

SEQ ID NO: 1639837 - DNA, 15 bp, Homo sapiens
gagtcctcccaattc

SEQ ID NO: 1639838 - DNA, 15 bp, Homo sapiens
tgagtcctcccaatt

SEQ ID NO: 1639839 - DNA, 15 bp, Homo sapiens
ctgagtcctcccaat

SEQ ID NO: 1639840 - DNA, 15 bp, Homo sapiens
cctgagtcctcccaa

SEQ ID NO: 1639841 - DNA, 15 bp, Homo sapiens
tcctgagtcctccca

SEQ ID NO: 1639842 - DNA, 15 bp, Homo sapiens
gtcctgagtcctccc

SEQ ID NO: 1639843 - DNA, 15 bp, Homo sapiens
tgtcctgagtcctcc

SEQ ID NO: 1639844 - DNA, 15 bp, Homo sapiens
atgtcctgagtcctc

SEQ ID NO: 1639845 - DNA, 15 bp, Homo sapiens
gatgtcctgagtcct

SEQ ID NO: 1639846 - DNA, 15 bp, Homo sapiens
ggatgtcctgagtcc

SEQ ID NO: 1639847 - DNA, 15 bp, Homo sapiens
tggatgtcctgagtc

SEQ ID NO: 1639848 - DNA, 15 bp, Homo sapiens
ttggatgtcctgagt

SEQ ID NO: 1639849 - DNA, 15 bp, Homo sapiens
attggatgtcctgag

SEQ ID NO: 1639850 - DNA, 15 bp, Homo sapiens
gattggatgtcctga

SEQ ID NO: 1639851 - DNA, 15 bp, Homo sapiens
tgattggatgtcctg

SEQ ID NO: 1639852 - DNA, 15 bp, Homo sapiens
ctgattggatgtcct

SEQ ID NO: 1639853 - DNA, 15 bp, Homo sapiens
tctgattggatgtcc

SEQ ID NO: 1639854 - DNA, 15 bp, Homo sapiens
cactctgattggatg

SEQ ID NO: 1639855 - DNA, 15 bp, Homo sapiens
gcactctgattggat

SEQ ID NO: 1639856 - DNA, 15 bp, Homo sapiens
ggcactctgattgga

SEQ ID NO: 1639857 - DNA, 15 bp, Homo sapiens
aggcactctgattgg

SEQ ID NO: 1639858 - DNA, 15 bp, Homo sapiens
taggcactctgattg

SEQ ID NO: 1639859 - DNA, 15 bp, Homo sapiens
ttaggcactctgatt

SEQ ID NO: 1639860 - DNA, 15 bp, Homo sapiens
cttaggcactctgat

SEQ ID NO: 1639861 - DNA, 15 bp, Homo sapiens
ccttaggcactctga

SEQ ID NO: 1639862 - DNA, 15 bp, Homo sapiens
cccttaggcactctg

SEQ ID NO: 1639863 - DNA, 15 bp, Homo sapiens
ccccttaggcactct

SEQ ID NO: 1639864 - DNA, 15 bp, Homo sapiens
cccccttaggcactc

SEQ ID NO: 1639865 - DNA, 15 bp, Homo sapiens
acccccttaggcact

SEQ ID NO: 1639866 - DNA, 15 bp, Homo sapiens
aacccccttaggcac

SEQ ID NO: 1639867 - DNA, 15 bp, Homo sapiens
gaacccccttaggca

SEQ ID NO: 1639868 - DNA, 15 bp, Homo sapiens
tgaacccccttaggc

SEQ ID NO: 1639869 - DNA, 15 bp, Homo sapiens
ctgaacccccttagg

SEQ ID NO: 1639870 - DNA, 15 bp, Homo sapiens
gctgaacccccttag

SEQ ID NO: 1639871 - DNA, 15 bp, Homo sapiens
cgctgaaccccctta

SEQ ID NO: 1639872 - DNA, 15 bp, Homo sapiens
acgctgaaccccctt

SEQ ID NO: 1639873 - DNA, 15 bp, Homo sapiens
cacgctgaaccccct

SEQ ID NO: 1639874 - DNA, 15 bp, Homo sapiens
tcacgctgaaccccc

SEQ ID NO: 1639875 - DNA, 15 bp, Homo sapiens
atcacgctgaacccc

SEQ ID NO: 1639876 - DNA, 15 bp, Homo sapiens
aatcacgctgaaccc

SEQ ID NO: 1639877 - DNA, 15 bp, Homo sapiens
taatcacgctgaacc

SEQ ID NO: 1639878 - DNA, 15 bp, Homo sapiens
ataatcacgctgaac

SEQ ID NO: 1639879 - DNA, 15 bp, Homo sapiens
aataatcacgctgaa

SEQ ID NO: 1639880 - DNA, 15 bp, Homo sapiens
aaataatcacgctga

SEQ ID NO: 1639881 - DNA, 15 bp, Homo sapiens
aaaataatcacgctg

SEQ ID NO: 1639882 - DNA, 15 bp, Homo sapiens
gaaaataatcacgct

SEQ ID NO: 1639883 - DNA, 15 bp, Homo sapiens
agaaaataatcacgc

SEQ ID NO: 1639884 - DNA, 15 bp, Homo sapiens
aagaaaataatcacg

SEQ ID NO: 1639885 - DNA, 15 bp, Homo sapiens
caagaaaataatcac

SEQ ID NO: 1639886 - DNA, 15 bp, Homo sapiens
ccaagaaaataatca

SEQ ID NO: 1639887 - DNA, 15 bp, Homo sapiens
accaagaaaataatc

SEQ ID NO: 1639888 - DNA, 15 bp, Homo sapiens
aaccaagaaaataat

SEQ ID NO: 1639889 - DNA, 15 bp, Homo sapiens
caaccaagaaaataa

SEQ ID NO: 1639890 - DNA, 15 bp, Homo sapiens
tcaaccaagaaaata

SEQ ID NO: 1639891 - DNA, 15 bp, Homo sapiens
atcaaccaagaaaat

SEQ ID NO: 1639892 - DNA, 15 bp, Homo sapiens
catcaaccaagaaaa

SEQ ID NO: 1639893 - DNA, 15 bp, Homo sapiens
tcatcaaccaagaaa

SEQ ID NO: 1639894 - DNA, 15 bp, Homo sapiens
ctcatcaaccaagaa

SEQ ID NO: 1639895 - DNA, 15 bp, Homo sapiens
actcatcaaccaaga

SEQ ID NO: 1639896 - DNA, 15 bp, Homo sapiens
aactcatcaaccaag

SEQ ID NO: 1639897 - DNA, 15 bp, Homo sapiens
aaactcatcaaccaa

SEQ ID NO: 1639898 - DNA, 15 bp, Homo sapiens
aaaactcatcaacca

SEQ ID NO: 1639899 - DNA, 15 bp, Homo sapiens
aaaaactcatcaacc

SEQ ID NO: 1639900 - DNA, 15 bp, Homo sapiens
caaaaactcatcaac

SEQ ID NO: 1639901 - DNA, 15 bp, Homo sapiens
ccaaaaactcatcaa

SEQ ID NO: 1639902 - DNA, 15 bp, Homo sapiens
cccaaaaactcatca

SEQ ID NO: 1639903 - DNA, 15 bp, Homo sapiens
gcccaaaaactcatc

SEQ ID NO: 1639904 - DNA, 15 bp, Homo sapiens
agcccaaaaactcat

SEQ ID NO: 1639905 - DNA, 15 bp, Homo sapiens
gagcccaaaaactca

SEQ ID NO: 1639906 - DNA, 15 bp, Homo sapiens
agagcccaaaaactc

SEQ ID NO: 1639907 - DNA, 15 bp, Homo sapiens
tagagcccaaaaact

SEQ ID NO: 1639908 - DNA, 15 bp, Homo sapiens
atagagcccaaaaac

SEQ ID NO: 1639909 - DNA, 15 bp, Homo sapiens
gatagagcccaaaaa

SEQ ID NO: 1639910 - DNA, 15 bp, Homo sapiens
ggatagagcccaaaa

SEQ ID NO: 1639911 - DNA, 15 bp, Homo sapiens
aggatagagcccaaa

SEQ ID NO: 1639912 - DNA, 15 bp, Homo sapiens
aaggatagagcccaa

SEQ ID NO: 1639913 - DNA, 15 bp, Homo sapiens
caaggatagagccca

SEQ ID NO: 1639914 - DNA, 15 bp, Homo sapiens
tcaaggatagagccc

SEQ ID NO: 1639915 - DNA, 15 bp, Homo sapiens
ctcaaggatagagcc

SEQ ID NO: 1639916 - DNA, 15 bp, Homo sapiens
actcaaggatagagc

SEQ ID NO: 1639917 - DNA, 15 bp, Homo sapiens
aactcaaggatagag

SEQ ID NO: 1639918 - DNA, 15 bp, Homo sapiens
aaactcaaggataga

SEQ ID NO: 1639919 - DNA, 15 bp, Homo sapiens
aaaactcaaggatag

SEQ ID NO: 1639920 - DNA, 15 bp, Homo sapiens
aaaaactcaaggata

SEQ ID NO: 1639921 - DNA, 15 bp, Homo sapiens
aaaaaactcaaggat

SEQ ID NO: 1639922 - DNA, 15 bp, Homo sapiens
aaaaaaactcaagga

SEQ ID NO: 1639923 - DNA, 15 bp, Homo sapiens
taaaaaaactcaagg

SEQ ID NO: 1639924 - DNA, 15 bp, Homo sapiens
ataaaaaaactcaag

SEQ ID NO: 1639925 - DNA, 15 bp, Homo sapiens
cataaaaaaactcaa

SEQ ID NO: 1639926 - DNA, 15 bp, Homo sapiens
acataaaaaaactca

SEQ ID NO: 1639927 - DNA, 15 bp, Homo sapiens
aacataaaaaaactc

SEQ ID NO: 1639928 - DNA, 15 bp, Homo sapiens
caacataaaaaaact

SEQ ID NO: 1639929 - DNA, 15 bp, Homo sapiens
acaacataaaaaaac

SEQ ID NO: 1639930 - DNA, 15 bp, Homo sapiens
gacaacataaaaaaa

SEQ ID NO: 1639931 - DNA, 15 bp, Homo sapiens
tgacaacataaaaaa

SEQ ID NO: 1639932 - DNA, 15 bp, Homo sapiens
atgacaacataaaaa

SEQ ID NO: 1639933 - DNA, 15 bp, Homo sapiens
tatgacaacataaaa

SEQ ID NO: 1639934 - DNA, 15 bp, Homo sapiens
atatgacaacataaa

SEQ ID NO: 1639935 - DNA, 15 bp, Homo sapiens
tatatgacaacataa

SEQ ID NO: 1639936 - DNA, 15 bp, Homo sapiens
gtatatgacaacata

SEQ ID NO: 1639937 - DNA, 15 bp, Homo sapiens
ggtatatgacaacat

SEQ ID NO: 1639938 - DNA, 15 bp, Homo sapiens
tggtatatgacaaca

SEQ ID NO: 1639939 - DNA, 15 bp, Homo sapiens
ttggtatatgacaac

SEQ ID NO: 1639940 - DNA, 15 bp, Homo sapiens
cttggtatatgacaa

SEQ ID NO: 1639941 - DNA, 15 bp, Homo sapiens
gcttggtatatgaca

SEQ ID NO: 1639942 - DNA, 15 bp, Homo sapiens
ggcttggtatatgac

SEQ ID NO: 1639943 - DNA, 15 bp, Homo sapiens
tggcttggtatatga

SEQ ID NO: 1639944 - DNA, 15 bp, Homo sapiens
ctggcttggtatatg

SEQ ID NO: 1639945 - DNA, 15 bp, Homo sapiens
tctggcttggtatat

SEQ ID NO: 1639946 - DNA, 15 bp, Homo sapiens
atctggcttggtata

SEQ ID NO: 1639947 - DNA, 15 bp, Homo sapiens
aatctggcttggtat

SEQ ID NO: 1639948 - DNA, 15 bp, Homo sapiens
caatctggcttggta

SEQ ID NO: 1639949 - DNA, 15 bp, Homo sapiens
tcaatctggcttggt

SEQ ID NO: 1639950 - DNA, 15 bp, Homo sapiens
atcaatctggcttgg

SEQ ID NO: 1639951 - DNA, 15 bp, Homo sapiens
aatcaatctggcttg

SEQ ID NO: 1639952 - DNA, 15 bp, Homo sapiens
aaatcaatctggctt

SEQ ID NO: 1639953 - DNA, 15 bp, Homo sapiens
taaatcaatctggct

SEQ ID NO: 1639954 - DNA, 15 bp, Homo sapiens
ctaaatcaatctggc

SEQ ID NO: 1639955 - DNA, 15 bp, Homo sapiens
cctaaatcaatctgg

SEQ ID NO: 1639956 - DNA, 15 bp, Homo sapiens
acctaaatcaatctg

SEQ ID NO: 1639957 - DNA, 15 bp, Homo sapiens
tacctaaatcaatct

SEQ ID NO: 1639958 - DNA, 15 bp, Homo sapiens
ttacctaaatcaatc

SEQ ID NO: 1639959 - DNA, 15 bp, Homo sapiens
tttacctaaatcaat

SEQ ID NO: 1639960 - DNA, 15 bp, Homo sapiens
ttttacctaaatcaa

SEQ ID NO: 1639961 - DNA, 15 bp, Homo sapiens
tttttacctaaatca

SEQ ID NO: 1639962 - DNA, 15 bp, Homo sapiens
gtttttacctaaatc

SEQ ID NO: 1639963 - DNA, 15 bp, Homo sapiens
tgtttttacctaaat

SEQ ID NO: 1639964 - DNA, 15 bp, Homo sapiens
ttgtttttacctaaa

SEQ ID NO: 1639965 - DNA, 15 bp, Homo sapiens
gttgtttttacctaa

SEQ ID NO: 1639966 - DNA, 15 bp, Homo sapiens
tgttgtttttaccta

SEQ ID NO: 1639967 - DNA, 15 bp, Homo sapiens
gtgttgtttttacct

SEQ ID NO: 1639968 - DNA, 15 bp, Homo sapiens
agtgttgtttttacc

SEQ ID NO: 1639969 - DNA, 15 bp, Homo sapiens
aagtgttgtttttac

SEQ ID NO: 1639970 - DNA, 15 bp, Homo sapiens
aaagtgttgttttta

SEQ ID NO: 1639971 - DNA, 15 bp, Homo sapiens
aaaagtgttgttttt

SEQ ID NO: 1639972 - DNA, 15 bp, Homo sapiens
gaaaagtgttgtttt

SEQ ID NO: 1639973 - DNA, 15 bp, Homo sapiens
tgaaaagtgttgttt

SEQ ID NO: 1639974 - DNA, 15 bp, Homo sapiens
atgaaaagtgttgtt

SEQ ID NO: 1639975 - DNA, 15 bp, Homo sapiens
aatgaaaagtgttgt

SEQ ID NO: 1639976 - DNA, 15 bp, Homo sapiens
aaatgaaaagtgttg

SEQ ID NO: 1639977 - DNA, 15 bp, Homo sapiens
taaatgaaaagtgtt

SEQ ID NO: 1639978 - DNA, 15 bp, Homo sapiens
ttaaatgaaaagtgt

SEQ ID NO: 1639979 - DNA, 15 bp, Homo sapiens
tttaaatgaaaagtg

SEQ ID NO: 1639980 - DNA, 15 bp, Homo sapiens
ttttaaatgaaaagt

SEQ ID NO: 1639981 - DNA, 15 bp, Homo sapiens
tttttaaatgaaaag

SEQ ID NO: 1639982 - DNA, 15 bp, Homo sapiens
atttttaaatgaaaa

SEQ ID NO: 1639983 - DNA, 15 bp, Homo sapiens
tatttttaaatgaaa

SEQ ID NO: 1639984 - DNA, 15 bp, Homo sapiens
gtatttttaaatgaa

SEQ ID NO: 1639985 - DNA, 15 bp, Homo sapiens
tgtatttttaaatga

SEQ ID NO: 1639986 - DNA, 15 bp, Homo sapiens
gtgtatttttaaatg

SEQ ID NO: 1639987 - DNA, 15 bp, Homo sapiens
tgtgtatttttaaat

SEQ ID NO: 1639988 - DNA, 15 bp, Homo sapiens
gtgtgtatttttaaa

SEQ ID NO: 1639989 - DNA, 15 bp, Homo sapiens
tgtgtgtatttttaa

SEQ ID NO: 1639990 - DNA, 15 bp, Homo sapiens
ctgtgtgtattttta

SEQ ID NO: 1639991 - DNA, 15 bp, Homo sapiens
actgtgtgtattttt

SEQ ID NO: 1639992 - DNA, 15 bp, Homo sapiens
gactgtgtgtatttt

SEQ ID NO: 1639993 - DNA, 15 bp, Homo sapiens
ggactgtgtgtattt

SEQ ID NO: 1639994 - DNA, 15 bp, Homo sapiens
gggactgtgtgtatt

SEQ ID NO: 1639995 - DNA, 15 bp, Homo sapiens
ggggactgtgtgtat

SEQ ID NO: 1639996 - DNA, 15 bp, Homo sapiens
aggggactgtgtgta

SEQ ID NO: 1639997 - DNA, 15 bp, Homo sapiens
aaggggactgtgtgt

SEQ ID NO: 1639998 - DNA, 15 bp, Homo sapiens
aaaggggactgtgtg

SEQ ID NO: 1639999 - DNA, 15 bp, Homo sapiens
aaaaggggactgtgt

SEQ ID NO: 1640000 - DNA, 15 bp, Homo sapiens
aaaaaggggactgtg

SEQ ID NO: 1640001 - DNA, 15 bp, Homo sapiens
aaaaaaggggactgt

SEQ ID NO: 1640002 - DNA, 15 bp, Homo sapiens
aaaaaaaggggactg

SEQ ID NO: 1640003 - DNA, 15 bp, Homo sapiens
caaaaaaaggggact

SEQ ID NO: 1640004 - DNA, 15 bp, Homo sapiens
tcaaaaaaaggggac

SEQ ID NO: 1640005 - DNA, 15 bp, Homo sapiens
ctcaaaaaaagggga

SEQ ID NO: 1640006 - DNA, 15 bp, Homo sapiens
gctcaaaaaaagggg

SEQ ID NO: 1640007 - DNA, 15 bp, Homo sapiens
tgctcaaaaaaaggg

SEQ ID NO: 1640008 - DNA, 15 bp, Homo sapiens
ctgctcaaaaaaagg

SEQ ID NO: 1640009 - DNA, 15 bp, Homo sapiens
actgctcaaaaaaag

SEQ ID NO: 1640010 - DNA, 15 bp, Homo sapiens
tactgctcaaaaaaa

SEQ ID NO: 1640011 - DNA, 15 bp, Homo sapiens
ttactgctcaaaaaa

SEQ ID NO: 1640012 - DNA, 15 bp, Homo sapiens
cttactgctcaaaaa

SEQ ID NO: 1640013 - DNA, 15 bp, Homo sapiens
acttactgctcaaaa

SEQ ID NO: 1640014 - DNA, 15 bp, Homo sapiens
gacttactgctcaaa

SEQ ID NO: 1640015 - DNA, 15 bp, Homo sapiens
tgacttactgctcaa

SEQ ID NO: 1640016 - DNA, 15 bp, Homo sapiens
ttgacttactgctca

SEQ ID NO: 1640017 - DNA, 15 bp, Homo sapiens
cttgacttactgctc

SEQ ID NO: 1640018 - DNA, 15 bp, Homo sapiens
ccttgacttactgct

SEQ ID NO: 1640019 - DNA, 15 bp, Homo sapiens
gccttgacttactgc

SEQ ID NO: 1640020 - DNA, 15 bp, Homo sapiens
ggccttgacttactg

SEQ ID NO: 1640021 - DNA, 15 bp, Homo sapiens
aggccttgacttact

SEQ ID NO: 1640022 - DNA, 15 bp, Homo sapiens
gaggccttgacttac

SEQ ID NO: 1640023 - DNA, 15 bp, Homo sapiens
tgaggccttgactta

SEQ ID NO: 1640024 - DNA, 15 bp, Homo sapiens
ctgaggccttgactt

SEQ ID NO: 1640025 - DNA, 15 bp, Homo sapiens
actgaggccttgact

SEQ ID NO: 1640026 - DNA, 15 bp, Homo sapiens
cactgaggccttgac

SEQ ID NO: 1640027 - DNA, 15 bp, Homo sapiens
tcactgaggccttga

SEQ ID NO: 1640028 - DNA, 15 bp, Homo sapiens
atcactgaggccttg

SEQ ID NO: 1640029 - DNA, 15 bp, Homo sapiens
aatcactgaggcctt

SEQ ID NO: 1640030 - DNA, 15 bp, Homo sapiens
aaatcactgaggcct

SEQ ID NO: 1640031 - DNA, 15 bp, Homo sapiens
aaaatcactgaggcc

SEQ ID NO: 1640032 - DNA, 15 bp, Homo sapiens
caaaatcactgaggc

SEQ ID NO: 1640033 - DNA, 15 bp, Homo sapiens
ccaaaatcactgagg

SEQ ID NO: 1640034 - DNA, 15 bp, Homo sapiens
tccaaaatcactgag

SEQ ID NO: 1640035 - DNA, 15 bp, Homo sapiens
ctccaaaatcactga

SEQ ID NO: 1640036 - DNA, 15 bp, Homo sapiens
cctccaaaatcactg

SEQ ID NO: 1640037 - DNA, 15 bp, Homo sapiens
tcctccaaaatcact

SEQ ID NO: 1640038 - DNA, 15 bp, Homo sapiens
ttcctccaaaatcac

SEQ ID NO: 1640039 - DNA, 15 bp, Homo sapiens
tttcctccaaaatca

SEQ ID NO: 1640040 - DNA, 15 bp, Homo sapiens
ctttcctccaaaatc

SEQ ID NO: 1640041 - DNA, 15 bp, Homo sapiens
tctttcctccaaaat

SEQ ID NO: 1640042 - DNA, 15 bp, Homo sapiens
ctctttcctccaaaa

SEQ ID NO: 1640043 - DNA, 15 bp, Homo sapiens
tctctttcctccaaa

SEQ ID NO: 1640044 - DNA, 15 bp, Homo sapiens
ttctctttcctccaa

SEQ ID NO: 1640045 - DNA, 15 bp, Homo sapiens
tttctctttcctcca

SEQ ID NO: 1640046 - DNA, 15 bp, Homo sapiens
atttctctttcctcc

SEQ ID NO: 1640047 - DNA, 15 bp, Homo sapiens
catttctctttcctc

SEQ ID NO: 1640048 - DNA, 15 bp, Homo sapiens
gcatttctctttcct

SEQ ID NO: 1640049 - DNA, 15 bp, Homo sapiens
tgcatttctctttcc

SEQ ID NO: 1640050 - DNA, 15 bp, Homo sapiens
ttgcatttctctttc

SEQ ID NO: 1640051 - DNA, 15 bp, Homo sapiens
tttgcatttctcttt

SEQ ID NO: 1640052 - DNA, 15 bp, Homo sapiens
ctttgcatttctctt

SEQ ID NO: 1640053 - DNA, 15 bp, Homo sapiens
gctttgcatttctct

SEQ ID NO: 1640054 - DNA, 15 bp, Homo sapiens
ggctttgcatttctc

SEQ ID NO: 1640055 - DNA, 15 bp, Homo sapiens
tggctttgcatttct

SEQ ID NO: 1640056 - DNA, 15 bp, Homo sapiens
ctggctttgcatttc

SEQ ID NO: 1640057 - DNA, 15 bp, Homo sapiens
gctggctttgcattt

SEQ ID NO: 1640058 - DNA, 15 bp, Homo sapiens
tgctggctttgcatt

SEQ ID NO: 1640059 - DNA, 15 bp, Homo sapiens
ttgctggctttgcat

SEQ ID NO: 1640060 - DNA, 15 bp, Homo sapiens
attgctggctttgca

SEQ ID NO: 1640061 - DNA, 15 bp, Homo sapiens
gattgctggctttgc

SEQ ID NO: 1640062 - DNA, 15 bp, Homo sapiens
tgattgctggctttg

SEQ ID NO: 1640063 - DNA, 15 bp, Homo sapiens
atgattgctggcttt

SEQ ID NO: 1640064 - DNA, 15 bp, Homo sapiens
aatgattgctggctt

SEQ ID NO: 1640065 - DNA, 15 bp, Homo sapiens
aaatgattgctggct

SEQ ID NO: 1640066 - DNA, 15 bp, Homo sapiens
aaaatgattgctggc

SEQ ID NO: 1640067 - DNA, 15 bp, Homo sapiens
aaaaatgattgctgg

SEQ ID NO: 1640068 - DNA, 15 bp, Homo sapiens
aaaaaatgattgctg

SEQ ID NO: 1640069 - DNA, 15 bp, Homo sapiens
taaaaaatgattgct

SEQ ID NO: 1640070 - DNA, 15 bp, Homo sapiens
ttaaaaaatgattgc

SEQ ID NO: 1640071 - DNA, 15 bp, Homo sapiens
tttaaaaaatgattg

SEQ ID NO: 1640072 - DNA, 15 bp, Homo sapiens
ctttaaaaaatgatt

SEQ ID NO: 1640073 - DNA, 15 bp, Homo sapiens
tctttaaaaaatgat

SEQ ID NO: 1640074 - DNA, 15 bp, Homo sapiens
ttctttaaaaaatga

SEQ ID NO: 1640075 - DNA, 15 bp, Homo sapiens
cttctttaaaaaatg

SEQ ID NO: 1640076 - DNA, 15 bp, Homo sapiens
ccttctttaaaaaat

SEQ ID NO: 1640077 - DNA, 15 bp, Homo sapiens
tccttctttaaaaaa

SEQ ID NO: 1640078 - DNA, 15 bp, Homo sapiens
atccttctttaaaaa

SEQ ID NO: 1640079 - DNA, 15 bp, Homo sapiens
aatccttctttaaaa

SEQ ID NO: 1640080 - DNA, 15 bp, Homo sapiens
taatccttctttaaa

SEQ ID NO: 1640081 - DNA, 15 bp, Homo sapiens
ctaatccttctttaa

SEQ ID NO: 1640082 - DNA, 15 bp, Homo sapiens
tctaatccttcttta

SEQ ID NO: 1640083 - DNA, 15 bp, Homo sapiens
ttctaatccttcttt

SEQ ID NO: 1640084 - DNA, 15 bp, Homo sapiens
tttctaatccttctt

SEQ ID NO: 1640085 - DNA, 15 bp, Homo sapiens
gtttctaatccttct

SEQ ID NO: 1640086 - DNA, 15 bp, Homo sapiens
tgtttctaatccttc

SEQ ID NO: 1640087 - DNA, 15 bp, Homo sapiens
ctgtttctaatcctt

SEQ ID NO: 1640088 - DNA, 15 bp, Homo sapiens
gctgtttctaatcct

SEQ ID NO: 1640089 - DNA, 15 bp, Homo sapiens
agctgtttctaatcc

SEQ ID NO: 1640090 - DNA, 15 bp, Homo sapiens
tagctgtttctaatc

SEQ ID NO: 1640091 - DNA, 15 bp, Homo sapiens
ctagctgtttctaat

SEQ ID NO: 1640092 - DNA, 15 bp, Homo sapiens
cctagctgtttctaa

SEQ ID NO: 1640093 - DNA, 15 bp, Homo sapiens
tcctagctgtttcta

SEQ ID NO: 1640094 - DNA, 15 bp, Homo sapiens
ctcctagctgtttct

SEQ ID NO: 1640095 - DNA, 15 bp, Homo sapiens
tctcctagctgtttc

SEQ ID NO: 1640096 - DNA, 15 bp, Homo sapiens
ctctcctagctgttt

SEQ ID NO: 1640097 - DNA, 15 bp, Homo sapiens
tctctcctagctgtt

SEQ ID NO: 1640098 - DNA, 15 bp, Homo sapiens
ctctctcctagctgt

SEQ ID NO: 1640099 - DNA, 15 bp, Homo sapiens
actctctcctagctg

SEQ ID NO: 1640100 - DNA, 15 bp, Homo sapiens
cactctctcctagct

SEQ ID NO: 1640101 - DNA, 15 bp, Homo sapiens
tcactctctcctagc

SEQ ID NO: 1640102 - DNA, 15 bp, Homo sapiens
ttcactctctcctag

SEQ ID NO: 1640103 - DNA, 15 bp, Homo sapiens
attcactctctccta

SEQ ID NO: 1640104 - DNA, 15 bp, Homo sapiens
cattcactctctcct

SEQ ID NO: 1640105 - DNA, 15 bp, Homo sapiens
tcattcactctctcc

SEQ ID NO: 1640106 - DNA, 15 bp, Homo sapiens
ctcattcactctctc

SEQ ID NO: 1640107 - DNA, 15 bp, Homo sapiens
tctcattcactctct

SEQ ID NO: 1640108 - DNA, 15 bp, Homo sapiens
atctcattcactctc

SEQ ID NO: 1640109 - DNA, 15 bp, Homo sapiens
aatctcattcactct

SEQ ID NO: 1640110 - DNA, 15 bp, Homo sapiens
caatctcattcactc

SEQ ID NO: 1640111 - DNA, 15 bp, Homo sapiens
tcaatctcattcact

SEQ ID NO: 1640112 - DNA, 15 bp, Homo sapiens
atcaatctcattcac

SEQ ID NO: 1640113 - DNA, 15 bp, Homo sapiens
tatcaatctcattca

SEQ ID NO: 1640114 - DNA, 15 bp, Homo sapiens
ctatcaatctcattc

SEQ ID NO: 1640115 - DNA, 15 bp, Homo sapiens
actatcaatctcatt

SEQ ID NO: 1640116 - DNA, 15 bp, Homo sapiens
cactatcaatctcat

SEQ ID NO: 1640117 - DNA, 15 bp, Homo sapiens
acactatcaatctca

SEQ ID NO: 1640118 - DNA, 15 bp, Homo sapiens
cacactatcaatctc

SEQ ID NO: 1640119 - DNA, 15 bp, Homo sapiens
ccacactatcaatct

SEQ ID NO: 1640120 - DNA, 15 bp, Homo sapiens
accacactatcaatc

SEQ ID NO: 1640121 - DNA, 15 bp, Homo sapiens
caccacactatcaat

SEQ ID NO: 1640122 - DNA, 15 bp, Homo sapiens
ccaccacactatcaa

SEQ ID NO: 1640123 - DNA, 15 bp, Homo sapiens
tccaccacactatca

SEQ ID NO: 1640124 - DNA, 15 bp, Homo sapiens
ctccaccacactatc

SEQ ID NO: 1640125 - DNA, 15 bp, Homo sapiens
tctccaccacactat

SEQ ID NO: 1640126 - DNA, 15 bp, Homo sapiens
atctccaccacacta

SEQ ID NO: 1640127 - DNA, 15 bp, Homo sapiens
tatctccaccacact

SEQ ID NO: 1640128 - DNA, 15 bp, Homo sapiens
ctatctccaccacac

SEQ ID NO: 1640129 - DNA, 15 bp, Homo sapiens
gctatctccaccaca

SEQ ID NO: 1640130 - DNA, 15 bp, Homo sapiens
agctatctccaccac

SEQ ID NO: 1640131 - DNA, 15 bp, Homo sapiens
cagctatctccacca

SEQ ID NO: 1640132 - DNA, 15 bp, Homo sapiens
ccagctatctccacc

SEQ ID NO: 1640133 - DNA, 15 bp, Homo sapiens
cccagctatctccac

SEQ ID NO: 1640134 - DNA, 15 bp, Homo sapiens
ccccagctatctcca

SEQ ID NO: 1640135 - DNA, 15 bp, Homo sapiens
tccccagctatctcc

SEQ ID NO: 1640136 - DNA, 15 bp, Homo sapiens
ctccccagctatctc

SEQ ID NO: 1640137 - DNA, 15 bp, Homo sapiens
tctccccagctatct

SEQ ID NO: 1640138 - DNA, 15 bp, Homo sapiens
ctctccccagctatc

SEQ ID NO: 1640139 - DNA, 15 bp, Homo sapiens
cctctccccagctat

SEQ ID NO: 1640140 - DNA, 15 bp, Homo sapiens
acctctccccagcta

SEQ ID NO: 1640141 - DNA, 15 bp, Homo sapiens
tacctctccccagct

SEQ ID NO: 1640142 - DNA, 15 bp, Homo sapiens
ctacctctccccagc

SEQ ID NO: 1640143 - DNA, 15 bp, Homo sapiens
tctacctctccccag

SEQ ID NO: 1640144 - DNA, 15 bp, Homo sapiens
ctctacctctcccca

SEQ ID NO: 1640145 - DNA, 15 bp, Homo sapiens
cctctacctctcccc

SEQ ID NO: 1640146 - DNA, 15 bp, Homo sapiens
ccctctacctctccc

SEQ ID NO: 1640147 - DNA, 15 bp, Homo sapiens
accctctacctctcc

SEQ ID NO: 1640148 - DNA, 15 bp, Homo sapiens
gaccctctacctctc

SEQ ID NO: 1640149 - DNA, 15 bp, Homo sapiens
cgaccctctacctct

SEQ ID NO: 1640150 - DNA, 15 bp, Homo sapiens
gcgaccctctacctc

SEQ ID NO: 1640151 - DNA, 15 bp, Homo sapiens
tgcgaccctctacct

SEQ ID NO: 1640152 - DNA, 15 bp, Homo sapiens
atgcgaccctctacc

SEQ ID NO: 1640153 - DNA, 15 bp, Homo sapiens
tatgcgaccctctac

SEQ ID NO: 1640154 - DNA, 15 bp, Homo sapiens
ttatgcgaccctcta

SEQ ID NO: 1640155 - DNA, 15 bp, Homo sapiens
cttatgcgaccctct

SEQ ID NO: 1640156 - DNA, 15 bp, Homo sapiens
tcttatgcgaccctc

SEQ ID NO: 1640157 - DNA, 15 bp, Homo sapiens
ttcttatgcgaccct

SEQ ID NO: 1640158 - DNA, 15 bp, Homo sapiens
gttcttatgcgaccc

SEQ ID NO: 1640159 - DNA, 15 bp, Homo sapiens
tgttcttatgcgacc

SEQ ID NO: 1640160 - DNA, 15 bp, Homo sapiens
ctgttcttatgcgac

SEQ ID NO: 1640161 - DNA, 15 bp, Homo sapiens
cctgttcttatgcga

SEQ ID NO: 1640162 - DNA, 15 bp, Homo sapiens
tcctgttcttatgcg

SEQ ID NO: 1640163 - DNA, 15 bp, Homo sapiens
ttcctgttcttatgc

SEQ ID NO: 1640164 - DNA, 15 bp, Homo sapiens
attcctgttcttatg

SEQ ID NO: 1640165 - DNA, 15 bp, Homo sapiens
cattcctgttcttat

SEQ ID NO: 1640166 - DNA, 15 bp, Homo sapiens
tcattcctgttctta

SEQ ID NO: 1640167 - DNA, 15 bp, Homo sapiens
ctcattcctgttctt

SEQ ID NO: 1640168 - DNA, 15 bp, Homo sapiens
tctcattcctgttct

SEQ ID NO: 1640169 - DNA, 15 bp, Homo sapiens
ttctcattcctgttc

SEQ ID NO: 1640170 - DNA, 15 bp, Homo sapiens
attctcattcctgtt

SEQ ID NO: 1640171 - DNA, 15 bp, Homo sapiens
tattctcattcctgt

SEQ ID NO: 1640172 - DNA, 15 bp, Homo sapiens
ttattctcattcctg

SEQ ID NO: 1640173 - DNA, 15 bp, Homo sapiens
cttattctcattcct

SEQ ID NO: 1640174 - DNA, 15 bp, Homo sapiens
tcttattctcattcc

SEQ ID NO: 1640175 - DNA, 15 bp, Homo sapiens
ctcttattctcattc

SEQ ID NO: 1640176 - DNA, 15 bp, Homo sapiens
actcttattctcatt

SEQ ID NO: 1640177 - DNA, 15 bp, Homo sapiens
cactcttattctcat

SEQ ID NO: 1640178 - DNA, 15 bp, Homo sapiens
tcactcttattctca

SEQ ID NO: 1640179 - DNA, 15 bp, Homo sapiens
ttcactcttattctc

SEQ ID NO: 1640180 - DNA, 15 bp, Homo sapiens
attcactcttattct

SEQ ID NO: 1640181 - DNA, 15 bp, Homo sapiens
tattcactcttattc

SEQ ID NO: 1640182 - DNA, 15 bp, Homo sapiens
atattcactcttatt

SEQ ID NO: 1640183 - DNA, 15 bp, Homo sapiens
tatattcactcttat

SEQ ID NO: 1640184 - DNA, 15 bp, Homo sapiens
ttatattcactctta

SEQ ID NO: 1640185 - DNA, 15 bp, Homo sapiens
tttatattcactctt

SEQ ID NO: 1640186 - DNA, 15 bp, Homo sapiens
ctttatattcactct

SEQ ID NO: 1640187 - DNA, 15 bp, Homo sapiens
cctttatattcactc

SEQ ID NO: 1640188 - DNA, 15 bp, Homo sapiens
acctttatattcact

SEQ ID NO: 1640189 - DNA, 15 bp, Homo sapiens
tacctttatattcac

SEQ ID NO: 1640190 - DNA, 15 bp, Homo sapiens
ttacctttatattca

SEQ ID NO: 1640191 - DNA, 15 bp, Homo sapiens
tttacctttatattc

SEQ ID NO: 1640192 - DNA, 15 bp, Homo sapiens
ctttacctttatatt

SEQ ID NO: 1640193 - DNA, 15 bp, Homo sapiens
tctttacctttatat

SEQ ID NO: 1640194 - DNA, 15 bp, Homo sapiens
ttctttacctttata

SEQ ID NO: 1640195 - DNA, 15 bp, Homo sapiens
attctttacctttat

SEQ ID NO: 1640196 - DNA, 15 bp, Homo sapiens
tattctttaccttta

SEQ ID NO: 1640197 - DNA, 15 bp, Homo sapiens
ctattctttaccttt

SEQ ID NO: 1640198 - DNA, 15 bp, Homo sapiens
cctattctttacctt

SEQ ID NO: 1640199 - DNA, 15 bp, Homo sapiens
tcctattctttacct

SEQ ID NO: 1640200 - DNA, 15 bp, Homo sapiens
gtcctattctttacc

SEQ ID NO: 1640201 - DNA, 15 bp, Homo sapiens
agtcctattctttac

SEQ ID NO: 1640202 - DNA, 15 bp, Homo sapiens
aagtcctattcttta

SEQ ID NO: 1640203 - DNA, 15 bp, Homo sapiens
aaagtcctattcttt

SEQ ID NO: 1640204 - DNA, 15 bp, Homo sapiens
taaagtcctattctt

SEQ ID NO: 1640205 - DNA, 15 bp, Homo sapiens
ataaagtcctattct

SEQ ID NO: 1640206 - DNA, 15 bp, Homo sapiens
aataaagtcctattc

SEQ ID NO: 1640207 - DNA, 15 bp, Homo sapiens
taataaagtcctatt

SEQ ID NO: 1640208 - DNA, 15 bp, Homo sapiens
ctaataaagtcctat

SEQ ID NO: 1640209 - DNA, 15 bp, Homo sapiens
cctaataaagtccta

SEQ ID NO: 1640210 - DNA, 15 bp, Homo sapiens
ccctaataaagtcct

SEQ ID NO: 1640211 - DNA, 15 bp, Homo sapiens
accctaataaagtcc

SEQ ID NO: 1640212 - DNA, 15 bp, Homo sapiens
caccctaataaagtc

SEQ ID NO: 1640213 - DNA, 15 bp, Homo sapiens
tcaccctaataaagt

SEQ ID NO: 1640214 - DNA, 15 bp, Homo sapiens
ttcaccctaataaag

SEQ ID NO: 1640215 - DNA, 15 bp, Homo sapiens
tttcaccctaataaa

SEQ ID NO: 1640216 - DNA, 15 bp, Homo sapiens
ctttcaccctaataa

SEQ ID NO: 1640217 - DNA, 15 bp, Homo sapiens
actttcaccctaata

SEQ ID NO: 1640218 - DNA, 15 bp, Homo sapiens
tactttcaccctaat

SEQ ID NO: 1640219 - DNA, 15 bp, Homo sapiens
atactttcaccctaa

SEQ ID NO: 1640220 - DNA, 15 bp, Homo sapiens
aatactttcacccta

SEQ ID NO: 1640221 - DNA, 15 bp, Homo sapiens
caatactttcaccct

SEQ ID NO: 1640222 - DNA, 15 bp, Homo sapiens
ccaatactttcaccc

SEQ ID NO: 1640223 - DNA, 15 bp, Homo sapiens
tccaatactttcacc

SEQ ID NO: 1640224 - DNA, 15 bp, Homo sapiens
ctccaatactttcac

SEQ ID NO: 1640225 - DNA, 15 bp, Homo sapiens
actccaatactttca

SEQ ID NO: 1640226 - DNA, 15 bp, Homo sapiens
cactccaatactttc

SEQ ID NO: 1640227 - DNA, 15 bp, Homo sapiens
acactccaatacttt

SEQ ID NO: 1640228 - DNA, 15 bp, Homo sapiens
tacactccaatactt

SEQ ID NO: 1640229 - DNA, 15 bp, Homo sapiens
gtacactccaatact

SEQ ID NO: 1640230 - DNA, 15 bp, Homo sapiens
ggtacactccaatac

SEQ ID NO: 1640231 - DNA, 15 bp, Homo sapiens
aggtacactccaata

SEQ ID NO: 1640232 - DNA, 15 bp, Homo sapiens
aaggtacactccaat

SEQ ID NO: 1640233 - DNA, 15 bp, Homo sapiens
caaggtacactccaa

SEQ ID NO: 1640234 - DNA, 15 bp, Homo sapiens
acaaggtacactcca

SEQ ID NO: 1640235 - DNA, 15 bp, Homo sapiens
gacaaggtacactcc

SEQ ID NO: 1640236 - DNA, 15 bp, Homo sapiens
tgacaaggtacactc

SEQ ID NO: 1640237 - DNA, 15 bp, Homo sapiens
gtgacaaggtacact

SEQ ID NO: 1640238 - DNA, 15 bp, Homo sapiens
agtgacaaggtacac

SEQ ID NO: 1640239 - DNA, 15 bp, Homo sapiens
cagtgacaaggtaca

SEQ ID NO: 1640240 - DNA, 15 bp, Homo sapiens
tcagtgacaaggtac

SEQ ID NO: 1640241 - DNA, 15 bp, Homo sapiens
ttcagtgacaaggta

SEQ ID NO: 1640242 - DNA, 15 bp, Homo sapiens
cttcagtgacaaggt

SEQ ID NO: 1640243 - DNA, 15 bp, Homo sapiens
tcttcagtgacaagg

SEQ ID NO: 1640244 - DNA, 15 bp, Homo sapiens
atcttcagtgacaag

SEQ ID NO: 1640245 - DNA, 15 bp, Homo sapiens
gatcttcagtgacaa

SEQ ID NO: 1640246 - DNA, 15 bp, Homo sapiens
agatcttcagtgaca

SEQ ID NO: 1640247 - DNA, 15 bp, Homo sapiens
aagatcttcagtgac

SEQ ID NO: 1640248 - DNA, 15 bp, Homo sapiens
gaagatcttcagtga

SEQ ID NO: 1640249 - DNA, 15 bp, Homo sapiens
agaagatcttcagtg

SEQ ID NO: 1640250 - DNA, 15 bp, Homo sapiens
tagaagatcttcagt

SEQ ID NO: 1640251 - DNA, 15 bp, Homo sapiens
atagaagatcttcag

SEQ ID NO: 1640252 - DNA, 15 bp, Homo sapiens
gatagaagatcttca

SEQ ID NO: 1640253 - DNA, 15 bp, Homo sapiens
ggatagaagatcttc

SEQ ID NO: 1640254 - DNA, 15 bp, Homo sapiens
tggatagaagatctt

SEQ ID NO: 1640255 - DNA, 15 bp, Homo sapiens
gtggatagaagatct

SEQ ID NO: 1640256 - DNA, 15 bp, Homo sapiens
agtggatagaagatc

SEQ ID NO: 1640257 - DNA, 15 bp, Homo sapiens
aagtggatagaagat

SEQ ID NO: 1640258 - DNA, 15 bp, Homo sapiens
gaagtggatagaaga

SEQ ID NO: 1640259 - DNA, 15 bp, Homo sapiens
tgaagtggatagaag

SEQ ID NO: 1640260 - DNA, 15 bp, Homo sapiens
ttgaagtggatagaa

SEQ ID NO: 1640261 - DNA, 15 bp, Homo sapiens
cttgaagtggataga

SEQ ID NO: 1640262 - DNA, 15 bp, Homo sapiens
tcttgaagtggatag

SEQ ID NO: 1640263 - DNA, 15 bp, Homo sapiens
ctcttgaagtggata

SEQ ID NO: 1640264 - DNA, 15 bp, Homo sapiens
tctcttgaagtggat

SEQ ID NO: 1640265 - DNA, 15 bp, Homo sapiens
ctctcttgaagtgga

SEQ ID NO: 1640266 - DNA, 15 bp, Homo sapiens
tctctcttgaagtgg

SEQ ID NO: 1640267 - DNA, 15 bp, Homo sapiens
gtctctcttgaagtg

SEQ ID NO: 1640268 - DNA, 15 bp, Homo sapiens
agtctctcttgaagt

SEQ ID NO: 1640269 - DNA, 15 bp, Homo sapiens
aagtctctcttgaag

SEQ ID NO: 1640270 - DNA, 15 bp, Homo sapiens
taagtctctcttgaa

SEQ ID NO: 1640271 - DNA, 15 bp, Homo sapiens
ttaagtctctcttga

SEQ ID NO: 1640272 - DNA, 15 bp, Homo sapiens
cttaagtctctcttg

SEQ ID NO: 1640273 - DNA, 15 bp, Homo sapiens
ccttaagtctctctt

SEQ ID NO: 1640274 - DNA, 15 bp, Homo sapiens
tccttaagtctctct

SEQ ID NO: 1640275 - DNA, 15 bp, Homo sapiens
ttccttaagtctctc

SEQ ID NO: 1640276 - DNA, 15 bp, Homo sapiens
cttccttaagtctct

SEQ ID NO: 1640277 - DNA, 15 bp, Homo sapiens
ccttccttaagtctc

SEQ ID NO: 1640278 - DNA, 15 bp, Homo sapiens
accttccttaagtct

SEQ ID NO: 1640279 - DNA, 15 bp, Homo sapiens
caccttccttaagtc

SEQ ID NO: 1640280 - DNA, 15 bp, Homo sapiens
ccaccttccttaagt

SEQ ID NO: 1640281 - DNA, 15 bp, Homo sapiens
accaccttccttaag

SEQ ID NO: 1640282 - DNA, 15 bp, Homo sapiens
aaccaccttccttaa

SEQ ID NO: 1640283 - DNA, 15 bp, Homo sapiens
aaaccaccttcctta

SEQ ID NO: 1640284 - DNA, 15 bp, Homo sapiens
caaaccaccttcctt

SEQ ID NO: 1640285 - DNA, 15 bp, Homo sapiens
tcaaaccaccttcct

SEQ ID NO: 1640286 - DNA, 15 bp, Homo sapiens
ctcaaaccaccttcc

SEQ ID NO: 1640287 - DNA, 15 bp, Homo sapiens
cctcaaaccaccttc

SEQ ID NO: 1640288 - DNA, 15 bp, Homo sapiens
acctcaaaccacctt

SEQ ID NO: 1640289 - DNA, 15 bp, Homo sapiens
tacctcaaaccacct

SEQ ID NO: 1640290 - DNA, 15 bp, Homo sapiens
ttacctcaaaccacc

SEQ ID NO: 1640291 - DNA, 15 bp, Homo sapiens
tttacctcaaaccac

SEQ ID NO: 1640292 - DNA, 15 bp, Homo sapiens
ttttacctcaaacca

SEQ ID NO: 1640293 - DNA, 15 bp, Homo sapiens
gttttacctcaaacc

SEQ ID NO: 1640294 - DNA, 15 bp, Homo sapiens
ggttttacctcaaac

SEQ ID NO: 1640295 - DNA, 15 bp, Homo sapiens
tggttttacctcaaa

SEQ ID NO: 1640296 - DNA, 15 bp, Homo sapiens
ctggttttacctcaa

SEQ ID NO: 1640297 - DNA, 15 bp, Homo sapiens
cctggttttacctca

SEQ ID NO: 1640298 - DNA, 15 bp, Homo sapiens
tcctggttttacctc

SEQ ID NO: 1640299 - DNA, 15 bp, Homo sapiens
ctcctggttttacct

SEQ ID NO: 1640300 - DNA, 15 bp, Homo sapiens
tctcctggttttacc

SEQ ID NO: 1640301 - DNA, 15 bp, Homo sapiens
atctcctggttttac

SEQ ID NO: 1640302 - DNA, 15 bp, Homo sapiens
tatctcctggtttta

SEQ ID NO: 1640303 - DNA, 15 bp, Homo sapiens
atatctcctggtttt

SEQ ID NO: 1640304 - DNA, 15 bp, Homo sapiens
catatctcctggttt

SEQ ID NO: 1640305 - DNA, 15 bp, Homo sapiens
tcatatctcctggtt

SEQ ID NO: 1640306 - DNA, 15 bp, Homo sapiens
ctcatatctcctggt

SEQ ID NO: 1640307 - DNA, 15 bp, Homo sapiens
actcatatctcctgg

SEQ ID NO: 1640308 - DNA, 15 bp, Homo sapiens
aactcatatctcctg

SEQ ID NO: 1640309 - DNA, 15 bp, Homo sapiens
taactcatatctcct

SEQ ID NO: 1640310 - DNA, 15 bp, Homo sapiens
ataactcatatctcc

SEQ ID NO: 1640311 - DNA, 15 bp, Homo sapiens
cataactcatatctc

SEQ ID NO: 1640312 - DNA, 15 bp, Homo sapiens
tcataactcatatct

SEQ ID NO: 1640313 - DNA, 15 bp, Homo sapiens
atcataactcatatc

SEQ ID NO: 1640314 - DNA, 15 bp, Homo sapiens
catcataactcatat

SEQ ID NO: 1640315 - DNA, 15 bp, Homo sapiens
ccatcataactcata

SEQ ID NO: 1640316 - DNA, 15 bp, Homo sapiens
accatcataactcat

SEQ ID NO: 1640317 - DNA, 15 bp, Homo sapiens
aaccatcataactca

SEQ ID NO: 1640318 - DNA, 15 bp, Homo sapiens
aaaccatcataactc

SEQ ID NO: 1640319 - DNA, 15 bp, Homo sapiens
caaaccatcataact

SEQ ID NO: 1640320 - DNA, 15 bp, Homo sapiens
ccaaaccatcataac

SEQ ID NO: 1640321 - DNA, 15 bp, Homo sapiens
tccaaaccatcataa

SEQ ID NO: 1640322 - DNA, 15 bp, Homo sapiens
ctccaaaccatcata

SEQ ID NO: 1640323 - DNA, 15 bp, Homo sapiens
cctccaaaccatcat

SEQ ID NO: 1640324 - DNA, 15 bp, Homo sapiens
tcctccaaaccatca

SEQ ID NO: 1640325 - DNA, 15 bp, Homo sapiens
ttcctccaaaccatc

SEQ ID NO: 1640326 - DNA, 15 bp, Homo sapiens
tttcctccaaaccat

SEQ ID NO: 1640327 - DNA, 15 bp, Homo sapiens
ttttcctccaaacca

SEQ ID NO: 1640328 - DNA, 15 bp, Homo sapiens
cttttcctccaaacc

SEQ ID NO: 1640329 - DNA, 15 bp, Homo sapiens
acttttcctccaaac

SEQ ID NO: 1640330 - DNA, 15 bp, Homo sapiens
cacttttcctccaaa

SEQ ID NO: 1640331 - DNA, 15 bp, Homo sapiens
acacttttcctccaa

SEQ ID NO: 1640332 - DNA, 15 bp, Homo sapiens
tacacttttcctcca

SEQ ID NO: 1640333 - DNA, 15 bp, Homo sapiens
ttacacttttcctcc

SEQ ID NO: 1640334 - DNA, 15 bp, Homo sapiens
tttacacttttcctc

SEQ ID NO: 1640335 - DNA, 15 bp, Homo sapiens
gtttacacttttcct

SEQ ID NO: 1640336 - DNA, 15 bp, Homo sapiens
agtttacacttttcc

SEQ ID NO: 1640337 - DNA, 15 bp, Homo sapiens
cagtttacacttttc

SEQ ID NO: 1640338 - DNA, 15 bp, Homo sapiens
ccagtttacactttt

SEQ ID NO: 1640339 - DNA, 15 bp, Homo sapiens
gccagtttacacttt

SEQ ID NO: 1640340 - DNA, 15 bp, Homo sapiens
tgccagtttacactt

SEQ ID NO: 1640341 - DNA, 15 bp, Homo sapiens
ctgccagtttacact

SEQ ID NO: 1640342 - DNA, 15 bp, Homo sapiens
actgccagtttacac

SEQ ID NO: 1640343 - DNA, 15 bp, Homo sapiens
cactgccagtttaca

SEQ ID NO: 1640344 - DNA, 15 bp, Homo sapiens
acactgccagtttac

SEQ ID NO: 1640345 - DNA, 15 bp, Homo sapiens
tacactgccagttta

SEQ ID NO: 1640346 - DNA, 15 bp, Homo sapiens
ttacactgccagttt

SEQ ID NO: 1640347 - DNA, 15 bp, Homo sapiens
tttacactgccagtt

SEQ ID NO: 1640348 - DNA, 15 bp, Homo sapiens
gtttacactgccagt

SEQ ID NO: 1640349 - DNA, 15 bp, Homo sapiens
tgtttacactgccag

SEQ ID NO: 1640350 - DNA, 15 bp, Homo sapiens
ttgtttacactgcca

SEQ ID NO: 1640351 - DNA, 15 bp, Homo sapiens
cttgtttacactgcc

SEQ ID NO: 1640352 - DNA, 15 bp, Homo sapiens
ccttgtttacactgc

SEQ ID NO: 1640353 - DNA, 15 bp, Homo sapiens
cccttgtttacactg

SEQ ID NO: 1640354 - DNA, 15 bp, Homo sapiens
gcccttgtttacact

SEQ ID NO: 1640355 - DNA, 15 bp, Homo sapiens
tgcccttgtttacac

SEQ ID NO: 1640356 - DNA, 15 bp, Homo sapiens
ctgcccttgtttaca

SEQ ID NO: 1640357 - DNA, 15 bp, Homo sapiens
cctgcccttgtttac

SEQ ID NO: 1640358 - DNA, 15 bp, Homo sapiens
ccctgcccttgttta

SEQ ID NO: 1640359 - DNA, 15 bp, Homo sapiens
gccctgcccttgttt

SEQ ID NO: 1640360 - DNA, 15 bp, Homo sapiens
tgccctgcccttgtt

SEQ ID NO: 1640361 - DNA, 15 bp, Homo sapiens
atgccctgcccttgt

SEQ ID NO: 1640362 - DNA, 15 bp, Homo sapiens
aatgccctgcccttg

SEQ ID NO: 1640363 - DNA, 15 bp, Homo sapiens
aaatgccctgccctt

SEQ ID NO: 1640364 - DNA, 15 bp, Homo sapiens
taaatgccctgccct

SEQ ID NO: 1640365 - DNA, 15 bp, Homo sapiens
gtaaatgccctgccc

SEQ ID NO: 1640366 - DNA, 15 bp, Homo sapiens
cgtaaatgccctgcc

SEQ ID NO: 1640367 - DNA, 15 bp, Homo sapiens
tcgtaaatgccctgc

SEQ ID NO: 1640368 - DNA, 15 bp, Homo sapiens
ctcgtaaatgccctg

SEQ ID NO: 1640369 - DNA, 15 bp, Homo sapiens
actcgtaaatgccct

SEQ ID NO: 1640370 - DNA, 15 bp, Homo sapiens
tactcgtaaatgccc

SEQ ID NO: 1640371 - DNA, 15 bp, Homo sapiens
ctactcgtaaatgcc

SEQ ID NO: 1640372 - DNA, 15 bp, Homo sapiens
actactcgtaaatgc

SEQ ID NO: 1640373 - DNA, 15 bp, Homo sapiens
aactactcgtaaatg

SEQ ID NO: 1640374 - DNA, 15 bp, Homo sapiens
caactactcgtaaat

SEQ ID NO: 1640375 - DNA, 15 bp, Homo sapiens
tcaactactcgtaaa

SEQ ID NO: 1640376 - DNA, 15 bp, Homo sapiens
ctcaactactcgtaa

SEQ ID NO: 1640377 - DNA, 15 bp, Homo sapiens
tctcaactactcgta

SEQ ID NO: 1640378 - DNA, 15 bp, Homo sapiens
ttctcaactactcgt

SEQ ID NO: 1640379 - DNA, 15 bp, Homo sapiens
attctcaactactcg

SEQ ID NO: 1640380 - DNA, 15 bp, Homo sapiens
cattctcaactactc

SEQ ID NO: 1640381 - DNA, 15 bp, Homo sapiens
ccattctcaactact

SEQ ID NO: 1640382 - DNA, 15 bp, Homo sapiens
accattctcaactac

SEQ ID NO: 1640383 - DNA, 15 bp, Homo sapiens
caccattctcaacta

SEQ ID NO: 1640384 - DNA, 15 bp, Homo sapiens
tcaccattctcaact

SEQ ID NO: 1640385 - DNA, 15 bp, Homo sapiens
ttcaccattctcaac

SEQ ID NO: 1640386 - DNA, 15 bp, Homo sapiens
attcaccattctcaa

SEQ ID NO: 1640387 - DNA, 15 bp, Homo sapiens
tattcaccattctca

SEQ ID NO: 1640388 - DNA, 15 bp, Homo sapiens
ctattcaccattctc

SEQ ID NO: 1640389 - DNA, 15 bp, Homo sapiens
cctattcaccattct

SEQ ID NO: 1640390 - DNA, 15 bp, Homo sapiens
tcctattcaccattc

SEQ ID NO: 1640391 - DNA, 15 bp, Homo sapiens
ctcctattcaccatt

SEQ ID NO: 1640392 - DNA, 15 bp, Homo sapiens
actcctattcaccat

SEQ ID NO: 1640393 - DNA, 15 bp, Homo sapiens
tactcctattcacca

SEQ ID NO: 1640394 - DNA, 15 bp, Homo sapiens
atactcctattcacc

SEQ ID NO: 1640395 - DNA, 15 bp, Homo sapiens
catactcctattcac

SEQ ID NO: 1640396 - DNA, 15 bp, Homo sapiens
tcatactcctattca

SEQ ID NO: 1640397 - DNA, 15 bp, Homo sapiens
gtcatactcctattc

SEQ ID NO: 1640398 - DNA, 15 bp, Homo sapiens
agtcatactcctatt

SEQ ID NO: 1640399 - DNA, 15 bp, Homo sapiens
tagtcatactcctat

SEQ ID NO: 1640400 - DNA, 15 bp, Homo sapiens
ctagtcatactccta

SEQ ID NO: 1640401 - DNA, 15 bp, Homo sapiens
tctagtcatactcct

SEQ ID NO: 1640402 - DNA, 15 bp, Homo sapiens
gtctagtcatactcc

SEQ ID NO: 1640403 - DNA, 15 bp, Homo sapiens
tgtctagtcatactc

SEQ ID NO: 1640404 - DNA, 15 bp, Homo sapiens
ctgtctagtcatact

SEQ ID NO: 1640405 - DNA, 15 bp, Homo sapiens
tctgtctagtcatac

SEQ ID NO: 1640406 - DNA, 15 bp, Homo sapiens
ttctgtctagtcata

SEQ ID NO: 1640407 - DNA, 15 bp, Homo sapiens
cttctgtctagtcat

SEQ ID NO: 1640408 - DNA, 15 bp, Homo sapiens
tcttctgtctagtca

SEQ ID NO: 1640409 - DNA, 15 bp, Homo sapiens
atcttctgtctagtc

SEQ ID NO: 1640410 - DNA, 15 bp, Homo sapiens
tatcttctgtctagt

SEQ ID NO: 1640411 - DNA, 15 bp, Homo sapiens
ctatcttctgtctag

SEQ ID NO: 1640412 - DNA, 15 bp, Homo sapiens
actatcttctgtcta

SEQ ID NO: 1640413 - DNA, 15 bp, Homo sapiens
tactatcttctgtct

SEQ ID NO: 1640414 - DNA, 15 bp, Homo sapiens
ctactatcttctgtc

SEQ ID NO: 1640415 - DNA, 15 bp, Homo sapiens
cctactatcttctgt

SEQ ID NO: 1640416 - DNA, 15 bp, Homo sapiens
ccctactatcttctg

SEQ ID NO: 1640417 - DNA, 15 bp, Homo sapiens
tccctactatcttct

SEQ ID NO: 1640418 - DNA, 15 bp, Homo sapiens
atccctactatcttc

SEQ ID NO: 1640419 - DNA, 15 bp, Homo sapiens
catccctactatctt

SEQ ID NO: 1640420 - DNA, 15 bp, Homo sapiens
tcatccctactatct

SEQ ID NO: 1640421 - DNA, 15 bp, Homo sapiens
gtcatccctactatc

SEQ ID NO: 1640422 - DNA, 15 bp, Homo sapiens
tgtcatccctactat

SEQ ID NO: 1640423 - DNA, 15 bp, Homo sapiens
ttgtcatccctacta

SEQ ID NO: 1640424 - DNA, 15 bp, Homo sapiens
cttgtcatccctact

SEQ ID NO: 1640425 - DNA, 15 bp, Homo sapiens
acttgtcatccctac

SEQ ID NO: 1640426 - DNA, 15 bp, Homo sapiens
aacttgtcatcccta

SEQ ID NO: 1640427 - DNA, 15 bp, Homo sapiens
aaacttgtcatccct

SEQ ID NO: 1640428 - DNA, 15 bp, Homo sapiens
aaaacttgtcatccc

SEQ ID NO: 1640429 - DNA, 15 bp, Homo sapiens
caaaacttgtcatcc

SEQ ID NO: 1640430 - DNA, 15 bp, Homo sapiens
ccaaaacttgtcatc

SEQ ID NO: 1640431 - DNA, 15 bp, Homo sapiens
cccaaaacttgtcat

SEQ ID NO: 1640432 - DNA, 15 bp, Homo sapiens
ccccaaaacttgtca

SEQ ID NO: 1640433 - DNA, 15 bp, Homo sapiens
accccaaaacttgtc

SEQ ID NO: 1640434 - DNA, 15 bp, Homo sapiens
aaccccaaaacttgt

SEQ ID NO: 1640435 - DNA, 15 bp, Homo sapiens
caaccccaaaacttg

SEQ ID NO: 1640436 - DNA, 15 bp, Homo sapiens
gcaaccccaaaactt

SEQ ID NO: 1640437 - DNA, 15 bp, Homo sapiens
tgcaaccccaaaact

SEQ ID NO: 1640438 - DNA, 15 bp, Homo sapiens
ctgcaaccccaaaac

SEQ ID NO: 1640439 - DNA, 15 bp, Homo sapiens
actgcaaccccaaaa

SEQ ID NO: 1640440 - DNA, 15 bp, Homo sapiens
gactgcaaccccaaa

SEQ ID NO: 1640441 - DNA, 15 bp, Homo sapiens
ggactgcaaccccaa

SEQ ID NO: 1640442 - DNA, 15 bp, Homo sapiens
tggactgcaacccca

SEQ ID NO: 1640443 - DNA, 15 bp, Homo sapiens
ttggactgcaacccc

SEQ ID NO: 1640444 - DNA, 15 bp, Homo sapiens
cttggactgcaaccc

SEQ ID NO: 1640445 - DNA, 15 bp, Homo sapiens
acttggactgcaacc

SEQ ID NO: 1640446 - DNA, 15 bp, Homo sapiens
tacttggactgcaac

SEQ ID NO: 1640447 - DNA, 15 bp, Homo sapiens
ctacttggactgcaa

SEQ ID NO: 1640448 - DNA, 15 bp, Homo sapiens
actacttggactgca

SEQ ID NO: 1640449 - DNA, 15 bp, Homo sapiens
cactacttggactgc

SEQ ID NO: 1640450 - DNA, 15 bp, Homo sapiens
ccactacttggactg

SEQ ID NO: 1640451 - DNA, 15 bp, Homo sapiens
cccactacttggact

SEQ ID NO: 1640452 - DNA, 15 bp, Homo sapiens
ccccactacttggac

SEQ ID NO: 1640453 - DNA, 15 bp, Homo sapiens
cccccactacttgga

SEQ ID NO: 1640454 - DNA, 15 bp, Homo sapiens
acccccactacttgg

SEQ ID NO: 1640455 - DNA, 15 bp, Homo sapiens
cacccccactacttg

SEQ ID NO: 1640456 - DNA, 15 bp, Homo sapiens
tcacccccactactt

SEQ ID NO: 1640457 - DNA, 15 bp, Homo sapiens
gtcacccccactact

SEQ ID NO: 1640458 - DNA, 15 bp, Homo sapiens
agtcacccccactac

SEQ ID NO: 1640459 - DNA, 15 bp, Homo sapiens
cagtcacccccacta

SEQ ID NO: 1640460 - DNA, 15 bp, Homo sapiens
gcagtcacccccact

SEQ ID NO: 1640461 - DNA, 15 bp, Homo sapiens
tgcagtcacccccac

SEQ ID NO: 1640462 - DNA, 15 bp, Homo sapiens
atgcagtcaccccca

SEQ ID NO: 1640463 - DNA, 15 bp, Homo sapiens
tatgcagtcaccccc

SEQ ID NO: 1640464 - DNA, 15 bp, Homo sapiens
ttatgcagtcacccc

SEQ ID NO: 1640465 - DNA, 15 bp, Homo sapiens
tttatgcagtcaccc

SEQ ID NO: 1640466 - DNA, 15 bp, Homo sapiens
ctttatgcagtcacc

SEQ ID NO: 1640467 - DNA, 15 bp, Homo sapiens
gctttatgcagtcac

SEQ ID NO: 1640468 - DNA, 15 bp, Homo sapiens
ggctttatgcagtca

SEQ ID NO: 1640469 - DNA, 15 bp, Homo sapiens
aggctttatgcagtc

SEQ ID NO: 1640470 - DNA, 15 bp, Homo sapiens
aaggctttatgcagt

SEQ ID NO: 1640471 - DNA, 15 bp, Homo sapiens
caaggctttatgcag

SEQ ID NO: 1640472 - DNA, 15 bp, Homo sapiens
acaaggctttatgca

SEQ ID NO: 1640473 - DNA, 15 bp, Homo sapiens
aacaaggctttatgc

SEQ ID NO: 1640474 - DNA, 15 bp, Homo sapiens
caacaaggctttatg

SEQ ID NO: 1640475 - DNA, 15 bp, Homo sapiens
gcaacaaggctttat

SEQ ID NO: 1640476 - DNA, 15 bp, Homo sapiens
tgcaacaaggcttta

SEQ ID NO: 1640477 - DNA, 15 bp, Homo sapiens
ttgcaacaaggcttt

SEQ ID NO: 1640478 - DNA, 15 bp, Homo sapiens
attgcaacaaggctt

SEQ ID NO: 1640479 - DNA, 15 bp, Homo sapiens
tattgcaacaaggct

SEQ ID NO: 1640480 - DNA, 15 bp, Homo sapiens
ttattgcaacaaggc

SEQ ID NO: 1640481 - DNA, 15 bp, Homo sapiens
cttattgcaacaagg

SEQ ID NO: 1640482 - DNA, 15 bp, Homo sapiens
acttattgcaacaag

SEQ ID NO: 1640483 - DNA, 15 bp, Homo sapiens
tacttattgcaacaa

SEQ ID NO: 1640484 - DNA, 15 bp, Homo sapiens
ctacttattgcaaca

SEQ ID NO: 1640485 - DNA, 15 bp, Homo sapiens
cctacttattgcaac

SEQ ID NO: 1640486 - DNA, 15 bp, Homo sapiens
ccctacttattgcaa

SEQ ID NO: 1640487 - DNA, 15 bp, Homo sapiens
accctacttattgca

SEQ ID NO: 1640488 - DNA, 15 bp, Homo sapiens
taccctacttattgc

SEQ ID NO: 1640489 - DNA, 15 bp, Homo sapiens
ttaccctacttattg

SEQ ID NO: 1640490 - DNA, 15 bp, Homo sapiens
attaccctacttatt

SEQ ID NO: 1640491 - DNA, 15 bp, Homo sapiens
tattaccctacttat

SEQ ID NO: 1640492 - DNA, 15 bp, Homo sapiens
ttattaccctactta

SEQ ID NO: 1640493 - DNA, 15 bp, Homo sapiens
tttattaccctactt

SEQ ID NO: 1640494 - DNA, 15 bp, Homo sapiens
gtttattaccctact

SEQ ID NO: 1640495 - DNA, 15 bp, Homo sapiens
agtttattaccctac

SEQ ID NO: 1640496 - DNA, 15 bp, Homo sapiens
aagtttattacccta

SEQ ID NO: 1640497 - DNA, 15 bp, Homo sapiens
taagtttattaccct

SEQ ID NO: 1640498 - DNA, 15 bp, Homo sapiens
ttaagtttattaccc

SEQ ID NO: 1640499 - DNA, 15 bp, Homo sapiens
attaagtttattacc

SEQ ID NO: 1640500 - DNA, 15 bp, Homo sapiens
tattaagtttattac

SEQ ID NO: 1640501 - DNA, 15 bp, Homo sapiens
ctattaagtttatta

SEQ ID NO: 1640502 - DNA, 15 bp, Homo sapiens
tctattaagtttatt

SEQ ID NO: 1640503 - DNA, 15 bp, Homo sapiens
ttctattaagtttat

SEQ ID NO: 1640504 - DNA, 15 bp, Homo sapiens
attctattaagttta

SEQ ID NO: 1640505 - DNA, 15 bp, Homo sapiens
cattctattaagttt

SEQ ID NO: 1640506 - DNA, 15 bp, Homo sapiens
tcattctattaagtt

SEQ ID NO: 1640507 - DNA, 15 bp, Homo sapiens
ttcattctattaagt

SEQ ID NO: 1640508 - DNA, 15 bp, Homo sapiens
tttcattctattaag

SEQ ID NO: 1640509 - DNA, 15 bp, Homo sapiens
ctttcattctattaa

SEQ ID NO: 1640510 - DNA, 15 bp, Homo sapiens
cctttcattctatta

SEQ ID NO: 1640511 - DNA, 15 bp, Homo sapiens
tcctttcattctatt

SEQ ID NO: 1640512 - DNA, 15 bp, Homo sapiens
atcctttcattctat

SEQ ID NO: 1640513 - DNA, 15 bp, Homo sapiens
catcctttcattcta

SEQ ID NO: 1640514 - DNA, 15 bp, Homo sapiens
acatcctttcattct

SEQ ID NO: 1640515 - DNA, 15 bp, Homo sapiens
aacatcctttcattc

SEQ ID NO: 1640516 - DNA, 15 bp, Homo sapiens
aaacatcctttcatt

SEQ ID NO: 1640517 - DNA, 15 bp, Homo sapiens
aaaacatcctttcat

SEQ ID NO: 1640518 - DNA, 15 bp, Homo sapiens
taaaacatcctttca

SEQ ID NO: 1640519 - DNA, 15 bp, Homo sapiens
ctaaaacatcctttc

SEQ ID NO: 1640520 - DNA, 15 bp, Homo sapiens
cctaaaacatccttt

SEQ ID NO: 1640521 - DNA, 15 bp, Homo sapiens
gcctaaaacatcctt

SEQ ID NO: 1640522 - DNA, 15 bp, Homo sapiens
agcctaaaacatcct

SEQ ID NO: 1640523 - DNA, 15 bp, Homo sapiens
gagcctaaaacatcc

SEQ ID NO: 1640524 - DNA, 15 bp, Homo sapiens
tgagcctaaaacatc

SEQ ID NO: 1640525 - DNA, 15 bp, Homo sapiens
atgagcctaaaacat

SEQ ID NO: 1640526 - DNA, 15 bp, Homo sapiens
tatgagcctaaaaca

SEQ ID NO: 1640527 - DNA, 15 bp, Homo sapiens
ttatgagcctaaaac

SEQ ID NO: 1640528 - DNA, 15 bp, Homo sapiens
cttatgagcctaaaa

SEQ ID NO: 1640529 - DNA, 15 bp, Homo sapiens
ccttatgagcctaaa

SEQ ID NO: 1640530 - DNA, 15 bp, Homo sapiens
cccttatgagcctaa

SEQ ID NO: 1640531 - DNA, 15 bp, Homo sapiens
acccttatgagccta

SEQ ID NO: 1640532 - DNA, 15 bp, Homo sapiens
aacccttatgagcct

SEQ ID NO: 1640533 - DNA, 15 bp, Homo sapiens
taacccttatgagcc

SEQ ID NO: 1640534 - DNA, 15 bp, Homo sapiens
gtaacccttatgagc

SEQ ID NO: 1640535 - DNA, 15 bp, Homo sapiens
agtaacccttatgag

SEQ ID NO: 1640536 - DNA, 15 bp, Homo sapiens
tagtaacccttatga

SEQ ID NO: 1640537 - DNA, 15 bp, Homo sapiens
gtagtaacccttatg

SEQ ID NO: 1640538 - DNA, 15 bp, Homo sapiens
agtagtaacccttat

SEQ ID NO: 1640539 - DNA, 15 bp, Homo sapiens
cagtagtaaccctta

SEQ ID NO: 1640540 - DNA, 15 bp, Homo sapiens
acagtagtaaccctt

SEQ ID NO: 1640541 - DNA, 15 bp, Homo sapiens
aacagtagtaaccct

SEQ ID NO: 1640542 - DNA, 15 bp, Homo sapiens
gaacagtagtaaccc

SEQ ID NO: 1640543 - DNA, 15 bp, Homo sapiens
agaacagtagtaacc

SEQ ID NO: 1640544 - DNA, 15 bp, Homo sapiens
aagaacagtagtaac

SEQ ID NO: 1640545 - DNA, 15 bp, Homo sapiens
gaagaacagtagtaa

SEQ ID NO: 1640546 - DNA, 15 bp, Homo sapiens
tgaagaacagtagta

SEQ ID NO: 1640547 - DNA, 15 bp, Homo sapiens
ctgaagaacagtagt

SEQ ID NO: 1640548 - DNA, 15 bp, Homo sapiens
tctgaagaacagtag

SEQ ID NO: 1640549 - DNA, 15 bp, Homo sapiens
ttctgaagaacagta

SEQ ID NO: 1640550 - DNA, 15 bp, Homo sapiens
tttctgaagaacagt

SEQ ID NO: 1640551 - DNA, 15 bp, Homo sapiens
atttctgaagaacag

SEQ ID NO: 1640552 - DNA, 15 bp, Homo sapiens
catttctgaagaaca

SEQ ID NO: 1640553 - DNA, 15 bp, Homo sapiens
acatttctgaagaac

SEQ ID NO: 1640554 - DNA, 15 bp, Homo sapiens
cacatttctgaagaa

SEQ ID NO: 1640555 - DNA, 15 bp, Homo sapiens
tcacatttctgaaga

SEQ ID NO: 1640556 - DNA, 15 bp, Homo sapiens
ctcacatttctgaag

SEQ ID NO: 1640557 - DNA, 15 bp, Homo sapiens
actcacatttctgaa

SEQ ID NO: 1640558 - DNA, 15 bp, Homo sapiens
cactcacatttctga

SEQ ID NO: 1640559 - DNA, 15 bp, Homo sapiens
tcactcacatttctg

SEQ ID NO: 1640560 - DNA, 15 bp, Homo sapiens
ctcactcacatttct

SEQ ID NO: 1640561 - DNA, 15 bp, Homo sapiens
actcactcacatttc

SEQ ID NO: 1640562 - DNA, 15 bp, Homo sapiens
aactcactcacattt

SEQ ID NO: 1640563 - DNA, 15 bp, Homo sapiens
aaactcactcacatt

SEQ ID NO: 1640564 - DNA, 15 bp, Homo sapiens
taaactcactcacat

SEQ ID NO: 1640565 - DNA, 15 bp, Homo sapiens
ttaaactcactcaca

SEQ ID NO: 1640566 - DNA, 15 bp, Homo sapiens
cttaaactcactcac

SEQ ID NO: 1640567 - DNA, 15 bp, Homo sapiens
ccttaaactcactca

SEQ ID NO: 1640568 - DNA, 15 bp, Homo sapiens
cccttaaactcactc

SEQ ID NO: 1640569 - DNA, 15 bp, Homo sapiens
tcccttaaactcact

SEQ ID NO: 1640570 - DNA, 15 bp, Homo sapiens
ttcccttaaactcac

SEQ ID NO: 1640571 - DNA, 15 bp, Homo sapiens
cttcccttaaactca

SEQ ID NO: 1640572 - DNA, 15 bp, Homo sapiens
acttcccttaaactc

SEQ ID NO: 1640573 - DNA, 15 bp, Homo sapiens
tacttcccttaaact

SEQ ID NO: 1640574 - DNA, 15 bp, Homo sapiens
ctacttcccttaaac

SEQ ID NO: 1640575 - DNA, 15 bp, Homo sapiens
cctacttcccttaaa

SEQ ID NO: 1640576 - DNA, 15 bp, Homo sapiens
ccctacttcccttaa

SEQ ID NO: 1640577 - DNA, 15 bp, Homo sapiens
accctacttccctta

SEQ ID NO: 1640578 - DNA, 15 bp, Homo sapiens
aaccctacttccctt

SEQ ID NO: 1640579 - DNA, 15 bp, Homo sapiens
caaccctacttccct

SEQ ID NO: 1640580 - DNA, 15 bp, Homo sapiens
tcaaccctacttccc

SEQ ID NO: 1640581 - DNA, 15 bp, Homo sapiens
ctcaaccctacttcc

SEQ ID NO: 1640582 - DNA, 15 bp, Homo sapiens
actcaaccctacttc

SEQ ID NO: 1640583 - DNA, 15 bp, Homo sapiens
tactcaaccctactt

SEQ ID NO: 1640584 - DNA, 15 bp, Homo sapiens
gtactcaaccctact

SEQ ID NO: 1640585 - DNA, 15 bp, Homo sapiens
agtactcaaccctac

SEQ ID NO: 1640586 - DNA, 15 bp, Homo sapiens
aagtactcaacccta

SEQ ID NO: 1640587 - DNA, 15 bp, Homo sapiens
caagtactcaaccct

SEQ ID NO: 1640588 - DNA, 15 bp, Homo sapiens
gcaagtactcaaccc

SEQ ID NO: 1640589 - DNA, 15 bp, Homo sapiens
tgcaagtactcaacc

SEQ ID NO: 1640590 - DNA, 15 bp, Homo sapiens
ttgcaagtactcaac

SEQ ID NO: 1640591 - DNA, 15 bp, Homo sapiens
gttgcaagtactcaa

SEQ ID NO: 1640592 - DNA, 15 bp, Homo sapiens
agttgcaagtactca

SEQ ID NO: 1640593 - DNA, 15 bp, Homo sapiens
aagttgcaagtactc

SEQ ID NO: 1640594 - DNA, 15 bp, Homo sapiens
gaagttgcaagtact

SEQ ID NO: 1640595 - DNA, 15 bp, Homo sapiens
agaagttgcaagtac

SEQ ID NO: 1640596 - DNA, 15 bp, Homo sapiens
tagaagttgcaagta

SEQ ID NO: 1640597 - DNA, 15 bp, Homo sapiens
ctagaagttgcaagt

SEQ ID NO: 1640598 - DNA, 15 bp, Homo sapiens
cctagaagttgcaag

SEQ ID NO: 1640599 - DNA, 15 bp, Homo sapiens
tcctagaagttgcaa

SEQ ID NO: 1640600 - DNA, 15 bp, Homo sapiens
ctcctagaagttgca

SEQ ID NO: 1640601 - DNA, 15 bp, Homo sapiens
cctcctagaagttgc

SEQ ID NO: 1640602 - DNA, 15 bp, Homo sapiens
tcctcctagaagttg

SEQ ID NO: 1640603 - DNA, 15 bp, Homo sapiens
ttcctcctagaagtt

SEQ ID NO: 1640604 - DNA, 15 bp, Homo sapiens
cttcctcctagaagt

SEQ ID NO: 1640605 - DNA, 15 bp, Homo sapiens
tcttcctcctagaag

SEQ ID NO: 1640606 - DNA, 15 bp, Homo sapiens
ctcttcctcctagaa

SEQ ID NO: 1640607 - DNA, 15 bp, Homo sapiens
cctcttcctcctaga

SEQ ID NO: 1640608 - DNA, 15 bp, Homo sapiens
tcctcttcctcctag

SEQ ID NO: 1640609 - DNA, 15 bp, Homo sapiens
ctcctcttcctccta

SEQ ID NO: 1640610 - DNA, 15 bp, Homo sapiens
tctcctcttcctcct

SEQ ID NO: 1640611 - DNA, 15 bp, Homo sapiens
ctctcctcttcctcc

SEQ ID NO: 1640612 - DNA, 15 bp, Homo sapiens
tctctcctcttcctc

SEQ ID NO: 1640613 - DNA, 15 bp, Homo sapiens
atctctcctcttcct

SEQ ID NO: 1640614 - DNA, 15 bp, Homo sapiens
aatctctcctcttcc

SEQ ID NO: 1640615 - DNA, 15 bp, Homo sapiens
taatctctcctcttc

SEQ ID NO: 1640616 - DNA, 15 bp, Homo sapiens
ctaatctctcctctt

SEQ ID NO: 1640617 - DNA, 15 bp, Homo sapiens
cctaatctctcctct

SEQ ID NO: 1640618 - DNA, 15 bp, Homo sapiens
gcctaatctctcctc

SEQ ID NO: 1640619 - DNA, 15 bp, Homo sapiens
agcctaatctctcct

SEQ ID NO: 1640620 - DNA, 15 bp, Homo sapiens
cagcctaatctctcc

SEQ ID NO: 1640621 - DNA, 15 bp, Homo sapiens
ccagcctaatctctc

SEQ ID NO: 1640622 - DNA, 15 bp, Homo sapiens
gccagcctaatctct

SEQ ID NO: 1640623 - DNA, 15 bp, Homo sapiens
agccagcctaatctc

SEQ ID NO: 1640624 - DNA, 15 bp, Homo sapiens
cagccagcctaatct

SEQ ID NO: 1640625 - DNA, 15 bp, Homo sapiens
acagccagcctaatc

SEQ ID NO: 1640626 - DNA, 15 bp, Homo sapiens
gacagccagcctaat

SEQ ID NO: 1640627 - DNA, 15 bp, Homo sapiens
ggacagccagcctaa

SEQ ID NO: 1640628 - DNA, 15 bp, Homo sapiens
tggacagccagccta

SEQ ID NO: 1640629 - DNA, 15 bp, Homo sapiens
ttggacagccagcct

SEQ ID NO: 1640630 - DNA, 15 bp, Homo sapiens
attggacagccagcc

SEQ ID NO: 1640631 - DNA, 15 bp, Homo sapiens
cattggacagccagc

SEQ ID NO: 1640632 - DNA, 15 bp, Homo sapiens
ccattggacagccag

SEQ ID NO: 1640633 - DNA, 15 bp, Homo sapiens
tccattggacagcca

SEQ ID NO: 1640634 - DNA, 15 bp, Homo sapiens
gtccattggacagcc

SEQ ID NO: 1640635 - DNA, 15 bp, Homo sapiens
tgtccattggacagc

SEQ ID NO: 1640636 - DNA, 15 bp, Homo sapiens
gtgtccattggacag

SEQ ID NO: 1640637 - DNA, 15 bp, Homo sapiens
tgtgtccattggaca

SEQ ID NO: 1640638 - DNA, 15 bp, Homo sapiens
ctgtgtccattggac

SEQ ID NO: 1640639 - DNA, 15 bp, Homo sapiens
gctgtgtccattgga

SEQ ID NO: 1640640 - DNA, 15 bp, Homo sapiens
agctgtgtccattgg

SEQ ID NO: 1640641 - DNA, 15 bp, Homo sapiens
aagctgtgtccattg

SEQ ID NO: 1640642 - DNA, 15 bp, Homo sapiens
aaagctgtgtccatt

SEQ ID NO: 1640643 - DNA, 15 bp, Homo sapiens
taaagctgtgtccat

SEQ ID NO: 1640644 - DNA, 15 bp, Homo sapiens
ataaagctgtgtcca

SEQ ID NO: 1640645 - DNA, 15 bp, Homo sapiens
aataaagctgtgtcc

SEQ ID NO: 1640646 - DNA, 15 bp, Homo sapiens
gaataaagctgtgtc

SEQ ID NO: 1640647 - DNA, 15 bp, Homo sapiens
agaataaagctgtgt

SEQ ID NO: 1640648 - DNA, 15 bp, Homo sapiens
cagaataaagctgtg

SEQ ID NO: 1640649 - DNA, 15 bp, Homo sapiens
ccagaataaagctgt

SEQ ID NO: 1640650 - DNA, 15 bp, Homo sapiens
tccagaataaagctg

SEQ ID NO: 1640651 - DNA, 15 bp, Homo sapiens
ttccagaataaagct

SEQ ID NO: 1640652 - DNA, 15 bp, Homo sapiens
attccagaataaagc

SEQ ID NO: 1640653 - DNA, 15 bp, Homo sapiens
cattccagaataaag

SEQ ID NO: 1640654 - DNA, 15 bp, Homo sapiens
ccattccagaataaa

SEQ ID NO: 1640655 - DNA, 15 bp, Homo sapiens
accattccagaataa

SEQ ID NO: 1640656 - DNA, 15 bp, Homo sapiens
caccattccagaata

SEQ ID NO: 1640657 - DNA, 15 bp, Homo sapiens
tcaccattccagaat

SEQ ID NO: 1640658 - DNA, 15 bp, Homo sapiens
ctcaccattccagaa

SEQ ID NO: 1640659 - DNA, 15 bp, Homo sapiens
gctcaccattccaga

SEQ ID NO: 1640660 - DNA, 15 bp, Homo sapiens
ggctcaccattccag

SEQ ID NO: 1640661 - DNA, 15 bp, Homo sapiens
aggctcaccattcca

SEQ ID NO: 1640662 - DNA, 15 bp, Homo sapiens
taggctcaccattcc

SEQ ID NO: 1640663 - DNA, 15 bp, Homo sapiens
ttaggctcaccattc

SEQ ID NO: 1640664 - DNA, 15 bp, Homo sapiens
attaggctcaccatt

SEQ ID NO: 1640665 - DNA, 15 bp, Homo sapiens
tattaggctcaccat

SEQ ID NO: 1640666 - DNA, 15 bp, Homo sapiens
ctattaggctcacca

SEQ ID NO: 1640667 - DNA, 15 bp, Homo sapiens
cctattaggctcacc

SEQ ID NO: 1640668 - DNA, 15 bp, Homo sapiens
ccctattaggctcac

SEQ ID NO: 1640669 - DNA, 15 bp, Homo sapiens
tccctattaggctca

SEQ ID NO: 1640670 - DNA, 15 bp, Homo sapiens
ctccctattaggctc

SEQ ID NO: 1640671 - DNA, 15 bp, Homo sapiens
cctccctattaggct

SEQ ID NO: 1640672 - DNA, 15 bp, Homo sapiens
ccctccctattaggc

SEQ ID NO: 1640673 - DNA, 15 bp, Homo sapiens
accctccctattagg

SEQ ID NO: 1640674 - DNA, 15 bp, Homo sapiens
gaccctccctattag

SEQ ID NO: 1640675 - DNA, 15 bp, Homo sapiens
agaccctccctatta

SEQ ID NO: 1640676 - DNA, 15 bp, Homo sapiens
aagaccctccctatt

SEQ ID NO: 1640677 - DNA, 15 bp, Homo sapiens
taagaccctccctat

SEQ ID NO: 1640678 - DNA, 15 bp, Homo sapiens
gtaagaccctcccta

SEQ ID NO: 1640679 - DNA, 15 bp, Homo sapiens
tgtaagaccctccct

SEQ ID NO: 1640680 - DNA, 15 bp, Homo sapiens
ctgtaagaccctccc

SEQ ID NO: 1640681 - DNA, 15 bp, Homo sapiens
cctgtaagaccctcc

SEQ ID NO: 1640682 - DNA, 15 bp, Homo sapiens
gcctgtaagaccctc

SEQ ID NO: 1640683 - DNA, 15 bp, Homo sapiens
cgcctgtaagaccct

SEQ ID NO: 1640684 - DNA, 15 bp, Homo sapiens
ccgcctgtaagaccc

SEQ ID NO: 1640685 - DNA, 15 bp, Homo sapiens
tccgcctgtaagacc

SEQ ID NO: 1640686 - DNA, 15 bp, Homo sapiens
atccgcctgtaagac

SEQ ID NO: 1640687 - DNA, 15 bp, Homo sapiens
catccgcctgtaaga

SEQ ID NO: 1640688 - DNA, 15 bp, Homo sapiens
ccatccgcctgtaag

SEQ ID NO: 1640689 - DNA, 15 bp, Homo sapiens
gccatccgcctgtaa

SEQ ID NO: 1640690 - DNA, 15 bp, Homo sapiens
tgccatccgcctgta

SEQ ID NO: 1640691 - DNA, 15 bp, Homo sapiens
ctgccatccgcctgt

SEQ ID NO: 1640692 - DNA, 15 bp, Homo sapiens
actgccatccgcctg

SEQ ID NO: 1640693 - DNA, 15 bp, Homo sapiens
aactgccatccgcct

SEQ ID NO: 1640694 - DNA, 15 bp, Homo sapiens
caactgccatccgcc

SEQ ID NO: 1640695 - DNA, 15 bp, Homo sapiens
ccaactgccatccgc

SEQ ID NO: 1640696 - DNA, 15 bp, Homo sapiens
cccaactgccatccg

SEQ ID NO: 1640697 - DNA, 15 bp, Homo sapiens
ccccaactgccatcc

SEQ ID NO: 1640698 - DNA, 15 bp, Homo sapiens
accccaactgccatc

SEQ ID NO: 1640699 - DNA, 15 bp, Homo sapiens
taccccaactgccat

SEQ ID NO: 1640700 - DNA, 15 bp, Homo sapiens
ataccccaactgcca

SEQ ID NO: 1640701 - DNA, 15 bp, Homo sapiens
aataccccaactgcc

SEQ ID NO: 1640702 - DNA, 15 bp, Homo sapiens
taataccccaactgc

SEQ ID NO: 1640703 - DNA, 15 bp, Homo sapiens
ataataccccaactg

SEQ ID NO: 1640704 - DNA, 15 bp, Homo sapiens
tataataccccaact

SEQ ID NO: 1640705 - DNA, 15 bp, Homo sapiens
ctataataccccaac

SEQ ID NO: 1640706 - DNA, 15 bp, Homo sapiens
tctataataccccaa

SEQ ID NO: 1640707 - DNA, 15 bp, Homo sapiens
atctataatacccca

SEQ ID NO: 1640708 - DNA, 15 bp, Homo sapiens
catctataatacccc

SEQ ID NO: 1640709 - DNA, 15 bp, Homo sapiens
tcatctataataccc

SEQ ID NO: 1640710 - DNA, 15 bp, Homo sapiens
gtcatctataatacc

SEQ ID NO: 1640711 - DNA, 15 bp, Homo sapiens
agtcatctataatac

SEQ ID NO: 1640712 - DNA, 15 bp, Homo sapiens
tagtcatctataata

SEQ ID NO: 1640713 - DNA, 15 bp, Homo sapiens
ttagtcatctataat

SEQ ID NO: 1640714 - DNA, 15 bp, Homo sapiens
cttagtcatctataa

SEQ ID NO: 1640715 - DNA, 15 bp, Homo sapiens
acttagtcatctata

SEQ ID NO: 1640716 - DNA, 15 bp, Homo sapiens
tacttagtcatctat

SEQ ID NO: 1640717 - DNA, 15 bp, Homo sapiens
ctacttagtcatcta

SEQ ID NO: 1640718 - DNA, 15 bp, Homo sapiens
cctacttagtcatct

SEQ ID NO: 1640719 - DNA, 15 bp, Homo sapiens
ccctacttagtcatc

SEQ ID NO: 1640720 - DNA, 15 bp, Homo sapiens
accctacttagtcat

SEQ ID NO: 1640721 - DNA, 15 bp, Homo sapiens
gaccctacttagtca

SEQ ID NO: 1640722 - DNA, 15 bp, Homo sapiens
ggaccctacttagtc

SEQ ID NO: 1640723 - DNA, 15 bp, Homo sapiens
cggaccctacttagt

SEQ ID NO: 1640724 - DNA, 15 bp, Homo sapiens
ccggaccctacttag

SEQ ID NO: 1640725 - DNA, 15 bp, Homo sapiens
accggaccctactta

SEQ ID NO: 1640726 - DNA, 15 bp, Homo sapiens
gaccggaccctactt

SEQ ID NO: 1640727 - DNA, 15 bp, Homo sapiens
agaccggaccctact

SEQ ID NO: 1640728 - DNA, 15 bp, Homo sapiens
tagaccggaccctac

SEQ ID NO: 1640729 - DNA, 15 bp, Homo sapiens
atagaccggacccta

SEQ ID NO: 1640730 - DNA, 15 bp, Homo sapiens
gatagaccggaccct

SEQ ID NO: 1640731 - DNA, 15 bp, Homo sapiens
tgatagaccggaccc

SEQ ID NO: 1640732 - DNA, 15 bp, Homo sapiens
ttgatagaccggacc

SEQ ID NO: 1640733 - DNA, 15 bp, Homo sapiens
cttgatagaccggac

SEQ ID NO: 1640734 - DNA, 15 bp, Homo sapiens
ccttgatagaccgga

SEQ ID NO: 1640735 - DNA, 15 bp, Homo sapiens
accttgatagaccgg

SEQ ID NO: 1640736 - DNA, 15 bp, Homo sapiens
aaccttgatagaccg

SEQ ID NO: 1640737 - DNA, 15 bp, Homo sapiens
taaccttgatagacc

SEQ ID NO: 1640738 - DNA, 15 bp, Homo sapiens
ataaccttgatagac

SEQ ID NO: 1640739 - DNA, 15 bp, Homo sapiens
tataaccttgataga

SEQ ID NO: 1640740 - DNA, 15 bp, Homo sapiens
ctataaccttgatag

SEQ ID NO: 1640741 - DNA, 15 bp, Homo sapiens
tctataaccttgata

SEQ ID NO: 1640742 - DNA, 15 bp, Homo sapiens
ctctataaccttgat

SEQ ID NO: 1640743 - DNA, 15 bp, Homo sapiens
actctataaccttga

SEQ ID NO: 1640744 - DNA, 15 bp, Homo sapiens
aactctataaccttg

SEQ ID NO: 1640745 - DNA, 15 bp, Homo sapiens
aaactctataacctt

SEQ ID NO: 1640746 - DNA, 15 bp, Homo sapiens
caaactctataacct

SEQ ID NO: 1640747 - DNA, 15 bp, Homo sapiens
tcaaactctataacc

SEQ ID NO: 1640748 - DNA, 15 bp, Homo sapiens
ctcaaactctataac

SEQ ID NO: 1640749 - DNA, 15 bp, Homo sapiens
cctcaaactctataa

SEQ ID NO: 1640750 - DNA, 15 bp, Homo sapiens
ccctcaaactctata

SEQ ID NO: 1640751 - DNA, 15 bp, Homo sapiens
cccctcaaactctat

SEQ ID NO: 1640752 - DNA, 15 bp, Homo sapiens
acccctcaaactcta

SEQ ID NO: 1640753 - DNA, 15 bp, Homo sapiens
gacccctcaaactct

SEQ ID NO: 1640754 - DNA, 15 bp, Homo sapiens
tgacccctcaaactc

SEQ ID NO: 1640755 - DNA, 15 bp, Homo sapiens
ctgacccctcaaact

SEQ ID NO: 1640756 - DNA, 15 bp, Homo sapiens
tctgacccctcaaac

SEQ ID NO: 1640757 - DNA, 15 bp, Homo sapiens
atctgacccctcaaa

SEQ ID NO: 1640758 - DNA, 15 bp, Homo sapiens
aatctgacccctcaa

SEQ ID NO: 1640759 - DNA, 15 bp, Homo sapiens
gaatctgacccctca

SEQ ID NO: 1640760 - DNA, 15 bp, Homo sapiens
agaatctgacccctc

SEQ ID NO: 1640761 - DNA, 15 bp, Homo sapiens
aagaatctgacccct

SEQ ID NO: 1640762 - DNA, 15 bp, Homo sapiens
taagaatctgacccc

SEQ ID NO: 1640763 - DNA, 15 bp, Homo sapiens
ttaagaatctgaccc

SEQ ID NO: 1640764 - DNA, 15 bp, Homo sapiens
gttaagaatctgacc

SEQ ID NO: 1640765 - DNA, 15 bp, Homo sapiens
tgttaagaatctgac

SEQ ID NO: 1640766 - DNA, 15 bp, Homo sapiens
ttgttaagaatctga

SEQ ID NO: 1640767 - DNA, 15 bp, Homo sapiens
cttgttaagaatctg

SEQ ID NO: 1640768 - DNA, 15 bp, Homo sapiens
tcttgttaagaatct

SEQ ID NO: 1640769 - DNA, 15 bp, Homo sapiens
ttcttgttaagaatc

SEQ ID NO: 1640770 - DNA, 15 bp, Homo sapiens
gttcttgttaagaat

SEQ ID NO: 1640771 - DNA, 15 bp, Homo sapiens
agttcttgttaagaa

SEQ ID NO: 1640772 - DNA, 15 bp, Homo sapiens
cagttcttgttaaga

SEQ ID NO: 1640773 - DNA, 15 bp, Homo sapiens
tcagttcttgttaag

SEQ ID NO: 1640774 - DNA, 15 bp, Homo sapiens
atcagttcttgttaa

SEQ ID NO: 1640775 - DNA, 15 bp, Homo sapiens
gatcagttcttgtta

SEQ ID NO: 1640776 - DNA, 15 bp, Homo sapiens
cgatcagttcttgtt

SEQ ID NO: 1640777 - DNA, 15 bp, Homo sapiens
acgatcagttcttgt

SEQ ID NO: 1640778 - DNA, 15 bp, Homo sapiens
gacgatcagttcttg

SEQ ID NO: 1640779 - DNA, 15 bp, Homo sapiens
ggacgatcagttctt

SEQ ID NO: 1640780 - DNA, 15 bp, Homo sapiens
tggacgatcagttct

SEQ ID NO: 1640781 - DNA, 15 bp, Homo sapiens
atggacgatcagttc

SEQ ID NO: 1640782 - DNA, 15 bp, Homo sapiens
gatggacgatcagtt

SEQ ID NO: 1640783 - DNA, 15 bp, Homo sapiens
agatggacgatcagt

SEQ ID NO: 1640784 - DNA, 15 bp, Homo sapiens
tagatggacgatcag

SEQ ID NO: 1640785 - DNA, 15 bp, Homo sapiens
ctagatggacgatca

SEQ ID NO: 1640786 - DNA, 15 bp, Homo sapiens
cctagatggacgatc

SEQ ID NO: 1640787 - DNA, 15 bp, Homo sapiens
ccctagatggacgat

SEQ ID NO: 1640788 - DNA, 15 bp, Homo sapiens
accctagatggacga

SEQ ID NO: 1640789 - DNA, 15 bp, Homo sapiens
caccctagatggacg

SEQ ID NO: 1640790 - DNA, 15 bp, Homo sapiens
acaccctagatggac

SEQ ID NO: 1640791 - DNA, 15 bp, Homo sapiens
gacaccctagatgga

SEQ ID NO: 1640792 - DNA, 15 bp, Homo sapiens
agacaccctagatgg

SEQ ID NO: 1640793 - DNA, 15 bp, Homo sapiens
aagacaccctagatg

SEQ ID NO: 1640794 - DNA, 15 bp, Homo sapiens
aaagacaccctagat

SEQ ID NO: 1640795 - DNA, 15 bp, Homo sapiens
taaagacaccctaga

SEQ ID NO: 1640796 - DNA, 15 bp, Homo sapiens
ataaagacaccctag

SEQ ID NO: 1640797 - DNA, 15 bp, Homo sapiens
tataaagacacccta

SEQ ID NO: 1640798 - DNA, 15 bp, Homo sapiens
atataaagacaccct

SEQ ID NO: 1640799 - DNA, 15 bp, Homo sapiens
catataaagacaccc

SEQ ID NO: 1640800 - DNA, 15 bp, Homo sapiens
ccatataaagacacc

SEQ ID NO: 1640801 - DNA, 15 bp, Homo sapiens
gccatataaagacac

SEQ ID NO: 1640802 - DNA, 15 bp, Homo sapiens
agccatataaagaca

SEQ ID NO: 1640803 - DNA, 15 bp, Homo sapiens
cagccatataaagac

SEQ ID NO: 1640804 - DNA, 15 bp, Homo sapiens
ccagccatataaaga

SEQ ID NO: 1640805 - DNA, 15 bp, Homo sapiens
cccagccatataaag

SEQ ID NO: 1640806 - DNA, 15 bp, Homo sapiens
tcccagccatataaa

SEQ ID NO: 1640807 - DNA, 15 bp, Homo sapiens
ttcccagccatataa

SEQ ID NO: 1640808 - DNA, 15 bp, Homo sapiens
attcccagccatata

SEQ ID NO: 1640809 - DNA, 15 bp, Homo sapiens
tattcccagccatat

SEQ ID NO: 1640810 - DNA, 15 bp, Homo sapiens
atattcccagccata

SEQ ID NO: 1640811 - DNA, 15 bp, Homo sapiens
catattcccagccat

SEQ ID NO: 1640812 - DNA, 15 bp, Homo sapiens
ccatattcccagcca

SEQ ID NO: 1640813 - DNA, 15 bp, Homo sapiens
tccatattcccagcc

SEQ ID NO: 1640814 - DNA, 15 bp, Homo sapiens
ctccatattcccagc

SEQ ID NO: 1640815 - DNA, 15 bp, Homo sapiens
actccatattcccag

SEQ ID NO: 1640816 - DNA, 15 bp, Homo sapiens
tactccatattccca

SEQ ID NO: 1640817 - DNA, 15 bp, Homo sapiens
ctactccatattccc

SEQ ID NO: 1640818 - DNA, 15 bp, Homo sapiens
cctactccatattcc

SEQ ID NO: 1640819 - DNA, 15 bp, Homo sapiens
gcctactccatattc

SEQ ID NO: 1640820 - DNA, 15 bp, Homo sapiens
tgcctactccatatt

SEQ ID NO: 1640821 - DNA, 15 bp, Homo sapiens
ttgcctactccatat

SEQ ID NO: 1640822 - DNA, 15 bp, Homo sapiens
cttgcctactccata

SEQ ID NO: 1640823 - DNA, 15 bp, Homo sapiens
tcttgcctactccat

SEQ ID NO: 1640824 - DNA, 15 bp, Homo sapiens
ttcttgcctactcca

SEQ ID NO: 1640825 - DNA, 15 bp, Homo sapiens
tttcttgcctactcc

SEQ ID NO: 1640826 - DNA, 15 bp, Homo sapiens
ttttcttgcctactc

SEQ ID NO: 1640827 - DNA, 15 bp, Homo sapiens
cttttcttgcctact

SEQ ID NO: 1640828 - DNA, 15 bp, Homo sapiens
tcttttcttgcctac

SEQ ID NO: 1640829 - DNA, 15 bp, Homo sapiens
atcttttcttgccta

SEQ ID NO: 1640830 - DNA, 15 bp, Homo sapiens
aatcttttcttgcct

SEQ ID NO: 1640831 - DNA, 15 bp, Homo sapiens
taatcttttcttgcc

SEQ ID NO: 1640832 - DNA, 15 bp, Homo sapiens
ctaatcttttcttgc

SEQ ID NO: 1640833 - DNA, 15 bp, Homo sapiens
gctaatcttttcttg

SEQ ID NO: 1640834 - DNA, 15 bp, Homo sapiens
tgctaatcttttctt

SEQ ID NO: 1640835 - DNA, 15 bp, Homo sapiens
ctgctaatcttttct

SEQ ID NO: 1640836 - DNA, 15 bp, Homo sapiens
gctgctaatcttttc

SEQ ID NO: 1640837 - DNA, 15 bp, Homo sapiens
agctgctaatctttt

SEQ ID NO: 1640838 - DNA, 15 bp, Homo sapiens
aagctgctaatcttt

SEQ ID NO: 1640839 - DNA, 15 bp, Homo sapiens
caagctgctaatctt

SEQ ID NO: 1640840 - DNA, 15 bp, Homo sapiens
ccaagctgctaatct

SEQ ID NO: 1640841 - DNA, 15 bp, Homo sapiens
gccaagctgctaatc

SEQ ID NO: 1640842 - DNA, 15 bp, Homo sapiens
tgccaagctgctaat

SEQ ID NO: 1640843 - DNA, 15 bp, Homo sapiens
ttgccaagctgctaa

SEQ ID NO: 1640844 - DNA, 15 bp, Homo sapiens
tttgccaagctgcta

SEQ ID NO: 1640845 - DNA, 15 bp, Homo sapiens
atttgccaagctgct

SEQ ID NO: 1640846 - DNA, 15 bp, Homo sapiens
aatttgccaagctgc

SEQ ID NO: 1640847 - DNA, 15 bp, Homo sapiens
aaatttgccaagctg

SEQ ID NO: 1640848 - DNA, 15 bp, Homo sapiens
gaaatttgccaagct

SEQ ID NO: 1640849 - DNA, 15 bp, Homo sapiens
ggaaatttgccaagc

SEQ ID NO: 1640850 - DNA, 15 bp, Homo sapiens
aggaaatttgccaag

SEQ ID NO: 1640851 - DNA, 15 bp, Homo sapiens
caggaaatttgccaa

SEQ ID NO: 1640852 - DNA, 15 bp, Homo sapiens
acaggaaatttgcca

SEQ ID NO: 1640853 - DNA, 15 bp, Homo sapiens
gacaggaaatttgcc

SEQ ID NO: 1640854 - DNA, 15 bp, Homo sapiens
agacaggaaatttgc

SEQ ID NO: 1640855 - DNA, 15 bp, Homo sapiens
aagacaggaaatttg

SEQ ID NO: 1640856 - DNA, 15 bp, Homo sapiens
caagacaggaaattt

SEQ ID NO: 1640857 - DNA, 15 bp, Homo sapiens
gcaagacaggaaatt

SEQ ID NO: 1640858 - DNA, 15 bp, Homo sapiens
ggcaagacaggaaat

SEQ ID NO: 1640859 - DNA, 15 bp, Homo sapiens
aggcaagacaggaaa

SEQ ID NO: 1640860 - DNA, 15 bp, Homo sapiens
caggcaagacaggaa

SEQ ID NO: 1640861 - DNA, 15 bp, Homo sapiens
gcaggcaagacagga

SEQ ID NO: 1640862 - DNA, 15 bp, Homo sapiens
agcaggcaagacagg

SEQ ID NO: 1640863 - DNA, 15 bp, Homo sapiens
cagcaggcaagacag

SEQ ID NO: 1640864 - DNA, 15 bp, Homo sapiens
ccagcaggcaagaca

SEQ ID NO: 1640865 - DNA, 15 bp, Homo sapiens
tccagcaggcaagac

SEQ ID NO: 1640866 - DNA, 15 bp, Homo sapiens
ctccagcaggcaaga

SEQ ID NO: 1640867 - DNA, 15 bp, Homo sapiens
cctccagcaggcaag

SEQ ID NO: 1640868 - DNA, 15 bp, Homo sapiens
tcctccagcaggcaa

SEQ ID NO: 1640869 - DNA, 15 bp, Homo sapiens
gtcctccagcaggca

SEQ ID NO: 1640870 - DNA, 15 bp, Homo sapiens
ggtcctccagcaggc

SEQ ID NO: 1640871 - DNA, 15 bp, Homo sapiens
tggtcctccagcagg

SEQ ID NO: 1640872 - DNA, 15 bp, Homo sapiens
ctggtcctccagcag

SEQ ID NO: 1640873 - DNA, 15 bp, Homo sapiens
gctggtcctccagca

SEQ ID NO: 1640874 - DNA, 15 bp, Homo sapiens
tgctggtcctccagc

SEQ ID NO: 1640875 - DNA, 15 bp, Homo sapiens
ctgctggtcctccag

SEQ ID NO: 1640876 - DNA, 15 bp, Homo sapiens
tctgctggtcctcca

SEQ ID NO: 1640877 - DNA, 15 bp, Homo sapiens
atctgctggtcctcc

SEQ ID NO: 1640878 - DNA, 15 bp, Homo sapiens
tatctgctggtcctc

SEQ ID NO: 1640879 - DNA, 15 bp, Homo sapiens
ctatctgctggtcct

SEQ ID NO: 1640880 - DNA, 15 bp, Homo sapiens
tctatctgctggtcc

SEQ ID NO: 1640881 - DNA, 15 bp, Homo sapiens
atctatctgctggtc

SEQ ID NO: 1640882 - DNA, 15 bp, Homo sapiens
aatctatctgctggt

SEQ ID NO: 1640883 - DNA, 15 bp, Homo sapiens
gaatctatctgctgg

SEQ ID NO: 1640884 - DNA, 15 bp, Homo sapiens
ggaatctatctgctg

SEQ ID NO: 1640885 - DNA, 15 bp, Homo sapiens
aggaatctatctgct

SEQ ID NO: 1640886 - DNA, 15 bp, Homo sapiens
taggaatctatctgc

SEQ ID NO: 1640887 - DNA, 15 bp, Homo sapiens
ctaggaatctatctg

SEQ ID NO: 1640888 - DNA, 15 bp, Homo sapiens
tctaggaatctatct

SEQ ID NO: 1640889 - DNA, 15 bp, Homo sapiens
ctctaggaatctatc

SEQ ID NO: 1640890 - DNA, 15 bp, Homo sapiens
cctctaggaatctat

SEQ ID NO: 1640891 - DNA, 15 bp, Homo sapiens
tcctctaggaatcta

SEQ ID NO: 1640892 - DNA, 15 bp, Homo sapiens
gtcctctaggaatct

SEQ ID NO: 1640893 - DNA, 15 bp, Homo sapiens
agtcctctaggaatc

SEQ ID NO: 1640894 - DNA, 15 bp, Homo sapiens
cagtcctctaggaat

SEQ ID NO: 1640895 - DNA, 15 bp, Homo sapiens
ccagtcctctaggaa

SEQ ID NO: 1640896 - DNA, 15 bp, Homo sapiens
accagtcctctagga

SEQ ID NO: 1640897 - DNA, 15 bp, Homo sapiens
caccagtcctctagg

SEQ ID NO: 1640898 - DNA, 15 bp, Homo sapiens
acaccagtcctctag

SEQ ID NO: 1640899 - DNA, 15 bp, Homo sapiens
gacaccagtcctcta

SEQ ID NO: 1640900 - DNA, 15 bp, Homo sapiens
agacaccagtcctct

SEQ ID NO: 1640901 - DNA, 15 bp, Homo sapiens
cagacaccagtcctc

SEQ ID NO: 1640902 - DNA, 15 bp, Homo sapiens
tcagacaccagtcct

SEQ ID NO: 1640903 - DNA, 15 bp, Homo sapiens
ctcagacaccagtcc

SEQ ID NO: 1640904 - DNA, 15 bp, Homo sapiens
tctcagacaccagtc

SEQ ID NO: 1640905 - DNA, 15 bp, Homo sapiens
gtctcagacaccagt

SEQ ID NO: 1640906 - DNA, 15 bp, Homo sapiens
cgtctcagacaccag

SEQ ID NO: 1640907 - DNA, 15 bp, Homo sapiens
tcgtctcagacacca

SEQ ID NO: 1640908 - DNA, 15 bp, Homo sapiens
ctcgtctcagacacc

SEQ ID NO: 1640909 - DNA, 15 bp, Homo sapiens
cctcgtctcagacac

SEQ ID NO: 1640910 - DNA, 15 bp, Homo sapiens
acctcgtctcagaca

SEQ ID NO: 1640911 - DNA, 15 bp, Homo sapiens
aacctcgtctcagac

SEQ ID NO: 1640912 - DNA, 15 bp, Homo sapiens
caacctcgtctcaga

SEQ ID NO: 1640913 - DNA, 15 bp, Homo sapiens
ccaacctcgtctcag

SEQ ID NO: 1640914 - DNA, 15 bp, Homo sapiens
cccaacctcgtctca

SEQ ID NO: 1640915 - DNA, 15 bp, Homo sapiens
ccccaacctcgtctc

SEQ ID NO: 1640916 - DNA, 15 bp, Homo sapiens
gccccaacctcgtct

SEQ ID NO: 1640917 - DNA, 15 bp, Homo sapiens
ggccccaacctcgtc

SEQ ID NO: 1640918 - DNA, 15 bp, Homo sapiens
tggccccaacctcgt

SEQ ID NO: 1640919 - DNA, 15 bp, Homo sapiens
ttggccccaacctcg

SEQ ID NO: 1640920 - DNA, 15 bp, Homo sapiens
cttggccccaacctc

SEQ ID NO: 1640921 - DNA, 15 bp, Homo sapiens
gcttggccccaacct

SEQ ID NO: 1640922 - DNA, 15 bp, Homo sapiens
tgcttggccccaacc

SEQ ID NO: 1640923 - DNA, 15 bp, Homo sapiens
ttgcttggccccaac

SEQ ID NO: 1640924 - DNA, 15 bp, Homo sapiens
cttgcttggccccaa

SEQ ID NO: 1640925 - DNA, 15 bp, Homo sapiens
tcttgcttggcccca

SEQ ID NO: 1640926 - DNA, 15 bp, Homo sapiens
ttcttgcttggcccc

SEQ ID NO: 1640927 - DNA, 15 bp, Homo sapiens
tttcttgcttggccc

SEQ ID NO: 1640928 - DNA, 15 bp, Homo sapiens
ctttcttgcttggcc

SEQ ID NO: 1640929 - DNA, 15 bp, Homo sapiens
actttcttgcttggc

SEQ ID NO: 1640930 - DNA, 15 bp, Homo sapiens
cactttcttgcttgg

SEQ ID NO: 1640931 - DNA, 15 bp, Homo sapiens
acactttcttgcttg

SEQ ID NO: 1640932 - DNA, 15 bp, Homo sapiens
cacactttcttgctt

SEQ ID NO: 1640933 - DNA, 15 bp, Homo sapiens
acacactttcttgct

SEQ ID NO: 1640934 - DNA, 15 bp, Homo sapiens
gacacactttcttgc

SEQ ID NO: 1640935 - DNA, 15 bp, Homo sapiens
agacacactttcttg

SEQ ID NO: 1640936 - DNA, 15 bp, Homo sapiens
tagacacactttctt

SEQ ID NO: 1640937 - DNA, 15 bp, Homo sapiens
atagacacactttct

SEQ ID NO: 1640938 - DNA, 15 bp, Homo sapiens
tatagacacactttc

SEQ ID NO: 1640939 - DNA, 15 bp, Homo sapiens
atatagacacacttt

SEQ ID NO: 1640940 - DNA, 15 bp, Homo sapiens
tatatagacacactt

SEQ ID NO: 1640941 - DNA, 15 bp, Homo sapiens
ttatatagacacact

SEQ ID NO: 1640942 - DNA, 15 bp, Homo sapiens
tttatatagacacac

SEQ ID NO: 1640943 - DNA, 15 bp, Homo sapiens
ttttatatagacaca

SEQ ID NO: 1640944 - DNA, 15 bp, Homo sapiens
cttttatatagacac

SEQ ID NO: 1640945 - DNA, 15 bp, Homo sapiens
acttttatatagaca

SEQ ID NO: 1640946 - DNA, 15 bp, Homo sapiens
aacttttatatagac

SEQ ID NO: 1640947 - DNA, 15 bp, Homo sapiens
aaacttttatataga

SEQ ID NO: 1640948 - DNA, 15 bp, Homo sapiens
taaacttttatatag

SEQ ID NO: 1640949 - DNA, 15 bp, Homo sapiens
ttaaacttttatata

SEQ ID NO: 1640950 - DNA, 15 bp, Homo sapiens
tttaaacttttatat

SEQ ID NO: 1640951 - DNA, 15 bp, Homo sapiens
atttaaacttttata

SEQ ID NO: 1640952 - DNA, 15 bp, Homo sapiens
catttaaacttttat

SEQ ID NO: 1640953 - DNA, 15 bp, Homo sapiens
ccatttaaactttta

SEQ ID NO: 1640954 - DNA, 15 bp, Homo sapiens
tccatttaaactttt

SEQ ID NO: 1640955 - DNA, 15 bp, Homo sapiens
gtccatttaaacttt

SEQ ID NO: 1640956 - DNA, 15 bp, Homo sapiens
agtccatttaaactt

SEQ ID NO: 1640957 - DNA, 15 bp, Homo sapiens
cagtccatttaaact

SEQ ID NO: 1640958 - DNA, 15 bp, Homo sapiens
acagtccatttaaac

SEQ ID NO: 1640959 - DNA, 15 bp, Homo sapiens
tacagtccatttaaa

SEQ ID NO: 1640960 - DNA, 15 bp, Homo sapiens
gtacagtccatttaa

SEQ ID NO: 1640961 - DNA, 15 bp, Homo sapiens
ggtacagtccattta

SEQ ID NO: 1640962 - DNA, 15 bp, Homo sapiens
gggtacagtccattt

SEQ ID NO: 1640963 - DNA, 15 bp, Homo sapiens
agggtacagtccatt

SEQ ID NO: 1640964 - DNA, 15 bp, Homo sapiens
gagggtacagtccat

SEQ ID NO: 1640965 - DNA, 15 bp, Homo sapiens
agagggtacagtcca

SEQ ID NO: 1640966 - DNA, 15 bp, Homo sapiens
tagagggtacagtcc

SEQ ID NO: 1640967 - DNA, 15 bp, Homo sapiens
ctagagggtacagtc

SEQ ID NO: 1640968 - DNA, 15 bp, Homo sapiens
gctagagggtacagt

SEQ ID NO: 1640969 - DNA, 15 bp, Homo sapiens
tgctagagggtacag

SEQ ID NO: 1640970 - DNA, 15 bp, Homo sapiens
atgctagagggtaca

SEQ ID NO: 1640971 - DNA, 15 bp, Homo sapiens
gatgctagagggtac

SEQ ID NO: 1640972 - DNA, 15 bp, Homo sapiens
agatgctagagggta

SEQ ID NO: 1640973 - DNA, 15 bp, Homo sapiens
gagatgctagagggt

SEQ ID NO: 1640974 - DNA, 15 bp, Homo sapiens
tgagatgctagaggg

SEQ ID NO: 1640975 - DNA, 15 bp, Homo sapiens
ttgagatgctagagg

SEQ ID NO: 1640976 - DNA, 15 bp, Homo sapiens
cttgagatgctagag

SEQ ID NO: 1640977 - DNA, 15 bp, Homo sapiens
ccttgagatgctaga

SEQ ID NO: 1640978 - DNA, 15 bp, Homo sapiens
tccttgagatgctag

SEQ ID NO: 1640979 - DNA, 15 bp, Homo sapiens
gtccttgagatgcta

SEQ ID NO: 1640980 - DNA, 15 bp, Homo sapiens
tgtccttgagatgct

SEQ ID NO: 1640981 - DNA, 15 bp, Homo sapiens
ctgtccttgagatgc

SEQ ID NO: 1640982 - DNA, 15 bp, Homo sapiens
cctgtccttgagatg

SEQ ID NO: 1640983 - DNA, 15 bp, Homo sapiens
gcctgtccttgagat

SEQ ID NO: 1640984 - DNA, 15 bp, Homo sapiens
agcctgtccttgaga

SEQ ID NO: 1640985 - DNA, 15 bp, Homo sapiens
gagcctgtccttgag

SEQ ID NO: 1640986 - DNA, 15 bp, Homo sapiens
agagcctgtccttga

SEQ ID NO: 1640987 - DNA, 15 bp, Homo sapiens
tagagcctgtccttg

SEQ ID NO: 1640988 - DNA, 15 bp, Homo sapiens
ttagagcctgtcctt

SEQ ID NO: 1640989 - DNA, 15 bp, Homo sapiens
attagagcctgtcct

SEQ ID NO: 1640990 - DNA, 15 bp, Homo sapiens
aattagagcctgtcc

SEQ ID NO: 1640991 - DNA, 15 bp, Homo sapiens
gaattagagcctgtc

SEQ ID NO: 1640992 - DNA, 15 bp, Homo sapiens
agaattagagcctgt

SEQ ID NO: 1640993 - DNA, 15 bp, Homo sapiens
cagaattagagcctg

SEQ ID NO: 1640994 - DNA, 15 bp, Homo sapiens
tcagaattagagcct

SEQ ID NO: 1640995 - DNA, 15 bp, Homo sapiens
ctcagaattagagcc

SEQ ID NO: 1640996 - DNA, 15 bp, Homo sapiens
tctcagaattagagc

SEQ ID NO: 1640997 - DNA, 15 bp, Homo sapiens
ttctcagaattagag

SEQ ID NO: 1640998 - DNA, 15 bp, Homo sapiens
tttctcagaattaga

SEQ ID NO: 1640999 - DNA, 15 bp, Homo sapiens
ctttctcagaattag

SEQ ID NO: 1641000 - DNA, 15 bp, Homo sapiens
cctttctcagaatta

SEQ ID NO: 1641001 - DNA, 15 bp, Homo sapiens
gcctttctcagaatt

SEQ ID NO: 1641002 - DNA, 15 bp, Homo sapiens
tgcctttctcagaat

SEQ ID NO: 1641003 - DNA, 15 bp, Homo sapiens
ttgcctttctcagaa

SEQ ID NO: 1641004 - DNA, 15 bp, Homo sapiens
cttgcctttctcaga

SEQ ID NO: 1641005 - DNA, 15 bp, Homo sapiens
ctcttgcctttctca

SEQ ID NO: 1641006 - DNA, 15 bp, Homo sapiens
cctcttgcctttctc

SEQ ID NO: 1641007 - DNA, 15 bp, Homo sapiens
acctcttgcctttct

SEQ ID NO: 1641008 - DNA, 15 bp, Homo sapiens
tacctcttgcctttc

SEQ ID NO: 1641009 - DNA, 15 bp, Homo sapiens
ttacctcttgccttt

SEQ ID NO: 1641010 - DNA, 15 bp, Homo sapiens
tttacctcttgcctt

SEQ ID NO: 1641011 - DNA, 15 bp, Homo sapiens
ttttacctcttgcct

SEQ ID NO: 1641012 - DNA, 15 bp, Homo sapiens
cttttacctcttgcc

SEQ ID NO: 1641013 - DNA, 15 bp, Homo sapiens
acttttacctcttgc

SEQ ID NO: 1641014 - DNA, 15 bp, Homo sapiens
tacttttacctcttg

SEQ ID NO: 1641015 - DNA, 15 bp, Homo sapiens
gtacttttacctctt

SEQ ID NO: 1641016 - DNA, 15 bp, Homo sapiens
agtacttttacctct

SEQ ID NO: 1641017 - DNA, 15 bp, Homo sapiens
cagtacttttacctc

SEQ ID NO: 1641018 - DNA, 15 bp, Homo sapiens
acagtacttttacct

SEQ ID NO: 1641019 - DNA, 15 bp, Homo sapiens
gacagtacttttacc

SEQ ID NO: 1641020 - DNA, 15 bp, Homo sapiens
ggacagtacttttac

SEQ ID NO: 1641021 - DNA, 15 bp, Homo sapiens
tggacagtactttta

SEQ ID NO: 1641022 - DNA, 15 bp, Homo sapiens
ttggacagtactttt

SEQ ID NO: 1641023 - DNA, 15 bp, Homo sapiens
attggacagtacttt

SEQ ID NO: 1641024 - DNA, 15 bp, Homo sapiens
gattggacagtactt

SEQ ID NO: 1641025 - DNA, 15 bp, Homo sapiens
agattggacagtact

SEQ ID NO: 1641026 - DNA, 15 bp, Homo sapiens
aagattggacagtac

SEQ ID NO: 1641027 - DNA, 15 bp, Homo sapiens
aaagattggacagta

SEQ ID NO: 1641028 - DNA, 15 bp, Homo sapiens
aaaagattggacagt

SEQ ID NO: 1641029 - DNA, 15 bp, Homo sapiens
aaaaagattggacag

SEQ ID NO: 1641030 - DNA, 15 bp, Homo sapiens
aaaaaagattggaca

SEQ ID NO: 1641031 - DNA, 15 bp, Homo sapiens
taaaaaagattggac

SEQ ID NO: 1641032 - DNA, 15 bp, Homo sapiens
ttaaaaaagattgga

SEQ ID NO: 1641033 - DNA, 15 bp, Homo sapiens
cttaaaaaagattgg

SEQ ID NO: 1641034 - DNA, 15 bp, Homo sapiens
acttaaaaaagattg

SEQ ID NO: 1641035 - DNA, 15 bp, Homo sapiens
aacttaaaaaagatt

SEQ ID NO: 1641036 - DNA, 15 bp, Homo sapiens
caacttaaaaaagat

SEQ ID NO: 1641037 - DNA, 15 bp, Homo sapiens
ccaacttaaaaaaga

SEQ ID NO: 1641038 - DNA, 15 bp, Homo sapiens
tccaacttaaaaaag

SEQ ID NO: 1641039 - DNA, 15 bp, Homo sapiens
ctccaacttaaaaaa

SEQ ID NO: 1641040 - DNA, 15 bp, Homo sapiens
cctccaacttaaaaa

SEQ ID NO: 1641041 - DNA, 15 bp, Homo sapiens
gcctccaacttaaaa

SEQ ID NO: 1641042 - DNA, 15 bp, Homo sapiens
agcctccaacttaaa

SEQ ID NO: 1641043 - DNA, 15 bp, Homo sapiens
cagcctccaacttaa

SEQ ID NO: 1641044 - DNA, 15 bp, Homo sapiens
tcagcctccaactta

SEQ ID NO: 1641045 - DNA, 15 bp, Homo sapiens
ctcagcctccaactt

SEQ ID NO: 1641046 - DNA, 15 bp, Homo sapiens
gctcagcctccaact

SEQ ID NO: 1641047 - DNA, 15 bp, Homo sapiens
agctcagcctccaac

SEQ ID NO: 1641048 - DNA, 15 bp, Homo sapiens
aagctcagcctccaa

SEQ ID NO: 1641049 - DNA, 15 bp, Homo sapiens
caagctcagcctcca

SEQ ID NO: 1641050 - DNA, 15 bp, Homo sapiens
ccaagctcagcctcc

SEQ ID NO: 1641051 - DNA, 15 bp, Homo sapiens
accaagctcagcctc

SEQ ID NO: 1641052 - DNA, 15 bp, Homo sapiens
caccaagctcagcct

SEQ ID NO: 1641053 - DNA, 15 bp, Homo sapiens
tcaccaagctcagcc

SEQ ID NO: 1641054 - DNA, 15 bp, Homo sapiens
ctcaccaagctcagc

SEQ ID NO: 1641055 - DNA, 15 bp, Homo sapiens
tctcaccaagctcag

SEQ ID NO: 1641056 - DNA, 15 bp, Homo sapiens
atctcaccaagctca

SEQ ID NO: 1641057 - DNA, 15 bp, Homo sapiens
catctcaccaagctc

SEQ ID NO: 1641058 - DNA, 15 bp, Homo sapiens
acatctcaccaagct

SEQ ID NO: 1641059 - DNA, 15 bp, Homo sapiens
cacatctcaccaagc

SEQ ID NO: 1641060 - DNA, 15 bp, Homo sapiens
acacatctcaccaag

SEQ ID NO: 1641061 - DNA, 15 bp, Homo sapiens
gacacatctcaccaa

SEQ ID NO: 1641062 - DNA, 15 bp, Homo sapiens
agacacatctcacca

SEQ ID NO: 1641063 - DNA, 15 bp, Homo sapiens
aagacacatctcacc

SEQ ID NO: 1641064 - DNA, 15 bp, Homo sapiens
aaagacacatctcac

SEQ ID NO: 1641065 - DNA, 15 bp, Homo sapiens
taaagacacatctca

SEQ ID NO: 1641066 - DNA, 15 bp, Homo sapiens
ttaaagacacatctc

SEQ ID NO: 1641067 - DNA, 15 bp, Homo sapiens
tttaaagacacatct

SEQ ID NO: 1641068 - DNA, 15 bp, Homo sapiens
ttttaaagacacatc

SEQ ID NO: 1641069 - DNA, 15 bp, Homo sapiens
cttttaaagacacat

SEQ ID NO: 1641070 - DNA, 15 bp, Homo sapiens
tcttttaaagacaca

SEQ ID NO: 1641071 - DNA, 15 bp, Homo sapiens
gtcttttaaagacac

SEQ ID NO: 1641072 - DNA, 15 bp, Homo sapiens
ggtcttttaaagaca

SEQ ID NO: 1641073 - DNA, 15 bp, Homo sapiens
tggtcttttaaagac

SEQ ID NO: 1641074 - DNA, 15 bp, Homo sapiens
atggtcttttaaaga

SEQ ID NO: 1641075 - DNA, 15 bp, Homo sapiens
aatggtcttttaaag

SEQ ID NO: 1641076 - DNA, 15 bp, Homo sapiens
taatggtcttttaaa

SEQ ID NO: 1641077 - DNA, 15 bp, Homo sapiens
ctaatggtcttttaa

SEQ ID NO: 1641078 - DNA, 15 bp, Homo sapiens
actaatggtctttta

SEQ ID NO: 1641079 - DNA, 15 bp, Homo sapiens
gactaatggtctttt

SEQ ID NO: 1641080 - DNA, 15 bp, Homo sapiens
ggactaatggtcttt

SEQ ID NO: 1641081 - DNA, 15 bp, Homo sapiens
tggactaatggtctt

SEQ ID NO: 1641082 - DNA, 15 bp, Homo sapiens
atggactaatggtct

SEQ ID NO: 1641083 - DNA, 15 bp, Homo sapiens
aatggactaatggtc

SEQ ID NO: 1641084 - DNA, 15 bp, Homo sapiens
gaatggactaatggt

SEQ ID NO: 1641085 - DNA, 15 bp, Homo sapiens
agaatggactaatgg

SEQ ID NO: 1641086 - DNA, 15 bp, Homo sapiens
tagaatggactaatg

SEQ ID NO: 1641087 - DNA, 15 bp, Homo sapiens
gtagaatggactaat

SEQ ID NO: 1641088 - DNA, 15 bp, Homo sapiens
ggtagaatggactaa

SEQ ID NO: 1641089 - DNA, 15 bp, Homo sapiens
aggtagaatggacta

SEQ ID NO: 1641090 - DNA, 15 bp, Homo sapiens
gaggtagaatggact

SEQ ID NO: 1641091 - DNA, 15 bp, Homo sapiens
agaggtagaatggac

SEQ ID NO: 1641092 - DNA, 15 bp, Homo sapiens
gagaggtagaatgga

SEQ ID NO: 1641093 - DNA, 15 bp, Homo sapiens
ggagaggtagaatgg

SEQ ID NO: 1641094 - DNA, 15 bp, Homo sapiens
aggagaggtagaatg

SEQ ID NO: 1641095 - DNA, 15 bp, Homo sapiens
caggagaggtagaat

SEQ ID NO: 1641096 - DNA, 15 bp, Homo sapiens
tcaggagaggtagaa

SEQ ID NO: 1641097 - DNA, 15 bp, Homo sapiens
ttcaggagaggtaga

SEQ ID NO: 1641098 - DNA, 15 bp, Homo sapiens
cttcaggagaggtag

SEQ ID NO: 1641099 - DNA, 15 bp, Homo sapiens
tcttcaggagaggta

SEQ ID NO: 1641100 - DNA, 15 bp, Homo sapiens
atcttcaggagaggt

SEQ ID NO: 1641101 - DNA, 15 bp, Homo sapiens
aatcttcaggagagg

SEQ ID NO: 1641102 - DNA, 15 bp, Homo sapiens
caatcttcaggagag

SEQ ID NO: 1641103 - DNA, 15 bp, Homo sapiens
tcaatcttcaggaga

SEQ ID NO: 1641104 - DNA, 15 bp, Homo sapiens
ctcaatcttcaggag

SEQ ID NO: 1641105 - DNA, 15 bp, Homo sapiens
tctcaatcttcagga

SEQ ID NO: 1641106 - DNA, 15 bp, Homo sapiens
ttctcaatcttcagg

SEQ ID NO: 1641107 - DNA, 15 bp, Homo sapiens
attctcaatcttcag

SEQ ID NO: 1641108 - DNA, 15 bp, Homo sapiens
cattctcaatcttca

SEQ ID NO: 1641109 - DNA, 15 bp, Homo sapiens
ccattctcaatcttc

SEQ ID NO: 1641110 - DNA, 15 bp, Homo sapiens
accattctcaatctt

SEQ ID NO: 1641111 - DNA, 15 bp, Homo sapiens
taccattctcaatct

SEQ ID NO: 1641112 - DNA, 15 bp, Homo sapiens
ttaccattctcaatc

SEQ ID NO: 1641113 - DNA, 15 bp, Homo sapiens
cttaccattctcaat

SEQ ID NO: 1641114 - DNA, 15 bp, Homo sapiens
ccttaccattctcaa

SEQ ID NO: 1641115 - DNA, 15 bp, Homo sapiens
cccttaccattctca

SEQ ID NO: 1641116 - DNA, 15 bp, Homo sapiens
ccccttaccattctc

SEQ ID NO: 1641117 - DNA, 15 bp, Homo sapiens
accccttaccattct

SEQ ID NO: 1641118 - DNA, 15 bp, Homo sapiens
taccccttaccattc

SEQ ID NO: 1641119 - DNA, 15 bp, Homo sapiens
ataccccttaccatt

SEQ ID NO: 1641120 - DNA, 15 bp, Homo sapiens
cataccccttaccat

SEQ ID NO: 1641121 - DNA, 15 bp, Homo sapiens
tcataccccttacca

SEQ ID NO: 1641122 - DNA, 15 bp, Homo sapiens
ttcataccccttacc

SEQ ID NO: 1641123 - DNA, 15 bp, Homo sapiens
cttcataccccttac

SEQ ID NO: 1641124 - DNA, 15 bp, Homo sapiens
ccttcatacccctta

SEQ ID NO: 1641125 - DNA, 15 bp, Homo sapiens
accttcatacccctt

SEQ ID NO: 1641126 - DNA, 15 bp, Homo sapiens
aaccttcatacccct

SEQ ID NO: 1641127 - DNA, 15 bp, Homo sapiens
gaaccttcatacccc

SEQ ID NO: 1641128 - DNA, 15 bp, Homo sapiens
ggaaccttcataccc

SEQ ID NO: 1641129 - DNA, 15 bp, Homo sapiens
tggaaccttcatacc

SEQ ID NO: 1641130 - DNA, 15 bp, Homo sapiens
gtggaaccttcatac

SEQ ID NO: 1641131 - DNA, 15 bp, Homo sapiens
agtggaaccttcata

SEQ ID NO: 1641132 - DNA, 15 bp, Homo sapiens
cagtggaaccttcat

SEQ ID NO: 1641133 - DNA, 15 bp, Homo sapiens
tcagtggaaccttca

SEQ ID NO: 1641134 - DNA, 15 bp, Homo sapiens
ttcagtggaaccttc

SEQ ID NO: 1641135 - DNA, 15 bp, Homo sapiens
attcagtggaacctt

SEQ ID NO: 1641136 - DNA, 15 bp, Homo sapiens
tattcagtggaacct

SEQ ID NO: 1641137 - DNA, 15 bp, Homo sapiens
gtattcagtggaacc

SEQ ID NO: 1641138 - DNA, 15 bp, Homo sapiens
ggtattcagtggaac

SEQ ID NO: 1641139 - DNA, 15 bp, Homo sapiens
tggtattcagtggaa

SEQ ID NO: 1641140 - DNA, 15 bp, Homo sapiens
ttggtattcagtgga

SEQ ID NO: 1641141 - DNA, 15 bp, Homo sapiens
cttggtattcagtgg

SEQ ID NO: 1641142 - DNA, 15 bp, Homo sapiens
tcttggtattcagtg

SEQ ID NO: 1641143 - DNA, 15 bp, Homo sapiens
ctcttggtattcagt

SEQ ID NO: 1641144 - DNA, 15 bp, Homo sapiens
gctcttggtattcag

SEQ ID NO: 1641145 - DNA, 15 bp, Homo sapiens
ggctcttggtattca

SEQ ID NO: 1641146 - DNA, 15 bp, Homo sapiens
aggctcttggtattc

SEQ ID NO: 1641147 - DNA, 15 bp, Homo sapiens
caggctcttggtatt

SEQ ID NO: 1641148 - DNA, 15 bp, Homo sapiens
tcaggctcttggtat

SEQ ID NO: 1641149 - DNA, 15 bp, Homo sapiens
ctcaggctcttggta

SEQ ID NO: 1641150 - DNA, 15 bp, Homo sapiens
tctcaggctcttggt

SEQ ID NO: 1641151 - DNA, 15 bp, Homo sapiens
ttctcaggctcttgg

SEQ ID NO: 1641152 - DNA, 15 bp, Homo sapiens
tttctcaggctcttg

SEQ ID NO: 1641153 - DNA, 15 bp, Homo sapiens
gtttctcaggctctt

SEQ ID NO: 1641154 - DNA, 15 bp, Homo sapiens
agtttctcaggctct

SEQ ID NO: 1641155 - DNA, 15 bp, Homo sapiens
cagtttctcaggctc

SEQ ID NO: 1641156 - DNA, 15 bp, Homo sapiens
gcagtttctcaggct

SEQ ID NO: 1641157 - DNA, 15 bp, Homo sapiens
agcagtttctcaggc

SEQ ID NO: 1641158 - DNA, 15 bp, Homo sapiens
aagcagtttctcagg

SEQ ID NO: 1641159 - DNA, 15 bp, Homo sapiens
caagcagtttctcag

SEQ ID NO: 1641160 - DNA, 15 bp, Homo sapiens
ccaagcagtttctca

SEQ ID NO: 1641161 - DNA, 15 bp, Homo sapiens
cccaagcagtttctc

SEQ ID NO: 1641162 - DNA, 15 bp, Homo sapiens
acccaagcagtttct

SEQ ID NO: 1641163 - DNA, 15 bp, Homo sapiens
cacccaagcagtttc

SEQ ID NO: 1641164 - DNA, 15 bp, Homo sapiens
tcacccaagcagttt

SEQ ID NO: 1641165 - DNA, 15 bp, Homo sapiens
atcacccaagcagtt

SEQ ID NO: 1641166 - DNA, 15 bp, Homo sapiens
aatcacccaagcagt

SEQ ID NO: 1641167 - DNA, 15 bp, Homo sapiens
aaatcacccaagcag

SEQ ID NO: 1641168 - DNA, 15 bp, Homo sapiens
caaatcacccaagca

SEQ ID NO: 1641169 - DNA, 15 bp, Homo sapiens
tcaaatcacccaagc

SEQ ID NO: 1641170 - DNA, 15 bp, Homo sapiens
gtcaaatcacccaag

SEQ ID NO: 1641171 - DNA, 15 bp, Homo sapiens
agtcaaatcacccaa

SEQ ID NO: 1641172 - DNA, 15 bp, Homo sapiens
tagtcaaatcaccca

SEQ ID NO: 1641173 - DNA, 15 bp, Homo sapiens
ttagtcaaatcaccc

SEQ ID NO: 1641174 - DNA, 15 bp, Homo sapiens
attagtcaaatcacc

SEQ ID NO: 1641175 - DNA, 15 bp, Homo sapiens
tattagtcaaatcac

SEQ ID NO: 1641176 - DNA, 15 bp, Homo sapiens
ttattagtcaaatca

SEQ ID NO: 1641177 - DNA, 15 bp, Homo sapiens
tttattagtcaaatc

SEQ ID NO: 1641178 - DNA, 15 bp, Homo sapiens
ctttattagtcaaat

SEQ ID NO: 1641179 - DNA, 15 bp, Homo sapiens
cctttattagtcaaa

SEQ ID NO: 1641180 - DNA, 15 bp, Homo sapiens
gcctttattagtcaa

SEQ ID NO: 1641181 - DNA, 15 bp, Homo sapiens
ggcctttattagtca

SEQ ID NO: 1641182 - DNA, 15 bp, Homo sapiens
cggcctttattagtc

SEQ ID NO: 1641183 - DNA, 15 bp, Homo sapiens
ccggcctttattagt

SEQ ID NO: 1641184 - DNA, 15 bp, Homo sapiens
accggcctttattag

SEQ ID NO: 1641185 - DNA, 15 bp, Homo sapiens
gaccggcctttatta

SEQ ID NO: 1641186 - DNA, 15 bp, Homo sapiens
ggaccggcctttatt

SEQ ID NO: 1641187 - DNA, 15 bp, Homo sapiens
tggaccggcctttat

SEQ ID NO: 1641188 - DNA, 15 bp, Homo sapiens
atggaccggccttta

SEQ ID NO: 1641189 - DNA, 15 bp, Homo sapiens
aatggaccggccttt

SEQ ID NO: 1641190 - DNA, 15 bp, Homo sapiens
taatggaccggcctt

SEQ ID NO: 1641191 - DNA, 15 bp, Homo sapiens
ataatggaccggcct

SEQ ID NO: 1641192 - DNA, 15 bp, Homo sapiens
gataatggaccggcc

SEQ ID NO: 1641193 - DNA, 15 bp, Homo sapiens
tgataatggaccggc

SEQ ID NO: 1641194 - DNA, 15 bp, Homo sapiens
ctgataatggaccgg

SEQ ID NO: 1641195 - DNA, 15 bp, Homo sapiens
tctgataatggaccg

SEQ ID NO: 1641196 - DNA, 15 bp, Homo sapiens
gtctgataatggacc

SEQ ID NO: 1641197 - DNA, 15 bp, Homo sapiens
agtctgataatggac

SEQ ID NO: 1641198 - DNA, 15 bp, Homo sapiens
cagtctgataatgga

SEQ ID NO: 1641199 - DNA, 15 bp, Homo sapiens
acagtctgataatgg

SEQ ID NO: 1641200 - DNA, 15 bp, Homo sapiens
tacagtctgataatg

SEQ ID NO: 1641201 - DNA, 15 bp, Homo sapiens
atacagtctgataat

SEQ ID NO: 1641202 - DNA, 15 bp, Homo sapiens
tatacagtctgataa

SEQ ID NO: 1641203 - DNA, 15 bp, Homo sapiens
ctatacagtctgata

SEQ ID NO: 1641204 - DNA, 15 bp, Homo sapiens
tctatacagtctgat

SEQ ID NO: 1641205 - DNA, 15 bp, Homo sapiens
ctctatacagtctga

SEQ ID NO: 1641206 - DNA, 15 bp, Homo sapiens
cctctatacagtctg

SEQ ID NO: 1641207 - DNA, 15 bp, Homo sapiens
acctctatacagtct

SEQ ID NO: 1641208 - DNA, 15 bp, Homo sapiens
cacctctatacagtc

SEQ ID NO: 1641209 - DNA, 15 bp, Homo sapiens
ccacctctatacagt

SEQ ID NO: 1641210 - DNA, 15 bp, Homo sapiens
cccacctctatacag

SEQ ID NO: 1641211 - DNA, 15 bp, Homo sapiens
tcccacctctataca

SEQ ID NO: 1641212 - DNA, 15 bp, Homo sapiens
ttcccacctctatac

SEQ ID NO: 1641213 - DNA, 15 bp, Homo sapiens
cttcccacctctata

SEQ ID NO: 1641214 - DNA, 15 bp, Homo sapiens
ccttcccacctctat

SEQ ID NO: 1641215 - DNA, 15 bp, Homo sapiens
gccttcccacctcta

SEQ ID NO: 1641216 - DNA, 15 bp, Homo sapiens
ggccttcccacctct

SEQ ID NO: 1641217 - DNA, 15 bp, Homo sapiens
tggccttcccacctc

SEQ ID NO: 1641218 - DNA, 15 bp, Homo sapiens
ttggccttcccacct

SEQ ID NO: 1641219 - DNA, 15 bp, Homo sapiens
cttggccttcccacc

SEQ ID NO: 1641220 - DNA, 15 bp, Homo sapiens
gcttggccttcccac

SEQ ID NO: 1641221 - DNA, 15 bp, Homo sapiens
ggcttggccttccca

SEQ ID NO: 1641222 - DNA, 15 bp, Homo sapiens
aggcttggccttccc

SEQ ID NO: 1641223 - DNA, 15 bp, Homo sapiens
taggcttggccttcc

SEQ ID NO: 1641224 - DNA, 15 bp, Homo sapiens
ctaggcttggccttc

SEQ ID NO: 1641225 - DNA, 15 bp, Homo sapiens
cctaggcttggcctt

SEQ ID NO: 1641226 - DNA, 15 bp, Homo sapiens
tcctaggcttggcct

SEQ ID NO: 1641227 - DNA, 15 bp, Homo sapiens
ttcctaggcttggcc

SEQ ID NO: 1641228 - DNA, 15 bp, Homo sapiens
attcctaggcttggc

SEQ ID NO: 1641229 - DNA, 15 bp, Homo sapiens
aattcctaggcttgg

SEQ ID NO: 1641230 - DNA, 15 bp, Homo sapiens
taattcctaggcttg

SEQ ID NO: 1641231 - DNA, 15 bp, Homo sapiens
ataattcctaggctt

SEQ ID NO: 1641232 - DNA, 15 bp, Homo sapiens
cataattcctaggct

SEQ ID NO: 1641233 - DNA, 15 bp, Homo sapiens
acataattcctaggc

SEQ ID NO: 1641234 - DNA, 15 bp, Homo sapiens
gacataattcctagg

SEQ ID NO: 1641235 - DNA, 15 bp, Homo sapiens
agacataattcctag

SEQ ID NO: 1641236 - DNA, 15 bp, Homo sapiens
cagacataattccta

SEQ ID NO: 1641237 - DNA, 15 bp, Homo sapiens
tcagacataattcct

SEQ ID NO: 1641238 - DNA, 15 bp, Homo sapiens
ttcagacataattcc

SEQ ID NO: 1641239 - DNA, 15 bp, Homo sapiens
tttcagacataattc

SEQ ID NO: 1641240 - DNA, 15 bp, Homo sapiens
ctttcagacataatt

SEQ ID NO: 1641241 - DNA, 15 bp, Homo sapiens
tctttcagacataat

SEQ ID NO: 1641242 - DNA, 15 bp, Homo sapiens
ttctttcagacataa

SEQ ID NO: 1641243 - DNA, 15 bp, Homo sapiens
cttctttcagacata

SEQ ID NO: 1641244 - DNA, 15 bp, Homo sapiens
ccttctttcagacat

SEQ ID NO: 1641245 - DNA, 15 bp, Homo sapiens
cccttctttcagaca

SEQ ID NO: 1641246 - DNA, 15 bp, Homo sapiens
tcccttctttcagac

SEQ ID NO: 1641247 - DNA, 15 bp, Homo sapiens
ttcccttctttcaga

SEQ ID NO: 1641248 - DNA, 15 bp, Homo sapiens
cttcccttctttcag

SEQ ID NO: 1641249 - DNA, 15 bp, Homo sapiens
tcttcccttctttca

SEQ ID NO: 1641250 - DNA, 15 bp, Homo sapiens
ttcttcccttctttc

SEQ ID NO: 1641251 - DNA, 15 bp, Homo sapiens
tttcttcccttcttt

SEQ ID NO: 1641252 - DNA, 15 bp, Homo sapiens
atttcttcccttctt

SEQ ID NO: 1641253 - DNA, 15 bp, Homo sapiens
catttcttcccttct

SEQ ID NO: 1641254 - DNA, 15 bp, Homo sapiens
tcatttcttcccttc

SEQ ID NO: 1641255 - DNA, 15 bp, Homo sapiens
gtcatttcttccctt

SEQ ID NO: 1641256 - DNA, 15 bp, Homo sapiens
agtcatttcttccct

SEQ ID NO: 1641257 - DNA, 15 bp, Homo sapiens
tagtcatttcttccc

SEQ ID NO: 1641258 - DNA, 15 bp, Homo sapiens
atagtcatttcttcc

SEQ ID NO: 1641259 - DNA, 15 bp, Homo sapiens
catagtcatttcttc

SEQ ID NO: 1641260 - DNA, 15 bp, Homo sapiens
ccatagtcatttctt

SEQ ID NO: 1641261 - DNA, 15 bp, Homo sapiens
accatagtcatttct

SEQ ID NO: 1641262 - DNA, 15 bp, Homo sapiens
caccatagtcatttc

SEQ ID NO: 1641263 - DNA, 15 bp, Homo sapiens
ccaccatagtcattt

SEQ ID NO: 1641264 - DNA, 15 bp, Homo sapiens
gccaccatagtcatt

SEQ ID NO: 1641265 - DNA, 15 bp, Homo sapiens
ggccaccatagtcat

SEQ ID NO: 1641266 - DNA, 15 bp, Homo sapiens
aggccaccatagtca

SEQ ID NO: 1641267 - DNA, 15 bp, Homo sapiens
aaggccaccatagtc

SEQ ID NO: 1641268 - DNA, 15 bp, Homo sapiens
gaaggccaccatagt

SEQ ID NO: 1641269 - DNA, 15 bp, Homo sapiens
agaaggccaccatag

SEQ ID NO: 1641270 - DNA, 15 bp, Homo sapiens
gagaaggccaccata

SEQ ID NO: 1641271 - DNA, 15 bp, Homo sapiens
tgagaaggccaccat

SEQ ID NO: 1641272 - DNA, 15 bp, Homo sapiens
ctgagaaggccacca

SEQ ID NO: 1641273 - DNA, 15 bp, Homo sapiens
tctgagaaggccacc

SEQ ID NO: 1641274 - DNA, 15 bp, Homo sapiens
gtctgagaaggccac

SEQ ID NO: 1641275 - DNA, 15 bp, Homo sapiens
ggtctgagaaggcca

SEQ ID NO: 1641276 - DNA, 15 bp, Homo sapiens
gggtctgagaaggcc

SEQ ID NO: 1641277 - DNA, 15 bp, Homo sapiens
agggtctgagaaggc

SEQ ID NO: 1641278 - DNA, 15 bp, Homo sapiens
cagggtctgagaagg

SEQ ID NO: 1641279 - DNA, 15 bp, Homo sapiens
acagggtctgagaag

SEQ ID NO: 1641280 - DNA, 15 bp, Homo sapiens
cacagggtctgagaa

SEQ ID NO: 1641281 - DNA, 15 bp, Homo sapiens
ccacagggtctgaga

SEQ ID NO: 1641282 - DNA, 15 bp, Homo sapiens
cccacagggtctgag

SEQ ID NO: 1641283 - DNA, 15 bp, Homo sapiens
tcccacagggtctga

SEQ ID NO: 1641284 - DNA, 15 bp, Homo sapiens
ttcccacagggtctg

SEQ ID NO: 1641285 - DNA, 15 bp, Homo sapiens
tttcccacagggtct

SEQ ID NO: 1641286 - DNA, 15 bp, Homo sapiens
ctttcccacagggtc

SEQ ID NO: 1641287 - DNA, 15 bp, Homo sapiens
actttcccacagggt

SEQ ID NO: 1641288 - DNA, 15 bp, Homo sapiens
gactttcccacaggg

SEQ ID NO: 1641289 - DNA, 15 bp, Homo sapiens
ggactttcccacagg

SEQ ID NO: 1641290 - DNA, 15 bp, Homo sapiens
aggactttcccacag

SEQ ID NO: 1641291 - DNA, 15 bp, Homo sapiens
gaggactttcccaca

SEQ ID NO: 1641292 - DNA, 15 bp, Homo sapiens
agaggactttcccac

SEQ ID NO: 1641293 - DNA, 15 bp, Homo sapiens
tagaggactttccca

SEQ ID NO: 1641294 - DNA, 15 bp, Homo sapiens
gtagaggactttccc

SEQ ID NO: 1641295 - DNA, 15 bp, Homo sapiens
ggtagaggactttcc

SEQ ID NO: 1641296 - DNA, 15 bp, Homo sapiens
gggtagaggactttc

SEQ ID NO: 1641297 - DNA, 15 bp, Homo sapiens
tgggtagaggacttt

SEQ ID NO: 1641298 - DNA, 15 bp, Homo sapiens
atgggtagaggactt

SEQ ID NO: 1641299 - DNA, 15 bp, Homo sapiens
gatgggtagaggact

SEQ ID NO: 1641300 - DNA, 15 bp, Homo sapiens
ggatgggtagaggac

SEQ ID NO: 1641301 - DNA, 15 bp, Homo sapiens
tggatgggtagagga

SEQ ID NO: 1641302 - DNA, 15 bp, Homo sapiens
ttggatgggtagagg

SEQ ID NO: 1641303 - DNA, 15 bp, Homo sapiens
attggatgggtagag

SEQ ID NO: 1641304 - DNA, 15 bp, Homo sapiens
cattggatgggtaga

SEQ ID NO: 1641305 - DNA, 15 bp, Homo sapiens
tcattggatgggtag

SEQ ID NO: 1641306 - DNA, 15 bp, Homo sapiens
ttcattggatgggta

SEQ ID NO: 1641307 - DNA, 15 bp, Homo sapiens
tttcattggatgggt

SEQ ID NO: 1641308 - DNA, 15 bp, Homo sapiens
ctttcattggatggg

SEQ ID NO: 1641309 - DNA, 15 bp, Homo sapiens
actttcattggatgg

SEQ ID NO: 1641310 - DNA, 15 bp, Homo sapiens
cactttcattggatg

SEQ ID NO: 1641311 - DNA, 15 bp, Homo sapiens
acactttcattggat

SEQ ID NO: 1641312 - DNA, 15 bp, Homo sapiens
gacactttcattgga

SEQ ID NO: 1641313 - DNA, 15 bp, Homo sapiens
agacactttcattgg

SEQ ID NO: 1641314 - DNA, 15 bp, Homo sapiens
tagacactttcattg

SEQ ID NO: 1641315 - DNA, 15 bp, Homo sapiens
gtagacactttcatt

SEQ ID NO: 1641316 - DNA, 15 bp, Homo sapiens
ggtagacactttcat

SEQ ID NO: 1641317 - DNA, 15 bp, Homo sapiens
gggtagacactttca

SEQ ID NO: 1641318 - DNA, 15 bp, Homo sapiens
tgggtagacactttc

SEQ ID NO: 1641319 - DNA, 15 bp, Homo sapiens
ctgggtagacacttt

SEQ ID NO: 1641320 - DNA, 15 bp, Homo sapiens
tctgggtagacactt

SEQ ID NO: 1641321 - DNA, 15 bp, Homo sapiens
gtctgggtagacact

SEQ ID NO: 1641322 - DNA, 15 bp, Homo sapiens
ggtctgggtagacac

SEQ ID NO: 1641323 - DNA, 15 bp, Homo sapiens
tggtctgggtagaca

SEQ ID NO: 1641324 - DNA, 15 bp, Homo sapiens
ttggtctgggtagac

SEQ ID NO: 1641325 - DNA, 15 bp, Homo sapiens
cttggtctgggtaga

SEQ ID NO: 1641326 - DNA, 15 bp, Homo sapiens
tcttggtctgggtag

SEQ ID NO: 1641327 - DNA, 15 bp, Homo sapiens
ctcttggtctgggta

SEQ ID NO: 1641328 - DNA, 15 bp, Homo sapiens
cctcttggtctgggt

SEQ ID NO: 1641329 - DNA, 15 bp, Homo sapiens
acctcttggtctggg

SEQ ID NO: 1641330 - DNA, 15 bp, Homo sapiens
tacctcttggtctgg

SEQ ID NO: 1641331 - DNA, 15 bp, Homo sapiens
atacctcttggtctg

SEQ ID NO: 1641332 - DNA, 15 bp, Homo sapiens
aatacctcttggtct

SEQ ID NO: 1641333 - DNA, 15 bp, Homo sapiens
aaatacctcttggtc

SEQ ID NO: 1641334 - DNA, 15 bp, Homo sapiens
aaaatacctcttggt

SEQ ID NO: 1641335 - DNA, 15 bp, Homo sapiens
taaaatacctcttgg

SEQ ID NO: 1641336 - DNA, 15 bp, Homo sapiens
ctaaaatacctcttg

SEQ ID NO: 1641337 - DNA, 15 bp, Homo sapiens
actaaaatacctctt

SEQ ID NO: 1641338 - DNA, 15 bp, Homo sapiens
aactaaaatacctct

SEQ ID NO: 1641339 - DNA, 15 bp, Homo sapiens
aaactaaaatacctc

SEQ ID NO: 1641340 - DNA, 15 bp, Homo sapiens
gaaactaaaatacct

SEQ ID NO: 1641341 - DNA, 15 bp, Homo sapiens
ggaaactaaaatacc

SEQ ID NO: 1641342 - DNA, 15 bp, Homo sapiens
aggaaactaaaatac

SEQ ID NO: 1641343 - DNA, 15 bp, Homo sapiens
caggaaactaaaata

SEQ ID NO: 1641344 - DNA, 15 bp, Homo sapiens
tcaggaaactaaaat

SEQ ID NO: 1641345 - DNA, 15 bp, Homo sapiens
gtcaggaaactaaaa

SEQ ID NO: 1641346 - DNA, 15 bp, Homo sapiens
agtcaggaaactaaa

SEQ ID NO: 1641347 - DNA, 15 bp, Homo sapiens
gagtcaggaaactaa

SEQ ID NO: 1641348 - DNA, 15 bp, Homo sapiens
cgagtcaggaaacta

SEQ ID NO: 1641349 - DNA, 15 bp, Homo sapiens
ccgagtcaggaaact

SEQ ID NO: 1641350 - DNA, 15 bp, Homo sapiens
cccgagtcaggaaac

SEQ ID NO: 1641351 - DNA, 15 bp, Homo sapiens
ccccgagtcaggaaa

SEQ ID NO: 1641352 - DNA, 15 bp, Homo sapiens
gccccgagtcaggaa

SEQ ID NO: 1641353 - DNA, 15 bp, Homo sapiens
tgccccgagtcagga

SEQ ID NO: 1641354 - DNA, 15 bp, Homo sapiens
atgccccgagtcagg

SEQ ID NO: 1641355 - DNA, 15 bp, Homo sapiens
catgccccgagtcag

SEQ ID NO: 1641356 - DNA, 15 bp, Homo sapiens
acatgccccgagtca

SEQ ID NO: 1641357 - DNA, 15 bp, Homo sapiens
cacatgccccgagtc

SEQ ID NO: 1641358 - DNA, 15 bp, Homo sapiens
tcacatgccccgagt

SEQ ID NO: 1641359 - DNA, 15 bp, Homo sapiens
ctcacatgccccgag

SEQ ID NO: 1641360 - DNA, 15 bp, Homo sapiens
actcacatgccccga

SEQ ID NO: 1641361 - DNA, 15 bp, Homo sapiens
tactcacatgccccg

SEQ ID NO: 1641362 - DNA, 15 bp, Homo sapiens
ttactcacatgcccc

SEQ ID NO: 1641363 - DNA, 15 bp, Homo sapiens
tttactcacatgccc

SEQ ID NO: 1641364 - DNA, 15 bp, Homo sapiens
ctttactcacatgcc

SEQ ID NO: 1641365 - DNA, 15 bp, Homo sapiens
actttactcacatgc

SEQ ID NO: 1641366 - DNA, 15 bp, Homo sapiens
gactttactcacatg

SEQ ID NO: 1641367 - DNA, 15 bp, Homo sapiens
tgactttactcacat

SEQ ID NO: 1641368 - DNA, 15 bp, Homo sapiens
ttgactttactcaca

SEQ ID NO: 1641369 - DNA, 15 bp, Homo sapiens
attgactttactcac

SEQ ID NO: 1641370 - DNA, 15 bp, Homo sapiens
aattgactttactca

SEQ ID NO: 1641371 - DNA, 15 bp, Homo sapiens
aaattgactttactc

SEQ ID NO: 1641372 - DNA, 15 bp, Homo sapiens
caaattgactttact

SEQ ID NO: 1641373 - DNA, 15 bp, Homo sapiens
gcaaattgactttac

SEQ ID NO: 1641374 - DNA, 15 bp, Homo sapiens
ggcaaattgacttta

SEQ ID NO: 1641375 - DNA, 15 bp, Homo sapiens
tggcaaattgacttt

SEQ ID NO: 1641376 - DNA, 15 bp, Homo sapiens
ctggcaaattgactt

SEQ ID NO: 1641377 - DNA, 15 bp, Homo sapiens
actggcaaattgact

SEQ ID NO: 1641378 - DNA, 15 bp, Homo sapiens
gactggcaaattgac

SEQ ID NO: 1641379 - DNA, 15 bp, Homo sapiens
ggactggcaaattga

SEQ ID NO: 1641380 - DNA, 15 bp, Homo sapiens
aggactggcaaattg

SEQ ID NO: 1641381 - DNA, 15 bp, Homo sapiens
caggactggcaaatt

SEQ ID NO: 1641382 - DNA, 15 bp, Homo sapiens
ccaggactggcaaat

SEQ ID NO: 1641383 - DNA, 15 bp, Homo sapiens
cccaggactggcaaa

SEQ ID NO: 1641384 - DNA, 15 bp, Homo sapiens
gcccaggactggcaa

SEQ ID NO: 1641385 - DNA, 15 bp, Homo sapiens
tgcccaggactggca

SEQ ID NO: 1641386 - DNA, 15 bp, Homo sapiens
ctgcccaggactggc

SEQ ID NO: 1641387 - DNA, 15 bp, Homo sapiens
cctgcccaggactgg

SEQ ID NO: 1641388 - DNA, 15 bp, Homo sapiens
ccctgcccaggactg

SEQ ID NO: 1641389 - DNA, 15 bp, Homo sapiens
gccctgcccaggact

SEQ ID NO: 1641390 - DNA, 15 bp, Homo sapiens
tgccctgcccaggac

SEQ ID NO: 1641391 - DNA, 15 bp, Homo sapiens
ttgccctgcccagga

SEQ ID NO: 1641392 - DNA, 15 bp, Homo sapiens
tttgccctgcccagg

SEQ ID NO: 1641393 - DNA, 15 bp, Homo sapiens
atttgccctgcccag

SEQ ID NO: 1641394 - DNA, 15 bp, Homo sapiens
aatttgccctgccca

SEQ ID NO: 1641395 - DNA, 15 bp, Homo sapiens
gaatttgccctgccc

SEQ ID NO: 1641396 - DNA, 15 bp, Homo sapiens
agaatttgccctgcc

SEQ ID NO: 1641397 - DNA, 15 bp, Homo sapiens
gagaatttgccctgc

SEQ ID NO: 1641398 - DNA, 15 bp, Homo sapiens
cgagaatttgccctg

SEQ ID NO: 1641399 - DNA, 15 bp, Homo sapiens
tcgagaatttgccct

SEQ ID NO: 1641400 - DNA, 15 bp, Homo sapiens
ctcgagaatttgccc

SEQ ID NO: 1641401 - DNA, 15 bp, Homo sapiens
gctcgagaatttgcc

SEQ ID NO: 1641402 - DNA, 15 bp, Homo sapiens
agctcgagaatttgc

SEQ ID NO: 1641403 - DNA, 15 bp, Homo sapiens
aagctcgagaatttg

SEQ ID NO: 1641404 - DNA, 15 bp, Homo sapiens
caagctcgagaattt

SEQ ID NO: 1641405 - DNA, 15 bp, Homo sapiens
tcaagctcgagaatt

SEQ ID NO: 1641406 - DNA, 15 bp, Homo sapiens
atcaagctcgagaat

SEQ ID NO: 1641407 - DNA, 15 bp, Homo sapiens
catcaagctcgagaa

SEQ ID NO: 1641408 - DNA, 15 bp, Homo sapiens
acatcaagctcgaga

SEQ ID NO: 1641409 - DNA, 15 bp, Homo sapiens
cacatcaagctcgag

SEQ ID NO: 1641410 - DNA, 15 bp, Homo sapiens
acacatcaagctcga

SEQ ID NO: 1641411 - DNA, 15 bp, Homo sapiens
tacacatcaagctcg

SEQ ID NO: 1641412 - DNA, 15 bp, Homo sapiens
ctacacatcaagctc

SEQ ID NO: 1641413 - DNA, 15 bp, Homo sapiens
cctacacatcaagct

SEQ ID NO: 1641414 - DNA, 15 bp, Homo sapiens
ccctacacatcaagc

SEQ ID NO: 1641415 - DNA, 15 bp, Homo sapiens
tccctacacatcaag

SEQ ID NO: 1641416 - DNA, 15 bp, Homo sapiens
ttccctacacatcaa

SEQ ID NO: 1641417 - DNA, 15 bp, Homo sapiens
cttccctacacatca

SEQ ID NO: 1641418 - DNA, 15 bp, Homo sapiens
ccttccctacacatc

SEQ ID NO: 1641419 - DNA, 15 bp, Homo sapiens
cccttccctacacat

SEQ ID NO: 1641420 - DNA, 15 bp, Homo sapiens
tcccttccctacaca

SEQ ID NO: 1641421 - DNA, 15 bp, Homo sapiens
ctcccttccctacac

SEQ ID NO: 1641422 - DNA, 15 bp, Homo sapiens
cctcccttccctaca

SEQ ID NO: 1641423 - DNA, 15 bp, Homo sapiens
ccctcccttccctac

SEQ ID NO: 1641424 - DNA, 15 bp, Homo sapiens
cccctcccttcccta

SEQ ID NO: 1641425 - DNA, 15 bp, Homo sapiens
ccccctcccttccct

SEQ ID NO: 1641426 - DNA, 15 bp, Homo sapiens
gccccctcccttccc

SEQ ID NO: 1641427 - DNA, 15 bp, Homo sapiens
ggccccctcccttcc

SEQ ID NO: 1641428 - DNA, 15 bp, Homo sapiens
aggccccctcccttc

SEQ ID NO: 1641429 - DNA, 15 bp, Homo sapiens
caggccccctccctt

SEQ ID NO: 1641430 - DNA, 15 bp, Homo sapiens
tcaggccccctccct

SEQ ID NO: 1641431 - DNA, 15 bp, Homo sapiens
ctcaggccccctccc

SEQ ID NO: 1641432 - DNA, 15 bp, Homo sapiens
cctcaggccccctcc

SEQ ID NO: 1641433 - DNA, 15 bp, Homo sapiens
tcctcaggccccctc

SEQ ID NO: 1641434 - DNA, 15 bp, Homo sapiens
ttcctcaggccccct

SEQ ID NO: 1641435 - DNA, 15 bp, Homo sapiens
attcctcaggccccc

SEQ ID NO: 1641436 - DNA, 15 bp, Homo sapiens
aattcctcaggcccc

SEQ ID NO: 1641437 - DNA, 15 bp, Homo sapiens
gaattcctcaggccc

SEQ ID NO: 1641438 - DNA, 15 bp, Homo sapiens
ggaattcctcaggcc

SEQ ID NO: 1641439 - DNA, 15 bp, Homo sapiens
aggaattcctcaggc

SEQ ID NO: 1641440 - DNA, 15 bp, Homo sapiens
caggaattcctcagg

SEQ ID NO: 1641441 - DNA, 15 bp, Homo sapiens
tcaggaattcctcag

SEQ ID NO: 1641442 - DNA, 15 bp, Homo sapiens
ctcaggaattcctca

SEQ ID NO: 1641443 - DNA, 15 bp, Homo sapiens
actcaggaattcctc

SEQ ID NO: 1641444 - DNA, 15 bp, Homo sapiens
tactcaggaattcct

SEQ ID NO: 1641445 - DNA, 15 bp, Homo sapiens
ctactcaggaattcc

SEQ ID NO: 1641446 - DNA, 15 bp, Homo sapiens
actactcaggaattc

SEQ ID NO: 1641447 - DNA, 15 bp, Homo sapiens
tactactcaggaatt

SEQ ID NO: 1641448 - DNA, 15 bp, Homo sapiens
ctactactcaggaat

SEQ ID NO: 1641449 - DNA, 15 bp, Homo sapiens
actactactcaggaa

SEQ ID NO: 1641450 - DNA, 15 bp, Homo sapiens
tactactactcagga

SEQ ID NO: 1641451 - DNA, 15 bp, Homo sapiens
ctactactactcagg

SEQ ID NO: 1641452 - DNA, 15 bp, Homo sapiens
actactactactcag

SEQ ID NO: 1641453 - DNA, 15 bp, Homo sapiens
tactactactactca

SEQ ID NO: 1641454 - DNA, 15 bp, Homo sapiens
atactactactactc

SEQ ID NO: 1641455 - DNA, 15 bp, Homo sapiens
tatactactactact

SEQ ID NO: 1641456 - DNA, 15 bp, Homo sapiens
ctatactactactac

SEQ ID NO: 1641457 - DNA, 15 bp, Homo sapiens
gctatactactacta

SEQ ID NO: 1641458 - DNA, 15 bp, Homo sapiens
tgctatactactact

SEQ ID NO: 1641459 - DNA, 15 bp, Homo sapiens
ctgctatactactac

SEQ ID NO: 1641460 - DNA, 15 bp, Homo sapiens
tctgctatactacta

SEQ ID NO: 1641461 - DNA, 15 bp, Homo sapiens
atctgctatactact

SEQ ID NO: 1641462 - DNA, 15 bp, Homo sapiens
catctgctatactac

SEQ ID NO: 1641463 - DNA, 15 bp, Homo sapiens
ccatctgctatacta

SEQ ID NO: 1641464 - DNA, 15 bp, Homo sapiens
cccatctgctatact

SEQ ID NO: 1641465 - DNA, 15 bp, Homo sapiens
tcccatctgctatac

SEQ ID NO: 1641466 - DNA, 15 bp, Homo sapiens
gtcccatctgctata

SEQ ID NO: 1641467 - DNA, 15 bp, Homo sapiens
tgtcccatctgctat

SEQ ID NO: 1641468 - DNA, 15 bp, Homo sapiens
ctgtcccatctgcta

SEQ ID NO: 1641469 - DNA, 15 bp, Homo sapiens
tctgtcccatctgct

SEQ ID NO: 1641470 - DNA, 15 bp, Homo sapiens
ctctgtcccatctgc

SEQ ID NO: 1641471 - DNA, 15 bp, Homo sapiens
tctctgtcccatctg

SEQ ID NO: 1641472 - DNA, 15 bp, Homo sapiens
ttctctgtcccatct

SEQ ID NO: 1641473 - DNA, 15 bp, Homo sapiens
cttctctgtcccatc

SEQ ID NO: 1641474 - DNA, 15 bp, Homo sapiens
acttctctgtcccat

SEQ ID NO: 1641475 - DNA, 15 bp, Homo sapiens
cacttctctgtccca

SEQ ID NO: 1641476 - DNA, 15 bp, Homo sapiens
tcacttctctgtccc

SEQ ID NO: 1641477 - DNA, 15 bp, Homo sapiens
atcacttctctgtcc

SEQ ID NO: 1641478 - DNA, 15 bp, Homo sapiens
aatcacttctctgtc

SEQ ID NO: 1641479 - DNA, 15 bp, Homo sapiens
aaatcacttctctgt

SEQ ID NO: 1641480 - DNA, 15 bp, Homo sapiens
aaaatcacttctctg

SEQ ID NO: 1641481 - DNA, 15 bp, Homo sapiens
aaaaatcacttctct

SEQ ID NO: 1641482 - DNA, 15 bp, Homo sapiens
aaaaaatcacttctc

SEQ ID NO: 1641483 - DNA, 15 bp, Homo sapiens
aaaaaaatcacttct

SEQ ID NO: 1641484 - DNA, 15 bp, Homo sapiens
taaaaaaatcacttc

SEQ ID NO: 1641485 - DNA, 15 bp, Homo sapiens
ctaaaaaaatcactt

SEQ ID NO: 1641486 - DNA, 15 bp, Homo sapiens
cctaaaaaaatcact

SEQ ID NO: 1641487 - DNA, 15 bp, Homo sapiens
tcctaaaaaaatcac

SEQ ID NO: 1641488 - DNA, 15 bp, Homo sapiens
atcctaaaaaaatca

SEQ ID NO: 1641489 - DNA, 15 bp, Homo sapiens
tatcctaaaaaaatc

SEQ ID NO: 1641490 - DNA, 15 bp, Homo sapiens
ctatcctaaaaaaat

SEQ ID NO: 1641491 - DNA, 15 bp, Homo sapiens
tctatcctaaaaaaa

SEQ ID NO: 1641492 - DNA, 15 bp, Homo sapiens
atctatcctaaaaaa

SEQ ID NO: 1641493 - DNA, 15 bp, Homo sapiens
aatctatcctaaaaa

SEQ ID NO: 1641494 - DNA, 15 bp, Homo sapiens
aaaatctatcctaaa

SEQ ID NO: 1641495 - DNA, 15 bp, Homo sapiens
aaaaatctatcctaa

SEQ ID NO: 1641496 - DNA, 15 bp, Homo sapiens
taaaaatctatccta

SEQ ID NO: 1641497 - DNA, 15 bp, Homo sapiens
gtaaaaatctatcct

SEQ ID NO: 1641498 - DNA, 15 bp, Homo sapiens
tgtaaaaatctatcc

SEQ ID NO: 1641499 - DNA, 15 bp, Homo sapiens
ttgtaaaaatctatc

SEQ ID NO: 1641500 - DNA, 15 bp, Homo sapiens
tttgtaaaaatctat

SEQ ID NO: 1641501 - DNA, 15 bp, Homo sapiens
ctttgtaaaaatcta

SEQ ID NO: 1641502 - DNA, 15 bp, Homo sapiens
cctttgtaaaaatct

SEQ ID NO: 1641503 - DNA, 15 bp, Homo sapiens
tcctttgtaaaaatc

SEQ ID NO: 1641504 - DNA, 15 bp, Homo sapiens
ttcctttgtaaaaat

SEQ ID NO: 1641505 - DNA, 15 bp, Homo sapiens
tttcctttgtaaaaa

SEQ ID NO: 1641506 - DNA, 15 bp, Homo sapiens
ctttcctttgtaaaa

SEQ ID NO: 1641507 - DNA, 15 bp, Homo sapiens
cctttcctttgtaaa

SEQ ID NO: 1641508 - DNA, 15 bp, Homo sapiens
tcctttcctttgtaa

SEQ ID NO: 1641509 - DNA, 15 bp, Homo sapiens
ttcctttcctttgta

SEQ ID NO: 1641510 - DNA, 15 bp, Homo sapiens
tttcctttcctttgt

SEQ ID NO: 1641511 - DNA, 15 bp, Homo sapiens
atttcctttcctttg

SEQ ID NO: 1641512 - DNA, 15 bp, Homo sapiens
catttcctttccttt

SEQ ID NO: 1641513 - DNA, 15 bp, Homo sapiens
tcatttcctttcctt

SEQ ID NO: 1641514 - DNA, 15 bp, Homo sapiens
ctcatttcctttcct

SEQ ID NO: 1641515 - DNA, 15 bp, Homo sapiens
tctcatttcctttcc

SEQ ID NO: 1641516 - DNA, 15 bp, Homo sapiens
ctctcatttcctttc

SEQ ID NO: 1641517 - DNA, 15 bp, Homo sapiens
cctctcatttccttt

SEQ ID NO: 1641518 - DNA, 15 bp, Homo sapiens
acctctcatttcctt

SEQ ID NO: 1641519 - DNA, 15 bp, Homo sapiens
aacctctcatttcct

SEQ ID NO: 1641520 - DNA, 15 bp, Homo sapiens
aaacctctcatttcc

SEQ ID NO: 1641521 - DNA, 15 bp, Homo sapiens
aaaacctctcatttc

SEQ ID NO: 1641522 - DNA, 15 bp, Homo sapiens
taaaacctctcattt

SEQ ID NO: 1641523 - DNA, 15 bp, Homo sapiens
ttaaaacctctcatt

SEQ ID NO: 1641524 - DNA, 15 bp, Homo sapiens
cttaaaacctctcat

SEQ ID NO: 1641525 - DNA, 15 bp, Homo sapiens
tcttaaaacctctca

SEQ ID NO: 1641526 - DNA, 15 bp, Homo sapiens
ctcttaaaacctctc

SEQ ID NO: 1641527 - DNA, 15 bp, Homo sapiens
cctcttaaaacctct

SEQ ID NO: 1641528 - DNA, 15 bp, Homo sapiens
gcctcttaaaacctc

SEQ ID NO: 1641529 - DNA, 15 bp, Homo sapiens
tgcctcttaaaacct

SEQ ID NO: 1641530 - DNA, 15 bp, Homo sapiens
ctgcctcttaaaacc

SEQ ID NO: 1641531 - DNA, 15 bp, Homo sapiens
cctgcctcttaaaac

SEQ ID NO: 1641532 - DNA, 15 bp, Homo sapiens
tcctgcctcttaaaa

SEQ ID NO: 1641533 - DNA, 15 bp, Homo sapiens
atcctgcctcttaaa

SEQ ID NO: 1641534 - DNA, 15 bp, Homo sapiens
tatcctgcctcttaa

SEQ ID NO: 1641535 - DNA, 15 bp, Homo sapiens
ctatcctgcctctta

SEQ ID NO: 1641536 - DNA, 15 bp, Homo sapiens
gctatcctgcctctt

SEQ ID NO: 1641537 - DNA, 15 bp, Homo sapiens
tgctatcctgcctct

SEQ ID NO: 1641538 - DNA, 15 bp, Homo sapiens
ctgctatcctgcctc

SEQ ID NO: 1641539 - DNA, 15 bp, Homo sapiens
gctgctatcctgcct

SEQ ID NO: 1641540 - DNA, 15 bp, Homo sapiens
agctgctatcctgcc

SEQ ID NO: 1641541 - DNA, 15 bp, Homo sapiens
aagctgctatcctgc

SEQ ID NO: 1641542 - DNA, 15 bp, Homo sapiens
caagctgctatcctg

SEQ ID NO: 1641543 - DNA, 15 bp, Homo sapiens
gcaagctgctatcct

SEQ ID NO: 1641544 - DNA, 15 bp, Homo sapiens
tgcaagctgctatcc

SEQ ID NO: 1641545 - DNA, 15 bp, Homo sapiens
ttgcaagctgctatc

SEQ ID NO: 1641546 - DNA, 15 bp, Homo sapiens
gttgcaagctgctat

SEQ ID NO: 1641547 - DNA, 15 bp, Homo sapiens
agttgcaagctgcta

SEQ ID NO: 1641548 - DNA, 15 bp, Homo sapiens
aagttgcaagctgct

SEQ ID NO: 1641549 - DNA, 15 bp, Homo sapiens
taagttgcaagctgc

SEQ ID NO: 1641550 - DNA, 15 bp, Homo sapiens
gtaagttgcaagctg

SEQ ID NO: 1641551 - DNA, 15 bp, Homo sapiens
tgtaagttgcaagct

SEQ ID NO: 1641552 - DNA, 15 bp, Homo sapiens
atgtaagttgcaagc

SEQ ID NO: 1641553 - DNA, 15 bp, Homo sapiens
catgtaagttgcaag

SEQ ID NO: 1641554 - DNA, 15 bp, Homo sapiens
ccatgtaagttgcaa

SEQ ID NO: 1641555 - DNA, 15 bp, Homo sapiens
tccatgtaagttgca

SEQ ID NO: 1641556 - DNA, 15 bp, Homo sapiens
ttccatgtaagttgc

SEQ ID NO: 1641557 - DNA, 15 bp, Homo sapiens
cttccatgtaagttg

SEQ ID NO: 1641558 - DNA, 15 bp, Homo sapiens
ccttccatgtaagtt

SEQ ID NO: 1641559 - DNA, 15 bp, Homo sapiens
cccttccatgtaagt

SEQ ID NO: 1641560 - DNA, 15 bp, Homo sapiens
ccccttccatgtaag

SEQ ID NO: 1641561 - DNA, 15 bp, Homo sapiens
accccttccatgtaa

SEQ ID NO: 1641562 - DNA, 15 bp, Homo sapiens
aaccccttccatgta

SEQ ID NO: 1641563 - DNA, 15 bp, Homo sapiens
taaccccttccatgt

SEQ ID NO: 1641564 - DNA, 15 bp, Homo sapiens
gtaaccccttccatg

SEQ ID NO: 1641565 - DNA, 15 bp, Homo sapiens
tgtaaccccttccat

SEQ ID NO: 1641566 - DNA, 15 bp, Homo sapiens
ttgtaaccccttcca

SEQ ID NO: 1641567 - DNA, 15 bp, Homo sapiens
tttgtaaccccttcc

SEQ ID NO: 1641568 - DNA, 15 bp, Homo sapiens
ttttgtaaccccttc

SEQ ID NO: 1641569 - DNA, 15 bp, Homo sapiens
attttgtaacccctt

SEQ ID NO: 1641570 - DNA, 15 bp, Homo sapiens
cattttgtaacccct

SEQ ID NO: 1641571 - DNA, 15 bp, Homo sapiens
tcattttgtaacccc

SEQ ID NO: 1641572 - DNA, 15 bp, Homo sapiens
gtcattttgtaaccc

SEQ ID NO: 1641573 - DNA, 15 bp, Homo sapiens
tgtcattttgtaacc

SEQ ID NO: 1641574 - DNA, 15 bp, Homo sapiens
ttgtcattttgtaac

SEQ ID NO: 1641575 - DNA, 15 bp, Homo sapiens
gttgtcattttgtaa

SEQ ID NO: 1641576 - DNA, 15 bp, Homo sapiens
tgttgtcattttgta

SEQ ID NO: 1641577 - DNA, 15 bp, Homo sapiens
ctgttgtcattttgt

SEQ ID NO: 1641578 - DNA, 15 bp, Homo sapiens
tctgttgtcattttg

SEQ ID NO: 1641579 - DNA, 15 bp, Homo sapiens
ttctgttgtcatttt

SEQ ID NO: 1641580 - DNA, 15 bp, Homo sapiens
attctgttgtcattt

SEQ ID NO: 1641581 - DNA, 15 bp, Homo sapiens
tattctgttgtcatt

SEQ ID NO: 1641582 - DNA, 15 bp, Homo sapiens
ctattctgttgtcat

SEQ ID NO: 1641583 - DNA, 15 bp, Homo sapiens
tctattctgttgtca

SEQ ID NO: 1641584 - DNA, 15 bp, Homo sapiens
ttctattctgttgtc

SEQ ID NO: 1641585 - DNA, 15 bp, Homo sapiens
attctattctgttgt

SEQ ID NO: 1641586 - DNA, 15 bp, Homo sapiens
tattctattctgttg

SEQ ID NO: 1641587 - DNA, 15 bp, Homo sapiens
ctattctattctgtt

SEQ ID NO: 1641588 - DNA, 15 bp, Homo sapiens
cctattctattctgt

SEQ ID NO: 1641589 - DNA, 15 bp, Homo sapiens
gcctattctattctg

SEQ ID NO: 1641590 - DNA, 15 bp, Homo sapiens
ggcctattctattct

SEQ ID NO: 1641591 - DNA, 15 bp, Homo sapiens
aggcctattctattc

SEQ ID NO: 1641592 - DNA, 15 bp, Homo sapiens
caggcctattctatt

SEQ ID NO: 1641593 - DNA, 15 bp, Homo sapiens
acaggcctattctat

SEQ ID NO: 1641594 - DNA, 15 bp, Homo sapiens
cacaggcctattcta

SEQ ID NO: 1641595 - DNA, 15 bp, Homo sapiens
tcacaggcctattct

SEQ ID NO: 1641596 - DNA, 15 bp, Homo sapiens
ctcacaggcctattc

SEQ ID NO: 1641597 - DNA, 15 bp, Homo sapiens
cctcacaggcctatt

SEQ ID NO: 1641598 - DNA, 15 bp, Homo sapiens
gcctcacaggcctat

SEQ ID NO: 1641599 - DNA, 15 bp, Homo sapiens
agcctcacaggccta

SEQ ID NO: 1641600 - DNA, 15 bp, Homo sapiens
cagcctcacaggcct

SEQ ID NO: 1641601 - DNA, 15 bp, Homo sapiens
ccagcctcacaggcc

SEQ ID NO: 1641602 - DNA, 15 bp, Homo sapiens
tccagcctcacaggc

SEQ ID NO: 1641603 - DNA, 15 bp, Homo sapiens
ttccagcctcacagg

SEQ ID NO: 1641604 - DNA, 15 bp, Homo sapiens
cttccagcctcacag

SEQ ID NO: 1641605 - DNA, 15 bp, Homo sapiens
ccttccagcctcaca

SEQ ID NO: 1641606 - DNA, 15 bp, Homo sapiens
tccttccagcctcac

SEQ ID NO: 1641607 - DNA, 15 bp, Homo sapiens
ctccttccagcctca

SEQ ID NO: 1641608 - DNA, 15 bp, Homo sapiens
tctccttccagcctc

SEQ ID NO: 1641609 - DNA, 15 bp, Homo sapiens
atctccttccagcct

SEQ ID NO: 1641610 - DNA, 15 bp, Homo sapiens
tatctccttccagcc

SEQ ID NO: 1641611 - DNA, 15 bp, Homo sapiens
atatctccttccagc

SEQ ID NO: 1641612 - DNA, 15 bp, Homo sapiens
aatatctccttccag

SEQ ID NO: 1641613 - DNA, 15 bp, Homo sapiens
aaatatctccttcca

SEQ ID NO: 1641614 - DNA, 15 bp, Homo sapiens
aaaatatctccttcc

SEQ ID NO: 1641615 - DNA, 15 bp, Homo sapiens
gaaaatatctccttc

SEQ ID NO: 1641616 - DNA, 15 bp, Homo sapiens
ggaaaatatctcctt

SEQ ID NO: 1641617 - DNA, 15 bp, Homo sapiens
aggaaaatatctcct

SEQ ID NO: 1641618 - DNA, 15 bp, Homo sapiens
aaggaaaatatctcc

SEQ ID NO: 1641619 - DNA, 15 bp, Homo sapiens
caaggaaaatatctc

SEQ ID NO: 1641620 - DNA, 15 bp, Homo sapiens
acaaggaaaatatct

SEQ ID NO: 1641621 - DNA, 15 bp, Homo sapiens
aacaaggaaaatatc

SEQ ID NO: 1641622 - DNA, 15 bp, Homo sapiens
gaacaaggaaaatat

SEQ ID NO: 1641623 - DNA, 15 bp, Homo sapiens
ggaacaaggaaaata

SEQ ID NO: 1641624 - DNA, 15 bp, Homo sapiens
tggaacaaggaaaat

SEQ ID NO: 1641625 - DNA, 15 bp, Homo sapiens
ttggaacaaggaaaa

SEQ ID NO: 1641626 - DNA, 15 bp, Homo sapiens
cttggaacaaggaaa

SEQ ID NO: 1641627 - DNA, 15 bp, Homo sapiens
tcttggaacaaggaa

SEQ ID NO: 1641628 - DNA, 15 bp, Homo sapiens
ttcttggaacaagga

SEQ ID NO: 1641629 - DNA, 15 bp, Homo sapiens
gttcttggaacaagg

SEQ ID NO: 1641630 - DNA, 15 bp, Homo sapiens
ggttcttggaacaag

SEQ ID NO: 1641631 - DNA, 15 bp, Homo sapiens
tggttcttggaacaa

SEQ ID NO: 1641632 - DNA, 15 bp, Homo sapiens
atggttcttggaaca

SEQ ID NO: 1641633 - DNA, 15 bp, Homo sapiens
aatggttcttggaac

SEQ ID NO: 1641634 - DNA, 15 bp, Homo sapiens
aaatggttcttggaa

SEQ ID NO: 1641635 - DNA, 15 bp, Homo sapiens
caaatggttcttgga

SEQ ID NO: 1641636 - DNA, 15 bp, Homo sapiens
gcaaatggttcttgg

SEQ ID NO: 1641637 - DNA, 15 bp, Homo sapiens
ggcaaatggttcttg

SEQ ID NO: 1641638 - DNA, 15 bp, Homo sapiens
aggcaaatggttctt

SEQ ID NO: 1641639 - DNA, 15 bp, Homo sapiens
aaggcaaatggttct

SEQ ID NO: 1641640 - DNA, 15 bp, Homo sapiens
caaggcaaatggttc

SEQ ID NO: 1641641 - DNA, 15 bp, Homo sapiens
acaaggcaaatggtt

SEQ ID NO: 1641642 - DNA, 15 bp, Homo sapiens
cacaaggcaaatggt

SEQ ID NO: 1641643 - DNA, 15 bp, Homo sapiens
acacaaggcaaatgg

SEQ ID NO: 1641644 - DNA, 15 bp, Homo sapiens
cacacaaggcaaatg

SEQ ID NO: 1641645 - DNA, 15 bp, Homo sapiens
ccacacaaggcaaat

SEQ ID NO: 1641646 - DNA, 15 bp, Homo sapiens
tccacacaaggcaaa

SEQ ID NO: 1641647 - DNA, 15 bp, Homo sapiens
ttccacacaaggcaa

SEQ ID NO: 1641648 - DNA, 15 bp, Homo sapiens
tttccacacaaggca

SEQ ID NO: 1641649 - DNA, 15 bp, Homo sapiens
ctttccacacaaggc

SEQ ID NO: 1641650 - DNA, 15 bp, Homo sapiens
tctttccacacaagg

SEQ ID NO: 1641651 - DNA, 15 bp, Homo sapiens
ctctttccacacaag

SEQ ID NO: 1641652 - DNA, 15 bp, Homo sapiens
tctctttccacacaa

SEQ ID NO: 1641653 - DNA, 15 bp, Homo sapiens
atctctttccacaca

SEQ ID NO: 1641654 - DNA, 15 bp, Homo sapiens
aatctctttccacac

SEQ ID NO: 1641655 - DNA, 15 bp, Homo sapiens
caatctctttccaca

SEQ ID NO: 1641656 - DNA, 15 bp, Homo sapiens
tcaatctctttccac

SEQ ID NO: 1641657 - DNA, 15 bp, Homo sapiens
atcaatctctttcca

SEQ ID NO: 1641658 - DNA, 15 bp, Homo sapiens
tatcaatctctttcc

SEQ ID NO: 1641659 - DNA, 15 bp, Homo sapiens
ctatcaatctctttc

SEQ ID NO: 1641660 - DNA, 15 bp, Homo sapiens
cctatcaatctcttt

SEQ ID NO: 1641661 - DNA, 15 bp, Homo sapiens
acctatcaatctctt

SEQ ID NO: 1641662 - DNA, 15 bp, Homo sapiens
cacctatcaatctct

SEQ ID NO: 1641663 - DNA, 15 bp, Homo sapiens
ccacctatcaatctc

SEQ ID NO: 1641664 - DNA, 15 bp, Homo sapiens
tccacctatcaatct

SEQ ID NO: 1641665 - DNA, 15 bp, Homo sapiens
ttccacctatcaatc

SEQ ID NO: 1641666 - DNA, 15 bp, Homo sapiens
cttccacctatcaat

SEQ ID NO: 1641667 - DNA, 15 bp, Homo sapiens
acttccacctatcaa

SEQ ID NO: 1641668 - DNA, 15 bp, Homo sapiens
aacttccacctatca

SEQ ID NO: 1641669 - DNA, 15 bp, Homo sapiens
aaacttccacctatc

SEQ ID NO: 1641670 - DNA, 15 bp, Homo sapiens
gaaacttccacctat

SEQ ID NO: 1641671 - DNA, 15 bp, Homo sapiens
tgaaacttccaccta

SEQ ID NO: 1641672 - DNA, 15 bp, Homo sapiens
ctgaaacttccacct

SEQ ID NO: 1641673 - DNA, 15 bp, Homo sapiens
actgaaacttccacc

SEQ ID NO: 1641674 - DNA, 15 bp, Homo sapiens
cactgaaacttccac

SEQ ID NO: 1641675 - DNA, 15 bp, Homo sapiens
ccactgaaacttcca

SEQ ID NO: 1641676 - DNA, 15 bp, Homo sapiens
cccactgaaacttcc

SEQ ID NO: 1641677 - DNA, 15 bp, Homo sapiens
tcccactgaaacttc

SEQ ID NO: 1641678 - DNA, 15 bp, Homo sapiens
ctcccactgaaactt

SEQ ID NO: 1641679 - DNA, 15 bp, Homo sapiens
tctcccactgaaact

SEQ ID NO: 1641680 - DNA, 15 bp, Homo sapiens
ctctcccactgaaac

SEQ ID NO: 1641681 - DNA, 15 bp, Homo sapiens
actctcccactgaaa

SEQ ID NO: 1641682 - DNA, 15 bp, Homo sapiens
tactctcccactgaa

SEQ ID NO: 1641683 - DNA, 15 bp, Homo sapiens
ctactctcccactga

SEQ ID NO: 1641684 - DNA, 15 bp, Homo sapiens
cctactctcccactg

SEQ ID NO: 1641685 - DNA, 15 bp, Homo sapiens
acctactctcccact

SEQ ID NO: 1641686 - DNA, 15 bp, Homo sapiens
cacctactctcccac

SEQ ID NO: 1641687 - DNA, 15 bp, Homo sapiens
ccacctactctccca

SEQ ID NO: 1641688 - DNA, 15 bp, Homo sapiens
cccacctactctccc

SEQ ID NO: 1641689 - DNA, 15 bp, Homo sapiens
tcccacctactctcc

SEQ ID NO: 1641690 - DNA, 15 bp, Homo sapiens
ctcccacctactctc

SEQ ID NO: 1641691 - DNA, 15 bp, Homo sapiens
actcccacctactct

SEQ ID NO: 1641692 - DNA, 15 bp, Homo sapiens
cactcccacctactc

SEQ ID NO: 1641693 - DNA, 15 bp, Homo sapiens
tcactcccacctact

SEQ ID NO: 1641694 - DNA, 15 bp, Homo sapiens
gtcactcccacctac

SEQ ID NO: 1641695 - DNA, 15 bp, Homo sapiens
tgtcactcccaccta

SEQ ID NO: 1641696 - DNA, 15 bp, Homo sapiens
ctgtcactcccacct

SEQ ID NO: 1641697 - DNA, 15 bp, Homo sapiens
tctgtcactcccacc

SEQ ID NO: 1641698 - DNA, 15 bp, Homo sapiens
atctgtcactcccac

SEQ ID NO: 1641699 - DNA, 15 bp, Homo sapiens
catctgtcactccca

SEQ ID NO: 1641700 - DNA, 15 bp, Homo sapiens
tcatctgtcactccc

SEQ ID NO: 1641701 - DNA, 15 bp, Homo sapiens
ctcatctgtcactcc

SEQ ID NO: 1641702 - DNA, 15 bp, Homo sapiens
tctcatctgtcactc

SEQ ID NO: 1641703 - DNA, 15 bp, Homo sapiens
ttctcatctgtcact

SEQ ID NO: 1641704 - DNA, 15 bp, Homo sapiens
cttctcatctgtcac

SEQ ID NO: 1641705 - DNA, 15 bp, Homo sapiens
ccttctcatctgtca

SEQ ID NO: 1641706 - DNA, 15 bp, Homo sapiens
tccttctcatctgtc

SEQ ID NO: 1641707 - DNA, 15 bp, Homo sapiens
ctccttctcatctgt

SEQ ID NO: 1641708 - DNA, 15 bp, Homo sapiens
tctccttctcatctg

SEQ ID NO: 1641709 - DNA, 15 bp, Homo sapiens
ttctccttctcatct

SEQ ID NO: 1641710 - DNA, 15 bp, Homo sapiens
tttctccttctcatc

SEQ ID NO: 1641711 - DNA, 15 bp, Homo sapiens
ttttctccttctcat

SEQ ID NO: 1641712 - DNA, 15 bp, Homo sapiens
tttttctccttctca

SEQ ID NO: 1641713 - DNA, 15 bp, Homo sapiens
gtttttctccttctc

SEQ ID NO: 1641714 - DNA, 15 bp, Homo sapiens
agtttttctccttct

SEQ ID NO: 1641715 - DNA, 15 bp, Homo sapiens
cagtttttctccttc

SEQ ID NO: 1641716 - DNA, 15 bp, Homo sapiens
ccagtttttctcctt

SEQ ID NO: 1641717 - DNA, 15 bp, Homo sapiens
gccagtttttctcct

SEQ ID NO: 1641718 - DNA, 15 bp, Homo sapiens
ggccagtttttctcc

SEQ ID NO: 1641719 - DNA, 15 bp, Homo sapiens
tggccagtttttctc

SEQ ID NO: 1641720 - DNA, 15 bp, Homo sapiens
atggccagtttttct

SEQ ID NO: 1641721 - DNA, 15 bp, Homo sapiens
catggccagtttttc

SEQ ID NO: 1641722 - DNA, 15 bp, Homo sapiens
tcatggccagttttt

SEQ ID NO: 1641723 - DNA, 15 bp, Homo sapiens
ctcatggccagtttt

SEQ ID NO: 1641724 - DNA, 15 bp, Homo sapiens
cctcatggccagttt

SEQ ID NO: 1641725 - DNA, 15 bp, Homo sapiens
ccctcatggccagtt

SEQ ID NO: 1641726 - DNA, 15 bp, Homo sapiens
tccctcatggccagt

SEQ ID NO: 1641727 - DNA, 15 bp, Homo sapiens
gtccctcatggccag

SEQ ID NO: 1641728 - DNA, 15 bp, Homo sapiens
tgtccctcatggcca

SEQ ID NO: 1641729 - DNA, 15 bp, Homo sapiens
ctgtccctcatggcc

SEQ ID NO: 1641730 - DNA, 15 bp, Homo sapiens
tctgtccctcatggc

SEQ ID NO: 1641731 - DNA, 15 bp, Homo sapiens
ttctgtccctcatgg

SEQ ID NO: 1641732 - DNA, 15 bp, Homo sapiens
cttctgtccctcatg

SEQ ID NO: 1641733 - DNA, 15 bp, Homo sapiens
acttctgtccctcat

SEQ ID NO: 1641734 - DNA, 15 bp, Homo sapiens
aacttctgtccctca

SEQ ID NO: 1641735 - DNA, 15 bp, Homo sapiens
caacttctgtccctc

SEQ ID NO: 1641736 - DNA, 15 bp, Homo sapiens
ccaacttctgtccct

SEQ ID NO: 1641737 - DNA, 15 bp, Homo sapiens
cccaacttctgtccc

SEQ ID NO: 1641738 - DNA, 15 bp, Homo sapiens
tcccaacttctgtcc

SEQ ID NO: 1641739 - DNA, 15 bp, Homo sapiens
gtcccaacttctgtc

SEQ ID NO: 1641740 - DNA, 15 bp, Homo sapiens
tgtcccaacttctgt

SEQ ID NO: 1641741 - DNA, 15 bp, Homo sapiens
gtgtcccaacttctg

SEQ ID NO: 1641742 - DNA, 15 bp, Homo sapiens
agtgtcccaacttct

SEQ ID NO: 1641743 - DNA, 15 bp, Homo sapiens
tagtgtcccaacttc

SEQ ID NO: 1641744 - DNA, 15 bp, Homo sapiens
ctagtgtcccaactt

SEQ ID NO: 1641745 - DNA, 15 bp, Homo sapiens
gctagtgtcccaact

SEQ ID NO: 1641746 - DNA, 15 bp, Homo sapiens
agctagtgtcccaac

SEQ ID NO: 1641747 - DNA, 15 bp, Homo sapiens
cagctagtgtcccaa

SEQ ID NO: 1641748 - DNA, 15 bp, Homo sapiens
gcagctagtgtccca

SEQ ID NO: 1641749 - DNA, 15 bp, Homo sapiens
agcagctagtgtccc

SEQ ID NO: 1641750 - DNA, 15 bp, Homo sapiens
aagcagctagtgtcc

SEQ ID NO: 1641751 - DNA, 15 bp, Homo sapiens
gaagcagctagtgtc

SEQ ID NO: 1641752 - DNA, 15 bp, Homo sapiens
agaagcagctagtgt

SEQ ID NO: 1641753 - DNA, 15 bp, Homo sapiens
aagaagcagctagtg

SEQ ID NO: 1641754 - DNA, 15 bp, Homo sapiens
aaagaagcagctagt

SEQ ID NO: 1641755 - DNA, 15 bp, Homo sapiens
taaagaagcagctag

SEQ ID NO: 1641756 - DNA, 15 bp, Homo sapiens
ctaaagaagcagcta

SEQ ID NO: 1641757 - DNA, 15 bp, Homo sapiens
gctaaagaagcagct

SEQ ID NO: 1641758 - DNA, 15 bp, Homo sapiens
agctaaagaagcagc

SEQ ID NO: 1641759 - DNA, 15 bp, Homo sapiens
tagctaaagaagcag

SEQ ID NO: 1641760 - DNA, 15 bp, Homo sapiens
gtagctaaagaagca

SEQ ID NO: 1641761 - DNA, 15 bp, Homo sapiens
ggtagctaaagaagc

SEQ ID NO: 1641762 - DNA, 15 bp, Homo sapiens
aggtagctaaagaag

SEQ ID NO: 1641763 - DNA, 15 bp, Homo sapiens
aaggtagctaaagaa

SEQ ID NO: 1641764 - DNA, 15 bp, Homo sapiens
taaggtagctaaaga

SEQ ID NO: 1641765 - DNA, 15 bp, Homo sapiens
ataaggtagctaaag

SEQ ID NO: 1641766 - DNA, 15 bp, Homo sapiens
gataaggtagctaaa

SEQ ID NO: 1641767 - DNA, 15 bp, Homo sapiens
tgataaggtagctaa

SEQ ID NO: 1641768 - DNA, 15 bp, Homo sapiens
ctgataaggtagcta

SEQ ID NO: 1641769 - DNA, 15 bp, Homo sapiens
gctgataaggtagct

SEQ ID NO: 1641770 - DNA, 15 bp, Homo sapiens
tgctgataaggtagc

SEQ ID NO: 1641771 - DNA, 15 bp, Homo sapiens
atgctgataaggtag

SEQ ID NO: 1641772 - DNA, 15 bp, Homo sapiens
tatgctgataaggta

SEQ ID NO: 1641773 - DNA, 15 bp, Homo sapiens
ttatgctgataaggt

SEQ ID NO: 1641774 - DNA, 15 bp, Homo sapiens
cttatgctgataagg

SEQ ID NO: 1641775 - DNA, 15 bp, Homo sapiens
gcttatgctgataag

SEQ ID NO: 1641776 - DNA, 15 bp, Homo sapiens
tgcttatgctgataa

SEQ ID NO: 1641777 - DNA, 15 bp, Homo sapiens
gtgcttatgctgata

SEQ ID NO: 1641778 - DNA, 15 bp, Homo sapiens
agtgcttatgctgat

SEQ ID NO: 1641779 - DNA, 15 bp, Homo sapiens
cagtgcttatgctga

SEQ ID NO: 1641780 - DNA, 15 bp, Homo sapiens
acagtgcttatgctg

SEQ ID NO: 1641781 - DNA, 15 bp, Homo sapiens
gacagtgcttatgct

SEQ ID NO: 1641782 - DNA, 15 bp, Homo sapiens
ggacagtgcttatgc

SEQ ID NO: 1641783 - DNA, 15 bp, Homo sapiens
aggacagtgcttatg

SEQ ID NO: 1641784 - DNA, 15 bp, Homo sapiens
caggacagtgcttat

SEQ ID NO: 1641785 - DNA, 15 bp, Homo sapiens
tcaggacagtgctta

SEQ ID NO: 1641786 - DNA, 15 bp, Homo sapiens
ctcaggacagtgctt

SEQ ID NO: 1641787 - DNA, 15 bp, Homo sapiens
actcaggacagtgct

SEQ ID NO: 1641788 - DNA, 15 bp, Homo sapiens
cactcaggacagtgc

SEQ ID NO: 1641789 - DNA, 15 bp, Homo sapiens
tcactcaggacagtg

SEQ ID NO: 1641790 - DNA, 15 bp, Homo sapiens
atcactcaggacagt

SEQ ID NO: 1641791 - DNA, 15 bp, Homo sapiens
catcactcaggacag

SEQ ID NO: 1641792 - DNA, 15 bp, Homo sapiens
ccatcactcaggaca

SEQ ID NO: 1641793 - DNA, 15 bp, Homo sapiens
cccatcactcaggac

SEQ ID NO: 1641794 - DNA, 15 bp, Homo sapiens
tcccatcactcagga

SEQ ID NO: 1641795 - DNA, 15 bp, Homo sapiens
atcccatcactcagg

SEQ ID NO: 1641796 - DNA, 15 bp, Homo sapiens
gatcccatcactcag

SEQ ID NO: 1641797 - DNA, 15 bp, Homo sapiens
agatcccatcactca

SEQ ID NO: 1641798 - DNA, 15 bp, Homo sapiens
cagatcccatcactc

SEQ ID NO: 1641799 - DNA, 15 bp, Homo sapiens
tcagatcccatcact

SEQ ID NO: 1641800 - DNA, 15 bp, Homo sapiens
atcagatcccatcac

SEQ ID NO: 1641801 - DNA, 15 bp, Homo sapiens
catcagatcccatca

SEQ ID NO: 1641802 - DNA, 15 bp, Homo sapiens
gcatcagatcccatc

SEQ ID NO: 1641803 - DNA, 15 bp, Homo sapiens
ggcatcagatcccat

SEQ ID NO: 1641804 - DNA, 15 bp, Homo sapiens
aggcatcagatccca

SEQ ID NO: 1641805 - DNA, 15 bp, Homo sapiens
aaggcatcagatccc

SEQ ID NO: 1641806 - DNA, 15 bp, Homo sapiens
aaaggcatcagatcc

SEQ ID NO: 1641807 - DNA, 15 bp, Homo sapiens
aaaaggcatcagatc

SEQ ID NO: 1641808 - DNA, 15 bp, Homo sapiens
caaaaggcatcagat

SEQ ID NO: 1641809 - DNA, 15 bp, Homo sapiens
tcaaaaggcatcaga

SEQ ID NO: 1641810 - DNA, 15 bp, Homo sapiens
atcaaaaggcatcag

SEQ ID NO: 1641811 - DNA, 15 bp, Homo sapiens
catcaaaaggcatca

SEQ ID NO: 1641812 - DNA, 15 bp, Homo sapiens
ccatcaaaaggcatc

SEQ ID NO: 1641813 - DNA, 15 bp, Homo sapiens
gccatcaaaaggcat

SEQ ID NO: 1641814 - DNA, 15 bp, Homo sapiens
ggccatcaaaaggca

SEQ ID NO: 1641815 - DNA, 15 bp, Homo sapiens
gggccatcaaaaggc

SEQ ID NO: 1641816 - DNA, 15 bp, Homo sapiens
agggccatcaaaagg

SEQ ID NO: 1641817 - DNA, 15 bp, Homo sapiens
aagggccatcaaaag

SEQ ID NO: 1641818 - DNA, 15 bp, Homo sapiens
caagggccatcaaaa

SEQ ID NO: 1641819 - DNA, 15 bp, Homo sapiens
ccaagggccatcaaa

SEQ ID NO: 1641820 - DNA, 15 bp, Homo sapiens
tccaagggccatcaa

SEQ ID NO: 1641821 - DNA, 15 bp, Homo sapiens
ctccaagggccatca

SEQ ID NO: 1641822 - DNA, 15 bp, Homo sapiens
actccaagggccatc

SEQ ID NO: 1641823 - DNA, 15 bp, Homo sapiens
cactccaagggccat

SEQ ID NO: 1641824 - DNA, 15 bp, Homo sapiens
tcactccaagggcca

SEQ ID NO: 1641825 - DNA, 15 bp, Homo sapiens
ttcactccaagggcc

SEQ ID NO: 1641826 - DNA, 15 bp, Homo sapiens
attcactccaagggc

SEQ ID NO: 1641827 - DNA, 15 bp, Homo sapiens
cattcactccaaggg

SEQ ID NO: 1641828 - DNA, 15 bp, Homo sapiens
tcattcactccaagg

SEQ ID NO: 1641829 - DNA, 15 bp, Homo sapiens
gtcattcactccaag

SEQ ID NO: 1641830 - DNA, 15 bp, Homo sapiens
agtcattcactccaa

SEQ ID NO: 1641831 - DNA, 15 bp, Homo sapiens
gagtcattcactcca

SEQ ID NO: 1641832 - DNA, 15 bp, Homo sapiens
ggagtcattcactcc

SEQ ID NO: 1641833 - DNA, 15 bp, Homo sapiens
tggagtcattcactc

SEQ ID NO: 1641834 - DNA, 15 bp, Homo sapiens
ctggagtcattcact

SEQ ID NO: 1641835 - DNA, 15 bp, Homo sapiens
gctggagtcattcac

SEQ ID NO: 1641836 - DNA, 15 bp, Homo sapiens
agctggagtcattca

SEQ ID NO: 1641837 - DNA, 15 bp, Homo sapiens
aagctggagtcattc

SEQ ID NO: 1641838 - DNA, 15 bp, Homo sapiens
gaagctggagtcatt

SEQ ID NO: 1641839 - DNA, 15 bp, Homo sapiens
ggaagctggagtcat

SEQ ID NO: 1641840 - DNA, 15 bp, Homo sapiens
aggaagctggagtca

SEQ ID NO: 1641841 - DNA, 15 bp, Homo sapiens
aaggaagctggagtc

SEQ ID NO: 1641842 - DNA, 15 bp, Homo sapiens
aaaggaagctggagt

SEQ ID NO: 1641843 - DNA, 15 bp, Homo sapiens
caaaggaagctggag

SEQ ID NO: 1641844 - DNA, 15 bp, Homo sapiens
ccaaaggaagctgga

SEQ ID NO: 1641845 - DNA, 15 bp, Homo sapiens
tccaaaggaagctgg

SEQ ID NO: 1641846 - DNA, 15 bp, Homo sapiens
ttccaaaggaagctg

SEQ ID NO: 1641847 - DNA, 15 bp, Homo sapiens
cttccaaaggaagct

SEQ ID NO: 1641848 - DNA, 15 bp, Homo sapiens
acttccaaaggaagc

SEQ ID NO: 1641849 - DNA, 15 bp, Homo sapiens
tacttccaaaggaag

SEQ ID NO: 1641850 - DNA, 15 bp, Homo sapiens
ttacttccaaaggaa

SEQ ID NO: 1641851 - DNA, 15 bp, Homo sapiens
tttacttccaaagga

SEQ ID NO: 1641852 - DNA, 15 bp, Homo sapiens
ctttacttccaaagg

SEQ ID NO: 1641853 - DNA, 15 bp, Homo sapiens
actttacttccaaag

SEQ ID NO: 1641854 - DNA, 15 bp, Homo sapiens
cactttacttccaaa

SEQ ID NO: 1641855 - DNA, 15 bp, Homo sapiens
ccactttacttccaa

SEQ ID NO: 1641856 - DNA, 15 bp, Homo sapiens
gccactttacttcca

SEQ ID NO: 1641857 - DNA, 15 bp, Homo sapiens
ggccactttacttcc

SEQ ID NO: 1641858 - DNA, 15 bp, Homo sapiens
aggccactttacttc

SEQ ID NO: 1641859 - DNA, 15 bp, Homo sapiens
aaggccactttactt

SEQ ID NO: 1641860 - DNA, 15 bp, Homo sapiens
caaggccactttact

SEQ ID NO: 1641861 - DNA, 15 bp, Homo sapiens
tcaaggccactttac

SEQ ID NO: 1641862 - DNA, 15 bp, Homo sapiens
ctcaaggccacttta

SEQ ID NO: 1641863 - DNA, 15 bp, Homo sapiens
tctcaaggccacttt

SEQ ID NO: 1641864 - DNA, 15 bp, Homo sapiens
ttctcaaggccactt

SEQ ID NO: 1641865 - DNA, 15 bp, Homo sapiens
cttctcaaggccact

SEQ ID NO: 1641866 - DNA, 15 bp, Homo sapiens
tcttctcaaggccac

SEQ ID NO: 1641867 - DNA, 15 bp, Homo sapiens
ctcttctcaaggcca

SEQ ID NO: 1641868 - DNA, 15 bp, Homo sapiens
actcttctcaaggcc

SEQ ID NO: 1641869 - DNA, 15 bp, Homo sapiens
aactcttctcaaggc

SEQ ID NO: 1641870 - DNA, 15 bp, Homo sapiens
aaactcttctcaagg

SEQ ID NO: 1641871 - DNA, 15 bp, Homo sapiens
aaaactcttctcaag

SEQ ID NO: 1641872 - DNA, 15 bp, Homo sapiens
aaaaactcttctcaa

SEQ ID NO: 1641873 - DNA, 15 bp, Homo sapiens
taaaaactcttctca

SEQ ID NO: 1641874 - DNA, 15 bp, Homo sapiens
ataaaaactcttctc

SEQ ID NO: 1641875 - DNA, 15 bp, Homo sapiens
aataaaaactcttct

SEQ ID NO: 1641876 - DNA, 15 bp, Homo sapiens
taataaaaactcttc

SEQ ID NO: 1641877 - DNA, 15 bp, Homo sapiens
ttaataaaaactctt

SEQ ID NO: 1641878 - DNA, 15 bp, Homo sapiens
tttaataaaaactct

SEQ ID NO: 1641879 - DNA, 15 bp, Homo sapiens
ctttaataaaaactc

SEQ ID NO: 1641880 - DNA, 15 bp, Homo sapiens
tctttaataaaaact

SEQ ID NO: 1641881 - DNA, 15 bp, Homo sapiens
ctctttaataaaaac

SEQ ID NO: 1641882 - DNA, 15 bp, Homo sapiens
cctctttaataaaaa

SEQ ID NO: 1641883 - DNA, 15 bp, Homo sapiens
gcctctttaataaaa

SEQ ID NO: 1641884 - DNA, 15 bp, Homo sapiens
tgcctctttaataaa

SEQ ID NO: 1641885 - DNA, 15 bp, Homo sapiens
atgcctctttaataa

SEQ ID NO: 1641886 - DNA, 15 bp, Homo sapiens
aatgcctctttaata

SEQ ID NO: 1641887 - DNA, 15 bp, Homo sapiens
taatgcctctttaat

SEQ ID NO: 1641888 - DNA, 15 bp, Homo sapiens
ttaatgcctctttaa

SEQ ID NO: 1641889 - DNA, 15 bp, Homo sapiens
attaatgcctcttta

SEQ ID NO: 1641890 - DNA, 15 bp, Homo sapiens
cattaatgcctcttt

SEQ ID NO: 1641891 - DNA, 15 bp, Homo sapiens
tcattaatgcctctt

SEQ ID NO: 1641892 - DNA, 15 bp, Homo sapiens
atcattaatgcctct

SEQ ID NO: 1641893 - DNA, 15 bp, Homo sapiens
catcattaatgcctc

SEQ ID NO: 1641894 - DNA, 15 bp, Homo sapiens
ccatcattaatgcct

SEQ ID NO: 1641895 - DNA, 15 bp, Homo sapiens
tccatcattaatgcc

SEQ ID NO: 1641896 - DNA, 15 bp, Homo sapiens
ctccatcattaatgc

SEQ ID NO: 1641897 - DNA, 15 bp, Homo sapiens
cctccatcattaatg

SEQ ID NO: 1641898 - DNA, 15 bp, Homo sapiens
tcctccatcattaat

SEQ ID NO: 1641899 - DNA, 15 bp, Homo sapiens
gtcctccatcattaa

SEQ ID NO: 1641900 - DNA, 15 bp, Homo sapiens
tgtcctccatcatta

SEQ ID NO: 1641901 - DNA, 15 bp, Homo sapiens
gtgtcctccatcatt

SEQ ID NO: 1641902 - DNA, 15 bp, Homo sapiens
agtgtcctccatcat

SEQ ID NO: 1641903 - DNA, 15 bp, Homo sapiens
aagtgtcctccatca

SEQ ID NO: 1641904 - DNA, 15 bp, Homo sapiens
caagtgtcctccatc

SEQ ID NO: 1641905 - DNA, 15 bp, Homo sapiens
gcaagtgtcctccat

SEQ ID NO: 1641906 - DNA, 15 bp, Homo sapiens
tgcaagtgtcctcca

SEQ ID NO: 1641907 - DNA, 15 bp, Homo sapiens
atgcaagtgtcctcc

SEQ ID NO: 1641908 - DNA, 15 bp, Homo sapiens
tatgcaagtgtcctc

SEQ ID NO: 1641909 - DNA, 15 bp, Homo sapiens
ctatgcaagtgtcct

SEQ ID NO: 1641910 - DNA, 15 bp, Homo sapiens
gctatgcaagtgtcc

SEQ ID NO: 1641911 - DNA, 15 bp, Homo sapiens
cgctatgcaagtgtc

SEQ ID NO: 1641912 - DNA, 15 bp, Homo sapiens
tcgctatgcaagtgt

SEQ ID NO: 1641913 - DNA, 15 bp, Homo sapiens
ctcgctatgcaagtg

SEQ ID NO: 1641914 - DNA, 15 bp, Homo sapiens
cctcgctatgcaagt

SEQ ID NO: 1641915 - DNA, 15 bp, Homo sapiens
tcctcgctatgcaag

SEQ ID NO: 1641916 - DNA, 15 bp, Homo sapiens
ttcctcgctatgcaa

SEQ ID NO: 1641917 - DNA, 15 bp, Homo sapiens
tttcctcgctatgca

SEQ ID NO: 1641918 - DNA, 15 bp, Homo sapiens
gtttcctcgctatgc

SEQ ID NO: 1641919 - DNA, 15 bp, Homo sapiens
ggtttcctcgctatg

SEQ ID NO: 1641920 - DNA, 15 bp, Homo sapiens
aggtttcctcgctat

SEQ ID NO: 1641921 - DNA, 15 bp, Homo sapiens
gaggtttcctcgcta

SEQ ID NO: 1641922 - DNA, 15 bp, Homo sapiens
agaggtttcctcgct

SEQ ID NO: 1641923 - DNA, 15 bp, Homo sapiens
aagaggtttcctcgc

SEQ ID NO: 1641924 - DNA, 15 bp, Homo sapiens
aaagaggtttcctcg

SEQ ID NO: 1641925 - DNA, 15 bp, Homo sapiens
aaaagaggtttcctc

SEQ ID NO: 1641926 - DNA, 15 bp, Homo sapiens
taaaagaggtttcct

SEQ ID NO: 1641927 - DNA, 15 bp, Homo sapiens
ctaaaagaggtttcc

SEQ ID NO: 1641928 - DNA, 15 bp, Homo sapiens
gctaaaagaggtttc

SEQ ID NO: 1641929 - DNA, 15 bp, Homo sapiens
ggctaaaagaggttt

SEQ ID NO: 1641930 - DNA, 15 bp, Homo sapiens
aggctaaaagaggtt

SEQ ID NO: 1641931 - DNA, 15 bp, Homo sapiens
taggctaaaagaggt

SEQ ID NO: 1641932 - DNA, 15 bp, Homo sapiens
gtaggctaaaagagg

SEQ ID NO: 1641933 - DNA, 15 bp, Homo sapiens
tgtaggctaaaagag

SEQ ID NO: 1641934 - DNA, 15 bp, Homo sapiens
atgtaggctaaaaga

SEQ ID NO: 1641935 - DNA, 15 bp, Homo sapiens
tatgtaggctaaaag

SEQ ID NO: 1641936 - DNA, 15 bp, Homo sapiens
ttatgtaggctaaaa

SEQ ID NO: 1641937 - DNA, 15 bp, Homo sapiens
gttatgtaggctaaa

SEQ ID NO: 1641938 - DNA, 15 bp, Homo sapiens
tgttatgtaggctaa

SEQ ID NO: 1641939 - DNA, 15 bp, Homo sapiens
ctgttatgtaggcta

SEQ ID NO: 1641940 - DNA, 15 bp, Homo sapiens
gctgttatgtaggct

SEQ ID NO: 1641941 - DNA, 15 bp, Homo sapiens
tgctgttatgtaggc

SEQ ID NO: 1641942 - DNA, 15 bp, Homo sapiens
atgctgttatgtagg

SEQ ID NO: 1641943 - DNA, 15 bp, Homo sapiens
catgctgttatgtag

SEQ ID NO: 1641944 - DNA, 15 bp, Homo sapiens
ccatgctgttatgta

SEQ ID NO: 1641945 - DNA, 15 bp, Homo sapiens
accatgctgttatgt

SEQ ID NO: 1641946 - DNA, 15 bp, Homo sapiens
caccatgctgttatg

SEQ ID NO: 1641947 - DNA, 15 bp, Homo sapiens
ccaccatgctgttat

SEQ ID NO: 1641948 - DNA, 15 bp, Homo sapiens
accaccatgctgtta

SEQ ID NO: 1641949 - DNA, 15 bp, Homo sapiens
caccaccatgctgtt

SEQ ID NO: 1641950 - DNA, 15 bp, Homo sapiens
gcaccaccatgctgt

SEQ ID NO: 1641951 - DNA, 15 bp, Homo sapiens
tgcaccaccatgctg

SEQ ID NO: 1641952 - DNA, 15 bp, Homo sapiens
ctgcaccaccatgct

SEQ ID NO: 1641953 - DNA, 15 bp, Homo sapiens
cctgcaccaccatgc

SEQ ID NO: 1641954 - DNA, 15 bp, Homo sapiens
tcctgcaccaccatg

SEQ ID NO: 1641955 - DNA, 15 bp, Homo sapiens
atcctgcaccaccat

SEQ ID NO: 1641956 - DNA, 15 bp, Homo sapiens
tatcctgcaccacca

SEQ ID NO: 1641957 - DNA, 15 bp, Homo sapiens
atatcctgcaccacc

SEQ ID NO: 1641958 - DNA, 15 bp, Homo sapiens
catatcctgcaccac

SEQ ID NO: 1641959 - DNA, 15 bp, Homo sapiens
ccatatcctgcacca

SEQ ID NO: 1641960 - DNA, 15 bp, Homo sapiens
tccatatcctgcacc

SEQ ID NO: 1641961 - DNA, 15 bp, Homo sapiens
ttccatatcctgcac

SEQ ID NO: 1641962 - DNA, 15 bp, Homo sapiens
cttccatatcctgca

SEQ ID NO: 1641963 - DNA, 15 bp, Homo sapiens
ccttccatatcctgc

SEQ ID NO: 1641964 - DNA, 15 bp, Homo sapiens
gccttccatatcctg

SEQ ID NO: 1641965 - DNA, 15 bp, Homo sapiens
tgccttccatatcct

SEQ ID NO: 1641966 - DNA, 15 bp, Homo sapiens
atgccttccatatcc

SEQ ID NO: 1641967 - DNA, 15 bp, Homo sapiens
tatgccttccatatc

SEQ ID NO: 1641968 - DNA, 15 bp, Homo sapiens
atatgccttccatat

SEQ ID NO: 1641969 - DNA, 15 bp, Homo sapiens
aatatgccttccata

SEQ ID NO: 1641970 - DNA, 15 bp, Homo sapiens
aaatatgccttccat

SEQ ID NO: 1641971 - DNA, 15 bp, Homo sapiens
taaatatgccttcca

SEQ ID NO: 1641972 - DNA, 15 bp, Homo sapiens
ctaaatatgccttcc

SEQ ID NO: 1641973 - DNA, 15 bp, Homo sapiens
tctaaatatgccttc

SEQ ID NO: 1641974 - DNA, 15 bp, Homo sapiens
ctctaaatatgcctt

SEQ ID NO: 1641975 - DNA, 15 bp, Homo sapiens
actctaaatatgcct

SEQ ID NO: 1641976 - DNA, 15 bp, Homo sapiens
gactctaaatatgcc

SEQ ID NO: 1641977 - DNA, 15 bp, Homo sapiens
tgactctaaatatgc

SEQ ID NO: 1641978 - DNA, 15 bp, Homo sapiens
ctgactctaaatatg

SEQ ID NO: 1641979 - DNA, 15 bp, Homo sapiens
actgactctaaatat

SEQ ID NO: 1641980 - DNA, 15 bp, Homo sapiens
tactgactctaaata

SEQ ID NO: 1641981 - DNA, 15 bp, Homo sapiens
atactgactctaaat

SEQ ID NO: 1641982 - DNA, 15 bp, Homo sapiens
tatactgactctaaa

SEQ ID NO: 1641983 - DNA, 15 bp, Homo sapiens
ttatactgactctaa

SEQ ID NO: 1641984 - DNA, 15 bp, Homo sapiens
tttatactgactcta

SEQ ID NO: 1641985 - DNA, 15 bp, Homo sapiens
atttatactgactct

SEQ ID NO: 1641986 - DNA, 15 bp, Homo sapiens
tatttatactgactc

SEQ ID NO: 1641987 - DNA, 15 bp, Homo sapiens
atatttatactgact

SEQ ID NO: 1641988 - DNA, 15 bp, Homo sapiens
aatatttatactgac

SEQ ID NO: 1641989 - DNA, 15 bp, Homo sapiens
caatatttatactga

SEQ ID NO: 1641990 - DNA, 15 bp, Homo sapiens
tcaatatttatactg

SEQ ID NO: 1641991 - DNA, 15 bp, Homo sapiens
atcaatatttatact

SEQ ID NO: 1641992 - DNA, 15 bp, Homo sapiens
catcaatatttatac

SEQ ID NO: 1641993 - DNA, 15 bp, Homo sapiens
acatcaatatttata

SEQ ID NO: 1641994 - DNA, 15 bp, Homo sapiens
cacatcaatatttat

SEQ ID NO: 1641995 - DNA, 15 bp, Homo sapiens
acacatcaatattta

SEQ ID NO: 1641996 - DNA, 15 bp, Homo sapiens
tacacatcaatattt

SEQ ID NO: 1641997 - DNA, 15 bp, Homo sapiens
ctacacatcaatatt

SEQ ID NO: 1641998 - DNA, 15 bp, Homo sapiens
actacacatcaatat

SEQ ID NO: 1641999 - DNA, 15 bp, Homo sapiens
gactacacatcaata

SEQ ID NO: 1642000 - DNA, 15 bp, Homo sapiens
ggactacacatcaat

SEQ ID NO: 1642001 - DNA, 15 bp, Homo sapiens
gggactacacatcaa

SEQ ID NO: 1642002 - DNA, 15 bp, Homo sapiens
agggactacacatca

SEQ ID NO: 1642003 - DNA, 15 bp, Homo sapiens
aagggactacacatc

SEQ ID NO: 1642004 - DNA, 15 bp, Homo sapiens
aaagggactacacat

SEQ ID NO: 1642005 - DNA, 15 bp, Homo sapiens
caaagggactacaca

SEQ ID NO: 1642006 - DNA, 15 bp, Homo sapiens
gcaaagggactacac

SEQ ID NO: 1642007 - DNA, 15 bp, Homo sapiens
tgcaaagggactaca

SEQ ID NO: 1642008 - DNA, 15 bp, Homo sapiens
ttgcaaagggactac

SEQ ID NO: 1642009 - DNA, 15 bp, Homo sapiens
cttgcaaagggacta

SEQ ID NO: 1642010 - DNA, 15 bp, Homo sapiens
tcttgcaaagggact

SEQ ID NO: 1642011 - DNA, 15 bp, Homo sapiens
ctcttgcaaagggac

SEQ ID NO: 1642012 - DNA, 15 bp, Homo sapiens
actcttgcaaaggga

SEQ ID NO: 1642013 - DNA, 15 bp, Homo sapiens
cactcttgcaaaggg

SEQ ID NO: 1642014 - DNA, 15 bp, Homo sapiens
tcactcttgcaaagg

SEQ ID NO: 1642015 - DNA, 15 bp, Homo sapiens
ctcactcttgcaaag

SEQ ID NO: 1642016 - DNA, 15 bp, Homo sapiens
tctcactcttgcaaa

SEQ ID NO: 1642017 - DNA, 15 bp, Homo sapiens
ctctcactcttgcaa

SEQ ID NO: 1642018 - DNA, 15 bp, Homo sapiens
gctctcactcttgca

SEQ ID NO: 1642019 - DNA, 15 bp, Homo sapiens
ggctctcactcttgc

SEQ ID NO: 1642020 - DNA, 15 bp, Homo sapiens
aggctctcactcttg

SEQ ID NO: 1642021 - DNA, 15 bp, Homo sapiens
caggctctcactctt

SEQ ID NO: 1642022 - DNA, 15 bp, Homo sapiens
tcaggctctcactct

SEQ ID NO: 1642023 - DNA, 15 bp, Homo sapiens
ctcaggctctcactc

SEQ ID NO: 1642024 - DNA, 15 bp, Homo sapiens
actcaggctctcact

SEQ ID NO: 1642025 - DNA, 15 bp, Homo sapiens
aactcaggctctcac

SEQ ID NO: 1642026 - DNA, 15 bp, Homo sapiens
taactcaggctctca

SEQ ID NO: 1642027 - DNA, 15 bp, Homo sapiens
ttaactcaggctctc

SEQ ID NO: 1642028 - DNA, 15 bp, Homo sapiens
cttaactcaggctct

SEQ ID NO: 1642029 - DNA, 15 bp, Homo sapiens
ccttaactcaggctc

SEQ ID NO: 1642030 - DNA, 15 bp, Homo sapiens
gccttaactcaggct

SEQ ID NO: 1642031 - DNA, 15 bp, Homo sapiens
tgccttaactcaggc

SEQ ID NO: 1642032 - DNA, 15 bp, Homo sapiens
ttgccttaactcagg

SEQ ID NO: 1642033 - DNA, 15 bp, Homo sapiens
attgccttaactcag

SEQ ID NO: 1642034 - DNA, 15 bp, Homo sapiens
cattgccttaactca

SEQ ID NO: 1642035 - DNA, 15 bp, Homo sapiens
tcattgccttaactc

SEQ ID NO: 1642036 - DNA, 15 bp, Homo sapiens
ctcattgccttaact

SEQ ID NO: 1642037 - DNA, 15 bp, Homo sapiens
actcattgccttaac

SEQ ID NO: 1642038 - DNA, 15 bp, Homo sapiens
aactcattgccttaa

SEQ ID NO: 1642039 - DNA, 15 bp, Homo sapiens
aaactcattgcctta

SEQ ID NO: 1642040 - DNA, 15 bp, Homo sapiens
caaactcattgcctt

SEQ ID NO: 1642041 - DNA, 15 bp, Homo sapiens
ccaaactcattgcct

SEQ ID NO: 1642042 - DNA, 15 bp, Homo sapiens
gccaaactcattgcc

SEQ ID NO: 1642043 - DNA, 15 bp, Homo sapiens
agccaaactcattgc

SEQ ID NO: 1642044 - DNA, 15 bp, Homo sapiens
aagccaaactcattg

SEQ ID NO: 1642045 - DNA, 15 bp, Homo sapiens
caagccaaactcatt

SEQ ID NO: 1642046 - DNA, 15 bp, Homo sapiens
gcaagccaaactcat

SEQ ID NO: 1642047 - DNA, 15 bp, Homo sapiens
agcaagccaaactca

SEQ ID NO: 1642048 - DNA, 15 bp, Homo sapiens
cagcaagccaaactc

SEQ ID NO: 1642049 - DNA, 15 bp, Homo sapiens
tcagcaagccaaact

SEQ ID NO: 1642050 - DNA, 15 bp, Homo sapiens
gtcagcaagccaaac

SEQ ID NO: 1642051 - DNA, 15 bp, Homo sapiens
tgtcagcaagccaaa

SEQ ID NO: 1642052 - DNA, 15 bp, Homo sapiens
ctgtcagcaagccaa

SEQ ID NO: 1642053 - DNA, 15 bp, Homo sapiens
cctgtcagcaagcca

SEQ ID NO: 1642054 - DNA, 15 bp, Homo sapiens
acctgtcagcaagcc

SEQ ID NO: 1642055 - DNA, 15 bp, Homo sapiens
tacctgtcagcaagc

SEQ ID NO: 1642056 - DNA, 15 bp, Homo sapiens
ctacctgtcagcaag

SEQ ID NO: 1642057 - DNA, 15 bp, Homo sapiens
actacctgtcagcaa

SEQ ID NO: 1642058 - DNA, 15 bp, Homo sapiens
cactacctgtcagca

SEQ ID NO: 1642059 - DNA, 15 bp, Homo sapiens
ccactacctgtcagc

SEQ ID NO: 1642060 - DNA, 15 bp, Homo sapiens
tccactacctgtcag

SEQ ID NO: 1642061 - DNA, 15 bp, Homo sapiens
ctccactacctgtca

SEQ ID NO: 1642062 - DNA, 15 bp, Homo sapiens
cctccactacctgtc

SEQ ID NO: 1642063 - DNA, 15 bp, Homo sapiens
acctccactacctgt

SEQ ID NO: 1642064 - DNA, 15 bp, Homo sapiens
cacctccactacctg

SEQ ID NO: 1642065 - DNA, 15 bp, Homo sapiens
ccacctccactacct

SEQ ID NO: 1642066 - DNA, 15 bp, Homo sapiens
tccacctccactacc

SEQ ID NO: 1642067 - DNA, 15 bp, Homo sapiens
gtccacctccactac

SEQ ID NO: 1642068 - DNA, 15 bp, Homo sapiens
tgtccacctccacta

SEQ ID NO: 1642069 - DNA, 15 bp, Homo sapiens
ctgtccacctccact

SEQ ID NO: 1642070 - DNA, 15 bp, Homo sapiens
tctgtccacctccac

SEQ ID NO: 1642071 - DNA, 15 bp, Homo sapiens
ctctgtccacctcca

SEQ ID NO: 1642072 - DNA, 15 bp, Homo sapiens
actctgtccacctcc

SEQ ID NO: 1642073 - DNA, 15 bp, Homo sapiens
cactctgtccacctc

SEQ ID NO: 1642074 - DNA, 15 bp, Homo sapiens
ccactctgtccacct

SEQ ID NO: 1642075 - DNA, 15 bp, Homo sapiens
accactctgtccacc

SEQ ID NO: 1642076 - DNA, 15 bp, Homo sapiens
taccactctgtccac

SEQ ID NO: 1642077 - DNA, 15 bp, Homo sapiens
ttaccactctgtcca

SEQ ID NO: 1642078 - DNA, 15 bp, Homo sapiens
gttaccactctgtcc

SEQ ID NO: 1642079 - DNA, 15 bp, Homo sapiens
tgttaccactctgtc

SEQ ID NO: 1642080 - DNA, 15 bp, Homo sapiens
atgttaccactctgt

SEQ ID NO: 1642081 - DNA, 15 bp, Homo sapiens
gatgttaccactctg

SEQ ID NO: 1642082 - DNA, 15 bp, Homo sapiens
tgatgttaccactct

SEQ ID NO: 1642083 - DNA, 15 bp, Homo sapiens
ttgatgttaccactc

SEQ ID NO: 1642084 - DNA, 15 bp, Homo sapiens
tgtcaacattcccac

SEQ ID NO: 1642085 - DNA, 15 bp, Homo sapiens
gtgtcaacattccca

SEQ ID NO: 1642086 - DNA, 15 bp, Homo sapiens
agtgtcaacattccc

SEQ ID NO: 1642087 - DNA, 15 bp, Homo sapiens
aagtgtcaacattcc

SEQ ID NO: 1642088 - DNA, 15 bp, Homo sapiens
aaagtgtcaacattc

SEQ ID NO: 1642089 - DNA, 15 bp, Homo sapiens
gaaagtgtcaacatt

SEQ ID NO: 1642090 - DNA, 15 bp, Homo sapiens
tgaaagtgtcaacat

SEQ ID NO: 1642091 - DNA, 15 bp, Homo sapiens
gtgaaagtgtcaaca

SEQ ID NO: 1642092 - DNA, 15 bp, Homo sapiens
agtgaaagtgtcaac

SEQ ID NO: 1642093 - DNA, 15 bp, Homo sapiens
cagtgaaagtgtcaa

SEQ ID NO: 1642094 - DNA, 15 bp, Homo sapiens
ccagtgaaagtgtca

SEQ ID NO: 1642095 - DNA, 15 bp, Homo sapiens
accagtgaaagtgtc

SEQ ID NO: 1642096 - DNA, 15 bp, Homo sapiens
aaccagtgaaagtgt

SEQ ID NO: 1642097 - DNA, 15 bp, Homo sapiens
caaccagtgaaagtg

SEQ ID NO: 1642098 - DNA, 15 bp, Homo sapiens
ccaaccagtgaaagt

SEQ ID NO: 1642099 - DNA, 15 bp, Homo sapiens
tccaaccagtgaaag

SEQ ID NO: 1642100 - DNA, 15 bp, Homo sapiens
ttccaaccagtgaaa

SEQ ID NO: 1642101 - DNA, 15 bp, Homo sapiens
tttccaaccagtgaa

SEQ ID NO: 1642102 - DNA, 15 bp, Homo sapiens
ctttccaaccagtga

SEQ ID NO: 1642103 - DNA, 15 bp, Homo sapiens
cctttccaaccagtg

SEQ ID NO: 1642104 - DNA, 15 bp, Homo sapiens
gcctttccaaccagt

SEQ ID NO: 1642105 - DNA, 15 bp, Homo sapiens
agcctttccaaccag

SEQ ID NO: 1642106 - DNA, 15 bp, Homo sapiens
tagcctttccaacca

SEQ ID NO: 1642107 - DNA, 15 bp, Homo sapiens
atagcctttccaacc

SEQ ID NO: 1642108 - DNA, 15 bp, Homo sapiens
tatagcctttccaac

SEQ ID NO: 1642109 - DNA, 15 bp, Homo sapiens
atatagcctttccaa

SEQ ID NO: 1642110 - DNA, 15 bp, Homo sapiens
tatatagcctttcca

SEQ ID NO: 1642111 - DNA, 15 bp, Homo sapiens
ctatatagcctttcc

SEQ ID NO: 1642112 - DNA, 15 bp, Homo sapiens
tctatatagcctttc

SEQ ID NO: 1642113 - DNA, 15 bp, Homo sapiens
atctatatagccttt

SEQ ID NO: 1642114 - DNA, 15 bp, Homo sapiens
tatctatatagcctt

SEQ ID NO: 1642115 - DNA, 15 bp, Homo sapiens
atatctatatagcct

SEQ ID NO: 1642116 - DNA, 15 bp, Homo sapiens
catatctatatagcc

SEQ ID NO: 1642117 - DNA, 15 bp, Homo sapiens
tcatatctatatagc

SEQ ID NO: 1642118 - DNA, 15 bp, Homo sapiens
ttcatatctatatag

SEQ ID NO: 1642119 - DNA, 15 bp, Homo sapiens
cttcatatctatata

SEQ ID NO: 1642120 - DNA, 15 bp, Homo sapiens
gcttcatatctatat

SEQ ID NO: 1642121 - DNA, 15 bp, Homo sapiens
ggcttcatatctata

SEQ ID NO: 1642122 - DNA, 15 bp, Homo sapiens
tggcttcatatctat

SEQ ID NO: 1642123 - DNA, 15 bp, Homo sapiens
ttggcttcatatcta

SEQ ID NO: 1642124 - DNA, 15 bp, Homo sapiens
tttggcttcatatct

SEQ ID NO: 1642125 - DNA, 15 bp, Homo sapiens
ctttggcttcatatc

SEQ ID NO: 1642126 - DNA, 15 bp, Homo sapiens
cctttggcttcatat

SEQ ID NO: 1642127 - DNA, 15 bp, Homo sapiens
tcctttggcttcata

SEQ ID NO: 1642128 - DNA, 15 bp, Homo sapiens
ttcctttggcttcat

SEQ ID NO: 1642129 - DNA, 15 bp, Homo sapiens
gttcctttggcttca

SEQ ID NO: 1642130 - DNA, 15 bp, Homo sapiens
agttcctttggcttc

SEQ ID NO: 1642131 - DNA, 15 bp, Homo sapiens
aagttcctttggctt

SEQ ID NO: 1642132 - DNA, 15 bp, Homo sapiens
taagttcctttggct

SEQ ID NO: 1642133 - DNA, 15 bp, Homo sapiens
ctaagttcctttggc

SEQ ID NO: 1642134 - DNA, 15 bp, Homo sapiens
actaagttcctttgg

SEQ ID NO: 1642135 - DNA, 15 bp, Homo sapiens
aactaagttcctttg

SEQ ID NO: 1642136 - DNA, 15 bp, Homo sapiens
taactaagttccttt

SEQ ID NO: 1642137 - DNA, 15 bp, Homo sapiens
ttaactaagttcctt

SEQ ID NO: 1642138 - DNA, 15 bp, Homo sapiens
tttaactaagttcct

SEQ ID NO: 1642139 - DNA, 15 bp, Homo sapiens
ctttaactaagttcc

SEQ ID NO: 1642140 - DNA, 15 bp, Homo sapiens
gctttaactaagttc

SEQ ID NO: 1642141 - DNA, 15 bp, Homo sapiens
tgctttaactaagtt

SEQ ID NO: 1642142 - DNA, 15 bp, Homo sapiens
ctgctttaactaagt

SEQ ID NO: 1642143 - DNA, 15 bp, Homo sapiens
tctgctttaactaag

SEQ ID NO: 1642144 - DNA, 15 bp, Homo sapiens
gtctgctttaactaa

SEQ ID NO: 1642145 - DNA, 15 bp, Homo sapiens
tgtctgctttaacta

SEQ ID NO: 1642146 - DNA, 15 bp, Homo sapiens
atgtctgctttaact

SEQ ID NO: 1642147 - DNA, 15 bp, Homo sapiens
aatgtctgctttaac

SEQ ID NO: 1642148 - DNA, 15 bp, Homo sapiens
caatgtctgctttaa

SEQ ID NO: 1642149 - DNA, 15 bp, Homo sapiens
tcaatgtctgcttta

SEQ ID NO: 1642150 - DNA, 15 bp, Homo sapiens
gtcaatgtctgcttt

SEQ ID NO: 1642151 - DNA, 15 bp, Homo sapiens
tgtcaatgtctgctt

SEQ ID NO: 1642152 - DNA, 15 bp, Homo sapiens
atgtcaatgtctgct

SEQ ID NO: 1642153 - DNA, 15 bp, Homo sapiens
tatgtcaatgtctgc

SEQ ID NO: 1642154 - DNA, 15 bp, Homo sapiens
ttatgtcaatgtctg

SEQ ID NO: 1642155 - DNA, 15 bp, Homo sapiens
tttatgtcaatgtct

SEQ ID NO: 1642156 - DNA, 15 bp, Homo sapiens
atttatgtcaatgtc

SEQ ID NO: 1642157 - DNA, 15 bp, Homo sapiens
catttatgtcaatgt

SEQ ID NO: 1642158 - DNA, 15 bp, Homo sapiens
tcatttatgtcaatg

SEQ ID NO: 1642159 - DNA, 15 bp, Homo sapiens
ctcatttatgtcaat

SEQ ID NO: 1642160 - DNA, 15 bp, Homo sapiens
cctcatttatgtcaa

SEQ ID NO: 1642161 - DNA, 15 bp, Homo sapiens
tcctcatttatgtca

SEQ ID NO: 1642162 - DNA, 15 bp, Homo sapiens
ttcctcatttatgtc

SEQ ID NO: 1642163 - DNA, 15 bp, Homo sapiens
attcctcatttatgt

SEQ ID NO: 1642164 - DNA, 15 bp, Homo sapiens
aattcctcatttatg

SEQ ID NO: 1642165 - DNA, 15 bp, Homo sapiens
aaattcctcatttat

SEQ ID NO: 1642166 - DNA, 15 bp, Homo sapiens
caaattcctcattta

SEQ ID NO: 1642167 - DNA, 15 bp, Homo sapiens
ccaaattcctcattt

SEQ ID NO: 1642168 - DNA, 15 bp, Homo sapiens
accaaattcctcatt

SEQ ID NO: 1642169 - DNA, 15 bp, Homo sapiens
aaccaaattcctcat

SEQ ID NO: 1642170 - DNA, 15 bp, Homo sapiens
caaccaaattcctca

SEQ ID NO: 1642171 - DNA, 15 bp, Homo sapiens
acaaccaaattcctc

SEQ ID NO: 1642172 - DNA, 15 bp, Homo sapiens
cacaaccaaattcct

SEQ ID NO: 1642173 - DNA, 15 bp, Homo sapiens
tcacaaccaaattcc

SEQ ID NO: 1642174 - DNA, 15 bp, Homo sapiens
gtcacaaccaaattc

SEQ ID NO: 1642175 - DNA, 15 bp, Homo sapiens
tgtcacaaccaaatt

SEQ ID NO: 1642176 - DNA, 15 bp, Homo sapiens
ttgtcacaaccaaat

SEQ ID NO: 1642177 - DNA, 15 bp, Homo sapiens
cttgtcacaaccaaa

SEQ ID NO: 1642178 - DNA, 15 bp, Homo sapiens
gcttgtcacaaccaa

SEQ ID NO: 1642179 - DNA, 15 bp, Homo sapiens
tgcttgtcacaacca

SEQ ID NO: 1642180 - DNA, 15 bp, Homo sapiens
ttgcttgtcacaacc

SEQ ID NO: 1642181 - DNA, 15 bp, Homo sapiens
attgcttgtcacaac

SEQ ID NO: 1642182 - DNA, 15 bp, Homo sapiens
cattgcttgtcacaa

SEQ ID NO: 1642183 - DNA, 15 bp, Homo sapiens
gcattgcttgtcaca

SEQ ID NO: 1642184 - DNA, 15 bp, Homo sapiens
ggcattgcttgtcac

SEQ ID NO: 1642185 - DNA, 15 bp, Homo sapiens
aggcattgcttgtca

SEQ ID NO: 1642186 - DNA, 15 bp, Homo sapiens
taggcattgcttgtc

SEQ ID NO: 1642187 - DNA, 15 bp, Homo sapiens
ataggcattgcttgt

SEQ ID NO: 1642188 - DNA, 15 bp, Homo sapiens
aataggcattgcttg

SEQ ID NO: 1642189 - DNA, 15 bp, Homo sapiens
aaataggcattgctt

SEQ ID NO: 1642190 - DNA, 15 bp, Homo sapiens
aaaataggcattgct

SEQ ID NO: 1642191 - DNA, 15 bp, Homo sapiens
taaaataggcattgc

SEQ ID NO: 1642192 - DNA, 15 bp, Homo sapiens
ctaaaataggcattg

SEQ ID NO: 1642193 - DNA, 15 bp, Homo sapiens
tctaaaataggcatt

SEQ ID NO: 1642194 - DNA, 15 bp, Homo sapiens
gtctaaaataggcat

SEQ ID NO: 1642195 - DNA, 15 bp, Homo sapiens
ggtctaaaataggca

SEQ ID NO: 1642196 - DNA, 15 bp, Homo sapiens
tggtctaaaataggc

SEQ ID NO: 1642197 - DNA, 15 bp, Homo sapiens
ttggtctaaaatagg

SEQ ID NO: 1642198 - DNA, 15 bp, Homo sapiens
attggtctaaaatag

SEQ ID NO: 1642199 - DNA, 15 bp, Homo sapiens
cattggtctaaaata

SEQ ID NO: 1642200 - DNA, 15 bp, Homo sapiens
ccattggtctaaaat

SEQ ID NO: 1642201 - DNA, 15 bp, Homo sapiens
gccattggtctaaaa

SEQ ID NO: 1642202 - DNA, 15 bp, Homo sapiens
agccattggtctaaa

SEQ ID NO: 1642203 - DNA, 15 bp, Homo sapiens
aagccattggtctaa

SEQ ID NO: 1642204 - DNA, 15 bp, Homo sapiens
caagccattggtcta

SEQ ID NO: 1642205 - DNA, 15 bp, Homo sapiens
acaagccattggtct

SEQ ID NO: 1642206 - DNA, 15 bp, Homo sapiens
tacaagccattggtc

SEQ ID NO: 1642207 - DNA, 15 bp, Homo sapiens
atacaagccattggt

SEQ ID NO: 1642208 - DNA, 15 bp, Homo sapiens
gatacaagccattgg

SEQ ID NO: 1642209 - DNA, 15 bp, Homo sapiens
ggatacaagccattg

SEQ ID NO: 1642210 - DNA, 15 bp, Homo sapiens
aggatacaagccatt

SEQ ID NO: 1642211 - DNA, 15 bp, Homo sapiens
gaggatacaagccat

SEQ ID NO: 1642212 - DNA, 15 bp, Homo sapiens
tgaggatacaagcca

SEQ ID NO: 1642213 - DNA, 15 bp, Homo sapiens
atgaggatacaagcc

SEQ ID NO: 1642214 - DNA, 15 bp, Homo sapiens
aatgaggatacaagc

SEQ ID NO: 1642215 - DNA, 15 bp, Homo sapiens
taatgaggatacaag

SEQ ID NO: 1642216 - DNA, 15 bp, Homo sapiens
ctaatgaggatacaa

SEQ ID NO: 1642217 - DNA, 15 bp, Homo sapiens
cctaatgaggataca

SEQ ID NO: 1642218 - DNA, 15 bp, Homo sapiens
ccctaatgaggatac

SEQ ID NO: 1642219 - DNA, 15 bp, Homo sapiens
tccctaatgaggata

SEQ ID NO: 1642220 - DNA, 15 bp, Homo sapiens
gtccctaatgaggat

SEQ ID NO: 1642221 - DNA, 15 bp, Homo sapiens
agtccctaatgagga

SEQ ID NO: 1642222 - DNA, 15 bp, Homo sapiens
cagtccctaatgagg

SEQ ID NO: 1642223 - DNA, 15 bp, Homo sapiens
acagtccctaatgag

SEQ ID NO: 1642224 - DNA, 15 bp, Homo sapiens
gacagtccctaatga

SEQ ID NO: 1642225 - DNA, 15 bp, Homo sapiens
tgacagtccctaatg

SEQ ID NO: 1642226 - DNA, 15 bp, Homo sapiens
ctgacagtccctaat

SEQ ID NO: 1642227 - DNA, 15 bp, Homo sapiens
actgacagtccctaa

SEQ ID NO: 1642228 - DNA, 15 bp, Homo sapiens
tactgacagtcccta

SEQ ID NO: 1642229 - DNA, 15 bp, Homo sapiens
atactgacagtccct

SEQ ID NO: 1642230 - DNA, 15 bp, Homo sapiens
tatactgacagtccc

SEQ ID NO: 1642231 - DNA, 15 bp, Homo sapiens
gtatactgacagtcc

SEQ ID NO: 1642232 - DNA, 15 bp, Homo sapiens
ggtatactgacagtc

SEQ ID NO: 1642233 - DNA, 15 bp, Homo sapiens
tggtatactgacagt

SEQ ID NO: 1642234 - DNA, 15 bp, Homo sapiens
ttggtatactgacag

SEQ ID NO: 1642235 - DNA, 15 bp, Homo sapiens
tttggtatactgaca

SEQ ID NO: 1642236 - DNA, 15 bp, Homo sapiens
ttttggtatactgac

SEQ ID NO: 1642237 - DNA, 15 bp, Homo sapiens
cttttggtatactga

SEQ ID NO: 1642238 - DNA, 15 bp, Homo sapiens
tcttttggtatactg

SEQ ID NO: 1642239 - DNA, 15 bp, Homo sapiens
ttcttttggtatact

SEQ ID NO: 1642240 - DNA, 15 bp, Homo sapiens
attcttttggtatac

SEQ ID NO: 1642241 - DNA, 15 bp, Homo sapiens
cattcttttggtata

SEQ ID NO: 1642242 - DNA, 15 bp, Homo sapiens
ccattcttttggtat

SEQ ID NO: 1642243 - DNA, 15 bp, Homo sapiens
cccattcttttggta

SEQ ID NO: 1642244 - DNA, 15 bp, Homo sapiens
acccattcttttggt

SEQ ID NO: 1642245 - DNA, 15 bp, Homo sapiens
cacccattcttttgg

SEQ ID NO: 1642246 - DNA, 15 bp, Homo sapiens
acacccattcttttg

SEQ ID NO: 1642247 - DNA, 15 bp, Homo sapiens
aacacccattctttt

SEQ ID NO: 1642248 - DNA, 15 bp, Homo sapiens
taacacccattcttt

SEQ ID NO: 1642249 - DNA, 15 bp, Homo sapiens
ttaacacccattctt

SEQ ID NO: 1642250 - DNA, 15 bp, Homo sapiens
cttaacacccattct

SEQ ID NO: 1642251 - DNA, 15 bp, Homo sapiens
acttaacacccattc

SEQ ID NO: 1642252 - DNA, 15 bp, Homo sapiens
gacttaacacccatt

SEQ ID NO: 1642253 - DNA, 15 bp, Homo sapiens
agacttaacacccat

SEQ ID NO: 1642254 - DNA, 15 bp, Homo sapiens
tagacttaacaccca

SEQ ID NO: 1642255 - DNA, 15 bp, Homo sapiens
ctagacttaacaccc

SEQ ID NO: 1642256 - DNA, 15 bp, Homo sapiens
cctagacttaacacc

SEQ ID NO: 1642257 - DNA, 15 bp, Homo sapiens
tcctagacttaacac

SEQ ID NO: 1642258 - DNA, 15 bp, Homo sapiens
ttcctagacttaaca

SEQ ID NO: 1642259 - DNA, 15 bp, Homo sapiens
tttcctagacttaac

SEQ ID NO: 1642260 - DNA, 15 bp, Homo sapiens
ttttcctagacttaa

SEQ ID NO: 1642261 - DNA, 15 bp, Homo sapiens
attttcctagactta

SEQ ID NO: 1642262 - DNA, 15 bp, Homo sapiens
aattttcctagactt

SEQ ID NO: 1642263 - DNA, 15 bp, Homo sapiens
taattttcctagact

SEQ ID NO: 1642264 - DNA, 15 bp, Homo sapiens
ataattttcctagac

SEQ ID NO: 1642265 - DNA, 15 bp, Homo sapiens
tataattttcctaga

SEQ ID NO: 1642266 - DNA, 15 bp, Homo sapiens
ttataattttcctag

SEQ ID NO: 1642267 - DNA, 15 bp, Homo sapiens
attataattttccta

SEQ ID NO: 1642268 - DNA, 15 bp, Homo sapiens
gattataattttcct

SEQ ID NO: 1642269 - DNA, 15 bp, Homo sapiens
tgattataattttcc

SEQ ID NO: 1642270 - DNA, 15 bp, Homo sapiens
atgattataattttc

SEQ ID NO: 1642271 - DNA, 15 bp, Homo sapiens
gatgattataatttt

SEQ ID NO: 1642272 - DNA, 15 bp, Homo sapiens
tgatgattataattt

SEQ ID NO: 1642273 - DNA, 15 bp, Homo sapiens
atgatgattataatt

SEQ ID NO: 1642274 - DNA, 15 bp, Homo sapiens
aatgatgattataat

SEQ ID NO: 1642275 - DNA, 15 bp, Homo sapiens
taatgatgattataa

SEQ ID NO: 1642276 - DNA, 15 bp, Homo sapiens
ttaatgatgattata

SEQ ID NO: 1642277 - DNA, 15 bp, Homo sapiens
cttaatgatgattat

SEQ ID NO: 1642278 - DNA, 15 bp, Homo sapiens
acttaatgatgatta

SEQ ID NO: 1642279 - DNA, 15 bp, Homo sapiens
aacttaatgatgatt

SEQ ID NO: 1642280 - DNA, 15 bp, Homo sapiens
caacttaatgatgat

SEQ ID NO: 1642281 - DNA, 15 bp, Homo sapiens
tcaacttaatgatga

SEQ ID NO: 1642282 - DNA, 15 bp, Homo sapiens
gtcaacttaatgatg

SEQ ID NO: 1642283 - DNA, 15 bp, Homo sapiens
agtcaacttaatgat

SEQ ID NO: 1642284 - DNA, 15 bp, Homo sapiens
aagtcaacttaatga

SEQ ID NO: 1642285 - DNA, 15 bp, Homo sapiens
aaagtcaacttaatg

SEQ ID NO: 1642286 - DNA, 15 bp, Homo sapiens
aaaagtcaacttaat

SEQ ID NO: 1642287 - DNA, 15 bp, Homo sapiens
taaaagtcaacttaa

SEQ ID NO: 1642288 - DNA, 15 bp, Homo sapiens
ctaaaagtcaactta

SEQ ID NO: 1642289 - DNA, 15 bp, Homo sapiens
actaaaagtcaactt

SEQ ID NO: 1642290 - DNA, 15 bp, Homo sapiens
aactaaaagtcaact

SEQ ID NO: 1642291 - DNA, 15 bp, Homo sapiens
gaactaaaagtcaac

SEQ ID NO: 1642292 - DNA, 15 bp, Homo sapiens
ggaactaaaagtcaa

SEQ ID NO: 1642293 - DNA, 15 bp, Homo sapiens
gggaactaaaagtca

SEQ ID NO: 1642294 - DNA, 15 bp, Homo sapiens
tgggaactaaaagtc

SEQ ID NO: 1642295 - DNA, 15 bp, Homo sapiens
ttgggaactaaaagt

SEQ ID NO: 1642296 - DNA, 15 bp, Homo sapiens
cttgggaactaaaag

SEQ ID NO: 1642297 - DNA, 15 bp, Homo sapiens
tcttgggaactaaaa

SEQ ID NO: 1642298 - DNA, 15 bp, Homo sapiens
atcttgggaactaaa

SEQ ID NO: 1642299 - DNA, 15 bp, Homo sapiens
aatcttgggaactaa

SEQ ID NO: 1642300 - DNA, 15 bp, Homo sapiens
aaatcttgggaacta

SEQ ID NO: 1642301 - DNA, 15 bp, Homo sapiens
gaaatcttgggaact

SEQ ID NO: 1642302 - DNA, 15 bp, Homo sapiens
ggaaatcttgggaac

SEQ ID NO: 1642303 - DNA, 15 bp, Homo sapiens
aggaaatcttgggaa

SEQ ID NO: 1642304 - DNA, 15 bp, Homo sapiens
taggaaatcttggga

SEQ ID NO: 1642305 - DNA, 15 bp, Homo sapiens
ataggaaatcttggg

SEQ ID NO: 1642306 - DNA, 15 bp, Homo sapiens
tataggaaatcttgg

SEQ ID NO: 1642307 - DNA, 15 bp, Homo sapiens
ttataggaaatcttg

SEQ ID NO: 1642308 - DNA, 15 bp, Homo sapiens
attataggaaatctt

SEQ ID NO: 1642309 - DNA, 15 bp, Homo sapiens
aattataggaaatct

SEQ ID NO: 1642310 - DNA, 15 bp, Homo sapiens
taattataggaaatc

SEQ ID NO: 1642311 - DNA, 15 bp, Homo sapiens
gtaattataggaaat

SEQ ID NO: 1642312 - DNA, 15 bp, Homo sapiens
agtaattataggaaa

SEQ ID NO: 1642313 - DNA, 15 bp, Homo sapiens
cagtaattataggaa

SEQ ID NO: 1642314 - DNA, 15 bp, Homo sapiens
acagtaattatagga

SEQ ID NO: 1642315 - DNA, 15 bp, Homo sapiens
aacagtaattatagg

SEQ ID NO: 1642316 - DNA, 15 bp, Homo sapiens
aaacagtaattatag

SEQ ID NO: 1642317 - DNA, 15 bp, Homo sapiens
aaaacagtaattata

SEQ ID NO: 1642318 - DNA, 15 bp, Homo sapiens
gaaaacagtaattat

SEQ ID NO: 1642319 - DNA, 15 bp, Homo sapiens
tgaaaacagtaatta

SEQ ID NO: 1642320 - DNA, 15 bp, Homo sapiens
ctgaaaacagtaatt

SEQ ID NO: 1642321 - DNA, 15 bp, Homo sapiens
actgaaaacagtaat

SEQ ID NO: 1642322 - DNA, 15 bp, Homo sapiens
tactgaaaacagtaa

SEQ ID NO: 1642323 - DNA, 15 bp, Homo sapiens
atactgaaaacagta

SEQ ID NO: 1642324 - DNA, 15 bp, Homo sapiens
aatactgaaaacagt

SEQ ID NO: 1642325 - DNA, 15 bp, Homo sapiens
aaatactgaaaacag

SEQ ID NO: 1642326 - DNA, 15 bp, Homo sapiens
taaatactgaaaaca

SEQ ID NO: 1642327 - DNA, 15 bp, Homo sapiens
ctaaatactgaaaac

SEQ ID NO: 1642328 - DNA, 15 bp, Homo sapiens
tctaaatactgaaaa

SEQ ID NO: 1642329 - DNA, 15 bp, Homo sapiens
atctaaatactgaaa

SEQ ID NO: 1642330 - DNA, 15 bp, Homo sapiens
tatctaaatactgaa

SEQ ID NO: 1642331 - DNA, 15 bp, Homo sapiens
atatctaaatactga

SEQ ID NO: 1642332 - DNA, 15 bp, Homo sapiens
aatatctaaatactg

SEQ ID NO: 1642333 - DNA, 15 bp, Homo sapiens
taatatctaaatact

SEQ ID NO: 1642334 - DNA, 15 bp, Homo sapiens
gtaatatctaaatac

SEQ ID NO: 1642335 - DNA, 15 bp, Homo sapiens
agtaatatctaaata

SEQ ID NO: 1642336 - DNA, 15 bp, Homo sapiens
cagtaatatctaaat

SEQ ID NO: 1642337 - DNA, 15 bp, Homo sapiens
gcagtaatatctaaa

SEQ ID NO: 1642338 - DNA, 15 bp, Homo sapiens
agcagtaatatctaa

SEQ ID NO: 1642339 - DNA, 15 bp, Homo sapiens
tagcagtaatatcta

SEQ ID NO: 1642340 - DNA, 15 bp, Homo sapiens
ttagcagtaatatct

SEQ ID NO: 1642341 - DNA, 15 bp, Homo sapiens
attagcagtaatatc

SEQ ID NO: 1642342 - DNA, 15 bp, Homo sapiens
cattagcagtaatat

SEQ ID NO: 1642343 - DNA, 15 bp, Homo sapiens
ccattagcagtaata

SEQ ID NO: 1642344 - DNA, 15 bp, Homo sapiens
accattagcagtaat

SEQ ID NO: 1642345 - DNA, 15 bp, Homo sapiens
taccattagcagtaa

SEQ ID NO: 1642346 - DNA, 15 bp, Homo sapiens
ttaccattagcagta

SEQ ID NO: 1642347 - DNA, 15 bp, Homo sapiens
tttaccattagcagt

SEQ ID NO: 1642348 - DNA, 15 bp, Homo sapiens
ttttaccattagcag

SEQ ID NO: 1642349 - DNA, 15 bp, Homo sapiens
attttaccattagca

SEQ ID NO: 1642350 - DNA, 15 bp, Homo sapiens
cattttaccattagc

SEQ ID NO: 1642351 - DNA, 15 bp, Homo sapiens
ccattttaccattag

SEQ ID NO: 1642352 - DNA, 15 bp, Homo sapiens
gccattttaccatta

SEQ ID NO: 1642353 - DNA, 15 bp, Homo sapiens
ggccattttaccatt

SEQ ID NO: 1642354 - DNA, 15 bp, Homo sapiens
aggccattttaccat

SEQ ID NO: 1642355 - DNA, 15 bp, Homo sapiens
taggccattttacca

SEQ ID NO: 1642356 - DNA, 15 bp, Homo sapiens
ataggccattttacc

SEQ ID NO: 1642357 - DNA, 15 bp, Homo sapiens
cataggccattttac

SEQ ID NO: 1642358 - DNA, 15 bp, Homo sapiens
tcataggccatttta

SEQ ID NO: 1642359 - DNA, 15 bp, Homo sapiens
ctcataggccatttt

SEQ ID NO: 1642360 - DNA, 15 bp, Homo sapiens
actcataggccattt

SEQ ID NO: 1642361 - DNA, 15 bp, Homo sapiens
tactcataggccatt

SEQ ID NO: 1642362 - DNA, 15 bp, Homo sapiens
ctactcataggccat

SEQ ID NO: 1642363 - DNA, 15 bp, Homo sapiens
tctactcataggcca

SEQ ID NO: 1642364 - DNA, 15 bp, Homo sapiens
ttctactcataggcc

SEQ ID NO: 1642365 - DNA, 15 bp, Homo sapiens
tttctactcataggc

SEQ ID NO: 1642366 - DNA, 15 bp, Homo sapiens
ttttctactcatagg

SEQ ID NO: 1642367 - DNA, 15 bp, Homo sapiens
attttctactcatag

SEQ ID NO: 1642368 - DNA, 15 bp, Homo sapiens
tattttctactcata

SEQ ID NO: 1642369 - DNA, 15 bp, Homo sapiens
atattttctactcat

SEQ ID NO: 1642370 - DNA, 15 bp, Homo sapiens
catattttctactca

SEQ ID NO: 1642371 - DNA, 15 bp, Homo sapiens
tcatattttctactc

SEQ ID NO: 1642372 - DNA, 15 bp, Homo sapiens
ttcatattttctact

SEQ ID NO: 1642373 - DNA, 15 bp, Homo sapiens
tttcatattttctac

SEQ ID NO: 1642374 - DNA, 15 bp, Homo sapiens
atttcatattttcta

SEQ ID NO: 1642375 - DNA, 15 bp, Homo sapiens
aatttcatattttct

SEQ ID NO: 1642376 - DNA, 15 bp, Homo sapiens
aaatttcatattttc

SEQ ID NO: 1642377 - DNA, 15 bp, Homo sapiens
taaatttcatatttt

SEQ ID NO: 1642378 - DNA, 15 bp, Homo sapiens
gtaaatttcatattt

SEQ ID NO: 1642379 - DNA, 15 bp, Homo sapiens
tgtaaatttcatatt

SEQ ID NO: 1642380 - DNA, 15 bp, Homo sapiens
atgtaaatttcatat

SEQ ID NO: 1642381 - DNA, 15 bp, Homo sapiens
aatgtaaatttcata

SEQ ID NO: 1642382 - DNA, 15 bp, Homo sapiens
aaatgtaaatttcat

SEQ ID NO: 1642383 - DNA, 15 bp, Homo sapiens
gaaatgtaaatttca

SEQ ID NO: 1642384 - DNA, 15 bp, Homo sapiens
agaaatgtaaatttc

SEQ ID NO: 1642385 - DNA, 15 bp, Homo sapiens
gagaaatgtaaattt

SEQ ID NO: 1642386 - DNA, 15 bp, Homo sapiens
agagaaatgtaaatt

SEQ ID NO: 1642387 - DNA, 15 bp, Homo sapiens
aagagaaatgtaaat

SEQ ID NO: 1642388 - DNA, 15 bp, Homo sapiens
aaagagaaatgtaaa

SEQ ID NO: 1642389 - DNA, 15 bp, Homo sapiens
taaagagaaatgtaa

SEQ ID NO: 1642390 - DNA, 15 bp, Homo sapiens
ataaagagaaatgta

SEQ ID NO: 1642391 - DNA, 15 bp, Homo sapiens
gataaagagaaatgt

SEQ ID NO: 1642392 - DNA, 15 bp, Homo sapiens
ggataaagagaaatg

SEQ ID NO: 1642393 - DNA, 15 bp, Homo sapiens
tggataaagagaaat

SEQ ID NO: 1642394 - DNA, 15 bp, Homo sapiens
ttggataaagagaaa

SEQ ID NO: 1642395 - DNA, 15 bp, Homo sapiens
tttggataaagagaa

SEQ ID NO: 1642396 - DNA, 15 bp, Homo sapiens
atttggataaagaga

SEQ ID NO: 1642397 - DNA, 15 bp, Homo sapiens
aatttggataaagag

SEQ ID NO: 1642398 - DNA, 15 bp, Homo sapiens
aaatttggataaaga

SEQ ID NO: 1642399 - DNA, 15 bp, Homo sapiens
gaaatttggataaag

SEQ ID NO: 1642400 - DNA, 15 bp, Homo sapiens
ggaaatttggataaa

SEQ ID NO: 1642401 - DNA, 15 bp, Homo sapiens
aggaaatttggataa

SEQ ID NO: 1642402 - DNA, 15 bp, Homo sapiens
taggaaatttggata

SEQ ID NO: 1642403 - DNA, 15 bp, Homo sapiens
ctaggaaatttggat

SEQ ID NO: 1642404 - DNA, 15 bp, Homo sapiens
actaggaaatttgga

SEQ ID NO: 1642405 - DNA, 15 bp, Homo sapiens
cactaggaaatttgg

SEQ ID NO: 1642406 - DNA, 15 bp, Homo sapiens
ccactaggaaatttg

SEQ ID NO: 1642407 - DNA, 15 bp, Homo sapiens
tccactaggaaattt

SEQ ID NO: 1642408 - DNA, 15 bp, Homo sapiens
ttccactaggaaatt

SEQ ID NO: 1642409 - DNA, 15 bp, Homo sapiens
gttccactaggaaat

SEQ ID NO: 1642410 - DNA, 15 bp, Homo sapiens
ggttccactaggaaa

SEQ ID NO: 1642411 - DNA, 15 bp, Homo sapiens
gggttccactaggaa

SEQ ID NO: 1642412 - DNA, 15 bp, Homo sapiens
agggttccactagga

SEQ ID NO: 1642413 - DNA, 15 bp, Homo sapiens
cagggttccactagg

SEQ ID NO: 1642414 - DNA, 15 bp, Homo sapiens
gcagggttccactag

SEQ ID NO: 1642415 - DNA, 15 bp, Homo sapiens
ggcagggttccacta

SEQ ID NO: 1642416 - DNA, 15 bp, Homo sapiens
gggcagggttccact

SEQ ID NO: 1642417 - DNA, 15 bp, Homo sapiens
ggggcagggttccac

SEQ ID NO: 1642418 - DNA, 15 bp, Homo sapiens
aggggcagggttcca

SEQ ID NO: 1642419 - DNA, 15 bp, Homo sapiens
taggggcagggttcc

SEQ ID NO: 1642420 - DNA, 15 bp, Homo sapiens
ttaggggcagggttc

SEQ ID NO: 1642421 - DNA, 15 bp, Homo sapiens
gttaggggcagggtt

SEQ ID NO: 1642422 - DNA, 15 bp, Homo sapiens
tgttaggggcagggt

SEQ ID NO: 1642423 - DNA, 15 bp, Homo sapiens
ttgttaggggcaggg

SEQ ID NO: 1642424 - DNA, 15 bp, Homo sapiens
attgttaggggcagg

SEQ ID NO: 1642425 - DNA, 15 bp, Homo sapiens
cattgttaggggcag

SEQ ID NO: 1642426 - DNA, 15 bp, Homo sapiens
acattgttaggggca

SEQ ID NO: 1642427 - DNA, 15 bp, Homo sapiens
aacattgttaggggc

SEQ ID NO: 1642428 - DNA, 15 bp, Homo sapiens
aaacattgttagggg

SEQ ID NO: 1642429 - DNA, 15 bp, Homo sapiens
taaacattgttaggg

SEQ ID NO: 1642430 - DNA, 15 bp, Homo sapiens
gtaaacattgttagg

SEQ ID NO: 1642431 - DNA, 15 bp, Homo sapiens
ggtaaacattgttag

SEQ ID NO: 1642432 - DNA, 15 bp, Homo sapiens
tggtaaacattgtta

SEQ ID NO: 1642433 - DNA, 15 bp, Homo sapiens
gtggtaaacattgtt

SEQ ID NO: 1642434 - DNA, 15 bp, Homo sapiens
agtggtaaacattgt

SEQ ID NO: 1642435 - DNA, 15 bp, Homo sapiens
aagtggtaaacattg

SEQ ID NO: 1642436 - DNA, 15 bp, Homo sapiens
gaagtggtaaacatt

SEQ ID NO: 1642437 - DNA, 15 bp, Homo sapiens
agaagtggtaaacat

SEQ ID NO: 1642438 - DNA, 15 bp, Homo sapiens
aagaagtggtaaaca

SEQ ID NO: 1642439 - DNA, 15 bp, Homo sapiens
taagaagtggtaaac

SEQ ID NO: 1642440 - DNA, 15 bp, Homo sapiens
gtaagaagtggtaaa

SEQ ID NO: 1642441 - DNA, 15 bp, Homo sapiens
agtaagaagtggtaa

SEQ ID NO: 1642442 - DNA, 15 bp, Homo sapiens
cagtaagaagtggta

SEQ ID NO: 1642443 - DNA, 15 bp, Homo sapiens
acagtaagaagtggt

SEQ ID NO: 1642444 - DNA, 15 bp, Homo sapiens
gacagtaagaagtgg

SEQ ID NO: 1642445 - DNA, 15 bp, Homo sapiens
ggacagtaagaagtg

SEQ ID NO: 1642446 - DNA, 15 bp, Homo sapiens
tggacagtaagaagt

SEQ ID NO: 1642447 - DNA, 15 bp, Homo sapiens
atggacagtaagaag

SEQ ID NO: 1642448 - DNA, 15 bp, Homo sapiens
aatggacagtaagaa

SEQ ID NO: 1642449 - DNA, 15 bp, Homo sapiens
aaatggacagtaaga

SEQ ID NO: 1642450 - DNA, 15 bp, Homo sapiens
aaaatggacagtaag

SEQ ID NO: 1642451 - DNA, 15 bp, Homo sapiens
gaaaatggacagtaa

SEQ ID NO: 1642452 - DNA, 15 bp, Homo sapiens
tgaaaatggacagta

SEQ ID NO: 1642453 - DNA, 15 bp, Homo sapiens
gtgaaaatggacagt

SEQ ID NO: 1642454 - DNA, 15 bp, Homo sapiens
tgtgaaaatggacag

SEQ ID NO: 1642455 - DNA, 15 bp, Homo sapiens
ctgtgaaaatggaca

SEQ ID NO: 1642456 - DNA, 15 bp, Homo sapiens
tctgtgaaaatggac

SEQ ID NO: 1642457 - DNA, 15 bp, Homo sapiens
atctgtgaaaatgga

SEQ ID NO: 1642458 - DNA, 15 bp, Homo sapiens
tatctgtgaaaatgg

SEQ ID NO: 1642459 - DNA, 15 bp, Homo sapiens
atatctgtgaaaatg

SEQ ID NO: 1642460 - DNA, 15 bp, Homo sapiens
catatctgtgaaaat

SEQ ID NO: 1642461 - DNA, 15 bp, Homo sapiens
ccatatctgtgaaaa

SEQ ID NO: 1642462 - DNA, 15 bp, Homo sapiens
cccatatctgtgaaa

SEQ ID NO: 1642463 - DNA, 15 bp, Homo sapiens
ccccatatctgtgaa

SEQ ID NO: 1642464 - DNA, 15 bp, Homo sapiens
cccccatatctgtga

SEQ ID NO: 1642465 - DNA, 15 bp, Homo sapiens
tcccccatatctgtg

SEQ ID NO: 1642466 - DNA, 15 bp, Homo sapiens
gtcccccatatctgt

SEQ ID NO: 1642467 - DNA, 15 bp, Homo sapiens
tgtcccccatatctg

SEQ ID NO: 1642468 - DNA, 15 bp, Homo sapiens
atgtcccccatatct

SEQ ID NO: 1642469 - DNA, 15 bp, Homo sapiens
catgtcccccatatc

SEQ ID NO: 1642470 - DNA, 15 bp, Homo sapiens
tcatgtcccccatat

SEQ ID NO: 1642471 - DNA, 15 bp, Homo sapiens
atcatgtcccccata

SEQ ID NO: 1642472 - DNA, 15 bp, Homo sapiens
aatcatgtcccccat

SEQ ID NO: 1642473 - DNA, 15 bp, Homo sapiens
taatcatgtccccca

SEQ ID NO: 1642474 - DNA, 15 bp, Homo sapiens
gtaatcatgtccccc

SEQ ID NO: 1642475 - DNA, 15 bp, Homo sapiens
tgtaatcatgtcccc

SEQ ID NO: 1642476 - DNA, 15 bp, Homo sapiens
atgtaatcatgtccc

SEQ ID NO: 1642477 - DNA, 15 bp, Homo sapiens
catgtaatcatgtcc

SEQ ID NO: 1642478 - DNA, 15 bp, Homo sapiens
gcatgtaatcatgtc

SEQ ID NO: 1642479 - DNA, 15 bp, Homo sapiens
ggcatgtaatcatgt

SEQ ID NO: 1642480 - DNA, 15 bp, Homo sapiens
gggcatgtaatcatg

SEQ ID NO: 1642481 - DNA, 15 bp, Homo sapiens
agggcatgtaatcat

SEQ ID NO: 1642482 - DNA, 15 bp, Homo sapiens
gagggcatgtaatca

SEQ ID NO: 1642483 - DNA, 15 bp, Homo sapiens
tgagggcatgtaatc

SEQ ID NO: 1642484 - DNA, 15 bp, Homo sapiens
ttgagggcatgtaat

SEQ ID NO: 1642485 - DNA, 15 bp, Homo sapiens
gttgagggcatgtaa

SEQ ID NO: 1642486 - DNA, 15 bp, Homo sapiens
ggttgagggcatgta

SEQ ID NO: 1642487 - DNA, 15 bp, Homo sapiens
gggttgagggcatgt

SEQ ID NO: 1642488 - DNA, 15 bp, Homo sapiens
tgggttgagggcatg

SEQ ID NO: 1642489 - DNA, 15 bp, Homo sapiens
atgggttgagggcat

SEQ ID NO: 1642490 - DNA, 15 bp, Homo sapiens
tatgggttgagggca

SEQ ID NO: 1642491 - DNA, 15 bp, Homo sapiens
atatgggttgagggc

SEQ ID NO: 1642492 - DNA, 15 bp, Homo sapiens
catatgggttgaggg

SEQ ID NO: 1642493 - DNA, 15 bp, Homo sapiens
acatatgggttgagg

SEQ ID NO: 1642494 - DNA, 15 bp, Homo sapiens
aacatatgggttgag

SEQ ID NO: 1642495 - DNA, 15 bp, Homo sapiens
aaacatatgggttga

SEQ ID NO: 1642496 - DNA, 15 bp, Homo sapiens
aaaacatatgggttg

SEQ ID NO: 1642497 - DNA, 15 bp, Homo sapiens
gaaaacatatgggtt

SEQ ID NO: 1642498 - DNA, 15 bp, Homo sapiens
agaaaacatatgggt

SEQ ID NO: 1642499 - DNA, 15 bp, Homo sapiens
tagaaaacatatggg

SEQ ID NO: 1642500 - DNA, 15 bp, Homo sapiens
ctagaaaacatatgg

SEQ ID NO: 1642501 - DNA, 15 bp, Homo sapiens
cctagaaaacatatg

SEQ ID NO: 1642502 - DNA, 15 bp, Homo sapiens
acctagaaaacatat

SEQ ID NO: 1642503 - DNA, 15 bp, Homo sapiens
tacctagaaaacata

SEQ ID NO: 1642504 - DNA, 15 bp, Homo sapiens
ttacctagaaaacat

SEQ ID NO: 1642505 - DNA, 15 bp, Homo sapiens
gttacctagaaaaca

SEQ ID NO: 1642506 - DNA, 15 bp, Homo sapiens
agttacctagaaaac

SEQ ID NO: 1642507 - DNA, 15 bp, Homo sapiens
gagttacctagaaaa

SEQ ID NO: 1642508 - DNA, 15 bp, Homo sapiens
agagttacctagaaa

SEQ ID NO: 1642509 - DNA, 15 bp, Homo sapiens
tagagttacctagaa

SEQ ID NO: 1642510 - DNA, 15 bp, Homo sapiens
gtagagttacctaga

SEQ ID NO: 1642511 - DNA, 15 bp, Homo sapiens
ggtagagttacctag

SEQ ID NO: 1642512 - DNA, 15 bp, Homo sapiens
tggtagagttaccta

SEQ ID NO: 1642513 - DNA, 15 bp, Homo sapiens
gtggtagagttacct

SEQ ID NO: 1642514 - DNA, 15 bp, Homo sapiens
tgtggtagagttacc

SEQ ID NO: 1642515 - DNA, 15 bp, Homo sapiens
ctgtggtagagttac

SEQ ID NO: 1642516 - DNA, 15 bp, Homo sapiens
tctgtggtagagtta

SEQ ID NO: 1642517 - DNA, 15 bp, Homo sapiens
ttctgtggtagagtt

SEQ ID NO: 1642518 - DNA, 15 bp, Homo sapiens
attctgtggtagagt

SEQ ID NO: 1642519 - DNA, 15 bp, Homo sapiens
tattctgtggtagag

SEQ ID NO: 1642520 - DNA, 15 bp, Homo sapiens
ttattctgtggtaga

SEQ ID NO: 1642521 - DNA, 15 bp, Homo sapiens
tttattctgtggtag

SEQ ID NO: 1642522 - DNA, 15 bp, Homo sapiens
ctttattctgtggta

SEQ ID NO: 1642523 - DNA, 15 bp, Homo sapiens
gctttattctgtggt

SEQ ID NO: 1642524 - DNA, 15 bp, Homo sapiens
cgctttattctgtgg

SEQ ID NO: 1642525 - DNA, 15 bp, Homo sapiens
ccgctttattctgtg

SEQ ID NO: 1642526 - DNA, 15 bp, Homo sapiens
accgctttattctgt

SEQ ID NO: 1642527 - DNA, 15 bp, Homo sapiens
taccgctttattctg

SEQ ID NO: 1642528 - DNA, 15 bp, Homo sapiens
gtaccgctttattct

SEQ ID NO: 1642529 - DNA, 15 bp, Homo sapiens
agtaccgctttattc

SEQ ID NO: 1642530 - DNA, 15 bp, Homo sapiens
gagtaccgctttatt

SEQ ID NO: 1642531 - DNA, 15 bp, Homo sapiens
tgagtaccgctttat

SEQ ID NO: 1642532 - DNA, 15 bp, Homo sapiens
ttgagtaccgcttta

SEQ ID NO: 1642533 - DNA, 15 bp, Homo sapiens
tttgagtaccgcttt

SEQ ID NO: 1642534 - DNA, 15 bp, Homo sapiens
atttgagtaccgctt

SEQ ID NO: 1642535 - DNA, 15 bp, Homo sapiens
aatttgagtaccgct

SEQ ID NO: 1642536 - DNA, 15 bp, Homo sapiens
taatttgagtaccgc

SEQ ID NO: 1642537 - DNA, 15 bp, Homo sapiens
gtaatttgagtaccg

SEQ ID NO: 1642538 - DNA, 15 bp, Homo sapiens
agtaatttgagtacc

SEQ ID NO: 1642539 - DNA, 15 bp, Homo sapiens
gagtaatttgagtac

SEQ ID NO: 1642540 - DNA, 15 bp, Homo sapiens
agagtaatttgagta

SEQ ID NO: 1642541 - DNA, 15 bp, Homo sapiens
gagagtaatttgagt

SEQ ID NO: 1642542 - DNA, 15 bp, Homo sapiens
tgagagtaatttgag

SEQ ID NO: 1642543 - DNA, 15 bp, Homo sapiens
ctgagagtaatttga

SEQ ID NO: 1642544 - DNA, 15 bp, Homo sapiens
gctgagagtaatttg

SEQ ID NO: 1642545 - DNA, 15 bp, Homo sapiens
agctgagagtaattt

SEQ ID NO: 1642546 - DNA, 15 bp, Homo sapiens
aagctgagagtaatt

SEQ ID NO: 1642547 - DNA, 15 bp, Homo sapiens
caagctgagagtaat

SEQ ID NO: 1642548 - DNA, 15 bp, Homo sapiens
gcaagctgagagtaa

SEQ ID NO: 1642549 - DNA, 15 bp, Homo sapiens
agcaagctgagagta

SEQ ID NO: 1642550 - DNA, 15 bp, Homo sapiens
aagcaagctgagagt

SEQ ID NO: 1642551 - DNA, 15 bp, Homo sapiens
taagcaagctgagag

SEQ ID NO: 1642552 - DNA, 15 bp, Homo sapiens
ttaagcaagctgaga

SEQ ID NO: 1642553 - DNA, 15 bp, Homo sapiens
attaagcaagctgag

SEQ ID NO: 1642554 - DNA, 15 bp, Homo sapiens
tattaagcaagctga

SEQ ID NO: 1642555 - DNA, 15 bp, Homo sapiens
atattaagcaagctg

SEQ ID NO: 1642556 - DNA, 15 bp, Homo sapiens
gatattaagcaagct

SEQ ID NO: 1642557 - DNA, 15 bp, Homo sapiens
ggatattaagcaagc

SEQ ID NO: 1642558 - DNA, 15 bp, Homo sapiens
tggatattaagcaag

SEQ ID NO: 1642559 - DNA, 15 bp, Homo sapiens
gtggatattaagcaa

SEQ ID NO: 1642560 - DNA, 15 bp, Homo sapiens
agtggatattaagca

SEQ ID NO: 1642561 - DNA, 15 bp, Homo sapiens
aagtggatattaagc

SEQ ID NO: 1642562 - DNA, 15 bp, Homo sapiens
aaagtggatattaag

SEQ ID NO: 1642563 - DNA, 15 bp, Homo sapiens
taaagtggatattaa

SEQ ID NO: 1642564 - DNA, 15 bp, Homo sapiens
ctaaagtggatatta

SEQ ID NO: 1642565 - DNA, 15 bp, Homo sapiens
cctaaagtggatatt

SEQ ID NO: 1642566 - DNA, 15 bp, Homo sapiens
tcctaaagtggatat

SEQ ID NO: 1642567 - DNA, 15 bp, Homo sapiens
gtcctaaagtggata

SEQ ID NO: 1642568 - DNA, 15 bp, Homo sapiens
tgtcctaaagtggat

SEQ ID NO: 1642569 - DNA, 15 bp, Homo sapiens
gtgtcctaaagtgga

SEQ ID NO: 1642570 - DNA, 15 bp, Homo sapiens
agtgtcctaaagtgg

SEQ ID NO: 1642571 - DNA, 15 bp, Homo sapiens
cagtgtcctaaagtg

SEQ ID NO: 1642572 - DNA, 15 bp, Homo sapiens
tcagtgtcctaaagt

SEQ ID NO: 1642573 - DNA, 15 bp, Homo sapiens
ttcagtgtcctaaag

SEQ ID NO: 1642574 - DNA, 15 bp, Homo sapiens
tttcagtgtcctaaa

SEQ ID NO: 1642575 - DNA, 15 bp, Homo sapiens
ttttcagtgtcctaa

SEQ ID NO: 1642576 - DNA, 15 bp, Homo sapiens
tttttcagtgtccta

SEQ ID NO: 1642577 - DNA, 15 bp, Homo sapiens
gtttttcagtgtcct

SEQ ID NO: 1642578 - DNA, 15 bp, Homo sapiens
tgtttttcagtgtcc

SEQ ID NO: 1642579 - DNA, 15 bp, Homo sapiens
ttgtttttcagtgtc

SEQ ID NO: 1642580 - DNA, 15 bp, Homo sapiens
tttgtttttcagtgt

SEQ ID NO: 1642581 - DNA, 15 bp, Homo sapiens
gtttgtttttcagtg

SEQ ID NO: 1642582 - DNA, 15 bp, Homo sapiens
tgtttgtttttcagt

SEQ ID NO: 1642583 - DNA, 15 bp, Homo sapiens
gtgtttgtttttcag

SEQ ID NO: 1642584 - DNA, 15 bp, Homo sapiens
tgtgtttgtttttca

SEQ ID NO: 1642585 - DNA, 15 bp, Homo sapiens
ttgtgtttgtttttc

SEQ ID NO: 1642586 - DNA, 15 bp, Homo sapiens
tttgtgtttgttttt

SEQ ID NO: 1642587 - DNA, 15 bp, Homo sapiens
ctttgtgtttgtttt

SEQ ID NO: 1642588 - DNA, 15 bp, Homo sapiens
cctttgtgtttgttt

SEQ ID NO: 1642589 - DNA, 15 bp, Homo sapiens
ccctttgtgtttgtt

SEQ ID NO: 1642590 - DNA, 15 bp, Homo sapiens
tccctttgtgtttgt

SEQ ID NO: 1642591 - DNA, 15 bp, Homo sapiens
gtccctttgtgtttg

SEQ ID NO: 1642592 - DNA, 15 bp, Homo sapiens
agtccctttgtgttt

SEQ ID NO: 1642593 - DNA, 15 bp, Homo sapiens
tagtccctttgtgtt

SEQ ID NO: 1642594 - DNA, 15 bp, Homo sapiens
ttagtccctttgtgt

SEQ ID NO: 1642595 - DNA, 15 bp, Homo sapiens
tttagtccctttgtg

SEQ ID NO: 1642596 - DNA, 15 bp, Homo sapiens
gtttagtccctttgt

SEQ ID NO: 1642597 - DNA, 15 bp, Homo sapiens
tgtttagtccctttg

SEQ ID NO: 1642598 - DNA, 15 bp, Homo sapiens
ttgtttagtcccttt

SEQ ID NO: 1642599 - DNA, 15 bp, Homo sapiens
cttgtttagtccctt

SEQ ID NO: 1642600 - DNA, 15 bp, Homo sapiens
tcttgtttagtccct

SEQ ID NO: 1642601 - DNA, 15 bp, Homo sapiens
atcttgtttagtccc

SEQ ID NO: 1642602 - DNA, 15 bp, Homo sapiens
catcttgtttagtcc

SEQ ID NO: 1642603 - DNA, 15 bp, Homo sapiens
tcatcttgtttagtc

SEQ ID NO: 1642604 - DNA, 15 bp, Homo sapiens
ttcatcttgtttagt

SEQ ID NO: 1642605 - DNA, 15 bp, Homo sapiens
gttcatcttgtttag

SEQ ID NO: 1642606 - DNA, 15 bp, Homo sapiens
tgttcatcttgttta

SEQ ID NO: 1642607 - DNA, 15 bp, Homo sapiens
ctgttcatcttgttt

SEQ ID NO: 1642608 - DNA, 15 bp, Homo sapiens
actgttcatcttgtt

SEQ ID NO: 1642609 - DNA, 15 bp, Homo sapiens
tactgttcatcttgt

SEQ ID NO: 1642610 - DNA, 15 bp, Homo sapiens
gtactgttcatcttg

SEQ ID NO: 1642611 - DNA, 15 bp, Homo sapiens
cgtactgttcatctt

SEQ ID NO: 1642612 - DNA, 15 bp, Homo sapiens
acgtactgttcatct

SEQ ID NO: 1642613 - DNA, 15 bp, Homo sapiens
tacgtactgttcatc

SEQ ID NO: 1642614 - DNA, 15 bp, Homo sapiens
atacgtactgttcat

SEQ ID NO: 1642615 - DNA, 15 bp, Homo sapiens
gatacgtactgttca

SEQ ID NO: 1642616 - DNA, 15 bp, Homo sapiens
ggatacgtactgttc

SEQ ID NO: 1642617 - DNA, 15 bp, Homo sapiens
gggatacgtactgtt

SEQ ID NO: 1642618 - DNA, 15 bp, Homo sapiens
tgggatacgtactgt

SEQ ID NO: 1642619 - DNA, 15 bp, Homo sapiens
atgggatacgtactg

SEQ ID NO: 1642620 - DNA, 15 bp, Homo sapiens
aatgggatacgtact

SEQ ID NO: 1642621 - DNA, 15 bp, Homo sapiens
aaatgggatacgtac

SEQ ID NO: 1642622 - DNA, 15 bp, Homo sapiens
gaaatgggatacgta

SEQ ID NO: 1642623 - DNA, 15 bp, Homo sapiens
agaaatgggatacgt

SEQ ID NO: 1642624 - DNA, 15 bp, Homo sapiens
aagaaatgggatacg

SEQ ID NO: 1642625 - DNA, 15 bp, Homo sapiens
aaagaaatgggatac

SEQ ID NO: 1642626 - DNA, 15 bp, Homo sapiens
aaaagaaatgggata

SEQ ID NO: 1642627 - DNA, 15 bp, Homo sapiens
taaaagaaatgggat

SEQ ID NO: 1642628 - DNA, 15 bp, Homo sapiens
ttaaaagaaatggga

SEQ ID NO: 1642629 - DNA, 15 bp, Homo sapiens
cttaaaagaaatggg

SEQ ID NO: 1642630 - DNA, 15 bp, Homo sapiens
acttaaaagaaatgg

SEQ ID NO: 1642631 - DNA, 15 bp, Homo sapiens
gacttaaaagaaatg

SEQ ID NO: 1642632 - DNA, 15 bp, Homo sapiens
ggacttaaaagaaat

SEQ ID NO: 1642633 - DNA, 15 bp, Homo sapiens
tggacttaaaagaaa

SEQ ID NO: 1642634 - DNA, 15 bp, Homo sapiens
gtggacttaaaagaa

SEQ ID NO: 1642635 - DNA, 15 bp, Homo sapiens
agtggacttaaaaga

SEQ ID NO: 1642636 - DNA, 15 bp, Homo sapiens
tagtggacttaaaag

SEQ ID NO: 1642637 - DNA, 15 bp, Homo sapiens
atagtggacttaaaa

SEQ ID NO: 1642638 - DNA, 15 bp, Homo sapiens
gatagtggacttaaa

SEQ ID NO: 1642639 - DNA, 15 bp, Homo sapiens
agatagtggacttaa

SEQ ID NO: 1642640 - DNA, 15 bp, Homo sapiens
aagatagtggactta

SEQ ID NO: 1642641 - DNA, 15 bp, Homo sapiens
caagatagtggactt

SEQ ID NO: 1642642 - DNA, 15 bp, Homo sapiens
tcaagatagtggact

SEQ ID NO: 1642643 - DNA, 15 bp, Homo sapiens
atcaagatagtggac

SEQ ID NO: 1642644 - DNA, 15 bp, Homo sapiens
tatcaagatagtgga

SEQ ID NO: 1642645 - DNA, 15 bp, Homo sapiens
atatcaagatagtgg

SEQ ID NO: 1642646 - DNA, 15 bp, Homo sapiens
gatatcaagatagtg

SEQ ID NO: 1642647 - DNA, 15 bp, Homo sapiens
tgatatcaagatagt

SEQ ID NO: 1642648 - DNA, 15 bp, Homo sapiens
atgatatcaagatag

SEQ ID NO: 1642649 - DNA, 15 bp, Homo sapiens
catgatatcaagata

SEQ ID NO: 1642650 - DNA, 15 bp, Homo sapiens
tcatgatatcaagat

SEQ ID NO: 1642651 - DNA, 15 bp, Homo sapiens
ctcatgatatcaaga

SEQ ID NO: 1642652 - DNA, 15 bp, Homo sapiens
cctcatgatatcaag

SEQ ID NO: 1642653 - DNA, 15 bp, Homo sapiens
gcctcatgatatcaa

SEQ ID NO: 1642654 - DNA, 15 bp, Homo sapiens
ggcctcatgatatca

SEQ ID NO: 1642655 - DNA, 15 bp, Homo sapiens
gggcctcatgatatc

SEQ ID NO: 1642656 - DNA, 15 bp, Homo sapiens
ggggcctcatgatat

SEQ ID NO: 1642657 - DNA, 15 bp, Homo sapiens
gggggcctcatgata

SEQ ID NO: 1642658 - DNA, 15 bp, Homo sapiens
agggggcctcatgat

SEQ ID NO: 1642659 - DNA, 15 bp, Homo sapiens
gagggggcctcatga

SEQ ID NO: 1642660 - DNA, 15 bp, Homo sapiens
tgagggggcctcatg

SEQ ID NO: 1642661 - DNA, 15 bp, Homo sapiens
gtgagggggcctcat

SEQ ID NO: 1642662 - DNA, 15 bp, Homo sapiens
agtgagggggcctca

SEQ ID NO: 1642663 - DNA, 15 bp, Homo sapiens
cagtgagggggcctc

SEQ ID NO: 1642664 - DNA, 15 bp, Homo sapiens
ccagtgagggggcct

SEQ ID NO: 1642665 - DNA, 15 bp, Homo sapiens
accagtgagggggcc

SEQ ID NO: 1642666 - DNA, 15 bp, Homo sapiens
aaccagtgagggggc

SEQ ID NO: 1642667 - DNA, 15 bp, Homo sapiens
aaaccagtgaggggg

SEQ ID NO: 1642668 - DNA, 15 bp, Homo sapiens
aaaaccagtgagggg

SEQ ID NO: 1642669 - DNA, 15 bp, Homo sapiens
taaaaccagtgaggg

SEQ ID NO: 1642670 - DNA, 15 bp, Homo sapiens
ataaaaccagtgagg

SEQ ID NO: 1642671 - DNA, 15 bp, Homo sapiens
cataaaaccagtgag

SEQ ID NO: 1642672 - DNA, 15 bp, Homo sapiens
acataaaaccagtga

SEQ ID NO: 1642673 - DNA, 15 bp, Homo sapiens
tacataaaaccagtg

SEQ ID NO: 1642674 - DNA, 15 bp, Homo sapiens
ctacataaaaccagt

SEQ ID NO: 1642675 - DNA, 15 bp, Homo sapiens
tctacataaaaccag

SEQ ID NO: 1642676 - DNA, 15 bp, Homo sapiens
atctacataaaacca

SEQ ID NO: 1642677 - DNA, 15 bp, Homo sapiens
catctacataaaacc

SEQ ID NO: 1642678 - DNA, 15 bp, Homo sapiens
ccatctacataaaac

SEQ ID NO: 1642679 - DNA, 15 bp, Homo sapiens
cccatctacataaaa

SEQ ID NO: 1642680 - DNA, 15 bp, Homo sapiens
gcccatctacataaa

SEQ ID NO: 1642681 - DNA, 15 bp, Homo sapiens
agcccatctacataa

SEQ ID NO: 1642682 - DNA, 15 bp, Homo sapiens
tagcccatctacata

SEQ ID NO: 1642683 - DNA, 15 bp, Homo sapiens
gtagcccatctacat

SEQ ID NO: 1642684 - DNA, 15 bp, Homo sapiens
agtagcccatctaca

SEQ ID NO: 1642685 - DNA, 15 bp, Homo sapiens
cagtagcccatctac

SEQ ID NO: 1642686 - DNA, 15 bp, Homo sapiens
ccagtagcccatcta

SEQ ID NO: 1642687 - DNA, 15 bp, Homo sapiens
tccagtagcccatct

SEQ ID NO: 1642688 - DNA, 15 bp, Homo sapiens
ttccagtagcccatc

SEQ ID NO: 1642689 - DNA, 15 bp, Homo sapiens
attccagtagcccat

SEQ ID NO: 1642690 - DNA, 15 bp, Homo sapiens
cattccagtagccca

SEQ ID NO: 1642691 - DNA, 15 bp, Homo sapiens
gcattccagtagccc

SEQ ID NO: 1642692 - DNA, 15 bp, Homo sapiens
tgcattccagtagcc

SEQ ID NO: 1642693 - DNA, 15 bp, Homo sapiens
atgcattccagtagc

SEQ ID NO: 1642694 - DNA, 15 bp, Homo sapiens
tatgcattccagtag

SEQ ID NO: 1642695 - DNA, 15 bp, Homo sapiens
ttatgcattccagta

SEQ ID NO: 1642696 - DNA, 15 bp, Homo sapiens
cttatgcattccagt

SEQ ID NO: 1642697 - DNA, 15 bp, Homo sapiens
gcttatgcattccag

SEQ ID NO: 1642698 - DNA, 15 bp, Homo sapiens
agcttatgcattcca

SEQ ID NO: 1642699 - DNA, 15 bp, Homo sapiens
tagcttatgcattcc

SEQ ID NO: 1642700 - DNA, 15 bp, Homo sapiens
ctagcttatgcattc

SEQ ID NO: 1642701 - DNA, 15 bp, Homo sapiens
actagcttatgcatt

SEQ ID NO: 1642702 - DNA, 15 bp, Homo sapiens
cactagcttatgcat

SEQ ID NO: 1642703 - DNA, 15 bp, Homo sapiens
gcactagcttatgca

SEQ ID NO: 1642704 - DNA, 15 bp, Homo sapiens
ggcactagcttatgc

SEQ ID NO: 1642705 - DNA, 15 bp, Homo sapiens
tggcactagcttatg

SEQ ID NO: 1642706 - DNA, 15 bp, Homo sapiens
ttggcactagcttat

SEQ ID NO: 1642707 - DNA, 15 bp, Homo sapiens
attggcactagctta

SEQ ID NO: 1642708 - DNA, 15 bp, Homo sapiens
aattggcactagctt

SEQ ID NO: 1642709 - DNA, 15 bp, Homo sapiens
gaattggcactagct

SEQ ID NO: 1642710 - DNA, 15 bp, Homo sapiens
agaattggcactagc

SEQ ID NO: 1642711 - DNA, 15 bp, Homo sapiens
aagaattggcactag

SEQ ID NO: 1642712 - DNA, 15 bp, Homo sapiens
taagaattggcacta

SEQ ID NO: 1642713 - DNA, 15 bp, Homo sapiens
ataagaattggcact

SEQ ID NO: 1642714 - DNA, 15 bp, Homo sapiens
aataagaattggcac

SEQ ID NO: 1642715 - DNA, 15 bp, Homo sapiens
aaataagaattggca

SEQ ID NO: 1642716 - DNA, 15 bp, Homo sapiens
aaaataagaattggc

SEQ ID NO: 1642717 - DNA, 15 bp, Homo sapiens
gaaaataagaattgg

SEQ ID NO: 1642718 - DNA, 15 bp, Homo sapiens
ggaaaataagaattg

SEQ ID NO: 1642719 - DNA, 15 bp, Homo sapiens
tggaaaataagaatt

SEQ ID NO: 1642720 - DNA, 15 bp, Homo sapiens
ttggaaaataagaat

SEQ ID NO: 1642721 - DNA, 15 bp, Homo sapiens
tttggaaaataagaa

SEQ ID NO: 1642722 - DNA, 15 bp, Homo sapiens
ctttggaaaataaga

SEQ ID NO: 1642723 - DNA, 15 bp, Homo sapiens
tctttggaaaataag

SEQ ID NO: 1642724 - DNA, 15 bp, Homo sapiens
atctttggaaaataa

SEQ ID NO: 1642725 - DNA, 15 bp, Homo sapiens
catctttggaaaata

SEQ ID NO: 1642726 - DNA, 15 bp, Homo sapiens
acatctttggaaaat

SEQ ID NO: 1642727 - DNA, 15 bp, Homo sapiens
aacatctttggaaaa

SEQ ID NO: 1642728 - DNA, 15 bp, Homo sapiens
taacatctttggaaa

SEQ ID NO: 1642729 - DNA, 15 bp, Homo sapiens
ttaacatctttggaa

SEQ ID NO: 1642730 - DNA, 15 bp, Homo sapiens
tttaacatctttgga

SEQ ID NO: 1642731 - DNA, 15 bp, Homo sapiens
ttttaacatctttgg

SEQ ID NO: 1642732 - DNA, 15 bp, Homo sapiens
cttttaacatctttg

SEQ ID NO: 1642733 - DNA, 15 bp, Homo sapiens
tcttttaacatcttt

SEQ ID NO: 1642734 - DNA, 15 bp, Homo sapiens
atcttttaacatctt

SEQ ID NO: 1642735 - DNA, 15 bp, Homo sapiens
aatcttttaacatct

SEQ ID NO: 1642736 - DNA, 15 bp, Homo sapiens
taatcttttaacatc

SEQ ID NO: 1642737 - DNA, 15 bp, Homo sapiens
ttaatcttttaacat

SEQ ID NO: 1642738 - DNA, 15 bp, Homo sapiens
gttaatcttttaaca

SEQ ID NO: 1642739 - DNA, 15 bp, Homo sapiens
tgttaatcttttaac

SEQ ID NO: 1642740 - DNA, 15 bp, Homo sapiens
atgttaatcttttaa

SEQ ID NO: 1642741 - DNA, 15 bp, Homo sapiens
tatgttaatctttta

SEQ ID NO: 1642742 - DNA, 15 bp, Homo sapiens
ctatgttaatctttt

SEQ ID NO: 1642743 - DNA, 15 bp, Homo sapiens
cctatgttaatcttt

SEQ ID NO: 1642744 - DNA, 15 bp, Homo sapiens
tcctatgttaatctt

SEQ ID NO: 1642745 - DNA, 15 bp, Homo sapiens
atcctatgttaatct

SEQ ID NO: 1642746 - DNA, 15 bp, Homo sapiens
catcctatgttaatc

SEQ ID NO: 1642747 - DNA, 15 bp, Homo sapiens
ccatcctatgttaat

SEQ ID NO: 1642748 - DNA, 15 bp, Homo sapiens
cccatcctatgttaa

SEQ ID NO: 1642749 - DNA, 15 bp, Homo sapiens
tcccatcctatgtta

SEQ ID NO: 1642750 - DNA, 15 bp, Homo sapiens
ctcccatcctatgtt

SEQ ID NO: 1642751 - DNA, 15 bp, Homo sapiens
cctcccatcctatgt

SEQ ID NO: 1642752 - DNA, 15 bp, Homo sapiens
tcctcccatcctatg

SEQ ID NO: 1642753 - DNA, 15 bp, Homo sapiens
ctcctcccatcctat

SEQ ID NO: 1642754 - DNA, 15 bp, Homo sapiens
tctcctcccatccta

SEQ ID NO: 1642755 - DNA, 15 bp, Homo sapiens
ctctcctcccatcct

SEQ ID NO: 1642756 - DNA, 15 bp, Homo sapiens
actctcctcccatcc

SEQ ID NO: 1642757 - DNA, 15 bp, Homo sapiens
cactctcctcccatc

SEQ ID NO: 1642758 - DNA, 15 bp, Homo sapiens
tcactctcctcccat

SEQ ID NO: 1642759 - DNA, 15 bp, Homo sapiens
ctcactctcctccca

SEQ ID NO: 1642760 - DNA, 15 bp, Homo sapiens
cctcactctcctccc

SEQ ID NO: 1642761 - DNA, 15 bp, Homo sapiens
tcctcactctcctcc

SEQ ID NO: 1642762 - DNA, 15 bp, Homo sapiens
atcctcactctcctc

SEQ ID NO: 1642763 - DNA, 15 bp, Homo sapiens
gatcctcactctcct

SEQ ID NO: 1642764 - DNA, 15 bp, Homo sapiens
tgatcctcactctcc

SEQ ID NO: 1642765 - DNA, 15 bp, Homo sapiens
ttgatcctcactctc

SEQ ID NO: 1642766 - DNA, 15 bp, Homo sapiens
tttgatcctcactct

SEQ ID NO: 1642767 - DNA, 15 bp, Homo sapiens
ttttgatcctcactc

SEQ ID NO: 1642768 - DNA, 15 bp, Homo sapiens
tttttgatcctcact

SEQ ID NO: 1642769 - DNA, 15 bp, Homo sapiens
ttttttgatcctcac

SEQ ID NO: 1642770 - DNA, 15 bp, Homo sapiens
attttttgatcctca

SEQ ID NO: 1642771 - DNA, 15 bp, Homo sapiens
gattttttgatcctc

SEQ ID NO: 1642772 - DNA, 15 bp, Homo sapiens
agattttttgatcct

SEQ ID NO: 1642773 - DNA, 15 bp, Homo sapiens
tagattttttgatcc

SEQ ID NO: 1642774 - DNA, 15 bp, Homo sapiens
gtagattttttgatc

SEQ ID NO: 1642775 - DNA, 15 bp, Homo sapiens
ggtagattttttgat

SEQ ID NO: 1642776 - DNA, 15 bp, Homo sapiens
aggtagattttttga

SEQ ID NO: 1642777 - DNA, 15 bp, Homo sapiens
taggtagattttttg

SEQ ID NO: 1642778 - DNA, 15 bp, Homo sapiens
ataggtagatttttt

SEQ ID NO: 1642779 - DNA, 15 bp, Homo sapiens
gataggtagattttt

SEQ ID NO: 1642780 - DNA, 15 bp, Homo sapiens
tgataggtagatttt

SEQ ID NO: 1642781 - DNA, 15 bp, Homo sapiens
ctgataggtagattt

SEQ ID NO: 1642782 - DNA, 15 bp, Homo sapiens
cctgataggtagatt

SEQ ID NO: 1642783 - DNA, 15 bp, Homo sapiens
acctgataggtagat

SEQ ID NO: 1642784 - DNA, 15 bp, Homo sapiens
tacctgataggtaga

SEQ ID NO: 1642785 - DNA, 15 bp, Homo sapiens
gtacctgataggtag

SEQ ID NO: 1642786 - DNA, 15 bp, Homo sapiens
agtacctgataggta

SEQ ID NO: 1642787 - DNA, 15 bp, Homo sapiens
tagtacctgataggt

SEQ ID NO: 1642788 - DNA, 15 bp, Homo sapiens
atagtacctgatagg

SEQ ID NO: 1642789 - DNA, 15 bp, Homo sapiens
catagtacctgatag

SEQ ID NO: 1642790 - DNA, 15 bp, Homo sapiens
gcatagtacctgata

SEQ ID NO: 1642791 - DNA, 15 bp, Homo sapiens
agcatagtacctgat

SEQ ID NO: 1642792 - DNA, 15 bp, Homo sapiens
gagcatagtacctga

SEQ ID NO: 1642793 - DNA, 15 bp, Homo sapiens
tgagcatagtacctg

SEQ ID NO: 1642794 - DNA, 15 bp, Homo sapiens
gtgagcatagtacct

SEQ ID NO: 1642795 - DNA, 15 bp, Homo sapiens
agtgagcatagtacc

SEQ ID NO: 1642796 - DNA, 15 bp, Homo sapiens
tagtgagcatagtac

SEQ ID NO: 1642797 - DNA, 15 bp, Homo sapiens
gtagtgagcatagta

SEQ ID NO: 1642798 - DNA, 15 bp, Homo sapiens
ggtagtgagcatagt

SEQ ID NO: 1642799 - DNA, 15 bp, Homo sapiens
tggtagtgagcatag

SEQ ID NO: 1642800 - DNA, 15 bp, Homo sapiens
ctggtagtgagcata

SEQ ID NO: 1642801 - DNA, 15 bp, Homo sapiens
actggtagtgagcat

SEQ ID NO: 1642802 - DNA, 15 bp, Homo sapiens
cactggtagtgagca

SEQ ID NO: 1642803 - DNA, 15 bp, Homo sapiens
acactggtagtgagc

SEQ ID NO: 1642804 - DNA, 15 bp, Homo sapiens
tacactggtagtgag

SEQ ID NO: 1642805 - DNA, 15 bp, Homo sapiens
ttacactggtagtga

SEQ ID NO: 1642806 - DNA, 15 bp, Homo sapiens
attacactggtagtg

SEQ ID NO: 1642807 - DNA, 15 bp, Homo sapiens
cattacactggtagt

SEQ ID NO: 1642808 - DNA, 15 bp, Homo sapiens
tcattacactggtag

SEQ ID NO: 1642809 - DNA, 15 bp, Homo sapiens
ttcattacactggta

SEQ ID NO: 1642810 - DNA, 15 bp, Homo sapiens
tttcattacactggt

SEQ ID NO: 1642811 - DNA, 15 bp, Homo sapiens
atttcattacactgg

SEQ ID NO: 1642812 - DNA, 15 bp, Homo sapiens
gatttcattacactg

SEQ ID NO: 1642813 - DNA, 15 bp, Homo sapiens
tgatttcattacact

SEQ ID NO: 1642814 - DNA, 15 bp, Homo sapiens
atgatttcattacac

SEQ ID NO: 1642815 - DNA, 15 bp, Homo sapiens
aatgatttcattaca

SEQ ID NO: 1642816 - DNA, 15 bp, Homo sapiens
aaatgatttcattac

SEQ ID NO: 1642817 - DNA, 15 bp, Homo sapiens
caaatgatttcatta

SEQ ID NO: 1642818 - DNA, 15 bp, Homo sapiens
acaaatgatttcatt

SEQ ID NO: 1642819 - DNA, 15 bp, Homo sapiens
tacaaatgatttcat

SEQ ID NO: 1642820 - DNA, 15 bp, Homo sapiens
gtacaaatgatttca

SEQ ID NO: 1642821 - DNA, 15 bp, Homo sapiens
tgtacaaatgatttc

SEQ ID NO: 1642822 - DNA, 15 bp, Homo sapiens
atgtacaaatgattt

SEQ ID NO: 1642823 - DNA, 15 bp, Homo sapiens
gatgtacaaatgatt

SEQ ID NO: 1642824 - DNA, 15 bp, Homo sapiens
tgatgtacaaatgat

SEQ ID NO: 1642825 - DNA, 15 bp, Homo sapiens
ttgatgtacaaatga

SEQ ID NO: 1642826 - DNA, 15 bp, Homo sapiens
tttgatgtacaaatg

SEQ ID NO: 1642827 - DNA, 15 bp, Homo sapiens
ctttgatgtacaaat

SEQ ID NO: 1642828 - DNA, 15 bp, Homo sapiens
gctttgatgtacaaa

SEQ ID NO: 1642829 - DNA, 15 bp, Homo sapiens
ggctttgatgtacaa

SEQ ID NO: 1642830 - DNA, 15 bp, Homo sapiens
gggctttgatgtaca

SEQ ID NO: 1642831 - DNA, 15 bp, Homo sapiens
tgggctttgatgtac

SEQ ID NO: 1642832 - DNA, 15 bp, Homo sapiens
atgggctttgatgta

SEQ ID NO: 1642833 - DNA, 15 bp, Homo sapiens
catgggctttgatgt

SEQ ID NO: 1642834 - DNA, 15 bp, Homo sapiens
tcatgggctttgatg

SEQ ID NO: 1642835 - DNA, 15 bp, Homo sapiens
gtcatgggctttgat

SEQ ID NO: 1642836 - DNA, 15 bp, Homo sapiens
tgtcatgggctttga

SEQ ID NO: 1642837 - DNA, 15 bp, Homo sapiens
gtgtcatgggctttg

SEQ ID NO: 1642838 - DNA, 15 bp, Homo sapiens
tgtgtcatgggcttt

SEQ ID NO: 1642839 - DNA, 15 bp, Homo sapiens
gtgtgtcatgggctt

SEQ ID NO: 1642840 - DNA, 15 bp, Homo sapiens
tgtgtgtcatgggct

SEQ ID NO: 1642841 - DNA, 15 bp, Homo sapiens
ttgtgtgtcatgggc

SEQ ID NO: 1642842 - DNA, 15 bp, Homo sapiens
attgtgtgtcatggg

SEQ ID NO: 1642843 - DNA, 15 bp, Homo sapiens
aattgtgtgtcatgg

SEQ ID NO: 1642844 - DNA, 15 bp, Homo sapiens
aaattgtgtgtcatg

SEQ ID NO: 1642845 - DNA, 15 bp, Homo sapiens
taaattgtgtgtcat

SEQ ID NO: 1642846 - DNA, 15 bp, Homo sapiens
gtaaattgtgtgtca

SEQ ID NO: 1642847 - DNA, 15 bp, Homo sapiens
ggtaaattgtgtgtc

SEQ ID NO: 1642848 - DNA, 15 bp, Homo sapiens
gggtaaattgtgtgt

SEQ ID NO: 1642849 - DNA, 15 bp, Homo sapiens
tgggtaaattgtgtg

SEQ ID NO: 1642850 - DNA, 15 bp, Homo sapiens
atgggtaaattgtgt

SEQ ID NO: 1642851 - DNA, 15 bp, Homo sapiens
catgggtaaattgtg

SEQ ID NO: 1642852 - DNA, 15 bp, Homo sapiens
ccatgggtaaattgt

SEQ ID NO: 1642853 - DNA, 15 bp, Homo sapiens
tccatgggtaaattg

SEQ ID NO: 1642854 - DNA, 15 bp, Homo sapiens
ttccatgggtaaatt

SEQ ID NO: 1642855 - DNA, 15 bp, Homo sapiens
tttccatgggtaaat

SEQ ID NO: 1642856 - DNA, 15 bp, Homo sapiens
atttccatgggtaaa

SEQ ID NO: 1642857 - DNA, 15 bp, Homo sapiens
aatttccatgggtaa

SEQ ID NO: 1642858 - DNA, 15 bp, Homo sapiens
aaatttccatgggta

SEQ ID NO: 1642859 - DNA, 15 bp, Homo sapiens
taaatttccatgggt

SEQ ID NO: 1642860 - DNA, 15 bp, Homo sapiens
gtaaatttccatggg

SEQ ID NO: 1642861 - DNA, 15 bp, Homo sapiens
ggtaaatttccatgg

SEQ ID NO: 1642862 - DNA, 15 bp, Homo sapiens
gggtaaatttccatg

SEQ ID NO: 1642863 - DNA, 15 bp, Homo sapiens
tgggtaaatttccat

SEQ ID NO: 1642864 - DNA, 15 bp, Homo sapiens
atgggtaaatttcca

SEQ ID NO: 1642865 - DNA, 15 bp, Homo sapiens
aatgggtaaatttcc

SEQ ID NO: 1642866 - DNA, 15 bp, Homo sapiens
caatgggtaaatttc

SEQ ID NO: 1642867 - DNA, 15 bp, Homo sapiens
ccaatgggtaaattt

SEQ ID NO: 1642868 - DNA, 15 bp, Homo sapiens
gccaatgggtaaatt

SEQ ID NO: 1642869 - DNA, 15 bp, Homo sapiens
agccaatgggtaaat

SEQ ID NO: 1642870 - DNA, 15 bp, Homo sapiens
aagccaatgggtaaa

SEQ ID NO: 1642871 - DNA, 15 bp, Homo sapiens
aaagccaatgggtaa

SEQ ID NO: 1642872 - DNA, 15 bp, Homo sapiens
aaaagccaatgggta

SEQ ID NO: 1642873 - DNA, 15 bp, Homo sapiens
caaaagccaatgggt

SEQ ID NO: 1642874 - DNA, 15 bp, Homo sapiens
gcaaaagccaatggg

SEQ ID NO: 1642875 - DNA, 15 bp, Homo sapiens
agcaaaagccaatgg

SEQ ID NO: 1642876 - DNA, 15 bp, Homo sapiens
cagcaaaagccaatg

SEQ ID NO: 1642877 - DNA, 15 bp, Homo sapiens
gcagcaaaagccaat

SEQ ID NO: 1642878 - DNA, 15 bp, Homo sapiens
tgcagcaaaagccaa

SEQ ID NO: 1642879 - DNA, 15 bp, Homo sapiens
ttgcagcaaaagcca

SEQ ID NO: 1642880 - DNA, 15 bp, Homo sapiens
tttgcagcaaaagcc

SEQ ID NO: 1642881 - DNA, 15 bp, Homo sapiens
ttttgcagcaaaagc

SEQ ID NO: 1642882 - DNA, 15 bp, Homo sapiens
cttttgcagcaaaag

SEQ ID NO: 1642883 - DNA, 15 bp, Homo sapiens
acttttgcagcaaaa

SEQ ID NO: 1642884 - DNA, 15 bp, Homo sapiens
tacttttgcagcaaa

SEQ ID NO: 1642885 - DNA, 15 bp, Homo sapiens
gtacttttgcagcaa

SEQ ID NO: 1642886 - DNA, 15 bp, Homo sapiens
ggtacttttgcagca

SEQ ID NO: 1642887 - DNA, 15 bp, Homo sapiens
gggtacttttgcagc

SEQ ID NO: 1642888 - DNA, 15 bp, Homo sapiens
ggggtacttttgcag

SEQ ID NO: 1642889 - DNA, 15 bp, Homo sapiens
aggggtacttttgca

SEQ ID NO: 1642890 - DNA, 15 bp, Homo sapiens
aaggggtacttttgc

SEQ ID NO: 1642891 - DNA, 15 bp, Homo sapiens
caaggggtacttttg

SEQ ID NO: 1642892 - DNA, 15 bp, Homo sapiens
tcaaggggtactttt

SEQ ID NO: 1642893 - DNA, 15 bp, Homo sapiens
ttcaaggggtacttt

SEQ ID NO: 1642894 - DNA, 15 bp, Homo sapiens
gttcaaggggtactt

SEQ ID NO: 1642895 - DNA, 15 bp, Homo sapiens
ggttcaaggggtact

SEQ ID NO: 1642896 - DNA, 15 bp, Homo sapiens
aggttcaaggggtac

SEQ ID NO: 1642897 - DNA, 15 bp, Homo sapiens
taggttcaaggggta

SEQ ID NO: 1642898 - DNA, 15 bp, Homo sapiens
ttaggttcaaggggt

SEQ ID NO: 1642899 - DNA, 15 bp, Homo sapiens
tttaggttcaagggg

SEQ ID NO: 1642900 - DNA, 15 bp, Homo sapiens
ttttaggttcaaggg

SEQ ID NO: 1642901 - DNA, 15 bp, Homo sapiens
attttaggttcaagg

SEQ ID NO: 1642902 - DNA, 15 bp, Homo sapiens
tattttaggttcaag

SEQ ID NO: 1642903 - DNA, 15 bp, Homo sapiens
ttattttaggttcaa

SEQ ID NO: 1642904 - DNA, 15 bp, Homo sapiens
tttattttaggttca

SEQ ID NO: 1642905 - DNA, 15 bp, Homo sapiens
ttttattttaggttc

SEQ ID NO: 1642906 - DNA, 15 bp, Homo sapiens
cttttattttaggtt

SEQ ID NO: 1642907 - DNA, 15 bp, Homo sapiens
acttttattttaggt

SEQ ID NO: 1642908 - DNA, 15 bp, Homo sapiens
aacttttattttagg

SEQ ID NO: 1642909 - DNA, 15 bp, Homo sapiens
caacttttattttag

SEQ ID NO: 1642910 - DNA, 15 bp, Homo sapiens
ccaacttttatttta

SEQ ID NO: 1642911 - DNA, 15 bp, Homo sapiens
tccaacttttatttt

SEQ ID NO: 1642912 - DNA, 15 bp, Homo sapiens
ttccaacttttattt

SEQ ID NO: 1642913 - DNA, 15 bp, Homo sapiens
cttccaacttttatt

SEQ ID NO: 1642914 - DNA, 15 bp, Homo sapiens
tcttccaacttttat

SEQ ID NO: 1642915 - DNA, 15 bp, Homo sapiens
ttcttccaactttta

SEQ ID NO: 1642916 - DNA, 15 bp, Homo sapiens
tttcttccaactttt

SEQ ID NO: 1642917 - DNA, 15 bp, Homo sapiens
ttttcttccaacttt

SEQ ID NO: 1642918 - DNA, 15 bp, Homo sapiens
tttttcttccaactt

SEQ ID NO: 1642919 - DNA, 15 bp, Homo sapiens
ttttttcttccaact

SEQ ID NO: 1642920 - DNA, 15 bp, Homo sapiens
tttttttcttccaac

SEQ ID NO: 1642921 - DNA, 15 bp, Homo sapiens
gtttttttcttccaa

SEQ ID NO: 1642922 - DNA, 15 bp, Homo sapiens
agtttttttcttcca

SEQ ID NO: 1642923 - DNA, 15 bp, Homo sapiens
aagtttttttcttcc

SEQ ID NO: 1642924 - DNA, 15 bp, Homo sapiens
taagtttttttcttc

SEQ ID NO: 1642925 - DNA, 15 bp, Homo sapiens
ttaagtttttttctt

SEQ ID NO: 1642926 - DNA, 15 bp, Homo sapiens
gttaagtttttttct

SEQ ID NO: 1642927 - DNA, 15 bp, Homo sapiens
tgttaagtttttttc

SEQ ID NO: 1642928 - DNA, 15 bp, Homo sapiens
atgttaagttttttt

SEQ ID NO: 1642929 - DNA, 15 bp, Homo sapiens
tatgttaagtttttt

SEQ ID NO: 1642930 - DNA, 15 bp, Homo sapiens
ctatgttaagttttt

SEQ ID NO: 1642931 - DNA, 15 bp, Homo sapiens
gctatgttaagtttt

SEQ ID NO: 1642932 - DNA, 15 bp, Homo sapiens
tgctatgttaagttt

SEQ ID NO: 1642933 - DNA, 15 bp, Homo sapiens
ttgctatgttaagtt

SEQ ID NO: 1642934 - DNA, 15 bp, Homo sapiens
tttgctatgttaagt

SEQ ID NO: 1642935 - DNA, 15 bp, Homo sapiens
atttgctatgttaag

SEQ ID NO: 1642936 - DNA, 15 bp, Homo sapiens
aatttgctatgttaa

SEQ ID NO: 1642937 - DNA, 15 bp, Homo sapiens
gaatttgctatgtta

SEQ ID NO: 1642938 - DNA, 15 bp, Homo sapiens
agaatttgctatgtt

SEQ ID NO: 1642939 - DNA, 15 bp, Homo sapiens
aagaatttgctatgt

SEQ ID NO: 1642940 - DNA, 15 bp, Homo sapiens
taagaatttgctatg

SEQ ID NO: 1642941 - DNA, 15 bp, Homo sapiens
ctaagaatttgctat

SEQ ID NO: 1642942 - DNA, 15 bp, Homo sapiens
tctaagaatttgcta

SEQ ID NO: 1642943 - DNA, 15 bp, Homo sapiens
gtctaagaatttgct

SEQ ID NO: 1642944 - DNA, 15 bp, Homo sapiens
tgtctaagaatttgc

SEQ ID NO: 1642945 - DNA, 15 bp, Homo sapiens
atgtctaagaatttg

SEQ ID NO: 1642946 - DNA, 15 bp, Homo sapiens
aatgtctaagaattt

SEQ ID NO: 1642947 - DNA, 15 bp, Homo sapiens
caatgtctaagaatt

SEQ ID NO: 1642948 - DNA, 15 bp, Homo sapiens
acaatgtctaagaat

SEQ ID NO: 1642949 - DNA, 15 bp, Homo sapiens
aacaatgtctaagaa

SEQ ID NO: 1642950 - DNA, 15 bp, Homo sapiens
gaacaatgtctaaga

SEQ ID NO: 1642951 - DNA, 15 bp, Homo sapiens
agaacaatgtctaag

SEQ ID NO: 1642952 - DNA, 15 bp, Homo sapiens
cagaacaatgtctaa

SEQ ID NO: 1642953 - DNA, 15 bp, Homo sapiens
tcagaacaatgtcta

SEQ ID NO: 1642954 - DNA, 15 bp, Homo sapiens
gtcagaacaatgtct

SEQ ID NO: 1642955 - DNA, 15 bp, Homo sapiens
agtcagaacaatgtc

SEQ ID NO: 1642956 - DNA, 15 bp, Homo sapiens
aagtcagaacaatgt

SEQ ID NO: 1642957 - DNA, 15 bp, Homo sapiens
caagtcagaacaatg

SEQ ID NO: 1642958 - DNA, 15 bp, Homo sapiens
acaagtcagaacaat

SEQ ID NO: 1642959 - DNA, 15 bp, Homo sapiens
aacaagtcagaacaa

SEQ ID NO: 1642960 - DNA, 15 bp, Homo sapiens
aaacaagtcagaaca

SEQ ID NO: 1642961 - DNA, 15 bp, Homo sapiens
caaacaagtcagaac

SEQ ID NO: 1642962 - DNA, 15 bp, Homo sapiens
gcaaacaagtcagaa

SEQ ID NO: 1642963 - DNA, 15 bp, Homo sapiens
tgcaaacaagtcaga

SEQ ID NO: 1642964 - DNA, 15 bp, Homo sapiens
ttgcaaacaagtcag

SEQ ID NO: 1642965 - DNA, 15 bp, Homo sapiens
cttgcaaacaagtca

SEQ ID NO: 1642966 - DNA, 15 bp, Homo sapiens
tcttgcaaacaagtc

SEQ ID NO: 1642967 - DNA, 15 bp, Homo sapiens
gtcttgcaaacaagt

SEQ ID NO: 1642968 - DNA, 15 bp, Homo sapiens
ggtcttgcaaacaag

SEQ ID NO: 1642969 - DNA, 15 bp, Homo sapiens
aggtcttgcaaacaa

SEQ ID NO: 1642970 - DNA, 15 bp, Homo sapiens
taggtcttgcaaaca

SEQ ID NO: 1642971 - DNA, 15 bp, Homo sapiens
ataggtcttgcaaac

SEQ ID NO: 1642972 - DNA, 15 bp, Homo sapiens
cataggtcttgcaaa

SEQ ID NO: 1642973 - DNA, 15 bp, Homo sapiens
gcataggtcttgcaa

SEQ ID NO: 1642974 - DNA, 15 bp, Homo sapiens
agcataggtcttgca

SEQ ID NO: 1642975 - DNA, 15 bp, Homo sapiens
aagcataggtcttgc

SEQ ID NO: 1642976 - DNA, 15 bp, Homo sapiens
aaagcataggtcttg

SEQ ID NO: 1642977 - DNA, 15 bp, Homo sapiens
gaaagcataggtctt

SEQ ID NO: 1642978 - DNA, 15 bp, Homo sapiens
agaaagcataggtct

SEQ ID NO: 1642979 - DNA, 15 bp, Homo sapiens
aagaaagcataggtc

SEQ ID NO: 1642980 - DNA, 15 bp, Homo sapiens
taggaagaaagcata

SEQ ID NO: 1642981 - DNA, 15 bp, Homo sapiens
ttaggaagaaagcat

SEQ ID NO: 1642982 - DNA, 15 bp, Homo sapiens
cttaggaagaaagca

SEQ ID NO: 1642983 - DNA, 15 bp, Homo sapiens
gcttaggaagaaagc

SEQ ID NO: 1642984 - DNA, 15 bp, Homo sapiens
agcttaggaagaaag

SEQ ID NO: 1642985 - DNA, 15 bp, Homo sapiens
cagcttaggaagaaa

SEQ ID NO: 1642986 - DNA, 15 bp, Homo sapiens
ccagcttaggaagaa

SEQ ID NO: 1642987 - DNA, 15 bp, Homo sapiens
accagcttaggaaga

SEQ ID NO: 1642988 - DNA, 15 bp, Homo sapiens
caccagcttaggaag

SEQ ID NO: 1642989 - DNA, 15 bp, Homo sapiens
gcaccagcttaggaa

SEQ ID NO: 1642990 - DNA, 15 bp, Homo sapiens
agcaccagcttagga

SEQ ID NO: 1642991 - DNA, 15 bp, Homo sapiens
cagcaccagcttagg

SEQ ID NO: 1642992 - DNA, 15 bp, Homo sapiens
ccagcaccagcttag

SEQ ID NO: 1642993 - DNA, 15 bp, Homo sapiens
tccagcaccagctta

SEQ ID NO: 1642994 - DNA, 15 bp, Homo sapiens
atccagcaccagctt

SEQ ID NO: 1642995 - DNA, 15 bp, Homo sapiens
tatccagcaccagct

SEQ ID NO: 1642996 - DNA, 15 bp, Homo sapiens
ctatccagcaccagc

SEQ ID NO: 1642997 - DNA, 15 bp, Homo sapiens
actatccagcaccag

SEQ ID NO: 1642998 - DNA, 15 bp, Homo sapiens
aactatccagcacca

SEQ ID NO: 1642999 - DNA, 15 bp, Homo sapiens
gaactatccagcacc

SEQ ID NO: 1643000 - DNA, 15 bp, Homo sapiens
agaactatccagcac

SEQ ID NO: 1643001 - DNA, 15 bp, Homo sapiens
aagaactatccagca

SEQ ID NO: 1643002 - DNA, 15 bp, Homo sapiens
aaagaactatccagc

SEQ ID NO: 1643003 - DNA, 15 bp, Homo sapiens
aaaagaactatccag

SEQ ID NO: 1643004 - DNA, 15 bp, Homo sapiens
caaaagaactatcca

SEQ ID NO: 1643005 - DNA, 15 bp, Homo sapiens
tcaaaagaactatcc

SEQ ID NO: 1643006 - DNA, 15 bp, Homo sapiens
gtcaaaagaactatc

SEQ ID NO: 1643007 - DNA, 15 bp, Homo sapiens
agtcaaaagaactat

SEQ ID NO: 1643008 - DNA, 15 bp, Homo sapiens
aagtcaaaagaacta

SEQ ID NO: 1643009 - DNA, 15 bp, Homo sapiens
aaagtcaaaagaact

SEQ ID NO: 1643010 - DNA, 15 bp, Homo sapiens
aaaagtcaaaagaac

SEQ ID NO: 1643011 - DNA, 15 bp, Homo sapiens
aaaaagtcaaaagaa

SEQ ID NO: 1643012 - DNA, 15 bp, Homo sapiens
aaaaaagtcaaaaga

SEQ ID NO: 1643013 - DNA, 15 bp, Homo sapiens
gaaaaaagtcaaaag

SEQ ID NO: 1643014 - DNA, 15 bp, Homo sapiens
tgaaaaaagtcaaaa

SEQ ID NO: 1643015 - DNA, 15 bp, Homo sapiens
atgaaaaaagtcaaa

SEQ ID NO: 1643016 - DNA, 15 bp, Homo sapiens
taatgaaaaaagtca

SEQ ID NO: 1643017 - DNA, 15 bp, Homo sapiens
ataatgaaaaaagtc

SEQ ID NO: 1643018 - DNA, 15 bp, Homo sapiens
aataatgaaaaaagt

SEQ ID NO: 1643019 - DNA, 15 bp, Homo sapiens
caataatgaaaaaag

SEQ ID NO: 1643020 - DNA, 15 bp, Homo sapiens
tcaataatgaaaaaa

SEQ ID NO: 1643021 - DNA, 15 bp, Homo sapiens
atcaataatgaaaaa

SEQ ID NO: 1643022 - DNA, 15 bp, Homo sapiens
gatcaataatgaaaa

SEQ ID NO: 1643023 - DNA, 15 bp, Homo sapiens
agatcaataatgaaa

SEQ ID NO: 1643024 - DNA, 15 bp, Homo sapiens
aagatcaataatgaa

SEQ ID NO: 1643025 - DNA, 15 bp, Homo sapiens
gaagatcaataatga

SEQ ID NO: 1643026 - DNA, 15 bp, Homo sapiens
agaagatcaataatg

SEQ ID NO: 1643027 - DNA, 15 bp, Homo sapiens
gagaagatcaataat

SEQ ID NO: 1643028 - DNA, 15 bp, Homo sapiens
agagaagatcaataa

SEQ ID NO: 1643029 - DNA, 15 bp, Homo sapiens
gagagaagatcaata

SEQ ID NO: 1643030 - DNA, 15 bp, Homo sapiens
agagagaagatcaat

SEQ ID NO: 1643031 - DNA, 15 bp, Homo sapiens
gagagagaagatcaa

SEQ ID NO: 1643032 - DNA, 15 bp, Homo sapiens
ggagagagaagatca

SEQ ID NO: 1643033 - DNA, 15 bp, Homo sapiens
gggagagagaagatc

SEQ ID NO: 1643034 - DNA, 15 bp, Homo sapiens
agggagagagaagat

SEQ ID NO: 1643035 - DNA, 15 bp, Homo sapiens
tagggagagagaaga

SEQ ID NO: 1643036 - DNA, 15 bp, Homo sapiens
ctagggagagagaag

SEQ ID NO: 1643037 - DNA, 15 bp, Homo sapiens
gctagggagagagaa

SEQ ID NO: 1643038 - DNA, 15 bp, Homo sapiens
tgctagggagagaga

SEQ ID NO: 1643039 - DNA, 15 bp, Homo sapiens
atgctagggagagag

SEQ ID NO: 1643040 - DNA, 15 bp, Homo sapiens
aatgctagggagaga

SEQ ID NO: 1643041 - DNA, 15 bp, Homo sapiens
caatgctagggagag

SEQ ID NO: 1643042 - DNA, 15 bp, Homo sapiens
gcaatgctagggaga

SEQ ID NO: 1643043 - DNA, 15 bp, Homo sapiens
ggcaatgctagggag

SEQ ID NO: 1643044 - DNA, 15 bp, Homo sapiens
tggcaatgctaggga

SEQ ID NO: 1643045 - DNA, 15 bp, Homo sapiens
gtggcaatgctaggg

SEQ ID NO: 1643046 - DNA, 15 bp, Homo sapiens
ggtggcaatgctagg

SEQ ID NO: 1643047 - DNA, 15 bp, Homo sapiens
tggtggcaatgctag

SEQ ID NO: 1643048 - DNA, 15 bp, Homo sapiens
ttggtggcaatgcta

SEQ ID NO: 1643049 - DNA, 15 bp, Homo sapiens
cttggtggcaatgct

SEQ ID NO: 1643050 - DNA, 15 bp, Homo sapiens
ccttggtggcaatgc

SEQ ID NO: 1643051 - DNA, 15 bp, Homo sapiens
cccttggtggcaatg

SEQ ID NO: 1643052 - DNA, 15 bp, Homo sapiens
tcccttggtggcaat

SEQ ID NO: 1643053 - DNA, 15 bp, Homo sapiens
ttcccttggtggcaa

SEQ ID NO: 1643054 - DNA, 15 bp, Homo sapiens
tttcccttggtggca

SEQ ID NO: 1643055 - DNA, 15 bp, Homo sapiens
gtttcccttggtggc

SEQ ID NO: 1643056 - DNA, 15 bp, Homo sapiens
agtttcccttggtgg

SEQ ID NO: 1643057 - DNA, 15 bp, Homo sapiens
tagtttcccttggtg

SEQ ID NO: 1643058 - DNA, 15 bp, Homo sapiens
atagtttcccttggt

SEQ ID NO: 1643059 - DNA, 15 bp, Homo sapiens
aatagtttcccttgg

SEQ ID NO: 1643060 - DNA, 15 bp, Homo sapiens
aaatagtttcccttg

SEQ ID NO: 1643061 - DNA, 15 bp, Homo sapiens
gaaatagtttccctt

SEQ ID NO: 1643062 - DNA, 15 bp, Homo sapiens
tgaaatagtttccct

SEQ ID NO: 1643063 - DNA, 15 bp, Homo sapiens
atgaaatagtttccc

SEQ ID NO: 1643064 - DNA, 15 bp, Homo sapiens
catgaaatagtttcc

SEQ ID NO: 1643065 - DNA, 15 bp, Homo sapiens
acatgaaatagtttc

SEQ ID NO: 1643066 - DNA, 15 bp, Homo sapiens
tacatgaaatagttt

SEQ ID NO: 1643067 - DNA, 15 bp, Homo sapiens
ttacatgaaatagtt

SEQ ID NO: 1643068 - DNA, 15 bp, Homo sapiens
cttacatgaaatagt

SEQ ID NO: 1643069 - DNA, 15 bp, Homo sapiens
tcttacatgaaatag

SEQ ID NO: 1643070 - DNA, 15 bp, Homo sapiens
gtcttacatgaaata

SEQ ID NO: 1643071 - DNA, 15 bp, Homo sapiens
tgtcttacatgaaat

SEQ ID NO: 1643072 - DNA, 15 bp, Homo sapiens
atgtcttacatgaaa

SEQ ID NO: 1643073 - DNA, 15 bp, Homo sapiens
aatgtcttacatgaa

SEQ ID NO: 1643074 - DNA, 15 bp, Homo sapiens
gaatgtcttacatga

SEQ ID NO: 1643075 - DNA, 15 bp, Homo sapiens
agaatgtcttacatg

SEQ ID NO: 1643076 - DNA, 15 bp, Homo sapiens
aagaatgtcttacat

SEQ ID NO: 1643077 - DNA, 15 bp, Homo sapiens
aaagaatgtcttaca

SEQ ID NO: 1643078 - DNA, 15 bp, Homo sapiens
aaaagaatgtcttac

SEQ ID NO: 1643079 - DNA, 15 bp, Homo sapiens
gaaaagaatgtctta

SEQ ID NO: 1643080 - DNA, 15 bp, Homo sapiens
ggaaaagaatgtctt

SEQ ID NO: 1643081 - DNA, 15 bp, Homo sapiens
tggaaaagaatgtct

SEQ ID NO: 1643082 - DNA, 15 bp, Homo sapiens
atggaaaagaatgtc

SEQ ID NO: 1643083 - DNA, 15 bp, Homo sapiens
gatggaaaagaatgt

SEQ ID NO: 1643084 - DNA, 15 bp, Homo sapiens
ggatggaaaagaatg

SEQ ID NO: 1643085 - DNA, 15 bp, Homo sapiens
tggatggaaaagaat

SEQ ID NO: 1643086 - DNA, 15 bp, Homo sapiens
ctggatggaaaagaa

SEQ ID NO: 1643087 - DNA, 15 bp, Homo sapiens
gctggatggaaaaga

SEQ ID NO: 1643088 - DNA, 15 bp, Homo sapiens
ggctggatggaaaag

SEQ ID NO: 1643089 - DNA, 15 bp, Homo sapiens
tggctggatggaaaa

SEQ ID NO: 1643090 - DNA, 15 bp, Homo sapiens
atggctggatggaaa

SEQ ID NO: 1643091 - DNA, 15 bp, Homo sapiens
gatggctggatggaa

SEQ ID NO: 1643092 - DNA, 15 bp, Homo sapiens
agatggctggatgga

SEQ ID NO: 1643093 - DNA, 15 bp, Homo sapiens
cagatggctggatgg

SEQ ID NO: 1643094 - DNA, 15 bp, Homo sapiens
ccagatggctggatg

SEQ ID NO: 1643095 - DNA, 15 bp, Homo sapiens
accagatggctggat

SEQ ID NO: 1643096 - DNA, 15 bp, Homo sapiens
aaccagatggctgga

SEQ ID NO: 1643097 - DNA, 15 bp, Homo sapiens
caaccagatggctgg

SEQ ID NO: 1643098 - DNA, 15 bp, Homo sapiens
ccaaccagatggctg

SEQ ID NO: 1643099 - DNA, 15 bp, Homo sapiens
gccaaccagatggct

SEQ ID NO: 1643100 - DNA, 15 bp, Homo sapiens
ggccaaccagatggc

SEQ ID NO: 1643101 - DNA, 15 bp, Homo sapiens
gggccaaccagatgg

SEQ ID NO: 1643102 - DNA, 15 bp, Homo sapiens
agggccaaccagatg

SEQ ID NO: 1643103 - DNA, 15 bp, Homo sapiens
tagggccaaccagat

SEQ ID NO: 1643104 - DNA, 15 bp, Homo sapiens
ttagggccaaccaga

SEQ ID NO: 1643105 - DNA, 15 bp, Homo sapiens
attagggccaaccag

SEQ ID NO: 1643106 - DNA, 15 bp, Homo sapiens
aattagggccaacca

SEQ ID NO: 1643107 - DNA, 15 bp, Homo sapiens
aaattagggccaacc

SEQ ID NO: 1643108 - DNA, 15 bp, Homo sapiens
gaaattagggccaac

SEQ ID NO: 1643109 - DNA, 15 bp, Homo sapiens
agaaattagggccaa

SEQ ID NO: 1643110 - DNA, 15 bp, Homo sapiens
gagaaattagggcca

SEQ ID NO: 1643111 - DNA, 15 bp, Homo sapiens
agagaaattagggcc

SEQ ID NO: 1643112 - DNA, 15 bp, Homo sapiens
cagagaaattagggc

SEQ ID NO: 1643113 - DNA, 15 bp, Homo sapiens
tcagagaaattaggg

SEQ ID NO: 1643114 - DNA, 15 bp, Homo sapiens
ctcagagaaattagg

SEQ ID NO: 1643115 - DNA, 15 bp, Homo sapiens
tgctcagagaaatta

SEQ ID NO: 1643116 - DNA, 15 bp, Homo sapiens
gtgctcagagaaatt

SEQ ID NO: 1643117 - DNA, 15 bp, Homo sapiens
tgtgctcagagaaat

SEQ ID NO: 1643118 - DNA, 15 bp, Homo sapiens
atgtgctcagagaaa

SEQ ID NO: 1643119 - DNA, 15 bp, Homo sapiens
gatgtgctcagagaa

SEQ ID NO: 1643120 - DNA, 15 bp, Homo sapiens
agatgtgctcagaga

SEQ ID NO: 1643121 - DNA, 15 bp, Homo sapiens
aagatgtgctcagag

SEQ ID NO: 1643122 - DNA, 15 bp, Homo sapiens
aaagatgtgctcaga

SEQ ID NO: 1643123 - DNA, 15 bp, Homo sapiens
gaaagatgtgctcag

SEQ ID NO: 1643124 - DNA, 15 bp, Homo sapiens
ggaaagatgtgctca

SEQ ID NO: 1643125 - DNA, 15 bp, Homo sapiens
gggaaagatgtgctc

SEQ ID NO: 1643126 - DNA, 15 bp, Homo sapiens
tgggaaagatgtgct

SEQ ID NO: 1643127 - DNA, 15 bp, Homo sapiens
gtgggaaagatgtgc

SEQ ID NO: 1643128 - DNA, 15 bp, Homo sapiens
ggtgggaaagatgtg

SEQ ID NO: 1643129 - DNA, 15 bp, Homo sapiens
aggtgggaaagatgt

SEQ ID NO: 1643130 - DNA, 15 bp, Homo sapiens
caggtgggaaagatg

SEQ ID NO: 1643131 - DNA, 15 bp, Homo sapiens
acaggtgggaaagat

SEQ ID NO: 1643132 - DNA, 15 bp, Homo sapiens
tacaggtgggaaaga

SEQ ID NO: 1643133 - DNA, 15 bp, Homo sapiens
atacaggtgggaaag

SEQ ID NO: 1643134 - DNA, 15 bp, Homo sapiens
aatacaggtgggaaa

SEQ ID NO: 1643135 - DNA, 15 bp, Homo sapiens
caatacaggtgggaa

SEQ ID NO: 1643136 - DNA, 15 bp, Homo sapiens
acaatacaggtggga

SEQ ID NO: 1643137 - DNA, 15 bp, Homo sapiens
cacaatacaggtggg

SEQ ID NO: 1643138 - DNA, 15 bp, Homo sapiens
tcacaatacaggtgg

SEQ ID NO: 1643139 - DNA, 15 bp, Homo sapiens
ttcacaatacaggtg

SEQ ID NO: 1643140 - DNA, 15 bp, Homo sapiens
gttcacaatacaggt

SEQ ID NO: 1643141 - DNA, 15 bp, Homo sapiens
ggttcacaatacagg

SEQ ID NO: 1643142 - DNA, 15 bp, Homo sapiens
tggttcacaatacag

SEQ ID NO: 1643143 - DNA, 15 bp, Homo sapiens
atggttcacaataca

SEQ ID NO: 1643144 - DNA, 15 bp, Homo sapiens
tatggttcacaatac

SEQ ID NO: 1643145 - DNA, 15 bp, Homo sapiens
ctatggttcacaata

SEQ ID NO: 1643146 - DNA, 15 bp, Homo sapiens
tctatggttcacaat

SEQ ID NO: 1643147 - DNA, 15 bp, Homo sapiens
ctctatggttcacaa

SEQ ID NO: 1643148 - DNA, 15 bp, Homo sapiens
gctctatggttcaca

SEQ ID NO: 1643149 - DNA, 15 bp, Homo sapiens
tgctctatggttcac

SEQ ID NO: 1643150 - DNA, 15 bp, Homo sapiens
ctgctctatggttca

SEQ ID NO: 1643151 - DNA, 15 bp, Homo sapiens
cctgctctatggttc

SEQ ID NO: 1643152 - DNA, 15 bp, Homo sapiens
gcctgctctatggtt

SEQ ID NO: 1643153 - DNA, 15 bp, Homo sapiens
ggcctgctctatggt

SEQ ID NO: 1643154 - DNA, 15 bp, Homo sapiens
aggcctgctctatgg

SEQ ID NO: 1643155 - DNA, 15 bp, Homo sapiens
taggcctgctctatg

SEQ ID NO: 1643156 - DNA, 15 bp, Homo sapiens
ttaggcctgctctat

SEQ ID NO: 1643157 - DNA, 15 bp, Homo sapiens
cttaggcctgctcta

SEQ ID NO: 1643158 - DNA, 15 bp, Homo sapiens
ccttaggcctgctct

SEQ ID NO: 1643159 - DNA, 15 bp, Homo sapiens
cccttaggcctgctc

SEQ ID NO: 1643160 - DNA, 15 bp, Homo sapiens
tcccttaggcctgct

SEQ ID NO: 1643161 - DNA, 15 bp, Homo sapiens
ttcccttaggcctgc

SEQ ID NO: 1643162 - DNA, 15 bp, Homo sapiens
cttcccttaggcctg

SEQ ID NO: 1643163 - DNA, 15 bp, Homo sapiens
ccttcccttaggcct

SEQ ID NO: 1643164 - DNA, 15 bp, Homo sapiens
accttcccttaggcc

SEQ ID NO: 1643165 - DNA, 15 bp, Homo sapiens
aaccttcccttaggc

SEQ ID NO: 1643166 - DNA, 15 bp, Homo sapiens
taaccttcccttagg

SEQ ID NO: 1643167 - DNA, 15 bp, Homo sapiens
ataaccttcccttag

SEQ ID NO: 1643168 - DNA, 15 bp, Homo sapiens
tataaccttccctta

SEQ ID NO: 1643169 - DNA, 15 bp, Homo sapiens
ttataaccttccctt

SEQ ID NO: 1643170 - DNA, 15 bp, Homo sapiens
tttataaccttccct

SEQ ID NO: 1643171 - DNA, 15 bp, Homo sapiens
ctttataaccttccc

SEQ ID NO: 1643172 - DNA, 15 bp, Homo sapiens
tctttataaccttcc

SEQ ID NO: 1643173 - DNA, 15 bp, Homo sapiens
ttctttataaccttc

SEQ ID NO: 1643174 - DNA, 15 bp, Homo sapiens
cttctttataacctt

SEQ ID NO: 1643175 - DNA, 15 bp, Homo sapiens
ccttctttataacct

SEQ ID NO: 1643176 - DNA, 15 bp, Homo sapiens
accttctttataacc

SEQ ID NO: 1643177 - DNA, 15 bp, Homo sapiens
taccttctttataac

SEQ ID NO: 1643178 - DNA, 15 bp, Homo sapiens
ttaccttctttataa

SEQ ID NO: 1643179 - DNA, 15 bp, Homo sapiens
cttaccttctttata

SEQ ID NO: 1643180 - DNA, 15 bp, Homo sapiens
ccttaccttctttat

SEQ ID NO: 1643181 - DNA, 15 bp, Homo sapiens
accttaccttcttta

SEQ ID NO: 1643182 - DNA, 15 bp, Homo sapiens
aaccttaccttcttt

SEQ ID NO: 1643183 - DNA, 15 bp, Homo sapiens
caaccttaccttctt

SEQ ID NO: 1643184 - DNA, 15 bp, Homo sapiens
ccaaccttaccttct

SEQ ID NO: 1643185 - DNA, 15 bp, Homo sapiens
accaaccttaccttc

SEQ ID NO: 1643186 - DNA, 15 bp, Homo sapiens
gaccaaccttacctt

SEQ ID NO: 1643187 - DNA, 15 bp, Homo sapiens
agaccaaccttacct

SEQ ID NO: 1643188 - DNA, 15 bp, Homo sapiens
cagaccaaccttacc

SEQ ID NO: 1643189 - DNA, 15 bp, Homo sapiens
acagaccaaccttac

SEQ ID NO: 1643190 - DNA, 15 bp, Homo sapiens
tacagaccaacctta

SEQ ID NO: 1643191 - DNA, 15 bp, Homo sapiens
atacagaccaacctt

SEQ ID NO: 1643192 - DNA, 15 bp, Homo sapiens
aatacagaccaacct

SEQ ID NO: 1643193 - DNA, 15 bp, Homo sapiens
caatacagaccaacc

SEQ ID NO: 1643194 - DNA, 15 bp, Homo sapiens
acaatacagaccaac

SEQ ID NO: 1643195 - DNA, 15 bp, Homo sapiens
gacaatacagaccaa

SEQ ID NO: 1643196 - DNA, 15 bp, Homo sapiens
agacaatacagacca

SEQ ID NO: 1643197 - DNA, 15 bp, Homo sapiens
gagacaatacagacc

SEQ ID NO: 1643198 - DNA, 15 bp, Homo sapiens
tgagacaatacagac

SEQ ID NO: 1643199 - DNA, 15 bp, Homo sapiens
ctgagacaatacaga

SEQ ID NO: 1643200 - DNA, 15 bp, Homo sapiens
actgagacaatacag

SEQ ID NO: 1643201 - DNA, 15 bp, Homo sapiens
gactgagacaataca

SEQ ID NO: 1643202 - DNA, 15 bp, Homo sapiens
agactgagacaatac

SEQ ID NO: 1643203 - DNA, 15 bp, Homo sapiens
gagactgagacaata

SEQ ID NO: 1643204 - DNA, 15 bp, Homo sapiens
agagactgagacaat

SEQ ID NO: 1643205 - DNA, 15 bp, Homo sapiens
aagagactgagacaa

SEQ ID NO: 1643206 - DNA, 15 bp, Homo sapiens
aaagagactgagaca

SEQ ID NO: 1643207 - DNA, 15 bp, Homo sapiens
aaaagagactgagac

SEQ ID NO: 1643208 - DNA, 15 bp, Homo sapiens
taaaagagactgaga

SEQ ID NO: 1643209 - DNA, 15 bp, Homo sapiens
ttaaaagagactgag

SEQ ID NO: 1643210 - DNA, 15 bp, Homo sapiens
attaaaagagactga

SEQ ID NO: 1643211 - DNA, 15 bp, Homo sapiens
tattaaaagagactg

SEQ ID NO: 1643212 - DNA, 15 bp, Homo sapiens
atattaaaagagact

SEQ ID NO: 1643213 - DNA, 15 bp, Homo sapiens
gatattaaaagagac

SEQ ID NO: 1643214 - DNA, 15 bp, Homo sapiens
agatattaaaagaga

SEQ ID NO: 1643215 - DNA, 15 bp, Homo sapiens
tagatattaaaagag

SEQ ID NO: 1643216 - DNA, 15 bp, Homo sapiens
atagatattaaaaga

SEQ ID NO: 1643217 - DNA, 15 bp, Homo sapiens
aatagatattaaaag

SEQ ID NO: 1643218 - DNA, 15 bp, Homo sapiens
gaatagatattaaaa

SEQ ID NO: 1643219 - DNA, 15 bp, Homo sapiens
ggaatagatattaaa

SEQ ID NO: 1643220 - DNA, 15 bp, Homo sapiens
gggaatagatattaa

SEQ ID NO: 1643221 - DNA, 15 bp, Homo sapiens
agggaatagatatta

SEQ ID NO: 1643222 - DNA, 15 bp, Homo sapiens
aagggaatagatatt

SEQ ID NO: 1643223 - DNA, 15 bp, Homo sapiens
gaagggaatagatat

SEQ ID NO: 1643224 - DNA, 15 bp, Homo sapiens
agaagggaatagata

SEQ ID NO: 1643225 - DNA, 15 bp, Homo sapiens
cagaagggaatagat

SEQ ID NO: 1643226 - DNA, 15 bp, Homo sapiens
acagaagggaataga

SEQ ID NO: 1643227 - DNA, 15 bp, Homo sapiens
tacagaagggaatag

SEQ ID NO: 1643228 - DNA, 15 bp, Homo sapiens
atacagaagggaata

SEQ ID NO: 1643229 - DNA, 15 bp, Homo sapiens
catacagaagggaat

SEQ ID NO: 1643230 - DNA, 15 bp, Homo sapiens
ccatacagaagggaa

SEQ ID NO: 1643231 - DNA, 15 bp, Homo sapiens
accatacagaaggga

SEQ ID NO: 1643232 - DNA, 15 bp, Homo sapiens
taccatacagaaggg

SEQ ID NO: 1643233 - DNA, 15 bp, Homo sapiens
gtaccatacagaagg

SEQ ID NO: 1643234 - DNA, 15 bp, Homo sapiens
agtaccatacagaag

SEQ ID NO: 1643235 - DNA, 15 bp, Homo sapiens
gagtaccatacagaa

SEQ ID NO: 1643236 - DNA, 15 bp, Homo sapiens
ggagtaccatacaga

SEQ ID NO: 1643237 - DNA, 15 bp, Homo sapiens
aggagtaccatacag

SEQ ID NO: 1643238 - DNA, 15 bp, Homo sapiens
aaggagtaccataca

SEQ ID NO: 1643239 - DNA, 15 bp, Homo sapiens
gaaggagtaccatac

SEQ ID NO: 1643240 - DNA, 15 bp, Homo sapiens
agaaggagtaccata

SEQ ID NO: 1643241 - DNA, 15 bp, Homo sapiens
aagaaggagtaccat

SEQ ID NO: 1643242 - DNA, 15 bp, Homo sapiens
gaagaaggagtacca

SEQ ID NO: 1643243 - DNA, 15 bp, Homo sapiens
agaagaaggagtacc

SEQ ID NO: 1643244 - DNA, 15 bp, Homo sapiens
gagaagaaggagtac

SEQ ID NO: 1643245 - DNA, 15 bp, Homo sapiens
tgagaagaaggagta

SEQ ID NO: 1643246 - DNA, 15 bp, Homo sapiens
ctgagaagaaggagt

SEQ ID NO: 1643247 - DNA, 15 bp, Homo sapiens
tctgagaagaaggag

SEQ ID NO: 1643248 - DNA, 15 bp, Homo sapiens
ctctgagaagaagga

SEQ ID NO: 1643249 - DNA, 15 bp, Homo sapiens
tctctgagaagaagg

SEQ ID NO: 1643250 - DNA, 15 bp, Homo sapiens
gtctctgagaagaag

SEQ ID NO: 1643251 - DNA, 15 bp, Homo sapiens
agtctctgagaagaa

SEQ ID NO: 1643252 - DNA, 15 bp, Homo sapiens
gagtctctgagaaga

SEQ ID NO: 1643253 - DNA, 15 bp, Homo sapiens
ggagtctctgagaag

SEQ ID NO: 1643254 - DNA, 15 bp, Homo sapiens
aggagtctctgagaa

SEQ ID NO: 1643255 - DNA, 15 bp, Homo sapiens
caggagtctctgaga

SEQ ID NO: 1643256 - DNA, 15 bp, Homo sapiens
acaggagtctctgag

SEQ ID NO: 1643257 - DNA, 15 bp, Homo sapiens
aacaggagtctctga

SEQ ID NO: 1643258 - DNA, 15 bp, Homo sapiens
gaacaggagtctctg

SEQ ID NO: 1643259 - DNA, 15 bp, Homo sapiens
agaacaggagtctct

SEQ ID NO: 1643260 - DNA, 15 bp, Homo sapiens
gagaacaggagtctc

SEQ ID NO: 1643261 - DNA, 15 bp, Homo sapiens
agagaacaggagtct

SEQ ID NO: 1643262 - DNA, 15 bp, Homo sapiens
tagagaacaggagtc

SEQ ID NO: 1643263 - DNA, 15 bp, Homo sapiens
ctagagaacaggagt

SEQ ID NO: 1643264 - DNA, 15 bp, Homo sapiens
gctagagaacaggag

SEQ ID NO: 1643265 - DNA, 15 bp, Homo sapiens
agctagagaacagga

SEQ ID NO: 1643266 - DNA, 15 bp, Homo sapiens
aagctagagaacagg

SEQ ID NO: 1643267 - DNA, 15 bp, Homo sapiens
gaagctagagaacag

SEQ ID NO: 1643268 - DNA, 15 bp, Homo sapiens
agaagctagagaaca

SEQ ID NO: 1643269 - DNA, 15 bp, Homo sapiens
aagaagctagagaac

SEQ ID NO: 1643270 - DNA, 15 bp, Homo sapiens
gaagaagctagagaa

SEQ ID NO: 1643271 - DNA, 15 bp, Homo sapiens
tgaagaagctagaga

SEQ ID NO: 1643272 - DNA, 15 bp, Homo sapiens
atgaagaagctagag

SEQ ID NO: 1643273 - DNA, 15 bp, Homo sapiens
tatgaagaagctaga

SEQ ID NO: 1643274 - DNA, 15 bp, Homo sapiens
ttatgaagaagctag

SEQ ID NO: 1643275 - DNA, 15 bp, Homo sapiens
attatgaagaagcta

SEQ ID NO: 1643276 - DNA, 15 bp, Homo sapiens
gattatgaagaagct

SEQ ID NO: 1643277 - DNA, 15 bp, Homo sapiens
cgattatgaagaagc

SEQ ID NO: 1643278 - DNA, 15 bp, Homo sapiens
ccgattatgaagaag

SEQ ID NO: 1643279 - DNA, 15 bp, Homo sapiens
gccgattatgaagaa

SEQ ID NO: 1643280 - DNA, 15 bp, Homo sapiens
agccgattatgaaga

SEQ ID NO: 1643281 - DNA, 15 bp, Homo sapiens
aagccgattatgaag

SEQ ID NO: 1643282 - DNA, 15 bp, Homo sapiens
aaagccgattatgaa

SEQ ID NO: 1643283 - DNA, 15 bp, Homo sapiens
gaaagccgattatga

SEQ ID NO: 1643284 - DNA, 15 bp, Homo sapiens
tgaaagccgattatg

SEQ ID NO: 1643285 - DNA, 15 bp, Homo sapiens
ttgaaagccgattat

SEQ ID NO: 1643286 - DNA, 15 bp, Homo sapiens
tttgaaagccgatta

SEQ ID NO: 1643287 - DNA, 15 bp, Homo sapiens
ttttgaaagccgatt

SEQ ID NO: 1643288 - DNA, 15 bp, Homo sapiens
attttgaaagccgat

SEQ ID NO: 1643289 - DNA, 15 bp, Homo sapiens
tattttgaaagccga

SEQ ID NO: 1643290 - DNA, 15 bp, Homo sapiens
ctattttgaaagccg

SEQ ID NO: 1643291 - DNA, 15 bp, Homo sapiens
cctattttgaaagcc

SEQ ID NO: 1643292 - DNA, 15 bp, Homo sapiens
tcctattttgaaagc

SEQ ID NO: 1643293 - DNA, 15 bp, Homo sapiens
atcctattttgaaag

SEQ ID NO: 1643294 - DNA, 15 bp, Homo sapiens
gatcctattttgaaa

SEQ ID NO: 1643295 - DNA, 15 bp, Homo sapiens
agatcctattttgaa

SEQ ID NO: 1643296 - DNA, 15 bp, Homo sapiens
cagatcctattttga

SEQ ID NO: 1643297 - DNA, 15 bp, Homo sapiens
gcagatcctattttg

SEQ ID NO: 1643298 - DNA, 15 bp, Homo sapiens
agcagatcctatttt

SEQ ID NO: 1643299 - DNA, 15 bp, Homo sapiens
cagcagatcctattt

SEQ ID NO: 1643300 - DNA, 15 bp, Homo sapiens
acagcagatcctatt

SEQ ID NO: 1643301 - DNA, 15 bp, Homo sapiens
gacagcagatcctat

SEQ ID NO: 1643302 - DNA, 15 bp, Homo sapiens
tgacagcagatccta

SEQ ID NO: 1643303 - DNA, 15 bp, Homo sapiens
ctgacagcagatcct

SEQ ID NO: 1643304 - DNA, 15 bp, Homo sapiens
gctgacagcagatcc

SEQ ID NO: 1643305 - DNA, 15 bp, Homo sapiens
cgctgacagcagatc

SEQ ID NO: 1643306 - DNA, 15 bp, Homo sapiens
tcgctgacagcagat

SEQ ID NO: 1643307 - DNA, 15 bp, Homo sapiens
atcgctgacagcaga

SEQ ID NO: 1643308 - DNA, 15 bp, Homo sapiens
aatcgctgacagcag

SEQ ID NO: 1643309 - DNA, 15 bp, Homo sapiens
aaatcgctgacagca

SEQ ID NO: 1643310 - DNA, 15 bp, Homo sapiens
taaatcgctgacagc

SEQ ID NO: 1643311 - DNA, 15 bp, Homo sapiens
ataaatcgctgacag

SEQ ID NO: 1643312 - DNA, 15 bp, Homo sapiens
gataaatcgctgaca

SEQ ID NO: 1643313 - DNA, 15 bp, Homo sapiens
ggataaatcgctgac

SEQ ID NO: 1643314 - DNA, 15 bp, Homo sapiens
gggataaatcgctga

SEQ ID NO: 1643315 - DNA, 15 bp, Homo sapiens
agggataaatcgctg

SEQ ID NO: 1643316 - DNA, 15 bp, Homo sapiens
aagggataaatcgct

SEQ ID NO: 1643317 - DNA, 15 bp, Homo sapiens
aaagggataaatcgc

SEQ ID NO: 1643318 - DNA, 15 bp, Homo sapiens
taaagggataaatcg

SEQ ID NO: 1643319 - DNA, 15 bp, Homo sapiens
ctaaagggataaatc

SEQ ID NO: 1643320 - DNA, 15 bp, Homo sapiens
actaaagggataaat

SEQ ID NO: 1643321 - DNA, 15 bp, Homo sapiens
cactaaagggataaa

SEQ ID NO: 1643322 - DNA, 15 bp, Homo sapiens
gcactaaagggataa

SEQ ID NO: 1643323 - DNA, 15 bp, Homo sapiens
agcactaaagggata

SEQ ID NO: 1643324 - DNA, 15 bp, Homo sapiens
tagcactaaagggat

SEQ ID NO: 1643325 - DNA, 15 bp, Homo sapiens
ctagcactaaaggga

SEQ ID NO: 1643326 - DNA, 15 bp, Homo sapiens
cctagcactaaaggg

SEQ ID NO: 1643327 - DNA, 15 bp, Homo sapiens
tcctagcactaaagg

SEQ ID NO: 1643328 - DNA, 15 bp, Homo sapiens
atcctagcactaaag

SEQ ID NO: 1643329 - DNA, 15 bp, Homo sapiens
catcctagcactaaa

SEQ ID NO: 1643330 - DNA, 15 bp, Homo sapiens
ccatcctagcactaa

SEQ ID NO: 1643331 - DNA, 15 bp, Homo sapiens
accatcctagcacta

SEQ ID NO: 1643332 - DNA, 15 bp, Homo sapiens
taccatcctagcact

SEQ ID NO: 1643333 - DNA, 15 bp, Homo sapiens
ttaccatcctagcac

SEQ ID NO: 1643334 - DNA, 15 bp, Homo sapiens
tttaccatcctagca

SEQ ID NO: 1643335 - DNA, 15 bp, Homo sapiens
atttaccatcctagc

SEQ ID NO: 1643336 - DNA, 15 bp, Homo sapiens
tatttaccatcctag

SEQ ID NO: 1643337 - DNA, 15 bp, Homo sapiens
ttatttaccatccta

SEQ ID NO: 1643338 - DNA, 15 bp, Homo sapiens
tttatttaccatcct

SEQ ID NO: 1643339 - DNA, 15 bp, Homo sapiens
atttatttaccatcc

SEQ ID NO: 1643340 - DNA, 15 bp, Homo sapiens
aatttatttaccatc

SEQ ID NO: 1643341 - DNA, 15 bp, Homo sapiens
aaatttatttaccat

SEQ ID NO: 1643342 - DNA, 15 bp, Homo sapiens
aaaatttatttacca

SEQ ID NO: 1643343 - DNA, 15 bp, Homo sapiens
taaaatttatttacc

SEQ ID NO: 1643344 - DNA, 15 bp, Homo sapiens
ataaaatttatttac

SEQ ID NO: 1643345 - DNA, 15 bp, Homo sapiens
gataaaatttattta

SEQ ID NO: 1643346 - DNA, 15 bp, Homo sapiens
agataaaatttattt

SEQ ID NO: 1643347 - DNA, 15 bp, Homo sapiens
aagataaaatttatt

SEQ ID NO: 1643348 - DNA, 15 bp, Homo sapiens
caagataaaatttat

SEQ ID NO: 1643349 - DNA, 15 bp, Homo sapiens
gcaagataaaattta

SEQ ID NO: 1643350 - DNA, 15 bp, Homo sapiens
tgcaagataaaattt

SEQ ID NO: 1643351 - DNA, 15 bp, Homo sapiens
atgcaagataaaatt

SEQ ID NO: 1643352 - DNA, 15 bp, Homo sapiens
catgcaagataaaat

SEQ ID NO: 1643353 - DNA, 15 bp, Homo sapiens
gcatgcaagataaaa

SEQ ID NO: 1643354 - DNA, 15 bp, Homo sapiens
ggcatgcaagataaa

SEQ ID NO: 1643355 - DNA, 15 bp, Homo sapiens
tggcatgcaagataa

SEQ ID NO: 1643356 - DNA, 15 bp, Homo sapiens
ttggcatgcaagata

SEQ ID NO: 1643357 - DNA, 15 bp, Homo sapiens
gttggcatgcaagat

SEQ ID NO: 1643358 - DNA, 15 bp, Homo sapiens
agttggcatgcaaga

SEQ ID NO: 1643359 - DNA, 15 bp, Homo sapiens
gagttggcatgcaag

SEQ ID NO: 1643360 - DNA, 15 bp, Homo sapiens
agagttggcatgcaa

SEQ ID NO: 1643361 - DNA, 15 bp, Homo sapiens
tagagttggcatgca

SEQ ID NO: 1643362 - DNA, 15 bp, Homo sapiens
ttagagttggcatgc

SEQ ID NO: 1643363 - DNA, 15 bp, Homo sapiens
tttagagttggcatg

SEQ ID NO: 1643364 - DNA, 15 bp, Homo sapiens
atttagagttggcat

SEQ ID NO: 1643365 - DNA, 15 bp, Homo sapiens
aatttagagttggca

SEQ ID NO: 1643366 - DNA, 15 bp, Homo sapiens
taatttagagttggc

SEQ ID NO: 1643367 - DNA, 15 bp, Homo sapiens
ataatttagagttgg

SEQ ID NO: 1643368 - DNA, 15 bp, Homo sapiens
aataatttagagttg

SEQ ID NO: 1643369 - DNA, 15 bp, Homo sapiens
taataatttagagtt

SEQ ID NO: 1643370 - DNA, 15 bp, Homo sapiens
ctaataatttagagt

SEQ ID NO: 1643371 - DNA, 15 bp, Homo sapiens
actaataatttagag

SEQ ID NO: 1643372 - DNA, 15 bp, Homo sapiens
tactaataatttaga

SEQ ID NO: 1643373 - DNA, 15 bp, Homo sapiens
ctactaataatttag

SEQ ID NO: 1643374 - DNA, 15 bp, Homo sapiens
gctactaataattta

SEQ ID NO: 1643375 - DNA, 15 bp, Homo sapiens
tgctactaataattt

SEQ ID NO: 1643376 - DNA, 15 bp, Homo sapiens
ctgctactaataatt

SEQ ID NO: 1643377 - DNA, 15 bp, Homo sapiens
gctgctactaataat

SEQ ID NO: 1643378 - DNA, 15 bp, Homo sapiens
ggctgctactaataa

SEQ ID NO: 1643379 - DNA, 15 bp, Homo sapiens
tggctgctactaata

SEQ ID NO: 1643380 - DNA, 15 bp, Homo sapiens
gtggctgctactaat

SEQ ID NO: 1643381 - DNA, 15 bp, Homo sapiens
ggtggctgctactaa

SEQ ID NO: 1643382 - DNA, 15 bp, Homo sapiens
aggtggctgctacta

SEQ ID NO: 1643383 - DNA, 15 bp, Homo sapiens
caggtggctgctact

SEQ ID NO: 1643384 - DNA, 15 bp, Homo sapiens
tcaggtggctgctac

SEQ ID NO: 1643385 - DNA, 15 bp, Homo sapiens
ttcaggtggctgcta

SEQ ID NO: 1643386 - DNA, 15 bp, Homo sapiens
tttcaggtggctgct

SEQ ID NO: 1643387 - DNA, 15 bp, Homo sapiens
atttcaggtggctgc

SEQ ID NO: 1643388 - DNA, 15 bp, Homo sapiens
catttcaggtggctg

SEQ ID NO: 1643389 - DNA, 15 bp, Homo sapiens
gcatttcaggtggct

SEQ ID NO: 1643390 - DNA, 15 bp, Homo sapiens
agcatttcaggtggc

SEQ ID NO: 1643391 - DNA, 15 bp, Homo sapiens
tagcatttcaggtgg

SEQ ID NO: 1643392 - DNA, 15 bp, Homo sapiens
gtagcatttcaggtg

SEQ ID NO: 1643393 - DNA, 15 bp, Homo sapiens
cgtagcatttcaggt

SEQ ID NO: 1643394 - DNA, 15 bp, Homo sapiens
acgtagcatttcagg

SEQ ID NO: 1643395 - DNA, 15 bp, Homo sapiens
cacgtagcatttcag

SEQ ID NO: 1643396 - DNA, 15 bp, Homo sapiens
tcacgtagcatttca

SEQ ID NO: 1643397 - DNA, 15 bp, Homo sapiens
ttcacgtagcatttc

SEQ ID NO: 1643398 - DNA, 15 bp, Homo sapiens
cttcacgtagcattt

SEQ ID NO: 1643399 - DNA, 15 bp, Homo sapiens
ccttcacgtagcatt

SEQ ID NO: 1643400 - DNA, 15 bp, Homo sapiens
tccttcacgtagcat

SEQ ID NO: 1643401 - DNA, 15 bp, Homo sapiens
atccttcacgtagca

SEQ ID NO: 1643402 - DNA, 15 bp, Homo sapiens
aatccttcacgtagc

SEQ ID NO: 1643403 - DNA, 15 bp, Homo sapiens
gaatccttcacgtag

SEQ ID NO: 1643404 - DNA, 15 bp, Homo sapiens
agaatccttcacgta

SEQ ID NO: 1643405 - DNA, 15 bp, Homo sapiens
cagaatccttcacgt

SEQ ID NO: 1643406 - DNA, 15 bp, Homo sapiens
ccagaatccttcacg

SEQ ID NO: 1643407 - DNA, 15 bp, Homo sapiens
cccagaatccttcac

SEQ ID NO: 1643408 - DNA, 15 bp, Homo sapiens
ccccagaatccttca

SEQ ID NO: 1643409 - DNA, 15 bp, Homo sapiens
tccccagaatccttc

SEQ ID NO: 1643410 - DNA, 15 bp, Homo sapiens
atccccagaatcctt

SEQ ID NO: 1643411 - DNA, 15 bp, Homo sapiens
catccccagaatcct

SEQ ID NO: 1643412 - DNA, 15 bp, Homo sapiens
gcatccccagaatcc

SEQ ID NO: 1643413 - DNA, 15 bp, Homo sapiens
tgcatccccagaatc

SEQ ID NO: 1643414 - DNA, 15 bp, Homo sapiens
atgcatccccagaat

SEQ ID NO: 1643415 - DNA, 15 bp, Homo sapiens
gatgcatccccagaa

SEQ ID NO: 1643416 - DNA, 15 bp, Homo sapiens
ggatgcatccccaga

SEQ ID NO: 1643417 - DNA, 15 bp, Homo sapiens
tggatgcatccccag

SEQ ID NO: 1643418 - DNA, 15 bp, Homo sapiens
ctggatgcatcccca

SEQ ID NO: 1643419 - DNA, 15 bp, Homo sapiens
actggatgcatcccc

SEQ ID NO: 1643420 - DNA, 15 bp, Homo sapiens
aactggatgcatccc

SEQ ID NO: 1643421 - DNA, 15 bp, Homo sapiens
caactggatgcatcc

SEQ ID NO: 1643422 - DNA, 15 bp, Homo sapiens
tcaactggatgcatc

SEQ ID NO: 1643423 - DNA, 15 bp, Homo sapiens
ttcaactggatgcat

SEQ ID NO: 1643424 - DNA, 15 bp, Homo sapiens
attcaactggatgca

SEQ ID NO: 1643425 - DNA, 15 bp, Homo sapiens
aattcaactggatgc

SEQ ID NO: 1643426 - DNA, 15 bp, Homo sapiens
taattcaactggatg

SEQ ID NO: 1643427 - DNA, 15 bp, Homo sapiens
ctaattcaactggat

SEQ ID NO: 1643428 - DNA, 15 bp, Homo sapiens
actaattcaactgga

SEQ ID NO: 1643429 - DNA, 15 bp, Homo sapiens
aactaattcaactgg

SEQ ID NO: 1643430 - DNA, 15 bp, Homo sapiens
taactaattcaactg

SEQ ID NO: 1643431 - DNA, 15 bp, Homo sapiens
ataactaattcaact

SEQ ID NO: 1643432 - DNA, 15 bp, Homo sapiens
cataactaattcaac

SEQ ID NO: 1643433 - DNA, 15 bp, Homo sapiens
tcataactaattcaa

SEQ ID NO: 1643434 - DNA, 15 bp, Homo sapiens
ctcataactaattca

SEQ ID NO: 1643435 - DNA, 15 bp, Homo sapiens
tctcataactaattc

SEQ ID NO: 1643436 - DNA, 15 bp, Homo sapiens
ttctcataactaatt

SEQ ID NO: 1643437 - DNA, 15 bp, Homo sapiens
cttctcataactaat

SEQ ID NO: 1643438 - DNA, 15 bp, Homo sapiens
tcttctcataactaa

SEQ ID NO: 1643439 - DNA, 15 bp, Homo sapiens
ttcttctcataacta

SEQ ID NO: 1643440 - DNA, 15 bp, Homo sapiens
tttcttctcataact

SEQ ID NO: 1643441 - DNA, 15 bp, Homo sapiens
ttttcttctcataac

SEQ ID NO: 1643442 - DNA, 15 bp, Homo sapiens
tttttcttctcataa

SEQ ID NO: 1643443 - DNA, 15 bp, Homo sapiens
atttttcttctcata

SEQ ID NO: 1643444 - DNA, 15 bp, Homo sapiens
aatttttcttctcat

SEQ ID NO: 1643445 - DNA, 15 bp, Homo sapiens
caatttttcttctca

SEQ ID NO: 1643446 - DNA, 15 bp, Homo sapiens
ccaatttttcttctc

SEQ ID NO: 1643447 - DNA, 15 bp, Homo sapiens
gccaatttttcttct

SEQ ID NO: 1643448 - DNA, 15 bp, Homo sapiens
agccaatttttcttc

SEQ ID NO: 1643449 - DNA, 15 bp, Homo sapiens
tagccaatttttctt

SEQ ID NO: 1643450 - DNA, 15 bp, Homo sapiens
gtagccaatttttct

SEQ ID NO: 1643451 - DNA, 15 bp, Homo sapiens
agtagccaatttttc

SEQ ID NO: 1643452 - DNA, 15 bp, Homo sapiens
tagtagccaattttt

SEQ ID NO: 1643453 - DNA, 15 bp, Homo sapiens
atagtagccaatttt

SEQ ID NO: 1643454 - DNA, 15 bp, Homo sapiens
tatagtagccaattt

SEQ ID NO: 1643455 - DNA, 15 bp, Homo sapiens
ctatagtagccaatt

SEQ ID NO: 1643456 - DNA, 15 bp, Homo sapiens
cctatagtagccaat

SEQ ID NO: 1643457 - DNA, 15 bp, Homo sapiens
tcctatagtagccaa

SEQ ID NO: 1643458 - DNA, 15 bp, Homo sapiens
ttcctatagtagcca

SEQ ID NO: 1643459 - DNA, 15 bp, Homo sapiens
tttcctatagtagcc

SEQ ID NO: 1643460 - DNA, 15 bp, Homo sapiens
ctttcctatagtagc

SEQ ID NO: 1643461 - DNA, 15 bp, Homo sapiens
tctttcctatagtag

SEQ ID NO: 1643462 - DNA, 15 bp, Homo sapiens
ctctttcctatagta

SEQ ID NO: 1643463 - DNA, 15 bp, Homo sapiens
tctctttcctatagt

SEQ ID NO: 1643464 - DNA, 15 bp, Homo sapiens
ttctctttcctatag

SEQ ID NO: 1643465 - DNA, 15 bp, Homo sapiens
attctctttcctata

SEQ ID NO: 1643466 - DNA, 15 bp, Homo sapiens
gattctctttcctat

SEQ ID NO: 1643467 - DNA, 15 bp, Homo sapiens
tgattctctttccta

SEQ ID NO: 1643468 - DNA, 15 bp, Homo sapiens
ttgattctctttcct

SEQ ID NO: 1643469 - DNA, 15 bp, Homo sapiens
gttgattctctttcc

SEQ ID NO: 1643470 - DNA, 15 bp, Homo sapiens
tgttgattctctttc

SEQ ID NO: 1643471 - DNA, 15 bp, Homo sapiens
ttgttgattctcttt

SEQ ID NO: 1643472 - DNA, 15 bp, Homo sapiens
attgttgattctctt

SEQ ID NO: 1643473 - DNA, 15 bp, Homo sapiens
aattgttgattctct

SEQ ID NO: 1643474 - DNA, 15 bp, Homo sapiens
gaattgttgattctc

SEQ ID NO: 1643475 - DNA, 15 bp, Homo sapiens
tgaattgttgattct

SEQ ID NO: 1643476 - DNA, 15 bp, Homo sapiens
ttgaattgttgattc

SEQ ID NO: 1643477 - DNA, 15 bp, Homo sapiens
attgaattgttgatt

SEQ ID NO: 1643478 - DNA, 15 bp, Homo sapiens
cattgaattgttgat

SEQ ID NO: 1643479 - DNA, 15 bp, Homo sapiens
ccattgaattgttga

SEQ ID NO: 1643480 - DNA, 15 bp, Homo sapiens
tccattgaattgttg

SEQ ID NO: 1643481 - DNA, 15 bp, Homo sapiens
atccattgaattgtt

SEQ ID NO: 1643482 - DNA, 15 bp, Homo sapiens
aatccattgaattgt

SEQ ID NO: 1643483 - DNA, 15 bp, Homo sapiens
taatccattgaattg

SEQ ID NO: 1643484 - DNA, 15 bp, Homo sapiens
ttaatccattgaatt

SEQ ID NO: 1643485 - DNA, 15 bp, Homo sapiens
tttaatccattgaat

SEQ ID NO: 1643486 - DNA, 15 bp, Homo sapiens
gtttaatccattgaa

SEQ ID NO: 1643487 - DNA, 15 bp, Homo sapiens
tgtttaatccattga

SEQ ID NO: 1643488 - DNA, 15 bp, Homo sapiens
ttgtttaatccattg

SEQ ID NO: 1643489 - DNA, 15 bp, Homo sapiens
tttgtttaatccatt

SEQ ID NO: 1643490 - DNA, 15 bp, Homo sapiens
ttttgtttaatccat

SEQ ID NO: 1643491 - DNA, 15 bp, Homo sapiens
tttttgtttaatcca

SEQ ID NO: 1643492 - DNA, 15 bp, Homo sapiens
ctttttgtttaatcc

SEQ ID NO: 1643493 - DNA, 15 bp, Homo sapiens
tctttttgtttaatc

SEQ ID NO: 1643494 - DNA, 15 bp, Homo sapiens
ctctttttgtttaat

SEQ ID NO: 1643495 - DNA, 15 bp, Homo sapiens
actctttttgtttaa

SEQ ID NO: 1643496 - DNA, 15 bp, Homo sapiens
cactctttttgttta

SEQ ID NO: 1643497 - DNA, 15 bp, Homo sapiens
acactctttttgttt

SEQ ID NO: 1643498 - DNA, 15 bp, Homo sapiens
aacactctttttgtt

SEQ ID NO: 1643499 - DNA, 15 bp, Homo sapiens
taacactctttttgt

SEQ ID NO: 1643500 - DNA, 15 bp, Homo sapiens
ttaacactctttttg

SEQ ID NO: 1643501 - DNA, 15 bp, Homo sapiens
attaacactcttttt

SEQ ID NO: 1643502 - DNA, 15 bp, Homo sapiens
aattaacactctttt

SEQ ID NO: 1643503 - DNA, 15 bp, Homo sapiens
taattaacactcttt

SEQ ID NO: 1643504 - DNA, 15 bp, Homo sapiens
ataattaacactctt

SEQ ID NO: 1643505 - DNA, 15 bp, Homo sapiens
aataattaacactct

SEQ ID NO: 1643506 - DNA, 15 bp, Homo sapiens
aaataattaacactc

SEQ ID NO: 1643507 - DNA, 15 bp, Homo sapiens
gaaataattaacact

SEQ ID NO: 1643508 - DNA, 15 bp, Homo sapiens
agaaataattaacac

SEQ ID NO: 1643509 - DNA, 15 bp, Homo sapiens
aagaaataattaaca

SEQ ID NO: 1643510 - DNA, 15 bp, Homo sapiens
taagaaataattaac

SEQ ID NO: 1643511 - DNA, 15 bp, Homo sapiens
gtaagaaataattaa

SEQ ID NO: 1643512 - DNA, 15 bp, Homo sapiens
tgtaagaaataatta

SEQ ID NO: 1643513 - DNA, 15 bp, Homo sapiens
atgtaagaaataatt

SEQ ID NO: 1643514 - DNA, 15 bp, Homo sapiens
catgtaagaaataat

SEQ ID NO: 1643515 - DNA, 15 bp, Homo sapiens
tcatgtaagaaataa

SEQ ID NO: 1643516 - DNA, 15 bp, Homo sapiens
gtcatgtaagaaata

SEQ ID NO: 1643517 - DNA, 15 bp, Homo sapiens
tgtcatgtaagaaat

SEQ ID NO: 1643518 - DNA, 15 bp, Homo sapiens
ctgtcatgtaagaaa

SEQ ID NO: 1643519 - DNA, 15 bp, Homo sapiens
actgtcatgtaagaa

SEQ ID NO: 1643520 - DNA, 15 bp, Homo sapiens
tactgtcatgtaaga

SEQ ID NO: 1643521 - DNA, 15 bp, Homo sapiens
atactgtcatgtaag

SEQ ID NO: 1643522 - DNA, 15 bp, Homo sapiens
gatactgtcatgtaa

SEQ ID NO: 1643523 - DNA, 15 bp, Homo sapiens
tgatactgtcatgta

SEQ ID NO: 1643524 - DNA, 15 bp, Homo sapiens
ttgatactgtcatgt

SEQ ID NO: 1643525 - DNA, 15 bp, Homo sapiens
attgatactgtcatg

SEQ ID NO: 1643526 - DNA, 15 bp, Homo sapiens
cattgatactgtcat

SEQ ID NO: 1643527 - DNA, 15 bp, Homo sapiens
acattgatactgtca

SEQ ID NO: 1643528 - DNA, 15 bp, Homo sapiens
tacattgatactgtc

SEQ ID NO: 1643529 - DNA, 15 bp, Homo sapiens
ttacattgatactgt

SEQ ID NO: 1643530 - DNA, 15 bp, Homo sapiens
tttacattgatactg

SEQ ID NO: 1643531 - DNA, 15 bp, Homo sapiens
ttttacattgatact

SEQ ID NO: 1643532 - DNA, 15 bp, Homo sapiens
tttttacattgatac

SEQ ID NO: 1643533 - DNA, 15 bp, Homo sapiens
ctttttacattgata

SEQ ID NO: 1643534 - DNA, 15 bp, Homo sapiens
actttttacattgat

SEQ ID NO: 1643535 - DNA, 15 bp, Homo sapiens
aactttttacattga

SEQ ID NO: 1643536 - DNA, 15 bp, Homo sapiens
gaactttttacattg

SEQ ID NO: 1643537 - DNA, 15 bp, Homo sapiens
tgaactttttacatt

SEQ ID NO: 1643538 - DNA, 15 bp, Homo sapiens
ttgaactttttacat

SEQ ID NO: 1643539 - DNA, 15 bp, Homo sapiens
tttgaactttttaca

SEQ ID NO: 1643540 - DNA, 15 bp, Homo sapiens
atttgaactttttac

SEQ ID NO: 1643541 - DNA, 15 bp, Homo sapiens
gatttgaacttttta

SEQ ID NO: 1643542 - DNA, 15 bp, Homo sapiens
tgatttgaacttttt

SEQ ID NO: 1643543 - DNA, 15 bp, Homo sapiens
ctgatttgaactttt

SEQ ID NO: 1643544 - DNA, 15 bp, Homo sapiens
tctgatttgaacttt

SEQ ID NO: 1643545 - DNA, 15 bp, Homo sapiens
ctctgatttgaactt

SEQ ID NO: 1643546 - DNA, 15 bp, Homo sapiens
tctctgatttgaact

SEQ ID NO: 1643547 - DNA, 15 bp, Homo sapiens
ctctctgatttgaac

SEQ ID NO: 1643548 - DNA, 15 bp, Homo sapiens
cctctctgatttgaa

SEQ ID NO: 1643549 - DNA, 15 bp, Homo sapiens
ccctctctgatttga

SEQ ID NO: 1643550 - DNA, 15 bp, Homo sapiens
tccctctctgatttg

SEQ ID NO: 1643551 - DNA, 15 bp, Homo sapiens
ttccctctctgattt

SEQ ID NO: 1643552 - DNA, 15 bp, Homo sapiens
attccctctctgatt

SEQ ID NO: 1643553 - DNA, 15 bp, Homo sapiens
aattccctctctgat

SEQ ID NO: 1643554 - DNA, 15 bp, Homo sapiens
gaattccctctctga

SEQ ID NO: 1643555 - DNA, 15 bp, Homo sapiens
agaattccctctctg

SEQ ID NO: 1643556 - DNA, 15 bp, Homo sapiens
cagaattccctctct

SEQ ID NO: 1643557 - DNA, 15 bp, Homo sapiens
acagaattccctctc

SEQ ID NO: 1643558 - DNA, 15 bp, Homo sapiens
aacagaattccctct

SEQ ID NO: 1643559 - DNA, 15 bp, Homo sapiens
aaacagaattccctc

SEQ ID NO: 1643560 - DNA, 15 bp, Homo sapiens
gaaacagaattccct

SEQ ID NO: 1643561 - DNA, 15 bp, Homo sapiens
agaaacagaattccc

SEQ ID NO: 1643562 - DNA, 15 bp, Homo sapiens
aagaaacagaattcc

SEQ ID NO: 1643563 - DNA, 15 bp, Homo sapiens
taagaaacagaattc

SEQ ID NO: 1643564 - DNA, 15 bp, Homo sapiens
ctaagaaacagaatt

SEQ ID NO: 1643565 - DNA, 15 bp, Homo sapiens
actaagaaacagaat

SEQ ID NO: 1643566 - DNA, 15 bp, Homo sapiens
gactaagaaacagaa

SEQ ID NO: 1643567 - DNA, 15 bp, Homo sapiens
tgactaagaaacaga

SEQ ID NO: 1643568 - DNA, 15 bp, Homo sapiens
atgactaagaaacag

SEQ ID NO: 1643569 - DNA, 15 bp, Homo sapiens
aatgactaagaaaca

SEQ ID NO: 1643570 - DNA, 15 bp, Homo sapiens
gaatgactaagaaac

SEQ ID NO: 1643571 - DNA, 15 bp, Homo sapiens
tgaatgactaagaaa

SEQ ID NO: 1643572 - DNA, 15 bp, Homo sapiens
ctgaatgactaagaa

SEQ ID NO: 1643573 - DNA, 15 bp, Homo sapiens
cctgaatgactaaga

SEQ ID NO: 1643574 - DNA, 15 bp, Homo sapiens
ccctgaatgactaag

SEQ ID NO: 1643575 - DNA, 15 bp, Homo sapiens
tccctgaatgactaa

SEQ ID NO: 1643576 - DNA, 15 bp, Homo sapiens
gtccctgaatgacta

SEQ ID NO: 1643577 - DNA, 15 bp, Homo sapiens
agtccctgaatgact

SEQ ID NO: 1643578 - DNA, 15 bp, Homo sapiens
aagtccctgaatgac

SEQ ID NO: 1643579 - DNA, 15 bp, Homo sapiens
caagtccctgaatga

SEQ ID NO: 1643580 - DNA, 15 bp, Homo sapiens
tcaagtccctgaatg

SEQ ID NO: 1643581 - DNA, 15 bp, Homo sapiens
atcaagtccctgaat

SEQ ID NO: 1643582 - DNA, 15 bp, Homo sapiens
aatcaagtccctgaa

SEQ ID NO: 1643583 - DNA, 15 bp, Homo sapiens
aaatcaagtccctga

SEQ ID NO: 1643584 - DNA, 15 bp, Homo sapiens
gaaatcaagtccctg

SEQ ID NO: 1643585 - DNA, 15 bp, Homo sapiens
ggaaatcaagtccct

SEQ ID NO: 1643586 - DNA, 15 bp, Homo sapiens
aggaaatcaagtccc

SEQ ID NO: 1643587 - DNA, 15 bp, Homo sapiens
aaggaaatcaagtcc

SEQ ID NO: 1643588 - DNA, 15 bp, Homo sapiens
gaaggaaatcaagtc

SEQ ID NO: 1643589 - DNA, 15 bp, Homo sapiens
ggaaggaaatcaagt

SEQ ID NO: 1643590 - DNA, 15 bp, Homo sapiens
tggaaggaaatcaag

SEQ ID NO: 1643591 - DNA, 15 bp, Homo sapiens
ttggaaggaaatcaa

SEQ ID NO: 1643592 - DNA, 15 bp, Homo sapiens
cttggaaggaaatca

SEQ ID NO: 1643593 - DNA, 15 bp, Homo sapiens
acttggaaggaaatc

SEQ ID NO: 1643594 - DNA, 15 bp, Homo sapiens
gacttggaaggaaat

SEQ ID NO: 1643595 - DNA, 15 bp, Homo sapiens
tgacttggaaggaaa

SEQ ID NO: 1643596 - DNA, 15 bp, Homo sapiens
atgacttggaaggaa

SEQ ID NO: 1643597 - DNA, 15 bp, Homo sapiens
aatgacttggaagga

SEQ ID NO: 1643598 - DNA, 15 bp, Homo sapiens
caatgacttggaagg

SEQ ID NO: 1643599 - DNA, 15 bp, Homo sapiens
acaatgacttggaag

SEQ ID NO: 1643600 - DNA, 15 bp, Homo sapiens
tacaatgacttggaa

SEQ ID NO: 1643601 - DNA, 15 bp, Homo sapiens
gtacaatgacttgga

SEQ ID NO: 1643602 - DNA, 15 bp, Homo sapiens
agtacaatgacttgg

SEQ ID NO: 1643603 - DNA, 15 bp, Homo sapiens
aagtacaatgacttg

SEQ ID NO: 1643604 - DNA, 15 bp, Homo sapiens
aaagtacaatgactt

SEQ ID NO: 1643605 - DNA, 15 bp, Homo sapiens
gaaagtacaatgact

SEQ ID NO: 1643606 - DNA, 15 bp, Homo sapiens
tgaaagtacaatgac

SEQ ID NO: 1643607 - DNA, 15 bp, Homo sapiens
atgaaagtacaatga

SEQ ID NO: 1643608 - DNA, 15 bp, Homo sapiens
gatgaaagtacaatg

SEQ ID NO: 1643609 - DNA, 15 bp, Homo sapiens
agatgaaagtacaat

SEQ ID NO: 1643610 - DNA, 15 bp, Homo sapiens
gagatgaaagtacaa

SEQ ID NO: 1643611 - DNA, 15 bp, Homo sapiens
tgagatgaaagtaca

SEQ ID NO: 1643612 - DNA, 15 bp, Homo sapiens
atgagatgaaagtac

SEQ ID NO: 1643613 - DNA, 15 bp, Homo sapiens
tatgagatgaaagta

SEQ ID NO: 1643614 - DNA, 15 bp, Homo sapiens
ctatgagatgaaagt

SEQ ID NO: 1643615 - DNA, 15 bp, Homo sapiens
cctatgagatgaaag

SEQ ID NO: 1643616 - DNA, 15 bp, Homo sapiens
ccctatgagatgaaa

SEQ ID NO: 1643617 - DNA, 15 bp, Homo sapiens
tccctatgagatgaa

SEQ ID NO: 1643618 - DNA, 15 bp, Homo sapiens
ttccctatgagatga

SEQ ID NO: 1643619 - DNA, 15 bp, Homo sapiens
attccctatgagatg

SEQ ID NO: 1643620 - DNA, 15 bp, Homo sapiens
gattccctatgagat

SEQ ID NO: 1643621 - DNA, 15 bp, Homo sapiens
tgattccctatgaga

SEQ ID NO: 1643622 - DNA, 15 bp, Homo sapiens
gtgattccctatgag

SEQ ID NO: 1643623 - DNA, 15 bp, Homo sapiens
agtgattccctatga

SEQ ID NO: 1643624 - DNA, 15 bp, Homo sapiens
gagtgattccctatg

SEQ ID NO: 1643625 - DNA, 15 bp, Homo sapiens
ggagtgattccctat

SEQ ID NO: 1643626 - DNA, 15 bp, Homo sapiens
gggagtgattcccta

SEQ ID NO: 1643627 - DNA, 15 bp, Homo sapiens
tgggagtgattccct

SEQ ID NO: 1643628 - DNA, 15 bp, Homo sapiens
atgggagtgattccc

SEQ ID NO: 1643629 - DNA, 15 bp, Homo sapiens
gatgggagtgattcc

SEQ ID NO: 1643630 - DNA, 15 bp, Homo sapiens
agatgggagtgattc

SEQ ID NO: 1643631 - DNA, 15 bp, Homo sapiens
cagatgggagtgatt

SEQ ID NO: 1643632 - DNA, 15 bp, Homo sapiens
acagatgggagtgat

SEQ ID NO: 1643633 - DNA, 15 bp, Homo sapiens
tacagatgggagtga

SEQ ID NO: 1643634 - DNA, 15 bp, Homo sapiens
atacagatgggagtg

SEQ ID NO: 1643635 - DNA, 15 bp, Homo sapiens
tatacagatgggagt

SEQ ID NO: 1643636 - DNA, 15 bp, Homo sapiens
gtatacagatgggag

SEQ ID NO: 1643637 - DNA, 15 bp, Homo sapiens
agtatacagatggga

SEQ ID NO: 1643638 - DNA, 15 bp, Homo sapiens
cagtatacagatggg

SEQ ID NO: 1643639 - DNA, 15 bp, Homo sapiens
tcagtatacagatgg

SEQ ID NO: 1643640 - DNA, 15 bp, Homo sapiens
ttcagtatacagatg

SEQ ID NO: 1643641 - DNA, 15 bp, Homo sapiens
tttcagtatacagat

SEQ ID NO: 1643642 - DNA, 15 bp, Homo sapiens
gtttcagtatacaga

SEQ ID NO: 1643643 - DNA, 15 bp, Homo sapiens
agtttcagtatacag

SEQ ID NO: 1643644 - DNA, 15 bp, Homo sapiens
cagtttcagtataca

SEQ ID NO: 1643645 - DNA, 15 bp, Homo sapiens
ccagtttcagtatac

SEQ ID NO: 1643646 - DNA, 15 bp, Homo sapiens
cccagtttcagtata

SEQ ID NO: 1643647 - DNA, 15 bp, Homo sapiens
acccagtttcagtat

SEQ ID NO: 1643648 - DNA, 15 bp, Homo sapiens
tacccagtttcagta

SEQ ID NO: 1643649 - DNA, 15 bp, Homo sapiens
ctacccagtttcagt

SEQ ID NO: 1643650 - DNA, 15 bp, Homo sapiens
gctacccagtttcag

SEQ ID NO: 1643651 - DNA, 15 bp, Homo sapiens
ggctacccagtttca

SEQ ID NO: 1643652 - DNA, 15 bp, Homo sapiens
tggctacccagtttc

SEQ ID NO: 1643653 - DNA, 15 bp, Homo sapiens
atggctacccagttt

SEQ ID NO: 1643654 - DNA, 15 bp, Homo sapiens
aatggctacccagtt

SEQ ID NO: 1643655 - DNA, 15 bp, Homo sapiens
taatggctacccagt

SEQ ID NO: 1643656 - DNA, 15 bp, Homo sapiens
gtaatggctacccag

SEQ ID NO: 1643657 - DNA, 15 bp, Homo sapiens
tgtaatggctaccca

SEQ ID NO: 1643658 - DNA, 15 bp, Homo sapiens
atgtaatggctaccc

SEQ ID NO: 1643659 - DNA, 15 bp, Homo sapiens
gatgtaatggctacc

SEQ ID NO: 1643660 - DNA, 15 bp, Homo sapiens
agatgtaatggctac

SEQ ID NO: 1643661 - DNA, 15 bp, Homo sapiens
cagatgtaatggcta

SEQ ID NO: 1643662 - DNA, 15 bp, Homo sapiens
tcagatgtaatggct

SEQ ID NO: 1643663 - DNA, 15 bp, Homo sapiens
ctcagatgtaatggc

SEQ ID NO: 1643664 - DNA, 15 bp, Homo sapiens
actcagatgtaatgg

SEQ ID NO: 1643665 - DNA, 15 bp, Homo sapiens
aactcagatgtaatg

SEQ ID NO: 1643666 - DNA, 15 bp, Homo sapiens
caactcagatgtaat

SEQ ID NO: 1643667 - DNA, 15 bp, Homo sapiens
gcaactcagatgtaa

SEQ ID NO: 1643668 - DNA, 15 bp, Homo sapiens
tgcaactcagatgta

SEQ ID NO: 1643669 - DNA, 15 bp, Homo sapiens
ctgcaactcagatgt

SEQ ID NO: 1643670 - DNA, 15 bp, Homo sapiens
gctgcaactcagatg

SEQ ID NO: 1643671 - DNA, 15 bp, Homo sapiens
agctgcaactcagat

SEQ ID NO: 1643672 - DNA, 15 bp, Homo sapiens
cagctgcaactcaga

SEQ ID NO: 1643673 - DNA, 15 bp, Homo sapiens
ccagctgcaactcag

SEQ ID NO: 1643674 - DNA, 15 bp, Homo sapiens
accagctgcaactca

SEQ ID NO: 1643675 - DNA, 15 bp, Homo sapiens
caccagctgcaactc

SEQ ID NO: 1643676 - DNA, 15 bp, Homo sapiens
ccaccagctgcaact

SEQ ID NO: 1643677 - DNA, 15 bp, Homo sapiens
cccaccagctgcaac

SEQ ID NO: 1643678 - DNA, 15 bp, Homo sapiens
tcccaccagctgcaa

SEQ ID NO: 1643679 - DNA, 15 bp, Homo sapiens
ctcccaccagctgca

SEQ ID NO: 1643680 - DNA, 15 bp, Homo sapiens
tctcccaccagctgc

SEQ ID NO: 1643681 - DNA, 15 bp, Homo sapiens
ttctcccaccagctg

SEQ ID NO: 1643682 - DNA, 15 bp, Homo sapiens
tttctcccaccagct

SEQ ID NO: 1643683 - DNA, 15 bp, Homo sapiens
ctttctcccaccagc

SEQ ID NO: 1643684 - DNA, 15 bp, Homo sapiens
actttctcccaccag

SEQ ID NO: 1643685 - DNA, 15 bp, Homo sapiens
tactttctcccacca

SEQ ID NO: 1643686 - DNA, 15 bp, Homo sapiens
atactttctcccacc

SEQ ID NO: 1643687 - DNA, 15 bp, Homo sapiens
catactttctcccac

SEQ ID NO: 1643688 - DNA, 15 bp, Homo sapiens
ccatactttctccca

SEQ ID NO: 1643689 - DNA, 15 bp, Homo sapiens
tccatactttctccc

SEQ ID NO: 1643690 - DNA, 15 bp, Homo sapiens
ttccatactttctcc

SEQ ID NO: 1643691 - DNA, 15 bp, Homo sapiens
tttccatactttctc

SEQ ID NO: 1643692 - DNA, 15 bp, Homo sapiens
ctttccatactttct

SEQ ID NO: 1643693 - DNA, 15 bp, Homo sapiens
cctttccatactttc

SEQ ID NO: 1643694 - DNA, 15 bp, Homo sapiens
tcctttccatacttt

SEQ ID NO: 1643695 - DNA, 15 bp, Homo sapiens
ctcctttccatactt

SEQ ID NO: 1643696 - DNA, 15 bp, Homo sapiens
tctcctttccatact

SEQ ID NO: 1643697 - DNA, 15 bp, Homo sapiens
ctctcctttccatac

SEQ ID NO: 1643698 - DNA, 15 bp, Homo sapiens
gctctcctttccata

SEQ ID NO: 1643699 - DNA, 15 bp, Homo sapiens
tgctctcctttccat

SEQ ID NO: 1643700 - DNA, 15 bp, Homo sapiens
atgctctcctttcca

SEQ ID NO: 1643701 - DNA, 15 bp, Homo sapiens
tatgctctcctttcc

SEQ ID NO: 1643702 - DNA, 15 bp, Homo sapiens
gtatgctctcctttc

SEQ ID NO: 1643703 - DNA, 15 bp, Homo sapiens
ggtatgctctccttt

SEQ ID NO: 1643704 - DNA, 15 bp, Homo sapiens
gggtatgctctcctt

SEQ ID NO: 1643705 - DNA, 15 bp, Homo sapiens
agggtatgctctcct

SEQ ID NO: 1643706 - DNA, 15 bp, Homo sapiens
tagggtatgctctcc

SEQ ID NO: 1643707 - DNA, 15 bp, Homo sapiens
atagggtatgctctc

SEQ ID NO: 1643708 - DNA, 15 bp, Homo sapiens
catagggtatgctct

SEQ ID NO: 1643709 - DNA, 15 bp, Homo sapiens
acatagggtatgctc

SEQ ID NO: 1643710 - DNA, 15 bp, Homo sapiens
gacatagggtatgct

SEQ ID NO: 1643711 - DNA, 15 bp, Homo sapiens
agacatagggtatgc

SEQ ID NO: 1643712 - DNA, 15 bp, Homo sapiens
aagacatagggtatg

SEQ ID NO: 1643713 - DNA, 15 bp, Homo sapiens
taagacatagggtat

SEQ ID NO: 1643714 - DNA, 15 bp, Homo sapiens
ctaagacatagggta

SEQ ID NO: 1643715 - DNA, 15 bp, Homo sapiens
cctaagacatagggt

SEQ ID NO: 1643716 - DNA, 15 bp, Homo sapiens
tcctaagacataggg

SEQ ID NO: 1643717 - DNA, 15 bp, Homo sapiens
gtcctaagacatagg

SEQ ID NO: 1643718 - DNA, 15 bp, Homo sapiens
ggtcctaagacatag

SEQ ID NO: 1643719 - DNA, 15 bp, Homo sapiens
gggtcctaagacata

SEQ ID NO: 1643720 - DNA, 15 bp, Homo sapiens
tgggtcctaagacat

SEQ ID NO: 1643721 - DNA, 15 bp, Homo sapiens
ctgggtcctaagaca

SEQ ID NO: 1643722 - DNA, 15 bp, Homo sapiens
cctgggtcctaagac

SEQ ID NO: 1643723 - DNA, 15 bp, Homo sapiens
gcctgggtcctaaga

SEQ ID NO: 1643724 - DNA, 15 bp, Homo sapiens
tgcctgggtcctaag

SEQ ID NO: 1643725 - DNA, 15 bp, Homo sapiens
atgcctgggtcctaa

SEQ ID NO: 1643726 - DNA, 15 bp, Homo sapiens
catgcctgggtccta

SEQ ID NO: 1643727 - DNA, 15 bp, Homo sapiens
ccatgcctgggtcct

SEQ ID NO: 1643728 - DNA, 15 bp, Homo sapiens
tccatgcctgggtcc

SEQ ID NO: 1643729 - DNA, 15 bp, Homo sapiens
ttccatgcctgggtc

SEQ ID NO: 1643730 - DNA, 15 bp, Homo sapiens
tttccatgcctgggt

SEQ ID NO: 1643731 - DNA, 15 bp, Homo sapiens
atttccatgcctggg

SEQ ID NO: 1643732 - DNA, 15 bp, Homo sapiens
catttccatgcctgg

SEQ ID NO: 1643733 - DNA, 15 bp, Homo sapiens
ccatttccatgcctg

SEQ ID NO: 1643734 - DNA, 15 bp, Homo sapiens
gccatttccatgcct

SEQ ID NO: 1643735 - DNA, 15 bp, Homo sapiens
tgccatttccatgcc

SEQ ID NO: 1643736 - DNA, 15 bp, Homo sapiens
atgccatttccatgc

SEQ ID NO: 1643737 - DNA, 15 bp, Homo sapiens
tatgccatttccatg

SEQ ID NO: 1643738 - DNA, 15 bp, Homo sapiens
gtatgccatttccat

SEQ ID NO: 1643739 - DNA, 15 bp, Homo sapiens
tgtatgccatttcca

SEQ ID NO: 1643740 - DNA, 15 bp, Homo sapiens
atgtatgccatttcc

SEQ ID NO: 1643741 - DNA, 15 bp, Homo sapiens
gatgtatgccatttc

SEQ ID NO: 1643742 - DNA, 15 bp, Homo sapiens
tgatgtatgccattt

SEQ ID NO: 1643743 - DNA, 15 bp, Homo sapiens
gtgatgtatgccatt

SEQ ID NO: 1643744 - DNA, 15 bp, Homo sapiens
agtgatgtatgccat

SEQ ID NO: 1643745 - DNA, 15 bp, Homo sapiens
aagtgatgtatgcca

SEQ ID NO: 1643746 - DNA, 15 bp, Homo sapiens
gaagtgatgtatgcc

SEQ ID NO: 1643747 - DNA, 15 bp, Homo sapiens
agaagtgatgtatgc

SEQ ID NO: 1643748 - DNA, 15 bp, Homo sapiens
tagaagtgatgtatg

SEQ ID NO: 1643749 - DNA, 15 bp, Homo sapiens
gagtagaagtgatgt

SEQ ID NO: 1643750 - DNA, 15 bp, Homo sapiens
tgagtagaagtgatg

SEQ ID NO: 1643751 - DNA, 15 bp, Homo sapiens
gtgagtagaagtgat

SEQ ID NO: 1643752 - DNA, 15 bp, Homo sapiens
tgtgagtagaagtga

SEQ ID NO: 1643753 - DNA, 15 bp, Homo sapiens
atgtgagtagaagtg

SEQ ID NO: 1643754 - DNA, 15 bp, Homo sapiens
aatgtgagtagaagt

SEQ ID NO: 1643755 - DNA, 15 bp, Homo sapiens
aaatgtgagtagaag

SEQ ID NO: 1643756 - DNA, 15 bp, Homo sapiens
aaaatgtgagtagaa

SEQ ID NO: 1643757 - DNA, 15 bp, Homo sapiens
taaaatgtgagtaga

SEQ ID NO: 1643758 - DNA, 15 bp, Homo sapiens
ataaaatgtgagtag

SEQ ID NO: 1643759 - DNA, 15 bp, Homo sapiens
aataaaatgtgagta

SEQ ID NO: 1643760 - DNA, 15 bp, Homo sapiens
caataaaatgtgagt

SEQ ID NO: 1643761 - DNA, 15 bp, Homo sapiens
tcaataaaatgtgag

SEQ ID NO: 1643762 - DNA, 15 bp, Homo sapiens
atcaataaaatgtga

SEQ ID NO: 1643763 - DNA, 15 bp, Homo sapiens
gatcaataaaatgtg

SEQ ID NO: 1643764 - DNA, 15 bp, Homo sapiens
tgatcaataaaatgt

SEQ ID NO: 1643765 - DNA, 15 bp, Homo sapiens
atgatcaataaaatg

SEQ ID NO: 1643766 - DNA, 15 bp, Homo sapiens
tatgatcaataaaat

SEQ ID NO: 1643767 - DNA, 15 bp, Homo sapiens
ttatgatcaataaaa

SEQ ID NO: 1643768 - DNA, 15 bp, Homo sapiens
gttatgatcaataaa

SEQ ID NO: 1643769 - DNA, 15 bp, Homo sapiens
tgttatgatcaataa

SEQ ID NO: 1643770 - DNA, 15 bp, Homo sapiens
ttgttatgatcaata

SEQ ID NO: 1643771 - DNA, 15 bp, Homo sapiens
attgttatgatcaat

SEQ ID NO: 1643772 - DNA, 15 bp, Homo sapiens
gattgttatgatcaa

SEQ ID NO: 1643773 - DNA, 15 bp, Homo sapiens
tgattgttatgatca

SEQ ID NO: 1643774 - DNA, 15 bp, Homo sapiens
atgattgttatgatc

SEQ ID NO: 1643775 - DNA, 15 bp, Homo sapiens
aatgattgttatgat

SEQ ID NO: 1643776 - DNA, 15 bp, Homo sapiens
aaatgattgttatga

SEQ ID NO: 1643777 - DNA, 15 bp, Homo sapiens
caaatgattgttatg

SEQ ID NO: 1643778 - DNA, 15 bp, Homo sapiens
ccaaatgattgttat

SEQ ID NO: 1643779 - DNA, 15 bp, Homo sapiens
gccaaatgattgtta

SEQ ID NO: 1643780 - DNA, 15 bp, Homo sapiens
agccaaatgattgtt

SEQ ID NO: 1643781 - DNA, 15 bp, Homo sapiens
cagccaaatgattgt

SEQ ID NO: 1643782 - DNA, 15 bp, Homo sapiens
gcagccaaatgattg

SEQ ID NO: 1643783 - DNA, 15 bp, Homo sapiens
tgcagccaaatgatt

SEQ ID NO: 1643784 - DNA, 15 bp, Homo sapiens
gtgcagccaaatgat

SEQ ID NO: 1643785 - DNA, 15 bp, Homo sapiens
tgtgcagccaaatga

SEQ ID NO: 1643786 - DNA, 15 bp, Homo sapiens
ctgtgcagccaaatg

SEQ ID NO: 1643787 - DNA, 15 bp, Homo sapiens
tctgtgcagccaaat

SEQ ID NO: 1643788 - DNA, 15 bp, Homo sapiens
ttctgtgcagccaaa

SEQ ID NO: 1643789 - DNA, 15 bp, Homo sapiens
gttctgtgcagccaa

SEQ ID NO: 1643790 - DNA, 15 bp, Homo sapiens
agttctgtgcagcca

SEQ ID NO: 1643791 - DNA, 15 bp, Homo sapiens
cagttctgtgcagcc

SEQ ID NO: 1643792 - DNA, 15 bp, Homo sapiens
gcagttctgtgcagc

SEQ ID NO: 1643793 - DNA, 15 bp, Homo sapiens
tgcagttctgtgcag

SEQ ID NO: 1643794 - DNA, 15 bp, Homo sapiens
ttgcagttctgtgca

SEQ ID NO: 1643795 - DNA, 15 bp, Homo sapiens
tttgcagttctgtgc

SEQ ID NO: 1643796 - DNA, 15 bp, Homo sapiens
ttttgcagttctgtg

SEQ ID NO: 1643797 - DNA, 15 bp, Homo sapiens
cttttgcagttctgt

SEQ ID NO: 1643798 - DNA, 15 bp, Homo sapiens
tcttttgcagttctg

SEQ ID NO: 1643799 - DNA, 15 bp, Homo sapiens
ttcttttgcagttct

SEQ ID NO: 1643800 - DNA, 15 bp, Homo sapiens
cttcttttgcagttc

SEQ ID NO: 1643801 - DNA, 15 bp, Homo sapiens
gcttcttttgcagtt

SEQ ID NO: 1643802 - DNA, 15 bp, Homo sapiens
agcttcttttgcagt

SEQ ID NO: 1643803 - DNA, 15 bp, Homo sapiens
cagcttcttttgcag

SEQ ID NO: 1643804 - DNA, 15 bp, Homo sapiens
tcagcttcttttgca

SEQ ID NO: 1643805 - DNA, 15 bp, Homo sapiens
ttcagcttcttttgc

SEQ ID NO: 1643806 - DNA, 15 bp, Homo sapiens
tttcagcttcttttg

SEQ ID NO: 1643807 - DNA, 15 bp, Homo sapiens
ttttcagcttctttt

SEQ ID NO: 1643808 - DNA, 15 bp, Homo sapiens
tttttcagcttcttt

SEQ ID NO: 1643809 - DNA, 15 bp, Homo sapiens
atttttcagcttctt

SEQ ID NO: 1643810 - DNA, 15 bp, Homo sapiens
catttttcagcttct

SEQ ID NO: 1643811 - DNA, 15 bp, Homo sapiens
acatttttcagcttc

SEQ ID NO: 1643812 - DNA, 15 bp, Homo sapiens
tacatttttcagctt

SEQ ID NO: 1643813 - DNA, 15 bp, Homo sapiens
gtacatttttcagct

SEQ ID NO: 1643814 - DNA, 15 bp, Homo sapiens
ggtacatttttcagc

SEQ ID NO: 1643815 - DNA, 15 bp, Homo sapiens
gggtacatttttcag

SEQ ID NO: 1643816 - DNA, 15 bp, Homo sapiens
agggtacatttttca

SEQ ID NO: 1643817 - DNA, 15 bp, Homo sapiens
tagggtacatttttc

SEQ ID NO: 1643818 - DNA, 15 bp, Homo sapiens
ctagggtacattttt

SEQ ID NO: 1643819 - DNA, 15 bp, Homo sapiens
gctagggtacatttt

SEQ ID NO: 1643820 - DNA, 15 bp, Homo sapiens
agctagggtacattt

SEQ ID NO: 1643821 - DNA, 15 bp, Homo sapiens
cagctagggtacatt

SEQ ID NO: 1643822 - DNA, 15 bp, Homo sapiens
ccagctagggtacat

SEQ ID NO: 1643823 - DNA, 15 bp, Homo sapiens
cccagctagggtaca

SEQ ID NO: 1643824 - DNA, 15 bp, Homo sapiens
gcccagctagggtac

SEQ ID NO: 1643825 - DNA, 15 bp, Homo sapiens
tgcccagctagggta

SEQ ID NO: 1643826 - DNA, 15 bp, Homo sapiens
ctgcccagctagggt

SEQ ID NO: 1643827 - DNA, 15 bp, Homo sapiens
gctgcccagctaggg

SEQ ID NO: 1643828 - DNA, 15 bp, Homo sapiens
ggctgcccagctagg

SEQ ID NO: 1643829 - DNA, 15 bp, Homo sapiens
tggctgcccagctag

SEQ ID NO: 1643830 - DNA, 15 bp, Homo sapiens
gtggctgcccagcta

SEQ ID NO: 1643831 - DNA, 15 bp, Homo sapiens
tgtggctgcccagct

SEQ ID NO: 1643832 - DNA, 15 bp, Homo sapiens
gtgtggctgcccagc

SEQ ID NO: 1643833 - DNA, 15 bp, Homo sapiens
tgtgtggctgcccag

SEQ ID NO: 1643834 - DNA, 15 bp, Homo sapiens
atgtgtggctgccca

SEQ ID NO: 1643835 - DNA, 15 bp, Homo sapiens
gatgtgtggctgccc

SEQ ID NO: 1643836 - DNA, 15 bp, Homo sapiens
tgatgtgtggctgcc

SEQ ID NO: 1643837 - DNA, 15 bp, Homo sapiens
ttgatgtgtggctgc

SEQ ID NO: 1643838 - DNA, 15 bp, Homo sapiens
cttgatgtgtggctg

SEQ ID NO: 1643839 - DNA, 15 bp, Homo sapiens
gcttgatgtgtggct

SEQ ID NO: 1643840 - DNA, 15 bp, Homo sapiens
tgcttgatgtgtggc

SEQ ID NO: 1643841 - DNA, 15 bp, Homo sapiens
ttgcttgatgtgtgg

SEQ ID NO: 1643842 - DNA, 15 bp, Homo sapiens
cttgcttgatgtgtg

SEQ ID NO: 1643843 - DNA, 15 bp, Homo sapiens
tcttgcttgatgtgt

SEQ ID NO: 1643844 - DNA, 15 bp, Homo sapiens
ttcttgcttgatgtg

SEQ ID NO: 1643845 - DNA, 15 bp, Homo sapiens
attcttgcttgatgt

SEQ ID NO: 1643846 - DNA, 15 bp, Homo sapiens
cattcttgcttgatg

SEQ ID NO: 1643847 - DNA, 15 bp, Homo sapiens
ccattcttgcttgat

SEQ ID NO: 1643848 - DNA, 15 bp, Homo sapiens
cccattcttgcttga

SEQ ID NO: 1643849 - DNA, 15 bp, Homo sapiens
tcccattcttgcttg

SEQ ID NO: 1643850 - DNA, 15 bp, Homo sapiens
ctcccattcttgctt

SEQ ID NO: 1643851 - DNA, 15 bp, Homo sapiens
tctcccattcttgct

SEQ ID NO: 1643852 - DNA, 15 bp, Homo sapiens
ttctcccattcttgc

SEQ ID NO: 1643853 - DNA, 15 bp, Homo sapiens
attctcccattcttg

SEQ ID NO: 1643854 - DNA, 15 bp, Homo sapiens
cattctcccattctt

SEQ ID NO: 1643855 - DNA, 15 bp, Homo sapiens
acattctcccattct

SEQ ID NO: 1643856 - DNA, 15 bp, Homo sapiens
tacattctcccattc

SEQ ID NO: 1643857 - DNA, 15 bp, Homo sapiens
atacattctcccatt

SEQ ID NO: 1643858 - DNA, 15 bp, Homo sapiens
aatacattctcccat

SEQ ID NO: 1643859 - DNA, 15 bp, Homo sapiens
aaatacattctccca

SEQ ID NO: 1643860 - DNA, 15 bp, Homo sapiens
aaaatacattctccc

SEQ ID NO: 1643861 - DNA, 15 bp, Homo sapiens
caaaatacattctcc

SEQ ID NO: 1643862 - DNA, 15 bp, Homo sapiens
ccaaaatacattctc

SEQ ID NO: 1643863 - DNA, 15 bp, Homo sapiens
accaaaatacattct

SEQ ID NO: 1643864 - DNA, 15 bp, Homo sapiens
caccaaaatacattc

SEQ ID NO: 1643865 - DNA, 15 bp, Homo sapiens
ccaccaaaatacatt

SEQ ID NO: 1643866 - DNA, 15 bp, Homo sapiens
cccaccaaaatacat

SEQ ID NO: 1643867 - DNA, 15 bp, Homo sapiens
gcccaccaaaataca

SEQ ID NO: 1643868 - DNA, 15 bp, Homo sapiens
tgcccaccaaaatac

SEQ ID NO: 1643869 - DNA, 15 bp, Homo sapiens
ttgcccaccaaaata

SEQ ID NO: 1643870 - DNA, 15 bp, Homo sapiens
gttgcccaccaaaat

SEQ ID NO: 1643871 - DNA, 15 bp, Homo sapiens
cgttgcccaccaaaa

SEQ ID NO: 1643872 - DNA, 15 bp, Homo sapiens
tcgttgcccaccaaa

SEQ ID NO: 1643873 - DNA, 15 bp, Homo sapiens
ctcgttgcccaccaa

SEQ ID NO: 1643874 - DNA, 15 bp, Homo sapiens
gctcgttgcccacca

SEQ ID NO: 1643875 - DNA, 15 bp, Homo sapiens
tgctcgttgcccacc

SEQ ID NO: 1643876 - DNA, 15 bp, Homo sapiens
atgctcgttgcccac

SEQ ID NO: 1643877 - DNA, 15 bp, Homo sapiens
aatgctcgttgccca

SEQ ID NO: 1643878 - DNA, 15 bp, Homo sapiens
aaatgctcgttgccc

SEQ ID NO: 1643879 - DNA, 15 bp, Homo sapiens
aaaatgctcgttgcc

SEQ ID NO: 1643880 - DNA, 15 bp, Homo sapiens
aaaaatgctcgttgc

SEQ ID NO: 1643881 - DNA, 15 bp, Homo sapiens
caaaaatgctcgttg

SEQ ID NO: 1643882 - DNA, 15 bp, Homo sapiens
acaaaaatgctcgtt

SEQ ID NO: 1643883 - DNA, 15 bp, Homo sapiens
gacaaaaatgctcgt

SEQ ID NO: 1643884 - DNA, 15 bp, Homo sapiens
ggacaaaaatgctcg

SEQ ID NO: 1643885 - DNA, 15 bp, Homo sapiens
gggacaaaaatgctc

SEQ ID NO: 1643886 - DNA, 15 bp, Homo sapiens
agggacaaaaatgct

SEQ ID NO: 1643887 - DNA, 15 bp, Homo sapiens
aagggacaaaaatgc

SEQ ID NO: 1643888 - DNA, 15 bp, Homo sapiens
taagggacaaaaatg

SEQ ID NO: 1643889 - DNA, 15 bp, Homo sapiens
gtaagggacaaaaat

SEQ ID NO: 1643890 - DNA, 15 bp, Homo sapiens
agtaagggacaaaaa

SEQ ID NO: 1643891 - DNA, 15 bp, Homo sapiens
tagtaagggacaaaa

SEQ ID NO: 1643892 - DNA, 15 bp, Homo sapiens
ctagtaagggacaaa

SEQ ID NO: 1643893 - DNA, 15 bp, Homo sapiens
cctagtaagggacaa

SEQ ID NO: 1643894 - DNA, 15 bp, Homo sapiens
gcctagtaagggaca

SEQ ID NO: 1643895 - DNA, 15 bp, Homo sapiens
agcctagtaagggac

SEQ ID NO: 1643896 - DNA, 15 bp, Homo sapiens
aagcctagtaaggga

SEQ ID NO: 1643897 - DNA, 15 bp, Homo sapiens
taagcctagtaaggg

SEQ ID NO: 1643898 - DNA, 15 bp, Homo sapiens
ttaagcctagtaagg

SEQ ID NO: 1643899 - DNA, 15 bp, Homo sapiens
gttaagcctagtaag

SEQ ID NO: 1643900 - DNA, 15 bp, Homo sapiens
tgttaagcctagtaa

SEQ ID NO: 1643901 - DNA, 15 bp, Homo sapiens
ctgttaagcctagta

SEQ ID NO: 1643902 - DNA, 15 bp, Homo sapiens
cctgttaagcctagt

SEQ ID NO: 1643903 - DNA, 15 bp, Homo sapiens
tcctgttaagcctag

SEQ ID NO: 1643904 - DNA, 15 bp, Homo sapiens
ttcctgttaagccta

SEQ ID NO: 1643905 - DNA, 15 bp, Homo sapiens
attcctgttaagcct

SEQ ID NO: 1643906 - DNA, 15 bp, Homo sapiens
gattcctgttaagcc

SEQ ID NO: 1643907 - DNA, 15 bp, Homo sapiens
tgattcctgttaagc

SEQ ID NO: 1643908 - DNA, 15 bp, Homo sapiens
ttgattcctgttaag

SEQ ID NO: 1643909 - DNA, 15 bp, Homo sapiens
attgattcctgttaa

SEQ ID NO: 1643910 - DNA, 15 bp, Homo sapiens
cattgattcctgtta

SEQ ID NO: 1643911 - DNA, 15 bp, Homo sapiens
gcattgattcctgtt

SEQ ID NO: 1643912 - DNA, 15 bp, Homo sapiens
agcattgattcctgt

SEQ ID NO: 1643913 - DNA, 15 bp, Homo sapiens
tagcattgattcctg

SEQ ID NO: 1643914 - DNA, 15 bp, Homo sapiens
atagcattgattcct

SEQ ID NO: 1643915 - DNA, 15 bp, Homo sapiens
catagcattgattcc

SEQ ID NO: 1643916 - DNA, 15 bp, Homo sapiens
tcatagcattgattc

SEQ ID NO: 1643917 - DNA, 15 bp, Homo sapiens
atcatagcattgatt

SEQ ID NO: 1643918 - DNA, 15 bp, Homo sapiens
aatcatagcattgat

SEQ ID NO: 1643919 - DNA, 15 bp, Homo sapiens
taatcatagcattga

SEQ ID NO: 1643920 - DNA, 15 bp, Homo sapiens
ttaatcatagcattg

SEQ ID NO: 1643921 - DNA, 15 bp, Homo sapiens
attaatcatagcatt

SEQ ID NO: 1643922 - DNA, 15 bp, Homo sapiens
aattaatcatagcat

SEQ ID NO: 1643923 - DNA, 15 bp, Homo sapiens
taattaatcatagca

SEQ ID NO: 1643924 - DNA, 15 bp, Homo sapiens
ttaattaatcatagc

SEQ ID NO: 1643925 - DNA, 15 bp, Homo sapiens
attaattaatcatag

SEQ ID NO: 1643926 - DNA, 15 bp, Homo sapiens
cattaattaatcata

SEQ ID NO: 1643927 - DNA, 15 bp, Homo sapiens
tcattaattaatcat

SEQ ID NO: 1643928 - DNA, 15 bp, Homo sapiens
ttcattaattaatca

SEQ ID NO: 1643929 - DNA, 15 bp, Homo sapiens
tttcattaattaatc

SEQ ID NO: 1643930 - DNA, 15 bp, Homo sapiens
atttcattaattaat

SEQ ID NO: 1643931 - DNA, 15 bp, Homo sapiens
aatttcattaattaa

SEQ ID NO: 1643932 - DNA, 15 bp, Homo sapiens
aaatttcattaatta

SEQ ID NO: 1643933 - DNA, 15 bp, Homo sapiens
aaaatttcattaatt

SEQ ID NO: 1643934 - DNA, 15 bp, Homo sapiens
gaaaatttcattaat

SEQ ID NO: 1643935 - DNA, 15 bp, Homo sapiens
ggaaaatttcattaa

SEQ ID NO: 1643936 - DNA, 15 bp, Homo sapiens
tggaaaatttcatta

SEQ ID NO: 1643937 - DNA, 15 bp, Homo sapiens
gtggaaaatttcatt

SEQ ID NO: 1643938 - DNA, 15 bp, Homo sapiens
cgtggaaaatttcat

SEQ ID NO: 1643939 - DNA, 15 bp, Homo sapiens
tcgtggaaaatttca

SEQ ID NO: 1643940 - DNA, 15 bp, Homo sapiens
ctcgtggaaaatttc

SEQ ID NO: 1643941 - DNA, 15 bp, Homo sapiens
actcgtggaaaattt

SEQ ID NO: 1643942 - DNA, 15 bp, Homo sapiens
aactcgtggaaaatt

SEQ ID NO: 1643943 - DNA, 15 bp, Homo sapiens
caactcgtggaaaat

SEQ ID NO: 1643944 - DNA, 15 bp, Homo sapiens
ccaactcgtggaaaa

SEQ ID NO: 1643945 - DNA, 15 bp, Homo sapiens
tccaactcgtggaaa

SEQ ID NO: 1643946 - DNA, 15 bp, Homo sapiens
ttccaactcgtggaa

SEQ ID NO: 1643947 - DNA, 15 bp, Homo sapiens
tttccaactcgtgga

SEQ ID NO: 1643948 - DNA, 15 bp, Homo sapiens
ttttccaactcgtgg

SEQ ID NO: 1643949 - DNA, 15 bp, Homo sapiens
tttttccaactcgtg

SEQ ID NO: 1643950 - DNA, 15 bp, Homo sapiens
ttttttccaactcgt

SEQ ID NO: 1643951 - DNA, 15 bp, Homo sapiens
tttttttccaactcg

SEQ ID NO: 1643952 - DNA, 15 bp, Homo sapiens
gtttttttccaactc

SEQ ID NO: 1643953 - DNA, 15 bp, Homo sapiens
agtttttttccaact

SEQ ID NO: 1643954 - DNA, 15 bp, Homo sapiens
cagtttttttccaac

SEQ ID NO: 1643955 - DNA, 15 bp, Homo sapiens
acagtttttttccaa

SEQ ID NO: 1643956 - DNA, 15 bp, Homo sapiens
cacagtttttttcca

SEQ ID NO: 1643957 - DNA, 15 bp, Homo sapiens
ccacagtttttttcc

SEQ ID NO: 1643958 - DNA, 15 bp, Homo sapiens
gccacagtttttttc

SEQ ID NO: 1643959 - DNA, 15 bp, Homo sapiens
tgccacagttttttt

SEQ ID NO: 1643960 - DNA, 15 bp, Homo sapiens
atgccacagtttttt

SEQ ID NO: 1643961 - DNA, 15 bp, Homo sapiens
gatgccacagttttt

SEQ ID NO: 1643962 - DNA, 15 bp, Homo sapiens
ggatgccacagtttt

SEQ ID NO: 1643963 - DNA, 15 bp, Homo sapiens
tggatgccacagttt

SEQ ID NO: 1643964 - DNA, 15 bp, Homo sapiens
gtggatgccacagtt

SEQ ID NO: 1643965 - DNA, 15 bp, Homo sapiens
ggtggatgccacagt

SEQ ID NO: 1643966 - DNA, 15 bp, Homo sapiens
gggtggatgccacag

SEQ ID NO: 1643967 - DNA, 15 bp, Homo sapiens
tgggtggatgccaca

SEQ ID NO: 1643968 - DNA, 15 bp, Homo sapiens
atgggtggatgccac

SEQ ID NO: 1643969 - DNA, 15 bp, Homo sapiens
tatgggtggatgcca

SEQ ID NO: 1643970 - DNA, 15 bp, Homo sapiens
atatgggtggatgcc

SEQ ID NO: 1643971 - DNA, 15 bp, Homo sapiens
aatatgggtggatgc

SEQ ID NO: 1643972 - DNA, 15 bp, Homo sapiens
taatatgggtggatg

SEQ ID NO: 1643973 - DNA, 15 bp, Homo sapiens
ataatatgggtggat

SEQ ID NO: 1643974 - DNA, 15 bp, Homo sapiens
cataatatgggtgga

SEQ ID NO: 1643975 - DNA, 15 bp, Homo sapiens
ccataatatgggtgg

SEQ ID NO: 1643976 - DNA, 15 bp, Homo sapiens
accataatatgggtg

SEQ ID NO: 1643977 - DNA, 15 bp, Homo sapiens
taccataatatgggt

SEQ ID NO: 1643978 - DNA, 15 bp, Homo sapiens
ataccataatatggg

SEQ ID NO: 1643979 - DNA, 15 bp, Homo sapiens
aataccataatatgg

SEQ ID NO: 1643980 - DNA, 15 bp, Homo sapiens
taataccataatatg

SEQ ID NO: 1643981 - DNA, 15 bp, Homo sapiens
ctaataccataatat

SEQ ID NO: 1643982 - DNA, 15 bp, Homo sapiens
gctaataccataata

SEQ ID NO: 1643983 - DNA, 15 bp, Homo sapiens
agctaataccataat

SEQ ID NO: 1643984 - DNA, 15 bp, Homo sapiens
cagctaataccataa

SEQ ID NO: 1643985 - DNA, 15 bp, Homo sapiens
tcagctaataccata

SEQ ID NO: 1643986 - DNA, 15 bp, Homo sapiens
atcagctaataccat

SEQ ID NO: 1643987 - DNA, 15 bp, Homo sapiens
gatcagctaatacca

SEQ ID NO: 1643988 - DNA, 15 bp, Homo sapiens
agatcagctaatacc

SEQ ID NO: 1643989 - DNA, 15 bp, Homo sapiens
aagatcagctaatac

SEQ ID NO: 1643990 - DNA, 15 bp, Homo sapiens
caagatcagctaata

SEQ ID NO: 1643991 - DNA, 15 bp, Homo sapiens
gcaagatcagctaat

SEQ ID NO: 1643992 - DNA, 15 bp, Homo sapiens
ggcaagatcagctaa

SEQ ID NO: 1643993 - DNA, 15 bp, Homo sapiens
aggcaagatcagcta

SEQ ID NO: 1643994 - DNA, 15 bp, Homo sapiens
aaggcaagatcagct

SEQ ID NO: 1643995 - DNA, 15 bp, Homo sapiens
taaggcaagatcagc

SEQ ID NO: 1643996 - DNA, 15 bp, Homo sapiens
ttaaggcaagatcag

SEQ ID NO: 1643997 - DNA, 15 bp, Homo sapiens
cttaaggcaagatca

SEQ ID NO: 1643998 - DNA, 15 bp, Homo sapiens
acttaaggcaagatc

SEQ ID NO: 1643999 - DNA, 15 bp, Homo sapiens
cacttaaggcaagat

SEQ ID NO: 1644000 - DNA, 15 bp, Homo sapiens
acacttaaggcaaga

SEQ ID NO: 1644001 - DNA, 15 bp, Homo sapiens
cacacttaaggcaag

SEQ ID NO: 1644002 - DNA, 15 bp, Homo sapiens
tcacacttaaggcaa

SEQ ID NO: 1644003 - DNA, 15 bp, Homo sapiens
ttcacacttaaggca

SEQ ID NO: 1644004 - DNA, 15 bp, Homo sapiens
tttcacacttaaggc

SEQ ID NO: 1644005 - DNA, 15 bp, Homo sapiens
atttcacacttaagg

SEQ ID NO: 1644006 - DNA, 15 bp, Homo sapiens
catttcacacttaag

SEQ ID NO: 1644007 - DNA, 15 bp, Homo sapiens
ccatttcacacttaa

SEQ ID NO: 1644008 - DNA, 15 bp, Homo sapiens
tccatttcacactta

SEQ ID NO: 1644009 - DNA, 15 bp, Homo sapiens
ttccatttcacactt

SEQ ID NO: 1644010 - DNA, 15 bp, Homo sapiens
cttccatttcacact

SEQ ID NO: 1644011 - DNA, 15 bp, Homo sapiens
acttccatttcacac

SEQ ID NO: 1644012 - DNA, 15 bp, Homo sapiens
gacttccatttcaca

SEQ ID NO: 1644013 - DNA, 15 bp, Homo sapiens
agacttccatttcac

SEQ ID NO: 1644014 - DNA, 15 bp, Homo sapiens
aagacttccatttca

SEQ ID NO: 1644015 - DNA, 15 bp, Homo sapiens
caagacttccatttc

SEQ ID NO: 1644016 - DNA, 15 bp, Homo sapiens
acaagacttccattt

SEQ ID NO: 1644017 - DNA, 15 bp, Homo sapiens
aacaagacttccatt

SEQ ID NO: 1644018 - DNA, 15 bp, Homo sapiens
aaacaagacttccat

SEQ ID NO: 1644019 - DNA, 15 bp, Homo sapiens
aaaacaagacttcca

SEQ ID NO: 1644020 - DNA, 15 bp, Homo sapiens
gaaaacaagacttcc

SEQ ID NO: 1644021 - DNA, 15 bp, Homo sapiens
agaaaacaagacttc

SEQ ID NO: 1644022 - DNA, 15 bp, Homo sapiens
aagaaaacaagactt

SEQ ID NO: 1644023 - DNA, 15 bp, Homo sapiens
aaagaaaacaagact

SEQ ID NO: 1644024 - DNA, 15 bp, Homo sapiens
gaaagaaaacaagac

SEQ ID NO: 1644025 - DNA, 15 bp, Homo sapiens
aggaaagaaaacaag

SEQ ID NO: 1644026 - DNA, 15 bp, Homo sapiens
taggaaagaaaacaa

SEQ ID NO: 1644027 - DNA, 15 bp, Homo sapiens
ctaggaaagaaaaca

SEQ ID NO: 1644028 - DNA, 15 bp, Homo sapiens
tctaggaaagaaaac

SEQ ID NO: 1644029 - DNA, 15 bp, Homo sapiens
ctctaggaaagaaaa

SEQ ID NO: 1644030 - DNA, 15 bp, Homo sapiens
cctctaggaaagaaa

SEQ ID NO: 1644031 - DNA, 15 bp, Homo sapiens
ccctctaggaaagaa

SEQ ID NO: 1644032 - DNA, 15 bp, Homo sapiens
accctctaggaaaga

SEQ ID NO: 1644033 - DNA, 15 bp, Homo sapiens
gaccctctaggaaag

SEQ ID NO: 1644034 - DNA, 15 bp, Homo sapiens
ggaccctctaggaaa

SEQ ID NO: 1644035 - DNA, 15 bp, Homo sapiens
aggaccctctaggaa

SEQ ID NO: 1644036 - DNA, 15 bp, Homo sapiens
caggaccctctagga

SEQ ID NO: 1644037 - DNA, 15 bp, Homo sapiens
tcaggaccctctagg

SEQ ID NO: 1644038 - DNA, 15 bp, Homo sapiens
ttcaggaccctctag

SEQ ID NO: 1644039 - DNA, 15 bp, Homo sapiens
cttcaggaccctcta

SEQ ID NO: 1644040 - DNA, 15 bp, Homo sapiens
acttcaggaccctct

SEQ ID NO: 1644041 - DNA, 15 bp, Homo sapiens
aacttcaggaccctc

SEQ ID NO: 1644042 - DNA, 15 bp, Homo sapiens
aaacttcaggaccct

SEQ ID NO: 1644043 - DNA, 15 bp, Homo sapiens
taaacttcaggaccc

SEQ ID NO: 1644044 - DNA, 15 bp, Homo sapiens
ttaaacttcaggacc

SEQ ID NO: 1644045 - DNA, 15 bp, Homo sapiens
tttaaacttcaggac

SEQ ID NO: 1644046 - DNA, 15 bp, Homo sapiens
atttaaacttcagga

SEQ ID NO: 1644047 - DNA, 15 bp, Homo sapiens
tatttaaacttcagg

SEQ ID NO: 1644048 - DNA, 15 bp, Homo sapiens
atatttaaacttcag

SEQ ID NO: 1644049 - DNA, 15 bp, Homo sapiens
tatatttaaacttca

SEQ ID NO: 1644050 - DNA, 15 bp, Homo sapiens
ttatatttaaacttc

SEQ ID NO: 1644051 - DNA, 15 bp, Homo sapiens
attatatttaaactt

SEQ ID NO: 1644052 - DNA, 15 bp, Homo sapiens
aattatatttaaact

SEQ ID NO: 1644053 - DNA, 15 bp, Homo sapiens
gaattatatttaaac

SEQ ID NO: 1644054 - DNA, 15 bp, Homo sapiens
ggaattatatttaaa

SEQ ID NO: 1644055 - DNA, 15 bp, Homo sapiens
tggaattatatttaa

SEQ ID NO: 1644056 - DNA, 15 bp, Homo sapiens
ttggaattatattta

SEQ ID NO: 1644057 - DNA, 15 bp, Homo sapiens
tttggaattatattt

SEQ ID NO: 1644058 - DNA, 15 bp, Homo sapiens
ttttggaattatatt

SEQ ID NO: 1644059 - DNA, 15 bp, Homo sapiens
tttttggaattatat

SEQ ID NO: 1644060 - DNA, 15 bp, Homo sapiens
ttttttggaattata

SEQ ID NO: 1644061 - DNA, 15 bp, Homo sapiens
attttttggaattat

SEQ ID NO: 1644062 - DNA, 15 bp, Homo sapiens
aattttttggaatta

SEQ ID NO: 1644063 - DNA, 15 bp, Homo sapiens
aaattttttggaatt

SEQ ID NO: 1644064 - DNA, 15 bp, Homo sapiens
caaattttttggaat

SEQ ID NO: 1644065 - DNA, 15 bp, Homo sapiens
tcaaattttttggaa

SEQ ID NO: 1644066 - DNA, 15 bp, Homo sapiens
gtcaaattttttgga

SEQ ID NO: 1644067 - DNA, 15 bp, Homo sapiens
tgtcaaattttttgg

SEQ ID NO: 1644068 - DNA, 15 bp, Homo sapiens
ctgtcaaattttttg

SEQ ID NO: 1644069 - DNA, 15 bp, Homo sapiens
cctgtcaaatttttt

SEQ ID NO: 1644070 - DNA, 15 bp, Homo sapiens
gcctgtcaaattttt

SEQ ID NO: 1644071 - DNA, 15 bp, Homo sapiens
tgcctgtcaaatttt

SEQ ID NO: 1644072 - DNA, 15 bp, Homo sapiens
atgcctgtcaaattt

SEQ ID NO: 1644073 - DNA, 15 bp, Homo sapiens
aatgcctgtcaaatt

SEQ ID NO: 1644074 - DNA, 15 bp, Homo sapiens
aaatgcctgtcaaat

SEQ ID NO: 1644075 - DNA, 15 bp, Homo sapiens
aaaatgcctgtcaaa

SEQ ID NO: 1644076 - DNA, 15 bp, Homo sapiens
gaaaatgcctgtcaa

SEQ ID NO: 1644077 - DNA, 15 bp, Homo sapiens
ggaaaatgcctgtca

SEQ ID NO: 1644078 - DNA, 15 bp, Homo sapiens
tggaaaatgcctgtc

SEQ ID NO: 1644079 - DNA, 15 bp, Homo sapiens
gtggaaaatgcctgt

SEQ ID NO: 1644080 - DNA, 15 bp, Homo sapiens
agtggaaaatgcctg

SEQ ID NO: 1644081 - DNA, 15 bp, Homo sapiens
tagtggaaaatgcct

SEQ ID NO: 1644082 - DNA, 15 bp, Homo sapiens
atagtggaaaatgcc

SEQ ID NO: 1644083 - DNA, 15 bp, Homo sapiens
catagtggaaaatgc

SEQ ID NO: 1644084 - DNA, 15 bp, Homo sapiens
tcatagtggaaaatg

SEQ ID NO: 1644085 - DNA, 15 bp, Homo sapiens
ctcatagtggaaaat

SEQ ID NO: 1644086 - DNA, 15 bp, Homo sapiens
tctcatagtggaaaa

SEQ ID NO: 1644087 - DNA, 15 bp, Homo sapiens
ttctcatagtggaaa

SEQ ID NO: 1644088 - DNA, 15 bp, Homo sapiens
tttctcatagtggaa

SEQ ID NO: 1644089 - DNA, 15 bp, Homo sapiens
ctttctcatagtgga

SEQ ID NO: 1644090 - DNA, 15 bp, Homo sapiens
cctttctcatagtgg

SEQ ID NO: 1644091 - DNA, 15 bp, Homo sapiens
acctttctcatagtg

SEQ ID NO: 1644092 - DNA, 15 bp, Homo sapiens
tacctttctcatagt

SEQ ID NO: 1644093 - DNA, 15 bp, Homo sapiens
gtacctttctcatag

SEQ ID NO: 1644094 - DNA, 15 bp, Homo sapiens
agtacctttctcata

SEQ ID NO: 1644095 - DNA, 15 bp, Homo sapiens
aagtacctttctcat

SEQ ID NO: 1644096 - DNA, 15 bp, Homo sapiens
aaagtacctttctca

SEQ ID NO: 1644097 - DNA, 15 bp, Homo sapiens
aaaagtacctttctc

SEQ ID NO: 1644098 - DNA, 15 bp, Homo sapiens
caaaagtacctttct

SEQ ID NO: 1644099 - DNA, 15 bp, Homo sapiens
acaaaagtacctttc

SEQ ID NO: 1644100 - DNA, 15 bp, Homo sapiens
aacaaaagtaccttt

SEQ ID NO: 1644101 - DNA, 15 bp, Homo sapiens
taacaaaagtacctt

SEQ ID NO: 1644102 - DNA, 15 bp, Homo sapiens
ctaacaaaagtacct

SEQ ID NO: 1644103 - DNA, 15 bp, Homo sapiens
cctaacaaaagtacc

SEQ ID NO: 1644104 - DNA, 15 bp, Homo sapiens
acctaacaaaagtac

SEQ ID NO: 1644105 - DNA, 15 bp, Homo sapiens
tacctaacaaaagta

SEQ ID NO: 1644106 - DNA, 15 bp, Homo sapiens
gtacctaacaaaagt

SEQ ID NO: 1644107 - DNA, 15 bp, Homo sapiens
tgtacctaacaaaag

SEQ ID NO: 1644108 - DNA, 15 bp, Homo sapiens
ttgtacctaacaaaa

SEQ ID NO: 1644109 - DNA, 15 bp, Homo sapiens
tttgtacctaacaaa

SEQ ID NO: 1644110 - DNA, 15 bp, Homo sapiens
ttttgtacctaacaa

SEQ ID NO: 1644111 - DNA, 15 bp, Homo sapiens
tttttgtacctaaca

SEQ ID NO: 1644112 - DNA, 15 bp, Homo sapiens
atttttgtacctaac

SEQ ID NO: 1644113 - DNA, 15 bp, Homo sapiens
tatttttgtacctaa

SEQ ID NO: 1644114 - DNA, 15 bp, Homo sapiens
ttatttttgtaccta

SEQ ID NO: 1644115 - DNA, 15 bp, Homo sapiens
tttatttttgtacct

SEQ ID NO: 1644116 - DNA, 15 bp, Homo sapiens
gtttatttttgtacc

SEQ ID NO: 1644117 - DNA, 15 bp, Homo sapiens
agtttatttttgtac

SEQ ID NO: 1644118 - DNA, 15 bp, Homo sapiens
aagtttatttttgta

SEQ ID NO: 1644119 - DNA, 15 bp, Homo sapiens
caagtttatttttgt

SEQ ID NO: 1644120 - DNA, 15 bp, Homo sapiens
acaagtttatttttg

SEQ ID NO: 1644121 - DNA, 15 bp, Homo sapiens
gacaagtttattttt

SEQ ID NO: 1644122 - DNA, 15 bp, Homo sapiens
ggacaagtttatttt

SEQ ID NO: 1644123 - DNA, 15 bp, Homo sapiens
gggacaagtttattt

SEQ ID NO: 1644124 - DNA, 15 bp, Homo sapiens
agggacaagtttatt

SEQ ID NO: 1644125 - DNA, 15 bp, Homo sapiens
cagggacaagtttat

SEQ ID NO: 1644126 - DNA, 15 bp, Homo sapiens
gcagggacaagttta

SEQ ID NO: 1644127 - DNA, 15 bp, Homo sapiens
agcagggacaagttt

SEQ ID NO: 1644128 - DNA, 15 bp, Homo sapiens
aagcagggacaagtt

SEQ ID NO: 1644129 - DNA, 15 bp, Homo sapiens
aaagcagggacaagt

SEQ ID NO: 1644130 - DNA, 15 bp, Homo sapiens
taaagcagggacaag

SEQ ID NO: 1644131 - DNA, 15 bp, Homo sapiens
ataaagcagggacaa

SEQ ID NO: 1644132 - DNA, 15 bp, Homo sapiens
gataaagcagggaca

SEQ ID NO: 1644133 - DNA, 15 bp, Homo sapiens
tgataaagcagggac

SEQ ID NO: 1644134 - DNA, 15 bp, Homo sapiens
gtgataaagcaggga

SEQ ID NO: 1644135 - DNA, 15 bp, Homo sapiens
agtgataaagcaggg

SEQ ID NO: 1644136 - DNA, 15 bp, Homo sapiens
aagtgataaagcagg

SEQ ID NO: 1644137 - DNA, 15 bp, Homo sapiens
taagtgataaagcag

SEQ ID NO: 1644138 - DNA, 15 bp, Homo sapiens
ttaagtgataaagca

SEQ ID NO: 1644139 - DNA, 15 bp, Homo sapiens
attaagtgataaagc

SEQ ID NO: 1644140 - DNA, 15 bp, Homo sapiens
cattaagtgataaag

SEQ ID NO: 1644141 - DNA, 15 bp, Homo sapiens
acattaagtgataaa

SEQ ID NO: 1644142 - DNA, 15 bp, Homo sapiens
tacattaagtgataa

SEQ ID NO: 1644143 - DNA, 15 bp, Homo sapiens
ctacattaagtgata

SEQ ID NO: 1644144 - DNA, 15 bp, Homo sapiens
tctacattaagtgat

SEQ ID NO: 1644145 - DNA, 15 bp, Homo sapiens
ttctacattaagtga

SEQ ID NO: 1644146 - DNA, 15 bp, Homo sapiens
attctacattaagtg

SEQ ID NO: 1644147 - DNA, 15 bp, Homo sapiens
gattctacattaagt

SEQ ID NO: 1644148 - DNA, 15 bp, Homo sapiens
tgattctacattaag

SEQ ID NO: 1644149 - DNA, 15 bp, Homo sapiens
ttgattctacattaa

SEQ ID NO: 1644150 - DNA, 15 bp, Homo sapiens
tttgattctacatta

SEQ ID NO: 1644151 - DNA, 15 bp, Homo sapiens
ctttgattctacatt

SEQ ID NO: 1644152 - DNA, 15 bp, Homo sapiens
tctttgattctacat

SEQ ID NO: 1644153 - DNA, 15 bp, Homo sapiens
atctttgattctaca

SEQ ID NO: 1644154 - DNA, 15 bp, Homo sapiens
aatctttgattctac

SEQ ID NO: 1644155 - DNA, 15 bp, Homo sapiens
gaatctttgattcta

SEQ ID NO: 1644156 - DNA, 15 bp, Homo sapiens
cgaatctttgattct

SEQ ID NO: 1644157 - DNA, 15 bp, Homo sapiens
acgaatctttgattc

SEQ ID NO: 1644158 - DNA, 15 bp, Homo sapiens
gacgaatctttgatt

SEQ ID NO: 1644159 - DNA, 15 bp, Homo sapiens
agacgaatctttgat

SEQ ID NO: 1644160 - DNA, 15 bp, Homo sapiens
gagacgaatctttga

SEQ ID NO: 1644161 - DNA, 15 bp, Homo sapiens
ggagacgaatctttg

SEQ ID NO: 1644162 - DNA, 15 bp, Homo sapiens
tggagacgaatcttt

SEQ ID NO: 1644163 - DNA, 15 bp, Homo sapiens
ctggagacgaatctt

SEQ ID NO: 1644164 - DNA, 15 bp, Homo sapiens
tctggagacgaatct

SEQ ID NO: 1644165 - DNA, 15 bp, Homo sapiens
atctggagacgaatc

SEQ ID NO: 1644166 - DNA, 15 bp, Homo sapiens
tatctggagacgaat

SEQ ID NO: 1644167 - DNA, 15 bp, Homo sapiens
ttatctggagacgaa

SEQ ID NO: 1644168 - DNA, 15 bp, Homo sapiens
gttatctggagacga

SEQ ID NO: 1644169 - DNA, 15 bp, Homo sapiens
tgttatctggagacg

SEQ ID NO: 1644170 - DNA, 15 bp, Homo sapiens
ctgttatctggagac

SEQ ID NO: 1644171 - DNA, 15 bp, Homo sapiens
tctgttatctggaga

SEQ ID NO: 1644172 - DNA, 15 bp, Homo sapiens
ttctgttatctggag

SEQ ID NO: 1644173 - DNA, 15 bp, Homo sapiens
attctgttatctgga

SEQ ID NO: 1644174 - DNA, 15 bp, Homo sapiens
aattctgttatctgg

SEQ ID NO: 1644175 - DNA, 15 bp, Homo sapiens
aaattctgttatctg

SEQ ID NO: 1644176 - DNA, 15 bp, Homo sapiens
gaaattctgttatct

SEQ ID NO: 1644177 - DNA, 15 bp, Homo sapiens
tgaaattctgttatc

SEQ ID NO: 1644178 - DNA, 15 bp, Homo sapiens
ctgaaattctgttat

SEQ ID NO: 1644179 - DNA, 15 bp, Homo sapiens
tctgaaattctgtta

SEQ ID NO: 1644180 - DNA, 15 bp, Homo sapiens
gtctgaaattctgtt

SEQ ID NO: 1644181 - DNA, 15 bp, Homo sapiens
tgtctgaaattctgt

SEQ ID NO: 1644182 - DNA, 15 bp, Homo sapiens
atgtctgaaattctg

SEQ ID NO: 1644183 - DNA, 15 bp, Homo sapiens
gatgtctgaaattct

SEQ ID NO: 1644184 - DNA, 15 bp, Homo sapiens
tgatgtctgaaattc

SEQ ID NO: 1644185 - DNA, 15 bp, Homo sapiens
ctgatgtctgaaatt

SEQ ID NO: 1644186 - DNA, 15 bp, Homo sapiens
gctgatgtctgaaat

SEQ ID NO: 1644187 - DNA, 15 bp, Homo sapiens
agctgatgtctgaaa

SEQ ID NO: 1644188 - DNA, 15 bp, Homo sapiens
tagctgatgtctgaa

SEQ ID NO: 1644189 - DNA, 15 bp, Homo sapiens
gtagctgatgtctga

SEQ ID NO: 1644190 - DNA, 15 bp, Homo sapiens
ggtagctgatgtctg

SEQ ID NO: 1644191 - DNA, 15 bp, Homo sapiens
tggtagctgatgtct

SEQ ID NO: 1644192 - DNA, 15 bp, Homo sapiens
ttggtagctgatgtc

SEQ ID NO: 1644193 - DNA, 15 bp, Homo sapiens
cttggtagctgatgt

SEQ ID NO: 1644194 - DNA, 15 bp, Homo sapiens
ccttggtagctgatg

SEQ ID NO: 1644195 - DNA, 15 bp, Homo sapiens
tccttggtagctgat

SEQ ID NO: 1644196 - DNA, 15 bp, Homo sapiens
ctccttggtagctga

SEQ ID NO: 1644197 - DNA, 15 bp, Homo sapiens
cctccttggtagctg

SEQ ID NO: 1644198 - DNA, 15 bp, Homo sapiens
ccctccttggtagct

SEQ ID NO: 1644199 - DNA, 15 bp, Homo sapiens
tccctccttggtagc

SEQ ID NO: 1644200 - DNA, 15 bp, Homo sapiens
ttccctccttggtag

SEQ ID NO: 1644201 - DNA, 15 bp, Homo sapiens
tttccctccttggta

SEQ ID NO: 1644202 - DNA, 15 bp, Homo sapiens
ttttccctccttggt

SEQ ID NO: 1644203 - DNA, 15 bp, Homo sapiens
attttccctccttgg

SEQ ID NO: 1644204 - DNA, 15 bp, Homo sapiens
tattttccctccttg

SEQ ID NO: 1644205 - DNA, 15 bp, Homo sapiens
atattttccctcctt

SEQ ID NO: 1644206 - DNA, 15 bp, Homo sapiens
tatattttccctcct

SEQ ID NO: 1644207 - DNA, 15 bp, Homo sapiens
ctatattttccctcc

SEQ ID NO: 1644208 - DNA, 15 bp, Homo sapiens
cctatattttccctc

SEQ ID NO: 1644209 - DNA, 15 bp, Homo sapiens
gcctatattttccct

SEQ ID NO: 1644210 - DNA, 15 bp, Homo sapiens
agcctatattttccc

SEQ ID NO: 1644211 - DNA, 15 bp, Homo sapiens
aagcctatattttcc

SEQ ID NO: 1644212 - DNA, 15 bp, Homo sapiens
caagcctatattttc

SEQ ID NO: 1644213 - DNA, 15 bp, Homo sapiens
ccaagcctatatttt

SEQ ID NO: 1644214 - DNA, 15 bp, Homo sapiens
cccaagcctatattt

SEQ ID NO: 1644215 - DNA, 15 bp, Homo sapiens
tcccaagcctatatt

SEQ ID NO: 1644216 - DNA, 15 bp, Homo sapiens
ttcccaagcctatat

SEQ ID NO: 1644217 - DNA, 15 bp, Homo sapiens
tttcccaagcctata

SEQ ID NO: 1644218 - DNA, 15 bp, Homo sapiens
ctttcccaagcctat

SEQ ID NO: 1644219 - DNA, 15 bp, Homo sapiens
tctttcccaagccta

SEQ ID NO: 1644220 - DNA, 15 bp, Homo sapiens
ttctttcccaagcct

SEQ ID NO: 1644221 - DNA, 15 bp, Homo sapiens
cttctttcccaagcc

SEQ ID NO: 1644222 - DNA, 15 bp, Homo sapiens
ccttctttcccaagc

SEQ ID NO: 1644223 - DNA, 15 bp, Homo sapiens
gccttctttcccaag

SEQ ID NO: 1644224 - DNA, 15 bp, Homo sapiens
ggccttctttcccaa

SEQ ID NO: 1644225 - DNA, 15 bp, Homo sapiens
aggccttctttccca

SEQ ID NO: 1644226 - DNA, 15 bp, Homo sapiens
aaggccttctttccc

SEQ ID NO: 1644227 - DNA, 15 bp, Homo sapiens
gaaggccttctttcc

SEQ ID NO: 1644228 - DNA, 15 bp, Homo sapiens
agaaggccttctttc

SEQ ID NO: 1644229 - DNA, 15 bp, Homo sapiens
aagaaggccttcttt

SEQ ID NO: 1644230 - DNA, 15 bp, Homo sapiens
caagaaggccttctt

SEQ ID NO: 1644231 - DNA, 15 bp, Homo sapiens
acaagaaggccttct

SEQ ID NO: 1644232 - DNA, 15 bp, Homo sapiens
tacaagaaggccttc

SEQ ID NO: 1644233 - DNA, 15 bp, Homo sapiens
atacaagaaggcctt

SEQ ID NO: 1644234 - DNA, 15 bp, Homo sapiens
catacaagaaggcct

SEQ ID NO: 1644235 - DNA, 15 bp, Homo sapiens
tcatacaagaaggcc

SEQ ID NO: 1644236 - DNA, 15 bp, Homo sapiens
ttcatacaagaaggc

SEQ ID NO: 1644237 - DNA, 15 bp, Homo sapiens
tttcatacaagaagg

SEQ ID NO: 1644238 - DNA, 15 bp, Homo sapiens
atttcatacaagaag

SEQ ID NO: 1644239 - DNA, 15 bp, Homo sapiens
gatttcatacaagaa

SEQ ID NO: 1644240 - DNA, 15 bp, Homo sapiens
tgatttcatacaaga

SEQ ID NO: 1644241 - DNA, 15 bp, Homo sapiens
gtgatttcatacaag

SEQ ID NO: 1644242 - DNA, 15 bp, Homo sapiens
tgtgatttcatacaa

SEQ ID NO: 1644243 - DNA, 15 bp, Homo sapiens
gtgtgatttcataca

SEQ ID NO: 1644244 - DNA, 15 bp, Homo sapiens
ggtgtgatttcatac

SEQ ID NO: 1644245 - DNA, 15 bp, Homo sapiens
tggtgtgatttcata

SEQ ID NO: 1644246 - DNA, 15 bp, Homo sapiens
gtggtgtgatttcat

SEQ ID NO: 1644247 - DNA, 15 bp, Homo sapiens
tgtggtgtgatttca

SEQ ID NO: 1644248 - DNA, 15 bp, Homo sapiens
gtgtggtgtgatttc

SEQ ID NO: 1644249 - DNA, 15 bp, Homo sapiens
tgtgtggtgtgattt

SEQ ID NO: 1644250 - DNA, 15 bp, Homo sapiens
ctgtgtggtgtgatt

SEQ ID NO: 1644251 - DNA, 15 bp, Homo sapiens
cctgtgtggtgtgat

SEQ ID NO: 1644252 - DNA, 15 bp, Homo sapiens
gcctgtgtggtgtga

SEQ ID NO: 1644253 - DNA, 15 bp, Homo sapiens
tgcctgtgtggtgtg

SEQ ID NO: 1644254 - DNA, 15 bp, Homo sapiens
gtgcctgtgtggtgt

SEQ ID NO: 1644255 - DNA, 15 bp, Homo sapiens
agtgcctgtgtggtg

SEQ ID NO: 1644256 - DNA, 15 bp, Homo sapiens
tagtgcctgtgtggt

SEQ ID NO: 1644257 - DNA, 15 bp, Homo sapiens
ctagtgcctgtgtgg

SEQ ID NO: 1644258 - DNA, 15 bp, Homo sapiens
tctagtgcctgtgtg

SEQ ID NO: 1644259 - DNA, 15 bp, Homo sapiens
gtctagtgcctgtgt

SEQ ID NO: 1644260 - DNA, 15 bp, Homo sapiens
tgtctagtgcctgtg

SEQ ID NO: 1644261 - DNA, 15 bp, Homo sapiens
ctgtctagtgcctgt

SEQ ID NO: 1644262 - DNA, 15 bp, Homo sapiens
gctgtctagtgcctg

SEQ ID NO: 1644263 - DNA, 15 bp, Homo sapiens
agctgtctagtgcct

SEQ ID NO: 1644264 - DNA, 15 bp, Homo sapiens
gagctgtctagtgcc

SEQ ID NO: 1644265 - DNA, 15 bp, Homo sapiens
agagctgtctagtgc

SEQ ID NO: 1644266 - DNA, 15 bp, Homo sapiens
tagagctgtctagtg

SEQ ID NO: 1644267 - DNA, 15 bp, Homo sapiens
gtagagctgtctagt

SEQ ID NO: 1644268 - DNA, 15 bp, Homo sapiens
agtagagctgtctag

SEQ ID NO: 1644269 - DNA, 15 bp, Homo sapiens
aagtagagctgtcta

SEQ ID NO: 1644270 - DNA, 15 bp, Homo sapiens
taagtagagctgtct

SEQ ID NO: 1644271 - DNA, 15 bp, Homo sapiens
ataagtagagctgtc

SEQ ID NO: 1644272 - DNA, 15 bp, Homo sapiens
tataagtagagctgt

SEQ ID NO: 1644273 - DNA, 15 bp, Homo sapiens
atataagtagagctg

SEQ ID NO: 1644274 - DNA, 15 bp, Homo sapiens
tatataagtagagct

SEQ ID NO: 1644275 - DNA, 15 bp, Homo sapiens
ttatataagtagagc

SEQ ID NO: 1644276 - DNA, 15 bp, Homo sapiens
tttatataagtagag

SEQ ID NO: 1644277 - DNA, 15 bp, Homo sapiens
ctttatataagtaga

SEQ ID NO: 1644278 - DNA, 15 bp, Homo sapiens
actttatataagtag

SEQ ID NO: 1644279 - DNA, 15 bp, Homo sapiens
aactttatataagta

SEQ ID NO: 1644280 - DNA, 15 bp, Homo sapiens
aaactttatataagt

SEQ ID NO: 1644281 - DNA, 15 bp, Homo sapiens
taaactttatataag

SEQ ID NO: 1644282 - DNA, 15 bp, Homo sapiens
ctaaactttatataa

SEQ ID NO: 1644283 - DNA, 15 bp, Homo sapiens
gctaaactttatata

SEQ ID NO: 1644284 - DNA, 15 bp, Homo sapiens
agctaaactttatat

SEQ ID NO: 1644285 - DNA, 15 bp, Homo sapiens
gagctaaactttata

SEQ ID NO: 1644286 - DNA, 15 bp, Homo sapiens
agagctaaactttat

SEQ ID NO: 1644287 - DNA, 15 bp, Homo sapiens
tagagctaaacttta

SEQ ID NO: 1644288 - DNA, 15 bp, Homo sapiens
atagagctaaacttt

SEQ ID NO: 1644289 - DNA, 15 bp, Homo sapiens
tatagagctaaactt

SEQ ID NO: 1644290 - DNA, 15 bp, Homo sapiens
ttatagagctaaact

SEQ ID NO: 1644291 - DNA, 15 bp, Homo sapiens
tttatagagctaaac

SEQ ID NO: 1644292 - DNA, 15 bp, Homo sapiens
ttttatagagctaaa

SEQ ID NO: 1644293 - DNA, 15 bp, Homo sapiens
tttttatagagctaa

SEQ ID NO: 1644294 - DNA, 15 bp, Homo sapiens
atttttatagagcta

SEQ ID NO: 1644295 - DNA, 15 bp, Homo sapiens
catttttatagagct

SEQ ID NO: 1644296 - DNA, 15 bp, Homo sapiens
tcatttttatagagc

SEQ ID NO: 1644297 - DNA, 15 bp, Homo sapiens
ctcatttttatagag

SEQ ID NO: 1644298 - DNA, 15 bp, Homo sapiens
tctcatttttataga

SEQ ID NO: 1644299 - DNA, 15 bp, Homo sapiens
atctcatttttatag

SEQ ID NO: 1644300 - DNA, 15 bp, Homo sapiens
aatctcatttttata

SEQ ID NO: 1644301 - DNA, 15 bp, Homo sapiens
caatctcatttttat

SEQ ID NO: 1644302 - DNA, 15 bp, Homo sapiens
ccaatctcattttta

SEQ ID NO: 1644303 - DNA, 15 bp, Homo sapiens
cccaatctcattttt

SEQ ID NO: 1644304 - DNA, 15 bp, Homo sapiens
ccccaatctcatttt

SEQ ID NO: 1644305 - DNA, 15 bp, Homo sapiens
accccaatctcattt

SEQ ID NO: 1644306 - DNA, 15 bp, Homo sapiens
caccccaatctcatt

SEQ ID NO: 1644307 - DNA, 15 bp, Homo sapiens
acaccccaatctcat

SEQ ID NO: 1644308 - DNA, 15 bp, Homo sapiens
aacaccccaatctca

SEQ ID NO: 1644309 - DNA, 15 bp, Homo sapiens
aaacaccccaatctc

SEQ ID NO: 1644310 - DNA, 15 bp, Homo sapiens
gaaacaccccaatct

SEQ ID NO: 1644311 - DNA, 15 bp, Homo sapiens
tgaaacaccccaatc

SEQ ID NO: 1644312 - DNA, 15 bp, Homo sapiens
ctgaaacaccccaat

SEQ ID NO: 1644313 - DNA, 15 bp, Homo sapiens
tctgaaacaccccaa

SEQ ID NO: 1644314 - DNA, 15 bp, Homo sapiens
ctctgaaacacccca

SEQ ID NO: 1644315 - DNA, 15 bp, Homo sapiens
tctctgaaacacccc

SEQ ID NO: 1644316 - DNA, 15 bp, Homo sapiens
atctctgaaacaccc

SEQ ID NO: 1644317 - DNA, 15 bp, Homo sapiens
aatctctgaaacacc

SEQ ID NO: 1644318 - DNA, 15 bp, Homo sapiens
aaatctctgaaacac

SEQ ID NO: 1644319 - DNA, 15 bp, Homo sapiens
aaaatctctgaaaca

SEQ ID NO: 1644320 - DNA, 15 bp, Homo sapiens
taaaatctctgaaac

SEQ ID NO: 1644321 - DNA, 15 bp, Homo sapiens
ataaaatctctgaaa

SEQ ID NO: 1644322 - DNA, 15 bp, Homo sapiens
aataaaatctctgaa

SEQ ID NO: 1644323 - DNA, 15 bp, Homo sapiens
taataaaatctctga

SEQ ID NO: 1644324 - DNA, 15 bp, Homo sapiens
ctaataaaatctctg

SEQ ID NO: 1644325 - DNA, 15 bp, Homo sapiens
cctaataaaatctct

SEQ ID NO: 1644326 - DNA, 15 bp, Homo sapiens
tcctaataaaatctc

SEQ ID NO: 1644327 - DNA, 15 bp, Homo sapiens
ttcctaataaaatct

SEQ ID NO: 1644328 - DNA, 15 bp, Homo sapiens
tttcctaataaaatc

SEQ ID NO: 1644329 - DNA, 15 bp, Homo sapiens
atttcctaataaaat

SEQ ID NO: 1644330 - DNA, 15 bp, Homo sapiens
catttcctaataaaa

SEQ ID NO: 1644331 - DNA, 15 bp, Homo sapiens
acatttcctaataaa

SEQ ID NO: 1644332 - DNA, 15 bp, Homo sapiens
tacatttcctaataa

SEQ ID NO: 1644333 - DNA, 15 bp, Homo sapiens
gtacatttcctaata

SEQ ID NO: 1644334 - DNA, 15 bp, Homo sapiens
tgtacatttcctaat

SEQ ID NO: 1644335 - DNA, 15 bp, Homo sapiens
ctgtacatttcctaa

SEQ ID NO: 1644336 - DNA, 15 bp, Homo sapiens
tctgtacatttccta

SEQ ID NO: 1644337 - DNA, 15 bp, Homo sapiens
ctctgtacatttcct

SEQ ID NO: 1644338 - DNA, 15 bp, Homo sapiens
tctctgtacatttcc

SEQ ID NO: 1644339 - DNA, 15 bp, Homo sapiens
ttctctgtacatttc

SEQ ID NO: 1644340 - DNA, 15 bp, Homo sapiens
tttctctgtacattt

SEQ ID NO: 1644341 - DNA, 15 bp, Homo sapiens
ttttctctgtacatt

SEQ ID NO: 1644342 - DNA, 15 bp, Homo sapiens
gttttctctgtacat

SEQ ID NO: 1644343 - DNA, 15 bp, Homo sapiens
tgttttctctgtaca

SEQ ID NO: 1644344 - DNA, 15 bp, Homo sapiens
ctgttttctctgtac

SEQ ID NO: 1644345 - DNA, 15 bp, Homo sapiens
actgttttctctgta

SEQ ID NO: 1644346 - DNA, 15 bp, Homo sapiens
aactgttttctctgt

SEQ ID NO: 1644347 - DNA, 15 bp, Homo sapiens
caactgttttctctg

SEQ ID NO: 1644348 - DNA, 15 bp, Homo sapiens
tcaactgttttctct

SEQ ID NO: 1644349 - DNA, 15 bp, Homo sapiens
atcaactgttttctc

SEQ ID NO: 1644350 - DNA, 15 bp, Homo sapiens
catcaactgttttct

SEQ ID NO: 1644351 - DNA, 15 bp, Homo sapiens
ccatcaactgttttc

SEQ ID NO: 1644352 - DNA, 15 bp, Homo sapiens
cccatcaactgtttt

SEQ ID NO: 1644353 - DNA, 15 bp, Homo sapiens
ccccatcaactgttt

SEQ ID NO: 1644354 - DNA, 15 bp, Homo sapiens
gccccatcaactgtt

SEQ ID NO: 1644355 - DNA, 15 bp, Homo sapiens
tgccccatcaactgt

SEQ ID NO: 1644356 - DNA, 15 bp, Homo sapiens
ttgccccatcaactg

SEQ ID NO: 1644357 - DNA, 15 bp, Homo sapiens
tttgccccatcaact

SEQ ID NO: 1644358 - DNA, 15 bp, Homo sapiens
ttttgccccatcaac

SEQ ID NO: 1644359 - DNA, 15 bp, Homo sapiens
cttttgccccatcaa

SEQ ID NO: 1644360 - DNA, 15 bp, Homo sapiens
gcttttgccccatca

SEQ ID NO: 1644361 - DNA, 15 bp, Homo sapiens
agcttttgccccatc

SEQ ID NO: 1644362 - DNA, 15 bp, Homo sapiens
tagcttttgccccat

SEQ ID NO: 1644363 - DNA, 15 bp, Homo sapiens
atagcttttgcccca

SEQ ID NO: 1644364 - DNA, 15 bp, Homo sapiens
tatagcttttgcccc

SEQ ID NO: 1644365 - DNA, 15 bp, Homo sapiens
ttatagcttttgccc

SEQ ID NO: 1644366 - DNA, 15 bp, Homo sapiens
tttatagcttttgcc

SEQ ID NO: 1644367 - DNA, 15 bp, Homo sapiens
gtttatagcttttgc

SEQ ID NO: 1644368 - DNA, 15 bp, Homo sapiens
tgtttatagcttttg

SEQ ID NO: 1644369 - DNA, 15 bp, Homo sapiens
gtgtttatagctttt

SEQ ID NO: 1644370 - DNA, 15 bp, Homo sapiens
agtgtttatagcttt

SEQ ID NO: 1644371 - DNA, 15 bp, Homo sapiens
tagtgtttatagctt

SEQ ID NO: 1644372 - DNA, 15 bp, Homo sapiens
ttagtgtttatagct

SEQ ID NO: 1644373 - DNA, 15 bp, Homo sapiens
cttagtgtttatagc

SEQ ID NO: 1644374 - DNA, 15 bp, Homo sapiens
ccttagtgtttatag

SEQ ID NO: 1644375 - DNA, 15 bp, Homo sapiens
accttagtgtttata

SEQ ID NO: 1644376 - DNA, 15 bp, Homo sapiens
caccttagtgtttat

SEQ ID NO: 1644377 - DNA, 15 bp, Homo sapiens
tcaccttagtgttta

SEQ ID NO: 1644378 - DNA, 15 bp, Homo sapiens
ctcaccttagtgttt

SEQ ID NO: 1644379 - DNA, 15 bp, Homo sapiens
tctcaccttagtgtt

SEQ ID NO: 1644380 - DNA, 15 bp, Homo sapiens
ttctcaccttagtgt

SEQ ID NO: 1644381 - DNA, 15 bp, Homo sapiens
cttctcaccttagtg

SEQ ID NO: 1644382 - DNA, 15 bp, Homo sapiens
ccttctcaccttagt

SEQ ID NO: 1644383 - DNA, 15 bp, Homo sapiens
tccttctcaccttag

SEQ ID NO: 1644384 - DNA, 15 bp, Homo sapiens
ttccttctcacctta

SEQ ID NO: 1644385 - DNA, 15 bp, Homo sapiens
attccttctcacctt

SEQ ID NO: 1644386 - DNA, 15 bp, Homo sapiens
gattccttctcacct

SEQ ID NO: 1644387 - DNA, 15 bp, Homo sapiens
tgattccttctcacc

SEQ ID NO: 1644388 - DNA, 15 bp, Homo sapiens
ctgattccttctcac

SEQ ID NO: 1644389 - DNA, 15 bp, Homo sapiens
tctgattccttctca

SEQ ID NO: 1644390 - DNA, 15 bp, Homo sapiens
ttctgattccttctc

SEQ ID NO: 1644391 - DNA, 15 bp, Homo sapiens
attctgattccttct

SEQ ID NO: 1644392 - DNA, 15 bp, Homo sapiens
tattctgattccttc

SEQ ID NO: 1644393 - DNA, 15 bp, Homo sapiens
atattctgattcctt

SEQ ID NO: 1644394 - DNA, 15 bp, Homo sapiens
tatattctgattcct

SEQ ID NO: 1644395 - DNA, 15 bp, Homo sapiens
ctatattctgattcc

SEQ ID NO: 1644396 - DNA, 15 bp, Homo sapiens
cctatattctgattc

SEQ ID NO: 1644397 - DNA, 15 bp, Homo sapiens
gcctatattctgatt

SEQ ID NO: 1644398 - DNA, 15 bp, Homo sapiens
tgcctatattctgat

SEQ ID NO: 1644399 - DNA, 15 bp, Homo sapiens
ttgcctatattctga

SEQ ID NO: 1644400 - DNA, 15 bp, Homo sapiens
cttgcctatattctg

SEQ ID NO: 1644401 - DNA, 15 bp, Homo sapiens
tcttgcctatattct

SEQ ID NO: 1644402 - DNA, 15 bp, Homo sapiens
ctcttgcctatattc

SEQ ID NO: 1644403 - DNA, 15 bp, Homo sapiens
actcttgcctatatt

SEQ ID NO: 1644404 - DNA, 15 bp, Homo sapiens
aactcttgcctatat

SEQ ID NO: 1644405 - DNA, 15 bp, Homo sapiens
taactcttgcctata

SEQ ID NO: 1644406 - DNA, 15 bp, Homo sapiens
ataactcttgcctat

SEQ ID NO: 1644407 - DNA, 15 bp, Homo sapiens
tataactcttgccta

SEQ ID NO: 1644408 - DNA, 15 bp, Homo sapiens
ctataactcttgcct

SEQ ID NO: 1644409 - DNA, 15 bp, Homo sapiens
tctataactcttgcc

SEQ ID NO: 1644410 - DNA, 15 bp, Homo sapiens
ttctataactcttgc

SEQ ID NO: 1644411 - DNA, 15 bp, Homo sapiens
cttctataactcttg

SEQ ID NO: 1644412 - DNA, 15 bp, Homo sapiens
gcttctataactctt

SEQ ID NO: 1644413 - DNA, 15 bp, Homo sapiens
tgcttctataactct

SEQ ID NO: 1644414 - DNA, 15 bp, Homo sapiens
atgcttctataactc

SEQ ID NO: 1644415 - DNA, 15 bp, Homo sapiens
gatgcttctataact

SEQ ID NO: 1644416 - DNA, 15 bp, Homo sapiens
agatgcttctataac

SEQ ID NO: 1644417 - DNA, 15 bp, Homo sapiens
tagatgcttctataa

SEQ ID NO: 1644418 - DNA, 15 bp, Homo sapiens
ttagatgcttctata

SEQ ID NO: 1644419 - DNA, 15 bp, Homo sapiens
tttagatgcttctat

SEQ ID NO: 1644420 - DNA, 15 bp, Homo sapiens
atttagatgcttcta

SEQ ID NO: 1644421 - DNA, 15 bp, Homo sapiens
catttagatgcttct

SEQ ID NO: 1644422 - DNA, 15 bp, Homo sapiens
ccatttagatgcttc

SEQ ID NO: 1644423 - DNA, 15 bp, Homo sapiens
gccatttagatgctt

SEQ ID NO: 1644424 - DNA, 15 bp, Homo sapiens
tgccatttagatgct

SEQ ID NO: 1644425 - DNA, 15 bp, Homo sapiens
atgccatttagatgc

SEQ ID NO: 1644426 - DNA, 15 bp, Homo sapiens
aatgccatttagatg

SEQ ID NO: 1644427 - DNA, 15 bp, Homo sapiens
aaatgccatttagat

SEQ ID NO: 1644428 - DNA, 15 bp, Homo sapiens
caaatgccatttaga

SEQ ID NO: 1644429 - DNA, 15 bp, Homo sapiens
acaaatgccatttag

SEQ ID NO: 1644430 - DNA, 15 bp, Homo sapiens
tacaaatgccattta

SEQ ID NO: 1644431 - DNA, 15 bp, Homo sapiens
atacaaatgccattt

SEQ ID NO: 1644432 - DNA, 15 bp, Homo sapiens
gatacaaatgccatt

SEQ ID NO: 1644433 - DNA, 15 bp, Homo sapiens
agatacaaatgccat

SEQ ID NO: 1644434 - DNA, 15 bp, Homo sapiens
cagatacaaatgcca

SEQ ID NO: 1644435 - DNA, 15 bp, Homo sapiens
acagatacaaatgcc

SEQ ID NO: 1644436 - DNA, 15 bp, Homo sapiens
aacagatacaaatgc

SEQ ID NO: 1644437 - DNA, 15 bp, Homo sapiens
aaacagatacaaatg

SEQ ID NO: 1644438 - DNA, 15 bp, Homo sapiens
taaacagatacaaat

SEQ ID NO: 1644439 - DNA, 15 bp, Homo sapiens
ttaaacagatacaaa

SEQ ID NO: 1644440 - DNA, 15 bp, Homo sapiens
attaaacagatacaa

SEQ ID NO: 1644441 - DNA, 15 bp, Homo sapiens
gattaaacagataca

SEQ ID NO: 1644442 - DNA, 15 bp, Homo sapiens
tgattaaacagatac

SEQ ID NO: 1644443 - DNA, 15 bp, Homo sapiens
ctgattaaacagata

SEQ ID NO: 1644444 - DNA, 15 bp, Homo sapiens
gctgattaaacagat

SEQ ID NO: 1644445 - DNA, 15 bp, Homo sapiens
ggctgattaaacaga

SEQ ID NO: 1644446 - DNA, 15 bp, Homo sapiens
aggctgattaaacag

SEQ ID NO: 1644447 - DNA, 15 bp, Homo sapiens
taggctgattaaaca

SEQ ID NO: 1644448 - DNA, 15 bp, Homo sapiens
ataggctgattaaac

SEQ ID NO: 1644449 - DNA, 15 bp, Homo sapiens
gataggctgattaaa

SEQ ID NO: 1644450 - DNA, 15 bp, Homo sapiens
tgataggctgattaa

SEQ ID NO: 1644451 - DNA, 15 bp, Homo sapiens
ctgataggctgatta

SEQ ID NO: 1644452 - DNA, 15 bp, Homo sapiens
cctgataggctgatt

SEQ ID NO: 1644453 - DNA, 15 bp, Homo sapiens
acctgataggctgat

SEQ ID NO: 1644454 - DNA, 15 bp, Homo sapiens
tacctgataggctga

SEQ ID NO: 1644455 - DNA, 15 bp, Homo sapiens
ttacctgataggctg

SEQ ID NO: 1644456 - DNA, 15 bp, Homo sapiens
tttacctgataggct

SEQ ID NO: 1644457 - DNA, 15 bp, Homo sapiens
atttacctgataggc

SEQ ID NO: 1644458 - DNA, 15 bp, Homo sapiens
gatttacctgatagg

SEQ ID NO: 1644459 - DNA, 15 bp, Homo sapiens
agatttacctgatag

SEQ ID NO: 1644460 - DNA, 15 bp, Homo sapiens
cagatttacctgata

SEQ ID NO: 1644461 - DNA, 15 bp, Homo sapiens
gcagatttacctgat

SEQ ID NO: 1644462 - DNA, 15 bp, Homo sapiens
ggcagatttacctga

SEQ ID NO: 1644463 - DNA, 15 bp, Homo sapiens
gggcagatttacctg

SEQ ID NO: 1644464 - DNA, 15 bp, Homo sapiens
tgggcagatttacct

SEQ ID NO: 1644465 - DNA, 15 bp, Homo sapiens
gtgggcagatttacc

SEQ ID NO: 1644466 - DNA, 15 bp, Homo sapiens
agtgggcagatttac

SEQ ID NO: 1644467 - DNA, 15 bp, Homo sapiens
aagtgggcagattta

SEQ ID NO: 1644468 - DNA, 15 bp, Homo sapiens
aaagtgggcagattt

SEQ ID NO: 1644469 - DNA, 15 bp, Homo sapiens
aaaagtgggcagatt

SEQ ID NO: 1644470 - DNA, 15 bp, Homo sapiens
gaaaagtgggcagat

SEQ ID NO: 1644471 - DNA, 15 bp, Homo sapiens
agaaaagtgggcaga

SEQ ID NO: 1644472 - DNA, 15 bp, Homo sapiens
gagaaaagtgggcag

SEQ ID NO: 1644473 - DNA, 15 bp, Homo sapiens
ggagaaaagtgggca

SEQ ID NO: 1644474 - DNA, 15 bp, Homo sapiens
gggagaaaagtgggc

SEQ ID NO: 1644475 - DNA, 15 bp, Homo sapiens
agggagaaaagtggg

SEQ ID NO: 1644476 - DNA, 15 bp, Homo sapiens
tagggagaaaagtgg

SEQ ID NO: 1644477 - DNA, 15 bp, Homo sapiens
gtagggagaaaagtg

SEQ ID NO: 1644478 - DNA, 15 bp, Homo sapiens
ggtagggagaaaagt

SEQ ID NO: 1644479 - DNA, 15 bp, Homo sapiens
tggtagggagaaaag

SEQ ID NO: 1644480 - DNA, 15 bp, Homo sapiens
ctggtagggagaaaa

SEQ ID NO: 1644481 - DNA, 15 bp, Homo sapiens
cactggtagggagaa

SEQ ID NO: 1644482 - DNA, 15 bp, Homo sapiens
tcactggtagggaga

SEQ ID NO: 1644483 - DNA, 15 bp, Homo sapiens
ttcactggtagggag

SEQ ID NO: 1644484 - DNA, 15 bp, Homo sapiens
gttcactggtaggga

SEQ ID NO: 1644485 - DNA, 15 bp, Homo sapiens
tgttcactggtaggg

SEQ ID NO: 1644486 - DNA, 15 bp, Homo sapiens
atgttcactggtagg

SEQ ID NO: 1644487 - DNA, 15 bp, Homo sapiens
gatgttcactggtag

SEQ ID NO: 1644488 - DNA, 15 bp, Homo sapiens
agatgttcactggta

SEQ ID NO: 1644489 - DNA, 15 bp, Homo sapiens
cagatgttcactggt

SEQ ID NO: 1644490 - DNA, 15 bp, Homo sapiens
acagatgttcactgg

SEQ ID NO: 1644491 - DNA, 15 bp, Homo sapiens
aacagatgttcactg

SEQ ID NO: 1644492 - DNA, 15 bp, Homo sapiens
aaacagatgttcact

SEQ ID NO: 1644493 - DNA, 15 bp, Homo sapiens
aaaacagatgttcac

SEQ ID NO: 1644494 - DNA, 15 bp, Homo sapiens
caaaacagatgttca

SEQ ID NO: 1644495 - DNA, 15 bp, Homo sapiens
tcaaaacagatgttc

SEQ ID NO: 1644496 - DNA, 15 bp, Homo sapiens
ttcaaaacagatgtt

SEQ ID NO: 1644497 - DNA, 15 bp, Homo sapiens
gttcaaaacagatgt

SEQ ID NO: 1644498 - DNA, 15 bp, Homo sapiens
ggttcaaaacagatg

SEQ ID NO: 1644499 - DNA, 15 bp, Homo sapiens
aggttcaaaacagat

SEQ ID NO: 1644500 - DNA, 15 bp, Homo sapiens
gaggttcaaaacaga

SEQ ID NO: 1644501 - DNA, 15 bp, Homo sapiens
agaggttcaaaacag

SEQ ID NO: 1644502 - DNA, 15 bp, Homo sapiens
tagaggttcaaaaca

SEQ ID NO: 1644503 - DNA, 15 bp, Homo sapiens
ctagaggttcaaaac

SEQ ID NO: 1644504 - DNA, 15 bp, Homo sapiens
cctagaggttcaaaa

SEQ ID NO: 1644505 - DNA, 15 bp, Homo sapiens
tcctagaggttcaaa

SEQ ID NO: 1644506 - DNA, 15 bp, Homo sapiens
atcctagaggttcaa

SEQ ID NO: 1644507 - DNA, 15 bp, Homo sapiens
tatcctagaggttca

SEQ ID NO: 1644508 - DNA, 15 bp, Homo sapiens
atatcctagaggttc

SEQ ID NO: 1644509 - DNA, 15 bp, Homo sapiens
catatcctagaggtt

SEQ ID NO: 1644510 - DNA, 15 bp, Homo sapiens
ccatatcctagaggt

SEQ ID NO: 1644511 - DNA, 15 bp, Homo sapiens
cccatatcctagagg

SEQ ID NO: 1644512 - DNA, 15 bp, Homo sapiens
tcccatatcctagag

SEQ ID NO: 1644513 - DNA, 15 bp, Homo sapiens
gtcccatatcctaga

SEQ ID NO: 1644514 - DNA, 15 bp, Homo sapiens
ggtcccatatcctag

SEQ ID NO: 1644515 - DNA, 15 bp, Homo sapiens
aggtcccatatccta

SEQ ID NO: 1644516 - DNA, 15 bp, Homo sapiens
gaggtcccatatcct

SEQ ID NO: 1644517 - DNA, 15 bp, Homo sapiens
agaggtcccatatcc

SEQ ID NO: 1644518 - DNA, 15 bp, Homo sapiens
aagaggtcccatatc

SEQ ID NO: 1644519 - DNA, 15 bp, Homo sapiens
caagaggtcccatat

SEQ ID NO: 1644520 - DNA, 15 bp, Homo sapiens
gcaagaggtcccata

SEQ ID NO: 1644521 - DNA, 15 bp, Homo sapiens
agcaagaggtcccat

SEQ ID NO: 1644522 - DNA, 15 bp, Homo sapiens
aagcaagaggtccca

SEQ ID NO: 1644523 - DNA, 15 bp, Homo sapiens
caagcaagaggtccc

SEQ ID NO: 1644524 - DNA, 15 bp, Homo sapiens
tcaagcaagaggtcc

SEQ ID NO: 1644525 - DNA, 15 bp, Homo sapiens
atcaagcaagaggtc

SEQ ID NO: 1644526 - DNA, 15 bp, Homo sapiens
tatcaagcaagaggt

SEQ ID NO: 1644527 - DNA, 15 bp, Homo sapiens
gtatcaagcaagagg

SEQ ID NO: 1644528 - DNA, 15 bp, Homo sapiens
ggtatcaagcaagag

SEQ ID NO: 1644529 - DNA, 15 bp, Homo sapiens
tggtatcaagcaaga

SEQ ID NO: 1644530 - DNA, 15 bp, Homo sapiens
ctggtatcaagcaag

SEQ ID NO: 1644531 - DNA, 15 bp, Homo sapiens
actggtatcaagcaa

SEQ ID NO: 1644532 - DNA, 15 bp, Homo sapiens
gactggtatcaagca

SEQ ID NO: 1644533 - DNA, 15 bp, Homo sapiens
agactggtatcaagc

SEQ ID NO: 1644534 - DNA, 15 bp, Homo sapiens
aagactggtatcaag

SEQ ID NO: 1644535 - DNA, 15 bp, Homo sapiens
aaagactggtatcaa

SEQ ID NO: 1644536 - DNA, 15 bp, Homo sapiens
gaaagactggtatca

SEQ ID NO: 1644537 - DNA, 15 bp, Homo sapiens
agaaagactggtatc

SEQ ID NO: 1644538 - DNA, 15 bp, Homo sapiens
cagaaagactggtat

SEQ ID NO: 1644539 - DNA, 15 bp, Homo sapiens
acagaaagactggta

SEQ ID NO: 1644540 - DNA, 15 bp, Homo sapiens
cacagaaagactggt

SEQ ID NO: 1644541 - DNA, 15 bp, Homo sapiens
gcacagaaagactgg

SEQ ID NO: 1644542 - DNA, 15 bp, Homo sapiens
ggcacagaaagactg

SEQ ID NO: 1644543 - DNA, 15 bp, Homo sapiens
aggcacagaaagact

SEQ ID NO: 1644544 - DNA, 15 bp, Homo sapiens
taggcacagaaagac

SEQ ID NO: 1644545 - DNA, 15 bp, Homo sapiens
gtaggcacagaaaga

SEQ ID NO: 1644546 - DNA, 15 bp, Homo sapiens
ggtaggcacagaaag

SEQ ID NO: 1644547 - DNA, 15 bp, Homo sapiens
aggtaggcacagaaa

SEQ ID NO: 1644548 - DNA, 15 bp, Homo sapiens
taggtaggcacagaa

SEQ ID NO: 1644549 - DNA, 15 bp, Homo sapiens
ataggtaggcacaga

SEQ ID NO: 1644550 - DNA, 15 bp, Homo sapiens
aataggtaggcacag

SEQ ID NO: 1644551 - DNA, 15 bp, Homo sapiens
gaataggtaggcaca

SEQ ID NO: 1644552 - DNA, 15 bp, Homo sapiens
agaataggtaggcac

SEQ ID NO: 1644553 - DNA, 15 bp, Homo sapiens
tagaataggtaggca

SEQ ID NO: 1644554 - DNA, 15 bp, Homo sapiens
ttagaataggtaggc

SEQ ID NO: 1644555 - DNA, 15 bp, Homo sapiens
tttagaataggtagg

SEQ ID NO: 1644556 - DNA, 15 bp, Homo sapiens
ctttagaataggtag

SEQ ID NO: 1644557 - DNA, 15 bp, Homo sapiens
gctttagaataggta

SEQ ID NO: 1644558 - DNA, 15 bp, Homo sapiens
ggctttagaataggt

SEQ ID NO: 1644559 - DNA, 15 bp, Homo sapiens
aggctttagaatagg

SEQ ID NO: 1644560 - DNA, 15 bp, Homo sapiens
caggctttagaatag

SEQ ID NO: 1644561 - DNA, 15 bp, Homo sapiens
tcaggctttagaata

SEQ ID NO: 1644562 - DNA, 15 bp, Homo sapiens
atcaggctttagaat

SEQ ID NO: 1644563 - DNA, 15 bp, Homo sapiens
catcaggctttagaa

SEQ ID NO: 1644564 - DNA, 15 bp, Homo sapiens
acatcaggctttaga

SEQ ID NO: 1644565 - DNA, 15 bp, Homo sapiens
gacatcaggctttag

SEQ ID NO: 1644566 - DNA, 15 bp, Homo sapiens
tgacatcaggcttta

SEQ ID NO: 1644567 - DNA, 15 bp, Homo sapiens
atgacatcaggcttt

SEQ ID NO: 1644568 - DNA, 15 bp, Homo sapiens
gatgacatcaggctt

SEQ ID NO: 1644569 - DNA, 15 bp, Homo sapiens
agatgacatcaggct

SEQ ID NO: 1644570 - DNA, 15 bp, Homo sapiens
aagatgacatcaggc

SEQ ID NO: 1644571 - DNA, 15 bp, Homo sapiens
gaagatgacatcagg

SEQ ID NO: 1644572 - DNA, 15 bp, Homo sapiens
agaagatgacatcag

SEQ ID NO: 1644573 - DNA, 15 bp, Homo sapiens
cagaagatgacatca

SEQ ID NO: 1644574 - DNA, 15 bp, Homo sapiens
acagaagatgacatc

SEQ ID NO: 1644575 - DNA, 15 bp, Homo sapiens
cacagaagatgacat

SEQ ID NO: 1644576 - DNA, 15 bp, Homo sapiens
gcacagaagatgaca

SEQ ID NO: 1644577 - DNA, 15 bp, Homo sapiens
ggcacagaagatgac

SEQ ID NO: 1644578 - DNA, 15 bp, Homo sapiens
aggcacagaagatga

SEQ ID NO: 1644579 - DNA, 15 bp, Homo sapiens
aaggcacagaagatg

SEQ ID NO: 1644580 - DNA, 15 bp, Homo sapiens
gaaggcacagaagat

SEQ ID NO: 1644581 - DNA, 15 bp, Homo sapiens
ggaaggcacagaaga

SEQ ID NO: 1644582 - DNA, 15 bp, Homo sapiens
gggaaggcacagaag

SEQ ID NO: 1644583 - DNA, 15 bp, Homo sapiens
agggaaggcacagaa

SEQ ID NO: 1644584 - DNA, 15 bp, Homo sapiens
aagggaaggcacaga

SEQ ID NO: 1644585 - DNA, 15 bp, Homo sapiens
taagggaaggcacag

SEQ ID NO: 1644586 - DNA, 15 bp, Homo sapiens
ataagggaaggcaca

SEQ ID NO: 1644587 - DNA, 15 bp, Homo sapiens
tataagggaaggcac

SEQ ID NO: 1644588 - DNA, 15 bp, Homo sapiens
ctataagggaaggca

SEQ ID NO: 1644589 - DNA, 15 bp, Homo sapiens
cctataagggaaggc

SEQ ID NO: 1644590 - DNA, 15 bp, Homo sapiens
gcctataagggaagg

SEQ ID NO: 1644591 - DNA, 15 bp, Homo sapiens
agcctataagggaag

SEQ ID NO: 1644592 - DNA, 15 bp, Homo sapiens
aagcctataagggaa

SEQ ID NO: 1644593 - DNA, 15 bp, Homo sapiens
taagcctataaggga

SEQ ID NO: 1644594 - DNA, 15 bp, Homo sapiens
gtaagcctataaggg

SEQ ID NO: 1644595 - DNA, 15 bp, Homo sapiens
agtaagcctataagg

SEQ ID NO: 1644596 - DNA, 15 bp, Homo sapiens
aagtaagcctataag

SEQ ID NO: 1644597 - DNA, 15 bp, Homo sapiens
gaagtaagcctataa

SEQ ID NO: 1644598 - DNA, 15 bp, Homo sapiens
ggaagtaagcctata

SEQ ID NO: 1644599 - DNA, 15 bp, Homo sapiens
aggaagtaagcctat

SEQ ID NO: 1644600 - DNA, 15 bp, Homo sapiens
aaggaagtaagccta

SEQ ID NO: 1644601 - DNA, 15 bp, Homo sapiens
gaaggaagtaagcct

SEQ ID NO: 1644602 - DNA, 15 bp, Homo sapiens
tgaaggaagtaagcc

SEQ ID NO: 1644603 - DNA, 15 bp, Homo sapiens
ttgaaggaagtaagc

SEQ ID NO: 1644604 - DNA, 15 bp, Homo sapiens
gttgaaggaagtaag

SEQ ID NO: 1644605 - DNA, 15 bp, Homo sapiens
cgttgaaggaagtaa

SEQ ID NO: 1644606 - DNA, 15 bp, Homo sapiens
gcgttgaaggaagta

SEQ ID NO: 1644607 - DNA, 15 bp, Homo sapiens
agcgttgaaggaagt

SEQ ID NO: 1644608 - DNA, 15 bp, Homo sapiens
cagcgttgaaggaag

SEQ ID NO: 1644609 - DNA, 15 bp, Homo sapiens
tcagcgttgaaggaa

SEQ ID NO: 1644610 - DNA, 15 bp, Homo sapiens
gtcagcgttgaagga

SEQ ID NO: 1644611 - DNA, 15 bp, Homo sapiens
ggtcagcgttgaagg

SEQ ID NO: 1644612 - DNA, 15 bp, Homo sapiens
tggtcagcgttgaag

SEQ ID NO: 1644613 - DNA, 15 bp, Homo sapiens
atggtcagcgttgaa

SEQ ID NO: 1644614 - DNA, 15 bp, Homo sapiens
aatggtcagcgttga

SEQ ID NO: 1644615 - DNA, 15 bp, Homo sapiens
gaatggtcagcgttg

SEQ ID NO: 1644616 - DNA, 15 bp, Homo sapiens
ggaatggtcagcgtt

SEQ ID NO: 1644617 - DNA, 15 bp, Homo sapiens
aggaatggtcagcgt

SEQ ID NO: 1644618 - DNA, 15 bp, Homo sapiens
gaggaatggtcagcg

SEQ ID NO: 1644619 - DNA, 15 bp, Homo sapiens
ggaggaatggtcagc

SEQ ID NO: 1644620 - DNA, 15 bp, Homo sapiens
tggaggaatggtcag

SEQ ID NO: 1644621 - DNA, 15 bp, Homo sapiens
ctggaggaatggtca

SEQ ID NO: 1644622 - DNA, 15 bp, Homo sapiens
gctggaggaatggtc

SEQ ID NO: 1644623 - DNA, 15 bp, Homo sapiens
tgctggaggaatggt

SEQ ID NO: 1644624 - DNA, 15 bp, Homo sapiens
atgctggaggaatgg

SEQ ID NO: 1644625 - DNA, 15 bp, Homo sapiens
aatgctggaggaatg

SEQ ID NO: 1644626 - DNA, 15 bp, Homo sapiens
aaatgctggaggaat

SEQ ID NO: 1644627 - DNA, 15 bp, Homo sapiens
gaaatgctggaggaa

SEQ ID NO: 1644628 - DNA, 15 bp, Homo sapiens
agaaatgctggagga

SEQ ID NO: 1644629 - DNA, 15 bp, Homo sapiens
aagaaatgctggagg

SEQ ID NO: 1644630 - DNA, 15 bp, Homo sapiens
taagaaatgctggag

SEQ ID NO: 1644631 - DNA, 15 bp, Homo sapiens
ataagaaatgctgga

SEQ ID NO: 1644632 - DNA, 15 bp, Homo sapiens
aataagaaatgctgg

SEQ ID NO: 1644633 - DNA, 15 bp, Homo sapiens
gaataagaaatgctg

SEQ ID NO: 1644634 - DNA, 15 bp, Homo sapiens
agaataagaaatgct

SEQ ID NO: 1644635 - DNA, 15 bp, Homo sapiens
tagaataagaaatgc

SEQ ID NO: 1644636 - DNA, 15 bp, Homo sapiens
ttagaataagaaatg

SEQ ID NO: 1644637 - DNA, 15 bp, Homo sapiens
tttagaataagaaat

SEQ ID NO: 1644638 - DNA, 15 bp, Homo sapiens
ctttagaataagaaa

SEQ ID NO: 1644639 - DNA, 15 bp, Homo sapiens
ctctttagaataaga

SEQ ID NO: 1644640 - DNA, 15 bp, Homo sapiens
cctctttagaataag

SEQ ID NO: 1644641 - DNA, 15 bp, Homo sapiens
tcctctttagaataa

SEQ ID NO: 1644642 - DNA, 15 bp, Homo sapiens
ttcctctttagaata

SEQ ID NO: 1644643 - DNA, 15 bp, Homo sapiens
gttcctctttagaat

SEQ ID NO: 1644644 - DNA, 15 bp, Homo sapiens
tgttcctctttagaa

SEQ ID NO: 1644645 - DNA, 15 bp, Homo sapiens
ctgttcctctttaga

SEQ ID NO: 1644646 - DNA, 15 bp, Homo sapiens
cctgttcctctttag

SEQ ID NO: 1644647 - DNA, 15 bp, Homo sapiens
acctgttcctcttta

SEQ ID NO: 1644648 - DNA, 15 bp, Homo sapiens
tacctgttcctcttt

SEQ ID NO: 1644649 - DNA, 15 bp, Homo sapiens
ttacctgttcctctt

SEQ ID NO: 1644650 - DNA, 15 bp, Homo sapiens
cttacctgttcctct

SEQ ID NO: 1644651 - DNA, 15 bp, Homo sapiens
tcttacctgttcctc

SEQ ID NO: 1644652 - DNA, 15 bp, Homo sapiens
ttcttacctgttcct

SEQ ID NO: 1644653 - DNA, 15 bp, Homo sapiens
tttcttacctgttcc

SEQ ID NO: 1644654 - DNA, 15 bp, Homo sapiens
gtttcttacctgttc

SEQ ID NO: 1644655 - DNA, 15 bp, Homo sapiens
agtttcttacctgtt

SEQ ID NO: 1644656 - DNA, 15 bp, Homo sapiens
aagtttcttacctgt

SEQ ID NO: 1644657 - DNA, 15 bp, Homo sapiens
gaagtttcttacctg

SEQ ID NO: 1644658 - DNA, 15 bp, Homo sapiens
cgaagtttcttacct

SEQ ID NO: 1644659 - DNA, 15 bp, Homo sapiens
acgaagtttcttacc

SEQ ID NO: 1644660 - DNA, 15 bp, Homo sapiens
aacgaagtttcttac

SEQ ID NO: 1644661 - DNA, 15 bp, Homo sapiens
caacgaagtttctta

SEQ ID NO: 1644662 - DNA, 15 bp, Homo sapiens
ccaacgaagtttctt

SEQ ID NO: 1644663 - DNA, 15 bp, Homo sapiens
tccaacgaagtttct

SEQ ID NO: 1644664 - DNA, 15 bp, Homo sapiens
ctccaacgaagtttc

SEQ ID NO: 1644665 - DNA, 15 bp, Homo sapiens
cctccaacgaagttt

SEQ ID NO: 1644666 - DNA, 15 bp, Homo sapiens
ccctccaacgaagtt

SEQ ID NO: 1644667 - DNA, 15 bp, Homo sapiens
tccctccaacgaagt

SEQ ID NO: 1644668 - DNA, 15 bp, Homo sapiens
ttccctccaacgaag

SEQ ID NO: 1644669 - DNA, 15 bp, Homo sapiens
tttccctccaacgaa

SEQ ID NO: 1644670 - DNA, 15 bp, Homo sapiens
ttttccctccaacga

SEQ ID NO: 1644671 - DNA, 15 bp, Homo sapiens
attttccctccaacg

SEQ ID NO: 1644672 - DNA, 15 bp, Homo sapiens
aattttccctccaac

SEQ ID NO: 1644673 - DNA, 15 bp, Homo sapiens
taattttccctccaa

SEQ ID NO: 1644674 - DNA, 15 bp, Homo sapiens
ttaattttccctcca

SEQ ID NO: 1644675 - DNA, 15 bp, Homo sapiens
cttaattttccctcc

SEQ ID NO: 1644676 - DNA, 15 bp, Homo sapiens
gcttaattttccctc

SEQ ID NO: 1644677 - DNA, 15 bp, Homo sapiens
tgcttaattttccct

SEQ ID NO: 1644678 - DNA, 15 bp, Homo sapiens
ttgcttaattttccc

SEQ ID NO: 1644679 - DNA, 15 bp, Homo sapiens
cttgcttaattttcc

SEQ ID NO: 1644680 - DNA, 15 bp, Homo sapiens
ccttgcttaattttc

SEQ ID NO: 1644681 - DNA, 15 bp, Homo sapiens
tccttgcttaatttt

SEQ ID NO: 1644682 - DNA, 15 bp, Homo sapiens
atccttgcttaattt

SEQ ID NO: 1644683 - DNA, 15 bp, Homo sapiens
aatccttgcttaatt

SEQ ID NO: 1644684 - DNA, 15 bp, Homo sapiens
caatccttgcttaat

SEQ ID NO: 1644685 - DNA, 15 bp, Homo sapiens
ccaatccttgcttaa

SEQ ID NO: 1644686 - DNA, 15 bp, Homo sapiens
gccaatccttgctta

SEQ ID NO: 1644687 - DNA, 15 bp, Homo sapiens
tgccaatccttgctt

SEQ ID NO: 1644688 - DNA, 15 bp, Homo sapiens
atgccaatccttgct

SEQ ID NO: 1644689 - DNA, 15 bp, Homo sapiens
aatgccaatccttgc

SEQ ID NO: 1644690 - DNA, 15 bp, Homo sapiens
taatgccaatccttg

SEQ ID NO: 1644691 - DNA, 15 bp, Homo sapiens
ctaatgccaatcctt

SEQ ID NO: 1644692 - DNA, 15 bp, Homo sapiens
tctaatgccaatcct

SEQ ID NO: 1644693 - DNA, 15 bp, Homo sapiens
ctctaatgccaatcc

SEQ ID NO: 1644694 - DNA, 15 bp, Homo sapiens
tctctaatgccaatc

SEQ ID NO: 1644695 - DNA, 15 bp, Homo sapiens
ctctctaatgccaat

SEQ ID NO: 1644696 - DNA, 15 bp, Homo sapiens
cctctctaatgccaa

SEQ ID NO: 1644697 - DNA, 15 bp, Homo sapiens
ccctctctaatgcca

SEQ ID NO: 1644698 - DNA, 15 bp, Homo sapiens
tccctctctaatgcc

SEQ ID NO: 1644699 - DNA, 15 bp, Homo sapiens
ctccctctctaatgc

SEQ ID NO: 1644700 - DNA, 15 bp, Homo sapiens
gctccctctctaatg

SEQ ID NO: 1644701 - DNA, 15 bp, Homo sapiens
agctccctctctaat

SEQ ID NO: 1644702 - DNA, 15 bp, Homo sapiens
cagctccctctctaa

SEQ ID NO: 1644703 - DNA, 15 bp, Homo sapiens
acagctccctctcta

SEQ ID NO: 1644704 - DNA, 15 bp, Homo sapiens
cacagctccctctct

SEQ ID NO: 1644705 - DNA, 15 bp, Homo sapiens
gcacagctccctctc

SEQ ID NO: 1644706 - DNA, 15 bp, Homo sapiens
tgcacagctccctct

SEQ ID NO: 1644707 - DNA, 15 bp, Homo sapiens
gtgcacagctccctc

SEQ ID NO: 1644708 - DNA, 15 bp, Homo sapiens
tgtgcacagctccct

SEQ ID NO: 1644709 - DNA, 15 bp, Homo sapiens
ctgtgcacagctccc

SEQ ID NO: 1644710 - DNA, 15 bp, Homo sapiens
actgtgcacagctcc

SEQ ID NO: 1644711 - DNA, 15 bp, Homo sapiens
gactgtgcacagctc

SEQ ID NO: 1644712 - DNA, 15 bp, Homo sapiens
ggactgtgcacagct

SEQ ID NO: 1644713 - DNA, 15 bp, Homo sapiens
gggactgtgcacagc

SEQ ID NO: 1644714 - DNA, 15 bp, Homo sapiens
agggactgtgcacag

SEQ ID NO: 1644715 - DNA, 15 bp, Homo sapiens
cagggactgtgcaca

SEQ ID NO: 1644716 - DNA, 15 bp, Homo sapiens
acagggactgtgcac

SEQ ID NO: 1644717 - DNA, 15 bp, Homo sapiens
gacagggactgtgca

SEQ ID NO: 1644718 - DNA, 15 bp, Homo sapiens
agacagggactgtgc

SEQ ID NO: 1644719 - DNA, 15 bp, Homo sapiens
gagacagggactgtg

SEQ ID NO: 1644720 - DNA, 15 bp, Homo sapiens
tgagacagggactgt

SEQ ID NO: 1644721 - DNA, 15 bp, Homo sapiens
ttgagacagggactg

SEQ ID NO: 1644722 - DNA, 15 bp, Homo sapiens
gttgagacagggact

SEQ ID NO: 1644723 - DNA, 15 bp, Homo sapiens
tgttgagacagggac

SEQ ID NO: 1644724 - DNA, 15 bp, Homo sapiens
ttgttgagacaggga

SEQ ID NO: 1644725 - DNA, 15 bp, Homo sapiens
atttttgttgagaca

SEQ ID NO: 1644726 - DNA, 15 bp, Homo sapiens
tatttttgttgagac

SEQ ID NO: 1644727 - DNA, 15 bp, Homo sapiens
ctatttttgttgaga

SEQ ID NO: 1644728 - DNA, 15 bp, Homo sapiens
gctatttttgttgag

SEQ ID NO: 1644729 - DNA, 15 bp, Homo sapiens
agctatttttgttga

SEQ ID NO: 1644730 - DNA, 15 bp, Homo sapiens
aagctatttttgttg

SEQ ID NO: 1644731 - DNA, 15 bp, Homo sapiens
taagctatttttgtt

SEQ ID NO: 1644732 - DNA, 15 bp, Homo sapiens
ttaagctatttttgt

SEQ ID NO: 1644733 - DNA, 15 bp, Homo sapiens
cttaagctatttttg

SEQ ID NO: 1644734 - DNA, 15 bp, Homo sapiens
tcttaagctattttt

SEQ ID NO: 1644735 - DNA, 15 bp, Homo sapiens
atcttaagctatttt

SEQ ID NO: 1644736 - DNA, 15 bp, Homo sapiens
catcttaagctattt

SEQ ID NO: 1644737 - DNA, 15 bp, Homo sapiens
tcatcttaagctatt

SEQ ID NO: 1644738 - DNA, 15 bp, Homo sapiens
ctcatcttaagctat

SEQ ID NO: 1644739 - DNA, 15 bp, Homo sapiens
tctcatcttaagcta

SEQ ID NO: 1644740 - DNA, 15 bp, Homo sapiens
gtctcatcttaagct

SEQ ID NO: 1644741 - DNA, 15 bp, Homo sapiens
tgtctcatcttaagc

SEQ ID NO: 1644742 - DNA, 15 bp, Homo sapiens
ttgtctcatcttaag

SEQ ID NO: 1644743 - DNA, 15 bp, Homo sapiens
cttgtctcatcttaa

SEQ ID NO: 1644744 - DNA, 15 bp, Homo sapiens
acttgtctcatctta

SEQ ID NO: 1644745 - DNA, 15 bp, Homo sapiens
tacttgtctcatctt

SEQ ID NO: 1644746 - DNA, 15 bp, Homo sapiens
gtacttgtctcatct

SEQ ID NO: 1644747 - DNA, 15 bp, Homo sapiens
agtacttgtctcatc

SEQ ID NO: 1644748 - DNA, 15 bp, Homo sapiens
aagtacttgtctcat

SEQ ID NO: 1644749 - DNA, 15 bp, Homo sapiens
aaagtacttgtctca

SEQ ID NO: 1644750 - DNA, 15 bp, Homo sapiens
taaagtacttgtctc

SEQ ID NO: 1644751 - DNA, 15 bp, Homo sapiens
gtaaagtacttgtct

SEQ ID NO: 1644752 - DNA, 15 bp, Homo sapiens
agtaaagtacttgtc

SEQ ID NO: 1644753 - DNA, 15 bp, Homo sapiens
aagtaaagtacttgt

SEQ ID NO: 1644754 - DNA, 15 bp, Homo sapiens
taagtaaagtacttg

SEQ ID NO: 1644755 - DNA, 15 bp, Homo sapiens
ctaagtaaagtactt

SEQ ID NO: 1644756 - DNA, 15 bp, Homo sapiens
gctaagtaaagtact

SEQ ID NO: 1644757 - DNA, 15 bp, Homo sapiens
tgctaagtaaagtac

SEQ ID NO: 1644758 - DNA, 15 bp, Homo sapiens
atgctaagtaaagta

SEQ ID NO: 1644759 - DNA, 15 bp, Homo sapiens
tatgctaagtaaagt

SEQ ID NO: 1644760 - DNA, 15 bp, Homo sapiens
ttatgctaagtaaag

SEQ ID NO: 1644761 - DNA, 15 bp, Homo sapiens
attatgctaagtaaa

SEQ ID NO: 1644762 - DNA, 15 bp, Homo sapiens
gattatgctaagtaa

SEQ ID NO: 1644763 - DNA, 15 bp, Homo sapiens
agattatgctaagta

SEQ ID NO: 1644764 - DNA, 15 bp, Homo sapiens
aagattatgctaagt

SEQ ID NO: 1644765 - DNA, 15 bp, Homo sapiens
caagattatgctaag

SEQ ID NO: 1644766 - DNA, 15 bp, Homo sapiens
gcaagattatgctaa

SEQ ID NO: 1644767 - DNA, 15 bp, Homo sapiens
agcaagattatgcta

SEQ ID NO: 1644768 - DNA, 15 bp, Homo sapiens
tagcaagattatgct

SEQ ID NO: 1644769 - DNA, 15 bp, Homo sapiens
gtagcaagattatgc

SEQ ID NO: 1644770 - DNA, 15 bp, Homo sapiens
agtagcaagattatg

SEQ ID NO: 1644771 - DNA, 15 bp, Homo sapiens
cagtagcaagattat

SEQ ID NO: 1644772 - DNA, 15 bp, Homo sapiens
tcagtagcaagatta

SEQ ID NO: 1644773 - DNA, 15 bp, Homo sapiens
ttcagtagcaagatt

SEQ ID NO: 1644774 - DNA, 15 bp, Homo sapiens
cttcagtagcaagat

SEQ ID NO: 1644775 - DNA, 15 bp, Homo sapiens
ccttcagtagcaaga

SEQ ID NO: 1644776 - DNA, 15 bp, Homo sapiens
cccttcagtagcaag

SEQ ID NO: 1644777 - DNA, 15 bp, Homo sapiens
ccccttcagtagcaa

SEQ ID NO: 1644778 - DNA, 15 bp, Homo sapiens
gccccttcagtagca

SEQ ID NO: 1644779 - DNA, 15 bp, Homo sapiens
agccccttcagtagc

SEQ ID NO: 1644780 - DNA, 15 bp, Homo sapiens
tagccccttcagtag

SEQ ID NO: 1644781 - DNA, 15 bp, Homo sapiens
atagccccttcagta

SEQ ID NO: 1644782 - DNA, 15 bp, Homo sapiens
aatagccccttcagt

SEQ ID NO: 1644783 - DNA, 15 bp, Homo sapiens
gaatagccccttcag

SEQ ID NO: 1644784 - DNA, 15 bp, Homo sapiens
agaatagccccttca

SEQ ID NO: 1644785 - DNA, 15 bp, Homo sapiens
tagaatagccccttc

SEQ ID NO: 1644786 - DNA, 15 bp, Homo sapiens
ttagaatagcccctt

SEQ ID NO: 1644787 - DNA, 15 bp, Homo sapiens
tttagaatagcccct

SEQ ID NO: 1644788 - DNA, 15 bp, Homo sapiens
atttagaatagcccc

SEQ ID NO: 1644789 - DNA, 15 bp, Homo sapiens
catttagaatagccc

SEQ ID NO: 1644790 - DNA, 15 bp, Homo sapiens
acatttagaatagcc

SEQ ID NO: 1644791 - DNA, 15 bp, Homo sapiens
gacatttagaatagc

SEQ ID NO: 1644792 - DNA, 15 bp, Homo sapiens
ggacatttagaatag

SEQ ID NO: 1644793 - DNA, 15 bp, Homo sapiens
gggacatttagaata

SEQ ID NO: 1644794 - DNA, 15 bp, Homo sapiens
ggggacatttagaat

SEQ ID NO: 1644795 - DNA, 15 bp, Homo sapiens
gggggacatttagaa

SEQ ID NO: 1644796 - DNA, 15 bp, Homo sapiens
ggggggacatttaga

SEQ ID NO: 1644797 - DNA, 15 bp, Homo sapiens
cggggggacatttag

SEQ ID NO: 1644798 - DNA, 15 bp, Homo sapiens
gcggggggacattta

SEQ ID NO: 1644799 - DNA, 15 bp, Homo sapiens
ggcggggggacattt

SEQ ID NO: 1644800 - DNA, 15 bp, Homo sapiens
gggcggggggacatt

SEQ ID NO: 1644801 - DNA, 15 bp, Homo sapiens
tgggcggggggacat

SEQ ID NO: 1644802 - DNA, 15 bp, Homo sapiens
ttgggcggggggaca

SEQ ID NO: 1644803 - DNA, 15 bp, Homo sapiens
gttgggcggggggac

SEQ ID NO: 1644804 - DNA, 15 bp, Homo sapiens
tgttgggcgggggga

SEQ ID NO: 1644805 - DNA, 15 bp, Homo sapiens
gtgttgggcgggggg

SEQ ID NO: 1644806 - DNA, 15 bp, Homo sapiens
ggtgttgggcggggg

SEQ ID NO: 1644807 - DNA, 15 bp, Homo sapiens
tggtgttgggcgggg

SEQ ID NO: 1644808 - DNA, 15 bp, Homo sapiens
atggtgttgggcggg

SEQ ID NO: 1644809 - DNA, 15 bp, Homo sapiens
aatggtgttgggcgg

SEQ ID NO: 1644810 - DNA, 15 bp, Homo sapiens
taatggtgttgggcg

SEQ ID NO: 1644811 - DNA, 15 bp, Homo sapiens
ataatggtgttgggc

SEQ ID NO: 1644812 - DNA, 15 bp, Homo sapiens
cataatggtgttggg

SEQ ID NO: 1644813 - DNA, 15 bp, Homo sapiens
acataatggtgttgg

SEQ ID NO: 1644814 - DNA, 15 bp, Homo sapiens
tacataatggtgttg

SEQ ID NO: 1644815 - DNA, 15 bp, Homo sapiens
ttacataatggtgtt

SEQ ID NO: 1644816 - DNA, 15 bp, Homo sapiens
tttacataatggtgt

SEQ ID NO: 1644817 - DNA, 15 bp, Homo sapiens
gtttacataatggtg

SEQ ID NO: 1644818 - DNA, 15 bp, Homo sapiens
tgtttacataatggt

SEQ ID NO: 1644819 - DNA, 15 bp, Homo sapiens
atgtttacataatgg

SEQ ID NO: 1644820 - DNA, 15 bp, Homo sapiens
aatgtttacataatg

SEQ ID NO: 1644821 - DNA, 15 bp, Homo sapiens
gaatgtttacataat

SEQ ID NO: 1644822 - DNA, 15 bp, Homo sapiens
agaatgtttacataa

SEQ ID NO: 1644823 - DNA, 15 bp, Homo sapiens
gagaatgtttacata

SEQ ID NO: 1644824 - DNA, 15 bp, Homo sapiens
agagaatgtttacat

SEQ ID NO: 1644825 - DNA, 15 bp, Homo sapiens
tagagaatgtttaca

SEQ ID NO: 1644826 - DNA, 15 bp, Homo sapiens
ttagagaatgtttac

SEQ ID NO: 1644827 - DNA, 15 bp, Homo sapiens
attagagaatgttta

SEQ ID NO: 1644828 - DNA, 15 bp, Homo sapiens
tattagagaatgttt

SEQ ID NO: 1644829 - DNA, 15 bp, Homo sapiens
atattagagaatgtt

SEQ ID NO: 1644830 - DNA, 15 bp, Homo sapiens
aatattagagaatgt

SEQ ID NO: 1644831 - DNA, 15 bp, Homo sapiens
gaatattagagaatg

SEQ ID NO: 1644832 - DNA, 15 bp, Homo sapiens
cgaatattagagaat

SEQ ID NO: 1644833 - DNA, 15 bp, Homo sapiens
gcgaatattagagaa

SEQ ID NO: 1644834 - DNA, 15 bp, Homo sapiens
agcgaatattagaga

SEQ ID NO: 1644835 - DNA, 15 bp, Homo sapiens
tagcgaatattagag

SEQ ID NO: 1644836 - DNA, 15 bp, Homo sapiens
gtagcgaatattaga

SEQ ID NO: 1644837 - DNA, 15 bp, Homo sapiens
agtagcgaatattag

SEQ ID NO: 1644838 - DNA, 15 bp, Homo sapiens
aagtagcgaatatta

SEQ ID NO: 1644839 - DNA, 15 bp, Homo sapiens
taagtagcgaatatt

SEQ ID NO: 1644840 - DNA, 15 bp, Homo sapiens
ttaagtagcgaatat

SEQ ID NO: 1644841 - DNA, 15 bp, Homo sapiens
attaagtagcgaata

SEQ ID NO: 1644842 - DNA, 15 bp, Homo sapiens
aattaagtagcgaat

SEQ ID NO: 1644843 - DNA, 15 bp, Homo sapiens
aaattaagtagcgaa

SEQ ID NO: 1644844 - DNA, 15 bp, Homo sapiens
taaattaagtagcga

SEQ ID NO: 1644845 - DNA, 15 bp, Homo sapiens
ctaaattaagtagcg

SEQ ID NO: 1644846 - DNA, 15 bp, Homo sapiens
tctaaattaagtagc

SEQ ID NO: 1644847 - DNA, 15 bp, Homo sapiens
atctaaattaagtag

SEQ ID NO: 1644848 - DNA, 15 bp, Homo sapiens
aatctaaattaagta

SEQ ID NO: 1644849 - DNA, 15 bp, Homo sapiens
taatctaaattaagt

SEQ ID NO: 1644850 - DNA, 15 bp, Homo sapiens
ataatctaaattaag

SEQ ID NO: 1644851 - DNA, 15 bp, Homo sapiens
gataatctaaattaa

SEQ ID NO: 1644852 - DNA, 15 bp, Homo sapiens
ggataatctaaatta

SEQ ID NO: 1644853 - DNA, 15 bp, Homo sapiens
tggataatctaaatt

SEQ ID NO: 1644854 - DNA, 15 bp, Homo sapiens
gtggataatctaaat

SEQ ID NO: 1644855 - DNA, 15 bp, Homo sapiens
ggtggataatctaaa

SEQ ID NO: 1644856 - DNA, 15 bp, Homo sapiens
gggtggataatctaa

SEQ ID NO: 1644857 - DNA, 15 bp, Homo sapiens
agggtggataatcta

SEQ ID NO: 1644858 - DNA, 15 bp, Homo sapiens
aagggtggataatct

SEQ ID NO: 1644859 - DNA, 15 bp, Homo sapiens
gaagggtggataatc

SEQ ID NO: 1644860 - DNA, 15 bp, Homo sapiens
ggaagggtggataat

SEQ ID NO: 1644861 - DNA, 15 bp, Homo sapiens
aggaagggtggataa

SEQ ID NO: 1644862 - DNA, 15 bp, Homo sapiens
aaggaagggtggata

SEQ ID NO: 1644863 - DNA, 15 bp, Homo sapiens
gaaggaagggtggat

SEQ ID NO: 1644864 - DNA, 15 bp, Homo sapiens
agaaggaagggtgga

SEQ ID NO: 1644865 - DNA, 15 bp, Homo sapiens
cagaaggaagggtgg

SEQ ID NO: 1644866 - DNA, 15 bp, Homo sapiens
ccagaaggaagggtg

SEQ ID NO: 1644867 - DNA, 15 bp, Homo sapiens
ggccagaaggaaggg

SEQ ID NO: 1644868 - DNA, 15 bp, Homo sapiens
tggccagaaggaagg

SEQ ID NO: 1644869 - DNA, 15 bp, Homo sapiens
atggccagaaggaag

SEQ ID NO: 1644870 - DNA, 15 bp, Homo sapiens
aatggccagaaggaa

SEQ ID NO: 1644871 - DNA, 15 bp, Homo sapiens
caatggccagaagga

SEQ ID NO: 1644872 - DNA, 15 bp, Homo sapiens
gcaatggccagaagg

SEQ ID NO: 1644873 - DNA, 15 bp, Homo sapiens
tgcaatggccagaag

SEQ ID NO: 1644874 - DNA, 15 bp, Homo sapiens
atgcaatggccagaa

SEQ ID NO: 1644875 - DNA, 15 bp, Homo sapiens
aatgcaatggccaga

SEQ ID NO: 1644876 - DNA, 15 bp, Homo sapiens
gaatgcaatggccag

SEQ ID NO: 1644877 - DNA, 15 bp, Homo sapiens
ggaatgcaatggcca

SEQ ID NO: 1644878 - DNA, 15 bp, Homo sapiens
aggaatgcaatggcc

SEQ ID NO: 1644879 - DNA, 15 bp, Homo sapiens
aaggaatgcaatggc

SEQ ID NO: 1644880 - DNA, 15 bp, Homo sapiens
taaggaatgcaatgg

SEQ ID NO: 1644881 - DNA, 15 bp, Homo sapiens
ataaggaatgcaatg

SEQ ID NO: 1644882 - DNA, 15 bp, Homo sapiens
gataaggaatgcaat

SEQ ID NO: 1644883 - DNA, 15 bp, Homo sapiens
agataaggaatgcaa

SEQ ID NO: 1644884 - DNA, 15 bp, Homo sapiens
tagataaggaatgca

SEQ ID NO: 1644885 - DNA, 15 bp, Homo sapiens
ctagataaggaatgc

SEQ ID NO: 1644886 - DNA, 15 bp, Homo sapiens
gctagataaggaatg

SEQ ID NO: 1644887 - DNA, 15 bp, Homo sapiens
tgctagataaggaat

SEQ ID NO: 1644888 - DNA, 15 bp, Homo sapiens
ttgctagataaggaa

SEQ ID NO: 1644889 - DNA, 15 bp, Homo sapiens
attgctagataagga

SEQ ID NO: 1644890 - DNA, 15 bp, Homo sapiens
cattgctagataagg

SEQ ID NO: 1644891 - DNA, 15 bp, Homo sapiens
gcattgctagataag

SEQ ID NO: 1644892 - DNA, 15 bp, Homo sapiens
tgcattgctagataa

SEQ ID NO: 1644893 - DNA, 15 bp, Homo sapiens
ctgcattgctagata

SEQ ID NO: 1644894 - DNA, 15 bp, Homo sapiens
cctgcattgctagat

SEQ ID NO: 1644895 - DNA, 15 bp, Homo sapiens
tcctgcattgctaga

SEQ ID NO: 1644896 - DNA, 15 bp, Homo sapiens
ttcctgcattgctag

SEQ ID NO: 1644897 - DNA, 15 bp, Homo sapiens
tttcctgcattgcta

SEQ ID NO: 1644898 - DNA, 15 bp, Homo sapiens
ttttcctgcattgct

SEQ ID NO: 1644899 - DNA, 15 bp, Homo sapiens
cttttcctgcattgc

SEQ ID NO: 1644900 - DNA, 15 bp, Homo sapiens
ccttttcctgcattg

SEQ ID NO: 1644901 - DNA, 15 bp, Homo sapiens
cccttttcctgcatt

SEQ ID NO: 1644902 - DNA, 15 bp, Homo sapiens
gcccttttcctgcat

SEQ ID NO: 1644903 - DNA, 15 bp, Homo sapiens
tgcccttttcctgca

SEQ ID NO: 1644904 - DNA, 15 bp, Homo sapiens
ttgcccttttcctgc

SEQ ID NO: 1644905 - DNA, 15 bp, Homo sapiens
cttgcccttttcctg

SEQ ID NO: 1644906 - DNA, 15 bp, Homo sapiens
tcttgcccttttcct

SEQ ID NO: 1644907 - DNA, 15 bp, Homo sapiens
ttcttgcccttttcc

SEQ ID NO: 1644908 - DNA, 15 bp, Homo sapiens
tttcttgcccttttc

SEQ ID NO: 1644909 - DNA, 15 bp, Homo sapiens
atttcttgccctttt

SEQ ID NO: 1644910 - DNA, 15 bp, Homo sapiens
gatttcttgcccttt

SEQ ID NO: 1644911 - DNA, 15 bp, Homo sapiens
tgatttcttgccctt

SEQ ID NO: 1644912 - DNA, 15 bp, Homo sapiens
ttgatttcttgccct

SEQ ID NO: 1644913 - DNA, 15 bp, Homo sapiens
tttgatttcttgccc

SEQ ID NO: 1644914 - DNA, 15 bp, Homo sapiens
ctttgatttcttgcc

SEQ ID NO: 1644915 - DNA, 15 bp, Homo sapiens
cctttgatttcttgc

SEQ ID NO: 1644916 - DNA, 15 bp, Homo sapiens
ccctttgatttcttg

SEQ ID NO: 1644917 - DNA, 15 bp, Homo sapiens
tccctttgatttctt

SEQ ID NO: 1644918 - DNA, 15 bp, Homo sapiens
ttccctttgatttct

SEQ ID NO: 1644919 - DNA, 15 bp, Homo sapiens
cttccctttgatttc

SEQ ID NO: 1644920 - DNA, 15 bp, Homo sapiens
ccttccctttgattt

SEQ ID NO: 1644921 - DNA, 15 bp, Homo sapiens
tccttccctttgatt

SEQ ID NO: 1644922 - DNA, 15 bp, Homo sapiens
ttccttccctttgat

SEQ ID NO: 1644923 - DNA, 15 bp, Homo sapiens
attccttccctttga

SEQ ID NO: 1644924 - DNA, 15 bp, Homo sapiens
tattccttccctttg

SEQ ID NO: 1644925 - DNA, 15 bp, Homo sapiens
ttattccttcccttt

SEQ ID NO: 1644926 - DNA, 15 bp, Homo sapiens
tttattccttccctt

SEQ ID NO: 1644927 - DNA, 15 bp, Homo sapiens
ctttattccttccct

SEQ ID NO: 1644928 - DNA, 15 bp, Homo sapiens
cctttattccttccc

SEQ ID NO: 1644929 - DNA, 15 bp, Homo sapiens
ccctttattccttcc

SEQ ID NO: 1644930 - DNA, 15 bp, Homo sapiens
tccctttattccttc

SEQ ID NO: 1644931 - DNA, 15 bp, Homo sapiens
gtccctttattcctt

SEQ ID NO: 1644932 - DNA, 15 bp, Homo sapiens
agtccctttattcct

SEQ ID NO: 1644933 - DNA, 15 bp, Homo sapiens
aagtccctttattcc

SEQ ID NO: 1644934 - DNA, 15 bp, Homo sapiens
gaagtccctttattc

SEQ ID NO: 1644935 - DNA, 15 bp, Homo sapiens
agaagtccctttatt

SEQ ID NO: 1644936 - DNA, 15 bp, Homo sapiens
cagaagtccctttat

SEQ ID NO: 1644937 - DNA, 15 bp, Homo sapiens
acagaagtcccttta

SEQ ID NO: 1644938 - DNA, 15 bp, Homo sapiens
aacagaagtcccttt

SEQ ID NO: 1644939 - DNA, 15 bp, Homo sapiens
aaacagaagtccctt

SEQ ID NO: 1644940 - DNA, 15 bp, Homo sapiens
gaaacagaagtccct

SEQ ID NO: 1644941 - DNA, 15 bp, Homo sapiens
ggaaacagaagtccc

SEQ ID NO: 1644942 - DNA, 15 bp, Homo sapiens
tggaaacagaagtcc

SEQ ID NO: 1644943 - DNA, 15 bp, Homo sapiens
ctggaaacagaagtc

SEQ ID NO: 1644944 - DNA, 15 bp, Homo sapiens
tctggaaacagaagt

SEQ ID NO: 1644945 - DNA, 15 bp, Homo sapiens
gtctggaaacagaag

SEQ ID NO: 1644946 - DNA, 15 bp, Homo sapiens
agtctggaaacagaa

SEQ ID NO: 1644947 - DNA, 15 bp, Homo sapiens
cagtctggaaacaga

SEQ ID NO: 1644948 - DNA, 15 bp, Homo sapiens
acagtctggaaacag

SEQ ID NO: 1644949 - DNA, 15 bp, Homo sapiens
tacagtctggaaaca

SEQ ID NO: 1644950 - DNA, 15 bp, Homo sapiens
atacagtctggaaac

SEQ ID NO: 1644951 - DNA, 15 bp, Homo sapiens
aatacagtctggaaa

SEQ ID NO: 1644952 - DNA, 15 bp, Homo sapiens
aaatacagtctggaa

SEQ ID NO: 1644953 - DNA, 15 bp, Homo sapiens
aaaatacagtctgga

SEQ ID NO: 1644954 - DNA, 15 bp, Homo sapiens
taaaatacagtctgg

SEQ ID NO: 1644955 - DNA, 15 bp, Homo sapiens
ttaaaatacagtctg

SEQ ID NO: 1644956 - DNA, 15 bp, Homo sapiens
tttaaaatacagtct

SEQ ID NO: 1644957 - DNA, 15 bp, Homo sapiens
ctttaaaatacagtc

SEQ ID NO: 1644958 - DNA, 15 bp, Homo sapiens
cctttaaaatacagt

SEQ ID NO: 1644959 - DNA, 15 bp, Homo sapiens
ccctttaaaatacag

SEQ ID NO: 1644960 - DNA, 15 bp, Homo sapiens
tccctttaaaataca

SEQ ID NO: 1644961 - DNA, 15 bp, Homo sapiens
ttccctttaaaatac

SEQ ID NO: 1644962 - DNA, 15 bp, Homo sapiens
cttccctttaaaata

SEQ ID NO: 1644963 - DNA, 15 bp, Homo sapiens
acttccctttaaaat

SEQ ID NO: 1644964 - DNA, 15 bp, Homo sapiens
gacttccctttaaaa

SEQ ID NO: 1644965 - DNA, 15 bp, Homo sapiens
tgacttccctttaaa

SEQ ID NO: 1644966 - DNA, 15 bp, Homo sapiens
atgacttccctttaa

SEQ ID NO: 1644967 - DNA, 15 bp, Homo sapiens
catgacttcccttta

SEQ ID NO: 1644968 - DNA, 15 bp, Homo sapiens
ccatgacttcccttt

SEQ ID NO: 1644969 - DNA, 15 bp, Homo sapiens
accatgacttccctt

SEQ ID NO: 1644970 - DNA, 15 bp, Homo sapiens
aaccatgacttccct

SEQ ID NO: 1644971 - DNA, 15 bp, Homo sapiens
caaccatgacttccc

SEQ ID NO: 1644972 - DNA, 15 bp, Homo sapiens
ccaaccatgacttcc

SEQ ID NO: 1644973 - DNA, 15 bp, Homo sapiens
accaaccatgacttc

SEQ ID NO: 1644974 - DNA, 15 bp, Homo sapiens
aaccaaccatgactt

SEQ ID NO: 1644975 - DNA, 15 bp, Homo sapiens
taaccaaccatgact

SEQ ID NO: 1644976 - DNA, 15 bp, Homo sapiens
ctaaccaaccatgac

SEQ ID NO: 1644977 - DNA, 15 bp, Homo sapiens
gctaaccaaccatga

SEQ ID NO: 1644978 - DNA, 15 bp, Homo sapiens
cgctaaccaaccatg

SEQ ID NO: 1644979 - DNA, 15 bp, Homo sapiens
tcgctaaccaaccat

SEQ ID NO: 1644980 - DNA, 15 bp, Homo sapiens
atcgctaaccaacca

SEQ ID NO: 1644981 - DNA, 15 bp, Homo sapiens
aatcgctaaccaacc

SEQ ID NO: 1644982 - DNA, 15 bp, Homo sapiens
aaatcgctaaccaac

SEQ ID NO: 1644983 - DNA, 15 bp, Homo sapiens
aaaatcgctaaccaa

SEQ ID NO: 1644984 - DNA, 15 bp, Homo sapiens
gaaaatcgctaacca

SEQ ID NO: 1644985 - DNA, 15 bp, Homo sapiens
agaaaatcgctaacc

SEQ ID NO: 1644986 - DNA, 15 bp, Homo sapiens
aagaaaatcgctaac

SEQ ID NO: 1644987 - DNA, 15 bp, Homo sapiens
aaagaaaatcgctaa

SEQ ID NO: 1644988 - DNA, 15 bp, Homo sapiens
taaagaaaatcgcta

SEQ ID NO: 1644989 - DNA, 15 bp, Homo sapiens
ctaaagaaaatcgct

SEQ ID NO: 1644990 - DNA, 15 bp, Homo sapiens
gctaaagaaaatcgc

SEQ ID NO: 1644991 - DNA, 15 bp, Homo sapiens
agctaaagaaaatcg

SEQ ID NO: 1644992 - DNA, 15 bp, Homo sapiens
aagctaaagaaaatc

SEQ ID NO: 1644993 - DNA, 15 bp, Homo sapiens
aaagctaaagaaaat

SEQ ID NO: 1644994 - DNA, 15 bp, Homo sapiens
aaaagctaaagaaaa

SEQ ID NO: 1644995 - DNA, 15 bp, Homo sapiens
caaaagctaaagaaa

SEQ ID NO: 1644996 - DNA, 15 bp, Homo sapiens
gcaaaagctaaagaa

SEQ ID NO: 1644997 - DNA, 15 bp, Homo sapiens
agcaaaagctaaaga

SEQ ID NO: 1644998 - DNA, 15 bp, Homo sapiens
aagcaaaagctaaag

SEQ ID NO: 1644999 - DNA, 15 bp, Homo sapiens
aaagcaaaagctaaa

SEQ ID NO: 1645000 - DNA, 15 bp, Homo sapiens
caaagcaaaagctaa

SEQ ID NO: 1645001 - DNA, 15 bp, Homo sapiens
gcaaagcaaaagcta

SEQ ID NO: 1645002 - DNA, 15 bp, Homo sapiens
cgcaaagcaaaagct

SEQ ID NO: 1645003 - DNA, 15 bp, Homo sapiens
acgcaaagcaaaagc

SEQ ID NO: 1645004 - DNA, 15 bp, Homo sapiens
aacgcaaagcaaaag

SEQ ID NO: 1645005 - DNA, 15 bp, Homo sapiens
aaacgcaaagcaaaa

SEQ ID NO: 1645006 - DNA, 15 bp, Homo sapiens
caaacgcaaagcaaa

SEQ ID NO: 1645007 - DNA, 15 bp, Homo sapiens
gcaaacgcaaagcaa

SEQ ID NO: 1645008 - DNA, 15 bp, Homo sapiens
tgcaaacgcaaagca

SEQ ID NO: 1645009 - DNA, 15 bp, Homo sapiens
ctgcaaacgcaaagc

SEQ ID NO: 1645010 - DNA, 15 bp, Homo sapiens
tctgcaaacgcaaag

SEQ ID NO: 1645011 - DNA, 15 bp, Homo sapiens
ttctgcaaacgcaaa

SEQ ID NO: 1645012 - DNA, 15 bp, Homo sapiens
attctgcaaacgcaa

SEQ ID NO: 1645013 - DNA, 15 bp, Homo sapiens
tattctgcaaacgca

SEQ ID NO: 1645014 - DNA, 15 bp, Homo sapiens
ctattctgcaaacgc

SEQ ID NO: 1645015 - DNA, 15 bp, Homo sapiens
gctattctgcaaacg

SEQ ID NO: 1645016 - DNA, 15 bp, Homo sapiens
agctattctgcaaac

SEQ ID NO: 1645017 - DNA, 15 bp, Homo sapiens
tagctattctgcaaa

SEQ ID NO: 1645018 - DNA, 15 bp, Homo sapiens
ttagctattctgcaa

SEQ ID NO: 1645019 - DNA, 15 bp, Homo sapiens
attagctattctgca

SEQ ID NO: 1645020 - DNA, 15 bp, Homo sapiens
tattagctattctgc

SEQ ID NO: 1645021 - DNA, 15 bp, Homo sapiens
atattagctattctg

SEQ ID NO: 1645022 - DNA, 15 bp, Homo sapiens
aatattagctattct

SEQ ID NO: 1645023 - DNA, 15 bp, Homo sapiens
taatattagctattc

SEQ ID NO: 1645024 - DNA, 15 bp, Homo sapiens
ataatattagctatt

SEQ ID NO: 1645025 - DNA, 15 bp, Homo sapiens
aataatattagctat

SEQ ID NO: 1645026 - DNA, 15 bp, Homo sapiens
caataatattagcta

SEQ ID NO: 1645027 - DNA, 15 bp, Homo sapiens
acaataatattagct

SEQ ID NO: 1645028 - DNA, 15 bp, Homo sapiens
aacaataatattagc

SEQ ID NO: 1645029 - DNA, 15 bp, Homo sapiens
aaacaataatattag

SEQ ID NO: 1645030 - DNA, 15 bp, Homo sapiens
aaaacaataatatta

SEQ ID NO: 1645031 - DNA, 15 bp, Homo sapiens
taaaacaataatatt

SEQ ID NO: 1645032 - DNA, 15 bp, Homo sapiens
gtaaaacaataatat

SEQ ID NO: 1645033 - DNA, 15 bp, Homo sapiens
ggtaaaacaataata

SEQ ID NO: 1645034 - DNA, 15 bp, Homo sapiens
aggtaaaacaataat

SEQ ID NO: 1645035 - DNA, 15 bp, Homo sapiens
taggtaaaacaataa

SEQ ID NO: 1645036 - DNA, 15 bp, Homo sapiens
ataggtaaaacaata

SEQ ID NO: 1645037 - DNA, 15 bp, Homo sapiens
cataggtaaaacaat

SEQ ID NO: 1645038 - DNA, 15 bp, Homo sapiens
ccataggtaaaacaa

SEQ ID NO: 1645039 - DNA, 15 bp, Homo sapiens
cccataggtaaaaca

SEQ ID NO: 1645040 - DNA, 15 bp, Homo sapiens
tcccataggtaaaac

SEQ ID NO: 1645041 - DNA, 15 bp, Homo sapiens
ttcccataggtaaaa

SEQ ID NO: 1645042 - DNA, 15 bp, Homo sapiens
gttcccataggtaaa

SEQ ID NO: 1645043 - DNA, 15 bp, Homo sapiens
agttcccataggtaa

SEQ ID NO: 1645044 - DNA, 15 bp, Homo sapiens
cagttcccataggta

SEQ ID NO: 1645045 - DNA, 15 bp, Homo sapiens
ccagttcccataggt

SEQ ID NO: 1645046 - DNA, 15 bp, Homo sapiens
accagttcccatagg

SEQ ID NO: 1645047 - DNA, 15 bp, Homo sapiens
taccagttcccatag

SEQ ID NO: 1645048 - DNA, 15 bp, Homo sapiens
ataccagttcccata

SEQ ID NO: 1645049 - DNA, 15 bp, Homo sapiens
gataccagttcccat

SEQ ID NO: 1645050 - DNA, 15 bp, Homo sapiens
ggataccagttccca

SEQ ID NO: 1645051 - DNA, 15 bp, Homo sapiens
tggataccagttccc

SEQ ID NO: 1645052 - DNA, 15 bp, Homo sapiens
ttggataccagttcc

SEQ ID NO: 1645053 - DNA, 15 bp, Homo sapiens
attggataccagttc

SEQ ID NO: 1645054 - DNA, 15 bp, Homo sapiens
gattggataccagtt

SEQ ID NO: 1645055 - DNA, 15 bp, Homo sapiens
agattggataccagt

SEQ ID NO: 1645056 - DNA, 15 bp, Homo sapiens
tagattggataccag

SEQ ID NO: 1645057 - DNA, 15 bp, Homo sapiens
ctagattggatacca

SEQ ID NO: 1645058 - DNA, 15 bp, Homo sapiens
actagattggatacc

SEQ ID NO: 1645059 - DNA, 15 bp, Homo sapiens
cactagattggatac

SEQ ID NO: 1645060 - DNA, 15 bp, Homo sapiens
gcactagattggata

SEQ ID NO: 1645061 - DNA, 15 bp, Homo sapiens
ggcactagattggat

SEQ ID NO: 1645062 - DNA, 15 bp, Homo sapiens
gggcactagattgga

SEQ ID NO: 1645063 - DNA, 15 bp, Homo sapiens
tgggcactagattgg

SEQ ID NO: 1645064 - DNA, 15 bp, Homo sapiens
ttgggcactagattg

SEQ ID NO: 1645065 - DNA, 15 bp, Homo sapiens
attgggcactagatt

SEQ ID NO: 1645066 - DNA, 15 bp, Homo sapiens
cattgggcactagat

SEQ ID NO: 1645067 - DNA, 15 bp, Homo sapiens
ccattgggcactaga

SEQ ID NO: 1645068 - DNA, 15 bp, Homo sapiens
cccattgggcactag

SEQ ID NO: 1645069 - DNA, 15 bp, Homo sapiens
ccccattgggcacta

SEQ ID NO: 1645070 - DNA, 15 bp, Homo sapiens
gccccattgggcact

SEQ ID NO: 1645071 - DNA, 15 bp, Homo sapiens
agccccattgggcac

SEQ ID NO: 1645072 - DNA, 15 bp, Homo sapiens
cagccccattgggca

SEQ ID NO: 1645073 - DNA, 15 bp, Homo sapiens
acagccccattgggc

SEQ ID NO: 1645074 - DNA, 15 bp, Homo sapiens
aacagccccattggg

SEQ ID NO: 1645075 - DNA, 15 bp, Homo sapiens
caacagccccattgg

SEQ ID NO: 1645076 - DNA, 15 bp, Homo sapiens
acaacagccccattg

SEQ ID NO: 1645077 - DNA, 15 bp, Homo sapiens
aacaacagccccatt

SEQ ID NO: 1645078 - DNA, 15 bp, Homo sapiens
taacaacagccccat

SEQ ID NO: 1645079 - DNA, 15 bp, Homo sapiens
gtaacaacagcccca

SEQ ID NO: 1645080 - DNA, 15 bp, Homo sapiens
agtaacaacagcccc

SEQ ID NO: 1645081 - DNA, 15 bp, Homo sapiens
tagtaacaacagccc

SEQ ID NO: 1645082 - DNA, 15 bp, Homo sapiens
ctagtaacaacagcc

SEQ ID NO: 1645083 - DNA, 15 bp, Homo sapiens
tctagtaacaacagc

SEQ ID NO: 1645084 - DNA, 15 bp, Homo sapiens
ctctagtaacaacag

SEQ ID NO: 1645085 - DNA, 15 bp, Homo sapiens
gctctagtaacaaca

SEQ ID NO: 1645086 - DNA, 15 bp, Homo sapiens
agctctagtaacaac

SEQ ID NO: 1645087 - DNA, 15 bp, Homo sapiens
tagctctagtaacaa

SEQ ID NO: 1645088 - DNA, 15 bp, Homo sapiens
atagctctagtaaca

SEQ ID NO: 1645089 - DNA, 15 bp, Homo sapiens
aatagctctagtaac

SEQ ID NO: 1645090 - DNA, 15 bp, Homo sapiens
aaatagctctagtaa

SEQ ID NO: 1645091 - DNA, 15 bp, Homo sapiens
aaaatagctctagta

SEQ ID NO: 1645092 - DNA, 15 bp, Homo sapiens
gaaaatagctctagt

SEQ ID NO: 1645093 - DNA, 15 bp, Homo sapiens
agaaaatagctctag

SEQ ID NO: 1645094 - DNA, 15 bp, Homo sapiens
cagaaaatagctcta

SEQ ID NO: 1645095 - DNA, 15 bp, Homo sapiens
acagaaaatagctct

SEQ ID NO: 1645096 - DNA, 15 bp, Homo sapiens
cacagaaaatagctc

SEQ ID NO: 1645097 - DNA, 15 bp, Homo sapiens
tcacagaaaatagct

SEQ ID NO: 1645098 - DNA, 15 bp, Homo sapiens
ttcacagaaaatagc

SEQ ID NO: 1645099 - DNA, 15 bp, Homo sapiens
gttcacagaaaatag

SEQ ID NO: 1645100 - DNA, 15 bp, Homo sapiens
ggttcacagaaaata

SEQ ID NO: 1645101 - DNA, 15 bp, Homo sapiens
aggttcacagaaaat

SEQ ID NO: 1645102 - DNA, 15 bp, Homo sapiens
gaggttcacagaaaa

SEQ ID NO: 1645103 - DNA, 15 bp, Homo sapiens
tgaggttcacagaaa

SEQ ID NO: 1645104 - DNA, 15 bp, Homo sapiens
atgaggttcacagaa

SEQ ID NO: 1645105 - DNA, 15 bp, Homo sapiens
tatgaggttcacaga

SEQ ID NO: 1645106 - DNA, 15 bp, Homo sapiens
ctatgaggttcacag

SEQ ID NO: 1645107 - DNA, 15 bp, Homo sapiens
gctatgaggttcaca

SEQ ID NO: 1645108 - DNA, 15 bp, Homo sapiens
tgctatgaggttcac

SEQ ID NO: 1645109 - DNA, 15 bp, Homo sapiens
ctgctatgaggttca

SEQ ID NO: 1645110 - DNA, 15 bp, Homo sapiens
tctgctatgaggttc

SEQ ID NO: 1645111 - DNA, 15 bp, Homo sapiens
gtctgctatgaggtt

SEQ ID NO: 1645112 - DNA, 15 bp, Homo sapiens
agtctgctatgaggt

SEQ ID NO: 1645113 - DNA, 15 bp, Homo sapiens
gagtctgctatgagg

SEQ ID NO: 1645114 - DNA, 15 bp, Homo sapiens
agagtctgctatgag

SEQ ID NO: 1645115 - DNA, 15 bp, Homo sapiens
gagagtctgctatga

SEQ ID NO: 1645116 - DNA, 15 bp, Homo sapiens
agagagtctgctatg

SEQ ID NO: 1645117 - DNA, 15 bp, Homo sapiens
aagagagtctgctat

SEQ ID NO: 1645118 - DNA, 15 bp, Homo sapiens
gaagagagtctgcta

SEQ ID NO: 1645119 - DNA, 15 bp, Homo sapiens
agaagagagtctgct

SEQ ID NO: 1645120 - DNA, 15 bp, Homo sapiens
cagaagagagtctgc

SEQ ID NO: 1645121 - DNA, 15 bp, Homo sapiens
gcagaagagagtctg

SEQ ID NO: 1645122 - DNA, 15 bp, Homo sapiens
agcagaagagagtct

SEQ ID NO: 1645123 - DNA, 15 bp, Homo sapiens
cagcagaagagagtc

SEQ ID NO: 1645124 - DNA, 15 bp, Homo sapiens
tcagcagaagagagt

SEQ ID NO: 1645125 - DNA, 15 bp, Homo sapiens
ttcagcagaagagag

SEQ ID NO: 1645126 - DNA, 15 bp, Homo sapiens
tttcagcagaagaga

SEQ ID NO: 1645127 - DNA, 15 bp, Homo sapiens
ttttcagcagaagag

SEQ ID NO: 1645128 - DNA, 15 bp, Homo sapiens
attttcagcagaaga

SEQ ID NO: 1645129 - DNA, 15 bp, Homo sapiens
cattttcagcagaag

SEQ ID NO: 1645130 - DNA, 15 bp, Homo sapiens
tcattttcagcagaa

SEQ ID NO: 1645131 - DNA, 15 bp, Homo sapiens
ctcattttcagcaga

SEQ ID NO: 1645132 - DNA, 15 bp, Homo sapiens
tctcattttcagcag

SEQ ID NO: 1645133 - DNA, 15 bp, Homo sapiens
atctcattttcagca

SEQ ID NO: 1645134 - DNA, 15 bp, Homo sapiens
aatctcattttcagc

SEQ ID NO: 1645135 - DNA, 15 bp, Homo sapiens
aaatctcattttcag

SEQ ID NO: 1645136 - DNA, 15 bp, Homo sapiens
taaatctcattttca

SEQ ID NO: 1645137 - DNA, 15 bp, Homo sapiens
gtaaatctcattttc

SEQ ID NO: 1645138 - DNA, 15 bp, Homo sapiens
agtaaatctcatttt

SEQ ID NO: 1645139 - DNA, 15 bp, Homo sapiens
tagtaaatctcattt

SEQ ID NO: 1645140 - DNA, 15 bp, Homo sapiens
atagtaaatctcatt

SEQ ID NO: 1645141 - DNA, 15 bp, Homo sapiens
aatagtaaatctcat

SEQ ID NO: 1645142 - DNA, 15 bp, Homo sapiens
gaatagtaaatctca

SEQ ID NO: 1645143 - DNA, 15 bp, Homo sapiens
tgaatagtaaatctc

SEQ ID NO: 1645144 - DNA, 15 bp, Homo sapiens
atgaatagtaaatct

SEQ ID NO: 1645145 - DNA, 15 bp, Homo sapiens
aatgaatagtaaatc

SEQ ID NO: 1645146 - DNA, 15 bp, Homo sapiens
gaatgaatagtaaat

SEQ ID NO: 1645147 - DNA, 15 bp, Homo sapiens
agaatgaatagtaaa

SEQ ID NO: 1645148 - DNA, 15 bp, Homo sapiens
cagaatgaatagtaa

SEQ ID NO: 1645149 - DNA, 15 bp, Homo sapiens
ccagaatgaatagta

SEQ ID NO: 1645150 - DNA, 15 bp, Homo sapiens
cccagaatgaatagt

SEQ ID NO: 1645151 - DNA, 15 bp, Homo sapiens
acccagaatgaatag

SEQ ID NO: 1645152 - DNA, 15 bp, Homo sapiens
aacccagaatgaata

SEQ ID NO: 1645153 - DNA, 15 bp, Homo sapiens
gaacccagaatgaat

SEQ ID NO: 1645154 - DNA, 15 bp, Homo sapiens
agaacccagaatgaa

SEQ ID NO: 1645155 - DNA, 15 bp, Homo sapiens
gagaacccagaatga

SEQ ID NO: 1645156 - DNA, 15 bp, Homo sapiens
agagaacccagaatg

SEQ ID NO: 1645157 - DNA, 15 bp, Homo sapiens
gagagaacccagaat

SEQ ID NO: 1645158 - DNA, 15 bp, Homo sapiens
tgagagaacccagaa

SEQ ID NO: 1645159 - DNA, 15 bp, Homo sapiens
ttgagagaacccaga

SEQ ID NO: 1645160 - DNA, 15 bp, Homo sapiens
tttgagagaacccag

SEQ ID NO: 1645161 - DNA, 15 bp, Homo sapiens
ttttgagagaaccca

SEQ ID NO: 1645162 - DNA, 15 bp, Homo sapiens
cttttgagagaaccc

SEQ ID NO: 1645163 - DNA, 15 bp, Homo sapiens
gcttttgagagaacc

SEQ ID NO: 1645164 - DNA, 15 bp, Homo sapiens
ggcttttgagagaac

SEQ ID NO: 1645165 - DNA, 15 bp, Homo sapiens
tggcttttgagagaa

SEQ ID NO: 1645166 - DNA, 15 bp, Homo sapiens
ctggcttttgagaga

SEQ ID NO: 1645167 - DNA, 15 bp, Homo sapiens
gctggcttttgagag

SEQ ID NO: 1645168 - DNA, 15 bp, Homo sapiens
ggctggcttttgaga

SEQ ID NO: 1645169 - DNA, 15 bp, Homo sapiens
aggctggcttttgag

SEQ ID NO: 1645170 - DNA, 15 bp, Homo sapiens
caggctggcttttga

SEQ ID NO: 1645171 - DNA, 15 bp, Homo sapiens
gcaggctggcttttg

SEQ ID NO: 1645172 - DNA, 15 bp, Homo sapiens
ggcaggctggctttt

SEQ ID NO: 1645173 - DNA, 15 bp, Homo sapiens
tggcaggctggcttt

SEQ ID NO: 1645174 - DNA, 15 bp, Homo sapiens
atggcaggctggctt

SEQ ID NO: 1645175 - DNA, 15 bp, Homo sapiens
gatggcaggctggct

SEQ ID NO: 1645176 - DNA, 15 bp, Homo sapiens
agatggcaggctggc

SEQ ID NO: 1645177 - DNA, 15 bp, Homo sapiens
tagatggcaggctgg

SEQ ID NO: 1645178 - DNA, 15 bp, Homo sapiens
gtagatggcaggctg

SEQ ID NO: 1645179 - DNA, 15 bp, Homo sapiens
tgtagatggcaggct

SEQ ID NO: 1645180 - DNA, 15 bp, Homo sapiens
ttgtagatggcaggc

SEQ ID NO: 1645181 - DNA, 15 bp, Homo sapiens
attgtagatggcagg

SEQ ID NO: 1645182 - DNA, 15 bp, Homo sapiens
aattgtagatggcag

SEQ ID NO: 1645183 - DNA, 15 bp, Homo sapiens
taattgtagatggca

SEQ ID NO: 1645184 - DNA, 15 bp, Homo sapiens
ctaattgtagatggc

SEQ ID NO: 1645185 - DNA, 15 bp, Homo sapiens
gctaattgtagatgg

SEQ ID NO: 1645186 - DNA, 15 bp, Homo sapiens
cgctaattgtagatg

SEQ ID NO: 1645187 - DNA, 15 bp, Homo sapiens
ccgctaattgtagat

SEQ ID NO: 1645188 - DNA, 15 bp, Homo sapiens
accgctaattgtaga

SEQ ID NO: 1645189 - DNA, 15 bp, Homo sapiens
gaccgctaattgtag

SEQ ID NO: 1645190 - DNA, 15 bp, Homo sapiens
tgaccgctaattgta

SEQ ID NO: 1645191 - DNA, 15 bp, Homo sapiens
gtgaccgctaattgt

SEQ ID NO: 1645192 - DNA, 15 bp, Homo sapiens
tgtgaccgctaattg

SEQ ID NO: 1645193 - DNA, 15 bp, Homo sapiens
atgtgaccgctaatt

SEQ ID NO: 1645194 - DNA, 15 bp, Homo sapiens
gatgtgaccgctaat

SEQ ID NO: 1645195 - DNA, 15 bp, Homo sapiens
ggatgtgaccgctaa

SEQ ID NO: 1645196 - DNA, 15 bp, Homo sapiens
tggatgtgaccgcta

SEQ ID NO: 1645197 - DNA, 15 bp, Homo sapiens
atggatgtgaccgct

SEQ ID NO: 1645198 - DNA, 15 bp, Homo sapiens
aatggatgtgaccgc

SEQ ID NO: 1645199 - DNA, 15 bp, Homo sapiens
aaatggatgtgaccg

SEQ ID NO: 1645200 - DNA, 15 bp, Homo sapiens
caaatggatgtgacc

SEQ ID NO: 1645201 - DNA, 15 bp, Homo sapiens
ccaaatggatgtgac

SEQ ID NO: 1645202 - DNA, 15 bp, Homo sapiens
gccaaatggatgtga

SEQ ID NO: 1645203 - DNA, 15 bp, Homo sapiens
agccaaatggatgtg

SEQ ID NO: 1645204 - DNA, 15 bp, Homo sapiens
tagccaaatggatgt

SEQ ID NO: 1645205 - DNA, 15 bp, Homo sapiens
atagccaaatggatg

SEQ ID NO: 1645206 - DNA, 15 bp, Homo sapiens
tatagccaaatggat

SEQ ID NO: 1645207 - DNA, 15 bp, Homo sapiens
ctatagccaaatgga

SEQ ID NO: 1645208 - DNA, 15 bp, Homo sapiens
actatagccaaatgg

SEQ ID NO: 1645209 - DNA, 15 bp, Homo sapiens
aactatagccaaatg

SEQ ID NO: 1645210 - DNA, 15 bp, Homo sapiens
gaactatagccaaat

SEQ ID NO: 1645211 - DNA, 15 bp, Homo sapiens
tgaactatagccaaa

SEQ ID NO: 1645212 - DNA, 15 bp, Homo sapiens
ctgaactatagccaa

SEQ ID NO: 1645213 - DNA, 15 bp, Homo sapiens
cctgaactatagcca

SEQ ID NO: 1645214 - DNA, 15 bp, Homo sapiens
acctgaactatagcc

SEQ ID NO: 1645215 - DNA, 15 bp, Homo sapiens
tacctgaactatagc

SEQ ID NO: 1645216 - DNA, 15 bp, Homo sapiens
ttacctgaactatag

SEQ ID NO: 1645217 - DNA, 15 bp, Homo sapiens
cttacctgaactata

SEQ ID NO: 1645218 - DNA, 15 bp, Homo sapiens
acttacctgaactat

SEQ ID NO: 1645219 - DNA, 15 bp, Homo sapiens
gacttacctgaacta

SEQ ID NO: 1645220 - DNA, 15 bp, Homo sapiens
ggacttacctgaact

SEQ ID NO: 1645221 - DNA, 15 bp, Homo sapiens
tggacttacctgaac

SEQ ID NO: 1645222 - DNA, 15 bp, Homo sapiens
ttggacttacctgaa

SEQ ID NO: 1645223 - DNA, 15 bp, Homo sapiens
attggacttacctga

SEQ ID NO: 1645224 - DNA, 15 bp, Homo sapiens
aattggacttacctg

SEQ ID NO: 1645225 - DNA, 15 bp, Homo sapiens
gaattggacttacct

SEQ ID NO: 1645226 - DNA, 15 bp, Homo sapiens
agaattggacttacc

SEQ ID NO: 1645227 - DNA, 15 bp, Homo sapiens
aagaattggacttac

SEQ ID NO: 1645228 - DNA, 15 bp, Homo sapiens
gaagaattggactta

SEQ ID NO: 1645229 - DNA, 15 bp, Homo sapiens
tgaagaattggactt

SEQ ID NO: 1645230 - DNA, 15 bp, Homo sapiens
atgaagaattggact

SEQ ID NO: 1645231 - DNA, 15 bp, Homo sapiens
catgaagaattggac

SEQ ID NO: 1645232 - DNA, 15 bp, Homo sapiens
acatgaagaattgga

SEQ ID NO: 1645233 - DNA, 15 bp, Homo sapiens
gacatgaagaattgg

SEQ ID NO: 1645234 - DNA, 15 bp, Homo sapiens
ggacatgaagaattg

SEQ ID NO: 1645235 - DNA, 15 bp, Homo sapiens
aggacatgaagaatt

SEQ ID NO: 1645236 - DNA, 15 bp, Homo sapiens
caggacatgaagaat

SEQ ID NO: 1645237 - DNA, 15 bp, Homo sapiens
gcaggacatgaagaa

SEQ ID NO: 1645238 - DNA, 15 bp, Homo sapiens
agcaggacatgaaga

SEQ ID NO: 1645239 - DNA, 15 bp, Homo sapiens
aagcaggacatgaag

SEQ ID NO: 1645240 - DNA, 15 bp, Homo sapiens
gaagcaggacatgaa

SEQ ID NO: 1645241 - DNA, 15 bp, Homo sapiens
agaagcaggacatga

SEQ ID NO: 1645242 - DNA, 15 bp, Homo sapiens
gagaagcaggacatg

SEQ ID NO: 1645243 - DNA, 15 bp, Homo sapiens
tgagaagcaggacat

SEQ ID NO: 1645244 - DNA, 15 bp, Homo sapiens
ctgagaagcaggaca

SEQ ID NO: 1645245 - DNA, 15 bp, Homo sapiens
gctgagaagcaggac

SEQ ID NO: 1645246 - DNA, 15 bp, Homo sapiens
agctgagaagcagga

SEQ ID NO: 1645247 - DNA, 15 bp, Homo sapiens
gagctgagaagcagg

SEQ ID NO: 1645248 - DNA, 15 bp, Homo sapiens
agagctgagaagcag

SEQ ID NO: 1645249 - DNA, 15 bp, Homo sapiens
gagagctgagaagca

SEQ ID NO: 1645250 - DNA, 15 bp, Homo sapiens
agagagctgagaagc

SEQ ID NO: 1645251 - DNA, 15 bp, Homo sapiens
cagagagctgagaag

SEQ ID NO: 1645252 - DNA, 15 bp, Homo sapiens
gcagagagctgagaa

SEQ ID NO: 1645253 - DNA, 15 bp, Homo sapiens
agcagagagctgaga

SEQ ID NO: 1645254 - DNA, 15 bp, Homo sapiens
cagcagagagctgag

SEQ ID NO: 1645255 - DNA, 15 bp, Homo sapiens
gcagcagagagctga

SEQ ID NO: 1645256 - DNA, 15 bp, Homo sapiens
agcagcagagagctg

SEQ ID NO: 1645257 - DNA, 15 bp, Homo sapiens
gagcagcagagagct

SEQ ID NO: 1645258 - DNA, 15 bp, Homo sapiens
tgagcagcagagagc

SEQ ID NO: 1645259 - DNA, 15 bp, Homo sapiens
ctgagcagcagagag

SEQ ID NO: 1645260 - DNA, 15 bp, Homo sapiens
tctgagcagcagaga

SEQ ID NO: 1645261 - DNA, 15 bp, Homo sapiens
ggctctgagcagcag

SEQ ID NO: 1645262 - DNA, 15 bp, Homo sapiens
tggctctgagcagca

SEQ ID NO: 1645263 - DNA, 15 bp, Homo sapiens
tttggctctgagcag

SEQ ID NO: 1645264 - DNA, 15 bp, Homo sapiens
ttttggctctgagca

SEQ ID NO: 1645265 - DNA, 15 bp, Homo sapiens
tttttggctctgagc

SEQ ID NO: 1645266 - DNA, 15 bp, Homo sapiens
gtttttggctctgag

SEQ ID NO: 1645267 - DNA, 15 bp, Homo sapiens
ggtttttggctctga

SEQ ID NO: 1645268 - DNA, 15 bp, Homo sapiens
aggtttttggctctg

SEQ ID NO: 1645269 - DNA, 15 bp, Homo sapiens
aaggtttttggctct

SEQ ID NO: 1645270 - DNA, 15 bp, Homo sapiens
taaggtttttggctc

SEQ ID NO: 1645271 - DNA, 15 bp, Homo sapiens
ataaggtttttggct

SEQ ID NO: 1645272 - DNA, 15 bp, Homo sapiens
gataaggtttttggc

SEQ ID NO: 1645273 - DNA, 15 bp, Homo sapiens
agataaggtttttgg

SEQ ID NO: 1645274 - DNA, 15 bp, Homo sapiens
aagataaggtttttg

SEQ ID NO: 1645275 - DNA, 15 bp, Homo sapiens
taagataaggttttt

SEQ ID NO: 1645276 - DNA, 15 bp, Homo sapiens
ctaagataaggtttt

SEQ ID NO: 1645277 - DNA, 15 bp, Homo sapiens
tctaagataaggttt

SEQ ID NO: 1645278 - DNA, 15 bp, Homo sapiens
ttctaagataaggtt

SEQ ID NO: 1645279 - DNA, 15 bp, Homo sapiens
gttctaagataaggt

SEQ ID NO: 1645280 - DNA, 15 bp, Homo sapiens
ggttctaagataagg

SEQ ID NO: 1645281 - DNA, 15 bp, Homo sapiens
gggttctaagataag

SEQ ID NO: 1645282 - DNA, 15 bp, Homo sapiens
ggggttctaagataa

SEQ ID NO: 1645283 - DNA, 15 bp, Homo sapiens
tggggttctaagata

SEQ ID NO: 1645284 - DNA, 15 bp, Homo sapiens
ttggggttctaagat

SEQ ID NO: 1645285 - DNA, 15 bp, Homo sapiens
tttggggttctaaga

SEQ ID NO: 1645286 - DNA, 15 bp, Homo sapiens
ttttggggttctaag

SEQ ID NO: 1645287 - DNA, 15 bp, Homo sapiens
attttggggttctaa

SEQ ID NO: 1645288 - DNA, 15 bp, Homo sapiens
tattttggggttcta

SEQ ID NO: 1645289 - DNA, 15 bp, Homo sapiens
gtattttggggttct

SEQ ID NO: 1645290 - DNA, 15 bp, Homo sapiens
tgtattttggggttc

SEQ ID NO: 1645291 - DNA, 15 bp, Homo sapiens
atgtattttggggtt

SEQ ID NO: 1645292 - DNA, 15 bp, Homo sapiens
catgtattttggggt

SEQ ID NO: 1645293 - DNA, 15 bp, Homo sapiens
acatgtattttgggg

SEQ ID NO: 1645294 - DNA, 15 bp, Homo sapiens
gacatgtattttggg

SEQ ID NO: 1645295 - DNA, 15 bp, Homo sapiens
agacatgtattttgg

SEQ ID NO: 1645296 - DNA, 15 bp, Homo sapiens
tagacatgtattttg

SEQ ID NO: 1645297 - DNA, 15 bp, Homo sapiens
ctagacatgtatttt

SEQ ID NO: 1645298 - DNA, 15 bp, Homo sapiens
actagacatgtattt

SEQ ID NO: 1645299 - DNA, 15 bp, Homo sapiens
aactagacatgtatt

SEQ ID NO: 1645300 - DNA, 15 bp, Homo sapiens
caactagacatgtat

SEQ ID NO: 1645301 - DNA, 15 bp, Homo sapiens
gcaactagacatgta

SEQ ID NO: 1645302 - DNA, 15 bp, Homo sapiens
agcaactagacatgt

SEQ ID NO: 1645303 - DNA, 15 bp, Homo sapiens
cagcaactagacatg

SEQ ID NO: 1645304 - DNA, 15 bp, Homo sapiens
acagcaactagacat

SEQ ID NO: 1645305 - DNA, 15 bp, Homo sapiens
tacagcaactagaca

SEQ ID NO: 1645306 - DNA, 15 bp, Homo sapiens
atacagcaactagac

SEQ ID NO: 1645307 - DNA, 15 bp, Homo sapiens
gatacagcaactaga

SEQ ID NO: 1645308 - DNA, 15 bp, Homo sapiens
tgatacagcaactag

SEQ ID NO: 1645309 - DNA, 15 bp, Homo sapiens
ttgatacagcaacta

SEQ ID NO: 1645310 - DNA, 15 bp, Homo sapiens
tttgatacagcaact

SEQ ID NO: 1645311 - DNA, 15 bp, Homo sapiens
ctttgatacagcaac

SEQ ID NO: 1645312 - DNA, 15 bp, Homo sapiens
tctttgatacagcaa

SEQ ID NO: 1645313 - DNA, 15 bp, Homo sapiens
gtctttgatacagca

SEQ ID NO: 1645314 - DNA, 15 bp, Homo sapiens
ggtctttgatacagc

SEQ ID NO: 1645315 - DNA, 15 bp, Homo sapiens
tggtctttgatacag

SEQ ID NO: 1645316 - DNA, 15 bp, Homo sapiens
ctggtctttgataca

SEQ ID NO: 1645317 - DNA, 15 bp, Homo sapiens
cctggtctttgatac

SEQ ID NO: 1645318 - DNA, 15 bp, Homo sapiens
acctggtctttgata

SEQ ID NO: 1645319 - DNA, 15 bp, Homo sapiens
tacctggtctttgat

SEQ ID NO: 1645320 - DNA, 15 bp, Homo sapiens
ctacctggtctttga

SEQ ID NO: 1645321 - DNA, 15 bp, Homo sapiens
gctacctggtctttg

SEQ ID NO: 1645322 - DNA, 15 bp, Homo sapiens
tgctacctggtcttt

SEQ ID NO: 1645323 - DNA, 15 bp, Homo sapiens
ctgctacctggtctt

SEQ ID NO: 1645324 - DNA, 15 bp, Homo sapiens
gctgctacctggtct

SEQ ID NO: 1645325 - DNA, 15 bp, Homo sapiens
ggctgctacctggtc

SEQ ID NO: 1645326 - DNA, 15 bp, Homo sapiens
aggctgctacctggt

SEQ ID NO: 1645327 - DNA, 15 bp, Homo sapiens
aaggctgctacctgg

SEQ ID NO: 1645328 - DNA, 15 bp, Homo sapiens
aaaggctgctacctg

SEQ ID NO: 1645329 - DNA, 15 bp, Homo sapiens
taaaggctgctacct

SEQ ID NO: 1645330 - DNA, 15 bp, Homo sapiens
gtaaaggctgctacc

SEQ ID NO: 1645331 - DNA, 15 bp, Homo sapiens
tgtaaaggctgctac

SEQ ID NO: 1645332 - DNA, 15 bp, Homo sapiens
ctgtaaaggctgcta

SEQ ID NO: 1645333 - DNA, 15 bp, Homo sapiens
tctgtaaaggctgct

SEQ ID NO: 1645334 - DNA, 15 bp, Homo sapiens
ttctgtaaaggctgc

SEQ ID NO: 1645335 - DNA, 15 bp, Homo sapiens
tttctgtaaaggctg

SEQ ID NO: 1645336 - DNA, 15 bp, Homo sapiens
ctttctgtaaaggct

SEQ ID NO: 1645337 - DNA, 15 bp, Homo sapiens
actttctgtaaaggc

SEQ ID NO: 1645338 - DNA, 15 bp, Homo sapiens
gactttctgtaaagg

SEQ ID NO: 1645339 - DNA, 15 bp, Homo sapiens
ggactttctgtaaag

SEQ ID NO: 1645340 - DNA, 15 bp, Homo sapiens
gggactttctgtaaa

SEQ ID NO: 1645341 - DNA, 15 bp, Homo sapiens
agggactttctgtaa

SEQ ID NO: 1645342 - DNA, 15 bp, Homo sapiens
aagggactttctgta

SEQ ID NO: 1645343 - DNA, 15 bp, Homo sapiens
aaagggactttctgt

SEQ ID NO: 1645344 - DNA, 15 bp, Homo sapiens
aaaagggactttctg

SEQ ID NO: 1645345 - DNA, 15 bp, Homo sapiens
gaaaagggactttct

SEQ ID NO: 1645346 - DNA, 15 bp, Homo sapiens
agaaaagggactttc

SEQ ID NO: 1645347 - DNA, 15 bp, Homo sapiens
gagaaaagggacttt

SEQ ID NO: 1645348 - DNA, 15 bp, Homo sapiens
tgagaaaagggactt

SEQ ID NO: 1645349 - DNA, 15 bp, Homo sapiens
ctgagaaaagggact

SEQ ID NO: 1645350 - DNA, 15 bp, Homo sapiens
tctgagaaaagggac

SEQ ID NO: 1645351 - DNA, 15 bp, Homo sapiens
ttctgagaaaaggga

SEQ ID NO: 1645352 - DNA, 15 bp, Homo sapiens
attctgagaaaaggg

SEQ ID NO: 1645353 - DNA, 15 bp, Homo sapiens
gattctgagaaaagg

SEQ ID NO: 1645354 - DNA, 15 bp, Homo sapiens
agattctgagaaaag

SEQ ID NO: 1645355 - DNA, 15 bp, Homo sapiens
tagattctgagaaaa

SEQ ID NO: 1645356 - DNA, 15 bp, Homo sapiens
ctagattctgagaaa

SEQ ID NO: 1645357 - DNA, 15 bp, Homo sapiens
actagattctgagaa

SEQ ID NO: 1645358 - DNA, 15 bp, Homo sapiens
aactagattctgaga

SEQ ID NO: 1645359 - DNA, 15 bp, Homo sapiens
caactagattctgag

SEQ ID NO: 1645360 - DNA, 15 bp, Homo sapiens
tcaactagattctga

SEQ ID NO: 1645361 - DNA, 15 bp, Homo sapiens
ctcaactagattctg

SEQ ID NO: 1645362 - DNA, 15 bp, Homo sapiens
gctcaactagattct

SEQ ID NO: 1645363 - DNA, 15 bp, Homo sapiens
ggctcaactagattc

SEQ ID NO: 1645364 - DNA, 15 bp, Homo sapiens
tggctcaactagatt

SEQ ID NO: 1645365 - DNA, 15 bp, Homo sapiens
ttggctcaactagat

SEQ ID NO: 1645366 - DNA, 15 bp, Homo sapiens
attggctcaactaga

SEQ ID NO: 1645367 - DNA, 15 bp, Homo sapiens
tattggctcaactag

SEQ ID NO: 1645368 - DNA, 15 bp, Homo sapiens
gtattggctcaacta

SEQ ID NO: 1645369 - DNA, 15 bp, Homo sapiens
agtattggctcaact

SEQ ID NO: 1645370 - DNA, 15 bp, Homo sapiens
tagtattggctcaac

SEQ ID NO: 1645371 - DNA, 15 bp, Homo sapiens
atagtattggctcaa

SEQ ID NO: 1645372 - DNA, 15 bp, Homo sapiens
catagtattggctca

SEQ ID NO: 1645373 - DNA, 15 bp, Homo sapiens
gcatagtattggctc

SEQ ID NO: 1645374 - DNA, 15 bp, Homo sapiens
tgcatagtattggct

SEQ ID NO: 1645375 - DNA, 15 bp, Homo sapiens
ctgcatagtattggc

SEQ ID NO: 1645376 - DNA, 15 bp, Homo sapiens
actgcatagtattgg

SEQ ID NO: 1645377 - DNA, 15 bp, Homo sapiens
cactgcatagtattg

SEQ ID NO: 1645378 - DNA, 15 bp, Homo sapiens
acactgcatagtatt

SEQ ID NO: 1645379 - DNA, 15 bp, Homo sapiens
gacactgcatagtat

SEQ ID NO: 1645380 - DNA, 15 bp, Homo sapiens
ggacactgcatagta

SEQ ID NO: 1645381 - DNA, 15 bp, Homo sapiens
tggacactgcatagt

SEQ ID NO: 1645382 - DNA, 15 bp, Homo sapiens
gtggacactgcatag

SEQ ID NO: 1645383 - DNA, 15 bp, Homo sapiens
agtggacactgcata

SEQ ID NO: 1645384 - DNA, 15 bp, Homo sapiens
tagtggacactgcat

SEQ ID NO: 1645385 - DNA, 15 bp, Homo sapiens
atagtggacactgca

SEQ ID NO: 1645386 - DNA, 15 bp, Homo sapiens
tatagtggacactgc

SEQ ID NO: 1645387 - DNA, 15 bp, Homo sapiens
atatagtggacactg

SEQ ID NO: 1645388 - DNA, 15 bp, Homo sapiens
aatatagtggacact

SEQ ID NO: 1645389 - DNA, 15 bp, Homo sapiens
gaatatagtggacac

SEQ ID NO: 1645390 - DNA, 15 bp, Homo sapiens
agaatatagtggaca

SEQ ID NO: 1645391 - DNA, 15 bp, Homo sapiens
aagaatatagtggac

SEQ ID NO: 1645392 - DNA, 15 bp, Homo sapiens
gaagaatatagtgga

SEQ ID NO: 1645393 - DNA, 15 bp, Homo sapiens
agaagaatatagtgg

SEQ ID NO: 1645394 - DNA, 15 bp, Homo sapiens
aagaagaatatagtg

SEQ ID NO: 1645395 - DNA, 15 bp, Homo sapiens
caagaagaatatagt

SEQ ID NO: 1645396 - DNA, 15 bp, Homo sapiens
ccaagaagaatatag

SEQ ID NO: 1645397 - DNA, 15 bp, Homo sapiens
accaagaagaatata

SEQ ID NO: 1645398 - DNA, 15 bp, Homo sapiens
aaccaagaagaatat

SEQ ID NO: 1645399 - DNA, 15 bp, Homo sapiens
gaaccaagaagaata

SEQ ID NO: 1645400 - DNA, 15 bp, Homo sapiens
tgaaccaagaagaat

SEQ ID NO: 1645401 - DNA, 15 bp, Homo sapiens
atgaaccaagaagaa

SEQ ID NO: 1645402 - DNA, 15 bp, Homo sapiens
aatgaaccaagaaga

SEQ ID NO: 1645403 - DNA, 15 bp, Homo sapiens
gaatgaaccaagaag

SEQ ID NO: 1645404 - DNA, 15 bp, Homo sapiens
agaatgaaccaagaa

SEQ ID NO: 1645405 - DNA, 15 bp, Homo sapiens
gagaatgaaccaaga

SEQ ID NO: 1645406 - DNA, 15 bp, Homo sapiens
agagaatgaaccaag

SEQ ID NO: 1645407 - DNA, 15 bp, Homo sapiens
aagagaatgaaccaa

SEQ ID NO: 1645408 - DNA, 15 bp, Homo sapiens
aaagagaatgaacca

SEQ ID NO: 1645409 - DNA, 15 bp, Homo sapiens
gaaagagaatgaacc

SEQ ID NO: 1645410 - DNA, 15 bp, Homo sapiens
agaaagagaatgaac

SEQ ID NO: 1645411 - DNA, 15 bp, Homo sapiens
aagaaagagaatgaa

SEQ ID NO: 1645412 - DNA, 15 bp, Homo sapiens
aaaagaaagagaatg

SEQ ID NO: 1645413 - DNA, 15 bp, Homo sapiens
caaaagaaagagaat

SEQ ID NO: 1645414 - DNA, 15 bp, Homo sapiens
ccaaaagaaagagaa

SEQ ID NO: 1645415 - DNA, 15 bp, Homo sapiens
tccaaaagaaagaga

SEQ ID NO: 1645416 - DNA, 15 bp, Homo sapiens
ctccaaaagaaagag

SEQ ID NO: 1645417 - DNA, 15 bp, Homo sapiens
cctccaaaagaaaga

SEQ ID NO: 1645418 - DNA, 15 bp, Homo sapiens
gcctccaaaagaaag

SEQ ID NO: 1645419 - DNA, 15 bp, Homo sapiens
tgcctccaaaagaaa

SEQ ID NO: 1645420 - DNA, 15 bp, Homo sapiens
ttgcctccaaaagaa

SEQ ID NO: 1645421 - DNA, 15 bp, Homo sapiens
gttgcctccaaaaga

SEQ ID NO: 1645422 - DNA, 15 bp, Homo sapiens
tgttgcctccaaaag

SEQ ID NO: 1645423 - DNA, 15 bp, Homo sapiens
ctgttgcctccaaaa

SEQ ID NO: 1645424 - DNA, 15 bp, Homo sapiens
gctgttgcctccaaa

SEQ ID NO: 1645425 - DNA, 15 bp, Homo sapiens
agctgttgcctccaa

SEQ ID NO: 1645426 - DNA, 15 bp, Homo sapiens
aagctgttgcctcca

SEQ ID NO: 1645427 - DNA, 15 bp, Homo sapiens
taagctgttgcctcc

SEQ ID NO: 1645428 - DNA, 15 bp, Homo sapiens
gtaagctgttgcctc

SEQ ID NO: 1645429 - DNA, 15 bp, Homo sapiens
agtaagctgttgcct

SEQ ID NO: 1645430 - DNA, 15 bp, Homo sapiens
tagtaagctgttgcc

SEQ ID NO: 1645431 - DNA, 15 bp, Homo sapiens
atagtaagctgttgc

SEQ ID NO: 1645432 - DNA, 15 bp, Homo sapiens
catagtaagctgttg

SEQ ID NO: 1645433 - DNA, 15 bp, Homo sapiens
ccatagtaagctgtt

SEQ ID NO: 1645434 - DNA, 15 bp, Homo sapiens
accatagtaagctgt

SEQ ID NO: 1645435 - DNA, 15 bp, Homo sapiens
caccatagtaagctg

SEQ ID NO: 1645436 - DNA, 15 bp, Homo sapiens
tcaccatagtaagct

SEQ ID NO: 1645437 - DNA, 15 bp, Homo sapiens
ctcaccatagtaagc

SEQ ID NO: 1645438 - DNA, 15 bp, Homo sapiens
cctcaccatagtaag

SEQ ID NO: 1645439 - DNA, 15 bp, Homo sapiens
tcctcaccatagtaa

SEQ ID NO: 1645440 - DNA, 15 bp, Homo sapiens
gtcctcaccatagta

SEQ ID NO: 1645441 - DNA, 15 bp, Homo sapiens
tgtcctcaccatagt

SEQ ID NO: 1645442 - DNA, 15 bp, Homo sapiens
ttgtcctcaccatag

SEQ ID NO: 1645443 - DNA, 15 bp, Homo sapiens
gttgtcctcaccata

SEQ ID NO: 1645444 - DNA, 15 bp, Homo sapiens
agttgtcctcaccat

SEQ ID NO: 1645445 - DNA, 15 bp, Homo sapiens
cagttgtcctcacca

SEQ ID NO: 1645446 - DNA, 15 bp, Homo sapiens
ccagttgtcctcacc

SEQ ID NO: 1645447 - DNA, 15 bp, Homo sapiens
tccagttgtcctcac

SEQ ID NO: 1645448 - DNA, 15 bp, Homo sapiens
ttccagttgtcctca

SEQ ID NO: 1645449 - DNA, 15 bp, Homo sapiens
attccagttgtcctc

SEQ ID NO: 1645450 - DNA, 15 bp, Homo sapiens
gattccagttgtcct

SEQ ID NO: 1645451 - DNA, 15 bp, Homo sapiens
ggattccagttgtcc

SEQ ID NO: 1645452 - DNA, 15 bp, Homo sapiens
tggattccagttgtc

SEQ ID NO: 1645453 - DNA, 15 bp, Homo sapiens
atggattccagttgt

SEQ ID NO: 1645454 - DNA, 15 bp, Homo sapiens
gatggattccagttg

SEQ ID NO: 1645455 - DNA, 15 bp, Homo sapiens
agatggattccagtt

SEQ ID NO: 1645456 - DNA, 15 bp, Homo sapiens
gagatggattccagt

SEQ ID NO: 1645457 - DNA, 15 bp, Homo sapiens
agagatggattccag

SEQ ID NO: 1645458 - DNA, 15 bp, Homo sapiens
tagagatggattcca

SEQ ID NO: 1645459 - DNA, 15 bp, Homo sapiens
gtagagatggattcc

SEQ ID NO: 1645460 - DNA, 15 bp, Homo sapiens
ggtagagatggattc

SEQ ID NO: 1645461 - DNA, 15 bp, Homo sapiens
aggtagagatggatt

SEQ ID NO: 1645462 - DNA, 15 bp, Homo sapiens
taggtagagatggat

SEQ ID NO: 1645463 - DNA, 15 bp, Homo sapiens
ataggtagagatgga

SEQ ID NO: 1645464 - DNA, 15 bp, Homo sapiens
aataggtagagatgg

SEQ ID NO: 1645465 - DNA, 15 bp, Homo sapiens
gaataggtagagatg

SEQ ID NO: 1645466 - DNA, 15 bp, Homo sapiens
tgaataggtagagat

SEQ ID NO: 1645467 - DNA, 15 bp, Homo sapiens
gtgaataggtagaga

SEQ ID NO: 1645468 - DNA, 15 bp, Homo sapiens
ggtgaataggtagag

SEQ ID NO: 1645469 - DNA, 15 bp, Homo sapiens
tggtgaataggtaga

SEQ ID NO: 1645470 - DNA, 15 bp, Homo sapiens
gtggtgaataggtag

SEQ ID NO: 1645471 - DNA, 15 bp, Homo sapiens
agtggtgaataggta

SEQ ID NO: 1645472 - DNA, 15 bp, Homo sapiens
aagtggtgaataggt

SEQ ID NO: 1645473 - DNA, 15 bp, Homo sapiens
aaagtggtgaatagg

SEQ ID NO: 1645474 - DNA, 15 bp, Homo sapiens
aaaagtggtgaatag

SEQ ID NO: 1645475 - DNA, 15 bp, Homo sapiens
aaaaagtggtgaata

SEQ ID NO: 1645476 - DNA, 15 bp, Homo sapiens
taaaaagtggtgaat

SEQ ID NO: 1645477 - DNA, 15 bp, Homo sapiens
ttaaaaagtggtgaa

SEQ ID NO: 1645478 - DNA, 15 bp, Homo sapiens
cttaaaaagtggtga

SEQ ID NO: 1645479 - DNA, 15 bp, Homo sapiens
acttaaaaagtggtg

SEQ ID NO: 1645480 - DNA, 15 bp, Homo sapiens
tacttaaaaagtggt

SEQ ID NO: 1645481 - DNA, 15 bp, Homo sapiens
ctacttaaaaagtgg

SEQ ID NO: 1645482 - DNA, 15 bp, Homo sapiens
actacttaaaaagtg

SEQ ID NO: 1645483 - DNA, 15 bp, Homo sapiens
tactacttaaaaagt

SEQ ID NO: 1645484 - DNA, 15 bp, Homo sapiens
ttactacttaaaaag

SEQ ID NO: 1645485 - DNA, 15 bp, Homo sapiens
tttactacttaaaaa

SEQ ID NO: 1645486 - DNA, 15 bp, Homo sapiens
ttttactacttaaaa

SEQ ID NO: 1645487 - DNA, 15 bp, Homo sapiens
attttactacttaaa

SEQ ID NO: 1645488 - DNA, 15 bp, Homo sapiens
aattttactacttaa

SEQ ID NO: 1645489 - DNA, 15 bp, Homo sapiens
caattttactactta

SEQ ID NO: 1645490 - DNA, 15 bp, Homo sapiens
ccaattttactactt

SEQ ID NO: 1645491 - DNA, 15 bp, Homo sapiens
accaattttactact

SEQ ID NO: 1645492 - DNA, 15 bp, Homo sapiens
taccaattttactac

SEQ ID NO: 1645493 - DNA, 15 bp, Homo sapiens
ctaccaattttacta

SEQ ID NO: 1645494 - DNA, 15 bp, Homo sapiens
gctaccaattttact

SEQ ID NO: 1645495 - DNA, 15 bp, Homo sapiens
agctaccaattttac

SEQ ID NO: 1645496 - DNA, 15 bp, Homo sapiens
gagctaccaatttta

SEQ ID NO: 1645497 - DNA, 15 bp, Homo sapiens
tgagctaccaatttt

SEQ ID NO: 1645498 - DNA, 15 bp, Homo sapiens
ttgagctaccaattt

SEQ ID NO: 1645499 - DNA, 15 bp, Homo sapiens
tttgagctaccaatt

SEQ ID NO: 1645500 - DNA, 15 bp, Homo sapiens
ttttgagctaccaat

SEQ ID NO: 1645501 - DNA, 15 bp, Homo sapiens
cttttgagctaccaa

SEQ ID NO: 1645502 - DNA, 15 bp, Homo sapiens
acttttgagctacca

SEQ ID NO: 1645503 - DNA, 15 bp, Homo sapiens
tacttttgagctacc

SEQ ID NO: 1645504 - DNA, 15 bp, Homo sapiens
ttacttttgagctac

SEQ ID NO: 1645505 - DNA, 15 bp, Homo sapiens
gttacttttgagcta

SEQ ID NO: 1645506 - DNA, 15 bp, Homo sapiens
agttacttttgagct

SEQ ID NO: 1645507 - DNA, 15 bp, Homo sapiens
aagttacttttgagc

SEQ ID NO: 1645508 - DNA, 15 bp, Homo sapiens
aaagttacttttgag

SEQ ID NO: 1645509 - DNA, 15 bp, Homo sapiens
taaagttacttttga

SEQ ID NO: 1645510 - DNA, 15 bp, Homo sapiens
ataaagttacttttg

SEQ ID NO: 1645511 - DNA, 15 bp, Homo sapiens
aataaagttactttt

SEQ ID NO: 1645512 - DNA, 15 bp, Homo sapiens
gaataaagttacttt

SEQ ID NO: 1645513 - DNA, 15 bp, Homo sapiens
ggaataaagttactt

SEQ ID NO: 1645514 - DNA, 15 bp, Homo sapiens
gggaataaagttact

SEQ ID NO: 1645515 - DNA, 15 bp, Homo sapiens
agggaataaagttac

SEQ ID NO: 1645516 - DNA, 15 bp, Homo sapiens
cagggaataaagtta

SEQ ID NO: 1645517 - DNA, 15 bp, Homo sapiens
gcagggaataaagtt

SEQ ID NO: 1645518 - DNA, 15 bp, Homo sapiens
agcagggaataaagt

SEQ ID NO: 1645519 - DNA, 15 bp, Homo sapiens
tagcagggaataaag

SEQ ID NO: 1645520 - DNA, 15 bp, Homo sapiens
ttagcagggaataaa

SEQ ID NO: 1645521 - DNA, 15 bp, Homo sapiens
cttagcagggaataa

SEQ ID NO: 1645522 - DNA, 15 bp, Homo sapiens
acttagcagggaata

SEQ ID NO: 1645523 - DNA, 15 bp, Homo sapiens
gacttagcagggaat

SEQ ID NO: 1645524 - DNA, 15 bp, Homo sapiens
agacttagcagggaa

SEQ ID NO: 1645525 - DNA, 15 bp, Homo sapiens
aagacttagcaggga

SEQ ID NO: 1645526 - DNA, 15 bp, Homo sapiens
caagacttagcaggg

SEQ ID NO: 1645527 - DNA, 15 bp, Homo sapiens
gcaagacttagcagg

SEQ ID NO: 1645528 - DNA, 15 bp, Homo sapiens
agcaagacttagcag

SEQ ID NO: 1645529 - DNA, 15 bp, Homo sapiens
gagcaagacttagca

SEQ ID NO: 1645530 - DNA, 15 bp, Homo sapiens
agagcaagacttagc

SEQ ID NO: 1645531 - DNA, 15 bp, Homo sapiens
aagagcaagacttag

SEQ ID NO: 1645532 - DNA, 15 bp, Homo sapiens
aaagagcaagactta

SEQ ID NO: 1645533 - DNA, 15 bp, Homo sapiens
gaaagagcaagactt

SEQ ID NO: 1645534 - DNA, 15 bp, Homo sapiens
ggaaagagcaagact

SEQ ID NO: 1645535 - DNA, 15 bp, Homo sapiens
tggaaagagcaagac

SEQ ID NO: 1645536 - DNA, 15 bp, Homo sapiens
ttggaaagagcaaga

SEQ ID NO: 1645537 - DNA, 15 bp, Homo sapiens
attggaaagagcaag

SEQ ID NO: 1645538 - DNA, 15 bp, Homo sapiens
aattggaaagagcaa

SEQ ID NO: 1645539 - DNA, 15 bp, Homo sapiens
taattggaaagagca

SEQ ID NO: 1645540 - DNA, 15 bp, Homo sapiens
ataattggaaagagc

SEQ ID NO: 1645541 - DNA, 15 bp, Homo sapiens
aataattggaaagag

SEQ ID NO: 1645542 - DNA, 15 bp, Homo sapiens
taataattggaaaga

SEQ ID NO: 1645543 - DNA, 15 bp, Homo sapiens
ataataattggaaag

SEQ ID NO: 1645544 - DNA, 15 bp, Homo sapiens
aataataattggaaa

SEQ ID NO: 1645545 - DNA, 15 bp, Homo sapiens
gaataataattggaa

SEQ ID NO: 1645546 - DNA, 15 bp, Homo sapiens
tgaataataattgga

SEQ ID NO: 1645547 - DNA, 15 bp, Homo sapiens
ttgaataataattgg

SEQ ID NO: 1645548 - DNA, 15 bp, Homo sapiens
tttgaataataattg

SEQ ID NO: 1645549 - DNA, 15 bp, Homo sapiens
gtttgaataataatt

SEQ ID NO: 1645550 - DNA, 15 bp, Homo sapiens
tgtttgaataataat

SEQ ID NO: 1645551 - DNA, 15 bp, Homo sapiens
atgtttgaataataa

SEQ ID NO: 1645552 - DNA, 15 bp, Homo sapiens
catgtttgaataata

SEQ ID NO: 1645553 - DNA, 15 bp, Homo sapiens
tcatgtttgaataat

SEQ ID NO: 1645554 - DNA, 15 bp, Homo sapiens
ctcatgtttgaataa

SEQ ID NO: 1645555 - DNA, 15 bp, Homo sapiens
tctcatgtttgaata

SEQ ID NO: 1645556 - DNA, 15 bp, Homo sapiens
ctctcatgtttgaat

SEQ ID NO: 1645557 - DNA, 15 bp, Homo sapiens
cctctcatgtttgaa

SEQ ID NO: 1645558 - DNA, 15 bp, Homo sapiens
acctctcatgtttga

SEQ ID NO: 1645559 - DNA, 15 bp, Homo sapiens
cacctctcatgtttg

SEQ ID NO: 1645560 - DNA, 15 bp, Homo sapiens
tcacctctcatgttt

SEQ ID NO: 1645561 - DNA, 15 bp, Homo sapiens
gtcacctctcatgtt

SEQ ID NO: 1645562 - DNA, 15 bp, Homo sapiens
tgtcacctctcatgt

SEQ ID NO: 1645563 - DNA, 15 bp, Homo sapiens
ctgtcacctctcatg

SEQ ID NO: 1645564 - DNA, 15 bp, Homo sapiens
actgtcacctctcat

SEQ ID NO: 1645565 - DNA, 15 bp, Homo sapiens
cactgtcacctctca

SEQ ID NO: 1645566 - DNA, 15 bp, Homo sapiens
tcactgtcacctctc

SEQ ID NO: 1645567 - DNA, 15 bp, Homo sapiens
ctcactgtcacctct

SEQ ID NO: 1645568 - DNA, 15 bp, Homo sapiens
tctcactgtcacctc

SEQ ID NO: 1645569 - DNA, 15 bp, Homo sapiens
ttctcactgtcacct

SEQ ID NO: 1645570 - DNA, 15 bp, Homo sapiens
cttctcactgtcacc

SEQ ID NO: 1645571 - DNA, 15 bp, Homo sapiens
tcttctcactgtcac

SEQ ID NO: 1645572 - DNA, 15 bp, Homo sapiens
atcttctcactgtca

SEQ ID NO: 1645573 - DNA, 15 bp, Homo sapiens
aatcttctcactgtc

SEQ ID NO: 1645574 - DNA, 15 bp, Homo sapiens
caatcttctcactgt

SEQ ID NO: 1645575 - DNA, 15 bp, Homo sapiens
ccaatcttctcactg

SEQ ID NO: 1645576 - DNA, 15 bp, Homo sapiens
accaatcttctcact

SEQ ID NO: 1645577 - DNA, 15 bp, Homo sapiens
aaccaatcttctcac

SEQ ID NO: 1645578 - DNA, 15 bp, Homo sapiens
aaaccaatcttctca

SEQ ID NO: 1645579 - DNA, 15 bp, Homo sapiens
caaaccaatcttctc

SEQ ID NO: 1645580 - DNA, 15 bp, Homo sapiens
ccaaaccaatcttct

SEQ ID NO: 1645581 - DNA, 15 bp, Homo sapiens
gccaaaccaatcttc

SEQ ID NO: 1645582 - DNA, 15 bp, Homo sapiens
tgccaaaccaatctt

SEQ ID NO: 1645583 - DNA, 15 bp, Homo sapiens
atgccaaaccaatct

SEQ ID NO: 1645584 - DNA, 15 bp, Homo sapiens
aatgccaaaccaatc

SEQ ID NO: 1645585 - DNA, 15 bp, Homo sapiens
taatgccaaaccaat

SEQ ID NO: 1645586 - DNA, 15 bp, Homo sapiens
ataatgccaaaccaa

SEQ ID NO: 1645587 - DNA, 15 bp, Homo sapiens
tataatgccaaacca

SEQ ID NO: 1645588 - DNA, 15 bp, Homo sapiens
ctataatgccaaacc

SEQ ID NO: 1645589 - DNA, 15 bp, Homo sapiens
cctataatgccaaac

SEQ ID NO: 1645590 - DNA, 15 bp, Homo sapiens
tcctataatgccaaa

SEQ ID NO: 1645591 - DNA, 15 bp, Homo sapiens
atcctataatgccaa

SEQ ID NO: 1645592 - DNA, 15 bp, Homo sapiens
catcctataatgcca

SEQ ID NO: 1645593 - DNA, 15 bp, Homo sapiens
ccatcctataatgcc

SEQ ID NO: 1645594 - DNA, 15 bp, Homo sapiens
accatcctataatgc

SEQ ID NO: 1645595 - DNA, 15 bp, Homo sapiens
taccatcctataatg

SEQ ID NO: 1645596 - DNA, 15 bp, Homo sapiens
gtaccatcctataat

SEQ ID NO: 1645597 - DNA, 15 bp, Homo sapiens
ggtaccatcctataa

SEQ ID NO: 1645598 - DNA, 15 bp, Homo sapiens
tggtaccatcctata

SEQ ID NO: 1645599 - DNA, 15 bp, Homo sapiens
atggtaccatcctat

SEQ ID NO: 1645600 - DNA, 15 bp, Homo sapiens
catggtaccatccta

SEQ ID NO: 1645601 - DNA, 15 bp, Homo sapiens
gcatggtaccatcct

SEQ ID NO: 1645602 - DNA, 15 bp, Homo sapiens
tgcatggtaccatcc

SEQ ID NO: 1645603 - DNA, 15 bp, Homo sapiens
ttgcatggtaccatc

SEQ ID NO: 1645604 - DNA, 15 bp, Homo sapiens
cttgcatggtaccat

SEQ ID NO: 1645605 - DNA, 15 bp, Homo sapiens
ccttgcatggtacca

SEQ ID NO: 1645606 - DNA, 15 bp, Homo sapiens
accttgcatggtacc

SEQ ID NO: 1645607 - DNA, 15 bp, Homo sapiens
taccttgcatggtac

SEQ ID NO: 1645608 - DNA, 15 bp, Homo sapiens
gtaccttgcatggta

SEQ ID NO: 1645609 - DNA, 15 bp, Homo sapiens
agtaccttgcatggt

SEQ ID NO: 1645610 - DNA, 15 bp, Homo sapiens
gagtaccttgcatgg

SEQ ID NO: 1645611 - DNA, 15 bp, Homo sapiens
agagtaccttgcatg

SEQ ID NO: 1645612 - DNA, 15 bp, Homo sapiens
tagagtaccttgcat

SEQ ID NO: 1645613 - DNA, 15 bp, Homo sapiens
ttagagtaccttgca

SEQ ID NO: 1645614 - DNA, 15 bp, Homo sapiens
gttagagtaccttgc

SEQ ID NO: 1645615 - DNA, 15 bp, Homo sapiens
tgttagagtaccttg

SEQ ID NO: 1645616 - DNA, 15 bp, Homo sapiens
ttgttagagtacctt

SEQ ID NO: 1645617 - DNA, 15 bp, Homo sapiens
gttgttagagtacct

SEQ ID NO: 1645618 - DNA, 15 bp, Homo sapiens
ggttgttagagtacc

SEQ ID NO: 1645619 - DNA, 15 bp, Homo sapiens
cggttgttagagtac

SEQ ID NO: 1645620 - DNA, 15 bp, Homo sapiens
ccggttgttagagta

SEQ ID NO: 1645621 - DNA, 15 bp, Homo sapiens
gccggttgttagagt

SEQ ID NO: 1645622 - DNA, 15 bp, Homo sapiens
ggccggttgttagag

SEQ ID NO: 1645623 - DNA, 15 bp, Homo sapiens
aggccggttgttaga

SEQ ID NO: 1645624 - DNA, 15 bp, Homo sapiens
aaggccggttgttag

SEQ ID NO: 1645625 - DNA, 15 bp, Homo sapiens
gaaggccggttgtta

SEQ ID NO: 1645626 - DNA, 15 bp, Homo sapiens
agaaggccggttgtt

SEQ ID NO: 1645627 - DNA, 15 bp, Homo sapiens
cagaaggccggttgt

SEQ ID NO: 1645628 - DNA, 15 bp, Homo sapiens
acagaaggccggttg

SEQ ID NO: 1645629 - DNA, 15 bp, Homo sapiens
gacagaaggccggtt

SEQ ID NO: 1645630 - DNA, 15 bp, Homo sapiens
agacagaaggccggt

SEQ ID NO: 1645631 - DNA, 15 bp, Homo sapiens
gagacagaaggccgg

SEQ ID NO: 1645632 - DNA, 15 bp, Homo sapiens
tgagacagaaggccg

SEQ ID NO: 1645633 - DNA, 15 bp, Homo sapiens
atgagacagaaggcc

SEQ ID NO: 1645634 - DNA, 15 bp, Homo sapiens
catgagacagaaggc

SEQ ID NO: 1645635 - DNA, 15 bp, Homo sapiens
ccatgagacagaagg

SEQ ID NO: 1645636 - DNA, 15 bp, Homo sapiens
accatgagacagaag

SEQ ID NO: 1645637 - DNA, 15 bp, Homo sapiens
gaccatgagacagaa

SEQ ID NO: 1645638 - DNA, 15 bp, Homo sapiens
agaccatgagacaga

SEQ ID NO: 1645639 - DNA, 15 bp, Homo sapiens
tagaccatgagacag

SEQ ID NO: 1645640 - DNA, 15 bp, Homo sapiens
atagaccatgagaca

SEQ ID NO: 1645641 - DNA, 15 bp, Homo sapiens
gatagaccatgagac

SEQ ID NO: 1645642 - DNA, 15 bp, Homo sapiens
agatagaccatgaga

SEQ ID NO: 1645643 - DNA, 15 bp, Homo sapiens
gagatagaccatgag

SEQ ID NO: 1645644 - DNA, 15 bp, Homo sapiens
ggagatagaccatga

SEQ ID NO: 1645645 - DNA, 15 bp, Homo sapiens
gggagatagaccatg

SEQ ID NO: 1645646 - DNA, 15 bp, Homo sapiens
agggagatagaccat

SEQ ID NO: 1645647 - DNA, 15 bp, Homo sapiens
cagggagatagacca

SEQ ID NO: 1645648 - DNA, 15 bp, Homo sapiens
gcagggagatagacc

SEQ ID NO: 1645649 - DNA, 15 bp, Homo sapiens
tgcagggagatagac

SEQ ID NO: 1645650 - DNA, 15 bp, Homo sapiens
ctgcagggagataga

SEQ ID NO: 1645651 - DNA, 15 bp, Homo sapiens
tctgcagggagatag

SEQ ID NO: 1645652 - DNA, 15 bp, Homo sapiens
atctgcagggagata

SEQ ID NO: 1645653 - DNA, 15 bp, Homo sapiens
aatctgcagggagat

SEQ ID NO: 1645654 - DNA, 15 bp, Homo sapiens
gaatctgcagggaga

SEQ ID NO: 1645655 - DNA, 15 bp, Homo sapiens
tgaatctgcagggag

SEQ ID NO: 1645656 - DNA, 15 bp, Homo sapiens
ctgaatctgcaggga

SEQ ID NO: 1645657 - DNA, 15 bp, Homo sapiens
cctgaatctgcaggg

SEQ ID NO: 1645658 - DNA, 15 bp, Homo sapiens
acctgaatctgcagg

SEQ ID NO: 1645659 - DNA, 15 bp, Homo sapiens
aacctgaatctgcag

SEQ ID NO: 1645660 - DNA, 15 bp, Homo sapiens
caacctgaatctgca

SEQ ID NO: 1645661 - DNA, 15 bp, Homo sapiens
gcaacctgaatctgc

SEQ ID NO: 1645662 - DNA, 15 bp, Homo sapiens
tgcaacctgaatctg

SEQ ID NO: 1645663 - DNA, 15 bp, Homo sapiens
atgcaacctgaatct

SEQ ID NO: 1645664 - DNA, 15 bp, Homo sapiens
gatgcaacctgaatc

SEQ ID NO: 1645665 - DNA, 15 bp, Homo sapiens
tgatgcaacctgaat

SEQ ID NO: 1645666 - DNA, 15 bp, Homo sapiens
ctgatgcaacctgaa

SEQ ID NO: 1645667 - DNA, 15 bp, Homo sapiens
gctgatgcaacctga

SEQ ID NO: 1645668 - DNA, 15 bp, Homo sapiens
agctgatgcaacctg

SEQ ID NO: 1645669 - DNA, 15 bp, Homo sapiens
cagctgatgcaacct

SEQ ID NO: 1645670 - DNA, 15 bp, Homo sapiens
acagctgatgcaacc

SEQ ID NO: 1645671 - DNA, 15 bp, Homo sapiens
gacagctgatgcaac

SEQ ID NO: 1645672 - DNA, 15 bp, Homo sapiens
ggacagctgatgcaa

SEQ ID NO: 1645673 - DNA, 15 bp, Homo sapiens
aggacagctgatgca

SEQ ID NO: 1645674 - DNA, 15 bp, Homo sapiens
gaggacagctgatgc

SEQ ID NO: 1645675 - DNA, 15 bp, Homo sapiens
ggaggacagctgatg

SEQ ID NO: 1645676 - DNA, 15 bp, Homo sapiens
aggaggacagctgat

SEQ ID NO: 1645677 - DNA, 15 bp, Homo sapiens
taggaggacagctga

SEQ ID NO: 1645678 - DNA, 15 bp, Homo sapiens
ataggaggacagctg

SEQ ID NO: 1645679 - DNA, 15 bp, Homo sapiens
cataggaggacagct

SEQ ID NO: 1645680 - DNA, 15 bp, Homo sapiens
acataggaggacagc

SEQ ID NO: 1645681 - DNA, 15 bp, Homo sapiens
gacataggaggacag

SEQ ID NO: 1645682 - DNA, 15 bp, Homo sapiens
ggacataggaggaca

SEQ ID NO: 1645683 - DNA, 15 bp, Homo sapiens
tggacataggaggac

SEQ ID NO: 1645684 - DNA, 15 bp, Homo sapiens
gtggacataggagga

SEQ ID NO: 1645685 - DNA, 15 bp, Homo sapiens
tgtggacataggagg

SEQ ID NO: 1645686 - DNA, 15 bp, Homo sapiens
ttgtggacataggag

SEQ ID NO: 1645687 - DNA, 15 bp, Homo sapiens
attgtggacatagga

SEQ ID NO: 1645688 - DNA, 15 bp, Homo sapiens
gattgtggacatagg

SEQ ID NO: 1645689 - DNA, 15 bp, Homo sapiens
ggattgtggacatag

SEQ ID NO: 1645690 - DNA, 15 bp, Homo sapiens
tggattgtggacata

SEQ ID NO: 1645691 - DNA, 15 bp, Homo sapiens
ttggattgtggacat

SEQ ID NO: 1645692 - DNA, 15 bp, Homo sapiens
tttggattgtggaca

SEQ ID NO: 1645693 - DNA, 15 bp, Homo sapiens
atttggattgtggac

SEQ ID NO: 1645694 - DNA, 15 bp, Homo sapiens
catttggattgtgga

SEQ ID NO: 1645695 - DNA, 15 bp, Homo sapiens
gcatttggattgtgg

SEQ ID NO: 1645696 - DNA, 15 bp, Homo sapiens
agcatttggattgtg

SEQ ID NO: 1645697 - DNA, 15 bp, Homo sapiens
tagcatttggattgt

SEQ ID NO: 1645698 - DNA, 15 bp, Homo sapiens
atagcatttggattg

SEQ ID NO: 1645699 - DNA, 15 bp, Homo sapiens
catagcatttggatt

SEQ ID NO: 1645700 - DNA, 15 bp, Homo sapiens
ccatagcatttggat

SEQ ID NO: 1645701 - DNA, 15 bp, Homo sapiens
cccatagcatttgga

SEQ ID NO: 1645702 - DNA, 15 bp, Homo sapiens
tcccatagcatttgg

SEQ ID NO: 1645703 - DNA, 15 bp, Homo sapiens
atcccatagcatttg

SEQ ID NO: 1645704 - DNA, 15 bp, Homo sapiens
tatcccatagcattt

SEQ ID NO: 1645705 - DNA, 15 bp, Homo sapiens
gtatcccatagcatt

SEQ ID NO: 1645706 - DNA, 15 bp, Homo sapiens
agtatcccatagcat

SEQ ID NO: 1645707 - DNA, 15 bp, Homo sapiens
tagtatcccatagca

SEQ ID NO: 1645708 - DNA, 15 bp, Homo sapiens
atagtatcccatagc

SEQ ID NO: 1645709 - DNA, 15 bp, Homo sapiens
catagtatcccatag

SEQ ID NO: 1645710 - DNA, 15 bp, Homo sapiens
ccatagtatcccata

SEQ ID NO: 1645711 - DNA, 15 bp, Homo sapiens
gccatagtatcccat

SEQ ID NO: 1645712 - DNA, 15 bp, Homo sapiens
tgccatagtatccca

SEQ ID NO: 1645713 - DNA, 15 bp, Homo sapiens
ctgccatagtatccc

SEQ ID NO: 1645714 - DNA, 15 bp, Homo sapiens
tctgccatagtatcc

SEQ ID NO: 1645715 - DNA, 15 bp, Homo sapiens
gtctgccatagtatc

SEQ ID NO: 1645716 - DNA, 15 bp, Homo sapiens
tgtctgccatagtat

SEQ ID NO: 1645717 - DNA, 15 bp, Homo sapiens
ttgtctgccatagta

SEQ ID NO: 1645718 - DNA, 15 bp, Homo sapiens
cttgtctgccatagt

SEQ ID NO: 1645719 - DNA, 15 bp, Homo sapiens
acttgtctgccatag

SEQ ID NO: 1645720 - DNA, 15 bp, Homo sapiens
aacttgtctgccata

SEQ ID NO: 1645721 - DNA, 15 bp, Homo sapiens
aaacttgtctgccat

SEQ ID NO: 1645722 - DNA, 15 bp, Homo sapiens
aaaacttgtctgcca

SEQ ID NO: 1645723 - DNA, 15 bp, Homo sapiens
gaaaacttgtctgcc

SEQ ID NO: 1645724 - DNA, 15 bp, Homo sapiens
ggaaaacttgtctgc

SEQ ID NO: 1645725 - DNA, 15 bp, Homo sapiens
tggaaaacttgtctg

SEQ ID NO: 1645726 - DNA, 15 bp, Homo sapiens
ctggaaaacttgtct

SEQ ID NO: 1645727 - DNA, 15 bp, Homo sapiens
actggaaaacttgtc

SEQ ID NO: 1645728 - DNA, 15 bp, Homo sapiens
aactggaaaacttgt

SEQ ID NO: 1645729 - DNA, 15 bp, Homo sapiens
gaactggaaaacttg

SEQ ID NO: 1645730 - DNA, 15 bp, Homo sapiens
agaactggaaaactt

SEQ ID NO: 1645731 - DNA, 15 bp, Homo sapiens
aagaactggaaaact

SEQ ID NO: 1645732 - DNA, 15 bp, Homo sapiens
gaagaactggaaaac

SEQ ID NO: 1645733 - DNA, 15 bp, Homo sapiens
tgaagaactggaaaa

SEQ ID NO: 1645734 - DNA, 15 bp, Homo sapiens
ctgaagaactggaaa

SEQ ID NO: 1645735 - DNA, 15 bp, Homo sapiens
cctgaagaactggaa

SEQ ID NO: 1645736 - DNA, 15 bp, Homo sapiens
tcctgaagaactgga

SEQ ID NO: 1645737 - DNA, 15 bp, Homo sapiens
ttcctgaagaactgg

SEQ ID NO: 1645738 - DNA, 15 bp, Homo sapiens
cttcctgaagaactg

SEQ ID NO: 1645739 - DNA, 15 bp, Homo sapiens
acttcctgaagaact

SEQ ID NO: 1645740 - DNA, 15 bp, Homo sapiens
tacttcctgaagaac

SEQ ID NO: 1645741 - DNA, 15 bp, Homo sapiens
ctacttcctgaagaa

SEQ ID NO: 1645742 - DNA, 15 bp, Homo sapiens
gctacttcctgaaga

SEQ ID NO: 1645743 - DNA, 15 bp, Homo sapiens
tgctacttcctgaag

SEQ ID NO: 1645744 - DNA, 15 bp, Homo sapiens
ttgctacttcctgaa

SEQ ID NO: 1645745 - DNA, 15 bp, Homo sapiens
gttgctacttcctga

SEQ ID NO: 1645746 - DNA, 15 bp, Homo sapiens
agttgctacttcctg

SEQ ID NO: 1645747 - DNA, 15 bp, Homo sapiens
cagttgctacttcct

SEQ ID NO: 1645748 - DNA, 15 bp, Homo sapiens
acagttgctacttcc

SEQ ID NO: 1645749 - DNA, 15 bp, Homo sapiens
cacagttgctacttc

SEQ ID NO: 1645750 - DNA, 15 bp, Homo sapiens
tcacagttgctactt

SEQ ID NO: 1645751 - DNA, 15 bp, Homo sapiens
ctcacagttgctact

SEQ ID NO: 1645752 - DNA, 15 bp, Homo sapiens
actcacagttgctac

SEQ ID NO: 1645753 - DNA, 15 bp, Homo sapiens
tactcacagttgcta

SEQ ID NO: 1645754 - DNA, 15 bp, Homo sapiens
atactcacagttgct

SEQ ID NO: 1645755 - DNA, 15 bp, Homo sapiens
aatactcacagttgc

SEQ ID NO: 1645756 - DNA, 15 bp, Homo sapiens
gaatactcacagttg

SEQ ID NO: 1645757 - DNA, 15 bp, Homo sapiens
agaatactcacagtt

SEQ ID NO: 1645758 - DNA, 15 bp, Homo sapiens
tagaatactcacagt

SEQ ID NO: 1645759 - DNA, 15 bp, Homo sapiens
ctagaatactcacag

SEQ ID NO: 1645760 - DNA, 15 bp, Homo sapiens
gctagaatactcaca

SEQ ID NO: 1645761 - DNA, 15 bp, Homo sapiens
agctagaatactcac

SEQ ID NO: 1645762 - DNA, 15 bp, Homo sapiens
gagctagaatactca

SEQ ID NO: 1645763 - DNA, 15 bp, Homo sapiens
tgagctagaatactc

SEQ ID NO: 1645764 - DNA, 15 bp, Homo sapiens
gtgagctagaatact

SEQ ID NO: 1645765 - DNA, 15 bp, Homo sapiens
tgtgagctagaatac

SEQ ID NO: 1645766 - DNA, 15 bp, Homo sapiens
ttgtgagctagaata

SEQ ID NO: 1645767 - DNA, 15 bp, Homo sapiens
attgtgagctagaat

SEQ ID NO: 1645768 - DNA, 15 bp, Homo sapiens
cattgtgagctagaa

SEQ ID NO: 1645769 - DNA, 15 bp, Homo sapiens
ccattgtgagctaga

SEQ ID NO: 1645770 - DNA, 15 bp, Homo sapiens
cccattgtgagctag

SEQ ID NO: 1645771 - DNA, 15 bp, Homo sapiens
tcccattgtgagcta

SEQ ID NO: 1645772 - DNA, 15 bp, Homo sapiens
ctcccattgtgagct

SEQ ID NO: 1645773 - DNA, 15 bp, Homo sapiens
cctcccattgtgagc

SEQ ID NO: 1645774 - DNA, 15 bp, Homo sapiens
tcctcccattgtgag

SEQ ID NO: 1645775 - DNA, 15 bp, Homo sapiens
ctcctcccattgtga

SEQ ID NO: 1645776 - DNA, 15 bp, Homo sapiens
gctcctcccattgtg

SEQ ID NO: 1645777 - DNA, 15 bp, Homo sapiens
tgctcctcccattgt

SEQ ID NO: 1645778 - DNA, 15 bp, Homo sapiens
gtgctcctcccattg

SEQ ID NO: 1645779 - DNA, 15 bp, Homo sapiens
tgtgctcctcccatt

SEQ ID NO: 1645780 - DNA, 15 bp, Homo sapiens
ttgtgctcctcccat

SEQ ID NO: 1645781 - DNA, 15 bp, Homo sapiens
gttgtgctcctccca

SEQ ID NO: 1645782 - DNA, 15 bp, Homo sapiens
cgttgtgctcctccc

SEQ ID NO: 1645783 - DNA, 15 bp, Homo sapiens
tcgttgtgctcctcc

SEQ ID NO: 1645784 - DNA, 15 bp, Homo sapiens
gtcgttgtgctcctc

SEQ ID NO: 1645785 - DNA, 15 bp, Homo sapiens
agtcgttgtgctcct

SEQ ID NO: 1645786 - DNA, 15 bp, Homo sapiens
cagtcgttgtgctcc

SEQ ID NO: 1645787 - DNA, 15 bp, Homo sapiens
ccagtcgttgtgctc

SEQ ID NO: 1645788 - DNA, 15 bp, Homo sapiens
tccagtcgttgtgct

SEQ ID NO: 1645789 - DNA, 15 bp, Homo sapiens
gtccagtcgttgtgc

SEQ ID NO: 1645790 - DNA, 15 bp, Homo sapiens
agtccagtcgttgtg

SEQ ID NO: 1645791 - DNA, 15 bp, Homo sapiens
gagtccagtcgttgt

SEQ ID NO: 1645792 - DNA, 15 bp, Homo sapiens
ggagtccagtcgttg

SEQ ID NO: 1645793 - DNA, 15 bp, Homo sapiens
tggagtccagtcgtt

SEQ ID NO: 1645794 - DNA, 15 bp, Homo sapiens
ctggagtccagtcgt

SEQ ID NO: 1645795 - DNA, 15 bp, Homo sapiens
gctggagtccagtcg

SEQ ID NO: 1645796 - DNA, 15 bp, Homo sapiens
ggctggagtccagtc

SEQ ID NO: 1645797 - DNA, 15 bp, Homo sapiens
tggctggagtccagt

SEQ ID NO: 1645798 - DNA, 15 bp, Homo sapiens
atggctggagtccag

SEQ ID NO: 1645799 - DNA, 15 bp, Homo sapiens
catggctggagtcca

SEQ ID NO: 1645800 - DNA, 15 bp, Homo sapiens
tcatggctggagtcc

SEQ ID NO: 1645801 - DNA, 15 bp, Homo sapiens
ctcatggctggagtc

SEQ ID NO: 1645802 - DNA, 15 bp, Homo sapiens
gctcatggctggagt

SEQ ID NO: 1645803 - DNA, 15 bp, Homo sapiens
tgctcatggctggag

SEQ ID NO: 1645804 - DNA, 15 bp, Homo sapiens
ttgctcatggctgga

SEQ ID NO: 1645805 - DNA, 15 bp, Homo sapiens
tttgctcatggctgg

SEQ ID NO: 1645806 - DNA, 15 bp, Homo sapiens
atttgctcatggctg

SEQ ID NO: 1645807 - DNA, 15 bp, Homo sapiens
tatttgctcatggct

SEQ ID NO: 1645808 - DNA, 15 bp, Homo sapiens
gtatttgctcatggc

SEQ ID NO: 1645809 - DNA, 15 bp, Homo sapiens
tgtatttgctcatgg

SEQ ID NO: 1645810 - DNA, 15 bp, Homo sapiens
ttgtatttgctcatg

SEQ ID NO: 1645811 - DNA, 15 bp, Homo sapiens
cttgtatttgctcat

SEQ ID NO: 1645812 - DNA, 15 bp, Homo sapiens
acttgtatttgctca

SEQ ID NO: 1645813 - DNA, 15 bp, Homo sapiens
tacttgtatttgctc

SEQ ID NO: 1645814 - DNA, 15 bp, Homo sapiens
ttacttgtatttgct

SEQ ID NO: 1645815 - DNA, 15 bp, Homo sapiens
tttacttgtatttgc

SEQ ID NO: 1645816 - DNA, 15 bp, Homo sapiens
ctttacttgtatttg

SEQ ID NO: 1645817 - DNA, 15 bp, Homo sapiens
cctttacttgtattt

SEQ ID NO: 1645818 - DNA, 15 bp, Homo sapiens
acctttacttgtatt

SEQ ID NO: 1645819 - DNA, 15 bp, Homo sapiens
aacctttacttgtat

SEQ ID NO: 1645820 - DNA, 15 bp, Homo sapiens
aaacctttacttgta

SEQ ID NO: 1645821 - DNA, 15 bp, Homo sapiens
taaacctttacttgt

SEQ ID NO: 1645822 - DNA, 15 bp, Homo sapiens
ttaaacctttacttg

SEQ ID NO: 1645823 - DNA, 15 bp, Homo sapiens
gttaaacctttactt

SEQ ID NO: 1645824 - DNA, 15 bp, Homo sapiens
agttaaacctttact

SEQ ID NO: 1645825 - DNA, 15 bp, Homo sapiens
cagttaaacctttac

SEQ ID NO: 1645826 - DNA, 15 bp, Homo sapiens
tcagttaaaccttta

SEQ ID NO: 1645827 - DNA, 15 bp, Homo sapiens
ctcagttaaaccttt

SEQ ID NO: 1645828 - DNA, 15 bp, Homo sapiens
tctcagttaaacctt

SEQ ID NO: 1645829 - DNA, 15 bp, Homo sapiens
gtctcagttaaacct

SEQ ID NO: 1645830 - DNA, 15 bp, Homo sapiens
agtctcagttaaacc

SEQ ID NO: 1645831 - DNA, 15 bp, Homo sapiens
cagtctcagttaaac

SEQ ID NO: 1645832 - DNA, 15 bp, Homo sapiens
acagtctcagttaaa

SEQ ID NO: 1645833 - DNA, 15 bp, Homo sapiens
gacagtctcagttaa

SEQ ID NO: 1645834 - DNA, 15 bp, Homo sapiens
agacagtctcagtta

SEQ ID NO: 1645835 - DNA, 15 bp, Homo sapiens
cagacagtctcagtt

SEQ ID NO: 1645836 - DNA, 15 bp, Homo sapiens
gcagacagtctcagt

SEQ ID NO: 1645837 - DNA, 15 bp, Homo sapiens
agcagacagtctcag

SEQ ID NO: 1645838 - DNA, 15 bp, Homo sapiens
gagcagacagtctca

SEQ ID NO: 1645839 - DNA, 15 bp, Homo sapiens
ggagcagacagtctc

SEQ ID NO: 1645840 - DNA, 15 bp, Homo sapiens
gggagcagacagtct

SEQ ID NO: 1645841 - DNA, 15 bp, Homo sapiens
ggggagcagacagtc

SEQ ID NO: 1645842 - DNA, 15 bp, Homo sapiens
tggggagcagacagt

SEQ ID NO: 1645843 - DNA, 15 bp, Homo sapiens
ctggggagcagacag

SEQ ID NO: 1645844 - DNA, 15 bp, Homo sapiens
actggggagcagaca

SEQ ID NO: 1645845 - DNA, 15 bp, Homo sapiens
aactggggagcagac

SEQ ID NO: 1645846 - DNA, 15 bp, Homo sapiens
gaactggggagcaga

SEQ ID NO: 1645847 - DNA, 15 bp, Homo sapiens
agaactggggagcag

SEQ ID NO: 1645848 - DNA, 15 bp, Homo sapiens
gagaactggggagca

SEQ ID NO: 1645849 - DNA, 15 bp, Homo sapiens
ggagaactggggagc

SEQ ID NO: 1645850 - DNA, 15 bp, Homo sapiens
tggagaactggggag

SEQ ID NO: 1645851 - DNA, 15 bp, Homo sapiens
ttggagaactgggga

SEQ ID NO: 1645852 - DNA, 15 bp, Homo sapiens
gttggagaactgggg

SEQ ID NO: 1645853 - DNA, 15 bp, Homo sapiens
ggttggagaactggg

SEQ ID NO: 1645854 - DNA, 15 bp, Homo sapiens
gggttggagaactgg

SEQ ID NO: 1645855 - DNA, 15 bp, Homo sapiens
ggggttggagaactg

SEQ ID NO: 1645856 - DNA, 15 bp, Homo sapiens
aggggttggagaact

SEQ ID NO: 1645857 - DNA, 15 bp, Homo sapiens
caggggttggagaac

SEQ ID NO: 1645858 - DNA, 15 bp, Homo sapiens
gcaggggttggagaa

SEQ ID NO: 1645859 - DNA, 15 bp, Homo sapiens
ggcaggggttggaga

SEQ ID NO: 1645860 - DNA, 15 bp, Homo sapiens
aggcaggggttggag

SEQ ID NO: 1645861 - DNA, 15 bp, Homo sapiens
taggcaggggttgga

SEQ ID NO: 1645862 - DNA, 15 bp, Homo sapiens
gtaggcaggggttgg

SEQ ID NO: 1645863 - DNA, 15 bp, Homo sapiens
ggtaggcaggggttg

SEQ ID NO: 1645864 - DNA, 15 bp, Homo sapiens
gggtaggcaggggtt

SEQ ID NO: 1645865 - DNA, 15 bp, Homo sapiens
ggggtaggcaggggt

SEQ ID NO: 1645866 - DNA, 15 bp, Homo sapiens
tggggtaggcagggg

SEQ ID NO: 1645867 - DNA, 15 bp, Homo sapiens
ttggggtaggcaggg

SEQ ID NO: 1645868 - DNA, 15 bp, Homo sapiens
cttggggtaggcagg

SEQ ID NO: 1645869 - DNA, 15 bp, Homo sapiens
gcttggggtaggcag

SEQ ID NO: 1645870 - DNA, 15 bp, Homo sapiens
ggcttggggtaggca

SEQ ID NO: 1645871 - DNA, 15 bp, Homo sapiens
gggcttggggtaggc

SEQ ID NO: 1645872 - DNA, 15 bp, Homo sapiens
ggggcttggggtagg

SEQ ID NO: 1645873 - DNA, 15 bp, Homo sapiens
aggggcttggggtag

SEQ ID NO: 1645874 - DNA, 15 bp, Homo sapiens
aaggggcttggggta

SEQ ID NO: 1645875 - DNA, 15 bp, Homo sapiens
aaaggggcttggggt

SEQ ID NO: 1645876 - DNA, 15 bp, Homo sapiens
aaaaggggcttgggg

SEQ ID NO: 1645877 - DNA, 15 bp, Homo sapiens
aaaaaggggcttggg

SEQ ID NO: 1645878 - DNA, 15 bp, Homo sapiens
caaaaaggggcttgg

SEQ ID NO: 1645879 - DNA, 15 bp, Homo sapiens
acaaaaaggggcttg

SEQ ID NO: 1645880 - DNA, 15 bp, Homo sapiens
gacaaaaaggggctt

SEQ ID NO: 1645881 - DNA, 15 bp, Homo sapiens
agacaaaaaggggct

SEQ ID NO: 1645882 - DNA, 15 bp, Homo sapiens
aagacaaaaaggggc

SEQ ID NO: 1645883 - DNA, 15 bp, Homo sapiens
caagacaaaaagggg

SEQ ID NO: 1645884 - DNA, 15 bp, Homo sapiens
tcaagacaaaaaggg

SEQ ID NO: 1645885 - DNA, 15 bp, Homo sapiens
atcaagacaaaaagg

SEQ ID NO: 1645886 - DNA, 15 bp, Homo sapiens
aatcaagacaaaaag

SEQ ID NO: 1645887 - DNA, 15 bp, Homo sapiens
aaatcaagacaaaaa

SEQ ID NO: 1645888 - DNA, 15 bp, Homo sapiens
taaatcaagacaaaa

SEQ ID NO: 1645889 - DNA, 15 bp, Homo sapiens
ataaatcaagacaaa

SEQ ID NO: 1645890 - DNA, 15 bp, Homo sapiens
tataaatcaagacaa

SEQ ID NO: 1645891 - DNA, 15 bp, Homo sapiens
ctataaatcaagaca

SEQ ID NO: 1645892 - DNA, 15 bp, Homo sapiens
actataaatcaagac

SEQ ID NO: 1645893 - DNA, 15 bp, Homo sapiens
tactataaatcaaga

SEQ ID NO: 1645894 - DNA, 15 bp, Homo sapiens
ctactataaatcaag

SEQ ID NO: 1645895 - DNA, 15 bp, Homo sapiens
tctactataaatcaa

SEQ ID NO: 1645896 - DNA, 15 bp, Homo sapiens
ttctactataaatca

SEQ ID NO: 1645897 - DNA, 15 bp, Homo sapiens
tttctactataaatc

SEQ ID NO: 1645898 - DNA, 15 bp, Homo sapiens
ttttctactataaat

SEQ ID NO: 1645899 - DNA, 15 bp, Homo sapiens
cttttctactataaa

SEQ ID NO: 1645900 - DNA, 15 bp, Homo sapiens
acttttctactataa

SEQ ID NO: 1645901 - DNA, 15 bp, Homo sapiens
tacttttctactata

SEQ ID NO: 1645902 - DNA, 15 bp, Homo sapiens
ttacttttctactat

SEQ ID NO: 1645903 - DNA, 15 bp, Homo sapiens
attacttttctacta

SEQ ID NO: 1645904 - DNA, 15 bp, Homo sapiens
tattacttttctact

SEQ ID NO: 1645905 - DNA, 15 bp, Homo sapiens
ctattacttttctac

SEQ ID NO: 1645906 - DNA, 15 bp, Homo sapiens
actattacttttcta

SEQ ID NO: 1645907 - DNA, 15 bp, Homo sapiens
gactattacttttct

SEQ ID NO: 1645908 - DNA, 15 bp, Homo sapiens
cgactattacttttc

SEQ ID NO: 1645909 - DNA, 15 bp, Homo sapiens
ccgactattactttt

SEQ ID NO: 1645910 - DNA, 15 bp, Homo sapiens
accgactattacttt

SEQ ID NO: 1645911 - DNA, 15 bp, Homo sapiens
gaccgactattactt

SEQ ID NO: 1645912 - DNA, 15 bp, Homo sapiens
cgaccgactattact

SEQ ID NO: 1645913 - DNA, 15 bp, Homo sapiens
ccgaccgactattac

SEQ ID NO: 1645914 - DNA, 15 bp, Homo sapiens
cccgaccgactatta

SEQ ID NO: 1645915 - DNA, 15 bp, Homo sapiens
gcccgaccgactatt

SEQ ID NO: 1645916 - DNA, 15 bp, Homo sapiens
cgcccgaccgactat

SEQ ID NO: 1645917 - DNA, 15 bp, Homo sapiens
gcgcccgaccgacta

SEQ ID NO: 1645918 - DNA, 15 bp, Homo sapiens
cgcgcccgaccgact

SEQ ID NO: 1645919 - DNA, 15 bp, Homo sapiens
ccgcgcccgaccgac

SEQ ID NO: 1645920 - DNA, 15 bp, Homo sapiens
cccgcgcccgaccga

SEQ ID NO: 1645921 - DNA, 15 bp, Homo sapiens
ccccgcgcccgaccg

SEQ ID NO: 1645922 - DNA, 15 bp, Homo sapiens
cccccgcgcccgacc

SEQ ID NO: 1645923 - DNA, 15 bp, Homo sapiens
gcccccgcgcccgac

SEQ ID NO: 1645924 - DNA, 15 bp, Homo sapiens
agcccccgcgcccga

SEQ ID NO: 1645925 - DNA, 15 bp, Homo sapiens
gagcccccgcgcccg

SEQ ID NO: 1645926 - DNA, 15 bp, Homo sapiens
tgagcccccgcgccc

SEQ ID NO: 1645927 - DNA, 15 bp, Homo sapiens
gtgagcccccgcgcc

SEQ ID NO: 1645928 - DNA, 15 bp, Homo sapiens
tgtgagcccccgcgc

SEQ ID NO: 1645929 - DNA, 15 bp, Homo sapiens
gtgtgagcccccgcg

SEQ ID NO: 1645930 - DNA, 15 bp, Homo sapiens
ggtgtgagcccccgc

SEQ ID NO: 1645931 - DNA, 15 bp, Homo sapiens
aggtgtgagcccccg

SEQ ID NO: 1645932 - DNA, 15 bp, Homo sapiens
caggtgtgagccccc

SEQ ID NO: 1645933 - DNA, 15 bp, Homo sapiens
acaggtgtgagcccc

SEQ ID NO: 1645934 - DNA, 15 bp, Homo sapiens
tacaggtgtgagccc

SEQ ID NO: 1645935 - DNA, 15 bp, Homo sapiens
ggtgggattacaggt

SEQ ID NO: 1645936 - DNA, 15 bp, Homo sapiens
tggtgggattacagg

SEQ ID NO: 1645937 - DNA, 15 bp, Homo sapiens
gtggtgggattacag

SEQ ID NO: 1645938 - DNA, 15 bp, Homo sapiens
agtggtgggattaca

SEQ ID NO: 1645939 - DNA, 15 bp, Homo sapiens
aagtggtgggattac

SEQ ID NO: 1645940 - DNA, 15 bp, Homo sapiens
aaagtggtgggatta

SEQ ID NO: 1645941 - DNA, 15 bp, Homo sapiens
caaagtggtgggatt

SEQ ID NO: 1645942 - DNA, 15 bp, Homo sapiens
ccaaagtggtgggat

SEQ ID NO: 1645943 - DNA, 15 bp, Homo sapiens
tccaaagtggtggga

SEQ ID NO: 1645944 - DNA, 15 bp, Homo sapiens
tccttccaaagtggt

SEQ ID NO: 1645945 - DNA, 15 bp, Homo sapiens
gtccttccaaagtgg

SEQ ID NO: 1645946 - DNA, 15 bp, Homo sapiens
cgtccttccaaagtg

SEQ ID NO: 1645947 - DNA, 15 bp, Homo sapiens
tcgtccttccaaagt

SEQ ID NO: 1645948 - DNA, 15 bp, Homo sapiens
ctcgtccttccaaag

SEQ ID NO: 1645949 - DNA, 15 bp, Homo sapiens
cctcgtccttccaaa

SEQ ID NO: 1645950 - DNA, 15 bp, Homo sapiens
gcctcgtccttccaa

SEQ ID NO: 1645951 - DNA, 15 bp, Homo sapiens
tgcctcgtccttcca

SEQ ID NO: 1645952 - DNA, 15 bp, Homo sapiens
ctgcctcgtccttcc

SEQ ID NO: 1645953 - DNA, 15 bp, Homo sapiens
cctgcctcgtccttc

SEQ ID NO: 1645954 - DNA, 15 bp, Homo sapiens
acctgcctcgtcctt

SEQ ID NO: 1645955 - DNA, 15 bp, Homo sapiens
cacctgcctcgtcct

SEQ ID NO: 1645956 - DNA, 15 bp, Homo sapiens
ccacctgcctcgtcc

SEQ ID NO: 1645957 - DNA, 15 bp, Homo sapiens
tccacctgcctcgtc

SEQ ID NO: 1645958 - DNA, 15 bp, Homo sapiens
atccacctgcctcgt

SEQ ID NO: 1645959 - DNA, 15 bp, Homo sapiens
gggtgatccacctgc

SEQ ID NO: 1645960 - DNA, 15 bp, Homo sapiens
cgggtgatccacctg

SEQ ID NO: 1645961 - DNA, 15 bp, Homo sapiens
tcgggtgatccacct

SEQ ID NO: 1645962 - DNA, 15 bp, Homo sapiens
ctcgggtgatccacc

SEQ ID NO: 1645963 - DNA, 15 bp, Homo sapiens
cctcgggtgatccac

SEQ ID NO: 1645964 - DNA, 15 bp, Homo sapiens
acctcgggtgatcca

SEQ ID NO: 1645965 - DNA, 15 bp, Homo sapiens
gacctcgggtgatcc

SEQ ID NO: 1645966 - DNA, 15 bp, Homo sapiens
ttcctgacctcgggt

SEQ ID NO: 1645967 - DNA, 15 bp, Homo sapiens
attcctgacctcggg

SEQ ID NO: 1645968 - DNA, 15 bp, Homo sapiens
aattcctgacctcgg

SEQ ID NO: 1645969 - DNA, 15 bp, Homo sapiens
gaattcctgacctcg

SEQ ID NO: 1645970 - DNA, 15 bp, Homo sapiens
agaattcctgacctc

SEQ ID NO: 1645971 - DNA, 15 bp, Homo sapiens
tagaattcctgacct

SEQ ID NO: 1645972 - DNA, 15 bp, Homo sapiens
ctagaattcctgacc

SEQ ID NO: 1645973 - DNA, 15 bp, Homo sapiens
tctagaattcctgac

SEQ ID NO: 1645974 - DNA, 15 bp, Homo sapiens
gtctagaattcctga

SEQ ID NO: 1645975 - DNA, 15 bp, Homo sapiens
ggtctagaattcctg

SEQ ID NO: 1645976 - DNA, 15 bp, Homo sapiens
tggtctagaattcct

SEQ ID NO: 1645977 - DNA, 15 bp, Homo sapiens
ctggtctagaattcc

SEQ ID NO: 1645978 - DNA, 15 bp, Homo sapiens
gctggtctagaattc

SEQ ID NO: 1645979 - DNA, 15 bp, Homo sapiens
ggctggtctagaatt

SEQ ID NO: 1645980 - DNA, 15 bp, Homo sapiens
aggctggtctagaat

SEQ ID NO: 1645981 - DNA, 15 bp, Homo sapiens
caggctggtctagaa

SEQ ID NO: 1645982 - DNA, 15 bp, Homo sapiens
ccaggctggtctaga

SEQ ID NO: 1645983 - DNA, 15 bp, Homo sapiens
gccaggctggtctag

SEQ ID NO: 1645984 - DNA, 15 bp, Homo sapiens
ggccaggctggtcta

SEQ ID NO: 1645985 - DNA, 15 bp, Homo sapiens
cttgtatttttagta

SEQ ID NO: 1645986 - DNA, 15 bp, Homo sapiens
tcttgtatttttagt

SEQ ID NO: 1645987 - DNA, 15 bp, Homo sapiens
ttcttgtatttttag

SEQ ID NO: 1645988 - DNA, 15 bp, Homo sapiens
tttcttgtattttta

SEQ ID NO: 1645989 - DNA, 15 bp, Homo sapiens
ttttcttgtattttt

SEQ ID NO: 1645990 - DNA, 15 bp, Homo sapiens
tttttcttgtatttt

SEQ ID NO: 1645991 - DNA, 15 bp, Homo sapiens
ttttttcttgtattt

SEQ ID NO: 1645992 - DNA, 15 bp, Homo sapiens
tttttttcttgtatt

SEQ ID NO: 1645993 - DNA, 15 bp, Homo sapiens
atttttttcttgtat

SEQ ID NO: 1645994 - DNA, 15 bp, Homo sapiens
aatttttttcttgta

SEQ ID NO: 1645995 - DNA, 15 bp, Homo sapiens
taatttttttcttgt

SEQ ID NO: 1645996 - DNA, 15 bp, Homo sapiens
ctaatttttttcttg

SEQ ID NO: 1645997 - DNA, 15 bp, Homo sapiens
gctaatttttttctt

SEQ ID NO: 1645998 - DNA, 15 bp, Homo sapiens
agctaatttttttct

SEQ ID NO: 1645999 - DNA, 15 bp, Homo sapiens
cagctaatttttttc

SEQ ID NO: 1646000 - DNA, 15 bp, Homo sapiens
agcctgccaccacac

SEQ ID NO: 1646001 - DNA, 15 bp, Homo sapiens
gagcctgccaccaca

SEQ ID NO: 1646002 - DNA, 15 bp, Homo sapiens
ggagcctgccaccac

SEQ ID NO: 1646003 - DNA, 15 bp, Homo sapiens
aggagcctgccacca

SEQ ID NO: 1646004 - DNA, 15 bp, Homo sapiens
caggagcctgccacc

SEQ ID NO: 1646005 - DNA, 15 bp, Homo sapiens
acaggagcctgccac

SEQ ID NO: 1646006 - DNA, 15 bp, Homo sapiens
tacaggagcctgcca

SEQ ID NO: 1646007 - DNA, 15 bp, Homo sapiens
atacaggagcctgcc

SEQ ID NO: 1646008 - DNA, 15 bp, Homo sapiens
aatacaggagcctgc

SEQ ID NO: 1646009 - DNA, 15 bp, Homo sapiens
gaatacaggagcctg

SEQ ID NO: 1646010 - DNA, 15 bp, Homo sapiens
ggaatacaggagcct

SEQ ID NO: 1646011 - DNA, 15 bp, Homo sapiens
gggaatacaggagcc

SEQ ID NO: 1646012 - DNA, 15 bp, Homo sapiens
tgggaatacaggagc

SEQ ID NO: 1646013 - DNA, 15 bp, Homo sapiens
ctgggaatacaggag

SEQ ID NO: 1646014 - DNA, 15 bp, Homo sapiens
gctgggaatacagga

SEQ ID NO: 1646015 - DNA, 15 bp, Homo sapiens
agctgggaatacagg

SEQ ID NO: 1646016 - DNA, 15 bp, Homo sapiens
tagctgggaatacag

SEQ ID NO: 1646017 - DNA, 15 bp, Homo sapiens
gtagctgggaataca

SEQ ID NO: 1646018 - DNA, 15 bp, Homo sapiens
agtagctgggaatac

SEQ ID NO: 1646019 - DNA, 15 bp, Homo sapiens
gagtagctgggaata

SEQ ID NO: 1646020 - DNA, 15 bp, Homo sapiens
tgagtagctgggaat

SEQ ID NO: 1646021 - DNA, 15 bp, Homo sapiens
ctgagtagctgggaa

SEQ ID NO: 1646022 - DNA, 15 bp, Homo sapiens
ccctgagtagctggg

SEQ ID NO: 1646023 - DNA, 15 bp, Homo sapiens
cccctgagtagctgg

SEQ ID NO: 1646024 - DNA, 15 bp, Homo sapiens
ccccctgagtagctg

SEQ ID NO: 1646025 - DNA, 15 bp, Homo sapiens
gccccctgagtagct

SEQ ID NO: 1646026 - DNA, 15 bp, Homo sapiens
ggccccctgagtagc

SEQ ID NO: 1646027 - DNA, 15 bp, Homo sapiens
tggccccctgagtag

SEQ ID NO: 1646028 - DNA, 15 bp, Homo sapiens
ttggccccctgagta

SEQ ID NO: 1646029 - DNA, 15 bp, Homo sapiens
cttggccccctgagt

SEQ ID NO: 1646030 - DNA, 15 bp, Homo sapiens
ccttggccccctgag

SEQ ID NO: 1646031 - DNA, 15 bp, Homo sapiens
gccttggccccctga

SEQ ID NO: 1646032 - DNA, 15 bp, Homo sapiens
tgccttggccccctg

SEQ ID NO: 1646033 - DNA, 15 bp, Homo sapiens
ctgccttggccccct

SEQ ID NO: 1646034 - DNA, 15 bp, Homo sapiens
cctgccttggccccc

SEQ ID NO: 1646035 - DNA, 15 bp, Homo sapiens
tcctgccttggcccc

SEQ ID NO: 1646036 - DNA, 15 bp, Homo sapiens
ctcctgccttggccc

SEQ ID NO: 1646037 - DNA, 15 bp, Homo sapiens
tctcctgccttggcc

SEQ ID NO: 1646038 - DNA, 15 bp, Homo sapiens
attctcctgccttgg

SEQ ID NO: 1646039 - DNA, 15 bp, Homo sapiens
gattctcctgccttg

SEQ ID NO: 1646040 - DNA, 15 bp, Homo sapiens
tgattctcctgcctt

SEQ ID NO: 1646041 - DNA, 15 bp, Homo sapiens
caaatgattctcctg

SEQ ID NO: 1646042 - DNA, 15 bp, Homo sapiens
tcaaatgattctcct

SEQ ID NO: 1646043 - DNA, 15 bp, Homo sapiens
ttcaaatgattctcc

SEQ ID NO: 1646044 - DNA, 15 bp, Homo sapiens
gttcaaatgattctc

SEQ ID NO: 1646045 - DNA, 15 bp, Homo sapiens
ggttcaaatgattct

SEQ ID NO: 1646046 - DNA, 15 bp, Homo sapiens
gggttcaaatgattc

SEQ ID NO: 1646047 - DNA, 15 bp, Homo sapiens
tgggttcaaatgatt

SEQ ID NO: 1646048 - DNA, 15 bp, Homo sapiens
ctgggttcaaatgat

SEQ ID NO: 1646049 - DNA, 15 bp, Homo sapiens
cctgggttcaaatga

SEQ ID NO: 1646050 - DNA, 15 bp, Homo sapiens
acatttttagttaga

SEQ ID NO: 1646051 - DNA, 15 bp, Homo sapiens
tacatttttagttag

SEQ ID NO: 1646052 - DNA, 15 bp, Homo sapiens
gtacatttttagtta

SEQ ID NO: 1646053 - DNA, 15 bp, Homo sapiens
tgtacatttttagtt

SEQ ID NO: 1646054 - DNA, 15 bp, Homo sapiens
ctgtacatttttagt

SEQ ID NO: 1646055 - DNA, 15 bp, Homo sapiens
tctgtacatttttag

SEQ ID NO: 1646056 - DNA, 15 bp, Homo sapiens
ttctgtacattttta

SEQ ID NO: 1646057 - DNA, 15 bp, Homo sapiens
attctgtacattttt

SEQ ID NO: 1646058 - DNA, 15 bp, Homo sapiens
cattctgtacatttt

SEQ ID NO: 1646059 - DNA, 15 bp, Homo sapiens
tcattctgtacattt

SEQ ID NO: 1646060 - DNA, 15 bp, Homo sapiens
ttcattctgtacatt

SEQ ID NO: 1646061 - DNA, 15 bp, Homo sapiens
tttcattctgtacat

SEQ ID NO: 1646062 - DNA, 15 bp, Homo sapiens
ttttcattctgtaca

SEQ ID NO: 1646063 - DNA, 15 bp, Homo sapiens
gttttcattctgtac

SEQ ID NO: 1646064 - DNA, 15 bp, Homo sapiens
agttttcattctgta

SEQ ID NO: 1646065 - DNA, 15 bp, Homo sapiens
tagttttcattctgt

SEQ ID NO: 1646066 - DNA, 15 bp, Homo sapiens
ctagttttcattctg

SEQ ID NO: 1646067 - DNA, 15 bp, Homo sapiens
tctagttttcattct

SEQ ID NO: 1646068 - DNA, 15 bp, Homo sapiens
ttctagttttcattc

SEQ ID NO: 1646069 - DNA, 15 bp, Homo sapiens
tttctagttttcatt

SEQ ID NO: 1646070 - DNA, 15 bp, Homo sapiens
ttttctagttttcat

SEQ ID NO: 1646071 - DNA, 15 bp, Homo sapiens
attttctagttttca

SEQ ID NO: 1646072 - DNA, 15 bp, Homo sapiens
aattttctagttttc

SEQ ID NO: 1646073 - DNA, 15 bp, Homo sapiens
aaattttctagtttt

SEQ ID NO: 1646074 - DNA, 15 bp, Homo sapiens
gaaattttctagttt

SEQ ID NO: 1646075 - DNA, 15 bp, Homo sapiens
tgaaattttctagtt

SEQ ID NO: 1646076 - DNA, 15 bp, Homo sapiens
ttgaaattttctagt

SEQ ID NO: 1646077 - DNA, 15 bp, Homo sapiens
gttgaaattttctag

SEQ ID NO: 1646078 - DNA, 15 bp, Homo sapiens
ggttgaaattttcta

SEQ ID NO: 1646079 - DNA, 15 bp, Homo sapiens
gggttgaaattttct

SEQ ID NO: 1646080 - DNA, 15 bp, Homo sapiens
ggggttgaaattttc

SEQ ID NO: 1646081 - DNA, 15 bp, Homo sapiens
ctggggttgaaattt

SEQ ID NO: 1646082 - DNA, 15 bp, Homo sapiens
tctggggttgaaatt

SEQ ID NO: 1646083 - DNA, 15 bp, Homo sapiens
atctggggttgaaat

SEQ ID NO: 1646084 - DNA, 15 bp, Homo sapiens
aatctggggttgaaa

SEQ ID NO: 1646085 - DNA, 15 bp, Homo sapiens
taatctggggttgaa

SEQ ID NO: 1646086 - DNA, 15 bp, Homo sapiens
ataatctggggttga

SEQ ID NO: 1646087 - DNA, 15 bp, Homo sapiens
gataatctggggttg

SEQ ID NO: 1646088 - DNA, 15 bp, Homo sapiens
agataatctggggtt

SEQ ID NO: 1646089 - DNA, 15 bp, Homo sapiens
aagataatctggggt

SEQ ID NO: 1646090 - DNA, 15 bp, Homo sapiens
gaagataatctgggg

SEQ ID NO: 1646091 - DNA, 15 bp, Homo sapiens
tgaagataatctggg

SEQ ID NO: 1646092 - DNA, 15 bp, Homo sapiens
ttgaagataatctgg

SEQ ID NO: 1646093 - DNA, 15 bp, Homo sapiens
gttgaagataatctg

SEQ ID NO: 1646094 - DNA, 15 bp, Homo sapiens
ggttgaagataatct

SEQ ID NO: 1646095 - DNA, 15 bp, Homo sapiens
aggttgaagataatc

SEQ ID NO: 1646096 - DNA, 15 bp, Homo sapiens
aaggttgaagataat

SEQ ID NO: 1646097 - DNA, 15 bp, Homo sapiens
caaggttgaagataa

SEQ ID NO: 1646098 - DNA, 15 bp, Homo sapiens
gcaaggttgaagata

SEQ ID NO: 1646099 - DNA, 15 bp, Homo sapiens
agcaaggttgaagat

SEQ ID NO: 1646100 - DNA, 15 bp, Homo sapiens
gagcaaggttgaaga

SEQ ID NO: 1646101 - DNA, 15 bp, Homo sapiens
ggagcaaggttgaag

SEQ ID NO: 1646102 - DNA, 15 bp, Homo sapiens
gggagcaaggttgaa

SEQ ID NO: 1646103 - DNA, 15 bp, Homo sapiens
agggagcaaggttga

SEQ ID NO: 1646104 - DNA, 15 bp, Homo sapiens
gagggagcaaggttg

SEQ ID NO: 1646105 - DNA, 15 bp, Homo sapiens
ggagggagcaaggtt

SEQ ID NO: 1646106 - DNA, 15 bp, Homo sapiens
tggagggagcaaggt

SEQ ID NO: 1646107 - DNA, 15 bp, Homo sapiens
gtggagggagcaagg

SEQ ID NO: 1646108 - DNA, 15 bp, Homo sapiens
ggtggagggagcaag

SEQ ID NO: 1646109 - DNA, 15 bp, Homo sapiens
tggtggagggagcaa

SEQ ID NO: 1646110 - DNA, 15 bp, Homo sapiens
ttggtggagggagca

SEQ ID NO: 1646111 - DNA, 15 bp, Homo sapiens
attggtggagggagc

SEQ ID NO: 1646112 - DNA, 15 bp, Homo sapiens
gattggtggagggag

SEQ ID NO: 1646113 - DNA, 15 bp, Homo sapiens
tgattggtggaggga

SEQ ID NO: 1646114 - DNA, 15 bp, Homo sapiens
atgattggtggaggg

SEQ ID NO: 1646115 - DNA, 15 bp, Homo sapiens
tatgattggtggagg

SEQ ID NO: 1646116 - DNA, 15 bp, Homo sapiens
gtatgattggtggag

SEQ ID NO: 1646117 - DNA, 15 bp, Homo sapiens
agtatgattggtgga

SEQ ID NO: 1646118 - DNA, 15 bp, Homo sapiens
aagtatgattggtgg

SEQ ID NO: 1646119 - DNA, 15 bp, Homo sapiens
aaagtatgattggtg

SEQ ID NO: 1646120 - DNA, 15 bp, Homo sapiens
caaagtatgattggt

SEQ ID NO: 1646121 - DNA, 15 bp, Homo sapiens
tcaaagtatgattgg

SEQ ID NO: 1646122 - DNA, 15 bp, Homo sapiens
gtcaaagtatgattg

SEQ ID NO: 1646123 - DNA, 15 bp, Homo sapiens
tgtcaaagtatgatt

SEQ ID NO: 1646124 - DNA, 15 bp, Homo sapiens
atgtcaaagtatgat

SEQ ID NO: 1646125 - DNA, 15 bp, Homo sapiens
aatgtcaaagtatga

SEQ ID NO: 1646126 - DNA, 15 bp, Homo sapiens
aaatgtcaaagtatg

SEQ ID NO: 1646127 - DNA, 15 bp, Homo sapiens
taaatgtcaaagtat

SEQ ID NO: 1646128 - DNA, 15 bp, Homo sapiens
ataaatgtcaaagta

SEQ ID NO: 1646129 - DNA, 15 bp, Homo sapiens
gataaatgtcaaagt

SEQ ID NO: 1646130 - DNA, 15 bp, Homo sapiens
agataaatgtcaaag

SEQ ID NO: 1646131 - DNA, 15 bp, Homo sapiens
tagataaatgtcaaa

SEQ ID NO: 1646132 - DNA, 15 bp, Homo sapiens
atagataaatgtcaa

SEQ ID NO: 1646133 - DNA, 15 bp, Homo sapiens
aatagataaatgtca

SEQ ID NO: 1646134 - DNA, 15 bp, Homo sapiens
aaatagataaatgtc

SEQ ID NO: 1646135 - DNA, 15 bp, Homo sapiens
gaaatagataaatgt

SEQ ID NO: 1646136 - DNA, 15 bp, Homo sapiens
ggaaatagataaatg

SEQ ID NO: 1646137 - DNA, 15 bp, Homo sapiens
aggaaatagataaat

SEQ ID NO: 1646138 - DNA, 15 bp, Homo sapiens
aaggaaatagataaa

SEQ ID NO: 1646139 - DNA, 15 bp, Homo sapiens
gaaggaaatagataa

SEQ ID NO: 1646140 - DNA, 15 bp, Homo sapiens
agaaggaaatagata

SEQ ID NO: 1646141 - DNA, 15 bp, Homo sapiens
gagaaggaaatagat

SEQ ID NO: 1646142 - DNA, 15 bp, Homo sapiens
ggagaaggaaataga

SEQ ID NO: 1646143 - DNA, 15 bp, Homo sapiens
tggagaaggaaatag

SEQ ID NO: 1646144 - DNA, 15 bp, Homo sapiens
gtggagaaggaaata

SEQ ID NO: 1646145 - DNA, 15 bp, Homo sapiens
agtggagaaggaaat

SEQ ID NO: 1646146 - DNA, 15 bp, Homo sapiens
aagtggagaaggaaa

SEQ ID NO: 1646147 - DNA, 15 bp, Homo sapiens
taagtggagaaggaa

SEQ ID NO: 1646148 - DNA, 15 bp, Homo sapiens
ataagtggagaagga

SEQ ID NO: 1646149 - DNA, 15 bp, Homo sapiens
cataagtggagaagg

SEQ ID NO: 1646150 - DNA, 15 bp, Homo sapiens
ccataagtggagaag

SEQ ID NO: 1646151 - DNA, 15 bp, Homo sapiens
tccataagtggagaa

SEQ ID NO: 1646152 - DNA, 15 bp, Homo sapiens
atccataagtggaga

SEQ ID NO: 1646153 - DNA, 15 bp, Homo sapiens
catccataagtggag

SEQ ID NO: 1646154 - DNA, 15 bp, Homo sapiens
acatccataagtgga

SEQ ID NO: 1646155 - DNA, 15 bp, Homo sapiens
tacatccataagtgg

SEQ ID NO: 1646156 - DNA, 15 bp, Homo sapiens
ttacatccataagtg

SEQ ID NO: 1646157 - DNA, 15 bp, Homo sapiens
attacatccataagt

SEQ ID NO: 1646158 - DNA, 15 bp, Homo sapiens
aattacatccataag

SEQ ID NO: 1646159 - DNA, 15 bp, Homo sapiens
caattacatccataa

SEQ ID NO: 1646160 - DNA, 15 bp, Homo sapiens
ccaattacatccata

SEQ ID NO: 1646161 - DNA, 15 bp, Homo sapiens
gccaattacatccat

SEQ ID NO: 1646162 - DNA, 15 bp, Homo sapiens
agccaattacatcca

SEQ ID NO: 1646163 - DNA, 15 bp, Homo sapiens
aagccaattacatcc

SEQ ID NO: 1646164 - DNA, 15 bp, Homo sapiens
caagccaattacatc

SEQ ID NO: 1646165 - DNA, 15 bp, Homo sapiens
gcaagccaattacat

SEQ ID NO: 1646166 - DNA, 15 bp, Homo sapiens
agcaagccaattaca

SEQ ID NO: 1646167 - DNA, 15 bp, Homo sapiens
tagcaagccaattac

SEQ ID NO: 1646168 - DNA, 15 bp, Homo sapiens
atagcaagccaatta

SEQ ID NO: 1646169 - DNA, 15 bp, Homo sapiens
tatagcaagccaatt

SEQ ID NO: 1646170 - DNA, 15 bp, Homo sapiens
ctatagcaagccaat

SEQ ID NO: 1646171 - DNA, 15 bp, Homo sapiens
tctatagcaagccaa

SEQ ID NO: 1646172 - DNA, 15 bp, Homo sapiens
ttctatagcaagcca

SEQ ID NO: 1646173 - DNA, 15 bp, Homo sapiens
tttctatagcaagcc

SEQ ID NO: 1646174 - DNA, 15 bp, Homo sapiens
gtttctatagcaagc

SEQ ID NO: 1646175 - DNA, 15 bp, Homo sapiens
agtttctatagcaag

SEQ ID NO: 1646176 - DNA, 15 bp, Homo sapiens
tagtttctatagcaa

SEQ ID NO: 1646177 - DNA, 15 bp, Homo sapiens
gtagtttctatagca

SEQ ID NO: 1646178 - DNA, 15 bp, Homo sapiens
tgtagtttctatagc

SEQ ID NO: 1646179 - DNA, 15 bp, Homo sapiens
ctgtagtttctatag

SEQ ID NO: 1646180 - DNA, 15 bp, Homo sapiens
actgtagtttctata

SEQ ID NO: 1646181 - DNA, 15 bp, Homo sapiens
aactgtagtttctat

SEQ ID NO: 1646182 - DNA, 15 bp, Homo sapiens
gaactgtagtttcta

SEQ ID NO: 1646183 - DNA, 15 bp, Homo sapiens
tgaactgtagtttct

SEQ ID NO: 1646184 - DNA, 15 bp, Homo sapiens
ctgaactgtagtttc

SEQ ID NO: 1646185 - DNA, 15 bp, Homo sapiens
tctgaactgtagttt

SEQ ID NO: 1646186 - DNA, 15 bp, Homo sapiens
atctgaactgtagtt

SEQ ID NO: 1646187 - DNA, 15 bp, Homo sapiens
catctgaactgtagt

SEQ ID NO: 1646188 - DNA, 15 bp, Homo sapiens
gcatctgaactgtag

SEQ ID NO: 1646189 - DNA, 15 bp, Homo sapiens
agcatctgaactgta

SEQ ID NO: 1646190 - DNA, 15 bp, Homo sapiens
aagcatctgaactgt

SEQ ID NO: 1646191 - DNA, 15 bp, Homo sapiens
aaagcatctgaactg

SEQ ID NO: 1646192 - DNA, 15 bp, Homo sapiens
caaagcatctgaact

SEQ ID NO: 1646193 - DNA, 15 bp, Homo sapiens
tcaaagcatctgaac

SEQ ID NO: 1646194 - DNA, 15 bp, Homo sapiens
ttcaaagcatctgaa

SEQ ID NO: 1646195 - DNA, 15 bp, Homo sapiens
attcaaagcatctga

SEQ ID NO: 1646196 - DNA, 15 bp, Homo sapiens
cattcaaagcatctg

SEQ ID NO: 1646197 - DNA, 15 bp, Homo sapiens
acattcaaagcatct

SEQ ID NO: 1646198 - DNA, 15 bp, Homo sapiens
tacattcaaagcatc

SEQ ID NO: 1646199 - DNA, 15 bp, Homo sapiens
atacattcaaagcat

SEQ ID NO: 1646200 - DNA, 15 bp, Homo sapiens
catacattcaaagca

SEQ ID NO: 1646201 - DNA, 15 bp, Homo sapiens
tcatacattcaaagc

SEQ ID NO: 1646202 - DNA, 15 bp, Homo sapiens
ttcatacattcaaag

SEQ ID NO: 1646203 - DNA, 15 bp, Homo sapiens
gttcatacattcaaa

SEQ ID NO: 1646204 - DNA, 15 bp, Homo sapiens
agttcatacattcaa

SEQ ID NO: 1646205 - DNA, 15 bp, Homo sapiens
tagttcatacattca

SEQ ID NO: 1646206 - DNA, 15 bp, Homo sapiens
gtagttcatacattc

SEQ ID NO: 1646207 - DNA, 15 bp, Homo sapiens
tgtagttcatacatt

SEQ ID NO: 1646208 - DNA, 15 bp, Homo sapiens
ttgtagttcatacat

SEQ ID NO: 1646209 - DNA, 15 bp, Homo sapiens
attgtagttcataca

SEQ ID NO: 1646210 - DNA, 15 bp, Homo sapiens
cattgtagttcatac

SEQ ID NO: 1646211 - DNA, 15 bp, Homo sapiens
tcattgtagttcata

SEQ ID NO: 1646212 - DNA, 15 bp, Homo sapiens
ttcattgtagttcat

SEQ ID NO: 1646213 - DNA, 15 bp, Homo sapiens
gttcattgtagttca

SEQ ID NO: 1646214 - DNA, 15 bp, Homo sapiens
tgttcattgtagttc

SEQ ID NO: 1646215 - DNA, 15 bp, Homo sapiens
ttgttcattgtagtt

SEQ ID NO: 1646216 - DNA, 15 bp, Homo sapiens
attgttcattgtagt

SEQ ID NO: 1646217 - DNA, 15 bp, Homo sapiens
tattgttcattgtag

SEQ ID NO: 1646218 - DNA, 15 bp, Homo sapiens
ttattgttcattgta

SEQ ID NO: 1646219 - DNA, 15 bp, Homo sapiens
tttattgttcattgt

SEQ ID NO: 1646220 - DNA, 15 bp, Homo sapiens
ctttattgttcattg

SEQ ID NO: 1646221 - DNA, 15 bp, Homo sapiens
actttattgttcatt

SEQ ID NO: 1646222 - DNA, 15 bp, Homo sapiens
gactttattgttcat

SEQ ID NO: 1646223 - DNA, 15 bp, Homo sapiens
ggactttattgttca

SEQ ID NO: 1646224 - DNA, 15 bp, Homo sapiens
aggactttattgttc

SEQ ID NO: 1646225 - DNA, 15 bp, Homo sapiens
gaggactttattgtt

SEQ ID NO: 1646226 - DNA, 15 bp, Homo sapiens
agaggactttattgt

SEQ ID NO: 1646227 - DNA, 15 bp, Homo sapiens
aagaggactttattg

SEQ ID NO: 1646228 - DNA, 15 bp, Homo sapiens
gaagaggactttatt

SEQ ID NO: 1646229 - DNA, 15 bp, Homo sapiens
agaagaggactttat

SEQ ID NO: 1646230 - DNA, 15 bp, Homo sapiens
aagaagaggacttta

SEQ ID NO: 1646231 - DNA, 15 bp, Homo sapiens
aaagaagaggacttt

SEQ ID NO: 1646232 - DNA, 15 bp, Homo sapiens
aaaagaagaggactt

SEQ ID NO: 1646233 - DNA, 15 bp, Homo sapiens
caaaagaagaggact

SEQ ID NO: 1646234 - DNA, 15 bp, Homo sapiens
tcaaaagaagaggac

SEQ ID NO: 1646235 - DNA, 15 bp, Homo sapiens
ttcaaaagaagagga

SEQ ID NO: 1646236 - DNA, 15 bp, Homo sapiens
cttcaaaagaagagg

SEQ ID NO: 1646237 - DNA, 15 bp, Homo sapiens
gcttcaaaagaagag

SEQ ID NO: 1646238 - DNA, 15 bp, Homo sapiens
tgcttcaaaagaaga

SEQ ID NO: 1646239 - DNA, 15 bp, Homo sapiens
atgcttcaaaagaag

SEQ ID NO: 1646240 - DNA, 15 bp, Homo sapiens
tatgcttcaaaagaa

SEQ ID NO: 1646241 - DNA, 15 bp, Homo sapiens
atatgcttcaaaaga

SEQ ID NO: 1646242 - DNA, 15 bp, Homo sapiens
aatatgcttcaaaag

SEQ ID NO: 1646243 - DNA, 15 bp, Homo sapiens
aaatatgcttcaaaa

SEQ ID NO: 1646244 - DNA, 15 bp, Homo sapiens
aaaatatgcttcaaa

SEQ ID NO: 1646245 - DNA, 15 bp, Homo sapiens
caaaatatgcttcaa

SEQ ID NO: 1646246 - DNA, 15 bp, Homo sapiens
ccaaaatatgcttca

SEQ ID NO: 1646247 - DNA, 15 bp, Homo sapiens
gccaaaatatgcttc

SEQ ID NO: 1646248 - DNA, 15 bp, Homo sapiens
agccaaaatatgctt

SEQ ID NO: 1646249 - DNA, 15 bp, Homo sapiens
aagccaaaatatgct

SEQ ID NO: 1646250 - DNA, 15 bp, Homo sapiens
gaagccaaaatatgc

SEQ ID NO: 1646251 - DNA, 15 bp, Homo sapiens
tgaagccaaaatatg

SEQ ID NO: 1646252 - DNA, 15 bp, Homo sapiens
ctgaagccaaaatat

SEQ ID NO: 1646253 - DNA, 15 bp, Homo sapiens
gctgaagccaaaata

SEQ ID NO: 1646254 - DNA, 15 bp, Homo sapiens
agctgaagccaaaat

SEQ ID NO: 1646255 - DNA, 15 bp, Homo sapiens
aagctgaagccaaaa

SEQ ID NO: 1646256 - DNA, 15 bp, Homo sapiens
aaagctgaagccaaa

SEQ ID NO: 1646257 - DNA, 15 bp, Homo sapiens
taaagctgaagccaa

SEQ ID NO: 1646258 - DNA, 15 bp, Homo sapiens
ttaaagctgaagcca

SEQ ID NO: 1646259 - DNA, 15 bp, Homo sapiens
cttaaagctgaagcc

SEQ ID NO: 1646260 - DNA, 15 bp, Homo sapiens
tcttaaagctgaagc

SEQ ID NO: 1646261 - DNA, 15 bp, Homo sapiens
atcttaaagctgaag

SEQ ID NO: 1646262 - DNA, 15 bp, Homo sapiens
tatcttaaagctgaa

SEQ ID NO: 1646263 - DNA, 15 bp, Homo sapiens
ttatcttaaagctga

SEQ ID NO: 1646264 - DNA, 15 bp, Homo sapiens
attatcttaaagctg

SEQ ID NO: 1646265 - DNA, 15 bp, Homo sapiens
gattatcttaaagct

SEQ ID NO: 1646266 - DNA, 15 bp, Homo sapiens
agattatcttaaagc

SEQ ID NO: 1646267 - DNA, 15 bp, Homo sapiens
aagattatcttaaag

SEQ ID NO: 1646268 - DNA, 15 bp, Homo sapiens
taagattatcttaaa

SEQ ID NO: 1646269 - DNA, 15 bp, Homo sapiens
ataagattatcttaa

SEQ ID NO: 1646270 - DNA, 15 bp, Homo sapiens
cctgttttaagggca

SEQ ID NO: 1646271 - DNA, 15 bp, Homo sapiens
acctgttttaagggc

SEQ ID NO: 1646272 - DNA, 15 bp, Homo sapiens
aacctgttttaaggg

SEQ ID NO: 1646273 - DNA, 15 bp, Homo sapiens
aaacctgttttaagg

SEQ ID NO: 1646274 - DNA, 15 bp, Homo sapiens
caaacctgttttaag

SEQ ID NO: 1646275 - DNA, 15 bp, Homo sapiens
tcaaacctgttttaa

SEQ ID NO: 1646276 - DNA, 15 bp, Homo sapiens
gtcaaacctgtttta

SEQ ID NO: 1646277 - DNA, 15 bp, Homo sapiens
ggtcaaacctgtttt

SEQ ID NO: 1646278 - DNA, 15 bp, Homo sapiens
aggtcaaacctgttt

SEQ ID NO: 1646279 - DNA, 15 bp, Homo sapiens
aaggtcaaacctgtt

SEQ ID NO: 1646280 - DNA, 15 bp, Homo sapiens
aaaggtcaaacctgt

SEQ ID NO: 1646281 - DNA, 15 bp, Homo sapiens
aaaaggtcaaacctg

SEQ ID NO: 1646282 - DNA, 15 bp, Homo sapiens
gaaaaggtcaaacct

SEQ ID NO: 1646283 - DNA, 15 bp, Homo sapiens
ggaaaaggtcaaacc

SEQ ID NO: 1646284 - DNA, 15 bp, Homo sapiens
aggaaaaggtcaaac

SEQ ID NO: 1646285 - DNA, 15 bp, Homo sapiens
aaggaaaaggtcaaa

SEQ ID NO: 1646286 - DNA, 15 bp, Homo sapiens
gaaggaaaaggtcaa

SEQ ID NO: 1646287 - DNA, 15 bp, Homo sapiens
tgaaggaaaaggtca

SEQ ID NO: 1646288 - DNA, 15 bp, Homo sapiens
gtgaaggaaaaggtc

SEQ ID NO: 1646289 - DNA, 15 bp, Homo sapiens
agtgaaggaaaaggt

SEQ ID NO: 1646290 - DNA, 15 bp, Homo sapiens
gagtgaaggaaaagg

SEQ ID NO: 1646291 - DNA, 15 bp, Homo sapiens
agagtgaaggaaaag

SEQ ID NO: 1646292 - DNA, 15 bp, Homo sapiens
aagagtgaaggaaaa

SEQ ID NO: 1646293 - DNA, 15 bp, Homo sapiens
gaagagtgaaggaaa

SEQ ID NO: 1646294 - DNA, 15 bp, Homo sapiens
ggaagagtgaaggaa

SEQ ID NO: 1646295 - DNA, 15 bp, Homo sapiens
aggaagagtgaagga

SEQ ID NO: 1646296 - DNA, 15 bp, Homo sapiens
gaggaagagtgaagg

SEQ ID NO: 1646297 - DNA, 15 bp, Homo sapiens
ggaggaagagtgaag

SEQ ID NO: 1646298 - DNA, 15 bp, Homo sapiens
aggaggaagagtgaa

SEQ ID NO: 1646299 - DNA, 15 bp, Homo sapiens
caggaggaagagtga

SEQ ID NO: 1646300 - DNA, 15 bp, Homo sapiens
acaggaggaagagtg

SEQ ID NO: 1646301 - DNA, 15 bp, Homo sapiens
gacaggaggaagagt

SEQ ID NO: 1646302 - DNA, 15 bp, Homo sapiens
ggacaggaggaagag

SEQ ID NO: 1646303 - DNA, 15 bp, Homo sapiens
gggacaggaggaaga

SEQ ID NO: 1646304 - DNA, 15 bp, Homo sapiens
tgggacaggaggaag

SEQ ID NO: 1646305 - DNA, 15 bp, Homo sapiens
gtgggacaggaggaa

SEQ ID NO: 1646306 - DNA, 15 bp, Homo sapiens
ggtgggacaggagga

SEQ ID NO: 1646307 - DNA, 15 bp, Homo sapiens
gggtgggacaggagg

SEQ ID NO: 1646308 - DNA, 15 bp, Homo sapiens
agggtgggacaggag

SEQ ID NO: 1646309 - DNA, 15 bp, Homo sapiens
gagggtgggacagga

SEQ ID NO: 1646310 - DNA, 15 bp, Homo sapiens
agagggtgggacagg

SEQ ID NO: 1646311 - DNA, 15 bp, Homo sapiens
cagagggtgggacag

SEQ ID NO: 1646312 - DNA, 15 bp, Homo sapiens
acagagggtgggaca

SEQ ID NO: 1646313 - DNA, 15 bp, Homo sapiens
cacagagggtgggac

SEQ ID NO: 1646314 - DNA, 15 bp, Homo sapiens
tcacagagggtggga

SEQ ID NO: 1646315 - DNA, 15 bp, Homo sapiens
ctcacagagggtggg

SEQ ID NO: 1646316 - DNA, 15 bp, Homo sapiens
actcacagagggtgg

SEQ ID NO: 1646317 - DNA, 15 bp, Homo sapiens
cactcacagagggtg

SEQ ID NO: 1646318 - DNA, 15 bp, Homo sapiens
tcactcacagagggt

SEQ ID NO: 1646319 - DNA, 15 bp, Homo sapiens
atcactcacagaggg

SEQ ID NO: 1646320 - DNA, 15 bp, Homo sapiens
aatcactcacagagg

SEQ ID NO: 1646321 - DNA, 15 bp, Homo sapiens
aaatcactcacagag

SEQ ID NO: 1646322 - DNA, 15 bp, Homo sapiens
taaatcactcacaga

SEQ ID NO: 1646323 - DNA, 15 bp, Homo sapiens
ttaaatcactcacag

SEQ ID NO: 1646324 - DNA, 15 bp, Homo sapiens
tttaaatcactcaca

SEQ ID NO: 1646325 - DNA, 15 bp, Homo sapiens
ttttaaatcactcac

SEQ ID NO: 1646326 - DNA, 15 bp, Homo sapiens
tttttaaatcactca

SEQ ID NO: 1646327 - DNA, 15 bp, Homo sapiens
gtttttaaatcactc

SEQ ID NO: 1646328 - DNA, 15 bp, Homo sapiens
cgtttttaaatcact

SEQ ID NO: 1646329 - DNA, 15 bp, Homo sapiens
ccgtttttaaatcac

SEQ ID NO: 1646330 - DNA, 15 bp, Homo sapiens
tccgtttttaaatca

SEQ ID NO: 1646331 - DNA, 15 bp, Homo sapiens
ttccgtttttaaatc

SEQ ID NO: 1646332 - DNA, 15 bp, Homo sapiens
tttccgtttttaaat

SEQ ID NO: 1646333 - DNA, 15 bp, Homo sapiens
ttttccgtttttaaa

SEQ ID NO: 1646334 - DNA, 15 bp, Homo sapiens
cttttccgtttttaa

SEQ ID NO: 1646335 - DNA, 15 bp, Homo sapiens
ccttttccgttttta

SEQ ID NO: 1646336 - DNA, 15 bp, Homo sapiens
accttttccgttttt

SEQ ID NO: 1646337 - DNA, 15 bp, Homo sapiens
gaccttttccgtttt

SEQ ID NO: 1646338 - DNA, 15 bp, Homo sapiens
tgaccttttccgttt

SEQ ID NO: 1646339 - DNA, 15 bp, Homo sapiens
ttgaccttttccgtt

SEQ ID NO: 1646340 - DNA, 15 bp, Homo sapiens
tttgaccttttccgt

SEQ ID NO: 1646341 - DNA, 15 bp, Homo sapiens
ctttgaccttttccg

SEQ ID NO: 1646342 - DNA, 15 bp, Homo sapiens
gctttgaccttttcc

SEQ ID NO: 1646343 - DNA, 15 bp, Homo sapiens
ggctttgaccttttc

SEQ ID NO: 1646344 - DNA, 15 bp, Homo sapiens
gggctttgacctttt

SEQ ID NO: 1646345 - DNA, 15 bp, Homo sapiens
tgggctttgaccttt

SEQ ID NO: 1646346 - DNA, 15 bp, Homo sapiens
ctgggctttgacctt

SEQ ID NO: 1646347 - DNA, 15 bp, Homo sapiens
gctgggctttgacct

SEQ ID NO: 1646348 - DNA, 15 bp, Homo sapiens
ggctgggctttgacc

SEQ ID NO: 1646349 - DNA, 15 bp, Homo sapiens
tggctgggctttgac

SEQ ID NO: 1646350 - DNA, 15 bp, Homo sapiens
ctggctgggctttga

SEQ ID NO: 1646351 - DNA, 15 bp, Homo sapiens
cctggctgggctttg

SEQ ID NO: 1646352 - DNA, 15 bp, Homo sapiens
gcctggctgggcttt

SEQ ID NO: 1646353 - DNA, 15 bp, Homo sapiens
ggcctggctgggctt

SEQ ID NO: 1646354 - DNA, 15 bp, Homo sapiens
aggcctggctgggct

SEQ ID NO: 1646355 - DNA, 15 bp, Homo sapiens
taggcctggctgggc

SEQ ID NO: 1646356 - DNA, 15 bp, Homo sapiens
gtaggcctggctggg

SEQ ID NO: 1646357 - DNA, 15 bp, Homo sapiens
tgtaggcctggctgg

SEQ ID NO: 1646358 - DNA, 15 bp, Homo sapiens
atgtaggcctggctg

SEQ ID NO: 1646359 - DNA, 15 bp, Homo sapiens
aatgtaggcctggct

SEQ ID NO: 1646360 - DNA, 15 bp, Homo sapiens
aaatgtaggcctggc

SEQ ID NO: 1646361 - DNA, 15 bp, Homo sapiens
taaatgtaggcctgg

SEQ ID NO: 1646362 - DNA, 15 bp, Homo sapiens
ctaaatgtaggcctg

SEQ ID NO: 1646363 - DNA, 15 bp, Homo sapiens
tctaaatgtaggcct

SEQ ID NO: 1646364 - DNA, 15 bp, Homo sapiens
ctctaaatgtaggcc

SEQ ID NO: 1646365 - DNA, 15 bp, Homo sapiens
tctctaaatgtaggc

SEQ ID NO: 1646366 - DNA, 15 bp, Homo sapiens
ttctctaaatgtagg

SEQ ID NO: 1646367 - DNA, 15 bp, Homo sapiens
tttctctaaatgtag

SEQ ID NO: 1646368 - DNA, 15 bp, Homo sapiens
atttctctaaatgta

SEQ ID NO: 1646369 - DNA, 15 bp, Homo sapiens
aatttctctaaatgt

SEQ ID NO: 1646370 - DNA, 15 bp, Homo sapiens
aaatttctctaaatg

SEQ ID NO: 1646371 - DNA, 15 bp, Homo sapiens
aaaatttctctaaat

SEQ ID NO: 1646372 - DNA, 15 bp, Homo sapiens
taaaatttctctaaa

SEQ ID NO: 1646373 - DNA, 15 bp, Homo sapiens
ttaaaatttctctaa

SEQ ID NO: 1646374 - DNA, 15 bp, Homo sapiens
tttaaaatttctcta

SEQ ID NO: 1646375 - DNA, 15 bp, Homo sapiens
ttttaaaatttctct

SEQ ID NO: 1646376 - DNA, 15 bp, Homo sapiens
tttttaaaatttctc

SEQ ID NO: 1646377 - DNA, 15 bp, Homo sapiens
ttttttaaaatttct

SEQ ID NO: 1646378 - DNA, 15 bp, Homo sapiens
tttttttaaaatttc

SEQ ID NO: 1646379 - DNA, 15 bp, Homo sapiens
atttttttaaaattt

SEQ ID NO: 1646380 - DNA, 15 bp, Homo sapiens
aatttttttaaaatt

SEQ ID NO: 1646381 - DNA, 15 bp, Homo sapiens
aaatttttttaaaat

SEQ ID NO: 1646382 - DNA, 15 bp, Homo sapiens
gaaaaatttttttaa

SEQ ID NO: 1646383 - DNA, 15 bp, Homo sapiens
ggaaaaattttttta

SEQ ID NO: 1646384 - DNA, 15 bp, Homo sapiens
aggaaaaattttttt

SEQ ID NO: 1646385 - DNA, 15 bp, Homo sapiens
aaggaaaaatttttt

SEQ ID NO: 1646386 - DNA, 15 bp, Homo sapiens
aaaggaaaaattttt

SEQ ID NO: 1646387 - DNA, 15 bp, Homo sapiens
gaaaggaaaaatttt

SEQ ID NO: 1646388 - DNA, 15 bp, Homo sapiens
tgaaaggaaaaattt

SEQ ID NO: 1646389 - DNA, 15 bp, Homo sapiens
ttgaaaggaaaaatt

SEQ ID NO: 1646390 - DNA, 15 bp, Homo sapiens
attgaaaggaaaaat

SEQ ID NO: 1646391 - DNA, 15 bp, Homo sapiens
aattgaaaggaaaaa

SEQ ID NO: 1646392 - DNA, 15 bp, Homo sapiens
aaattgaaaggaaaa

SEQ ID NO: 1646393 - DNA, 15 bp, Homo sapiens
aaaattgaaaggaaa

SEQ ID NO: 1646394 - DNA, 15 bp, Homo sapiens
caaaattgaaaggaa

SEQ ID NO: 1646395 - DNA, 15 bp, Homo sapiens
ccaaaattgaaagga

SEQ ID NO: 1646396 - DNA, 15 bp, Homo sapiens
gccaaaattgaaagg

SEQ ID NO: 1646397 - DNA, 15 bp, Homo sapiens
ggccaaaattgaaag

SEQ ID NO: 1646398 - DNA, 15 bp, Homo sapiens
tggccaaaattgaaa

SEQ ID NO: 1646399 - DNA, 15 bp, Homo sapiens
ttggccaaaattgaa

SEQ ID NO: 1646400 - DNA, 15 bp, Homo sapiens
attggccaaaattga

SEQ ID NO: 1646401 - DNA, 15 bp, Homo sapiens
aattggccaaaattg

SEQ ID NO: 1646402 - DNA, 15 bp, Homo sapiens
taattggccaaaatt

SEQ ID NO: 1646403 - DNA, 15 bp, Homo sapiens
ataattggccaaaat

SEQ ID NO: 1646404 - DNA, 15 bp, Homo sapiens
aataattggccaaaa

SEQ ID NO: 1646405 - DNA, 15 bp, Homo sapiens
aaataattggccaaa

SEQ ID NO: 1646406 - DNA, 15 bp, Homo sapiens
gaaataattggccaa

SEQ ID NO: 1646407 - DNA, 15 bp, Homo sapiens
ggaaataattggcca

SEQ ID NO: 1646408 - DNA, 15 bp, Homo sapiens
tggaaataattggcc

SEQ ID NO: 1646409 - DNA, 15 bp, Homo sapiens
ttggaaataattggc

SEQ ID NO: 1646410 - DNA, 15 bp, Homo sapiens
attggaaataattgg

SEQ ID NO: 1646411 - DNA, 15 bp, Homo sapiens
aattggaaataattg

SEQ ID NO: 1646412 - DNA, 15 bp, Homo sapiens
aaattggaaataatt

SEQ ID NO: 1646413 - DNA, 15 bp, Homo sapiens
aaaattggaaataat

SEQ ID NO: 1646414 - DNA, 15 bp, Homo sapiens
aaaaattggaaataa

SEQ ID NO: 1646415 - DNA, 15 bp, Homo sapiens
taaaaattggaaata

SEQ ID NO: 1646416 - DNA, 15 bp, Homo sapiens
ataaaaattggaaat

SEQ ID NO: 1646417 - DNA, 15 bp, Homo sapiens
aataaaaattggaaa

SEQ ID NO: 1646418 - DNA, 15 bp, Homo sapiens
aaataaaaattggaa

SEQ ID NO: 1646419 - DNA, 15 bp, Homo sapiens
aaaataaaaattgga

SEQ ID NO: 1646420 - DNA, 15 bp, Homo sapiens
taaaataaaaattgg

SEQ ID NO: 1646421 - DNA, 15 bp, Homo sapiens
ataaaataaaaattg

SEQ ID NO: 1646422 - DNA, 15 bp, Homo sapiens
gaataaaataaaaat

SEQ ID NO: 1646423 - DNA, 15 bp, Homo sapiens
agaataaaataaaaa

SEQ ID NO: 1646424 - DNA, 15 bp, Homo sapiens
aagaataaaataaaa

SEQ ID NO: 1646425 - DNA, 15 bp, Homo sapiens
taagaataaaataaa

SEQ ID NO: 1646426 - DNA, 15 bp, Homo sapiens
ttaagaataaaataa

SEQ ID NO: 1646427 - DNA, 15 bp, Homo sapiens
tttaagaataaaata

SEQ ID NO: 1646428 - DNA, 15 bp, Homo sapiens
ttttaagaataaaat

SEQ ID NO: 1646429 - DNA, 15 bp, Homo sapiens
gttttaagaataaaa

SEQ ID NO: 1646430 - DNA, 15 bp, Homo sapiens
agttttaagaataaa

SEQ ID NO: 1646431 - DNA, 15 bp, Homo sapiens
aagttttaagaataa

SEQ ID NO: 1646432 - DNA, 15 bp, Homo sapiens
taagttttaagaata

SEQ ID NO: 1646433 - DNA, 15 bp, Homo sapiens
ttaagttttaagaat

SEQ ID NO: 1646434 - DNA, 15 bp, Homo sapiens
cttaagttttaagaa

SEQ ID NO: 1646435 - DNA, 15 bp, Homo sapiens
gcttaagttttaaga

SEQ ID NO: 1646436 - DNA, 15 bp, Homo sapiens
tgcttaagttttaag

SEQ ID NO: 1646437 - DNA, 15 bp, Homo sapiens
atgcttaagttttaa

SEQ ID NO: 1646438 - DNA, 15 bp, Homo sapiens
catgcttaagtttta

SEQ ID NO: 1646439 - DNA, 15 bp, Homo sapiens
ccatgcttaagtttt

SEQ ID NO: 1646440 - DNA, 15 bp, Homo sapiens
accatgcttaagttt

SEQ ID NO: 1646441 - DNA, 15 bp, Homo sapiens
taccatgcttaagtt

SEQ ID NO: 1646442 - DNA, 15 bp, Homo sapiens
ttaccatgcttaagt

SEQ ID NO: 1646443 - DNA, 15 bp, Homo sapiens
tttaccatgcttaag

SEQ ID NO: 1646444 - DNA, 15 bp, Homo sapiens
ttttaccatgcttaa

SEQ ID NO: 1646445 - DNA, 15 bp, Homo sapiens
attttaccatgctta

SEQ ID NO: 1646446 - DNA, 15 bp, Homo sapiens
cattttaccatgctt

SEQ ID NO: 1646447 - DNA, 15 bp, Homo sapiens
acattttaccatgct

SEQ ID NO: 1646448 - DNA, 15 bp, Homo sapiens
aacattttaccatgc

SEQ ID NO: 1646449 - DNA, 15 bp, Homo sapiens
taacattttaccatg

SEQ ID NO: 1646450 - DNA, 15 bp, Homo sapiens
ttaacattttaccat

SEQ ID NO: 1646451 - DNA, 15 bp, Homo sapiens
cttaacattttacca

SEQ ID NO: 1646452 - DNA, 15 bp, Homo sapiens
gcttaacattttacc

SEQ ID NO: 1646453 - DNA, 15 bp, Homo sapiens
agcttaacattttac

SEQ ID NO: 1646454 - DNA, 15 bp, Homo sapiens
cagcttaacatttta

SEQ ID NO: 1646455 - DNA, 15 bp, Homo sapiens
acagcttaacatttt

SEQ ID NO: 1646456 - DNA, 15 bp, Homo sapiens
aacagcttaacattt

SEQ ID NO: 1646457 - DNA, 15 bp, Homo sapiens
aaacagcttaacatt

SEQ ID NO: 1646458 - DNA, 15 bp, Homo sapiens
aaaacagcttaacat

SEQ ID NO: 1646459 - DNA, 15 bp, Homo sapiens
gaaaacagcttaaca

SEQ ID NO: 1646460 - DNA, 15 bp, Homo sapiens
tgaaaacagcttaac

SEQ ID NO: 1646461 - DNA, 15 bp, Homo sapiens
atgaaaacagcttaa

SEQ ID NO: 1646462 - DNA, 15 bp, Homo sapiens
gatgaaaacagctta

SEQ ID NO: 1646463 - DNA, 15 bp, Homo sapiens
ggatgaaaacagctt

SEQ ID NO: 1646464 - DNA, 15 bp, Homo sapiens
tggatgaaaacagct

SEQ ID NO: 1646465 - DNA, 15 bp, Homo sapiens
gtggatgaaaacagc

SEQ ID NO: 1646466 - DNA, 15 bp, Homo sapiens
agtggatgaaaacag

SEQ ID NO: 1646467 - DNA, 15 bp, Homo sapiens
cagtggatgaaaaca

SEQ ID NO: 1646468 - DNA, 15 bp, Homo sapiens
tcagtggatgaaaac

SEQ ID NO: 1646469 - DNA, 15 bp, Homo sapiens
atcagtggatgaaaa

SEQ ID NO: 1646470 - DNA, 15 bp, Homo sapiens
tatcagtggatgaaa

SEQ ID NO: 1646471 - DNA, 15 bp, Homo sapiens
atatcagtggatgaa

SEQ ID NO: 1646472 - DNA, 15 bp, Homo sapiens
aatatcagtggatga

SEQ ID NO: 1646473 - DNA, 15 bp, Homo sapiens
taatatcagtggatg

SEQ ID NO: 1646474 - DNA, 15 bp, Homo sapiens
ataatatcagtggat

SEQ ID NO: 1646475 - DNA, 15 bp, Homo sapiens
aataatatcagtgga

SEQ ID NO: 1646476 - DNA, 15 bp, Homo sapiens
gaataatatcagtgg

SEQ ID NO: 1646477 - DNA, 15 bp, Homo sapiens
agaataatatcagtg

SEQ ID NO: 1646478 - DNA, 15 bp, Homo sapiens
tagaataatatcagt

SEQ ID NO: 1646479 - DNA, 15 bp, Homo sapiens
gtagaataatatcag

SEQ ID NO: 1646480 - DNA, 15 bp, Homo sapiens
agtagaataatatca

SEQ ID NO: 1646481 - DNA, 15 bp, Homo sapiens
tagtagaataatatc

SEQ ID NO: 1646482 - DNA, 15 bp, Homo sapiens
atagtagaataatat

SEQ ID NO: 1646483 - DNA, 15 bp, Homo sapiens
tatagtagaataata

SEQ ID NO: 1646484 - DNA, 15 bp, Homo sapiens
ttatagtagaataat

SEQ ID NO: 1646485 - DNA, 15 bp, Homo sapiens
tttatagtagaataa

SEQ ID NO: 1646486 - DNA, 15 bp, Homo sapiens
ttttatagtagaata

SEQ ID NO: 1646487 - DNA, 15 bp, Homo sapiens
ctttttatagtagaa

SEQ ID NO: 1646488 - DNA, 15 bp, Homo sapiens
gctttttatagtaga

SEQ ID NO: 1646489 - DNA, 15 bp, Homo sapiens
ggctttttatagtag

SEQ ID NO: 1646490 - DNA, 15 bp, Homo sapiens
gggctttttatagta

SEQ ID NO: 1646491 - DNA, 15 bp, Homo sapiens
agggctttttatagt

SEQ ID NO: 1646492 - DNA, 15 bp, Homo sapiens
aagggctttttatag

SEQ ID NO: 1646493 - DNA, 15 bp, Homo sapiens
gaagggctttttata

SEQ ID NO: 1646494 - DNA, 15 bp, Homo sapiens
agaagggctttttat

SEQ ID NO: 1646495 - DNA, 15 bp, Homo sapiens
aagaagggcttttta

SEQ ID NO: 1646496 - DNA, 15 bp, Homo sapiens
caagaagggcttttt

SEQ ID NO: 1646497 - DNA, 15 bp, Homo sapiens
tcaagaagggctttt

SEQ ID NO: 1646498 - DNA, 15 bp, Homo sapiens
ctcaagaagggcttt

SEQ ID NO: 1646499 - DNA, 15 bp, Homo sapiens
gctcaagaagggctt

SEQ ID NO: 1646500 - DNA, 15 bp, Homo sapiens
tgctcaagaagggct

SEQ ID NO: 1646501 - DNA, 15 bp, Homo sapiens
ctgctcaagaagggc

SEQ ID NO: 1646502 - DNA, 15 bp, Homo sapiens
tctgctcaagaaggg

SEQ ID NO: 1646503 - DNA, 15 bp, Homo sapiens
atctgctcaagaagg

SEQ ID NO: 1646504 - DNA, 15 bp, Homo sapiens
aatctgctcaagaag

SEQ ID NO: 1646505 - DNA, 15 bp, Homo sapiens
aaatctgctcaagaa

SEQ ID NO: 1646506 - DNA, 15 bp, Homo sapiens
caaatctgctcaaga

SEQ ID NO: 1646507 - DNA, 15 bp, Homo sapiens
tcaaatctgctcaag

SEQ ID NO: 1646508 - DNA, 15 bp, Homo sapiens
atcaaatctgctcaa

SEQ ID NO: 1646509 - DNA, 15 bp, Homo sapiens
catcaaatctgctca

SEQ ID NO: 1646510 - DNA, 15 bp, Homo sapiens
tcatcaaatctgctc

SEQ ID NO: 1646511 - DNA, 15 bp, Homo sapiens
atcatcaaatctgct

SEQ ID NO: 1646512 - DNA, 15 bp, Homo sapiens
tatcatcaaatctgc

SEQ ID NO: 1646513 - DNA, 15 bp, Homo sapiens
ttatcatcaaatctg

SEQ ID NO: 1646514 - DNA, 15 bp, Homo sapiens
tttatcatcaaatct

SEQ ID NO: 1646515 - DNA, 15 bp, Homo sapiens
ttttatcatcaaatc

SEQ ID NO: 1646516 - DNA, 15 bp, Homo sapiens
tttttatcatcaaat

SEQ ID NO: 1646517 - DNA, 15 bp, Homo sapiens
ctttttatcatcaaa

SEQ ID NO: 1646518 - DNA, 15 bp, Homo sapiens
cctttttatcatcaa

SEQ ID NO: 1646519 - DNA, 15 bp, Homo sapiens
tcctttttatcatca

SEQ ID NO: 1646520 - DNA, 15 bp, Homo sapiens
ctcctttttatcatc

SEQ ID NO: 1646521 - DNA, 15 bp, Homo sapiens
tctcctttttatcat

SEQ ID NO: 1646522 - DNA, 15 bp, Homo sapiens
ttctcctttttatca

SEQ ID NO: 1646523 - DNA, 15 bp, Homo sapiens
gttctcctttttatc

SEQ ID NO: 1646524 - DNA, 15 bp, Homo sapiens
tgttctcctttttat

SEQ ID NO: 1646525 - DNA, 15 bp, Homo sapiens
atgttctccttttta

SEQ ID NO: 1646526 - DNA, 15 bp, Homo sapiens
aatgttctccttttt

SEQ ID NO: 1646527 - DNA, 15 bp, Homo sapiens
aaatgttctcctttt

SEQ ID NO: 1646528 - DNA, 15 bp, Homo sapiens
gaaatgttctccttt

SEQ ID NO: 1646529 - DNA, 15 bp, Homo sapiens
agaaatgttctcctt

SEQ ID NO: 1646530 - DNA, 15 bp, Homo sapiens
tagaaatgttctcct

SEQ ID NO: 1646531 - DNA, 15 bp, Homo sapiens
ttagaaatgttctcc

SEQ ID NO: 1646532 - DNA, 15 bp, Homo sapiens
cttagaaatgttctc

SEQ ID NO: 1646533 - DNA, 15 bp, Homo sapiens
ccttagaaatgttct

SEQ ID NO: 1646534 - DNA, 15 bp, Homo sapiens
accttagaaatgttc

SEQ ID NO: 1646535 - DNA, 15 bp, Homo sapiens
taccttagaaatgtt

SEQ ID NO: 1646536 - DNA, 15 bp, Homo sapiens
ataccttagaaatgt

SEQ ID NO: 1646537 - DNA, 15 bp, Homo sapiens
tataccttagaaatg

SEQ ID NO: 1646538 - DNA, 15 bp, Homo sapiens
ttataccttagaaat

SEQ ID NO: 1646539 - DNA, 15 bp, Homo sapiens
attataccttagaaa

SEQ ID NO: 1646540 - DNA, 15 bp, Homo sapiens
aattataccttagaa

SEQ ID NO: 1646541 - DNA, 15 bp, Homo sapiens
taattataccttaga

SEQ ID NO: 1646542 - DNA, 15 bp, Homo sapiens
ctaattataccttag

SEQ ID NO: 1646543 - DNA, 15 bp, Homo sapiens
tctaattatacctta

SEQ ID NO: 1646544 - DNA, 15 bp, Homo sapiens
gatgaccaactaatt

SEQ ID NO: 1646545 - DNA, 15 bp, Homo sapiens
tgatgaccaactaat

SEQ ID NO: 1646546 - DNA, 15 bp, Homo sapiens
atgatgaccaactaa

SEQ ID NO: 1646547 - DNA, 15 bp, Homo sapiens
gatgatgaccaacta

SEQ ID NO: 1646548 - DNA, 15 bp, Homo sapiens
ggatgatgaccaact

SEQ ID NO: 1646549 - DNA, 15 bp, Homo sapiens
gggatgatgaccaac

SEQ ID NO: 1646550 - DNA, 15 bp, Homo sapiens
agggatgatgaccaa

SEQ ID NO: 1646551 - DNA, 15 bp, Homo sapiens
gagggatgatgacca

SEQ ID NO: 1646552 - DNA, 15 bp, Homo sapiens
ggagggatgatgacc

SEQ ID NO: 1646553 - DNA, 15 bp, Homo sapiens
aggagggatgatgac

SEQ ID NO: 1646554 - DNA, 15 bp, Homo sapiens
caggagggatgatga

SEQ ID NO: 1646555 - DNA, 15 bp, Homo sapiens
gcaggagggatgatg

SEQ ID NO: 1646556 - DNA, 15 bp, Homo sapiens
agcaggagggatgat

SEQ ID NO: 1646557 - DNA, 15 bp, Homo sapiens
cagcaggagggatga

SEQ ID NO: 1646558 - DNA, 15 bp, Homo sapiens
gcagcaggagggatg

SEQ ID NO: 1646559 - DNA, 15 bp, Homo sapiens
ggcagcaggagggat

SEQ ID NO: 1646560 - DNA, 15 bp, Homo sapiens
gggcagcaggaggga

SEQ ID NO: 1646561 - DNA, 15 bp, Homo sapiens
tgggcagcaggaggg

SEQ ID NO: 1646562 - DNA, 15 bp, Homo sapiens
ctgggcagcaggagg

SEQ ID NO: 1646563 - DNA, 15 bp, Homo sapiens
gctgggcagcaggag

SEQ ID NO: 1646564 - DNA, 15 bp, Homo sapiens
tgctgggcagcagga

SEQ ID NO: 1646565 - DNA, 15 bp, Homo sapiens
ctgctgggcagcagg

SEQ ID NO: 1646566 - DNA, 15 bp, Homo sapiens
actgctgggcagcag

SEQ ID NO: 1646567 - DNA, 15 bp, Homo sapiens
cactgctgggcagca

SEQ ID NO: 1646568 - DNA, 15 bp, Homo sapiens
ccactgctgggcagc

SEQ ID NO: 1646569 - DNA, 15 bp, Homo sapiens
accactgctgggcag

SEQ ID NO: 1646570 - DNA, 15 bp, Homo sapiens
gaccactgctgggca

SEQ ID NO: 1646571 - DNA, 15 bp, Homo sapiens
tgaccactgctgggc

SEQ ID NO: 1646572 - DNA, 15 bp, Homo sapiens
ctgaccactgctggg

SEQ ID NO: 1646573 - DNA, 15 bp, Homo sapiens
actgaccactgctgg

SEQ ID NO: 1646574 - DNA, 15 bp, Homo sapiens
gactgaccactgctg

SEQ ID NO: 1646575 - DNA, 15 bp, Homo sapiens
tgactgaccactgct

SEQ ID NO: 1646576 - DNA, 15 bp, Homo sapiens
atgactgaccactgc

SEQ ID NO: 1646577 - DNA, 15 bp, Homo sapiens
aatgactgaccactg

SEQ ID NO: 1646578 - DNA, 15 bp, Homo sapiens
aaatgactgaccact

SEQ ID NO: 1646579 - DNA, 15 bp, Homo sapiens
aaaatgactgaccac

SEQ ID NO: 1646580 - DNA, 15 bp, Homo sapiens
aaaaatgactgacca

SEQ ID NO: 1646581 - DNA, 15 bp, Homo sapiens
gaaaaatgactgacc

SEQ ID NO: 1646582 - DNA, 15 bp, Homo sapiens
tgaaaaatgactgac

SEQ ID NO: 1646583 - DNA, 15 bp, Homo sapiens
atgaaaaatgactga

SEQ ID NO: 1646584 - DNA, 15 bp, Homo sapiens
catgaaaaatgactg

SEQ ID NO: 1646585 - DNA, 15 bp, Homo sapiens
tcatgaaaaatgact

SEQ ID NO: 1646586 - DNA, 15 bp, Homo sapiens
ctcatgaaaaatgac

SEQ ID NO: 1646587 - DNA, 15 bp, Homo sapiens
cctcatgaaaaatga

SEQ ID NO: 1646588 - DNA, 15 bp, Homo sapiens
ccctcatgaaaaatg

SEQ ID NO: 1646589 - DNA, 15 bp, Homo sapiens
tccctcatgaaaaat

SEQ ID NO: 1646590 - DNA, 15 bp, Homo sapiens
atccctcatgaaaaa

SEQ ID NO: 1646591 - DNA, 15 bp, Homo sapiens
catccctcatgaaaa

SEQ ID NO: 1646592 - DNA, 15 bp, Homo sapiens
ccatccctcatgaaa

SEQ ID NO: 1646593 - DNA, 15 bp, Homo sapiens
tccatccctcatgaa

SEQ ID NO: 1646594 - DNA, 15 bp, Homo sapiens
gtccatccctcatga

SEQ ID NO: 1646595 - DNA, 15 bp, Homo sapiens
agtccatccctcatg

SEQ ID NO: 1646596 - DNA, 15 bp, Homo sapiens
tagtccatccctcat

SEQ ID NO: 1646597 - DNA, 15 bp, Homo sapiens
ctagtccatccctca

SEQ ID NO: 1646598 - DNA, 15 bp, Homo sapiens
cctagtccatccctc

SEQ ID NO: 1646599 - DNA, 15 bp, Homo sapiens
tcctagtccatccct

SEQ ID NO: 1646600 - DNA, 15 bp, Homo sapiens
ttcctagtccatccc

SEQ ID NO: 1646601 - DNA, 15 bp, Homo sapiens
tttcctagtccatcc

SEQ ID NO: 1646602 - DNA, 15 bp, Homo sapiens
ttttcctagtccatc

SEQ ID NO: 1646603 - DNA, 15 bp, Homo sapiens
attttcctagtccat

SEQ ID NO: 1646604 - DNA, 15 bp, Homo sapiens
cattttcctagtcca

SEQ ID NO: 1646605 - DNA, 15 bp, Homo sapiens
tcattttcctagtcc

SEQ ID NO: 1646606 - DNA, 15 bp, Homo sapiens
ttcattttcctagtc

SEQ ID NO: 1646607 - DNA, 15 bp, Homo sapiens
cttcattttcctagt

SEQ ID NO: 1646608 - DNA, 15 bp, Homo sapiens
acttcattttcctag

SEQ ID NO: 1646609 - DNA, 15 bp, Homo sapiens
cacttcattttccta

SEQ ID NO: 1646610 - DNA, 15 bp, Homo sapiens
acacttcattttcct

SEQ ID NO: 1646611 - DNA, 15 bp, Homo sapiens
gacacttcattttcc

SEQ ID NO: 1646612 - DNA, 15 bp, Homo sapiens
agacacttcattttc

SEQ ID NO: 1646613 - DNA, 15 bp, Homo sapiens
tagacacttcatttt

SEQ ID NO: 1646614 - DNA, 15 bp, Homo sapiens
atagacacttcattt

SEQ ID NO: 1646615 - DNA, 15 bp, Homo sapiens
aatagacacttcatt

SEQ ID NO: 1646616 - DNA, 15 bp, Homo sapiens
taatagacacttcat

SEQ ID NO: 1646617 - DNA, 15 bp, Homo sapiens
ataatagacacttca

SEQ ID NO: 1646618 - DNA, 15 bp, Homo sapiens
tataatagacacttc

SEQ ID NO: 1646619 - DNA, 15 bp, Homo sapiens
ttataatagacactt

SEQ ID NO: 1646620 - DNA, 15 bp, Homo sapiens
cttataatagacact

SEQ ID NO: 1646621 - DNA, 15 bp, Homo sapiens
ccttataatagacac

SEQ ID NO: 1646622 - DNA, 15 bp, Homo sapiens
tccttataatagaca

SEQ ID NO: 1646623 - DNA, 15 bp, Homo sapiens
ctccttataatagac

SEQ ID NO: 1646624 - DNA, 15 bp, Homo sapiens
tctccttataataga

SEQ ID NO: 1646625 - DNA, 15 bp, Homo sapiens
ctctccttataatag

SEQ ID NO: 1646626 - DNA, 15 bp, Homo sapiens
actctccttataata

SEQ ID NO: 1646627 - DNA, 15 bp, Homo sapiens
aactctccttataat

SEQ ID NO: 1646628 - DNA, 15 bp, Homo sapiens
gaactctccttataa

SEQ ID NO: 1646629 - DNA, 15 bp, Homo sapiens
ggaactctccttata

SEQ ID NO: 1646630 - DNA, 15 bp, Homo sapiens
aggaactctccttat

SEQ ID NO: 1646631 - DNA, 15 bp, Homo sapiens
caggaactctcctta

SEQ ID NO: 1646632 - DNA, 15 bp, Homo sapiens
acaggaactctcctt

SEQ ID NO: 1646633 - DNA, 15 bp, Homo sapiens
tacaggaactctcct

SEQ ID NO: 1646634 - DNA, 15 bp, Homo sapiens
ttacaggaactctcc

SEQ ID NO: 1646635 - DNA, 15 bp, Homo sapiens
gttacaggaactctc

SEQ ID NO: 1646636 - DNA, 15 bp, Homo sapiens
agttacaggaactct

SEQ ID NO: 1646637 - DNA, 15 bp, Homo sapiens
aagttacaggaactc

SEQ ID NO: 1646638 - DNA, 15 bp, Homo sapiens
taagttacaggaact

SEQ ID NO: 1646639 - DNA, 15 bp, Homo sapiens
ttaagttacaggaac

SEQ ID NO: 1646640 - DNA, 15 bp, Homo sapiens
cttaagttacaggaa

SEQ ID NO: 1646641 - DNA, 15 bp, Homo sapiens
ccttaagttacagga

SEQ ID NO: 1646642 - DNA, 15 bp, Homo sapiens
tccttaagttacagg

SEQ ID NO: 1646643 - DNA, 15 bp, Homo sapiens
ctccttaagttacag

SEQ ID NO: 1646644 - DNA, 15 bp, Homo sapiens
gctccttaagttaca

SEQ ID NO: 1646645 - DNA, 15 bp, Homo sapiens
tgctccttaagttac

SEQ ID NO: 1646646 - DNA, 15 bp, Homo sapiens
ttgctccttaagtta

SEQ ID NO: 1646647 - DNA, 15 bp, Homo sapiens
cttgctccttaagtt

SEQ ID NO: 1646648 - DNA, 15 bp, Homo sapiens
gcttgctccttaagt

SEQ ID NO: 1646649 - DNA, 15 bp, Homo sapiens
agcttgctccttaag

SEQ ID NO: 1646650 - DNA, 15 bp, Homo sapiens
gagcttgctccttaa

SEQ ID NO: 1646651 - DNA, 15 bp, Homo sapiens
tgagcttgctcctta

SEQ ID NO: 1646652 - DNA, 15 bp, Homo sapiens
gtgagcttgctcctt

SEQ ID NO: 1646653 - DNA, 15 bp, Homo sapiens
agtgagcttgctcct

SEQ ID NO: 1646654 - DNA, 15 bp, Homo sapiens
tagtgagcttgctcc

SEQ ID NO: 1646655 - DNA, 15 bp, Homo sapiens
gtagtgagcttgctc

SEQ ID NO: 1646656 - DNA, 15 bp, Homo sapiens
tgtagtgagcttgct

SEQ ID NO: 1646657 - DNA, 15 bp, Homo sapiens
ttgtagtgagcttgc

SEQ ID NO: 1646658 - DNA, 15 bp, Homo sapiens
tttgtagtgagcttg

SEQ ID NO: 1646659 - DNA, 15 bp, Homo sapiens
ttttgtagtgagctt

SEQ ID NO: 1646660 - DNA, 15 bp, Homo sapiens
gttttgtagtgagct

SEQ ID NO: 1646661 - DNA, 15 bp, Homo sapiens
ggttttgtagtgagc

SEQ ID NO: 1646662 - DNA, 15 bp, Homo sapiens
gggttttgtagtgag

SEQ ID NO: 1646663 - DNA, 15 bp, Homo sapiens
tgggttttgtagtga

SEQ ID NO: 1646664 - DNA, 15 bp, Homo sapiens
ctgggttttgtagtg

SEQ ID NO: 1646665 - DNA, 15 bp, Homo sapiens
gctgggttttgtagt

SEQ ID NO: 1646666 - DNA, 15 bp, Homo sapiens
agctgggttttgtag

SEQ ID NO: 1646667 - DNA, 15 bp, Homo sapiens
tagctgggttttgta

SEQ ID NO: 1646668 - DNA, 15 bp, Homo sapiens
gtagctgggttttgt

SEQ ID NO: 1646669 - DNA, 15 bp, Homo sapiens
ggtagctgggttttg

SEQ ID NO: 1646670 - DNA, 15 bp, Homo sapiens
aggtagctgggtttt

SEQ ID NO: 1646671 - DNA, 15 bp, Homo sapiens
caggtagctgggttt

SEQ ID NO: 1646672 - DNA, 15 bp, Homo sapiens
gcaggtagctgggtt

SEQ ID NO: 1646673 - DNA, 15 bp, Homo sapiens
agcaggtagctgggt

SEQ ID NO: 1646674 - DNA, 15 bp, Homo sapiens
aagcaggtagctggg

SEQ ID NO: 1646675 - DNA, 15 bp, Homo sapiens
gagaatgcctaatac

SEQ ID NO: 1646676 - DNA, 15 bp, Homo sapiens
agagaatgcctaata

SEQ ID NO: 1646677 - DNA, 15 bp, Homo sapiens
cagagaatgcctaat

SEQ ID NO: 1646678 - DNA, 15 bp, Homo sapiens
ccagagaatgcctaa

SEQ ID NO: 1646679 - DNA, 15 bp, Homo sapiens
cccagagaatgccta

SEQ ID NO: 1646680 - DNA, 15 bp, Homo sapiens
tcccagagaatgcct

SEQ ID NO: 1646681 - DNA, 15 bp, Homo sapiens
ttcccagagaatgcc

SEQ ID NO: 1646682 - DNA, 15 bp, Homo sapiens
cttcccagagaatgc

SEQ ID NO: 1646683 - DNA, 15 bp, Homo sapiens
ccttcccagagaatg

SEQ ID NO: 1646684 - DNA, 15 bp, Homo sapiens
gccttcccagagaat

SEQ ID NO: 1646685 - DNA, 15 bp, Homo sapiens
tgccttcccagagaa

SEQ ID NO: 1646686 - DNA, 15 bp, Homo sapiens
atgccttcccagaga

SEQ ID NO: 1646687 - DNA, 15 bp, Homo sapiens
catgccttcccagag

SEQ ID NO: 1646688 - DNA, 15 bp, Homo sapiens
gcatgccttcccaga

SEQ ID NO: 1646689 - DNA, 15 bp, Homo sapiens
tgcatgccttcccag

SEQ ID NO: 1646690 - DNA, 15 bp, Homo sapiens
atgcatgccttccca

SEQ ID NO: 1646691 - DNA, 15 bp, Homo sapiens
aatgcatgccttccc

SEQ ID NO: 1646692 - DNA, 15 bp, Homo sapiens
aaatgcatgccttcc

SEQ ID NO: 1646693 - DNA, 15 bp, Homo sapiens
aaaatgcatgccttc

SEQ ID NO: 1646694 - DNA, 15 bp, Homo sapiens
aaaaatgcatgcctt

SEQ ID NO: 1646695 - DNA, 15 bp, Homo sapiens
aaaaaatgcatgcct

SEQ ID NO: 1646696 - DNA, 15 bp, Homo sapiens
aaaaaaatgcatgcc

SEQ ID NO: 1646697 - DNA, 15 bp, Homo sapiens
gaaaaaaatgcatgc

SEQ ID NO: 1646698 - DNA, 15 bp, Homo sapiens
ggaaaaaaatgcatg

SEQ ID NO: 1646699 - DNA, 15 bp, Homo sapiens
gggaaaaaaatgcat

SEQ ID NO: 1646700 - DNA, 15 bp, Homo sapiens
tgggaaaaaaatgca

SEQ ID NO: 1646701 - DNA, 15 bp, Homo sapiens
atgggaaaaaaatgc

SEQ ID NO: 1646702 - DNA, 15 bp, Homo sapiens
catgggaaaaaaatg

SEQ ID NO: 1646703 - DNA, 15 bp, Homo sapiens
acatgggaaaaaaat

SEQ ID NO: 1646704 - DNA, 15 bp, Homo sapiens
gacatgggaaaaaaa

SEQ ID NO: 1646705 - DNA, 15 bp, Homo sapiens
agacatgggaaaaaa

SEQ ID NO: 1646706 - DNA, 15 bp, Homo sapiens
gagacatgggaaaaa

SEQ ID NO: 1646707 - DNA, 15 bp, Homo sapiens
agagacatgggaaaa

SEQ ID NO: 1646708 - DNA, 15 bp, Homo sapiens
cagagacatgggaaa

SEQ ID NO: 1646709 - DNA, 15 bp, Homo sapiens
ccagagacatgggaa

SEQ ID NO: 1646710 - DNA, 15 bp, Homo sapiens
cccagagacatggga

SEQ ID NO: 1646711 - DNA, 15 bp, Homo sapiens
ccccagagacatggg

SEQ ID NO: 1646712 - DNA, 15 bp, Homo sapiens
gccccagagacatgg

SEQ ID NO: 1646713 - DNA, 15 bp, Homo sapiens
ggccccagagacatg

SEQ ID NO: 1646714 - DNA, 15 bp, Homo sapiens
tggccccagagacat

SEQ ID NO: 1646715 - DNA, 15 bp, Homo sapiens
ttggccccagagaca

SEQ ID NO: 1646716 - DNA, 15 bp, Homo sapiens
tttggccccagagac

SEQ ID NO: 1646717 - DNA, 15 bp, Homo sapiens
ttttggccccagaga

SEQ ID NO: 1646718 - DNA, 15 bp, Homo sapiens
tttttggccccagag

SEQ ID NO: 1646719 - DNA, 15 bp, Homo sapiens
gtttttggccccaga

SEQ ID NO: 1646720 - DNA, 15 bp, Homo sapiens
ggtttttggccccag

SEQ ID NO: 1646721 - DNA, 15 bp, Homo sapiens
aggtttttggcccca

SEQ ID NO: 1646722 - DNA, 15 bp, Homo sapiens
aaggtttttggcccc

SEQ ID NO: 1646723 - DNA, 15 bp, Homo sapiens
taaggtttttggccc

SEQ ID NO: 1646724 - DNA, 15 bp, Homo sapiens
ataaggtttttggcc

SEQ ID NO: 1646725 - DNA, 15 bp, Homo sapiens
tataaggtttttggc

SEQ ID NO: 1646726 - DNA, 15 bp, Homo sapiens
gtataaggtttttgg

SEQ ID NO: 1646727 - DNA, 15 bp, Homo sapiens
ggtataaggtttttg

SEQ ID NO: 1646728 - DNA, 15 bp, Homo sapiens
tggtataaggttttt

SEQ ID NO: 1646729 - DNA, 15 bp, Homo sapiens
ttggtataaggtttt

SEQ ID NO: 1646730 - DNA, 15 bp, Homo sapiens
cttggtataaggttt

SEQ ID NO: 1646731 - DNA, 15 bp, Homo sapiens
acttggtataaggtt

SEQ ID NO: 1646732 - DNA, 15 bp, Homo sapiens
tacttggtataaggt

SEQ ID NO: 1646733 - DNA, 15 bp, Homo sapiens
gtacttggtataagg

SEQ ID NO: 1646734 - DNA, 15 bp, Homo sapiens
ggtacttggtataag

SEQ ID NO: 1646735 - DNA, 15 bp, Homo sapiens
aggtacttggtataa

SEQ ID NO: 1646736 - DNA, 15 bp, Homo sapiens
taggtacttggtata

SEQ ID NO: 1646737 - DNA, 15 bp, Homo sapiens
ataggtacttggtat

SEQ ID NO: 1646738 - DNA, 15 bp, Homo sapiens
aataggtacttggta

SEQ ID NO: 1646739 - DNA, 15 bp, Homo sapiens
caataggtacttggt

SEQ ID NO: 1646740 - DNA, 15 bp, Homo sapiens
ccaataggtacttgg

SEQ ID NO: 1646741 - DNA, 15 bp, Homo sapiens
gccaataggtacttg

SEQ ID NO: 1646742 - DNA, 15 bp, Homo sapiens
tgccaataggtactt

SEQ ID NO: 1646743 - DNA, 15 bp, Homo sapiens
gtgccaataggtact

SEQ ID NO: 1646744 - DNA, 15 bp, Homo sapiens
ggtgccaataggtac

SEQ ID NO: 1646745 - DNA, 15 bp, Homo sapiens
gggtgccaataggta

SEQ ID NO: 1646746 - DNA, 15 bp, Homo sapiens
cgggtgccaataggt

SEQ ID NO: 1646747 - DNA, 15 bp, Homo sapiens
tcgggtgccaatagg

SEQ ID NO: 1646748 - DNA, 15 bp, Homo sapiens
ttcgggtgccaatag

SEQ ID NO: 1646749 - DNA, 15 bp, Homo sapiens
attcgggtgccaata

SEQ ID NO: 1646750 - DNA, 15 bp, Homo sapiens
tattcgggtgccaat

SEQ ID NO: 1646751 - DNA, 15 bp, Homo sapiens
atattcgggtgccaa

SEQ ID NO: 1646752 - DNA, 15 bp, Homo sapiens
tatattcgggtgcca

SEQ ID NO: 1646753 - DNA, 15 bp, Homo sapiens
atatattcgggtgcc

SEQ ID NO: 1646754 - DNA, 15 bp, Homo sapiens
aatatattcgggtgc

SEQ ID NO: 1646755 - DNA, 15 bp, Homo sapiens
aaatatattcgggtg

SEQ ID NO: 1646756 - DNA, 15 bp, Homo sapiens
caaatatattcgggt

SEQ ID NO: 1646757 - DNA, 15 bp, Homo sapiens
acaaatatattcggg

SEQ ID NO: 1646758 - DNA, 15 bp, Homo sapiens
tacaaatatattcgg

SEQ ID NO: 1646759 - DNA, 15 bp, Homo sapiens
ctacaaatatattcg

SEQ ID NO: 1646760 - DNA, 15 bp, Homo sapiens
tctacaaatatattc

SEQ ID NO: 1646761 - DNA, 15 bp, Homo sapiens
ttctacaaatatatt

SEQ ID NO: 1646762 - DNA, 15 bp, Homo sapiens
attctacaaatatat

SEQ ID NO: 1646763 - DNA, 15 bp, Homo sapiens
cattctacaaatata

SEQ ID NO: 1646764 - DNA, 15 bp, Homo sapiens
tcattctacaaatat

SEQ ID NO: 1646765 - DNA, 15 bp, Homo sapiens
ttcattctacaaata

SEQ ID NO: 1646766 - DNA, 15 bp, Homo sapiens
attcattctacaaat

SEQ ID NO: 1646767 - DNA, 15 bp, Homo sapiens
cattcattctacaaa

SEQ ID NO: 1646768 - DNA, 15 bp, Homo sapiens
tcattcattctacaa

SEQ ID NO: 1646769 - DNA, 15 bp, Homo sapiens
ttcattcattctaca

SEQ ID NO: 1646770 - DNA, 15 bp, Homo sapiens
attcattcattctac

SEQ ID NO: 1646771 - DNA, 15 bp, Homo sapiens
tattcattcattcta

SEQ ID NO: 1646772 - DNA, 15 bp, Homo sapiens
gtattcattcattct

SEQ ID NO: 1646773 - DNA, 15 bp, Homo sapiens
tgtattcattcattc

SEQ ID NO: 1646774 - DNA, 15 bp, Homo sapiens
atgtattcattcatt

SEQ ID NO: 1646775 - DNA, 15 bp, Homo sapiens
catgtattcattcat

SEQ ID NO: 1646776 - DNA, 15 bp, Homo sapiens
tcatgtattcattca

SEQ ID NO: 1646777 - DNA, 15 bp, Homo sapiens
ttcatgtattcattc

SEQ ID NO: 1646778 - DNA, 15 bp, Homo sapiens
tttcatgtattcatt

SEQ ID NO: 1646779 - DNA, 15 bp, Homo sapiens
ttttcatgtattcat

SEQ ID NO: 1646780 - DNA, 15 bp, Homo sapiens
tttttcatgtattca

SEQ ID NO: 1646781 - DNA, 15 bp, Homo sapiens
ttttttcatgtattc

SEQ ID NO: 1646782 - DNA, 15 bp, Homo sapiens
tttttttcatgtatt

SEQ ID NO: 1646783 - DNA, 15 bp, Homo sapiens
ttttttttcatgtat

SEQ ID NO: 1646784 - DNA, 15 bp, Homo sapiens
attttttttcatgta

SEQ ID NO: 1646785 - DNA, 15 bp, Homo sapiens
tattttttttcatgt

SEQ ID NO: 1646786 - DNA, 15 bp, Homo sapiens
ttattttttttcatg

SEQ ID NO: 1646787 - DNA, 15 bp, Homo sapiens
tttattttttttcat

SEQ ID NO: 1646788 - DNA, 15 bp, Homo sapiens
gtttattttttttca

SEQ ID NO: 1646789 - DNA, 15 bp, Homo sapiens
tgtttattttttttc

SEQ ID NO: 1646790 - DNA, 15 bp, Homo sapiens
ctgtttatttttttt

SEQ ID NO: 1646791 - DNA, 15 bp, Homo sapiens
actgtttattttttt

SEQ ID NO: 1646792 - DNA, 15 bp, Homo sapiens
tactgtttatttttt

SEQ ID NO: 1646793 - DNA, 15 bp, Homo sapiens
ttactgtttattttt

SEQ ID NO: 1646794 - DNA, 15 bp, Homo sapiens
gttactgtttatttt

SEQ ID NO: 1646795 - DNA, 15 bp, Homo sapiens
ggttactgtttattt

SEQ ID NO: 1646796 - DNA, 15 bp, Homo sapiens
aggttactgtttatt

SEQ ID NO: 1646797 - DNA, 15 bp, Homo sapiens
aaggttactgtttat

SEQ ID NO: 1646798 - DNA, 15 bp, Homo sapiens
aaaggttactgttta

SEQ ID NO: 1646799 - DNA, 15 bp, Homo sapiens
gaaaggttactgttt

SEQ ID NO: 1646800 - DNA, 15 bp, Homo sapiens
agaaaggttactgtt

SEQ ID NO: 1646801 - DNA, 15 bp, Homo sapiens
gagaaaggttactgt

SEQ ID NO: 1646802 - DNA, 15 bp, Homo sapiens
ggagaaaggttactg

SEQ ID NO: 1646803 - DNA, 15 bp, Homo sapiens
aggagaaaggttact

SEQ ID NO: 1646804 - DNA, 15 bp, Homo sapiens
taggagaaaggttac

SEQ ID NO: 1646805 - DNA, 15 bp, Homo sapiens
ataggagaaaggtta

SEQ ID NO: 1646806 - DNA, 15 bp, Homo sapiens
tataggagaaaggtt

SEQ ID NO: 1646807 - DNA, 15 bp, Homo sapiens
atataggagaaaggt

SEQ ID NO: 1646808 - DNA, 15 bp, Homo sapiens
aatataggagaaagg

SEQ ID NO: 1646809 - DNA, 15 bp, Homo sapiens
gaatataggagaaag

SEQ ID NO: 1646810 - DNA, 15 bp, Homo sapiens
agaatataggagaaa

SEQ ID NO: 1646811 - DNA, 15 bp, Homo sapiens
tagaatataggagaa

SEQ ID NO: 1646812 - DNA, 15 bp, Homo sapiens
gtagaatataggaga

SEQ ID NO: 1646813 - DNA, 15 bp, Homo sapiens
agtagaatataggag

SEQ ID NO: 1646814 - DNA, 15 bp, Homo sapiens
aagtagaatatagga

SEQ ID NO: 1646815 - DNA, 15 bp, Homo sapiens
aaagtagaatatagg

SEQ ID NO: 1646816 - DNA, 15 bp, Homo sapiens
gaaagtagaatatag

SEQ ID NO: 1646817 - DNA, 15 bp, Homo sapiens
ggaaagtagaatata

SEQ ID NO: 1646818 - DNA, 15 bp, Homo sapiens
tggaaagtagaatat

SEQ ID NO: 1646819 - DNA, 15 bp, Homo sapiens
ttggaaagtagaata

SEQ ID NO: 1646820 - DNA, 15 bp, Homo sapiens
cttggaaagtagaat

SEQ ID NO: 1646821 - DNA, 15 bp, Homo sapiens
gcttggaaagtagaa

SEQ ID NO: 1646822 - DNA, 15 bp, Homo sapiens
ggcttggaaagtaga

SEQ ID NO: 1646823 - DNA, 15 bp, Homo sapiens
tggcttggaaagtag

SEQ ID NO: 1646824 - DNA, 15 bp, Homo sapiens
ttggcttggaaagta

SEQ ID NO: 1646825 - DNA, 15 bp, Homo sapiens
attggcttggaaagt

SEQ ID NO: 1646826 - DNA, 15 bp, Homo sapiens
aattggcttggaaag

SEQ ID NO: 1646827 - DNA, 15 bp, Homo sapiens
taattggcttggaaa

SEQ ID NO: 1646828 - DNA, 15 bp, Homo sapiens
ttaattggcttggaa

SEQ ID NO: 1646829 - DNA, 15 bp, Homo sapiens
attaattggcttgga

SEQ ID NO: 1646830 - DNA, 15 bp, Homo sapiens
tattaattggcttgg

SEQ ID NO: 1646831 - DNA, 15 bp, Homo sapiens
ttattaattggcttg

SEQ ID NO: 1646832 - DNA, 15 bp, Homo sapiens
cttattaattggctt

SEQ ID NO: 1646833 - DNA, 15 bp, Homo sapiens
gcttattaattggct

SEQ ID NO: 1646834 - DNA, 15 bp, Homo sapiens
tgcttattaattggc

SEQ ID NO: 1646835 - DNA, 15 bp, Homo sapiens
ttgcttattaattgg

SEQ ID NO: 1646836 - DNA, 15 bp, Homo sapiens
cttgcttattaattg

SEQ ID NO: 1646837 - DNA, 15 bp, Homo sapiens
acttgcttattaatt

SEQ ID NO: 1646838 - DNA, 15 bp, Homo sapiens
cacttgcttattaat

SEQ ID NO: 1646839 - DNA, 15 bp, Homo sapiens
acacttgcttattaa

SEQ ID NO: 1646840 - DNA, 15 bp, Homo sapiens
gacacttgcttatta

SEQ ID NO: 1646841 - DNA, 15 bp, Homo sapiens
agacacttgcttatt

SEQ ID NO: 1646842 - DNA, 15 bp, Homo sapiens
aagacacttgcttat

SEQ ID NO: 1646843 - DNA, 15 bp, Homo sapiens
aaagacacttgctta

SEQ ID NO: 1646844 - DNA, 15 bp, Homo sapiens
aaaagacacttgctt

SEQ ID NO: 1646845 - DNA, 15 bp, Homo sapiens
gaaaagacacttgct

SEQ ID NO: 1646846 - DNA, 15 bp, Homo sapiens
cgaaaagacacttgc

SEQ ID NO: 1646847 - DNA, 15 bp, Homo sapiens
acgaaaagacacttg

SEQ ID NO: 1646848 - DNA, 15 bp, Homo sapiens
gacgaaaagacactt

SEQ ID NO: 1646849 - DNA, 15 bp, Homo sapiens
tgacgaaaagacact

SEQ ID NO: 1646850 - DNA, 15 bp, Homo sapiens
atgacgaaaagacac

SEQ ID NO: 1646851 - DNA, 15 bp, Homo sapiens
catgacgaaaagaca

SEQ ID NO: 1646852 - DNA, 15 bp, Homo sapiens
tcatgacgaaaagac

SEQ ID NO: 1646853 - DNA, 15 bp, Homo sapiens
atcatgacgaaaaga

SEQ ID NO: 1646854 - DNA, 15 bp, Homo sapiens
aatcatgacgaaaag

SEQ ID NO: 1646855 - DNA, 15 bp, Homo sapiens
aaatcatgacgaaaa

SEQ ID NO: 1646856 - DNA, 15 bp, Homo sapiens
aaaatcatgacgaaa

SEQ ID NO: 1646857 - DNA, 15 bp, Homo sapiens
aaaaatcatgacgaa

SEQ ID NO: 1646858 - DNA, 15 bp, Homo sapiens
aaaaaatcatgacga

SEQ ID NO: 1646859 - DNA, 15 bp, Homo sapiens
aaaaaaatcatgacg

SEQ ID NO: 1646860 - DNA, 15 bp, Homo sapiens
aaaaaaaatcatgac

SEQ ID NO: 1646861 - DNA, 15 bp, Homo sapiens
caaaaaaaatcatga

SEQ ID NO: 1646862 - DNA, 15 bp, Homo sapiens
acaaaaaaaatcatg

SEQ ID NO: 1646863 - DNA, 15 bp, Homo sapiens
aacaaaaaaaatcat

SEQ ID NO: 1646864 - DNA, 15 bp, Homo sapiens
aaacaaaaaaaatca

SEQ ID NO: 1646865 - DNA, 15 bp, Homo sapiens
aaaacaaaaaaaatc

SEQ ID NO: 1646866 - DNA, 15 bp, Homo sapiens
gaaaacaaaaaaaat

SEQ ID NO: 1646867 - DNA, 15 bp, Homo sapiens
agaaaacaaaaaaaa

SEQ ID NO: 1646868 - DNA, 15 bp, Homo sapiens
cagaaaacaaaaaaa

SEQ ID NO: 1646869 - DNA, 15 bp, Homo sapiens
acagaaaacaaaaaa

SEQ ID NO: 1646870 - DNA, 15 bp, Homo sapiens
aacagaaaacaaaaa

SEQ ID NO: 1646871 - DNA, 15 bp, Homo sapiens
aaacagaaaacaaaa

SEQ ID NO: 1646872 - DNA, 15 bp, Homo sapiens
taaacagaaaacaaa

SEQ ID NO: 1646873 - DNA, 15 bp, Homo sapiens
ctaaacagaaaacaa

SEQ ID NO: 1646874 - DNA, 15 bp, Homo sapiens
cctaaacagaaaaca

SEQ ID NO: 1646875 - DNA, 15 bp, Homo sapiens
tcctaaacagaaaac

SEQ ID NO: 1646876 - DNA, 15 bp, Homo sapiens
atcctaaacagaaaa

SEQ ID NO: 1646877 - DNA, 15 bp, Homo sapiens
aatcctaaacagaaa

SEQ ID NO: 1646878 - DNA, 15 bp, Homo sapiens
aaatcctaaacagaa

SEQ ID NO: 1646879 - DNA, 15 bp, Homo sapiens
taaatcctaaacaga

SEQ ID NO: 1646880 - DNA, 15 bp, Homo sapiens
ttaaatcctaaacag

SEQ ID NO: 1646881 - DNA, 15 bp, Homo sapiens
gttaaatcctaaaca

SEQ ID NO: 1646882 - DNA, 15 bp, Homo sapiens
tgttaaatcctaaac

SEQ ID NO: 1646883 - DNA, 15 bp, Homo sapiens
ttgttaaatcctaaa

SEQ ID NO: 1646884 - DNA, 15 bp, Homo sapiens
tttgttaaatcctaa

SEQ ID NO: 1646885 - DNA, 15 bp, Homo sapiens
ttttgttaaatccta

SEQ ID NO: 1646886 - DNA, 15 bp, Homo sapiens
attttgttaaatcct

SEQ ID NO: 1646887 - DNA, 15 bp, Homo sapiens
cattttgttaaatcc

SEQ ID NO: 1646888 - DNA, 15 bp, Homo sapiens
ccattttgttaaatc

SEQ ID NO: 1646889 - DNA, 15 bp, Homo sapiens
accattttgttaaat

SEQ ID NO: 1646890 - DNA, 15 bp, Homo sapiens
aaccattttgttaaa

SEQ ID NO: 1646891 - DNA, 15 bp, Homo sapiens
caaccattttgttaa

SEQ ID NO: 1646892 - DNA, 15 bp, Homo sapiens
tcaaccattttgtta

SEQ ID NO: 1646893 - DNA, 15 bp, Homo sapiens
ctcaaccattttgtt

SEQ ID NO: 1646894 - DNA, 15 bp, Homo sapiens
tctcaaccattttgt

SEQ ID NO: 1646895 - DNA, 15 bp, Homo sapiens
atctcaaccattttg

SEQ ID NO: 1646896 - DNA, 15 bp, Homo sapiens
acctttgacatgcgt

SEQ ID NO: 1646897 - DNA, 15 bp, Homo sapiens
cacctttgacatgcg

SEQ ID NO: 1646898 - DNA, 15 bp, Homo sapiens
tcacctttgacatgc

SEQ ID NO: 1646899 - DNA, 15 bp, Homo sapiens
atcacctttgacatg

SEQ ID NO: 1646900 - DNA, 15 bp, Homo sapiens
gatcacctttgacat

SEQ ID NO: 1646901 - DNA, 15 bp, Homo sapiens
agatcacctttgaca

SEQ ID NO: 1646902 - DNA, 15 bp, Homo sapiens
cagatcacctttgac

SEQ ID NO: 1646903 - DNA, 15 bp, Homo sapiens
acagatcacctttga

SEQ ID NO: 1646904 - DNA, 15 bp, Homo sapiens
aacagatcacctttg

SEQ ID NO: 1646905 - DNA, 15 bp, Homo sapiens
aaacagatcaccttt

SEQ ID NO: 1646906 - DNA, 15 bp, Homo sapiens
taaacagatcacctt

SEQ ID NO: 1646907 - DNA, 15 bp, Homo sapiens
ctaaacagatcacct

SEQ ID NO: 1646908 - DNA, 15 bp, Homo sapiens
actaaacagatcacc

SEQ ID NO: 1646909 - DNA, 15 bp, Homo sapiens
aactaaacagatcac

SEQ ID NO: 1646910 - DNA, 15 bp, Homo sapiens
aaactaaacagatca

SEQ ID NO: 1646911 - DNA, 15 bp, Homo sapiens
aaaactaaacagatc

SEQ ID NO: 1646912 - DNA, 15 bp, Homo sapiens
aaaaactaaacagat

SEQ ID NO: 1646913 - DNA, 15 bp, Homo sapiens
gaaaaactaaacaga

SEQ ID NO: 1646914 - DNA, 15 bp, Homo sapiens
ggaaaaactaaacag

SEQ ID NO: 1646915 - DNA, 15 bp, Homo sapiens
aggaaaaactaaaca

SEQ ID NO: 1646916 - DNA, 15 bp, Homo sapiens
aaggaaaaactaaac

SEQ ID NO: 1646917 - DNA, 15 bp, Homo sapiens
taaggaaaaactaaa

SEQ ID NO: 1646918 - DNA, 15 bp, Homo sapiens
ctaaggaaaaactaa

SEQ ID NO: 1646919 - DNA, 15 bp, Homo sapiens
actaaggaaaaacta

SEQ ID NO: 1646920 - DNA, 15 bp, Homo sapiens
tactaaggaaaaact

SEQ ID NO: 1646921 - DNA, 15 bp, Homo sapiens
atactaaggaaaaac

SEQ ID NO: 1646922 - DNA, 15 bp, Homo sapiens
gatactaaggaaaaa

SEQ ID NO: 1646923 - DNA, 15 bp, Homo sapiens
cgatactaaggaaaa

SEQ ID NO: 1646924 - DNA, 15 bp, Homo sapiens
tcgatactaaggaaa

SEQ ID NO: 1646925 - DNA, 15 bp, Homo sapiens
ttcgatactaaggaa

SEQ ID NO: 1646926 - DNA, 15 bp, Homo sapiens
gttcgatactaagga

SEQ ID NO: 1646927 - DNA, 15 bp, Homo sapiens
tgttcgatactaagg

SEQ ID NO: 1646928 - DNA, 15 bp, Homo sapiens
atgttcgatactaag

SEQ ID NO: 1646929 - DNA, 15 bp, Homo sapiens
tatgttcgatactaa

SEQ ID NO: 1646930 - DNA, 15 bp, Homo sapiens
atatgttcgatacta

SEQ ID NO: 1646931 - DNA, 15 bp, Homo sapiens
gatatgttcgatact

SEQ ID NO: 1646932 - DNA, 15 bp, Homo sapiens
aagaaaatatgtgta

SEQ ID NO: 1646933 - DNA, 15 bp, Homo sapiens
gaagaaaatatgtgt

SEQ ID NO: 1646934 - DNA, 15 bp, Homo sapiens
agaagaaaatatgtg

SEQ ID NO: 1646935 - DNA, 15 bp, Homo sapiens
cagaagaaaatatgt

SEQ ID NO: 1646936 - DNA, 15 bp, Homo sapiens
gcagaagaaaatatg

SEQ ID NO: 1646937 - DNA, 15 bp, Homo sapiens
agcagaagaaaatat

SEQ ID NO: 1646938 - DNA, 15 bp, Homo sapiens
tagcagaagaaaata

SEQ ID NO: 1646939 - DNA, 15 bp, Homo sapiens
gtagcagaagaaaat

SEQ ID NO: 1646940 - DNA, 15 bp, Homo sapiens
ggtagcagaagaaaa

SEQ ID NO: 1646941 - DNA, 15 bp, Homo sapiens
gggtagcagaagaaa

SEQ ID NO: 1646942 - DNA, 15 bp, Homo sapiens
tgggtagcagaagaa

SEQ ID NO: 1646943 - DNA, 15 bp, Homo sapiens
ttgggtagcagaaga

SEQ ID NO: 1646944 - DNA, 15 bp, Homo sapiens
cttgggtagcagaag

SEQ ID NO: 1646945 - DNA, 15 bp, Homo sapiens
tcttgggtagcagaa

SEQ ID NO: 1646946 - DNA, 15 bp, Homo sapiens
gtcttgggtagcaga

SEQ ID NO: 1646947 - DNA, 15 bp, Homo sapiens
tgtcttgggtagcag

SEQ ID NO: 1646948 - DNA, 15 bp, Homo sapiens
gtgtcttgggtagca

SEQ ID NO: 1646949 - DNA, 15 bp, Homo sapiens
tgtgtcttgggtagc

SEQ ID NO: 1646950 - DNA, 15 bp, Homo sapiens
ttgtgtcttgggtag

SEQ ID NO: 1646951 - DNA, 15 bp, Homo sapiens
attgtgtcttgggta

SEQ ID NO: 1646952 - DNA, 15 bp, Homo sapiens
tattgtgtcttgggt

SEQ ID NO: 1646953 - DNA, 15 bp, Homo sapiens
ttattgtgtcttggg

SEQ ID NO: 1646954 - DNA, 15 bp, Homo sapiens
tttattgtgtcttgg

SEQ ID NO: 1646955 - DNA, 15 bp, Homo sapiens
ctttattgtgtcttg

SEQ ID NO: 1646956 - DNA, 15 bp, Homo sapiens
tctttattgtgtctt

SEQ ID NO: 1646957 - DNA, 15 bp, Homo sapiens
atctttattgtgtct

SEQ ID NO: 1646958 - DNA, 15 bp, Homo sapiens
catctttattgtgtc

SEQ ID NO: 1646959 - DNA, 15 bp, Homo sapiens
ccatctttattgtgt

SEQ ID NO: 1646960 - DNA, 15 bp, Homo sapiens
accatctttattgtg

SEQ ID NO: 1646961 - DNA, 15 bp, Homo sapiens
aaccatctttattgt

SEQ ID NO: 1646962 - DNA, 15 bp, Homo sapiens
aaaccatctttattg

SEQ ID NO: 1646963 - DNA, 15 bp, Homo sapiens
taaaccatctttatt

SEQ ID NO: 1646964 - DNA, 15 bp, Homo sapiens
ataaaccatctttat

SEQ ID NO: 1646965 - DNA, 15 bp, Homo sapiens
gataaaccatcttta

SEQ ID NO: 1646966 - DNA, 15 bp, Homo sapiens
agataaaccatcttt

SEQ ID NO: 1646967 - DNA, 15 bp, Homo sapiens
aagataaaccatctt

SEQ ID NO: 1646968 - DNA, 15 bp, Homo sapiens
aaagataaaccatct

SEQ ID NO: 1646969 - DNA, 15 bp, Homo sapiens
caaagataaaccatc

SEQ ID NO: 1646970 - DNA, 15 bp, Homo sapiens
gcaaagataaaccat

SEQ ID NO: 1646971 - DNA, 15 bp, Homo sapiens
tgcaaagataaacca

SEQ ID NO: 1646972 - DNA, 15 bp, Homo sapiens
atgcaaagataaacc

SEQ ID NO: 1646973 - DNA, 15 bp, Homo sapiens
gatgcaaagataaac

SEQ ID NO: 1646974 - DNA, 15 bp, Homo sapiens
ggatgcaaagataaa

SEQ ID NO: 1646975 - DNA, 15 bp, Homo sapiens
gggatgcaaagataa

SEQ ID NO: 1646976 - DNA, 15 bp, Homo sapiens
ggggatgcaaagata

SEQ ID NO: 1646977 - DNA, 15 bp, Homo sapiens
tggggatgcaaagat

SEQ ID NO: 1646978 - DNA, 15 bp, Homo sapiens
ttggggatgcaaaga

SEQ ID NO: 1646979 - DNA, 15 bp, Homo sapiens
attggggatgcaaag

SEQ ID NO: 1646980 - DNA, 15 bp, Homo sapiens
cattggggatgcaaa

SEQ ID NO: 1646981 - DNA, 15 bp, Homo sapiens
gcattggggatgcaa

SEQ ID NO: 1646982 - DNA, 15 bp, Homo sapiens
ggcattggggatgca

SEQ ID NO: 1646983 - DNA, 15 bp, Homo sapiens
aggcattggggatgc

SEQ ID NO: 1646984 - DNA, 15 bp, Homo sapiens
taggcattggggatg

SEQ ID NO: 1646985 - DNA, 15 bp, Homo sapiens
ctaggcattggggat

SEQ ID NO: 1646986 - DNA, 15 bp, Homo sapiens
gctaggcattgggga

SEQ ID NO: 1646987 - DNA, 15 bp, Homo sapiens
tgctaggcattgggg

SEQ ID NO: 1646988 - DNA, 15 bp, Homo sapiens
ttgctaggcattggg

SEQ ID NO: 1646989 - DNA, 15 bp, Homo sapiens
attgctaggcattgg

SEQ ID NO: 1646990 - DNA, 15 bp, Homo sapiens
cattgctaggcattg

SEQ ID NO: 1646991 - DNA, 15 bp, Homo sapiens
tcattgctaggcatt

SEQ ID NO: 1646992 - DNA, 15 bp, Homo sapiens
ctcattgctaggcat

SEQ ID NO: 1646993 - DNA, 15 bp, Homo sapiens
tctcattgctaggca

SEQ ID NO: 1646994 - DNA, 15 bp, Homo sapiens
atctcattgctaggc

SEQ ID NO: 1646995 - DNA, 15 bp, Homo sapiens
aatctcattgctagg

SEQ ID NO: 1646996 - DNA, 15 bp, Homo sapiens
caatctcattgctag

SEQ ID NO: 1646997 - DNA, 15 bp, Homo sapiens
ccaatctcattgcta

SEQ ID NO: 1646998 - DNA, 15 bp, Homo sapiens
gccaatctcattgct

SEQ ID NO: 1646999 - DNA, 15 bp, Homo sapiens
tgccaatctcattgc

SEQ ID NO: 1647000 - DNA, 15 bp, Homo sapiens
gtgccaatctcattg

SEQ ID NO: 1647001 - DNA, 15 bp, Homo sapiens
tgtgccaatctcatt

SEQ ID NO: 1647002 - DNA, 15 bp, Homo sapiens
gtgtgccaatctcat

SEQ ID NO: 1647003 - DNA, 15 bp, Homo sapiens
tgtgtgccaatctca

SEQ ID NO: 1647004 - DNA, 15 bp, Homo sapiens
ttgtgtgccaatctc

SEQ ID NO: 1647005 - DNA, 15 bp, Homo sapiens
attgtgtgccaatct

SEQ ID NO: 1647006 - DNA, 15 bp, Homo sapiens
tattgtgtgccaatc

SEQ ID NO: 1647007 - DNA, 15 bp, Homo sapiens
ctattgtgtgccaat

SEQ ID NO: 1647008 - DNA, 15 bp, Homo sapiens
tctattgtgtgccaa

SEQ ID NO: 1647009 - DNA, 15 bp, Homo sapiens
atctattgtgtgcca

SEQ ID NO: 1647010 - DNA, 15 bp, Homo sapiens
tatctattgtgtgcc

SEQ ID NO: 1647011 - DNA, 15 bp, Homo sapiens
ttatctattgtgtgc

SEQ ID NO: 1647012 - DNA, 15 bp, Homo sapiens
gttatctattgtgtg

SEQ ID NO: 1647013 - DNA, 15 bp, Homo sapiens
agttatctattgtgt

SEQ ID NO: 1647014 - DNA, 15 bp, Homo sapiens
tagttatctattgtg

SEQ ID NO: 1647015 - DNA, 15 bp, Homo sapiens
gtagttatctattgt

SEQ ID NO: 1647016 - DNA, 15 bp, Homo sapiens
agtagttatctattg

SEQ ID NO: 1647017 - DNA, 15 bp, Homo sapiens
tagtagttatctatt

SEQ ID NO: 1647018 - DNA, 15 bp, Homo sapiens
atagtagttatctat

SEQ ID NO: 1647019 - DNA, 15 bp, Homo sapiens
tatagtagttatcta

SEQ ID NO: 1647020 - DNA, 15 bp, Homo sapiens
ctatagtagttatct

SEQ ID NO: 1647021 - DNA, 15 bp, Homo sapiens
actatagtagttatc

SEQ ID NO: 1647022 - DNA, 15 bp, Homo sapiens
cactatagtagttat

SEQ ID NO: 1647023 - DNA, 15 bp, Homo sapiens
ccactatagtagtta

SEQ ID NO: 1647024 - DNA, 15 bp, Homo sapiens
gccactatagtagtt

SEQ ID NO: 1647025 - DNA, 15 bp, Homo sapiens
tgccactatagtagt

SEQ ID NO: 1647026 - DNA, 15 bp, Homo sapiens
atgccactatagtag

SEQ ID NO: 1647027 - DNA, 15 bp, Homo sapiens
aatgccactatagta

SEQ ID NO: 1647028 - DNA, 15 bp, Homo sapiens
gaatgccactatagt

SEQ ID NO: 1647029 - DNA, 15 bp, Homo sapiens
agaatgccactatag

SEQ ID NO: 1647030 - DNA, 15 bp, Homo sapiens
aagaatgccactata

SEQ ID NO: 1647031 - DNA, 15 bp, Homo sapiens
gaagaatgccactat

SEQ ID NO: 1647032 - DNA, 15 bp, Homo sapiens
tgaagaatgccacta

SEQ ID NO: 1647033 - DNA, 15 bp, Homo sapiens
ctgaagaatgccact

SEQ ID NO: 1647034 - DNA, 15 bp, Homo sapiens
tctgaagaatgccac

SEQ ID NO: 1647035 - DNA, 15 bp, Homo sapiens
gtctgaagaatgcca

SEQ ID NO: 1647036 - DNA, 15 bp, Homo sapiens
tgtctgaagaatgcc

SEQ ID NO: 1647037 - DNA, 15 bp, Homo sapiens
ttgtctgaagaatgc

SEQ ID NO: 1647038 - DNA, 15 bp, Homo sapiens
gttgtctgaagaatg

SEQ ID NO: 1647039 - DNA, 15 bp, Homo sapiens
ggttgtctgaagaat

SEQ ID NO: 1647040 - DNA, 15 bp, Homo sapiens
tggttgtctgaagaa

SEQ ID NO: 1647041 - DNA, 15 bp, Homo sapiens
ttggttgtctgaaga

SEQ ID NO: 1647042 - DNA, 15 bp, Homo sapiens
attggttgtctgaag

SEQ ID NO: 1647043 - DNA, 15 bp, Homo sapiens
gattggttgtctgaa

SEQ ID NO: 1647044 - DNA, 15 bp, Homo sapiens
ggattggttgtctga

SEQ ID NO: 1647045 - DNA, 15 bp, Homo sapiens
gggattggttgtctg

SEQ ID NO: 1647046 - DNA, 15 bp, Homo sapiens
agggattggttgtct

SEQ ID NO: 1647047 - DNA, 15 bp, Homo sapiens
aagggattggttgtc

SEQ ID NO: 1647048 - DNA, 15 bp, Homo sapiens
caagggattggttgt

SEQ ID NO: 1647049 - DNA, 15 bp, Homo sapiens
gcaagggattggttg

SEQ ID NO: 1647050 - DNA, 15 bp, Homo sapiens
cgcaagggattggtt

SEQ ID NO: 1647051 - DNA, 15 bp, Homo sapiens
acgcaagggattggt

SEQ ID NO: 1647052 - DNA, 15 bp, Homo sapiens
tacgcaagggattgg

SEQ ID NO: 1647053 - DNA, 15 bp, Homo sapiens
atacgcaagggattg

SEQ ID NO: 1647054 - DNA, 15 bp, Homo sapiens
catacgcaagggatt

SEQ ID NO: 1647055 - DNA, 15 bp, Homo sapiens
gcatacgcaagggat

SEQ ID NO: 1647056 - DNA, 15 bp, Homo sapiens
cgcatacgcaaggga

SEQ ID NO: 1647057 - DNA, 15 bp, Homo sapiens
acgcatacgcaaggg

SEQ ID NO: 1647058 - DNA, 15 bp, Homo sapiens
tacgcatacgcaagg

SEQ ID NO: 1647059 - DNA, 15 bp, Homo sapiens
atacgcatacgcaag

SEQ ID NO: 1647060 - DNA, 15 bp, Homo sapiens
aatacgcatacgcaa

SEQ ID NO: 1647061 - DNA, 15 bp, Homo sapiens
gaatacgcatacgca

SEQ ID NO: 1647062 - DNA, 15 bp, Homo sapiens
tgaatacgcatacgc

SEQ ID NO: 1647063 - DNA, 15 bp, Homo sapiens
ttgaatacgcatacg

SEQ ID NO: 1647064 - DNA, 15 bp, Homo sapiens
tttgaatacgcatac

SEQ ID NO: 1647065 - DNA, 15 bp, Homo sapiens
ttttgaatacgcata

SEQ ID NO: 1647066 - DNA, 15 bp, Homo sapiens
cttttgaatacgcat

SEQ ID NO: 1647067 - DNA, 15 bp, Homo sapiens
tcttttgaatacgca

SEQ ID NO: 1647068 - DNA, 15 bp, Homo sapiens
atcttttgaatacgc

SEQ ID NO: 1647069 - DNA, 15 bp, Homo sapiens
tatcttttgaatacg

SEQ ID NO: 1647070 - DNA, 15 bp, Homo sapiens
ttatcttttgaatac

SEQ ID NO: 1647071 - DNA, 15 bp, Homo sapiens
attatcttttgaata

SEQ ID NO: 1647072 - DNA, 15 bp, Homo sapiens
gattatcttttgaat

SEQ ID NO: 1647073 - DNA, 15 bp, Homo sapiens
tgattatcttttgaa

SEQ ID NO: 1647074 - DNA, 15 bp, Homo sapiens
atgattatcttttga

SEQ ID NO: 1647075 - DNA, 15 bp, Homo sapiens
aatgattatcttttg

SEQ ID NO: 1647076 - DNA, 15 bp, Homo sapiens
caatgattatctttt

SEQ ID NO: 1647077 - DNA, 15 bp, Homo sapiens
acaatgattatcttt

SEQ ID NO: 1647078 - DNA, 15 bp, Homo sapiens
aacaatgattatctt

SEQ ID NO: 1647079 - DNA, 15 bp, Homo sapiens
taacaatgattatct

SEQ ID NO: 1647080 - DNA, 15 bp, Homo sapiens
ataacaatgattatc

SEQ ID NO: 1647081 - DNA, 15 bp, Homo sapiens
aataacaatgattat

SEQ ID NO: 1647082 - DNA, 15 bp, Homo sapiens
gaataacaatgatta

SEQ ID NO: 1647083 - DNA, 15 bp, Homo sapiens
tgaataacaatgatt

SEQ ID NO: 1647084 - DNA, 15 bp, Homo sapiens
ttgaataacaatgat

SEQ ID NO: 1647085 - DNA, 15 bp, Homo sapiens
tttgaataacaatga

SEQ ID NO: 1647086 - DNA, 15 bp, Homo sapiens
atttgaataacaatg

SEQ ID NO: 1647087 - DNA, 15 bp, Homo sapiens
aatttgaataacaat

SEQ ID NO: 1647088 - DNA, 15 bp, Homo sapiens
aaatttgaataacaa

SEQ ID NO: 1647089 - DNA, 15 bp, Homo sapiens
aaaatttgaataaca

SEQ ID NO: 1647090 - DNA, 15 bp, Homo sapiens
gaaaatttgaataac

SEQ ID NO: 1647091 - DNA, 15 bp, Homo sapiens
ggaaaatttgaataa

SEQ ID NO: 1647092 - DNA, 15 bp, Homo sapiens
aggaaaatttgaata

SEQ ID NO: 1647093 - DNA, 15 bp, Homo sapiens
taggaaaatttgaat

SEQ ID NO: 1647094 - DNA, 15 bp, Homo sapiens
gtaggaaaatttgaa

SEQ ID NO: 1647095 - DNA, 15 bp, Homo sapiens
agtaggaaaatttga

SEQ ID NO: 1647096 - DNA, 15 bp, Homo sapiens
aagtaggaaaatttg

SEQ ID NO: 1647097 - DNA, 15 bp, Homo sapiens
aaagtaggaaaattt

SEQ ID NO: 1647098 - DNA, 15 bp, Homo sapiens
taaagtaggaaaatt

SEQ ID NO: 1647099 - DNA, 15 bp, Homo sapiens
ataaagtaggaaaat

SEQ ID NO: 1647100 - DNA, 15 bp, Homo sapiens
aataaagtaggaaaa

SEQ ID NO: 1647101 - DNA, 15 bp, Homo sapiens
aaataaagtaggaaa

SEQ ID NO: 1647102 - DNA, 15 bp, Homo sapiens
caaataaagtaggaa

SEQ ID NO: 1647103 - DNA, 15 bp, Homo sapiens
gcaaataaagtagga

SEQ ID NO: 1647104 - DNA, 15 bp, Homo sapiens
tgcaaataaagtagg

SEQ ID NO: 1647105 - DNA, 15 bp, Homo sapiens
gtgcaaataaagtag

SEQ ID NO: 1647106 - DNA, 15 bp, Homo sapiens
tgtgcaaataaagta

SEQ ID NO: 1647107 - DNA, 15 bp, Homo sapiens
ttgtgcaaataaagt

SEQ ID NO: 1647108 - DNA, 15 bp, Homo sapiens
attgtgcaaataaag

SEQ ID NO: 1647109 - DNA, 15 bp, Homo sapiens
tattgtgcaaataaa

SEQ ID NO: 1647110 - DNA, 15 bp, Homo sapiens
atattgtgcaaataa

SEQ ID NO: 1647111 - DNA, 15 bp, Homo sapiens
tatattgtgcaaata

SEQ ID NO: 1647112 - DNA, 15 bp, Homo sapiens
ttatattgtgcaaat

SEQ ID NO: 1647113 - DNA, 15 bp, Homo sapiens
attatattgtgcaaa

SEQ ID NO: 1647114 - DNA, 15 bp, Homo sapiens
tattatattgtgcaa

SEQ ID NO: 1647115 - DNA, 15 bp, Homo sapiens
ttattatattgtgca

SEQ ID NO: 1647116 - DNA, 15 bp, Homo sapiens
gttattatattgtgc

SEQ ID NO: 1647117 - DNA, 15 bp, Homo sapiens
agttattatattgtg

SEQ ID NO: 1647118 - DNA, 15 bp, Homo sapiens
tagttattatattgt

SEQ ID NO: 1647119 - DNA, 15 bp, Homo sapiens
atagttattatattg

SEQ ID NO: 1647120 - DNA, 15 bp, Homo sapiens
gatagttattatatt

SEQ ID NO: 1647121 - DNA, 15 bp, Homo sapiens
tgatagttattatat

SEQ ID NO: 1647122 - DNA, 15 bp, Homo sapiens
atgatagttattata

SEQ ID NO: 1647123 - DNA, 15 bp, Homo sapiens
tatgatagttattat

SEQ ID NO: 1647124 - DNA, 15 bp, Homo sapiens
gtatgatagttatta

SEQ ID NO: 1647125 - DNA, 15 bp, Homo sapiens
tgtatgatagttatt

SEQ ID NO: 1647126 - DNA, 15 bp, Homo sapiens
ttgtatgatagttat

SEQ ID NO: 1647127 - DNA, 15 bp, Homo sapiens
attgtatgatagtta

SEQ ID NO: 1647128 - DNA, 15 bp, Homo sapiens
aattgtatgatagtt

SEQ ID NO: 1647129 - DNA, 15 bp, Homo sapiens
aaattgtatgatagt

SEQ ID NO: 1647130 - DNA, 15 bp, Homo sapiens
aaaattgtatgatag

SEQ ID NO: 1647131 - DNA, 15 bp, Homo sapiens
taaaattgtatgata

SEQ ID NO: 1647132 - DNA, 15 bp, Homo sapiens
ataaaattgtatgat

SEQ ID NO: 1647133 - DNA, 15 bp, Homo sapiens
tataaaattgtatga

SEQ ID NO: 1647134 - DNA, 15 bp, Homo sapiens
tttataaaattgtat

SEQ ID NO: 1647135 - DNA, 15 bp, Homo sapiens
gtttataaaattgta

SEQ ID NO: 1647136 - DNA, 15 bp, Homo sapiens
ggtttataaaattgt

SEQ ID NO: 1647137 - DNA, 15 bp, Homo sapiens
aggtttataaaattg

SEQ ID NO: 1647138 - DNA, 15 bp, Homo sapiens
taggtttataaaatt

SEQ ID NO: 1647139 - DNA, 15 bp, Homo sapiens
ctaggtttataaaat

SEQ ID NO: 1647140 - DNA, 15 bp, Homo sapiens
actaggtttataaaa

SEQ ID NO: 1647141 - DNA, 15 bp, Homo sapiens
tactaggtttataaa

SEQ ID NO: 1647142 - DNA, 15 bp, Homo sapiens
gtactaggtttataa

SEQ ID NO: 1647143 - DNA, 15 bp, Homo sapiens
ggtactaggtttata

SEQ ID NO: 1647144 - DNA, 15 bp, Homo sapiens
gggtactaggtttat

SEQ ID NO: 1647145 - DNA, 15 bp, Homo sapiens
tgggtactaggttta

SEQ ID NO: 1647146 - DNA, 15 bp, Homo sapiens
ctgggtactaggttt

SEQ ID NO: 1647147 - DNA, 15 bp, Homo sapiens
gctgggtactaggtt

SEQ ID NO: 1647148 - DNA, 15 bp, Homo sapiens
tgctgggtactaggt

SEQ ID NO: 1647149 - DNA, 15 bp, Homo sapiens
gtgctgggtactagg

SEQ ID NO: 1647150 - DNA, 15 bp, Homo sapiens
ggtgctgggtactag

SEQ ID NO: 1647151 - DNA, 15 bp, Homo sapiens
tggtgctgggtacta

SEQ ID NO: 1647152 - DNA, 15 bp, Homo sapiens
acttggtgctgggta

SEQ ID NO: 1647153 - DNA, 15 bp, Homo sapiens
cacttggtgctgggt

SEQ ID NO: 1647154 - DNA, 15 bp, Homo sapiens
tcacttggtgctggg

SEQ ID NO: 1647155 - DNA, 15 bp, Homo sapiens
ctcacttggtgctgg

SEQ ID NO: 1647156 - DNA, 15 bp, Homo sapiens
tctcacttggtgctg

SEQ ID NO: 1647157 - DNA, 15 bp, Homo sapiens
ttctcacttggtgct

SEQ ID NO: 1647158 - DNA, 15 bp, Homo sapiens
tttctcacttggtgc

SEQ ID NO: 1647159 - DNA, 15 bp, Homo sapiens
ttttctcacttggtg

SEQ ID NO: 1647160 - DNA, 15 bp, Homo sapiens
attttctcacttggt

SEQ ID NO: 1647161 - DNA, 15 bp, Homo sapiens
gattttctcacttgg

SEQ ID NO: 1647162 - DNA, 15 bp, Homo sapiens
tgattttctcacttg

SEQ ID NO: 1647163 - DNA, 15 bp, Homo sapiens
ttgattttctcactt

SEQ ID NO: 1647164 - DNA, 15 bp, Homo sapiens
gttgattttctcact

SEQ ID NO: 1647165 - DNA, 15 bp, Homo sapiens
tgttgattttctcac

SEQ ID NO: 1647166 - DNA, 15 bp, Homo sapiens
ctgttgattttctca

SEQ ID NO: 1647167 - DNA, 15 bp, Homo sapiens
actgttgattttctc

SEQ ID NO: 1647168 - DNA, 15 bp, Homo sapiens
aactgttgattttct

SEQ ID NO: 1647169 - DNA, 15 bp, Homo sapiens
taactgttgattttc

SEQ ID NO: 1647170 - DNA, 15 bp, Homo sapiens
gtaactgttgatttt

SEQ ID NO: 1647171 - DNA, 15 bp, Homo sapiens
tgtaactgttgattt

SEQ ID NO: 1647172 - DNA, 15 bp, Homo sapiens
atgtaactgttgatt

SEQ ID NO: 1647173 - DNA, 15 bp, Homo sapiens
aatgtaactgttgat

SEQ ID NO: 1647174 - DNA, 15 bp, Homo sapiens
aaatgtaactgttga

SEQ ID NO: 1647175 - DNA, 15 bp, Homo sapiens
taaatgtaactgttg

SEQ ID NO: 1647176 - DNA, 15 bp, Homo sapiens
ataaatgtaactgtt

SEQ ID NO: 1647177 - DNA, 15 bp, Homo sapiens
tataaatgtaactgt

SEQ ID NO: 1647178 - DNA, 15 bp, Homo sapiens
atataaatgtaactg

SEQ ID NO: 1647179 - DNA, 15 bp, Homo sapiens
catataaatgtaact

SEQ ID NO: 1647180 - DNA, 15 bp, Homo sapiens
ccatataaatgtaac

SEQ ID NO: 1647181 - DNA, 15 bp, Homo sapiens
accatataaatgtaa

SEQ ID NO: 1647182 - DNA, 15 bp, Homo sapiens
caccatataaatgta

SEQ ID NO: 1647183 - DNA, 15 bp, Homo sapiens
gcaccatataaatgt

SEQ ID NO: 1647184 - DNA, 15 bp, Homo sapiens
ggcaccatataaatg

SEQ ID NO: 1647185 - DNA, 15 bp, Homo sapiens
aggcaccatataaat

SEQ ID NO: 1647186 - DNA, 15 bp, Homo sapiens
aaggcaccatataaa

SEQ ID NO: 1647187 - DNA, 15 bp, Homo sapiens
taaggcaccatataa

SEQ ID NO: 1647188 - DNA, 15 bp, Homo sapiens
ctaaggcaccatata

SEQ ID NO: 1647189 - DNA, 15 bp, Homo sapiens
tctaaggcaccatat

SEQ ID NO: 1647190 - DNA, 15 bp, Homo sapiens
ctctaaggcaccata

SEQ ID NO: 1647191 - DNA, 15 bp, Homo sapiens
actctaaggcaccat

SEQ ID NO: 1647192 - DNA, 15 bp, Homo sapiens
aactctaaggcacca

SEQ ID NO: 1647193 - DNA, 15 bp, Homo sapiens
gaactctaaggcacc

SEQ ID NO: 1647194 - DNA, 15 bp, Homo sapiens
tgaactctaaggcac

SEQ ID NO: 1647195 - DNA, 15 bp, Homo sapiens
gtgaactctaaggca

SEQ ID NO: 1647196 - DNA, 15 bp, Homo sapiens
tgtgaactctaaggc

SEQ ID NO: 1647197 - DNA, 15 bp, Homo sapiens
ttgtgaactctaagg

SEQ ID NO: 1647198 - DNA, 15 bp, Homo sapiens
tttgtgaactctaag

SEQ ID NO: 1647199 - DNA, 15 bp, Homo sapiens
ttttgtgaactctaa

SEQ ID NO: 1647200 - DNA, 15 bp, Homo sapiens
attttgtgaactcta

SEQ ID NO: 1647201 - DNA, 15 bp, Homo sapiens
cattttgtgaactct

SEQ ID NO: 1647202 - DNA, 15 bp, Homo sapiens
gcattttgtgaactc

SEQ ID NO: 1647203 - DNA, 15 bp, Homo sapiens
agcattttgtgaact

SEQ ID NO: 1647204 - DNA, 15 bp, Homo sapiens
tagcattttgtgaac

SEQ ID NO: 1647205 - DNA, 15 bp, Homo sapiens
ttagcattttgtgaa

SEQ ID NO: 1647206 - DNA, 15 bp, Homo sapiens
gttagcattttgtga

SEQ ID NO: 1647207 - DNA, 15 bp, Homo sapiens
tgttagcattttgtg

SEQ ID NO: 1647208 - DNA, 15 bp, Homo sapiens
atgttagcattttgt

SEQ ID NO: 1647209 - DNA, 15 bp, Homo sapiens
tatgttagcattttg

SEQ ID NO: 1647210 - DNA, 15 bp, Homo sapiens
ctatgttagcatttt

SEQ ID NO: 1647211 - DNA, 15 bp, Homo sapiens
cctatgttagcattt

SEQ ID NO: 1647212 - DNA, 15 bp, Homo sapiens
acctatgttagcatt

SEQ ID NO: 1647213 - DNA, 15 bp, Homo sapiens
tacctatgttagcat

SEQ ID NO: 1647214 - DNA, 15 bp, Homo sapiens
atacctatgttagca

SEQ ID NO: 1647215 - DNA, 15 bp, Homo sapiens
aatacctatgttagc

SEQ ID NO: 1647216 - DNA, 15 bp, Homo sapiens
caatacctatgttag

SEQ ID NO: 1647217 - DNA, 15 bp, Homo sapiens
gcaatacctatgtta

SEQ ID NO: 1647218 - DNA, 15 bp, Homo sapiens
ggcaatacctatgtt

SEQ ID NO: 1647219 - DNA, 15 bp, Homo sapiens
aggcaatacctatgt

SEQ ID NO: 1647220 - DNA, 15 bp, Homo sapiens
aaggcaatacctatg

SEQ ID NO: 1647221 - DNA, 15 bp, Homo sapiens
taaggcaatacctat

SEQ ID NO: 1647222 - DNA, 15 bp, Homo sapiens
ataaggcaataccta

SEQ ID NO: 1647223 - DNA, 15 bp, Homo sapiens
aataaggcaatacct

SEQ ID NO: 1647224 - DNA, 15 bp, Homo sapiens
aaataaggcaatacc

SEQ ID NO: 1647225 - DNA, 15 bp, Homo sapiens
aaaataaggcaatac

SEQ ID NO: 1647226 - DNA, 15 bp, Homo sapiens
aaaaataaggcaata

SEQ ID NO: 1647227 - DNA, 15 bp, Homo sapiens
caaaaataaggcaat

SEQ ID NO: 1647228 - DNA, 15 bp, Homo sapiens
ccaaaaataaggcaa

SEQ ID NO: 1647229 - DNA, 15 bp, Homo sapiens
gccaaaaataaggca

SEQ ID NO: 1647230 - DNA, 15 bp, Homo sapiens
agccaaaaataaggc

SEQ ID NO: 1647231 - DNA, 15 bp, Homo sapiens
cagccaaaaataagg

SEQ ID NO: 1647232 - DNA, 15 bp, Homo sapiens
acagccaaaaataag

SEQ ID NO: 1647233 - DNA, 15 bp, Homo sapiens
cacagccaaaaataa

SEQ ID NO: 1647234 - DNA, 15 bp, Homo sapiens
ccacagccaaaaata

SEQ ID NO: 1647235 - DNA, 15 bp, Homo sapiens
gccacagccaaaaat

SEQ ID NO: 1647236 - DNA, 15 bp, Homo sapiens
agccacagccaaaaa

SEQ ID NO: 1647237 - DNA, 15 bp, Homo sapiens
tagccacagccaaaa

SEQ ID NO: 1647238 - DNA, 15 bp, Homo sapiens
ttagccacagccaaa

SEQ ID NO: 1647239 - DNA, 15 bp, Homo sapiens
tttagccacagccaa

SEQ ID NO: 1647240 - DNA, 15 bp, Homo sapiens
atttagccacagcca

SEQ ID NO: 1647241 - DNA, 15 bp, Homo sapiens
catttagccacagcc

SEQ ID NO: 1647242 - DNA, 15 bp, Homo sapiens
tcatttagccacagc

SEQ ID NO: 1647243 - DNA, 15 bp, Homo sapiens
ttcatttagccacag

SEQ ID NO: 1647244 - DNA, 15 bp, Homo sapiens
tttcatttagccaca

SEQ ID NO: 1647245 - DNA, 15 bp, Homo sapiens
atttcatttagccac

SEQ ID NO: 1647246 - DNA, 15 bp, Homo sapiens
tatttcatttagcca

SEQ ID NO: 1647247 - DNA, 15 bp, Homo sapiens
atatttcatttagcc

SEQ ID NO: 1647248 - DNA, 15 bp, Homo sapiens
catatttcatttagc

SEQ ID NO: 1647249 - DNA, 15 bp, Homo sapiens
tcatatttcatttag

SEQ ID NO: 1647250 - DNA, 15 bp, Homo sapiens
atcatatttcattta

SEQ ID NO: 1647251 - DNA, 15 bp, Homo sapiens
tatcatatttcattt

SEQ ID NO: 1647252 - DNA, 15 bp, Homo sapiens
ttatcatatttcatt

SEQ ID NO: 1647253 - DNA, 15 bp, Homo sapiens
tttatcatatttcat

SEQ ID NO: 1647254 - DNA, 15 bp, Homo sapiens
atttatcatatttca

SEQ ID NO: 1647255 - DNA, 15 bp, Homo sapiens
aatttatcatatttc

SEQ ID NO: 1647256 - DNA, 15 bp, Homo sapiens
aaatttatcatattt

SEQ ID NO: 1647257 - DNA, 15 bp, Homo sapiens
aaaatttatcatatt

SEQ ID NO: 1647258 - DNA, 15 bp, Homo sapiens
gaaaatttatcatat

SEQ ID NO: 1647259 - DNA, 15 bp, Homo sapiens
tgaaaatttatcata

SEQ ID NO: 1647260 - DNA, 15 bp, Homo sapiens
ctgaaaatttatcat

SEQ ID NO: 1647261 - DNA, 15 bp, Homo sapiens
actgaaaatttatca

SEQ ID NO: 1647262 - DNA, 15 bp, Homo sapiens
cactgaaaatttatc

SEQ ID NO: 1647263 - DNA, 15 bp, Homo sapiens
gcactgaaaatttat

SEQ ID NO: 1647264 - DNA, 15 bp, Homo sapiens
ggcactgaaaattta

SEQ ID NO: 1647265 - DNA, 15 bp, Homo sapiens
aggcactgaaaattt

SEQ ID NO: 1647266 - DNA, 15 bp, Homo sapiens
aaggcactgaaaatt

SEQ ID NO: 1647267 - DNA, 15 bp, Homo sapiens
aaaggcactgaaaat

SEQ ID NO: 1647268 - DNA, 15 bp, Homo sapiens
taaaggcactgaaaa

SEQ ID NO: 1647269 - DNA, 15 bp, Homo sapiens
ttaaaggcactgaaa

SEQ ID NO: 1647270 - DNA, 15 bp, Homo sapiens
gttaaaggcactgaa

SEQ ID NO: 1647271 - DNA, 15 bp, Homo sapiens
tgttaaaggcactga

SEQ ID NO: 1647272 - DNA, 15 bp, Homo sapiens
ctgttaaaggcactg

SEQ ID NO: 1647273 - DNA, 15 bp, Homo sapiens
actgttaaaggcact

SEQ ID NO: 1647274 - DNA, 15 bp, Homo sapiens
cactgttaaaggcac

SEQ ID NO: 1647275 - DNA, 15 bp, Homo sapiens
tcactgttaaaggca

SEQ ID NO: 1647276 - DNA, 15 bp, Homo sapiens
ctcactgttaaaggc

SEQ ID NO: 1647277 - DNA, 15 bp, Homo sapiens
actcactgttaaagg

SEQ ID NO: 1647278 - DNA, 15 bp, Homo sapiens
aactcactgttaaag

SEQ ID NO: 1647279 - DNA, 15 bp, Homo sapiens
gaactcactgttaaa

SEQ ID NO: 1647280 - DNA, 15 bp, Homo sapiens
tgaactcactgttaa

SEQ ID NO: 1647281 - DNA, 15 bp, Homo sapiens
gtgaactcactgtta

SEQ ID NO: 1647282 - DNA, 15 bp, Homo sapiens
tgtgaactcactgtt

SEQ ID NO: 1647283 - DNA, 15 bp, Homo sapiens
atgtgaactcactgt

SEQ ID NO: 1647284 - DNA, 15 bp, Homo sapiens
tatgtgaactcactg

SEQ ID NO: 1647285 - DNA, 15 bp, Homo sapiens
ctatgtgaactcact

SEQ ID NO: 1647286 - DNA, 15 bp, Homo sapiens
actatgtgaactcac

SEQ ID NO: 1647287 - DNA, 15 bp, Homo sapiens
tactatgtgaactca

SEQ ID NO: 1647288 - DNA, 15 bp, Homo sapiens
ctactatgtgaactc

SEQ ID NO: 1647289 - DNA, 15 bp, Homo sapiens
cctactatgtgaact

SEQ ID NO: 1647290 - DNA, 15 bp, Homo sapiens
gcctactatgtgaac

SEQ ID NO: 1647291 - DNA, 15 bp, Homo sapiens
tgcctactatgtgaa

SEQ ID NO: 1647292 - DNA, 15 bp, Homo sapiens
ttgcctactatgtga

SEQ ID NO: 1647293 - DNA, 15 bp, Homo sapiens
attgcctactatgtg

SEQ ID NO: 1647294 - DNA, 15 bp, Homo sapiens
gattgcctactatgt

SEQ ID NO: 1647295 - DNA, 15 bp, Homo sapiens
tgattgcctactatg

SEQ ID NO: 1647296 - DNA, 15 bp, Homo sapiens
ttgattgcctactat

SEQ ID NO: 1647297 - DNA, 15 bp, Homo sapiens
tttgattgcctacta

SEQ ID NO: 1647298 - DNA, 15 bp, Homo sapiens
ttttgattgcctact

SEQ ID NO: 1647299 - DNA, 15 bp, Homo sapiens
attttgattgcctac

SEQ ID NO: 1647300 - DNA, 15 bp, Homo sapiens
aattttgattgccta

SEQ ID NO: 1647301 - DNA, 15 bp, Homo sapiens
caattttgattgcct

SEQ ID NO: 1647302 - DNA, 15 bp, Homo sapiens
tcaattttgattgcc

SEQ ID NO: 1647303 - DNA, 15 bp, Homo sapiens
atcaattttgattgc

SEQ ID NO: 1647304 - DNA, 15 bp, Homo sapiens
gatcaattttgattg

SEQ ID NO: 1647305 - DNA, 15 bp, Homo sapiens
agatcaattttgatt

SEQ ID NO: 1647306 - DNA, 15 bp, Homo sapiens
tagatcaattttgat

SEQ ID NO: 1647307 - DNA, 15 bp, Homo sapiens
atagatcaattttga

SEQ ID NO: 1647308 - DNA, 15 bp, Homo sapiens
aatagatcaattttg

SEQ ID NO: 1647309 - DNA, 15 bp, Homo sapiens
aaatagatcaatttt

SEQ ID NO: 1647310 - DNA, 15 bp, Homo sapiens
taaatagatcaattt

SEQ ID NO: 1647311 - DNA, 15 bp, Homo sapiens
ttaaatagatcaatt

SEQ ID NO: 1647312 - DNA, 15 bp, Homo sapiens
gttaaatagatcaat

SEQ ID NO: 1647313 - DNA, 15 bp, Homo sapiens
tgttaaatagatcaa

SEQ ID NO: 1647314 - DNA, 15 bp, Homo sapiens
ctgttaaatagatca

SEQ ID NO: 1647315 - DNA, 15 bp, Homo sapiens
cctgttaaatagatc

SEQ ID NO: 1647316 - DNA, 15 bp, Homo sapiens
acctgttaaatagat

SEQ ID NO: 1647317 - DNA, 15 bp, Homo sapiens
tacctgttaaataga

SEQ ID NO: 1647318 - DNA, 15 bp, Homo sapiens
atacctgttaaatag

SEQ ID NO: 1647319 - DNA, 15 bp, Homo sapiens
aatacctgttaaata

SEQ ID NO: 1647320 - DNA, 15 bp, Homo sapiens
aaatacctgttaaat

SEQ ID NO: 1647321 - DNA, 15 bp, Homo sapiens
taaatacctgttaaa

SEQ ID NO: 1647322 - DNA, 15 bp, Homo sapiens
ttaaatacctgttaa

SEQ ID NO: 1647323 - DNA, 15 bp, Homo sapiens
tttaaatacctgtta

SEQ ID NO: 1647324 - DNA, 15 bp, Homo sapiens
gtttaaatacctgtt

SEQ ID NO: 1647325 - DNA, 15 bp, Homo sapiens
ggtttaaatacctgt

SEQ ID NO: 1647326 - DNA, 15 bp, Homo sapiens
gggtttaaatacctg

SEQ ID NO: 1647327 - DNA, 15 bp, Homo sapiens
agggtttaaatacct

SEQ ID NO: 1647328 - DNA, 15 bp, Homo sapiens
aagggtttaaatacc

SEQ ID NO: 1647329 - DNA, 15 bp, Homo sapiens
caagggtttaaatac

SEQ ID NO: 1647330 - DNA, 15 bp, Homo sapiens
ccaagggtttaaata

SEQ ID NO: 1647331 - DNA, 15 bp, Homo sapiens
accaagggtttaaat

SEQ ID NO: 1647332 - DNA, 15 bp, Homo sapiens
aaccaagggtttaaa

SEQ ID NO: 1647333 - DNA, 15 bp, Homo sapiens
aaaccaagggtttaa

SEQ ID NO: 1647334 - DNA, 15 bp, Homo sapiens
caaaccaagggttta

SEQ ID NO: 1647335 - DNA, 15 bp, Homo sapiens
acaaaccaagggttt

SEQ ID NO: 1647336 - DNA, 15 bp, Homo sapiens
tacaaaccaagggtt

SEQ ID NO: 1647337 - DNA, 15 bp, Homo sapiens
atacaaaccaagggt

SEQ ID NO: 1647338 - DNA, 15 bp, Homo sapiens
tatacaaaccaaggg

SEQ ID NO: 1647339 - DNA, 15 bp, Homo sapiens
ttatacaaaccaagg

SEQ ID NO: 1647340 - DNA, 15 bp, Homo sapiens
gttatacaaaccaag

SEQ ID NO: 1647341 - DNA, 15 bp, Homo sapiens
agttatacaaaccaa

SEQ ID NO: 1647342 - DNA, 15 bp, Homo sapiens
tagttatacaaacca

SEQ ID NO: 1647343 - DNA, 15 bp, Homo sapiens
gtagttatacaaacc

SEQ ID NO: 1647344 - DNA, 15 bp, Homo sapiens
agtagttatacaaac

SEQ ID NO: 1647345 - DNA, 15 bp, Homo sapiens
aagtagttatacaaa

SEQ ID NO: 1647346 - DNA, 15 bp, Homo sapiens
taagtagttatacaa

SEQ ID NO: 1647347 - DNA, 15 bp, Homo sapiens
ataagtagttataca

SEQ ID NO: 1647348 - DNA, 15 bp, Homo sapiens
tataagtagttatac

SEQ ID NO: 1647349 - DNA, 15 bp, Homo sapiens
ctataagtagttata

SEQ ID NO: 1647350 - DNA, 15 bp, Homo sapiens
ttctataagtagtta

SEQ ID NO: 1647351 - DNA, 15 bp, Homo sapiens
gttctataagtagtt

SEQ ID NO: 1647352 - DNA, 15 bp, Homo sapiens
ggttctataagtagt

SEQ ID NO: 1647353 - DNA, 15 bp, Homo sapiens
gggttctataagtag

SEQ ID NO: 1647354 - DNA, 15 bp, Homo sapiens
agggttctataagta

SEQ ID NO: 1647355 - DNA, 15 bp, Homo sapiens
aagggttctataagt

SEQ ID NO: 1647356 - DNA, 15 bp, Homo sapiens
gaagggttctataag

SEQ ID NO: 1647357 - DNA, 15 bp, Homo sapiens
agaagggttctataa

SEQ ID NO: 1647358 - DNA, 15 bp, Homo sapiens
gagaagggttctata

SEQ ID NO: 1647359 - DNA, 15 bp, Homo sapiens
tgagaagggttctat

SEQ ID NO: 1647360 - DNA, 15 bp, Homo sapiens
gtgagaagggttcta

SEQ ID NO: 1647361 - DNA, 15 bp, Homo sapiens
agtgagaagggttct

SEQ ID NO: 1647362 - DNA, 15 bp, Homo sapiens
cagtgagaagggttc

SEQ ID NO: 1647363 - DNA, 15 bp, Homo sapiens
acagtgagaagggtt

SEQ ID NO: 1647364 - DNA, 15 bp, Homo sapiens
cacagtgagaagggt

SEQ ID NO: 1647365 - DNA, 15 bp, Homo sapiens
ccacagtgagaaggg

SEQ ID NO: 1647366 - DNA, 15 bp, Homo sapiens
accacagtgagaagg

SEQ ID NO: 1647367 - DNA, 15 bp, Homo sapiens
aaaccacagtgagaa

SEQ ID NO: 1647368 - DNA, 15 bp, Homo sapiens
taaaccacagtgaga

SEQ ID NO: 1647369 - DNA, 15 bp, Homo sapiens
ttaaaccacagtgag

SEQ ID NO: 1647370 - DNA, 15 bp, Homo sapiens
gttaaaccacagtga

SEQ ID NO: 1647371 - DNA, 15 bp, Homo sapiens
agttaaaccacagtg

SEQ ID NO: 1647372 - DNA, 15 bp, Homo sapiens
tagttaaaccacagt

SEQ ID NO: 1647373 - DNA, 15 bp, Homo sapiens
atagttaaaccacag

SEQ ID NO: 1647374 - DNA, 15 bp, Homo sapiens
tatagttaaaccaca

SEQ ID NO: 1647375 - DNA, 15 bp, Homo sapiens
gtatagttaaaccac

SEQ ID NO: 1647376 - DNA, 15 bp, Homo sapiens
tgtatagttaaacca

SEQ ID NO: 1647377 - DNA, 15 bp, Homo sapiens
ttgtatagttaaacc

SEQ ID NO: 1647378 - DNA, 15 bp, Homo sapiens
attgtatagttaaac

SEQ ID NO: 1647379 - DNA, 15 bp, Homo sapiens
cattgtatagttaaa

SEQ ID NO: 1647380 - DNA, 15 bp, Homo sapiens
tcattgtatagttaa

SEQ ID NO: 1647381 - DNA, 15 bp, Homo sapiens
ctcattgtatagtta

SEQ ID NO: 1647382 - DNA, 15 bp, Homo sapiens
tctcattgtatagtt

SEQ ID NO: 1647383 - DNA, 15 bp, Homo sapiens
ttctcattgtatagt

SEQ ID NO: 1647384 - DNA, 15 bp, Homo sapiens
attctcattgtatag

SEQ ID NO: 1647385 - DNA, 15 bp, Homo sapiens
aattctcattgtata

SEQ ID NO: 1647386 - DNA, 15 bp, Homo sapiens
aaattctcattgtat

SEQ ID NO: 1647387 - DNA, 15 bp, Homo sapiens
aaaattctcattgta

SEQ ID NO: 1647388 - DNA, 15 bp, Homo sapiens
caaaattctcattgt

SEQ ID NO: 1647389 - DNA, 15 bp, Homo sapiens
acaaaattctcattg

SEQ ID NO: 1647390 - DNA, 15 bp, Homo sapiens
tacaaaattctcatt

SEQ ID NO: 1647391 - DNA, 15 bp, Homo sapiens
ctacaaaattctcat

SEQ ID NO: 1647392 - DNA, 15 bp, Homo sapiens
tctacaaaattctca

SEQ ID NO: 1647393 - DNA, 15 bp, Homo sapiens
ctctacaaaattctc

SEQ ID NO: 1647394 - DNA, 15 bp, Homo sapiens
tctctacaaaattct

SEQ ID NO: 1647395 - DNA, 15 bp, Homo sapiens
gtctctacaaaattc

SEQ ID NO: 1647396 - DNA, 15 bp, Homo sapiens
ttgtctctacaaaat

SEQ ID NO: 1647397 - DNA, 15 bp, Homo sapiens
attgtctctacaaaa

SEQ ID NO: 1647398 - DNA, 15 bp, Homo sapiens
tattgtctctacaaa

SEQ ID NO: 1647399 - DNA, 15 bp, Homo sapiens
gtattgtctctacaa

SEQ ID NO: 1647400 - DNA, 15 bp, Homo sapiens
ggtattgtctctaca

SEQ ID NO: 1647401 - DNA, 15 bp, Homo sapiens
aggtattgtctctac

SEQ ID NO: 1647402 - DNA, 15 bp, Homo sapiens
taggtattgtctcta

SEQ ID NO: 1647403 - DNA, 15 bp, Homo sapiens
ctaggtattgtctct

SEQ ID NO: 1647404 - DNA, 15 bp, Homo sapiens
gctaggtattgtctc

SEQ ID NO: 1647405 - DNA, 15 bp, Homo sapiens
agctaggtattgtct

SEQ ID NO: 1647406 - DNA, 15 bp, Homo sapiens
aagctaggtattgtc

SEQ ID NO: 1647407 - DNA, 15 bp, Homo sapiens
taagctaggtattgt

SEQ ID NO: 1647408 - DNA, 15 bp, Homo sapiens
gtaagctaggtattg

SEQ ID NO: 1647409 - DNA, 15 bp, Homo sapiens
tgtaagctaggtatt

SEQ ID NO: 1647410 - DNA, 15 bp, Homo sapiens
ctgtaagctaggtat

SEQ ID NO: 1647411 - DNA, 15 bp, Homo sapiens
tctgtaagctaggta

SEQ ID NO: 1647412 - DNA, 15 bp, Homo sapiens
ttctgtaagctaggt

SEQ ID NO: 1647413 - DNA, 15 bp, Homo sapiens
tttctgtaagctagg

SEQ ID NO: 1647414 - DNA, 15 bp, Homo sapiens
ctttctgtaagctag

SEQ ID NO: 1647415 - DNA, 15 bp, Homo sapiens
actttctgtaagcta

SEQ ID NO: 1647416 - DNA, 15 bp, Homo sapiens
aactttctgtaagct

SEQ ID NO: 1647417 - DNA, 15 bp, Homo sapiens
aaactttctgtaagc

SEQ ID NO: 1647418 - DNA, 15 bp, Homo sapiens
aaaactttctgtaag

SEQ ID NO: 1647419 - DNA, 15 bp, Homo sapiens
taaaactttctgtaa

SEQ ID NO: 1647420 - DNA, 15 bp, Homo sapiens
ataaaactttctgta

SEQ ID NO: 1647421 - DNA, 15 bp, Homo sapiens
aataaaactttctgt

SEQ ID NO: 1647422 - DNA, 15 bp, Homo sapiens
gaataaaactttctg

SEQ ID NO: 1647423 - DNA, 15 bp, Homo sapiens
tgaataaaactttct

SEQ ID NO: 1647424 - DNA, 15 bp, Homo sapiens
atgaataaaactttc

SEQ ID NO: 1647425 - DNA, 15 bp, Homo sapiens
tatgaataaaacttt

SEQ ID NO: 1647426 - DNA, 15 bp, Homo sapiens
gtatgaataaaactt

SEQ ID NO: 1647427 - DNA, 15 bp, Homo sapiens
tgtatgaataaaact

SEQ ID NO: 1647428 - DNA, 15 bp, Homo sapiens
ctgtatgaataaaac

SEQ ID NO: 1647429 - DNA, 15 bp, Homo sapiens
tctgtatgaataaaa

SEQ ID NO: 1647430 - DNA, 15 bp, Homo sapiens
ttctgtatgaataaa

SEQ ID NO: 1647431 - DNA, 15 bp, Homo sapiens
tttctgtatgaataa

SEQ ID NO: 1647432 - DNA, 15 bp, Homo sapiens
ctttctgtatgaata

SEQ ID NO: 1647433 - DNA, 15 bp, Homo sapiens
gctttctgtatgaat

SEQ ID NO: 1647434 - DNA, 15 bp, Homo sapiens
tgctttctgtatgaa

SEQ ID NO: 1647435 - DNA, 15 bp, Homo sapiens
atgctttctgtatga

SEQ ID NO: 1647436 - DNA, 15 bp, Homo sapiens
gatgctttctgtatg

SEQ ID NO: 1647437 - DNA, 15 bp, Homo sapiens
tgatgctttctgtat

SEQ ID NO: 1647438 - DNA, 15 bp, Homo sapiens
ttgatgctttctgta

SEQ ID NO: 1647439 - DNA, 15 bp, Homo sapiens
tttgatgctttctgt

SEQ ID NO: 1647440 - DNA, 15 bp, Homo sapiens
atttgatgctttctg

SEQ ID NO: 1647441 - DNA, 15 bp, Homo sapiens
aatttgatgctttct

SEQ ID NO: 1647442 - DNA, 15 bp, Homo sapiens
aaatttgatgctttc

SEQ ID NO: 1647443 - DNA, 15 bp, Homo sapiens
aaaatttgatgcttt

SEQ ID NO: 1647444 - DNA, 15 bp, Homo sapiens
aaaaatttgatgctt

SEQ ID NO: 1647445 - DNA, 15 bp, Homo sapiens
gaaaaatttgatgct

SEQ ID NO: 1647446 - DNA, 15 bp, Homo sapiens
tgaaaaatttgatgc

SEQ ID NO: 1647447 - DNA, 15 bp, Homo sapiens
atgaaaaatttgatg

SEQ ID NO: 1647448 - DNA, 15 bp, Homo sapiens
aatgaaaaatttgat

SEQ ID NO: 1647449 - DNA, 15 bp, Homo sapiens
aaatgaaaaatttga

SEQ ID NO: 1647450 - DNA, 15 bp, Homo sapiens
taaatgaaaaatttg

SEQ ID NO: 1647451 - DNA, 15 bp, Homo sapiens
gtaaatgaaaaattt

SEQ ID NO: 1647452 - DNA, 15 bp, Homo sapiens
tgtaaatgaaaaatt

SEQ ID NO: 1647453 - DNA, 15 bp, Homo sapiens
ttgtaaatgaaaaat

SEQ ID NO: 1647454 - DNA, 15 bp, Homo sapiens
cttgtaaatgaaaaa

SEQ ID NO: 1647455 - DNA, 15 bp, Homo sapiens
acttgtaaatgaaaa

SEQ ID NO: 1647456 - DNA, 15 bp, Homo sapiens
cacttgtaaatgaaa

SEQ ID NO: 1647457 - DNA, 15 bp, Homo sapiens
gcacttgtaaatgaa

SEQ ID NO: 1647458 - DNA, 15 bp, Homo sapiens
agcacttgtaaatga

SEQ ID NO: 1647459 - DNA, 15 bp, Homo sapiens
aagcacttgtaaatg

SEQ ID NO: 1647460 - DNA, 15 bp, Homo sapiens
aaagcacttgtaaat

SEQ ID NO: 1647461 - DNA, 15 bp, Homo sapiens
taaagcacttgtaaa

SEQ ID NO: 1647462 - DNA, 15 bp, Homo sapiens
ataaagcacttgtaa

SEQ ID NO: 1647463 - DNA, 15 bp, Homo sapiens
tataaagcacttgta

SEQ ID NO: 1647464 - DNA, 15 bp, Homo sapiens
ttataaagcacttgt

SEQ ID NO: 1647465 - DNA, 15 bp, Homo sapiens
attataaagcacttg

SEQ ID NO: 1647466 - DNA, 15 bp, Homo sapiens
aattataaagcactt

SEQ ID NO: 1647467 - DNA, 15 bp, Homo sapiens
aaattataaagcact

SEQ ID NO: 1647468 - DNA, 15 bp, Homo sapiens
taaattataaagcac

SEQ ID NO: 1647469 - DNA, 15 bp, Homo sapiens
ctaaattataaagca

SEQ ID NO: 1647470 - DNA, 15 bp, Homo sapiens
tctaaattataaagc

SEQ ID NO: 1647471 - DNA, 15 bp, Homo sapiens
ttctaaattataaag

SEQ ID NO: 1647472 - DNA, 15 bp, Homo sapiens
tttctaaattataaa

SEQ ID NO: 1647473 - DNA, 15 bp, Homo sapiens
ctttctaaattataa

SEQ ID NO: 1647474 - DNA, 15 bp, Homo sapiens
gctttctaaattata

SEQ ID NO: 1647475 - DNA, 15 bp, Homo sapiens
tgctttctaaattat

SEQ ID NO: 1647476 - DNA, 15 bp, Homo sapiens
gtgctttctaaatta

SEQ ID NO: 1647477 - DNA, 15 bp, Homo sapiens
tgtgctttctaaatt

SEQ ID NO: 1647478 - DNA, 15 bp, Homo sapiens
atgtgctttctaaat

SEQ ID NO: 1647479 - DNA, 15 bp, Homo sapiens
aatgtgctttctaaa

SEQ ID NO: 1647480 - DNA, 15 bp, Homo sapiens
gaatgtgctttctaa

SEQ ID NO: 1647481 - DNA, 15 bp, Homo sapiens
cgaatgtgctttcta

SEQ ID NO: 1647482 - DNA, 15 bp, Homo sapiens
gcgaatgtgctttct

SEQ ID NO: 1647483 - DNA, 15 bp, Homo sapiens
tgcgaatgtgctttc

SEQ ID NO: 1647484 - DNA, 15 bp, Homo sapiens
ttgcgaatgtgcttt

SEQ ID NO: 1647485 - DNA, 15 bp, Homo sapiens
cttgcgaatgtgctt

SEQ ID NO: 1647486 - DNA, 15 bp, Homo sapiens
gcttgcgaatgtgct

SEQ ID NO: 1647487 - DNA, 15 bp, Homo sapiens
agcttgcgaatgtgc

SEQ ID NO: 1647488 - DNA, 15 bp, Homo sapiens
cagcttgcgaatgtg

SEQ ID NO: 1647489 - DNA, 15 bp, Homo sapiens
tcagcttgcgaatgt

SEQ ID NO: 1647490 - DNA, 15 bp, Homo sapiens
ttcagcttgcgaatg

SEQ ID NO: 1647491 - DNA, 15 bp, Homo sapiens
attcagcttgcgaat

SEQ ID NO: 1647492 - DNA, 15 bp, Homo sapiens
aattcagcttgcgaa

SEQ ID NO: 1647493 - DNA, 15 bp, Homo sapiens
taattcagcttgcga

SEQ ID NO: 1647494 - DNA, 15 bp, Homo sapiens
ttaattcagcttgcg

SEQ ID NO: 1647495 - DNA, 15 bp, Homo sapiens
cttaattcagcttgc

SEQ ID NO: 1647496 - DNA, 15 bp, Homo sapiens
acttaattcagcttg

SEQ ID NO: 1647497 - DNA, 15 bp, Homo sapiens
cacttaattcagctt

SEQ ID NO: 1647498 - DNA, 15 bp, Homo sapiens
tcacttaattcagct

SEQ ID NO: 1647499 - DNA, 15 bp, Homo sapiens
gtcacttaattcagc

SEQ ID NO: 1647500 - DNA, 15 bp, Homo sapiens
agtcacttaattcag

SEQ ID NO: 1647501 - DNA, 15 bp, Homo sapiens
aagtcacttaattca

SEQ ID NO: 1647502 - DNA, 15 bp, Homo sapiens
aaagtcacttaattc

SEQ ID NO: 1647503 - DNA, 15 bp, Homo sapiens
gaaagtcacttaatt

SEQ ID NO: 1647504 - DNA, 15 bp, Homo sapiens
cgaaagtcacttaat

SEQ ID NO: 1647505 - DNA, 15 bp, Homo sapiens
ccgaaagtcacttaa

SEQ ID NO: 1647506 - DNA, 15 bp, Homo sapiens
accgaaagtcactta

SEQ ID NO: 1647507 - DNA, 15 bp, Homo sapiens
gaccgaaagtcactt

SEQ ID NO: 1647508 - DNA, 15 bp, Homo sapiens
agaccgaaagtcact

SEQ ID NO: 1647509 - DNA, 15 bp, Homo sapiens
cagaccgaaagtcac

SEQ ID NO: 1647510 - DNA, 15 bp, Homo sapiens
ccagaccgaaagtca

SEQ ID NO: 1647511 - DNA, 15 bp, Homo sapiens
tccagaccgaaagtc

SEQ ID NO: 1647512 - DNA, 15 bp, Homo sapiens
atccagaccgaaagt

SEQ ID NO: 1647513 - DNA, 15 bp, Homo sapiens
gatccagaccgaaag

SEQ ID NO: 1647514 - DNA, 15 bp, Homo sapiens
agatccagaccgaaa

SEQ ID NO: 1647515 - DNA, 15 bp, Homo sapiens
gagatccagaccgaa

SEQ ID NO: 1647516 - DNA, 15 bp, Homo sapiens
tgagatccagaccga

SEQ ID NO: 1647517 - DNA, 15 bp, Homo sapiens
gtgagatccagaccg

SEQ ID NO: 1647518 - DNA, 15 bp, Homo sapiens
atgtgagatccagac

SEQ ID NO: 1647519 - DNA, 15 bp, Homo sapiens
gatgtgagatccaga

SEQ ID NO: 1647520 - DNA, 15 bp, Homo sapiens
agatgtgagatccag

SEQ ID NO: 1647521 - DNA, 15 bp, Homo sapiens
tagatgtgagatcca

SEQ ID NO: 1647522 - DNA, 15 bp, Homo sapiens
atagatgtgagatcc

SEQ ID NO: 1647523 - DNA, 15 bp, Homo sapiens
aatagatgtgagatc

SEQ ID NO: 1647524 - DNA, 15 bp, Homo sapiens
taatagatgtgagat

SEQ ID NO: 1647525 - DNA, 15 bp, Homo sapiens
gtaatagatgtgaga

SEQ ID NO: 1647526 - DNA, 15 bp, Homo sapiens
agtaatagatgtgag

SEQ ID NO: 1647527 - DNA, 15 bp, Homo sapiens
aagtaatagatgtga

SEQ ID NO: 1647528 - DNA, 15 bp, Homo sapiens
gaagtaatagatgtg

SEQ ID NO: 1647529 - DNA, 15 bp, Homo sapiens
tgaagtaatagatgt

SEQ ID NO: 1647530 - DNA, 15 bp, Homo sapiens
atgaagtaatagatg

SEQ ID NO: 1647531 - DNA, 15 bp, Homo sapiens
aatgaagtaatagat

SEQ ID NO: 1647532 - DNA, 15 bp, Homo sapiens
aaatgaagtaataga

SEQ ID NO: 1647533 - DNA, 15 bp, Homo sapiens
gaaatgaagtaatag

SEQ ID NO: 1647534 - DNA, 15 bp, Homo sapiens
gaggaaatgaagtaa

SEQ ID NO: 1647535 - DNA, 15 bp, Homo sapiens
tgaggaaatgaagta

SEQ ID NO: 1647536 - DNA, 15 bp, Homo sapiens
atgaggaaatgaagt

SEQ ID NO: 1647537 - DNA, 15 bp, Homo sapiens
tatgaggaaatgaag

SEQ ID NO: 1647538 - DNA, 15 bp, Homo sapiens
gtatgaggaaatgaa

SEQ ID NO: 1647539 - DNA, 15 bp, Homo sapiens
agtatgaggaaatga

SEQ ID NO: 1647540 - DNA, 15 bp, Homo sapiens
tagtatgaggaaatg

SEQ ID NO: 1647541 - DNA, 15 bp, Homo sapiens
ctagtatgaggaaat

SEQ ID NO: 1647542 - DNA, 15 bp, Homo sapiens
gctagtatgaggaaa

SEQ ID NO: 1647543 - DNA, 15 bp, Homo sapiens
agctagtatgaggaa

SEQ ID NO: 1647544 - DNA, 15 bp, Homo sapiens
gagctagtatgagga

SEQ ID NO: 1647545 - DNA, 15 bp, Homo sapiens
agagctagtatgagg

SEQ ID NO: 1647546 - DNA, 15 bp, Homo sapiens
aagagctagtatgag

SEQ ID NO: 1647547 - DNA, 15 bp, Homo sapiens
aaagagctagtatga

SEQ ID NO: 1647548 - DNA, 15 bp, Homo sapiens
gaaagagctagtatg

SEQ ID NO: 1647549 - DNA, 15 bp, Homo sapiens
ggaaagagctagtat

SEQ ID NO: 1647550 - DNA, 15 bp, Homo sapiens
aggaaagagctagta

SEQ ID NO: 1647551 - DNA, 15 bp, Homo sapiens
caggaaagagctagt

SEQ ID NO: 1647552 - DNA, 15 bp, Homo sapiens
ccaggaaagagctag

SEQ ID NO: 1647553 - DNA, 15 bp, Homo sapiens
accaggaaagagcta

SEQ ID NO: 1647554 - DNA, 15 bp, Homo sapiens
aaccaggaaagagct

SEQ ID NO: 1647555 - DNA, 15 bp, Homo sapiens
taaccaggaaagagc

SEQ ID NO: 1647556 - DNA, 15 bp, Homo sapiens
gtaaccaggaaagag

SEQ ID NO: 1647557 - DNA, 15 bp, Homo sapiens
ggtaaccaggaaaga

SEQ ID NO: 1647558 - DNA, 15 bp, Homo sapiens
aggtaaccaggaaag

SEQ ID NO: 1647559 - DNA, 15 bp, Homo sapiens
caggtaaccaggaaa

SEQ ID NO: 1647560 - DNA, 15 bp, Homo sapiens
ccaggtaaccaggaa

SEQ ID NO: 1647561 - DNA, 15 bp, Homo sapiens
tccaggtaaccagga

SEQ ID NO: 1647562 - DNA, 15 bp, Homo sapiens
ttccaggtaaccagg

SEQ ID NO: 1647563 - DNA, 15 bp, Homo sapiens
tttccaggtaaccag

SEQ ID NO: 1647564 - DNA, 15 bp, Homo sapiens
ttttccaggtaacca

SEQ ID NO: 1647565 - DNA, 15 bp, Homo sapiens
tttttccaggtaacc

SEQ ID NO: 1647566 - DNA, 15 bp, Homo sapiens
atttttccaggtaac

SEQ ID NO: 1647567 - DNA, 15 bp, Homo sapiens
catttttccaggtaa

SEQ ID NO: 1647568 - DNA, 15 bp, Homo sapiens
acatttttccaggta

SEQ ID NO: 1647569 - DNA, 15 bp, Homo sapiens
tacatttttccaggt

SEQ ID NO: 1647570 - DNA, 15 bp, Homo sapiens
atacatttttccagg

SEQ ID NO: 1647571 - DNA, 15 bp, Homo sapiens
gatacatttttccag

SEQ ID NO: 1647572 - DNA, 15 bp, Homo sapiens
tgatacatttttcca

SEQ ID NO: 1647573 - DNA, 15 bp, Homo sapiens
ctgatacatttttcc

SEQ ID NO: 1647574 - DNA, 15 bp, Homo sapiens
actgatacatttttc

SEQ ID NO: 1647575 - DNA, 15 bp, Homo sapiens
tactgatacattttt

SEQ ID NO: 1647576 - DNA, 15 bp, Homo sapiens
ttactgatacatttt

SEQ ID NO: 1647577 - DNA, 15 bp, Homo sapiens
attactgatacattt

SEQ ID NO: 1647578 - DNA, 15 bp, Homo sapiens
tattactgatacatt

SEQ ID NO: 1647579 - DNA, 15 bp, Homo sapiens
ttattactgatacat

SEQ ID NO: 1647580 - DNA, 15 bp, Homo sapiens
attattactgataca

SEQ ID NO: 1647581 - DNA, 15 bp, Homo sapiens
aattattactgatac

SEQ ID NO: 1647582 - DNA, 15 bp, Homo sapiens
aaattattactgata

SEQ ID NO: 1647583 - DNA, 15 bp, Homo sapiens
taaattattactgat

SEQ ID NO: 1647584 - DNA, 15 bp, Homo sapiens
ttaaattattactga

SEQ ID NO: 1647585 - DNA, 15 bp, Homo sapiens
gttaaattattactg

SEQ ID NO: 1647586 - DNA, 15 bp, Homo sapiens
agttaaattattact

SEQ ID NO: 1647587 - DNA, 15 bp, Homo sapiens
aagttaaattattac

SEQ ID NO: 1647588 - DNA, 15 bp, Homo sapiens
taagttaaattatta

SEQ ID NO: 1647589 - DNA, 15 bp, Homo sapiens
ttaagttaaattatt

SEQ ID NO: 1647590 - DNA, 15 bp, Homo sapiens
gttaagttaaattat

SEQ ID NO: 1647591 - DNA, 15 bp, Homo sapiens
ggttaagttaaatta

SEQ ID NO: 1647592 - DNA, 15 bp, Homo sapiens
aggttaagttaaatt

SEQ ID NO: 1647593 - DNA, 15 bp, Homo sapiens
gaggttaagttaaat

SEQ ID NO: 1647594 - DNA, 15 bp, Homo sapiens
tgaggttaagttaaa

SEQ ID NO: 1647595 - DNA, 15 bp, Homo sapiens
gtgaggttaagttaa

SEQ ID NO: 1647596 - DNA, 15 bp, Homo sapiens
ggtgaggttaagtta

SEQ ID NO: 1647597 - DNA, 15 bp, Homo sapiens
tggtgaggttaagtt

SEQ ID NO: 1647598 - DNA, 15 bp, Homo sapiens
ctggtgaggttaagt

SEQ ID NO: 1647599 - DNA, 15 bp, Homo sapiens
actggtgaggttaag

SEQ ID NO: 1647600 - DNA, 15 bp, Homo sapiens
tactggtgaggttaa

SEQ ID NO: 1647601 - DNA, 15 bp, Homo sapiens
ttactggtgaggtta

SEQ ID NO: 1647602 - DNA, 15 bp, Homo sapiens
tttactggtgaggtt

SEQ ID NO: 1647603 - DNA, 15 bp, Homo sapiens
ctttactggtgaggt

SEQ ID NO: 1647604 - DNA, 15 bp, Homo sapiens
actttactggtgagg

SEQ ID NO: 1647605 - DNA, 15 bp, Homo sapiens
gactttactggtgag

SEQ ID NO: 1647606 - DNA, 15 bp, Homo sapiens
agactttactggtga

SEQ ID NO: 1647607 - DNA, 15 bp, Homo sapiens
aagactttactggtg

SEQ ID NO: 1647608 - DNA, 15 bp, Homo sapiens
caagactttactggt

SEQ ID NO: 1647609 - DNA, 15 bp, Homo sapiens
tcaagactttactgg

SEQ ID NO: 1647610 - DNA, 15 bp, Homo sapiens
atcaagactttactg

SEQ ID NO: 1647611 - DNA, 15 bp, Homo sapiens
aatcaagactttact

SEQ ID NO: 1647612 - DNA, 15 bp, Homo sapiens
caatcaagactttac

SEQ ID NO: 1647613 - DNA, 15 bp, Homo sapiens
acaatcaagacttta

SEQ ID NO: 1647614 - DNA, 15 bp, Homo sapiens
aacaatcaagacttt

SEQ ID NO: 1647615 - DNA, 15 bp, Homo sapiens
aaacaatcaagactt

SEQ ID NO: 1647616 - DNA, 15 bp, Homo sapiens
taaacaatcaagact

SEQ ID NO: 1647617 - DNA, 15 bp, Homo sapiens
ttaaacaatcaagac

SEQ ID NO: 1647618 - DNA, 15 bp, Homo sapiens
tttaaacaatcaaga

SEQ ID NO: 1647619 - DNA, 15 bp, Homo sapiens
ttttaaacaatcaag

SEQ ID NO: 1647620 - DNA, 15 bp, Homo sapiens
attttaaacaatcaa

SEQ ID NO: 1647621 - DNA, 15 bp, Homo sapiens
aattttaaacaatca

SEQ ID NO: 1647622 - DNA, 15 bp, Homo sapiens
taattttaaacaatc

SEQ ID NO: 1647623 - DNA, 15 bp, Homo sapiens
ttaattttaaacaat

SEQ ID NO: 1647624 - DNA, 15 bp, Homo sapiens
cttaattttaaacaa

SEQ ID NO: 1647625 - DNA, 15 bp, Homo sapiens
gcttaattttaaaca

SEQ ID NO: 1647626 - DNA, 15 bp, Homo sapiens
tgcttaattttaaac

SEQ ID NO: 1647627 - DNA, 15 bp, Homo sapiens
ttgcttaattttaaa

SEQ ID NO: 1647628 - DNA, 15 bp, Homo sapiens
attgcttaattttaa

SEQ ID NO: 1647629 - DNA, 15 bp, Homo sapiens
tattgcttaatttta

SEQ ID NO: 1647630 - DNA, 15 bp, Homo sapiens
atattgcttaatttt

SEQ ID NO: 1647631 - DNA, 15 bp, Homo sapiens
tatattgcttaattt

SEQ ID NO: 1647632 - DNA, 15 bp, Homo sapiens
atatattgcttaatt

SEQ ID NO: 1647633 - DNA, 15 bp, Homo sapiens
gatatattgcttaat

SEQ ID NO: 1647634 - DNA, 15 bp, Homo sapiens
tgatatattgcttaa

SEQ ID NO: 1647635 - DNA, 15 bp, Homo sapiens
atgatatattgctta

SEQ ID NO: 1647636 - DNA, 15 bp, Homo sapiens
aatgatatattgctt

SEQ ID NO: 1647637 - DNA, 15 bp, Homo sapiens
gaatgatatattgct

SEQ ID NO: 1647638 - DNA, 15 bp, Homo sapiens
ggaatgatatattgc

SEQ ID NO: 1647639 - DNA, 15 bp, Homo sapiens
aggaatgatatattg

SEQ ID NO: 1647640 - DNA, 15 bp, Homo sapiens
aaggaatgatatatt

SEQ ID NO: 1647641 - DNA, 15 bp, Homo sapiens
taaggaatgatatat

SEQ ID NO: 1647642 - DNA, 15 bp, Homo sapiens
gtaaggaatgatata

SEQ ID NO: 1647643 - DNA, 15 bp, Homo sapiens
tgtaaggaatgatat

SEQ ID NO: 1647644 - DNA, 15 bp, Homo sapiens
atgtaaggaatgata

SEQ ID NO: 1647645 - DNA, 15 bp, Homo sapiens
gatgtaaggaatgat

SEQ ID NO: 1647646 - DNA, 15 bp, Homo sapiens
agatgtaaggaatga

SEQ ID NO: 1647647 - DNA, 15 bp, Homo sapiens
cagatgtaaggaatg

SEQ ID NO: 1647648 - DNA, 15 bp, Homo sapiens
tcagatgtaaggaat

SEQ ID NO: 1647649 - DNA, 15 bp, Homo sapiens
ttcagatgtaaggaa

SEQ ID NO: 1647650 - DNA, 15 bp, Homo sapiens
attcagatgtaagga

SEQ ID NO: 1647651 - DNA, 15 bp, Homo sapiens
tattcagatgtaagg

SEQ ID NO: 1647652 - DNA, 15 bp, Homo sapiens
ctattcagatgtaag

SEQ ID NO: 1647653 - DNA, 15 bp, Homo sapiens
actattcagatgtaa

SEQ ID NO: 1647654 - DNA, 15 bp, Homo sapiens
tactattcagatgta

SEQ ID NO: 1647655 - DNA, 15 bp, Homo sapiens
atactattcagatgt

SEQ ID NO: 1647656 - DNA, 15 bp, Homo sapiens
tatactattcagatg

SEQ ID NO: 1647657 - DNA, 15 bp, Homo sapiens
ctatactattcagat

SEQ ID NO: 1647658 - DNA, 15 bp, Homo sapiens
tctatactattcaga

SEQ ID NO: 1647659 - DNA, 15 bp, Homo sapiens
ctctatactattcag

SEQ ID NO: 1647660 - DNA, 15 bp, Homo sapiens
cctctatactattca

SEQ ID NO: 1647661 - DNA, 15 bp, Homo sapiens
tcctctatactattc

SEQ ID NO: 1647662 - DNA, 15 bp, Homo sapiens
atcctctatactatt

SEQ ID NO: 1647663 - DNA, 15 bp, Homo sapiens
tatcctctatactat

SEQ ID NO: 1647664 - DNA, 15 bp, Homo sapiens
ttatcctctatacta

SEQ ID NO: 1647665 - DNA, 15 bp, Homo sapiens
tttatcctctatact

SEQ ID NO: 1647666 - DNA, 15 bp, Homo sapiens
gtttatcctctatac

SEQ ID NO: 1647667 - DNA, 15 bp, Homo sapiens
agtttatcctctata

SEQ ID NO: 1647668 - DNA, 15 bp, Homo sapiens
aagtttatcctctat

SEQ ID NO: 1647669 - DNA, 15 bp, Homo sapiens
aaagtttatcctcta

SEQ ID NO: 1647670 - DNA, 15 bp, Homo sapiens
gaaagtttatcctct

SEQ ID NO: 1647671 - DNA, 15 bp, Homo sapiens
ggaaagtttatcctc

SEQ ID NO: 1647672 - DNA, 15 bp, Homo sapiens
aggaaagtttatcct

SEQ ID NO: 1647673 - DNA, 15 bp, Homo sapiens
gaggaaagtttatcc

SEQ ID NO: 1647674 - DNA, 15 bp, Homo sapiens
agaggaaagtttatc

SEQ ID NO: 1647675 - DNA, 15 bp, Homo sapiens
aagaggaaagtttat

SEQ ID NO: 1647676 - DNA, 15 bp, Homo sapiens
taagaggaaagttta

SEQ ID NO: 1647677 - DNA, 15 bp, Homo sapiens
ataagaggaaagttt

SEQ ID NO: 1647678 - DNA, 15 bp, Homo sapiens
aataagaggaaagtt

SEQ ID NO: 1647679 - DNA, 15 bp, Homo sapiens
taataagaggaaagt

SEQ ID NO: 1647680 - DNA, 15 bp, Homo sapiens
gtaataagaggaaag

SEQ ID NO: 1647681 - DNA, 15 bp, Homo sapiens
tgtaataagaggaaa

SEQ ID NO: 1647682 - DNA, 15 bp, Homo sapiens
atgtaataagaggaa

SEQ ID NO: 1647683 - DNA, 15 bp, Homo sapiens
tatgtaataagagga

SEQ ID NO: 1647684 - DNA, 15 bp, Homo sapiens
ctatgtaataagagg

SEQ ID NO: 1647685 - DNA, 15 bp, Homo sapiens
cctatgtaataagag

SEQ ID NO: 1647686 - DNA, 15 bp, Homo sapiens
tcctatgtaataaga

SEQ ID NO: 1647687 - DNA, 15 bp, Homo sapiens
ctcctatgtaataag

SEQ ID NO: 1647688 - DNA, 15 bp, Homo sapiens
tctcctatgtaataa

SEQ ID NO: 1647689 - DNA, 15 bp, Homo sapiens
ttctcctatgtaata

SEQ ID NO: 1647690 - DNA, 15 bp, Homo sapiens
attctcctatgtaat

SEQ ID NO: 1647691 - DNA, 15 bp, Homo sapiens
aattctcctatgtaa

SEQ ID NO: 1647692 - DNA, 15 bp, Homo sapiens
taattctcctatgta

SEQ ID NO: 1647693 - DNA, 15 bp, Homo sapiens
ttaattctcctatgt

SEQ ID NO: 1647694 - DNA, 15 bp, Homo sapiens
attaattctcctatg

SEQ ID NO: 1647695 - DNA, 15 bp, Homo sapiens
gattaattctcctat

SEQ ID NO: 1647696 - DNA, 15 bp, Homo sapiens
agattaattctccta

SEQ ID NO: 1647697 - DNA, 15 bp, Homo sapiens
aagattaattctcct

SEQ ID NO: 1647698 - DNA, 15 bp, Homo sapiens
caagattaattctcc

SEQ ID NO: 1647699 - DNA, 15 bp, Homo sapiens
acaagattaattctc

SEQ ID NO: 1647700 - DNA, 15 bp, Homo sapiens
tacaagattaattct

SEQ ID NO: 1647701 - DNA, 15 bp, Homo sapiens
atacaagattaattc

SEQ ID NO: 1647702 - DNA, 15 bp, Homo sapiens
aatacaagattaatt

SEQ ID NO: 1647703 - DNA, 15 bp, Homo sapiens
aaatacaagattaat

SEQ ID NO: 1647704 - DNA, 15 bp, Homo sapiens
aaaatacaagattaa

SEQ ID NO: 1647705 - DNA, 15 bp, Homo sapiens
taaaatacaagatta

SEQ ID NO: 1647706 - DNA, 15 bp, Homo sapiens
gtaaaatacaagatt

SEQ ID NO: 1647707 - DNA, 15 bp, Homo sapiens
tgtaaaatacaagat

SEQ ID NO: 1647708 - DNA, 15 bp, Homo sapiens
ctgtaaaatacaaga

SEQ ID NO: 1647709 - DNA, 15 bp, Homo sapiens
actgtaaaatacaag

SEQ ID NO: 1647710 - DNA, 15 bp, Homo sapiens
tactgtaaaatacaa

SEQ ID NO: 1647711 - DNA, 15 bp, Homo sapiens
gtactgtaaaataca

SEQ ID NO: 1647712 - DNA, 15 bp, Homo sapiens
ggtactgtaaaatac

SEQ ID NO: 1647713 - DNA, 15 bp, Homo sapiens
gggtactgtaaaata

SEQ ID NO: 1647714 - DNA, 15 bp, Homo sapiens
tgggtactgtaaaat

SEQ ID NO: 1647715 - DNA, 15 bp, Homo sapiens
ttgggtactgtaaaa

SEQ ID NO: 1647716 - DNA, 15 bp, Homo sapiens
tttgggtactgtaaa

SEQ ID NO: 1647717 - DNA, 15 bp, Homo sapiens
ttttgggtactgtaa

SEQ ID NO: 1647718 - DNA, 15 bp, Homo sapiens
attttgggtactgta

SEQ ID NO: 1647719 - DNA, 15 bp, Homo sapiens
tattttgggtactgt

SEQ ID NO: 1647720 - DNA, 15 bp, Homo sapiens
ctattttgggtactg

SEQ ID NO: 1647721 - DNA, 15 bp, Homo sapiens
gctattttgggtact

SEQ ID NO: 1647722 - DNA, 15 bp, Homo sapiens
agctattttgggtac

SEQ ID NO: 1647723 - DNA, 15 bp, Homo sapiens
cagctattttgggta

SEQ ID NO: 1647724 - DNA, 15 bp, Homo sapiens
ccagctattttgggt

SEQ ID NO: 1647725 - DNA, 15 bp, Homo sapiens
accagctattttggg

SEQ ID NO: 1647726 - DNA, 15 bp, Homo sapiens
tgtggatacaaagaa

SEQ ID NO: 1647727 - DNA, 15 bp, Homo sapiens
ttgtggatacaaaga

SEQ ID NO: 1647728 - DNA, 15 bp, Homo sapiens
gttgtggatacaaag

SEQ ID NO: 1647729 - DNA, 15 bp, Homo sapiens
cgttgtggatacaaa

SEQ ID NO: 1647730 - DNA, 15 bp, Homo sapiens
gcgttgtggatacaa

SEQ ID NO: 1647731 - DNA, 15 bp, Homo sapiens
agcgttgtggataca

SEQ ID NO: 1647732 - DNA, 15 bp, Homo sapiens
aagcgttgtggatac

SEQ ID NO: 1647733 - DNA, 15 bp, Homo sapiens
taagcgttgtggata

SEQ ID NO: 1647734 - DNA, 15 bp, Homo sapiens
ataagcgttgtggat

SEQ ID NO: 1647735 - DNA, 15 bp, Homo sapiens
gataagcgttgtgga

SEQ ID NO: 1647736 - DNA, 15 bp, Homo sapiens
tgataagcgttgtgg

SEQ ID NO: 1647737 - DNA, 15 bp, Homo sapiens
gtgataagcgttgtg

SEQ ID NO: 1647738 - DNA, 15 bp, Homo sapiens
tgtgataagcgttgt

SEQ ID NO: 1647739 - DNA, 15 bp, Homo sapiens
ctgtgataagcgttg

SEQ ID NO: 1647740 - DNA, 15 bp, Homo sapiens
actgtgataagcgtt

SEQ ID NO: 1647741 - DNA, 15 bp, Homo sapiens
tactgtgataagcgt

SEQ ID NO: 1647742 - DNA, 15 bp, Homo sapiens
ctactgtgataagcg

SEQ ID NO: 1647743 - DNA, 15 bp, Homo sapiens
tctactgtgataagc

SEQ ID NO: 1647744 - DNA, 15 bp, Homo sapiens
ttctactgtgataag

SEQ ID NO: 1647745 - DNA, 15 bp, Homo sapiens
attctactgtgataa

SEQ ID NO: 1647746 - DNA, 15 bp, Homo sapiens
tattctactgtgata

SEQ ID NO: 1647747 - DNA, 15 bp, Homo sapiens
gtattctactgtgat

SEQ ID NO: 1647748 - DNA, 15 bp, Homo sapiens
tgtattctactgtga

SEQ ID NO: 1647749 - DNA, 15 bp, Homo sapiens
ttgtattctactgtg

SEQ ID NO: 1647750 - DNA, 15 bp, Homo sapiens
cttgtattctactgt

SEQ ID NO: 1647751 - DNA, 15 bp, Homo sapiens
acttgtattctactg

SEQ ID NO: 1647752 - DNA, 15 bp, Homo sapiens
cacttgtattctact

SEQ ID NO: 1647753 - DNA, 15 bp, Homo sapiens
gcacttgtattctac

SEQ ID NO: 1647754 - DNA, 15 bp, Homo sapiens
agcacttgtattcta

SEQ ID NO: 1647755 - DNA, 15 bp, Homo sapiens
aagcacttgtattct

SEQ ID NO: 1647756 - DNA, 15 bp, Homo sapiens
aaagcacttgtattc

SEQ ID NO: 1647757 - DNA, 15 bp, Homo sapiens
taaagcacttgtatt

SEQ ID NO: 1647758 - DNA, 15 bp, Homo sapiens
gtaaagcacttgtat

SEQ ID NO: 1647759 - DNA, 15 bp, Homo sapiens
tgtaaagcacttgta

SEQ ID NO: 1647760 - DNA, 15 bp, Homo sapiens
ctgtaaagcacttgt

SEQ ID NO: 1647761 - DNA, 15 bp, Homo sapiens
actgtaaagcacttg

SEQ ID NO: 1647762 - DNA, 15 bp, Homo sapiens
aactgtaaagcactt

SEQ ID NO: 1647763 - DNA, 15 bp, Homo sapiens
aaactgtaaagcact

SEQ ID NO: 1647764 - DNA, 15 bp, Homo sapiens
taaactgtaaagcac

SEQ ID NO: 1647765 - DNA, 15 bp, Homo sapiens
gtaaactgtaaagca

SEQ ID NO: 1647766 - DNA, 15 bp, Homo sapiens
tgtaaactgtaaagc

SEQ ID NO: 1647767 - DNA, 15 bp, Homo sapiens
ttgtaaactgtaaag

SEQ ID NO: 1647768 - DNA, 15 bp, Homo sapiens
tttgtaaactgtaaa

SEQ ID NO: 1647769 - DNA, 15 bp, Homo sapiens
ctttgtaaactgtaa

SEQ ID NO: 1647770 - DNA, 15 bp, Homo sapiens
gctttgtaaactgta

SEQ ID NO: 1647771 - DNA, 15 bp, Homo sapiens
tgctttgtaaactgt

SEQ ID NO: 1647772 - DNA, 15 bp, Homo sapiens
gtgctttgtaaactg

SEQ ID NO: 1647773 - DNA, 15 bp, Homo sapiens
tgtgctttgtaaact

SEQ ID NO: 1647774 - DNA, 15 bp, Homo sapiens
atgtgctttgtaaac

SEQ ID NO: 1647775 - DNA, 15 bp, Homo sapiens
aatgtgctttgtaaa

SEQ ID NO: 1647776 - DNA, 15 bp, Homo sapiens
gaatgtgctttgtaa

SEQ ID NO: 1647777 - DNA, 15 bp, Homo sapiens
tgaatgtgctttgta

SEQ ID NO: 1647778 - DNA, 15 bp, Homo sapiens
gtgaatgtgctttgt

SEQ ID NO: 1647779 - DNA, 15 bp, Homo sapiens
agtgaatgtgctttg

SEQ ID NO: 1647780 - DNA, 15 bp, Homo sapiens
tagtgaatgtgcttt

SEQ ID NO: 1647781 - DNA, 15 bp, Homo sapiens
atagtgaatgtgctt

SEQ ID NO: 1647782 - DNA, 15 bp, Homo sapiens
aatagtgaatgtgct

SEQ ID NO: 1647783 - DNA, 15 bp, Homo sapiens
aaatagtgaatgtgc

SEQ ID NO: 1647784 - DNA, 15 bp, Homo sapiens
aaaatagtgaatgtg

SEQ ID NO: 1647785 - DNA, 15 bp, Homo sapiens
aaaaatagtgaatgt

SEQ ID NO: 1647786 - DNA, 15 bp, Homo sapiens
aaaaaatagtgaatg

SEQ ID NO: 1647787 - DNA, 15 bp, Homo sapiens
aaaaaaatagtgaat

SEQ ID NO: 1647788 - DNA, 15 bp, Homo sapiens
aaaaaaaatagtgaa

SEQ ID NO: 1647789 - DNA, 15 bp, Homo sapiens
gaaaaaaaatagtga

SEQ ID NO: 1647790 - DNA, 15 bp, Homo sapiens
tgaaaaaaaatagtg

SEQ ID NO: 1647791 - DNA, 15 bp, Homo sapiens
ctgaaaaaaaatagt

SEQ ID NO: 1647792 - DNA, 15 bp, Homo sapiens
cctgaaaaaaaatag

SEQ ID NO: 1647793 - DNA, 15 bp, Homo sapiens
acctgaaaaaaaata

SEQ ID NO: 1647794 - DNA, 15 bp, Homo sapiens
gacctgaaaaaaaat

SEQ ID NO: 1647795 - DNA, 15 bp, Homo sapiens
tgacctgaaaaaaaa

SEQ ID NO: 1647796 - DNA, 15 bp, Homo sapiens
gtgacctgaaaaaaa

SEQ ID NO: 1647797 - DNA, 15 bp, Homo sapiens
ggtgacctgaaaaaa

SEQ ID NO: 1647798 - DNA, 15 bp, Homo sapiens
aggtgacctgaaaaa

SEQ ID NO: 1647799 - DNA, 15 bp, Homo sapiens
taggtgacctgaaaa

SEQ ID NO: 1647800 - DNA, 15 bp, Homo sapiens
ctaggtgacctgaaa

SEQ ID NO: 1647801 - DNA, 15 bp, Homo sapiens
tctaggtgacctgaa

SEQ ID NO: 1647802 - DNA, 15 bp, Homo sapiens
atctaggtgacctga

SEQ ID NO: 1647803 - DNA, 15 bp, Homo sapiens
tatctaggtgacctg

SEQ ID NO: 1647804 - DNA, 15 bp, Homo sapiens
atatctaggtgacct

SEQ ID NO: 1647805 - DNA, 15 bp, Homo sapiens
gatatctaggtgacc

SEQ ID NO: 1647806 - DNA, 15 bp, Homo sapiens
tgatatctaggtgac

SEQ ID NO: 1647807 - DNA, 15 bp, Homo sapiens
ttgatatctaggtga

SEQ ID NO: 1647808 - DNA, 15 bp, Homo sapiens
attgatatctaggtg

SEQ ID NO: 1647809 - DNA, 15 bp, Homo sapiens
tattgatatctaggt

SEQ ID NO: 1647810 - DNA, 15 bp, Homo sapiens
ttattgatatctagg

SEQ ID NO: 1647811 - DNA, 15 bp, Homo sapiens
attattgatatctag

SEQ ID NO: 1647812 - DNA, 15 bp, Homo sapiens
gattattgatatcta

SEQ ID NO: 1647813 - DNA, 15 bp, Homo sapiens
tgattattgatatct

SEQ ID NO: 1647814 - DNA, 15 bp, Homo sapiens
atgattattgatatc

SEQ ID NO: 1647815 - DNA, 15 bp, Homo sapiens
aatgattattgatat

SEQ ID NO: 1647816 - DNA, 15 bp, Homo sapiens
caatgattattgata

SEQ ID NO: 1647817 - DNA, 15 bp, Homo sapiens
gcaatgattattgat

SEQ ID NO: 1647818 - DNA, 15 bp, Homo sapiens
tgcaatgattattga

SEQ ID NO: 1647819 - DNA, 15 bp, Homo sapiens
atgcaatgattattg

SEQ ID NO: 1647820 - DNA, 15 bp, Homo sapiens
aatgcaatgattatt

SEQ ID NO: 1647821 - DNA, 15 bp, Homo sapiens
aaatgcaatgattat

SEQ ID NO: 1647822 - DNA, 15 bp, Homo sapiens
aaaatgcaatgatta

SEQ ID NO: 1647823 - DNA, 15 bp, Homo sapiens
aaaaatgcaatgatt

SEQ ID NO: 1647824 - DNA, 15 bp, Homo sapiens
taaaaatgcaatgat

SEQ ID NO: 1647825 - DNA, 15 bp, Homo sapiens
ctaaaaatgcaatga

SEQ ID NO: 1647826 - DNA, 15 bp, Homo sapiens
actaaaaatgcaatg

SEQ ID NO: 1647827 - DNA, 15 bp, Homo sapiens
cactaaaaatgcaat

SEQ ID NO: 1647828 - DNA, 15 bp, Homo sapiens
gcactaaaaatgcaa

SEQ ID NO: 1647829 - DNA, 15 bp, Homo sapiens
ggcactaaaaatgca

SEQ ID NO: 1647830 - DNA, 15 bp, Homo sapiens
aggcactaaaaatgc

SEQ ID NO: 1647831 - DNA, 15 bp, Homo sapiens
taggcactaaaaatg

SEQ ID NO: 1647832 - DNA, 15 bp, Homo sapiens
ctaggcactaaaaat

SEQ ID NO: 1647833 - DNA, 15 bp, Homo sapiens
gctaggcactaaaaa

SEQ ID NO: 1647834 - DNA, 15 bp, Homo sapiens
tgctaggcactaaaa

SEQ ID NO: 1647835 - DNA, 15 bp, Homo sapiens
gtgctaggcactaaa

SEQ ID NO: 1647836 - DNA, 15 bp, Homo sapiens
tgtgctaggcactaa

SEQ ID NO: 1647837 - DNA, 15 bp, Homo sapiens
ctgtgctaggcacta

SEQ ID NO: 1647838 - DNA, 15 bp, Homo sapiens
cctgtgctaggcact

SEQ ID NO: 1647839 - DNA, 15 bp, Homo sapiens
tccctgtgctaggca

SEQ ID NO: 1647840 - DNA, 15 bp, Homo sapiens
gtccctgtgctaggc

SEQ ID NO: 1647841 - DNA, 15 bp, Homo sapiens
tgtccctgtgctagg

SEQ ID NO: 1647842 - DNA, 15 bp, Homo sapiens
ctgtccctgtgctag

SEQ ID NO: 1647843 - DNA, 15 bp, Homo sapiens
cctgtccctgtgcta

SEQ ID NO: 1647844 - DNA, 15 bp, Homo sapiens
gcctgtccctgtgct

SEQ ID NO: 1647845 - DNA, 15 bp, Homo sapiens
tgcctgtccctgtgc

SEQ ID NO: 1647846 - DNA, 15 bp, Homo sapiens
gtgcctgtccctgtg

SEQ ID NO: 1647847 - DNA, 15 bp, Homo sapiens
tgtgcctgtccctgt

SEQ ID NO: 1647848 - DNA, 15 bp, Homo sapiens
ctgtgcctgtccctg

SEQ ID NO: 1647849 - DNA, 15 bp, Homo sapiens
tctgtgcctgtccct

SEQ ID NO: 1647850 - DNA, 15 bp, Homo sapiens
ttctgtgcctgtccc

SEQ ID NO: 1647851 - DNA, 15 bp, Homo sapiens
tttctgtgcctgtcc

SEQ ID NO: 1647852 - DNA, 15 bp, Homo sapiens
ttttctgtgcctgtc

SEQ ID NO: 1647853 - DNA, 15 bp, Homo sapiens
cttttctgtgcctgt

SEQ ID NO: 1647854 - DNA, 15 bp, Homo sapiens
ccttttctgtgcctg

SEQ ID NO: 1647855 - DNA, 15 bp, Homo sapiens
tccttttctgtgcct

SEQ ID NO: 1647856 - DNA, 15 bp, Homo sapiens
ttccttttctgtgcc

SEQ ID NO: 1647857 - DNA, 15 bp, Homo sapiens
tttccttttctgtgc

SEQ ID NO: 1647858 - DNA, 15 bp, Homo sapiens
gtttccttttctgtg

SEQ ID NO: 1647859 - DNA, 15 bp, Homo sapiens
agtttccttttctgt

SEQ ID NO: 1647860 - DNA, 15 bp, Homo sapiens
tagtttccttttctg

SEQ ID NO: 1647861 - DNA, 15 bp, Homo sapiens
ctagtttccttttct

SEQ ID NO: 1647862 - DNA, 15 bp, Homo sapiens
actagtttccttttc

SEQ ID NO: 1647863 - DNA, 15 bp, Homo sapiens
tactagtttcctttt

SEQ ID NO: 1647864 - DNA, 15 bp, Homo sapiens
ctactagtttccttt

SEQ ID NO: 1647865 - DNA, 15 bp, Homo sapiens
actactagtttcctt

SEQ ID NO: 1647866 - DNA, 15 bp, Homo sapiens
tactactagtttcct

SEQ ID NO: 1647867 - DNA, 15 bp, Homo sapiens
atactactagtttcc

SEQ ID NO: 1647868 - DNA, 15 bp, Homo sapiens
aatactactagtttc

SEQ ID NO: 1647869 - DNA, 15 bp, Homo sapiens
gaatactactagttt

SEQ ID NO: 1647870 - DNA, 15 bp, Homo sapiens
tgaatactactagtt

SEQ ID NO: 1647871 - DNA, 15 bp, Homo sapiens
ctgaatactactagt

SEQ ID NO: 1647872 - DNA, 15 bp, Homo sapiens
tctgaatactactag

SEQ ID NO: 1647873 - DNA, 15 bp, Homo sapiens
ttctgaatactacta

SEQ ID NO: 1647874 - DNA, 15 bp, Homo sapiens
tttctgaatactact

SEQ ID NO: 1647875 - DNA, 15 bp, Homo sapiens
atttctgaatactac

SEQ ID NO: 1647876 - DNA, 15 bp, Homo sapiens
aatttctgaatacta

SEQ ID NO: 1647877 - DNA, 15 bp, Homo sapiens
aaatttctgaatact

SEQ ID NO: 1647878 - DNA, 15 bp, Homo sapiens
aaaatttctgaatac

SEQ ID NO: 1647879 - DNA, 15 bp, Homo sapiens
gaaaatttctgaata

SEQ ID NO: 1647880 - DNA, 15 bp, Homo sapiens
agaaaatttctgaat

SEQ ID NO: 1647881 - DNA, 15 bp, Homo sapiens
gagaaaatttctgaa

SEQ ID NO: 1647882 - DNA, 15 bp, Homo sapiens
agagaaaatttctga

SEQ ID NO: 1647883 - DNA, 15 bp, Homo sapiens
cagagaaaatttctg

SEQ ID NO: 1647884 - DNA, 15 bp, Homo sapiens
tcagagaaaatttct

SEQ ID NO: 1647885 - DNA, 15 bp, Homo sapiens
ttcagagaaaatttc

SEQ ID NO: 1647886 - DNA, 15 bp, Homo sapiens
attcagagaaaattt

SEQ ID NO: 1647887 - DNA, 15 bp, Homo sapiens
tattcagagaaaatt

SEQ ID NO: 1647888 - DNA, 15 bp, Homo sapiens
ttattcagagaaaat

SEQ ID NO: 1647889 - DNA, 15 bp, Homo sapiens
gttattcagagaaaa

SEQ ID NO: 1647890 - DNA, 15 bp, Homo sapiens
tgttattcagagaaa

SEQ ID NO: 1647891 - DNA, 15 bp, Homo sapiens
ttgttattcagagaa

SEQ ID NO: 1647892 - DNA, 15 bp, Homo sapiens
tttgttattcagaga

SEQ ID NO: 1647893 - DNA, 15 bp, Homo sapiens
atttgttattcagag

SEQ ID NO: 1647894 - DNA, 15 bp, Homo sapiens
tatttgttattcaga

SEQ ID NO: 1647895 - DNA, 15 bp, Homo sapiens
ttatttgttattcag

SEQ ID NO: 1647896 - DNA, 15 bp, Homo sapiens
attatttgttattca

SEQ ID NO: 1647897 - DNA, 15 bp, Homo sapiens
tattatttgttattc

SEQ ID NO: 1647898 - DNA, 15 bp, Homo sapiens
gtattatttgttatt

SEQ ID NO: 1647899 - DNA, 15 bp, Homo sapiens
tgtattatttgttat

SEQ ID NO: 1647900 - DNA, 15 bp, Homo sapiens
atgtattatttgtta

SEQ ID NO: 1647901 - DNA, 15 bp, Homo sapiens
gatgtattatttgtt

SEQ ID NO: 1647902 - DNA, 15 bp, Homo sapiens
tgatgtattatttgt

SEQ ID NO: 1647903 - DNA, 15 bp, Homo sapiens
ctgatgtattatttg

SEQ ID NO: 1647904 - DNA, 15 bp, Homo sapiens
cctgatgtattattt

SEQ ID NO: 1647905 - DNA, 15 bp, Homo sapiens
ccctgatgtattatt

SEQ ID NO: 1647906 - DNA, 15 bp, Homo sapiens
cccctgatgtattat

SEQ ID NO: 1647907 - DNA, 15 bp, Homo sapiens
ccccctgatgtatta

SEQ ID NO: 1647908 - DNA, 15 bp, Homo sapiens
accccctgatgtatt

SEQ ID NO: 1647909 - DNA, 15 bp, Homo sapiens
caccccctgatgtat

SEQ ID NO: 1647910 - DNA, 15 bp, Homo sapiens
ccaccccctgatgta

SEQ ID NO: 1647911 - DNA, 15 bp, Homo sapiens
accaccccctgatgt

SEQ ID NO: 1647912 - DNA, 15 bp, Homo sapiens
taccaccccctgatg

SEQ ID NO: 1647913 - DNA, 15 bp, Homo sapiens
ttaccaccccctgat

SEQ ID NO: 1647914 - DNA, 15 bp, Homo sapiens
cttaccaccccctga

SEQ ID NO: 1647915 - DNA, 15 bp, Homo sapiens
gcttaccaccccctg

SEQ ID NO: 1647916 - DNA, 15 bp, Homo sapiens
agcttaccaccccct

SEQ ID NO: 1647917 - DNA, 15 bp, Homo sapiens
tagcttaccaccccc

SEQ ID NO: 1647918 - DNA, 15 bp, Homo sapiens
atagcttaccacccc

SEQ ID NO: 1647919 - DNA, 15 bp, Homo sapiens
catagcttaccaccc

SEQ ID NO: 1647920 - DNA, 15 bp, Homo sapiens
tcatagcttaccacc

SEQ ID NO: 1647921 - DNA, 15 bp, Homo sapiens
ttcatagcttaccac

SEQ ID NO: 1647922 - DNA, 15 bp, Homo sapiens
gttcatagcttacca

SEQ ID NO: 1647923 - DNA, 15 bp, Homo sapiens
tgttcatagcttacc

SEQ ID NO: 1647924 - DNA, 15 bp, Homo sapiens
ctgttcatagcttac

SEQ ID NO: 1647925 - DNA, 15 bp, Homo sapiens
gctgttcatagctta

SEQ ID NO: 1647926 - DNA, 15 bp, Homo sapiens
tgctgttcatagctt

SEQ ID NO: 1647927 - DNA, 15 bp, Homo sapiens
ctgctgttcatagct

SEQ ID NO: 1647928 - DNA, 15 bp, Homo sapiens
cctgctgttcatagc

SEQ ID NO: 1647929 - DNA, 15 bp, Homo sapiens
gcctgctgttcatag

SEQ ID NO: 1647930 - DNA, 15 bp, Homo sapiens
ggcctgctgttcata

SEQ ID NO: 1647931 - DNA, 15 bp, Homo sapiens
tggcctgctgttcat

SEQ ID NO: 1647932 - DNA, 15 bp, Homo sapiens
ttggcctgctgttca

SEQ ID NO: 1647933 - DNA, 15 bp, Homo sapiens
tttggcctgctgttc

SEQ ID NO: 1647934 - DNA, 15 bp, Homo sapiens
atttggcctgctgtt

SEQ ID NO: 1647935 - DNA, 15 bp, Homo sapiens
gatttggcctgctgt

SEQ ID NO: 1647936 - DNA, 15 bp, Homo sapiens
ggatttggcctgctg

SEQ ID NO: 1647937 - DNA, 15 bp, Homo sapiens
tggatttggcctgct

SEQ ID NO: 1647938 - DNA, 15 bp, Homo sapiens
ttggatttggcctgc

SEQ ID NO: 1647939 - DNA, 15 bp, Homo sapiens
attggatttggcctg

SEQ ID NO: 1647940 - DNA, 15 bp, Homo sapiens
aattggatttggcct

SEQ ID NO: 1647941 - DNA, 15 bp, Homo sapiens
caattggatttggcc

SEQ ID NO: 1647942 - DNA, 15 bp, Homo sapiens
ccaattggatttggc

SEQ ID NO: 1647943 - DNA, 15 bp, Homo sapiens
gccaattggatttgg

SEQ ID NO: 1647944 - DNA, 15 bp, Homo sapiens
agccaattggatttg

SEQ ID NO: 1647945 - DNA, 15 bp, Homo sapiens
gagccaattggattt

SEQ ID NO: 1647946 - DNA, 15 bp, Homo sapiens
tgagccaattggatt

SEQ ID NO: 1647947 - DNA, 15 bp, Homo sapiens
ttgagccaattggat

SEQ ID NO: 1647948 - DNA, 15 bp, Homo sapiens
tttgagccaattgga

SEQ ID NO: 1647949 - DNA, 15 bp, Homo sapiens
ttttgagccaattgg

SEQ ID NO: 1647950 - DNA, 15 bp, Homo sapiens
tttttgagccaattg

SEQ ID NO: 1647951 - DNA, 15 bp, Homo sapiens
gtttttgagccaatt

SEQ ID NO: 1647952 - DNA, 15 bp, Homo sapiens
agtttttgagccaat

SEQ ID NO: 1647953 - DNA, 15 bp, Homo sapiens
tagtttttgagccaa

SEQ ID NO: 1647954 - DNA, 15 bp, Homo sapiens
ttagtttttgagcca

SEQ ID NO: 1647955 - DNA, 15 bp, Homo sapiens
cttagtttttgagcc

SEQ ID NO: 1647956 - DNA, 15 bp, Homo sapiens
tcttagtttttgagc

SEQ ID NO: 1647957 - DNA, 15 bp, Homo sapiens
ttcttagtttttgag

SEQ ID NO: 1647958 - DNA, 15 bp, Homo sapiens
attcttagtttttga

SEQ ID NO: 1647959 - DNA, 15 bp, Homo sapiens
cattcttagtttttg

SEQ ID NO: 1647960 - DNA, 15 bp, Homo sapiens
tcattcttagttttt

SEQ ID NO: 1647961 - DNA, 15 bp, Homo sapiens
atcattcttagtttt

SEQ ID NO: 1647962 - DNA, 15 bp, Homo sapiens
aatcattcttagttt

SEQ ID NO: 1647963 - DNA, 15 bp, Homo sapiens
aaatcattcttagtt

SEQ ID NO: 1647964 - DNA, 15 bp, Homo sapiens
aaaatcattcttagt

SEQ ID NO: 1647965 - DNA, 15 bp, Homo sapiens
caaaatcattcttag

SEQ ID NO: 1647966 - DNA, 15 bp, Homo sapiens
tcaaaatcattctta

SEQ ID NO: 1647967 - DNA, 15 bp, Homo sapiens
gtcaaaatcattctt

SEQ ID NO: 1647968 - DNA, 15 bp, Homo sapiens
ggtcaaaatcattct

SEQ ID NO: 1647969 - DNA, 15 bp, Homo sapiens
aggtcaaaatcattc

SEQ ID NO: 1647970 - DNA, 15 bp, Homo sapiens
aaggtcaaaatcatt

SEQ ID NO: 1647971 - DNA, 15 bp, Homo sapiens
taaggtcaaaatcat

SEQ ID NO: 1647972 - DNA, 15 bp, Homo sapiens
ataaggtcaaaatca

SEQ ID NO: 1647973 - DNA, 15 bp, Homo sapiens
tataaggtcaaaatc

SEQ ID NO: 1647974 - DNA, 15 bp, Homo sapiens
ttataaggtcaaaat

SEQ ID NO: 1647975 - DNA, 15 bp, Homo sapiens
tttataaggtcaaaa

SEQ ID NO: 1647976 - DNA, 15 bp, Homo sapiens
ttttataaggtcaaa

SEQ ID NO: 1647977 - DNA, 15 bp, Homo sapiens
tttttataaggtcaa

SEQ ID NO: 1647978 - DNA, 15 bp, Homo sapiens
gtttttataaggtca

SEQ ID NO: 1647979 - DNA, 15 bp, Homo sapiens
cgtttttataaggtc

SEQ ID NO: 1647980 - DNA, 15 bp, Homo sapiens
acgtttttataaggt

SEQ ID NO: 1647981 - DNA, 15 bp, Homo sapiens
aacgtttttataagg

SEQ ID NO: 1647982 - DNA, 15 bp, Homo sapiens
caacgtttttataag

SEQ ID NO: 1647983 - DNA, 15 bp, Homo sapiens
acaacgtttttataa

SEQ ID NO: 1647984 - DNA, 15 bp, Homo sapiens
aacaacgtttttata

SEQ ID NO: 1647985 - DNA, 15 bp, Homo sapiens
aaacaacgtttttat

SEQ ID NO: 1647986 - DNA, 15 bp, Homo sapiens
taaacaacgttttta

SEQ ID NO: 1647987 - DNA, 15 bp, Homo sapiens
ttaaacaacgttttt

SEQ ID NO: 1647988 - DNA, 15 bp, Homo sapiens
tttaaacaacgtttt

SEQ ID NO: 1647989 - DNA, 15 bp, Homo sapiens
ttttaaacaacgttt

SEQ ID NO: 1647990 - DNA, 15 bp, Homo sapiens
tttttaaacaacgtt

SEQ ID NO: 1647991 - DNA, 15 bp, Homo sapiens
ttttttaaacaacgt

SEQ ID NO: 1647992 - DNA, 15 bp, Homo sapiens
gttttttaaacaacg

SEQ ID NO: 1647993 - DNA, 15 bp, Homo sapiens
tgttttttaaacaac

SEQ ID NO: 1647994 - DNA, 15 bp, Homo sapiens
ttgttttttaaacaa

SEQ ID NO: 1647995 - DNA, 15 bp, Homo sapiens
tttgttttttaaaca

SEQ ID NO: 1647996 - DNA, 15 bp, Homo sapiens
atttgttttttaaac

SEQ ID NO: 1647997 - DNA, 15 bp, Homo sapiens
tatttgttttttaaa

SEQ ID NO: 1647998 - DNA, 15 bp, Homo sapiens
atatttgttttttaa

SEQ ID NO: 1647999 - DNA, 15 bp, Homo sapiens
catatttgtttttta

SEQ ID NO: 1648000 - DNA, 15 bp, Homo sapiens
acatatttgtttttt

SEQ ID NO: 1648001 - DNA, 15 bp, Homo sapiens
tacatatttgttttt

SEQ ID NO: 1648002 - DNA, 15 bp, Homo sapiens
ttacatatttgtttt

SEQ ID NO: 1648003 - DNA, 15 bp, Homo sapiens
gttacatatttgttt

SEQ ID NO: 1648004 - DNA, 15 bp, Homo sapiens
tgttacatatttgtt

SEQ ID NO: 1648005 - DNA, 15 bp, Homo sapiens
ctgttacatatttgt

SEQ ID NO: 1648006 - DNA, 15 bp, Homo sapiens
tctgttacatatttg

SEQ ID NO: 1648007 - DNA, 15 bp, Homo sapiens
ttctgttacatattt

SEQ ID NO: 1648008 - DNA, 15 bp, Homo sapiens
tttctgttacatatt

SEQ ID NO: 1648009 - DNA, 15 bp, Homo sapiens
gtttctgttacatat

SEQ ID NO: 1648010 - DNA, 15 bp, Homo sapiens
ggtttctgttacata

SEQ ID NO: 1648011 - DNA, 15 bp, Homo sapiens
tggtttctgttacat

SEQ ID NO: 1648012 - DNA, 15 bp, Homo sapiens
atggtttctgttaca

SEQ ID NO: 1648013 - DNA, 15 bp, Homo sapiens
tatggtttctgttac

SEQ ID NO: 1648014 - DNA, 15 bp, Homo sapiens
atatggtttctgtta

SEQ ID NO: 1648015 - DNA, 15 bp, Homo sapiens
catatggtttctgtt

SEQ ID NO: 1648016 - DNA, 15 bp, Homo sapiens
ccatatggtttctgt

SEQ ID NO: 1648017 - DNA, 15 bp, Homo sapiens
gccatatggtttctg

SEQ ID NO: 1648018 - DNA, 15 bp, Homo sapiens
ggccatatggtttct

SEQ ID NO: 1648019 - DNA, 15 bp, Homo sapiens
gggccatatggtttc

SEQ ID NO: 1648020 - DNA, 15 bp, Homo sapiens
tgggccatatggttt

SEQ ID NO: 1648021 - DNA, 15 bp, Homo sapiens
gtgggccatatggtt

SEQ ID NO: 1648022 - DNA, 15 bp, Homo sapiens
tgtgggccatatggt

SEQ ID NO: 1648023 - DNA, 15 bp, Homo sapiens
ctgtgggccatatgg

SEQ ID NO: 1648024 - DNA, 15 bp, Homo sapiens
actgtgggccatatg

SEQ ID NO: 1648025 - DNA, 15 bp, Homo sapiens
gactgtgggccatat

SEQ ID NO: 1648026 - DNA, 15 bp, Homo sapiens
agactgtgggccata

SEQ ID NO: 1648027 - DNA, 15 bp, Homo sapiens
tagactgtgggccat

SEQ ID NO: 1648028 - DNA, 15 bp, Homo sapiens
ttagactgtgggcca

SEQ ID NO: 1648029 - DNA, 15 bp, Homo sapiens
tttagactgtgggcc

SEQ ID NO: 1648030 - DNA, 15 bp, Homo sapiens
ctttagactgtgggc

SEQ ID NO: 1648031 - DNA, 15 bp, Homo sapiens
actttagactgtggg

SEQ ID NO: 1648032 - DNA, 15 bp, Homo sapiens
tactttagactgtgg

SEQ ID NO: 1648033 - DNA, 15 bp, Homo sapiens
atactttagactgtg

SEQ ID NO: 1648034 - DNA, 15 bp, Homo sapiens
aatactttagactgt

SEQ ID NO: 1648035 - DNA, 15 bp, Homo sapiens
aaatactttagactg

SEQ ID NO: 1648036 - DNA, 15 bp, Homo sapiens
taaatactttagact

SEQ ID NO: 1648037 - DNA, 15 bp, Homo sapiens
ataaatactttagac

SEQ ID NO: 1648038 - DNA, 15 bp, Homo sapiens
cataaatactttaga

SEQ ID NO: 1648039 - DNA, 15 bp, Homo sapiens
tcataaatactttag

SEQ ID NO: 1648040 - DNA, 15 bp, Homo sapiens
atcataaatacttta

SEQ ID NO: 1648041 - DNA, 15 bp, Homo sapiens
aatcataaatacttt

SEQ ID NO: 1648042 - DNA, 15 bp, Homo sapiens
aaatcataaatactt

SEQ ID NO: 1648043 - DNA, 15 bp, Homo sapiens
caaatcataaatact

SEQ ID NO: 1648044 - DNA, 15 bp, Homo sapiens
tcaaatcataaatac

SEQ ID NO: 1648045 - DNA, 15 bp, Homo sapiens
gtcaaatcataaata

SEQ ID NO: 1648046 - DNA, 15 bp, Homo sapiens
ggtcaaatcataaat

SEQ ID NO: 1648047 - DNA, 15 bp, Homo sapiens
gggtcaaatcataaa

SEQ ID NO: 1648048 - DNA, 15 bp, Homo sapiens
ggggtcaaatcataa

SEQ ID NO: 1648049 - DNA, 15 bp, Homo sapiens
aggggtcaaatcata

SEQ ID NO: 1648050 - DNA, 15 bp, Homo sapiens
aaggggtcaaatcat

SEQ ID NO: 1648051 - DNA, 15 bp, Homo sapiens
taaggggtcaaatca

SEQ ID NO: 1648052 - DNA, 15 bp, Homo sapiens
gtaaggggtcaaatc

SEQ ID NO: 1648053 - DNA, 15 bp, Homo sapiens
tgtaaggggtcaaat

SEQ ID NO: 1648054 - DNA, 15 bp, Homo sapiens
ctgtaaggggtcaaa

SEQ ID NO: 1648055 - DNA, 15 bp, Homo sapiens
tctgtaaggggtcaa

SEQ ID NO: 1648056 - DNA, 15 bp, Homo sapiens
ttctgtaaggggtca

SEQ ID NO: 1648057 - DNA, 15 bp, Homo sapiens
tttctgtaaggggtc

SEQ ID NO: 1648058 - DNA, 15 bp, Homo sapiens
ttttctgtaaggggt

SEQ ID NO: 1648059 - DNA, 15 bp, Homo sapiens
tttttctgtaagggg

SEQ ID NO: 1648060 - DNA, 15 bp, Homo sapiens
gtttttctgtaaggg

SEQ ID NO: 1648061 - DNA, 15 bp, Homo sapiens
agtttttctgtaagg

SEQ ID NO: 1648062 - DNA, 15 bp, Homo sapiens
cagtttttctgtaag

SEQ ID NO: 1648063 - DNA, 15 bp, Homo sapiens
acagtttttctgtaa

SEQ ID NO: 1648064 - DNA, 15 bp, Homo sapiens
cacagtttttctgta

SEQ ID NO: 1648065 - DNA, 15 bp, Homo sapiens
ccacagtttttctgt

SEQ ID NO: 1648066 - DNA, 15 bp, Homo sapiens
tccacagtttttctg

SEQ ID NO: 1648067 - DNA, 15 bp, Homo sapiens
gtccacagtttttct

SEQ ID NO: 1648068 - DNA, 15 bp, Homo sapiens
ggtccacagtttttc

SEQ ID NO: 1648069 - DNA, 15 bp, Homo sapiens
gggtccacagttttt

SEQ ID NO: 1648070 - DNA, 15 bp, Homo sapiens
ggggtccacagtttt

SEQ ID NO: 1648071 - DNA, 15 bp, Homo sapiens
aggggtccacagttt

SEQ ID NO: 1648072 - DNA, 15 bp, Homo sapiens
caggggtccacagtt

SEQ ID NO: 1648073 - DNA, 15 bp, Homo sapiens
tcaggggtccacagt

SEQ ID NO: 1648074 - DNA, 15 bp, Homo sapiens
atcaggggtccacag

SEQ ID NO: 1648075 - DNA, 15 bp, Homo sapiens
aatcaggggtccaca

SEQ ID NO: 1648076 - DNA, 15 bp, Homo sapiens
aaatcaggggtccac

SEQ ID NO: 1648077 - DNA, 15 bp, Homo sapiens
taaatcaggggtcca

SEQ ID NO: 1648078 - DNA, 15 bp, Homo sapiens
gtaaatcaggggtcc

SEQ ID NO: 1648079 - DNA, 15 bp, Homo sapiens
tgtaaatcaggggtc

SEQ ID NO: 1648080 - DNA, 15 bp, Homo sapiens
atgtaaatcaggggt

SEQ ID NO: 1648081 - DNA, 15 bp, Homo sapiens
tatgtaaatcagggg

SEQ ID NO: 1648082 - DNA, 15 bp, Homo sapiens
ttatgtaaatcaggg

SEQ ID NO: 1648083 - DNA, 15 bp, Homo sapiens
attatgtaaatcagg

SEQ ID NO: 1648084 - DNA, 15 bp, Homo sapiens
cattatgtaaatcag

SEQ ID NO: 1648085 - DNA, 15 bp, Homo sapiens
gcattatgtaaatca

SEQ ID NO: 1648086 - DNA, 15 bp, Homo sapiens
agcattatgtaaatc

SEQ ID NO: 1648087 - DNA, 15 bp, Homo sapiens
aagcattatgtaaat

SEQ ID NO: 1648088 - DNA, 15 bp, Homo sapiens
gaagcattatgtaaa

SEQ ID NO: 1648089 - DNA, 15 bp, Homo sapiens
tgaagcattatgtaa

SEQ ID NO: 1648090 - DNA, 15 bp, Homo sapiens
gtgaagcattatgta

SEQ ID NO: 1648091 - DNA, 15 bp, Homo sapiens
atcacagcttttacc

SEQ ID NO: 1648092 - DNA, 15 bp, Homo sapiens
aatcacagcttttac

SEQ ID NO: 1648093 - DNA, 15 bp, Homo sapiens
aaatcacagctttta

SEQ ID NO: 1648094 - DNA, 15 bp, Homo sapiens
taaatcacagctttt

SEQ ID NO: 1648095 - DNA, 15 bp, Homo sapiens
ttaaatcacagcttt

SEQ ID NO: 1648096 - DNA, 15 bp, Homo sapiens
tttaaatcacagctt

SEQ ID NO: 1648097 - DNA, 15 bp, Homo sapiens
ctttaaatcacagct

SEQ ID NO: 1648098 - DNA, 15 bp, Homo sapiens
gctttaaatcacagc

SEQ ID NO: 1648099 - DNA, 15 bp, Homo sapiens
agctttaaatcacag

SEQ ID NO: 1648100 - DNA, 15 bp, Homo sapiens
cagctttaaatcaca

SEQ ID NO: 1648101 - DNA, 15 bp, Homo sapiens
ccagctttaaatcac

SEQ ID NO: 1648102 - DNA, 15 bp, Homo sapiens
gccagctttaaatca

SEQ ID NO: 1648103 - DNA, 15 bp, Homo sapiens
agccagctttaaatc

SEQ ID NO: 1648104 - DNA, 15 bp, Homo sapiens
gagccagctttaaat

SEQ ID NO: 1648105 - DNA, 15 bp, Homo sapiens
tgagccagctttaaa

SEQ ID NO: 1648106 - DNA, 15 bp, Homo sapiens
ttgagccagctttaa

SEQ ID NO: 1648107 - DNA, 15 bp, Homo sapiens
cttgagccagcttta

SEQ ID NO: 1648108 - DNA, 15 bp, Homo sapiens
tcttgagccagcttt

SEQ ID NO: 1648109 - DNA, 15 bp, Homo sapiens
gtcttgagccagctt

SEQ ID NO: 1648110 - DNA, 15 bp, Homo sapiens
agtcttgagccagct

SEQ ID NO: 1648111 - DNA, 15 bp, Homo sapiens
cagtcttgagccagc

SEQ ID NO: 1648112 - DNA, 15 bp, Homo sapiens
ccagtcttgagccag

SEQ ID NO: 1648113 - DNA, 15 bp, Homo sapiens
gccagtcttgagcca

SEQ ID NO: 1648114 - DNA, 15 bp, Homo sapiens
ggccagtcttgagcc

SEQ ID NO: 1648115 - DNA, 15 bp, Homo sapiens
gggccagtcttgagc

SEQ ID NO: 1648116 - DNA, 15 bp, Homo sapiens
tgggccagtcttgag

SEQ ID NO: 1648117 - DNA, 15 bp, Homo sapiens
ctgggccagtcttga

SEQ ID NO: 1648118 - DNA, 15 bp, Homo sapiens
cctgggccagtcttg

SEQ ID NO: 1648119 - DNA, 15 bp, Homo sapiens
gcctgggccagtctt

SEQ ID NO: 1648120 - DNA, 15 bp, Homo sapiens
tgcctgggccagtct

SEQ ID NO: 1648121 - DNA, 15 bp, Homo sapiens
atgcctgggccagtc

SEQ ID NO: 1648122 - DNA, 15 bp, Homo sapiens
tatgcctgggccagt

SEQ ID NO: 1648123 - DNA, 15 bp, Homo sapiens
ttatgcctgggccag

SEQ ID NO: 1648124 - DNA, 15 bp, Homo sapiens
attatgcctgggcca

SEQ ID NO: 1648125 - DNA, 15 bp, Homo sapiens
tattatgcctgggcc

SEQ ID NO: 1648126 - DNA, 15 bp, Homo sapiens
gtattatgcctgggc

SEQ ID NO: 1648127 - DNA, 15 bp, Homo sapiens
agtattatgcctggg

SEQ ID NO: 1648128 - DNA, 15 bp, Homo sapiens
cagtattatgcctgg

SEQ ID NO: 1648129 - DNA, 15 bp, Homo sapiens
acagtattatgcctg

SEQ ID NO: 1648130 - DNA, 15 bp, Homo sapiens
gacagtattatgcct

SEQ ID NO: 1648131 - DNA, 15 bp, Homo sapiens
tgacagtattatgcc

SEQ ID NO: 1648132 - DNA, 15 bp, Homo sapiens
ttgacagtattatgc

SEQ ID NO: 1648133 - DNA, 15 bp, Homo sapiens
attgacagtattatg

SEQ ID NO: 1648134 - DNA, 15 bp, Homo sapiens
gattgacagtattat

SEQ ID NO: 1648135 - DNA, 15 bp, Homo sapiens
agattgacagtatta

SEQ ID NO: 1648136 - DNA, 15 bp, Homo sapiens
tagattgacagtatt

SEQ ID NO: 1648137 - DNA, 15 bp, Homo sapiens
ttagattgacagtat

SEQ ID NO: 1648138 - DNA, 15 bp, Homo sapiens
tttagattgacagta

SEQ ID NO: 1648139 - DNA, 15 bp, Homo sapiens
ctttagattgacagt

SEQ ID NO: 1648140 - DNA, 15 bp, Homo sapiens
cctttagattgacag

SEQ ID NO: 1648141 - DNA, 15 bp, Homo sapiens
acctttagattgaca

SEQ ID NO: 1648142 - DNA, 15 bp, Homo sapiens
tacctttagattgac

SEQ ID NO: 1648143 - DNA, 15 bp, Homo sapiens
ttacctttagattga

SEQ ID NO: 1648144 - DNA, 15 bp, Homo sapiens
gttacctttagattg

SEQ ID NO: 1648145 - DNA, 15 bp, Homo sapiens
ggttacctttagatt

SEQ ID NO: 1648146 - DNA, 15 bp, Homo sapiens
cggttacctttagat

SEQ ID NO: 1648147 - DNA, 15 bp, Homo sapiens
ccggttacctttaga

SEQ ID NO: 1648148 - DNA, 15 bp, Homo sapiens
gccggttacctttag

SEQ ID NO: 1648149 - DNA, 15 bp, Homo sapiens
tgccggttaccttta

SEQ ID NO: 1648150 - DNA, 15 bp, Homo sapiens
ttgccggttaccttt

SEQ ID NO: 1648151 - DNA, 15 bp, Homo sapiens
gttgccggttacctt

SEQ ID NO: 1648152 - DNA, 15 bp, Homo sapiens
tgttgccggttacct

SEQ ID NO: 1648153 - DNA, 15 bp, Homo sapiens
atgttgccggttacc

SEQ ID NO: 1648154 - DNA, 15 bp, Homo sapiens
gatgttgccggttac

SEQ ID NO: 1648155 - DNA, 15 bp, Homo sapiens
tgatgttgccggtta

SEQ ID NO: 1648156 - DNA, 15 bp, Homo sapiens
ttgatgttgccggtt

SEQ ID NO: 1648157 - DNA, 15 bp, Homo sapiens
tttgatgttgccggt

SEQ ID NO: 1648158 - DNA, 15 bp, Homo sapiens
ttttgatgttgccgg

SEQ ID NO: 1648159 - DNA, 15 bp, Homo sapiens
tttttgatgttgccg

SEQ ID NO: 1648160 - DNA, 15 bp, Homo sapiens
ctttttgatgttgcc

SEQ ID NO: 1648161 - DNA, 15 bp, Homo sapiens
actttttgatgttgc

SEQ ID NO: 1648162 - DNA, 15 bp, Homo sapiens
tactttttgatgttg

SEQ ID NO: 1648163 - DNA, 15 bp, Homo sapiens
gtactttttgatgtt

SEQ ID NO: 1648164 - DNA, 15 bp, Homo sapiens
tgtactttttgatgt

SEQ ID NO: 1648165 - DNA, 15 bp, Homo sapiens
atgtactttttgatg

SEQ ID NO: 1648166 - DNA, 15 bp, Homo sapiens
gatgtactttttgat

SEQ ID NO: 1648167 - DNA, 15 bp, Homo sapiens
agatgtactttttga

SEQ ID NO: 1648168 - DNA, 15 bp, Homo sapiens
gagatgtactttttg

SEQ ID NO: 1648169 - DNA, 15 bp, Homo sapiens
tgagatgtacttttt

SEQ ID NO: 1648170 - DNA, 15 bp, Homo sapiens
ttgagatgtactttt

SEQ ID NO: 1648171 - DNA, 15 bp, Homo sapiens
tttgagatgtacttt

SEQ ID NO: 1648172 - DNA, 15 bp, Homo sapiens
ttttgagatgtactt

SEQ ID NO: 1648173 - DNA, 15 bp, Homo sapiens
cttttgagatgtact

SEQ ID NO: 1648174 - DNA, 15 bp, Homo sapiens
tcttttgagatgtac

SEQ ID NO: 1648175 - DNA, 15 bp, Homo sapiens
ttcttttgagatgta

SEQ ID NO: 1648176 - DNA, 15 bp, Homo sapiens
attcttttgagatgt

SEQ ID NO: 1648177 - DNA, 15 bp, Homo sapiens
gattcttttgagatg

SEQ ID NO: 1648178 - DNA, 15 bp, Homo sapiens
tgattcttttgagat

SEQ ID NO: 1648179 - DNA, 15 bp, Homo sapiens
ctgattcttttgaga

SEQ ID NO: 1648180 - DNA, 15 bp, Homo sapiens
cctgattcttttgag

SEQ ID NO: 1648181 - DNA, 15 bp, Homo sapiens
gcctgattcttttga

SEQ ID NO: 1648182 - DNA, 15 bp, Homo sapiens
agcctgattcttttg

SEQ ID NO: 1648183 - DNA, 15 bp, Homo sapiens
aagcctgattctttt

SEQ ID NO: 1648184 - DNA, 15 bp, Homo sapiens
taagcctgattcttt

SEQ ID NO: 1648185 - DNA, 15 bp, Homo sapiens
ttaagcctgattctt

SEQ ID NO: 1648186 - DNA, 15 bp, Homo sapiens
tttaagcctgattct

SEQ ID NO: 1648187 - DNA, 15 bp, Homo sapiens
ctttaagcctgattc

SEQ ID NO: 1648188 - DNA, 15 bp, Homo sapiens
tctttaagcctgatt

SEQ ID NO: 1648189 - DNA, 15 bp, Homo sapiens
atctttaagcctgat

SEQ ID NO: 1648190 - DNA, 15 bp, Homo sapiens
tatctttaagcctga

SEQ ID NO: 1648191 - DNA, 15 bp, Homo sapiens
ttatctttaagcctg

SEQ ID NO: 1648192 - DNA, 15 bp, Homo sapiens
tttatctttaagcct

SEQ ID NO: 1648193 - DNA, 15 bp, Homo sapiens
gtttatctttaagcc

SEQ ID NO: 1648194 - DNA, 15 bp, Homo sapiens
tgtttatctttaagc

SEQ ID NO: 1648195 - DNA, 15 bp, Homo sapiens
ctgtttatctttaag

SEQ ID NO: 1648196 - DNA, 15 bp, Homo sapiens
cctgtttatctttaa

SEQ ID NO: 1648197 - DNA, 15 bp, Homo sapiens
tcctgtttatcttta

SEQ ID NO: 1648198 - DNA, 15 bp, Homo sapiens
ctcctgtttatcttt

SEQ ID NO: 1648199 - DNA, 15 bp, Homo sapiens
tctcctgtttatctt

SEQ ID NO: 1648200 - DNA, 15 bp, Homo sapiens
ttctcctgtttatct

SEQ ID NO: 1648201 - DNA, 15 bp, Homo sapiens
gttctcctgtttatc

SEQ ID NO: 1648202 - DNA, 15 bp, Homo sapiens
agttctcctgtttat

SEQ ID NO: 1648203 - DNA, 15 bp, Homo sapiens
cagttctcctgttta

SEQ ID NO: 1648204 - DNA, 15 bp, Homo sapiens
ccagttctcctgttt

SEQ ID NO: 1648205 - DNA, 15 bp, Homo sapiens
tccagttctcctgtt

SEQ ID NO: 1648206 - DNA, 15 bp, Homo sapiens
ttccagttctcctgt

SEQ ID NO: 1648207 - DNA, 15 bp, Homo sapiens
tttccagttctcctg

SEQ ID NO: 1648208 - DNA, 15 bp, Homo sapiens
atttccagttctcct

SEQ ID NO: 1648209 - DNA, 15 bp, Homo sapiens
tatttccagttctcc

SEQ ID NO: 1648210 - DNA, 15 bp, Homo sapiens
atatttccagttctc

SEQ ID NO: 1648211 - DNA, 15 bp, Homo sapiens
gatatttccagttct

SEQ ID NO: 1648212 - DNA, 15 bp, Homo sapiens
agatatttccagttc

SEQ ID NO: 1648213 - DNA, 15 bp, Homo sapiens
tagatatttccagtt

SEQ ID NO: 1648214 - DNA, 15 bp, Homo sapiens
ttagatatttccagt

SEQ ID NO: 1648215 - DNA, 15 bp, Homo sapiens
cttagatatttccag

SEQ ID NO: 1648216 - DNA, 15 bp, Homo sapiens
tcttagatatttcca

SEQ ID NO: 1648217 - DNA, 15 bp, Homo sapiens
ctcttagatatttcc

SEQ ID NO: 1648218 - DNA, 15 bp, Homo sapiens
actcttagatatttc

SEQ ID NO: 1648219 - DNA, 15 bp, Homo sapiens
tactcttagatattt

SEQ ID NO: 1648220 - DNA, 15 bp, Homo sapiens
ttactcttagatatt

SEQ ID NO: 1648221 - DNA, 15 bp, Homo sapiens
cttactcttagatat

SEQ ID NO: 1648222 - DNA, 15 bp, Homo sapiens
tcttactcttagata

SEQ ID NO: 1648223 - DNA, 15 bp, Homo sapiens
ttcttactcttagat

SEQ ID NO: 1648224 - DNA, 15 bp, Homo sapiens
cttcttactcttaga

SEQ ID NO: 1648225 - DNA, 15 bp, Homo sapiens
acttcttactcttag

SEQ ID NO: 1648226 - DNA, 15 bp, Homo sapiens
cacttcttactctta

SEQ ID NO: 1648227 - DNA, 15 bp, Homo sapiens
acacttcttactctt

SEQ ID NO: 1648228 - DNA, 15 bp, Homo sapiens
tacacttcttactct

SEQ ID NO: 1648229 - DNA, 15 bp, Homo sapiens
ttacacttcttactc

SEQ ID NO: 1648230 - DNA, 15 bp, Homo sapiens
tttacacttcttact

SEQ ID NO: 1648231 - DNA, 15 bp, Homo sapiens
gtttacacttcttac

SEQ ID NO: 1648232 - DNA, 15 bp, Homo sapiens
tgtttacacttctta

SEQ ID NO: 1648233 - DNA, 15 bp, Homo sapiens
ttgtttacacttctt

SEQ ID NO: 1648234 - DNA, 15 bp, Homo sapiens
attgtttacacttct

SEQ ID NO: 1648235 - DNA, 15 bp, Homo sapiens
tattgtttacacttc

SEQ ID NO: 1648236 - DNA, 15 bp, Homo sapiens
ctattgtttacactt

SEQ ID NO: 1648237 - DNA, 15 bp, Homo sapiens
tctattgtttacact

SEQ ID NO: 1648238 - DNA, 15 bp, Homo sapiens
ttctattgtttacac

SEQ ID NO: 1648239 - DNA, 15 bp, Homo sapiens
tttctattgtttaca

SEQ ID NO: 1648240 - DNA, 15 bp, Homo sapiens
ttttctattgtttac

SEQ ID NO: 1648241 - DNA, 15 bp, Homo sapiens
cttttctattgttta

SEQ ID NO: 1648242 - DNA, 15 bp, Homo sapiens
tcttttctattgttt

SEQ ID NO: 1648243 - DNA, 15 bp, Homo sapiens
ctcttttctattgtt

SEQ ID NO: 1648244 - DNA, 15 bp, Homo sapiens
cctcttttctattgt

SEQ ID NO: 1648245 - DNA, 15 bp, Homo sapiens
acctcttttctattg

SEQ ID NO: 1648246 - DNA, 15 bp, Homo sapiens
tacctcttttctatt

SEQ ID NO: 1648247 - DNA, 15 bp, Homo sapiens
ctacctcttttctat

SEQ ID NO: 1648248 - DNA, 15 bp, Homo sapiens
cctacctcttttcta

SEQ ID NO: 1648249 - DNA, 15 bp, Homo sapiens
ccctacctcttttct

SEQ ID NO: 1648250 - DNA, 15 bp, Homo sapiens
accctacctcttttc

SEQ ID NO: 1648251 - DNA, 15 bp, Homo sapiens
aaccctacctctttt

SEQ ID NO: 1648252 - DNA, 15 bp, Homo sapiens
aaaccctacctcttt

SEQ ID NO: 1648253 - DNA, 15 bp, Homo sapiens
taaaccctacctctt

SEQ ID NO: 1648254 - DNA, 15 bp, Homo sapiens
ctaaaccctacctct

SEQ ID NO: 1648255 - DNA, 15 bp, Homo sapiens
cctaaaccctacctc

SEQ ID NO: 1648256 - DNA, 15 bp, Homo sapiens
ccctaaaccctacct

SEQ ID NO: 1648257 - DNA, 15 bp, Homo sapiens
accctaaaccctacc

SEQ ID NO: 1648258 - DNA, 15 bp, Homo sapiens
aaccctaaaccctac

SEQ ID NO: 1648259 - DNA, 15 bp, Homo sapiens
gaaccctaaacccta

SEQ ID NO: 1648260 - DNA, 15 bp, Homo sapiens
agaaccctaaaccct

SEQ ID NO: 1648261 - DNA, 15 bp, Homo sapiens
gagaaccctaaaccc

SEQ ID NO: 1648262 - DNA, 15 bp, Homo sapiens
tgagaaccctaaacc

SEQ ID NO: 1648263 - DNA, 15 bp, Homo sapiens
atgagaaccctaaac

SEQ ID NO: 1648264 - DNA, 15 bp, Homo sapiens
gatgagaaccctaaa

SEQ ID NO: 1648265 - DNA, 15 bp, Homo sapiens
agatgagaaccctaa

SEQ ID NO: 1648266 - DNA, 15 bp, Homo sapiens
aagatgagaacccta

SEQ ID NO: 1648267 - DNA, 15 bp, Homo sapiens
caagatgagaaccct

SEQ ID NO: 1648268 - DNA, 15 bp, Homo sapiens
ccaagatgagaaccc

SEQ ID NO: 1648269 - DNA, 15 bp, Homo sapiens
cccaagatgagaacc

SEQ ID NO: 1648270 - DNA, 15 bp, Homo sapiens
tcccaagatgagaac

SEQ ID NO: 1648271 - DNA, 15 bp, Homo sapiens
atcccaagatgagaa

SEQ ID NO: 1648272 - DNA, 15 bp, Homo sapiens
aatcccaagatgaga

SEQ ID NO: 1648273 - DNA, 15 bp, Homo sapiens
aaatcccaagatgag

SEQ ID NO: 1648274 - DNA, 15 bp, Homo sapiens
gaaatcccaagatga

SEQ ID NO: 1648275 - DNA, 15 bp, Homo sapiens
ggaaatcccaagatg

SEQ ID NO: 1648276 - DNA, 15 bp, Homo sapiens
gggaaatcccaagat

SEQ ID NO: 1648277 - DNA, 15 bp, Homo sapiens
ggggaaatcccaaga

SEQ ID NO: 1648278 - DNA, 15 bp, Homo sapiens
tggggaaatcccaag

SEQ ID NO: 1648279 - DNA, 15 bp, Homo sapiens
ctggggaaatcccaa

SEQ ID NO: 1648280 - DNA, 15 bp, Homo sapiens
cctggggaaatccca

SEQ ID NO: 1648281 - DNA, 15 bp, Homo sapiens
acctggggaaatccc

SEQ ID NO: 1648282 - DNA, 15 bp, Homo sapiens
gacctggggaaatcc

SEQ ID NO: 1648283 - DNA, 15 bp, Homo sapiens
agacctggggaaatc

SEQ ID NO: 1648284 - DNA, 15 bp, Homo sapiens
aagacctggggaaat

SEQ ID NO: 1648285 - DNA, 15 bp, Homo sapiens
gaagacctggggaaa

SEQ ID NO: 1648286 - DNA, 15 bp, Homo sapiens
tgaagacctggggaa

SEQ ID NO: 1648287 - DNA, 15 bp, Homo sapiens
ttgaagacctgggga

SEQ ID NO: 1648288 - DNA, 15 bp, Homo sapiens
cttgaagacctgggg

SEQ ID NO: 1648289 - DNA, 15 bp, Homo sapiens
gcttgaagacctggg

SEQ ID NO: 1648290 - DNA, 15 bp, Homo sapiens
agcttgaagacctgg

SEQ ID NO: 1648291 - DNA, 15 bp, Homo sapiens
aagcttgaagacctg

SEQ ID NO: 1648292 - DNA, 15 bp, Homo sapiens
gaagcttgaagacct

SEQ ID NO: 1648293 - DNA, 15 bp, Homo sapiens
agaagcttgaagacc

SEQ ID NO: 1648294 - DNA, 15 bp, Homo sapiens
tagaagcttgaagac

SEQ ID NO: 1648295 - DNA, 15 bp, Homo sapiens
atagaagcttgaaga

SEQ ID NO: 1648296 - DNA, 15 bp, Homo sapiens
gatagaagcttgaag

SEQ ID NO: 1648297 - DNA, 15 bp, Homo sapiens
ggatagaagcttgaa

SEQ ID NO: 1648298 - DNA, 15 bp, Homo sapiens
aggatagaagcttga

SEQ ID NO: 1648299 - DNA, 15 bp, Homo sapiens
aaggatagaagcttg

SEQ ID NO: 1648300 - DNA, 15 bp, Homo sapiens
gaaggatagaagctt

SEQ ID NO: 1648301 - DNA, 15 bp, Homo sapiens
ggaaggatagaagct

SEQ ID NO: 1648302 - DNA, 15 bp, Homo sapiens
aggaaggatagaagc

SEQ ID NO: 1648303 - DNA, 15 bp, Homo sapiens
caggaaggatagaag

SEQ ID NO: 1648304 - DNA, 15 bp, Homo sapiens
ccaggaaggatagaa

SEQ ID NO: 1648305 - DNA, 15 bp, Homo sapiens
cccaggaaggataga

SEQ ID NO: 1648306 - DNA, 15 bp, Homo sapiens
acccaggaaggatag

SEQ ID NO: 1648307 - DNA, 15 bp, Homo sapiens
aacccaggaaggata

SEQ ID NO: 1648308 - DNA, 15 bp, Homo sapiens
gaacccaggaaggat

SEQ ID NO: 1648309 - DNA, 15 bp, Homo sapiens
agaacccaggaagga

SEQ ID NO: 1648310 - DNA, 15 bp, Homo sapiens
cagaacccaggaagg

SEQ ID NO: 1648311 - DNA, 15 bp, Homo sapiens
ccagaacccaggaag

SEQ ID NO: 1648312 - DNA, 15 bp, Homo sapiens
cccagaacccaggaa

SEQ ID NO: 1648313 - DNA, 15 bp, Homo sapiens
acccagaacccagga

SEQ ID NO: 1648314 - DNA, 15 bp, Homo sapiens
gacccagaacccagg

SEQ ID NO: 1648315 - DNA, 15 bp, Homo sapiens
tgacccagaacccag

SEQ ID NO: 1648316 - DNA, 15 bp, Homo sapiens
atgacccagaaccca

SEQ ID NO: 1648317 - DNA, 15 bp, Homo sapiens
catgacccagaaccc

SEQ ID NO: 1648318 - DNA, 15 bp, Homo sapiens
ccatgacccagaacc

SEQ ID NO: 1648319 - DNA, 15 bp, Homo sapiens
cccatgacccagaac

SEQ ID NO: 1648320 - DNA, 15 bp, Homo sapiens
gcccatgacccagaa

SEQ ID NO: 1648321 - DNA, 15 bp, Homo sapiens
ggcccatgacccaga

SEQ ID NO: 1648322 - DNA, 15 bp, Homo sapiens
aggcccatgacccag

SEQ ID NO: 1648323 - DNA, 15 bp, Homo sapiens
gaggcccatgaccca

SEQ ID NO: 1648324 - DNA, 15 bp, Homo sapiens
ggaggcccatgaccc

SEQ ID NO: 1648325 - DNA, 15 bp, Homo sapiens
tggaggcccatgacc

SEQ ID NO: 1648326 - DNA, 15 bp, Homo sapiens
ctggaggcccatgac

SEQ ID NO: 1648327 - DNA, 15 bp, Homo sapiens
tctggaggcccatga

SEQ ID NO: 1648328 - DNA, 15 bp, Homo sapiens
atctggaggcccatg

SEQ ID NO: 1648329 - DNA, 15 bp, Homo sapiens
aatctggaggcccat

SEQ ID NO: 1648330 - DNA, 15 bp, Homo sapiens
gaatctggaggccca

SEQ ID NO: 1648331 - DNA, 15 bp, Homo sapiens
ggaatctggaggccc

SEQ ID NO: 1648332 - DNA, 15 bp, Homo sapiens
cggaatctggaggcc

SEQ ID NO: 1648333 - DNA, 15 bp, Homo sapiens
ccggaatctggaggc

SEQ ID NO: 1648334 - DNA, 15 bp, Homo sapiens
gccggaatctggagg

SEQ ID NO: 1648335 - DNA, 15 bp, Homo sapiens
ggccggaatctggag

SEQ ID NO: 1648336 - DNA, 15 bp, Homo sapiens
cggccggaatctgga

SEQ ID NO: 1648337 - DNA, 15 bp, Homo sapiens
acggccggaatctgg

SEQ ID NO: 1648338 - DNA, 15 bp, Homo sapiens
aacggccggaatctg

SEQ ID NO: 1648339 - DNA, 15 bp, Homo sapiens
taacggccggaatct

SEQ ID NO: 1648340 - DNA, 15 bp, Homo sapiens
ctaacggccggaatc

SEQ ID NO: 1648341 - DNA, 15 bp, Homo sapiens
actaacggccggaat

SEQ ID NO: 1648342 - DNA, 15 bp, Homo sapiens
gactaacggccggaa

SEQ ID NO: 1648343 - DNA, 15 bp, Homo sapiens
agactaacggccgga

SEQ ID NO: 1648344 - DNA, 15 bp, Homo sapiens
aagactaacggccgg

SEQ ID NO: 1648345 - DNA, 15 bp, Homo sapiens
caagactaacggccg

SEQ ID NO: 1648346 - DNA, 15 bp, Homo sapiens
tcaagactaacggcc

SEQ ID NO: 1648347 - DNA, 15 bp, Homo sapiens
ctcaagactaacggc

SEQ ID NO: 1648348 - DNA, 15 bp, Homo sapiens
tctcaagactaacgg

SEQ ID NO: 1648349 - DNA, 15 bp, Homo sapiens
atctcaagactaacg

SEQ ID NO: 1648350 - DNA, 15 bp, Homo sapiens
tatctcaagactaac

SEQ ID NO: 1648351 - DNA, 15 bp, Homo sapiens
gtatctcaagactaa

SEQ ID NO: 1648352 - DNA, 15 bp, Homo sapiens
ggtatctcaagacta

SEQ ID NO: 1648353 - DNA, 15 bp, Homo sapiens
aggtatctcaagact

SEQ ID NO: 1648354 - DNA, 15 bp, Homo sapiens
aaggtatctcaagac

SEQ ID NO: 1648355 - DNA, 15 bp, Homo sapiens
aaaggtatctcaaga

SEQ ID NO: 1648356 - DNA, 15 bp, Homo sapiens
aaaaggtatctcaag

SEQ ID NO: 1648357 - DNA, 15 bp, Homo sapiens
aaaaaggtatctcaa

SEQ ID NO: 1648358 - DNA, 15 bp, Homo sapiens
gaaaaaggtatctca

SEQ ID NO: 1648359 - DNA, 15 bp, Homo sapiens
cgaaaaaggtatctc

SEQ ID NO: 1648360 - DNA, 15 bp, Homo sapiens
gcgaaaaaggtatct

SEQ ID NO: 1648361 - DNA, 15 bp, Homo sapiens
agcgaaaaaggtatc

SEQ ID NO: 1648362 - DNA, 15 bp, Homo sapiens
aagcgaaaaaggtat

SEQ ID NO: 1648363 - DNA, 15 bp, Homo sapiens
caagcgaaaaaggta

SEQ ID NO: 1648364 - DNA, 15 bp, Homo sapiens
ccaagcgaaaaaggt

SEQ ID NO: 1648365 - DNA, 15 bp, Homo sapiens
cccaagcgaaaaagg

SEQ ID NO: 1648366 - DNA, 15 bp, Homo sapiens
acccaagcgaaaaag

SEQ ID NO: 1648367 - DNA, 15 bp, Homo sapiens
gacccaagcgaaaaa

SEQ ID NO: 1648368 - DNA, 15 bp, Homo sapiens
ggacccaagcgaaaa

SEQ ID NO: 1648369 - DNA, 15 bp, Homo sapiens
aggacccaagcgaaa

SEQ ID NO: 1648370 - DNA, 15 bp, Homo sapiens
gaggacccaagcgaa

SEQ ID NO: 1648371 - DNA, 15 bp, Homo sapiens
agaggacccaagcga

SEQ ID NO: 1648372 - DNA, 15 bp, Homo sapiens
tagaggacccaagcg

SEQ ID NO: 1648373 - DNA, 15 bp, Homo sapiens
atagaggacccaagc

SEQ ID NO: 1648374 - DNA, 15 bp, Homo sapiens
gatagaggacccaag

SEQ ID NO: 1648375 - DNA, 15 bp, Homo sapiens
ggatagaggacccaa

SEQ ID NO: 1648376 - DNA, 15 bp, Homo sapiens
tggatagaggaccca

SEQ ID NO: 1648377 - DNA, 15 bp, Homo sapiens
atggatagaggaccc

SEQ ID NO: 1648378 - DNA, 15 bp, Homo sapiens
gatggatagaggacc

SEQ ID NO: 1648379 - DNA, 15 bp, Homo sapiens
agatggatagaggac

SEQ ID NO: 1648380 - DNA, 15 bp, Homo sapiens
tagatggatagagga

SEQ ID NO: 1648381 - DNA, 15 bp, Homo sapiens
ctagatggatagagg

SEQ ID NO: 1648382 - DNA, 15 bp, Homo sapiens
cctagatggatagag

SEQ ID NO: 1648383 - DNA, 15 bp, Homo sapiens
acctagatggataga

SEQ ID NO: 1648384 - DNA, 15 bp, Homo sapiens
tacctagatggatag

SEQ ID NO: 1648385 - DNA, 15 bp, Homo sapiens
ctacctagatggata

SEQ ID NO: 1648386 - DNA, 15 bp, Homo sapiens
cctacctagatggat

SEQ ID NO: 1648387 - DNA, 15 bp, Homo sapiens
gcctacctagatgga

SEQ ID NO: 1648388 - DNA, 15 bp, Homo sapiens
agcctacctagatgg

SEQ ID NO: 1648389 - DNA, 15 bp, Homo sapiens
aagcctacctagatg

SEQ ID NO: 1648390 - DNA, 15 bp, Homo sapiens
aaagcctacctagat

SEQ ID NO: 1648391 - DNA, 15 bp, Homo sapiens
caaagcctacctaga

SEQ ID NO: 1648392 - DNA, 15 bp, Homo sapiens
acaaagcctacctag

SEQ ID NO: 1648393 - DNA, 15 bp, Homo sapiens
cacaaagcctaccta

SEQ ID NO: 1648394 - DNA, 15 bp, Homo sapiens
tcacaaagcctacct

SEQ ID NO: 1648395 - DNA, 15 bp, Homo sapiens
gtcacaaagcctacc

SEQ ID NO: 1648396 - DNA, 15 bp, Homo sapiens
tgtcacaaagcctac

SEQ ID NO: 1648397 - DNA, 15 bp, Homo sapiens
ctgtcacaaagccta

SEQ ID NO: 1648398 - DNA, 15 bp, Homo sapiens
cctgtcacaaagcct

SEQ ID NO: 1648399 - DNA, 15 bp, Homo sapiens
ccctgtcacaaagcc

SEQ ID NO: 1648400 - DNA, 15 bp, Homo sapiens
cccctgtcacaaagc

SEQ ID NO: 1648401 - DNA, 15 bp, Homo sapiens
gcccctgtcacaaag

SEQ ID NO: 1648402 - DNA, 15 bp, Homo sapiens
ggcccctgtcacaaa

SEQ ID NO: 1648403 - DNA, 15 bp, Homo sapiens
aggcccctgtcacaa

SEQ ID NO: 1648404 - DNA, 15 bp, Homo sapiens
aaggcccctgtcaca

SEQ ID NO: 1648405 - DNA, 15 bp, Homo sapiens
gaaggcccctgtcac

SEQ ID NO: 1648406 - DNA, 15 bp, Homo sapiens
ggaaggcccctgtca

SEQ ID NO: 1648407 - DNA, 15 bp, Homo sapiens
tggaaggcccctgtc

SEQ ID NO: 1648408 - DNA, 15 bp, Homo sapiens
atggaaggcccctgt

SEQ ID NO: 1648409 - DNA, 15 bp, Homo sapiens
gatggaaggcccctg

SEQ ID NO: 1648410 - DNA, 15 bp, Homo sapiens
ggatggaaggcccct

SEQ ID NO: 1648411 - DNA, 15 bp, Homo sapiens
aggatggaaggcccc

SEQ ID NO: 1648412 - DNA, 15 bp, Homo sapiens
aaggatggaaggccc

SEQ ID NO: 1648413 - DNA, 15 bp, Homo sapiens
caaggatggaaggcc

SEQ ID NO: 1648414 - DNA, 15 bp, Homo sapiens
ccaaggatggaaggc

SEQ ID NO: 1648415 - DNA, 15 bp, Homo sapiens
cccaaggatggaagg

SEQ ID NO: 1648416 - DNA, 15 bp, Homo sapiens
acccaaggatggaag

SEQ ID NO: 1648417 - DNA, 15 bp, Homo sapiens
aacccaaggatggaa

SEQ ID NO: 1648418 - DNA, 15 bp, Homo sapiens
caacccaaggatgga

SEQ ID NO: 1648419 - DNA, 15 bp, Homo sapiens
acaacccaaggatgg

SEQ ID NO: 1648420 - DNA, 15 bp, Homo sapiens
tacaacccaaggatg

SEQ ID NO: 1648421 - DNA, 15 bp, Homo sapiens
ctacaacccaaggat

SEQ ID NO: 1648422 - DNA, 15 bp, Homo sapiens
cctacaacccaagga

SEQ ID NO: 1648423 - DNA, 15 bp, Homo sapiens
acctacaacccaagg

SEQ ID NO: 1648424 - DNA, 15 bp, Homo sapiens
gacctacaacccaag

SEQ ID NO: 1648425 - DNA, 15 bp, Homo sapiens
agacctacaacccaa

SEQ ID NO: 1648426 - DNA, 15 bp, Homo sapiens
aagacctacaaccca

SEQ ID NO: 1648427 - DNA, 15 bp, Homo sapiens
gaagacctacaaccc

SEQ ID NO: 1648428 - DNA, 15 bp, Homo sapiens
ggaagacctacaacc

SEQ ID NO: 1648429 - DNA, 15 bp, Homo sapiens
tggaagacctacaac

SEQ ID NO: 1648430 - DNA, 15 bp, Homo sapiens
ctggaagacctacaa

SEQ ID NO: 1648431 - DNA, 15 bp, Homo sapiens
gctggaagacctaca

SEQ ID NO: 1648432 - DNA, 15 bp, Homo sapiens
agctggaagacctac

SEQ ID NO: 1648433 - DNA, 15 bp, Homo sapiens
tagctggaagaccta

SEQ ID NO: 1648434 - DNA, 15 bp, Homo sapiens
gtagctggaagacct

SEQ ID NO: 1648435 - DNA, 15 bp, Homo sapiens
tgtagctggaagacc

SEQ ID NO: 1648436 - DNA, 15 bp, Homo sapiens
ttgtagctggaagac

SEQ ID NO: 1648437 - DNA, 15 bp, Homo sapiens
gttgtagctggaaga

SEQ ID NO: 1648438 - DNA, 15 bp, Homo sapiens
ggttgtagctggaag

SEQ ID NO: 1648439 - DNA, 15 bp, Homo sapiens
gggttgtagctggaa

SEQ ID NO: 1648440 - DNA, 15 bp, Homo sapiens
agggttgtagctgga

SEQ ID NO: 1648441 - DNA, 15 bp, Homo sapiens
cagggttgtagctgg

SEQ ID NO: 1648442 - DNA, 15 bp, Homo sapiens
ccagggttgtagctg

SEQ ID NO: 1648443 - DNA, 15 bp, Homo sapiens
cccagggttgtagct

SEQ ID NO: 1648444 - DNA, 15 bp, Homo sapiens
gcccagggttgtagc

SEQ ID NO: 1648445 - DNA, 15 bp, Homo sapiens
agcccagggttgtag

SEQ ID NO: 1648446 - DNA, 15 bp, Homo sapiens
tagcccagggttgta

SEQ ID NO: 1648447 - DNA, 15 bp, Homo sapiens
ttagcccagggttgt

SEQ ID NO: 1648448 - DNA, 15 bp, Homo sapiens
attagcccagggttg

SEQ ID NO: 1648449 - DNA, 15 bp, Homo sapiens
gattagcccagggtt

SEQ ID NO: 1648450 - DNA, 15 bp, Homo sapiens
agattagcccagggt

SEQ ID NO: 1648451 - DNA, 15 bp, Homo sapiens
aagattagcccaggg

SEQ ID NO: 1648452 - DNA, 15 bp, Homo sapiens
taagattagcccagg

SEQ ID NO: 1648453 - DNA, 15 bp, Homo sapiens
ctaagattagcccag

SEQ ID NO: 1648454 - DNA, 15 bp, Homo sapiens
cctaagattagccca

SEQ ID NO: 1648455 - DNA, 15 bp, Homo sapiens
acctaagattagccc

SEQ ID NO: 1648456 - DNA, 15 bp, Homo sapiens
gacctaagattagcc

SEQ ID NO: 1648457 - DNA, 15 bp, Homo sapiens
cgacctaagattagc

SEQ ID NO: 1648458 - DNA, 15 bp, Homo sapiens
acgacctaagattag

SEQ ID NO: 1648459 - DNA, 15 bp, Homo sapiens
aacgacctaagatta

SEQ ID NO: 1648460 - DNA, 15 bp, Homo sapiens
caacgacctaagatt

SEQ ID NO: 1648461 - DNA, 15 bp, Homo sapiens
ccaacgacctaagat

SEQ ID NO: 1648462 - DNA, 15 bp, Homo sapiens
gccaacgacctaaga

SEQ ID NO: 1648463 - DNA, 15 bp, Homo sapiens
ggccaacgacctaag

SEQ ID NO: 1648464 - DNA, 15 bp, Homo sapiens
aggccaacgacctaa

SEQ ID NO: 1648465 - DNA, 15 bp, Homo sapiens
aaggccaacgaccta

SEQ ID NO: 1648466 - DNA, 15 bp, Homo sapiens
caaggccaacgacct

SEQ ID NO: 1648467 - DNA, 15 bp, Homo sapiens
acaaggccaacgacc

SEQ ID NO: 1648468 - DNA, 15 bp, Homo sapiens
cacaaggccaacgac

SEQ ID NO: 1648469 - DNA, 15 bp, Homo sapiens
acacaaggccaacga

SEQ ID NO: 1648470 - DNA, 15 bp, Homo sapiens
gacacaaggccaacg

SEQ ID NO: 1648471 - DNA, 15 bp, Homo sapiens
tgacacaaggccaac

SEQ ID NO: 1648472 - DNA, 15 bp, Homo sapiens
gtgacacaaggccaa

SEQ ID NO: 1648473 - DNA, 15 bp, Homo sapiens
tgtgacacaaggcca

SEQ ID NO: 1648474 - DNA, 15 bp, Homo sapiens
ttgtgacacaaggcc

SEQ ID NO: 1648475 - DNA, 15 bp, Homo sapiens
cttgtgacacaaggc

SEQ ID NO: 1648476 - DNA, 15 bp, Homo sapiens
acttgtgacacaagg

SEQ ID NO: 1648477 - DNA, 15 bp, Homo sapiens
gacttgtgacacaag

SEQ ID NO: 1648478 - DNA, 15 bp, Homo sapiens
agacttgtgacacaa

SEQ ID NO: 1648479 - DNA, 15 bp, Homo sapiens
gagacttgtgacaca

SEQ ID NO: 1648480 - DNA, 15 bp, Homo sapiens
tgagacttgtgacac

SEQ ID NO: 1648481 - DNA, 15 bp, Homo sapiens
ctgagacttgtgaca

SEQ ID NO: 1648482 - DNA, 15 bp, Homo sapiens
actgagacttgtgac

SEQ ID NO: 1648483 - DNA, 15 bp, Homo sapiens
aactgagacttgtga

SEQ ID NO: 1648484 - DNA, 15 bp, Homo sapiens
gaactgagacttgtg

SEQ ID NO: 1648485 - DNA, 15 bp, Homo sapiens
agaactgagacttgt

SEQ ID NO: 1648486 - DNA, 15 bp, Homo sapiens
aagaactgagacttg

SEQ ID NO: 1648487 - DNA, 15 bp, Homo sapiens
taagaactgagactt

SEQ ID NO: 1648488 - DNA, 15 bp, Homo sapiens
ctaagaactgagact

SEQ ID NO: 1648489 - DNA, 15 bp, Homo sapiens
cctaagaactgagac

SEQ ID NO: 1648490 - DNA, 15 bp, Homo sapiens
gcctaagaactgaga

SEQ ID NO: 1648491 - DNA, 15 bp, Homo sapiens
ggcctaagaactgag

SEQ ID NO: 1648492 - DNA, 15 bp, Homo sapiens
aggcctaagaactga

SEQ ID NO: 1648493 - DNA, 15 bp, Homo sapiens
aaggcctaagaactg

SEQ ID NO: 1648494 - DNA, 15 bp, Homo sapiens
gaaggcctaagaact

SEQ ID NO: 1648495 - DNA, 15 bp, Homo sapiens
ggaaggcctaagaac

SEQ ID NO: 1648496 - DNA, 15 bp, Homo sapiens
tggaaggcctaagaa

SEQ ID NO: 1648497 - DNA, 15 bp, Homo sapiens
atggaaggcctaaga

SEQ ID NO: 1648498 - DNA, 15 bp, Homo sapiens
catggaaggcctaag

SEQ ID NO: 1648499 - DNA, 15 bp, Homo sapiens
acatggaaggcctaa

SEQ ID NO: 1648500 - DNA, 15 bp, Homo sapiens
cacatggaaggccta

SEQ ID NO: 1648501 - DNA, 15 bp, Homo sapiens
acacatggaaggcct

SEQ ID NO: 1648502 - DNA, 15 bp, Homo sapiens
gacacatggaaggcc

SEQ ID NO: 1648503 - DNA, 15 bp, Homo sapiens
ggacacatggaaggc

SEQ ID NO: 1648504 - DNA, 15 bp, Homo sapiens
aggacacatggaagg

SEQ ID NO: 1648505 - DNA, 15 bp, Homo sapiens
caggacacatggaag

SEQ ID NO: 1648506 - DNA, 15 bp, Homo sapiens
acaggacacatggaa

SEQ ID NO: 1648507 - DNA, 15 bp, Homo sapiens
gacaggacacatgga

SEQ ID NO: 1648508 - DNA, 15 bp, Homo sapiens
ggacaggacacatgg

SEQ ID NO: 1648509 - DNA, 15 bp, Homo sapiens
gggacaggacacatg

SEQ ID NO: 1648510 - DNA, 15 bp, Homo sapiens
tgggacaggacacat

SEQ ID NO: 1648511 - DNA, 15 bp, Homo sapiens
ctgggacaggacaca

SEQ ID NO: 1648512 - DNA, 15 bp, Homo sapiens
cctgggacaggacac

SEQ ID NO: 1648513 - DNA, 15 bp, Homo sapiens
acctgggacaggaca

SEQ ID NO: 1648514 - DNA, 15 bp, Homo sapiens
gacctgggacaggac

SEQ ID NO: 1648515 - DNA, 15 bp, Homo sapiens
agacctgggacagga

SEQ ID NO: 1648516 - DNA, 15 bp, Homo sapiens
aagacctgggacagg

SEQ ID NO: 1648517 - DNA, 15 bp, Homo sapiens
taagacctgggacag

SEQ ID NO: 1648518 - DNA, 15 bp, Homo sapiens
ttaagacctgggaca

SEQ ID NO: 1648519 - DNA, 15 bp, Homo sapiens
cttaagacctgggac

SEQ ID NO: 1648520 - DNA, 15 bp, Homo sapiens
tcttaagacctggga

SEQ ID NO: 1648521 - DNA, 15 bp, Homo sapiens
gtcttaagacctggg

SEQ ID NO: 1648522 - DNA, 15 bp, Homo sapiens
agtcttaagacctgg

SEQ ID NO: 1648523 - DNA, 15 bp, Homo sapiens
aagtcttaagacctg

SEQ ID NO: 1648524 - DNA, 15 bp, Homo sapiens
gaagtcttaagacct

SEQ ID NO: 1648525 - DNA, 15 bp, Homo sapiens
agaagtcttaagacc

SEQ ID NO: 1648526 - DNA, 15 bp, Homo sapiens
tagaagtcttaagac

SEQ ID NO: 1648527 - DNA, 15 bp, Homo sapiens
ttagaagtcttaaga

SEQ ID NO: 1648528 - DNA, 15 bp, Homo sapiens
gttagaagtcttaag

SEQ ID NO: 1648529 - DNA, 15 bp, Homo sapiens
agttagaagtcttaa

SEQ ID NO: 1648530 - DNA, 15 bp, Homo sapiens
gagttagaagtctta

SEQ ID NO: 1648531 - DNA, 15 bp, Homo sapiens
tgagttagaagtctt

SEQ ID NO: 1648532 - DNA, 15 bp, Homo sapiens
ttgagttagaagtct

SEQ ID NO: 1648533 - DNA, 15 bp, Homo sapiens
cttgagttagaagtc

SEQ ID NO: 1648534 - DNA, 15 bp, Homo sapiens
gcttgagttagaagt

SEQ ID NO: 1648535 - DNA, 15 bp, Homo sapiens
ggcttgagttagaag

SEQ ID NO: 1648536 - DNA, 15 bp, Homo sapiens
aggcttgagttagaa

SEQ ID NO: 1648537 - DNA, 15 bp, Homo sapiens
aaggcttgagttaga

SEQ ID NO: 1648538 - DNA, 15 bp, Homo sapiens
caaggcttgagttag

SEQ ID NO: 1648539 - DNA, 15 bp, Homo sapiens
tcaaggcttgagtta

SEQ ID NO: 1648540 - DNA, 15 bp, Homo sapiens
ctcaaggcttgagtt

SEQ ID NO: 1648541 - DNA, 15 bp, Homo sapiens
tctcaaggcttgagt

SEQ ID NO: 1648542 - DNA, 15 bp, Homo sapiens
gtctcaaggcttgag

SEQ ID NO: 1648543 - DNA, 15 bp, Homo sapiens
agtctcaaggcttga

SEQ ID NO: 1648544 - DNA, 15 bp, Homo sapiens
aagtctcaaggcttg

SEQ ID NO: 1648545 - DNA, 15 bp, Homo sapiens
gaagtctcaaggctt

SEQ ID NO: 1648546 - DNA, 15 bp, Homo sapiens
ggaagtctcaaggct

SEQ ID NO: 1648547 - DNA, 15 bp, Homo sapiens
tggaagtctcaaggc

SEQ ID NO: 1648548 - DNA, 15 bp, Homo sapiens
atggaagtctcaagg

SEQ ID NO: 1648549 - DNA, 15 bp, Homo sapiens
gatggaagtctcaag

SEQ ID NO: 1648550 - DNA, 15 bp, Homo sapiens
ggatggaagtctcaa

SEQ ID NO: 1648551 - DNA, 15 bp, Homo sapiens
tggatggaagtctca

SEQ ID NO: 1648552 - DNA, 15 bp, Homo sapiens
ttggatggaagtctc

SEQ ID NO: 1648553 - DNA, 15 bp, Homo sapiens
gttggatggaagtct

SEQ ID NO: 1648554 - DNA, 15 bp, Homo sapiens
agttggatggaagtc

SEQ ID NO: 1648555 - DNA, 15 bp, Homo sapiens
gagttggatggaagt

SEQ ID NO: 1648556 - DNA, 15 bp, Homo sapiens
tgagttggatggaag

SEQ ID NO: 1648557 - DNA, 15 bp, Homo sapiens
ctgagttggatggaa

SEQ ID NO: 1648558 - DNA, 15 bp, Homo sapiens
cctgagttggatgga

SEQ ID NO: 1648559 - DNA, 15 bp, Homo sapiens
gcctgagttggatgg

SEQ ID NO: 1648560 - DNA, 15 bp, Homo sapiens
ggcctgagttggatg

SEQ ID NO: 1648561 - DNA, 15 bp, Homo sapiens
aggcctgagttggat

SEQ ID NO: 1648562 - DNA, 15 bp, Homo sapiens
aaggcctgagttgga

SEQ ID NO: 1648563 - DNA, 15 bp, Homo sapiens
gaaggcctgagttgg

SEQ ID NO: 1648564 - DNA, 15 bp, Homo sapiens
cgaaggcctgagttg

SEQ ID NO: 1648565 - DNA, 15 bp, Homo sapiens
ccgaaggcctgagtt

SEQ ID NO: 1648566 - DNA, 15 bp, Homo sapiens
accgaaggcctgagt

SEQ ID NO: 1648567 - DNA, 15 bp, Homo sapiens
gaccgaaggcctgag

SEQ ID NO: 1648568 - DNA, 15 bp, Homo sapiens
ggaccgaaggcctga

SEQ ID NO: 1648569 - DNA, 15 bp, Homo sapiens
tggaccgaaggcctg

SEQ ID NO: 1648570 - DNA, 15 bp, Homo sapiens
ttggaccgaaggcct

SEQ ID NO: 1648571 - DNA, 15 bp, Homo sapiens
attggaccgaaggcc

SEQ ID NO: 1648572 - DNA, 15 bp, Homo sapiens
aattggaccgaaggc

SEQ ID NO: 1648573 - DNA, 15 bp, Homo sapiens
gaattggaccgaagg

SEQ ID NO: 1648574 - DNA, 15 bp, Homo sapiens
tgaattggaccgaag

SEQ ID NO: 1648575 - DNA, 15 bp, Homo sapiens
ctgaattggaccgaa

SEQ ID NO: 1648576 - DNA, 15 bp, Homo sapiens
cctgaattggaccga

SEQ ID NO: 1648577 - DNA, 15 bp, Homo sapiens
gcctgaattggaccg

SEQ ID NO: 1648578 - DNA, 15 bp, Homo sapiens
ggcctgaattggacc

SEQ ID NO: 1648579 - DNA, 15 bp, Homo sapiens
tggcctgaattggac

SEQ ID NO: 1648580 - DNA, 15 bp, Homo sapiens
gtggcctgaattgga

SEQ ID NO: 1648581 - DNA, 15 bp, Homo sapiens
ggtggcctgaattgg

SEQ ID NO: 1648582 - DNA, 15 bp, Homo sapiens
gggtggcctgaattg

SEQ ID NO: 1648583 - DNA, 15 bp, Homo sapiens
agggtggcctgaatt

SEQ ID NO: 1648584 - DNA, 15 bp, Homo sapiens
gagggtggcctgaat

SEQ ID NO: 1648585 - DNA, 15 bp, Homo sapiens
agagggtggcctgaa

SEQ ID NO: 1648586 - DNA, 15 bp, Homo sapiens
cagagggtggcctga

SEQ ID NO: 1648587 - DNA, 15 bp, Homo sapiens
acagagggtggcctg

SEQ ID NO: 1648588 - DNA, 15 bp, Homo sapiens
aacagagggtggcct

SEQ ID NO: 1648589 - DNA, 15 bp, Homo sapiens
aaacagagggtggcc

SEQ ID NO: 1648590 - DNA, 15 bp, Homo sapiens
aaaacagagggtggc

SEQ ID NO: 1648591 - DNA, 15 bp, Homo sapiens
gaaaacagagggtgg

SEQ ID NO: 1648592 - DNA, 15 bp, Homo sapiens
agaaaacagagggtg

SEQ ID NO: 1648593 - DNA, 15 bp, Homo sapiens
aagaaaacagagggt

SEQ ID NO: 1648594 - DNA, 15 bp, Homo sapiens
caagaaaacagaggg

SEQ ID NO: 1648595 - DNA, 15 bp, Homo sapiens
ccaagaaaacagagg

SEQ ID NO: 1648596 - DNA, 15 bp, Homo sapiens
gccaagaaaacagag

SEQ ID NO: 1648597 - DNA, 15 bp, Homo sapiens
agccaagaaaacaga

SEQ ID NO: 1648598 - DNA, 15 bp, Homo sapiens
gagccaagaaaacag

SEQ ID NO: 1648599 - DNA, 15 bp, Homo sapiens
agagccaagaaaaca

SEQ ID NO: 1648600 - DNA, 15 bp, Homo sapiens
aagagccaagaaaac

SEQ ID NO: 1648601 - DNA, 15 bp, Homo sapiens
caagagccaagaaaa

SEQ ID NO: 1648602 - DNA, 15 bp, Homo sapiens
tcaagagccaagaaa

SEQ ID NO: 1648603 - DNA, 15 bp, Homo sapiens
ctcaagagccaagaa

SEQ ID NO: 1648604 - DNA, 15 bp, Homo sapiens
cctcaagagccaaga

SEQ ID NO: 1648605 - DNA, 15 bp, Homo sapiens
gcctcaagagccaag

SEQ ID NO: 1648606 - DNA, 15 bp, Homo sapiens
agcctcaagagccaa

SEQ ID NO: 1648607 - DNA, 15 bp, Homo sapiens
aagcctcaagagcca

SEQ ID NO: 1648608 - DNA, 15 bp, Homo sapiens
aaagcctcaagagcc

SEQ ID NO: 1648609 - DNA, 15 bp, Homo sapiens
aaaagcctcaagagc

SEQ ID NO: 1648610 - DNA, 15 bp, Homo sapiens
caaaagcctcaagag

SEQ ID NO: 1648611 - DNA, 15 bp, Homo sapiens
acaaaagcctcaaga

SEQ ID NO: 1648612 - DNA, 15 bp, Homo sapiens
aacaaaagcctcaag

SEQ ID NO: 1648613 - DNA, 15 bp, Homo sapiens
caacaaaagcctcaa

SEQ ID NO: 1648614 - DNA, 15 bp, Homo sapiens
ccaacaaaagcctca

SEQ ID NO: 1648615 - DNA, 15 bp, Homo sapiens
accaacaaaagcctc

SEQ ID NO: 1648616 - DNA, 15 bp, Homo sapiens
aaccaacaaaagcct

SEQ ID NO: 1648617 - DNA, 15 bp, Homo sapiens
aaaccaacaaaagcc

SEQ ID NO: 1648618 - DNA, 15 bp, Homo sapiens
gaaaccaacaaaagc

SEQ ID NO: 1648619 - DNA, 15 bp, Homo sapiens
tgaaaccaacaaaag

SEQ ID NO: 1648620 - DNA, 15 bp, Homo sapiens
ctgaaaccaacaaaa

SEQ ID NO: 1648621 - DNA, 15 bp, Homo sapiens
cctgaaaccaacaaa

SEQ ID NO: 1648622 - DNA, 15 bp, Homo sapiens
gcctgaaaccaacaa

SEQ ID NO: 1648623 - DNA, 15 bp, Homo sapiens
ggcctgaaaccaaca

SEQ ID NO: 1648624 - DNA, 15 bp, Homo sapiens
aggcctgaaaccaac

SEQ ID NO: 1648625 - DNA, 15 bp, Homo sapiens
caggcctgaaaccaa

SEQ ID NO: 1648626 - DNA, 15 bp, Homo sapiens
tcaggcctgaaacca

SEQ ID NO: 1648627 - DNA, 15 bp, Homo sapiens
ctcaggcctgaaacc

SEQ ID NO: 1648628 - DNA, 15 bp, Homo sapiens
cctcaggcctgaaac

SEQ ID NO: 1648629 - DNA, 15 bp, Homo sapiens
gcctcaggcctgaaa

SEQ ID NO: 1648630 - DNA, 15 bp, Homo sapiens
agcctcaggcctgaa

SEQ ID NO: 1648631 - DNA, 15 bp, Homo sapiens
aagcctcaggcctga

SEQ ID NO: 1648632 - DNA, 15 bp, Homo sapiens
gaagcctcaggcctg

SEQ ID NO: 1648633 - DNA, 15 bp, Homo sapiens
agaagcctcaggcct

SEQ ID NO: 1648634 - DNA, 15 bp, Homo sapiens
tagaagcctcaggcc

SEQ ID NO: 1648635 - DNA, 15 bp, Homo sapiens
atagaagcctcaggc

SEQ ID NO: 1648636 - DNA, 15 bp, Homo sapiens
gatagaagcctcagg

SEQ ID NO: 1648637 - DNA, 15 bp, Homo sapiens
agatagaagcctcag

SEQ ID NO: 1648638 - DNA, 15 bp, Homo sapiens
tagatagaagcctca

SEQ ID NO: 1648639 - DNA, 15 bp, Homo sapiens
atagatagaagcctc

SEQ ID NO: 1648640 - DNA, 15 bp, Homo sapiens
gatagatagaagcct

SEQ ID NO: 1648641 - DNA, 15 bp, Homo sapiens
agatagatagaagcc

SEQ ID NO: 1648642 - DNA, 15 bp, Homo sapiens
aagatagatagaagc

SEQ ID NO: 1648643 - DNA, 15 bp, Homo sapiens
caagatagatagaag

SEQ ID NO: 1648644 - DNA, 15 bp, Homo sapiens
ccaagatagatagaa

SEQ ID NO: 1648645 - DNA, 15 bp, Homo sapiens
tccaagatagataga

SEQ ID NO: 1648646 - DNA, 15 bp, Homo sapiens
ttccaagatagatag

SEQ ID NO: 1648647 - DNA, 15 bp, Homo sapiens
gttccaagatagata

SEQ ID NO: 1648648 - DNA, 15 bp, Homo sapiens
tgttccaagatagat

SEQ ID NO: 1648649 - DNA, 15 bp, Homo sapiens
atgttccaagataga

SEQ ID NO: 1648650 - DNA, 15 bp, Homo sapiens
catgttccaagatag

SEQ ID NO: 1648651 - DNA, 15 bp, Homo sapiens
ccatgttccaagata

SEQ ID NO: 1648652 - DNA, 15 bp, Homo sapiens
cccatgttccaagat

SEQ ID NO: 1648653 - DNA, 15 bp, Homo sapiens
gcccatgttccaaga

SEQ ID NO: 1648654 - DNA, 15 bp, Homo sapiens
agcccatgttccaag

SEQ ID NO: 1648655 - DNA, 15 bp, Homo sapiens
aagcccatgttccaa

SEQ ID NO: 1648656 - DNA, 15 bp, Homo sapiens
aaagcccatgttcca

SEQ ID NO: 1648657 - DNA, 15 bp, Homo sapiens
gaaagcccatgttcc

SEQ ID NO: 1648658 - DNA, 15 bp, Homo sapiens
ggaaagcccatgttc

SEQ ID NO: 1648659 - DNA, 15 bp, Homo sapiens
tggaaagcccatgtt

SEQ ID NO: 1648660 - DNA, 15 bp, Homo sapiens
atggaaagcccatgt

SEQ ID NO: 1648661 - DNA, 15 bp, Homo sapiens
gatggaaagcccatg

SEQ ID NO: 1648662 - DNA, 15 bp, Homo sapiens
agatggaaagcccat

SEQ ID NO: 1648663 - DNA, 15 bp, Homo sapiens
aagatggaaagccca

SEQ ID NO: 1648664 - DNA, 15 bp, Homo sapiens
taagatggaaagccc

SEQ ID NO: 1648665 - DNA, 15 bp, Homo sapiens
ctaagatggaaagcc

SEQ ID NO: 1648666 - DNA, 15 bp, Homo sapiens
actaagatggaaagc

SEQ ID NO: 1648667 - DNA, 15 bp, Homo sapiens
gactaagatggaaag

SEQ ID NO: 1648668 - DNA, 15 bp, Homo sapiens
ggactaagatggaaa

SEQ ID NO: 1648669 - DNA, 15 bp, Homo sapiens
aggactaagatggaa

SEQ ID NO: 1648670 - DNA, 15 bp, Homo sapiens
gaggactaagatgga

SEQ ID NO: 1648671 - DNA, 15 bp, Homo sapiens
cgaggactaagatgg

SEQ ID NO: 1648672 - DNA, 15 bp, Homo sapiens
ccgaggactaagatg

SEQ ID NO: 1648673 - DNA, 15 bp, Homo sapiens
cccgaggactaagat

SEQ ID NO: 1648674 - DNA, 15 bp, Homo sapiens
acccgaggactaaga

SEQ ID NO: 1648675 - DNA, 15 bp, Homo sapiens
gacccgaggactaag

SEQ ID NO: 1648676 - DNA, 15 bp, Homo sapiens
agacccgaggactaa

SEQ ID NO: 1648677 - DNA, 15 bp, Homo sapiens
gagacccgaggacta

SEQ ID NO: 1648678 - DNA, 15 bp, Homo sapiens
tgagacccgaggact

SEQ ID NO: 1648679 - DNA, 15 bp, Homo sapiens
ttgagacccgaggac

SEQ ID NO: 1648680 - DNA, 15 bp, Homo sapiens
cttgagacccgagga

SEQ ID NO: 1648681 - DNA, 15 bp, Homo sapiens
acttgagacccgagg

SEQ ID NO: 1648682 - DNA, 15 bp, Homo sapiens
gacttgagacccgag

SEQ ID NO: 1648683 - DNA, 15 bp, Homo sapiens
agacttgagacccga

SEQ ID NO: 1648684 - DNA, 15 bp, Homo sapiens
gagacttgagacccg

SEQ ID NO: 1648685 - DNA, 15 bp, Homo sapiens
tgagacttgagaccc

SEQ ID NO: 1648686 - DNA, 15 bp, Homo sapiens
ttgagacttgagacc

SEQ ID NO: 1648687 - DNA, 15 bp, Homo sapiens
tttgagacttgagac

SEQ ID NO: 1648688 - DNA, 15 bp, Homo sapiens
gtttgagacttgaga

SEQ ID NO: 1648689 - DNA, 15 bp, Homo sapiens
ggtttgagacttgag

SEQ ID NO: 1648690 - DNA, 15 bp, Homo sapiens
tggtttgagacttga

SEQ ID NO: 1648691 - DNA, 15 bp, Homo sapiens
atggtttgagacttg

SEQ ID NO: 1648692 - DNA, 15 bp, Homo sapiens
gatggtttgagactt

SEQ ID NO: 1648693 - DNA, 15 bp, Homo sapiens
agatggtttgagact

SEQ ID NO: 1648694 - DNA, 15 bp, Homo sapiens
cagatggtttgagac

SEQ ID NO: 1648695 - DNA, 15 bp, Homo sapiens
acagatggtttgaga

SEQ ID NO: 1648696 - DNA, 15 bp, Homo sapiens
gacagatggtttgag

SEQ ID NO: 1648697 - DNA, 15 bp, Homo sapiens
agacagatggtttga

SEQ ID NO: 1648698 - DNA, 15 bp, Homo sapiens
aagacagatggtttg

SEQ ID NO: 1648699 - DNA, 15 bp, Homo sapiens
taagacagatggttt

SEQ ID NO: 1648700 - DNA, 15 bp, Homo sapiens
ataagacagatggtt

SEQ ID NO: 1648701 - DNA, 15 bp, Homo sapiens
tataagacagatggt

SEQ ID NO: 1648702 - DNA, 15 bp, Homo sapiens
gtataagacagatgg

SEQ ID NO: 1648703 - DNA, 15 bp, Homo sapiens
agtataagacagatg

SEQ ID NO: 1648704 - DNA, 15 bp, Homo sapiens
aagtataagacagat

SEQ ID NO: 1648705 - DNA, 15 bp, Homo sapiens
aaagtataagacaga

SEQ ID NO: 1648706 - DNA, 15 bp, Homo sapiens
caaagtataagacag

SEQ ID NO: 1648707 - DNA, 15 bp, Homo sapiens
ccaaagtataagaca

SEQ ID NO: 1648708 - DNA, 15 bp, Homo sapiens
cccaaagtataagac

SEQ ID NO: 1648709 - DNA, 15 bp, Homo sapiens
gcccaaagtataaga

SEQ ID NO: 1648710 - DNA, 15 bp, Homo sapiens
ggcccaaagtataag

SEQ ID NO: 1648711 - DNA, 15 bp, Homo sapiens
aggcccaaagtataa

SEQ ID NO: 1648712 - DNA, 15 bp, Homo sapiens
aaggcccaaagtata

SEQ ID NO: 1648713 - DNA, 15 bp, Homo sapiens
gaaggcccaaagtat

SEQ ID NO: 1648714 - DNA, 15 bp, Homo sapiens
agaaggcccaaagta

SEQ ID NO: 1648715 - DNA, 15 bp, Homo sapiens
tagaaggcccaaagt

SEQ ID NO: 1648716 - DNA, 15 bp, Homo sapiens
atagaaggcccaaag

SEQ ID NO: 1648717 - DNA, 15 bp, Homo sapiens
gatagaaggcccaaa

SEQ ID NO: 1648718 - DNA, 15 bp, Homo sapiens
ggatagaaggcccaa

SEQ ID NO: 1648719 - DNA, 15 bp, Homo sapiens
tggatagaaggccca

SEQ ID NO: 1648720 - DNA, 15 bp, Homo sapiens
atggatagaaggccc

SEQ ID NO: 1648721 - DNA, 15 bp, Homo sapiens
tatggatagaaggcc

SEQ ID NO: 1648722 - DNA, 15 bp, Homo sapiens
atatggatagaaggc

SEQ ID NO: 1648723 - DNA, 15 bp, Homo sapiens
catatggatagaagg

SEQ ID NO: 1648724 - DNA, 15 bp, Homo sapiens
tcatatggatagaag

SEQ ID NO: 1648725 - DNA, 15 bp, Homo sapiens
ctcatatggatagaa

SEQ ID NO: 1648726 - DNA, 15 bp, Homo sapiens
gctcatatggataga

SEQ ID NO: 1648727 - DNA, 15 bp, Homo sapiens
ggctcatatggatag

SEQ ID NO: 1648728 - DNA, 15 bp, Homo sapiens
aggctcatatggata

SEQ ID NO: 1648729 - DNA, 15 bp, Homo sapiens
aaggctcatatggat

SEQ ID NO: 1648730 - DNA, 15 bp, Homo sapiens
gaaggctcatatgga

SEQ ID NO: 1648731 - DNA, 15 bp, Homo sapiens
ggaaggctcatatgg

SEQ ID NO: 1648732 - DNA, 15 bp, Homo sapiens
tggaaggctcatatg

SEQ ID NO: 1648733 - DNA, 15 bp, Homo sapiens
gtggaaggctcatat

SEQ ID NO: 1648734 - DNA, 15 bp, Homo sapiens
ggtggaaggctcata

SEQ ID NO: 1648735 - DNA, 15 bp, Homo sapiens
aggtggaaggctcat

SEQ ID NO: 1648736 - DNA, 15 bp, Homo sapiens
aaggtggaaggctca

SEQ ID NO: 1648737 - DNA, 15 bp, Homo sapiens
gaaggtggaaggctc

SEQ ID NO: 1648738 - DNA, 15 bp, Homo sapiens
agaaggtggaaggct

SEQ ID NO: 1648739 - DNA, 15 bp, Homo sapiens
cagaaggtggaaggc

SEQ ID NO: 1648740 - DNA, 15 bp, Homo sapiens
gcagaaggtggaagg

SEQ ID NO: 1648741 - DNA, 15 bp, Homo sapiens
ggcagaaggtggaag

SEQ ID NO: 1648742 - DNA, 15 bp, Homo sapiens
gggcagaaggtggaa

SEQ ID NO: 1648743 - DNA, 15 bp, Homo sapiens
agggcagaaggtgga

SEQ ID NO: 1648744 - DNA, 15 bp, Homo sapiens
tagggcagaaggtgg

SEQ ID NO: 1648745 - DNA, 15 bp, Homo sapiens
gtagggcagaaggtg

SEQ ID NO: 1648746 - DNA, 15 bp, Homo sapiens
agtagggcagaaggt

SEQ ID NO: 1648747 - DNA, 15 bp, Homo sapiens
aagtagggcagaagg

SEQ ID NO: 1648748 - DNA, 15 bp, Homo sapiens
caagtagggcagaag

SEQ ID NO: 1648749 - DNA, 15 bp, Homo sapiens
tcaagtagggcagaa

SEQ ID NO: 1648750 - DNA, 15 bp, Homo sapiens
ctcaagtagggcaga

SEQ ID NO: 1648751 - DNA, 15 bp, Homo sapiens
actcaagtagggcag

SEQ ID NO: 1648752 - DNA, 15 bp, Homo sapiens
agaactcaagtaggg

SEQ ID NO: 1648753 - DNA, 15 bp, Homo sapiens
cagaactcaagtagg

SEQ ID NO: 1648754 - DNA, 15 bp, Homo sapiens
ccagaactcaagtag

SEQ ID NO: 1648755 - DNA, 15 bp, Homo sapiens
cccagaactcaagta

SEQ ID NO: 1648756 - DNA, 15 bp, Homo sapiens
acccagaactcaagt

SEQ ID NO: 1648757 - DNA, 15 bp, Homo sapiens
aacccagaactcaag

SEQ ID NO: 1648758 - DNA, 15 bp, Homo sapiens
aaacccagaactcaa

SEQ ID NO: 1648759 - DNA, 15 bp, Homo sapiens
aaaacccagaactca

SEQ ID NO: 1648760 - DNA, 15 bp, Homo sapiens
taaaacccagaactc

SEQ ID NO: 1648761 - DNA, 15 bp, Homo sapiens
gtaaaacccagaact

SEQ ID NO: 1648762 - DNA, 15 bp, Homo sapiens
agtaaaacccagaac

SEQ ID NO: 1648763 - DNA, 15 bp, Homo sapiens
cagtaaaacccagaa

SEQ ID NO: 1648764 - DNA, 15 bp, Homo sapiens
gcagtaaaacccaga

SEQ ID NO: 1648765 - DNA, 15 bp, Homo sapiens
tgcagtaaaacccag

SEQ ID NO: 1648766 - DNA, 15 bp, Homo sapiens
ctgcagtaaaaccca

SEQ ID NO: 1648767 - DNA, 15 bp, Homo sapiens
actgcagtaaaaccc

SEQ ID NO: 1648768 - DNA, 15 bp, Homo sapiens
gactgcagtaaaacc

SEQ ID NO: 1648769 - DNA, 15 bp, Homo sapiens
agactgcagtaaaac

SEQ ID NO: 1648770 - DNA, 15 bp, Homo sapiens
tagactgcagtaaaa

SEQ ID NO: 1648771 - DNA, 15 bp, Homo sapiens
ctagactgcagtaaa

SEQ ID NO: 1648772 - DNA, 15 bp, Homo sapiens
cctagactgcagtaa

SEQ ID NO: 1648773 - DNA, 15 bp, Homo sapiens
ccctagactgcagta

SEQ ID NO: 1648774 - DNA, 15 bp, Homo sapiens
gccctagactgcagt

SEQ ID NO: 1648775 - DNA, 15 bp, Homo sapiens
ggccctagactgcag

SEQ ID NO: 1648776 - DNA, 15 bp, Homo sapiens
aggccctagactgca

SEQ ID NO: 1648777 - DNA, 15 bp, Homo sapiens
aaggccctagactgc

SEQ ID NO: 1648778 - DNA, 15 bp, Homo sapiens
caaggccctagactg

SEQ ID NO: 1648779 - DNA, 15 bp, Homo sapiens
aaacaaggccctaga

SEQ ID NO: 1648780 - DNA, 15 bp, Homo sapiens
aaaacaaggccctag

SEQ ID NO: 1648781 - DNA, 15 bp, Homo sapiens
caaaacaaggcccta

SEQ ID NO: 1648782 - DNA, 15 bp, Homo sapiens
ccaaaacaaggccct

SEQ ID NO: 1648783 - DNA, 15 bp, Homo sapiens
accaaaacaaggccc

SEQ ID NO: 1648784 - DNA, 15 bp, Homo sapiens
gaccaaaacaaggcc

SEQ ID NO: 1648785 - DNA, 15 bp, Homo sapiens
agaccaaaacaaggc

SEQ ID NO: 1648786 - DNA, 15 bp, Homo sapiens
aagaccaaaacaagg

SEQ ID NO: 1648787 - DNA, 15 bp, Homo sapiens
caagaccaaaacaag

SEQ ID NO: 1648788 - DNA, 15 bp, Homo sapiens
ccaagaccaaaacaa

SEQ ID NO: 1648789 - DNA, 15 bp, Homo sapiens
tccaagaccaaaaca

SEQ ID NO: 1648790 - DNA, 15 bp, Homo sapiens
atccaagaccaaaac

SEQ ID NO: 1648791 - DNA, 15 bp, Homo sapiens
gatccaagaccaaaa

SEQ ID NO: 1648792 - DNA, 15 bp, Homo sapiens
tgatccaagaccaaa

SEQ ID NO: 1648793 - DNA, 15 bp, Homo sapiens
atgatccaagaccaa

SEQ ID NO: 1648794 - DNA, 15 bp, Homo sapiens
gatgatccaagacca

SEQ ID NO: 1648795 - DNA, 15 bp, Homo sapiens
agatgatccaagacc

SEQ ID NO: 1648796 - DNA, 15 bp, Homo sapiens
gagatgatccaagac

SEQ ID NO: 1648797 - DNA, 15 bp, Homo sapiens
tgagatgatccaaga

SEQ ID NO: 1648798 - DNA, 15 bp, Homo sapiens
gtgagatgatccaag

SEQ ID NO: 1648799 - DNA, 15 bp, Homo sapiens
tgtgagatgatccaa

SEQ ID NO: 1648800 - DNA, 15 bp, Homo sapiens
atgtgagatgatcca

SEQ ID NO: 1648801 - DNA, 15 bp, Homo sapiens
catgtgagatgatcc

SEQ ID NO: 1648802 - DNA, 15 bp, Homo sapiens
ccatgtgagatgatc

SEQ ID NO: 1648803 - DNA, 15 bp, Homo sapiens
gccatgtgagatgat

SEQ ID NO: 1648804 - DNA, 15 bp, Homo sapiens
tgccatgtgagatga

SEQ ID NO: 1648805 - DNA, 15 bp, Homo sapiens
ctgccatgtgagatg

SEQ ID NO: 1648806 - DNA, 15 bp, Homo sapiens
gctgccatgtgagat

SEQ ID NO: 1648807 - DNA, 15 bp, Homo sapiens
ggctgccatgtgaga

SEQ ID NO: 1648808 - DNA, 15 bp, Homo sapiens
aggctgccatgtgag

SEQ ID NO: 1648809 - DNA, 15 bp, Homo sapiens
caggctgccatgtga

SEQ ID NO: 1648810 - DNA, 15 bp, Homo sapiens
ccaggctgccatgtg

SEQ ID NO: 1648811 - DNA, 15 bp, Homo sapiens
gccaggctgccatgt

SEQ ID NO: 1648812 - DNA, 15 bp, Homo sapiens
tgccaggctgccatg

SEQ ID NO: 1648813 - DNA, 15 bp, Homo sapiens
atgccaggctgccat

SEQ ID NO: 1648814 - DNA, 15 bp, Homo sapiens
tatgccaggctgcca

SEQ ID NO: 1648815 - DNA, 15 bp, Homo sapiens
ttatgccaggctgcc

SEQ ID NO: 1648816 - DNA, 15 bp, Homo sapiens
cttatgccaggctgc

SEQ ID NO: 1648817 - DNA, 15 bp, Homo sapiens
ccttatgccaggctg

SEQ ID NO: 1648818 - DNA, 15 bp, Homo sapiens
tccttatgccaggct

SEQ ID NO: 1648819 - DNA, 15 bp, Homo sapiens
ttccttatgccaggc

SEQ ID NO: 1648820 - DNA, 15 bp, Homo sapiens
gttccttatgccagg

SEQ ID NO: 1648821 - DNA, 15 bp, Homo sapiens
ggttccttatgccag

SEQ ID NO: 1648822 - DNA, 15 bp, Homo sapiens
cggttccttatgcca

SEQ ID NO: 1648823 - DNA, 15 bp, Homo sapiens
gcggttccttatgcc

SEQ ID NO: 1648824 - DNA, 15 bp, Homo sapiens
agcggttccttatgc

SEQ ID NO: 1648825 - DNA, 15 bp, Homo sapiens
gagcggttccttatg

SEQ ID NO: 1648826 - DNA, 15 bp, Homo sapiens
ggagcggttccttat

SEQ ID NO: 1648827 - DNA, 15 bp, Homo sapiens
tggagcggttcctta

SEQ ID NO: 1648828 - DNA, 15 bp, Homo sapiens
gtggagcggttcctt

SEQ ID NO: 1648829 - DNA, 15 bp, Homo sapiens
tgtggagcggttcct

SEQ ID NO: 1648830 - DNA, 15 bp, Homo sapiens
ttgtggagcggttcc

SEQ ID NO: 1648831 - DNA, 15 bp, Homo sapiens
attgtggagcggttc

SEQ ID NO: 1648832 - DNA, 15 bp, Homo sapiens
cattgtggagcggtt

SEQ ID NO: 1648833 - DNA, 15 bp, Homo sapiens
gcattgtggagcggt

SEQ ID NO: 1648834 - DNA, 15 bp, Homo sapiens
agcattgtggagcgg

SEQ ID NO: 1648835 - DNA, 15 bp, Homo sapiens
aagcattgtggagcg

SEQ ID NO: 1648836 - DNA, 15 bp, Homo sapiens
caagcattgtggagc

SEQ ID NO: 1648837 - DNA, 15 bp, Homo sapiens
gcaagcattgtggag

SEQ ID NO: 1648838 - DNA, 15 bp, Homo sapiens
agcaagcattgtgga

SEQ ID NO: 1648839 - DNA, 15 bp, Homo sapiens
gagcaagcattgtgg

SEQ ID NO: 1648840 - DNA, 15 bp, Homo sapiens
agagcaagcattgtg

SEQ ID NO: 1648841 - DNA, 15 bp, Homo sapiens
cagagcaagcattgt

SEQ ID NO: 1648842 - DNA, 15 bp, Homo sapiens
tcagagcaagcattg

SEQ ID NO: 1648843 - DNA, 15 bp, Homo sapiens
atcagagcaagcatt

SEQ ID NO: 1648844 - DNA, 15 bp, Homo sapiens
tatcagagcaagcat

SEQ ID NO: 1648845 - DNA, 15 bp, Homo sapiens
ctatcagagcaagca

SEQ ID NO: 1648846 - DNA, 15 bp, Homo sapiens
gctatcagagcaagc

SEQ ID NO: 1648847 - DNA, 15 bp, Homo sapiens
ggctatcagagcaag

SEQ ID NO: 1648848 - DNA, 15 bp, Homo sapiens
cggctatcagagcaa

SEQ ID NO: 1648849 - DNA, 15 bp, Homo sapiens
tcggctatcagagca

SEQ ID NO: 1648850 - DNA, 15 bp, Homo sapiens
gtcggctatcagagc

SEQ ID NO: 1648851 - DNA, 15 bp, Homo sapiens
cgtcggctatcagag

SEQ ID NO: 1648852 - DNA, 15 bp, Homo sapiens
acgtcggctatcaga

SEQ ID NO: 1648853 - DNA, 15 bp, Homo sapiens
aacgtcggctatcag

SEQ ID NO: 1648854 - DNA, 15 bp, Homo sapiens
gaacgtcggctatca

SEQ ID NO: 1648855 - DNA, 15 bp, Homo sapiens
agaacgtcggctatc

SEQ ID NO: 1648856 - DNA, 15 bp, Homo sapiens
cagaacgtcggctat

SEQ ID NO: 1648857 - DNA, 15 bp, Homo sapiens
gcagaacgtcggcta

SEQ ID NO: 1648858 - DNA, 15 bp, Homo sapiens
tgcagaacgtcggct

SEQ ID NO: 1648859 - DNA, 15 bp, Homo sapiens
gtgcagaacgtcggc

SEQ ID NO: 1648860 - DNA, 15 bp, Homo sapiens
ggtgcagaacgtcgg

SEQ ID NO: 1648861 - DNA, 15 bp, Homo sapiens
aggtgcagaacgtcg

SEQ ID NO: 1648862 - DNA, 15 bp, Homo sapiens
taggtgcagaacgtc

SEQ ID NO: 1648863 - DNA, 15 bp, Homo sapiens
ataggtgcagaacgt

SEQ ID NO: 1648864 - DNA, 15 bp, Homo sapiens
gataggtgcagaacg

SEQ ID NO: 1648865 - DNA, 15 bp, Homo sapiens
tgataggtgcagaac

SEQ ID NO: 1648866 - DNA, 15 bp, Homo sapiens
ctgataggtgcagaa

SEQ ID NO: 1648867 - DNA, 15 bp, Homo sapiens
cctgataggtgcaga

SEQ ID NO: 1648868 - DNA, 15 bp, Homo sapiens
gcctgataggtgcag

SEQ ID NO: 1648869 - DNA, 15 bp, Homo sapiens
tgcctgataggtgca

SEQ ID NO: 1648870 - DNA, 15 bp, Homo sapiens
ctgcctgataggtgc

SEQ ID NO: 1648871 - DNA, 15 bp, Homo sapiens
cctgcctgataggtg

SEQ ID NO: 1648872 - DNA, 15 bp, Homo sapiens
ccctgcctgataggt

SEQ ID NO: 1648873 - DNA, 15 bp, Homo sapiens
cccctgcctgatagg

SEQ ID NO: 1648874 - DNA, 15 bp, Homo sapiens
acccctgcctgatag

SEQ ID NO: 1648875 - DNA, 15 bp, Homo sapiens
aacccctgcctgata

SEQ ID NO: 1648876 - DNA, 15 bp, Homo sapiens
taacccctgcctgat

SEQ ID NO: 1648877 - DNA, 15 bp, Homo sapiens
ctaacccctgcctga

SEQ ID NO: 1648878 - DNA, 15 bp, Homo sapiens
cctaacccctgcctg

SEQ ID NO: 1648879 - DNA, 15 bp, Homo sapiens
tcctaacccctgcct

SEQ ID NO: 1648880 - DNA, 15 bp, Homo sapiens
ttcctaacccctgcc

SEQ ID NO: 1648881 - DNA, 15 bp, Homo sapiens
cttcctaacccctgc

SEQ ID NO: 1648882 - DNA, 15 bp, Homo sapiens
gcttcctaacccctg

SEQ ID NO: 1648883 - DNA, 15 bp, Homo sapiens
ggcttcctaacccct

SEQ ID NO: 1648884 - DNA, 15 bp, Homo sapiens
gggcttcctaacccc

SEQ ID NO: 1648885 - DNA, 15 bp, Homo sapiens
ggggcttcctaaccc

SEQ ID NO: 1648886 - DNA, 15 bp, Homo sapiens
aggggcttcctaacc

SEQ ID NO: 1648887 - DNA, 15 bp, Homo sapiens
gaggggcttcctaac

SEQ ID NO: 1648888 - DNA, 15 bp, Homo sapiens
agaggggcttcctaa

SEQ ID NO: 1648889 - DNA, 15 bp, Homo sapiens
cagaggggcttccta

SEQ ID NO: 1648890 - DNA, 15 bp, Homo sapiens
gcagaggggcttcct

SEQ ID NO: 1648891 - DNA, 15 bp, Homo sapiens
ggcagaggggcttcc

SEQ ID NO: 1648892 - DNA, 15 bp, Homo sapiens
tggcagaggggcttc

SEQ ID NO: 1648893 - DNA, 15 bp, Homo sapiens
gtggcagaggggctt

SEQ ID NO: 1648894 - DNA, 15 bp, Homo sapiens
tgtggcagaggggct

SEQ ID NO: 1648895 - DNA, 15 bp, Homo sapiens
gtgtggcagaggggc

SEQ ID NO: 1648896 - DNA, 15 bp, Homo sapiens
tgtgtggcagagggg

SEQ ID NO: 1648897 - DNA, 15 bp, Homo sapiens
atgtgtggcagaggg

SEQ ID NO: 1648898 - DNA, 15 bp, Homo sapiens
catgtgtggcagagg

SEQ ID NO: 1648899 - DNA, 15 bp, Homo sapiens
tcatgtgtggcagag

SEQ ID NO: 1648900 - DNA, 15 bp, Homo sapiens
gtcatgtgtggcaga

SEQ ID NO: 1648901 - DNA, 15 bp, Homo sapiens
tgtcatgtgtggcag

SEQ ID NO: 1648902 - DNA, 15 bp, Homo sapiens
gtgtcatgtgtggca

SEQ ID NO: 1648903 - DNA, 15 bp, Homo sapiens
tgtgtcatgtgtggc

SEQ ID NO: 1648904 - DNA, 15 bp, Homo sapiens
gtgtgtcatgtgtgg

SEQ ID NO: 1648905 - DNA, 15 bp, Homo sapiens
tgtgtgtcatgtgtg

SEQ ID NO: 1648906 - DNA, 15 bp, Homo sapiens
gtgtgtgtcatgtgt

SEQ ID NO: 1648907 - DNA, 15 bp, Homo sapiens
tgtgtgtgtcatgtg

SEQ ID NO: 1648908 - DNA, 15 bp, Homo sapiens
gtgtgtgtgtcatgt

SEQ ID NO: 1648909 - DNA, 15 bp, Homo sapiens
tgtgtgtgtgtcatg

SEQ ID NO: 1648910 - DNA, 15 bp, Homo sapiens
gtgtgtgtgtgtcat

SEQ ID NO: 1648911 - DNA, 15 bp, Homo sapiens
cgtgtgtgtgtgtca

SEQ ID NO: 1648912 - DNA, 15 bp, Homo sapiens
acgtgtgtgtgtgtc

SEQ ID NO: 1648913 - DNA, 15 bp, Homo sapiens
gtacgtgtgtgtgtg

SEQ ID NO: 1648914 - DNA, 15 bp, Homo sapiens
tgtacgtgtgtgtgt

SEQ ID NO: 1648915 - DNA, 15 bp, Homo sapiens
gtgtacgtgtgtgtg

SEQ ID NO: 1648916 - DNA, 15 bp, Homo sapiens
agtgtacgtgtgtgt

SEQ ID NO: 1648917 - DNA, 15 bp, Homo sapiens
aagtgtacgtgtgtg

SEQ ID NO: 1648918 - DNA, 15 bp, Homo sapiens
caagtgtacgtgtgt

SEQ ID NO: 1648919 - DNA, 15 bp, Homo sapiens
gcaagtgtacgtgtg

SEQ ID NO: 1648920 - DNA, 15 bp, Homo sapiens
ggcaagtgtacgtgt

SEQ ID NO: 1648921 - DNA, 15 bp, Homo sapiens
gggcaagtgtacgtg

SEQ ID NO: 1648922 - DNA, 15 bp, Homo sapiens
tgggcaagtgtacgt

SEQ ID NO: 1648923 - DNA, 15 bp, Homo sapiens
gtgggcaagtgtacg

SEQ ID NO: 1648924 - DNA, 15 bp, Homo sapiens
tgtgggcaagtgtac

SEQ ID NO: 1648925 - DNA, 15 bp, Homo sapiens
atgtgggcaagtgta

SEQ ID NO: 1648926 - DNA, 15 bp, Homo sapiens
tatgtgggcaagtgt

SEQ ID NO: 1648927 - DNA, 15 bp, Homo sapiens
atatgtgggcaagtg

SEQ ID NO: 1648928 - DNA, 15 bp, Homo sapiens
catatgtgggcaagt

SEQ ID NO: 1648929 - DNA, 15 bp, Homo sapiens
gcatatgtgggcaag

SEQ ID NO: 1648930 - DNA, 15 bp, Homo sapiens
tgcatatgtgggcaa

SEQ ID NO: 1648931 - DNA, 15 bp, Homo sapiens
ttgcatatgtgggca

SEQ ID NO: 1648932 - DNA, 15 bp, Homo sapiens
tttgcatatgtgggc

SEQ ID NO: 1648933 - DNA, 15 bp, Homo sapiens
gttggtattggtggt

SEQ ID NO: 1648934 - DNA, 15 bp, Homo sapiens
tgttggtattggtgg

SEQ ID NO: 1648935 - DNA, 15 bp, Homo sapiens
gtgttggtattggtg

SEQ ID NO: 1648936 - DNA, 15 bp, Homo sapiens
tgtgttggtattggt

SEQ ID NO: 1648937 - DNA, 15 bp, Homo sapiens
ctgtgttggtattgg

SEQ ID NO: 1648938 - DNA, 15 bp, Homo sapiens
tctgtgttggtattg

SEQ ID NO: 1648939 - DNA, 15 bp, Homo sapiens
atctgtgttggtatt

SEQ ID NO: 1648940 - DNA, 15 bp, Homo sapiens
catctgtgttggtat

SEQ ID NO: 1648941 - DNA, 15 bp, Homo sapiens
gcatctgtgttggta

SEQ ID NO: 1648942 - DNA, 15 bp, Homo sapiens
agcatctgtgttggt

SEQ ID NO: 1648943 - DNA, 15 bp, Homo sapiens
gagcatctgtgttgg

SEQ ID NO: 1648944 - DNA, 15 bp, Homo sapiens
agagcatctgtgttg

SEQ ID NO: 1648945 - DNA, 15 bp, Homo sapiens
aagagcatctgtgtt

SEQ ID NO: 1648946 - DNA, 15 bp, Homo sapiens
gaagagcatctgtgt

SEQ ID NO: 1648947 - DNA, 15 bp, Homo sapiens
agaagagcatctgtg

SEQ ID NO: 1648948 - DNA, 15 bp, Homo sapiens
tagaagagcatctgt

SEQ ID NO: 1648949 - DNA, 15 bp, Homo sapiens
atagaagagcatctg

SEQ ID NO: 1648950 - DNA, 15 bp, Homo sapiens
aatagaagagcatct

SEQ ID NO: 1648951 - DNA, 15 bp, Homo sapiens
aaatagaagagcatc

SEQ ID NO: 1648952 - DNA, 15 bp, Homo sapiens
taaatagaagagcat

SEQ ID NO: 1648953 - DNA, 15 bp, Homo sapiens
ataaatagaagagca

SEQ ID NO: 1648954 - DNA, 15 bp, Homo sapiens
tataaatagaagagc

SEQ ID NO: 1648955 - DNA, 15 bp, Homo sapiens
ttataaatagaagag

SEQ ID NO: 1648956 - DNA, 15 bp, Homo sapiens
tttataaatagaaga

SEQ ID NO: 1648957 - DNA, 15 bp, Homo sapiens
gtttataaatagaag

SEQ ID NO: 1648958 - DNA, 15 bp, Homo sapiens
agtttataaatagaa

SEQ ID NO: 1648959 - DNA, 15 bp, Homo sapiens
aagtttataaataga

SEQ ID NO: 1648960 - DNA, 15 bp, Homo sapiens
aaagtttataaatag

SEQ ID NO: 1648961 - DNA, 15 bp, Homo sapiens
aaaagtttataaata

SEQ ID NO: 1648962 - DNA, 15 bp, Homo sapiens
taaaagtttataaat

SEQ ID NO: 1648963 - DNA, 15 bp, Homo sapiens
gtaaaagtttataaa

SEQ ID NO: 1648964 - DNA, 15 bp, Homo sapiens
ggtaaaagtttataa

SEQ ID NO: 1648965 - DNA, 15 bp, Homo sapiens
aggtaaaagtttata

SEQ ID NO: 1648966 - DNA, 15 bp, Homo sapiens
aaggtaaaagtttat

SEQ ID NO: 1648967 - DNA, 15 bp, Homo sapiens
taaggtaaaagttta

SEQ ID NO: 1648968 - DNA, 15 bp, Homo sapiens
ctaaggtaaaagttt

SEQ ID NO: 1648969 - DNA, 15 bp, Homo sapiens
cctaaggtaaaagtt

SEQ ID NO: 1648970 - DNA, 15 bp, Homo sapiens
ccctaaggtaaaagt

SEQ ID NO: 1648971 - DNA, 15 bp, Homo sapiens
tccctaaggtaaaag

SEQ ID NO: 1648972 - DNA, 15 bp, Homo sapiens
atccctaaggtaaaa

SEQ ID NO: 1648973 - DNA, 15 bp, Homo sapiens
aatccctaaggtaaa

SEQ ID NO: 1648974 - DNA, 15 bp, Homo sapiens
aaatccctaaggtaa

SEQ ID NO: 1648975 - DNA, 15 bp, Homo sapiens
gaaatccctaaggta

SEQ ID NO: 1648976 - DNA, 15 bp, Homo sapiens
agaaatccctaaggt

SEQ ID NO: 1648977 - DNA, 15 bp, Homo sapiens
aagaaatccctaagg

SEQ ID NO: 1648978 - DNA, 15 bp, Homo sapiens
taagaaatccctaag

SEQ ID NO: 1648979 - DNA, 15 bp, Homo sapiens
gtaagaaatccctaa

SEQ ID NO: 1648980 - DNA, 15 bp, Homo sapiens
tgtaagaaatcccta

SEQ ID NO: 1648981 - DNA, 15 bp, Homo sapiens
atgtaagaaatccct

SEQ ID NO: 1648982 - DNA, 15 bp, Homo sapiens
tatgtaagaaatccc

SEQ ID NO: 1648983 - DNA, 15 bp, Homo sapiens
ctatgtaagaaatcc

SEQ ID NO: 1648984 - DNA, 15 bp, Homo sapiens
tctatgtaagaaatc

SEQ ID NO: 1648985 - DNA, 15 bp, Homo sapiens
ttctatgtaagaaat

SEQ ID NO: 1648986 - DNA, 15 bp, Homo sapiens
gttctatgtaagaaa

SEQ ID NO: 1648987 - DNA, 15 bp, Homo sapiens
ggttctatgtaagaa

SEQ ID NO: 1648988 - DNA, 15 bp, Homo sapiens
tggttctatgtaaga

SEQ ID NO: 1648989 - DNA, 15 bp, Homo sapiens
ttggttctatgtaag

SEQ ID NO: 1648990 - DNA, 15 bp, Homo sapiens
tttggttctatgtaa

SEQ ID NO: 1648991 - DNA, 15 bp, Homo sapiens
ctttggttctatgta

SEQ ID NO: 1648992 - DNA, 15 bp, Homo sapiens
gctttggttctatgt

SEQ ID NO: 1648993 - DNA, 15 bp, Homo sapiens
tgctttggttctatg

SEQ ID NO: 1648994 - DNA, 15 bp, Homo sapiens
atgctttggttctat

SEQ ID NO: 1648995 - DNA, 15 bp, Homo sapiens
catgctttggttcta

SEQ ID NO: 1648996 - DNA, 15 bp, Homo sapiens
gcatgctttggttct

SEQ ID NO: 1648997 - DNA, 15 bp, Homo sapiens
ggcatgctttggttc

SEQ ID NO: 1648998 - DNA, 15 bp, Homo sapiens
tggcatgctttggtt

SEQ ID NO: 1648999 - DNA, 15 bp, Homo sapiens
ttggcatgctttggt

SEQ ID NO: 1649000 - DNA, 15 bp, Homo sapiens
gttggcatgctttgg

SEQ ID NO: 1649001 - DNA, 15 bp, Homo sapiens
agttggcatgctttg

SEQ ID NO: 1649002 - DNA, 15 bp, Homo sapiens
gagttggcatgcttt

SEQ ID NO: 1649003 - DNA, 15 bp, Homo sapiens
agagttggcatgctt

SEQ ID NO: 1649004 - DNA, 15 bp, Homo sapiens
cagagttggcatgct

SEQ ID NO: 1649005 - DNA, 15 bp, Homo sapiens
gcagagttggcatgc

SEQ ID NO: 1649006 - DNA, 15 bp, Homo sapiens
ggcagagttggcatg

SEQ ID NO: 1649007 - DNA, 15 bp, Homo sapiens
aggcagagttggcat

SEQ ID NO: 1649008 - DNA, 15 bp, Homo sapiens
caggcagagttggca

SEQ ID NO: 1649009 - DNA, 15 bp, Homo sapiens
gcaggcagagttggc

SEQ ID NO: 1649010 - DNA, 15 bp, Homo sapiens
agcaggcagagttgg

SEQ ID NO: 1649011 - DNA, 15 bp, Homo sapiens
tagcaggcagagttg

SEQ ID NO: 1649012 - DNA, 15 bp, Homo sapiens
gtagcaggcagagtt

SEQ ID NO: 1649013 - DNA, 15 bp, Homo sapiens
ggtagcaggcagagt

SEQ ID NO: 1649014 - DNA, 15 bp, Homo sapiens
aggtagcaggcagag

SEQ ID NO: 1649015 - DNA, 15 bp, Homo sapiens
caggtagcaggcaga

SEQ ID NO: 1649016 - DNA, 15 bp, Homo sapiens
tcaggtagcaggcag

SEQ ID NO: 1649017 - DNA, 15 bp, Homo sapiens
atcaggtagcaggca

SEQ ID NO: 1649018 - DNA, 15 bp, Homo sapiens
tatcaggtagcaggc

SEQ ID NO: 1649019 - DNA, 15 bp, Homo sapiens
ctatcaggtagcagg

SEQ ID NO: 1649020 - DNA, 15 bp, Homo sapiens
actatcaggtagcag

SEQ ID NO: 1649021 - DNA, 15 bp, Homo sapiens
cactatcaggtagca

SEQ ID NO: 1649022 - DNA, 15 bp, Homo sapiens
gcactatcaggtagc

SEQ ID NO: 1649023 - DNA, 15 bp, Homo sapiens
agcactatcaggtag

SEQ ID NO: 1649024 - DNA, 15 bp, Homo sapiens
tagcactatcaggta

SEQ ID NO: 1649025 - DNA, 15 bp, Homo sapiens
ctagcactatcaggt

SEQ ID NO: 1649026 - DNA, 15 bp, Homo sapiens
actagcactatcagg

SEQ ID NO: 1649027 - DNA, 15 bp, Homo sapiens
cactagcactatcag

SEQ ID NO: 1649028 - DNA, 15 bp, Homo sapiens
ccactagcactatca

SEQ ID NO: 1649029 - DNA, 15 bp, Homo sapiens
accactagcactatc

SEQ ID NO: 1649030 - DNA, 15 bp, Homo sapiens
gaccactagcactat

SEQ ID NO: 1649031 - DNA, 15 bp, Homo sapiens
tgaccactagcacta

SEQ ID NO: 1649032 - DNA, 15 bp, Homo sapiens
gtgaccactagcact

SEQ ID NO: 1649033 - DNA, 15 bp, Homo sapiens
agtgaccactagcac

SEQ ID NO: 1649034 - DNA, 15 bp, Homo sapiens
aagtgaccactagca

SEQ ID NO: 1649035 - DNA, 15 bp, Homo sapiens
taagtgaccactagc

SEQ ID NO: 1649036 - DNA, 15 bp, Homo sapiens
ataagtgaccactag

SEQ ID NO: 1649037 - DNA, 15 bp, Homo sapiens
tataagtgaccacta

SEQ ID NO: 1649038 - DNA, 15 bp, Homo sapiens
atataagtgaccact

SEQ ID NO: 1649039 - DNA, 15 bp, Homo sapiens
aatataagtgaccac

SEQ ID NO: 1649040 - DNA, 15 bp, Homo sapiens
caatataagtgacca

SEQ ID NO: 1649041 - DNA, 15 bp, Homo sapiens
acaatataagtgacc

SEQ ID NO: 1649042 - DNA, 15 bp, Homo sapiens
cacaatataagtgac

SEQ ID NO: 1649043 - DNA, 15 bp, Homo sapiens
ccacaatataagtga

SEQ ID NO: 1649044 - DNA, 15 bp, Homo sapiens
cccacaatataagtg

SEQ ID NO: 1649045 - DNA, 15 bp, Homo sapiens
tcccacaatataagt

SEQ ID NO: 1649046 - DNA, 15 bp, Homo sapiens
ttcccacaatataag

SEQ ID NO: 1649047 - DNA, 15 bp, Homo sapiens
tttcccacaatataa

SEQ ID NO: 1649048 - DNA, 15 bp, Homo sapiens
atttcccacaatata

SEQ ID NO: 1649049 - DNA, 15 bp, Homo sapiens
catttcccacaatat

SEQ ID NO: 1649050 - DNA, 15 bp, Homo sapiens
tcatttcccacaata

SEQ ID NO: 1649051 - DNA, 15 bp, Homo sapiens
ttcatttcccacaat

SEQ ID NO: 1649052 - DNA, 15 bp, Homo sapiens
gttcatttcccacaa

SEQ ID NO: 1649053 - DNA, 15 bp, Homo sapiens
agttcatttcccaca

SEQ ID NO: 1649054 - DNA, 15 bp, Homo sapiens
aagttcatttcccac

SEQ ID NO: 1649055 - DNA, 15 bp, Homo sapiens
taagttcatttccca

SEQ ID NO: 1649056 - DNA, 15 bp, Homo sapiens
ataagttcatttccc

SEQ ID NO: 1649057 - DNA, 15 bp, Homo sapiens
cataagttcatttcc

SEQ ID NO: 1649058 - DNA, 15 bp, Homo sapiens
tcataagttcatttc

SEQ ID NO: 1649059 - DNA, 15 bp, Homo sapiens
ctcataagttcattt

SEQ ID NO: 1649060 - DNA, 15 bp, Homo sapiens
actcataagttcatt

SEQ ID NO: 1649061 - DNA, 15 bp, Homo sapiens
gactcataagttcat

SEQ ID NO: 1649062 - DNA, 15 bp, Homo sapiens
agactcataagttca

SEQ ID NO: 1649063 - DNA, 15 bp, Homo sapiens
aagactcataagttc

SEQ ID NO: 1649064 - DNA, 15 bp, Homo sapiens
gaagactcataagtt

SEQ ID NO: 1649065 - DNA, 15 bp, Homo sapiens
agaagactcataagt

SEQ ID NO: 1649066 - DNA, 15 bp, Homo sapiens
aagaagactcataag

SEQ ID NO: 1649067 - DNA, 15 bp, Homo sapiens
caagaagactcataa

SEQ ID NO: 1649068 - DNA, 15 bp, Homo sapiens
ccaagaagactcata

SEQ ID NO: 1649069 - DNA, 15 bp, Homo sapiens
cccaagaagactcat

SEQ ID NO: 1649070 - DNA, 15 bp, Homo sapiens
acccaagaagactca

SEQ ID NO: 1649071 - DNA, 15 bp, Homo sapiens
aacccaagaagactc

SEQ ID NO: 1649072 - DNA, 15 bp, Homo sapiens
taacccaagaagact

SEQ ID NO: 1649073 - DNA, 15 bp, Homo sapiens
gtaacccaagaagac

SEQ ID NO: 1649074 - DNA, 15 bp, Homo sapiens
ggtaacccaagaaga

SEQ ID NO: 1649075 - DNA, 15 bp, Homo sapiens
aggtaacccaagaag

SEQ ID NO: 1649076 - DNA, 15 bp, Homo sapiens
aaggtaacccaagaa

SEQ ID NO: 1649077 - DNA, 15 bp, Homo sapiens
aaaggtaacccaaga

SEQ ID NO: 1649078 - DNA, 15 bp, Homo sapiens
aaaaggtaacccaag

SEQ ID NO: 1649079 - DNA, 15 bp, Homo sapiens
taaaaggtaacccaa

SEQ ID NO: 1649080 - DNA, 15 bp, Homo sapiens
gtaaaaggtaaccca

SEQ ID NO: 1649081 - DNA, 15 bp, Homo sapiens
agtaaaaggtaaccc

SEQ ID NO: 1649082 - DNA, 15 bp, Homo sapiens
aagtaaaaggtaacc

SEQ ID NO: 1649083 - DNA, 15 bp, Homo sapiens
caagtaaaaggtaac

SEQ ID NO: 1649084 - DNA, 15 bp, Homo sapiens
tcaagtaaaaggtaa

SEQ ID NO: 1649085 - DNA, 15 bp, Homo sapiens
gtcaagtaaaaggta

SEQ ID NO: 1649086 - DNA, 15 bp, Homo sapiens
tgtcaagtaaaaggt

SEQ ID NO: 1649087 - DNA, 15 bp, Homo sapiens
atgtcaagtaaaagg

SEQ ID NO: 1649088 - DNA, 15 bp, Homo sapiens
catgtcaagtaaaag

SEQ ID NO: 1649089 - DNA, 15 bp, Homo sapiens
acatgtcaagtaaaa

SEQ ID NO: 1649090 - DNA, 15 bp, Homo sapiens
cacatgtcaagtaaa

SEQ ID NO: 1649091 - DNA, 15 bp, Homo sapiens
gcacatgtcaagtaa

SEQ ID NO: 1649092 - DNA, 15 bp, Homo sapiens
ggcacatgtcaagta

SEQ ID NO: 1649093 - DNA, 15 bp, Homo sapiens
tggcacatgtcaagt

SEQ ID NO: 1649094 - DNA, 15 bp, Homo sapiens
ctggcacatgtcaag

SEQ ID NO: 1649095 - DNA, 15 bp, Homo sapiens
cctggcacatgtcaa

SEQ ID NO: 1649096 - DNA, 15 bp, Homo sapiens
gcctggcacatgtca

SEQ ID NO: 1649097 - DNA, 15 bp, Homo sapiens
tgcctggcacatgtc

SEQ ID NO: 1649098 - DNA, 15 bp, Homo sapiens
gtgcctggcacatgt

SEQ ID NO: 1649099 - DNA, 15 bp, Homo sapiens
gcagtgcctggcaca

SEQ ID NO: 1649100 - DNA, 15 bp, Homo sapiens
tgcagtgcctggcac

SEQ ID NO: 1649101 - DNA, 15 bp, Homo sapiens
ttgcagtgcctggca

SEQ ID NO: 1649102 - DNA, 15 bp, Homo sapiens
attgcagtgcctggc

SEQ ID NO: 1649103 - DNA, 15 bp, Homo sapiens
tattgcagtgcctgg

SEQ ID NO: 1649104 - DNA, 15 bp, Homo sapiens
ctattgcagtgcctg

SEQ ID NO: 1649105 - DNA, 15 bp, Homo sapiens
cctattgcagtgcct

SEQ ID NO: 1649106 - DNA, 15 bp, Homo sapiens
acctattgcagtgcc

SEQ ID NO: 1649107 - DNA, 15 bp, Homo sapiens
cacctattgcagtgc

SEQ ID NO: 1649108 - DNA, 15 bp, Homo sapiens
tcacctattgcagtg

SEQ ID NO: 1649109 - DNA, 15 bp, Homo sapiens
ctcacctattgcagt

SEQ ID NO: 1649110 - DNA, 15 bp, Homo sapiens
gctcacctattgcag

SEQ ID NO: 1649111 - DNA, 15 bp, Homo sapiens
tgctcacctattgca

SEQ ID NO: 1649112 - DNA, 15 bp, Homo sapiens
gtgctcacctattgc

SEQ ID NO: 1649113 - DNA, 15 bp, Homo sapiens
agtgctcacctattg

SEQ ID NO: 1649114 - DNA, 15 bp, Homo sapiens
aagtgctcacctatt

SEQ ID NO: 1649115 - DNA, 15 bp, Homo sapiens
aaagtgctcacctat

SEQ ID NO: 1649116 - DNA, 15 bp, Homo sapiens
taaagtgctcaccta

SEQ ID NO: 1649117 - DNA, 15 bp, Homo sapiens
gtaaagtgctcacct

SEQ ID NO: 1649118 - DNA, 15 bp, Homo sapiens
tgtaaagtgctcacc

SEQ ID NO: 1649119 - DNA, 15 bp, Homo sapiens
atgtaaagtgctcac

SEQ ID NO: 1649120 - DNA, 15 bp, Homo sapiens
tatgtaaagtgctca

SEQ ID NO: 1649121 - DNA, 15 bp, Homo sapiens
gtatgtaaagtgctc

SEQ ID NO: 1649122 - DNA, 15 bp, Homo sapiens
tgtatgtaaagtgct

SEQ ID NO: 1649123 - DNA, 15 bp, Homo sapiens
atgtatgtaaagtgc

SEQ ID NO: 1649124 - DNA, 15 bp, Homo sapiens
catgtatgtaaagtg

SEQ ID NO: 1649125 - DNA, 15 bp, Homo sapiens
tcatgtatgtaaagt

SEQ ID NO: 1649126 - DNA, 15 bp, Homo sapiens
atcatgtatgtaaag

SEQ ID NO: 1649127 - DNA, 15 bp, Homo sapiens
aatcatgtatgtaaa

SEQ ID NO: 1649128 - DNA, 15 bp, Homo sapiens
aaatcatgtatgtaa

SEQ ID NO: 1649129 - DNA, 15 bp, Homo sapiens
gaaatcatgtatgta

SEQ ID NO: 1649130 - DNA, 15 bp, Homo sapiens
tgaaatcatgtatgt

SEQ ID NO: 1649131 - DNA, 15 bp, Homo sapiens
atgaaatcatgtatg

SEQ ID NO: 1649132 - DNA, 15 bp, Homo sapiens
aatgaaatcatgtat

SEQ ID NO: 1649133 - DNA, 15 bp, Homo sapiens
aaatgaaatcatgta

SEQ ID NO: 1649134 - DNA, 15 bp, Homo sapiens
taaatgaaatcatgt

SEQ ID NO: 1649135 - DNA, 15 bp, Homo sapiens
ttaaatgaaatcatg

SEQ ID NO: 1649136 - DNA, 15 bp, Homo sapiens
gttaaatgaaatcat

SEQ ID NO: 1649137 - DNA, 15 bp, Homo sapiens
ggttaaatgaaatca

SEQ ID NO: 1649138 - DNA, 15 bp, Homo sapiens
gggttaaatgaaatc

SEQ ID NO: 1649139 - DNA, 15 bp, Homo sapiens
agggttaaatgaaat

SEQ ID NO: 1649140 - DNA, 15 bp, Homo sapiens
gagggttaaatgaaa

SEQ ID NO: 1649141 - DNA, 15 bp, Homo sapiens
tgagggttaaatgaa

SEQ ID NO: 1649142 - DNA, 15 bp, Homo sapiens
gtgagggttaaatga

SEQ ID NO: 1649143 - DNA, 15 bp, Homo sapiens
tgtgagggttaaatg

SEQ ID NO: 1649144 - DNA, 15 bp, Homo sapiens
ttgtgagggttaaat

SEQ ID NO: 1649145 - DNA, 15 bp, Homo sapiens
tttgtgagggttaaa

SEQ ID NO: 1649146 - DNA, 15 bp, Homo sapiens
gtttgtgagggttaa

SEQ ID NO: 1649147 - DNA, 15 bp, Homo sapiens
tgtttgtgagggtta

SEQ ID NO: 1649148 - DNA, 15 bp, Homo sapiens
ctgtttgtgagggtt

SEQ ID NO: 1649149 - DNA, 15 bp, Homo sapiens
tctgtttgtgagggt

SEQ ID NO: 1649150 - DNA, 15 bp, Homo sapiens
ctctgtttgtgaggg

SEQ ID NO: 1649151 - DNA, 15 bp, Homo sapiens
tctctgtttgtgagg

SEQ ID NO: 1649152 - DNA, 15 bp, Homo sapiens
ttctctgtttgtgag

SEQ ID NO: 1649153 - DNA, 15 bp, Homo sapiens
cttctctgtttgtga

SEQ ID NO: 1649154 - DNA, 15 bp, Homo sapiens
acttctctgtttgtg

SEQ ID NO: 1649155 - DNA, 15 bp, Homo sapiens
gacttctctgtttgt

SEQ ID NO: 1649156 - DNA, 15 bp, Homo sapiens
agacttctctgtttg

SEQ ID NO: 1649157 - DNA, 15 bp, Homo sapiens
tagacttctctgttt

SEQ ID NO: 1649158 - DNA, 15 bp, Homo sapiens
ctagacttctctgtt

SEQ ID NO: 1649159 - DNA, 15 bp, Homo sapiens
tctagacttctctgt

SEQ ID NO: 1649160 - DNA, 15 bp, Homo sapiens
ctctagacttctctg

SEQ ID NO: 1649161 - DNA, 15 bp, Homo sapiens
tctctagacttctct

SEQ ID NO: 1649162 - DNA, 15 bp, Homo sapiens
gtctctagacttctc

SEQ ID NO: 1649163 - DNA, 15 bp, Homo sapiens
agtctctagacttct

SEQ ID NO: 1649164 - DNA, 15 bp, Homo sapiens
aagtctctagacttc

SEQ ID NO: 1649165 - DNA, 15 bp, Homo sapiens
aaagtctctagactt

SEQ ID NO: 1649166 - DNA, 15 bp, Homo sapiens
taaagtctctagact

SEQ ID NO: 1649167 - DNA, 15 bp, Homo sapiens
ttaaagtctctagac

SEQ ID NO: 1649168 - DNA, 15 bp, Homo sapiens
cttaaagtctctaga

SEQ ID NO: 1649169 - DNA, 15 bp, Homo sapiens
acttaaagtctctag

SEQ ID NO: 1649170 - DNA, 15 bp, Homo sapiens
aacttaaagtctcta

SEQ ID NO: 1649171 - DNA, 15 bp, Homo sapiens
caacttaaagtctct

SEQ ID NO: 1649172 - DNA, 15 bp, Homo sapiens
acaacttaaagtctc

SEQ ID NO: 1649173 - DNA, 15 bp, Homo sapiens
gacaacttaaagtct

SEQ ID NO: 1649174 - DNA, 15 bp, Homo sapiens
tgacaacttaaagtc

SEQ ID NO: 1649175 - DNA, 15 bp, Homo sapiens
ttgacaacttaaagt

SEQ ID NO: 1649176 - DNA, 15 bp, Homo sapiens
tttgacaacttaaag

SEQ ID NO: 1649177 - DNA, 15 bp, Homo sapiens
ctttgacaacttaaa

SEQ ID NO: 1649178 - DNA, 15 bp, Homo sapiens
cctttgacaacttaa

SEQ ID NO: 1649179 - DNA, 15 bp, Homo sapiens
acctttgacaactta

SEQ ID NO: 1649180 - DNA, 15 bp, Homo sapiens
gacctttgacaactt

SEQ ID NO: 1649181 - DNA, 15 bp, Homo sapiens
tgacctttgacaact

SEQ ID NO: 1649182 - DNA, 15 bp, Homo sapiens
atgacctttgacaac

SEQ ID NO: 1649183 - DNA, 15 bp, Homo sapiens
tatgacctttgacaa

SEQ ID NO: 1649184 - DNA, 15 bp, Homo sapiens
atatgacctttgaca

SEQ ID NO: 1649185 - DNA, 15 bp, Homo sapiens
tatatgacctttgac

SEQ ID NO: 1649186 - DNA, 15 bp, Homo sapiens
gtatatgacctttga

SEQ ID NO: 1649187 - DNA, 15 bp, Homo sapiens
ggtatatgacctttg

SEQ ID NO: 1649188 - DNA, 15 bp, Homo sapiens
aggtatatgaccttt

SEQ ID NO: 1649189 - DNA, 15 bp, Homo sapiens
taggtatatgacctt

SEQ ID NO: 1649190 - DNA, 15 bp, Homo sapiens
ttaggtatatgacct

SEQ ID NO: 1649191 - DNA, 15 bp, Homo sapiens
attaggtatatgacc

SEQ ID NO: 1649192 - DNA, 15 bp, Homo sapiens
cattaggtatatgac

SEQ ID NO: 1649193 - DNA, 15 bp, Homo sapiens
tcattaggtatatga

SEQ ID NO: 1649194 - DNA, 15 bp, Homo sapiens
ctcattaggtatatg

SEQ ID NO: 1649195 - DNA, 15 bp, Homo sapiens
actcattaggtatat

SEQ ID NO: 1649196 - DNA, 15 bp, Homo sapiens
tactcattaggtata

SEQ ID NO: 1649197 - DNA, 15 bp, Homo sapiens
ctactcattaggtat

SEQ ID NO: 1649198 - DNA, 15 bp, Homo sapiens
gctactcattaggta

SEQ ID NO: 1649199 - DNA, 15 bp, Homo sapiens
tgctactcattaggt

SEQ ID NO: 1649200 - DNA, 15 bp, Homo sapiens
ctgctactcattagg

SEQ ID NO: 1649201 - DNA, 15 bp, Homo sapiens
tctgctactcattag

SEQ ID NO: 1649202 - DNA, 15 bp, Homo sapiens
ctctgctactcatta

SEQ ID NO: 1649203 - DNA, 15 bp, Homo sapiens
cctctgctactcatt

SEQ ID NO: 1649204 - DNA, 15 bp, Homo sapiens
tcctctgctactcat

SEQ ID NO: 1649205 - DNA, 15 bp, Homo sapiens
atcctctgctactca

SEQ ID NO: 1649206 - DNA, 15 bp, Homo sapiens
aatcctctgctactc

SEQ ID NO: 1649207 - DNA, 15 bp, Homo sapiens
aaatcctctgctact

SEQ ID NO: 1649208 - DNA, 15 bp, Homo sapiens
taaatcctctgctac

SEQ ID NO: 1649209 - DNA, 15 bp, Homo sapiens
ttaaatcctctgcta

SEQ ID NO: 1649210 - DNA, 15 bp, Homo sapiens
tttaaatcctctgct

SEQ ID NO: 1649211 - DNA, 15 bp, Homo sapiens
ttttaaatcctctgc

SEQ ID NO: 1649212 - DNA, 15 bp, Homo sapiens
gttttaaatcctctg

SEQ ID NO: 1649213 - DNA, 15 bp, Homo sapiens
tgttttaaatcctct

SEQ ID NO: 1649214 - DNA, 15 bp, Homo sapiens
gtgttttaaatcctc

SEQ ID NO: 1649215 - DNA, 15 bp, Homo sapiens
tgtgttttaaatcct

SEQ ID NO: 1649216 - DNA, 15 bp, Homo sapiens
gtgtgttttaaatcc

SEQ ID NO: 1649217 - DNA, 15 bp, Homo sapiens
tgtgtgttttaaatc

SEQ ID NO: 1649218 - DNA, 15 bp, Homo sapiens
ttgtgtgttttaaat

SEQ ID NO: 1649219 - DNA, 15 bp, Homo sapiens
attgtgtgttttaaa

SEQ ID NO: 1649220 - DNA, 15 bp, Homo sapiens
cattgtgtgttttaa

SEQ ID NO: 1649221 - DNA, 15 bp, Homo sapiens
acattgtgtgtttta

SEQ ID NO: 1649222 - DNA, 15 bp, Homo sapiens
tacattgtgtgtttt

SEQ ID NO: 1649223 - DNA, 15 bp, Homo sapiens
atacattgtgtgttt

SEQ ID NO: 1649224 - DNA, 15 bp, Homo sapiens
catacattgtgtgtt

SEQ ID NO: 1649225 - DNA, 15 bp, Homo sapiens
gcatacattgtgtgt

SEQ ID NO: 1649226 - DNA, 15 bp, Homo sapiens
ggcatacattgtgtg

SEQ ID NO: 1649227 - DNA, 15 bp, Homo sapiens
aggcatacattgtgt

SEQ ID NO: 1649228 - DNA, 15 bp, Homo sapiens
gaggcatacattgtg

SEQ ID NO: 1649229 - DNA, 15 bp, Homo sapiens
agaggcatacattgt

SEQ ID NO: 1649230 - DNA, 15 bp, Homo sapiens
aagaggcatacattg

SEQ ID NO: 1649231 - DNA, 15 bp, Homo sapiens
taagaggcatacatt

SEQ ID NO: 1649232 - DNA, 15 bp, Homo sapiens
ttaagaggcatacat

SEQ ID NO: 1649233 - DNA, 15 bp, Homo sapiens
gttaagaggcataca

SEQ ID NO: 1649234 - DNA, 15 bp, Homo sapiens
tgttaagaggcatac

SEQ ID NO: 1649235 - DNA, 15 bp, Homo sapiens
atgttaagaggcata

SEQ ID NO: 1649236 - DNA, 15 bp, Homo sapiens
gatgttaagaggcat

SEQ ID NO: 1649237 - DNA, 15 bp, Homo sapiens
ggatgttaagaggca

SEQ ID NO: 1649238 - DNA, 15 bp, Homo sapiens
aggatgttaagaggc

SEQ ID NO: 1649239 - DNA, 15 bp, Homo sapiens
caggatgttaagagg

SEQ ID NO: 1649240 - DNA, 15 bp, Homo sapiens
acaggatgttaagag

SEQ ID NO: 1649241 - DNA, 15 bp, Homo sapiens
aacaggatgttaaga

SEQ ID NO: 1649242 - DNA, 15 bp, Homo sapiens
taacaggatgttaag

SEQ ID NO: 1649243 - DNA, 15 bp, Homo sapiens
gtaacaggatgttaa

SEQ ID NO: 1649244 - DNA, 15 bp, Homo sapiens
tgtaacaggatgtta

SEQ ID NO: 1649245 - DNA, 15 bp, Homo sapiens
ttgtaacaggatgtt

SEQ ID NO: 1649246 - DNA, 15 bp, Homo sapiens
gttgtaacaggatgt

SEQ ID NO: 1649247 - DNA, 15 bp, Homo sapiens
agttgtaacaggatg

SEQ ID NO: 1649248 - DNA, 15 bp, Homo sapiens
tagttgtaacaggat

SEQ ID NO: 1649249 - DNA, 15 bp, Homo sapiens
atagttgtaacagga

SEQ ID NO: 1649250 - DNA, 15 bp, Homo sapiens
aatagttgtaacagg

SEQ ID NO: 1649251 - DNA, 15 bp, Homo sapiens
aaatagttgtaacag

SEQ ID NO: 1649252 - DNA, 15 bp, Homo sapiens
taaatagttgtaaca

SEQ ID NO: 1649253 - DNA, 15 bp, Homo sapiens
gtaaatagttgtaac

SEQ ID NO: 1649254 - DNA, 15 bp, Homo sapiens
agtaaatagttgtaa

SEQ ID NO: 1649255 - DNA, 15 bp, Homo sapiens
tagtaaatagttgta

SEQ ID NO: 1649256 - DNA, 15 bp, Homo sapiens
ctagtaaatagttgt

SEQ ID NO: 1649257 - DNA, 15 bp, Homo sapiens
cctagtaaatagttg

SEQ ID NO: 1649258 - DNA, 15 bp, Homo sapiens
tcctagtaaatagtt

SEQ ID NO: 1649259 - DNA, 15 bp, Homo sapiens
atcctagtaaatagt

SEQ ID NO: 1649260 - DNA, 15 bp, Homo sapiens
aatcctagtaaatag

SEQ ID NO: 1649261 - DNA, 15 bp, Homo sapiens
aaatcctagtaaata

SEQ ID NO: 1649262 - DNA, 15 bp, Homo sapiens
gaaatcctagtaaat

SEQ ID NO: 1649263 - DNA, 15 bp, Homo sapiens
agaaatcctagtaaa

SEQ ID NO: 1649264 - DNA, 15 bp, Homo sapiens
cagaaatcctagtaa

SEQ ID NO: 1649265 - DNA, 15 bp, Homo sapiens
ccagaaatcctagta

SEQ ID NO: 1649266 - DNA, 15 bp, Homo sapiens
tccagaaatcctagt

SEQ ID NO: 1649267 - DNA, 15 bp, Homo sapiens
ttccagaaatcctag

SEQ ID NO: 1649268 - DNA, 15 bp, Homo sapiens
cttccagaaatccta

SEQ ID NO: 1649269 - DNA, 15 bp, Homo sapiens
tcttccagaaatcct

SEQ ID NO: 1649270 - DNA, 15 bp, Homo sapiens
ctcttccagaaatcc

SEQ ID NO: 1649271 - DNA, 15 bp, Homo sapiens
gctcttccagaaatc

SEQ ID NO: 1649272 - DNA, 15 bp, Homo sapiens
ggctcttccagaaat

SEQ ID NO: 1649273 - DNA, 15 bp, Homo sapiens
tggctcttccagaaa

SEQ ID NO: 1649274 - DNA, 15 bp, Homo sapiens
ttggctcttccagaa

SEQ ID NO: 1649275 - DNA, 15 bp, Homo sapiens
tttggctcttccaga

SEQ ID NO: 1649276 - DNA, 15 bp, Homo sapiens
atttggctcttccag

SEQ ID NO: 1649277 - DNA, 15 bp, Homo sapiens
catttggctcttcca

SEQ ID NO: 1649278 - DNA, 15 bp, Homo sapiens
ccatttggctcttcc

SEQ ID NO: 1649279 - DNA, 15 bp, Homo sapiens
cccatttggctcttc

SEQ ID NO: 1649280 - DNA, 15 bp, Homo sapiens
tcccatttggctctt

SEQ ID NO: 1649281 - DNA, 15 bp, Homo sapiens
atcccatttggctct

SEQ ID NO: 1649282 - DNA, 15 bp, Homo sapiens
catcccatttggctc

SEQ ID NO: 1649283 - DNA, 15 bp, Homo sapiens
acatcccatttggct

SEQ ID NO: 1649284 - DNA, 15 bp, Homo sapiens
gacatcccatttggc

SEQ ID NO: 1649285 - DNA, 15 bp, Homo sapiens
tgacatcccatttgg

SEQ ID NO: 1649286 - DNA, 15 bp, Homo sapiens
gtgacatcccatttg

SEQ ID NO: 1649287 - DNA, 15 bp, Homo sapiens
tgtgacatcccattt

SEQ ID NO: 1649288 - DNA, 15 bp, Homo sapiens
ctgtgacatcccatt

SEQ ID NO: 1649289 - DNA, 15 bp, Homo sapiens
tctgtgacatcccat

SEQ ID NO: 1649290 - DNA, 15 bp, Homo sapiens
atctgtgacatccca

SEQ ID NO: 1649291 - DNA, 15 bp, Homo sapiens
catctgtgacatccc

SEQ ID NO: 1649292 - DNA, 15 bp, Homo sapiens
tcatctgtgacatcc

SEQ ID NO: 1649293 - DNA, 15 bp, Homo sapiens
gtcatctgtgacatc

SEQ ID NO: 1649294 - DNA, 15 bp, Homo sapiens
agtcatctgtgacat

SEQ ID NO: 1649295 - DNA, 15 bp, Homo sapiens
tagtcatctgtgaca

SEQ ID NO: 1649296 - DNA, 15 bp, Homo sapiens
ttagtcatctgtgac

SEQ ID NO: 1649297 - DNA, 15 bp, Homo sapiens
cttagtcatctgtga

SEQ ID NO: 1649298 - DNA, 15 bp, Homo sapiens
acttagtcatctgtg

SEQ ID NO: 1649299 - DNA, 15 bp, Homo sapiens
tacttagtcatctgt

SEQ ID NO: 1649300 - DNA, 15 bp, Homo sapiens
atacttagtcatctg

SEQ ID NO: 1649301 - DNA, 15 bp, Homo sapiens
aatacttagtcatct

SEQ ID NO: 1649302 - DNA, 15 bp, Homo sapiens
aaatacttagtcatc

SEQ ID NO: 1649303 - DNA, 15 bp, Homo sapiens
aaaatacttagtcat

SEQ ID NO: 1649304 - DNA, 15 bp, Homo sapiens
gaaaatacttagtca

SEQ ID NO: 1649305 - DNA, 15 bp, Homo sapiens
tgaaaatacttagtc

SEQ ID NO: 1649306 - DNA, 15 bp, Homo sapiens
atgaaaatacttagt

SEQ ID NO: 1649307 - DNA, 15 bp, Homo sapiens
tatgaaaatacttag

SEQ ID NO: 1649308 - DNA, 15 bp, Homo sapiens
ttatgaaaatactta

SEQ ID NO: 1649309 - DNA, 15 bp, Homo sapiens
tttatgaaaatactt

SEQ ID NO: 1649310 - DNA, 15 bp, Homo sapiens
ttttatgaaaatact

SEQ ID NO: 1649311 - DNA, 15 bp, Homo sapiens
cttttatgaaaatac

SEQ ID NO: 1649312 - DNA, 15 bp, Homo sapiens
ccttttatgaaaata

SEQ ID NO: 1649313 - DNA, 15 bp, Homo sapiens
gccttttatgaaaat

SEQ ID NO: 1649314 - DNA, 15 bp, Homo sapiens
agccttttatgaaaa

SEQ ID NO: 1649315 - DNA, 15 bp, Homo sapiens
gagccttttatgaaa

SEQ ID NO: 1649316 - DNA, 15 bp, Homo sapiens
agagccttttatgaa

SEQ ID NO: 1649317 - DNA, 15 bp, Homo sapiens
aagagccttttatga

SEQ ID NO: 1649318 - DNA, 15 bp, Homo sapiens
aaagagccttttatg

SEQ ID NO: 1649319 - DNA, 15 bp, Homo sapiens
caaagagccttttat

SEQ ID NO: 1649320 - DNA, 15 bp, Homo sapiens
tcaaagagcctttta

SEQ ID NO: 1649321 - DNA, 15 bp, Homo sapiens
atcaaagagcctttt

SEQ ID NO: 1649322 - DNA, 15 bp, Homo sapiens
tatcaaagagccttt

SEQ ID NO: 1649323 - DNA, 15 bp, Homo sapiens
ctatcaaagagcctt

SEQ ID NO: 1649324 - DNA, 15 bp, Homo sapiens
cctatcaaagagcct

SEQ ID NO: 1649325 - DNA, 15 bp, Homo sapiens
tcctatcaaagagcc

SEQ ID NO: 1649326 - DNA, 15 bp, Homo sapiens
gtcctatcaaagagc

SEQ ID NO: 1649327 - DNA, 15 bp, Homo sapiens
agtcctatcaaagag

SEQ ID NO: 1649328 - DNA, 15 bp, Homo sapiens
aagtcctatcaaaga

SEQ ID NO: 1649329 - DNA, 15 bp, Homo sapiens
caagtcctatcaaag

SEQ ID NO: 1649330 - DNA, 15 bp, Homo sapiens
gcaagtcctatcaaa

SEQ ID NO: 1649331 - DNA, 15 bp, Homo sapiens
agcaagtcctatcaa

SEQ ID NO: 1649332 - DNA, 15 bp, Homo sapiens
gagcaagtcctatca

SEQ ID NO: 1649333 - DNA, 15 bp, Homo sapiens
tgagcaagtcctatc

SEQ ID NO: 1649334 - DNA, 15 bp, Homo sapiens
ttgagcaagtcctat

SEQ ID NO: 1649335 - DNA, 15 bp, Homo sapiens
attgagcaagtccta

SEQ ID NO: 1649336 - DNA, 15 bp, Homo sapiens
gattgagcaagtcct

SEQ ID NO: 1649337 - DNA, 15 bp, Homo sapiens
ggattgagcaagtcc

SEQ ID NO: 1649338 - DNA, 15 bp, Homo sapiens
gggattgagcaagtc

SEQ ID NO: 1649339 - DNA, 15 bp, Homo sapiens
ggggattgagcaagt

SEQ ID NO: 1649340 - DNA, 15 bp, Homo sapiens
aggggattgagcaag

SEQ ID NO: 1649341 - DNA, 15 bp, Homo sapiens
gaggggattgagcaa

SEQ ID NO: 1649342 - DNA, 15 bp, Homo sapiens
ggaggggattgagca

SEQ ID NO: 1649343 - DNA, 15 bp, Homo sapiens
aggaggggattgagc

SEQ ID NO: 1649344 - DNA, 15 bp, Homo sapiens
aaggaggggattgag

SEQ ID NO: 1649345 - DNA, 15 bp, Homo sapiens
aaaggaggggattga

SEQ ID NO: 1649346 - DNA, 15 bp, Homo sapiens
taaaggaggggattg

SEQ ID NO: 1649347 - DNA, 15 bp, Homo sapiens
ctaaaggaggggatt

SEQ ID NO: 1649348 - DNA, 15 bp, Homo sapiens
gctaaaggaggggat

SEQ ID NO: 1649349 - DNA, 15 bp, Homo sapiens
tgctaaaggagggga

SEQ ID NO: 1649350 - DNA, 15 bp, Homo sapiens
atgctaaaggagggg

SEQ ID NO: 1649351 - DNA, 15 bp, Homo sapiens
gatgctaaaggaggg

SEQ ID NO: 1649352 - DNA, 15 bp, Homo sapiens
tgatgctaaaggagg

SEQ ID NO: 1649353 - DNA, 15 bp, Homo sapiens
gtgatgctaaaggag

SEQ ID NO: 1649354 - DNA, 15 bp, Homo sapiens
ggtgatgctaaagga

SEQ ID NO: 1649355 - DNA, 15 bp, Homo sapiens
aggtgatgctaaagg

SEQ ID NO: 1649356 - DNA, 15 bp, Homo sapiens
aaggtgatgctaaag

SEQ ID NO: 1649357 - DNA, 15 bp, Homo sapiens
aaaggtgatgctaaa

SEQ ID NO: 1649358 - DNA, 15 bp, Homo sapiens
gaaaggtgatgctaa

SEQ ID NO: 1649359 - DNA, 15 bp, Homo sapiens
ggaaaggtgatgcta

SEQ ID NO: 1649360 - DNA, 15 bp, Homo sapiens
gggaaaggtgatgct

SEQ ID NO: 1649361 - DNA, 15 bp, Homo sapiens
ggggaaaggtgatgc

SEQ ID NO: 1649362 - DNA, 15 bp, Homo sapiens
tggggaaaggtgatg

SEQ ID NO: 1649363 - DNA, 15 bp, Homo sapiens
ttggggaaaggtgat

SEQ ID NO: 1649364 - DNA, 15 bp, Homo sapiens
gttggggaaaggtga

SEQ ID NO: 1649365 - DNA, 15 bp, Homo sapiens
agttggggaaaggtg

SEQ ID NO: 1649366 - DNA, 15 bp, Homo sapiens
gagttggggaaaggt

SEQ ID NO: 1649367 - DNA, 15 bp, Homo sapiens
agagttggggaaagg

SEQ ID NO: 1649368 - DNA, 15 bp, Homo sapiens
aagagttggggaaag

SEQ ID NO: 1649369 - DNA, 15 bp, Homo sapiens
aaagagttggggaaa

SEQ ID NO: 1649370 - DNA, 15 bp, Homo sapiens
taaagagttggggaa

SEQ ID NO: 1649371 - DNA, 15 bp, Homo sapiens
ctaaagagttgggga

SEQ ID NO: 1649372 - DNA, 15 bp, Homo sapiens
tctaaagagttgggg

SEQ ID NO: 1649373 - DNA, 15 bp, Homo sapiens
ttctaaagagttggg

SEQ ID NO: 1649374 - DNA, 15 bp, Homo sapiens
tttctaaagagttgg

SEQ ID NO: 1649375 - DNA, 15 bp, Homo sapiens
ttttctaaagagttg

SEQ ID NO: 1649376 - DNA, 15 bp, Homo sapiens
gttttctaaagagtt

SEQ ID NO: 1649377 - DNA, 15 bp, Homo sapiens
agttttctaaagagt

SEQ ID NO: 1649378 - DNA, 15 bp, Homo sapiens
cagttttctaaagag

SEQ ID NO: 1649379 - DNA, 15 bp, Homo sapiens
tcagttttctaaaga

SEQ ID NO: 1649380 - DNA, 15 bp, Homo sapiens
gtcagttttctaaag

SEQ ID NO: 1649381 - DNA, 15 bp, Homo sapiens
agtcagttttctaaa

SEQ ID NO: 1649382 - DNA, 15 bp, Homo sapiens
aagtcagttttctaa

SEQ ID NO: 1649383 - DNA, 15 bp, Homo sapiens
gaagtcagttttcta

SEQ ID NO: 1649384 - DNA, 15 bp, Homo sapiens
tgaagtcagttttct

SEQ ID NO: 1649385 - DNA, 15 bp, Homo sapiens
atgaagtcagttttc

SEQ ID NO: 1649386 - DNA, 15 bp, Homo sapiens
aatgaagtcagtttt

SEQ ID NO: 1649387 - DNA, 15 bp, Homo sapiens
gaatgaagtcagttt

SEQ ID NO: 1649388 - DNA, 15 bp, Homo sapiens
agaatgaagtcagtt

SEQ ID NO: 1649389 - DNA, 15 bp, Homo sapiens
gagaatgaagtcagt

SEQ ID NO: 1649390 - DNA, 15 bp, Homo sapiens
tgagaatgaagtcag

SEQ ID NO: 1649391 - DNA, 15 bp, Homo sapiens
gtgagaatgaagtca

SEQ ID NO: 1649392 - DNA, 15 bp, Homo sapiens
tgtgagaatgaagtc

SEQ ID NO: 1649393 - DNA, 15 bp, Homo sapiens
gtgtgagaatgaagt

SEQ ID NO: 1649394 - DNA, 15 bp, Homo sapiens
agtgtgagaatgaag

SEQ ID NO: 1649395 - DNA, 15 bp, Homo sapiens
aagtgtgagaatgaa

SEQ ID NO: 1649396 - DNA, 15 bp, Homo sapiens
aaagtgtgagaatga

SEQ ID NO: 1649397 - DNA, 15 bp, Homo sapiens
aaaagtgtgagaatg

SEQ ID NO: 1649398 - DNA, 15 bp, Homo sapiens
taaaagtgtgagaat

SEQ ID NO: 1649399 - DNA, 15 bp, Homo sapiens
ataaaagtgtgagaa

SEQ ID NO: 1649400 - DNA, 15 bp, Homo sapiens
tataaaagtgtgaga

SEQ ID NO: 1649401 - DNA, 15 bp, Homo sapiens
attataaaagtgtga

SEQ ID NO: 1649402 - DNA, 15 bp, Homo sapiens
cattataaaagtgtg

SEQ ID NO: 1649403 - DNA, 15 bp, Homo sapiens
ccattataaaagtgt

SEQ ID NO: 1649404 - DNA, 15 bp, Homo sapiens
gccattataaaagtg

SEQ ID NO: 1649405 - DNA, 15 bp, Homo sapiens
agccattataaaagt

SEQ ID NO: 1649406 - DNA, 15 bp, Homo sapiens
tagccattataaaag

SEQ ID NO: 1649407 - DNA, 15 bp, Homo sapiens
gtagccattataaaa

SEQ ID NO: 1649408 - DNA, 15 bp, Homo sapiens
agtagccattataaa

SEQ ID NO: 1649409 - DNA, 15 bp, Homo sapiens
aagtagccattataa

SEQ ID NO: 1649410 - DNA, 15 bp, Homo sapiens
gaagtagccattata

SEQ ID NO: 1649411 - DNA, 15 bp, Homo sapiens
tgaagtagccattat

SEQ ID NO: 1649412 - DNA, 15 bp, Homo sapiens
ctgaagtagccatta

SEQ ID NO: 1649413 - DNA, 15 bp, Homo sapiens
tctgaagtagccatt

SEQ ID NO: 1649414 - DNA, 15 bp, Homo sapiens
ctctgaagtagccat

SEQ ID NO: 1649415 - DNA, 15 bp, Homo sapiens
actctgaagtagcca

SEQ ID NO: 1649416 - DNA, 15 bp, Homo sapiens
aactctgaagtagcc

SEQ ID NO: 1649417 - DNA, 15 bp, Homo sapiens
aaactctgaagtagc

SEQ ID NO: 1649418 - DNA, 15 bp, Homo sapiens
taaactctgaagtag

SEQ ID NO: 1649419 - DNA, 15 bp, Homo sapiens
ctaaactctgaagta

SEQ ID NO: 1649420 - DNA, 15 bp, Homo sapiens
actaaactctgaagt

SEQ ID NO: 1649421 - DNA, 15 bp, Homo sapiens
aactaaactctgaag

SEQ ID NO: 1649422 - DNA, 15 bp, Homo sapiens
aaactaaactctgaa

SEQ ID NO: 1649423 - DNA, 15 bp, Homo sapiens
aaaactaaactctga

SEQ ID NO: 1649424 - DNA, 15 bp, Homo sapiens
gaaaactaaactctg

SEQ ID NO: 1649425 - DNA, 15 bp, Homo sapiens
agaaaactaaactct

SEQ ID NO: 1649426 - DNA, 15 bp, Homo sapiens
aagaaaactaaactc

SEQ ID NO: 1649427 - DNA, 15 bp, Homo sapiens
aaagaaaactaaact

SEQ ID NO: 1649428 - DNA, 15 bp, Homo sapiens
aaaagaaaactaaac

SEQ ID NO: 1649429 - DNA, 15 bp, Homo sapiens
aaaaagaaaactaaa

SEQ ID NO: 1649430 - DNA, 15 bp, Homo sapiens
taaaaagaaaactaa

SEQ ID NO: 1649431 - DNA, 15 bp, Homo sapiens
gtaaaaagaaaacta

SEQ ID NO: 1649432 - DNA, 15 bp, Homo sapiens
tgtaaaaagaaaact

SEQ ID NO: 1649433 - DNA, 15 bp, Homo sapiens
gtgtaaaaagaaaac

SEQ ID NO: 1649434 - DNA, 15 bp, Homo sapiens
agtgtaaaaagaaaa

SEQ ID NO: 1649435 - DNA, 15 bp, Homo sapiens
tagtgtaaaaagaaa

SEQ ID NO: 1649436 - DNA, 15 bp, Homo sapiens
ttagtgtaaaaagaa

SEQ ID NO: 1649437 - DNA, 15 bp, Homo sapiens
attagtgtaaaaaga

SEQ ID NO: 1649438 - DNA, 15 bp, Homo sapiens
gattagtgtaaaaag

SEQ ID NO: 1649439 - DNA, 15 bp, Homo sapiens
agattagtgtaaaaa

SEQ ID NO: 1649440 - DNA, 15 bp, Homo sapiens
aagattagtgtaaaa

SEQ ID NO: 1649441 - DNA, 15 bp, Homo sapiens
taagattagtgtaaa

SEQ ID NO: 1649442 - DNA, 15 bp, Homo sapiens
ttaagattagtgtaa

SEQ ID NO: 1649443 - DNA, 15 bp, Homo sapiens
gttaagattagtgta

SEQ ID NO: 1649444 - DNA, 15 bp, Homo sapiens
agttaagattagtgt

SEQ ID NO: 1649445 - DNA, 15 bp, Homo sapiens
cagttaagattagtg

SEQ ID NO: 1649446 - DNA, 15 bp, Homo sapiens
tcagttaagattagt

SEQ ID NO: 1649447 - DNA, 15 bp, Homo sapiens
gtcagttaagattag

SEQ ID NO: 1649448 - DNA, 15 bp, Homo sapiens
cgtcagttaagatta

SEQ ID NO: 1649449 - DNA, 15 bp, Homo sapiens
tcgtcagttaagatt

SEQ ID NO: 1649450 - DNA, 15 bp, Homo sapiens
gtcgtcagttaagat

SEQ ID NO: 1649451 - DNA, 15 bp, Homo sapiens
tgtcgtcagttaaga

SEQ ID NO: 1649452 - DNA, 15 bp, Homo sapiens
ctgtcgtcagttaag

SEQ ID NO: 1649453 - DNA, 15 bp, Homo sapiens
tctgtcgtcagttaa

SEQ ID NO: 1649454 - DNA, 15 bp, Homo sapiens
ctctgtcgtcagtta

SEQ ID NO: 1649455 - DNA, 15 bp, Homo sapiens
actctgtcgtcagtt

SEQ ID NO: 1649456 - DNA, 15 bp, Homo sapiens
gactctgtcgtcagt

SEQ ID NO: 1649457 - DNA, 15 bp, Homo sapiens
agactctgtcgtcag

SEQ ID NO: 1649458 - DNA, 15 bp, Homo sapiens
gagactctgtcgtca

SEQ ID NO: 1649459 - DNA, 15 bp, Homo sapiens
agagactctgtcgtc

SEQ ID NO: 1649460 - DNA, 15 bp, Homo sapiens
gagagactctgtcgt

SEQ ID NO: 1649461 - DNA, 15 bp, Homo sapiens
tgagagactctgtcg

SEQ ID NO: 1649462 - DNA, 15 bp, Homo sapiens
gtgagagactctgtc

SEQ ID NO: 1649463 - DNA, 15 bp, Homo sapiens
tgtgagagactctgt

SEQ ID NO: 1649464 - DNA, 15 bp, Homo sapiens
ttgtgagagactctg

SEQ ID NO: 1649465 - DNA, 15 bp, Homo sapiens
tttgtgagagactct

SEQ ID NO: 1649466 - DNA, 15 bp, Homo sapiens
gtttgtgagagactc

SEQ ID NO: 1649467 - DNA, 15 bp, Homo sapiens
cgtttgtgagagact

SEQ ID NO: 1649468 - DNA, 15 bp, Homo sapiens
ccgtttgtgagagac

SEQ ID NO: 1649469 - DNA, 15 bp, Homo sapiens
tccgtttgtgagaga

SEQ ID NO: 1649470 - DNA, 15 bp, Homo sapiens
ctccgtttgtgagag

SEQ ID NO: 1649471 - DNA, 15 bp, Homo sapiens
tctccgtttgtgaga

SEQ ID NO: 1649472 - DNA, 15 bp, Homo sapiens
atctccgtttgtgag

SEQ ID NO: 1649473 - DNA, 15 bp, Homo sapiens
catctccgtttgtga

SEQ ID NO: 1649474 - DNA, 15 bp, Homo sapiens
tcatctccgtttgtg

SEQ ID NO: 1649475 - DNA, 15 bp, Homo sapiens
ctcatctccgtttgt

SEQ ID NO: 1649476 - DNA, 15 bp, Homo sapiens
tctcatctccgtttg

SEQ ID NO: 1649477 - DNA, 15 bp, Homo sapiens
ttctcatctccgttt

SEQ ID NO: 1649478 - DNA, 15 bp, Homo sapiens
tttctcatctccgtt

SEQ ID NO: 1649479 - DNA, 15 bp, Homo sapiens
ctttctcatctccgt

SEQ ID NO: 1649480 - DNA, 15 bp, Homo sapiens
cctttctcatctccg

SEQ ID NO: 1649481 - DNA, 15 bp, Homo sapiens
ccctttctcatctcc

SEQ ID NO: 1649482 - DNA, 15 bp, Homo sapiens
accctttctcatctc

SEQ ID NO: 1649483 - DNA, 15 bp, Homo sapiens
aaccctttctcatct

SEQ ID NO: 1649484 - DNA, 15 bp, Homo sapiens
taaccctttctcatc

SEQ ID NO: 1649485 - DNA, 15 bp, Homo sapiens
gtaaccctttctcat

SEQ ID NO: 1649486 - DNA, 15 bp, Homo sapiens
ggtaaccctttctca

SEQ ID NO: 1649487 - DNA, 15 bp, Homo sapiens
gggtaaccctttctc

SEQ ID NO: 1649488 - DNA, 15 bp, Homo sapiens
agggtaaccctttct

SEQ ID NO: 1649489 - DNA, 15 bp, Homo sapiens
aagggtaaccctttc

SEQ ID NO: 1649490 - DNA, 15 bp, Homo sapiens
aaagggtaacccttt

SEQ ID NO: 1649491 - DNA, 15 bp, Homo sapiens
gaaagggtaaccctt

SEQ ID NO: 1649492 - DNA, 15 bp, Homo sapiens
tgaaagggtaaccct

SEQ ID NO: 1649493 - DNA, 15 bp, Homo sapiens
ctgaaagggtaaccc

SEQ ID NO: 1649494 - DNA, 15 bp, Homo sapiens
gctgaaagggtaacc

SEQ ID NO: 1649495 - DNA, 15 bp, Homo sapiens
tgctgaaagggtaac

SEQ ID NO: 1649496 - DNA, 15 bp, Homo sapiens
ctgctgaaagggtaa

SEQ ID NO: 1649497 - DNA, 15 bp, Homo sapiens
tctgctgaaagggta

SEQ ID NO: 1649498 - DNA, 15 bp, Homo sapiens
ttctgctgaaagggt

SEQ ID NO: 1649499 - DNA, 15 bp, Homo sapiens
tttctgctgaaaggg

SEQ ID NO: 1649500 - DNA, 15 bp, Homo sapiens
ctttctgctgaaagg

SEQ ID NO: 1649501 - DNA, 15 bp, Homo sapiens
gctttctgctgaaag

SEQ ID NO: 1649502 - DNA, 15 bp, Homo sapiens
tgctttctgctgaaa

SEQ ID NO: 1649503 - DNA, 15 bp, Homo sapiens
ctgctttctgctgaa

SEQ ID NO: 1649504 - DNA, 15 bp, Homo sapiens
tctgctttctgctga

SEQ ID NO: 1649505 - DNA, 15 bp, Homo sapiens
ttctgctttctgctg

SEQ ID NO: 1649506 - DNA, 15 bp, Homo sapiens
tttctgctttctgct

SEQ ID NO: 1649507 - DNA, 15 bp, Homo sapiens
atttctgctttctgc

SEQ ID NO: 1649508 - DNA, 15 bp, Homo sapiens
catttctgctttctg

SEQ ID NO: 1649509 - DNA, 15 bp, Homo sapiens
ccatttctgctttct

SEQ ID NO: 1649510 - DNA, 15 bp, Homo sapiens
accatttctgctttc

SEQ ID NO: 1649511 - DNA, 15 bp, Homo sapiens
caccatttctgcttt

SEQ ID NO: 1649512 - DNA, 15 bp, Homo sapiens
acaccatttctgctt

SEQ ID NO: 1649513 - DNA, 15 bp, Homo sapiens
aacaccatttctgct

SEQ ID NO: 1649514 - DNA, 15 bp, Homo sapiens
aaacaccatttctgc

SEQ ID NO: 1649515 - DNA, 15 bp, Homo sapiens
aaaacaccatttctg

SEQ ID NO: 1649516 - DNA, 15 bp, Homo sapiens
taaaacaccatttct

SEQ ID NO: 1649517 - DNA, 15 bp, Homo sapiens
ttaaaacaccatttc

SEQ ID NO: 1649518 - DNA, 15 bp, Homo sapiens
cttaaaacaccattt

SEQ ID NO: 1649519 - DNA, 15 bp, Homo sapiens
gcttaaaacaccatt

SEQ ID NO: 1649520 - DNA, 15 bp, Homo sapiens
agcttaaaacaccat

SEQ ID NO: 1649521 - DNA, 15 bp, Homo sapiens
aagcttaaaacacca

SEQ ID NO: 1649522 - DNA, 15 bp, Homo sapiens
gaagcttaaaacacc

SEQ ID NO: 1649523 - DNA, 15 bp, Homo sapiens
agaagcttaaaacac

SEQ ID NO: 1649524 - DNA, 15 bp, Homo sapiens
gagaagcttaaaaca

SEQ ID NO: 1649525 - DNA, 15 bp, Homo sapiens
tgagaagcttaaaac

SEQ ID NO: 1649526 - DNA, 15 bp, Homo sapiens
ttgagaagcttaaaa

SEQ ID NO: 1649527 - DNA, 15 bp, Homo sapiens
gttgagaagcttaaa

SEQ ID NO: 1649528 - DNA, 15 bp, Homo sapiens
cgttgagaagcttaa

SEQ ID NO: 1649529 - DNA, 15 bp, Homo sapiens
acgttgagaagctta

SEQ ID NO: 1649530 - DNA, 15 bp, Homo sapiens
aacgttgagaagctt

SEQ ID NO: 1649531 - DNA, 15 bp, Homo sapiens
aaacgttgagaagct

SEQ ID NO: 1649532 - DNA, 15 bp, Homo sapiens
taaacgttgagaagc

SEQ ID NO: 1649533 - DNA, 15 bp, Homo sapiens
ttaaacgttgagaag

SEQ ID NO: 1649534 - DNA, 15 bp, Homo sapiens
cttaaacgttgagaa

SEQ ID NO: 1649535 - DNA, 15 bp, Homo sapiens
ccttaaacgttgaga

SEQ ID NO: 1649536 - DNA, 15 bp, Homo sapiens
gccttaaacgttgag

SEQ ID NO: 1649537 - DNA, 15 bp, Homo sapiens
agccttaaacgttga

SEQ ID NO: 1649538 - DNA, 15 bp, Homo sapiens
gagccttaaacgttg

SEQ ID NO: 1649539 - DNA, 15 bp, Homo sapiens
agagccttaaacgtt

SEQ ID NO: 1649540 - DNA, 15 bp, Homo sapiens
tagagccttaaacgt

SEQ ID NO: 1649541 - DNA, 15 bp, Homo sapiens
ttagagccttaaacg

SEQ ID NO: 1649542 - DNA, 15 bp, Homo sapiens
cttagagccttaaac

SEQ ID NO: 1649543 - DNA, 15 bp, Homo sapiens
tcttagagccttaaa

SEQ ID NO: 1649544 - DNA, 15 bp, Homo sapiens
ttcttagagccttaa

SEQ ID NO: 1649545 - DNA, 15 bp, Homo sapiens
attcttagagcctta

SEQ ID NO: 1649546 - DNA, 15 bp, Homo sapiens
cattcttagagcctt

SEQ ID NO: 1649547 - DNA, 15 bp, Homo sapiens
tcattcttagagcct

SEQ ID NO: 1649548 - DNA, 15 bp, Homo sapiens
gtcattcttagagcc

SEQ ID NO: 1649549 - DNA, 15 bp, Homo sapiens
tgtcattcttagagc

SEQ ID NO: 1649550 - DNA, 15 bp, Homo sapiens
ctgtcattcttagag

SEQ ID NO: 1649551 - DNA, 15 bp, Homo sapiens
tctgtcattcttaga

SEQ ID NO: 1649552 - DNA, 15 bp, Homo sapiens
ctctgtcattcttag

SEQ ID NO: 1649553 - DNA, 15 bp, Homo sapiens
cctctgtcattctta

SEQ ID NO: 1649554 - DNA, 15 bp, Homo sapiens
ccctctgtcattctt

SEQ ID NO: 1649555 - DNA, 15 bp, Homo sapiens
gccctctgtcattct

SEQ ID NO: 1649556 - DNA, 15 bp, Homo sapiens
ggccctctgtcattc

SEQ ID NO: 1649557 - DNA, 15 bp, Homo sapiens
aggccctctgtcatt

SEQ ID NO: 1649558 - DNA, 15 bp, Homo sapiens
taggccctctgtcat

SEQ ID NO: 1649559 - DNA, 15 bp, Homo sapiens
ataggccctctgtca

SEQ ID NO: 1649560 - DNA, 15 bp, Homo sapiens
tataggccctctgtc

SEQ ID NO: 1649561 - DNA, 15 bp, Homo sapiens
gtataggccctctgt

SEQ ID NO: 1649562 - DNA, 15 bp, Homo sapiens
tgtataggccctctg

SEQ ID NO: 1649563 - DNA, 15 bp, Homo sapiens
ctgtataggccctct

SEQ ID NO: 1649564 - DNA, 15 bp, Homo sapiens
actgtataggccctc

SEQ ID NO: 1649565 - DNA, 15 bp, Homo sapiens
cactgtataggccct

SEQ ID NO: 1649566 - DNA, 15 bp, Homo sapiens
tcactgtataggccc

SEQ ID NO: 1649567 - DNA, 15 bp, Homo sapiens
ttcactgtataggcc

SEQ ID NO: 1649568 - DNA, 15 bp, Homo sapiens
cttcactgtataggc

SEQ ID NO: 1649569 - DNA, 15 bp, Homo sapiens
tcttcactgtatagg

SEQ ID NO: 1649570 - DNA, 15 bp, Homo sapiens
gtcttcactgtatag

SEQ ID NO: 1649571 - DNA, 15 bp, Homo sapiens
tgtcttcactgtata

SEQ ID NO: 1649572 - DNA, 15 bp, Homo sapiens
atgtcttcactgtat

SEQ ID NO: 1649573 - DNA, 15 bp, Homo sapiens
tatgtcttcactgta

SEQ ID NO: 1649574 - DNA, 15 bp, Homo sapiens
ctatgtcttcactgt

SEQ ID NO: 1649575 - DNA, 15 bp, Homo sapiens
tctatgtcttcactg

SEQ ID NO: 1649576 - DNA, 15 bp, Homo sapiens
ttctatgtcttcact

SEQ ID NO: 1649577 - DNA, 15 bp, Homo sapiens
gttctatgtcttcac

SEQ ID NO: 1649578 - DNA, 15 bp, Homo sapiens
tgttctatgtcttca

SEQ ID NO: 1649579 - DNA, 15 bp, Homo sapiens
gtgttctatgtcttc

SEQ ID NO: 1649580 - DNA, 15 bp, Homo sapiens
tgtgttctatgtctt

SEQ ID NO: 1649581 - DNA, 15 bp, Homo sapiens
gtgtgttctatgtct

SEQ ID NO: 1649582 - DNA, 15 bp, Homo sapiens
tgtgtgttctatgtc

SEQ ID NO: 1649583 - DNA, 15 bp, Homo sapiens
ttgtgtgttctatgt

SEQ ID NO: 1649584 - DNA, 15 bp, Homo sapiens
cttgtgtgttctatg

SEQ ID NO: 1649585 - DNA, 15 bp, Homo sapiens
gcttgtgtgttctat

SEQ ID NO: 1649586 - DNA, 15 bp, Homo sapiens
tgcttgtgtgttcta

SEQ ID NO: 1649587 - DNA, 15 bp, Homo sapiens
ttgcttgtgtgttct

SEQ ID NO: 1649588 - DNA, 15 bp, Homo sapiens
tttgcttgtgtgttc

SEQ ID NO: 1649589 - DNA, 15 bp, Homo sapiens
ctttgcttgtgtgtt

SEQ ID NO: 1649590 - DNA, 15 bp, Homo sapiens
cctttgcttgtgtgt

SEQ ID NO: 1649591 - DNA, 15 bp, Homo sapiens
gcctttgcttgtgtg

SEQ ID NO: 1649592 - DNA, 15 bp, Homo sapiens
agcctttgcttgtgt

SEQ ID NO: 1649593 - DNA, 15 bp, Homo sapiens
tagcctttgcttgtg

SEQ ID NO: 1649594 - DNA, 15 bp, Homo sapiens
ttagcctttgcttgt

SEQ ID NO: 1649595 - DNA, 15 bp, Homo sapiens
tttagcctttgcttg

SEQ ID NO: 1649596 - DNA, 15 bp, Homo sapiens
atttagcctttgctt

SEQ ID NO: 1649597 - DNA, 15 bp, Homo sapiens
aatttagcctttgct

SEQ ID NO: 1649598 - DNA, 15 bp, Homo sapiens
gaatttagcctttgc

SEQ ID NO: 1649599 - DNA, 15 bp, Homo sapiens
agaatttagcctttg

SEQ ID NO: 1649600 - DNA, 15 bp, Homo sapiens
aagaatttagccttt

SEQ ID NO: 1649601 - DNA, 15 bp, Homo sapiens
gaagaatttagcctt

SEQ ID NO: 1649602 - DNA, 15 bp, Homo sapiens
agaagaatttagcct

SEQ ID NO: 1649603 - DNA, 15 bp, Homo sapiens
cagaagaatttagcc

SEQ ID NO: 1649604 - DNA, 15 bp, Homo sapiens
acagaagaatttagc

SEQ ID NO: 1649605 - DNA, 15 bp, Homo sapiens
cacagaagaatttag

SEQ ID NO: 1649606 - DNA, 15 bp, Homo sapiens
tcacagaagaattta

SEQ ID NO: 1649607 - DNA, 15 bp, Homo sapiens
atcacagaagaattt

SEQ ID NO: 1649608 - DNA, 15 bp, Homo sapiens
tatcacagaagaatt

SEQ ID NO: 1649609 - DNA, 15 bp, Homo sapiens
gtatcacagaagaat

SEQ ID NO: 1649610 - DNA, 15 bp, Homo sapiens
tgtatcacagaagaa

SEQ ID NO: 1649611 - DNA, 15 bp, Homo sapiens
ttgtatcacagaaga

SEQ ID NO: 1649612 - DNA, 15 bp, Homo sapiens
gttgtatcacagaag

SEQ ID NO: 1649613 - DNA, 15 bp, Homo sapiens
agttgtatcacagaa

SEQ ID NO: 1649614 - DNA, 15 bp, Homo sapiens
cagttgtatcacaga

SEQ ID NO: 1649615 - DNA, 15 bp, Homo sapiens
ccagttgtatcacag

SEQ ID NO: 1649616 - DNA, 15 bp, Homo sapiens
accagttgtatcaca

SEQ ID NO: 1649617 - DNA, 15 bp, Homo sapiens
taccagttgtatcac

SEQ ID NO: 1649618 - DNA, 15 bp, Homo sapiens
ttaccagttgtatca

SEQ ID NO: 1649619 - DNA, 15 bp, Homo sapiens
cttaccagttgtatc

SEQ ID NO: 1649620 - DNA, 15 bp, Homo sapiens
tcttaccagttgtat

SEQ ID NO: 1649621 - DNA, 15 bp, Homo sapiens
ttcttaccagttgta

SEQ ID NO: 1649622 - DNA, 15 bp, Homo sapiens
cttcttaccagttgt

SEQ ID NO: 1649623 - DNA, 15 bp, Homo sapiens
tcttcttaccagttg

SEQ ID NO: 1649624 - DNA, 15 bp, Homo sapiens
gtcttcttaccagtt

SEQ ID NO: 1649625 - DNA, 15 bp, Homo sapiens
ggtcttcttaccagt

SEQ ID NO: 1649626 - DNA, 15 bp, Homo sapiens
tggtcttcttaccag

SEQ ID NO: 1649627 - DNA, 15 bp, Homo sapiens
atggtcttcttacca

SEQ ID NO: 1649628 - DNA, 15 bp, Homo sapiens
tatggtcttcttacc

SEQ ID NO: 1649629 - DNA, 15 bp, Homo sapiens
ttatggtcttcttac

SEQ ID NO: 1649630 - DNA, 15 bp, Homo sapiens
attatggtcttctta

SEQ ID NO: 1649631 - DNA, 15 bp, Homo sapiens
cattatggtcttctt

SEQ ID NO: 1649632 - DNA, 15 bp, Homo sapiens
acattatggtcttct

SEQ ID NO: 1649633 - DNA, 15 bp, Homo sapiens
gacattatggtcttc

SEQ ID NO: 1649634 - DNA, 15 bp, Homo sapiens
agacattatggtctt

SEQ ID NO: 1649635 - DNA, 15 bp, Homo sapiens
aagacattatggtct

SEQ ID NO: 1649636 - DNA, 15 bp, Homo sapiens
aaagacattatggtc

SEQ ID NO: 1649637 - DNA, 15 bp, Homo sapiens
caaagacattatggt

SEQ ID NO: 1649638 - DNA, 15 bp, Homo sapiens
tcaaagacattatgg

SEQ ID NO: 1649639 - DNA, 15 bp, Homo sapiens
ctcaaagacattatg

SEQ ID NO: 1649640 - DNA, 15 bp, Homo sapiens
actcaaagacattat

SEQ ID NO: 1649641 - DNA, 15 bp, Homo sapiens
aactcaaagacatta

SEQ ID NO: 1649642 - DNA, 15 bp, Homo sapiens
caactcaaagacatt

SEQ ID NO: 1649643 - DNA, 15 bp, Homo sapiens
gcaactcaaagacat

SEQ ID NO: 1649644 - DNA, 15 bp, Homo sapiens
agcaactcaaagaca

SEQ ID NO: 1649645 - DNA, 15 bp, Homo sapiens
aagcaactcaaagac

SEQ ID NO: 1649646 - DNA, 15 bp, Homo sapiens
gaagcaactcaaaga

SEQ ID NO: 1649647 - DNA, 15 bp, Homo sapiens
tgaagcaactcaaag

SEQ ID NO: 1649648 - DNA, 15 bp, Homo sapiens
ctgaagcaactcaaa

SEQ ID NO: 1649649 - DNA, 15 bp, Homo sapiens
actgaagcaactcaa

SEQ ID NO: 1649650 - DNA, 15 bp, Homo sapiens
cactgaagcaactca

SEQ ID NO: 1649651 - DNA, 15 bp, Homo sapiens
tcactgaagcaactc

SEQ ID NO: 1649652 - DNA, 15 bp, Homo sapiens
ttcactgaagcaact

SEQ ID NO: 1649653 - DNA, 15 bp, Homo sapiens
gttcactgaagcaac

SEQ ID NO: 1649654 - DNA, 15 bp, Homo sapiens
ggttcactgaagcaa

SEQ ID NO: 1649655 - DNA, 15 bp, Homo sapiens
gggttcactgaagca

SEQ ID NO: 1649656 - DNA, 15 bp, Homo sapiens
tgggttcactgaagc

SEQ ID NO: 1649657 - DNA, 15 bp, Homo sapiens
ctgggttcactgaag

SEQ ID NO: 1649658 - DNA, 15 bp, Homo sapiens
actgggttcactgaa

SEQ ID NO: 1649659 - DNA, 15 bp, Homo sapiens
gactgggttcactga

SEQ ID NO: 1649660 - DNA, 15 bp, Homo sapiens
tgactgggttcactg

SEQ ID NO: 1649661 - DNA, 15 bp, Homo sapiens
ctgactgggttcact

SEQ ID NO: 1649662 - DNA, 15 bp, Homo sapiens
actgactgggttcac

SEQ ID NO: 1649663 - DNA, 15 bp, Homo sapiens
tactgactgggttca

SEQ ID NO: 1649664 - DNA, 15 bp, Homo sapiens
ttactgactgggttc

SEQ ID NO: 1649665 - DNA, 15 bp, Homo sapiens
attactgactgggtt

SEQ ID NO: 1649666 - DNA, 15 bp, Homo sapiens
tattactgactgggt

SEQ ID NO: 1649667 - DNA, 15 bp, Homo sapiens
atattactgactggg

SEQ ID NO: 1649668 - DNA, 15 bp, Homo sapiens
catattactgactgg

SEQ ID NO: 1649669 - DNA, 15 bp, Homo sapiens
ccatattactgactg

SEQ ID NO: 1649670 - DNA, 15 bp, Homo sapiens
tccatattactgact

SEQ ID NO: 1649671 - DNA, 15 bp, Homo sapiens
ttccatattactgac

SEQ ID NO: 1649672 - DNA, 15 bp, Homo sapiens
cttccatattactga

SEQ ID NO: 1649673 - DNA, 15 bp, Homo sapiens
tcttccatattactg

SEQ ID NO: 1649674 - DNA, 15 bp, Homo sapiens
gtcttccatattact

SEQ ID NO: 1649675 - DNA, 15 bp, Homo sapiens
agtcttccatattac

SEQ ID NO: 1649676 - DNA, 15 bp, Homo sapiens
cagtcttccatatta

SEQ ID NO: 1649677 - DNA, 15 bp, Homo sapiens
ccagtcttccatatt

SEQ ID NO: 1649678 - DNA, 15 bp, Homo sapiens
accagtcttccatat

SEQ ID NO: 1649679 - DNA, 15 bp, Homo sapiens
gaccagtcttccata

SEQ ID NO: 1649680 - DNA, 15 bp, Homo sapiens
tgaccagtcttccat

SEQ ID NO: 1649681 - DNA, 15 bp, Homo sapiens
atgaccagtcttcca

SEQ ID NO: 1649682 - DNA, 15 bp, Homo sapiens
gatgaccagtcttcc

SEQ ID NO: 1649683 - DNA, 15 bp, Homo sapiens
aacctgactaaaaat

SEQ ID NO: 1649684 - DNA, 15 bp, Homo sapiens
aaacctgactaaaaa

SEQ ID NO: 1649685 - DNA, 15 bp, Homo sapiens
gaaacctgactaaaa

SEQ ID NO: 1649686 - DNA, 15 bp, Homo sapiens
ggaaacctgactaaa

SEQ ID NO: 1649687 - DNA, 15 bp, Homo sapiens
tggaaacctgactaa

SEQ ID NO: 1649688 - DNA, 15 bp, Homo sapiens
atggaaacctgacta

SEQ ID NO: 1649689 - DNA, 15 bp, Homo sapiens
aatggaaacctgact

SEQ ID NO: 1649690 - DNA, 15 bp, Homo sapiens
aaatggaaacctgac

SEQ ID NO: 1649691 - DNA, 15 bp, Homo sapiens
caaatggaaacctga

SEQ ID NO: 1649692 - DNA, 15 bp, Homo sapiens
acaaatggaaacctg

SEQ ID NO: 1649693 - DNA, 15 bp, Homo sapiens
tacaaatggaaacct

SEQ ID NO: 1649694 - DNA, 15 bp, Homo sapiens
atacaaatggaaacc

SEQ ID NO: 1649695 - DNA, 15 bp, Homo sapiens
aatacaaatggaaac

SEQ ID NO: 1649696 - DNA, 15 bp, Homo sapiens
aaatacaaatggaaa

SEQ ID NO: 1649697 - DNA, 15 bp, Homo sapiens
taaatacaaatggaa

SEQ ID NO: 1649698 - DNA, 15 bp, Homo sapiens
ataaatacaaatgga

SEQ ID NO: 1649699 - DNA, 15 bp, Homo sapiens
cataaatacaaatgg

SEQ ID NO: 1649700 - DNA, 15 bp, Homo sapiens
gcataaatacaaatg

SEQ ID NO: 1649701 - DNA, 15 bp, Homo sapiens
cgcataaatacaaat

SEQ ID NO: 1649702 - DNA, 15 bp, Homo sapiens
ccgcataaatacaaa

SEQ ID NO: 1649703 - DNA, 15 bp, Homo sapiens
gccgcataaatacaa

SEQ ID NO: 1649704 - DNA, 15 bp, Homo sapiens
agccgcataaataca

SEQ ID NO: 1649705 - DNA, 15 bp, Homo sapiens
aagccgcataaatac

SEQ ID NO: 1649706 - DNA, 15 bp, Homo sapiens
gaagccgcataaata

SEQ ID NO: 1649707 - DNA, 15 bp, Homo sapiens
ggaagccgcataaat

SEQ ID NO: 1649708 - DNA, 15 bp, Homo sapiens
tggaagccgcataaa

SEQ ID NO: 1649709 - DNA, 15 bp, Homo sapiens
atggaagccgcataa

SEQ ID NO: 1649710 - DNA, 15 bp, Homo sapiens
gatggaagccgcata

SEQ ID NO: 1649711 - DNA, 15 bp, Homo sapiens
tgatggaagccgcat

SEQ ID NO: 1649712 - DNA, 15 bp, Homo sapiens
ttgatggaagccgca

SEQ ID NO: 1649713 - DNA, 15 bp, Homo sapiens
attgatggaagccgc

SEQ ID NO: 1649714 - DNA, 15 bp, Homo sapiens
gattgatggaagccg

SEQ ID NO: 1649715 - DNA, 15 bp, Homo sapiens
tgattgatggaagcc

SEQ ID NO: 1649716 - DNA, 15 bp, Homo sapiens
ctgattgatggaagc

SEQ ID NO: 1649717 - DNA, 15 bp, Homo sapiens
gctgattgatggaag

SEQ ID NO: 1649718 - DNA, 15 bp, Homo sapiens
tgctgattgatggaa

SEQ ID NO: 1649719 - DNA, 15 bp, Homo sapiens
ttgctgattgatgga

SEQ ID NO: 1649720 - DNA, 15 bp, Homo sapiens
gttgctgattgatgg

SEQ ID NO: 1649721 - DNA, 15 bp, Homo sapiens
ggttgctgattgatg

SEQ ID NO: 1649722 - DNA, 15 bp, Homo sapiens
tggttgctgattgat

SEQ ID NO: 1649723 - DNA, 15 bp, Homo sapiens
atggttgctgattga

SEQ ID NO: 1649724 - DNA, 15 bp, Homo sapiens
tatggttgctgattg

SEQ ID NO: 1649725 - DNA, 15 bp, Homo sapiens
ctatggttgctgatt

SEQ ID NO: 1649726 - DNA, 15 bp, Homo sapiens
gctatggttgctgat

SEQ ID NO: 1649727 - DNA, 15 bp, Homo sapiens
tgctatggttgctga

SEQ ID NO: 1649728 - DNA, 15 bp, Homo sapiens
atgctatggttgctg

SEQ ID NO: 1649729 - DNA, 15 bp, Homo sapiens
tatgctatggttgct

SEQ ID NO: 1649730 - DNA, 15 bp, Homo sapiens
ttatgctatggttgc

SEQ ID NO: 1649731 - DNA, 15 bp, Homo sapiens
tttatgctatggttg

SEQ ID NO: 1649732 - DNA, 15 bp, Homo sapiens
ttttatgctatggtt

SEQ ID NO: 1649733 - DNA, 15 bp, Homo sapiens
tttttatgctatggt

SEQ ID NO: 1649734 - DNA, 15 bp, Homo sapiens
ctttttatgctatgg

SEQ ID NO: 1649735 - DNA, 15 bp, Homo sapiens
tctttttatgctatg

SEQ ID NO: 1649736 - DNA, 15 bp, Homo sapiens
gtctttttatgctat

SEQ ID NO: 1649737 - DNA, 15 bp, Homo sapiens
tgtctttttatgcta

SEQ ID NO: 1649738 - DNA, 15 bp, Homo sapiens
gtgtctttttatgct

SEQ ID NO: 1649739 - DNA, 15 bp, Homo sapiens
tgtgtctttttatgc

SEQ ID NO: 1649740 - DNA, 15 bp, Homo sapiens
gtgtgtctttttatg

SEQ ID NO: 1649741 - DNA, 15 bp, Homo sapiens
ggtgtgtctttttat

SEQ ID NO: 1649742 - DNA, 15 bp, Homo sapiens
aggtgtgtcttttta

SEQ ID NO: 1649743 - DNA, 15 bp, Homo sapiens
gaggtgtgtcttttt

SEQ ID NO: 1649744 - DNA, 15 bp, Homo sapiens
agaggtgtgtctttt

SEQ ID NO: 1649745 - DNA, 15 bp, Homo sapiens
gagaggtgtgtcttt

SEQ ID NO: 1649746 - DNA, 15 bp, Homo sapiens
tgagaggtgtgtctt

SEQ ID NO: 1649747 - DNA, 15 bp, Homo sapiens
gtgagaggtgtgtct

SEQ ID NO: 1649748 - DNA, 15 bp, Homo sapiens
agtgagaggtgtgtc

SEQ ID NO: 1649749 - DNA, 15 bp, Homo sapiens
aagtgagaggtgtgt

SEQ ID NO: 1649750 - DNA, 15 bp, Homo sapiens
caagtgagaggtgtg

SEQ ID NO: 1649751 - DNA, 15 bp, Homo sapiens
acaagtgagaggtgt

SEQ ID NO: 1649752 - DNA, 15 bp, Homo sapiens
aacaagtgagaggtg

SEQ ID NO: 1649753 - DNA, 15 bp, Homo sapiens
caacaagtgagaggt

SEQ ID NO: 1649754 - DNA, 15 bp, Homo sapiens
acaacaagtgagagg

SEQ ID NO: 1649755 - DNA, 15 bp, Homo sapiens
tacaacaagtgagag

SEQ ID NO: 1649756 - DNA, 15 bp, Homo sapiens
atacaacaagtgaga

SEQ ID NO: 1649757 - DNA, 15 bp, Homo sapiens
aatacaacaagtgag

SEQ ID NO: 1649758 - DNA, 15 bp, Homo sapiens
taatacaacaagtga

SEQ ID NO: 1649759 - DNA, 15 bp, Homo sapiens
ataatacaacaagtg

SEQ ID NO: 1649760 - DNA, 15 bp, Homo sapiens
tataatacaacaagt

SEQ ID NO: 1649761 - DNA, 15 bp, Homo sapiens
gtataatacaacaag

SEQ ID NO: 1649762 - DNA, 15 bp, Homo sapiens
tgtataatacaacaa

SEQ ID NO: 1649763 - DNA, 15 bp, Homo sapiens
gtgtataatacaaca

SEQ ID NO: 1649764 - DNA, 15 bp, Homo sapiens
ggtgtataatacaac

SEQ ID NO: 1649765 - DNA, 15 bp, Homo sapiens
tggtgtataatacaa

SEQ ID NO: 1649766 - DNA, 15 bp, Homo sapiens
atggtgtataataca

SEQ ID NO: 1649767 - DNA, 15 bp, Homo sapiens
catggtgtataatac

SEQ ID NO: 1649768 - DNA, 15 bp, Homo sapiens
ccatggtgtataata

SEQ ID NO: 1649769 - DNA, 15 bp, Homo sapiens
gccatggtgtataat

SEQ ID NO: 1649770 - DNA, 15 bp, Homo sapiens
tgccatggtgtataa

SEQ ID NO: 1649771 - DNA, 15 bp, Homo sapiens
atgccatggtgtata

SEQ ID NO: 1649772 - DNA, 15 bp, Homo sapiens
gatgccatggtgtat

SEQ ID NO: 1649773 - DNA, 15 bp, Homo sapiens
ggatgccatggtgta

SEQ ID NO: 1649774 - DNA, 15 bp, Homo sapiens
gggatgccatggtgt

SEQ ID NO: 1649775 - DNA, 15 bp, Homo sapiens
tgggatgccatggtg

SEQ ID NO: 1649776 - DNA, 15 bp, Homo sapiens
ttgggatgccatggt

SEQ ID NO: 1649777 - DNA, 15 bp, Homo sapiens
cttgggatgccatgg

SEQ ID NO: 1649778 - DNA, 15 bp, Homo sapiens
gcttgggatgccatg

SEQ ID NO: 1649779 - DNA, 15 bp, Homo sapiens
ggcttgggatgccat

SEQ ID NO: 1649780 - DNA, 15 bp, Homo sapiens
tggcttgggatgcca

SEQ ID NO: 1649781 - DNA, 15 bp, Homo sapiens
atggcttgggatgcc

SEQ ID NO: 1649782 - DNA, 15 bp, Homo sapiens
gatggcttgggatgc

SEQ ID NO: 1649783 - DNA, 15 bp, Homo sapiens
ggatggcttgggatg

SEQ ID NO: 1649784 - DNA, 15 bp, Homo sapiens
aggatggcttgggat

SEQ ID NO: 1649785 - DNA, 15 bp, Homo sapiens
caggatggcttggga

SEQ ID NO: 1649786 - DNA, 15 bp, Homo sapiens
tcaggatggcttggg

SEQ ID NO: 1649787 - DNA, 15 bp, Homo sapiens
ttcaggatggcttgg

SEQ ID NO: 1649788 - DNA, 15 bp, Homo sapiens
cttcaggatggcttg

SEQ ID NO: 1649789 - DNA, 15 bp, Homo sapiens
acttcaggatggctt

SEQ ID NO: 1649790 - DNA, 15 bp, Homo sapiens
tacttcaggatggct

SEQ ID NO: 1649791 - DNA, 15 bp, Homo sapiens
atacttcaggatggc

SEQ ID NO: 1649792 - DNA, 15 bp, Homo sapiens
catacttcaggatgg

SEQ ID NO: 1649793 - DNA, 15 bp, Homo sapiens
acatacttcaggatg

SEQ ID NO: 1649794 - DNA, 15 bp, Homo sapiens
tacatacttcaggat

SEQ ID NO: 1649795 - DNA, 15 bp, Homo sapiens
ttacatacttcagga

SEQ ID NO: 1649796 - DNA, 15 bp, Homo sapiens
tttacatacttcagg

SEQ ID NO: 1649797 - DNA, 15 bp, Homo sapiens
atttacatacttcag

SEQ ID NO: 1649798 - DNA, 15 bp, Homo sapiens
catttacatacttca

SEQ ID NO: 1649799 - DNA, 15 bp, Homo sapiens
tcatttacatacttc

SEQ ID NO: 1649800 - DNA, 15 bp, Homo sapiens
atcatttacatactt

SEQ ID NO: 1649801 - DNA, 15 bp, Homo sapiens
aatcatttacatact

SEQ ID NO: 1649802 - DNA, 15 bp, Homo sapiens
caatcatttacatac

SEQ ID NO: 1649803 - DNA, 15 bp, Homo sapiens
ccaatcatttacata

SEQ ID NO: 1649804 - DNA, 15 bp, Homo sapiens
gccaatcatttacat

SEQ ID NO: 1649805 - DNA, 15 bp, Homo sapiens
tgccaatcatttaca

SEQ ID NO: 1649806 - DNA, 15 bp, Homo sapiens
ttgccaatcatttac

SEQ ID NO: 1649807 - DNA, 15 bp, Homo sapiens
tttgccaatcattta

SEQ ID NO: 1649808 - DNA, 15 bp, Homo sapiens
ctttgccaatcattt

SEQ ID NO: 1649809 - DNA, 15 bp, Homo sapiens
actttgccaatcatt

SEQ ID NO: 1649810 - DNA, 15 bp, Homo sapiens
aactttgccaatcat

SEQ ID NO: 1649811 - DNA, 15 bp, Homo sapiens
gaactttgccaatca

SEQ ID NO: 1649812 - DNA, 15 bp, Homo sapiens
agaactttgccaatc

SEQ ID NO: 1649813 - DNA, 15 bp, Homo sapiens
aagaactttgccaat

SEQ ID NO: 1649814 - DNA, 15 bp, Homo sapiens
gaagaactttgccaa

SEQ ID NO: 1649815 - DNA, 15 bp, Homo sapiens
agaagaactttgcca

SEQ ID NO: 1649816 - DNA, 15 bp, Homo sapiens
cagaagaactttgcc

SEQ ID NO: 1649817 - DNA, 15 bp, Homo sapiens
acagaagaactttgc

SEQ ID NO: 1649818 - DNA, 15 bp, Homo sapiens
tacagaagaactttg

SEQ ID NO: 1649819 - DNA, 15 bp, Homo sapiens
ttacagaagaacttt

SEQ ID NO: 1649820 - DNA, 15 bp, Homo sapiens
cttacagaagaactt

SEQ ID NO: 1649821 - DNA, 15 bp, Homo sapiens
ccttacagaagaact

SEQ ID NO: 1649822 - DNA, 15 bp, Homo sapiens
gccttacagaagaac

SEQ ID NO: 1649823 - DNA, 15 bp, Homo sapiens
agccttacagaagaa

SEQ ID NO: 1649824 - DNA, 15 bp, Homo sapiens
aagccttacagaaga

SEQ ID NO: 1649825 - DNA, 15 bp, Homo sapiens
aaagccttacagaag

SEQ ID NO: 1649826 - DNA, 15 bp, Homo sapiens
taaagccttacagaa

SEQ ID NO: 1649827 - DNA, 15 bp, Homo sapiens
ttaaagccttacaga

SEQ ID NO: 1649828 - DNA, 15 bp, Homo sapiens
cttaaagccttacag

SEQ ID NO: 1649829 - DNA, 15 bp, Homo sapiens
tcttaaagccttaca

SEQ ID NO: 1649830 - DNA, 15 bp, Homo sapiens
ctcttaaagccttac

SEQ ID NO: 1649831 - DNA, 15 bp, Homo sapiens
tctcttaaagcctta

SEQ ID NO: 1649832 - DNA, 15 bp, Homo sapiens
ctctcttaaagcctt

SEQ ID NO: 1649833 - DNA, 15 bp, Homo sapiens
tctctcttaaagcct

SEQ ID NO: 1649834 - DNA, 15 bp, Homo sapiens
gtctctcttaaagcc

SEQ ID NO: 1649835 - DNA, 15 bp, Homo sapiens
agtctctcttaaagc

SEQ ID NO: 1649836 - DNA, 15 bp, Homo sapiens
aagtctctcttaaag

SEQ ID NO: 1649837 - DNA, 15 bp, Homo sapiens
aaagtctctcttaaa

SEQ ID NO: 1649838 - DNA, 15 bp, Homo sapiens
caaagtctctcttaa

SEQ ID NO: 1649839 - DNA, 15 bp, Homo sapiens
ccaaagtctctctta

SEQ ID NO: 1649840 - DNA, 15 bp, Homo sapiens
cccaaagtctctctt

SEQ ID NO: 1649841 - DNA, 15 bp, Homo sapiens
ccccaaagtctctct

SEQ ID NO: 1649842 - DNA, 15 bp, Homo sapiens
tccccaaagtctctc

SEQ ID NO: 1649843 - DNA, 15 bp, Homo sapiens
gtccccaaagtctct

SEQ ID NO: 1649844 - DNA, 15 bp, Homo sapiens
ggtccccaaagtctc

SEQ ID NO: 1649845 - DNA, 15 bp, Homo sapiens
tggtccccaaagtct

SEQ ID NO: 1649846 - DNA, 15 bp, Homo sapiens
gtggtccccaaagtc

SEQ ID NO: 1649847 - DNA, 15 bp, Homo sapiens
tgtggtccccaaagt

SEQ ID NO: 1649848 - DNA, 15 bp, Homo sapiens
atgtggtccccaaag

SEQ ID NO: 1649849 - DNA, 15 bp, Homo sapiens
catgtggtccccaaa

SEQ ID NO: 1649850 - DNA, 15 bp, Homo sapiens
ccatgtggtccccaa

SEQ ID NO: 1649851 - DNA, 15 bp, Homo sapiens
tccatgtggtcccca

SEQ ID NO: 1649852 - DNA, 15 bp, Homo sapiens
ttccatgtggtcccc

SEQ ID NO: 1649853 - DNA, 15 bp, Homo sapiens
gttccatgtggtccc

SEQ ID NO: 1649854 - DNA, 15 bp, Homo sapiens
tgttccatgtggtcc

SEQ ID NO: 1649855 - DNA, 15 bp, Homo sapiens
ctgttccatgtggtc

SEQ ID NO: 1649856 - DNA, 15 bp, Homo sapiens
tctgttccatgtggt

SEQ ID NO: 1649857 - DNA, 15 bp, Homo sapiens
ttctgttccatgtgg

SEQ ID NO: 1649858 - DNA, 15 bp, Homo sapiens
attctgttccatgtg

SEQ ID NO: 1649859 - DNA, 15 bp, Homo sapiens
cattctgttccatgt

SEQ ID NO: 1649860 - DNA, 15 bp, Homo sapiens
tcattctgttccatg

SEQ ID NO: 1649861 - DNA, 15 bp, Homo sapiens
atcattctgttccat

SEQ ID NO: 1649862 - DNA, 15 bp, Homo sapiens
aatcattctgttcca

SEQ ID NO: 1649863 - DNA, 15 bp, Homo sapiens
aaatcattctgttcc

SEQ ID NO: 1649864 - DNA, 15 bp, Homo sapiens
caaatcattctgttc

SEQ ID NO: 1649865 - DNA, 15 bp, Homo sapiens
gcaaatcattctgtt

SEQ ID NO: 1649866 - DNA, 15 bp, Homo sapiens
ggcaaatcattctgt

SEQ ID NO: 1649867 - DNA, 15 bp, Homo sapiens
gggcaaatcattctg

SEQ ID NO: 1649868 - DNA, 15 bp, Homo sapiens
tgggcaaatcattct

SEQ ID NO: 1649869 - DNA, 15 bp, Homo sapiens
atgggcaaatcattc

SEQ ID NO: 1649870 - DNA, 15 bp, Homo sapiens
catgggcaaatcatt

SEQ ID NO: 1649871 - DNA, 15 bp, Homo sapiens
acatgggcaaatcat

SEQ ID NO: 1649872 - DNA, 15 bp, Homo sapiens
cacatgggcaaatca

SEQ ID NO: 1649873 - DNA, 15 bp, Homo sapiens
tcacatgggcaaatc

SEQ ID NO: 1649874 - DNA, 15 bp, Homo sapiens
atcacatgggcaaat

SEQ ID NO: 1649875 - DNA, 15 bp, Homo sapiens
gatcacatgggcaaa

SEQ ID NO: 1649876 - DNA, 15 bp, Homo sapiens
tgatcacatgggcaa

SEQ ID NO: 1649877 - DNA, 15 bp, Homo sapiens
ttgatcacatgggca

SEQ ID NO: 1649878 - DNA, 15 bp, Homo sapiens
attgatcacatgggc

SEQ ID NO: 1649879 - DNA, 15 bp, Homo sapiens
cattgatcacatggg

SEQ ID NO: 1649880 - DNA, 15 bp, Homo sapiens
acattgatcacatgg

SEQ ID NO: 1649881 - DNA, 15 bp, Homo sapiens
gacattgatcacatg

SEQ ID NO: 1649882 - DNA, 15 bp, Homo sapiens
tgacattgatcacat

SEQ ID NO: 1649883 - DNA, 15 bp, Homo sapiens
gtgacattgatcaca

SEQ ID NO: 1649884 - DNA, 15 bp, Homo sapiens
agtgacattgatcac

SEQ ID NO: 1649885 - DNA, 15 bp, Homo sapiens
cagtgacattgatca

SEQ ID NO: 1649886 - DNA, 15 bp, Homo sapiens
tcagtgacattgatc

SEQ ID NO: 1649887 - DNA, 15 bp, Homo sapiens
atcagtgacattgat

SEQ ID NO: 1649888 - DNA, 15 bp, Homo sapiens
catcagtgacattga

SEQ ID NO: 1649889 - DNA, 15 bp, Homo sapiens
acatcagtgacattg

SEQ ID NO: 1649890 - DNA, 15 bp, Homo sapiens
cacatcagtgacatt

SEQ ID NO: 1649891 - DNA, 15 bp, Homo sapiens
tcacatcagtgacat

SEQ ID NO: 1649892 - DNA, 15 bp, Homo sapiens
gtcacatcagtgaca

SEQ ID NO: 1649893 - DNA, 15 bp, Homo sapiens
tgtcacatcagtgac

SEQ ID NO: 1649894 - DNA, 15 bp, Homo sapiens
ctgtcacatcagtga

SEQ ID NO: 1649895 - DNA, 15 bp, Homo sapiens
actgtcacatcagtg

SEQ ID NO: 1649896 - DNA, 15 bp, Homo sapiens
aactgtcacatcagt

SEQ ID NO: 1649897 - DNA, 15 bp, Homo sapiens
caactgtcacatcag

SEQ ID NO: 1649898 - DNA, 15 bp, Homo sapiens
acaactgtcacatca

SEQ ID NO: 1649899 - DNA, 15 bp, Homo sapiens
gacaactgtcacatc

SEQ ID NO: 1649900 - DNA, 15 bp, Homo sapiens
ggacaactgtcacat

SEQ ID NO: 1649901 - DNA, 15 bp, Homo sapiens
tggacaactgtcaca

SEQ ID NO: 1649902 - DNA, 15 bp, Homo sapiens
atggacaactgtcac

SEQ ID NO: 1649903 - DNA, 15 bp, Homo sapiens
catggacaactgtca

SEQ ID NO: 1649904 - DNA, 15 bp, Homo sapiens
acatggacaactgtc

SEQ ID NO: 1649905 - DNA, 15 bp, Homo sapiens
aacatggacaactgt

SEQ ID NO: 1649906 - DNA, 15 bp, Homo sapiens
gaacatggacaactg

SEQ ID NO: 1649907 - DNA, 15 bp, Homo sapiens
agaacatggacaact

SEQ ID NO: 1649908 - DNA, 15 bp, Homo sapiens
gagaacatggacaac

SEQ ID NO: 1649909 - DNA, 15 bp, Homo sapiens
ggagaacatggacaa

SEQ ID NO: 1649910 - DNA, 15 bp, Homo sapiens
aggagaacatggaca

SEQ ID NO: 1649911 - DNA, 15 bp, Homo sapiens
taggagaacatggac

SEQ ID NO: 1649912 - DNA, 15 bp, Homo sapiens
ttaggagaacatgga

SEQ ID NO: 1649913 - DNA, 15 bp, Homo sapiens
tttaggagaacatgg

SEQ ID NO: 1649914 - DNA, 15 bp, Homo sapiens
ttttaggagaacatg

SEQ ID NO: 1649915 - DNA, 15 bp, Homo sapiens
cttttaggagaacat

SEQ ID NO: 1649916 - DNA, 15 bp, Homo sapiens
tcttttaggagaaca

SEQ ID NO: 1649917 - DNA, 15 bp, Homo sapiens
ttcttttaggagaac

SEQ ID NO: 1649918 - DNA, 15 bp, Homo sapiens
gttcttttaggagaa

SEQ ID NO: 1649919 - DNA, 15 bp, Homo sapiens
tgttcttttaggaga

SEQ ID NO: 1649920 - DNA, 15 bp, Homo sapiens
ttgttcttttaggag

SEQ ID NO: 1649921 - DNA, 15 bp, Homo sapiens
gttgttcttttagga

SEQ ID NO: 1649922 - DNA, 15 bp, Homo sapiens
agttgttcttttagg

SEQ ID NO: 1649923 - DNA, 15 bp, Homo sapiens
aagttgttcttttag

SEQ ID NO: 1649924 - DNA, 15 bp, Homo sapiens
taagttgttctttta

SEQ ID NO: 1649925 - DNA, 15 bp, Homo sapiens
ctaagttgttctttt

SEQ ID NO: 1649926 - DNA, 15 bp, Homo sapiens
gctaagttgttcttt

SEQ ID NO: 1649927 - DNA, 15 bp, Homo sapiens
agctaagttgttctt

SEQ ID NO: 1649928 - DNA, 15 bp, Homo sapiens
cagctaagttgttct

SEQ ID NO: 1649929 - DNA, 15 bp, Homo sapiens
acagctaagttgttc

SEQ ID NO: 1649930 - DNA, 15 bp, Homo sapiens
tacagctaagttgtt

SEQ ID NO: 1649931 - DNA, 15 bp, Homo sapiens
ttacagctaagttgt

SEQ ID NO: 1649932 - DNA, 15 bp, Homo sapiens
cttacagctaagttg

SEQ ID NO: 1649933 - DNA, 15 bp, Homo sapiens
gcttacagctaagtt

SEQ ID NO: 1649934 - DNA, 15 bp, Homo sapiens
ggcttacagctaagt

SEQ ID NO: 1649935 - DNA, 15 bp, Homo sapiens
aggcttacagctaag

SEQ ID NO: 1649936 - DNA, 15 bp, Homo sapiens
gaggcttacagctaa

SEQ ID NO: 1649937 - DNA, 15 bp, Homo sapiens
agaggcttacagcta

SEQ ID NO: 1649938 - DNA, 15 bp, Homo sapiens
cagaggcttacagct

SEQ ID NO: 1649939 - DNA, 15 bp, Homo sapiens
gcagaggcttacagc

SEQ ID NO: 1649940 - DNA, 15 bp, Homo sapiens
ggcagaggcttacag

SEQ ID NO: 1649941 - DNA, 15 bp, Homo sapiens
tggcagaggcttaca

SEQ ID NO: 1649942 - DNA, 15 bp, Homo sapiens
gtggcagaggcttac

SEQ ID NO: 1649943 - DNA, 15 bp, Homo sapiens
cgtggcagaggctta

SEQ ID NO: 1649944 - DNA, 15 bp, Homo sapiens
acgtggcagaggctt

SEQ ID NO: 1649945 - DNA, 15 bp, Homo sapiens
cacgtggcagaggct

SEQ ID NO: 1649946 - DNA, 15 bp, Homo sapiens
gcacgtggcagaggc

SEQ ID NO: 1649947 - DNA, 15 bp, Homo sapiens
agcacgtggcagagg

SEQ ID NO: 1649948 - DNA, 15 bp, Homo sapiens
tagcacgtggcagag

SEQ ID NO: 1649949 - DNA, 15 bp, Homo sapiens
atagcacgtggcaga

SEQ ID NO: 1649950 - DNA, 15 bp, Homo sapiens
tatagcacgtggcag

SEQ ID NO: 1649951 - DNA, 15 bp, Homo sapiens
ctatagcacgtggca

SEQ ID NO: 1649952 - DNA, 15 bp, Homo sapiens
actatagcacgtggc

SEQ ID NO: 1649953 - DNA, 15 bp, Homo sapiens
gactatagcacgtgg

SEQ ID NO: 1649954 - DNA, 15 bp, Homo sapiens
ggactatagcacgtg

SEQ ID NO: 1649955 - DNA, 15 bp, Homo sapiens
gggactatagcacgt

SEQ ID NO: 1649956 - DNA, 15 bp, Homo sapiens
tgggactatagcacg

SEQ ID NO: 1649957 - DNA, 15 bp, Homo sapiens
gtgggactatagcac

SEQ ID NO: 1649958 - DNA, 15 bp, Homo sapiens
ctggtcccagatagg

SEQ ID NO: 1649959 - DNA, 15 bp, Homo sapiens
cctggtcccagatag

SEQ ID NO: 1649960 - DNA, 15 bp, Homo sapiens
tcctggtcccagata

SEQ ID NO: 1649961 - DNA, 15 bp, Homo sapiens
ttcctggtcccagat

SEQ ID NO: 1649962 - DNA, 15 bp, Homo sapiens
tttcctggtcccaga

SEQ ID NO: 1649963 - DNA, 15 bp, Homo sapiens
ctttcctggtcccag

SEQ ID NO: 1649964 - DNA, 15 bp, Homo sapiens
actttcctggtccca

SEQ ID NO: 1649965 - DNA, 15 bp, Homo sapiens
tactttcctggtccc

SEQ ID NO: 1649966 - DNA, 15 bp, Homo sapiens
atactttcctggtcc

SEQ ID NO: 1649967 - DNA, 15 bp, Homo sapiens
gatactttcctggtc

SEQ ID NO: 1649968 - DNA, 15 bp, Homo sapiens
agatactttcctggt

SEQ ID NO: 1649969 - DNA, 15 bp, Homo sapiens
aagatactttcctgg

SEQ ID NO: 1649970 - DNA, 15 bp, Homo sapiens
caagatactttcctg

SEQ ID NO: 1649971 - DNA, 15 bp, Homo sapiens
tcaagatactttcct

SEQ ID NO: 1649972 - DNA, 15 bp, Homo sapiens
gtcaagatactttcc

SEQ ID NO: 1649973 - DNA, 15 bp, Homo sapiens
tgtcaagatactttc

SEQ ID NO: 1649974 - DNA, 15 bp, Homo sapiens
ctgtcaagatacttt

SEQ ID NO: 1649975 - DNA, 15 bp, Homo sapiens
tctgtcaagatactt

SEQ ID NO: 1649976 - DNA, 15 bp, Homo sapiens
ttctgtcaagatact

SEQ ID NO: 1649977 - DNA, 15 bp, Homo sapiens
gttctgtcaagatac

SEQ ID NO: 1649978 - DNA, 15 bp, Homo sapiens
ggttctgtcaagata

SEQ ID NO: 1649979 - DNA, 15 bp, Homo sapiens
aggttctgtcaagat

SEQ ID NO: 1649980 - DNA, 15 bp, Homo sapiens
gaggttctgtcaaga

SEQ ID NO: 1649981 - DNA, 15 bp, Homo sapiens
ggaggttctgtcaag

SEQ ID NO: 1649982 - DNA, 15 bp, Homo sapiens
aggaggttctgtcaa

SEQ ID NO: 1649983 - DNA, 15 bp, Homo sapiens
caggaggttctgtca

SEQ ID NO: 1649984 - DNA, 15 bp, Homo sapiens
tcaggaggttctgtc

SEQ ID NO: 1649985 - DNA, 15 bp, Homo sapiens
gtcaggaggttctgt

SEQ ID NO: 1649986 - DNA, 15 bp, Homo sapiens
ggtcaggaggttctg

SEQ ID NO: 1649987 - DNA, 15 bp, Homo sapiens
aggtcaggaggttct

SEQ ID NO: 1649988 - DNA, 15 bp, Homo sapiens
taggtcaggaggttc

SEQ ID NO: 1649989 - DNA, 15 bp, Homo sapiens
ctaggtcaggaggtt

SEQ ID NO: 1649990 - DNA, 15 bp, Homo sapiens
cctaggtcaggaggt

SEQ ID NO: 1649991 - DNA, 15 bp, Homo sapiens
ccctaggtcaggagg

SEQ ID NO: 1649992 - DNA, 15 bp, Homo sapiens
accctaggtcaggag

SEQ ID NO: 1649993 - DNA, 15 bp, Homo sapiens
aaccctaggtcagga

SEQ ID NO: 1649994 - DNA, 15 bp, Homo sapiens
caaccctaggtcagg

SEQ ID NO: 1649995 - DNA, 15 bp, Homo sapiens
acaaccctaggtcag

SEQ ID NO: 1649996 - DNA, 15 bp, Homo sapiens
aacaaccctaggtca

SEQ ID NO: 1649997 - DNA, 15 bp, Homo sapiens
caacaaccctaggtc

SEQ ID NO: 1649998 - DNA, 15 bp, Homo sapiens
gcaacaaccctaggt

SEQ ID NO: 1649999 - DNA, 15 bp, Homo sapiens
ggcaacaaccctagg

SEQ ID NO: 1650000 - DNA, 15 bp, Homo sapiens
gggcaacaaccctag

SEQ ID NO: 1650001 - DNA, 15 bp, Homo sapiens
tgggcaacaacccta

SEQ ID NO: 1650002 - DNA, 15 bp, Homo sapiens
ctgggcaacaaccct

SEQ ID NO: 1650003 - DNA, 15 bp, Homo sapiens
actgggcaacaaccc

SEQ ID NO: 1650004 - DNA, 15 bp, Homo sapiens
cactgggcaacaacc

SEQ ID NO: 1650005 - DNA, 15 bp, Homo sapiens
ccactgggcaacaac

SEQ ID NO: 1650006 - DNA, 15 bp, Homo sapiens
accactgggcaacaa

SEQ ID NO: 1650007 - DNA, 15 bp, Homo sapiens
taccactgggcaaca

SEQ ID NO: 1650008 - DNA, 15 bp, Homo sapiens
ctaccactgggcaac

SEQ ID NO: 1650009 - DNA, 15 bp, Homo sapiens
actaccactgggcaa

SEQ ID NO: 1650010 - DNA, 15 bp, Homo sapiens
cactaccactgggca

SEQ ID NO: 1650011 - DNA, 15 bp, Homo sapiens
tcactaccactgggc

SEQ ID NO: 1650012 - DNA, 15 bp, Homo sapiens
ctcactaccactggg

SEQ ID NO: 1650013 - DNA, 15 bp, Homo sapiens
gctcactaccactgg

SEQ ID NO: 1650014 - DNA, 15 bp, Homo sapiens
agctcactaccactg

SEQ ID NO: 1650015 - DNA, 15 bp, Homo sapiens
aagctcactaccact

SEQ ID NO: 1650016 - DNA, 15 bp, Homo sapiens
aaagctcactaccac

SEQ ID NO: 1650017 - DNA, 15 bp, Homo sapiens
aaaagctcactacca

SEQ ID NO: 1650018 - DNA, 15 bp, Homo sapiens
gaaaagctcactacc

SEQ ID NO: 1650019 - DNA, 15 bp, Homo sapiens
ggaaaagctcactac

SEQ ID NO: 1650020 - DNA, 15 bp, Homo sapiens
gggaaaagctcacta

SEQ ID NO: 1650021 - DNA, 15 bp, Homo sapiens
ggggaaaagctcact

SEQ ID NO: 1650022 - DNA, 15 bp, Homo sapiens
aggggaaaagctcac

SEQ ID NO: 1650023 - DNA, 15 bp, Homo sapiens
caggggaaaagctca

SEQ ID NO: 1650024 - DNA, 15 bp, Homo sapiens
ccaggggaaaagctc

SEQ ID NO: 1650025 - DNA, 15 bp, Homo sapiens
tccaggggaaaagct

SEQ ID NO: 1650026 - DNA, 15 bp, Homo sapiens
ctccaggggaaaagc

SEQ ID NO: 1650027 - DNA, 15 bp, Homo sapiens
cctccaggggaaaag

SEQ ID NO: 1650028 - DNA, 15 bp, Homo sapiens
tcctccaggggaaaa

SEQ ID NO: 1650029 - DNA, 15 bp, Homo sapiens
atcctccaggggaaa

SEQ ID NO: 1650030 - DNA, 15 bp, Homo sapiens
gatcctccaggggaa

SEQ ID NO: 1650031 - DNA, 15 bp, Homo sapiens
ggatcctccagggga

SEQ ID NO: 1650032 - DNA, 15 bp, Homo sapiens
aggatcctccagggg

SEQ ID NO: 1650033 - DNA, 15 bp, Homo sapiens
gaggatcctccaggg

SEQ ID NO: 1650034 - DNA, 15 bp, Homo sapiens
tgaggatcctccagg

SEQ ID NO: 1650035 - DNA, 15 bp, Homo sapiens
atgaggatcctccag

SEQ ID NO: 1650036 - DNA, 15 bp, Homo sapiens
catgaggatcctcca

SEQ ID NO: 1650037 - DNA, 15 bp, Homo sapiens
gcatgaggatcctcc

SEQ ID NO: 1650038 - DNA, 15 bp, Homo sapiens
ggcatgaggatcctc

SEQ ID NO: 1650039 - DNA, 15 bp, Homo sapiens
gggcatgaggatcct

SEQ ID NO: 1650040 - DNA, 15 bp, Homo sapiens
ggggcatgaggatcc

SEQ ID NO: 1650041 - DNA, 15 bp, Homo sapiens
tggggcatgaggatc

SEQ ID NO: 1650042 - DNA, 15 bp, Homo sapiens
atggggcatgaggat

SEQ ID NO: 1650043 - DNA, 15 bp, Homo sapiens
gatggggcatgagga

SEQ ID NO: 1650044 - DNA, 15 bp, Homo sapiens
agatggggcatgagg

SEQ ID NO: 1650045 - DNA, 15 bp, Homo sapiens
gagatggggcatgag

SEQ ID NO: 1650046 - DNA, 15 bp, Homo sapiens
ggagatggggcatga

SEQ ID NO: 1650047 - DNA, 15 bp, Homo sapiens
tggagatggggcatg

SEQ ID NO: 1650048 - DNA, 15 bp, Homo sapiens
gtggagatggggcat

SEQ ID NO: 1650049 - DNA, 15 bp, Homo sapiens
ggtggagatggggca

SEQ ID NO: 1650050 - DNA, 15 bp, Homo sapiens
aggtggagatggggc

SEQ ID NO: 1650051 - DNA, 15 bp, Homo sapiens
taggtggagatgggg

SEQ ID NO: 1650052 - DNA, 15 bp, Homo sapiens
ctaggtggagatggg

SEQ ID NO: 1650053 - DNA, 15 bp, Homo sapiens
cctaggtggagatgg

SEQ ID NO: 1650054 - DNA, 15 bp, Homo sapiens
ccctaggtggagatg

SEQ ID NO: 1650055 - DNA, 15 bp, Homo sapiens
tccctaggtggagat

SEQ ID NO: 1650056 - DNA, 15 bp, Homo sapiens
atccctaggtggaga

SEQ ID NO: 1650057 - DNA, 15 bp, Homo sapiens
gatccctaggtggag

SEQ ID NO: 1650058 - DNA, 15 bp, Homo sapiens
cgatccctaggtgga

SEQ ID NO: 1650059 - DNA, 15 bp, Homo sapiens
acgatccctaggtgg

SEQ ID NO: 1650060 - DNA, 15 bp, Homo sapiens
gacgatccctaggtg

SEQ ID NO: 1650061 - DNA, 15 bp, Homo sapiens
tgacgatccctaggt

SEQ ID NO: 1650062 - DNA, 15 bp, Homo sapiens
ttgacgatccctagg

SEQ ID NO: 1650063 - DNA, 15 bp, Homo sapiens
tttgacgatccctag

SEQ ID NO: 1650064 - DNA, 15 bp, Homo sapiens
ctttgacgatcccta

SEQ ID NO: 1650065 - DNA, 15 bp, Homo sapiens
cctttgacgatccct

SEQ ID NO: 1650066 - DNA, 15 bp, Homo sapiens
ccctttgacgatccc

SEQ ID NO: 1650067 - DNA, 15 bp, Homo sapiens
tccctttgacgatcc

SEQ ID NO: 1650068 - DNA, 15 bp, Homo sapiens
ttccctttgacgatc

SEQ ID NO: 1650069 - DNA, 15 bp, Homo sapiens
attccctttgacgat

SEQ ID NO: 1650070 - DNA, 15 bp, Homo sapiens
cattccctttgacga

SEQ ID NO: 1650071 - DNA, 15 bp, Homo sapiens
ccattccctttgacg

SEQ ID NO: 1650072 - DNA, 15 bp, Homo sapiens
tccattccctttgac

SEQ ID NO: 1650073 - DNA, 15 bp, Homo sapiens
atccattccctttga

SEQ ID NO: 1650074 - DNA, 15 bp, Homo sapiens
gatccattccctttg

SEQ ID NO: 1650075 - DNA, 15 bp, Homo sapiens
tgatccattcccttt

SEQ ID NO: 1650076 - DNA, 15 bp, Homo sapiens
gtgatccattccctt

SEQ ID NO: 1650077 - DNA, 15 bp, Homo sapiens
agtgatccattccct

SEQ ID NO: 1650078 - DNA, 15 bp, Homo sapiens
tagtgatccattccc

SEQ ID NO: 1650079 - DNA, 15 bp, Homo sapiens
ttagtgatccattcc

SEQ ID NO: 1650080 - DNA, 15 bp, Homo sapiens
gttagtgatccattc

SEQ ID NO: 1650081 - DNA, 15 bp, Homo sapiens
tgttagtgatccatt

SEQ ID NO: 1650082 - DNA, 15 bp, Homo sapiens
gtgttagtgatccat

SEQ ID NO: 1650083 - DNA, 15 bp, Homo sapiens
agtgttagtgatcca

SEQ ID NO: 1650084 - DNA, 15 bp, Homo sapiens
cagtgttagtgatcc

SEQ ID NO: 1650085 - DNA, 15 bp, Homo sapiens
acagtgttagtgatc

SEQ ID NO: 1650086 - DNA, 15 bp, Homo sapiens
tacagtgttagtgat

SEQ ID NO: 1650087 - DNA, 15 bp, Homo sapiens
ttacagtgttagtga

SEQ ID NO: 1650088 - DNA, 15 bp, Homo sapiens
tttacagtgttagtg

SEQ ID NO: 1650089 - DNA, 15 bp, Homo sapiens
ttttacagtgttagt

SEQ ID NO: 1650090 - DNA, 15 bp, Homo sapiens
gttttacagtgttag

SEQ ID NO: 1650091 - DNA, 15 bp, Homo sapiens
tgttttacagtgtta

SEQ ID NO: 1650092 - DNA, 15 bp, Homo sapiens
ttgttttacagtgtt

SEQ ID NO: 1650093 - DNA, 15 bp, Homo sapiens
gttgttttacagtgt

SEQ ID NO: 1650094 - DNA, 15 bp, Homo sapiens
tgttgttttacagtg

SEQ ID NO: 1650095 - DNA, 15 bp, Homo sapiens
ttgttgttttacagt

SEQ ID NO: 1650096 - DNA, 15 bp, Homo sapiens
cttgttgttttacag

SEQ ID NO: 1650097 - DNA, 15 bp, Homo sapiens
gcttgttgttttaca

SEQ ID NO: 1650098 - DNA, 15 bp, Homo sapiens
aagggaaagggaatg

SEQ ID NO: 1650099 - DNA, 15 bp, Homo sapiens
taagggaaagggaat

SEQ ID NO: 1650100 - DNA, 15 bp, Homo sapiens
ttaagggaaagggaa

SEQ ID NO: 1650101 - DNA, 15 bp, Homo sapiens
gttaagggaaaggga

SEQ ID NO: 1650102 - DNA, 15 bp, Homo sapiens
cgttaagggaaaggg

SEQ ID NO: 1650103 - DNA, 15 bp, Homo sapiens
ccgttaagggaaagg

SEQ ID NO: 1650104 - DNA, 15 bp, Homo sapiens
cccgttaagggaaag

SEQ ID NO: 1650105 - DNA, 15 bp, Homo sapiens
tcccgttaagggaaa

SEQ ID NO: 1650106 - DNA, 15 bp, Homo sapiens
ttcccgttaagggaa

SEQ ID NO: 1650107 - DNA, 15 bp, Homo sapiens
attcccgttaaggga

SEQ ID NO: 1650108 - DNA, 15 bp, Homo sapiens
gattcccgttaaggg

SEQ ID NO: 1650109 - DNA, 15 bp, Homo sapiens
agattcccgttaagg

SEQ ID NO: 1650110 - DNA, 15 bp, Homo sapiens
tagattcccgttaag

SEQ ID NO: 1650111 - DNA, 15 bp, Homo sapiens
ttagattcccgttaa

SEQ ID NO: 1650112 - DNA, 15 bp, Homo sapiens
cttagattcccgtta

SEQ ID NO: 1650113 - DNA, 15 bp, Homo sapiens
ccttagattcccgtt

SEQ ID NO: 1650114 - DNA, 15 bp, Homo sapiens
gccttagattcccgt

SEQ ID NO: 1650115 - DNA, 15 bp, Homo sapiens
agccttagattcccg

SEQ ID NO: 1650116 - DNA, 15 bp, Homo sapiens
tagccttagattccc

SEQ ID NO: 1650117 - DNA, 15 bp, Homo sapiens
ctagccttagattcc

SEQ ID NO: 1650118 - DNA, 15 bp, Homo sapiens
tctagccttagattc

SEQ ID NO: 1650119 - DNA, 15 bp, Homo sapiens
ctctagccttagatt

SEQ ID NO: 1650120 - DNA, 15 bp, Homo sapiens
tctctagccttagat

SEQ ID NO: 1650121 - DNA, 15 bp, Homo sapiens
ttctctagccttaga

SEQ ID NO: 1650122 - DNA, 15 bp, Homo sapiens
tttctctagccttag

SEQ ID NO: 1650123 - DNA, 15 bp, Homo sapiens
ttttctctagcctta

SEQ ID NO: 1650124 - DNA, 15 bp, Homo sapiens
attttctctagcctt

SEQ ID NO: 1650125 - DNA, 15 bp, Homo sapiens
cattttctctagcct

SEQ ID NO: 1650126 - DNA, 15 bp, Homo sapiens
ccattttctctagcc

SEQ ID NO: 1650127 - DNA, 15 bp, Homo sapiens
accattttctctagc

SEQ ID NO: 1650128 - DNA, 15 bp, Homo sapiens
aaccattttctctag

SEQ ID NO: 1650129 - DNA, 15 bp, Homo sapiens
taaccattttctcta

SEQ ID NO: 1650130 - DNA, 15 bp, Homo sapiens
gtaaccattttctct

SEQ ID NO: 1650131 - DNA, 15 bp, Homo sapiens
tgtaaccattttctc

SEQ ID NO: 1650132 - DNA, 15 bp, Homo sapiens
atgtaaccattttct

SEQ ID NO: 1650133 - DNA, 15 bp, Homo sapiens
aatgtaaccattttc

SEQ ID NO: 1650134 - DNA, 15 bp, Homo sapiens
aaatgtaaccatttt

SEQ ID NO: 1650135 - DNA, 15 bp, Homo sapiens
aaaatgtaaccattt

SEQ ID NO: 1650136 - DNA, 15 bp, Homo sapiens
caaaatgtaaccatt

SEQ ID NO: 1650137 - DNA, 15 bp, Homo sapiens
ccaaaatgtaaccat

SEQ ID NO: 1650138 - DNA, 15 bp, Homo sapiens
tccaaaatgtaacca

SEQ ID NO: 1650139 - DNA, 15 bp, Homo sapiens
ttccaaaatgtaacc

SEQ ID NO: 1650140 - DNA, 15 bp, Homo sapiens
gttccaaaatgtaac

SEQ ID NO: 1650141 - DNA, 15 bp, Homo sapiens
agttccaaaatgtaa

SEQ ID NO: 1650142 - DNA, 15 bp, Homo sapiens
cagttccaaaatgta

SEQ ID NO: 1650143 - DNA, 15 bp, Homo sapiens
ccagttccaaaatgt

SEQ ID NO: 1650144 - DNA, 15 bp, Homo sapiens
tcccagttccaaaat

SEQ ID NO: 1650145 - DNA, 15 bp, Homo sapiens
ttcccagttccaaaa

SEQ ID NO: 1650146 - DNA, 15 bp, Homo sapiens
attcccagttccaaa

SEQ ID NO: 1650147 - DNA, 15 bp, Homo sapiens
gattcccagttccaa

SEQ ID NO: 1650148 - DNA, 15 bp, Homo sapiens
agattcccagttcca

SEQ ID NO: 1650149 - DNA, 15 bp, Homo sapiens
tagattcccagttcc

SEQ ID NO: 1650150 - DNA, 15 bp, Homo sapiens
ttagattcccagttc

SEQ ID NO: 1650151 - DNA, 15 bp, Homo sapiens
cttagattcccagtt

SEQ ID NO: 1650152 - DNA, 15 bp, Homo sapiens
ccttagattcccagt

SEQ ID NO: 1650153 - DNA, 15 bp, Homo sapiens
gccttagattcccag

SEQ ID NO: 1650154 - DNA, 15 bp, Homo sapiens
agccttagattccca

SEQ ID NO: 1650155 - DNA, 15 bp, Homo sapiens
ctttctctagcctta

SEQ ID NO: 1650156 - DNA, 15 bp, Homo sapiens
actttctctagcctt

SEQ ID NO: 1650157 - DNA, 15 bp, Homo sapiens
cactttctctagcct

SEQ ID NO: 1650158 - DNA, 15 bp, Homo sapiens
ccactttctctagcc

SEQ ID NO: 1650159 - DNA, 15 bp, Homo sapiens
accactttctctagc

SEQ ID NO: 1650160 - DNA, 15 bp, Homo sapiens
aaccactttctctag

SEQ ID NO: 1650161 - DNA, 15 bp, Homo sapiens
taaccactttctcta

SEQ ID NO: 1650162 - DNA, 15 bp, Homo sapiens
gtaaccactttctct

SEQ ID NO: 1650163 - DNA, 15 bp, Homo sapiens
tgtaaccactttctc

SEQ ID NO: 1650164 - DNA, 15 bp, Homo sapiens
atgtaaccactttct

SEQ ID NO: 1650165 - DNA, 15 bp, Homo sapiens
aatgtaaccactttc

SEQ ID NO: 1650166 - DNA, 15 bp, Homo sapiens
aaatgtaaccacttt

SEQ ID NO: 1650167 - DNA, 15 bp, Homo sapiens
aaaatgtaaccactt

SEQ ID NO: 1650168 - DNA, 15 bp, Homo sapiens
caaaatgtaaccact

SEQ ID NO: 1650169 - DNA, 15 bp, Homo sapiens
ccaaaatgtaaccac

SEQ ID NO: 1650170 - DNA, 15 bp, Homo sapiens
tcagttccaaaatgt

SEQ ID NO: 1650171 - DNA, 15 bp, Homo sapiens
atcagttccaaaatg

SEQ ID NO: 1650172 - DNA, 15 bp, Homo sapiens
tatcagttccaaaat

SEQ ID NO: 1650173 - DNA, 15 bp, Homo sapiens
gtatcagttccaaaa

SEQ ID NO: 1650174 - DNA, 15 bp, Homo sapiens
tgtatcagttccaaa

SEQ ID NO: 1650175 - DNA, 15 bp, Homo sapiens
ctgtatcagttccaa

SEQ ID NO: 1650176 - DNA, 15 bp, Homo sapiens
tctgtatcagttcca

SEQ ID NO: 1650177 - DNA, 15 bp, Homo sapiens
ttctgtatcagttcc

SEQ ID NO: 1650178 - DNA, 15 bp, Homo sapiens
gttctgtatcagttc

SEQ ID NO: 1650179 - DNA, 15 bp, Homo sapiens
ggttctgtatcagtt

SEQ ID NO: 1650180 - DNA, 15 bp, Homo sapiens
tggttctgtatcagt

SEQ ID NO: 1650181 - DNA, 15 bp, Homo sapiens
atggttctgtatcag

SEQ ID NO: 1650182 - DNA, 15 bp, Homo sapiens
tatggttctgtatca

SEQ ID NO: 1650183 - DNA, 15 bp, Homo sapiens
gtatggttctgtatc

SEQ ID NO: 1650184 - DNA, 15 bp, Homo sapiens
tgtatggttctgtat

SEQ ID NO: 1650185 - DNA, 15 bp, Homo sapiens
atgtatggttctgta

SEQ ID NO: 1650186 - DNA, 15 bp, Homo sapiens
aatgtatggttctgt

SEQ ID NO: 1650187 - DNA, 15 bp, Homo sapiens
aaatgtatggttctg

SEQ ID NO: 1650188 - DNA, 15 bp, Homo sapiens
gaaatgtatggttct

SEQ ID NO: 1650189 - DNA, 15 bp, Homo sapiens
tgaaatgtatggttc

SEQ ID NO: 1650190 - DNA, 15 bp, Homo sapiens
gtgaaatgtatggtt

SEQ ID NO: 1650191 - DNA, 15 bp, Homo sapiens
agtgaaatgtatggt

SEQ ID NO: 1650192 - DNA, 15 bp, Homo sapiens
tagtgaaatgtatgg

SEQ ID NO: 1650193 - DNA, 15 bp, Homo sapiens
ctagtgaaatgtatg

SEQ ID NO: 1650194 - DNA, 15 bp, Homo sapiens
cctagtgaaatgtat

SEQ ID NO: 1650195 - DNA, 15 bp, Homo sapiens
ccctagtgaaatgta

SEQ ID NO: 1650196 - DNA, 15 bp, Homo sapiens
accctagtgaaatgt

SEQ ID NO: 1650197 - DNA, 15 bp, Homo sapiens
aaccctagtgaaatg

SEQ ID NO: 1650198 - DNA, 15 bp, Homo sapiens
gaaccctagtgaaat

SEQ ID NO: 1650199 - DNA, 15 bp, Homo sapiens
tgaaccctagtgaaa

SEQ ID NO: 1650200 - DNA, 15 bp, Homo sapiens
ttgaaccctagtgaa

SEQ ID NO: 1650201 - DNA, 15 bp, Homo sapiens
attgaaccctagtga

SEQ ID NO: 1650202 - DNA, 15 bp, Homo sapiens
tattgaaccctagtg

SEQ ID NO: 1650203 - DNA, 15 bp, Homo sapiens
atattgaaccctagt

SEQ ID NO: 1650204 - DNA, 15 bp, Homo sapiens
aatattgaaccctag

SEQ ID NO: 1650205 - DNA, 15 bp, Homo sapiens
gaatattgaacccta

SEQ ID NO: 1650206 - DNA, 15 bp, Homo sapiens
tgaatattgaaccct

SEQ ID NO: 1650207 - DNA, 15 bp, Homo sapiens
gtgaatattgaaccc

SEQ ID NO: 1650208 - DNA, 15 bp, Homo sapiens
agtgaatattgaacc

SEQ ID NO: 1650209 - DNA, 15 bp, Homo sapiens
cagtgaatattgaac

SEQ ID NO: 1650210 - DNA, 15 bp, Homo sapiens
tcagtgaatattgaa

SEQ ID NO: 1650211 - DNA, 15 bp, Homo sapiens
gtcagtgaatattga

SEQ ID NO: 1650212 - DNA, 15 bp, Homo sapiens
tgtcagtgaatattg

SEQ ID NO: 1650213 - DNA, 15 bp, Homo sapiens
ttgtcagtgaatatt

SEQ ID NO: 1650214 - DNA, 15 bp, Homo sapiens
cttgtcagtgaatat

SEQ ID NO: 1650215 - DNA, 15 bp, Homo sapiens
tcttgtcagtgaata

SEQ ID NO: 1650216 - DNA, 15 bp, Homo sapiens
ttcttgtcagtgaat

SEQ ID NO: 1650217 - DNA, 15 bp, Homo sapiens
attcttgtcagtgaa

SEQ ID NO: 1650218 - DNA, 15 bp, Homo sapiens
aattcttgtcagtga

SEQ ID NO: 1650219 - DNA, 15 bp, Homo sapiens
aaattcttgtcagtg

SEQ ID NO: 1650220 - DNA, 15 bp, Homo sapiens
aaaattcttgtcagt

SEQ ID NO: 1650221 - DNA, 15 bp, Homo sapiens
caaaattcttgtcag

SEQ ID NO: 1650222 - DNA, 15 bp, Homo sapiens
tcaaaattcttgtca

SEQ ID NO: 1650223 - DNA, 15 bp, Homo sapiens
ctcaaaattcttgtc

SEQ ID NO: 1650224 - DNA, 15 bp, Homo sapiens
tctcaaaattcttgt

SEQ ID NO: 1650225 - DNA, 15 bp, Homo sapiens
ttctcaaaattcttg

SEQ ID NO: 1650226 - DNA, 15 bp, Homo sapiens
attctcaaaattctt

SEQ ID NO: 1650227 - DNA, 15 bp, Homo sapiens
gattctcaaaattct

SEQ ID NO: 1650228 - DNA, 15 bp, Homo sapiens
ggattctcaaaattc

SEQ ID NO: 1650229 - DNA, 15 bp, Homo sapiens
cggattctcaaaatt

SEQ ID NO: 1650230 - DNA, 15 bp, Homo sapiens
acggattctcaaaat

SEQ ID NO: 1650231 - DNA, 15 bp, Homo sapiens
gacggattctcaaaa

SEQ ID NO: 1650232 - DNA, 15 bp, Homo sapiens
tgacggattctcaaa

SEQ ID NO: 1650233 - DNA, 15 bp, Homo sapiens
atgacggattctcaa

SEQ ID NO: 1650234 - DNA, 15 bp, Homo sapiens
gatgacggattctca

SEQ ID NO: 1650235 - DNA, 15 bp, Homo sapiens
agatgacggattctc

SEQ ID NO: 1650236 - DNA, 15 bp, Homo sapiens
aagatgacggattct

SEQ ID NO: 1650237 - DNA, 15 bp, Homo sapiens
caagatgacggattc

SEQ ID NO: 1650238 - DNA, 15 bp, Homo sapiens
gcaagatgacggatt

SEQ ID NO: 1650239 - DNA, 15 bp, Homo sapiens
tgcaagatgacggat

SEQ ID NO: 1650240 - DNA, 15 bp, Homo sapiens
ctgcaagatgacgga

SEQ ID NO: 1650241 - DNA, 15 bp, Homo sapiens
tctgcaagatgacgg

SEQ ID NO: 1650242 - DNA, 15 bp, Homo sapiens
gtctgcaagatgacg

SEQ ID NO: 1650243 - DNA, 15 bp, Homo sapiens
ggtctgcaagatgac

SEQ ID NO: 1650244 - DNA, 15 bp, Homo sapiens
tggtctgcaagatga

SEQ ID NO: 1650245 - DNA, 15 bp, Homo sapiens
ttggtctgcaagatg

SEQ ID NO: 1650246 - DNA, 15 bp, Homo sapiens
gttggtctgcaagat

SEQ ID NO: 1650247 - DNA, 15 bp, Homo sapiens
tgttggtctgcaaga

SEQ ID NO: 1650248 - DNA, 15 bp, Homo sapiens
ttgttggtctgcaag

SEQ ID NO: 1650249 - DNA, 15 bp, Homo sapiens
tttgttggtctgcaa

SEQ ID NO: 1650250 - DNA, 15 bp, Homo sapiens
ttttgttggtctgca

SEQ ID NO: 1650251 - DNA, 15 bp, Homo sapiens
attttgttggtctgc

SEQ ID NO: 1650252 - DNA, 15 bp, Homo sapiens
tattttgttggtctg

SEQ ID NO: 1650253 - DNA, 15 bp, Homo sapiens
atattttgttggtct

SEQ ID NO: 1650254 - DNA, 15 bp, Homo sapiens
gatattttgttggtc

SEQ ID NO: 1650255 - DNA, 15 bp, Homo sapiens
tgatattttgttggt

SEQ ID NO: 1650256 - DNA, 15 bp, Homo sapiens
ttgatattttgttgg

SEQ ID NO: 1650257 - DNA, 15 bp, Homo sapiens
tttgatattttgttg

SEQ ID NO: 1650258 - DNA, 15 bp, Homo sapiens
ctttgatattttgtt

SEQ ID NO: 1650259 - DNA, 15 bp, Homo sapiens
actttgatattttgt

SEQ ID NO: 1650260 - DNA, 15 bp, Homo sapiens
gactttgatattttg

SEQ ID NO: 1650261 - DNA, 15 bp, Homo sapiens
agactttgatatttt

SEQ ID NO: 1650262 - DNA, 15 bp, Homo sapiens
aagactttgatattt

SEQ ID NO: 1650263 - DNA, 15 bp, Homo sapiens
taagactttgatatt

SEQ ID NO: 1650264 - DNA, 15 bp, Homo sapiens
ataagactttgatat

SEQ ID NO: 1650265 - DNA, 15 bp, Homo sapiens
cataagactttgata

SEQ ID NO: 1650266 - DNA, 15 bp, Homo sapiens
ccataagactttgat

SEQ ID NO: 1650267 - DNA, 15 bp, Homo sapiens
tccataagactttga

SEQ ID NO: 1650268 - DNA, 15 bp, Homo sapiens
ctccataagactttg

SEQ ID NO: 1650269 - DNA, 15 bp, Homo sapiens
tctccataagacttt

SEQ ID NO: 1650270 - DNA, 15 bp, Homo sapiens
ctctccataagactt

SEQ ID NO: 1650271 - DNA, 15 bp, Homo sapiens
tctctccataagact

SEQ ID NO: 1650272 - DNA, 15 bp, Homo sapiens
ttctctccataagac

SEQ ID NO: 1650273 - DNA, 15 bp, Homo sapiens
attctctccataaga

SEQ ID NO: 1650274 - DNA, 15 bp, Homo sapiens
tattctctccataag

SEQ ID NO: 1650275 - DNA, 15 bp, Homo sapiens
ttattctctccataa

SEQ ID NO: 1650276 - DNA, 15 bp, Homo sapiens
gttattctctccata

SEQ ID NO: 1650277 - DNA, 15 bp, Homo sapiens
agttattctctccat

SEQ ID NO: 1650278 - DNA, 15 bp, Homo sapiens
cagttattctctcca

SEQ ID NO: 1650279 - DNA, 15 bp, Homo sapiens
tcagttattctctcc

SEQ ID NO: 1650280 - DNA, 15 bp, Homo sapiens
ctcagttattctctc

SEQ ID NO: 1650281 - DNA, 15 bp, Homo sapiens
actcagttattctct

SEQ ID NO: 1650282 - DNA, 15 bp, Homo sapiens
cactcagttattctc

SEQ ID NO: 1650283 - DNA, 15 bp, Homo sapiens
ccactcagttattct

SEQ ID NO: 1650284 - DNA, 15 bp, Homo sapiens
gccactcagttattc

SEQ ID NO: 1650285 - DNA, 15 bp, Homo sapiens
tgccactcagttatt

SEQ ID NO: 1650286 - DNA, 15 bp, Homo sapiens
gtgccactcagttat

SEQ ID NO: 1650287 - DNA, 15 bp, Homo sapiens
tgtgccactcagtta

SEQ ID NO: 1650288 - DNA, 15 bp, Homo sapiens
ctgtgccactcagtt

SEQ ID NO: 1650289 - DNA, 15 bp, Homo sapiens
gctgtgccactcagt

SEQ ID NO: 1650290 - DNA, 15 bp, Homo sapiens
ggctgtgccactcag

SEQ ID NO: 1650291 - DNA, 15 bp, Homo sapiens
tggctgtgccactca

SEQ ID NO: 1650292 - DNA, 15 bp, Homo sapiens
ctggctgtgccactc

SEQ ID NO: 1650293 - DNA, 15 bp, Homo sapiens
gctggctgtgccact

SEQ ID NO: 1650294 - DNA, 15 bp, Homo sapiens
ggctggctgtgccac

SEQ ID NO: 1650295 - DNA, 15 bp, Homo sapiens
tggctggctgtgcca

SEQ ID NO: 1650296 - DNA, 15 bp, Homo sapiens
atggctggctgtgcc

SEQ ID NO: 1650297 - DNA, 15 bp, Homo sapiens
gatggctggctgtgc

SEQ ID NO: 1650298 - DNA, 15 bp, Homo sapiens
agatggctggctgtg

SEQ ID NO: 1650299 - DNA, 15 bp, Homo sapiens
cagatggctggctgt

SEQ ID NO: 1650300 - DNA, 15 bp, Homo sapiens
ccagatggctggctg

SEQ ID NO: 1650301 - DNA, 15 bp, Homo sapiens
accagatggctggct

SEQ ID NO: 1650302 - DNA, 15 bp, Homo sapiens
aaccagatggctggc

SEQ ID NO: 1650303 - DNA, 15 bp, Homo sapiens
gaaccagatggctgg

SEQ ID NO: 1650304 - DNA, 15 bp, Homo sapiens
tgaaccagatggctg

SEQ ID NO: 1650305 - DNA, 15 bp, Homo sapiens
ttgaaccagatggct

SEQ ID NO: 1650306 - DNA, 15 bp, Homo sapiens
tttgaaccagatggc

SEQ ID NO: 1650307 - DNA, 15 bp, Homo sapiens
atttgaaccagatgg

SEQ ID NO: 1650308 - DNA, 15 bp, Homo sapiens
tatttgaaccagatg

SEQ ID NO: 1650309 - DNA, 15 bp, Homo sapiens
gtatttgaaccagat

SEQ ID NO: 1650310 - DNA, 15 bp, Homo sapiens
agtatttgaaccaga

SEQ ID NO: 1650311 - DNA, 15 bp, Homo sapiens
gagtatttgaaccag

SEQ ID NO: 1650312 - DNA, 15 bp, Homo sapiens
ggagtatttgaacca

SEQ ID NO: 1650313 - DNA, 15 bp, Homo sapiens
tggagtatttgaacc

SEQ ID NO: 1650314 - DNA, 15 bp, Homo sapiens
ctggagtatttgaac

SEQ ID NO: 1650315 - DNA, 15 bp, Homo sapiens
gctggagtatttgaa

SEQ ID NO: 1650316 - DNA, 15 bp, Homo sapiens
tgctggagtatttga

SEQ ID NO: 1650317 - DNA, 15 bp, Homo sapiens
atgctggagtatttg

SEQ ID NO: 1650318 - DNA, 15 bp, Homo sapiens
gatgctggagtattt

SEQ ID NO: 1650319 - DNA, 15 bp, Homo sapiens
tgatgctggagtatt

SEQ ID NO: 1650320 - DNA, 15 bp, Homo sapiens
ctgatgctggagtat

SEQ ID NO: 1650321 - DNA, 15 bp, Homo sapiens
tctgatgctggagta

SEQ ID NO: 1650322 - DNA, 15 bp, Homo sapiens
gtctgatgctggagt

SEQ ID NO: 1650323 - DNA, 15 bp, Homo sapiens
tgtctgatgctggag

SEQ ID NO: 1650324 - DNA, 15 bp, Homo sapiens
ctgtctgatgctgga

SEQ ID NO: 1650325 - DNA, 15 bp, Homo sapiens
tctgtctgatgctgg

SEQ ID NO: 1650326 - DNA, 15 bp, Homo sapiens
ttctgtctgatgctg

SEQ ID NO: 1650327 - DNA, 15 bp, Homo sapiens
attctgtctgatgct

SEQ ID NO: 1650328 - DNA, 15 bp, Homo sapiens
aattctgtctgatgc

SEQ ID NO: 1650329 - DNA, 15 bp, Homo sapiens
caattctgtctgatg

SEQ ID NO: 1650330 - DNA, 15 bp, Homo sapiens
acaattctgtctgat

SEQ ID NO: 1650331 - DNA, 15 bp, Homo sapiens
gacaattctgtctga

SEQ ID NO: 1650332 - DNA, 15 bp, Homo sapiens
tgacaattctgtctg

SEQ ID NO: 1650333 - DNA, 15 bp, Homo sapiens
gtgacaattctgtct

SEQ ID NO: 1650334 - DNA, 15 bp, Homo sapiens
tgtgacaattctgtc

SEQ ID NO: 1650335 - DNA, 15 bp, Homo sapiens
ctgtgacaattctgt

SEQ ID NO: 1650336 - DNA, 15 bp, Homo sapiens
gctgtgacaattctg

SEQ ID NO: 1650337 - DNA, 15 bp, Homo sapiens
agctgtgacaattct

SEQ ID NO: 1650338 - DNA, 15 bp, Homo sapiens
tagctgtgacaattc

SEQ ID NO: 1650339 - DNA, 15 bp, Homo sapiens
ctagctgtgacaatt

SEQ ID NO: 1650340 - DNA, 15 bp, Homo sapiens
tctagctgtgacaat

SEQ ID NO: 1650341 - DNA, 15 bp, Homo sapiens
gtctagctgtgacaa

SEQ ID NO: 1650342 - DNA, 15 bp, Homo sapiens
cgtctagctgtgaca

SEQ ID NO: 1650343 - DNA, 15 bp, Homo sapiens
acgtctagctgtgac

SEQ ID NO: 1650344 - DNA, 15 bp, Homo sapiens
cacgtctagctgtga

SEQ ID NO: 1650345 - DNA, 15 bp, Homo sapiens
tcacgtctagctgtg

SEQ ID NO: 1650346 - DNA, 15 bp, Homo sapiens
atcacgtctagctgt

SEQ ID NO: 1650347 - DNA, 15 bp, Homo sapiens
tatcacgtctagctg

SEQ ID NO: 1650348 - DNA, 15 bp, Homo sapiens
atatcacgtctagct

SEQ ID NO: 1650349 - DNA, 15 bp, Homo sapiens
aatatcacgtctagc

SEQ ID NO: 1650350 - DNA, 15 bp, Homo sapiens
taatatcacgtctag

SEQ ID NO: 1650351 - DNA, 15 bp, Homo sapiens
ttaatatcacgtcta

SEQ ID NO: 1650352 - DNA, 15 bp, Homo sapiens
attaatatcacgtct

SEQ ID NO: 1650353 - DNA, 15 bp, Homo sapiens
tattaatatcacgtc

SEQ ID NO: 1650354 - DNA, 15 bp, Homo sapiens
ttattaatatcacgt

SEQ ID NO: 1650355 - DNA, 15 bp, Homo sapiens
attattaatatcacg

SEQ ID NO: 1650356 - DNA, 15 bp, Homo sapiens
gattattaatatcac

SEQ ID NO: 1650357 - DNA, 15 bp, Homo sapiens
tgattattaatatca

SEQ ID NO: 1650358 - DNA, 15 bp, Homo sapiens
gtgattattaatatc

SEQ ID NO: 1650359 - DNA, 15 bp, Homo sapiens
tgtgattattaatat

SEQ ID NO: 1650360 - DNA, 15 bp, Homo sapiens
atgtgattattaata

SEQ ID NO: 1650361 - DNA, 15 bp, Homo sapiens
tatgtgattattaat

SEQ ID NO: 1650362 - DNA, 15 bp, Homo sapiens
ctatgtgattattaa

SEQ ID NO: 1650363 - DNA, 15 bp, Homo sapiens
cctatgtgattatta

SEQ ID NO: 1650364 - DNA, 15 bp, Homo sapiens
gcctatgtgattatt

SEQ ID NO: 1650365 - DNA, 15 bp, Homo sapiens
ggcctatgtgattat

SEQ ID NO: 1650366 - DNA, 15 bp, Homo sapiens
tggcctatgtgatta

SEQ ID NO: 1650367 - DNA, 15 bp, Homo sapiens
ctggcctatgtgatt

SEQ ID NO: 1650368 - DNA, 15 bp, Homo sapiens
cctggcctatgtgat

SEQ ID NO: 1650369 - DNA, 15 bp, Homo sapiens
gcctggcctatgtga

SEQ ID NO: 1650370 - DNA, 15 bp, Homo sapiens
cgcctggcctatgtg

SEQ ID NO: 1650371 - DNA, 15 bp, Homo sapiens
gcgcctggcctatgt

SEQ ID NO: 1650372 - DNA, 15 bp, Homo sapiens
tgcgcctggcctatg

SEQ ID NO: 1650373 - DNA, 15 bp, Homo sapiens
ctgcgcctggcctat

SEQ ID NO: 1650374 - DNA, 15 bp, Homo sapiens
actgcgcctggccta

SEQ ID NO: 1650375 - DNA, 15 bp, Homo sapiens
cactgcgcctggcct

SEQ ID NO: 1650376 - DNA, 15 bp, Homo sapiens
tcgccttggcctccc

SEQ ID NO: 1650377 - DNA, 15 bp, Homo sapiens
ctcgccttggcctcc

SEQ ID NO: 1650378 - DNA, 15 bp, Homo sapiens
actcgccttggcctc

SEQ ID NO: 1650379 - DNA, 15 bp, Homo sapiens
cactcgccttggcct

SEQ ID NO: 1650380 - DNA, 15 bp, Homo sapiens
ccactcgccttggcc

SEQ ID NO: 1650381 - DNA, 15 bp, Homo sapiens
tccactcgccttggc

SEQ ID NO: 1650382 - DNA, 15 bp, Homo sapiens
atccactcgccttgg

SEQ ID NO: 1650383 - DNA, 15 bp, Homo sapiens
gatccactcgccttg

SEQ ID NO: 1650384 - DNA, 15 bp, Homo sapiens
tgatccactcgcctt

SEQ ID NO: 1650385 - DNA, 15 bp, Homo sapiens
ggtgatccactcgcc

SEQ ID NO: 1650386 - DNA, 15 bp, Homo sapiens
aggtgatccactcgc

SEQ ID NO: 1650387 - DNA, 15 bp, Homo sapiens
caggtgatccactcg

SEQ ID NO: 1650388 - DNA, 15 bp, Homo sapiens
tcaggtgatccactc

SEQ ID NO: 1650389 - DNA, 15 bp, Homo sapiens
ttctgacctcaggtg

SEQ ID NO: 1650390 - DNA, 15 bp, Homo sapiens
cttctgacctcaggt

SEQ ID NO: 1650391 - DNA, 15 bp, Homo sapiens
acttctgacctcagg

SEQ ID NO: 1650392 - DNA, 15 bp, Homo sapiens
aacttctgacctcag

SEQ ID NO: 1650393 - DNA, 15 bp, Homo sapiens
cgaacttctgacctc

SEQ ID NO: 1650394 - DNA, 15 bp, Homo sapiens
tcgaacttctgacct

SEQ ID NO: 1650395 - DNA, 15 bp, Homo sapiens
ctcgaacttctgacc

SEQ ID NO: 1650396 - DNA, 15 bp, Homo sapiens
tctcgaacttctgac

SEQ ID NO: 1650397 - DNA, 15 bp, Homo sapiens
gtctcgaacttctga

SEQ ID NO: 1650398 - DNA, 15 bp, Homo sapiens
ggtctcgaacttctg

SEQ ID NO: 1650399 - DNA, 15 bp, Homo sapiens
tggtctcgaacttct

SEQ ID NO: 1650400 - DNA, 15 bp, Homo sapiens
ctggtctcgaacttc

SEQ ID NO: 1650401 - DNA, 15 bp, Homo sapiens
gctggtctcgaactt

SEQ ID NO: 1650402 - DNA, 15 bp, Homo sapiens
gtgttggccaggctg

SEQ ID NO: 1650403 - DNA, 15 bp, Homo sapiens
cgtgttggccaggct

SEQ ID NO: 1650404 - DNA, 15 bp, Homo sapiens
ccgtgttggccaggc

SEQ ID NO: 1650405 - DNA, 15 bp, Homo sapiens
gccgtgttggccagg

SEQ ID NO: 1650406 - DNA, 15 bp, Homo sapiens
tgccgtgttggccag

SEQ ID NO: 1650407 - DNA, 15 bp, Homo sapiens
ttgccgtgttggcca

SEQ ID NO: 1650408 - DNA, 15 bp, Homo sapiens
tttgccgtgttggcc

SEQ ID NO: 1650409 - DNA, 15 bp, Homo sapiens
ttttgccgtgttggc

SEQ ID NO: 1650410 - DNA, 15 bp, Homo sapiens
gttttgccgtgttgg

SEQ ID NO: 1650411 - DNA, 15 bp, Homo sapiens
agttttgccgtgttg

SEQ ID NO: 1650412 - DNA, 15 bp, Homo sapiens
gagttttgccgtgtt

SEQ ID NO: 1650413 - DNA, 15 bp, Homo sapiens
ggagttttgccgtgt

SEQ ID NO: 1650414 - DNA, 15 bp, Homo sapiens
tggagttttgccgtg

SEQ ID NO: 1650415 - DNA, 15 bp, Homo sapiens
atggagttttgccgt

SEQ ID NO: 1650416 - DNA, 15 bp, Homo sapiens
gatggagttttgccg

SEQ ID NO: 1650417 - DNA, 15 bp, Homo sapiens
cagatggagttttgc

SEQ ID NO: 1650418 - DNA, 15 bp, Homo sapiens
acagatggagttttg

SEQ ID NO: 1650419 - DNA, 15 bp, Homo sapiens
tacagatggagtttt

SEQ ID NO: 1650420 - DNA, 15 bp, Homo sapiens
gtacagatggagttt

SEQ ID NO: 1650421 - DNA, 15 bp, Homo sapiens
agtacagatggagtt

SEQ ID NO: 1650422 - DNA, 15 bp, Homo sapiens
tagtacagatggagt

SEQ ID NO: 1650423 - DNA, 15 bp, Homo sapiens
ttagtacagatggag

SEQ ID NO: 1650424 - DNA, 15 bp, Homo sapiens
tttagtacagatgga

SEQ ID NO: 1650425 - DNA, 15 bp, Homo sapiens
ttttagtacagatgg

SEQ ID NO: 1650426 - DNA, 15 bp, Homo sapiens
tttttagtacagatg

SEQ ID NO: 1650427 - DNA, 15 bp, Homo sapiens
atttttagtacagat

SEQ ID NO: 1650428 - DNA, 15 bp, Homo sapiens
gtttgtatttttagt

SEQ ID NO: 1650429 - DNA, 15 bp, Homo sapiens
tgtttgtatttttag

SEQ ID NO: 1650430 - DNA, 15 bp, Homo sapiens
atgtttgtattttta

SEQ ID NO: 1650431 - DNA, 15 bp, Homo sapiens
aatgtttgtattttt

SEQ ID NO: 1650432 - DNA, 15 bp, Homo sapiens
taatgtttgtatttt

SEQ ID NO: 1650433 - DNA, 15 bp, Homo sapiens
ctaatgtttgtattt

SEQ ID NO: 1650434 - DNA, 15 bp, Homo sapiens
gctaatgtttgtatt

SEQ ID NO: 1650435 - DNA, 15 bp, Homo sapiens
agctaatgtttgtat

SEQ ID NO: 1650436 - DNA, 15 bp, Homo sapiens
cagctaatgtttgta

SEQ ID NO: 1650437 - DNA, 15 bp, Homo sapiens
ccagctaatgtttgt

SEQ ID NO: 1650438 - DNA, 15 bp, Homo sapiens
cccagctaatgtttg

SEQ ID NO: 1650439 - DNA, 15 bp, Homo sapiens
ccccagctaatgttt

SEQ ID NO: 1650440 - DNA, 15 bp, Homo sapiens
cccccagctaatgtt

SEQ ID NO: 1650441 - DNA, 15 bp, Homo sapiens
gcccccagctaatgt

SEQ ID NO: 1650442 - DNA, 15 bp, Homo sapiens
cgcccccagctaatg

SEQ ID NO: 1650443 - DNA, 15 bp, Homo sapiens
ccgcccccagctaat

SEQ ID NO: 1650444 - DNA, 15 bp, Homo sapiens
cccgcccccagctaa

SEQ ID NO: 1650445 - DNA, 15 bp, Homo sapiens
ccccgcccccagcta

SEQ ID NO: 1650446 - DNA, 15 bp, Homo sapiens
ccccccgcccccagc

SEQ ID NO: 1650447 - DNA, 15 bp, Homo sapiens
accccccgcccccag

SEQ ID NO: 1650448 - DNA, 15 bp, Homo sapiens
caccccccgccccca

SEQ ID NO: 1650449 - DNA, 15 bp, Homo sapiens
ccaccccccgccccc

SEQ ID NO: 1650450 - DNA, 15 bp, Homo sapiens
cccaccccccgcccc

SEQ ID NO: 1650451 - DNA, 15 bp, Homo sapiens
ccccaccccccgccc

SEQ ID NO: 1650452 - DNA, 15 bp, Homo sapiens
cccccaccccccgcc

SEQ ID NO: 1650453 - DNA, 15 bp, Homo sapiens
ccccccaccccccgc

SEQ ID NO: 1650454 - DNA, 15 bp, Homo sapiens
gccccccaccccccg

SEQ ID NO: 1650455 - DNA, 15 bp, Homo sapiens
cgccccccacccccc

SEQ ID NO: 1650456 - DNA, 15 bp, Homo sapiens
ccgccccccaccccc

SEQ ID NO: 1650457 - DNA, 15 bp, Homo sapiens
cccgccccccacccc

SEQ ID NO: 1650458 - DNA, 15 bp, Homo sapiens
acccgccccccaccc

SEQ ID NO: 1650459 - DNA, 15 bp, Homo sapiens
cacccgccccccacc

SEQ ID NO: 1650460 - DNA, 15 bp, Homo sapiens
gcacccgccccccac

SEQ ID NO: 1650461 - DNA, 15 bp, Homo sapiens
ggcacccgcccccca

SEQ ID NO: 1650462 - DNA, 15 bp, Homo sapiens
aggcacccgcccccc

SEQ ID NO: 1650463 - DNA, 15 bp, Homo sapiens
caggcacccgccccc

SEQ ID NO: 1650464 - DNA, 15 bp, Homo sapiens
acaggcacccgcccc

SEQ ID NO: 1650465 - DNA, 15 bp, Homo sapiens
tacaggcacccgccc

SEQ ID NO: 1650466 - DNA, 15 bp, Homo sapiens
gattacaggcacccg

SEQ ID NO: 1650467 - DNA, 15 bp, Homo sapiens
atcaagcaattctcc

SEQ ID NO: 1650468 - DNA, 15 bp, Homo sapiens
gatcaagcaattctc

SEQ ID NO: 1650469 - DNA, 15 bp, Homo sapiens
tgatcaagcaattct

SEQ ID NO: 1650470 - DNA, 15 bp, Homo sapiens
atgatcaagcaattc

SEQ ID NO: 1650471 - DNA, 15 bp, Homo sapiens
catgatcaagcaatt

SEQ ID NO: 1650472 - DNA, 15 bp, Homo sapiens
ccatgatcaagcaat

SEQ ID NO: 1650473 - DNA, 15 bp, Homo sapiens
cccatgatcaagcaa

SEQ ID NO: 1650474 - DNA, 15 bp, Homo sapiens
ccccatgatcaagca

SEQ ID NO: 1650475 - DNA, 15 bp, Homo sapiens
cccccatgatcaagc

SEQ ID NO: 1650476 - DNA, 15 bp, Homo sapiens
ttcccccatgatcaa

SEQ ID NO: 1650477 - DNA, 15 bp, Homo sapiens
cttcccccatgatca

SEQ ID NO: 1650478 - DNA, 15 bp, Homo sapiens
ccttcccccatgatc

SEQ ID NO: 1650479 - DNA, 15 bp, Homo sapiens
tccttcccccatgat

SEQ ID NO: 1650480 - DNA, 15 bp, Homo sapiens
ctccttcccccatga

SEQ ID NO: 1650481 - DNA, 15 bp, Homo sapiens
cctccttcccccatg

SEQ ID NO: 1650482 - DNA, 15 bp, Homo sapiens
acctccttcccccat

SEQ ID NO: 1650483 - DNA, 15 bp, Homo sapiens
aacctccttccccca

SEQ ID NO: 1650484 - DNA, 15 bp, Homo sapiens
caacctccttccccc

SEQ ID NO: 1650485 - DNA, 15 bp, Homo sapiens
gcaacctccttcccc

SEQ ID NO: 1650486 - DNA, 15 bp, Homo sapiens
tgcaacctccttccc

SEQ ID NO: 1650487 - DNA, 15 bp, Homo sapiens
ctgcaacctccttcc

SEQ ID NO: 1650488 - DNA, 15 bp, Homo sapiens
actgcaacctccttc

SEQ ID NO: 1650489 - DNA, 15 bp, Homo sapiens
cactgcaacctcctt

SEQ ID NO: 1650490 - DNA, 15 bp, Homo sapiens
tcactgcaacctcct

SEQ ID NO: 1650491 - DNA, 15 bp, Homo sapiens
ctcactgcaacctcc

SEQ ID NO: 1650492 - DNA, 15 bp, Homo sapiens
agcacgatctcgact

SEQ ID NO: 1650493 - DNA, 15 bp, Homo sapiens
tagcacgatctcgac

SEQ ID NO: 1650494 - DNA, 15 bp, Homo sapiens
gtagcacgatctcga

SEQ ID NO: 1650495 - DNA, 15 bp, Homo sapiens
agtagcacgatctcg

SEQ ID NO: 1650496 - DNA, 15 bp, Homo sapiens
aagtagcacgatctc

SEQ ID NO: 1650497 - DNA, 15 bp, Homo sapiens
gaagtagcacgatct

SEQ ID NO: 1650498 - DNA, 15 bp, Homo sapiens
tgaagtagcacgatc

SEQ ID NO: 1650499 - DNA, 15 bp, Homo sapiens
gtgaagtagcacgat

SEQ ID NO: 1650500 - DNA, 15 bp, Homo sapiens
agtgaagtagcacga

SEQ ID NO: 1650501 - DNA, 15 bp, Homo sapiens
gagtgaagtagcacg

SEQ ID NO: 1650502 - DNA, 15 bp, Homo sapiens
ggagtgaagtagcac

SEQ ID NO: 1650503 - DNA, 15 bp, Homo sapiens
tggagtgaagtagca

SEQ ID NO: 1650504 - DNA, 15 bp, Homo sapiens
ctggagtgaagtagc

SEQ ID NO: 1650505 - DNA, 15 bp, Homo sapiens
gctggagtgaagtag

SEQ ID NO: 1650506 - DNA, 15 bp, Homo sapiens
ggctggagtgaagta

SEQ ID NO: 1650507 - DNA, 15 bp, Homo sapiens
aggctggagtgaagt

SEQ ID NO: 1650508 - DNA, 15 bp, Homo sapiens
caggctggagtgaag

SEQ ID NO: 1650509 - DNA, 15 bp, Homo sapiens
ccaggctggagtgaa

SEQ ID NO: 1650510 - DNA, 15 bp, Homo sapiens
cccaggctggagtga

SEQ ID NO: 1650511 - DNA, 15 bp, Homo sapiens
ttcgcccaggctgga

SEQ ID NO: 1650512 - DNA, 15 bp, Homo sapiens
tttcgcccaggctgg

SEQ ID NO: 1650513 - DNA, 15 bp, Homo sapiens
ctttcgcccaggctg

SEQ ID NO: 1650514 - DNA, 15 bp, Homo sapiens
tctttcgcccaggct

SEQ ID NO: 1650515 - DNA, 15 bp, Homo sapiens
ctctttcgcccaggc

SEQ ID NO: 1650516 - DNA, 15 bp, Homo sapiens
gctctttcgcccagg

SEQ ID NO: 1650517 - DNA, 15 bp, Homo sapiens
tgctctttcgcccag

SEQ ID NO: 1650518 - DNA, 15 bp, Homo sapiens
ttgctctttcgccca

SEQ ID NO: 1650519 - DNA, 15 bp, Homo sapiens
tttgctctttcgccc

SEQ ID NO: 1650520 - DNA, 15 bp, Homo sapiens
ttttgctctttcgcc

SEQ ID NO: 1650521 - DNA, 15 bp, Homo sapiens
gttttgctctttcgc

SEQ ID NO: 1650522 - DNA, 15 bp, Homo sapiens
agttttgctctttcg

SEQ ID NO: 1650523 - DNA, 15 bp, Homo sapiens
gagttttgctctttc

SEQ ID NO: 1650524 - DNA, 15 bp, Homo sapiens
ggagttttgctcttt

SEQ ID NO: 1650525 - DNA, 15 bp, Homo sapiens
cggagttttgctctt

SEQ ID NO: 1650526 - DNA, 15 bp, Homo sapiens
acggagttttgctct

SEQ ID NO: 1650527 - DNA, 15 bp, Homo sapiens
gacggagttttgctc

SEQ ID NO: 1650528 - DNA, 15 bp, Homo sapiens
agacggagttttgct

SEQ ID NO: 1650529 - DNA, 15 bp, Homo sapiens
gagacggagttttgc

SEQ ID NO: 1650530 - DNA, 15 bp, Homo sapiens
tgagacggagttttg

SEQ ID NO: 1650531 - DNA, 15 bp, Homo sapiens
ttgagacggagtttt

SEQ ID NO: 1650532 - DNA, 15 bp, Homo sapiens
tatgtgatttttttt

SEQ ID NO: 1650533 - DNA, 15 bp, Homo sapiens
ttatgtgattttttt

SEQ ID NO: 1650534 - DNA, 15 bp, Homo sapiens
attatgtgatttttt

SEQ ID NO: 1650535 - DNA, 15 bp, Homo sapiens
aattatgtgattttt

SEQ ID NO: 1650536 - DNA, 15 bp, Homo sapiens
gaattatgtgatttt

SEQ ID NO: 1650537 - DNA, 15 bp, Homo sapiens
tgaattatgtgattt

SEQ ID NO: 1650538 - DNA, 15 bp, Homo sapiens
ttgaattatgtgatt

SEQ ID NO: 1650539 - DNA, 15 bp, Homo sapiens
gttgaattatgtgat

SEQ ID NO: 1650540 - DNA, 15 bp, Homo sapiens
tgttgaattatgtga

SEQ ID NO: 1650541 - DNA, 15 bp, Homo sapiens
atgttgaattatgtg

SEQ ID NO: 1650542 - DNA, 15 bp, Homo sapiens
aatgttgaattatgt

SEQ ID NO: 1650543 - DNA, 15 bp, Homo sapiens
aaatgttgaattatg

SEQ ID NO: 1650544 - DNA, 15 bp, Homo sapiens
aaaatgttgaattat

SEQ ID NO: 1650545 - DNA, 15 bp, Homo sapiens
gaaaatgttgaatta

SEQ ID NO: 1650546 - DNA, 15 bp, Homo sapiens
tgaaaatgttgaatt

SEQ ID NO: 1650547 - DNA, 15 bp, Homo sapiens
atgaaaatgttgaat

SEQ ID NO: 1650548 - DNA, 15 bp, Homo sapiens
aatgaaaatgttgaa

SEQ ID NO: 1650549 - DNA, 15 bp, Homo sapiens
gaatgaaaatgttga

SEQ ID NO: 1650550 - DNA, 15 bp, Homo sapiens
agaatgaaaatgttg

SEQ ID NO: 1650551 - DNA, 15 bp, Homo sapiens
gagaatgaaaatgtt

SEQ ID NO: 1650552 - DNA, 15 bp, Homo sapiens
agagaatgaaaatgt

SEQ ID NO: 1650553 - DNA, 15 bp, Homo sapiens
tagagaatgaaaatg

SEQ ID NO: 1650554 - DNA, 15 bp, Homo sapiens
ttagagaatgaaaat

SEQ ID NO: 1650555 - DNA, 15 bp, Homo sapiens
cttagagaatgaaaa

SEQ ID NO: 1650556 - DNA, 15 bp, Homo sapiens
ccttagagaatgaaa

SEQ ID NO: 1650557 - DNA, 15 bp, Homo sapiens
tccttagagaatgaa

SEQ ID NO: 1650558 - DNA, 15 bp, Homo sapiens
ttccttagagaatga

SEQ ID NO: 1650559 - DNA, 15 bp, Homo sapiens
tttccttagagaatg

SEQ ID NO: 1650560 - DNA, 15 bp, Homo sapiens
gtttccttagagaat

SEQ ID NO: 1650561 - DNA, 15 bp, Homo sapiens
agtttccttagagaa

SEQ ID NO: 1650562 - DNA, 15 bp, Homo sapiens
cagtttccttagaga

SEQ ID NO: 1650563 - DNA, 15 bp, Homo sapiens
ccagtttccttagag

SEQ ID NO: 1650564 - DNA, 15 bp, Homo sapiens
cccagtttccttaga

SEQ ID NO: 1650565 - DNA, 15 bp, Homo sapiens
tcccagtttccttag

SEQ ID NO: 1650566 - DNA, 15 bp, Homo sapiens
ttcccagtttcctta

SEQ ID NO: 1650567 - DNA, 15 bp, Homo sapiens
gttcccagtttcctt

SEQ ID NO: 1650568 - DNA, 15 bp, Homo sapiens
ggttcccagtttcct

SEQ ID NO: 1650569 - DNA, 15 bp, Homo sapiens
gggttcccagtttcc

SEQ ID NO: 1650570 - DNA, 15 bp, Homo sapiens
tgggttcccagtttc

SEQ ID NO: 1650571 - DNA, 15 bp, Homo sapiens
ctgggttcccagttt

SEQ ID NO: 1650572 - DNA, 15 bp, Homo sapiens
tctgggttcccagtt

SEQ ID NO: 1650573 - DNA, 15 bp, Homo sapiens
ttctgggttcccagt

SEQ ID NO: 1650574 - DNA, 15 bp, Homo sapiens
cttctgggttcccag

SEQ ID NO: 1650575 - DNA, 15 bp, Homo sapiens
tcttctgggttccca

SEQ ID NO: 1650576 - DNA, 15 bp, Homo sapiens
atcttctgggttccc

SEQ ID NO: 1650577 - DNA, 15 bp, Homo sapiens
catcttctgggttcc

SEQ ID NO: 1650578 - DNA, 15 bp, Homo sapiens
tcatcttctgggttc

SEQ ID NO: 1650579 - DNA, 15 bp, Homo sapiens
ttcatcttctgggtt

SEQ ID NO: 1650580 - DNA, 15 bp, Homo sapiens
tttcatcttctgggt

SEQ ID NO: 1650581 - DNA, 15 bp, Homo sapiens
gtttcatcttctggg

SEQ ID NO: 1650582 - DNA, 15 bp, Homo sapiens
agtttcatcttctgg

SEQ ID NO: 1650583 - DNA, 15 bp, Homo sapiens
tagtttcatcttctg

SEQ ID NO: 1650584 - DNA, 15 bp, Homo sapiens
gtagtttcatcttct

SEQ ID NO: 1650585 - DNA, 15 bp, Homo sapiens
ggtagtttcatcttc

SEQ ID NO: 1650586 - DNA, 15 bp, Homo sapiens
aggtagtttcatctt

SEQ ID NO: 1650587 - DNA, 15 bp, Homo sapiens
gaggtagtttcatct

SEQ ID NO: 1650588 - DNA, 15 bp, Homo sapiens
tgaggtagtttcatc

SEQ ID NO: 1650589 - DNA, 15 bp, Homo sapiens
ttgaggtagtttcat

SEQ ID NO: 1650590 - DNA, 15 bp, Homo sapiens
attgaggtagtttca

SEQ ID NO: 1650591 - DNA, 15 bp, Homo sapiens
cattgaggtagtttc

SEQ ID NO: 1650592 - DNA, 15 bp, Homo sapiens
acattgaggtagttt

SEQ ID NO: 1650593 - DNA, 15 bp, Homo sapiens
aacattgaggtagtt

SEQ ID NO: 1650594 - DNA, 15 bp, Homo sapiens
taacattgaggtagt

SEQ ID NO: 1650595 - DNA, 15 bp, Homo sapiens
gtaacattgaggtag

SEQ ID NO: 1650596 - DNA, 15 bp, Homo sapiens
tgtaacattgaggta

SEQ ID NO: 1650597 - DNA, 15 bp, Homo sapiens
gtgtaacattgaggt

SEQ ID NO: 1650598 - DNA, 15 bp, Homo sapiens
tgtgtaacattgagg

SEQ ID NO: 1650599 - DNA, 15 bp, Homo sapiens
ttgtgtaacattgag

SEQ ID NO: 1650600 - DNA, 15 bp, Homo sapiens
tatttgtgtaacatt

SEQ ID NO: 1650601 - DNA, 15 bp, Homo sapiens
ctatttgtgtaacat

SEQ ID NO: 1650602 - DNA, 15 bp, Homo sapiens
tctatttgtgtaaca

SEQ ID NO: 1650603 - DNA, 15 bp, Homo sapiens
ttctatttgtgtaac

SEQ ID NO: 1650604 - DNA, 15 bp, Homo sapiens
cttctatttgtgtaa

SEQ ID NO: 1650605 - DNA, 15 bp, Homo sapiens
ccttctatttgtgta

SEQ ID NO: 1650606 - DNA, 15 bp, Homo sapiens
accttctatttgtgt

SEQ ID NO: 1650607 - DNA, 15 bp, Homo sapiens
taccttctatttgtg

SEQ ID NO: 1650608 - DNA, 15 bp, Homo sapiens
ttaccttctatttgt

SEQ ID NO: 1650609 - DNA, 15 bp, Homo sapiens
gttaccttctatttg

SEQ ID NO: 1650610 - DNA, 15 bp, Homo sapiens
ggttaccttctattt

SEQ ID NO: 1650611 - DNA, 15 bp, Homo sapiens
tggttaccttctatt

SEQ ID NO: 1650612 - DNA, 15 bp, Homo sapiens
ttggttaccttctat

SEQ ID NO: 1650613 - DNA, 15 bp, Homo sapiens
cttggttaccttcta

SEQ ID NO: 1650614 - DNA, 15 bp, Homo sapiens
acttggttaccttct

SEQ ID NO: 1650615 - DNA, 15 bp, Homo sapiens
cacttggttaccttc

SEQ ID NO: 1650616 - DNA, 15 bp, Homo sapiens
tcacttggttacctt

SEQ ID NO: 1650617 - DNA, 15 bp, Homo sapiens
atcacttggttacct

SEQ ID NO: 1650618 - DNA, 15 bp, Homo sapiens
tatcacttggttacc

SEQ ID NO: 1650619 - DNA, 15 bp, Homo sapiens
gtatcacttggttac

SEQ ID NO: 1650620 - DNA, 15 bp, Homo sapiens
agtatcacttggtta

SEQ ID NO: 1650621 - DNA, 15 bp, Homo sapiens
aagtatcacttggtt

SEQ ID NO: 1650622 - DNA, 15 bp, Homo sapiens
taagtatcacttggt

SEQ ID NO: 1650623 - DNA, 15 bp, Homo sapiens
ttaagtatcacttgg

SEQ ID NO: 1650624 - DNA, 15 bp, Homo sapiens
tttaagtatcacttg

SEQ ID NO: 1650625 - DNA, 15 bp, Homo sapiens
gtttaagtatcactt

SEQ ID NO: 1650626 - DNA, 15 bp, Homo sapiens
ggtttaagtatcact

SEQ ID NO: 1650627 - DNA, 15 bp, Homo sapiens
gggtttaagtatcac

SEQ ID NO: 1650628 - DNA, 15 bp, Homo sapiens
tgggtttaagtatca

SEQ ID NO: 1650629 - DNA, 15 bp, Homo sapiens
atgggtttaagtatc

SEQ ID NO: 1650630 - DNA, 15 bp, Homo sapiens
catgggtttaagtat

SEQ ID NO: 1650631 - DNA, 15 bp, Homo sapiens
acatgggtttaagta

SEQ ID NO: 1650632 - DNA, 15 bp, Homo sapiens
gacatgggtttaagt

SEQ ID NO: 1650633 - DNA, 15 bp, Homo sapiens
agacatgggtttaag

SEQ ID NO: 1650634 - DNA, 15 bp, Homo sapiens
aagacatgggtttaa

SEQ ID NO: 1650635 - DNA, 15 bp, Homo sapiens
gaagacatgggttta

SEQ ID NO: 1650636 - DNA, 15 bp, Homo sapiens
ggaagacatgggttt

SEQ ID NO: 1650637 - DNA, 15 bp, Homo sapiens
gggaagacatgggtt

SEQ ID NO: 1650638 - DNA, 15 bp, Homo sapiens
tgggaagacatgggt

SEQ ID NO: 1650639 - DNA, 15 bp, Homo sapiens
gtgggaagacatggg

SEQ ID NO: 1650640 - DNA, 15 bp, Homo sapiens
tgtgggaagacatgg

SEQ ID NO: 1650641 - DNA, 15 bp, Homo sapiens
ttgtgggaagacatg

SEQ ID NO: 1650642 - DNA, 15 bp, Homo sapiens
attgtgggaagacat

SEQ ID NO: 1650643 - DNA, 15 bp, Homo sapiens
aattgtgggaagaca

SEQ ID NO: 1650644 - DNA, 15 bp, Homo sapiens
gaattgtgggaagac

SEQ ID NO: 1650645 - DNA, 15 bp, Homo sapiens
tgaattgtgggaaga

SEQ ID NO: 1650646 - DNA, 15 bp, Homo sapiens
ttgaattgtgggaag

SEQ ID NO: 1650647 - DNA, 15 bp, Homo sapiens
tttgaattgtgggaa

SEQ ID NO: 1650648 - DNA, 15 bp, Homo sapiens
ctttgaattgtggga

SEQ ID NO: 1650649 - DNA, 15 bp, Homo sapiens
cctttgaattgtggg

SEQ ID NO: 1650650 - DNA, 15 bp, Homo sapiens
acctttgaattgtgg

SEQ ID NO: 1650651 - DNA, 15 bp, Homo sapiens
gacctttgaattgtg

SEQ ID NO: 1650652 - DNA, 15 bp, Homo sapiens
agacctttgaattgt

SEQ ID NO: 1650653 - DNA, 15 bp, Homo sapiens
aagacctttgaattg

SEQ ID NO: 1650654 - DNA, 15 bp, Homo sapiens
aaagacctttgaatt

SEQ ID NO: 1650655 - DNA, 15 bp, Homo sapiens
aaaagacctttgaat

SEQ ID NO: 1650656 - DNA, 15 bp, Homo sapiens
taaaagacctttgaa

SEQ ID NO: 1650657 - DNA, 15 bp, Homo sapiens
ttaaaagacctttga

SEQ ID NO: 1650658 - DNA, 15 bp, Homo sapiens
gttaaaagacctttg

SEQ ID NO: 1650659 - DNA, 15 bp, Homo sapiens
agttaaaagaccttt

SEQ ID NO: 1650660 - DNA, 15 bp, Homo sapiens
cagttaaaagacctt

SEQ ID NO: 1650661 - DNA, 15 bp, Homo sapiens
acagttaaaagacct

SEQ ID NO: 1650662 - DNA, 15 bp, Homo sapiens
cacagttaaaagacc

SEQ ID NO: 1650663 - DNA, 15 bp, Homo sapiens
ccacagttaaaagac

SEQ ID NO: 1650664 - DNA, 15 bp, Homo sapiens
cccacagttaaaaga

SEQ ID NO: 1650665 - DNA, 15 bp, Homo sapiens
ccccacagttaaaag

SEQ ID NO: 1650666 - DNA, 15 bp, Homo sapiens
accccacagttaaaa

SEQ ID NO: 1650667 - DNA, 15 bp, Homo sapiens
gaccccacagttaaa

SEQ ID NO: 1650668 - DNA, 15 bp, Homo sapiens
agaccccacagttaa

SEQ ID NO: 1650669 - DNA, 15 bp, Homo sapiens
cagaccccacagtta

SEQ ID NO: 1650670 - DNA, 15 bp, Homo sapiens
acagaccccacagtt

SEQ ID NO: 1650671 - DNA, 15 bp, Homo sapiens
cacagaccccacagt

SEQ ID NO: 1650672 - DNA, 15 bp, Homo sapiens
gcacagaccccacag

SEQ ID NO: 1650673 - DNA, 15 bp, Homo sapiens
tgcacagaccccaca

SEQ ID NO: 1650674 - DNA, 15 bp, Homo sapiens
atgcacagaccccac

SEQ ID NO: 1650675 - DNA, 15 bp, Homo sapiens
tatgcacagacccca

SEQ ID NO: 1650676 - DNA, 15 bp, Homo sapiens
ctatgcacagacccc

SEQ ID NO: 1650677 - DNA, 15 bp, Homo sapiens
tctatgcacagaccc

SEQ ID NO: 1650678 - DNA, 15 bp, Homo sapiens
atctatgcacagacc

SEQ ID NO: 1650679 - DNA, 15 bp, Homo sapiens
aatctatgcacagac

SEQ ID NO: 1650680 - DNA, 15 bp, Homo sapiens
gaatctatgcacaga

SEQ ID NO: 1650681 - DNA, 15 bp, Homo sapiens
agaatctatgcacag

SEQ ID NO: 1650682 - DNA, 15 bp, Homo sapiens
gagaatctatgcaca

SEQ ID NO: 1650683 - DNA, 15 bp, Homo sapiens
tgagaatctatgcac

SEQ ID NO: 1650684 - DNA, 15 bp, Homo sapiens
ctgagaatctatgca

SEQ ID NO: 1650685 - DNA, 15 bp, Homo sapiens
cctgagaatctatgc

SEQ ID NO: 1650686 - DNA, 15 bp, Homo sapiens
tcctgagaatctatg

SEQ ID NO: 1650687 - DNA, 15 bp, Homo sapiens
gtcctgagaatctat

SEQ ID NO: 1650688 - DNA, 15 bp, Homo sapiens
tgtcctgagaatcta

SEQ ID NO: 1650689 - DNA, 15 bp, Homo sapiens
atgtcctgagaatct

SEQ ID NO: 1650690 - DNA, 15 bp, Homo sapiens
tatgtcctgagaatc

SEQ ID NO: 1650691 - DNA, 15 bp, Homo sapiens
atatgtcctgagaat

SEQ ID NO: 1650692 - DNA, 15 bp, Homo sapiens
catatgtcctgagaa

SEQ ID NO: 1650693 - DNA, 15 bp, Homo sapiens
ccatatgtcctgaga

SEQ ID NO: 1650694 - DNA, 15 bp, Homo sapiens
cccatatgtcctgag

SEQ ID NO: 1650695 - DNA, 15 bp, Homo sapiens
ccccatatgtcctga

SEQ ID NO: 1650696 - DNA, 15 bp, Homo sapiens
tccccatatgtcctg

SEQ ID NO: 1650697 - DNA, 15 bp, Homo sapiens
ctccccatatgtcct

SEQ ID NO: 1650698 - DNA, 15 bp, Homo sapiens
gctccccatatgtcc

SEQ ID NO: 1650699 - DNA, 15 bp, Homo sapiens
agctccccatatgtc

SEQ ID NO: 1650700 - DNA, 15 bp, Homo sapiens
aagctccccatatgt

SEQ ID NO: 1650701 - DNA, 15 bp, Homo sapiens
aaagctccccatatg

SEQ ID NO: 1650702 - DNA, 15 bp, Homo sapiens
gaaagctccccatat

SEQ ID NO: 1650703 - DNA, 15 bp, Homo sapiens
agaaagctccccata

SEQ ID NO: 1650704 - DNA, 15 bp, Homo sapiens
tagaaagctccccat

SEQ ID NO: 1650705 - DNA, 15 bp, Homo sapiens
gtagaaagctcccca

SEQ ID NO: 1650706 - DNA, 15 bp, Homo sapiens
tgtagaaagctcccc

SEQ ID NO: 1650707 - DNA, 15 bp, Homo sapiens
ttgtagaaagctccc

SEQ ID NO: 1650708 - DNA, 15 bp, Homo sapiens
tttgtagaaagctcc

SEQ ID NO: 1650709 - DNA, 15 bp, Homo sapiens
ttttgtagaaagctc

SEQ ID NO: 1650710 - DNA, 15 bp, Homo sapiens
gttttgtagaaagct

SEQ ID NO: 1650711 - DNA, 15 bp, Homo sapiens
agttttgtagaaagc

SEQ ID NO: 1650712 - DNA, 15 bp, Homo sapiens
aagttttgtagaaag

SEQ ID NO: 1650713 - DNA, 15 bp, Homo sapiens
aaagttttgtagaaa

SEQ ID NO: 1650714 - DNA, 15 bp, Homo sapiens
gaaagttttgtagaa

SEQ ID NO: 1650715 - DNA, 15 bp, Homo sapiens
tgaaagttttgtaga

SEQ ID NO: 1650716 - DNA, 15 bp, Homo sapiens
gtgaaagttttgtag

SEQ ID NO: 1650717 - DNA, 15 bp, Homo sapiens
tgtgaaagttttgta

SEQ ID NO: 1650718 - DNA, 15 bp, Homo sapiens
ttgtgaaagttttgt

SEQ ID NO: 1650719 - DNA, 15 bp, Homo sapiens
attgtgaaagttttg

SEQ ID NO: 1650720 - DNA, 15 bp, Homo sapiens
tattgtgaaagtttt

SEQ ID NO: 1650721 - DNA, 15 bp, Homo sapiens
gtattgtgaaagttt

SEQ ID NO: 1650722 - DNA, 15 bp, Homo sapiens
agtattgtgaaagtt

SEQ ID NO: 1650723 - DNA, 15 bp, Homo sapiens
gagtattgtgaaagt

SEQ ID NO: 1650724 - DNA, 15 bp, Homo sapiens
agagtattgtgaaag

SEQ ID NO: 1650725 - DNA, 15 bp, Homo sapiens
gagagtattgtgaaa

SEQ ID NO: 1650726 - DNA, 15 bp, Homo sapiens
tgagagtattgtgaa

SEQ ID NO: 1650727 - DNA, 15 bp, Homo sapiens
atgagagtattgtga

SEQ ID NO: 1650728 - DNA, 15 bp, Homo sapiens
aatgagagtattgtg

SEQ ID NO: 1650729 - DNA, 15 bp, Homo sapiens
aaatgagagtattgt

SEQ ID NO: 1650730 - DNA, 15 bp, Homo sapiens
gaaatgagagtattg

SEQ ID NO: 1650731 - DNA, 15 bp, Homo sapiens
tgaaatgagagtatt

SEQ ID NO: 1650732 - DNA, 15 bp, Homo sapiens
gtgaaatgagagtat

SEQ ID NO: 1650733 - DNA, 15 bp, Homo sapiens
agtgaaatgagagta

SEQ ID NO: 1650734 - DNA, 15 bp, Homo sapiens
cagtgaaatgagagt

SEQ ID NO: 1650735 - DNA, 15 bp, Homo sapiens
acagtgaaatgagag

SEQ ID NO: 1650736 - DNA, 15 bp, Homo sapiens
tacagtgaaatgaga

SEQ ID NO: 1650737 - DNA, 15 bp, Homo sapiens
ttacagtgaaatgag

SEQ ID NO: 1650738 - DNA, 15 bp, Homo sapiens
cttacagtgaaatga

SEQ ID NO: 1650739 - DNA, 15 bp, Homo sapiens
ccttacagtgaaatg

SEQ ID NO: 1650740 - DNA, 15 bp, Homo sapiens
tccttacagtgaaat

SEQ ID NO: 1650741 - DNA, 15 bp, Homo sapiens
atccttacagtgaaa

SEQ ID NO: 1650742 - DNA, 15 bp, Homo sapiens
tatccttacagtgaa

SEQ ID NO: 1650743 - DNA, 15 bp, Homo sapiens
ctatccttacagtga

SEQ ID NO: 1650744 - DNA, 15 bp, Homo sapiens
actatccttacagtg

SEQ ID NO: 1650745 - DNA, 15 bp, Homo sapiens
aactatccttacagt

SEQ ID NO: 1650746 - DNA, 15 bp, Homo sapiens
aaactatccttacag

SEQ ID NO: 1650747 - DNA, 15 bp, Homo sapiens
taaactatccttaca

SEQ ID NO: 1650748 - DNA, 15 bp, Homo sapiens
ctaaactatccttac

SEQ ID NO: 1650749 - DNA, 15 bp, Homo sapiens
tctaaactatcctta

SEQ ID NO: 1650750 - DNA, 15 bp, Homo sapiens
atctaaactatcctt

SEQ ID NO: 1650751 - DNA, 15 bp, Homo sapiens
gatctaaactatcct

SEQ ID NO: 1650752 - DNA, 15 bp, Homo sapiens
tgatctaaactatcc

SEQ ID NO: 1650753 - DNA, 15 bp, Homo sapiens
ctgatctaaactatc

SEQ ID NO: 1650754 - DNA, 15 bp, Homo sapiens
gctgatctaaactat

SEQ ID NO: 1650755 - DNA, 15 bp, Homo sapiens
agctgatctaaacta

SEQ ID NO: 1650756 - DNA, 15 bp, Homo sapiens
tagctgatctaaact

SEQ ID NO: 1650757 - DNA, 15 bp, Homo sapiens
atagctgatctaaac

SEQ ID NO: 1650758 - DNA, 15 bp, Homo sapiens
tatagctgatctaaa

SEQ ID NO: 1650759 - DNA, 15 bp, Homo sapiens
atatagctgatctaa

SEQ ID NO: 1650760 - DNA, 15 bp, Homo sapiens
catatagctgatcta

SEQ ID NO: 1650761 - DNA, 15 bp, Homo sapiens
tcatatagctgatct

SEQ ID NO: 1650762 - DNA, 15 bp, Homo sapiens
gtcatatagctgatc

SEQ ID NO: 1650763 - DNA, 15 bp, Homo sapiens
agtcatatagctgat

SEQ ID NO: 1650764 - DNA, 15 bp, Homo sapiens
tagtcatatagctga

SEQ ID NO: 1650765 - DNA, 15 bp, Homo sapiens
gtagtcatatagctg

SEQ ID NO: 1650766 - DNA, 15 bp, Homo sapiens
agtagtcatatagct

SEQ ID NO: 1650767 - DNA, 15 bp, Homo sapiens
aagtagtcatatagc

SEQ ID NO: 1650768 - DNA, 15 bp, Homo sapiens
gaagtagtcatatag

SEQ ID NO: 1650769 - DNA, 15 bp, Homo sapiens
tgaagtagtcatata

SEQ ID NO: 1650770 - DNA, 15 bp, Homo sapiens
atgaagtagtcatat

SEQ ID NO: 1650771 - DNA, 15 bp, Homo sapiens
tatgaagtagtcata

SEQ ID NO: 1650772 - DNA, 15 bp, Homo sapiens
ttatgaagtagtcat

SEQ ID NO: 1650773 - DNA, 15 bp, Homo sapiens
attatgaagtagtca

SEQ ID NO: 1650774 - DNA, 15 bp, Homo sapiens
tattatgaagtagtc

SEQ ID NO: 1650775 - DNA, 15 bp, Homo sapiens
atattatgaagtagt

SEQ ID NO: 1650776 - DNA, 15 bp, Homo sapiens
tatattatgaagtag

SEQ ID NO: 1650777 - DNA, 15 bp, Homo sapiens
ctatattatgaagta

SEQ ID NO: 1650778 - DNA, 15 bp, Homo sapiens
cctatattatgaagt

SEQ ID NO: 1650779 - DNA, 15 bp, Homo sapiens
tcctatattatgaag

SEQ ID NO: 1650780 - DNA, 15 bp, Homo sapiens
gtcctatattatgaa

SEQ ID NO: 1650781 - DNA, 15 bp, Homo sapiens
ggtcctatattatga

SEQ ID NO: 1650782 - DNA, 15 bp, Homo sapiens
tggtcctatattatg

SEQ ID NO: 1650783 - DNA, 15 bp, Homo sapiens
gtggtcctatattat

SEQ ID NO: 1650784 - DNA, 15 bp, Homo sapiens
cgtggtcctatatta

SEQ ID NO: 1650785 - DNA, 15 bp, Homo sapiens
acgtggtcctatatt

SEQ ID NO: 1650786 - DNA, 15 bp, Homo sapiens
aacgtggtcctatat

SEQ ID NO: 1650787 - DNA, 15 bp, Homo sapiens
caacgtggtcctata

SEQ ID NO: 1650788 - DNA, 15 bp, Homo sapiens
gcaacgtggtcctat

SEQ ID NO: 1650789 - DNA, 15 bp, Homo sapiens
ggcaacgtggtccta

SEQ ID NO: 1650790 - DNA, 15 bp, Homo sapiens
tggcaacgtggtcct

SEQ ID NO: 1650791 - DNA, 15 bp, Homo sapiens
ctggcaacgtggtcc

SEQ ID NO: 1650792 - DNA, 15 bp, Homo sapiens
tctggcaacgtggtc

SEQ ID NO: 1650793 - DNA, 15 bp, Homo sapiens
atctggcaacgtggt

SEQ ID NO: 1650794 - DNA, 15 bp, Homo sapiens
aatctggcaacgtgg

SEQ ID NO: 1650795 - DNA, 15 bp, Homo sapiens
taatctggcaacgtg

SEQ ID NO: 1650796 - DNA, 15 bp, Homo sapiens
ctaatctggcaacgt

SEQ ID NO: 1650797 - DNA, 15 bp, Homo sapiens
actaatctggcaacg

SEQ ID NO: 1650798 - DNA, 15 bp, Homo sapiens
cactaatctggcaac

SEQ ID NO: 1650799 - DNA, 15 bp, Homo sapiens
ccactaatctggcaa

SEQ ID NO: 1650800 - DNA, 15 bp, Homo sapiens
gccactaatctggca

SEQ ID NO: 1650801 - DNA, 15 bp, Homo sapiens
tgccactaatctggc

SEQ ID NO: 1650802 - DNA, 15 bp, Homo sapiens
ttgccactaatctgg

SEQ ID NO: 1650803 - DNA, 15 bp, Homo sapiens
tttgccactaatctg

SEQ ID NO: 1650804 - DNA, 15 bp, Homo sapiens
atttgccactaatct

SEQ ID NO: 1650805 - DNA, 15 bp, Homo sapiens
catttgccactaatc

SEQ ID NO: 1650806 - DNA, 15 bp, Homo sapiens
acatttgccactaat

SEQ ID NO: 1650807 - DNA, 15 bp, Homo sapiens
aacatttgccactaa

SEQ ID NO: 1650808 - DNA, 15 bp, Homo sapiens
gaacatttgccacta

SEQ ID NO: 1650809 - DNA, 15 bp, Homo sapiens
agaacatttgccact

SEQ ID NO: 1650810 - DNA, 15 bp, Homo sapiens
tagaacatttgccac

SEQ ID NO: 1650811 - DNA, 15 bp, Homo sapiens
ctagaacatttgcca

SEQ ID NO: 1650812 - DNA, 15 bp, Homo sapiens
actagaacatttgcc

SEQ ID NO: 1650813 - DNA, 15 bp, Homo sapiens
aactagaacatttgc

SEQ ID NO: 1650814 - DNA, 15 bp, Homo sapiens
aaactagaacatttg

SEQ ID NO: 1650815 - DNA, 15 bp, Homo sapiens
aaaactagaacattt

SEQ ID NO: 1650816 - DNA, 15 bp, Homo sapiens
caaaactagaacatt

SEQ ID NO: 1650817 - DNA, 15 bp, Homo sapiens
acaaaactagaacat

SEQ ID NO: 1650818 - DNA, 15 bp, Homo sapiens
aacaaaactagaaca

SEQ ID NO: 1650819 - DNA, 15 bp, Homo sapiens
caacaaaactagaac

SEQ ID NO: 1650820 - DNA, 15 bp, Homo sapiens
gcaacaaaactagaa

SEQ ID NO: 1650821 - DNA, 15 bp, Homo sapiens
ggcaacaaaactaga

SEQ ID NO: 1650822 - DNA, 15 bp, Homo sapiens
aggcaacaaaactag

SEQ ID NO: 1650823 - DNA, 15 bp, Homo sapiens
caggcaacaaaacta

SEQ ID NO: 1650824 - DNA, 15 bp, Homo sapiens
ccaggcaacaaaact

SEQ ID NO: 1650825 - DNA, 15 bp, Homo sapiens
cccaggcaacaaaac

SEQ ID NO: 1650826 - DNA, 15 bp, Homo sapiens
ccccaggcaacaaaa

SEQ ID NO: 1650827 - DNA, 15 bp, Homo sapiens
tccccaggcaacaaa

SEQ ID NO: 1650828 - DNA, 15 bp, Homo sapiens
atccccaggcaacaa

SEQ ID NO: 1650829 - DNA, 15 bp, Homo sapiens
aatccccaggcaaca

SEQ ID NO: 1650830 - DNA, 15 bp, Homo sapiens
taatccccaggcaac

SEQ ID NO: 1650831 - DNA, 15 bp, Homo sapiens
gtaatccccaggcaa

SEQ ID NO: 1650832 - DNA, 15 bp, Homo sapiens
tgtaatccccaggca

SEQ ID NO: 1650833 - DNA, 15 bp, Homo sapiens
ctgtaatccccaggc

SEQ ID NO: 1650834 - DNA, 15 bp, Homo sapiens
tctgtaatccccagg

SEQ ID NO: 1650835 - DNA, 15 bp, Homo sapiens
ttctgtaatccccag

SEQ ID NO: 1650836 - DNA, 15 bp, Homo sapiens
tttctgtaatcccca

SEQ ID NO: 1650837 - DNA, 15 bp, Homo sapiens
ttttctgtaatcccc

SEQ ID NO: 1650838 - DNA, 15 bp, Homo sapiens
cttttctgtaatccc

SEQ ID NO: 1650839 - DNA, 15 bp, Homo sapiens
tcttttctgtaatcc

SEQ ID NO: 1650840 - DNA, 15 bp, Homo sapiens
ttcttttctgtaatc

SEQ ID NO: 1650841 - DNA, 15 bp, Homo sapiens
cttcttttctgtaat

SEQ ID NO: 1650842 - DNA, 15 bp, Homo sapiens
tcttcttttctgtaa

SEQ ID NO: 1650843 - DNA, 15 bp, Homo sapiens
ctcttcttttctgta

SEQ ID NO: 1650844 - DNA, 15 bp, Homo sapiens
tctcttcttttctgt

SEQ ID NO: 1650845 - DNA, 15 bp, Homo sapiens
ttctcttcttttctg

SEQ ID NO: 1650846 - DNA, 15 bp, Homo sapiens
cttctcttcttttct

SEQ ID NO: 1650847 - DNA, 15 bp, Homo sapiens
gcttctcttcttttc

SEQ ID NO: 1650848 - DNA, 15 bp, Homo sapiens
tgcttctcttctttt

SEQ ID NO: 1650849 - DNA, 15 bp, Homo sapiens
ttgcttctcttcttt

SEQ ID NO: 1650850 - DNA, 15 bp, Homo sapiens
tttgcttctcttctt

SEQ ID NO: 1650851 - DNA, 15 bp, Homo sapiens
gtttgcttctcttct

SEQ ID NO: 1650852 - DNA, 15 bp, Homo sapiens
tgtttgcttctcttc

SEQ ID NO: 1650853 - DNA, 15 bp, Homo sapiens
ttgtttgcttctctt

SEQ ID NO: 1650854 - DNA, 15 bp, Homo sapiens
attgtttgcttctct

SEQ ID NO: 1650855 - DNA, 15 bp, Homo sapiens
tattgtttgcttctc

SEQ ID NO: 1650856 - DNA, 15 bp, Homo sapiens
atattgtttgcttct

SEQ ID NO: 1650857 - DNA, 15 bp, Homo sapiens
tatattgtttgcttc

SEQ ID NO: 1650858 - DNA, 15 bp, Homo sapiens
atatattgtttgctt

SEQ ID NO: 1650859 - DNA, 15 bp, Homo sapiens
tatatattgtttgct

SEQ ID NO: 1650860 - DNA, 15 bp, Homo sapiens
ttatatattgtttgc

SEQ ID NO: 1650861 - DNA, 15 bp, Homo sapiens
tttatatattgtttg

SEQ ID NO: 1650862 - DNA, 15 bp, Homo sapiens
atttatatattgttt

SEQ ID NO: 1650863 - DNA, 15 bp, Homo sapiens
catttatatattgtt

SEQ ID NO: 1650864 - DNA, 15 bp, Homo sapiens
acatttatatattgt

SEQ ID NO: 1650865 - DNA, 15 bp, Homo sapiens
cacatttatatattg

SEQ ID NO: 1650866 - DNA, 15 bp, Homo sapiens
acacatttatatatt

SEQ ID NO: 1650867 - DNA, 15 bp, Homo sapiens
aacacatttatatat

SEQ ID NO: 1650868 - DNA, 15 bp, Homo sapiens
aaacacatttatata

SEQ ID NO: 1650869 - DNA, 15 bp, Homo sapiens
aaaacacatttatat

SEQ ID NO: 1650870 - DNA, 15 bp, Homo sapiens
caaaacacatttata

SEQ ID NO: 1650871 - DNA, 15 bp, Homo sapiens
acaaaacacatttat

SEQ ID NO: 1650872 - DNA, 15 bp, Homo sapiens
cacaaaacacattta

SEQ ID NO: 1650873 - DNA, 15 bp, Homo sapiens
gcacaaaacacattt

SEQ ID NO: 1650874 - DNA, 15 bp, Homo sapiens
ggcacaaaacacatt

SEQ ID NO: 1650875 - DNA, 15 bp, Homo sapiens
tggcacaaaacacat

SEQ ID NO: 1650876 - DNA, 15 bp, Homo sapiens
ttggcacaaaacaca

SEQ ID NO: 1650877 - DNA, 15 bp, Homo sapiens
tttggcacaaaacac

SEQ ID NO: 1650878 - DNA, 15 bp, Homo sapiens
atttggcacaaaaca

SEQ ID NO: 1650879 - DNA, 15 bp, Homo sapiens
catttggcacaaaac

SEQ ID NO: 1650880 - DNA, 15 bp, Homo sapiens
tcatttggcacaaaa

SEQ ID NO: 1650881 - DNA, 15 bp, Homo sapiens
ttcatttggcacaaa

SEQ ID NO: 1650882 - DNA, 15 bp, Homo sapiens
tttcatttggcacaa

SEQ ID NO: 1650883 - DNA, 15 bp, Homo sapiens
ctttcatttggcaca

SEQ ID NO: 1650884 - DNA, 15 bp, Homo sapiens
actttcatttggcac

SEQ ID NO: 1650885 - DNA, 15 bp, Homo sapiens
cactttcatttggca

SEQ ID NO: 1650886 - DNA, 15 bp, Homo sapiens
tcactttcatttggc

SEQ ID NO: 1650887 - DNA, 15 bp, Homo sapiens
ttcactttcatttgg

SEQ ID NO: 1650888 - DNA, 15 bp, Homo sapiens
tttcactttcatttg

SEQ ID NO: 1650889 - DNA, 15 bp, Homo sapiens
atttcactttcattt

SEQ ID NO: 1650890 - DNA, 15 bp, Homo sapiens
tatttcactttcatt

SEQ ID NO: 1650891 - DNA, 15 bp, Homo sapiens
ctatttcactttcat

SEQ ID NO: 1650892 - DNA, 15 bp, Homo sapiens
gctatttcactttca

SEQ ID NO: 1650893 - DNA, 15 bp, Homo sapiens
tgctatttcactttc

SEQ ID NO: 1650894 - DNA, 15 bp, Homo sapiens
atgctatttcacttt

SEQ ID NO: 1650895 - DNA, 15 bp, Homo sapiens
aatgctatttcactt

SEQ ID NO: 1650896 - DNA, 15 bp, Homo sapiens
caatgctatttcact

SEQ ID NO: 1650897 - DNA, 15 bp, Homo sapiens
gcaatgctatttcac

SEQ ID NO: 1650898 - DNA, 15 bp, Homo sapiens
agcaatgctatttca

SEQ ID NO: 1650899 - DNA, 15 bp, Homo sapiens
tagcaatgctatttc

SEQ ID NO: 1650900 - DNA, 15 bp, Homo sapiens
atagcaatgctattt

SEQ ID NO: 1650901 - DNA, 15 bp, Homo sapiens
catagcaatgctatt

SEQ ID NO: 1650902 - DNA, 15 bp, Homo sapiens
acatagcaatgctat

SEQ ID NO: 1650903 - DNA, 15 bp, Homo sapiens
cacatagcaatgcta

SEQ ID NO: 1650904 - DNA, 15 bp, Homo sapiens
gcacatagcaatgct

SEQ ID NO: 1650905 - DNA, 15 bp, Homo sapiens
agcacatagcaatgc

SEQ ID NO: 1650906 - DNA, 15 bp, Homo sapiens
tagcacatagcaatg

SEQ ID NO: 1650907 - DNA, 15 bp, Homo sapiens
atagcacatagcaat

SEQ ID NO: 1650908 - DNA, 15 bp, Homo sapiens
tatagcacatagcaa

SEQ ID NO: 1650909 - DNA, 15 bp, Homo sapiens
ttatagcacatagca

SEQ ID NO: 1650910 - DNA, 15 bp, Homo sapiens
attatagcacatagc

SEQ ID NO: 1650911 - DNA, 15 bp, Homo sapiens
cattatagcacatag

SEQ ID NO: 1650912 - DNA, 15 bp, Homo sapiens
ccattatagcacata

SEQ ID NO: 1650913 - DNA, 15 bp, Homo sapiens
gccattatagcacat

SEQ ID NO: 1650914 - DNA, 15 bp, Homo sapiens
tgccattatagcaca

SEQ ID NO: 1650915 - DNA, 15 bp, Homo sapiens
ctgccattatagcac

SEQ ID NO: 1650916 - DNA, 15 bp, Homo sapiens
cctgccattatagca

SEQ ID NO: 1650917 - DNA, 15 bp, Homo sapiens
tcctgccattatagc

SEQ ID NO: 1650918 - DNA, 15 bp, Homo sapiens
atcctgccattatag

SEQ ID NO: 1650919 - DNA, 15 bp, Homo sapiens
aatcctgccattata

SEQ ID NO: 1650920 - DNA, 15 bp, Homo sapiens
aaatcctgccattat

SEQ ID NO: 1650921 - DNA, 15 bp, Homo sapiens
taaatcctgccatta

SEQ ID NO: 1650922 - DNA, 15 bp, Homo sapiens
ttaaatcctgccatt

SEQ ID NO: 1650923 - DNA, 15 bp, Homo sapiens
tttaaatcctgccat

SEQ ID NO: 1650924 - DNA, 15 bp, Homo sapiens
ctttaaatcctgcca

SEQ ID NO: 1650925 - DNA, 15 bp, Homo sapiens
gctttaaatcctgcc

SEQ ID NO: 1650926 - DNA, 15 bp, Homo sapiens
tgctttaaatcctgc

SEQ ID NO: 1650927 - DNA, 15 bp, Homo sapiens
ctgctttaaatcctg

SEQ ID NO: 1650928 - DNA, 15 bp, Homo sapiens
actgctttaaatcct

SEQ ID NO: 1650929 - DNA, 15 bp, Homo sapiens
aactgctttaaatcc

SEQ ID NO: 1650930 - DNA, 15 bp, Homo sapiens
aaactgctttaaatc

SEQ ID NO: 1650931 - DNA, 15 bp, Homo sapiens
caaactgctttaaat

SEQ ID NO: 1650932 - DNA, 15 bp, Homo sapiens
tcaaactgctttaaa

SEQ ID NO: 1650933 - DNA, 15 bp, Homo sapiens
ttcaaactgctttaa

SEQ ID NO: 1650934 - DNA, 15 bp, Homo sapiens
tttcaaactgcttta

SEQ ID NO: 1650935 - DNA, 15 bp, Homo sapiens
ttttcaaactgcttt

SEQ ID NO: 1650936 - DNA, 15 bp, Homo sapiens
gttttcaaactgctt

SEQ ID NO: 1650937 - DNA, 15 bp, Homo sapiens
tgttttcaaactgct

SEQ ID NO: 1650938 - DNA, 15 bp, Homo sapiens
ctgttttcaaactgc

SEQ ID NO: 1650939 - DNA, 15 bp, Homo sapiens
gctgttttcaaactg

SEQ ID NO: 1650940 - DNA, 15 bp, Homo sapiens
tgctgttttcaaact

SEQ ID NO: 1650941 - DNA, 15 bp, Homo sapiens
ctgctgttttcaaac

SEQ ID NO: 1650942 - DNA, 15 bp, Homo sapiens
actgctgttttcaaa

SEQ ID NO: 1650943 - DNA, 15 bp, Homo sapiens
aactgctgttttcaa

SEQ ID NO: 1650944 - DNA, 15 bp, Homo sapiens
aaactgctgttttca

SEQ ID NO: 1650945 - DNA, 15 bp, Homo sapiens
caaactgctgttttc

SEQ ID NO: 1650946 - DNA, 15 bp, Homo sapiens
ccaaactgctgtttt

SEQ ID NO: 1650947 - DNA, 15 bp, Homo sapiens
accaaactgctgttt

SEQ ID NO: 1650948 - DNA, 15 bp, Homo sapiens
caccaaactgctgtt

SEQ ID NO: 1650949 - DNA, 15 bp, Homo sapiens
tcaccaaactgctgt

SEQ ID NO: 1650950 - DNA, 15 bp, Homo sapiens
ttcaccaaactgctg

SEQ ID NO: 1650951 - DNA, 15 bp, Homo sapiens
cttcaccaaactgct

SEQ ID NO: 1650952 - DNA, 15 bp, Homo sapiens
acttcaccaaactgc

SEQ ID NO: 1650953 - DNA, 15 bp, Homo sapiens
cacttcaccaaactg

SEQ ID NO: 1650954 - DNA, 15 bp, Homo sapiens
gcacttcaccaaact

SEQ ID NO: 1650955 - DNA, 15 bp, Homo sapiens
tgcacttcaccaaac

SEQ ID NO: 1650956 - DNA, 15 bp, Homo sapiens
atgcacttcaccaaa

SEQ ID NO: 1650957 - DNA, 15 bp, Homo sapiens
gatgcacttcaccaa

SEQ ID NO: 1650958 - DNA, 15 bp, Homo sapiens
tgatgcacttcacca

SEQ ID NO: 1650959 - DNA, 15 bp, Homo sapiens
ttgatgcacttcacc

SEQ ID NO: 1650960 - DNA, 15 bp, Homo sapiens
gttgatgcacttcac

SEQ ID NO: 1650961 - DNA, 15 bp, Homo sapiens
tgttgatgcacttca

SEQ ID NO: 1650962 - DNA, 15 bp, Homo sapiens
gtgttgatgcacttc

SEQ ID NO: 1650963 - DNA, 15 bp, Homo sapiens
tgtgttgatgcactt

SEQ ID NO: 1650964 - DNA, 15 bp, Homo sapiens
ctgtgttgatgcact

SEQ ID NO: 1650965 - DNA, 15 bp, Homo sapiens
gctgtgttgatgcac

SEQ ID NO: 1650966 - DNA, 15 bp, Homo sapiens
tgctgtgttgatgca

SEQ ID NO: 1650967 - DNA, 15 bp, Homo sapiens
atgctgtgttgatgc

SEQ ID NO: 1650968 - DNA, 15 bp, Homo sapiens
catgctgtgttgatg

SEQ ID NO: 1650969 - DNA, 15 bp, Homo sapiens
acatgctgtgttgat

SEQ ID NO: 1650970 - DNA, 15 bp, Homo sapiens
cacatgctgtgttga

SEQ ID NO: 1650971 - DNA, 15 bp, Homo sapiens
tcacatgctgtgttg

SEQ ID NO: 1650972 - DNA, 15 bp, Homo sapiens
atcacatgctgtgtt

SEQ ID NO: 1650973 - DNA, 15 bp, Homo sapiens
tatcacatgctgtgt

SEQ ID NO: 1650974 - DNA, 15 bp, Homo sapiens
atatcacatgctgtg

SEQ ID NO: 1650975 - DNA, 15 bp, Homo sapiens
aatatcacatgctgt

SEQ ID NO: 1650976 - DNA, 15 bp, Homo sapiens
taatatcacatgctg

SEQ ID NO: 1650977 - DNA, 15 bp, Homo sapiens
gtaatatcacatgct

SEQ ID NO: 1650978 - DNA, 15 bp, Homo sapiens
tgtaatatcacatgc

SEQ ID NO: 1650979 - DNA, 15 bp, Homo sapiens
ctgtaatatcacatg

SEQ ID NO: 1650980 - DNA, 15 bp, Homo sapiens
tctgtaatatcacat

SEQ ID NO: 1650981 - DNA, 15 bp, Homo sapiens
gtctgtaatatcaca

SEQ ID NO: 1650982 - DNA, 15 bp, Homo sapiens
tgtctgtaatatcac

SEQ ID NO: 1650983 - DNA, 15 bp, Homo sapiens
gtgtctgtaatatca

SEQ ID NO: 1650984 - DNA, 15 bp, Homo sapiens
cgtgtctgtaatatc

SEQ ID NO: 1650985 - DNA, 15 bp, Homo sapiens
gcgtgtctgtaatat

SEQ ID NO: 1650986 - DNA, 15 bp, Homo sapiens
ggcgtgtctgtaata

SEQ ID NO: 1650987 - DNA, 15 bp, Homo sapiens
tggcgtgtctgtaat

SEQ ID NO: 1650988 - DNA, 15 bp, Homo sapiens
gtggcgtgtctgtaa

SEQ ID NO: 1650989 - DNA, 15 bp, Homo sapiens
agtggcgtgtctgta

SEQ ID NO: 1650990 - DNA, 15 bp, Homo sapiens
gagtggcgtgtctgt

SEQ ID NO: 1650991 - DNA, 15 bp, Homo sapiens
tgagtggcgtgtctg

SEQ ID NO: 1650992 - DNA, 15 bp, Homo sapiens
ttgagtggcgtgtct

SEQ ID NO: 1650993 - DNA, 15 bp, Homo sapiens
tttgagtggcgtgtc

SEQ ID NO: 1650994 - DNA, 15 bp, Homo sapiens
ttttgagtggcgtgt

SEQ ID NO: 1650995 - DNA, 15 bp, Homo sapiens
cttttgagtggcgtg

SEQ ID NO: 1650996 - DNA, 15 bp, Homo sapiens
tcttttgagtggcgt

SEQ ID NO: 1650997 - DNA, 15 bp, Homo sapiens
ttcttttgagtggcg

SEQ ID NO: 1650998 - DNA, 15 bp, Homo sapiens
tttcttttgagtggc

SEQ ID NO: 1650999 - DNA, 15 bp, Homo sapiens
gtttcttttgagtgg

SEQ ID NO: 1651000 - DNA, 15 bp, Homo sapiens
agtttcttttgagtg

SEQ ID NO: 1651001 - DNA, 15 bp, Homo sapiens
tagtttcttttgagt

SEQ ID NO: 1651002 - DNA, 15 bp, Homo sapiens
atagtttcttttgag

SEQ ID NO: 1651003 - DNA, 15 bp, Homo sapiens
tatagtttcttttga

SEQ ID NO: 1651004 - DNA, 15 bp, Homo sapiens
ttatagtttcttttg

SEQ ID NO: 1651005 - DNA, 15 bp, Homo sapiens
attatagtttctttt

SEQ ID NO: 1651006 - DNA, 15 bp, Homo sapiens
tattatagtttcttt

SEQ ID NO: 1651007 - DNA, 15 bp, Homo sapiens
gtattatagtttctt

SEQ ID NO: 1651008 - DNA, 15 bp, Homo sapiens
agtattatagtttct

SEQ ID NO: 1651009 - DNA, 15 bp, Homo sapiens
tagtattatagtttc

SEQ ID NO: 1651010 - DNA, 15 bp, Homo sapiens
atagtattatagttt

SEQ ID NO: 1651011 - DNA, 15 bp, Homo sapiens
tatagtattatagtt

SEQ ID NO: 1651012 - DNA, 15 bp, Homo sapiens
ttatagtattatagt

SEQ ID NO: 1651013 - DNA, 15 bp, Homo sapiens
attatagtattatag

SEQ ID NO: 1651014 - DNA, 15 bp, Homo sapiens
tattatagtattata

SEQ ID NO: 1651015 - DNA, 15 bp, Homo sapiens
ctattatagtattat

SEQ ID NO: 1651016 - DNA, 15 bp, Homo sapiens
actattatagtatta

SEQ ID NO: 1651017 - DNA, 15 bp, Homo sapiens
tactattatagtatt

SEQ ID NO: 1651018 - DNA, 15 bp, Homo sapiens
ctactattatagtat

SEQ ID NO: 1651019 - DNA, 15 bp, Homo sapiens
actactattatagta

SEQ ID NO: 1651020 - DNA, 15 bp, Homo sapiens
cactactattatagt

SEQ ID NO: 1651021 - DNA, 15 bp, Homo sapiens
gcactactattatag

SEQ ID NO: 1651022 - DNA, 15 bp, Homo sapiens
ggcactactattata

SEQ ID NO: 1651023 - DNA, 15 bp, Homo sapiens
tggcactactattat

SEQ ID NO: 1651024 - DNA, 15 bp, Homo sapiens
atggcactactatta

SEQ ID NO: 1651025 - DNA, 15 bp, Homo sapiens
tatggcactactatt

SEQ ID NO: 1651026 - DNA, 15 bp, Homo sapiens
atatggcactactat

SEQ ID NO: 1651027 - DNA, 15 bp, Homo sapiens
aatatggcactacta

SEQ ID NO: 1651028 - DNA, 15 bp, Homo sapiens
aaatatggcactact

SEQ ID NO: 1651029 - DNA, 15 bp, Homo sapiens
caaatatggcactac

SEQ ID NO: 1651030 - DNA, 15 bp, Homo sapiens
gcaaatatggcacta

SEQ ID NO: 1651031 - DNA, 15 bp, Homo sapiens
tgcaaatatggcact

SEQ ID NO: 1651032 - DNA, 15 bp, Homo sapiens
atgcaaatatggcac

SEQ ID NO: 1651033 - DNA, 15 bp, Homo sapiens
aatgcaaatatggca

SEQ ID NO: 1651034 - DNA, 15 bp, Homo sapiens
aaatgcaaatatggc

SEQ ID NO: 1651035 - DNA, 15 bp, Homo sapiens
aaaatgcaaatatgg

SEQ ID NO: 1651036 - DNA, 15 bp, Homo sapiens
taaaatgcaaatatg

SEQ ID NO: 1651037 - DNA, 15 bp, Homo sapiens
ctaaaatgcaaatat

SEQ ID NO: 1651038 - DNA, 15 bp, Homo sapiens
actaaaatgcaaata

SEQ ID NO: 1651039 - DNA, 15 bp, Homo sapiens
aactaaaatgcaaat

SEQ ID NO: 1651040 - DNA, 15 bp, Homo sapiens
taactaaaatgcaaa

SEQ ID NO: 1651041 - DNA, 15 bp, Homo sapiens
ataactaaaatgcaa

SEQ ID NO: 1651042 - DNA, 15 bp, Homo sapiens
gataactaaaatgca

SEQ ID NO: 1651043 - DNA, 15 bp, Homo sapiens
agataactaaaatgc

SEQ ID NO: 1651044 - DNA, 15 bp, Homo sapiens
tagataactaaaatg

SEQ ID NO: 1651045 - DNA, 15 bp, Homo sapiens
atagataactaaaat

SEQ ID NO: 1651046 - DNA, 15 bp, Homo sapiens
aatagataactaaaa

SEQ ID NO: 1651047 - DNA, 15 bp, Homo sapiens
taatagataactaaa

SEQ ID NO: 1651048 - DNA, 15 bp, Homo sapiens
ttaatagataactaa

SEQ ID NO: 1651049 - DNA, 15 bp, Homo sapiens
gttaatagataacta

SEQ ID NO: 1651050 - DNA, 15 bp, Homo sapiens
agttaatagataact

SEQ ID NO: 1651051 - DNA, 15 bp, Homo sapiens
tagttaatagataac

SEQ ID NO: 1651052 - DNA, 15 bp, Homo sapiens
gtagttaatagataa

SEQ ID NO: 1651053 - DNA, 15 bp, Homo sapiens
agtagttaatagata

SEQ ID NO: 1651054 - DNA, 15 bp, Homo sapiens
tagtagttaatagat

SEQ ID NO: 1651055 - DNA, 15 bp, Homo sapiens
ttagtagttaataga

SEQ ID NO: 1651056 - DNA, 15 bp, Homo sapiens
attagtagttaatag

SEQ ID NO: 1651057 - DNA, 15 bp, Homo sapiens
aattagtagttaata

SEQ ID NO: 1651058 - DNA, 15 bp, Homo sapiens
aaattagtagttaat

SEQ ID NO: 1651059 - DNA, 15 bp, Homo sapiens
caaattagtagttaa

SEQ ID NO: 1651060 - DNA, 15 bp, Homo sapiens
acaaattagtagtta

SEQ ID NO: 1651061 - DNA, 15 bp, Homo sapiens
tacaaattagtagtt

SEQ ID NO: 1651062 - DNA, 15 bp, Homo sapiens
gtacaaattagtagt

SEQ ID NO: 1651063 - DNA, 15 bp, Homo sapiens
tgtacaaattagtag

SEQ ID NO: 1651064 - DNA, 15 bp, Homo sapiens
atgtacaaattagta

SEQ ID NO: 1651065 - DNA, 15 bp, Homo sapiens
gatgtacaaattagt

SEQ ID NO: 1651066 - DNA, 15 bp, Homo sapiens
agatgtacaaattag

SEQ ID NO: 1651067 - DNA, 15 bp, Homo sapiens
cagatgtacaaatta

SEQ ID NO: 1651068 - DNA, 15 bp, Homo sapiens
gcagatgtacaaatt

SEQ ID NO: 1651069 - DNA, 15 bp, Homo sapiens
agcagatgtacaaat

SEQ ID NO: 1651070 - DNA, 15 bp, Homo sapiens
tagcagatgtacaaa

SEQ ID NO: 1651071 - DNA, 15 bp, Homo sapiens
atagcagatgtacaa

SEQ ID NO: 1651072 - DNA, 15 bp, Homo sapiens
catagcagatgtaca

SEQ ID NO: 1651073 - DNA, 15 bp, Homo sapiens
acatagcagatgtac

SEQ ID NO: 1651074 - DNA, 15 bp, Homo sapiens
aacatagcagatgta

SEQ ID NO: 1651075 - DNA, 15 bp, Homo sapiens
aaacatagcagatgt

SEQ ID NO: 1651076 - DNA, 15 bp, Homo sapiens
aaaacatagcagatg

SEQ ID NO: 1651077 - DNA, 15 bp, Homo sapiens
taaaacatagcagat

SEQ ID NO: 1651078 - DNA, 15 bp, Homo sapiens
ataaaacatagcaga

SEQ ID NO: 1651079 - DNA, 15 bp, Homo sapiens
tataaaacatagcag

SEQ ID NO: 1651080 - DNA, 15 bp, Homo sapiens
ctataaaacatagca

SEQ ID NO: 1651081 - DNA, 15 bp, Homo sapiens
actataaaacatagc

SEQ ID NO: 1651082 - DNA, 15 bp, Homo sapiens
aactataaaacatag

SEQ ID NO: 1651083 - DNA, 15 bp, Homo sapiens
caactataaaacata

SEQ ID NO: 1651084 - DNA, 15 bp, Homo sapiens
acaactataaaacat

SEQ ID NO: 1651085 - DNA, 15 bp, Homo sapiens
tacaactataaaaca

SEQ ID NO: 1651086 - DNA, 15 bp, Homo sapiens
atacaactataaaac

SEQ ID NO: 1651087 - DNA, 15 bp, Homo sapiens
aatacaactataaaa

SEQ ID NO: 1651088 - DNA, 15 bp, Homo sapiens
taatacaactataaa

SEQ ID NO: 1651089 - DNA, 15 bp, Homo sapiens
ataatacaactataa

SEQ ID NO: 1651090 - DNA, 15 bp, Homo sapiens
tataatacaactata

SEQ ID NO: 1651091 - DNA, 15 bp, Homo sapiens
ctataatacaactat

SEQ ID NO: 1651092 - DNA, 15 bp, Homo sapiens
tctataatacaacta

SEQ ID NO: 1651093 - DNA, 15 bp, Homo sapiens
atctataatacaact

SEQ ID NO: 1651094 - DNA, 15 bp, Homo sapiens
catctataatacaac

SEQ ID NO: 1651095 - DNA, 15 bp, Homo sapiens
acatctataatacaa

SEQ ID NO: 1651096 - DNA, 15 bp, Homo sapiens
tacatctataataca

SEQ ID NO: 1651097 - DNA, 15 bp, Homo sapiens
ctacatctataatac

SEQ ID NO: 1651098 - DNA, 15 bp, Homo sapiens
cctacatctataata

SEQ ID NO: 1651099 - DNA, 15 bp, Homo sapiens
gcctacatctataat

SEQ ID NO: 1651100 - DNA, 15 bp, Homo sapiens
tgcctacatctataa

SEQ ID NO: 1651101 - DNA, 15 bp, Homo sapiens
ttgcctacatctata

SEQ ID NO: 1651102 - DNA, 15 bp, Homo sapiens
tttgcctacatctat

SEQ ID NO: 1651103 - DNA, 15 bp, Homo sapiens
gtttgcctacatcta

SEQ ID NO: 1651104 - DNA, 15 bp, Homo sapiens
tgtttgcctacatct

SEQ ID NO: 1651105 - DNA, 15 bp, Homo sapiens
ctgtttgcctacatc

SEQ ID NO: 1651106 - DNA, 15 bp, Homo sapiens
tctgtttgcctacat

SEQ ID NO: 1651107 - DNA, 15 bp, Homo sapiens
atctgtttgcctaca

SEQ ID NO: 1651108 - DNA, 15 bp, Homo sapiens
aatctgtttgcctac

SEQ ID NO: 1651109 - DNA, 15 bp, Homo sapiens
aaatctgtttgccta

SEQ ID NO: 1651110 - DNA, 15 bp, Homo sapiens
gaaatctgtttgcct

SEQ ID NO: 1651111 - DNA, 15 bp, Homo sapiens
tgaaatctgtttgcc

SEQ ID NO: 1651112 - DNA, 15 bp, Homo sapiens
atgaaatctgtttgc

SEQ ID NO: 1651113 - DNA, 15 bp, Homo sapiens
aatgaaatctgtttg

SEQ ID NO: 1651114 - DNA, 15 bp, Homo sapiens
gaatgaaatctgttt

SEQ ID NO: 1651115 - DNA, 15 bp, Homo sapiens
ggaatgaaatctgtt

SEQ ID NO: 1651116 - DNA, 15 bp, Homo sapiens
tggaatgaaatctgt

SEQ ID NO: 1651117 - DNA, 15 bp, Homo sapiens
ctggaatgaaatctg

SEQ ID NO: 1651118 - DNA, 15 bp, Homo sapiens
cctggaatgaaatct

SEQ ID NO: 1651119 - DNA, 15 bp, Homo sapiens
acctggaatgaaatc

SEQ ID NO: 1651120 - DNA, 15 bp, Homo sapiens
aacctggaatgaaat

SEQ ID NO: 1651121 - DNA, 15 bp, Homo sapiens
aaacctggaatgaaa

SEQ ID NO: 1651122 - DNA, 15 bp, Homo sapiens
caaacctggaatgaa

SEQ ID NO: 1651123 - DNA, 15 bp, Homo sapiens
acaaacctggaatga

SEQ ID NO: 1651124 - DNA, 15 bp, Homo sapiens
aacaaacctggaatg

SEQ ID NO: 1651125 - DNA, 15 bp, Homo sapiens
gaacaaacctggaat

SEQ ID NO: 1651126 - DNA, 15 bp, Homo sapiens
tgaacaaacctggaa

SEQ ID NO: 1651127 - DNA, 15 bp, Homo sapiens
atgaacaaacctgga

SEQ ID NO: 1651128 - DNA, 15 bp, Homo sapiens
tatgaacaaacctgg

SEQ ID NO: 1651129 - DNA, 15 bp, Homo sapiens
gtatgaacaaacctg

SEQ ID NO: 1651130 - DNA, 15 bp, Homo sapiens
tgtatgaacaaacct

SEQ ID NO: 1651131 - DNA, 15 bp, Homo sapiens
gtgtatgaacaaacc

SEQ ID NO: 1651132 - DNA, 15 bp, Homo sapiens
agtgtatgaacaaac

SEQ ID NO: 1651133 - DNA, 15 bp, Homo sapiens
aagtgtatgaacaaa

SEQ ID NO: 1651134 - DNA, 15 bp, Homo sapiens
aaagtgtatgaacaa

SEQ ID NO: 1651135 - DNA, 15 bp, Homo sapiens
taaagtgtatgaaca

SEQ ID NO: 1651136 - DNA, 15 bp, Homo sapiens
ttaaagtgtatgaac

SEQ ID NO: 1651137 - DNA, 15 bp, Homo sapiens
gttaaagtgtatgaa

SEQ ID NO: 1651138 - DNA, 15 bp, Homo sapiens
agttaaagtgtatga

SEQ ID NO: 1651139 - DNA, 15 bp, Homo sapiens
aagttaaagtgtatg

SEQ ID NO: 1651140 - DNA, 15 bp, Homo sapiens
taagttaaagtgtat

SEQ ID NO: 1651141 - DNA, 15 bp, Homo sapiens
ttaagttaaagtgta

SEQ ID NO: 1651142 - DNA, 15 bp, Homo sapiens
gttaagttaaagtgt

SEQ ID NO: 1651143 - DNA, 15 bp, Homo sapiens
tgttaagttaaagtg

SEQ ID NO: 1651144 - DNA, 15 bp, Homo sapiens
ttgttaagttaaagt

SEQ ID NO: 1651145 - DNA, 15 bp, Homo sapiens
attgttaagttaaag

SEQ ID NO: 1651146 - DNA, 15 bp, Homo sapiens
aattgttaagttaaa

SEQ ID NO: 1651147 - DNA, 15 bp, Homo sapiens
taattgttaagttaa

SEQ ID NO: 1651148 - DNA, 15 bp, Homo sapiens
ataattgttaagtta

SEQ ID NO: 1651149 - DNA, 15 bp, Homo sapiens
aataattgttaagtt

SEQ ID NO: 1651150 - DNA, 15 bp, Homo sapiens
gaataattgttaagt

SEQ ID NO: 1651151 - DNA, 15 bp, Homo sapiens
ggaataattgttaag

SEQ ID NO: 1651152 - DNA, 15 bp, Homo sapiens
gggaataattgttaa

SEQ ID NO: 1651153 - DNA, 15 bp, Homo sapiens
tgggaataattgtta

SEQ ID NO: 1651154 - DNA, 15 bp, Homo sapiens
atgggaataattgtt

SEQ ID NO: 1651155 - DNA, 15 bp, Homo sapiens
tatgggaataattgt

SEQ ID NO: 1651156 - DNA, 15 bp, Homo sapiens
ttatgggaataattg

SEQ ID NO: 1651157 - DNA, 15 bp, Homo sapiens
tttatgggaataatt

SEQ ID NO: 1651158 - DNA, 15 bp, Homo sapiens
gtttatgggaataat

SEQ ID NO: 1651159 - DNA, 15 bp, Homo sapiens
ggtttatgggaataa

SEQ ID NO: 1651160 - DNA, 15 bp, Homo sapiens
aggtttatgggaata

SEQ ID NO: 1651161 - DNA, 15 bp, Homo sapiens
taggtttatgggaat

SEQ ID NO: 1651162 - DNA, 15 bp, Homo sapiens
ttaggtttatgggaa

SEQ ID NO: 1651163 - DNA, 15 bp, Homo sapiens
tttaggtttatggga

SEQ ID NO: 1651164 - DNA, 15 bp, Homo sapiens
atttaggtttatggg

SEQ ID NO: 1651165 - DNA, 15 bp, Homo sapiens
tatttaggtttatgg

SEQ ID NO: 1651166 - DNA, 15 bp, Homo sapiens
ctatttaggtttatg

SEQ ID NO: 1651167 - DNA, 15 bp, Homo sapiens
actatttaggtttat

SEQ ID NO: 1651168 - DNA, 15 bp, Homo sapiens
tactatttaggttta

SEQ ID NO: 1651169 - DNA, 15 bp, Homo sapiens
gtactatttaggttt

SEQ ID NO: 1651170 - DNA, 15 bp, Homo sapiens
tgtactatttaggtt

SEQ ID NO: 1651171 - DNA, 15 bp, Homo sapiens
atgtactatttaggt

SEQ ID NO: 1651172 - DNA, 15 bp, Homo sapiens
tatgtactatttagg

SEQ ID NO: 1651173 - DNA, 15 bp, Homo sapiens
ttatgtactatttag

SEQ ID NO: 1651174 - DNA, 15 bp, Homo sapiens
attatgtactattta

SEQ ID NO: 1651175 - DNA, 15 bp, Homo sapiens
tattatgtactattt

SEQ ID NO: 1651176 - DNA, 15 bp, Homo sapiens
ttattatgtactatt

SEQ ID NO: 1651177 - DNA, 15 bp, Homo sapiens
attattatgtactat

SEQ ID NO: 1651178 - DNA, 15 bp, Homo sapiens
tattattatgtacta

SEQ ID NO: 1651179 - DNA, 15 bp, Homo sapiens
atattattatgtact

SEQ ID NO: 1651180 - DNA, 15 bp, Homo sapiens
aatattattatgtac

SEQ ID NO: 1651181 - DNA, 15 bp, Homo sapiens
aaatattattatgta

SEQ ID NO: 1651182 - DNA, 15 bp, Homo sapiens
aaaatattattatgt

SEQ ID NO: 1651183 - DNA, 15 bp, Homo sapiens
aaaaatattattatg

SEQ ID NO: 1651184 - DNA, 15 bp, Homo sapiens
gaaaaatattattat

SEQ ID NO: 1651185 - DNA, 15 bp, Homo sapiens
agaaaaatattatta

SEQ ID NO: 1651186 - DNA, 15 bp, Homo sapiens
aagaaaaatattatt

SEQ ID NO: 1651187 - DNA, 15 bp, Homo sapiens
aaagaaaaatattat

SEQ ID NO: 1651188 - DNA, 15 bp, Homo sapiens
aaaagaaaaatatta

SEQ ID NO: 1651189 - DNA, 15 bp, Homo sapiens
taaaagaaaaatatt

SEQ ID NO: 1651190 - DNA, 15 bp, Homo sapiens
gtaaaagaaaaatat

SEQ ID NO: 1651191 - DNA, 15 bp, Homo sapiens
tgtaaaagaaaaata

SEQ ID NO: 1651192 - DNA, 15 bp, Homo sapiens
ctgtaaaagaaaaat

SEQ ID NO: 1651193 - DNA, 15 bp, Homo sapiens
tctgtaaaagaaaaa

SEQ ID NO: 1651194 - DNA, 15 bp, Homo sapiens
ttctgtaaaagaaaa

SEQ ID NO: 1651195 - DNA, 15 bp, Homo sapiens
tttctgtaaaagaaa

SEQ ID NO: 1651196 - DNA, 15 bp, Homo sapiens
ttttctgtaaaagaa

SEQ ID NO: 1651197 - DNA, 15 bp, Homo sapiens
gttttctgtaaaaga

SEQ ID NO: 1651198 - DNA, 15 bp, Homo sapiens
cgttttctgtaaaag

SEQ ID NO: 1651199 - DNA, 15 bp, Homo sapiens
acgttttctgtaaaa

SEQ ID NO: 1651200 - DNA, 15 bp, Homo sapiens
aacgttttctgtaaa

SEQ ID NO: 1651201 - DNA, 15 bp, Homo sapiens
aaacgttttctgtaa

SEQ ID NO: 1651202 - DNA, 15 bp, Homo sapiens
taaacgttttctgta

SEQ ID NO: 1651203 - DNA, 15 bp, Homo sapiens
ttaaacgttttctgt

SEQ ID NO: 1651204 - DNA, 15 bp, Homo sapiens
attaaacgttttctg

SEQ ID NO: 1651205 - DNA, 15 bp, Homo sapiens
gattaaacgttttct

SEQ ID NO: 1651206 - DNA, 15 bp, Homo sapiens
tgattaaacgttttc

SEQ ID NO: 1651207 - DNA, 15 bp, Homo sapiens
ttgattaaacgtttt

SEQ ID NO: 1651208 - DNA, 15 bp, Homo sapiens
tttgattaaacgttt

SEQ ID NO: 1651209 - DNA, 15 bp, Homo sapiens
atttgattaaacgtt

SEQ ID NO: 1651210 - DNA, 15 bp, Homo sapiens
tatttgattaaacgt

SEQ ID NO: 1651211 - DNA, 15 bp, Homo sapiens
atatttgattaaacg

SEQ ID NO: 1651212 - DNA, 15 bp, Homo sapiens
tatatttgattaaac

SEQ ID NO: 1651213 - DNA, 15 bp, Homo sapiens
ctatatttgattaaa

SEQ ID NO: 1651214 - DNA, 15 bp, Homo sapiens
gctatatttgattaa

SEQ ID NO: 1651215 - DNA, 15 bp, Homo sapiens
tgctatatttgatta

SEQ ID NO: 1651216 - DNA, 15 bp, Homo sapiens
ttgctatatttgatt

SEQ ID NO: 1651217 - DNA, 15 bp, Homo sapiens
tttgctatatttgat

SEQ ID NO: 1651218 - DNA, 15 bp, Homo sapiens
ttttgctatatttga

SEQ ID NO: 1651219 - DNA, 15 bp, Homo sapiens
attttgctatatttg

SEQ ID NO: 1651220 - DNA, 15 bp, Homo sapiens
tattttgctatattt

SEQ ID NO: 1651221 - DNA, 15 bp, Homo sapiens
atattttgctatatt

SEQ ID NO: 1651222 - DNA, 15 bp, Homo sapiens
aatattttgctatat

SEQ ID NO: 1651223 - DNA, 15 bp, Homo sapiens
taatattttgctata

SEQ ID NO: 1651224 - DNA, 15 bp, Homo sapiens
ttaatattttgctat

SEQ ID NO: 1651225 - DNA, 15 bp, Homo sapiens
attaatattttgcta

SEQ ID NO: 1651226 - DNA, 15 bp, Homo sapiens
aattaatattttgct

SEQ ID NO: 1651227 - DNA, 15 bp, Homo sapiens
caattaatattttgc

SEQ ID NO: 1651228 - DNA, 15 bp, Homo sapiens
acaattaatattttg

SEQ ID NO: 1651229 - DNA, 15 bp, Homo sapiens
tacaattaatatttt

SEQ ID NO: 1651230 - DNA, 15 bp, Homo sapiens
ctacaattaatattt

SEQ ID NO: 1651231 - DNA, 15 bp, Homo sapiens
tctacaattaatatt

SEQ ID NO: 1651232 - DNA, 15 bp, Homo sapiens
ttctacaattaatat

SEQ ID NO: 1651233 - DNA, 15 bp, Homo sapiens
attctacaattaata

SEQ ID NO: 1651234 - DNA, 15 bp, Homo sapiens
gattctacaattaat

SEQ ID NO: 1651235 - DNA, 15 bp, Homo sapiens
agattctacaattaa

SEQ ID NO: 1651236 - DNA, 15 bp, Homo sapiens
tagattctacaatta

SEQ ID NO: 1651237 - DNA, 15 bp, Homo sapiens
ttagattctacaatt

SEQ ID NO: 1651238 - DNA, 15 bp, Homo sapiens
cttagattctacaat

SEQ ID NO: 1651239 - DNA, 15 bp, Homo sapiens
gcttagattctacaa

SEQ ID NO: 1651240 - DNA, 15 bp, Homo sapiens
tgcttagattctaca

SEQ ID NO: 1651241 - DNA, 15 bp, Homo sapiens
ctgcttagattctac

SEQ ID NO: 1651242 - DNA, 15 bp, Homo sapiens
actgcttagattcta

SEQ ID NO: 1651243 - DNA, 15 bp, Homo sapiens
cactgcttagattct

SEQ ID NO: 1651244 - DNA, 15 bp, Homo sapiens
tcactgcttagattc

SEQ ID NO: 1651245 - DNA, 15 bp, Homo sapiens
atcactgcttagatt

SEQ ID NO: 1651246 - DNA, 15 bp, Homo sapiens
aatcactgcttagat

SEQ ID NO: 1651247 - DNA, 15 bp, Homo sapiens
taatcactgcttaga

SEQ ID NO: 1651248 - DNA, 15 bp, Homo sapiens
ataatcactgcttag

SEQ ID NO: 1651249 - DNA, 15 bp, Homo sapiens
cataatcactgctta

SEQ ID NO: 1651250 - DNA, 15 bp, Homo sapiens
acataatcactgctt

SEQ ID NO: 1651251 - DNA, 15 bp, Homo sapiens
tacataatcactgct

SEQ ID NO: 1651252 - DNA, 15 bp, Homo sapiens
ctacataatcactgc

SEQ ID NO: 1651253 - DNA, 15 bp, Homo sapiens
cctacataatcactg

SEQ ID NO: 1651254 - DNA, 15 bp, Homo sapiens
acctacataatcact

SEQ ID NO: 1651255 - DNA, 15 bp, Homo sapiens
cacctacataatcac

SEQ ID NO: 1651256 - DNA, 15 bp, Homo sapiens
gcacctacataatca

SEQ ID NO: 1651257 - DNA, 15 bp, Homo sapiens
tgcacctacataatc

SEQ ID NO: 1651258 - DNA, 15 bp, Homo sapiens
gtgcacctacataat

SEQ ID NO: 1651259 - DNA, 15 bp, Homo sapiens
tgtgcacctacataa

SEQ ID NO: 1651260 - DNA, 15 bp, Homo sapiens
gtgtgcacctacata

SEQ ID NO: 1651261 - DNA, 15 bp, Homo sapiens
agtgtgcacctacat

SEQ ID NO: 1651262 - DNA, 15 bp, Homo sapiens
cagtgtgcacctaca

SEQ ID NO: 1651263 - DNA, 15 bp, Homo sapiens
tcagtgtgcacctac

SEQ ID NO: 1651264 - DNA, 15 bp, Homo sapiens
ttcagtgtgcaccta

SEQ ID NO: 1651265 - DNA, 15 bp, Homo sapiens
attcagtgtgcacct

SEQ ID NO: 1651266 - DNA, 15 bp, Homo sapiens
tattcagtgtgcacc

SEQ ID NO: 1651267 - DNA, 15 bp, Homo sapiens
ttattcagtgtgcac

SEQ ID NO: 1651268 - DNA, 15 bp, Homo sapiens
attattcagtgtgca

SEQ ID NO: 1651269 - DNA, 15 bp, Homo sapiens
aattattcagtgtgc

SEQ ID NO: 1651270 - DNA, 15 bp, Homo sapiens
gaattattcagtgtg

SEQ ID NO: 1651271 - DNA, 15 bp, Homo sapiens
agaattattcagtgt

SEQ ID NO: 1651272 - DNA, 15 bp, Homo sapiens
aagaattattcagtg

SEQ ID NO: 1651273 - DNA, 15 bp, Homo sapiens
aaagaattattcagt

SEQ ID NO: 1651274 - DNA, 15 bp, Homo sapiens
aaaagaattattcag

SEQ ID NO: 1651275 - DNA, 15 bp, Homo sapiens
gaaaagaattattca

SEQ ID NO: 1651276 - DNA, 15 bp, Homo sapiens
agaaaagaattattc

SEQ ID NO: 1651277 - DNA, 15 bp, Homo sapiens
aagaaaagaattatt

SEQ ID NO: 1651278 - DNA, 15 bp, Homo sapiens
caagaaaagaattat

SEQ ID NO: 1651279 - DNA, 15 bp, Homo sapiens
tcaagaaaagaatta

SEQ ID NO: 1651280 - DNA, 15 bp, Homo sapiens
ctcaagaaaagaatt

SEQ ID NO: 1651281 - DNA, 15 bp, Homo sapiens
tctcaagaaaagaat

SEQ ID NO: 1651282 - DNA, 15 bp, Homo sapiens
ctctcaagaaaagaa

SEQ ID NO: 1651283 - DNA, 15 bp, Homo sapiens
tctctcaagaaaaga

SEQ ID NO: 1651284 - DNA, 15 bp, Homo sapiens
ttctctcaagaaaag

SEQ ID NO: 1651285 - DNA, 15 bp, Homo sapiens
tttctctcaagaaaa

SEQ ID NO: 1651286 - DNA, 15 bp, Homo sapiens
ttttctctcaagaaa

SEQ ID NO: 1651287 - DNA, 15 bp, Homo sapiens
gttttctctcaagaa

SEQ ID NO: 1651288 - DNA, 15 bp, Homo sapiens
ggttttctctcaaga

SEQ ID NO: 1651289 - DNA, 15 bp, Homo sapiens
aggttttctctcaag

SEQ ID NO: 1651290 - DNA, 15 bp, Homo sapiens
gaggttttctctcaa

SEQ ID NO: 1651291 - DNA, 15 bp, Homo sapiens
ggaggttttctctca

SEQ ID NO: 1651292 - DNA, 15 bp, Homo sapiens
gggaggttttctctc

SEQ ID NO: 1651293 - DNA, 15 bp, Homo sapiens
agggaggttttctct

SEQ ID NO: 1651294 - DNA, 15 bp, Homo sapiens
tagggaggttttctc

SEQ ID NO: 1651295 - DNA, 15 bp, Homo sapiens
gtagggaggttttct

SEQ ID NO: 1651296 - DNA, 15 bp, Homo sapiens
agtagggaggttttc

SEQ ID NO: 1651297 - DNA, 15 bp, Homo sapiens
tagtagggaggtttt

SEQ ID NO: 1651298 - DNA, 15 bp, Homo sapiens
atagtagggaggttt

SEQ ID NO: 1651299 - DNA, 15 bp, Homo sapiens
gatagtagggaggtt

SEQ ID NO: 1651300 - DNA, 15 bp, Homo sapiens
tgatagtagggaggt

SEQ ID NO: 1651301 - DNA, 15 bp, Homo sapiens
ttgatagtagggagg

SEQ ID NO: 1651302 - DNA, 15 bp, Homo sapiens
tttgatagtagggag

SEQ ID NO: 1651303 - DNA, 15 bp, Homo sapiens
gtttgatagtaggga

SEQ ID NO: 1651304 - DNA, 15 bp, Homo sapiens
agtttgatagtaggg

SEQ ID NO: 1651305 - DNA, 15 bp, Homo sapiens
aagtttgatagtagg

SEQ ID NO: 1651306 - DNA, 15 bp, Homo sapiens
taagtttgatagtag

SEQ ID NO: 1651307 - DNA, 15 bp, Homo sapiens
ataagtttgatagta

SEQ ID NO: 1651308 - DNA, 15 bp, Homo sapiens
aataagtttgatagt

SEQ ID NO: 1651309 - DNA, 15 bp, Homo sapiens
taataagtttgatag

SEQ ID NO: 1651310 - DNA, 15 bp, Homo sapiens
ataataagtttgata

SEQ ID NO: 1651311 - DNA, 15 bp, Homo sapiens
tataataagtttgat

SEQ ID NO: 1651312 - DNA, 15 bp, Homo sapiens
gtataataagtttga

SEQ ID NO: 1651313 - DNA, 15 bp, Homo sapiens
tgtataataagtttg

SEQ ID NO: 1651314 - DNA, 15 bp, Homo sapiens
ctgtataataagttt

SEQ ID NO: 1651315 - DNA, 15 bp, Homo sapiens
tctgtataataagtt

SEQ ID NO: 1651316 - DNA, 15 bp, Homo sapiens
gtctgtataataagt

SEQ ID NO: 1651317 - DNA, 15 bp, Homo sapiens
agtctgtataataag

SEQ ID NO: 1651318 - DNA, 15 bp, Homo sapiens
aagtctgtataataa

SEQ ID NO: 1651319 - DNA, 15 bp, Homo sapiens
caagtctgtataata

SEQ ID NO: 1651320 - DNA, 15 bp, Homo sapiens
tcaagtctgtataat

SEQ ID NO: 1651321 - DNA, 15 bp, Homo sapiens
ctcaagtctgtataa

SEQ ID NO: 1651322 - DNA, 15 bp, Homo sapiens
tctcaagtctgtata

SEQ ID NO: 1651323 - DNA, 15 bp, Homo sapiens
ttctcaagtctgtat

SEQ ID NO: 1651324 - DNA, 15 bp, Homo sapiens
tttctcaagtctgta

SEQ ID NO: 1651325 - DNA, 15 bp, Homo sapiens
gtttctcaagtctgt

SEQ ID NO: 1651326 - DNA, 15 bp, Homo sapiens
tgtttctcaagtctg

SEQ ID NO: 1651327 - DNA, 15 bp, Homo sapiens
gtgtttctcaagtct

SEQ ID NO: 1651328 - DNA, 15 bp, Homo sapiens
agtgtttctcaagtc

SEQ ID NO: 1651329 - DNA, 15 bp, Homo sapiens
cagtgtttctcaagt

SEQ ID NO: 1651330 - DNA, 15 bp, Homo sapiens
acagtgtttctcaag

SEQ ID NO: 1651331 - DNA, 15 bp, Homo sapiens
gacagtgtttctcaa

SEQ ID NO: 1651332 - DNA, 15 bp, Homo sapiens
agacagtgtttctca

SEQ ID NO: 1651333 - DNA, 15 bp, Homo sapiens
gagacagtgtttctc

SEQ ID NO: 1651334 - DNA, 15 bp, Homo sapiens
tgagacagtgtttct

SEQ ID NO: 1651335 - DNA, 15 bp, Homo sapiens
ttgagacagtgtttc

SEQ ID NO: 1651336 - DNA, 15 bp, Homo sapiens
tttgagacagtgttt

SEQ ID NO: 1651337 - DNA, 15 bp, Homo sapiens
gtttgagacagtgtt

SEQ ID NO: 1651338 - DNA, 15 bp, Homo sapiens
agtttgagacagtgt

SEQ ID NO: 1651339 - DNA, 15 bp, Homo sapiens
tagtttgagacagtg

SEQ ID NO: 1651340 - DNA, 15 bp, Homo sapiens
ttagtttgagacagt

SEQ ID NO: 1651341 - DNA, 15 bp, Homo sapiens
attagtttgagacag

SEQ ID NO: 1651342 - DNA, 15 bp, Homo sapiens
tattagtttgagaca

SEQ ID NO: 1651343 - DNA, 15 bp, Homo sapiens
atattagtttgagac

SEQ ID NO: 1651344 - DNA, 15 bp, Homo sapiens
gatattagtttgaga

SEQ ID NO: 1651345 - DNA, 15 bp, Homo sapiens
agatattagtttgag

SEQ ID NO: 1651346 - DNA, 15 bp, Homo sapiens
tagatattagtttga

SEQ ID NO: 1651347 - DNA, 15 bp, Homo sapiens
ttagatattagtttg

SEQ ID NO: 1651348 - DNA, 15 bp, Homo sapiens
attagatattagttt

SEQ ID NO: 1651349 - DNA, 15 bp, Homo sapiens
tattagatattagtt

SEQ ID NO: 1651350 - DNA, 15 bp, Homo sapiens
atattagatattagt

SEQ ID NO: 1651351 - DNA, 15 bp, Homo sapiens
tatattagatattag

SEQ ID NO: 1651352 - DNA, 15 bp, Homo sapiens
ttatattagatatta

SEQ ID NO: 1651353 - DNA, 15 bp, Homo sapiens
tttatattagatatt

SEQ ID NO: 1651354 - DNA, 15 bp, Homo sapiens
ttttatattagatat

SEQ ID NO: 1651355 - DNA, 15 bp, Homo sapiens
attttatattagata

SEQ ID NO: 1651356 - DNA, 15 bp, Homo sapiens
tattttatattagat

SEQ ID NO: 1651357 - DNA, 15 bp, Homo sapiens
atattttatattaga

SEQ ID NO: 1651358 - DNA, 15 bp, Homo sapiens
aatattttatattag

SEQ ID NO: 1651359 - DNA, 15 bp, Homo sapiens
taatattttatatta

SEQ ID NO: 1651360 - DNA, 15 bp, Homo sapiens
ttaatattttatatt

SEQ ID NO: 1651361 - DNA, 15 bp, Homo sapiens
tttaatattttatat

SEQ ID NO: 1651362 - DNA, 15 bp, Homo sapiens
ttttaatattttata

SEQ ID NO: 1651363 - DNA, 15 bp, Homo sapiens
attttaatattttat

SEQ ID NO: 1651364 - DNA, 15 bp, Homo sapiens
aattttaatatttta

SEQ ID NO: 1651365 - DNA, 15 bp, Homo sapiens
taattttaatatttt

SEQ ID NO: 1651366 - DNA, 15 bp, Homo sapiens
ataattttaatattt

SEQ ID NO: 1651367 - DNA, 15 bp, Homo sapiens
tataattttaatatt

SEQ ID NO: 1651368 - DNA, 15 bp, Homo sapiens
gtataattttaatat

SEQ ID NO: 1651369 - DNA, 15 bp, Homo sapiens
agtataattttaata

SEQ ID NO: 1651370 - DNA, 15 bp, Homo sapiens
gagtataattttaat

SEQ ID NO: 1651371 - DNA, 15 bp, Homo sapiens
tgagtataattttaa

SEQ ID NO: 1651372 - DNA, 15 bp, Homo sapiens
ttgagtataatttta

SEQ ID NO: 1651373 - DNA, 15 bp, Homo sapiens
gttgagtataatttt

SEQ ID NO: 1651374 - DNA, 15 bp, Homo sapiens
tgttgagtataattt

SEQ ID NO: 1651375 - DNA, 15 bp, Homo sapiens
atgttgagtataatt

SEQ ID NO: 1651376 - DNA, 15 bp, Homo sapiens
tatgttgagtataat

SEQ ID NO: 1651377 - DNA, 15 bp, Homo sapiens
ttatgttgagtataa

SEQ ID NO: 1651378 - DNA, 15 bp, Homo sapiens
attatgttgagtata

SEQ ID NO: 1651379 - DNA, 15 bp, Homo sapiens
aattatgttgagtat

SEQ ID NO: 1651380 - DNA, 15 bp, Homo sapiens
aaattatgttgagta

SEQ ID NO: 1651381 - DNA, 15 bp, Homo sapiens
gaaattatgttgagt

SEQ ID NO: 1651382 - DNA, 15 bp, Homo sapiens
tgaaattatgttgag

SEQ ID NO: 1651383 - DNA, 15 bp, Homo sapiens
atgaaattatgttga

SEQ ID NO: 1651384 - DNA, 15 bp, Homo sapiens
catgaaattatgttg

SEQ ID NO: 1651385 - DNA, 15 bp, Homo sapiens
acatgaaattatgtt

SEQ ID NO: 1651386 - DNA, 15 bp, Homo sapiens
aacatgaaattatgt

SEQ ID NO: 1651387 - DNA, 15 bp, Homo sapiens
taacatgaaattatg

SEQ ID NO: 1651388 - DNA, 15 bp, Homo sapiens
ataacatgaaattat

SEQ ID NO: 1651389 - DNA, 15 bp, Homo sapiens
aataacatgaaatta

SEQ ID NO: 1651390 - DNA, 15 bp, Homo sapiens
aaataacatgaaatt

SEQ ID NO: 1651391 - DNA, 15 bp, Homo sapiens
aaaataacatgaaat

SEQ ID NO: 1651392 - DNA, 15 bp, Homo sapiens
taaaataacatgaaa

SEQ ID NO: 1651393 - DNA, 15 bp, Homo sapiens
ttaaaataacatgaa

SEQ ID NO: 1651394 - DNA, 15 bp, Homo sapiens
tttaaaataacatga

SEQ ID NO: 1651395 - DNA, 15 bp, Homo sapiens
atttaaaataacatg

SEQ ID NO: 1651396 - DNA, 15 bp, Homo sapiens
aatttaaaataacat

SEQ ID NO: 1651397 - DNA, 15 bp, Homo sapiens
caatttaaaataaca

SEQ ID NO: 1651398 - DNA, 15 bp, Homo sapiens
gcaatttaaaataac

SEQ ID NO: 1651399 - DNA, 15 bp, Homo sapiens
agcaatttaaaataa

SEQ ID NO: 1651400 - DNA, 15 bp, Homo sapiens
cagcaatttaaaata

SEQ ID NO: 1651401 - DNA, 15 bp, Homo sapiens
tcagcaatttaaaat

SEQ ID NO: 1651402 - DNA, 15 bp, Homo sapiens
atcagcaatttaaaa

SEQ ID NO: 1651403 - DNA, 15 bp, Homo sapiens
aatcagcaatttaaa

SEQ ID NO: 1651404 - DNA, 15 bp, Homo sapiens
taatcagcaatttaa

SEQ ID NO: 1651405 - DNA, 15 bp, Homo sapiens
ttaatcagcaattta

SEQ ID NO: 1651406 - DNA, 15 bp, Homo sapiens
attaatcagcaattt

SEQ ID NO: 1651407 - DNA, 15 bp, Homo sapiens
tattaatcagcaatt

SEQ ID NO: 1651408 - DNA, 15 bp, Homo sapiens
atattaatcagcaat

SEQ ID NO: 1651409 - DNA, 15 bp, Homo sapiens
catattaatcagcaa

SEQ ID NO: 1651410 - DNA, 15 bp, Homo sapiens
gcatattaatcagca

SEQ ID NO: 1651411 - DNA, 15 bp, Homo sapiens
tgcatattaatcagc

SEQ ID NO: 1651412 - DNA, 15 bp, Homo sapiens
ttgcatattaatcag

SEQ ID NO: 1651413 - DNA, 15 bp, Homo sapiens
attgcatattaatca

SEQ ID NO: 1651414 - DNA, 15 bp, Homo sapiens
cattgcatattaatc

SEQ ID NO: 1651415 - DNA, 15 bp, Homo sapiens
gcattgcatattaat

SEQ ID NO: 1651416 - DNA, 15 bp, Homo sapiens
tgcattgcatattaa

SEQ ID NO: 1651417 - DNA, 15 bp, Homo sapiens
gtgcattgcatatta

SEQ ID NO: 1651418 - DNA, 15 bp, Homo sapiens
tgtgcattgcatatt

SEQ ID NO: 1651419 - DNA, 15 bp, Homo sapiens
atgtgcattgcatat

SEQ ID NO: 1651420 - DNA, 15 bp, Homo sapiens
catgtgcattgcata

SEQ ID NO: 1651421 - DNA, 15 bp, Homo sapiens
tgtcatgtgcattgc

SEQ ID NO: 1651422 - DNA, 15 bp, Homo sapiens
ttgtcatgtgcattg

SEQ ID NO: 1651423 - DNA, 15 bp, Homo sapiens
attgtcatgtgcatt

SEQ ID NO: 1651424 - DNA, 15 bp, Homo sapiens
cattgtcatgtgcat

SEQ ID NO: 1651425 - DNA, 15 bp, Homo sapiens
gcattgtcatgtgca

SEQ ID NO: 1651426 - DNA, 15 bp, Homo sapiens
agcattgtcatgtgc

SEQ ID NO: 1651427 - DNA, 15 bp, Homo sapiens
cagcattgtcatgtg

SEQ ID NO: 1651428 - DNA, 15 bp, Homo sapiens
acagcattgtcatgt

SEQ ID NO: 1651429 - DNA, 15 bp, Homo sapiens
aacagcattgtcatg

SEQ ID NO: 1651430 - DNA, 15 bp, Homo sapiens
taacagcattgtcat

SEQ ID NO: 1651431 - DNA, 15 bp, Homo sapiens
ttaacagcattgtca

SEQ ID NO: 1651432 - DNA, 15 bp, Homo sapiens
attaacagcattgtc

SEQ ID NO: 1651433 - DNA, 15 bp, Homo sapiens
gattaacagcattgt

SEQ ID NO: 1651434 - DNA, 15 bp, Homo sapiens
tgattaacagcattg

SEQ ID NO: 1651435 - DNA, 15 bp, Homo sapiens
ctgattaacagcatt

SEQ ID NO: 1651436 - DNA, 15 bp, Homo sapiens
cctgattaacagcat

SEQ ID NO: 1651437 - DNA, 15 bp, Homo sapiens
ccctgattaacagca

SEQ ID NO: 1651438 - DNA, 15 bp, Homo sapiens
gccctgattaacagc

SEQ ID NO: 1651439 - DNA, 15 bp, Homo sapiens
tgccctgattaacag

SEQ ID NO: 1651440 - DNA, 15 bp, Homo sapiens
gtgccctgattaaca

SEQ ID NO: 1651441 - DNA, 15 bp, Homo sapiens
agtgccctgattaac

SEQ ID NO: 1651442 - DNA, 15 bp, Homo sapiens
aagtgccctgattaa

SEQ ID NO: 1651443 - DNA, 15 bp, Homo sapiens
aaagtgccctgatta

SEQ ID NO: 1651444 - DNA, 15 bp, Homo sapiens
aaaagtgccctgatt

SEQ ID NO: 1651445 - DNA, 15 bp, Homo sapiens
aaaaagtgccctgat

SEQ ID NO: 1651446 - DNA, 15 bp, Homo sapiens
caaaaagtgccctga

SEQ ID NO: 1651447 - DNA, 15 bp, Homo sapiens
acaaaaagtgccctg

SEQ ID NO: 1651448 - DNA, 15 bp, Homo sapiens
tacaaaaagtgccct

SEQ ID NO: 1651449 - DNA, 15 bp, Homo sapiens
ttacaaaaagtgccc

SEQ ID NO: 1651450 - DNA, 15 bp, Homo sapiens
gttacaaaaagtgcc

SEQ ID NO: 1651451 - DNA, 15 bp, Homo sapiens
tgttacaaaaagtgc

SEQ ID NO: 1651452 - DNA, 15 bp, Homo sapiens
ctgttacaaaaagtg

SEQ ID NO: 1651453 - DNA, 15 bp, Homo sapiens
gctgttacaaaaagt

SEQ ID NO: 1651454 - DNA, 15 bp, Homo sapiens
tgctgttacaaaaag

SEQ ID NO: 1651455 - DNA, 15 bp, Homo sapiens
gtgctgttacaaaaa

SEQ ID NO: 1651456 - DNA, 15 bp, Homo sapiens
tgtgctgttacaaaa

SEQ ID NO: 1651457 - DNA, 15 bp, Homo sapiens
gtgtgctgttacaaa

SEQ ID NO: 1651458 - DNA, 15 bp, Homo sapiens
ggtgtgctgttacaa

SEQ ID NO: 1651459 - DNA, 15 bp, Homo sapiens
tggtgtgctgttaca

SEQ ID NO: 1651460 - DNA, 15 bp, Homo sapiens
ttggtgtgctgttac

SEQ ID NO: 1651461 - DNA, 15 bp, Homo sapiens
gttggtgtgctgtta

SEQ ID NO: 1651462 - DNA, 15 bp, Homo sapiens
agttggtgtgctgtt

SEQ ID NO: 1651463 - DNA, 15 bp, Homo sapiens
aagttggtgtgctgt

SEQ ID NO: 1651464 - DNA, 15 bp, Homo sapiens
aaagttggtgtgctg

SEQ ID NO: 1651465 - DNA, 15 bp, Homo sapiens
gaaagttggtgtgct

SEQ ID NO: 1651466 - DNA, 15 bp, Homo sapiens
agaaagttggtgtgc

SEQ ID NO: 1651467 - DNA, 15 bp, Homo sapiens
aagaaagttggtgtg

SEQ ID NO: 1651468 - DNA, 15 bp, Homo sapiens
caagaaagttggtgt

SEQ ID NO: 1651469 - DNA, 15 bp, Homo sapiens
tcaagaaagttggtg

SEQ ID NO: 1651470 - DNA, 15 bp, Homo sapiens
gtcaagaaagttggt

SEQ ID NO: 1651471 - DNA, 15 bp, Homo sapiens
agtcaagaaagttgg

SEQ ID NO: 1651472 - DNA, 15 bp, Homo sapiens
tagtcaagaaagttg

SEQ ID NO: 1651473 - DNA, 15 bp, Homo sapiens
ttagtcaagaaagtt

SEQ ID NO: 1651474 - DNA, 15 bp, Homo sapiens
tttagtcaagaaagt

SEQ ID NO: 1651475 - DNA, 15 bp, Homo sapiens
ttttagtcaagaaag

SEQ ID NO: 1651476 - DNA, 15 bp, Homo sapiens
attttagtcaagaaa

SEQ ID NO: 1651477 - DNA, 15 bp, Homo sapiens
aattttagtcaagaa

SEQ ID NO: 1651478 - DNA, 15 bp, Homo sapiens
caattttagtcaaga

SEQ ID NO: 1651479 - DNA, 15 bp, Homo sapiens
tcaattttagtcaag

SEQ ID NO: 1651480 - DNA, 15 bp, Homo sapiens
ttcaattttagtcaa

SEQ ID NO: 1651481 - DNA, 15 bp, Homo sapiens
tttcaattttagtca

SEQ ID NO: 1651482 - DNA, 15 bp, Homo sapiens
ctttcaattttagtc

SEQ ID NO: 1651483 - DNA, 15 bp, Homo sapiens
cctttcaattttagt

SEQ ID NO: 1651484 - DNA, 15 bp, Homo sapiens
acctttcaattttag

SEQ ID NO: 1651485 - DNA, 15 bp, Homo sapiens
aacctttcaatttta

SEQ ID NO: 1651486 - DNA, 15 bp, Homo sapiens
taacctttcaatttt

SEQ ID NO: 1651487 - DNA, 15 bp, Homo sapiens
ttaacctttcaattt

SEQ ID NO: 1651488 - DNA, 15 bp, Homo sapiens
tttaacctttcaatt

SEQ ID NO: 1651489 - DNA, 15 bp, Homo sapiens
ttttaacctttcaat

SEQ ID NO: 1651490 - DNA, 15 bp, Homo sapiens
tttttaacctttcaa

SEQ ID NO: 1651491 - DNA, 15 bp, Homo sapiens
atttttaacctttca

SEQ ID NO: 1651492 - DNA, 15 bp, Homo sapiens
aatttttaacctttc

SEQ ID NO: 1651493 - DNA, 15 bp, Homo sapiens
taatttttaaccttt

SEQ ID NO: 1651494 - DNA, 15 bp, Homo sapiens
ataatttttaacctt

SEQ ID NO: 1651495 - DNA, 15 bp, Homo sapiens
tataatttttaacct

SEQ ID NO: 1651496 - DNA, 15 bp, Homo sapiens
atataatttttaacc

SEQ ID NO: 1651497 - DNA, 15 bp, Homo sapiens
aatataatttttaac

SEQ ID NO: 1651498 - DNA, 15 bp, Homo sapiens
aaatataatttttaa

SEQ ID NO: 1651499 - DNA, 15 bp, Homo sapiens
caaatataattttta

SEQ ID NO: 1651500 - DNA, 15 bp, Homo sapiens
ccaaatataattttt

SEQ ID NO: 1651501 - DNA, 15 bp, Homo sapiens
cccaaatataatttt

SEQ ID NO: 1651502 - DNA, 15 bp, Homo sapiens
acccaaatataattt

SEQ ID NO: 1651503 - DNA, 15 bp, Homo sapiens
aacccaaatataatt

SEQ ID NO: 1651504 - DNA, 15 bp, Homo sapiens
taacccaaatataat

SEQ ID NO: 1651505 - DNA, 15 bp, Homo sapiens
gtaacccaaatataa

SEQ ID NO: 1651506 - DNA, 15 bp, Homo sapiens
tgtaacccaaatata

SEQ ID NO: 1651507 - DNA, 15 bp, Homo sapiens
ttgtaacccaaatat

SEQ ID NO: 1651508 - DNA, 15 bp, Homo sapiens
attgtaacccaaata

SEQ ID NO: 1651509 - DNA, 15 bp, Homo sapiens
aattgtaacccaaat

SEQ ID NO: 1651510 - DNA, 15 bp, Homo sapiens
caattgtaacccaaa

SEQ ID NO: 1651511 - DNA, 15 bp, Homo sapiens
gcaattgtaacccaa

SEQ ID NO: 1651512 - DNA, 15 bp, Homo sapiens
ggcaattgtaaccca

SEQ ID NO: 1651513 - DNA, 15 bp, Homo sapiens
tggcaattgtaaccc

SEQ ID NO: 1651514 - DNA, 15 bp, Homo sapiens
ttggcaattgtaacc

SEQ ID NO: 1651515 - DNA, 15 bp, Homo sapiens
cttggcaattgtaac

SEQ ID NO: 1651516 - DNA, 15 bp, Homo sapiens
ccttggcaattgtaa

SEQ ID NO: 1651517 - DNA, 15 bp, Homo sapiens
tccttggcaattgta

SEQ ID NO: 1651518 - DNA, 15 bp, Homo sapiens
ttccttggcaattgt

SEQ ID NO: 1651519 - DNA, 15 bp, Homo sapiens
cttccttggcaattg

SEQ ID NO: 1651520 - DNA, 15 bp, Homo sapiens
tcttccttggcaatt

SEQ ID NO: 1651521 - DNA, 15 bp, Homo sapiens
gtcttccttggcaat

SEQ ID NO: 1651522 - DNA, 15 bp, Homo sapiens
tgtcttccttggcaa

SEQ ID NO: 1651523 - DNA, 15 bp, Homo sapiens
atgtcttccttggca

SEQ ID NO: 1651524 - DNA, 15 bp, Homo sapiens
gatgtcttccttggc

SEQ ID NO: 1651525 - DNA, 15 bp, Homo sapiens
agatgtcttccttgg

SEQ ID NO: 1651526 - DNA, 15 bp, Homo sapiens
tagatgtcttccttg

SEQ ID NO: 1651527 - DNA, 15 bp, Homo sapiens
gtagatgtcttcctt

SEQ ID NO: 1651528 - DNA, 15 bp, Homo sapiens
agtagatgtcttcct

SEQ ID NO: 1651529 - DNA, 15 bp, Homo sapiens
gagtagatgtcttcc

SEQ ID NO: 1651530 - DNA, 15 bp, Homo sapiens
ggagtagatgtcttc

SEQ ID NO: 1651531 - DNA, 15 bp, Homo sapiens
aggagtagatgtctt

SEQ ID NO: 1651532 - DNA, 15 bp, Homo sapiens
aaggagtagatgtct

SEQ ID NO: 1651533 - DNA, 15 bp, Homo sapiens
caaggagtagatgtc

SEQ ID NO: 1651534 - DNA, 15 bp, Homo sapiens
ccaaggagtagatgt

SEQ ID NO: 1651535 - DNA, 15 bp, Homo sapiens
cccaaggagtagatg

SEQ ID NO: 1651536 - DNA, 15 bp, Homo sapiens
acccaaggagtagat

SEQ ID NO: 1651537 - DNA, 15 bp, Homo sapiens
gacccaaggagtaga

SEQ ID NO: 1651538 - DNA, 15 bp, Homo sapiens
agacccaaggagtag

SEQ ID NO: 1651539 - DNA, 15 bp, Homo sapiens
aagacccaaggagta

SEQ ID NO: 1651540 - DNA, 15 bp, Homo sapiens
taagacccaaggagt

SEQ ID NO: 1651541 - DNA, 15 bp, Homo sapiens
ttaagacccaaggag

SEQ ID NO: 1651542 - DNA, 15 bp, Homo sapiens
tttaagacccaagga

SEQ ID NO: 1651543 - DNA, 15 bp, Homo sapiens
atttaagacccaagg

SEQ ID NO: 1651544 - DNA, 15 bp, Homo sapiens
tatttaagacccaag

SEQ ID NO: 1651545 - DNA, 15 bp, Homo sapiens
ctatttaagacccaa

SEQ ID NO: 1651546 - DNA, 15 bp, Homo sapiens
cctatttaagaccca

SEQ ID NO: 1651547 - DNA, 15 bp, Homo sapiens
gcctatttaagaccc

SEQ ID NO: 1651548 - DNA, 15 bp, Homo sapiens
tgcctatttaagacc

SEQ ID NO: 1651549 - DNA, 15 bp, Homo sapiens
gtgcctatttaagac

SEQ ID NO: 1651550 - DNA, 15 bp, Homo sapiens
agtgcctatttaaga

SEQ ID NO: 1651551 - DNA, 15 bp, Homo sapiens
aagtgcctatttaag

SEQ ID NO: 1651552 - DNA, 15 bp, Homo sapiens
aaagtgcctatttaa

SEQ ID NO: 1651553 - DNA, 15 bp, Homo sapiens
caaagtgcctattta

SEQ ID NO: 1651554 - DNA, 15 bp, Homo sapiens
ccaaagtgcctattt

SEQ ID NO: 1651555 - DNA, 15 bp, Homo sapiens
tccaaagtgcctatt

SEQ ID NO: 1651556 - DNA, 15 bp, Homo sapiens
ttccaaagtgcctat

SEQ ID NO: 1651557 - DNA, 15 bp, Homo sapiens
cttccaaagtgccta

SEQ ID NO: 1651558 - DNA, 15 bp, Homo sapiens
ccttccaaagtgcct

SEQ ID NO: 1651559 - DNA, 15 bp, Homo sapiens
gccttccaaagtgcc

SEQ ID NO: 1651560 - DNA, 15 bp, Homo sapiens
agccttccaaagtgc

SEQ ID NO: 1651561 - DNA, 15 bp, Homo sapiens
tagccttccaaagtg

SEQ ID NO: 1651562 - DNA, 15 bp, Homo sapiens
ctagccttccaaagt

SEQ ID NO: 1651563 - DNA, 15 bp, Homo sapiens
gctagccttccaaag

SEQ ID NO: 1651564 - DNA, 15 bp, Homo sapiens
agctagccttccaaa

SEQ ID NO: 1651565 - DNA, 15 bp, Homo sapiens
cagctagccttccaa

SEQ ID NO: 1651566 - DNA, 15 bp, Homo sapiens
ccagctagccttcca

SEQ ID NO: 1651567 - DNA, 15 bp, Homo sapiens
tccagctagccttcc

SEQ ID NO: 1651568 - DNA, 15 bp, Homo sapiens
ctccagctagccttc

SEQ ID NO: 1651569 - DNA, 15 bp, Homo sapiens
cctccagctagcctt

SEQ ID NO: 1651570 - DNA, 15 bp, Homo sapiens
acctccagctagcct

SEQ ID NO: 1651571 - DNA, 15 bp, Homo sapiens
gacctccagctagcc

SEQ ID NO: 1651572 - DNA, 15 bp, Homo sapiens
tgacctccagctagc

SEQ ID NO: 1651573 - DNA, 15 bp, Homo sapiens
ctgacctccagctag

SEQ ID NO: 1651574 - DNA, 15 bp, Homo sapiens
actgacctccagcta

SEQ ID NO: 1651575 - DNA, 15 bp, Homo sapiens
tactgacctccagct

SEQ ID NO: 1651576 - DNA, 15 bp, Homo sapiens
ttactgacctccagc

SEQ ID NO: 1651577 - DNA, 15 bp, Homo sapiens
tttactgacctccag

SEQ ID NO: 1651578 - DNA, 15 bp, Homo sapiens
atttactgacctcca

SEQ ID NO: 1651579 - DNA, 15 bp, Homo sapiens
catttactgacctcc

SEQ ID NO: 1651580 - DNA, 15 bp, Homo sapiens
tcatttactgacctc

SEQ ID NO: 1651581 - DNA, 15 bp, Homo sapiens
ttcatttactgacct

SEQ ID NO: 1651582 - DNA, 15 bp, Homo sapiens
gttcatttactgacc

SEQ ID NO: 1651583 - DNA, 15 bp, Homo sapiens
ggttcatttactgac

SEQ ID NO: 1651584 - DNA, 15 bp, Homo sapiens
aggttcatttactga

SEQ ID NO: 1651585 - DNA, 15 bp, Homo sapiens
aaggttcatttactg

SEQ ID NO: 1651586 - DNA, 15 bp, Homo sapiens
aaaggttcatttact

SEQ ID NO: 1651587 - DNA, 15 bp, Homo sapiens
gaaaggttcatttac

SEQ ID NO: 1651588 - DNA, 15 bp, Homo sapiens
ggaaaggttcattta

SEQ ID NO: 1651589 - DNA, 15 bp, Homo sapiens
aggaaaggttcattt

SEQ ID NO: 1651590 - DNA, 15 bp, Homo sapiens
taggaaaggttcatt

SEQ ID NO: 1651591 - DNA, 15 bp, Homo sapiens
ataggaaaggttcat

SEQ ID NO: 1651592 - DNA, 15 bp, Homo sapiens
gataggaaaggttca

SEQ ID NO: 1651593 - DNA, 15 bp, Homo sapiens
ggataggaaaggttc

SEQ ID NO: 1651594 - DNA, 15 bp, Homo sapiens
gggataggaaaggtt

SEQ ID NO: 1651595 - DNA, 15 bp, Homo sapiens
tgggataggaaaggt

SEQ ID NO: 1651596 - DNA, 15 bp, Homo sapiens
gtgggataggaaagg

SEQ ID NO: 1651597 - DNA, 15 bp, Homo sapiens
cgtgggataggaaag

SEQ ID NO: 1651598 - DNA, 15 bp, Homo sapiens
acgtgggataggaaa

SEQ ID NO: 1651599 - DNA, 15 bp, Homo sapiens
cacgtgggataggaa

SEQ ID NO: 1651600 - DNA, 15 bp, Homo sapiens
acacgtgggatagga

SEQ ID NO: 1651601 - DNA, 15 bp, Homo sapiens
cacacgtgggatagg

SEQ ID NO: 1651602 - DNA, 15 bp, Homo sapiens
tcacacgtgggatag

SEQ ID NO: 1651603 - DNA, 15 bp, Homo sapiens
ttcacacgtgggata

SEQ ID NO: 1651604 - DNA, 15 bp, Homo sapiens
gttcacacgtgggat

SEQ ID NO: 1651605 - DNA, 15 bp, Homo sapiens
tgttcacacgtggga

SEQ ID NO: 1651606 - DNA, 15 bp, Homo sapiens
atgttcacacgtggg

SEQ ID NO: 1651607 - DNA, 15 bp, Homo sapiens
catgttcacacgtgg

SEQ ID NO: 1651608 - DNA, 15 bp, Homo sapiens
gcatgttcacacgtg

SEQ ID NO: 1651609 - DNA, 15 bp, Homo sapiens
ggcatgttcacacgt

SEQ ID NO: 1651610 - DNA, 15 bp, Homo sapiens
aggcatgttcacacg

SEQ ID NO: 1651611 - DNA, 15 bp, Homo sapiens
aaggcatgttcacac

SEQ ID NO: 1651612 - DNA, 15 bp, Homo sapiens
aaaggcatgttcaca

SEQ ID NO: 1651613 - DNA, 15 bp, Homo sapiens
gaaaggcatgttcac

SEQ ID NO: 1651614 - DNA, 15 bp, Homo sapiens
ggaaaggcatgttca

SEQ ID NO: 1651615 - DNA, 15 bp, Homo sapiens
gggaaaggcatgttc

SEQ ID NO: 1651616 - DNA, 15 bp, Homo sapiens
agggaaaggcatgtt

SEQ ID NO: 1651617 - DNA, 15 bp, Homo sapiens
aagggaaaggcatgt

SEQ ID NO: 1651618 - DNA, 15 bp, Homo sapiens
gaagggaaaggcatg

SEQ ID NO: 1651619 - DNA, 15 bp, Homo sapiens
ggaagggaaaggcat

SEQ ID NO: 1651620 - DNA, 15 bp, Homo sapiens
aggaagggaaaggca

SEQ ID NO: 1651621 - DNA, 15 bp, Homo sapiens
aaggaagggaaaggc

SEQ ID NO: 1651622 - DNA, 15 bp, Homo sapiens
aaaggaagggaaagg

SEQ ID NO: 1651623 - DNA, 15 bp, Homo sapiens
gaaaggaagggaaag

SEQ ID NO: 1651624 - DNA, 15 bp, Homo sapiens
ggaaaggaagggaaa

SEQ ID NO: 1651625 - DNA, 15 bp, Homo sapiens
gggaaaggaagggaa

SEQ ID NO: 1651626 - DNA, 15 bp, Homo sapiens
tgggaaaggaaggga

SEQ ID NO: 1651627 - DNA, 15 bp, Homo sapiens
gtgggaaaggaaggg

SEQ ID NO: 1651628 - DNA, 15 bp, Homo sapiens
ggtgggaaaggaagg

SEQ ID NO: 1651629 - DNA, 15 bp, Homo sapiens
aggtgggaaaggaag

SEQ ID NO: 1651630 - DNA, 15 bp, Homo sapiens
gaggtgggaaaggaa

SEQ ID NO: 1651631 - DNA, 15 bp, Homo sapiens
ggaggtgggaaagga

SEQ ID NO: 1651632 - DNA, 15 bp, Homo sapiens
tggaggtgggaaagg

SEQ ID NO: 1651633 - DNA, 15 bp, Homo sapiens
ctggaggtgggaaag

SEQ ID NO: 1651634 - DNA, 15 bp, Homo sapiens
actggaggtgggaaa

SEQ ID NO: 1651635 - DNA, 15 bp, Homo sapiens
aacactggaggtggg

SEQ ID NO: 1651636 - DNA, 15 bp, Homo sapiens
gaacactggaggtgg

SEQ ID NO: 1651637 - DNA, 15 bp, Homo sapiens
agaacactggaggtg

SEQ ID NO: 1651638 - DNA, 15 bp, Homo sapiens
gagaacactggaggt

SEQ ID NO: 1651639 - DNA, 15 bp, Homo sapiens
tgagaacactggagg

SEQ ID NO: 1651640 - DNA, 15 bp, Homo sapiens
ctgagaacactggag

SEQ ID NO: 1651641 - DNA, 15 bp, Homo sapiens
cctgagaacactgga

SEQ ID NO: 1651642 - DNA, 15 bp, Homo sapiens
ccctgagaacactgg

SEQ ID NO: 1651643 - DNA, 15 bp, Homo sapiens
accctgagaacactg

SEQ ID NO: 1651644 - DNA, 15 bp, Homo sapiens
gaccctgagaacact

SEQ ID NO: 1651645 - DNA, 15 bp, Homo sapiens
ggaccctgagaacac

SEQ ID NO: 1651646 - DNA, 15 bp, Homo sapiens
aggaccctgagaaca

SEQ ID NO: 1651647 - DNA, 15 bp, Homo sapiens
aaggaccctgagaac

SEQ ID NO: 1651648 - DNA, 15 bp, Homo sapiens
aaaggaccctgagaa

SEQ ID NO: 1651649 - DNA, 15 bp, Homo sapiens
taaaggaccctgaga

SEQ ID NO: 1651650 - DNA, 15 bp, Homo sapiens
ctaaaggaccctgag

SEQ ID NO: 1651651 - DNA, 15 bp, Homo sapiens
gctaaaggaccctga

SEQ ID NO: 1651652 - DNA, 15 bp, Homo sapiens
agctaaaggaccctg

SEQ ID NO: 1651653 - DNA, 15 bp, Homo sapiens
gagctaaaggaccct

SEQ ID NO: 1651654 - DNA, 15 bp, Homo sapiens
agagctaaaggaccc

SEQ ID NO: 1651655 - DNA, 15 bp, Homo sapiens
aagagctaaaggacc

SEQ ID NO: 1651656 - DNA, 15 bp, Homo sapiens
taagagctaaaggac

SEQ ID NO: 1651657 - DNA, 15 bp, Homo sapiens
ctaagagctaaagga

SEQ ID NO: 1651658 - DNA, 15 bp, Homo sapiens
tctaagagctaaagg

SEQ ID NO: 1651659 - DNA, 15 bp, Homo sapiens
ttctaagagctaaag

SEQ ID NO: 1651660 - DNA, 15 bp, Homo sapiens
tttctaagagctaaa

SEQ ID NO: 1651661 - DNA, 15 bp, Homo sapiens
ttttctaagagctaa

SEQ ID NO: 1651662 - DNA, 15 bp, Homo sapiens
tttttctaagagcta

SEQ ID NO: 1651663 - DNA, 15 bp, Homo sapiens
ttttttctaagagct

SEQ ID NO: 1651664 - DNA, 15 bp, Homo sapiens
tttttttctaagagc

SEQ ID NO: 1651665 - DNA, 15 bp, Homo sapiens
gtttttttctaagag

SEQ ID NO: 1651666 - DNA, 15 bp, Homo sapiens
cgtttttttctaaga

SEQ ID NO: 1651667 - DNA, 15 bp, Homo sapiens
ccgtttttttctaag

SEQ ID NO: 1651668 - DNA, 15 bp, Homo sapiens
tccgtttttttctaa

SEQ ID NO: 1651669 - DNA, 15 bp, Homo sapiens
ttccgtttttttcta

SEQ ID NO: 1651670 - DNA, 15 bp, Homo sapiens
tttccgtttttttct

SEQ ID NO: 1651671 - DNA, 15 bp, Homo sapiens
ctttccgtttttttc

SEQ ID NO: 1651672 - DNA, 15 bp, Homo sapiens
tctttccgttttttt

SEQ ID NO: 1651673 - DNA, 15 bp, Homo sapiens
ttctttccgtttttt

SEQ ID NO: 1651674 - DNA, 15 bp, Homo sapiens
cttctttccgttttt

SEQ ID NO: 1651675 - DNA, 15 bp, Homo sapiens
tcttctttccgtttt

SEQ ID NO: 1651676 - DNA, 15 bp, Homo sapiens
ttcttctttccgttt

SEQ ID NO: 1651677 - DNA, 15 bp, Homo sapiens
tttcttctttccgtt

SEQ ID NO: 1651678 - DNA, 15 bp, Homo sapiens
atttcttctttccgt

SEQ ID NO: 1651679 - DNA, 15 bp, Homo sapiens
catttcttctttccg

SEQ ID NO: 1651680 - DNA, 15 bp, Homo sapiens
gcatttcttctttcc

SEQ ID NO: 1651681 - DNA, 15 bp, Homo sapiens
tgcatttcttctttc

SEQ ID NO: 1651682 - DNA, 15 bp, Homo sapiens
atgcatttcttcttt

SEQ ID NO: 1651683 - DNA, 15 bp, Homo sapiens
tatgcatttcttctt

SEQ ID NO: 1651684 - DNA, 15 bp, Homo sapiens
gtatgcatttcttct

SEQ ID NO: 1651685 - DNA, 15 bp, Homo sapiens
ggtatgcatttcttc

SEQ ID NO: 1651686 - DNA, 15 bp, Homo sapiens
gggtatgcatttctt

SEQ ID NO: 1651687 - DNA, 15 bp, Homo sapiens
tgggtatgcatttct

SEQ ID NO: 1651688 - DNA, 15 bp, Homo sapiens
ttgggtatgcatttc

SEQ ID NO: 1651689 - DNA, 15 bp, Homo sapiens
cttgggtatgcattt

SEQ ID NO: 1651690 - DNA, 15 bp, Homo sapiens
ccttgggtatgcatt

SEQ ID NO: 1651691 - DNA, 15 bp, Homo sapiens
tccttgggtatgcat

SEQ ID NO: 1651692 - DNA, 15 bp, Homo sapiens
ttccttgggtatgca

SEQ ID NO: 1651693 - DNA, 15 bp, Homo sapiens
gttccttgggtatgc

SEQ ID NO: 1651694 - DNA, 15 bp, Homo sapiens
tgttccttgggtatg

SEQ ID NO: 1651695 - DNA, 15 bp, Homo sapiens
ctgttccttgggtat

SEQ ID NO: 1651696 - DNA, 15 bp, Homo sapiens
gctgttccttgggta

SEQ ID NO: 1651697 - DNA, 15 bp, Homo sapiens
agctgttccttgggt

SEQ ID NO: 1651698 - DNA, 15 bp, Homo sapiens
aagctgttccttggg

SEQ ID NO: 1651699 - DNA, 15 bp, Homo sapiens
taagctgttccttgg

SEQ ID NO: 1651700 - DNA, 15 bp, Homo sapiens
gtaagctgttccttg

SEQ ID NO: 1651701 - DNA, 15 bp, Homo sapiens
ggtaagctgttcctt

SEQ ID NO: 1651702 - DNA, 15 bp, Homo sapiens
aggtaagctgttcct

SEQ ID NO: 1651703 - DNA, 15 bp, Homo sapiens
caggtaagctgttcc

SEQ ID NO: 1651704 - DNA, 15 bp, Homo sapiens
ccaggtaagctgttc

SEQ ID NO: 1651705 - DNA, 15 bp, Homo sapiens
gccaggtaagctgtt

SEQ ID NO: 1651706 - DNA, 15 bp, Homo sapiens
cgccaggtaagctgt

SEQ ID NO: 1651707 - DNA, 15 bp, Homo sapiens
tcgccaggtaagctg

SEQ ID NO: 1651708 - DNA, 15 bp, Homo sapiens
atcgccaggtaagct

SEQ ID NO: 1651709 - DNA, 15 bp, Homo sapiens
tatcgccaggtaagc

SEQ ID NO: 1651710 - DNA, 15 bp, Homo sapiens
atatcgccaggtaag

SEQ ID NO: 1651711 - DNA, 15 bp, Homo sapiens
gatatcgccaggtaa

SEQ ID NO: 1651712 - DNA, 15 bp, Homo sapiens
tgatatcgccaggta

SEQ ID NO: 1651713 - DNA, 15 bp, Homo sapiens
ctgatatcgccaggt

SEQ ID NO: 1651714 - DNA, 15 bp, Homo sapiens
tctgatatcgccagg

SEQ ID NO: 1651715 - DNA, 15 bp, Homo sapiens
ttctgatatcgccag

SEQ ID NO: 1651716 - DNA, 15 bp, Homo sapiens
attctgatatcgcca

SEQ ID NO: 1651717 - DNA, 15 bp, Homo sapiens
tattctgatatcgcc

SEQ ID NO: 1651718 - DNA, 15 bp, Homo sapiens
ttattctgatatcgc

SEQ ID NO: 1651719 - DNA, 15 bp, Homo sapiens
attattctgatatcg

SEQ ID NO: 1651720 - DNA, 15 bp, Homo sapiens
aattattctgatatc

SEQ ID NO: 1651721 - DNA, 15 bp, Homo sapiens
aaattattctgatat

SEQ ID NO: 1651722 - DNA, 15 bp, Homo sapiens
taaattattctgata

SEQ ID NO: 1651723 - DNA, 15 bp, Homo sapiens
ttaaattattctgat

SEQ ID NO: 1651724 - DNA, 15 bp, Homo sapiens
attaaattattctga

SEQ ID NO: 1651725 - DNA, 15 bp, Homo sapiens
gattaaattattctg

SEQ ID NO: 1651726 - DNA, 15 bp, Homo sapiens
agattaaattattct

SEQ ID NO: 1651727 - DNA, 15 bp, Homo sapiens
cagattaaattattc

SEQ ID NO: 1651728 - DNA, 15 bp, Homo sapiens
tcagattaaattatt

SEQ ID NO: 1651729 - DNA, 15 bp, Homo sapiens
ttcagattaaattat

SEQ ID NO: 1651730 - DNA, 15 bp, Homo sapiens
tttcagattaaatta

SEQ ID NO: 1651731 - DNA, 15 bp, Homo sapiens
ttttcagattaaatt

SEQ ID NO: 1651732 - DNA, 15 bp, Homo sapiens
attttcagattaaat

SEQ ID NO: 1651733 - DNA, 15 bp, Homo sapiens
gattttcagattaaa

SEQ ID NO: 1651734 - DNA, 15 bp, Homo sapiens
tgattttcagattaa

SEQ ID NO: 1651735 - DNA, 15 bp, Homo sapiens
ttgattttcagatta

SEQ ID NO: 1651736 - DNA, 15 bp, Homo sapiens
attgattttcagatt

SEQ ID NO: 1651737 - DNA, 15 bp, Homo sapiens
cattgattttcagat

SEQ ID NO: 1651738 - DNA, 15 bp, Homo sapiens
acattgattttcaga

SEQ ID NO: 1651739 - DNA, 15 bp, Homo sapiens
gacattgattttcag

SEQ ID NO: 1651740 - DNA, 15 bp, Homo sapiens
tgacattgattttca

SEQ ID NO: 1651741 - DNA, 15 bp, Homo sapiens
ttgacattgattttc

SEQ ID NO: 1651742 - DNA, 15 bp, Homo sapiens
tttgacattgatttt

SEQ ID NO: 1651743 - DNA, 15 bp, Homo sapiens
ttttgacattgattt

SEQ ID NO: 1651744 - DNA, 15 bp, Homo sapiens
attttgacattgatt

SEQ ID NO: 1651745 - DNA, 15 bp, Homo sapiens
cattttgacattgat

SEQ ID NO: 1651746 - DNA, 15 bp, Homo sapiens
acattttgacattga

SEQ ID NO: 1651747 - DNA, 15 bp, Homo sapiens
cacattttgacattg

SEQ ID NO: 1651748 - DNA, 15 bp, Homo sapiens
ccacattttgacatt

SEQ ID NO: 1651749 - DNA, 15 bp, Homo sapiens
tccacattttgacat

SEQ ID NO: 1651750 - DNA, 15 bp, Homo sapiens
atccacattttgaca

SEQ ID NO: 1651751 - DNA, 15 bp, Homo sapiens
aatccacattttgac

SEQ ID NO: 1651752 - DNA, 15 bp, Homo sapiens
caatccacattttga

SEQ ID NO: 1651753 - DNA, 15 bp, Homo sapiens
tcaatccacattttg

SEQ ID NO: 1651754 - DNA, 15 bp, Homo sapiens
ttcaatccacatttt

SEQ ID NO: 1651755 - DNA, 15 bp, Homo sapiens
cttcaatccacattt

SEQ ID NO: 1651756 - DNA, 15 bp, Homo sapiens
acttcaatccacatt

SEQ ID NO: 1651757 - DNA, 15 bp, Homo sapiens
tacttcaatccacat

SEQ ID NO: 1651758 - DNA, 15 bp, Homo sapiens
ttacttcaatccaca

SEQ ID NO: 1651759 - DNA, 15 bp, Homo sapiens
tttacttcaatccac

SEQ ID NO: 1651760 - DNA, 15 bp, Homo sapiens
atttacttcaatcca

SEQ ID NO: 1651761 - DNA, 15 bp, Homo sapiens
aatttacttcaatcc

SEQ ID NO: 1651762 - DNA, 15 bp, Homo sapiens
gaatttacttcaatc

SEQ ID NO: 1651763 - DNA, 15 bp, Homo sapiens
agaatttacttcaat

SEQ ID NO: 1651764 - DNA, 15 bp, Homo sapiens
cagaatttacttcaa

SEQ ID NO: 1651765 - DNA, 15 bp, Homo sapiens
ccagaatttacttca

SEQ ID NO: 1651766 - DNA, 15 bp, Homo sapiens
accagaatttacttc

SEQ ID NO: 1651767 - DNA, 15 bp, Homo sapiens
aaccagaatttactt

SEQ ID NO: 1651768 - DNA, 15 bp, Homo sapiens
gaaccagaatttact

SEQ ID NO: 1651769 - DNA, 15 bp, Homo sapiens
agaaccagaatttac

SEQ ID NO: 1651770 - DNA, 15 bp, Homo sapiens
aagaaccagaattta

SEQ ID NO: 1651771 - DNA, 15 bp, Homo sapiens
taagaaccagaattt

SEQ ID NO: 1651772 - DNA, 15 bp, Homo sapiens
ttaagaaccagaatt

SEQ ID NO: 1651773 - DNA, 15 bp, Homo sapiens
cttaagaaccagaat

SEQ ID NO: 1651774 - DNA, 15 bp, Homo sapiens
tcttaagaaccagaa

SEQ ID NO: 1651775 - DNA, 15 bp, Homo sapiens
atcttaagaaccaga

SEQ ID NO: 1651776 - DNA, 15 bp, Homo sapiens
tatcttaagaaccag

SEQ ID NO: 1651777 - DNA, 15 bp, Homo sapiens
ttatcttaagaacca

SEQ ID NO: 1651778 - DNA, 15 bp, Homo sapiens
tttatcttaagaacc

SEQ ID NO: 1651779 - DNA, 15 bp, Homo sapiens
ctttatcttaagaac

SEQ ID NO: 1651780 - DNA, 15 bp, Homo sapiens
actttatcttaagaa

SEQ ID NO: 1651781 - DNA, 15 bp, Homo sapiens
aactttatcttaaga

SEQ ID NO: 1651782 - DNA, 15 bp, Homo sapiens
aaactttatcttaag

SEQ ID NO: 1651783 - DNA, 15 bp, Homo sapiens
caaactttatcttaa

SEQ ID NO: 1651784 - DNA, 15 bp, Homo sapiens
acaaactttatctta

SEQ ID NO: 1651785 - DNA, 15 bp, Homo sapiens
aacaaactttatctt

SEQ ID NO: 1651786 - DNA, 15 bp, Homo sapiens
aaacaaactttatct

SEQ ID NO: 1651787 - DNA, 15 bp, Homo sapiens
gaaacaaactttatc

SEQ ID NO: 1651788 - DNA, 15 bp, Homo sapiens
agaaacaaactttat

SEQ ID NO: 1651789 - DNA, 15 bp, Homo sapiens
cagaaacaaacttta

SEQ ID NO: 1651790 - DNA, 15 bp, Homo sapiens
gcagaaacaaacttt

SEQ ID NO: 1651791 - DNA, 15 bp, Homo sapiens
tgcagaaacaaactt

SEQ ID NO: 1651792 - DNA, 15 bp, Homo sapiens
ttgcagaaacaaact

SEQ ID NO: 1651793 - DNA, 15 bp, Homo sapiens
gttgcagaaacaaac

SEQ ID NO: 1651794 - DNA, 15 bp, Homo sapiens
ggttgcagaaacaaa

SEQ ID NO: 1651795 - DNA, 15 bp, Homo sapiens
aggttgcagaaacaa

SEQ ID NO: 1651796 - DNA, 15 bp, Homo sapiens
taggttgcagaaaca

SEQ ID NO: 1651797 - DNA, 15 bp, Homo sapiens
ataggttgcagaaac

SEQ ID NO: 1651798 - DNA, 15 bp, Homo sapiens
aataggttgcagaaa

SEQ ID NO: 1651799 - DNA, 15 bp, Homo sapiens
aaataggttgcagaa

SEQ ID NO: 1651800 - DNA, 15 bp, Homo sapiens
aaaataggttgcaga

SEQ ID NO: 1651801 - DNA, 15 bp, Homo sapiens
taaaataggttgcag

SEQ ID NO: 1651802 - DNA, 15 bp, Homo sapiens
gtaaaataggttgca

SEQ ID NO: 1651803 - DNA, 15 bp, Homo sapiens
cgtaaaataggttgc

SEQ ID NO: 1651804 - DNA, 15 bp, Homo sapiens
acgtaaaataggttg

SEQ ID NO: 1651805 - DNA, 15 bp, Homo sapiens
aacgtaaaataggtt

SEQ ID NO: 1651806 - DNA, 15 bp, Homo sapiens
aaacgtaaaataggt

SEQ ID NO: 1651807 - DNA, 15 bp, Homo sapiens
gaaacgtaaaatagg

SEQ ID NO: 1651808 - DNA, 15 bp, Homo sapiens
tgaaacgtaaaatag

SEQ ID NO: 1651809 - DNA, 15 bp, Homo sapiens
ttgaaacgtaaaata

SEQ ID NO: 1651810 - DNA, 15 bp, Homo sapiens
tttgaaacgtaaaat

SEQ ID NO: 1651811 - DNA, 15 bp, Homo sapiens
ttttgaaacgtaaaa

SEQ ID NO: 1651812 - DNA, 15 bp, Homo sapiens
gttttgaaacgtaaa

SEQ ID NO: 1651813 - DNA, 15 bp, Homo sapiens
agttttgaaacgtaa

SEQ ID NO: 1651814 - DNA, 15 bp, Homo sapiens
cagttttgaaacgta

SEQ ID NO: 1651815 - DNA, 15 bp, Homo sapiens
ccagttttgaaacgt

SEQ ID NO: 1651816 - DNA, 15 bp, Homo sapiens
gccagttttgaaacg

SEQ ID NO: 1651817 - DNA, 15 bp, Homo sapiens
tgccagttttgaaac

SEQ ID NO: 1651818 - DNA, 15 bp, Homo sapiens
ctgccagttttgaaa

SEQ ID NO: 1651819 - DNA, 15 bp, Homo sapiens
tctgccagttttgaa

SEQ ID NO: 1651820 - DNA, 15 bp, Homo sapiens
ttctgccagttttga

SEQ ID NO: 1651821 - DNA, 15 bp, Homo sapiens
tttctgccagttttg

SEQ ID NO: 1651822 - DNA, 15 bp, Homo sapiens
gtttctgccagtttt

SEQ ID NO: 1651823 - DNA, 15 bp, Homo sapiens
tgtttctgccagttt

SEQ ID NO: 1651824 - DNA, 15 bp, Homo sapiens
atgtttctgccagtt

SEQ ID NO: 1651825 - DNA, 15 bp, Homo sapiens
aatgtttctgccagt

SEQ ID NO: 1651826 - DNA, 15 bp, Homo sapiens
aaatgtttctgccag

SEQ ID NO: 1651827 - DNA, 15 bp, Homo sapiens
taaatgtttctgcca

SEQ ID NO: 1651828 - DNA, 15 bp, Homo sapiens
ctaaatgtttctgcc

SEQ ID NO: 1651829 - DNA, 15 bp, Homo sapiens
cctaaatgtttctgc

SEQ ID NO: 1651830 - DNA, 15 bp, Homo sapiens
ccctaaatgtttctg

SEQ ID NO: 1651831 - DNA, 15 bp, Homo sapiens
gccctaaatgtttct

SEQ ID NO: 1651832 - DNA, 15 bp, Homo sapiens
tgccctaaatgtttc

SEQ ID NO: 1651833 - DNA, 15 bp, Homo sapiens
ctgccctaaatgttt

SEQ ID NO: 1651834 - DNA, 15 bp, Homo sapiens
tctgccctaaatgtt

SEQ ID NO: 1651835 - DNA, 15 bp, Homo sapiens
ttctgccctaaatgt

SEQ ID NO: 1651836 - DNA, 15 bp, Homo sapiens
cttctgccctaaatg

SEQ ID NO: 1651837 - DNA, 15 bp, Homo sapiens
ccttctgccctaaat

SEQ ID NO: 1651838 - DNA, 15 bp, Homo sapiens
cccttctgccctaaa

SEQ ID NO: 1651839 - DNA, 15 bp, Homo sapiens
acccttctgccctaa

SEQ ID NO: 1651840 - DNA, 15 bp, Homo sapiens
gacccttctgcccta

SEQ ID NO: 1651841 - DNA, 15 bp, Homo sapiens
tgacccttctgccct

SEQ ID NO: 1651842 - DNA, 15 bp, Homo sapiens
atgacccttctgccc

SEQ ID NO: 1651843 - DNA, 15 bp, Homo sapiens
aatgacccttctgcc

SEQ ID NO: 1651844 - DNA, 15 bp, Homo sapiens
aaatgacccttctgc

SEQ ID NO: 1651845 - DNA, 15 bp, Homo sapiens
gaaatgacccttctg

SEQ ID NO: 1651846 - DNA, 15 bp, Homo sapiens
agaaatgacccttct

SEQ ID NO: 1651847 - DNA, 15 bp, Homo sapiens
tagaaatgacccttc

SEQ ID NO: 1651848 - DNA, 15 bp, Homo sapiens
ctagaaatgaccctt

SEQ ID NO: 1651849 - DNA, 15 bp, Homo sapiens
actagaaatgaccct

SEQ ID NO: 1651850 - DNA, 15 bp, Homo sapiens
aactagaaatgaccc

SEQ ID NO: 1651851 - DNA, 15 bp, Homo sapiens
aaactagaaatgacc

SEQ ID NO: 1651852 - DNA, 15 bp, Homo sapiens
gaaactagaaatgac

SEQ ID NO: 1651853 - DNA, 15 bp, Homo sapiens
tgaaactagaaatga

SEQ ID NO: 1651854 - DNA, 15 bp, Homo sapiens
ttgaaactagaaatg

SEQ ID NO: 1651855 - DNA, 15 bp, Homo sapiens
cttgaaactagaaat

SEQ ID NO: 1651856 - DNA, 15 bp, Homo sapiens
tcttgaaactagaaa

SEQ ID NO: 1651857 - DNA, 15 bp, Homo sapiens
ttcttgaaactagaa

SEQ ID NO: 1651858 - DNA, 15 bp, Homo sapiens
attcttgaaactaga

SEQ ID NO: 1651859 - DNA, 15 bp, Homo sapiens
tattcttgaaactag

SEQ ID NO: 1651860 - DNA, 15 bp, Homo sapiens
gtattcttgaaacta

SEQ ID NO: 1651861 - DNA, 15 bp, Homo sapiens
ggtattcttgaaact

SEQ ID NO: 1651862 - DNA, 15 bp, Homo sapiens
gggtattcttgaaac

SEQ ID NO: 1651863 - DNA, 15 bp, Homo sapiens
agggtattcttgaaa

SEQ ID NO: 1651864 - DNA, 15 bp, Homo sapiens
tagggtattcttgaa

SEQ ID NO: 1651865 - DNA, 15 bp, Homo sapiens
gtagggtattcttga

SEQ ID NO: 1651866 - DNA, 15 bp, Homo sapiens
tgtagggtattcttg

SEQ ID NO: 1651867 - DNA, 15 bp, Homo sapiens
ctgtagggtattctt

SEQ ID NO: 1651868 - DNA, 15 bp, Homo sapiens
gctgtagggtattct

SEQ ID NO: 1651869 - DNA, 15 bp, Homo sapiens
agctgtagggtattc

SEQ ID NO: 1651870 - DNA, 15 bp, Homo sapiens
tagctgtagggtatt

SEQ ID NO: 1651871 - DNA, 15 bp, Homo sapiens
ttagctgtagggtat

SEQ ID NO: 1651872 - DNA, 15 bp, Homo sapiens
tttagctgtagggta

SEQ ID NO: 1651873 - DNA, 15 bp, Homo sapiens
gtttagctgtagggt

SEQ ID NO: 1651874 - DNA, 15 bp, Homo sapiens
agtttagctgtaggg

SEQ ID NO: 1651875 - DNA, 15 bp, Homo sapiens
gagtttagctgtagg

SEQ ID NO: 1651876 - DNA, 15 bp, Homo sapiens
agagtttagctgtag

SEQ ID NO: 1651877 - DNA, 15 bp, Homo sapiens
gagagtttagctgta

SEQ ID NO: 1651878 - DNA, 15 bp, Homo sapiens
ggagagtttagctgt

SEQ ID NO: 1651879 - DNA, 15 bp, Homo sapiens
gggagagtttagctg

SEQ ID NO: 1651880 - DNA, 15 bp, Homo sapiens
agggagagtttagct

SEQ ID NO: 1651881 - DNA, 15 bp, Homo sapiens
tagggagagtttagc

SEQ ID NO: 1651882 - DNA, 15 bp, Homo sapiens
ttagggagagtttag

SEQ ID NO: 1651883 - DNA, 15 bp, Homo sapiens
tttagggagagttta

SEQ ID NO: 1651884 - DNA, 15 bp, Homo sapiens
gtttagggagagttt

SEQ ID NO: 1651885 - DNA, 15 bp, Homo sapiens
agtttagggagagtt

SEQ ID NO: 1651886 - DNA, 15 bp, Homo sapiens
aagtttagggagagt

SEQ ID NO: 1651887 - DNA, 15 bp, Homo sapiens
taagtttagggagag

SEQ ID NO: 1651888 - DNA, 15 bp, Homo sapiens
ttaagtttagggaga

SEQ ID NO: 1651889 - DNA, 15 bp, Homo sapiens
gttaagtttagggag

SEQ ID NO: 1651890 - DNA, 15 bp, Homo sapiens
ggttaagtttaggga

SEQ ID NO: 1651891 - DNA, 15 bp, Homo sapiens
tggttaagtttaggg

SEQ ID NO: 1651892 - DNA, 15 bp, Homo sapiens
atggttaagtttagg

SEQ ID NO: 1651893 - DNA, 15 bp, Homo sapiens
tatggttaagtttag

SEQ ID NO: 1651894 - DNA, 15 bp, Homo sapiens
ctatggttaagttta

SEQ ID NO: 1651895 - DNA, 15 bp, Homo sapiens
tctatggttaagttt

SEQ ID NO: 1651896 - DNA, 15 bp, Homo sapiens
ttctatggttaagtt

SEQ ID NO: 1651897 - DNA, 15 bp, Homo sapiens
cttctatggttaagt

SEQ ID NO: 1651898 - DNA, 15 bp, Homo sapiens
gcttctatggttaag

SEQ ID NO: 1651899 - DNA, 15 bp, Homo sapiens
tgcttctatggttaa

SEQ ID NO: 1651900 - DNA, 15 bp, Homo sapiens
ttgcttctatggtta

SEQ ID NO: 1651901 - DNA, 15 bp, Homo sapiens
tttgcttctatggtt

SEQ ID NO: 1651902 - DNA, 15 bp, Homo sapiens
atttgcttctatggt

SEQ ID NO: 1651903 - DNA, 15 bp, Homo sapiens
catttgcttctatgg

SEQ ID NO: 1651904 - DNA, 15 bp, Homo sapiens
acatttgcttctatg

SEQ ID NO: 1651905 - DNA, 15 bp, Homo sapiens
gacatttgcttctat

SEQ ID NO: 1651906 - DNA, 15 bp, Homo sapiens
tgacatttgcttcta

SEQ ID NO: 1651907 - DNA, 15 bp, Homo sapiens
ttgacatttgcttct

SEQ ID NO: 1651908 - DNA, 15 bp, Homo sapiens
tttgacatttgcttc

SEQ ID NO: 1651909 - DNA, 15 bp, Homo sapiens
gtttgacatttgctt

SEQ ID NO: 1651910 - DNA, 15 bp, Homo sapiens
tgtttgacatttgct

SEQ ID NO: 1651911 - DNA, 15 bp, Homo sapiens
gtgtttgacatttgc

SEQ ID NO: 1651912 - DNA, 15 bp, Homo sapiens
agtgtttgacatttg

SEQ ID NO: 1651913 - DNA, 15 bp, Homo sapiens
gagtgtttgacattt

SEQ ID NO: 1651914 - DNA, 15 bp, Homo sapiens
tgagtgtttgacatt

SEQ ID NO: 1651915 - DNA, 15 bp, Homo sapiens
gtgagtgtttgacat

SEQ ID NO: 1651916 - DNA, 15 bp, Homo sapiens
agtgagtgtttgaca

SEQ ID NO: 1651917 - DNA, 15 bp, Homo sapiens
tagtgagtgtttgac

SEQ ID NO: 1651918 - DNA, 15 bp, Homo sapiens
gtagtgagtgtttga

SEQ ID NO: 1651919 - DNA, 15 bp, Homo sapiens
ggtagtgagtgtttg

SEQ ID NO: 1651920 - DNA, 15 bp, Homo sapiens
cggtagtgagtgttt

SEQ ID NO: 1651921 - DNA, 15 bp, Homo sapiens
acggtagtgagtgtt

SEQ ID NO: 1651922 - DNA, 15 bp, Homo sapiens
tacggtagtgagtgt

SEQ ID NO: 1651923 - DNA, 15 bp, Homo sapiens
ttacggtagtgagtg

SEQ ID NO: 1651924 - DNA, 15 bp, Homo sapiens
attacggtagtgagt

SEQ ID NO: 1651925 - DNA, 15 bp, Homo sapiens
tattacggtagtgag

SEQ ID NO: 1651926 - DNA, 15 bp, Homo sapiens
atattacggtagtga

SEQ ID NO: 1651927 - DNA, 15 bp, Homo sapiens
aatattacggtagtg

SEQ ID NO: 1651928 - DNA, 15 bp, Homo sapiens
taatattacggtagt

SEQ ID NO: 1651929 - DNA, 15 bp, Homo sapiens
ttaatattacggtag

SEQ ID NO: 1651930 - DNA, 15 bp, Homo sapiens
gttaatattacggta

SEQ ID NO: 1651931 - DNA, 15 bp, Homo sapiens
tgttaatattacggt

SEQ ID NO: 1651932 - DNA, 15 bp, Homo sapiens
ctgttaatattacgg

SEQ ID NO: 1651933 - DNA, 15 bp, Homo sapiens
tctgttaatattacg

SEQ ID NO: 1651934 - DNA, 15 bp, Homo sapiens
ttctgttaatattac

SEQ ID NO: 1651935 - DNA, 15 bp, Homo sapiens
tttctgttaatatta

SEQ ID NO: 1651936 - DNA, 15 bp, Homo sapiens
ttttctgttaatatt

SEQ ID NO: 1651937 - DNA, 15 bp, Homo sapiens
tttttctgttaatat

SEQ ID NO: 1651938 - DNA, 15 bp, Homo sapiens
atttttctgttaata

SEQ ID NO: 1651939 - DNA, 15 bp, Homo sapiens
aatttttctgttaat

SEQ ID NO: 1651940 - DNA, 15 bp, Homo sapiens
aaatttttctgttaa

SEQ ID NO: 1651941 - DNA, 15 bp, Homo sapiens
gaaatttttctgtta

SEQ ID NO: 1651942 - DNA, 15 bp, Homo sapiens
ggaaatttttctgtt

SEQ ID NO: 1651943 - DNA, 15 bp, Homo sapiens
gggaaatttttctgt

SEQ ID NO: 1651944 - DNA, 15 bp, Homo sapiens
tgggaaatttttctg

SEQ ID NO: 1651945 - DNA, 15 bp, Homo sapiens
ttgggaaatttttct

SEQ ID NO: 1651946 - DNA, 15 bp, Homo sapiens
gttgggaaatttttc

SEQ ID NO: 1651947 - DNA, 15 bp, Homo sapiens
ggttgggaaattttt

SEQ ID NO: 1651948 - DNA, 15 bp, Homo sapiens
tggttgggaaatttt

SEQ ID NO: 1651949 - DNA, 15 bp, Homo sapiens
ttggttgggaaattt

SEQ ID NO: 1651950 - DNA, 15 bp, Homo sapiens
cttggttgggaaatt

SEQ ID NO: 1651951 - DNA, 15 bp, Homo sapiens
gcttggttgggaaat

SEQ ID NO: 1651952 - DNA, 15 bp, Homo sapiens
ggcttggttgggaaa

SEQ ID NO: 1651953 - DNA, 15 bp, Homo sapiens
tggcttggttgggaa

SEQ ID NO: 1651954 - DNA, 15 bp, Homo sapiens
ctggcttggttggga

SEQ ID NO: 1651955 - DNA, 15 bp, Homo sapiens
cctggcttggttggg

SEQ ID NO: 1651956 - DNA, 15 bp, Homo sapiens
acctggcttggttgg

SEQ ID NO: 1651957 - DNA, 15 bp, Homo sapiens
aacctggcttggttg

SEQ ID NO: 1651958 - DNA, 15 bp, Homo sapiens
aaacctggcttggtt

SEQ ID NO: 1651959 - DNA, 15 bp, Homo sapiens
gaaacctggcttggt

SEQ ID NO: 1651960 - DNA, 15 bp, Homo sapiens
agaaacctggcttgg

SEQ ID NO: 1651961 - DNA, 15 bp, Homo sapiens
gagaaacctggcttg

SEQ ID NO: 1651962 - DNA, 15 bp, Homo sapiens
tgagaaacctggctt

SEQ ID NO: 1651963 - DNA, 15 bp, Homo sapiens
gtgagaaacctggct

SEQ ID NO: 1651964 - DNA, 15 bp, Homo sapiens
agtgagaaacctggc

SEQ ID NO: 1651965 - DNA, 15 bp, Homo sapiens
cagtgagaaacctgg

SEQ ID NO: 1651966 - DNA, 15 bp, Homo sapiens
acagtgagaaacctg

SEQ ID NO: 1651967 - DNA, 15 bp, Homo sapiens
tacagtgagaaacct

SEQ ID NO: 1651968 - DNA, 15 bp, Homo sapiens
ctacagtgagaaacc

SEQ ID NO: 1651969 - DNA, 15 bp, Homo sapiens
tctacagtgagaaac

SEQ ID NO: 1651970 - DNA, 15 bp, Homo sapiens
ttctacagtgagaaa

SEQ ID NO: 1651971 - DNA, 15 bp, Homo sapiens
tttctacagtgagaa

SEQ ID NO: 1651972 - DNA, 15 bp, Homo sapiens
atttctacagtgaga

SEQ ID NO: 1651973 - DNA, 15 bp, Homo sapiens
catttctacagtgag

SEQ ID NO: 1651974 - DNA, 15 bp, Homo sapiens
ccatttctacagtga

SEQ ID NO: 1651975 - DNA, 15 bp, Homo sapiens
cccatttctacagtg

SEQ ID NO: 1651976 - DNA, 15 bp, Homo sapiens
tcccatttctacagt

SEQ ID NO: 1651977 - DNA, 15 bp, Homo sapiens
ctcccatttctacag

SEQ ID NO: 1651978 - DNA, 15 bp, Homo sapiens
cctcccatttctaca

SEQ ID NO: 1651979 - DNA, 15 bp, Homo sapiens
acctcccatttctac

SEQ ID NO: 1651980 - DNA, 15 bp, Homo sapiens
tacctcccatttcta

SEQ ID NO: 1651981 - DNA, 15 bp, Homo sapiens
ttacctcccatttct

SEQ ID NO: 1651982 - DNA, 15 bp, Homo sapiens
gttacctcccatttc

SEQ ID NO: 1651983 - DNA, 15 bp, Homo sapiens
tgttacctcccattt

SEQ ID NO: 1651984 - DNA, 15 bp, Homo sapiens
ctgttacctcccatt

SEQ ID NO: 1651985 - DNA, 15 bp, Homo sapiens
tctgttacctcccat

SEQ ID NO: 1651986 - DNA, 15 bp, Homo sapiens
atctgttacctccca

SEQ ID NO: 1651987 - DNA, 15 bp, Homo sapiens
tatctgttacctccc

SEQ ID NO: 1651988 - DNA, 15 bp, Homo sapiens
ttatctgttacctcc

SEQ ID NO: 1651989 - DNA, 15 bp, Homo sapiens
cttatctgttacctc

SEQ ID NO: 1651990 - DNA, 15 bp, Homo sapiens
gcttatctgttacct

SEQ ID NO: 1651991 - DNA, 15 bp, Homo sapiens
tgcttatctgttacc

SEQ ID NO: 1651992 - DNA, 15 bp, Homo sapiens
ttgcttatctgttac

SEQ ID NO: 1651993 - DNA, 15 bp, Homo sapiens
cttgcttatctgtta

SEQ ID NO: 1651994 - DNA, 15 bp, Homo sapiens
ccttgcttatctgtt

SEQ ID NO: 1651995 - DNA, 15 bp, Homo sapiens
tccttgcttatctgt

SEQ ID NO: 1651996 - DNA, 15 bp, Homo sapiens
ctccttgcttatctg

SEQ ID NO: 1651997 - DNA, 15 bp, Homo sapiens
cctccttgcttatct

SEQ ID NO: 1651998 - DNA, 15 bp, Homo sapiens
acctccttgcttatc

SEQ ID NO: 1651999 - DNA, 15 bp, Homo sapiens
cacctccttgcttat

SEQ ID NO: 1652000 - DNA, 15 bp, Homo sapiens
tcacctccttgctta

SEQ ID NO: 1652001 - DNA, 15 bp, Homo sapiens
ctcacctccttgctt

SEQ ID NO: 1652002 - DNA, 15 bp, Homo sapiens
tctcacctccttgct

SEQ ID NO: 1652003 - DNA, 15 bp, Homo sapiens
gtctcacctccttgc

SEQ ID NO: 1652004 - DNA, 15 bp, Homo sapiens
agtctcacctccttg

SEQ ID NO: 1652005 - DNA, 15 bp, Homo sapiens
tagtctcacctcctt

SEQ ID NO: 1652006 - DNA, 15 bp, Homo sapiens
atagtctcacctcct

SEQ ID NO: 1652007 - DNA, 15 bp, Homo sapiens
tatagtctcacctcc

SEQ ID NO: 1652008 - DNA, 15 bp, Homo sapiens
ttatagtctcacctc

SEQ ID NO: 1652009 - DNA, 15 bp, Homo sapiens
attatagtctcacct

SEQ ID NO: 1652010 - DNA, 15 bp, Homo sapiens
cattatagtctcacc

SEQ ID NO: 1652011 - DNA, 15 bp, Homo sapiens
tcattatagtctcac

SEQ ID NO: 1652012 - DNA, 15 bp, Homo sapiens
atcattatagtctca

SEQ ID NO: 1652013 - DNA, 15 bp, Homo sapiens
gatcattatagtctc

SEQ ID NO: 1652014 - DNA, 15 bp, Homo sapiens
ggatcattatagtct

SEQ ID NO: 1652015 - DNA, 15 bp, Homo sapiens
tggatcattatagtc

SEQ ID NO: 1652016 - DNA, 15 bp, Homo sapiens
atggatcattatagt

SEQ ID NO: 1652017 - DNA, 15 bp, Homo sapiens
catggatcattatag

SEQ ID NO: 1652018 - DNA, 15 bp, Homo sapiens
acatggatcattata

SEQ ID NO: 1652019 - DNA, 15 bp, Homo sapiens
cacatggatcattat

SEQ ID NO: 1652020 - DNA, 15 bp, Homo sapiens
ccacatggatcatta

SEQ ID NO: 1652021 - DNA, 15 bp, Homo sapiens
gccacatggatcatt

SEQ ID NO: 1652022 - DNA, 15 bp, Homo sapiens
tgccacatggatcat

SEQ ID NO: 1652023 - DNA, 15 bp, Homo sapiens
ttgccacatggatca

SEQ ID NO: 1652024 - DNA, 15 bp, Homo sapiens
attgccacatggatc

SEQ ID NO: 1652025 - DNA, 15 bp, Homo sapiens
cattgccacatggat

SEQ ID NO: 1652026 - DNA, 15 bp, Homo sapiens
tcattgccacatgga

SEQ ID NO: 1652027 - DNA, 15 bp, Homo sapiens
atcattgccacatgg

SEQ ID NO: 1652028 - DNA, 15 bp, Homo sapiens
aatcattgccacatg

SEQ ID NO: 1652029 - DNA, 15 bp, Homo sapiens
taatcattgccacat

SEQ ID NO: 1652030 - DNA, 15 bp, Homo sapiens
ctaatcattgccaca

SEQ ID NO: 1652031 - DNA, 15 bp, Homo sapiens
tctaatcattgccac

SEQ ID NO: 1652032 - DNA, 15 bp, Homo sapiens
ctctaatcattgcca

SEQ ID NO: 1652033 - DNA, 15 bp, Homo sapiens
actctaatcattgcc

SEQ ID NO: 1652034 - DNA, 15 bp, Homo sapiens
aactctaatcattgc

SEQ ID NO: 1652035 - DNA, 15 bp, Homo sapiens
caactctaatcattg

SEQ ID NO: 1652036 - DNA, 15 bp, Homo sapiens
ccaactctaatcatt

SEQ ID NO: 1652037 - DNA, 15 bp, Homo sapiens
tccaactctaatcat

SEQ ID NO: 1652038 - DNA, 15 bp, Homo sapiens
ctccaactctaatca

SEQ ID NO: 1652039 - DNA, 15 bp, Homo sapiens
tctccaactctaatc

SEQ ID NO: 1652040 - DNA, 15 bp, Homo sapiens
gtctccaactctaat

SEQ ID NO: 1652041 - DNA, 15 bp, Homo sapiens
cgtctccaactctaa

SEQ ID NO: 1652042 - DNA, 15 bp, Homo sapiens
acgtctccaactcta

SEQ ID NO: 1652043 - DNA, 15 bp, Homo sapiens
tacgtctccaactct

SEQ ID NO: 1652044 - DNA, 15 bp, Homo sapiens
ctacgtctccaactc

SEQ ID NO: 1652045 - DNA, 15 bp, Homo sapiens
cctacgtctccaact

SEQ ID NO: 1652046 - DNA, 15 bp, Homo sapiens
acctacgtctccaac

SEQ ID NO: 1652047 - DNA, 15 bp, Homo sapiens
tacctacgtctccaa

SEQ ID NO: 1652048 - DNA, 15 bp, Homo sapiens
atacctacgtctcca

SEQ ID NO: 1652049 - DNA, 15 bp, Homo sapiens
tatacctacgtctcc

SEQ ID NO: 1652050 - DNA, 15 bp, Homo sapiens
ttatacctacgtctc

SEQ ID NO: 1652051 - DNA, 15 bp, Homo sapiens
tttatacctacgtct

SEQ ID NO: 1652052 - DNA, 15 bp, Homo sapiens
gtttatacctacgtc

SEQ ID NO: 1652053 - DNA, 15 bp, Homo sapiens
tgtttatacctacgt

SEQ ID NO: 1652054 - DNA, 15 bp, Homo sapiens
gtgtttatacctacg

SEQ ID NO: 1652055 - DNA, 15 bp, Homo sapiens
tgtgtttatacctac

SEQ ID NO: 1652056 - DNA, 15 bp, Homo sapiens
atgtgtttataccta

SEQ ID NO: 1652057 - DNA, 15 bp, Homo sapiens
aatgtgtttatacct

SEQ ID NO: 1652058 - DNA, 15 bp, Homo sapiens
aaatgtgtttatacc

SEQ ID NO: 1652059 - DNA, 15 bp, Homo sapiens
taaatgtgtttatac

SEQ ID NO: 1652060 - DNA, 15 bp, Homo sapiens
ctaaatgtgtttata

SEQ ID NO: 1652061 - DNA, 15 bp, Homo sapiens
actaaatgtgtttat

SEQ ID NO: 1652062 - DNA, 15 bp, Homo sapiens
aactaaatgtgttta

SEQ ID NO: 1652063 - DNA, 15 bp, Homo sapiens
aaactaaatgtgttt

SEQ ID NO: 1652064 - DNA, 15 bp, Homo sapiens
taaactaaatgtgtt

SEQ ID NO: 1652065 - DNA, 15 bp, Homo sapiens
ttaaactaaatgtgt

SEQ ID NO: 1652066 - DNA, 15 bp, Homo sapiens
attaaactaaatgtg

SEQ ID NO: 1652067 - DNA, 15 bp, Homo sapiens
tattaaactaaatgt

SEQ ID NO: 1652068 - DNA, 15 bp, Homo sapiens
atattaaactaaatg

SEQ ID NO: 1652069 - DNA, 15 bp, Homo sapiens
tatattaaactaaat

SEQ ID NO: 1652070 - DNA, 15 bp, Homo sapiens
ctatattaaactaaa

SEQ ID NO: 1652071 - DNA, 15 bp, Homo sapiens
tctatattaaactaa

SEQ ID NO: 1652072 - DNA, 15 bp, Homo sapiens
atctatattaaacta

SEQ ID NO: 1652073 - DNA, 15 bp, Homo sapiens
tatctatattaaact

SEQ ID NO: 1652074 - DNA, 15 bp, Homo sapiens
gtatctatattaaac

SEQ ID NO: 1652075 - DNA, 15 bp, Homo sapiens
tgtatctatattaaa

SEQ ID NO: 1652076 - DNA, 15 bp, Homo sapiens
ctgtatctatattaa

SEQ ID NO: 1652077 - DNA, 15 bp, Homo sapiens
tctgtatctatatta

SEQ ID NO: 1652078 - DNA, 15 bp, Homo sapiens
atctgtatctatatt

SEQ ID NO: 1652079 - DNA, 15 bp, Homo sapiens
catctgtatctatat

SEQ ID NO: 1652080 - DNA, 15 bp, Homo sapiens
ccatctgtatctata

SEQ ID NO: 1652081 - DNA, 15 bp, Homo sapiens
accatctgtatctat

SEQ ID NO: 1652082 - DNA, 15 bp, Homo sapiens
aaccatctgtatcta

SEQ ID NO: 1652083 - DNA, 15 bp, Homo sapiens
taaccatctgtatct

SEQ ID NO: 1652084 - DNA, 15 bp, Homo sapiens
ataaccatctgtatc

SEQ ID NO: 1652085 - DNA, 15 bp, Homo sapiens
tataaccatctgtat

SEQ ID NO: 1652086 - DNA, 15 bp, Homo sapiens
atataaccatctgta

SEQ ID NO: 1652087 - DNA, 15 bp, Homo sapiens
tatataaccatctgt

SEQ ID NO: 1652088 - DNA, 15 bp, Homo sapiens
atatataaccatctg

SEQ ID NO: 1652089 - DNA, 15 bp, Homo sapiens
tatatataaccatct

SEQ ID NO: 1652090 - DNA, 15 bp, Homo sapiens
atatatataaccatc

SEQ ID NO: 1652091 - DNA, 15 bp, Homo sapiens
aatatatataaccat

SEQ ID NO: 1652092 - DNA, 15 bp, Homo sapiens
aaatatatataacca

SEQ ID NO: 1652093 - DNA, 15 bp, Homo sapiens
taaatatatataacc

SEQ ID NO: 1652094 - DNA, 15 bp, Homo sapiens
ataaatatatataac

SEQ ID NO: 1652095 - DNA, 15 bp, Homo sapiens
tataaatatatataa

SEQ ID NO: 1652096 - DNA, 15 bp, Homo sapiens
ctataaatatatata

SEQ ID NO: 1652097 - DNA, 15 bp, Homo sapiens
gctataaatatatat

SEQ ID NO: 1652098 - DNA, 15 bp, Homo sapiens
agctataaatatata

SEQ ID NO: 1652099 - DNA, 15 bp, Homo sapiens
tagctataaatatat

SEQ ID NO: 1652100 - DNA, 15 bp, Homo sapiens
atagctataaatata

SEQ ID NO: 1652101 - DNA, 15 bp, Homo sapiens
catagctataaatat

SEQ ID NO: 1652102 - DNA, 15 bp, Homo sapiens
acatagctataaata

SEQ ID NO: 1652103 - DNA, 15 bp, Homo sapiens
cacatagctataaat

SEQ ID NO: 1652104 - DNA, 15 bp, Homo sapiens
gcacatagctataaa

SEQ ID NO: 1652105 - DNA, 15 bp, Homo sapiens
tgcacatagctataa

SEQ ID NO: 1652106 - DNA, 15 bp, Homo sapiens
atgcacatagctata

SEQ ID NO: 1652107 - DNA, 15 bp, Homo sapiens
tatgcacatagctat

SEQ ID NO: 1652108 - DNA, 15 bp, Homo sapiens
atatgcacatagcta

SEQ ID NO: 1652109 - DNA, 15 bp, Homo sapiens
tatatgcacatagct

SEQ ID NO: 1652110 - DNA, 15 bp, Homo sapiens
gtatatgcacatagc

SEQ ID NO: 1652111 - DNA, 15 bp, Homo sapiens
tgtatatgcacatag

SEQ ID NO: 1652112 - DNA, 15 bp, Homo sapiens
gtgtatatgcacata

SEQ ID NO: 1652113 - DNA, 15 bp, Homo sapiens
tgtgtatatgcacat

SEQ ID NO: 1652114 - DNA, 15 bp, Homo sapiens
gtgtgtatatgcaca

SEQ ID NO: 1652115 - DNA, 15 bp, Homo sapiens
cgtgtgtatatgcac

SEQ ID NO: 1652116 - DNA, 15 bp, Homo sapiens
acgtgtgtatatgca

SEQ ID NO: 1652117 - DNA, 15 bp, Homo sapiens
aacgtgtgtatatgc

SEQ ID NO: 1652118 - DNA, 15 bp, Homo sapiens
taacgtgtgtatatg

SEQ ID NO: 1652119 - DNA, 15 bp, Homo sapiens
ctaacgtgtgtatat

SEQ ID NO: 1652120 - DNA, 15 bp, Homo sapiens
tctaacgtgtgtata

SEQ ID NO: 1652121 - DNA, 15 bp, Homo sapiens
ttctaacgtgtgtat

SEQ ID NO: 1652122 - DNA, 15 bp, Homo sapiens
attctaacgtgtgta

SEQ ID NO: 1652123 - DNA, 15 bp, Homo sapiens
cattctaacgtgtgt

SEQ ID NO: 1652124 - DNA, 15 bp, Homo sapiens
gcattctaacgtgtg

SEQ ID NO: 1652125 - DNA, 15 bp, Homo sapiens
tgcattctaacgtgt

SEQ ID NO: 1652126 - DNA, 15 bp, Homo sapiens
ttgcattctaacgtg

SEQ ID NO: 1652127 - DNA, 15 bp, Homo sapiens
tttgcattctaacgt

SEQ ID NO: 1652128 - DNA, 15 bp, Homo sapiens
atttgcattctaacg

SEQ ID NO: 1652129 - DNA, 15 bp, Homo sapiens
tatttgcattctaac

SEQ ID NO: 1652130 - DNA, 15 bp, Homo sapiens
atatttgcattctaa

SEQ ID NO: 1652131 - DNA, 15 bp, Homo sapiens
tatatttgcattcta

SEQ ID NO: 1652132 - DNA, 15 bp, Homo sapiens
atatatttgcattct

SEQ ID NO: 1652133 - DNA, 15 bp, Homo sapiens
tatatatttgcattc

SEQ ID NO: 1652134 - DNA, 15 bp, Homo sapiens
atatatatttgcatt

SEQ ID NO: 1652135 - DNA, 15 bp, Homo sapiens
gatatatatttgcat

SEQ ID NO: 1652136 - DNA, 15 bp, Homo sapiens
agatatatatttgca

SEQ ID NO: 1652137 - DNA, 15 bp, Homo sapiens
gagatatatatttgc

SEQ ID NO: 1652138 - DNA, 15 bp, Homo sapiens
ggagatatatatttg

SEQ ID NO: 1652139 - DNA, 15 bp, Homo sapiens
aggagatatatattt

SEQ ID NO: 1652140 - DNA, 15 bp, Homo sapiens
aaggagatatatatt

SEQ ID NO: 1652141 - DNA, 15 bp, Homo sapiens
caaggagatatatat

SEQ ID NO: 1652142 - DNA, 15 bp, Homo sapiens
gcaaggagatatata

SEQ ID NO: 1652143 - DNA, 15 bp, Homo sapiens
agcaaggagatatat

SEQ ID NO: 1652144 - DNA, 15 bp, Homo sapiens
gagcaaggagatata

SEQ ID NO: 1652145 - DNA, 15 bp, Homo sapiens
agagcaaggagatat

SEQ ID NO: 1652146 - DNA, 15 bp, Homo sapiens
aagagcaaggagata

SEQ ID NO: 1652147 - DNA, 15 bp, Homo sapiens
caagagcaaggagat

SEQ ID NO: 1652148 - DNA, 15 bp, Homo sapiens
acaagagcaaggaga

SEQ ID NO: 1652149 - DNA, 15 bp, Homo sapiens
gacaagagcaaggag

SEQ ID NO: 1652150 - DNA, 15 bp, Homo sapiens
tgacaagagcaagga

SEQ ID NO: 1652151 - DNA, 15 bp, Homo sapiens
ttgacaagagcaagg

SEQ ID NO: 1652152 - DNA, 15 bp, Homo sapiens
gttgacaagagcaag

SEQ ID NO: 1652153 - DNA, 15 bp, Homo sapiens
agttgacaagagcaa

SEQ ID NO: 1652154 - DNA, 15 bp, Homo sapiens
cagttgacaagagca

SEQ ID NO: 1652155 - DNA, 15 bp, Homo sapiens
tcagttgacaagagc

SEQ ID NO: 1652156 - DNA, 15 bp, Homo sapiens
ttcagttgacaagag

SEQ ID NO: 1652157 - DNA, 15 bp, Homo sapiens
tttcagttgacaaga

SEQ ID NO: 1652158 - DNA, 15 bp, Homo sapiens
ttttcagttgacaag

SEQ ID NO: 1652159 - DNA, 15 bp, Homo sapiens
cttttcagttgacaa

SEQ ID NO: 1652160 - DNA, 15 bp, Homo sapiens
ccttttcagttgaca

SEQ ID NO: 1652161 - DNA, 15 bp, Homo sapiens
accttttcagttgac

SEQ ID NO: 1652162 - DNA, 15 bp, Homo sapiens
gaccttttcagttga

SEQ ID NO: 1652163 - DNA, 15 bp, Homo sapiens
agaccttttcagttg

SEQ ID NO: 1652164 - DNA, 15 bp, Homo sapiens
aagaccttttcagtt

SEQ ID NO: 1652165 - DNA, 15 bp, Homo sapiens
caagaccttttcagt

SEQ ID NO: 1652166 - DNA, 15 bp, Homo sapiens
tcaagaccttttcag

SEQ ID NO: 1652167 - DNA, 15 bp, Homo sapiens
ttcaagaccttttca

SEQ ID NO: 1652168 - DNA, 15 bp, Homo sapiens
cttcaagaccttttc

SEQ ID NO: 1652169 - DNA, 15 bp, Homo sapiens
ccttcaagacctttt

SEQ ID NO: 1652170 - DNA, 15 bp, Homo sapiens
tccttcaagaccttt

SEQ ID NO: 1652171 - DNA, 15 bp, Homo sapiens
ttccttcaagacctt

SEQ ID NO: 1652172 - DNA, 15 bp, Homo sapiens
attccttcaagacct

SEQ ID NO: 1652173 - DNA, 15 bp, Homo sapiens
cattccttcaagacc

SEQ ID NO: 1652174 - DNA, 15 bp, Homo sapiens
tcattccttcaagac

SEQ ID NO: 1652175 - DNA, 15 bp, Homo sapiens
gtcattccttcaaga

SEQ ID NO: 1652176 - DNA, 15 bp, Homo sapiens
tgtcattccttcaag

SEQ ID NO: 1652177 - DNA, 15 bp, Homo sapiens
gtgtcattccttcaa

SEQ ID NO: 1652178 - DNA, 15 bp, Homo sapiens
agtgtcattccttca

SEQ ID NO: 1652179 - DNA, 15 bp, Homo sapiens
gagtgtcattccttc

SEQ ID NO: 1652180 - DNA, 15 bp, Homo sapiens
ggagtgtcattcctt

SEQ ID NO: 1652181 - DNA, 15 bp, Homo sapiens
tggagtgtcattcct

SEQ ID NO: 1652182 - DNA, 15 bp, Homo sapiens
ctggagtgtcattcc

SEQ ID NO: 1652183 - DNA, 15 bp, Homo sapiens
actggagtgtcattc

SEQ ID NO: 1652184 - DNA, 15 bp, Homo sapiens
tactggagtgtcatt

SEQ ID NO: 1652185 - DNA, 15 bp, Homo sapiens
ctactggagtgtcat

SEQ ID NO: 1652186 - DNA, 15 bp, Homo sapiens
actactggagtgtca

SEQ ID NO: 1652187 - DNA, 15 bp, Homo sapiens
tactactggagtgtc

SEQ ID NO: 1652188 - DNA, 15 bp, Homo sapiens
ttactactggagtgt

SEQ ID NO: 1652189 - DNA, 15 bp, Homo sapiens
attactactggagtg

SEQ ID NO: 1652190 - DNA, 15 bp, Homo sapiens
cattactactggagt

SEQ ID NO: 1652191 - DNA, 15 bp, Homo sapiens
tcattactactggag

SEQ ID NO: 1652192 - DNA, 15 bp, Homo sapiens
ctcattactactgga

SEQ ID NO: 1652193 - DNA, 15 bp, Homo sapiens
gctcattactactgg

SEQ ID NO: 1652194 - DNA, 15 bp, Homo sapiens
cgctcattactactg

SEQ ID NO: 1652195 - DNA, 15 bp, Homo sapiens
gcgctcattactact

SEQ ID NO: 1652196 - DNA, 15 bp, Homo sapiens
tgcgctcattactac

SEQ ID NO: 1652197 - DNA, 15 bp, Homo sapiens
gtgcgctcattacta

SEQ ID NO: 1652198 - DNA, 15 bp, Homo sapiens
ggtgcgctcattact

SEQ ID NO: 1652199 - DNA, 15 bp, Homo sapiens
aggtgcgctcattac

SEQ ID NO: 1652200 - DNA, 15 bp, Homo sapiens
taggtgcgctcatta

SEQ ID NO: 1652201 - DNA, 15 bp, Homo sapiens
ctaggtgcgctcatt

SEQ ID NO: 1652202 - DNA, 15 bp, Homo sapiens
gctaggtgcgctcat

SEQ ID NO: 1652203 - DNA, 15 bp, Homo sapiens
tgctaggtgcgctca

SEQ ID NO: 1652204 - DNA, 15 bp, Homo sapiens
atgctaggtgcgctc

SEQ ID NO: 1652205 - DNA, 15 bp, Homo sapiens
aatgctaggtgcgct

SEQ ID NO: 1652206 - DNA, 15 bp, Homo sapiens
gaatgctaggtgcgc

SEQ ID NO: 1652207 - DNA, 15 bp, Homo sapiens
tgaatgctaggtgcg

SEQ ID NO: 1652208 - DNA, 15 bp, Homo sapiens
gtgaatgctaggtgc

SEQ ID NO: 1652209 - DNA, 15 bp, Homo sapiens
agtgaatgctaggtg

SEQ ID NO: 1652210 - DNA, 15 bp, Homo sapiens
aagtgaatgctaggt

SEQ ID NO: 1652211 - DNA, 15 bp, Homo sapiens
agaagtgaatgctag

SEQ ID NO: 1652212 - DNA, 15 bp, Homo sapiens
aagaagtgaatgcta

SEQ ID NO: 1652213 - DNA, 15 bp, Homo sapiens
caagaagtgaatgct

SEQ ID NO: 1652214 - DNA, 15 bp, Homo sapiens
tcaagaagtgaatgc

SEQ ID NO: 1652215 - DNA, 15 bp, Homo sapiens
atcaagaagtgaatg

SEQ ID NO: 1652216 - DNA, 15 bp, Homo sapiens
aatcaagaagtgaat

SEQ ID NO: 1652217 - DNA, 15 bp, Homo sapiens
aaatcaagaagtgaa

SEQ ID NO: 1652218 - DNA, 15 bp, Homo sapiens
gaaatcaagaagtga

SEQ ID NO: 1652219 - DNA, 15 bp, Homo sapiens
agaaatcaagaagtg

SEQ ID NO: 1652220 - DNA, 15 bp, Homo sapiens
tagaaatcaagaagt

SEQ ID NO: 1652221 - DNA, 15 bp, Homo sapiens
ttagaaatcaagaag

SEQ ID NO: 1652222 - DNA, 15 bp, Homo sapiens
attagaaatcaagaa

SEQ ID NO: 1652223 - DNA, 15 bp, Homo sapiens
tattagaaatcaaga

SEQ ID NO: 1652224 - DNA, 15 bp, Homo sapiens
atattagaaatcaag

SEQ ID NO: 1652225 - DNA, 15 bp, Homo sapiens
aatattagaaatcaa

SEQ ID NO: 1652226 - DNA, 15 bp, Homo sapiens
taatattagaaatca

SEQ ID NO: 1652227 - DNA, 15 bp, Homo sapiens
gtaatattagaaatc

SEQ ID NO: 1652228 - DNA, 15 bp, Homo sapiens
agtaatattagaaat

SEQ ID NO: 1652229 - DNA, 15 bp, Homo sapiens
gagtaatattagaaa

SEQ ID NO: 1652230 - DNA, 15 bp, Homo sapiens
agagtaatattagaa

SEQ ID NO: 1652231 - DNA, 15 bp, Homo sapiens
gagagtaatattaga

SEQ ID NO: 1652232 - DNA, 15 bp, Homo sapiens
ggagagtaatattag

SEQ ID NO: 1652233 - DNA, 15 bp, Homo sapiens
tggagagtaatatta

SEQ ID NO: 1652234 - DNA, 15 bp, Homo sapiens
ttggagagtaatatt

SEQ ID NO: 1652235 - DNA, 15 bp, Homo sapiens
attggagagtaatat

SEQ ID NO: 1652236 - DNA, 15 bp, Homo sapiens
tattggagagtaata

SEQ ID NO: 1652237 - DNA, 15 bp, Homo sapiens
ttattggagagtaat

SEQ ID NO: 1652238 - DNA, 15 bp, Homo sapiens
tttattggagagtaa

SEQ ID NO: 1652239 - DNA, 15 bp, Homo sapiens
ttttattggagagta

SEQ ID NO: 1652240 - DNA, 15 bp, Homo sapiens
tttttattggagagt

SEQ ID NO: 1652241 - DNA, 15 bp, Homo sapiens
ctttttattggagag

SEQ ID NO: 1652242 - DNA, 15 bp, Homo sapiens
actttttattggaga

SEQ ID NO: 1652243 - DNA, 15 bp, Homo sapiens
tactttttattggag

SEQ ID NO: 1652244 - DNA, 15 bp, Homo sapiens
atactttttattgga

SEQ ID NO: 1652245 - DNA, 15 bp, Homo sapiens
gatactttttattgg

SEQ ID NO: 1652246 - DNA, 15 bp, Homo sapiens
tgatactttttattg

SEQ ID NO: 1652247 - DNA, 15 bp, Homo sapiens
ttgatactttttatt

SEQ ID NO: 1652248 - DNA, 15 bp, Homo sapiens
cttgatactttttat

SEQ ID NO: 1652249 - DNA, 15 bp, Homo sapiens
ccttgatacttttta

SEQ ID NO: 1652250 - DNA, 15 bp, Homo sapiens
gccttgatacttttt

SEQ ID NO: 1652251 - DNA, 15 bp, Homo sapiens
agccttgatactttt

SEQ ID NO: 1652252 - DNA, 15 bp, Homo sapiens
gagccttgatacttt

SEQ ID NO: 1652253 - DNA, 15 bp, Homo sapiens
ggagccttgatactt

SEQ ID NO: 1652254 - DNA, 15 bp, Homo sapiens
aggagccttgatact

SEQ ID NO: 1652255 - DNA, 15 bp, Homo sapiens
aaggagccttgatac

SEQ ID NO: 1652256 - DNA, 15 bp, Homo sapiens
caaggagccttgata

SEQ ID NO: 1652257 - DNA, 15 bp, Homo sapiens
gcaaggagccttgat

SEQ ID NO: 1652258 - DNA, 15 bp, Homo sapiens
tgcaaggagccttga

SEQ ID NO: 1652259 - DNA, 15 bp, Homo sapiens
ctgcaaggagccttg

SEQ ID NO: 1652260 - DNA, 15 bp, Homo sapiens
tctgcaaggagcctt

SEQ ID NO: 1652261 - DNA, 15 bp, Homo sapiens
ttctgcaaggagcct

SEQ ID NO: 1652262 - DNA, 15 bp, Homo sapiens
tttctgcaaggagcc

SEQ ID NO: 1652263 - DNA, 15 bp, Homo sapiens
atttctgcaaggagc

SEQ ID NO: 1652264 - DNA, 15 bp, Homo sapiens
tatttctgcaaggag

SEQ ID NO: 1652265 - DNA, 15 bp, Homo sapiens
gtatttctgcaagga

SEQ ID NO: 1652266 - DNA, 15 bp, Homo sapiens
tgtatttctgcaagg

SEQ ID NO: 1652267 - DNA, 15 bp, Homo sapiens
atgtatttctgcaag

SEQ ID NO: 1652268 - DNA, 15 bp, Homo sapiens
gatgtatttctgcaa

SEQ ID NO: 1652269 - DNA, 15 bp, Homo sapiens
tgatgtatttctgca

SEQ ID NO: 1652270 - DNA, 15 bp, Homo sapiens
atgatgtatttctgc

SEQ ID NO: 1652271 - DNA, 15 bp, Homo sapiens
aatgatgtatttctg

SEQ ID NO: 1652272 - DNA, 15 bp, Homo sapiens
aaatgatgtatttct

SEQ ID NO: 1652273 - DNA, 15 bp, Homo sapiens
aaaatgatgtatttc

SEQ ID NO: 1652274 - DNA, 15 bp, Homo sapiens
taaaatgatgtattt

SEQ ID NO: 1652275 - DNA, 15 bp, Homo sapiens
ctaaaatgatgtatt

SEQ ID NO: 1652276 - DNA, 15 bp, Homo sapiens
cctaaaatgatgtat

SEQ ID NO: 1652277 - DNA, 15 bp, Homo sapiens
acctaaaatgatgta

SEQ ID NO: 1652278 - DNA, 15 bp, Homo sapiens
gacctaaaatgatgt

SEQ ID NO: 1652279 - DNA, 15 bp, Homo sapiens
ggacctaaaatgatg

SEQ ID NO: 1652280 - DNA, 15 bp, Homo sapiens
tggacctaaaatgat

SEQ ID NO: 1652281 - DNA, 15 bp, Homo sapiens
ctggacctaaaatga

SEQ ID NO: 1652282 - DNA, 15 bp, Homo sapiens
cctggacctaaaatg

SEQ ID NO: 1652283 - DNA, 15 bp, Homo sapiens
gcctggacctaaaat

SEQ ID NO: 1652284 - DNA, 15 bp, Homo sapiens
tgcctggacctaaaa

SEQ ID NO: 1652285 - DNA, 15 bp, Homo sapiens
ctgcctggacctaaa

SEQ ID NO: 1652286 - DNA, 15 bp, Homo sapiens
cctgcctggacctaa

SEQ ID NO: 1652287 - DNA, 15 bp, Homo sapiens
tcctgcctggaccta

SEQ ID NO: 1652288 - DNA, 15 bp, Homo sapiens
ctcctgcctggacct

SEQ ID NO: 1652289 - DNA, 15 bp, Homo sapiens
tctcctgcctggacc

SEQ ID NO: 1652290 - DNA, 15 bp, Homo sapiens
atctcctgcctggac

SEQ ID NO: 1652291 - DNA, 15 bp, Homo sapiens
tatctcctgcctgga

SEQ ID NO: 1652292 - DNA, 15 bp, Homo sapiens
atatctcctgcctgg

SEQ ID NO: 1652293 - DNA, 15 bp, Homo sapiens
catatctcctgcctg

SEQ ID NO: 1652294 - DNA, 15 bp, Homo sapiens
gcatatctcctgcct

SEQ ID NO: 1652295 - DNA, 15 bp, Homo sapiens
tgcatatctcctgcc

SEQ ID NO: 1652296 - DNA, 15 bp, Homo sapiens
ttgcatatctcctgc

SEQ ID NO: 1652297 - DNA, 15 bp, Homo sapiens
tttgcatatctcctg

SEQ ID NO: 1652298 - DNA, 15 bp, Homo sapiens
atttgcatatctcct

SEQ ID NO: 1652299 - DNA, 15 bp, Homo sapiens
catttgcatatctcc

SEQ ID NO: 1652300 - DNA, 15 bp, Homo sapiens
tcatttgcatatctc

SEQ ID NO: 1652301 - DNA, 15 bp, Homo sapiens
ctcatttgcatatct

SEQ ID NO: 1652302 - DNA, 15 bp, Homo sapiens
actcatttgcatatc

SEQ ID NO: 1652303 - DNA, 15 bp, Homo sapiens
gactcatttgcatat

SEQ ID NO: 1652304 - DNA, 15 bp, Homo sapiens
agactcatttgcata

SEQ ID NO: 1652305 - DNA, 15 bp, Homo sapiens
cagactcatttgcat

SEQ ID NO: 1652306 - DNA, 15 bp, Homo sapiens
tcagactcatttgca

SEQ ID NO: 1652307 - DNA, 15 bp, Homo sapiens
ttcagactcatttgc

SEQ ID NO: 1652308 - DNA, 15 bp, Homo sapiens
cttcagactcatttg

SEQ ID NO: 1652309 - DNA, 15 bp, Homo sapiens
gcttcagactcattt

SEQ ID NO: 1652310 - DNA, 15 bp, Homo sapiens
tgcttcagactcatt

SEQ ID NO: 1652311 - DNA, 15 bp, Homo sapiens
atgcttcagactcat

SEQ ID NO: 1652312 - DNA, 15 bp, Homo sapiens
catgcttcagactca

SEQ ID NO: 1652313 - DNA, 15 bp, Homo sapiens
acatgcttcagactc

SEQ ID NO: 1652314 - DNA, 15 bp, Homo sapiens
aacatgcttcagact

SEQ ID NO: 1652315 - DNA, 15 bp, Homo sapiens
caacatgcttcagac

SEQ ID NO: 1652316 - DNA, 15 bp, Homo sapiens
acaacatgcttcaga

SEQ ID NO: 1652317 - DNA, 15 bp, Homo sapiens
tacaacatgcttcag

SEQ ID NO: 1652318 - DNA, 15 bp, Homo sapiens
ctacaacatgcttca

SEQ ID NO: 1652319 - DNA, 15 bp, Homo sapiens
actacaacatgcttc

SEQ ID NO: 1652320 - DNA, 15 bp, Homo sapiens
aactacaacatgctt

SEQ ID NO: 1652321 - DNA, 15 bp, Homo sapiens
gaactacaacatgct

SEQ ID NO: 1652322 - DNA, 15 bp, Homo sapiens
ggaactacaacatgc

SEQ ID NO: 1652323 - DNA, 15 bp, Homo sapiens
tggaactacaacatg

SEQ ID NO: 1652324 - DNA, 15 bp, Homo sapiens
ttggaactacaacat

SEQ ID NO: 1652325 - DNA, 15 bp, Homo sapiens
tttggaactacaaca

SEQ ID NO: 1652326 - DNA, 15 bp, Homo sapiens
ttttggaactacaac

SEQ ID NO: 1652327 - DNA, 15 bp, Homo sapiens
tttttggaactacaa

SEQ ID NO: 1652328 - DNA, 15 bp, Homo sapiens
atttttggaactaca

SEQ ID NO: 1652329 - DNA, 15 bp, Homo sapiens
tatttttggaactac

SEQ ID NO: 1652330 - DNA, 15 bp, Homo sapiens
ttatttttggaacta

SEQ ID NO: 1652331 - DNA, 15 bp, Homo sapiens
cttatttttggaact

SEQ ID NO: 1652332 - DNA, 15 bp, Homo sapiens
tcttatttttggaac

SEQ ID NO: 1652333 - DNA, 15 bp, Homo sapiens
ttcttatttttggaa

SEQ ID NO: 1652334 - DNA, 15 bp, Homo sapiens
tttcttatttttgga

SEQ ID NO: 1652335 - DNA, 15 bp, Homo sapiens
ctttcttatttttgg

SEQ ID NO: 1652336 - DNA, 15 bp, Homo sapiens
actttcttatttttg

SEQ ID NO: 1652337 - DNA, 15 bp, Homo sapiens
cactttcttattttt

SEQ ID NO: 1652338 - DNA, 15 bp, Homo sapiens
gcactttcttatttt

SEQ ID NO: 1652339 - DNA, 15 bp, Homo sapiens
agcactttcttattt

SEQ ID NO: 1652340 - DNA, 15 bp, Homo sapiens
gagcactttcttatt

SEQ ID NO: 1652341 - DNA, 15 bp, Homo sapiens
tgagcactttcttat

SEQ ID NO: 1652342 - DNA, 15 bp, Homo sapiens
ttgagcactttctta

SEQ ID NO: 1652343 - DNA, 15 bp, Homo sapiens
tttgagcactttctt

SEQ ID NO: 1652344 - DNA, 15 bp, Homo sapiens
gtttgagcactttct

SEQ ID NO: 1652345 - DNA, 15 bp, Homo sapiens
tgtttgagcactttc

SEQ ID NO: 1652346 - DNA, 15 bp, Homo sapiens
ttgtttgagcacttt

SEQ ID NO: 1652347 - DNA, 15 bp, Homo sapiens
tttgtttgagcactt

SEQ ID NO: 1652348 - DNA, 15 bp, Homo sapiens
ttttgtttgagcact

SEQ ID NO: 1652349 - DNA, 15 bp, Homo sapiens
tttttgtttgagcac

SEQ ID NO: 1652350 - DNA, 15 bp, Homo sapiens
ttttttgtttgagca

SEQ ID NO: 1652351 - DNA, 15 bp, Homo sapiens
gttttttgtttgagc

SEQ ID NO: 1652352 - DNA, 15 bp, Homo sapiens
ggttttttgtttgag

SEQ ID NO: 1652353 - DNA, 15 bp, Homo sapiens
gggttttttgtttga

SEQ ID NO: 1652354 - DNA, 15 bp, Homo sapiens
tgggttttttgtttg

SEQ ID NO: 1652355 - DNA, 15 bp, Homo sapiens
gtgggttttttgttt

SEQ ID NO: 1652356 - DNA, 15 bp, Homo sapiens
tgtgggttttttgtt

SEQ ID NO: 1652357 - DNA, 15 bp, Homo sapiens
atgtgggttttttgt

SEQ ID NO: 1652358 - DNA, 15 bp, Homo sapiens
aatgtgggttttttg

SEQ ID NO: 1652359 - DNA, 15 bp, Homo sapiens
gaatgtgggtttttt

SEQ ID NO: 1652360 - DNA, 15 bp, Homo sapiens
tgaatgtgggttttt

SEQ ID NO: 1652361 - DNA, 15 bp, Homo sapiens
atgaatgtgggtttt

SEQ ID NO: 1652362 - DNA, 15 bp, Homo sapiens
catgaatgtgggttt

SEQ ID NO: 1652363 - DNA, 15 bp, Homo sapiens
ccatgaatgtgggtt

SEQ ID NO: 1652364 - DNA, 15 bp, Homo sapiens
cccatgaatgtgggt

SEQ ID NO: 1652365 - DNA, 15 bp, Homo sapiens
ccccatgaatgtggg

SEQ ID NO: 1652366 - DNA, 15 bp, Homo sapiens
accccatgaatgtgg

SEQ ID NO: 1652367 - DNA, 15 bp, Homo sapiens
aaccccatgaatgtg

SEQ ID NO: 1652368 - DNA, 15 bp, Homo sapiens
taaccccatgaatgt

SEQ ID NO: 1652369 - DNA, 15 bp, Homo sapiens
ataaccccatgaatg

SEQ ID NO: 1652370 - DNA, 15 bp, Homo sapiens
tataaccccatgaat

SEQ ID NO: 1652371 - DNA, 15 bp, Homo sapiens
atataaccccatgaa

SEQ ID NO: 1652372 - DNA, 15 bp, Homo sapiens
gatataaccccatga

SEQ ID NO: 1652373 - DNA, 15 bp, Homo sapiens
tgatataaccccatg

SEQ ID NO: 1652374 - DNA, 15 bp, Homo sapiens
ttgatataaccccat

SEQ ID NO: 1652375 - DNA, 15 bp, Homo sapiens
tttgatataacccca

SEQ ID NO: 1652376 - DNA, 15 bp, Homo sapiens
ctttgatataacccc

SEQ ID NO: 1652377 - DNA, 15 bp, Homo sapiens
gctttgatataaccc

SEQ ID NO: 1652378 - DNA, 15 bp, Homo sapiens
ggctttgatataacc

SEQ ID NO: 1652379 - DNA, 15 bp, Homo sapiens
tggctttgatataac

SEQ ID NO: 1652380 - DNA, 15 bp, Homo sapiens
ttggctttgatataa

SEQ ID NO: 1652381 - DNA, 15 bp, Homo sapiens
tttggctttgatata

SEQ ID NO: 1652382 - DNA, 15 bp, Homo sapiens
atttggctttgatat

SEQ ID NO: 1652383 - DNA, 15 bp, Homo sapiens
catttggctttgata

SEQ ID NO: 1652384 - DNA, 15 bp, Homo sapiens
tcatttggctttgat

SEQ ID NO: 1652385 - DNA, 15 bp, Homo sapiens
ttcatttggctttga

SEQ ID NO: 1652386 - DNA, 15 bp, Homo sapiens
tttcatttggctttg

SEQ ID NO: 1652387 - DNA, 15 bp, Homo sapiens
ctttcatttggcttt

SEQ ID NO: 1652388 - DNA, 15 bp, Homo sapiens
tctttcatttggctt

SEQ ID NO: 1652389 - DNA, 15 bp, Homo sapiens
gtctttcatttggct

SEQ ID NO: 1652390 - DNA, 15 bp, Homo sapiens
ggtctttcatttggc

SEQ ID NO: 1652391 - DNA, 15 bp, Homo sapiens
aggtctttcatttgg

SEQ ID NO: 1652392 - DNA, 15 bp, Homo sapiens
gaggtctttcatttg

SEQ ID NO: 1652393 - DNA, 15 bp, Homo sapiens
ggaggtctttcattt

SEQ ID NO: 1652394 - DNA, 15 bp, Homo sapiens
gggaggtctttcatt

SEQ ID NO: 1652395 - DNA, 15 bp, Homo sapiens
tgggaggtctttcat

SEQ ID NO: 1652396 - DNA, 15 bp, Homo sapiens
ttgggaggtctttca

SEQ ID NO: 1652397 - DNA, 15 bp, Homo sapiens
attgggaggtctttc

SEQ ID NO: 1652398 - DNA, 15 bp, Homo sapiens
cattgggaggtcttt

SEQ ID NO: 1652399 - DNA, 15 bp, Homo sapiens
ccattgggaggtctt

SEQ ID NO: 1652400 - DNA, 15 bp, Homo sapiens
gccattgggaggtct

SEQ ID NO: 1652401 - DNA, 15 bp, Homo sapiens
ggccattgggaggtc

SEQ ID NO: 1652402 - DNA, 15 bp, Homo sapiens
tggccattgggaggt

SEQ ID NO: 1652403 - DNA, 15 bp, Homo sapiens
ttggccattgggagg

SEQ ID NO: 1652404 - DNA, 15 bp, Homo sapiens
tttggccattgggag

SEQ ID NO: 1652405 - DNA, 15 bp, Homo sapiens
ctttggccattggga

SEQ ID NO: 1652406 - DNA, 15 bp, Homo sapiens
gctttggccattggg

SEQ ID NO: 1652407 - DNA, 15 bp, Homo sapiens
agctttggccattgg

SEQ ID NO: 1652408 - DNA, 15 bp, Homo sapiens
cagctttggccattg

SEQ ID NO: 1652409 - DNA, 15 bp, Homo sapiens
ccagctttggccatt

SEQ ID NO: 1652410 - DNA, 15 bp, Homo sapiens
tccagctttggccat

SEQ ID NO: 1652411 - DNA, 15 bp, Homo sapiens
ttccagctttggcca

SEQ ID NO: 1652412 - DNA, 15 bp, Homo sapiens
gttccagctttggcc

SEQ ID NO: 1652413 - DNA, 15 bp, Homo sapiens
tgttccagctttggc

SEQ ID NO: 1652414 - DNA, 15 bp, Homo sapiens
ttgttccagctttgg

SEQ ID NO: 1652415 - DNA, 15 bp, Homo sapiens
attgttccagctttg

SEQ ID NO: 1652416 - DNA, 15 bp, Homo sapiens
aattgttccagcttt

SEQ ID NO: 1652417 - DNA, 15 bp, Homo sapiens
aaattgttccagctt

SEQ ID NO: 1652418 - DNA, 15 bp, Homo sapiens
caaattgttccagct

SEQ ID NO: 1652419 - DNA, 15 bp, Homo sapiens
tcaaattgttccagc

SEQ ID NO: 1652420 - DNA, 15 bp, Homo sapiens
ttcaaattgttccag

SEQ ID NO: 1652421 - DNA, 15 bp, Homo sapiens
gttcaaattgttcca

SEQ ID NO: 1652422 - DNA, 15 bp, Homo sapiens
tgttcaaattgttcc

SEQ ID NO: 1652423 - DNA, 15 bp, Homo sapiens
ttgttcaaattgttc

SEQ ID NO: 1652424 - DNA, 15 bp, Homo sapiens
gttgttcaaattgtt

SEQ ID NO: 1652425 - DNA, 15 bp, Homo sapiens
tgttgttcaaattgt

SEQ ID NO: 1652426 - DNA, 15 bp, Homo sapiens
ctgttgttcaaattg

SEQ ID NO: 1652427 - DNA, 15 bp, Homo sapiens
tctgttgttcaaatt

SEQ ID NO: 1652428 - DNA, 15 bp, Homo sapiens
ttctgttgttcaaat

SEQ ID NO: 1652429 - DNA, 15 bp, Homo sapiens
attctgttgttcaaa

SEQ ID NO: 1652430 - DNA, 15 bp, Homo sapiens
tattctgttgttcaa

SEQ ID NO: 1652431 - DNA, 15 bp, Homo sapiens
ttattctgttgttca

SEQ ID NO: 1652432 - DNA, 15 bp, Homo sapiens
tttattctgttgttc

SEQ ID NO: 1652433 - DNA, 15 bp, Homo sapiens
ctttattctgttgtt

SEQ ID NO: 1652434 - DNA, 15 bp, Homo sapiens
actttattctgttgt

SEQ ID NO: 1652435 - DNA, 15 bp, Homo sapiens
tactttattctgttg

SEQ ID NO: 1652436 - DNA, 15 bp, Homo sapiens
ttactttattctgtt

SEQ ID NO: 1652437 - DNA, 15 bp, Homo sapiens
attactttattctgt

SEQ ID NO: 1652438 - DNA, 15 bp, Homo sapiens
tattactttattctg

SEQ ID NO: 1652439 - DNA, 15 bp, Homo sapiens
gtattactttattct

SEQ ID NO: 1652440 - DNA, 15 bp, Homo sapiens
agtattactttattc

SEQ ID NO: 1652441 - DNA, 15 bp, Homo sapiens
cagtattactttatt

SEQ ID NO: 1652442 - DNA, 15 bp, Homo sapiens
acagtattactttat

SEQ ID NO: 1652443 - DNA, 15 bp, Homo sapiens
tacagtattacttta

SEQ ID NO: 1652444 - DNA, 15 bp, Homo sapiens
atacagtattacttt

SEQ ID NO: 1652445 - DNA, 15 bp, Homo sapiens
aatacagtattactt

SEQ ID NO: 1652446 - DNA, 15 bp, Homo sapiens
taatacagtattact

SEQ ID NO: 1652447 - DNA, 15 bp, Homo sapiens
ataatacagtattac

SEQ ID NO: 1652448 - DNA, 15 bp, Homo sapiens
tataatacagtatta

SEQ ID NO: 1652449 - DNA, 15 bp, Homo sapiens
ttataatacagtatt

SEQ ID NO: 1652450 - DNA, 15 bp, Homo sapiens
gttataatacagtat

SEQ ID NO: 1652451 - DNA, 15 bp, Homo sapiens
ggttataatacagta

SEQ ID NO: 1652452 - DNA, 15 bp, Homo sapiens
gggttataatacagt

SEQ ID NO: 1652453 - DNA, 15 bp, Homo sapiens
tgggttataatacag

SEQ ID NO: 1652454 - DNA, 15 bp, Homo sapiens
ctgggttataataca

SEQ ID NO: 1652455 - DNA, 15 bp, Homo sapiens
tctgggttataatac

SEQ ID NO: 1652456 - DNA, 15 bp, Homo sapiens
ctctgggttataata

SEQ ID NO: 1652457 - DNA, 15 bp, Homo sapiens
actctgggttataat

SEQ ID NO: 1652458 - DNA, 15 bp, Homo sapiens
tactctgggttataa

SEQ ID NO: 1652459 - DNA, 15 bp, Homo sapiens
atactctgggttata

SEQ ID NO: 1652460 - DNA, 15 bp, Homo sapiens
tatactctgggttat

SEQ ID NO: 1652461 - DNA, 15 bp, Homo sapiens
ttatactctgggtta

SEQ ID NO: 1652462 - DNA, 15 bp, Homo sapiens
tttatactctgggtt

SEQ ID NO: 1652463 - DNA, 15 bp, Homo sapiens
ttttatactctgggt

SEQ ID NO: 1652464 - DNA, 15 bp, Homo sapiens
attttatactctggg

SEQ ID NO: 1652465 - DNA, 15 bp, Homo sapiens
tattttatactctgg

SEQ ID NO: 1652466 - DNA, 15 bp, Homo sapiens
atattttatactctg

SEQ ID NO: 1652467 - DNA, 15 bp, Homo sapiens
gatattttatactct

SEQ ID NO: 1652468 - DNA, 15 bp, Homo sapiens
ggatattttatactc

SEQ ID NO: 1652469 - DNA, 15 bp, Homo sapiens
gggatattttatact

SEQ ID NO: 1652470 - DNA, 15 bp, Homo sapiens
agggatattttatac

SEQ ID NO: 1652471 - DNA, 15 bp, Homo sapiens
cagggatattttata

SEQ ID NO: 1652472 - DNA, 15 bp, Homo sapiens
tcagggatattttat

SEQ ID NO: 1652473 - DNA, 15 bp, Homo sapiens
ctcagggatatttta

SEQ ID NO: 1652474 - DNA, 15 bp, Homo sapiens
tctcagggatatttt

SEQ ID NO: 1652475 - DNA, 15 bp, Homo sapiens
atctcagggatattt

SEQ ID NO: 1652476 - DNA, 15 bp, Homo sapiens
gatctcagggatatt

SEQ ID NO: 1652477 - DNA, 15 bp, Homo sapiens
tgatctcagggatat

SEQ ID NO: 1652478 - DNA, 15 bp, Homo sapiens
atgatctcagggata

SEQ ID NO: 1652479 - DNA, 15 bp, Homo sapiens
tatgatctcagggat

SEQ ID NO: 1652480 - DNA, 15 bp, Homo sapiens
gtatgatctcaggga

SEQ ID NO: 1652481 - DNA, 15 bp, Homo sapiens
agtatgatctcaggg

SEQ ID NO: 1652482 - DNA, 15 bp, Homo sapiens
cagtatgatctcagg

SEQ ID NO: 1652483 - DNA, 15 bp, Homo sapiens
tcagtatgatctcag

SEQ ID NO: 1652484 - DNA, 15 bp, Homo sapiens
atcagtatgatctca

SEQ ID NO: 1652485 - DNA, 15 bp, Homo sapiens
tatcagtatgatctc

SEQ ID NO: 1652486 - DNA, 15 bp, Homo sapiens
atatcagtatgatct

SEQ ID NO: 1652487 - DNA, 15 bp, Homo sapiens
tatatcagtatgatc

SEQ ID NO: 1652488 - DNA, 15 bp, Homo sapiens
ttatatcagtatgat

SEQ ID NO: 1652489 - DNA, 15 bp, Homo sapiens
tttatatcagtatga

SEQ ID NO: 1652490 - DNA, 15 bp, Homo sapiens
atttatatcagtatg

SEQ ID NO: 1652491 - DNA, 15 bp, Homo sapiens
catttatatcagtat

SEQ ID NO: 1652492 - DNA, 15 bp, Homo sapiens
tcatttatatcagta

SEQ ID NO: 1652493 - DNA, 15 bp, Homo sapiens
gtcatttatatcagt

SEQ ID NO: 1652494 - DNA, 15 bp, Homo sapiens
agtcatttatatcag

SEQ ID NO: 1652495 - DNA, 15 bp, Homo sapiens
cagtcatttatatca

SEQ ID NO: 1652496 - DNA, 15 bp, Homo sapiens
tcagtcatttatatc

SEQ ID NO: 1652497 - DNA, 15 bp, Homo sapiens
ttcagtcatttatat

SEQ ID NO: 1652498 - DNA, 15 bp, Homo sapiens
attcagtcatttata

SEQ ID NO: 1652499 - DNA, 15 bp, Homo sapiens
tattcagtcatttat

SEQ ID NO: 1652500 - DNA, 15 bp, Homo sapiens
ttattcagtcattta

SEQ ID NO: 1652501 - DNA, 15 bp, Homo sapiens
tttattcagtcattt

SEQ ID NO: 1652502 - DNA, 15 bp, Homo sapiens
gtttattcagtcatt

SEQ ID NO: 1652503 - DNA, 15 bp, Homo sapiens
tgtttattcagtcat

SEQ ID NO: 1652504 - DNA, 15 bp, Homo sapiens
gtgtttattcagtca

SEQ ID NO: 1652505 - DNA, 15 bp, Homo sapiens
tgtgtttattcagtc

SEQ ID NO: 1652506 - DNA, 15 bp, Homo sapiens
ttgtgtttattcagt

SEQ ID NO: 1652507 - DNA, 15 bp, Homo sapiens
attgtgtttattcag

SEQ ID NO: 1652508 - DNA, 15 bp, Homo sapiens
tattgtgtttattca

SEQ ID NO: 1652509 - DNA, 15 bp, Homo sapiens
gtattgtgtttattc

SEQ ID NO: 1652510 - DNA, 15 bp, Homo sapiens
tgtattgtgtttatt

SEQ ID NO: 1652511 - DNA, 15 bp, Homo sapiens
atgtattgtgtttat

SEQ ID NO: 1652512 - DNA, 15 bp, Homo sapiens
aatgtattgtgttta

SEQ ID NO: 1652513 - DNA, 15 bp, Homo sapiens
caatgtattgtgttt

SEQ ID NO: 1652514 - DNA, 15 bp, Homo sapiens
acaatgtattgtgtt

SEQ ID NO: 1652515 - DNA, 15 bp, Homo sapiens
cacaatgtattgtgt

SEQ ID NO: 1652516 - DNA, 15 bp, Homo sapiens
ccacaatgtattgtg

SEQ ID NO: 1652517 - DNA, 15 bp, Homo sapiens
tccacaatgtattgt

SEQ ID NO: 1652518 - DNA, 15 bp, Homo sapiens
ctccacaatgtattg

SEQ ID NO: 1652519 - DNA, 15 bp, Homo sapiens
tctccacaatgtatt

SEQ ID NO: 1652520 - DNA, 15 bp, Homo sapiens
ttctccacaatgtat

SEQ ID NO: 1652521 - DNA, 15 bp, Homo sapiens
tttctccacaatgta

SEQ ID NO: 1652522 - DNA, 15 bp, Homo sapiens
ttttctccacaatgt

SEQ ID NO: 1652523 - DNA, 15 bp, Homo sapiens
cttttctccacaatg

SEQ ID NO: 1652524 - DNA, 15 bp, Homo sapiens
tcttttctccacaat

SEQ ID NO: 1652525 - DNA, 15 bp, Homo sapiens
gtcttttctccacaa

SEQ ID NO: 1652526 - DNA, 15 bp, Homo sapiens
tgtcttttctccaca

SEQ ID NO: 1652527 - DNA, 15 bp, Homo sapiens
atgtcttttctccac

SEQ ID NO: 1652528 - DNA, 15 bp, Homo sapiens
gatgtcttttctcca

SEQ ID NO: 1652529 - DNA, 15 bp, Homo sapiens
ggatgtcttttctcc

SEQ ID NO: 1652530 - DNA, 15 bp, Homo sapiens
aggatgtcttttctc

SEQ ID NO: 1652531 - DNA, 15 bp, Homo sapiens
caggatgtcttttct

SEQ ID NO: 1652532 - DNA, 15 bp, Homo sapiens
acaggatgtcttttc

SEQ ID NO: 1652533 - DNA, 15 bp, Homo sapiens
cacaggatgtctttt

SEQ ID NO: 1652534 - DNA, 15 bp, Homo sapiens
gcacaggatgtcttt

SEQ ID NO: 1652535 - DNA, 15 bp, Homo sapiens
tgcacaggatgtctt

SEQ ID NO: 1652536 - DNA, 15 bp, Homo sapiens
ttgcacaggatgtct

SEQ ID NO: 1652537 - DNA, 15 bp, Homo sapiens
tttgcacaggatgtc

SEQ ID NO: 1652538 - DNA, 15 bp, Homo sapiens
ttttgcacaggatgt

SEQ ID NO: 1652539 - DNA, 15 bp, Homo sapiens
cttttgcacaggatg

SEQ ID NO: 1652540 - DNA, 15 bp, Homo sapiens
tcttttgcacaggat

SEQ ID NO: 1652541 - DNA, 15 bp, Homo sapiens
ttcttttgcacagga

SEQ ID NO: 1652542 - DNA, 15 bp, Homo sapiens
attcttttgcacagg

SEQ ID NO: 1652543 - DNA, 15 bp, Homo sapiens
aattcttttgcacag

SEQ ID NO: 1652544 - DNA, 15 bp, Homo sapiens
tggaattcttttgca

SEQ ID NO: 1652545 - DNA, 15 bp, Homo sapiens
ttggaattcttttgc

SEQ ID NO: 1652546 - DNA, 15 bp, Homo sapiens
tttggaattcttttg

SEQ ID NO: 1652547 - DNA, 15 bp, Homo sapiens
atttggaattctttt

SEQ ID NO: 1652548 - DNA, 15 bp, Homo sapiens
tatttggaattcttt

SEQ ID NO: 1652549 - DNA, 15 bp, Homo sapiens
ttatttggaattctt

SEQ ID NO: 1652550 - DNA, 15 bp, Homo sapiens
attatttggaattct

SEQ ID NO: 1652551 - DNA, 15 bp, Homo sapiens
aattatttggaattc

SEQ ID NO: 1652552 - DNA, 15 bp, Homo sapiens
aaattatttggaatt

SEQ ID NO: 1652553 - DNA, 15 bp, Homo sapiens
taaattatttggaat

SEQ ID NO: 1652554 - DNA, 15 bp, Homo sapiens
ataaattatttggaa

SEQ ID NO: 1652555 - DNA, 15 bp, Homo sapiens
cataaattatttgga

SEQ ID NO: 1652556 - DNA, 15 bp, Homo sapiens
acataaattatttgg

SEQ ID NO: 1652557 - DNA, 15 bp, Homo sapiens
tacataaattatttg

SEQ ID NO: 1652558 - DNA, 15 bp, Homo sapiens
ttacataaattattt

SEQ ID NO: 1652559 - DNA, 15 bp, Homo sapiens
tttacataaattatt

SEQ ID NO: 1652560 - DNA, 15 bp, Homo sapiens
atttacataaattat

SEQ ID NO: 1652561 - DNA, 15 bp, Homo sapiens
tatttacataaatta

SEQ ID NO: 1652562 - DNA, 15 bp, Homo sapiens
gtatttacataaatt

SEQ ID NO: 1652563 - DNA, 15 bp, Homo sapiens
agtatttacataaat

SEQ ID NO: 1652564 - DNA, 15 bp, Homo sapiens
gagtatttacataaa

SEQ ID NO: 1652565 - DNA, 15 bp, Homo sapiens
agagtatttacataa

SEQ ID NO: 1652566 - DNA, 15 bp, Homo sapiens
cagagtatttacata

SEQ ID NO: 1652567 - DNA, 15 bp, Homo sapiens
gcagagtatttacat

SEQ ID NO: 1652568 - DNA, 15 bp, Homo sapiens
ggcagagtatttaca

SEQ ID NO: 1652569 - DNA, 15 bp, Homo sapiens
gggcagagtatttac

SEQ ID NO: 1652570 - DNA, 15 bp, Homo sapiens
agggcagagtattta

SEQ ID NO: 1652571 - DNA, 15 bp, Homo sapiens
gagggcagagtattt

SEQ ID NO: 1652572 - DNA, 15 bp, Homo sapiens
tgagggcagagtatt

SEQ ID NO: 1652573 - DNA, 15 bp, Homo sapiens
ttgagggcagagtat

SEQ ID NO: 1652574 - DNA, 15 bp, Homo sapiens
attgagggcagagta

SEQ ID NO: 1652575 - DNA, 15 bp, Homo sapiens
cattgagggcagagt

SEQ ID NO: 1652576 - DNA, 15 bp, Homo sapiens
tcattgagggcagag

SEQ ID NO: 1652577 - DNA, 15 bp, Homo sapiens
ctcattgagggcaga

SEQ ID NO: 1652578 - DNA, 15 bp, Homo sapiens
cctcattgagggcag

SEQ ID NO: 1652579 - DNA, 15 bp, Homo sapiens
acctcattgagggca

SEQ ID NO: 1652580 - DNA, 15 bp, Homo sapiens
cacctcattgagggc

SEQ ID NO: 1652581 - DNA, 15 bp, Homo sapiens
ccacctcattgaggg

SEQ ID NO: 1652582 - DNA, 15 bp, Homo sapiens
tccacctcattgagg

SEQ ID NO: 1652583 - DNA, 15 bp, Homo sapiens
ttccacctcattgag

SEQ ID NO: 1652584 - DNA, 15 bp, Homo sapiens
cttccacctcattga

SEQ ID NO: 1652585 - DNA, 15 bp, Homo sapiens
ccttccacctcattg

SEQ ID NO: 1652586 - DNA, 15 bp, Homo sapiens
accttccacctcatt

SEQ ID NO: 1652587 - DNA, 15 bp, Homo sapiens
taccttccacctcat

SEQ ID NO: 1652588 - DNA, 15 bp, Homo sapiens
ttaccttccacctca

SEQ ID NO: 1652589 - DNA, 15 bp, Homo sapiens
attaccttccacctc

SEQ ID NO: 1652590 - DNA, 15 bp, Homo sapiens
aattaccttccacct

SEQ ID NO: 1652591 - DNA, 15 bp, Homo sapiens
aaattaccttccacc

SEQ ID NO: 1652592 - DNA, 15 bp, Homo sapiens
gaaattaccttccac

SEQ ID NO: 1652593 - DNA, 15 bp, Homo sapiens
ggaaattaccttcca

SEQ ID NO: 1652594 - DNA, 15 bp, Homo sapiens
gggaaattaccttcc

SEQ ID NO: 1652595 - DNA, 15 bp, Homo sapiens
tgggaaattaccttc

SEQ ID NO: 1652596 - DNA, 15 bp, Homo sapiens
atgggaaattacctt

SEQ ID NO: 1652597 - DNA, 15 bp, Homo sapiens
aatgggaaattacct

SEQ ID NO: 1652598 - DNA, 15 bp, Homo sapiens
gaatgggaaattacc

SEQ ID NO: 1652599 - DNA, 15 bp, Homo sapiens
ggaatgggaaattac

SEQ ID NO: 1652600 - DNA, 15 bp, Homo sapiens
aggaatgggaaatta

SEQ ID NO: 1652601 - DNA, 15 bp, Homo sapiens
aaggaatgggaaatt

SEQ ID NO: 1652602 - DNA, 15 bp, Homo sapiens
taaggaatgggaaat

SEQ ID NO: 1652603 - DNA, 15 bp, Homo sapiens
ttaaggaatgggaaa

SEQ ID NO: 1652604 - DNA, 15 bp, Homo sapiens
cttaaggaatgggaa

SEQ ID NO: 1652605 - DNA, 15 bp, Homo sapiens
acttaaggaatggga

SEQ ID NO: 1652606 - DNA, 15 bp, Homo sapiens
cacttaaggaatggg

SEQ ID NO: 1652607 - DNA, 15 bp, Homo sapiens
gcacttaaggaatgg

SEQ ID NO: 1652608 - DNA, 15 bp, Homo sapiens
agcacttaaggaatg

SEQ ID NO: 1652609 - DNA, 15 bp, Homo sapiens
cagcacttaaggaat

SEQ ID NO: 1652610 - DNA, 15 bp, Homo sapiens
ccagcacttaaggaa

SEQ ID NO: 1652611 - DNA, 15 bp, Homo sapiens
gccagcacttaagga

SEQ ID NO: 1652612 - DNA, 15 bp, Homo sapiens
agccagcacttaagg

SEQ ID NO: 1652613 - DNA, 15 bp, Homo sapiens
cagccagcacttaag

SEQ ID NO: 1652614 - DNA, 15 bp, Homo sapiens
gcagccagcacttaa

SEQ ID NO: 1652615 - DNA, 15 bp, Homo sapiens
tgcagccagcactta

SEQ ID NO: 1652616 - DNA, 15 bp, Homo sapiens
gtgcagccagcactt

SEQ ID NO: 1652617 - DNA, 15 bp, Homo sapiens
tgtgcagccagcact

SEQ ID NO: 1652618 - DNA, 15 bp, Homo sapiens
atgtgcagccagcac

SEQ ID NO: 1652619 - DNA, 15 bp, Homo sapiens
tatgtgcagccagca

SEQ ID NO: 1652620 - DNA, 15 bp, Homo sapiens
ctatgtgcagccagc

SEQ ID NO: 1652621 - DNA, 15 bp, Homo sapiens
actatgtgcagccag

SEQ ID NO: 1652622 - DNA, 15 bp, Homo sapiens
cactatgtgcagcca

SEQ ID NO: 1652623 - DNA, 15 bp, Homo sapiens
tcactatgtgcagcc

SEQ ID NO: 1652624 - DNA, 15 bp, Homo sapiens
gtcactatgtgcagc

SEQ ID NO: 1652625 - DNA, 15 bp, Homo sapiens
agtcactatgtgcag

SEQ ID NO: 1652626 - DNA, 15 bp, Homo sapiens
aagtcactatgtgca

SEQ ID NO: 1652627 - DNA, 15 bp, Homo sapiens
gaagtcactatgtgc

SEQ ID NO: 1652628 - DNA, 15 bp, Homo sapiens
ggaagtcactatgtg

SEQ ID NO: 1652629 - DNA, 15 bp, Homo sapiens
aggaagtcactatgt

SEQ ID NO: 1652630 - DNA, 15 bp, Homo sapiens
taggaagtcactatg

SEQ ID NO: 1652631 - DNA, 15 bp, Homo sapiens
ataggaagtcactat

SEQ ID NO: 1652632 - DNA, 15 bp, Homo sapiens
cataggaagtcacta

SEQ ID NO: 1652633 - DNA, 15 bp, Homo sapiens
acataggaagtcact

SEQ ID NO: 1652634 - DNA, 15 bp, Homo sapiens
cacataggaagtcac

SEQ ID NO: 1652635 - DNA, 15 bp, Homo sapiens
tcacataggaagtca

SEQ ID NO: 1652636 - DNA, 15 bp, Homo sapiens
ttcacataggaagtc

SEQ ID NO: 1652637 - DNA, 15 bp, Homo sapiens
gttcacataggaagt

SEQ ID NO: 1652638 - DNA, 15 bp, Homo sapiens
tgttcacataggaag

SEQ ID NO: 1652639 - DNA, 15 bp, Homo sapiens
ctgttcacataggaa

SEQ ID NO: 1652640 - DNA, 15 bp, Homo sapiens
actgttcacatagga

SEQ ID NO: 1652641 - DNA, 15 bp, Homo sapiens
tactgttcacatagg

SEQ ID NO: 1652642 - DNA, 15 bp, Homo sapiens
atactgttcacatag

SEQ ID NO: 1652643 - DNA, 15 bp, Homo sapiens
tatactgttcacata

SEQ ID NO: 1652644 - DNA, 15 bp, Homo sapiens
ctatactgttcacat

SEQ ID NO: 1652645 - DNA, 15 bp, Homo sapiens
actatactgttcaca

SEQ ID NO: 1652646 - DNA, 15 bp, Homo sapiens
tactatactgttcac

SEQ ID NO: 1652647 - DNA, 15 bp, Homo sapiens
ctactatactgttca

SEQ ID NO: 1652648 - DNA, 15 bp, Homo sapiens
cctactatactgttc

SEQ ID NO: 1652649 - DNA, 15 bp, Homo sapiens
ccctactatactgtt

SEQ ID NO: 1652650 - DNA, 15 bp, Homo sapiens
tccctactatactgt

SEQ ID NO: 1652651 - DNA, 15 bp, Homo sapiens
ttccctactatactg

SEQ ID NO: 1652652 - DNA, 15 bp, Homo sapiens
tttccctactatact

SEQ ID NO: 1652653 - DNA, 15 bp, Homo sapiens
atttccctactatac

SEQ ID NO: 1652654 - DNA, 15 bp, Homo sapiens
catttccctactata

SEQ ID NO: 1652655 - DNA, 15 bp, Homo sapiens
ccatttccctactat

SEQ ID NO: 1652656 - DNA, 15 bp, Homo sapiens
tccatttccctacta

SEQ ID NO: 1652657 - DNA, 15 bp, Homo sapiens
ctccatttccctact

SEQ ID NO: 1652658 - DNA, 15 bp, Homo sapiens
tctccatttccctac

SEQ ID NO: 1652659 - DNA, 15 bp, Homo sapiens
ttctccatttcccta

SEQ ID NO: 1652660 - DNA, 15 bp, Homo sapiens
tttctccatttccct

SEQ ID NO: 1652661 - DNA, 15 bp, Homo sapiens
atttctccatttccc

SEQ ID NO: 1652662 - DNA, 15 bp, Homo sapiens
tatttctccatttcc

SEQ ID NO: 1652663 - DNA, 15 bp, Homo sapiens
ttatttctccatttc

SEQ ID NO: 1652664 - DNA, 15 bp, Homo sapiens
tttatttctccattt

SEQ ID NO: 1652665 - DNA, 15 bp, Homo sapiens
ctttatttctccatt

SEQ ID NO: 1652666 - DNA, 15 bp, Homo sapiens
tctttatttctccat

SEQ ID NO: 1652667 - DNA, 15 bp, Homo sapiens
gtctttatttctcca

SEQ ID NO: 1652668 - DNA, 15 bp, Homo sapiens
agtctttatttctcc

SEQ ID NO: 1652669 - DNA, 15 bp, Homo sapiens
tagtctttatttctc

SEQ ID NO: 1652670 - DNA, 15 bp, Homo sapiens
ttagtctttatttct

SEQ ID NO: 1652671 - DNA, 15 bp, Homo sapiens
attagtctttatttc

SEQ ID NO: 1652672 - DNA, 15 bp, Homo sapiens
aattagtctttattt

SEQ ID NO: 1652673 - DNA, 15 bp, Homo sapiens
aaattagtctttatt

SEQ ID NO: 1652674 - DNA, 15 bp, Homo sapiens
aaaattagtctttat

SEQ ID NO: 1652675 - DNA, 15 bp, Homo sapiens
taaaattagtcttta

SEQ ID NO: 1652676 - DNA, 15 bp, Homo sapiens
gtaaaattagtcttt

SEQ ID NO: 1652677 - DNA, 15 bp, Homo sapiens
cgtaaaattagtctt

SEQ ID NO: 1652678 - DNA, 15 bp, Homo sapiens
gcgtaaaattagtct

SEQ ID NO: 1652679 - DNA, 15 bp, Homo sapiens
agcgtaaaattagtc

SEQ ID NO: 1652680 - DNA, 15 bp, Homo sapiens
cagcgtaaaattagt

SEQ ID NO: 1652681 - DNA, 15 bp, Homo sapiens
ccagcgtaaaattag

SEQ ID NO: 1652682 - DNA, 15 bp, Homo sapiens
tccagcgtaaaatta

SEQ ID NO: 1652683 - DNA, 15 bp, Homo sapiens
ctccagcgtaaaatt

SEQ ID NO: 1652684 - DNA, 15 bp, Homo sapiens
tctccagcgtaaaat

SEQ ID NO: 1652685 - DNA, 15 bp, Homo sapiens
ttctccagcgtaaaa

SEQ ID NO: 1652686 - DNA, 15 bp, Homo sapiens
tttctccagcgtaaa

SEQ ID NO: 1652687 - DNA, 15 bp, Homo sapiens
gtttctccagcgtaa

SEQ ID NO: 1652688 - DNA, 15 bp, Homo sapiens
ggtttctccagcgta

SEQ ID NO: 1652689 - DNA, 15 bp, Homo sapiens
aggtttctccagcgt

SEQ ID NO: 1652690 - DNA, 15 bp, Homo sapiens
caggtttctccagcg

SEQ ID NO: 1652691 - DNA, 15 bp, Homo sapiens
tcaggtttctccagc

SEQ ID NO: 1652692 - DNA, 15 bp, Homo sapiens
gtcaggtttctccag

SEQ ID NO: 1652693 - DNA, 15 bp, Homo sapiens
tgtcaggtttctcca

SEQ ID NO: 1652694 - DNA, 15 bp, Homo sapiens
ttgtcaggtttctcc

SEQ ID NO: 1652695 - DNA, 15 bp, Homo sapiens
tttgtcaggtttctc

SEQ ID NO: 1652696 - DNA, 15 bp, Homo sapiens
atttgtcaggtttct

SEQ ID NO: 1652697 - DNA, 15 bp, Homo sapiens
tatttgtcaggtttc

SEQ ID NO: 1652698 - DNA, 15 bp, Homo sapiens
ctatttgtcaggttt

SEQ ID NO: 1652699 - DNA, 15 bp, Homo sapiens
actatttgtcaggtt

SEQ ID NO: 1652700 - DNA, 15 bp, Homo sapiens
tactatttgtcaggt

SEQ ID NO: 1652701 - DNA, 15 bp, Homo sapiens
gtactatttgtcagg

SEQ ID NO: 1652702 - DNA, 15 bp, Homo sapiens
ggtactatttgtcag

SEQ ID NO: 1652703 - DNA, 15 bp, Homo sapiens
aggtactatttgtca

SEQ ID NO: 1652704 - DNA, 15 bp, Homo sapiens
gaggtactatttgtc

SEQ ID NO: 1652705 - DNA, 15 bp, Homo sapiens
tgaggtactatttgt

SEQ ID NO: 1652706 - DNA, 15 bp, Homo sapiens
ctgaggtactatttg

SEQ ID NO: 1652707 - DNA, 15 bp, Homo sapiens
tctgaggtactattt

SEQ ID NO: 1652708 - DNA, 15 bp, Homo sapiens
gtctgaggtactatt

SEQ ID NO: 1652709 - DNA, 15 bp, Homo sapiens
tgtctgaggtactat

SEQ ID NO: 1652710 - DNA, 15 bp, Homo sapiens
ctgtctgaggtacta

SEQ ID NO: 1652711 - DNA, 15 bp, Homo sapiens
cctgtctgaggtact

SEQ ID NO: 1652712 - DNA, 15 bp, Homo sapiens
acctgtctgaggtac

SEQ ID NO: 1652713 - DNA, 15 bp, Homo sapiens
cacctgtctgaggta

SEQ ID NO: 1652714 - DNA, 15 bp, Homo sapiens
tcacctgtctgaggt

SEQ ID NO: 1652715 - DNA, 15 bp, Homo sapiens
atcacctgtctgagg

SEQ ID NO: 1652716 - DNA, 15 bp, Homo sapiens
aatcacctgtctgag

SEQ ID NO: 1652717 - DNA, 15 bp, Homo sapiens
taatcacctgtctga

SEQ ID NO: 1652718 - DNA, 15 bp, Homo sapiens
ttaatcacctgtctg

SEQ ID NO: 1652719 - DNA, 15 bp, Homo sapiens
cttaatcacctgtct

SEQ ID NO: 1652720 - DNA, 15 bp, Homo sapiens
ccttaatcacctgtc

SEQ ID NO: 1652721 - DNA, 15 bp, Homo sapiens
tccttaatcacctgt

SEQ ID NO: 1652722 - DNA, 15 bp, Homo sapiens
atccttaatcacctg

SEQ ID NO: 1652723 - DNA, 15 bp, Homo sapiens
tatccttaatcacct

SEQ ID NO: 1652724 - DNA, 15 bp, Homo sapiens
ttatccttaatcacc

SEQ ID NO: 1652725 - DNA, 15 bp, Homo sapiens
gttatccttaatcac

SEQ ID NO: 1652726 - DNA, 15 bp, Homo sapiens
tgttatccttaatca

SEQ ID NO: 1652727 - DNA, 15 bp, Homo sapiens
atgttatccttaatc

SEQ ID NO: 1652728 - DNA, 15 bp, Homo sapiens
tatgttatccttaat

SEQ ID NO: 1652729 - DNA, 15 bp, Homo sapiens
ttatgttatccttaa

SEQ ID NO: 1652730 - DNA, 15 bp, Homo sapiens
tttatgttatcctta

SEQ ID NO: 1652731 - DNA, 15 bp, Homo sapiens
gtttatgttatcctt

SEQ ID NO: 1652732 - DNA, 15 bp, Homo sapiens
tgtttatgttatcct

SEQ ID NO: 1652733 - DNA, 15 bp, Homo sapiens
ctgtttatgttatcc

SEQ ID NO: 1652734 - DNA, 15 bp, Homo sapiens
actgtttatgttatc

SEQ ID NO: 1652735 - DNA, 15 bp, Homo sapiens
cactgtttatgttat

SEQ ID NO: 1652736 - DNA, 15 bp, Homo sapiens
tcactgtttatgtta

SEQ ID NO: 1652737 - DNA, 15 bp, Homo sapiens
atcactgtttatgtt

SEQ ID NO: 1652738 - DNA, 15 bp, Homo sapiens
tatcactgtttatgt

SEQ ID NO: 1652739 - DNA, 15 bp, Homo sapiens
ttatcactgtttatg

SEQ ID NO: 1652740 - DNA, 15 bp, Homo sapiens
cttatcactgtttat

SEQ ID NO: 1652741 - DNA, 15 bp, Homo sapiens
acttatcactgttta

SEQ ID NO: 1652742 - DNA, 15 bp, Homo sapiens
gacttatcactgttt

SEQ ID NO: 1652743 - DNA, 15 bp, Homo sapiens
tgacttatcactgtt

SEQ ID NO: 1652744 - DNA, 15 bp, Homo sapiens
atgacttatcactgt

SEQ ID NO: 1652745 - DNA, 15 bp, Homo sapiens
catgacttatcactg

SEQ ID NO: 1652746 - DNA, 15 bp, Homo sapiens
acatgacttatcact

SEQ ID NO: 1652747 - DNA, 15 bp, Homo sapiens
aacatgacttatcac

SEQ ID NO: 1652748 - DNA, 15 bp, Homo sapiens
caacatgacttatca

SEQ ID NO: 1652749 - DNA, 15 bp, Homo sapiens
tcaacatgacttatc

SEQ ID NO: 1652750 - DNA, 15 bp, Homo sapiens
atcaacatgacttat

SEQ ID NO: 1652751 - DNA, 15 bp, Homo sapiens
tatcaacatgactta

SEQ ID NO: 1652752 - DNA, 15 bp, Homo sapiens
ctatcaacatgactt

SEQ ID NO: 1652753 - DNA, 15 bp, Homo sapiens
actatcaacatgact

SEQ ID NO: 1652754 - DNA, 15 bp, Homo sapiens
tactatcaacatgac

SEQ ID NO: 1652755 - DNA, 15 bp, Homo sapiens
atactatcaacatga

SEQ ID NO: 1652756 - DNA, 15 bp, Homo sapiens
catactatcaacatg

SEQ ID NO: 1652757 - DNA, 15 bp, Homo sapiens
acatactatcaacat

SEQ ID NO: 1652758 - DNA, 15 bp, Homo sapiens
tacatactatcaaca

SEQ ID NO: 1652759 - DNA, 15 bp, Homo sapiens
gtacatactatcaac

SEQ ID NO: 1652760 - DNA, 15 bp, Homo sapiens
agtacatactatcaa

SEQ ID NO: 1652761 - DNA, 15 bp, Homo sapiens
gagtacatactatca

SEQ ID NO: 1652762 - DNA, 15 bp, Homo sapiens
agagtacatactatc

SEQ ID NO: 1652763 - DNA, 15 bp, Homo sapiens
aagagtacatactat

SEQ ID NO: 1652764 - DNA, 15 bp, Homo sapiens
caagagtacatacta

SEQ ID NO: 1652765 - DNA, 15 bp, Homo sapiens
tcaagagtacatact

SEQ ID NO: 1652766 - DNA, 15 bp, Homo sapiens
atcaagagtacatac

SEQ ID NO: 1652767 - DNA, 15 bp, Homo sapiens
tatcaagagtacata

SEQ ID NO: 1652768 - DNA, 15 bp, Homo sapiens
ttatcaagagtacat

SEQ ID NO: 1652769 - DNA, 15 bp, Homo sapiens
cttatcaagagtaca

SEQ ID NO: 1652770 - DNA, 15 bp, Homo sapiens
acttatcaagagtac

SEQ ID NO: 1652771 - DNA, 15 bp, Homo sapiens
cacttatcaagagta

SEQ ID NO: 1652772 - DNA, 15 bp, Homo sapiens
tcacttatcaagagt

SEQ ID NO: 1652773 - DNA, 15 bp, Homo sapiens
atcacttatcaagag

SEQ ID NO: 1652774 - DNA, 15 bp, Homo sapiens
tatcacttatcaaga

SEQ ID NO: 1652775 - DNA, 15 bp, Homo sapiens
ttatcacttatcaag

SEQ ID NO: 1652776 - DNA, 15 bp, Homo sapiens
cttatcacttatcaa

SEQ ID NO: 1652777 - DNA, 15 bp, Homo sapiens
tcttatcacttatca

SEQ ID NO: 1652778 - DNA, 15 bp, Homo sapiens
ttcttatcacttatc

SEQ ID NO: 1652779 - DNA, 15 bp, Homo sapiens
attcttatcacttat

SEQ ID NO: 1652780 - DNA, 15 bp, Homo sapiens
cattcttatcactta

SEQ ID NO: 1652781 - DNA, 15 bp, Homo sapiens
ccattcttatcactt

SEQ ID NO: 1652782 - DNA, 15 bp, Homo sapiens
gccattcttatcact

SEQ ID NO: 1652783 - DNA, 15 bp, Homo sapiens
tgccattcttatcac

SEQ ID NO: 1652784 - DNA, 15 bp, Homo sapiens
gtgccattcttatca

SEQ ID NO: 1652785 - DNA, 15 bp, Homo sapiens
agtgccattcttatc

SEQ ID NO: 1652786 - DNA, 15 bp, Homo sapiens
gagtgccattcttat

SEQ ID NO: 1652787 - DNA, 15 bp, Homo sapiens
agagtgccattctta

SEQ ID NO: 1652788 - DNA, 15 bp, Homo sapiens
tagagtgccattctt

SEQ ID NO: 1652789 - DNA, 15 bp, Homo sapiens
gtagagtgccattct

SEQ ID NO: 1652790 - DNA, 15 bp, Homo sapiens
ggtagagtgccattc

SEQ ID NO: 1652791 - DNA, 15 bp, Homo sapiens
aggtagagtgccatt

SEQ ID NO: 1652792 - DNA, 15 bp, Homo sapiens
aaggtagagtgccat

SEQ ID NO: 1652793 - DNA, 15 bp, Homo sapiens
aaaggtagagtgcca

SEQ ID NO: 1652794 - DNA, 15 bp, Homo sapiens
caaaggtagagtgcc

SEQ ID NO: 1652795 - DNA, 15 bp, Homo sapiens
acaaaggtagagtgc

SEQ ID NO: 1652796 - DNA, 15 bp, Homo sapiens
cacaaaggtagagtg

SEQ ID NO: 1652797 - DNA, 15 bp, Homo sapiens
ccacaaaggtagagt

SEQ ID NO: 1652798 - DNA, 15 bp, Homo sapiens
accacaaaggtagag

SEQ ID NO: 1652799 - DNA, 15 bp, Homo sapiens
gaccacaaaggtaga

SEQ ID NO: 1652800 - DNA, 15 bp, Homo sapiens
agaccacaaaggtag

SEQ ID NO: 1652801 - DNA, 15 bp, Homo sapiens
aagaccacaaaggta

SEQ ID NO: 1652802 - DNA, 15 bp, Homo sapiens
gaagaccacaaaggt

SEQ ID NO: 1652803 - DNA, 15 bp, Homo sapiens
ggaagaccacaaagg

SEQ ID NO: 1652804 - DNA, 15 bp, Homo sapiens
aggaagaccacaaag

SEQ ID NO: 1652805 - DNA, 15 bp, Homo sapiens
gaggaagaccacaaa

SEQ ID NO: 1652806 - DNA, 15 bp, Homo sapiens
ggaggaagaccacaa

SEQ ID NO: 1652807 - DNA, 15 bp, Homo sapiens
aggaggaagaccaca

SEQ ID NO: 1652808 - DNA, 15 bp, Homo sapiens
taggaggaagaccac

SEQ ID NO: 1652809 - DNA, 15 bp, Homo sapiens
ttaggaggaagacca

SEQ ID NO: 1652810 - DNA, 15 bp, Homo sapiens
tttaggaggaagacc

SEQ ID NO: 1652811 - DNA, 15 bp, Homo sapiens
gtttaggaggaagac

SEQ ID NO: 1652812 - DNA, 15 bp, Homo sapiens
tgtttaggaggaaga

SEQ ID NO: 1652813 - DNA, 15 bp, Homo sapiens
gtgtttaggaggaag

SEQ ID NO: 1652814 - DNA, 15 bp, Homo sapiens
agtgtttaggaggaa

SEQ ID NO: 1652815 - DNA, 15 bp, Homo sapiens
gagtgtttaggagga

SEQ ID NO: 1652816 - DNA, 15 bp, Homo sapiens
tgagtgtttaggagg

SEQ ID NO: 1652817 - DNA, 15 bp, Homo sapiens
atgagtgtttaggag

SEQ ID NO: 1652818 - DNA, 15 bp, Homo sapiens
tatgagtgtttagga

SEQ ID NO: 1652819 - DNA, 15 bp, Homo sapiens
ttatgagtgtttagg

SEQ ID NO: 1652820 - DNA, 15 bp, Homo sapiens
tttatgagtgtttag

SEQ ID NO: 1652821 - DNA, 15 bp, Homo sapiens
gtttatgagtgttta

SEQ ID NO: 1652822 - DNA, 15 bp, Homo sapiens
ggtttatgagtgttt

SEQ ID NO: 1652823 - DNA, 15 bp, Homo sapiens
gggtttatgagtgtt

SEQ ID NO: 1652824 - DNA, 15 bp, Homo sapiens
tgggtttatgagtgt

SEQ ID NO: 1652825 - DNA, 15 bp, Homo sapiens
ttgggtttatgagtg

SEQ ID NO: 1652826 - DNA, 15 bp, Homo sapiens
attgggtttatgagt

SEQ ID NO: 1652827 - DNA, 15 bp, Homo sapiens
gattgggtttatgag

SEQ ID NO: 1652828 - DNA, 15 bp, Homo sapiens
agattgggtttatga

SEQ ID NO: 1652829 - DNA, 15 bp, Homo sapiens
tagattgggtttatg

SEQ ID NO: 1652830 - DNA, 15 bp, Homo sapiens
ctagattgggtttat

SEQ ID NO: 1652831 - DNA, 15 bp, Homo sapiens
actagattgggttta

SEQ ID NO: 1652832 - DNA, 15 bp, Homo sapiens
gactagattgggttt

SEQ ID NO: 1652833 - DNA, 15 bp, Homo sapiens
tgactagattgggtt

SEQ ID NO: 1652834 - DNA, 15 bp, Homo sapiens
atgactagattgggt

SEQ ID NO: 1652835 - DNA, 15 bp, Homo sapiens
catgactagattggg

SEQ ID NO: 1652836 - DNA, 15 bp, Homo sapiens
tcatgactagattgg

SEQ ID NO: 1652837 - DNA, 15 bp, Homo sapiens
ctcatgactagattg

SEQ ID NO: 1652838 - DNA, 15 bp, Homo sapiens
tctcatgactagatt

SEQ ID NO: 1652839 - DNA, 15 bp, Homo sapiens
ttctcatgactagat

SEQ ID NO: 1652840 - DNA, 15 bp, Homo sapiens
cttctcatgactaga

SEQ ID NO: 1652841 - DNA, 15 bp, Homo sapiens
tcttctcatgactag

SEQ ID NO: 1652842 - DNA, 15 bp, Homo sapiens
ttcttctcatgacta

SEQ ID NO: 1652843 - DNA, 15 bp, Homo sapiens
gttcttctcatgact

SEQ ID NO: 1652844 - DNA, 15 bp, Homo sapiens
tgttcttctcatgac

SEQ ID NO: 1652845 - DNA, 15 bp, Homo sapiens
atgttcttctcatga

SEQ ID NO: 1652846 - DNA, 15 bp, Homo sapiens
gatgttcttctcatg

SEQ ID NO: 1652847 - DNA, 15 bp, Homo sapiens
tgatgttcttctcat

SEQ ID NO: 1652848 - DNA, 15 bp, Homo sapiens
ctgatgttcttctca

SEQ ID NO: 1652849 - DNA, 15 bp, Homo sapiens
tctgatgttcttctc

SEQ ID NO: 1652850 - DNA, 15 bp, Homo sapiens
gtctgatgttcttct

SEQ ID NO: 1652851 - DNA, 15 bp, Homo sapiens
tgtctgatgttcttc

SEQ ID NO: 1652852 - DNA, 15 bp, Homo sapiens
ttgtctgatgttctt

SEQ ID NO: 1652853 - DNA, 15 bp, Homo sapiens
tttgtctgatgttct

SEQ ID NO: 1652854 - DNA, 15 bp, Homo sapiens
atttgtctgatgttc

SEQ ID NO: 1652855 - DNA, 15 bp, Homo sapiens
aatttgtctgatgtt

SEQ ID NO: 1652856 - DNA, 15 bp, Homo sapiens
gaatttgtctgatgt

SEQ ID NO: 1652857 - DNA, 15 bp, Homo sapiens
ggaatttgtctgatg

SEQ ID NO: 1652858 - DNA, 15 bp, Homo sapiens
tggaatttgtctgat

SEQ ID NO: 1652859 - DNA, 15 bp, Homo sapiens
ttggaatttgtctga

SEQ ID NO: 1652860 - DNA, 15 bp, Homo sapiens
attggaatttgtctg

SEQ ID NO: 1652861 - DNA, 15 bp, Homo sapiens
tattggaatttgtct

SEQ ID NO: 1652862 - DNA, 15 bp, Homo sapiens
ctattggaatttgtc

SEQ ID NO: 1652863 - DNA, 15 bp, Homo sapiens
tctattggaatttgt

SEQ ID NO: 1652864 - DNA, 15 bp, Homo sapiens
ctctattggaatttg

SEQ ID NO: 1652865 - DNA, 15 bp, Homo sapiens
tctctattggaattt

SEQ ID NO: 1652866 - DNA, 15 bp, Homo sapiens
ctctctattggaatt

SEQ ID NO: 1652867 - DNA, 15 bp, Homo sapiens
tctctctattggaat

SEQ ID NO: 1652868 - DNA, 15 bp, Homo sapiens
gtctctctattggaa

SEQ ID NO: 1652869 - DNA, 15 bp, Homo sapiens
tgtctctctattgga

SEQ ID NO: 1652870 - DNA, 15 bp, Homo sapiens
atgtctctctattgg

SEQ ID NO: 1652871 - DNA, 15 bp, Homo sapiens
aatgtctctctattg

SEQ ID NO: 1652872 - DNA, 15 bp, Homo sapiens
gaatgtctctctatt

SEQ ID NO: 1652873 - DNA, 15 bp, Homo sapiens
agaatgtctctctat

SEQ ID NO: 1652874 - DNA, 15 bp, Homo sapiens
tagaatgtctctcta

SEQ ID NO: 1652875 - DNA, 15 bp, Homo sapiens
atagaatgtctctct

SEQ ID NO: 1652876 - DNA, 15 bp, Homo sapiens
tatagaatgtctctc

SEQ ID NO: 1652877 - DNA, 15 bp, Homo sapiens
ctatagaatgtctct

SEQ ID NO: 1652878 - DNA, 15 bp, Homo sapiens
tctatagaatgtctc

SEQ ID NO: 1652879 - DNA, 15 bp, Homo sapiens
ttctatagaatgtct

SEQ ID NO: 1652880 - DNA, 15 bp, Homo sapiens
attctatagaatgtc

SEQ ID NO: 1652881 - DNA, 15 bp, Homo sapiens
tattctatagaatgt

SEQ ID NO: 1652882 - DNA, 15 bp, Homo sapiens
gtattctatagaatg

SEQ ID NO: 1652883 - DNA, 15 bp, Homo sapiens
agtattctatagaat

SEQ ID NO: 1652884 - DNA, 15 bp, Homo sapiens
cagtattctatagaa

SEQ ID NO: 1652885 - DNA, 15 bp, Homo sapiens
ccagtattctataga

SEQ ID NO: 1652886 - DNA, 15 bp, Homo sapiens
tccagtattctatag

SEQ ID NO: 1652887 - DNA, 15 bp, Homo sapiens
gtccagtattctata

SEQ ID NO: 1652888 - DNA, 15 bp, Homo sapiens
ggtccagtattctat

SEQ ID NO: 1652889 - DNA, 15 bp, Homo sapiens
tggtccagtattcta

SEQ ID NO: 1652890 - DNA, 15 bp, Homo sapiens
atggtccagtattct

SEQ ID NO: 1652891 - DNA, 15 bp, Homo sapiens
aatggtccagtattc

SEQ ID NO: 1652892 - DNA, 15 bp, Homo sapiens
taatggtccagtatt

SEQ ID NO: 1652893 - DNA, 15 bp, Homo sapiens
ctaatggtccagtat

SEQ ID NO: 1652894 - DNA, 15 bp, Homo sapiens
actaatggtccagta

SEQ ID NO: 1652895 - DNA, 15 bp, Homo sapiens
gactaatggtccagt

SEQ ID NO: 1652896 - DNA, 15 bp, Homo sapiens
ggactaatggtccag

SEQ ID NO: 1652897 - DNA, 15 bp, Homo sapiens
aggactaatggtcca

SEQ ID NO: 1652898 - DNA, 15 bp, Homo sapiens
gaggactaatggtcc

SEQ ID NO: 1652899 - DNA, 15 bp, Homo sapiens
tgaggactaatggtc

SEQ ID NO: 1652900 - DNA, 15 bp, Homo sapiens
ttgaggactaatggt

SEQ ID NO: 1652901 - DNA, 15 bp, Homo sapiens
tttgaggactaatgg

SEQ ID NO: 1652902 - DNA, 15 bp, Homo sapiens
ttttgaggactaatg

SEQ ID NO: 1652903 - DNA, 15 bp, Homo sapiens
gttttgaggactaat

SEQ ID NO: 1652904 - DNA, 15 bp, Homo sapiens
agttttgaggactaa

SEQ ID NO: 1652905 - DNA, 15 bp, Homo sapiens
cagttttgaggacta

SEQ ID NO: 1652906 - DNA, 15 bp, Homo sapiens
acagttttgaggact

SEQ ID NO: 1652907 - DNA, 15 bp, Homo sapiens
cacagttttgaggac

SEQ ID NO: 1652908 - DNA, 15 bp, Homo sapiens
tcacagttttgagga

SEQ ID NO: 1652909 - DNA, 15 bp, Homo sapiens
ttcacagttttgagg

SEQ ID NO: 1652910 - DNA, 15 bp, Homo sapiens
cttcacagttttgag

SEQ ID NO: 1652911 - DNA, 15 bp, Homo sapiens
acttcacagttttga

SEQ ID NO: 1652912 - DNA, 15 bp, Homo sapiens
aacttcacagttttg

SEQ ID NO: 1652913 - DNA, 15 bp, Homo sapiens
gaacttcacagtttt

SEQ ID NO: 1652914 - DNA, 15 bp, Homo sapiens
tgaacttcacagttt

SEQ ID NO: 1652915 - DNA, 15 bp, Homo sapiens
atgaacttcacagtt

SEQ ID NO: 1652916 - DNA, 15 bp, Homo sapiens
gatgaacttcacagt

SEQ ID NO: 1652917 - DNA, 15 bp, Homo sapiens
tgatgaacttcacag

SEQ ID NO: 1652918 - DNA, 15 bp, Homo sapiens
ttgatgaacttcaca

SEQ ID NO: 1652919 - DNA, 15 bp, Homo sapiens
tttgatgaacttcac

SEQ ID NO: 1652920 - DNA, 15 bp, Homo sapiens
ttttgatgaacttca

SEQ ID NO: 1652921 - DNA, 15 bp, Homo sapiens
tttttgatgaacttc

SEQ ID NO: 1652922 - DNA, 15 bp, Homo sapiens
gtttttgatgaactt

SEQ ID NO: 1652923 - DNA, 15 bp, Homo sapiens
tgtttttgatgaact

SEQ ID NO: 1652924 - DNA, 15 bp, Homo sapiens
ttgtttttgatgaac

SEQ ID NO: 1652925 - DNA, 15 bp, Homo sapiens
tttgtttttgatgaa

SEQ ID NO: 1652926 - DNA, 15 bp, Homo sapiens
ctttgtttttgatga

SEQ ID NO: 1652927 - DNA, 15 bp, Homo sapiens
tctttgtttttgatg

SEQ ID NO: 1652928 - DNA, 15 bp, Homo sapiens
ctctttgtttttgat

SEQ ID NO: 1652929 - DNA, 15 bp, Homo sapiens
actctttgtttttga

SEQ ID NO: 1652930 - DNA, 15 bp, Homo sapiens
gactctttgtttttg

SEQ ID NO: 1652931 - DNA, 15 bp, Homo sapiens
agactctttgttttt

SEQ ID NO: 1652932 - DNA, 15 bp, Homo sapiens
cagactctttgtttt

SEQ ID NO: 1652933 - DNA, 15 bp, Homo sapiens
tcagactctttgttt

SEQ ID NO: 1652934 - DNA, 15 bp, Homo sapiens
ctcagactctttgtt

SEQ ID NO: 1652935 - DNA, 15 bp, Homo sapiens
tctcagactctttgt

SEQ ID NO: 1652936 - DNA, 15 bp, Homo sapiens
ttctcagactctttg

SEQ ID NO: 1652937 - DNA, 15 bp, Homo sapiens
gtttctcagactctt

SEQ ID NO: 1652938 - DNA, 15 bp, Homo sapiens
agtttctcagactct

SEQ ID NO: 1652939 - DNA, 15 bp, Homo sapiens
cagtttctcagactc

SEQ ID NO: 1652940 - DNA, 15 bp, Homo sapiens
acagtttctcagact

SEQ ID NO: 1652941 - DNA, 15 bp, Homo sapiens
gacagtttctcagac

SEQ ID NO: 1652942 - DNA, 15 bp, Homo sapiens
tgacagtttctcaga

SEQ ID NO: 1652943 - DNA, 15 bp, Homo sapiens
atgacagtttctcag

SEQ ID NO: 1652944 - DNA, 15 bp, Homo sapiens
aatgacagtttctca

SEQ ID NO: 1652945 - DNA, 15 bp, Homo sapiens
taatgacagtttctc

SEQ ID NO: 1652946 - DNA, 15 bp, Homo sapiens
gtaatgacagtttct

SEQ ID NO: 1652947 - DNA, 15 bp, Homo sapiens
ggtaatgacagtttc

SEQ ID NO: 1652948 - DNA, 15 bp, Homo sapiens
tggtaatgacagttt

SEQ ID NO: 1652949 - DNA, 15 bp, Homo sapiens
ttggtaatgacagtt

SEQ ID NO: 1652950 - DNA, 15 bp, Homo sapiens
cttggtaatgacagt

SEQ ID NO: 1652951 - DNA, 15 bp, Homo sapiens
tcttggtaatgacag

SEQ ID NO: 1652952 - DNA, 15 bp, Homo sapiens
ctcttggtaatgaca

SEQ ID NO: 1652953 - DNA, 15 bp, Homo sapiens
cctcttggtaatgac

SEQ ID NO: 1652954 - DNA, 15 bp, Homo sapiens
tcctcttggtaatga

SEQ ID NO: 1652955 - DNA, 15 bp, Homo sapiens
ctcctcttggtaatg

SEQ ID NO: 1652956 - DNA, 15 bp, Homo sapiens
gctcctcttggtaat

SEQ ID NO: 1652957 - DNA, 15 bp, Homo sapiens
ggctcctcttggtaa

SEQ ID NO: 1652958 - DNA, 15 bp, Homo sapiens
aggctcctcttggta

SEQ ID NO: 1652959 - DNA, 15 bp, Homo sapiens
taggctcctcttggt

SEQ ID NO: 1652960 - DNA, 15 bp, Homo sapiens
ttaggctcctcttgg

SEQ ID NO: 1652961 - DNA, 15 bp, Homo sapiens
cttaggctcctcttg

SEQ ID NO: 1652962 - DNA, 15 bp, Homo sapiens
ccttaggctcctctt

SEQ ID NO: 1652963 - DNA, 15 bp, Homo sapiens
tccttaggctcctct

SEQ ID NO: 1652964 - DNA, 15 bp, Homo sapiens
ctccttaggctcctc

SEQ ID NO: 1652965 - DNA, 15 bp, Homo sapiens
tctccttaggctcct

SEQ ID NO: 1652966 - DNA, 15 bp, Homo sapiens
gtctccttaggctcc

SEQ ID NO: 1652967 - DNA, 15 bp, Homo sapiens
tgtctccttaggctc

SEQ ID NO: 1652968 - DNA, 15 bp, Homo sapiens
atgtctccttaggct

SEQ ID NO: 1652969 - DNA, 15 bp, Homo sapiens
catgtctccttaggc

SEQ ID NO: 1652970 - DNA, 15 bp, Homo sapiens
tcatgtctccttagg

SEQ ID NO: 1652971 - DNA, 15 bp, Homo sapiens
gtcatgtctccttag

SEQ ID NO: 1652972 - DNA, 15 bp, Homo sapiens
agtcatgtctcctta

SEQ ID NO: 1652973 - DNA, 15 bp, Homo sapiens
tagtcatgtctcctt

SEQ ID NO: 1652974 - DNA, 15 bp, Homo sapiens
gtagtcatgtctcct

SEQ ID NO: 1652975 - DNA, 15 bp, Homo sapiens
agtagtcatgtctcc

SEQ ID NO: 1652976 - DNA, 15 bp, Homo sapiens
tagtagtcatgtctc

SEQ ID NO: 1652977 - DNA, 15 bp, Homo sapiens
ttagtagtcatgtct

SEQ ID NO: 1652978 - DNA, 15 bp, Homo sapiens
cttagtagtcatgtc

SEQ ID NO: 1652979 - DNA, 15 bp, Homo sapiens
ccttagtagtcatgt

SEQ ID NO: 1652980 - DNA, 15 bp, Homo sapiens
tccttagtagtcatg

SEQ ID NO: 1652981 - DNA, 15 bp, Homo sapiens
gtccttagtagtcat

SEQ ID NO: 1652982 - DNA, 15 bp, Homo sapiens
tgtccttagtagtca

SEQ ID NO: 1652983 - DNA, 15 bp, Homo sapiens
gtgtccttagtagtc

SEQ ID NO: 1652984 - DNA, 15 bp, Homo sapiens
tgtgtccttagtagt

SEQ ID NO: 1652985 - DNA, 15 bp, Homo sapiens
atgtgtccttagtag

SEQ ID NO: 1652986 - DNA, 15 bp, Homo sapiens
catgtgtccttagta

SEQ ID NO: 1652987 - DNA, 15 bp, Homo sapiens
gcatgtgtccttagt

SEQ ID NO: 1652988 - DNA, 15 bp, Homo sapiens
tgcatgtgtccttag

SEQ ID NO: 1652989 - DNA, 15 bp, Homo sapiens
ctgcatgtgtcctta

SEQ ID NO: 1652990 - DNA, 15 bp, Homo sapiens
gctgcatgtgtcctt

SEQ ID NO: 1652991 - DNA, 15 bp, Homo sapiens
cgctgcatgtgtcct

SEQ ID NO: 1652992 - DNA, 15 bp, Homo sapiens
acgctgcatgtgtcc

SEQ ID NO: 1652993 - DNA, 15 bp, Homo sapiens
cacgctgcatgtgtc

SEQ ID NO: 1652994 - DNA, 15 bp, Homo sapiens
ccacgctgcatgtgt

SEQ ID NO: 1652995 - DNA, 15 bp, Homo sapiens
accacgctgcatgtg

SEQ ID NO: 1652996 - DNA, 15 bp, Homo sapiens
taccacgctgcatgt

SEQ ID NO: 1652997 - DNA, 15 bp, Homo sapiens
ataccacgctgcatg

SEQ ID NO: 1652998 - DNA, 15 bp, Homo sapiens
gataccacgctgcat

SEQ ID NO: 1652999 - DNA, 15 bp, Homo sapiens
agataccacgctgca

SEQ ID NO: 1653000 - DNA, 15 bp, Homo sapiens
aagataccacgctgc

SEQ ID NO: 1653001 - DNA, 15 bp, Homo sapiens
gaagataccacgctg

SEQ ID NO: 1653002 - DNA, 15 bp, Homo sapiens
tgaagataccacgct

SEQ ID NO: 1653003 - DNA, 15 bp, Homo sapiens
ttgaagataccacgc

SEQ ID NO: 1653004 - DNA, 15 bp, Homo sapiens
attgaagataccacg

SEQ ID NO: 1653005 - DNA, 15 bp, Homo sapiens
cattgaagataccac

SEQ ID NO: 1653006 - DNA, 15 bp, Homo sapiens
ccattgaagatacca

SEQ ID NO: 1653007 - DNA, 15 bp, Homo sapiens
cccattgaagatacc

SEQ ID NO: 1653008 - DNA, 15 bp, Homo sapiens
tcccattgaagatac

SEQ ID NO: 1653009 - DNA, 15 bp, Homo sapiens
atcccattgaagata

SEQ ID NO: 1653010 - DNA, 15 bp, Homo sapiens
gatcccattgaagat

SEQ ID NO: 1653011 - DNA, 15 bp, Homo sapiens
ggatcccattgaaga

SEQ ID NO: 1653012 - DNA, 15 bp, Homo sapiens
aggatcccattgaag

SEQ ID NO: 1653013 - DNA, 15 bp, Homo sapiens
caggatcccattgaa

SEQ ID NO: 1653014 - DNA, 15 bp, Homo sapiens
ccaggatcccattga

SEQ ID NO: 1653015 - DNA, 15 bp, Homo sapiens
tccaggatcccattg

SEQ ID NO: 1653016 - DNA, 15 bp, Homo sapiens
ttccaggatcccatt

SEQ ID NO: 1653017 - DNA, 15 bp, Homo sapiens
gttccaggatcccat

SEQ ID NO: 1653018 - DNA, 15 bp, Homo sapiens
tgttccaggatccca

SEQ ID NO: 1653019 - DNA, 15 bp, Homo sapiens
gtgttccaggatccc

SEQ ID NO: 1653020 - DNA, 15 bp, Homo sapiens
tgtgttccaggatcc

SEQ ID NO: 1653021 - DNA, 15 bp, Homo sapiens
ttgtgttccaggatc

SEQ ID NO: 1653022 - DNA, 15 bp, Homo sapiens
tttgtgttccaggat

SEQ ID NO: 1653023 - DNA, 15 bp, Homo sapiens
ttttgtgttccagga

SEQ ID NO: 1653024 - DNA, 15 bp, Homo sapiens
tttttgtgttccagg

SEQ ID NO: 1653025 - DNA, 15 bp, Homo sapiens
aatgattattgtcat

SEQ ID NO: 1653026 - DNA, 15 bp, Homo sapiens
aaatgattattgtca

SEQ ID NO: 1653027 - DNA, 15 bp, Homo sapiens
taaatgattattgtc

SEQ ID NO: 1653028 - DNA, 15 bp, Homo sapiens
ttaaatgattattgt

SEQ ID NO: 1653029 - DNA, 15 bp, Homo sapiens
tttaaatgattattg

SEQ ID NO: 1653030 - DNA, 15 bp, Homo sapiens
ctttaaatgattatt

SEQ ID NO: 1653031 - DNA, 15 bp, Homo sapiens
tctttaaatgattat

SEQ ID NO: 1653032 - DNA, 15 bp, Homo sapiens
ttctttaaatgatta

SEQ ID NO: 1653033 - DNA, 15 bp, Homo sapiens
tttctttaaatgatt

SEQ ID NO: 1653034 - DNA, 15 bp, Homo sapiens
atttctttaaatgat

SEQ ID NO: 1653035 - DNA, 15 bp, Homo sapiens
catttctttaaatga

SEQ ID NO: 1653036 - DNA, 15 bp, Homo sapiens
gcatttctttaaatg

SEQ ID NO: 1653037 - DNA, 15 bp, Homo sapiens
ggcatttctttaaat

SEQ ID NO: 1653038 - DNA, 15 bp, Homo sapiens
tggcatttctttaaa

SEQ ID NO: 1653039 - DNA, 15 bp, Homo sapiens
ttggcatttctttaa

SEQ ID NO: 1653040 - DNA, 15 bp, Homo sapiens
tttggcatttcttta

SEQ ID NO: 1653041 - DNA, 15 bp, Homo sapiens
ttttggcatttcttt

SEQ ID NO: 1653042 - DNA, 15 bp, Homo sapiens
tttttggcatttctt

SEQ ID NO: 1653043 - DNA, 15 bp, Homo sapiens
ttttttggcatttct

SEQ ID NO: 1653044 - DNA, 15 bp, Homo sapiens
cttttttggcatttc

SEQ ID NO: 1653045 - DNA, 15 bp, Homo sapiens
acttttttggcattt

SEQ ID NO: 1653046 - DNA, 15 bp, Homo sapiens
aacttttttggcatt

SEQ ID NO: 1653047 - DNA, 15 bp, Homo sapiens
aaacttttttggcat

SEQ ID NO: 1653048 - DNA, 15 bp, Homo sapiens
gaaacttttttggca

SEQ ID NO: 1653049 - DNA, 15 bp, Homo sapiens
ggaaacttttttggc

SEQ ID NO: 1653050 - DNA, 15 bp, Homo sapiens
aggaaacttttttgg

SEQ ID NO: 1653051 - DNA, 15 bp, Homo sapiens
aaggaaacttttttg

SEQ ID NO: 1653052 - DNA, 15 bp, Homo sapiens
gaaggaaactttttt

SEQ ID NO: 1653053 - DNA, 15 bp, Homo sapiens
tgaaggaaacttttt

SEQ ID NO: 1653054 - DNA, 15 bp, Homo sapiens
atgaaggaaactttt

SEQ ID NO: 1653055 - DNA, 15 bp, Homo sapiens
aatgaaggaaacttt

SEQ ID NO: 1653056 - DNA, 15 bp, Homo sapiens
taatgaaggaaactt

SEQ ID NO: 1653057 - DNA, 15 bp, Homo sapiens
ctaatgaaggaaact

SEQ ID NO: 1653058 - DNA, 15 bp, Homo sapiens
tctaatgaaggaaac

SEQ ID NO: 1653059 - DNA, 15 bp, Homo sapiens
gtctaatgaaggaaa

SEQ ID NO: 1653060 - DNA, 15 bp, Homo sapiens
agtctaatgaaggaa

SEQ ID NO: 1653061 - DNA, 15 bp, Homo sapiens
aagtctaatgaagga

SEQ ID NO: 1653062 - DNA, 15 bp, Homo sapiens
aaagtctaatgaagg

SEQ ID NO: 1653063 - DNA, 15 bp, Homo sapiens
aaaagtctaatgaag

SEQ ID NO: 1653064 - DNA, 15 bp, Homo sapiens
caaaagtctaatgaa

SEQ ID NO: 1653065 - DNA, 15 bp, Homo sapiens
tcaaaagtctaatga

SEQ ID NO: 1653066 - DNA, 15 bp, Homo sapiens
ttcaaaagtctaatg

SEQ ID NO: 1653067 - DNA, 15 bp, Homo sapiens
tttcaaaagtctaat

SEQ ID NO: 1653068 - DNA, 15 bp, Homo sapiens
ttttcaaaagtctaa

SEQ ID NO: 1653069 - DNA, 15 bp, Homo sapiens
attttcaaaagtcta

SEQ ID NO: 1653070 - DNA, 15 bp, Homo sapiens
aattttcaaaagtct

SEQ ID NO: 1653071 - DNA, 15 bp, Homo sapiens
aaattttcaaaagtc

SEQ ID NO: 1653072 - DNA, 15 bp, Homo sapiens
aaaattttcaaaagt

SEQ ID NO: 1653073 - DNA, 15 bp, Homo sapiens
gaaaattttcaaaag

SEQ ID NO: 1653074 - DNA, 15 bp, Homo sapiens
ggaaaattttcaaaa

SEQ ID NO: 1653075 - DNA, 15 bp, Homo sapiens
tggaaaattttcaaa

SEQ ID NO: 1653076 - DNA, 15 bp, Homo sapiens
ttggaaaattttcaa

SEQ ID NO: 1653077 - DNA, 15 bp, Homo sapiens
tttggaaaattttca

SEQ ID NO: 1653078 - DNA, 15 bp, Homo sapiens
atttggaaaattttc

SEQ ID NO: 1653079 - DNA, 15 bp, Homo sapiens
gatttggaaaatttt

SEQ ID NO: 1653080 - DNA, 15 bp, Homo sapiens
tgatttggaaaattt

SEQ ID NO: 1653081 - DNA, 15 bp, Homo sapiens
gtgatttggaaaatt

SEQ ID NO: 1653082 - DNA, 15 bp, Homo sapiens
tgtgatttggaaaat

SEQ ID NO: 1653083 - DNA, 15 bp, Homo sapiens
ttgtgatttggaaaa

SEQ ID NO: 1653084 - DNA, 15 bp, Homo sapiens
tttgtgatttggaaa

SEQ ID NO: 1653085 - DNA, 15 bp, Homo sapiens
ttttgtgatttggaa

SEQ ID NO: 1653086 - DNA, 15 bp, Homo sapiens
attttgtgatttgga

SEQ ID NO: 1653087 - DNA, 15 bp, Homo sapiens
cattttgtgatttgg

SEQ ID NO: 1653088 - DNA, 15 bp, Homo sapiens
acattttgtgatttg

SEQ ID NO: 1653089 - DNA, 15 bp, Homo sapiens
gacattttgtgattt

SEQ ID NO: 1653090 - DNA, 15 bp, Homo sapiens
tgacattttgtgatt

SEQ ID NO: 1653091 - DNA, 15 bp, Homo sapiens
atgacattttgtgat

SEQ ID NO: 1653092 - DNA, 15 bp, Homo sapiens
aatgacattttgtga

SEQ ID NO: 1653093 - DNA, 15 bp, Homo sapiens
aaatgacattttgtg

SEQ ID NO: 1653094 - DNA, 15 bp, Homo sapiens
aaaatgacattttgt

SEQ ID NO: 1653095 - DNA, 15 bp, Homo sapiens
gaaaatgacattttg

SEQ ID NO: 1653096 - DNA, 15 bp, Homo sapiens
tgaaaatgacatttt

SEQ ID NO: 1653097 - DNA, 15 bp, Homo sapiens
ctgaaaatgacattt

SEQ ID NO: 1653098 - DNA, 15 bp, Homo sapiens
cctgaaaatgacatt

SEQ ID NO: 1653099 - DNA, 15 bp, Homo sapiens
ccctgaaaatgacat

SEQ ID NO: 1653100 - DNA, 15 bp, Homo sapiens
tccctgaaaatgaca

SEQ ID NO: 1653101 - DNA, 15 bp, Homo sapiens
atccctgaaaatgac

SEQ ID NO: 1653102 - DNA, 15 bp, Homo sapiens
aatccctgaaaatga

SEQ ID NO: 1653103 - DNA, 15 bp, Homo sapiens
aaatccctgaaaatg

SEQ ID NO: 1653104 - DNA, 15 bp, Homo sapiens
taaatccctgaaaat

SEQ ID NO: 1653105 - DNA, 15 bp, Homo sapiens
ctaaatccctgaaaa

SEQ ID NO: 1653106 - DNA, 15 bp, Homo sapiens
cctaaatccctgaaa

SEQ ID NO: 1653107 - DNA, 15 bp, Homo sapiens
acctaaatccctgaa

SEQ ID NO: 1653108 - DNA, 15 bp, Homo sapiens
tacctaaatccctga

SEQ ID NO: 1653109 - DNA, 15 bp, Homo sapiens
atacctaaatccctg

SEQ ID NO: 1653110 - DNA, 15 bp, Homo sapiens
aatacctaaatccct

SEQ ID NO: 1653111 - DNA, 15 bp, Homo sapiens
aaatacctaaatccc

SEQ ID NO: 1653112 - DNA, 15 bp, Homo sapiens
caaatacctaaatcc

SEQ ID NO: 1653113 - DNA, 15 bp, Homo sapiens
tcaaatacctaaatc

SEQ ID NO: 1653114 - DNA, 15 bp, Homo sapiens
atcaaatacctaaat

SEQ ID NO: 1653115 - DNA, 15 bp, Homo sapiens
tatcaaatacctaaa

SEQ ID NO: 1653116 - DNA, 15 bp, Homo sapiens
atatcaaatacctaa

SEQ ID NO: 1653117 - DNA, 15 bp, Homo sapiens
tatatcaaataccta

SEQ ID NO: 1653118 - DNA, 15 bp, Homo sapiens
ttatatcaaatacct

SEQ ID NO: 1653119 - DNA, 15 bp, Homo sapiens
cttatatcaaatacc

SEQ ID NO: 1653120 - DNA, 15 bp, Homo sapiens
gcttatatcaaatac

SEQ ID NO: 1653121 - DNA, 15 bp, Homo sapiens
ggcttatatcaaata

SEQ ID NO: 1653122 - DNA, 15 bp, Homo sapiens
gggcttatatcaaat

SEQ ID NO: 1653123 - DNA, 15 bp, Homo sapiens
ggggcttatatcaaa

SEQ ID NO: 1653124 - DNA, 15 bp, Homo sapiens
aggggcttatatcaa

SEQ ID NO: 1653125 - DNA, 15 bp, Homo sapiens
taggggcttatatca

SEQ ID NO: 1653126 - DNA, 15 bp, Homo sapiens
ataggggcttatatc

SEQ ID NO: 1653127 - DNA, 15 bp, Homo sapiens
gataggggcttatat

SEQ ID NO: 1653128 - DNA, 15 bp, Homo sapiens
agataggggcttata

SEQ ID NO: 1653129 - DNA, 15 bp, Homo sapiens
aagataggggcttat

SEQ ID NO: 1653130 - DNA, 15 bp, Homo sapiens
taagataggggctta

SEQ ID NO: 1653131 - DNA, 15 bp, Homo sapiens
ataagataggggctt

SEQ ID NO: 1653132 - DNA, 15 bp, Homo sapiens
aataagataggggct

SEQ ID NO: 1653133 - DNA, 15 bp, Homo sapiens
aaataagataggggc

SEQ ID NO: 1653134 - DNA, 15 bp, Homo sapiens
gaaataagatagggg

SEQ ID NO: 1653135 - DNA, 15 bp, Homo sapiens
tgaaataagataggg

SEQ ID NO: 1653136 - DNA, 15 bp, Homo sapiens
gtgaaataagatagg

SEQ ID NO: 1653137 - DNA, 15 bp, Homo sapiens
agtgaaataagatag

SEQ ID NO: 1653138 - DNA, 15 bp, Homo sapiens
tagtgaaataagata

SEQ ID NO: 1653139 - DNA, 15 bp, Homo sapiens
ctagtgaaataagat

SEQ ID NO: 1653140 - DNA, 15 bp, Homo sapiens
gctagtgaaataaga

SEQ ID NO: 1653141 - DNA, 15 bp, Homo sapiens
tgctagtgaaataag

SEQ ID NO: 1653142 - DNA, 15 bp, Homo sapiens
ctgctagtgaaataa

SEQ ID NO: 1653143 - DNA, 15 bp, Homo sapiens
actgctagtgaaata

SEQ ID NO: 1653144 - DNA, 15 bp, Homo sapiens
gactgctagtgaaat

SEQ ID NO: 1653145 - DNA, 15 bp, Homo sapiens
agactgctagtgaaa

SEQ ID NO: 1653146 - DNA, 15 bp, Homo sapiens
gagactgctagtgaa

SEQ ID NO: 1653147 - DNA, 15 bp, Homo sapiens
cgagactgctagtga

SEQ ID NO: 1653148 - DNA, 15 bp, Homo sapiens
tcgagactgctagtg

SEQ ID NO: 1653149 - DNA, 15 bp, Homo sapiens
ctcgagactgctagt

SEQ ID NO: 1653150 - DNA, 15 bp, Homo sapiens
tctcgagactgctag

SEQ ID NO: 1653151 - DNA, 15 bp, Homo sapiens
atctcgagactgcta

SEQ ID NO: 1653152 - DNA, 15 bp, Homo sapiens
catctcgagactgct

SEQ ID NO: 1653153 - DNA, 15 bp, Homo sapiens
ccatctcgagactgc

SEQ ID NO: 1653154 - DNA, 15 bp, Homo sapiens
accatctcgagactg

SEQ ID NO: 1653155 - DNA, 15 bp, Homo sapiens
gaccatctcgagact

SEQ ID NO: 1653156 - DNA, 15 bp, Homo sapiens
tgaccatctcgagac

SEQ ID NO: 1653157 - DNA, 15 bp, Homo sapiens
ctgaccatctcgaga

SEQ ID NO: 1653158 - DNA, 15 bp, Homo sapiens
tctgaccatctcgag

SEQ ID NO: 1653159 - DNA, 15 bp, Homo sapiens
atctgaccatctcga

SEQ ID NO: 1653160 - DNA, 15 bp, Homo sapiens
aatctgaccatctcg

SEQ ID NO: 1653161 - DNA, 15 bp, Homo sapiens
caatctgaccatctc

SEQ ID NO: 1653162 - DNA, 15 bp, Homo sapiens
tcaatctgaccatct

SEQ ID NO: 1653163 - DNA, 15 bp, Homo sapiens
atcaatctgaccatc

SEQ ID NO: 1653164 - DNA, 15 bp, Homo sapiens
catcaatctgaccat

SEQ ID NO: 1653165 - DNA, 15 bp, Homo sapiens
ccatcaatctgacca

SEQ ID NO: 1653166 - DNA, 15 bp, Homo sapiens
accatcaatctgacc

SEQ ID NO: 1653167 - DNA, 15 bp, Homo sapiens
caccatcaatctgac

SEQ ID NO: 1653168 - DNA, 15 bp, Homo sapiens
tcaccatcaatctga

SEQ ID NO: 1653169 - DNA, 15 bp, Homo sapiens
atcaccatcaatctg

SEQ ID NO: 1653170 - DNA, 15 bp, Homo sapiens
gatcaccatcaatct

SEQ ID NO: 1653171 - DNA, 15 bp, Homo sapiens
agatcaccatcaatc

SEQ ID NO: 1653172 - DNA, 15 bp, Homo sapiens
cagatcaccatcaat

SEQ ID NO: 1653173 - DNA, 15 bp, Homo sapiens
tcagatcaccatcaa

SEQ ID NO: 1653174 - DNA, 15 bp, Homo sapiens
ttcagatcaccatca

SEQ ID NO: 1653175 - DNA, 15 bp, Homo sapiens
gttcagatcaccatc

SEQ ID NO: 1653176 - DNA, 15 bp, Homo sapiens
ggttcagatcaccat

SEQ ID NO: 1653177 - DNA, 15 bp, Homo sapiens
tggttcagatcacca

SEQ ID NO: 1653178 - DNA, 15 bp, Homo sapiens
ttggttcagatcacc

SEQ ID NO: 1653179 - DNA, 15 bp, Homo sapiens
tttggttcagatcac

SEQ ID NO: 1653180 - DNA, 15 bp, Homo sapiens
gtttggttcagatca

SEQ ID NO: 1653181 - DNA, 15 bp, Homo sapiens
agtttggttcagatc

SEQ ID NO: 1653182 - DNA, 15 bp, Homo sapiens
gagtttggttcagat

SEQ ID NO: 1653183 - DNA, 15 bp, Homo sapiens
tgagtttggttcaga

SEQ ID NO: 1653184 - DNA, 15 bp, Homo sapiens
ctgagtttggttcag

SEQ ID NO: 1653185 - DNA, 15 bp, Homo sapiens
tctgagtttggttca

SEQ ID NO: 1653186 - DNA, 15 bp, Homo sapiens
ctctgagtttggttc

SEQ ID NO: 1653187 - DNA, 15 bp, Homo sapiens
gctctgagtttggtt

SEQ ID NO: 1653188 - DNA, 15 bp, Homo sapiens
ggctctgagtttggt

SEQ ID NO: 1653189 - DNA, 15 bp, Homo sapiens
tggctctgagtttgg

SEQ ID NO: 1653190 - DNA, 15 bp, Homo sapiens
ctggctctgagtttg

SEQ ID NO: 1653191 - DNA, 15 bp, Homo sapiens
cctggctctgagttt

SEQ ID NO: 1653192 - DNA, 15 bp, Homo sapiens
tcctggctctgagtt

SEQ ID NO: 1653193 - DNA, 15 bp, Homo sapiens
gtcctggctctgagt

SEQ ID NO: 1653194 - DNA, 15 bp, Homo sapiens
agtcctggctctgag

SEQ ID NO: 1653195 - DNA, 15 bp, Homo sapiens
tagtcctggctctga

SEQ ID NO: 1653196 - DNA, 15 bp, Homo sapiens
ttagtcctggctctg

SEQ ID NO: 1653197 - DNA, 15 bp, Homo sapiens
tttagtcctggctct

SEQ ID NO: 1653198 - DNA, 15 bp, Homo sapiens
ctttagtcctggctc

SEQ ID NO: 1653199 - DNA, 15 bp, Homo sapiens
actttagtcctggct

SEQ ID NO: 1653200 - DNA, 15 bp, Homo sapiens
gactttagtcctggc

SEQ ID NO: 1653201 - DNA, 15 bp, Homo sapiens
agactttagtcctgg

SEQ ID NO: 1653202 - DNA, 15 bp, Homo sapiens
tagactttagtcctg

SEQ ID NO: 1653203 - DNA, 15 bp, Homo sapiens
ttagactttagtcct

SEQ ID NO: 1653204 - DNA, 15 bp, Homo sapiens
cttagactttagtcc

SEQ ID NO: 1653205 - DNA, 15 bp, Homo sapiens
gcttagactttagtc

SEQ ID NO: 1653206 - DNA, 15 bp, Homo sapiens
tgcttagactttagt

SEQ ID NO: 1653207 - DNA, 15 bp, Homo sapiens
atgcttagactttag

SEQ ID NO: 1653208 - DNA, 15 bp, Homo sapiens
aatgcttagacttta

SEQ ID NO: 1653209 - DNA, 15 bp, Homo sapiens
aaatgcttagacttt

SEQ ID NO: 1653210 - DNA, 15 bp, Homo sapiens
gaaatgcttagactt

SEQ ID NO: 1653211 - DNA, 15 bp, Homo sapiens
agaaatgcttagact

SEQ ID NO: 1653212 - DNA, 15 bp, Homo sapiens
cagaaatgcttagac

SEQ ID NO: 1653213 - DNA, 15 bp, Homo sapiens
gcagaaatgcttaga

SEQ ID NO: 1653214 - DNA, 15 bp, Homo sapiens
ggcagaaatgcttag

SEQ ID NO: 1653215 - DNA, 15 bp, Homo sapiens
gggcagaaatgctta

SEQ ID NO: 1653216 - DNA, 15 bp, Homo sapiens
tgggcagaaatgctt

SEQ ID NO: 1653217 - DNA, 15 bp, Homo sapiens
ttgggcagaaatgct

SEQ ID NO: 1653218 - DNA, 15 bp, Homo sapiens
tttgggcagaaatgc

SEQ ID NO: 1653219 - DNA, 15 bp, Homo sapiens
ttttgggcagaaatg

SEQ ID NO: 1653220 - DNA, 15 bp, Homo sapiens
gttttgggcagaaat

SEQ ID NO: 1653221 - DNA, 15 bp, Homo sapiens
ggttttgggcagaaa

SEQ ID NO: 1653222 - DNA, 15 bp, Homo sapiens
tggttttgggcagaa

SEQ ID NO: 1653223 - DNA, 15 bp, Homo sapiens
atggttttgggcaga

SEQ ID NO: 1653224 - DNA, 15 bp, Homo sapiens
tatggttttgggcag

SEQ ID NO: 1653225 - DNA, 15 bp, Homo sapiens
ttatggttttgggca

SEQ ID NO: 1653226 - DNA, 15 bp, Homo sapiens
attatggttttgggc

SEQ ID NO: 1653227 - DNA, 15 bp, Homo sapiens
cattatggttttggg

SEQ ID NO: 1653228 - DNA, 15 bp, Homo sapiens
tcattatggttttgg

SEQ ID NO: 1653229 - DNA, 15 bp, Homo sapiens
atcattatggttttg

SEQ ID NO: 1653230 - DNA, 15 bp, Homo sapiens
aatcattatggtttt

SEQ ID NO: 1653231 - DNA, 15 bp, Homo sapiens
aaatcattatggttt

SEQ ID NO: 1653232 - DNA, 15 bp, Homo sapiens
gaaatcattatggtt

SEQ ID NO: 1653233 - DNA, 15 bp, Homo sapiens
ggaaatcattatggt

SEQ ID NO: 1653234 - DNA, 15 bp, Homo sapiens
aggaaatcattatgg

SEQ ID NO: 1653235 - DNA, 15 bp, Homo sapiens
gaaggaaatcattat

SEQ ID NO: 1653236 - DNA, 15 bp, Homo sapiens
agaaggaaatcatta

SEQ ID NO: 1653237 - DNA, 15 bp, Homo sapiens
cagaaggaaatcatt

SEQ ID NO: 1653238 - DNA, 15 bp, Homo sapiens
gcagaaggaaatcat

SEQ ID NO: 1653239 - DNA, 15 bp, Homo sapiens
tgcagaaggaaatca

SEQ ID NO: 1653240 - DNA, 15 bp, Homo sapiens
atgcagaaggaaatc

SEQ ID NO: 1653241 - DNA, 15 bp, Homo sapiens
gatgcagaaggaaat

SEQ ID NO: 1653242 - DNA, 15 bp, Homo sapiens
ggatgcagaaggaaa

SEQ ID NO: 1653243 - DNA, 15 bp, Homo sapiens
aggatgcagaaggaa

SEQ ID NO: 1653244 - DNA, 15 bp, Homo sapiens
gaggatgcagaagga

SEQ ID NO: 1653245 - DNA, 15 bp, Homo sapiens
ggaggatgcagaagg

SEQ ID NO: 1653246 - DNA, 15 bp, Homo sapiens
tggaggatgcagaag

SEQ ID NO: 1653247 - DNA, 15 bp, Homo sapiens
atggaggatgcagaa

SEQ ID NO: 1653248 - DNA, 15 bp, Homo sapiens
tatggaggatgcaga

SEQ ID NO: 1653249 - DNA, 15 bp, Homo sapiens
ttatggaggatgcag

SEQ ID NO: 1653250 - DNA, 15 bp, Homo sapiens
cttatggaggatgca

SEQ ID NO: 1653251 - DNA, 15 bp, Homo sapiens
tcttatggaggatgc

SEQ ID NO: 1653252 - DNA, 15 bp, Homo sapiens
ttcttatggaggatg

SEQ ID NO: 1653253 - DNA, 15 bp, Homo sapiens
tttcttatggaggat

SEQ ID NO: 1653254 - DNA, 15 bp, Homo sapiens
ctttcttatggagga

SEQ ID NO: 1653255 - DNA, 15 bp, Homo sapiens
gctttcttatggagg

SEQ ID NO: 1653256 - DNA, 15 bp, Homo sapiens
tgctttcttatggag

SEQ ID NO: 1653257 - DNA, 15 bp, Homo sapiens
ttgctttcttatgga

SEQ ID NO: 1653258 - DNA, 15 bp, Homo sapiens
tttgctttcttatgg

SEQ ID NO: 1653259 - DNA, 15 bp, Homo sapiens
atttgctttcttatg

SEQ ID NO: 1653260 - DNA, 15 bp, Homo sapiens
aatttgctttcttat

SEQ ID NO: 1653261 - DNA, 15 bp, Homo sapiens
gaatttgctttctta

SEQ ID NO: 1653262 - DNA, 15 bp, Homo sapiens
ggaatttgctttctt

SEQ ID NO: 1653263 - DNA, 15 bp, Homo sapiens
aaggaatttgctttc

SEQ ID NO: 1653264 - DNA, 15 bp, Homo sapiens
caaggaatttgcttt

SEQ ID NO: 1653265 - DNA, 15 bp, Homo sapiens
tcaaggaatttgctt

SEQ ID NO: 1653266 - DNA, 15 bp, Homo sapiens
atcaaggaatttgct

SEQ ID NO: 1653267 - DNA, 15 bp, Homo sapiens
tatcaaggaatttgc

SEQ ID NO: 1653268 - DNA, 15 bp, Homo sapiens
atatcaaggaatttg

SEQ ID NO: 1653269 - DNA, 15 bp, Homo sapiens
tatatcaaggaattt

SEQ ID NO: 1653270 - DNA, 15 bp, Homo sapiens
ttatatcaaggaatt

SEQ ID NO: 1653271 - DNA, 15 bp, Homo sapiens
tttatatcaaggaat

SEQ ID NO: 1653272 - DNA, 15 bp, Homo sapiens
atttatatcaaggaa

SEQ ID NO: 1653273 - DNA, 15 bp, Homo sapiens
gatttatatcaagga

SEQ ID NO: 1653274 - DNA, 15 bp, Homo sapiens
ggatttatatcaagg

SEQ ID NO: 1653275 - DNA, 15 bp, Homo sapiens
aggatttatatcaag

SEQ ID NO: 1653276 - DNA, 15 bp, Homo sapiens
caggatttatatcaa

SEQ ID NO: 1653277 - DNA, 15 bp, Homo sapiens
acaggatttatatca

SEQ ID NO: 1653278 - DNA, 15 bp, Homo sapiens
gacaggatttatatc

SEQ ID NO: 1653279 - DNA, 15 bp, Homo sapiens
agacaggatttatat

SEQ ID NO: 1653280 - DNA, 15 bp, Homo sapiens
aagacaggatttata

SEQ ID NO: 1653281 - DNA, 15 bp, Homo sapiens
aaagacaggatttat

SEQ ID NO: 1653282 - DNA, 15 bp, Homo sapiens
caaagacaggattta

SEQ ID NO: 1653283 - DNA, 15 bp, Homo sapiens
ccaaagacaggattt

SEQ ID NO: 1653284 - DNA, 15 bp, Homo sapiens
accaaagacaggatt

SEQ ID NO: 1653285 - DNA, 15 bp, Homo sapiens
aaccaaagacaggat

SEQ ID NO: 1653286 - DNA, 15 bp, Homo sapiens
aaaccaaagacagga

SEQ ID NO: 1653287 - DNA, 15 bp, Homo sapiens
aaaaccaaagacagg

SEQ ID NO: 1653288 - DNA, 15 bp, Homo sapiens
caaaaccaaagacag

SEQ ID NO: 1653289 - DNA, 15 bp, Homo sapiens
gcaaaaccaaagaca

SEQ ID NO: 1653290 - DNA, 15 bp, Homo sapiens
agcaaaaccaaagac

SEQ ID NO: 1653291 - DNA, 15 bp, Homo sapiens
tagcaaaaccaaaga

SEQ ID NO: 1653292 - DNA, 15 bp, Homo sapiens
atagcaaaaccaaag

SEQ ID NO: 1653293 - DNA, 15 bp, Homo sapiens
aatagcaaaaccaaa

SEQ ID NO: 1653294 - DNA, 15 bp, Homo sapiens
aaatagcaaaaccaa

SEQ ID NO: 1653295 - DNA, 15 bp, Homo sapiens
taaatagcaaaacca

SEQ ID NO: 1653296 - DNA, 15 bp, Homo sapiens
ataaatagcaaaacc

SEQ ID NO: 1653297 - DNA, 15 bp, Homo sapiens
aataaatagcaaaac

SEQ ID NO: 1653298 - DNA, 15 bp, Homo sapiens
gaataaatagcaaaa

SEQ ID NO: 1653299 - DNA, 15 bp, Homo sapiens
ggaataaatagcaaa

SEQ ID NO: 1653300 - DNA, 15 bp, Homo sapiens
tggaataaatagcaa

SEQ ID NO: 1653301 - DNA, 15 bp, Homo sapiens
ctggaataaatagca

SEQ ID NO: 1653302 - DNA, 15 bp, Homo sapiens
gctggaataaatagc

SEQ ID NO: 1653303 - DNA, 15 bp, Homo sapiens
tgctggaataaatag

SEQ ID NO: 1653304 - DNA, 15 bp, Homo sapiens
gtgctggaataaata

SEQ ID NO: 1653305 - DNA, 15 bp, Homo sapiens
ggtgctggaataaat

SEQ ID NO: 1653306 - DNA, 15 bp, Homo sapiens
aggtgctggaataaa

SEQ ID NO: 1653307 - DNA, 15 bp, Homo sapiens
caggtgctggaataa

SEQ ID NO: 1653308 - DNA, 15 bp, Homo sapiens
ccaggtgctggaata

SEQ ID NO: 1653309 - DNA, 15 bp, Homo sapiens
accaggtgctggaat

SEQ ID NO: 1653310 - DNA, 15 bp, Homo sapiens
taccaggtgctggaa

SEQ ID NO: 1653311 - DNA, 15 bp, Homo sapiens
gtaccaggtgctgga

SEQ ID NO: 1653312 - DNA, 15 bp, Homo sapiens
tgtaccaggtgctgg

SEQ ID NO: 1653313 - DNA, 15 bp, Homo sapiens
ttgtaccaggtgctg

SEQ ID NO: 1653314 - DNA, 15 bp, Homo sapiens
attgtaccaggtgct

SEQ ID NO: 1653315 - DNA, 15 bp, Homo sapiens
tattgtaccaggtgc

SEQ ID NO: 1653316 - DNA, 15 bp, Homo sapiens
ttattgtaccaggtg

SEQ ID NO: 1653317 - DNA, 15 bp, Homo sapiens
attattgtaccaggt

SEQ ID NO: 1653318 - DNA, 15 bp, Homo sapiens
tattattgtaccagg

SEQ ID NO: 1653319 - DNA, 15 bp, Homo sapiens
atattattgtaccag

SEQ ID NO: 1653320 - DNA, 15 bp, Homo sapiens
aatattattgtacca

SEQ ID NO: 1653321 - DNA, 15 bp, Homo sapiens
aaatattattgtacc

SEQ ID NO: 1653322 - DNA, 15 bp, Homo sapiens
caaatattattgtac

SEQ ID NO: 1653323 - DNA, 15 bp, Homo sapiens
acaaatattattgta

SEQ ID NO: 1653324 - DNA, 15 bp, Homo sapiens
aacaaatattattgt

SEQ ID NO: 1653325 - DNA, 15 bp, Homo sapiens
caacaaatattattg

SEQ ID NO: 1653326 - DNA, 15 bp, Homo sapiens
tcaacaaatattatt

SEQ ID NO: 1653327 - DNA, 15 bp, Homo sapiens
ttcaacaaatattat

SEQ ID NO: 1653328 - DNA, 15 bp, Homo sapiens
gttcaacaaatatta

SEQ ID NO: 1653329 - DNA, 15 bp, Homo sapiens
agttcaacaaatatt

SEQ ID NO: 1653330 - DNA, 15 bp, Homo sapiens
tagttcaacaaatat

SEQ ID NO: 1653331 - DNA, 15 bp, Homo sapiens
ttagttcaacaaata

SEQ ID NO: 1653332 - DNA, 15 bp, Homo sapiens
gttagttcaacaaat

SEQ ID NO: 1653333 - DNA, 15 bp, Homo sapiens
tgttagttcaacaaa

SEQ ID NO: 1653334 - DNA, 15 bp, Homo sapiens
gtgttagttcaacaa

SEQ ID NO: 1653335 - DNA, 15 bp, Homo sapiens
tgtgttagttcaaca

SEQ ID NO: 1653336 - DNA, 15 bp, Homo sapiens
ttgtgttagttcaac

SEQ ID NO: 1653337 - DNA, 15 bp, Homo sapiens
cttgtgttagttcaa

SEQ ID NO: 1653338 - DNA, 15 bp, Homo sapiens
tcttgtgttagttca

SEQ ID NO: 1653339 - DNA, 15 bp, Homo sapiens
ttcttgtgttagttc

SEQ ID NO: 1653340 - DNA, 15 bp, Homo sapiens
attcttgtgttagtt

SEQ ID NO: 1653341 - DNA, 15 bp, Homo sapiens
aattcttgtgttagt

SEQ ID NO: 1653342 - DNA, 15 bp, Homo sapiens
taattcttgtgttag

SEQ ID NO: 1653343 - DNA, 15 bp, Homo sapiens
ataattcttgtgtta

SEQ ID NO: 1653344 - DNA, 15 bp, Homo sapiens
gataattcttgtgtt

SEQ ID NO: 1653345 - DNA, 15 bp, Homo sapiens
agataattcttgtgt

SEQ ID NO: 1653346 - DNA, 15 bp, Homo sapiens
gagataattcttgtg

SEQ ID NO: 1653347 - DNA, 15 bp, Homo sapiens
agagataattcttgt

SEQ ID NO: 1653348 - DNA, 15 bp, Homo sapiens
tagagataattcttg

SEQ ID NO: 1653349 - DNA, 15 bp, Homo sapiens
atagagataattctt

SEQ ID NO: 1653350 - DNA, 15 bp, Homo sapiens
aatagagataattct

SEQ ID NO: 1653351 - DNA, 15 bp, Homo sapiens
aaatagagataattc

SEQ ID NO: 1653352 - DNA, 15 bp, Homo sapiens
aaaatagagataatt

SEQ ID NO: 1653353 - DNA, 15 bp, Homo sapiens
caaaatagagataat

SEQ ID NO: 1653354 - DNA, 15 bp, Homo sapiens
tcaaaatagagataa

SEQ ID NO: 1653355 - DNA, 15 bp, Homo sapiens
ttcaaaatagagata

SEQ ID NO: 1653356 - DNA, 15 bp, Homo sapiens
cttcaaaatagagat

SEQ ID NO: 1653357 - DNA, 15 bp, Homo sapiens
tcttcaaaatagaga

SEQ ID NO: 1653358 - DNA, 15 bp, Homo sapiens
atcttcaaaatagag

SEQ ID NO: 1653359 - DNA, 15 bp, Homo sapiens
catcttcaaaataga

SEQ ID NO: 1653360 - DNA, 15 bp, Homo sapiens
gcatcttcaaaatag

SEQ ID NO: 1653361 - DNA, 15 bp, Homo sapiens
ggcatcttcaaaata

SEQ ID NO: 1653362 - DNA, 15 bp, Homo sapiens
gggcatcttcaaaat

SEQ ID NO: 1653363 - DNA, 15 bp, Homo sapiens
tgggcatcttcaaaa

SEQ ID NO: 1653364 - DNA, 15 bp, Homo sapiens
gtgggcatcttcaaa

SEQ ID NO: 1653365 - DNA, 15 bp, Homo sapiens
tgtgggcatcttcaa

SEQ ID NO: 1653366 - DNA, 15 bp, Homo sapiens
atgtgggcatcttca

SEQ ID NO: 1653367 - DNA, 15 bp, Homo sapiens
aatgtgggcatcttc

SEQ ID NO: 1653368 - DNA, 15 bp, Homo sapiens
aaatgtgggcatctt

SEQ ID NO: 1653369 - DNA, 15 bp, Homo sapiens
gaaatgtgggcatct

SEQ ID NO: 1653370 - DNA, 15 bp, Homo sapiens
ggaaatgtgggcatc

SEQ ID NO: 1653371 - DNA, 15 bp, Homo sapiens
tggaaatgtgggcat

SEQ ID NO: 1653372 - DNA, 15 bp, Homo sapiens
ctggaaatgtgggca

SEQ ID NO: 1653373 - DNA, 15 bp, Homo sapiens
tctggaaatgtgggc

SEQ ID NO: 1653374 - DNA, 15 bp, Homo sapiens
ctctggaaatgtggg

SEQ ID NO: 1653375 - DNA, 15 bp, Homo sapiens
gctctggaaatgtgg

SEQ ID NO: 1653376 - DNA, 15 bp, Homo sapiens
tgctctggaaatgtg

SEQ ID NO: 1653377 - DNA, 15 bp, Homo sapiens
atgctctggaaatgt

SEQ ID NO: 1653378 - DNA, 15 bp, Homo sapiens
gatgctctggaaatg

SEQ ID NO: 1653379 - DNA, 15 bp, Homo sapiens
ggatgctctggaaat

SEQ ID NO: 1653380 - DNA, 15 bp, Homo sapiens
gggatgctctggaaa

SEQ ID NO: 1653381 - DNA, 15 bp, Homo sapiens
agggatgctctggaa

SEQ ID NO: 1653382 - DNA, 15 bp, Homo sapiens
aagggatgctctgga

SEQ ID NO: 1653383 - DNA, 15 bp, Homo sapiens
aaagggatgctctgg

SEQ ID NO: 1653384 - DNA, 15 bp, Homo sapiens
aaaagggatgctctg

SEQ ID NO: 1653385 - DNA, 15 bp, Homo sapiens
aaaaagggatgctct

SEQ ID NO: 1653386 - DNA, 15 bp, Homo sapiens
taaaaagggatgctc

SEQ ID NO: 1653387 - DNA, 15 bp, Homo sapiens
gtaaaaagggatgct

SEQ ID NO: 1653388 - DNA, 15 bp, Homo sapiens
tgtaaaaagggatgc

SEQ ID NO: 1653389 - DNA, 15 bp, Homo sapiens
ttgtaaaaagggatg

SEQ ID NO: 1653390 - DNA, 15 bp, Homo sapiens
attgtaaaaagggat

SEQ ID NO: 1653391 - DNA, 15 bp, Homo sapiens
aattgtaaaaaggga

SEQ ID NO: 1653392 - DNA, 15 bp, Homo sapiens
caattgtaaaaaggg

SEQ ID NO: 1653393 - DNA, 15 bp, Homo sapiens
gcaattgtaaaaagg

SEQ ID NO: 1653394 - DNA, 15 bp, Homo sapiens
agcaattgtaaaaag

SEQ ID NO: 1653395 - DNA, 15 bp, Homo sapiens
tagcaattgtaaaaa

SEQ ID NO: 1653396 - DNA, 15 bp, Homo sapiens
ctagcaattgtaaaa

SEQ ID NO: 1653397 - DNA, 15 bp, Homo sapiens
tctagcaattgtaaa

SEQ ID NO: 1653398 - DNA, 15 bp, Homo sapiens
ctctagcaattgtaa

SEQ ID NO: 1653399 - DNA, 15 bp, Homo sapiens
tctctagcaattgta

SEQ ID NO: 1653400 - DNA, 15 bp, Homo sapiens
atctctagcaattgt

SEQ ID NO: 1653401 - DNA, 15 bp, Homo sapiens
aatctctagcaattg

SEQ ID NO: 1653402 - DNA, 15 bp, Homo sapiens
aaatctctagcaatt

SEQ ID NO: 1653403 - DNA, 15 bp, Homo sapiens
aaaatctctagcaat

SEQ ID NO: 1653404 - DNA, 15 bp, Homo sapiens
aaaaatctctagcaa

SEQ ID NO: 1653405 - DNA, 15 bp, Homo sapiens
gaaaaatctctagca

SEQ ID NO: 1653406 - DNA, 15 bp, Homo sapiens
agaaaaatctctagc

SEQ ID NO: 1653407 - DNA, 15 bp, Homo sapiens
aagaaaaatctctag

SEQ ID NO: 1653408 - DNA, 15 bp, Homo sapiens
taagaaaaatctcta

SEQ ID NO: 1653409 - DNA, 15 bp, Homo sapiens
ttaagaaaaatctct

SEQ ID NO: 1653410 - DNA, 15 bp, Homo sapiens
cttaagaaaaatctc

SEQ ID NO: 1653411 - DNA, 15 bp, Homo sapiens
ccttaagaaaaatct

SEQ ID NO: 1653412 - DNA, 15 bp, Homo sapiens
cccttaagaaaaatc

SEQ ID NO: 1653413 - DNA, 15 bp, Homo sapiens
acccttaagaaaaat

SEQ ID NO: 1653414 - DNA, 15 bp, Homo sapiens
cacccttaagaaaaa

SEQ ID NO: 1653415 - DNA, 15 bp, Homo sapiens
ccacccttaagaaaa

SEQ ID NO: 1653416 - DNA, 15 bp, Homo sapiens
tccacccttaagaaa

SEQ ID NO: 1653417 - DNA, 15 bp, Homo sapiens
ttccacccttaagaa

SEQ ID NO: 1653418 - DNA, 15 bp, Homo sapiens
tttccacccttaaga

SEQ ID NO: 1653419 - DNA, 15 bp, Homo sapiens
atttccacccttaag

SEQ ID NO: 1653420 - DNA, 15 bp, Homo sapiens
aatttccacccttaa

SEQ ID NO: 1653421 - DNA, 15 bp, Homo sapiens
taatttccaccctta

SEQ ID NO: 1653422 - DNA, 15 bp, Homo sapiens
ataatttccaccctt

SEQ ID NO: 1653423 - DNA, 15 bp, Homo sapiens
aataatttccaccct

SEQ ID NO: 1653424 - DNA, 15 bp, Homo sapiens
aaataatttccaccc

SEQ ID NO: 1653425 - DNA, 15 bp, Homo sapiens
gaaataatttccacc

SEQ ID NO: 1653426 - DNA, 15 bp, Homo sapiens
tgaaataatttccac

SEQ ID NO: 1653427 - DNA, 15 bp, Homo sapiens
ttgaaataatttcca

SEQ ID NO: 1653428 - DNA, 15 bp, Homo sapiens
cttgaaataatttcc

SEQ ID NO: 1653429 - DNA, 15 bp, Homo sapiens
gcttgaaataatttc

SEQ ID NO: 1653430 - DNA, 15 bp, Homo sapiens
tgcttgaaataattt

SEQ ID NO: 1653431 - DNA, 15 bp, Homo sapiens
ttgcttgaaataatt

SEQ ID NO: 1653432 - DNA, 15 bp, Homo sapiens
attgcttgaaataat

SEQ ID NO: 1653433 - DNA, 15 bp, Homo sapiens
cattgcttgaaataa

SEQ ID NO: 1653434 - DNA, 15 bp, Homo sapiens
tcattgcttgaaata

SEQ ID NO: 1653435 - DNA, 15 bp, Homo sapiens
ttcattgcttgaaat

SEQ ID NO: 1653436 - DNA, 15 bp, Homo sapiens
attcattgcttgaaa

SEQ ID NO: 1653437 - DNA, 15 bp, Homo sapiens
aattcattgcttgaa

SEQ ID NO: 1653438 - DNA, 15 bp, Homo sapiens
aaattcattgcttga

SEQ ID NO: 1653439 - DNA, 15 bp, Homo sapiens
taaattcattgcttg

SEQ ID NO: 1653440 - DNA, 15 bp, Homo sapiens
ttaaattcattgctt

SEQ ID NO: 1653441 - DNA, 15 bp, Homo sapiens
tttaaattcattgct

SEQ ID NO: 1653442 - DNA, 15 bp, Homo sapiens
atttaaattcattgc

SEQ ID NO: 1653443 - DNA, 15 bp, Homo sapiens
tatttaaattcattg

SEQ ID NO: 1653444 - DNA, 15 bp, Homo sapiens
gtatttaaattcatt

SEQ ID NO: 1653445 - DNA, 15 bp, Homo sapiens
tgtatttaaattcat

SEQ ID NO: 1653446 - DNA, 15 bp, Homo sapiens
ctgtatttaaattca

SEQ ID NO: 1653447 - DNA, 15 bp, Homo sapiens
gctgtatttaaattc

SEQ ID NO: 1653448 - DNA, 15 bp, Homo sapiens
agctgtatttaaatt

SEQ ID NO: 1653449 - DNA, 15 bp, Homo sapiens
aagctgtatttaaat

SEQ ID NO: 1653450 - DNA, 15 bp, Homo sapiens
gaagctgtatttaaa

SEQ ID NO: 1653451 - DNA, 15 bp, Homo sapiens
tgaagctgtatttaa

SEQ ID NO: 1653452 - DNA, 15 bp, Homo sapiens
ttgaagctgtattta

SEQ ID NO: 1653453 - DNA, 15 bp, Homo sapiens
cttgaagctgtattt

SEQ ID NO: 1653454 - DNA, 15 bp, Homo sapiens
tcttgaagctgtatt

SEQ ID NO: 1653455 - DNA, 15 bp, Homo sapiens
atcttgaagctgtat

SEQ ID NO: 1653456 - DNA, 15 bp, Homo sapiens
aatcttgaagctgta

SEQ ID NO: 1653457 - DNA, 15 bp, Homo sapiens
gaatcttgaagctgt

SEQ ID NO: 1653458 - DNA, 15 bp, Homo sapiens
tgaatcttgaagctg

SEQ ID NO: 1653459 - DNA, 15 bp, Homo sapiens
gtgaatcttgaagct

SEQ ID NO: 1653460 - DNA, 15 bp, Homo sapiens
ggtgaatcttgaagc

SEQ ID NO: 1653461 - DNA, 15 bp, Homo sapiens
aggtgaatcttgaag

SEQ ID NO: 1653462 - DNA, 15 bp, Homo sapiens
aaggtgaatcttgaa

SEQ ID NO: 1653463 - DNA, 15 bp, Homo sapiens
aaaggtgaatcttga

SEQ ID NO: 1653464 - DNA, 15 bp, Homo sapiens
caaaggtgaatcttg

SEQ ID NO: 1653465 - DNA, 15 bp, Homo sapiens
ccaaaggtgaatctt

SEQ ID NO: 1653466 - DNA, 15 bp, Homo sapiens
tccaaaggtgaatct

SEQ ID NO: 1653467 - DNA, 15 bp, Homo sapiens
atccaaaggtgaatc

SEQ ID NO: 1653468 - DNA, 15 bp, Homo sapiens
catccaaaggtgaat

SEQ ID NO: 1653469 - DNA, 15 bp, Homo sapiens
gcatccaaaggtgaa

SEQ ID NO: 1653470 - DNA, 15 bp, Homo sapiens
agcatccaaaggtga

SEQ ID NO: 1653471 - DNA, 15 bp, Homo sapiens
tagcatccaaaggtg

SEQ ID NO: 1653472 - DNA, 15 bp, Homo sapiens
atagcatccaaaggt

SEQ ID NO: 1653473 - DNA, 15 bp, Homo sapiens
gatagcatccaaagg

SEQ ID NO: 1653474 - DNA, 15 bp, Homo sapiens
agatagcatccaaag

SEQ ID NO: 1653475 - DNA, 15 bp, Homo sapiens
tagatagcatccaaa

SEQ ID NO: 1653476 - DNA, 15 bp, Homo sapiens
ctagatagcatccaa

SEQ ID NO: 1653477 - DNA, 15 bp, Homo sapiens
actagatagcatcca

SEQ ID NO: 1653478 - DNA, 15 bp, Homo sapiens
tactagatagcatcc

SEQ ID NO: 1653479 - DNA, 15 bp, Homo sapiens
atactagatagcatc

SEQ ID NO: 1653480 - DNA, 15 bp, Homo sapiens
tatactagatagcat

SEQ ID NO: 1653481 - DNA, 15 bp, Homo sapiens
ttatactagatagca

SEQ ID NO: 1653482 - DNA, 15 bp, Homo sapiens
attatactagatagc

SEQ ID NO: 1653483 - DNA, 15 bp, Homo sapiens
gattatactagatag

SEQ ID NO: 1653484 - DNA, 15 bp, Homo sapiens
tgattatactagata

SEQ ID NO: 1653485 - DNA, 15 bp, Homo sapiens
ttgattatactagat

SEQ ID NO: 1653486 - DNA, 15 bp, Homo sapiens
attgattatactaga

SEQ ID NO: 1653487 - DNA, 15 bp, Homo sapiens
gattgattatactag

SEQ ID NO: 1653488 - DNA, 15 bp, Homo sapiens
ggattgattatacta

SEQ ID NO: 1653489 - DNA, 15 bp, Homo sapiens
tggattgattatact

SEQ ID NO: 1653490 - DNA, 15 bp, Homo sapiens
gtggattgattatac

SEQ ID NO: 1653491 - DNA, 15 bp, Homo sapiens
ggtggattgattata

SEQ ID NO: 1653492 - DNA, 15 bp, Homo sapiens
aggtggattgattat

SEQ ID NO: 1653493 - DNA, 15 bp, Homo sapiens
taggtggattgatta

SEQ ID NO: 1653494 - DNA, 15 bp, Homo sapiens
ttaggtggattgatt

SEQ ID NO: 1653495 - DNA, 15 bp, Homo sapiens
tttaggtggattgat

SEQ ID NO: 1653496 - DNA, 15 bp, Homo sapiens
ttttaggtggattga

SEQ ID NO: 1653497 - DNA, 15 bp, Homo sapiens
attttaggtggattg

SEQ ID NO: 1653498 - DNA, 15 bp, Homo sapiens
gattttaggtggatt

SEQ ID NO: 1653499 - DNA, 15 bp, Homo sapiens
tgattttaggtggat

SEQ ID NO: 1653500 - DNA, 15 bp, Homo sapiens
ttgattttaggtgga

SEQ ID NO: 1653501 - DNA, 15 bp, Homo sapiens
cttgattttaggtgg

SEQ ID NO: 1653502 - DNA, 15 bp, Homo sapiens
gcttgattttaggtg

SEQ ID NO: 1653503 - DNA, 15 bp, Homo sapiens
ggcttgattttaggt

SEQ ID NO: 1653504 - DNA, 15 bp, Homo sapiens
tggcttgattttagg

SEQ ID NO: 1653505 - DNA, 15 bp, Homo sapiens
atggcttgattttag

SEQ ID NO: 1653506 - DNA, 15 bp, Homo sapiens
gatggcttgatttta

SEQ ID NO: 1653507 - DNA, 15 bp, Homo sapiens
ggatggcttgatttt

SEQ ID NO: 1653508 - DNA, 15 bp, Homo sapiens
aggatggcttgattt

SEQ ID NO: 1653509 - DNA, 15 bp, Homo sapiens
aaggatggcttgatt

SEQ ID NO: 1653510 - DNA, 15 bp, Homo sapiens
gaaggatggcttgat

SEQ ID NO: 1653511 - DNA, 15 bp, Homo sapiens
ggaaggatggcttga

SEQ ID NO: 1653512 - DNA, 15 bp, Homo sapiens
aggaaggatggcttg

SEQ ID NO: 1653513 - DNA, 15 bp, Homo sapiens
gaggaaggatggctt

SEQ ID NO: 1653514 - DNA, 15 bp, Homo sapiens
agaggaaggatggct

SEQ ID NO: 1653515 - DNA, 15 bp, Homo sapiens
aagaggaaggatggc

SEQ ID NO: 1653516 - DNA, 15 bp, Homo sapiens
caagaggaaggatgg

SEQ ID NO: 1653517 - DNA, 15 bp, Homo sapiens
tcaagaggaaggatg

SEQ ID NO: 1653518 - DNA, 15 bp, Homo sapiens
gtcaagaggaaggat

SEQ ID NO: 1653519 - DNA, 15 bp, Homo sapiens
agtcaagaggaagga

SEQ ID NO: 1653520 - DNA, 15 bp, Homo sapiens
aagtcaagaggaagg

SEQ ID NO: 1653521 - DNA, 15 bp, Homo sapiens
taagtcaagaggaag

SEQ ID NO: 1653522 - DNA, 15 bp, Homo sapiens
ttaagtcaagaggaa

SEQ ID NO: 1653523 - DNA, 15 bp, Homo sapiens
cttaagtcaagagga

SEQ ID NO: 1653524 - DNA, 15 bp, Homo sapiens
ccttaagtcaagagg

SEQ ID NO: 1653525 - DNA, 15 bp, Homo sapiens
accttaagtcaagag

SEQ ID NO: 1653526 - DNA, 15 bp, Homo sapiens
taccttaagtcaaga

SEQ ID NO: 1653527 - DNA, 15 bp, Homo sapiens
gtaccttaagtcaag

SEQ ID NO: 1653528 - DNA, 15 bp, Homo sapiens
tgtaccttaagtcaa

SEQ ID NO: 1653529 - DNA, 15 bp, Homo sapiens
ctgtaccttaagtca

SEQ ID NO: 1653530 - DNA, 15 bp, Homo sapiens
tctgtaccttaagtc

SEQ ID NO: 1653531 - DNA, 15 bp, Homo sapiens
ttctgtaccttaagt

SEQ ID NO: 1653532 - DNA, 15 bp, Homo sapiens
attctgtaccttaag

SEQ ID NO: 1653533 - DNA, 15 bp, Homo sapiens
gattctgtaccttaa

SEQ ID NO: 1653534 - DNA, 15 bp, Homo sapiens
tgattctgtacctta

SEQ ID NO: 1653535 - DNA, 15 bp, Homo sapiens
gtgattctgtacctt

SEQ ID NO: 1653536 - DNA, 15 bp, Homo sapiens
ggtgattctgtacct

SEQ ID NO: 1653537 - DNA, 15 bp, Homo sapiens
aggtgattctgtacc

SEQ ID NO: 1653538 - DNA, 15 bp, Homo sapiens
gaggtgattctgtac

SEQ ID NO: 1653539 - DNA, 15 bp, Homo sapiens
ggaggtgattctgta

SEQ ID NO: 1653540 - DNA, 15 bp, Homo sapiens
tggaggtgattctgt

SEQ ID NO: 1653541 - DNA, 15 bp, Homo sapiens
ttggaggtgattctg

SEQ ID NO: 1653542 - DNA, 15 bp, Homo sapiens
tttggaggtgattct

SEQ ID NO: 1653543 - DNA, 15 bp, Homo sapiens
atttggaggtgattc

SEQ ID NO: 1653544 - DNA, 15 bp, Homo sapiens
aatttggaggtgatt

SEQ ID NO: 1653545 - DNA, 15 bp, Homo sapiens
gaatttggaggtgat

SEQ ID NO: 1653546 - DNA, 15 bp, Homo sapiens
tgaatttggaggtga

SEQ ID NO: 1653547 - DNA, 15 bp, Homo sapiens
atgaatttggaggtg

SEQ ID NO: 1653548 - DNA, 15 bp, Homo sapiens
aatgaatttggaggt

SEQ ID NO: 1653549 - DNA, 15 bp, Homo sapiens
gaatgaatttggagg

SEQ ID NO: 1653550 - DNA, 15 bp, Homo sapiens
atgaatgaatttgga

SEQ ID NO: 1653551 - DNA, 15 bp, Homo sapiens
aatgaatgaatttgg

SEQ ID NO: 1653552 - DNA, 15 bp, Homo sapiens
aaatgaatgaatttg

SEQ ID NO: 1653553 - DNA, 15 bp, Homo sapiens
taaatgaatgaattt

SEQ ID NO: 1653554 - DNA, 15 bp, Homo sapiens
ttaaatgaatgaatt

SEQ ID NO: 1653555 - DNA, 15 bp, Homo sapiens
tttaaatgaatgaat

SEQ ID NO: 1653556 - DNA, 15 bp, Homo sapiens
ttttaaatgaatgaa

SEQ ID NO: 1653557 - DNA, 15 bp, Homo sapiens
gttttaaatgaatga

SEQ ID NO: 1653558 - DNA, 15 bp, Homo sapiens
tgttttaaatgaatg

SEQ ID NO: 1653559 - DNA, 15 bp, Homo sapiens
ttgttttaaatgaat

SEQ ID NO: 1653560 - DNA, 15 bp, Homo sapiens
tttgttttaaatgaa

SEQ ID NO: 1653561 - DNA, 15 bp, Homo sapiens
atttgttttaaatga

SEQ ID NO: 1653562 - DNA, 15 bp, Homo sapiens
aatttgttttaaatg

SEQ ID NO: 1653563 - DNA, 15 bp, Homo sapiens
gaatttgttttaaat

SEQ ID NO: 1653564 - DNA, 15 bp, Homo sapiens
ggaatttgttttaaa

SEQ ID NO: 1653565 - DNA, 15 bp, Homo sapiens
tggaatttgttttaa

SEQ ID NO: 1653566 - DNA, 15 bp, Homo sapiens
ttggaatttgtttta

SEQ ID NO: 1653567 - DNA, 15 bp, Homo sapiens
attggaatttgtttt

SEQ ID NO: 1653568 - DNA, 15 bp, Homo sapiens
tattggaatttgttt

SEQ ID NO: 1653569 - DNA, 15 bp, Homo sapiens
ttattggaatttgtt

SEQ ID NO: 1653570 - DNA, 15 bp, Homo sapiens
attattggaatttgt

SEQ ID NO: 1653571 - DNA, 15 bp, Homo sapiens
tattattggaatttg

SEQ ID NO: 1653572 - DNA, 15 bp, Homo sapiens
ttattattggaattt

SEQ ID NO: 1653573 - DNA, 15 bp, Homo sapiens
attattattggaatt

SEQ ID NO: 1653574 - DNA, 15 bp, Homo sapiens
aattattattggaat

SEQ ID NO: 1653575 - DNA, 15 bp, Homo sapiens
taattattattggaa

SEQ ID NO: 1653576 - DNA, 15 bp, Homo sapiens
ataattattattgga

SEQ ID NO: 1653577 - DNA, 15 bp, Homo sapiens
tataattattattgg

SEQ ID NO: 1653578 - DNA, 15 bp, Homo sapiens
ttataattattattg

SEQ ID NO: 1653579 - DNA, 15 bp, Homo sapiens
attataattattatt

SEQ ID NO: 1653580 - DNA, 15 bp, Homo sapiens
aattataattattat

SEQ ID NO: 1653581 - DNA, 15 bp, Homo sapiens
caattataattatta

SEQ ID NO: 1653582 - DNA, 15 bp, Homo sapiens
acaattataattatt

SEQ ID NO: 1653583 - DNA, 15 bp, Homo sapiens
tacaattataattat

SEQ ID NO: 1653584 - DNA, 15 bp, Homo sapiens
atacaattataatta

SEQ ID NO: 1653585 - DNA, 15 bp, Homo sapiens
catacaattataatt

SEQ ID NO: 1653586 - DNA, 15 bp, Homo sapiens
acatacaattataat

SEQ ID NO: 1653587 - DNA, 15 bp, Homo sapiens
aacatacaattataa

SEQ ID NO: 1653588 - DNA, 15 bp, Homo sapiens
caacatacaattata

SEQ ID NO: 1653589 - DNA, 15 bp, Homo sapiens
tcaacatacaattat

SEQ ID NO: 1653590 - DNA, 15 bp, Homo sapiens
gtcaacatacaatta

SEQ ID NO: 1653591 - DNA, 15 bp, Homo sapiens
tgtcaacatacaatt

SEQ ID NO: 1653592 - DNA, 15 bp, Homo sapiens
ttgtcaacatacaat

SEQ ID NO: 1653593 - DNA, 15 bp, Homo sapiens
attgtcaacatacaa

SEQ ID NO: 1653594 - DNA, 15 bp, Homo sapiens
cattgtcaacataca

SEQ ID NO: 1653595 - DNA, 15 bp, Homo sapiens
tcattgtcaacatac

SEQ ID NO: 1653596 - DNA, 15 bp, Homo sapiens
ttcattgtcaacata

SEQ ID NO: 1653597 - DNA, 15 bp, Homo sapiens
attcattgtcaacat

SEQ ID NO: 1653598 - DNA, 15 bp, Homo sapiens
cattcattgtcaaca

SEQ ID NO: 1653599 - DNA, 15 bp, Homo sapiens
tcattcattgtcaac

SEQ ID NO: 1653600 - DNA, 15 bp, Homo sapiens
gtcattcattgtcaa

SEQ ID NO: 1653601 - DNA, 15 bp, Homo sapiens
tgtcattcattgtca

SEQ ID NO: 1653602 - DNA, 15 bp, Homo sapiens
ttgtcattcattgtc

SEQ ID NO: 1653603 - DNA, 15 bp, Homo sapiens
attgtcattcattgt

SEQ ID NO: 1653604 - DNA, 15 bp, Homo sapiens
aattgtcattcattg

SEQ ID NO: 1653605 - DNA, 15 bp, Homo sapiens
aaattgtcattcatt

SEQ ID NO: 1653606 - DNA, 15 bp, Homo sapiens
taaattgtcattcat

SEQ ID NO: 1653607 - DNA, 15 bp, Homo sapiens
ttaaattgtcattca

SEQ ID NO: 1653608 - DNA, 15 bp, Homo sapiens
attaaattgtcattc

SEQ ID NO: 1653609 - DNA, 15 bp, Homo sapiens
aattaaattgtcatt

SEQ ID NO: 1653610 - DNA, 15 bp, Homo sapiens
taattaaattgtcat

SEQ ID NO: 1653611 - DNA, 15 bp, Homo sapiens
gtaattaaattgtca

SEQ ID NO: 1653612 - DNA, 15 bp, Homo sapiens
ggtaattaaattgtc

SEQ ID NO: 1653613 - DNA, 15 bp, Homo sapiens
tggtaattaaattgt

SEQ ID NO: 1653614 - DNA, 15 bp, Homo sapiens
ttggtaattaaattg

SEQ ID NO: 1653615 - DNA, 15 bp, Homo sapiens
attggtaattaaatt

SEQ ID NO: 1653616 - DNA, 15 bp, Homo sapiens
tattggtaattaaat

SEQ ID NO: 1653617 - DNA, 15 bp, Homo sapiens
ctattggtaattaaa

SEQ ID NO: 1653618 - DNA, 15 bp, Homo sapiens
tctattggtaattaa

SEQ ID NO: 1653619 - DNA, 15 bp, Homo sapiens
ttctattggtaatta

SEQ ID NO: 1653620 - DNA, 15 bp, Homo sapiens
cttctattggtaatt

SEQ ID NO: 1653621 - DNA, 15 bp, Homo sapiens
tcttctattggtaat

SEQ ID NO: 1653622 - DNA, 15 bp, Homo sapiens
atcttctattggtaa

SEQ ID NO: 1653623 - DNA, 15 bp, Homo sapiens
aatcttctattggta

SEQ ID NO: 1653624 - DNA, 15 bp, Homo sapiens
aaatcttctattggt

SEQ ID NO: 1653625 - DNA, 15 bp, Homo sapiens
gaaatcttctattgg

SEQ ID NO: 1653626 - DNA, 15 bp, Homo sapiens
tgaaatcttctattg

SEQ ID NO: 1653627 - DNA, 15 bp, Homo sapiens
atgaaatcttctatt

SEQ ID NO: 1653628 - DNA, 15 bp, Homo sapiens
tatgaaatcttctat

SEQ ID NO: 1653629 - DNA, 15 bp, Homo sapiens
ttatgaaatcttcta

SEQ ID NO: 1653630 - DNA, 15 bp, Homo sapiens
cttatgaaatcttct

SEQ ID NO: 1653631 - DNA, 15 bp, Homo sapiens
gcttatgaaatcttc

SEQ ID NO: 1653632 - DNA, 15 bp, Homo sapiens
tgcttatgaaatctt

SEQ ID NO: 1653633 - DNA, 15 bp, Homo sapiens
atgcttatgaaatct

SEQ ID NO: 1653634 - DNA, 15 bp, Homo sapiens
tatgcttatgaaatc

SEQ ID NO: 1653635 - DNA, 15 bp, Homo sapiens
ctatgcttatgaaat

SEQ ID NO: 1653636 - DNA, 15 bp, Homo sapiens
tctatgcttatgaaa

SEQ ID NO: 1653637 - DNA, 15 bp, Homo sapiens
gtctatgcttatgaa

SEQ ID NO: 1653638 - DNA, 15 bp, Homo sapiens
ggtctatgcttatga

SEQ ID NO: 1653639 - DNA, 15 bp, Homo sapiens
tggtctatgcttatg

SEQ ID NO: 1653640 - DNA, 15 bp, Homo sapiens
ctggtctatgcttat

SEQ ID NO: 1653641 - DNA, 15 bp, Homo sapiens
cctggtctatgctta

SEQ ID NO: 1653642 - DNA, 15 bp, Homo sapiens
ccctggtctatgctt

SEQ ID NO: 1653643 - DNA, 15 bp, Homo sapiens
accctggtctatgct

SEQ ID NO: 1653644 - DNA, 15 bp, Homo sapiens
aaccctggtctatgc

SEQ ID NO: 1653645 - DNA, 15 bp, Homo sapiens
aaaccctggtctatg

SEQ ID NO: 1653646 - DNA, 15 bp, Homo sapiens
gaaaccctggtctat

SEQ ID NO: 1653647 - DNA, 15 bp, Homo sapiens
agaaaccctggtcta

SEQ ID NO: 1653648 - DNA, 15 bp, Homo sapiens
gagaaaccctggtct

SEQ ID NO: 1653649 - DNA, 15 bp, Homo sapiens
tgagaaaccctggtc

SEQ ID NO: 1653650 - DNA, 15 bp, Homo sapiens
ttgagaaaccctggt

SEQ ID NO: 1653651 - DNA, 15 bp, Homo sapiens
tttgagaaaccctgg

SEQ ID NO: 1653652 - DNA, 15 bp, Homo sapiens
atttgagaaaccctg

SEQ ID NO: 1653653 - DNA, 15 bp, Homo sapiens
aatttgagaaaccct

SEQ ID NO: 1653654 - DNA, 15 bp, Homo sapiens
caatttgagaaaccc

SEQ ID NO: 1653655 - DNA, 15 bp, Homo sapiens
ccaatttgagaaacc

SEQ ID NO: 1653656 - DNA, 15 bp, Homo sapiens
cccaatttgagaaac

SEQ ID NO: 1653657 - DNA, 15 bp, Homo sapiens
ccccaatttgagaaa

SEQ ID NO: 1653658 - DNA, 15 bp, Homo sapiens
accccaatttgagaa

SEQ ID NO: 1653659 - DNA, 15 bp, Homo sapiens
caccccaatttgaga

SEQ ID NO: 1653660 - DNA, 15 bp, Homo sapiens
tcaccccaatttgag

SEQ ID NO: 1653661 - DNA, 15 bp, Homo sapiens
atcaccccaatttga

SEQ ID NO: 1653662 - DNA, 15 bp, Homo sapiens
tatcaccccaatttg

SEQ ID NO: 1653663 - DNA, 15 bp, Homo sapiens
ttatcaccccaattt

SEQ ID NO: 1653664 - DNA, 15 bp, Homo sapiens
gttatcaccccaatt

SEQ ID NO: 1653665 - DNA, 15 bp, Homo sapiens
ggttatcaccccaat

SEQ ID NO: 1653666 - DNA, 15 bp, Homo sapiens
gggttatcaccccaa

SEQ ID NO: 1653667 - DNA, 15 bp, Homo sapiens
agggttatcacccca

SEQ ID NO: 1653668 - DNA, 15 bp, Homo sapiens
cagggttatcacccc

SEQ ID NO: 1653669 - DNA, 15 bp, Homo sapiens
ccagggttatcaccc

SEQ ID NO: 1653670 - DNA, 15 bp, Homo sapiens
cccagggttatcacc

SEQ ID NO: 1653671 - DNA, 15 bp, Homo sapiens
ccccagggttatcac

SEQ ID NO: 1653672 - DNA, 15 bp, Homo sapiens
tccccagggttatca

SEQ ID NO: 1653673 - DNA, 15 bp, Homo sapiens
atccccagggttatc

SEQ ID NO: 1653674 - DNA, 15 bp, Homo sapiens
aatccccagggttat

SEQ ID NO: 1653675 - DNA, 15 bp, Homo sapiens
aaatccccagggtta

SEQ ID NO: 1653676 - DNA, 15 bp, Homo sapiens
caaatccccagggtt

SEQ ID NO: 1653677 - DNA, 15 bp, Homo sapiens
acaaatccccagggt

SEQ ID NO: 1653678 - DNA, 15 bp, Homo sapiens
cacaaatccccaggg

SEQ ID NO: 1653679 - DNA, 15 bp, Homo sapiens
tcacaaatccccagg

SEQ ID NO: 1653680 - DNA, 15 bp, Homo sapiens
ttcacaaatccccag

SEQ ID NO: 1653681 - DNA, 15 bp, Homo sapiens
attcacaaatcccca

SEQ ID NO: 1653682 - DNA, 15 bp, Homo sapiens
tattcacaaatcccc

SEQ ID NO: 1653683 - DNA, 15 bp, Homo sapiens
atattcacaaatccc

SEQ ID NO: 1653684 - DNA, 15 bp, Homo sapiens
tatattcacaaatcc

SEQ ID NO: 1653685 - DNA, 15 bp, Homo sapiens
atatattcacaaatc

SEQ ID NO: 1653686 - DNA, 15 bp, Homo sapiens
aatatattcacaaat

SEQ ID NO: 1653687 - DNA, 15 bp, Homo sapiens
gaatatattcacaaa

SEQ ID NO: 1653688 - DNA, 15 bp, Homo sapiens
agaatatattcacaa

SEQ ID NO: 1653689 - DNA, 15 bp, Homo sapiens
tagaatatattcaca

SEQ ID NO: 1653690 - DNA, 15 bp, Homo sapiens
ttagaatatattcac

SEQ ID NO: 1653691 - DNA, 15 bp, Homo sapiens
attagaatatattca

SEQ ID NO: 1653692 - DNA, 15 bp, Homo sapiens
cattagaatatattc

SEQ ID NO: 1653693 - DNA, 15 bp, Homo sapiens
ccattagaatatatt

SEQ ID NO: 1653694 - DNA, 15 bp, Homo sapiens
tccattagaatatat

SEQ ID NO: 1653695 - DNA, 15 bp, Homo sapiens
atccattagaatata

SEQ ID NO: 1653696 - DNA, 15 bp, Homo sapiens
gatccattagaatat

SEQ ID NO: 1653697 - DNA, 15 bp, Homo sapiens
ggatccattagaata

SEQ ID NO: 1653698 - DNA, 15 bp, Homo sapiens
gggatccattagaat

SEQ ID NO: 1653699 - DNA, 15 bp, Homo sapiens
ggggatccattagaa

SEQ ID NO: 1653700 - DNA, 15 bp, Homo sapiens
tggggatccattaga

SEQ ID NO: 1653701 - DNA, 15 bp, Homo sapiens
ttggggatccattag

SEQ ID NO: 1653702 - DNA, 15 bp, Homo sapiens
cttggggatccatta

SEQ ID NO: 1653703 - DNA, 15 bp, Homo sapiens
acttggggatccatt

SEQ ID NO: 1653704 - DNA, 15 bp, Homo sapiens
aacttggggatccat

SEQ ID NO: 1653705 - DNA, 15 bp, Homo sapiens
gaacttggggatcca

SEQ ID NO: 1653706 - DNA, 15 bp, Homo sapiens
agaacttggggatcc

SEQ ID NO: 1653707 - DNA, 15 bp, Homo sapiens
tagaacttggggatc

SEQ ID NO: 1653708 - DNA, 15 bp, Homo sapiens
gtagaacttggggat

SEQ ID NO: 1653709 - DNA, 15 bp, Homo sapiens
tgtagaacttgggga

SEQ ID NO: 1653710 - DNA, 15 bp, Homo sapiens
atgtagaacttgggg

SEQ ID NO: 1653711 - DNA, 15 bp, Homo sapiens
tatgtagaacttggg

SEQ ID NO: 1653712 - DNA, 15 bp, Homo sapiens
ttatgtagaacttgg

SEQ ID NO: 1653713 - DNA, 15 bp, Homo sapiens
cttatgtagaacttg

SEQ ID NO: 1653714 - DNA, 15 bp, Homo sapiens
acttatgtagaactt

SEQ ID NO: 1653715 - DNA, 15 bp, Homo sapiens
aacttatgtagaact

SEQ ID NO: 1653716 - DNA, 15 bp, Homo sapiens
taacttatgtagaac

SEQ ID NO: 1653717 - DNA, 15 bp, Homo sapiens
ataacttatgtagaa

SEQ ID NO: 1653718 - DNA, 15 bp, Homo sapiens
tataacttatgtaga

SEQ ID NO: 1653719 - DNA, 15 bp, Homo sapiens
atataacttatgtag

SEQ ID NO: 1653720 - DNA, 15 bp, Homo sapiens
tatataacttatgta

SEQ ID NO: 1653721 - DNA, 15 bp, Homo sapiens
ttatataacttatgt

SEQ ID NO: 1653722 - DNA, 15 bp, Homo sapiens
tttatataacttatg

SEQ ID NO: 1653723 - DNA, 15 bp, Homo sapiens
ttttatataacttat

SEQ ID NO: 1653724 - DNA, 15 bp, Homo sapiens
gttttatataactta

SEQ ID NO: 1653725 - DNA, 15 bp, Homo sapiens
tgttttatataactt

SEQ ID NO: 1653726 - DNA, 15 bp, Homo sapiens
gtgttttatataact

SEQ ID NO: 1653727 - DNA, 15 bp, Homo sapiens
tgtgttttatataac

SEQ ID NO: 1653728 - DNA, 15 bp, Homo sapiens
atgtgttttatataa

SEQ ID NO: 1653729 - DNA, 15 bp, Homo sapiens
gatgtgttttatata

SEQ ID NO: 1653730 - DNA, 15 bp, Homo sapiens
agatgtgttttatat

SEQ ID NO: 1653731 - DNA, 15 bp, Homo sapiens
aagatgtgttttata

SEQ ID NO: 1653732 - DNA, 15 bp, Homo sapiens
aaagatgtgttttat

SEQ ID NO: 1653733 - DNA, 15 bp, Homo sapiens
caaagatgtgtttta

SEQ ID NO: 1653734 - DNA, 15 bp, Homo sapiens
tcaaagatgtgtttt

SEQ ID NO: 1653735 - DNA, 15 bp, Homo sapiens
gtcaaagatgtgttt

SEQ ID NO: 1653736 - DNA, 15 bp, Homo sapiens
tgtcaaagatgtgtt

SEQ ID NO: 1653737 - DNA, 15 bp, Homo sapiens
ttgtcaaagatgtgt

SEQ ID NO: 1653738 - DNA, 15 bp, Homo sapiens
tttgtcaaagatgtg

SEQ ID NO: 1653739 - DNA, 15 bp, Homo sapiens
ctttgtcaaagatgt

SEQ ID NO: 1653740 - DNA, 15 bp, Homo sapiens
tctttgtcaaagatg

SEQ ID NO: 1653741 - DNA, 15 bp, Homo sapiens
gtctttgtcaaagat

SEQ ID NO: 1653742 - DNA, 15 bp, Homo sapiens
tgtctttgtcaaaga

SEQ ID NO: 1653743 - DNA, 15 bp, Homo sapiens
ttgtctttgtcaaag

SEQ ID NO: 1653744 - DNA, 15 bp, Homo sapiens
gttgtctttgtcaaa

SEQ ID NO: 1653745 - DNA, 15 bp, Homo sapiens
cgttgtctttgtcaa

SEQ ID NO: 1653746 - DNA, 15 bp, Homo sapiens
acgttgtctttgtca

SEQ ID NO: 1653747 - DNA, 15 bp, Homo sapiens
cacgttgtctttgtc

SEQ ID NO: 1653748 - DNA, 15 bp, Homo sapiens
tcacgttgtctttgt

SEQ ID NO: 1653749 - DNA, 15 bp, Homo sapiens
ttcacgttgtctttg

SEQ ID NO: 1653750 - DNA, 15 bp, Homo sapiens
tttcacgttgtcttt

SEQ ID NO: 1653751 - DNA, 15 bp, Homo sapiens
atttcacgttgtctt

SEQ ID NO: 1653752 - DNA, 15 bp, Homo sapiens
aatttcacgttgtct

SEQ ID NO: 1653753 - DNA, 15 bp, Homo sapiens
caatttcacgttgtc

SEQ ID NO: 1653754 - DNA, 15 bp, Homo sapiens
ccaatttcacgttgt

SEQ ID NO: 1653755 - DNA, 15 bp, Homo sapiens
tccaatttcacgttg

SEQ ID NO: 1653756 - DNA, 15 bp, Homo sapiens
ttccaatttcacgtt

SEQ ID NO: 1653757 - DNA, 15 bp, Homo sapiens
tttccaatttcacgt

SEQ ID NO: 1653758 - DNA, 15 bp, Homo sapiens
ttttccaatttcacg

SEQ ID NO: 1653759 - DNA, 15 bp, Homo sapiens
gttttccaatttcac

SEQ ID NO: 1653760 - DNA, 15 bp, Homo sapiens
tgttttccaatttca

SEQ ID NO: 1653761 - DNA, 15 bp, Homo sapiens
atgttttccaatttc

SEQ ID NO: 1653762 - DNA, 15 bp, Homo sapiens
tatgttttccaattt

SEQ ID NO: 1653763 - DNA, 15 bp, Homo sapiens
atatgttttccaatt

SEQ ID NO: 1653764 - DNA, 15 bp, Homo sapiens
aatatgttttccaat

SEQ ID NO: 1653765 - DNA, 15 bp, Homo sapiens
aaatatgttttccaa

SEQ ID NO: 1653766 - DNA, 15 bp, Homo sapiens
taaatatgttttcca

SEQ ID NO: 1653767 - DNA, 15 bp, Homo sapiens
gtaaatatgttttcc

SEQ ID NO: 1653768 - DNA, 15 bp, Homo sapiens
tgtaaatatgttttc

SEQ ID NO: 1653769 - DNA, 15 bp, Homo sapiens
atgtaaatatgtttt

SEQ ID NO: 1653770 - DNA, 15 bp, Homo sapiens
aatgtaaatatgttt

SEQ ID NO: 1653771 - DNA, 15 bp, Homo sapiens
aaatgtaaatatgtt

SEQ ID NO: 1653772 - DNA, 15 bp, Homo sapiens
gaaatgtaaatatgt

SEQ ID NO: 1653773 - DNA, 15 bp, Homo sapiens
tgaaatgtaaatatg

SEQ ID NO: 1653774 - DNA, 15 bp, Homo sapiens
ttgaaatgtaaatat

SEQ ID NO: 1653775 - DNA, 15 bp, Homo sapiens
tttgaaatgtaaata

SEQ ID NO: 1653776 - DNA, 15 bp, Homo sapiens
atttgaaatgtaaat

SEQ ID NO: 1653777 - DNA, 15 bp, Homo sapiens
tatttgaaatgtaaa

SEQ ID NO: 1653778 - DNA, 15 bp, Homo sapiens
atatttgaaatgtaa

SEQ ID NO: 1653779 - DNA, 15 bp, Homo sapiens
gatatttgaaatgta

SEQ ID NO: 1653780 - DNA, 15 bp, Homo sapiens
agatatttgaaatgt

SEQ ID NO: 1653781 - DNA, 15 bp, Homo sapiens
aagatatttgaaatg

SEQ ID NO: 1653782 - DNA, 15 bp, Homo sapiens
aaagatatttgaaat

SEQ ID NO: 1653783 - DNA, 15 bp, Homo sapiens
caaagatatttgaaa

SEQ ID NO: 1653784 - DNA, 15 bp, Homo sapiens
acaaagatatttgaa

SEQ ID NO: 1653785 - DNA, 15 bp, Homo sapiens
aacaaagatatttga

SEQ ID NO: 1653786 - DNA, 15 bp, Homo sapiens
taacaaagatatttg

SEQ ID NO: 1653787 - DNA, 15 bp, Homo sapiens
ttaacaaagatattt

SEQ ID NO: 1653788 - DNA, 15 bp, Homo sapiens
cttaacaaagatatt

SEQ ID NO: 1653789 - DNA, 15 bp, Homo sapiens
acttaacaaagatat

SEQ ID NO: 1653790 - DNA, 15 bp, Homo sapiens
gacttaacaaagata

SEQ ID NO: 1653791 - DNA, 15 bp, Homo sapiens
tgacttaacaaagat

SEQ ID NO: 1653792 - DNA, 15 bp, Homo sapiens
ctgacttaacaaaga

SEQ ID NO: 1653793 - DNA, 15 bp, Homo sapiens
actgacttaacaaag

SEQ ID NO: 1653794 - DNA, 15 bp, Homo sapiens
cactgacttaacaaa

SEQ ID NO: 1653795 - DNA, 15 bp, Homo sapiens
acactgacttaacaa

SEQ ID NO: 1653796 - DNA, 15 bp, Homo sapiens
aacactgacttaaca

SEQ ID NO: 1653797 - DNA, 15 bp, Homo sapiens
gaacactgacttaac

SEQ ID NO: 1653798 - DNA, 15 bp, Homo sapiens
ggaacactgacttaa

SEQ ID NO: 1653799 - DNA, 15 bp, Homo sapiens
aggaacactgactta

SEQ ID NO: 1653800 - DNA, 15 bp, Homo sapiens
gaggaacactgactt

SEQ ID NO: 1653801 - DNA, 15 bp, Homo sapiens
tgaggaacactgact

SEQ ID NO: 1653802 - DNA, 15 bp, Homo sapiens
ttgaggaacactgac

SEQ ID NO: 1653803 - DNA, 15 bp, Homo sapiens
tttgaggaacactga

SEQ ID NO: 1653804 - DNA, 15 bp, Homo sapiens
ttttgaggaacactg

SEQ ID NO: 1653805 - DNA, 15 bp, Homo sapiens
gttttgaggaacact

SEQ ID NO: 1653806 - DNA, 15 bp, Homo sapiens
tgttttgaggaacac

SEQ ID NO: 1653807 - DNA, 15 bp, Homo sapiens
gtgttttgaggaaca

SEQ ID NO: 1653808 - DNA, 15 bp, Homo sapiens
tgtgttttgaggaac

SEQ ID NO: 1653809 - DNA, 15 bp, Homo sapiens
atgtgttttgaggaa

SEQ ID NO: 1653810 - DNA, 15 bp, Homo sapiens
aatgtgttttgagga

SEQ ID NO: 1653811 - DNA, 15 bp, Homo sapiens
aaatgtgttttgagg

SEQ ID NO: 1653812 - DNA, 15 bp, Homo sapiens
aaaatgtgttttgag

SEQ ID NO: 1653813 - DNA, 15 bp, Homo sapiens
aaaaatgtgttttga

SEQ ID NO: 1653814 - DNA, 15 bp, Homo sapiens
aaaaaatgtgttttg

SEQ ID NO: 1653815 - DNA, 15 bp, Homo sapiens
aaaaaaatgtgtttt

SEQ ID NO: 1653816 - DNA, 15 bp, Homo sapiens
taaaaaaatgtgttt

SEQ ID NO: 1653817 - DNA, 15 bp, Homo sapiens
ctaaaaaaatgtgtt

SEQ ID NO: 1653818 - DNA, 15 bp, Homo sapiens
cctaaaaaaatgtgt

SEQ ID NO: 1653819 - DNA, 15 bp, Homo sapiens
tcctaaaaaaatgtg

SEQ ID NO: 1653820 - DNA, 15 bp, Homo sapiens
atcctaaaaaaatgt

SEQ ID NO: 1653821 - DNA, 15 bp, Homo sapiens
gatcctaaaaaaatg

SEQ ID NO: 1653822 - DNA, 15 bp, Homo sapiens
agatcctaaaaaaat

SEQ ID NO: 1653823 - DNA, 15 bp, Homo sapiens
gagatcctaaaaaaa

SEQ ID NO: 1653824 - DNA, 15 bp, Homo sapiens
tgagatcctaaaaaa

SEQ ID NO: 1653825 - DNA, 15 bp, Homo sapiens
ctgagatcctaaaaa

SEQ ID NO: 1653826 - DNA, 15 bp, Homo sapiens
tctgagatcctaaaa

SEQ ID NO: 1653827 - DNA, 15 bp, Homo sapiens
ttctgagatcctaaa

SEQ ID NO: 1653828 - DNA, 15 bp, Homo sapiens
tttctgagatcctaa

SEQ ID NO: 1653829 - DNA, 15 bp, Homo sapiens
ttttctgagatccta

SEQ ID NO: 1653830 - DNA, 15 bp, Homo sapiens
attttctgagatcct

SEQ ID NO: 1653831 - DNA, 15 bp, Homo sapiens
aattttctgagatcc

SEQ ID NO: 1653832 - DNA, 15 bp, Homo sapiens
aaattttctgagatc

SEQ ID NO: 1653833 - DNA, 15 bp, Homo sapiens
aaaattttctgagat

SEQ ID NO: 1653834 - DNA, 15 bp, Homo sapiens
caaaattttctgaga

SEQ ID NO: 1653835 - DNA, 15 bp, Homo sapiens
acaaaattttctgag

SEQ ID NO: 1653836 - DNA, 15 bp, Homo sapiens
aacaaaattttctga

SEQ ID NO: 1653837 - DNA, 15 bp, Homo sapiens
gaacaaaattttctg

SEQ ID NO: 1653838 - DNA, 15 bp, Homo sapiens
ggaacaaaattttct

SEQ ID NO: 1653839 - DNA, 15 bp, Homo sapiens
aggaacaaaattttc

SEQ ID NO: 1653840 - DNA, 15 bp, Homo sapiens
aaggaacaaaatttt

SEQ ID NO: 1653841 - DNA, 15 bp, Homo sapiens
aaaggaacaaaattt

SEQ ID NO: 1653842 - DNA, 15 bp, Homo sapiens
taaaggaacaaaatt

SEQ ID NO: 1653843 - DNA, 15 bp, Homo sapiens
ctaaaggaacaaaat

SEQ ID NO: 1653844 - DNA, 15 bp, Homo sapiens
tctaaaggaacaaaa

SEQ ID NO: 1653845 - DNA, 15 bp, Homo sapiens
ttctaaaggaacaaa

SEQ ID NO: 1653846 - DNA, 15 bp, Homo sapiens
cttctaaaggaacaa

SEQ ID NO: 1653847 - DNA, 15 bp, Homo sapiens
ccttctaaaggaaca

SEQ ID NO: 1653848 - DNA, 15 bp, Homo sapiens
accttctaaaggaac

SEQ ID NO: 1653849 - DNA, 15 bp, Homo sapiens
caccttctaaaggaa

SEQ ID NO: 1653850 - DNA, 15 bp, Homo sapiens
acaccttctaaagga

SEQ ID NO: 1653851 - DNA, 15 bp, Homo sapiens
aacaccttctaaagg

SEQ ID NO: 1653852 - DNA, 15 bp, Homo sapiens
aaacaccttctaaag

SEQ ID NO: 1653853 - DNA, 15 bp, Homo sapiens
gaaacaccttctaaa

SEQ ID NO: 1653854 - DNA, 15 bp, Homo sapiens
tgaaacaccttctaa

SEQ ID NO: 1653855 - DNA, 15 bp, Homo sapiens
atgaaacaccttcta

SEQ ID NO: 1653856 - DNA, 15 bp, Homo sapiens
gatgaaacaccttct

SEQ ID NO: 1653857 - DNA, 15 bp, Homo sapiens
tgatgaaacaccttc

SEQ ID NO: 1653858 - DNA, 15 bp, Homo sapiens
atgatgaaacacctt

SEQ ID NO: 1653859 - DNA, 15 bp, Homo sapiens
catgatgaaacacct

SEQ ID NO: 1653860 - DNA, 15 bp, Homo sapiens
tcatgatgaaacacc

SEQ ID NO: 1653861 - DNA, 15 bp, Homo sapiens
ttcatgatgaaacac

SEQ ID NO: 1653862 - DNA, 15 bp, Homo sapiens
cttcatgatgaaaca

SEQ ID NO: 1653863 - DNA, 15 bp, Homo sapiens
gcttcatgatgaaac

SEQ ID NO: 1653864 - DNA, 15 bp, Homo sapiens
tgcttcatgatgaaa

SEQ ID NO: 1653865 - DNA, 15 bp, Homo sapiens
atgcttcatgatgaa

SEQ ID NO: 1653866 - DNA, 15 bp, Homo sapiens
aatgcttcatgatga

SEQ ID NO: 1653867 - DNA, 15 bp, Homo sapiens
taatgcttcatgatg

SEQ ID NO: 1653868 - DNA, 15 bp, Homo sapiens
gtaatgcttcatgat

SEQ ID NO: 1653869 - DNA, 15 bp, Homo sapiens
agtaatgcttcatga

SEQ ID NO: 1653870 - DNA, 15 bp, Homo sapiens
aagtaatgcttcatg

SEQ ID NO: 1653871 - DNA, 15 bp, Homo sapiens
caagtaatgcttcat

SEQ ID NO: 1653872 - DNA, 15 bp, Homo sapiens
ccaagtaatgcttca

SEQ ID NO: 1653873 - DNA, 15 bp, Homo sapiens
cccaagtaatgcttc

SEQ ID NO: 1653874 - DNA, 15 bp, Homo sapiens
acccaagtaatgctt

SEQ ID NO: 1653875 - DNA, 15 bp, Homo sapiens
aacccaagtaatgct

SEQ ID NO: 1653876 - DNA, 15 bp, Homo sapiens
aaacccaagtaatgc

SEQ ID NO: 1653877 - DNA, 15 bp, Homo sapiens
caaacccaagtaatg

SEQ ID NO: 1653878 - DNA, 15 bp, Homo sapiens
tcaaacccaagtaat

SEQ ID NO: 1653879 - DNA, 15 bp, Homo sapiens
ctcaaacccaagtaa

SEQ ID NO: 1653880 - DNA, 15 bp, Homo sapiens
tctcaaacccaagta

SEQ ID NO: 1653881 - DNA, 15 bp, Homo sapiens
ttctcaaacccaagt

SEQ ID NO: 1653882 - DNA, 15 bp, Homo sapiens
tttctcaaacccaag

SEQ ID NO: 1653883 - DNA, 15 bp, Homo sapiens
gtttctcaaacccaa

SEQ ID NO: 1653884 - DNA, 15 bp, Homo sapiens
tgtttctcaaaccca

SEQ ID NO: 1653885 - DNA, 15 bp, Homo sapiens
ttgtttctcaaaccc

SEQ ID NO: 1653886 - DNA, 15 bp, Homo sapiens
attgtttctcaaacc

SEQ ID NO: 1653887 - DNA, 15 bp, Homo sapiens
cattgtttctcaaac

SEQ ID NO: 1653888 - DNA, 15 bp, Homo sapiens
ccattgtttctcaaa

SEQ ID NO: 1653889 - DNA, 15 bp, Homo sapiens
gccattgtttctcaa

SEQ ID NO: 1653890 - DNA, 15 bp, Homo sapiens
tgccattgtttctca

SEQ ID NO: 1653891 - DNA, 15 bp, Homo sapiens
gtgccattgtttctc

SEQ ID NO: 1653892 - DNA, 15 bp, Homo sapiens
tgtgccattgtttct

SEQ ID NO: 1653893 - DNA, 15 bp, Homo sapiens
ctgtgccattgtttc

SEQ ID NO: 1653894 - DNA, 15 bp, Homo sapiens
tctgtgccattgttt

SEQ ID NO: 1653895 - DNA, 15 bp, Homo sapiens
gtctgtgccattgtt

SEQ ID NO: 1653896 - DNA, 15 bp, Homo sapiens
ggtctgtgccattgt

SEQ ID NO: 1653897 - DNA, 15 bp, Homo sapiens
tggtctgtgccattg

SEQ ID NO: 1653898 - DNA, 15 bp, Homo sapiens
atggtctgtgccatt

SEQ ID NO: 1653899 - DNA, 15 bp, Homo sapiens
catggtctgtgccat

SEQ ID NO: 1653900 - DNA, 15 bp, Homo sapiens
acatggtctgtgcca

SEQ ID NO: 1653901 - DNA, 15 bp, Homo sapiens
aacatggtctgtgcc

SEQ ID NO: 1653902 - DNA, 15 bp, Homo sapiens
aaacatggtctgtgc

SEQ ID NO: 1653903 - DNA, 15 bp, Homo sapiens
gaaacatggtctgtg

SEQ ID NO: 1653904 - DNA, 15 bp, Homo sapiens
ggaaacatggtctgt

SEQ ID NO: 1653905 - DNA, 15 bp, Homo sapiens
tggaaacatggtctg

SEQ ID NO: 1653906 - DNA, 15 bp, Homo sapiens
ttggaaacatggtct

SEQ ID NO: 1653907 - DNA, 15 bp, Homo sapiens
cttggaaacatggtc

SEQ ID NO: 1653908 - DNA, 15 bp, Homo sapiens
tcttggaaacatggt

SEQ ID NO: 1653909 - DNA, 15 bp, Homo sapiens
ttcttggaaacatgg

SEQ ID NO: 1653910 - DNA, 15 bp, Homo sapiens
cttcttggaaacatg

SEQ ID NO: 1653911 - DNA, 15 bp, Homo sapiens
ccttcttggaaacat

SEQ ID NO: 1653912 - DNA, 15 bp, Homo sapiens
accttcttggaaaca

SEQ ID NO: 1653913 - DNA, 15 bp, Homo sapiens
aaccttcttggaaac

SEQ ID NO: 1653914 - DNA, 15 bp, Homo sapiens
gaaccttcttggaaa

SEQ ID NO: 1653915 - DNA, 15 bp, Homo sapiens
tgaaccttcttggaa

SEQ ID NO: 1653916 - DNA, 15 bp, Homo sapiens
ttgaaccttcttgga

SEQ ID NO: 1653917 - DNA, 15 bp, Homo sapiens
cttgaaccttcttgg

SEQ ID NO: 1653918 - DNA, 15 bp, Homo sapiens
tcttgaaccttcttg

SEQ ID NO: 1653919 - DNA, 15 bp, Homo sapiens
gtcttgaaccttctt

SEQ ID NO: 1653920 - DNA, 15 bp, Homo sapiens
ggtcttgaaccttct

SEQ ID NO: 1653921 - DNA, 15 bp, Homo sapiens
tggtcttgaaccttc

SEQ ID NO: 1653922 - DNA, 15 bp, Homo sapiens
atggtcttgaacctt

SEQ ID NO: 1653923 - DNA, 15 bp, Homo sapiens
catggtcttgaacct

SEQ ID NO: 1653924 - DNA, 15 bp, Homo sapiens
tcatggtcttgaacc

SEQ ID NO: 1653925 - DNA, 15 bp, Homo sapiens
atcatggtcttgaac

SEQ ID NO: 1653926 - DNA, 15 bp, Homo sapiens
catcatggtcttgaa

SEQ ID NO: 1653927 - DNA, 15 bp, Homo sapiens
acatcatggtcttga

SEQ ID NO: 1653928 - DNA, 15 bp, Homo sapiens
tacatcatggtcttg

SEQ ID NO: 1653929 - DNA, 15 bp, Homo sapiens
atacatcatggtctt

SEQ ID NO: 1653930 - DNA, 15 bp, Homo sapiens
tatacatcatggtct

SEQ ID NO: 1653931 - DNA, 15 bp, Homo sapiens
atatacatcatggtc

SEQ ID NO: 1653932 - DNA, 15 bp, Homo sapiens
tatatacatcatggt

SEQ ID NO: 1653933 - DNA, 15 bp, Homo sapiens
ttatatacatcatgg

SEQ ID NO: 1653934 - DNA, 15 bp, Homo sapiens
gttatatacatcatg

SEQ ID NO: 1653935 - DNA, 15 bp, Homo sapiens
ggttatatacatcat

SEQ ID NO: 1653936 - DNA, 15 bp, Homo sapiens
gggttatatacatca

SEQ ID NO: 1653937 - DNA, 15 bp, Homo sapiens
agggttatatacatc

SEQ ID NO: 1653938 - DNA, 15 bp, Homo sapiens
gagggttatatacat

SEQ ID NO: 1653939 - DNA, 15 bp, Homo sapiens
tgagggttatataca

SEQ ID NO: 1653940 - DNA, 15 bp, Homo sapiens
ctgagggttatatac

SEQ ID NO: 1653941 - DNA, 15 bp, Homo sapiens
actgagggttatata

SEQ ID NO: 1653942 - DNA, 15 bp, Homo sapiens
gactgagggttatat

SEQ ID NO: 1653943 - DNA, 15 bp, Homo sapiens
tgactgagggttata

SEQ ID NO: 1653944 - DNA, 15 bp, Homo sapiens
ctgactgagggttat

SEQ ID NO: 1653945 - DNA, 15 bp, Homo sapiens
gctgactgagggtta

SEQ ID NO: 1653946 - DNA, 15 bp, Homo sapiens
ggctgactgagggtt

SEQ ID NO: 1653947 - DNA, 15 bp, Homo sapiens
tggctgactgagggt

SEQ ID NO: 1653948 - DNA, 15 bp, Homo sapiens
ctggctgactgaggg

SEQ ID NO: 1653949 - DNA, 15 bp, Homo sapiens
tctggctgactgagg

SEQ ID NO: 1653950 - DNA, 15 bp, Homo sapiens
gtctggctgactgag

SEQ ID NO: 1653951 - DNA, 15 bp, Homo sapiens
tgtctggctgactga

SEQ ID NO: 1653952 - DNA, 15 bp, Homo sapiens
ttgtctggctgactg

SEQ ID NO: 1653953 - DNA, 15 bp, Homo sapiens
attgtctggctgact

SEQ ID NO: 1653954 - DNA, 15 bp, Homo sapiens
cattgtctggctgac

SEQ ID NO: 1653955 - DNA, 15 bp, Homo sapiens
acattgtctggctga

SEQ ID NO: 1653956 - DNA, 15 bp, Homo sapiens
aacattgtctggctg

SEQ ID NO: 1653957 - DNA, 15 bp, Homo sapiens
caacattgtctggct

SEQ ID NO: 1653958 - DNA, 15 bp, Homo sapiens
acaacattgtctggc

SEQ ID NO: 1653959 - DNA, 15 bp, Homo sapiens
aacaacattgtctgg

SEQ ID NO: 1653960 - DNA, 15 bp, Homo sapiens
taacaacattgtctg

SEQ ID NO: 1653961 - DNA, 15 bp, Homo sapiens
ttaacaacattgtct

SEQ ID NO: 1653962 - DNA, 15 bp, Homo sapiens
cttaacaacattgtc

SEQ ID NO: 1653963 - DNA, 15 bp, Homo sapiens
gcttaacaacattgt

SEQ ID NO: 1653964 - DNA, 15 bp, Homo sapiens
tgcttaacaacattg

SEQ ID NO: 1653965 - DNA, 15 bp, Homo sapiens
tatgcttaacaacat

SEQ ID NO: 1653966 - DNA, 15 bp, Homo sapiens
atatgcttaacaaca

SEQ ID NO: 1653967 - DNA, 15 bp, Homo sapiens
catatgcttaacaac

SEQ ID NO: 1653968 - DNA, 15 bp, Homo sapiens
ccatatgcttaacaa

SEQ ID NO: 1653969 - DNA, 15 bp, Homo sapiens
tccatatgcttaaca

SEQ ID NO: 1653970 - DNA, 15 bp, Homo sapiens
ctccatatgcttaac

SEQ ID NO: 1653971 - DNA, 15 bp, Homo sapiens
actccatatgcttaa

SEQ ID NO: 1653972 - DNA, 15 bp, Homo sapiens
cactccatatgctta

SEQ ID NO: 1653973 - DNA, 15 bp, Homo sapiens
ccactccatatgctt

SEQ ID NO: 1653974 - DNA, 15 bp, Homo sapiens
cccactccatatgct

SEQ ID NO: 1653975 - DNA, 15 bp, Homo sapiens
ccccactccatatgc

SEQ ID NO: 1653976 - DNA, 15 bp, Homo sapiens
gccccactccatatg

SEQ ID NO: 1653977 - DNA, 15 bp, Homo sapiens
agccccactccatat

SEQ ID NO: 1653978 - DNA, 15 bp, Homo sapiens
cagccccactccata

SEQ ID NO: 1653979 - DNA, 15 bp, Homo sapiens
ccagccccactccat

SEQ ID NO: 1653980 - DNA, 15 bp, Homo sapiens
cccagccccactcca

SEQ ID NO: 1653981 - DNA, 15 bp, Homo sapiens
tcccagccccactcc

SEQ ID NO: 1653982 - DNA, 15 bp, Homo sapiens
ctcccagccccactc

SEQ ID NO: 1653983 - DNA, 15 bp, Homo sapiens
cctcccagccccact

SEQ ID NO: 1653984 - DNA, 15 bp, Homo sapiens
gcctcccagccccac

SEQ ID NO: 1653985 - DNA, 15 bp, Homo sapiens
tgcctcccagcccca

SEQ ID NO: 1653986 - DNA, 15 bp, Homo sapiens
atgcctcccagcccc

SEQ ID NO: 1653987 - DNA, 15 bp, Homo sapiens
catgcctcccagccc

SEQ ID NO: 1653988 - DNA, 15 bp, Homo sapiens
ccatgcctcccagcc

SEQ ID NO: 1653989 - DNA, 15 bp, Homo sapiens
tccatgcctcccagc

SEQ ID NO: 1653990 - DNA, 15 bp, Homo sapiens
ttccatgcctcccag

SEQ ID NO: 1653991 - DNA, 15 bp, Homo sapiens
tttccatgcctccca

SEQ ID NO: 1653992 - DNA, 15 bp, Homo sapiens
gtttccatgcctccc

SEQ ID NO: 1653993 - DNA, 15 bp, Homo sapiens
tgtttccatgcctcc

SEQ ID NO: 1653994 - DNA, 15 bp, Homo sapiens
ttgtttccatgcctc

SEQ ID NO: 1653995 - DNA, 15 bp, Homo sapiens
cttgtttccatgcct

SEQ ID NO: 1653996 - DNA, 15 bp, Homo sapiens
gcttgtttccatgcc

SEQ ID NO: 1653997 - DNA, 15 bp, Homo sapiens
ggcttgtttccatgc

SEQ ID NO: 1653998 - DNA, 15 bp, Homo sapiens
gggcttgtttccatg

SEQ ID NO: 1653999 - DNA, 15 bp, Homo sapiens
agggcttgtttccat

SEQ ID NO: 1654000 - DNA, 15 bp, Homo sapiens
cagggcttgtttcca

SEQ ID NO: 1654001 - DNA, 15 bp, Homo sapiens
tcagggcttgtttcc

SEQ ID NO: 1654002 - DNA, 15 bp, Homo sapiens
ctcagggcttgtttc

SEQ ID NO: 1654003 - DNA, 15 bp, Homo sapiens
cctcagggcttgttt

SEQ ID NO: 1654004 - DNA, 15 bp, Homo sapiens
tcctcagggcttgtt

SEQ ID NO: 1654005 - DNA, 15 bp, Homo sapiens
ttcctcagggcttgt

SEQ ID NO: 1654006 - DNA, 15 bp, Homo sapiens
tttcctcagggcttg

SEQ ID NO: 1654007 - DNA, 15 bp, Homo sapiens
atttcctcagggctt

SEQ ID NO: 1654008 - DNA, 15 bp, Homo sapiens
tatttcctcagggct

SEQ ID NO: 1654009 - DNA, 15 bp, Homo sapiens
atatttcctcagggc

SEQ ID NO: 1654010 - DNA, 15 bp, Homo sapiens
catatttcctcaggg

SEQ ID NO: 1654011 - DNA, 15 bp, Homo sapiens
ccatatttcctcagg

SEQ ID NO: 1654012 - DNA, 15 bp, Homo sapiens
tccatatttcctcag

SEQ ID NO: 1654013 - DNA, 15 bp, Homo sapiens
atccatatttcctca

SEQ ID NO: 1654014 - DNA, 15 bp, Homo sapiens
tatccatatttcctc

SEQ ID NO: 1654015 - DNA, 15 bp, Homo sapiens
atatccatatttcct

SEQ ID NO: 1654016 - DNA, 15 bp, Homo sapiens
catatccatatttcc

SEQ ID NO: 1654017 - DNA, 15 bp, Homo sapiens
tcatatccatatttc

SEQ ID NO: 1654018 - DNA, 15 bp, Homo sapiens
ttcatatccatattt

SEQ ID NO: 1654019 - DNA, 15 bp, Homo sapiens
attcatatccatatt

SEQ ID NO: 1654020 - DNA, 15 bp, Homo sapiens
aattcatatccatat

SEQ ID NO: 1654021 - DNA, 15 bp, Homo sapiens
taattcatatccata

SEQ ID NO: 1654022 - DNA, 15 bp, Homo sapiens
ttaattcatatccat

SEQ ID NO: 1654023 - DNA, 15 bp, Homo sapiens
tttaattcatatcca

SEQ ID NO: 1654024 - DNA, 15 bp, Homo sapiens
ttttaattcatatcc

SEQ ID NO: 1654025 - DNA, 15 bp, Homo sapiens
gttttaattcatatc

SEQ ID NO: 1654026 - DNA, 15 bp, Homo sapiens
cgttttaattcatat

SEQ ID NO: 1654027 - DNA, 15 bp, Homo sapiens
ccgttttaattcata

SEQ ID NO: 1654028 - DNA, 15 bp, Homo sapiens
cccgttttaattcat

SEQ ID NO: 1654029 - DNA, 15 bp, Homo sapiens
gcccgttttaattca

SEQ ID NO: 1654030 - DNA, 15 bp, Homo sapiens
agcccgttttaattc

SEQ ID NO: 1654031 - DNA, 15 bp, Homo sapiens
tagcccgttttaatt

SEQ ID NO: 1654032 - DNA, 15 bp, Homo sapiens
atagcccgttttaat

SEQ ID NO: 1654033 - DNA, 15 bp, Homo sapiens
tatagcccgttttaa

SEQ ID NO: 1654034 - DNA, 15 bp, Homo sapiens
ttatagcccgtttta

SEQ ID NO: 1654035 - DNA, 15 bp, Homo sapiens
cttatagcccgtttt

SEQ ID NO: 1654036 - DNA, 15 bp, Homo sapiens
acttatagcccgttt

SEQ ID NO: 1654037 - DNA, 15 bp, Homo sapiens
cacttatagcccgtt

SEQ ID NO: 1654038 - DNA, 15 bp, Homo sapiens
tcacttatagcccgt

SEQ ID NO: 1654039 - DNA, 15 bp, Homo sapiens
ttcacttatagcccg

SEQ ID NO: 1654040 - DNA, 15 bp, Homo sapiens
cttcacttatagccc

SEQ ID NO: 1654041 - DNA, 15 bp, Homo sapiens
gcttcacttatagcc

SEQ ID NO: 1654042 - DNA, 15 bp, Homo sapiens
ggcttcacttatagc

SEQ ID NO: 1654043 - DNA, 15 bp, Homo sapiens
tggcttcacttatag

SEQ ID NO: 1654044 - DNA, 15 bp, Homo sapiens
ctggcttcacttata

SEQ ID NO: 1654045 - DNA, 15 bp, Homo sapiens
actggcttcacttat

SEQ ID NO: 1654046 - DNA, 15 bp, Homo sapiens
aactggcttcactta

SEQ ID NO: 1654047 - DNA, 15 bp, Homo sapiens
gaactggcttcactt

SEQ ID NO: 1654048 - DNA, 15 bp, Homo sapiens
tgaactggcttcact

SEQ ID NO: 1654049 - DNA, 15 bp, Homo sapiens
gtgaactggcttcac

SEQ ID NO: 1654050 - DNA, 15 bp, Homo sapiens
agtgaactggcttca

SEQ ID NO: 1654051 - DNA, 15 bp, Homo sapiens
aagtgaactggcttc

SEQ ID NO: 1654052 - DNA, 15 bp, Homo sapiens
taagtgaactggctt

SEQ ID NO: 1654053 - DNA, 15 bp, Homo sapiens
ataagtgaactggct

SEQ ID NO: 1654054 - DNA, 15 bp, Homo sapiens
tataagtgaactggc

SEQ ID NO: 1654055 - DNA, 15 bp, Homo sapiens
atataagtgaactgg

SEQ ID NO: 1654056 - DNA, 15 bp, Homo sapiens
catataagtgaactg

SEQ ID NO: 1654057 - DNA, 15 bp, Homo sapiens
ccatataagtgaact

SEQ ID NO: 1654058 - DNA, 15 bp, Homo sapiens
accatataagtgaac

SEQ ID NO: 1654059 - DNA, 15 bp, Homo sapiens
aaccatataagtgaa

SEQ ID NO: 1654060 - DNA, 15 bp, Homo sapiens
gaaccatataagtga

SEQ ID NO: 1654061 - DNA, 15 bp, Homo sapiens
agaaccatataagtg

SEQ ID NO: 1654062 - DNA, 15 bp, Homo sapiens
aagaaccatataagt

SEQ ID NO: 1654063 - DNA, 15 bp, Homo sapiens
caagaaccatataag

SEQ ID NO: 1654064 - DNA, 15 bp, Homo sapiens
acaagaaccatataa

SEQ ID NO: 1654065 - DNA, 15 bp, Homo sapiens
aacaagaaccatata

SEQ ID NO: 1654066 - DNA, 15 bp, Homo sapiens
caacaagaaccatat

SEQ ID NO: 1654067 - DNA, 15 bp, Homo sapiens
gcaacaagaaccata

SEQ ID NO: 1654068 - DNA, 15 bp, Homo sapiens
agcaacaagaaccat

SEQ ID NO: 1654069 - DNA, 15 bp, Homo sapiens
gagcaacaagaacca

SEQ ID NO: 1654070 - DNA, 15 bp, Homo sapiens
ggagcaacaagaacc

SEQ ID NO: 1654071 - DNA, 15 bp, Homo sapiens
aggagcaacaagaac

SEQ ID NO: 1654072 - DNA, 15 bp, Homo sapiens
caggagcaacaagaa

SEQ ID NO: 1654073 - DNA, 15 bp, Homo sapiens
gcaggagcaacaaga

SEQ ID NO: 1654074 - DNA, 15 bp, Homo sapiens
agcaggagcaacaag

SEQ ID NO: 1654075 - DNA, 15 bp, Homo sapiens
cagcaggagcaacaa

SEQ ID NO: 1654076 - DNA, 15 bp, Homo sapiens
acagcaggagcaaca

SEQ ID NO: 1654077 - DNA, 15 bp, Homo sapiens
cacagcaggagcaac

SEQ ID NO: 1654078 - DNA, 15 bp, Homo sapiens
tcacagcaggagcaa

SEQ ID NO: 1654079 - DNA, 15 bp, Homo sapiens
atcacagcaggagca

SEQ ID NO: 1654080 - DNA, 15 bp, Homo sapiens
catcacagcaggagc

SEQ ID NO: 1654081 - DNA, 15 bp, Homo sapiens
gcatcacagcaggag

SEQ ID NO: 1654082 - DNA, 15 bp, Homo sapiens
tgcatcacagcagga

SEQ ID NO: 1654083 - DNA, 15 bp, Homo sapiens
atgcatcacagcagg

SEQ ID NO: 1654084 - DNA, 15 bp, Homo sapiens
catgcatcacagcag

SEQ ID NO: 1654085 - DNA, 15 bp, Homo sapiens
tcatgcatcacagca

SEQ ID NO: 1654086 - DNA, 15 bp, Homo sapiens
ttcatgcatcacagc

SEQ ID NO: 1654087 - DNA, 15 bp, Homo sapiens
attcatgcatcacag

SEQ ID NO: 1654088 - DNA, 15 bp, Homo sapiens
cattcatgcatcaca

SEQ ID NO: 1654089 - DNA, 15 bp, Homo sapiens
acattcatgcatcac

SEQ ID NO: 1654090 - DNA, 15 bp, Homo sapiens
cacattcatgcatca

SEQ ID NO: 1654091 - DNA, 15 bp, Homo sapiens
gcacattcatgcatc

SEQ ID NO: 1654092 - DNA, 15 bp, Homo sapiens
tgcacattcatgcat

SEQ ID NO: 1654093 - DNA, 15 bp, Homo sapiens
gtgcacattcatgca

SEQ ID NO: 1654094 - DNA, 15 bp, Homo sapiens
ggtgcacattcatgc

SEQ ID NO: 1654095 - DNA, 15 bp, Homo sapiens
tggtgcacattcatg

SEQ ID NO: 1654096 - DNA, 15 bp, Homo sapiens
ctggtgcacattcat

SEQ ID NO: 1654097 - DNA, 15 bp, Homo sapiens
tctggtgcacattca

SEQ ID NO: 1654098 - DNA, 15 bp, Homo sapiens
ttctggtgcacattc

SEQ ID NO: 1654099 - DNA, 15 bp, Homo sapiens
tttctggtgcacatt

SEQ ID NO: 1654100 - DNA, 15 bp, Homo sapiens
ttttctggtgcacat

SEQ ID NO: 1654101 - DNA, 15 bp, Homo sapiens
tttttctggtgcaca

SEQ ID NO: 1654102 - DNA, 15 bp, Homo sapiens
ttttttctggtgcac

SEQ ID NO: 1654103 - DNA, 15 bp, Homo sapiens
tttttttctggtgca

SEQ ID NO: 1654104 - DNA, 15 bp, Homo sapiens
ctttttttctggtgc

SEQ ID NO: 1654105 - DNA, 15 bp, Homo sapiens
actttttttctggtg

SEQ ID NO: 1654106 - DNA, 15 bp, Homo sapiens
aactttttttctggt

SEQ ID NO: 1654107 - DNA, 15 bp, Homo sapiens
aaactttttttctgg

SEQ ID NO: 1654108 - DNA, 15 bp, Homo sapiens
gaaactttttttctg

SEQ ID NO: 1654109 - DNA, 15 bp, Homo sapiens
cgaaactttttttct

SEQ ID NO: 1654110 - DNA, 15 bp, Homo sapiens
tcgaaactttttttc

SEQ ID NO: 1654111 - DNA, 15 bp, Homo sapiens
ttcgaaacttttttt

SEQ ID NO: 1654112 - DNA, 15 bp, Homo sapiens
attcgaaactttttt

SEQ ID NO: 1654113 - DNA, 15 bp, Homo sapiens
cattcgaaacttttt

SEQ ID NO: 1654114 - DNA, 15 bp, Homo sapiens
acattcgaaactttt

SEQ ID NO: 1654115 - DNA, 15 bp, Homo sapiens
aacattcgaaacttt

SEQ ID NO: 1654116 - DNA, 15 bp, Homo sapiens
taacattcgaaactt

SEQ ID NO: 1654117 - DNA, 15 bp, Homo sapiens
ataacattcgaaact

SEQ ID NO: 1654118 - DNA, 15 bp, Homo sapiens
cataacattcgaaac

SEQ ID NO: 1654119 - DNA, 15 bp, Homo sapiens
acataacattcgaaa

SEQ ID NO: 1654120 - DNA, 15 bp, Homo sapiens
aacataacattcgaa

SEQ ID NO: 1654121 - DNA, 15 bp, Homo sapiens
taacataacattcga

SEQ ID NO: 1654122 - DNA, 15 bp, Homo sapiens
ttaacataacattcg

SEQ ID NO: 1654123 - DNA, 15 bp, Homo sapiens
tttaacataacattc

SEQ ID NO: 1654124 - DNA, 15 bp, Homo sapiens
gtttaacataacatt

SEQ ID NO: 1654125 - DNA, 15 bp, Homo sapiens
tgtttaacataacat

SEQ ID NO: 1654126 - DNA, 15 bp, Homo sapiens
ttgtttaacataaca

SEQ ID NO: 1654127 - DNA, 15 bp, Homo sapiens
attgtttaacataac

SEQ ID NO: 1654128 - DNA, 15 bp, Homo sapiens
tattgtttaacataa

SEQ ID NO: 1654129 - DNA, 15 bp, Homo sapiens
atattgtttaacata

SEQ ID NO: 1654130 - DNA, 15 bp, Homo sapiens
aatattgtttaacat

SEQ ID NO: 1654131 - DNA, 15 bp, Homo sapiens
aaatattgtttaaca

SEQ ID NO: 1654132 - DNA, 15 bp, Homo sapiens
aaaatattgtttaac

SEQ ID NO: 1654133 - DNA, 15 bp, Homo sapiens
caaaatattgtttaa

SEQ ID NO: 1654134 - DNA, 15 bp, Homo sapiens
acaaaatattgttta

SEQ ID NO: 1654135 - DNA, 15 bp, Homo sapiens
gacaaaatattgttt

SEQ ID NO: 1654136 - DNA, 15 bp, Homo sapiens
tgacaaaatattgtt

SEQ ID NO: 1654137 - DNA, 15 bp, Homo sapiens
ctgacaaaatattgt

SEQ ID NO: 1654138 - DNA, 15 bp, Homo sapiens
gctgacaaaatattg

SEQ ID NO: 1654139 - DNA, 15 bp, Homo sapiens
agctgacaaaatatt

SEQ ID NO: 1654140 - DNA, 15 bp, Homo sapiens
cagctgacaaaatat

SEQ ID NO: 1654141 - DNA, 15 bp, Homo sapiens
ccagctgacaaaata

SEQ ID NO: 1654142 - DNA, 15 bp, Homo sapiens
tccagctgacaaaat

SEQ ID NO: 1654143 - DNA, 15 bp, Homo sapiens
ttccagctgacaaaa

SEQ ID NO: 1654144 - DNA, 15 bp, Homo sapiens
tttccagctgacaaa

SEQ ID NO: 1654145 - DNA, 15 bp, Homo sapiens
aatgttttccagctg

SEQ ID NO: 1654146 - DNA, 15 bp, Homo sapiens
taatgttttccagct

SEQ ID NO: 1654147 - DNA, 15 bp, Homo sapiens
ttaatgttttccagc

SEQ ID NO: 1654148 - DNA, 15 bp, Homo sapiens
cttaatgttttccag

SEQ ID NO: 1654149 - DNA, 15 bp, Homo sapiens
ccttaatgttttcca

SEQ ID NO: 1654150 - DNA, 15 bp, Homo sapiens
tccttaatgttttcc

SEQ ID NO: 1654151 - DNA, 15 bp, Homo sapiens
ctccttaatgttttc

SEQ ID NO: 1654152 - DNA, 15 bp, Homo sapiens
cctccttaatgtttt

SEQ ID NO: 1654153 - DNA, 15 bp, Homo sapiens
gcctccttaatgttt

SEQ ID NO: 1654154 - DNA, 15 bp, Homo sapiens
agcctccttaatgtt

SEQ ID NO: 1654155 - DNA, 15 bp, Homo sapiens
tagcctccttaatgt

SEQ ID NO: 1654156 - DNA, 15 bp, Homo sapiens
ttagcctccttaatg

SEQ ID NO: 1654157 - DNA, 15 bp, Homo sapiens
cttagcctccttaat

SEQ ID NO: 1654158 - DNA, 15 bp, Homo sapiens
gcttagcctccttaa

SEQ ID NO: 1654159 - DNA, 15 bp, Homo sapiens
agcttagcctcctta

SEQ ID NO: 1654160 - DNA, 15 bp, Homo sapiens
aagcttagcctcctt

SEQ ID NO: 1654161 - DNA, 15 bp, Homo sapiens
gaagcttagcctcct

SEQ ID NO: 1654162 - DNA, 15 bp, Homo sapiens
agaagcttagcctcc

SEQ ID NO: 1654163 - DNA, 15 bp, Homo sapiens
aagaagcttagcctc

SEQ ID NO: 1654164 - DNA, 15 bp, Homo sapiens
aaagaagcttagcct

SEQ ID NO: 1654165 - DNA, 15 bp, Homo sapiens
aaaagaagcttagcc

SEQ ID NO: 1654166 - DNA, 15 bp, Homo sapiens
taaaagaagcttagc

SEQ ID NO: 1654167 - DNA, 15 bp, Homo sapiens
ctaaaagaagcttag

SEQ ID NO: 1654168 - DNA, 15 bp, Homo sapiens
gctaaaagaagctta

SEQ ID NO: 1654169 - DNA, 15 bp, Homo sapiens
agctaaaagaagctt

SEQ ID NO: 1654170 - DNA, 15 bp, Homo sapiens
aagctaaaagaagct

SEQ ID NO: 1654171 - DNA, 15 bp, Homo sapiens
aaagctaaaagaagc

SEQ ID NO: 1654172 - DNA, 15 bp, Homo sapiens
taaagctaaaagaag

SEQ ID NO: 1654173 - DNA, 15 bp, Homo sapiens
gtaaagctaaaagaa

SEQ ID NO: 1654174 - DNA, 15 bp, Homo sapiens
cgtaaagctaaaaga

SEQ ID NO: 1654175 - DNA, 15 bp, Homo sapiens
tcgtaaagctaaaag

SEQ ID NO: 1654176 - DNA, 15 bp, Homo sapiens
ttcgtaaagctaaaa

SEQ ID NO: 1654177 - DNA, 15 bp, Homo sapiens
tttcgtaaagctaaa

SEQ ID NO: 1654178 - DNA, 15 bp, Homo sapiens
ctttcgtaaagctaa

SEQ ID NO: 1654179 - DNA, 15 bp, Homo sapiens
cctttcgtaaagcta

SEQ ID NO: 1654180 - DNA, 15 bp, Homo sapiens
acctttcgtaaagct

SEQ ID NO: 1654181 - DNA, 15 bp, Homo sapiens
cacctttcgtaaagc

SEQ ID NO: 1654182 - DNA, 15 bp, Homo sapiens
ccacctttcgtaaag

SEQ ID NO: 1654183 - DNA, 15 bp, Homo sapiens
cccacctttcgtaaa

SEQ ID NO: 1654184 - DNA, 15 bp, Homo sapiens
tcccacctttcgtaa

SEQ ID NO: 1654185 - DNA, 15 bp, Homo sapiens
ctcccacctttcgta

SEQ ID NO: 1654186 - DNA, 15 bp, Homo sapiens
cctcccacctttcgt

SEQ ID NO: 1654187 - DNA, 15 bp, Homo sapiens
tcctcccacctttcg

SEQ ID NO: 1654188 - DNA, 15 bp, Homo sapiens
ttcctcccacctttc

SEQ ID NO: 1654189 - DNA, 15 bp, Homo sapiens
tttcctcccaccttt

SEQ ID NO: 1654190 - DNA, 15 bp, Homo sapiens
ctttcctcccacctt

SEQ ID NO: 1654191 - DNA, 15 bp, Homo sapiens
tctttcctcccacct

SEQ ID NO: 1654192 - DNA, 15 bp, Homo sapiens
ttctttcctcccacc

SEQ ID NO: 1654193 - DNA, 15 bp, Homo sapiens
cttctttcctcccac

SEQ ID NO: 1654194 - DNA, 15 bp, Homo sapiens
ccttctttcctccca

SEQ ID NO: 1654195 - DNA, 15 bp, Homo sapiens
accttctttcctccc

SEQ ID NO: 1654196 - DNA, 15 bp, Homo sapiens
taccttctttcctcc

SEQ ID NO: 1654197 - DNA, 15 bp, Homo sapiens
ataccttctttcctc

SEQ ID NO: 1654198 - DNA, 15 bp, Homo sapiens
tataccttctttcct

SEQ ID NO: 1654199 - DNA, 15 bp, Homo sapiens
atataccttctttcc

SEQ ID NO: 1654200 - DNA, 15 bp, Homo sapiens
tatataccttctttc

SEQ ID NO: 1654201 - DNA, 15 bp, Homo sapiens
ttatataccttcttt

SEQ ID NO: 1654202 - DNA, 15 bp, Homo sapiens
tttatataccttctt

SEQ ID NO: 1654203 - DNA, 15 bp, Homo sapiens
gtttatataccttct

SEQ ID NO: 1654204 - DNA, 15 bp, Homo sapiens
agtttatataccttc

SEQ ID NO: 1654205 - DNA, 15 bp, Homo sapiens
tagtttatatacctt

SEQ ID NO: 1654206 - DNA, 15 bp, Homo sapiens
tgtagtttatatacc

SEQ ID NO: 1654207 - DNA, 15 bp, Homo sapiens
ctgtagtttatatac

SEQ ID NO: 1654208 - DNA, 15 bp, Homo sapiens
gctgtagtttatata

SEQ ID NO: 1654209 - DNA, 15 bp, Homo sapiens
tgctgtagtttatat

SEQ ID NO: 1654210 - DNA, 15 bp, Homo sapiens
atgctgtagtttata

SEQ ID NO: 1654211 - DNA, 15 bp, Homo sapiens
tatgctgtagtttat

SEQ ID NO: 1654212 - DNA, 15 bp, Homo sapiens
ttatgctgtagttta

SEQ ID NO: 1654213 - DNA, 15 bp, Homo sapiens
tttatgctgtagttt

SEQ ID NO: 1654214 - DNA, 15 bp, Homo sapiens
ctttatgctgtagtt

SEQ ID NO: 1654215 - DNA, 15 bp, Homo sapiens
actttatgctgtagt

SEQ ID NO: 1654216 - DNA, 15 bp, Homo sapiens
tactttatgctgtag

SEQ ID NO: 1654217 - DNA, 15 bp, Homo sapiens
ctactttatgctgta

SEQ ID NO: 1654218 - DNA, 15 bp, Homo sapiens
cctactttatgctgt

SEQ ID NO: 1654219 - DNA, 15 bp, Homo sapiens
gcctactttatgctg

SEQ ID NO: 1654220 - DNA, 15 bp, Homo sapiens
tgcctactttatgct

SEQ ID NO: 1654221 - DNA, 15 bp, Homo sapiens
ttgcctactttatgc

SEQ ID NO: 1654222 - DNA, 15 bp, Homo sapiens
cttgcctactttatg

SEQ ID NO: 1654223 - DNA, 15 bp, Homo sapiens
ccttgcctactttat

SEQ ID NO: 1654224 - DNA, 15 bp, Homo sapiens
tccttgcctacttta

SEQ ID NO: 1654225 - DNA, 15 bp, Homo sapiens
ttccttgcctacttt

SEQ ID NO: 1654226 - DNA, 15 bp, Homo sapiens
cttccttgcctactt

SEQ ID NO: 1654227 - DNA, 15 bp, Homo sapiens
ccttccttgcctact

SEQ ID NO: 1654228 - DNA, 15 bp, Homo sapiens
accttccttgcctac

SEQ ID NO: 1654229 - DNA, 15 bp, Homo sapiens
gaccttccttgccta

SEQ ID NO: 1654230 - DNA, 15 bp, Homo sapiens
tgaccttccttgcct

SEQ ID NO: 1654231 - DNA, 15 bp, Homo sapiens
ttgaccttccttgcc

SEQ ID NO: 1654232 - DNA, 15 bp, Homo sapiens
cttgaccttccttgc

SEQ ID NO: 1654233 - DNA, 15 bp, Homo sapiens
ccttgaccttccttg

SEQ ID NO: 1654234 - DNA, 15 bp, Homo sapiens
accttgaccttcctt

SEQ ID NO: 1654235 - DNA, 15 bp, Homo sapiens
aaccttgaccttcct

SEQ ID NO: 1654236 - DNA, 15 bp, Homo sapiens
aaaccttgaccttcc

SEQ ID NO: 1654237 - DNA, 15 bp, Homo sapiens
aaaaccttgaccttc

SEQ ID NO: 1654238 - DNA, 15 bp, Homo sapiens
caaaaccttgacctt

SEQ ID NO: 1654239 - DNA, 15 bp, Homo sapiens
tcaaaaccttgacct

SEQ ID NO: 1654240 - DNA, 15 bp, Homo sapiens
gtcaaaaccttgacc

SEQ ID NO: 1654241 - DNA, 15 bp, Homo sapiens
agtcaaaaccttgac

SEQ ID NO: 1654242 - DNA, 15 bp, Homo sapiens
aagtcaaaaccttga

SEQ ID NO: 1654243 - DNA, 15 bp, Homo sapiens
gaagtcaaaaccttg

SEQ ID NO: 1654244 - DNA, 15 bp, Homo sapiens
tgaagtcaaaacctt

SEQ ID NO: 1654245 - DNA, 15 bp, Homo sapiens
gtgaagtcaaaacct

SEQ ID NO: 1654246 - DNA, 15 bp, Homo sapiens
agtgaagtcaaaacc

SEQ ID NO: 1654247 - DNA, 15 bp, Homo sapiens
aagtgaagtcaaaac

SEQ ID NO: 1654248 - DNA, 15 bp, Homo sapiens
gaagtgaagtcaaaa

SEQ ID NO: 1654249 - DNA, 15 bp, Homo sapiens
agaagtgaagtcaaa

SEQ ID NO: 1654250 - DNA, 15 bp, Homo sapiens
gagaagtgaagtcaa

SEQ ID NO: 1654251 - DNA, 15 bp, Homo sapiens
ggagaagtgaagtca

SEQ ID NO: 1654252 - DNA, 15 bp, Homo sapiens
tggagaagtgaagtc

SEQ ID NO: 1654253 - DNA, 15 bp, Homo sapiens
gtggagaagtgaagt

SEQ ID NO: 1654254 - DNA, 15 bp, Homo sapiens
agtggagaagtgaag

SEQ ID NO: 1654255 - DNA, 15 bp, Homo sapiens
tagtggagaagtgaa

SEQ ID NO: 1654256 - DNA, 15 bp, Homo sapiens
gtagtggagaagtga

SEQ ID NO: 1654257 - DNA, 15 bp, Homo sapiens
ggtagtggagaagtg

SEQ ID NO: 1654258 - DNA, 15 bp, Homo sapiens
gggtagtggagaagt

SEQ ID NO: 1654259 - DNA, 15 bp, Homo sapiens
agggtagtggagaag

SEQ ID NO: 1654260 - DNA, 15 bp, Homo sapiens
gagggtagtggagaa

SEQ ID NO: 1654261 - DNA, 15 bp, Homo sapiens
agagggtagtggaga

SEQ ID NO: 1654262 - DNA, 15 bp, Homo sapiens
aagagggtagtggag

SEQ ID NO: 1654263 - DNA, 15 bp, Homo sapiens
caagagggtagtgga

SEQ ID NO: 1654264 - DNA, 15 bp, Homo sapiens
ccaagagggtagtgg

SEQ ID NO: 1654265 - DNA, 15 bp, Homo sapiens
gccaagagggtagtg

SEQ ID NO: 1654266 - DNA, 15 bp, Homo sapiens
tgccaagagggtagt

SEQ ID NO: 1654267 - DNA, 15 bp, Homo sapiens
ttgccaagagggtag

SEQ ID NO: 1654268 - DNA, 15 bp, Homo sapiens
tttgccaagagggta

SEQ ID NO: 1654269 - DNA, 15 bp, Homo sapiens
ttttgccaagagggt

SEQ ID NO: 1654270 - DNA, 15 bp, Homo sapiens
tttttgccaagaggg

SEQ ID NO: 1654271 - DNA, 15 bp, Homo sapiens
ctttttgccaagagg

SEQ ID NO: 1654272 - DNA, 15 bp, Homo sapiens
cctttttgccaagag

SEQ ID NO: 1654273 - DNA, 15 bp, Homo sapiens
acctttttgccaaga

SEQ ID NO: 1654274 - DNA, 15 bp, Homo sapiens
aacctttttgccaag

SEQ ID NO: 1654275 - DNA, 15 bp, Homo sapiens
gaacctttttgccaa

SEQ ID NO: 1654276 - DNA, 15 bp, Homo sapiens
ggaacctttttgcca

SEQ ID NO: 1654277 - DNA, 15 bp, Homo sapiens
tggaacctttttgcc

SEQ ID NO: 1654278 - DNA, 15 bp, Homo sapiens
ttggaacctttttgc

SEQ ID NO: 1654279 - DNA, 15 bp, Homo sapiens
tttggaacctttttg

SEQ ID NO: 1654280 - DNA, 15 bp, Homo sapiens
gtttggaaccttttt

SEQ ID NO: 1654281 - DNA, 15 bp, Homo sapiens
agtttggaacctttt

SEQ ID NO: 1654282 - DNA, 15 bp, Homo sapiens
aagtttggaaccttt

SEQ ID NO: 1654283 - DNA, 15 bp, Homo sapiens
taagtttggaacctt

SEQ ID NO: 1654284 - DNA, 15 bp, Homo sapiens
ttaagtttggaacct

SEQ ID NO: 1654285 - DNA, 15 bp, Homo sapiens
tttaagtttggaacc

SEQ ID NO: 1654286 - DNA, 15 bp, Homo sapiens
ttttaagtttggaac

SEQ ID NO: 1654287 - DNA, 15 bp, Homo sapiens
tttttaagtttggaa

SEQ ID NO: 1654288 - DNA, 15 bp, Homo sapiens
ctttttaagtttgga

SEQ ID NO: 1654289 - DNA, 15 bp, Homo sapiens
actttttaagtttgg

SEQ ID NO: 1654290 - DNA, 15 bp, Homo sapiens
tactttttaagtttg

SEQ ID NO: 1654291 - DNA, 15 bp, Homo sapiens
atactttttaagttt

SEQ ID NO: 1654292 - DNA, 15 bp, Homo sapiens
gatactttttaagtt

SEQ ID NO: 1654293 - DNA, 15 bp, Homo sapiens
agatactttttaagt

SEQ ID NO: 1654294 - DNA, 15 bp, Homo sapiens
tagatactttttaag

SEQ ID NO: 1654295 - DNA, 15 bp, Homo sapiens
gtagatactttttaa

SEQ ID NO: 1654296 - DNA, 15 bp, Homo sapiens
cgtagatacttttta

SEQ ID NO: 1654297 - DNA, 15 bp, Homo sapiens
tcgtagatacttttt

SEQ ID NO: 1654298 - DNA, 15 bp, Homo sapiens
atcgtagatactttt

SEQ ID NO: 1654299 - DNA, 15 bp, Homo sapiens
tatcgtagatacttt

SEQ ID NO: 1654300 - DNA, 15 bp, Homo sapiens
atatcgtagatactt

SEQ ID NO: 1654301 - DNA, 15 bp, Homo sapiens
catatcgtagatact

SEQ ID NO: 1654302 - DNA, 15 bp, Homo sapiens
gcatatcgtagatac

SEQ ID NO: 1654303 - DNA, 15 bp, Homo sapiens
tgcatatcgtagata

SEQ ID NO: 1654304 - DNA, 15 bp, Homo sapiens
atgcatatcgtagat

SEQ ID NO: 1654305 - DNA, 15 bp, Homo sapiens
aatgcatatcgtaga

SEQ ID NO: 1654306 - DNA, 15 bp, Homo sapiens
taatgcatatcgtag

SEQ ID NO: 1654307 - DNA, 15 bp, Homo sapiens
ataatgcatatcgta

SEQ ID NO: 1654308 - DNA, 15 bp, Homo sapiens
gataatgcatatcgt

SEQ ID NO: 1654309 - DNA, 15 bp, Homo sapiens
ggataatgcatatcg

SEQ ID NO: 1654310 - DNA, 15 bp, Homo sapiens
tggataatgcatatc

SEQ ID NO: 1654311 - DNA, 15 bp, Homo sapiens
atggataatgcatat

SEQ ID NO: 1654312 - DNA, 15 bp, Homo sapiens
catggataatgcata

SEQ ID NO: 1654313 - DNA, 15 bp, Homo sapiens
ccatggataatgcat

SEQ ID NO: 1654314 - DNA, 15 bp, Homo sapiens
accatggataatgca

SEQ ID NO: 1654315 - DNA, 15 bp, Homo sapiens
gaccatggataatgc

SEQ ID NO: 1654316 - DNA, 15 bp, Homo sapiens
tgaccatggataatg

SEQ ID NO: 1654317 - DNA, 15 bp, Homo sapiens
atgaccatggataat

SEQ ID NO: 1654318 - DNA, 15 bp, Homo sapiens
gatgaccatggataa

SEQ ID NO: 1654319 - DNA, 15 bp, Homo sapiens
agatgaccatggata

SEQ ID NO: 1654320 - DNA, 15 bp, Homo sapiens
cagatgaccatggat

SEQ ID NO: 1654321 - DNA, 15 bp, Homo sapiens
acagatgaccatgga

SEQ ID NO: 1654322 - DNA, 15 bp, Homo sapiens
aacagatgaccatgg

SEQ ID NO: 1654323 - DNA, 15 bp, Homo sapiens
gaacagatgaccatg

SEQ ID NO: 1654324 - DNA, 15 bp, Homo sapiens
agaacagatgaccat

SEQ ID NO: 1654325 - DNA, 15 bp, Homo sapiens
aagaacagatgacca

SEQ ID NO: 1654326 - DNA, 15 bp, Homo sapiens
caagaacagatgacc

SEQ ID NO: 1654327 - DNA, 15 bp, Homo sapiens
ccaagaacagatgac

SEQ ID NO: 1654328 - DNA, 15 bp, Homo sapiens
cccaagaacagatga

SEQ ID NO: 1654329 - DNA, 15 bp, Homo sapiens
gcccaagaacagatg

SEQ ID NO: 1654330 - DNA, 15 bp, Homo sapiens
tgcccaagaacagat

SEQ ID NO: 1654331 - DNA, 15 bp, Homo sapiens
ctgcccaagaacaga

SEQ ID NO: 1654332 - DNA, 15 bp, Homo sapiens
tctgcccaagaacag

SEQ ID NO: 1654333 - DNA, 15 bp, Homo sapiens
ttctgcccaagaaca

SEQ ID NO: 1654334 - DNA, 15 bp, Homo sapiens
tttctgcccaagaac

SEQ ID NO: 1654335 - DNA, 15 bp, Homo sapiens
atttctgcccaagaa

SEQ ID NO: 1654336 - DNA, 15 bp, Homo sapiens
catttctgcccaaga

SEQ ID NO: 1654337 - DNA, 15 bp, Homo sapiens
acatttctgcccaag

SEQ ID NO: 1654338 - DNA, 15 bp, Homo sapiens
tacatttctgcccaa

SEQ ID NO: 1654339 - DNA, 15 bp, Homo sapiens
ctacatttctgccca

SEQ ID NO: 1654340 - DNA, 15 bp, Homo sapiens
actacatttctgccc

SEQ ID NO: 1654341 - DNA, 15 bp, Homo sapiens
tactacatttctgcc

SEQ ID NO: 1654342 - DNA, 15 bp, Homo sapiens
ttactacatttctgc

SEQ ID NO: 1654343 - DNA, 15 bp, Homo sapiens
tttactacatttctg

SEQ ID NO: 1654344 - DNA, 15 bp, Homo sapiens
ttttactacatttct

SEQ ID NO: 1654345 - DNA, 15 bp, Homo sapiens
attttactacatttc

SEQ ID NO: 1654346 - DNA, 15 bp, Homo sapiens
aattttactacattt

SEQ ID NO: 1654347 - DNA, 15 bp, Homo sapiens
caattttactacatt

SEQ ID NO: 1654348 - DNA, 15 bp, Homo sapiens
acaattttactacat

SEQ ID NO: 1654349 - DNA, 15 bp, Homo sapiens
cacaattttactaca

SEQ ID NO: 1654350 - DNA, 15 bp, Homo sapiens
ccacaattttactac

SEQ ID NO: 1654351 - DNA, 15 bp, Homo sapiens
tccacaattttacta

SEQ ID NO: 1654352 - DNA, 15 bp, Homo sapiens
ttccacaattttact

SEQ ID NO: 1654353 - DNA, 15 bp, Homo sapiens
cttccacaattttac

SEQ ID NO: 1654354 - DNA, 15 bp, Homo sapiens
ccttccacaatttta

SEQ ID NO: 1654355 - DNA, 15 bp, Homo sapiens
tccttccacaatttt

SEQ ID NO: 1654356 - DNA, 15 bp, Homo sapiens
ctccttccacaattt

SEQ ID NO: 1654357 - DNA, 15 bp, Homo sapiens
gctccttccacaatt

SEQ ID NO: 1654358 - DNA, 15 bp, Homo sapiens
ggctccttccacaat

SEQ ID NO: 1654359 - DNA, 15 bp, Homo sapiens
cggctccttccacaa

SEQ ID NO: 1654360 - DNA, 15 bp, Homo sapiens
tcggctccttccaca

SEQ ID NO: 1654361 - DNA, 15 bp, Homo sapiens
ttcggctccttccac

SEQ ID NO: 1654362 - DNA, 15 bp, Homo sapiens
cttcggctccttcca

SEQ ID NO: 1654363 - DNA, 15 bp, Homo sapiens
acttcggctccttcc

SEQ ID NO: 1654364 - DNA, 15 bp, Homo sapiens
tacttcggctccttc

SEQ ID NO: 1654365 - DNA, 15 bp, Homo sapiens
atacttcggctcctt

SEQ ID NO: 1654366 - DNA, 15 bp, Homo sapiens
aatacttcggctcct

SEQ ID NO: 1654367 - DNA, 15 bp, Homo sapiens
taatacttcggctcc

SEQ ID NO: 1654368 - DNA, 15 bp, Homo sapiens
ctaatacttcggctc

SEQ ID NO: 1654369 - DNA, 15 bp, Homo sapiens
tctaatacttcggct

SEQ ID NO: 1654370 - DNA, 15 bp, Homo sapiens
atctaatacttcggc

SEQ ID NO: 1654371 - DNA, 15 bp, Homo sapiens
aatctaatacttcgg

SEQ ID NO: 1654372 - DNA, 15 bp, Homo sapiens
aaatctaatacttcg

SEQ ID NO: 1654373 - DNA, 15 bp, Homo sapiens
taaatctaatacttc

SEQ ID NO: 1654374 - DNA, 15 bp, Homo sapiens
ataaatctaatactt

SEQ ID NO: 1654375 - DNA, 15 bp, Homo sapiens
cataaatctaatact

SEQ ID NO: 1654376 - DNA, 15 bp, Homo sapiens
gcataaatctaatac

SEQ ID NO: 1654377 - DNA, 15 bp, Homo sapiens
ggcataaatctaata

SEQ ID NO: 1654378 - DNA, 15 bp, Homo sapiens
gggcataaatctaat

SEQ ID NO: 1654379 - DNA, 15 bp, Homo sapiens
agggcataaatctaa

SEQ ID NO: 1654380 - DNA, 15 bp, Homo sapiens
gagggcataaatcta

SEQ ID NO: 1654381 - DNA, 15 bp, Homo sapiens
tgagggcataaatct

SEQ ID NO: 1654382 - DNA, 15 bp, Homo sapiens
ttgagggcataaatc

SEQ ID NO: 1654383 - DNA, 15 bp, Homo sapiens
attgagggcataaat

SEQ ID NO: 1654384 - DNA, 15 bp, Homo sapiens
gattgagggcataaa

SEQ ID NO: 1654385 - DNA, 15 bp, Homo sapiens
agattgagggcataa

SEQ ID NO: 1654386 - DNA, 15 bp, Homo sapiens
gagattgagggcata

SEQ ID NO: 1654387 - DNA, 15 bp, Homo sapiens
agagattgagggcat

SEQ ID NO: 1654388 - DNA, 15 bp, Homo sapiens
cagagattgagggca

SEQ ID NO: 1654389 - DNA, 15 bp, Homo sapiens
tcagagattgagggc

SEQ ID NO: 1654390 - DNA, 15 bp, Homo sapiens
ttcagagattgaggg

SEQ ID NO: 1654391 - DNA, 15 bp, Homo sapiens
gttcagagattgagg

SEQ ID NO: 1654392 - DNA, 15 bp, Homo sapiens
agttcagagattgag

SEQ ID NO: 1654393 - DNA, 15 bp, Homo sapiens
aagttcagagattga

SEQ ID NO: 1654394 - DNA, 15 bp, Homo sapiens
aaagttcagagattg

SEQ ID NO: 1654395 - DNA, 15 bp, Homo sapiens
taaagttcagagatt

SEQ ID NO: 1654396 - DNA, 15 bp, Homo sapiens
ttaaagttcagagat

SEQ ID NO: 1654397 - DNA, 15 bp, Homo sapiens
tttaaagttcagaga

SEQ ID NO: 1654398 - DNA, 15 bp, Homo sapiens
ttttaaagttcagag

SEQ ID NO: 1654399 - DNA, 15 bp, Homo sapiens
attttaaagttcaga

SEQ ID NO: 1654400 - DNA, 15 bp, Homo sapiens
tattttaaagttcag

SEQ ID NO: 1654401 - DNA, 15 bp, Homo sapiens
gtattttaaagttca

SEQ ID NO: 1654402 - DNA, 15 bp, Homo sapiens
agtattttaaagttc

SEQ ID NO: 1654403 - DNA, 15 bp, Homo sapiens
gagtattttaaagtt

SEQ ID NO: 1654404 - DNA, 15 bp, Homo sapiens
tgagtattttaaagt

SEQ ID NO: 1654405 - DNA, 15 bp, Homo sapiens
ttgagtattttaaag

SEQ ID NO: 1654406 - DNA, 15 bp, Homo sapiens
cttgagtattttaaa

SEQ ID NO: 1654407 - DNA, 15 bp, Homo sapiens
gcttgagtattttaa

SEQ ID NO: 1654408 - DNA, 15 bp, Homo sapiens
agcttgagtatttta

SEQ ID NO: 1654409 - DNA, 15 bp, Homo sapiens
aagcttgagtatttt

SEQ ID NO: 1654410 - DNA, 15 bp, Homo sapiens
taagcttgagtattt

SEQ ID NO: 1654411 - DNA, 15 bp, Homo sapiens
ataagcttgagtatt

SEQ ID NO: 1654412 - DNA, 15 bp, Homo sapiens
cataagcttgagtat

SEQ ID NO: 1654413 - DNA, 15 bp, Homo sapiens
tcataagcttgagta

SEQ ID NO: 1654414 - DNA, 15 bp, Homo sapiens
ctcataagcttgagt

SEQ ID NO: 1654415 - DNA, 15 bp, Homo sapiens
tctcataagcttgag

SEQ ID NO: 1654416 - DNA, 15 bp, Homo sapiens
atctcataagcttga

SEQ ID NO: 1654417 - DNA, 15 bp, Homo sapiens
aatctcataagcttg

SEQ ID NO: 1654418 - DNA, 15 bp, Homo sapiens
aaatctcataagctt

SEQ ID NO: 1654419 - DNA, 15 bp, Homo sapiens
taaatctcataagct

SEQ ID NO: 1654420 - DNA, 15 bp, Homo sapiens
ctaaatctcataagc

SEQ ID NO: 1654421 - DNA, 15 bp, Homo sapiens
gctaaatctcataag

SEQ ID NO: 1654422 - DNA, 15 bp, Homo sapiens
tgctaaatctcataa

SEQ ID NO: 1654423 - DNA, 15 bp, Homo sapiens
ttgctaaatctcata

SEQ ID NO: 1654424 - DNA, 15 bp, Homo sapiens
attgctaaatctcat

SEQ ID NO: 1654425 - DNA, 15 bp, Homo sapiens
gattgctaaatctca

SEQ ID NO: 1654426 - DNA, 15 bp, Homo sapiens
tgattgctaaatctc

SEQ ID NO: 1654427 - DNA, 15 bp, Homo sapiens
gtgattgctaaatct

SEQ ID NO: 1654428 - DNA, 15 bp, Homo sapiens
agtgattgctaaatc

SEQ ID NO: 1654429 - DNA, 15 bp, Homo sapiens
tagtgattgctaaat

SEQ ID NO: 1654430 - DNA, 15 bp, Homo sapiens
ttagtgattgctaaa

SEQ ID NO: 1654431 - DNA, 15 bp, Homo sapiens
attagtgattgctaa

SEQ ID NO: 1654432 - DNA, 15 bp, Homo sapiens
aattagtgattgcta

SEQ ID NO: 1654433 - DNA, 15 bp, Homo sapiens
aaattagtgattgct

SEQ ID NO: 1654434 - DNA, 15 bp, Homo sapiens
caaattagtgattgc

SEQ ID NO: 1654435 - DNA, 15 bp, Homo sapiens
gcaaattagtgattg

SEQ ID NO: 1654436 - DNA, 15 bp, Homo sapiens
ggcaaattagtgatt

SEQ ID NO: 1654437 - DNA, 15 bp, Homo sapiens
tggcaaattagtgat

SEQ ID NO: 1654438 - DNA, 15 bp, Homo sapiens
ttggcaaattagtga

SEQ ID NO: 1654439 - DNA, 15 bp, Homo sapiens
gttggcaaattagtg

SEQ ID NO: 1654440 - DNA, 15 bp, Homo sapiens
ggttggcaaattagt

SEQ ID NO: 1654441 - DNA, 15 bp, Homo sapiens
aggttggcaaattag

SEQ ID NO: 1654442 - DNA, 15 bp, Homo sapiens
aaggttggcaaatta

SEQ ID NO: 1654443 - DNA, 15 bp, Homo sapiens
gaaggttggcaaatt

SEQ ID NO: 1654444 - DNA, 15 bp, Homo sapiens
cgaaggttggcaaat

SEQ ID NO: 1654445 - DNA, 15 bp, Homo sapiens
gcgaaggttggcaaa

SEQ ID NO: 1654446 - DNA, 15 bp, Homo sapiens
tgcgaaggttggcaa

SEQ ID NO: 1654447 - DNA, 15 bp, Homo sapiens
ttgcgaaggttggca

SEQ ID NO: 1654448 - DNA, 15 bp, Homo sapiens
tttgcgaaggttggc

SEQ ID NO: 1654449 - DNA, 15 bp, Homo sapiens
atttgcgaaggttgg

SEQ ID NO: 1654450 - DNA, 15 bp, Homo sapiens
tatttgcgaaggttg

SEQ ID NO: 1654451 - DNA, 15 bp, Homo sapiens
ctatttgcgaaggtt

SEQ ID NO: 1654452 - DNA, 15 bp, Homo sapiens
gctatttgcgaaggt

SEQ ID NO: 1654453 - DNA, 15 bp, Homo sapiens
ggctatttgcgaagg

SEQ ID NO: 1654454 - DNA, 15 bp, Homo sapiens
tggctatttgcgaag

SEQ ID NO: 1654455 - DNA, 15 bp, Homo sapiens
ttggctatttgcgaa

SEQ ID NO: 1654456 - DNA, 15 bp, Homo sapiens
tttggctatttgcga

SEQ ID NO: 1654457 - DNA, 15 bp, Homo sapiens
gtttggctatttgcg

SEQ ID NO: 1654458 - DNA, 15 bp, Homo sapiens
tgtttggctatttgc

SEQ ID NO: 1654459 - DNA, 15 bp, Homo sapiens
gtgtttggctatttg

SEQ ID NO: 1654460 - DNA, 15 bp, Homo sapiens
tgtgtttggctattt

SEQ ID NO: 1654461 - DNA, 15 bp, Homo sapiens
ttgtgtttggctatt

SEQ ID NO: 1654462 - DNA, 15 bp, Homo sapiens
attgtgtttggctat

SEQ ID NO: 1654463 - DNA, 15 bp, Homo sapiens
cattgtgtttggcta

SEQ ID NO: 1654464 - DNA, 15 bp, Homo sapiens
ccattgtgtttggct

SEQ ID NO: 1654465 - DNA, 15 bp, Homo sapiens
gccattgtgtttggc

SEQ ID NO: 1654466 - DNA, 15 bp, Homo sapiens
agccattgtgtttgg

SEQ ID NO: 1654467 - DNA, 15 bp, Homo sapiens
tagccattgtgtttg

SEQ ID NO: 1654468 - DNA, 15 bp, Homo sapiens
atagccattgtgttt

SEQ ID NO: 1654469 - DNA, 15 bp, Homo sapiens
catagccattgtgtt

SEQ ID NO: 1654470 - DNA, 15 bp, Homo sapiens
gcatagccattgtgt

SEQ ID NO: 1654471 - DNA, 15 bp, Homo sapiens
agcatagccattgtg

SEQ ID NO: 1654472 - DNA, 15 bp, Homo sapiens
gagcatagccattgt

SEQ ID NO: 1654473 - DNA, 15 bp, Homo sapiens
agagcatagccattg

SEQ ID NO: 1654474 - DNA, 15 bp, Homo sapiens
tagagcatagccatt

SEQ ID NO: 1654475 - DNA, 15 bp, Homo sapiens
atagagcatagccat

SEQ ID NO: 1654476 - DNA, 15 bp, Homo sapiens
gatagagcatagcca

SEQ ID NO: 1654477 - DNA, 15 bp, Homo sapiens
ggatagagcatagcc

SEQ ID NO: 1654478 - DNA, 15 bp, Homo sapiens
gggatagagcatagc

SEQ ID NO: 1654479 - DNA, 15 bp, Homo sapiens
agggatagagcatag

SEQ ID NO: 1654480 - DNA, 15 bp, Homo sapiens
aagggatagagcata

SEQ ID NO: 1654481 - DNA, 15 bp, Homo sapiens
aaagggatagagcat

SEQ ID NO: 1654482 - DNA, 15 bp, Homo sapiens
gaaagggatagagca

SEQ ID NO: 1654483 - DNA, 15 bp, Homo sapiens
tgaaagggatagagc

SEQ ID NO: 1654484 - DNA, 15 bp, Homo sapiens
atgaaagggatagag

SEQ ID NO: 1654485 - DNA, 15 bp, Homo sapiens
gatgaaagggataga

SEQ ID NO: 1654486 - DNA, 15 bp, Homo sapiens
agatgaaagggatag

SEQ ID NO: 1654487 - DNA, 15 bp, Homo sapiens
gagatgaaagggata

SEQ ID NO: 1654488 - DNA, 15 bp, Homo sapiens
agagatgaaagggat

SEQ ID NO: 1654489 - DNA, 15 bp, Homo sapiens
aagagatgaaaggga

SEQ ID NO: 1654490 - DNA, 15 bp, Homo sapiens
aaagagatgaaaggg

SEQ ID NO: 1654491 - DNA, 15 bp, Homo sapiens
gaaagagatgaaagg

SEQ ID NO: 1654492 - DNA, 15 bp, Homo sapiens
ggaaagagatgaaag

SEQ ID NO: 1654493 - DNA, 15 bp, Homo sapiens
tggaaagagatgaaa

SEQ ID NO: 1654494 - DNA, 15 bp, Homo sapiens
atggaaagagatgaa

SEQ ID NO: 1654495 - DNA, 15 bp, Homo sapiens
catggaaagagatga

SEQ ID NO: 1654496 - DNA, 15 bp, Homo sapiens
ccatggaaagagatg

SEQ ID NO: 1654497 - DNA, 15 bp, Homo sapiens
gccatggaaagagat

SEQ ID NO: 1654498 - DNA, 15 bp, Homo sapiens
agccatggaaagaga

SEQ ID NO: 1654499 - DNA, 15 bp, Homo sapiens
gagccatggaaagag

SEQ ID NO: 1654500 - DNA, 15 bp, Homo sapiens
ggagccatggaaaga

SEQ ID NO: 1654501 - DNA, 15 bp, Homo sapiens
tggagccatggaaag

SEQ ID NO: 1654502 - DNA, 15 bp, Homo sapiens
ttggagccatggaaa

SEQ ID NO: 1654503 - DNA, 15 bp, Homo sapiens
tttggagccatggaa

SEQ ID NO: 1654504 - DNA, 15 bp, Homo sapiens
ttttggagccatgga

SEQ ID NO: 1654505 - DNA, 15 bp, Homo sapiens
cttttggagccatgg

SEQ ID NO: 1654506 - DNA, 15 bp, Homo sapiens
tcttttggagccatg

SEQ ID NO: 1654507 - DNA, 15 bp, Homo sapiens
ctcttttggagccat

SEQ ID NO: 1654508 - DNA, 15 bp, Homo sapiens
cctcttttggagcca

SEQ ID NO: 1654509 - DNA, 15 bp, Homo sapiens
acctcttttggagcc

SEQ ID NO: 1654510 - DNA, 15 bp, Homo sapiens
tacctcttttggagc

SEQ ID NO: 1654511 - DNA, 15 bp, Homo sapiens
ttacctcttttggag

SEQ ID NO: 1654512 - DNA, 15 bp, Homo sapiens
tttacctcttttgga

SEQ ID NO: 1654513 - DNA, 15 bp, Homo sapiens
ttttacctcttttgg

SEQ ID NO: 1654514 - DNA, 15 bp, Homo sapiens
tttttacctcttttg

SEQ ID NO: 1654515 - DNA, 15 bp, Homo sapiens
ttttttacctctttt

SEQ ID NO: 1654516 - DNA, 15 bp, Homo sapiens
gttttttacctcttt

SEQ ID NO: 1654517 - DNA, 15 bp, Homo sapiens
tgttttttacctctt

SEQ ID NO: 1654518 - DNA, 15 bp, Homo sapiens
ttgttttttacctct

SEQ ID NO: 1654519 - DNA, 15 bp, Homo sapiens
tttgttttttacctc

SEQ ID NO: 1654520 - DNA, 15 bp, Homo sapiens
atttgttttttacct

SEQ ID NO: 1654521 - DNA, 15 bp, Homo sapiens
catttgttttttacc

SEQ ID NO: 1654522 - DNA, 15 bp, Homo sapiens
tcatttgttttttac

SEQ ID NO: 1654523 - DNA, 15 bp, Homo sapiens
ttcatttgtttttta

SEQ ID NO: 1654524 - DNA, 15 bp, Homo sapiens
tttcatttgtttttt

SEQ ID NO: 1654525 - DNA, 15 bp, Homo sapiens
atttcatttgttttt

SEQ ID NO: 1654526 - DNA, 15 bp, Homo sapiens
aatttcatttgtttt

SEQ ID NO: 1654527 - DNA, 15 bp, Homo sapiens
taatttcatttgttt

SEQ ID NO: 1654528 - DNA, 15 bp, Homo sapiens
ttaatttcatttgtt

SEQ ID NO: 1654529 - DNA, 15 bp, Homo sapiens
tttaatttcatttgt

SEQ ID NO: 1654530 - DNA, 15 bp, Homo sapiens
ttttaatttcatttg

SEQ ID NO: 1654531 - DNA, 15 bp, Homo sapiens
attttaatttcattt

SEQ ID NO: 1654532 - DNA, 15 bp, Homo sapiens
tattttaatttcatt

SEQ ID NO: 1654533 - DNA, 15 bp, Homo sapiens
ttattttaatttcat

SEQ ID NO: 1654534 - DNA, 15 bp, Homo sapiens
tttattttaatttca

SEQ ID NO: 1654535 - DNA, 15 bp, Homo sapiens
gtttattttaatttc

SEQ ID NO: 1654536 - DNA, 15 bp, Homo sapiens
ggtttattttaattt

SEQ ID NO: 1654537 - DNA, 15 bp, Homo sapiens
tggtttattttaatt

SEQ ID NO: 1654538 - DNA, 15 bp, Homo sapiens
ttggtttattttaat

SEQ ID NO: 1654539 - DNA, 15 bp, Homo sapiens
gttggtttattttaa

SEQ ID NO: 1654540 - DNA, 15 bp, Homo sapiens
agttggtttatttta

SEQ ID NO: 1654541 - DNA, 15 bp, Homo sapiens
cagttggtttatttt

SEQ ID NO: 1654542 - DNA, 15 bp, Homo sapiens
ccagttggtttattt

SEQ ID NO: 1654543 - DNA, 15 bp, Homo sapiens
tccagttggtttatt

SEQ ID NO: 1654544 - DNA, 15 bp, Homo sapiens
gtccagttggtttat

SEQ ID NO: 1654545 - DNA, 15 bp, Homo sapiens
agtccagttggttta

SEQ ID NO: 1654546 - DNA, 15 bp, Homo sapiens
tagtccagttggttt

SEQ ID NO: 1654547 - DNA, 15 bp, Homo sapiens
atagtccagttggtt

SEQ ID NO: 1654548 - DNA, 15 bp, Homo sapiens
gatagtccagttggt

SEQ ID NO: 1654549 - DNA, 15 bp, Homo sapiens
ggatagtccagttgg

SEQ ID NO: 1654550 - DNA, 15 bp, Homo sapiens
tggatagtccagttg

SEQ ID NO: 1654551 - DNA, 15 bp, Homo sapiens
ctggatagtccagtt

SEQ ID NO: 1654552 - DNA, 15 bp, Homo sapiens
tctggatagtccagt

SEQ ID NO: 1654553 - DNA, 15 bp, Homo sapiens
atctggatagtccag

SEQ ID NO: 1654554 - DNA, 15 bp, Homo sapiens
catctggatagtcca

SEQ ID NO: 1654555 - DNA, 15 bp, Homo sapiens
ccatctggatagtcc

SEQ ID NO: 1654556 - DNA, 15 bp, Homo sapiens
gccatctggatagtc

SEQ ID NO: 1654557 - DNA, 15 bp, Homo sapiens
agccatctggatagt

SEQ ID NO: 1654558 - DNA, 15 bp, Homo sapiens
cagccatctggatag

SEQ ID NO: 1654559 - DNA, 15 bp, Homo sapiens
gcagccatctggata

SEQ ID NO: 1654560 - DNA, 15 bp, Homo sapiens
tgcagccatctggat

SEQ ID NO: 1654561 - DNA, 15 bp, Homo sapiens
ttgcagccatctgga

SEQ ID NO: 1654562 - DNA, 15 bp, Homo sapiens
attgcagccatctgg

SEQ ID NO: 1654563 - DNA, 15 bp, Homo sapiens
tattgcagccatctg

SEQ ID NO: 1654564 - DNA, 15 bp, Homo sapiens
atattgcagccatct

SEQ ID NO: 1654565 - DNA, 15 bp, Homo sapiens
aatattgcagccatc

SEQ ID NO: 1654566 - DNA, 15 bp, Homo sapiens
taatattgcagccat

SEQ ID NO: 1654567 - DNA, 15 bp, Homo sapiens
ttaatattgcagcca

SEQ ID NO: 1654568 - DNA, 15 bp, Homo sapiens
attaatattgcagcc

SEQ ID NO: 1654569 - DNA, 15 bp, Homo sapiens
gattaatattgcagc

SEQ ID NO: 1654570 - DNA, 15 bp, Homo sapiens
ggattaatattgcag

SEQ ID NO: 1654571 - DNA, 15 bp, Homo sapiens
aggattaatattgca

SEQ ID NO: 1654572 - DNA, 15 bp, Homo sapiens
taggattaatattgc

SEQ ID NO: 1654573 - DNA, 15 bp, Homo sapiens
ataggattaatattg

SEQ ID NO: 1654574 - DNA, 15 bp, Homo sapiens
gataggattaatatt

SEQ ID NO: 1654575 - DNA, 15 bp, Homo sapiens
agataggattaatat

SEQ ID NO: 1654576 - DNA, 15 bp, Homo sapiens
aagataggattaata

SEQ ID NO: 1654577 - DNA, 15 bp, Homo sapiens
caagataggattaat

SEQ ID NO: 1654578 - DNA, 15 bp, Homo sapiens
ccaagataggattaa

SEQ ID NO: 1654579 - DNA, 15 bp, Homo sapiens
gccaagataggatta

SEQ ID NO: 1654580 - DNA, 15 bp, Homo sapiens
agccaagataggatt

SEQ ID NO: 1654581 - DNA, 15 bp, Homo sapiens
aagccaagataggat

SEQ ID NO: 1654582 - DNA, 15 bp, Homo sapiens
taagccaagatagga

SEQ ID NO: 1654583 - DNA, 15 bp, Homo sapiens
ttaagccaagatagg

SEQ ID NO: 1654584 - DNA, 15 bp, Homo sapiens
tttaagccaagatag

SEQ ID NO: 1654585 - DNA, 15 bp, Homo sapiens
ctttaagccaagata

SEQ ID NO: 1654586 - DNA, 15 bp, Homo sapiens
tctttaagccaagat

SEQ ID NO: 1654587 - DNA, 15 bp, Homo sapiens
ctctttaagccaaga

SEQ ID NO: 1654588 - DNA, 15 bp, Homo sapiens
tctctttaagccaag

SEQ ID NO: 1654589 - DNA, 15 bp, Homo sapiens
ttctctttaagccaa

SEQ ID NO: 1654590 - DNA, 15 bp, Homo sapiens
tttctctttaagcca

SEQ ID NO: 1654591 - DNA, 15 bp, Homo sapiens
ttttctctttaagcc

SEQ ID NO: 1654592 - DNA, 15 bp, Homo sapiens
tttttctctttaagc

SEQ ID NO: 1654593 - DNA, 15 bp, Homo sapiens
ctttttctctttaag

SEQ ID NO: 1654594 - DNA, 15 bp, Homo sapiens
gctttttctctttaa

SEQ ID NO: 1654595 - DNA, 15 bp, Homo sapiens
tgctttttctcttta

SEQ ID NO: 1654596 - DNA, 15 bp, Homo sapiens
ttgctttttctcttt

SEQ ID NO: 1654597 - DNA, 15 bp, Homo sapiens
tttgctttttctctt

SEQ ID NO: 1654598 - DNA, 15 bp, Homo sapiens
gtttgctttttctct

SEQ ID NO: 1654599 - DNA, 15 bp, Homo sapiens
ggtttgctttttctc

SEQ ID NO: 1654600 - DNA, 15 bp, Homo sapiens
gggtttgctttttct

SEQ ID NO: 1654601 - DNA, 15 bp, Homo sapiens
tgggtttgctttttc

SEQ ID NO: 1654602 - DNA, 15 bp, Homo sapiens
gtgggtttgcttttt

SEQ ID NO: 1654603 - DNA, 15 bp, Homo sapiens
agtgggtttgctttt

SEQ ID NO: 1654604 - DNA, 15 bp, Homo sapiens
aagtgggtttgcttt

SEQ ID NO: 1654605 - DNA, 15 bp, Homo sapiens
gaagtgggtttgctt

SEQ ID NO: 1654606 - DNA, 15 bp, Homo sapiens
ggaagtgggtttgct

SEQ ID NO: 1654607 - DNA, 15 bp, Homo sapiens
aggaagtgggtttgc

SEQ ID NO: 1654608 - DNA, 15 bp, Homo sapiens
aaggaagtgggtttg

SEQ ID NO: 1654609 - DNA, 15 bp, Homo sapiens
taaggaagtgggttt

SEQ ID NO: 1654610 - DNA, 15 bp, Homo sapiens
ttaaggaagtgggtt

SEQ ID NO: 1654611 - DNA, 15 bp, Homo sapiens
cttaaggaagtgggt

SEQ ID NO: 1654612 - DNA, 15 bp, Homo sapiens
acttaaggaagtggg

SEQ ID NO: 1654613 - DNA, 15 bp, Homo sapiens
aacttaaggaagtgg

SEQ ID NO: 1654614 - DNA, 15 bp, Homo sapiens
aaacttaaggaagtg

SEQ ID NO: 1654615 - DNA, 15 bp, Homo sapiens
taaacttaaggaagt

SEQ ID NO: 1654616 - DNA, 15 bp, Homo sapiens
ataaacttaaggaag

SEQ ID NO: 1654617 - DNA, 15 bp, Homo sapiens
aataaacttaaggaa

SEQ ID NO: 1654618 - DNA, 15 bp, Homo sapiens
gaataaacttaagga

SEQ ID NO: 1654619 - DNA, 15 bp, Homo sapiens
agaataaacttaagg

SEQ ID NO: 1654620 - DNA, 15 bp, Homo sapiens
tagaataaacttaag

SEQ ID NO: 1654621 - DNA, 15 bp, Homo sapiens
atagaataaacttaa

SEQ ID NO: 1654622 - DNA, 15 bp, Homo sapiens
gatagaataaactta

SEQ ID NO: 1654623 - DNA, 15 bp, Homo sapiens
tgatagaataaactt

SEQ ID NO: 1654624 - DNA, 15 bp, Homo sapiens
ttgatagaataaact

SEQ ID NO: 1654625 - DNA, 15 bp, Homo sapiens
gttgatagaataaac

SEQ ID NO: 1654626 - DNA, 15 bp, Homo sapiens
agttgatagaataaa

SEQ ID NO: 1654627 - DNA, 15 bp, Homo sapiens
aagttgatagaataa

SEQ ID NO: 1654628 - DNA, 15 bp, Homo sapiens
gaagttgatagaata

SEQ ID NO: 1654629 - DNA, 15 bp, Homo sapiens
tgaagttgatagaat

SEQ ID NO: 1654630 - DNA, 15 bp, Homo sapiens
ttgaagttgatagaa

SEQ ID NO: 1654631 - DNA, 15 bp, Homo sapiens
tttgaagttgataga

SEQ ID NO: 1654632 - DNA, 15 bp, Homo sapiens
atttgaagttgatag

SEQ ID NO: 1654633 - DNA, 15 bp, Homo sapiens
gatttgaagttgata

SEQ ID NO: 1654634 - DNA, 15 bp, Homo sapiens
ggatttgaagttgat

SEQ ID NO: 1654635 - DNA, 15 bp, Homo sapiens
aggatttgaagttga

SEQ ID NO: 1654636 - DNA, 15 bp, Homo sapiens
aaggatttgaagttg

SEQ ID NO: 1654637 - DNA, 15 bp, Homo sapiens
caaggatttgaagtt

SEQ ID NO: 1654638 - DNA, 15 bp, Homo sapiens
acaaggatttgaagt

SEQ ID NO: 1654639 - DNA, 15 bp, Homo sapiens
cacaaggatttgaag

SEQ ID NO: 1654640 - DNA, 15 bp, Homo sapiens
ccacaaggatttgaa

SEQ ID NO: 1654641 - DNA, 15 bp, Homo sapiens
cccacaaggatttga

SEQ ID NO: 1654642 - DNA, 15 bp, Homo sapiens
acccacaaggatttg

SEQ ID NO: 1654643 - DNA, 15 bp, Homo sapiens
aacccacaaggattt

SEQ ID NO: 1654644 - DNA, 15 bp, Homo sapiens
gaacccacaaggatt

SEQ ID NO: 1654645 - DNA, 15 bp, Homo sapiens
ggaacccacaaggat

SEQ ID NO: 1654646 - DNA, 15 bp, Homo sapiens
gggaacccacaagga

SEQ ID NO: 1654647 - DNA, 15 bp, Homo sapiens
agggaacccacaagg

SEQ ID NO: 1654648 - DNA, 15 bp, Homo sapiens
aagggaacccacaag

SEQ ID NO: 1654649 - DNA, 15 bp, Homo sapiens
gaagggaacccacaa

SEQ ID NO: 1654650 - DNA, 15 bp, Homo sapiens
ggaagggaacccaca

SEQ ID NO: 1654651 - DNA, 15 bp, Homo sapiens
aggaagggaacccac

SEQ ID NO: 1654652 - DNA, 15 bp, Homo sapiens
taggaagggaaccca

SEQ ID NO: 1654653 - DNA, 15 bp, Homo sapiens
ttaggaagggaaccc

SEQ ID NO: 1654654 - DNA, 15 bp, Homo sapiens
tttaggaagggaacc

SEQ ID NO: 1654655 - DNA, 15 bp, Homo sapiens
ttttaggaagggaac

SEQ ID NO: 1654656 - DNA, 15 bp, Homo sapiens
gttttaggaagggaa

SEQ ID NO: 1654657 - DNA, 15 bp, Homo sapiens
agttttaggaaggga

SEQ ID NO: 1654658 - DNA, 15 bp, Homo sapiens
tagttttaggaaggg

SEQ ID NO: 1654659 - DNA, 15 bp, Homo sapiens
gtagttttaggaagg

SEQ ID NO: 1654660 - DNA, 15 bp, Homo sapiens
agtagttttaggaag

SEQ ID NO: 1654661 - DNA, 15 bp, Homo sapiens
tagtagttttaggaa

SEQ ID NO: 1654662 - DNA, 15 bp, Homo sapiens
gtagtagttttagga

SEQ ID NO: 1654663 - DNA, 15 bp, Homo sapiens
agtagtagttttagg

SEQ ID NO: 1654664 - DNA, 15 bp, Homo sapiens
aagtagtagttttag

SEQ ID NO: 1654665 - DNA, 15 bp, Homo sapiens
taagtagtagtttta

SEQ ID NO: 1654666 - DNA, 15 bp, Homo sapiens
ataagtagtagtttt

SEQ ID NO: 1654667 - DNA, 15 bp, Homo sapiens
cataagtagtagttt

SEQ ID NO: 1654668 - DNA, 15 bp, Homo sapiens
tcataagtagtagtt

SEQ ID NO: 1654669 - DNA, 15 bp, Homo sapiens
atcataagtagtagt

SEQ ID NO: 1654670 - DNA, 15 bp, Homo sapiens
aatcataagtagtag

SEQ ID NO: 1654671 - DNA, 15 bp, Homo sapiens
gaatcataagtagta

SEQ ID NO: 1654672 - DNA, 15 bp, Homo sapiens
tgaatcataagtagt

SEQ ID NO: 1654673 - DNA, 15 bp, Homo sapiens
gtgaatcataagtag

SEQ ID NO: 1654674 - DNA, 15 bp, Homo sapiens
tgtgaatcataagta

SEQ ID NO: 1654675 - DNA, 15 bp, Homo sapiens
gtgtgaatcataagt

SEQ ID NO: 1654676 - DNA, 15 bp, Homo sapiens
tgtgtgaatcataag

SEQ ID NO: 1654677 - DNA, 15 bp, Homo sapiens
ttgtgtgaatcataa

SEQ ID NO: 1654678 - DNA, 15 bp, Homo sapiens
tttgtgtgaatcata

SEQ ID NO: 1654679 - DNA, 15 bp, Homo sapiens
ttttgtgtgaatcat

SEQ ID NO: 1654680 - DNA, 15 bp, Homo sapiens
gttttgtgtgaatca

SEQ ID NO: 1654681 - DNA, 15 bp, Homo sapiens
tgttttgtgtgaatc

SEQ ID NO: 1654682 - DNA, 15 bp, Homo sapiens
ctgttttgtgtgaat

SEQ ID NO: 1654683 - DNA, 15 bp, Homo sapiens
gctgttttgtgtgaa

SEQ ID NO: 1654684 - DNA, 15 bp, Homo sapiens
tgctgttttgtgtga

SEQ ID NO: 1654685 - DNA, 15 bp, Homo sapiens
gtgctgttttgtgtg

SEQ ID NO: 1654686 - DNA, 15 bp, Homo sapiens
agtgctgttttgtgt

SEQ ID NO: 1654687 - DNA, 15 bp, Homo sapiens
aagtgctgttttgtg

SEQ ID NO: 1654688 - DNA, 15 bp, Homo sapiens
taagtgctgttttgt

SEQ ID NO: 1654689 - DNA, 15 bp, Homo sapiens
ataagtgctgttttg

SEQ ID NO: 1654690 - DNA, 15 bp, Homo sapiens
aataagtgctgtttt

SEQ ID NO: 1654691 - DNA, 15 bp, Homo sapiens
taataagtgctgttt

SEQ ID NO: 1654692 - DNA, 15 bp, Homo sapiens
ataataagtgctgtt

SEQ ID NO: 1654693 - DNA, 15 bp, Homo sapiens
aataataagtgctgt

SEQ ID NO: 1654694 - DNA, 15 bp, Homo sapiens
aaataataagtgctg

SEQ ID NO: 1654695 - DNA, 15 bp, Homo sapiens
gaaaataataagtgc

SEQ ID NO: 1654696 - DNA, 15 bp, Homo sapiens
agaaaataataagtg

SEQ ID NO: 1654697 - DNA, 15 bp, Homo sapiens
tagaaaataataagt

SEQ ID NO: 1654698 - DNA, 15 bp, Homo sapiens
ttagaaaataataag

SEQ ID NO: 1654699 - DNA, 15 bp, Homo sapiens
tttagaaaataataa

SEQ ID NO: 1654700 - DNA, 15 bp, Homo sapiens
ctttagaaaataata

SEQ ID NO: 1654701 - DNA, 15 bp, Homo sapiens
actttagaaaataat

SEQ ID NO: 1654702 - DNA, 15 bp, Homo sapiens
aactttagaaaataa

SEQ ID NO: 1654703 - DNA, 15 bp, Homo sapiens
taactttagaaaata

SEQ ID NO: 1654704 - DNA, 15 bp, Homo sapiens
ataactttagaaaat

SEQ ID NO: 1654705 - DNA, 15 bp, Homo sapiens
aataactttagaaaa

SEQ ID NO: 1654706 - DNA, 15 bp, Homo sapiens
aaataactttagaaa

SEQ ID NO: 1654707 - DNA, 15 bp, Homo sapiens
gaaataactttagaa

SEQ ID NO: 1654708 - DNA, 15 bp, Homo sapiens
tgaaataactttaga

SEQ ID NO: 1654709 - DNA, 15 bp, Homo sapiens
ttgaaataactttag

SEQ ID NO: 1654710 - DNA, 15 bp, Homo sapiens
tttgaaataacttta

SEQ ID NO: 1654711 - DNA, 15 bp, Homo sapiens
atttgaaataacttt

SEQ ID NO: 1654712 - DNA, 15 bp, Homo sapiens
catttgaaataactt

SEQ ID NO: 1654713 - DNA, 15 bp, Homo sapiens
acatttgaaataact

SEQ ID NO: 1654714 - DNA, 15 bp, Homo sapiens
cacatttgaaataac

SEQ ID NO: 1654715 - DNA, 15 bp, Homo sapiens
gcacatttgaaataa

SEQ ID NO: 1654716 - DNA, 15 bp, Homo sapiens
agcacatttgaaata

SEQ ID NO: 1654717 - DNA, 15 bp, Homo sapiens
gagcacatttgaaat

SEQ ID NO: 1654718 - DNA, 15 bp, Homo sapiens
tgagcacatttgaaa

SEQ ID NO: 1654719 - DNA, 15 bp, Homo sapiens
gtgagcacatttgaa

SEQ ID NO: 1654720 - DNA, 15 bp, Homo sapiens
tgtgagcacatttga

SEQ ID NO: 1654721 - DNA, 15 bp, Homo sapiens
atgtgagcacatttg

SEQ ID NO: 1654722 - DNA, 15 bp, Homo sapiens
aatgtgagcacattt

SEQ ID NO: 1654723 - DNA, 15 bp, Homo sapiens
taatgtgagcacatt

SEQ ID NO: 1654724 - DNA, 15 bp, Homo sapiens
ctaatgtgagcacat

SEQ ID NO: 1654725 - DNA, 15 bp, Homo sapiens
gctaatgtgagcaca

SEQ ID NO: 1654726 - DNA, 15 bp, Homo sapiens
agctaatgtgagcac

SEQ ID NO: 1654727 - DNA, 15 bp, Homo sapiens
gagctaatgtgagca

SEQ ID NO: 1654728 - DNA, 15 bp, Homo sapiens
ggagctaatgtgagc

SEQ ID NO: 1654729 - DNA, 15 bp, Homo sapiens
aggagctaatgtgag

SEQ ID NO: 1654730 - DNA, 15 bp, Homo sapiens
gaggagctaatgtga

SEQ ID NO: 1654731 - DNA, 15 bp, Homo sapiens
tgaggagctaatgtg

SEQ ID NO: 1654732 - DNA, 15 bp, Homo sapiens
ttgaggagctaatgt

SEQ ID NO: 1654733 - DNA, 15 bp, Homo sapiens
gttgaggagctaatg

SEQ ID NO: 1654734 - DNA, 15 bp, Homo sapiens
cgttgaggagctaat

SEQ ID NO: 1654735 - DNA, 15 bp, Homo sapiens
tcgttgaggagctaa

SEQ ID NO: 1654736 - DNA, 15 bp, Homo sapiens
atcgttgaggagcta

SEQ ID NO: 1654737 - DNA, 15 bp, Homo sapiens
tatcgttgaggagct

SEQ ID NO: 1654738 - DNA, 15 bp, Homo sapiens
ttatcgttgaggagc

SEQ ID NO: 1654739 - DNA, 15 bp, Homo sapiens
tttatcgttgaggag

SEQ ID NO: 1654740 - DNA, 15 bp, Homo sapiens
ttttatcgttgagga

SEQ ID NO: 1654741 - DNA, 15 bp, Homo sapiens
attttatcgttgagg

SEQ ID NO: 1654742 - DNA, 15 bp, Homo sapiens
gattttatcgttgag

SEQ ID NO: 1654743 - DNA, 15 bp, Homo sapiens
tgattttatcgttga

SEQ ID NO: 1654744 - DNA, 15 bp, Homo sapiens
atgattttatcgttg

SEQ ID NO: 1654745 - DNA, 15 bp, Homo sapiens
gatgattttatcgtt

SEQ ID NO: 1654746 - DNA, 15 bp, Homo sapiens
agatgattttatcgt

SEQ ID NO: 1654747 - DNA, 15 bp, Homo sapiens
gagatgattttatcg

SEQ ID NO: 1654748 - DNA, 15 bp, Homo sapiens
tgagatgattttatc

SEQ ID NO: 1654749 - DNA, 15 bp, Homo sapiens
ctgagatgattttat

SEQ ID NO: 1654750 - DNA, 15 bp, Homo sapiens
cctgagatgatttta

SEQ ID NO: 1654751 - DNA, 15 bp, Homo sapiens
tcctgagatgatttt

SEQ ID NO: 1654752 - DNA, 15 bp, Homo sapiens
ttcctgagatgattt

SEQ ID NO: 1654753 - DNA, 15 bp, Homo sapiens
gcacctataatccca

SEQ ID NO: 1654754 - DNA, 15 bp, Homo sapiens
ggcacctataatccc

SEQ ID NO: 1654755 - DNA, 15 bp, Homo sapiens
aggcacctataatcc

SEQ ID NO: 1654756 - DNA, 15 bp, Homo sapiens
caggcacctataatc

SEQ ID NO: 1654757 - DNA, 15 bp, Homo sapiens
gcaggcacctataat

SEQ ID NO: 1654758 - DNA, 15 bp, Homo sapiens
ggcaggcacctataa

SEQ ID NO: 1654759 - DNA, 15 bp, Homo sapiens
tggcaggcacctata

SEQ ID NO: 1654760 - DNA, 15 bp, Homo sapiens
gtggcaggcacctat

SEQ ID NO: 1654761 - DNA, 15 bp, Homo sapiens
ggtggcaggcaccta

SEQ ID NO: 1654762 - DNA, 15 bp, Homo sapiens
taaatacaaaaatta

SEQ ID NO: 1654763 - DNA, 15 bp, Homo sapiens
ataaatacaaaaatt

SEQ ID NO: 1654764 - DNA, 15 bp, Homo sapiens
gtctctactataaat

SEQ ID NO: 1654765 - DNA, 15 bp, Homo sapiens
cgtctctactataaa

SEQ ID NO: 1654766 - DNA, 15 bp, Homo sapiens
ccgtctctactataa

SEQ ID NO: 1654767 - DNA, 15 bp, Homo sapiens
cccgtctctactata

SEQ ID NO: 1654768 - DNA, 15 bp, Homo sapiens
ccccgtctctactat

SEQ ID NO: 1654769 - DNA, 15 bp, Homo sapiens
cgaaaccccgtctct

SEQ ID NO: 1654770 - DNA, 15 bp, Homo sapiens
gcgaaaccccgtctc

SEQ ID NO: 1654771 - DNA, 15 bp, Homo sapiens
agcgaaaccccgtct

SEQ ID NO: 1654772 - DNA, 15 bp, Homo sapiens
tagcgaaaccccgtc

SEQ ID NO: 1654773 - DNA, 15 bp, Homo sapiens
atagcgaaaccccgt

SEQ ID NO: 1654774 - DNA, 15 bp, Homo sapiens
catagcgaaaccccg

SEQ ID NO: 1654775 - DNA, 15 bp, Homo sapiens
acatagcgaaacccc

SEQ ID NO: 1654776 - DNA, 15 bp, Homo sapiens
aacatagcgaaaccc

SEQ ID NO: 1654777 - DNA, 15 bp, Homo sapiens
caacatagcgaaacc

SEQ ID NO: 1654778 - DNA, 15 bp, Homo sapiens
ccaacatagcgaaac

SEQ ID NO: 1654779 - DNA, 15 bp, Homo sapiens
gccaacatagcgaaa

SEQ ID NO: 1654780 - DNA, 15 bp, Homo sapiens
ggccaacatagcgaa

SEQ ID NO: 1654781 - DNA, 15 bp, Homo sapiens
tggccaacatagcga

SEQ ID NO: 1654782 - DNA, 15 bp, Homo sapiens
ctggccaacatagcg

SEQ ID NO: 1654783 - DNA, 15 bp, Homo sapiens
gaggagtttgagacc

SEQ ID NO: 1654784 - DNA, 15 bp, Homo sapiens
tgaggagtttgagac

SEQ ID NO: 1654785 - DNA, 15 bp, Homo sapiens
gtgaggagtttgaga

SEQ ID NO: 1654786 - DNA, 15 bp, Homo sapiens
ggtgaggagtttgag

SEQ ID NO: 1654787 - DNA, 15 bp, Homo sapiens
aggtgaggagtttga

SEQ ID NO: 1654788 - DNA, 15 bp, Homo sapiens
gaggtgaggagtttg

SEQ ID NO: 1654789 - DNA, 15 bp, Homo sapiens
tgaggtgaggagttt

SEQ ID NO: 1654790 - DNA, 15 bp, Homo sapiens
ctgaggtgaggagtt

SEQ ID NO: 1654791 - DNA, 15 bp, Homo sapiens
cctgaggtgaggagt

SEQ ID NO: 1654792 - DNA, 15 bp, Homo sapiens
acctgaggtgaggag

SEQ ID NO: 1654793 - DNA, 15 bp, Homo sapiens
cacctgaggtgagga

SEQ ID NO: 1654794 - DNA, 15 bp, Homo sapiens
tcacctgaggtgagg

SEQ ID NO: 1654795 - DNA, 15 bp, Homo sapiens
atcacctgaggtgag

SEQ ID NO: 1654796 - DNA, 15 bp, Homo sapiens
gatcacctgaggtga

SEQ ID NO: 1654797 - DNA, 15 bp, Homo sapiens
ggatcacctgaggtg

SEQ ID NO: 1654798 - DNA, 15 bp, Homo sapiens
ctggatcacctgagg

SEQ ID NO: 1654799 - DNA, 15 bp, Homo sapiens
gctggatcacctgag

SEQ ID NO: 1654800 - DNA, 15 bp, Homo sapiens
ggctggatcacctga

SEQ ID NO: 1654801 - DNA, 15 bp, Homo sapiens
tggctggatcacctg

SEQ ID NO: 1654802 - DNA, 15 bp, Homo sapiens
gtggctggatcacct

SEQ ID NO: 1654803 - DNA, 15 bp, Homo sapiens
ggtggctggatcacc

SEQ ID NO: 1654804 - DNA, 15 bp, Homo sapiens
aggtggctggatcac

SEQ ID NO: 1654805 - DNA, 15 bp, Homo sapiens
gaggtggctggatca

SEQ ID NO: 1654806 - DNA, 15 bp, Homo sapiens
cgaggtggctggatc

SEQ ID NO: 1654807 - DNA, 15 bp, Homo sapiens
ccgaggtggctggat

SEQ ID NO: 1654808 - DNA, 15 bp, Homo sapiens
gccgaggtggctgga

SEQ ID NO: 1654809 - DNA, 15 bp, Homo sapiens
ggccgaggtggctgg

SEQ ID NO: 1654810 - DNA, 15 bp, Homo sapiens
aggccgaggtggctg

SEQ ID NO: 1654811 - DNA, 15 bp, Homo sapiens
gaggccgaggtggct

SEQ ID NO: 1654812 - DNA, 15 bp, Homo sapiens
ggaggccgaggtggc

SEQ ID NO: 1654813 - DNA, 15 bp, Homo sapiens
cggtggctcatgctt

SEQ ID NO: 1654814 - DNA, 15 bp, Homo sapiens
gcggtggctcatgct

SEQ ID NO: 1654815 - DNA, 15 bp, Homo sapiens
gttggccgggcgcgg

SEQ ID NO: 1654816 - DNA, 15 bp, Homo sapiens
ggttggccgggcgcg

SEQ ID NO: 1654817 - DNA, 15 bp, Homo sapiens
tggttggccgggcgc

SEQ ID NO: 1654818 - DNA, 15 bp, Homo sapiens
ttggttggccgggcg

SEQ ID NO: 1654819 - DNA, 15 bp, Homo sapiens
tttggttggccgggc

SEQ ID NO: 1654820 - DNA, 15 bp, Homo sapiens
atttggttggccggg

SEQ ID NO: 1654821 - DNA, 15 bp, Homo sapiens
aatttggttggccgg

SEQ ID NO: 1654822 - DNA, 15 bp, Homo sapiens
aaatttggttggccg

SEQ ID NO: 1654823 - DNA, 15 bp, Homo sapiens
gaaatttggttggcc

SEQ ID NO: 1654824 - DNA, 15 bp, Homo sapiens
agaaatttggttggc

SEQ ID NO: 1654825 - DNA, 15 bp, Homo sapiens
aagaaatttggttgg

SEQ ID NO: 1654826 - DNA, 15 bp, Homo sapiens
taagaaatttggttg

SEQ ID NO: 1654827 - DNA, 15 bp, Homo sapiens
ttaagaaatttggtt

SEQ ID NO: 1654828 - DNA, 15 bp, Homo sapiens
tttaagaaatttggt

SEQ ID NO: 1654829 - DNA, 15 bp, Homo sapiens
ttttaagaaatttgg

SEQ ID NO: 1654830 - DNA, 15 bp, Homo sapiens
cttttaagaaatttg

SEQ ID NO: 1654831 - DNA, 15 bp, Homo sapiens
acttttaagaaattt

SEQ ID NO: 1654832 - DNA, 15 bp, Homo sapiens
tacttttaagaaatt

SEQ ID NO: 1654833 - DNA, 15 bp, Homo sapiens
atacttttaagaaat

SEQ ID NO: 1654834 - DNA, 15 bp, Homo sapiens
tatacttttaagaaa

SEQ ID NO: 1654835 - DNA, 15 bp, Homo sapiens
ctatacttttaagaa

SEQ ID NO: 1654836 - DNA, 15 bp, Homo sapiens
tctatacttttaaga

SEQ ID NO: 1654837 - DNA, 15 bp, Homo sapiens
ttctatacttttaag

SEQ ID NO: 1654838 - DNA, 15 bp, Homo sapiens
gttctatacttttaa

SEQ ID NO: 1654839 - DNA, 15 bp, Homo sapiens
tgttctatactttta

SEQ ID NO: 1654840 - DNA, 15 bp, Homo sapiens
atgttctatactttt

SEQ ID NO: 1654841 - DNA, 15 bp, Homo sapiens
aatgttctatacttt

SEQ ID NO: 1654842 - DNA, 15 bp, Homo sapiens
aaatgttctatactt

SEQ ID NO: 1654843 - DNA, 15 bp, Homo sapiens
gaaatgttctatact

SEQ ID NO: 1654844 - DNA, 15 bp, Homo sapiens
ggaaatgttctatac

SEQ ID NO: 1654845 - DNA, 15 bp, Homo sapiens
tggaaatgttctata

SEQ ID NO: 1654846 - DNA, 15 bp, Homo sapiens
gtggaaatgttctat

SEQ ID NO: 1654847 - DNA, 15 bp, Homo sapiens
tgtggaaatgttcta

SEQ ID NO: 1654848 - DNA, 15 bp, Homo sapiens
gtgtggaaatgttct

SEQ ID NO: 1654849 - DNA, 15 bp, Homo sapiens
agtgtggaaatgttc

SEQ ID NO: 1654850 - DNA, 15 bp, Homo sapiens
aagtgtggaaatgtt

SEQ ID NO: 1654851 - DNA, 15 bp, Homo sapiens
caagtgtggaaatgt

SEQ ID NO: 1654852 - DNA, 15 bp, Homo sapiens
acaagtgtggaaatg

SEQ ID NO: 1654853 - DNA, 15 bp, Homo sapiens
tacaagtgtggaaat

SEQ ID NO: 1654854 - DNA, 15 bp, Homo sapiens
ctacaagtgtggaaa

SEQ ID NO: 1654855 - DNA, 15 bp, Homo sapiens
tctacaagtgtggaa

SEQ ID NO: 1654856 - DNA, 15 bp, Homo sapiens
ttctacaagtgtgga

SEQ ID NO: 1654857 - DNA, 15 bp, Homo sapiens
tttctacaagtgtgg

SEQ ID NO: 1654858 - DNA, 15 bp, Homo sapiens
gtttctacaagtgtg

SEQ ID NO: 1654859 - DNA, 15 bp, Homo sapiens
agtttctacaagtgt

SEQ ID NO: 1654860 - DNA, 15 bp, Homo sapiens
aagtttctacaagtg

SEQ ID NO: 1654861 - DNA, 15 bp, Homo sapiens
gaagtttctacaagt

SEQ ID NO: 1654862 - DNA, 15 bp, Homo sapiens
agaagtttctacaag

SEQ ID NO: 1654863 - DNA, 15 bp, Homo sapiens
tagaagtttctacaa

SEQ ID NO: 1654864 - DNA, 15 bp, Homo sapiens
ctagaagtttctaca

SEQ ID NO: 1654865 - DNA, 15 bp, Homo sapiens
actagaagtttctac

SEQ ID NO: 1654866 - DNA, 15 bp, Homo sapiens
tactagaagtttcta

SEQ ID NO: 1654867 - DNA, 15 bp, Homo sapiens
ctactagaagtttct

SEQ ID NO: 1654868 - DNA, 15 bp, Homo sapiens
tctactagaagtttc

SEQ ID NO: 1654869 - DNA, 15 bp, Homo sapiens
atctactagaagttt

SEQ ID NO: 1654870 - DNA, 15 bp, Homo sapiens
tatctactagaagtt

SEQ ID NO: 1654871 - DNA, 15 bp, Homo sapiens
ttatctactagaagt

SEQ ID NO: 1654872 - DNA, 15 bp, Homo sapiens
tttatctactagaag

SEQ ID NO: 1654873 - DNA, 15 bp, Homo sapiens
ctttatctactagaa

SEQ ID NO: 1654874 - DNA, 15 bp, Homo sapiens
actttatctactaga

SEQ ID NO: 1654875 - DNA, 15 bp, Homo sapiens
aactttatctactag

SEQ ID NO: 1654876 - DNA, 15 bp, Homo sapiens
caactttatctacta

SEQ ID NO: 1654877 - DNA, 15 bp, Homo sapiens
acaactttatctact

SEQ ID NO: 1654878 - DNA, 15 bp, Homo sapiens
tacaactttatctac

SEQ ID NO: 1654879 - DNA, 15 bp, Homo sapiens
atacaactttatcta

SEQ ID NO: 1654880 - DNA, 15 bp, Homo sapiens
aatacaactttatct

SEQ ID NO: 1654881 - DNA, 15 bp, Homo sapiens
taatacaactttatc

SEQ ID NO: 1654882 - DNA, 15 bp, Homo sapiens
ctaatacaactttat

SEQ ID NO: 1654883 - DNA, 15 bp, Homo sapiens
tctaatacaacttta

SEQ ID NO: 1654884 - DNA, 15 bp, Homo sapiens
ctctaatacaacttt

SEQ ID NO: 1654885 - DNA, 15 bp, Homo sapiens
cctctaatacaactt

SEQ ID NO: 1654886 - DNA, 15 bp, Homo sapiens
acctctaatacaact

SEQ ID NO: 1654887 - DNA, 15 bp, Homo sapiens
aacctctaatacaac

SEQ ID NO: 1654888 - DNA, 15 bp, Homo sapiens
aaacctctaatacaa

SEQ ID NO: 1654889 - DNA, 15 bp, Homo sapiens
caaacctctaataca

SEQ ID NO: 1654890 - DNA, 15 bp, Homo sapiens
ccaaacctctaatac

SEQ ID NO: 1654891 - DNA, 15 bp, Homo sapiens
accaaacctctaata

SEQ ID NO: 1654892 - DNA, 15 bp, Homo sapiens
taccaaacctctaat

SEQ ID NO: 1654893 - DNA, 15 bp, Homo sapiens
ttaccaaacctctaa

SEQ ID NO: 1654894 - DNA, 15 bp, Homo sapiens
attaccaaacctcta

SEQ ID NO: 1654895 - DNA, 15 bp, Homo sapiens
gattaccaaacctct

SEQ ID NO: 1654896 - DNA, 15 bp, Homo sapiens
ggattaccaaacctc

SEQ ID NO: 1654897 - DNA, 15 bp, Homo sapiens
tggattaccaaacct

SEQ ID NO: 1654898 - DNA, 15 bp, Homo sapiens
ctggattaccaaacc

SEQ ID NO: 1654899 - DNA, 15 bp, Homo sapiens
actggattaccaaac

SEQ ID NO: 1654900 - DNA, 15 bp, Homo sapiens
gactggattaccaaa

SEQ ID NO: 1654901 - DNA, 15 bp, Homo sapiens
agactggattaccaa

SEQ ID NO: 1654902 - DNA, 15 bp, Homo sapiens
aagactggattacca

SEQ ID NO: 1654903 - DNA, 15 bp, Homo sapiens
aaagactggattacc

SEQ ID NO: 1654904 - DNA, 15 bp, Homo sapiens
gaaagactggattac

SEQ ID NO: 1654905 - DNA, 15 bp, Homo sapiens
agaaagactggatta

SEQ ID NO: 1654906 - DNA, 15 bp, Homo sapiens
cagaaagactggatt

SEQ ID NO: 1654907 - DNA, 15 bp, Homo sapiens
tcagaaagactggat

SEQ ID NO: 1654908 - DNA, 15 bp, Homo sapiens
atcagaaagactgga

SEQ ID NO: 1654909 - DNA, 15 bp, Homo sapiens
tatcagaaagactgg

SEQ ID NO: 1654910 - DNA, 15 bp, Homo sapiens
ctatcagaaagactg

SEQ ID NO: 1654911 - DNA, 15 bp, Homo sapiens
gctatcagaaagact

SEQ ID NO: 1654912 - DNA, 15 bp, Homo sapiens
agctatcagaaagac

SEQ ID NO: 1654913 - DNA, 15 bp, Homo sapiens
cagctatcagaaaga

SEQ ID NO: 1654914 - DNA, 15 bp, Homo sapiens
gcagctatcagaaag

SEQ ID NO: 1654915 - DNA, 15 bp, Homo sapiens
agcagctatcagaaa

SEQ ID NO: 1654916 - DNA, 15 bp, Homo sapiens
aagcagctatcagaa

SEQ ID NO: 1654917 - DNA, 15 bp, Homo sapiens
gaagcagctatcaga

SEQ ID NO: 1654918 - DNA, 15 bp, Homo sapiens
tgaagcagctatcag

SEQ ID NO: 1654919 - DNA, 15 bp, Homo sapiens
atgaagcagctatca

SEQ ID NO: 1654920 - DNA, 15 bp, Homo sapiens
tatgaagcagctatc

SEQ ID NO: 1654921 - DNA, 15 bp, Homo sapiens
ctatgaagcagctat

SEQ ID NO: 1654922 - DNA, 15 bp, Homo sapiens
cctatgaagcagcta

SEQ ID NO: 1654923 - DNA, 15 bp, Homo sapiens
acctatgaagcagct

SEQ ID NO: 1654924 - DNA, 15 bp, Homo sapiens
cacctatgaagcagc

SEQ ID NO: 1654925 - DNA, 15 bp, Homo sapiens
acacctatgaagcag

SEQ ID NO: 1654926 - DNA, 15 bp, Homo sapiens
gacacctatgaagca

SEQ ID NO: 1654927 - DNA, 15 bp, Homo sapiens
tgacacctatgaagc

SEQ ID NO: 1654928 - DNA, 15 bp, Homo sapiens
gtgacacctatgaag

SEQ ID NO: 1654929 - DNA, 15 bp, Homo sapiens
agtgacacctatgaa

SEQ ID NO: 1654930 - DNA, 15 bp, Homo sapiens
cagtgacacctatga

SEQ ID NO: 1654931 - DNA, 15 bp, Homo sapiens
acagtgacacctatg

SEQ ID NO: 1654932 - DNA, 15 bp, Homo sapiens
tacagtgacacctat

SEQ ID NO: 1654933 - DNA, 15 bp, Homo sapiens
ctacagtgacaccta

SEQ ID NO: 1654934 - DNA, 15 bp, Homo sapiens
cctacagtgacacct

SEQ ID NO: 1654935 - DNA, 15 bp, Homo sapiens
acctacagtgacacc

SEQ ID NO: 1654936 - DNA, 15 bp, Homo sapiens
tacctacagtgacac

SEQ ID NO: 1654937 - DNA, 15 bp, Homo sapiens
ctacctacagtgaca

SEQ ID NO: 1654938 - DNA, 15 bp, Homo sapiens
actacctacagtgac

SEQ ID NO: 1654939 - DNA, 15 bp, Homo sapiens
aactacctacagtga

SEQ ID NO: 1654940 - DNA, 15 bp, Homo sapiens
aaactacctacagtg

SEQ ID NO: 1654941 - DNA, 15 bp, Homo sapiens
gaaactacctacagt

SEQ ID NO: 1654942 - DNA, 15 bp, Homo sapiens
agaaactacctacag

SEQ ID NO: 1654943 - DNA, 15 bp, Homo sapiens
gagaaactacctaca

SEQ ID NO: 1654944 - DNA, 15 bp, Homo sapiens
agagaaactacctac

SEQ ID NO: 1654945 - DNA, 15 bp, Homo sapiens
gagagaaactaccta

SEQ ID NO: 1654946 - DNA, 15 bp, Homo sapiens
agagagaaactacct

SEQ ID NO: 1654947 - DNA, 15 bp, Homo sapiens
aagagagaaactacc

SEQ ID NO: 1654948 - DNA, 15 bp, Homo sapiens
aaagagagaaactac

SEQ ID NO: 1654949 - DNA, 15 bp, Homo sapiens
caaagagagaaacta

SEQ ID NO: 1654950 - DNA, 15 bp, Homo sapiens
acaaagagagaaact

SEQ ID NO: 1654951 - DNA, 15 bp, Homo sapiens
aacaaagagagaaac

SEQ ID NO: 1654952 - DNA, 15 bp, Homo sapiens
taacaaagagagaaa

SEQ ID NO: 1654953 - DNA, 15 bp, Homo sapiens
ttaacaaagagagaa

SEQ ID NO: 1654954 - DNA, 15 bp, Homo sapiens
cttaacaaagagaga

SEQ ID NO: 1654955 - DNA, 15 bp, Homo sapiens
gcttaacaaagagag

SEQ ID NO: 1654956 - DNA, 15 bp, Homo sapiens
tgcttaacaaagaga

SEQ ID NO: 1654957 - DNA, 15 bp, Homo sapiens
atgcttaacaaagag

SEQ ID NO: 1654958 - DNA, 15 bp, Homo sapiens
aatgcttaacaaaga

SEQ ID NO: 1654959 - DNA, 15 bp, Homo sapiens
caatgcttaacaaag

SEQ ID NO: 1654960 - DNA, 15 bp, Homo sapiens
acaatgcttaacaaa

SEQ ID NO: 1654961 - DNA, 15 bp, Homo sapiens
aacaatgcttaacaa

SEQ ID NO: 1654962 - DNA, 15 bp, Homo sapiens
aaacaatgcttaaca

SEQ ID NO: 1654963 - DNA, 15 bp, Homo sapiens
aaaacaatgcttaac

SEQ ID NO: 1654964 - DNA, 15 bp, Homo sapiens
gaaaacaatgcttaa

SEQ ID NO: 1654965 - DNA, 15 bp, Homo sapiens
agaaaacaatgctta

SEQ ID NO: 1654966 - DNA, 15 bp, Homo sapiens
gagaaaacaatgctt

SEQ ID NO: 1654967 - DNA, 15 bp, Homo sapiens
tgagaaaacaatgct

SEQ ID NO: 1654968 - DNA, 15 bp, Homo sapiens
ttgagaaaacaatgc

SEQ ID NO: 1654969 - DNA, 15 bp, Homo sapiens
tttgagaaaacaatg

SEQ ID NO: 1654970 - DNA, 15 bp, Homo sapiens
ctttgagaaaacaat

SEQ ID NO: 1654971 - DNA, 15 bp, Homo sapiens
cctttgagaaaacaa

SEQ ID NO: 1654972 - DNA, 15 bp, Homo sapiens
acctttgagaaaaca

SEQ ID NO: 1654973 - DNA, 15 bp, Homo sapiens
tacctttgagaaaac

SEQ ID NO: 1654974 - DNA, 15 bp, Homo sapiens
gtacctttgagaaaa

SEQ ID NO: 1654975 - DNA, 15 bp, Homo sapiens
ggtacctttgagaaa

SEQ ID NO: 1654976 - DNA, 15 bp, Homo sapiens
tggtacctttgagaa

SEQ ID NO: 1654977 - DNA, 15 bp, Homo sapiens
atggtacctttgaga

SEQ ID NO: 1654978 - DNA, 15 bp, Homo sapiens
aatggtacctttgag

SEQ ID NO: 1654979 - DNA, 15 bp, Homo sapiens
caatggtacctttga

SEQ ID NO: 1654980 - DNA, 15 bp, Homo sapiens
acaatggtacctttg

SEQ ID NO: 1654981 - DNA, 15 bp, Homo sapiens
tacaatggtaccttt

SEQ ID NO: 1654982 - DNA, 15 bp, Homo sapiens
atacaatggtacctt

SEQ ID NO: 1654983 - DNA, 15 bp, Homo sapiens
aatacaatggtacct

SEQ ID NO: 1654984 - DNA, 15 bp, Homo sapiens
caatacaatggtacc

SEQ ID NO: 1654985 - DNA, 15 bp, Homo sapiens
gcaatacaatggtac

SEQ ID NO: 1654986 - DNA, 15 bp, Homo sapiens
tgcaatacaatggta

SEQ ID NO: 1654987 - DNA, 15 bp, Homo sapiens
gtgcaatacaatggt

SEQ ID NO: 1654988 - DNA, 15 bp, Homo sapiens
ggtgcaatacaatgg

SEQ ID NO: 1654989 - DNA, 15 bp, Homo sapiens
tggtgcaatacaatg

SEQ ID NO: 1654990 - DNA, 15 bp, Homo sapiens
gtggtgcaatacaat

SEQ ID NO: 1654991 - DNA, 15 bp, Homo sapiens
agtggtgcaatacaa

SEQ ID NO: 1654992 - DNA, 15 bp, Homo sapiens
aagtggtgcaataca

SEQ ID NO: 1654993 - DNA, 15 bp, Homo sapiens
aaagtggtgcaatac

SEQ ID NO: 1654994 - DNA, 15 bp, Homo sapiens
taaagtggtgcaata

SEQ ID NO: 1654995 - DNA, 15 bp, Homo sapiens
gtaaagtggtgcaat

SEQ ID NO: 1654996 - DNA, 15 bp, Homo sapiens
tgtaaagtggtgcaa

SEQ ID NO: 1654997 - DNA, 15 bp, Homo sapiens
ttgtaaagtggtgca

SEQ ID NO: 1654998 - DNA, 15 bp, Homo sapiens
attgtaaagtggtgc

SEQ ID NO: 1654999 - DNA, 15 bp, Homo sapiens
tattgtaaagtggtg

SEQ ID NO: 1655000 - DNA, 15 bp, Homo sapiens
gtattgtaaagtggt

SEQ ID NO: 1655001 - DNA, 15 bp, Homo sapiens
tgtattgtaaagtgg

SEQ ID NO: 1655002 - DNA, 15 bp, Homo sapiens
ttgtattgtaaagtg

SEQ ID NO: 1655003 - DNA, 15 bp, Homo sapiens
attgtattgtaaagt

SEQ ID NO: 1655004 - DNA, 15 bp, Homo sapiens
tattgtattgtaaag

SEQ ID NO: 1655005 - DNA, 15 bp, Homo sapiens
ttattgtattgtaaa

SEQ ID NO: 1655006 - DNA, 15 bp, Homo sapiens
gttattgtattgtaa

SEQ ID NO: 1655007 - DNA, 15 bp, Homo sapiens
ggttattgtattgta

SEQ ID NO: 1655008 - DNA, 15 bp, Homo sapiens
gggttattgtattgt

SEQ ID NO: 1655009 - DNA, 15 bp, Homo sapiens
agggttattgtattg

SEQ ID NO: 1655010 - DNA, 15 bp, Homo sapiens
gagggttattgtatt

SEQ ID NO: 1655011 - DNA, 15 bp, Homo sapiens
tgagggttattgtat

SEQ ID NO: 1655012 - DNA, 15 bp, Homo sapiens
atgagggttattgta

SEQ ID NO: 1655013 - DNA, 15 bp, Homo sapiens
aatgagggttattgt

SEQ ID NO: 1655014 - DNA, 15 bp, Homo sapiens
aaatgagggttattg

SEQ ID NO: 1655015 - DNA, 15 bp, Homo sapiens
caaatgagggttatt

SEQ ID NO: 1655016 - DNA, 15 bp, Homo sapiens
ccaaatgagggttat

SEQ ID NO: 1655017 - DNA, 15 bp, Homo sapiens
tccaaatgagggtta

SEQ ID NO: 1655018 - DNA, 15 bp, Homo sapiens
ttccaaatgagggtt

SEQ ID NO: 1655019 - DNA, 15 bp, Homo sapiens
attccaaatgagggt

SEQ ID NO: 1655020 - DNA, 15 bp, Homo sapiens
cattccaaatgaggg

SEQ ID NO: 1655021 - DNA, 15 bp, Homo sapiens
tcattccaaatgagg

SEQ ID NO: 1655022 - DNA, 15 bp, Homo sapiens
gtcattccaaatgag

SEQ ID NO: 1655023 - DNA, 15 bp, Homo sapiens
tgtcattccaaatga

SEQ ID NO: 1655024 - DNA, 15 bp, Homo sapiens
ttgtcattccaaatg

SEQ ID NO: 1655025 - DNA, 15 bp, Homo sapiens
cttgtcattccaaat

SEQ ID NO: 1655026 - DNA, 15 bp, Homo sapiens
acttgtcattccaaa

SEQ ID NO: 1655027 - DNA, 15 bp, Homo sapiens
gacttgtcattccaa

SEQ ID NO: 1655028 - DNA, 15 bp, Homo sapiens
tgacttgtcattcca

SEQ ID NO: 1655029 - DNA, 15 bp, Homo sapiens
ctgacttgtcattcc

SEQ ID NO: 1655030 - DNA, 15 bp, Homo sapiens
tctgacttgtcattc

SEQ ID NO: 1655031 - DNA, 15 bp, Homo sapiens
atctgacttgtcatt

SEQ ID NO: 1655032 - DNA, 15 bp, Homo sapiens
aatctgacttgtcat

SEQ ID NO: 1655033 - DNA, 15 bp, Homo sapiens
taatctgacttgtca

SEQ ID NO: 1655034 - DNA, 15 bp, Homo sapiens
gtaatctgacttgtc

SEQ ID NO: 1655035 - DNA, 15 bp, Homo sapiens
agtaatctgacttgt

SEQ ID NO: 1655036 - DNA, 15 bp, Homo sapiens
aagtaatctgacttg

SEQ ID NO: 1655037 - DNA, 15 bp, Homo sapiens
aaagtaatctgactt

SEQ ID NO: 1655038 - DNA, 15 bp, Homo sapiens
aaaagtaatctgact

SEQ ID NO: 1655039 - DNA, 15 bp, Homo sapiens
aaaaagtaatctgac

SEQ ID NO: 1655040 - DNA, 15 bp, Homo sapiens
aaaaaagtaatctga

SEQ ID NO: 1655041 - DNA, 15 bp, Homo sapiens
aaaaaaagtaatctg

SEQ ID NO: 1655042 - DNA, 15 bp, Homo sapiens
caaaaaaagtaatct

SEQ ID NO: 1655043 - DNA, 15 bp, Homo sapiens
acaaaaaaagtaatc

SEQ ID NO: 1655044 - DNA, 15 bp, Homo sapiens
aacaaaaaaagtaat

SEQ ID NO: 1655045 - DNA, 15 bp, Homo sapiens
aaacaaaaaaagtaa

SEQ ID NO: 1655046 - DNA, 15 bp, Homo sapiens
caaacaaaaaaagta

SEQ ID NO: 1655047 - DNA, 15 bp, Homo sapiens
tcaaacaaaaaaagt

SEQ ID NO: 1655048 - DNA, 15 bp, Homo sapiens
atcaaacaaaaaaag

SEQ ID NO: 1655049 - DNA, 15 bp, Homo sapiens
gatcaaacaaaaaaa

SEQ ID NO: 1655050 - DNA, 15 bp, Homo sapiens
ggatcaaacaaaaaa

SEQ ID NO: 1655051 - DNA, 15 bp, Homo sapiens
tggatcaaacaaaaa

SEQ ID NO: 1655052 - DNA, 15 bp, Homo sapiens
ttggatcaaacaaaa

SEQ ID NO: 1655053 - DNA, 15 bp, Homo sapiens
cttggatcaaacaaa

SEQ ID NO: 1655054 - DNA, 15 bp, Homo sapiens
ccttggatcaaacaa

SEQ ID NO: 1655055 - DNA, 15 bp, Homo sapiens
tccttggatcaaaca

SEQ ID NO: 1655056 - DNA, 15 bp, Homo sapiens
gtccttggatcaaac

SEQ ID NO: 1655057 - DNA, 15 bp, Homo sapiens
tgtccttggatcaaa

SEQ ID NO: 1655058 - DNA, 15 bp, Homo sapiens
gtgtccttggatcaa

SEQ ID NO: 1655059 - DNA, 15 bp, Homo sapiens
agtgtccttggatca

SEQ ID NO: 1655060 - DNA, 15 bp, Homo sapiens
aagtgtccttggatc

SEQ ID NO: 1655061 - DNA, 15 bp, Homo sapiens
taagtgtccttggat

SEQ ID NO: 1655062 - DNA, 15 bp, Homo sapiens
ctaagtgtccttgga

SEQ ID NO: 1655063 - DNA, 15 bp, Homo sapiens
tctaagtgtccttgg

SEQ ID NO: 1655064 - DNA, 15 bp, Homo sapiens
ttctaagtgtccttg

SEQ ID NO: 1655065 - DNA, 15 bp, Homo sapiens
cttctaagtgtcctt

SEQ ID NO: 1655066 - DNA, 15 bp, Homo sapiens
tcttctaagtgtcct

SEQ ID NO: 1655067 - DNA, 15 bp, Homo sapiens
atcttctaagtgtcc

SEQ ID NO: 1655068 - DNA, 15 bp, Homo sapiens
catcttctaagtgtc

SEQ ID NO: 1655069 - DNA, 15 bp, Homo sapiens
ccatcttctaagtgt

SEQ ID NO: 1655070 - DNA, 15 bp, Homo sapiens
tccatcttctaagtg

SEQ ID NO: 1655071 - DNA, 15 bp, Homo sapiens
ttccatcttctaagt

SEQ ID NO: 1655072 - DNA, 15 bp, Homo sapiens
cttccatcttctaag

SEQ ID NO: 1655073 - DNA, 15 bp, Homo sapiens
ccttccatcttctaa

SEQ ID NO: 1655074 - DNA, 15 bp, Homo sapiens
accttccatcttcta

SEQ ID NO: 1655075 - DNA, 15 bp, Homo sapiens
taccttccatcttct

SEQ ID NO: 1655076 - DNA, 15 bp, Homo sapiens
ataccttccatcttc

SEQ ID NO: 1655077 - DNA, 15 bp, Homo sapiens
aataccttccatctt

SEQ ID NO: 1655078 - DNA, 15 bp, Homo sapiens
aaataccttccatct

SEQ ID NO: 1655079 - DNA, 15 bp, Homo sapiens
gaaataccttccatc

SEQ ID NO: 1655080 - DNA, 15 bp, Homo sapiens
agaaataccttccat

SEQ ID NO: 1655081 - DNA, 15 bp, Homo sapiens
aagaaataccttcca

SEQ ID NO: 1655082 - DNA, 15 bp, Homo sapiens
taagaaataccttcc

SEQ ID NO: 1655083 - DNA, 15 bp, Homo sapiens
ttaagaaataccttc

SEQ ID NO: 1655084 - DNA, 15 bp, Homo sapiens
cttaagaaatacctt

SEQ ID NO: 1655085 - DNA, 15 bp, Homo sapiens
ccttaagaaatacct

SEQ ID NO: 1655086 - DNA, 15 bp, Homo sapiens
tccttaagaaatacc

SEQ ID NO: 1655087 - DNA, 15 bp, Homo sapiens
ttccttaagaaatac

SEQ ID NO: 1655088 - DNA, 15 bp, Homo sapiens
cttccttaagaaata

SEQ ID NO: 1655089 - DNA, 15 bp, Homo sapiens
tcttccttaagaaat

SEQ ID NO: 1655090 - DNA, 15 bp, Homo sapiens
ttcttccttaagaaa

SEQ ID NO: 1655091 - DNA, 15 bp, Homo sapiens
tttcttccttaagaa

SEQ ID NO: 1655092 - DNA, 15 bp, Homo sapiens
ttttcttccttaaga

SEQ ID NO: 1655093 - DNA, 15 bp, Homo sapiens
attttcttccttaag

SEQ ID NO: 1655094 - DNA, 15 bp, Homo sapiens
aattttcttccttaa

SEQ ID NO: 1655095 - DNA, 15 bp, Homo sapiens
aaattttcttcctta

SEQ ID NO: 1655096 - DNA, 15 bp, Homo sapiens
caaattttcttcctt

SEQ ID NO: 1655097 - DNA, 15 bp, Homo sapiens
gcaaattttcttcct

SEQ ID NO: 1655098 - DNA, 15 bp, Homo sapiens
tgcaaattttcttcc

SEQ ID NO: 1655099 - DNA, 15 bp, Homo sapiens
atgcaaattttcttc

SEQ ID NO: 1655100 - DNA, 15 bp, Homo sapiens
tatgcaaattttctt

SEQ ID NO: 1655101 - DNA, 15 bp, Homo sapiens
gtatgcaaattttct

SEQ ID NO: 1655102 - DNA, 15 bp, Homo sapiens
agtatgcaaattttc

SEQ ID NO: 1655103 - DNA, 15 bp, Homo sapiens
aagtatgcaaatttt

SEQ ID NO: 1655104 - DNA, 15 bp, Homo sapiens
aaagtatgcaaattt

SEQ ID NO: 1655105 - DNA, 15 bp, Homo sapiens
taaagtatgcaaatt

SEQ ID NO: 1655106 - DNA, 15 bp, Homo sapiens
ataaagtatgcaaat

SEQ ID NO: 1655107 - DNA, 15 bp, Homo sapiens
aataaagtatgcaaa

SEQ ID NO: 1655108 - DNA, 15 bp, Homo sapiens
taataaagtatgcaa

SEQ ID NO: 1655109 - DNA, 15 bp, Homo sapiens
ataataaagtatgca

SEQ ID NO: 1655110 - DNA, 15 bp, Homo sapiens
aataataaagtatgc

SEQ ID NO: 1655111 - DNA, 15 bp, Homo sapiens
aaataataaagtatg

SEQ ID NO: 1655112 - DNA, 15 bp, Homo sapiens
aaaataataaagtat

SEQ ID NO: 1655113 - DNA, 15 bp, Homo sapiens
aaaaataataaagta

SEQ ID NO: 1655114 - DNA, 15 bp, Homo sapiens
gaaaaataataaagt

SEQ ID NO: 1655115 - DNA, 15 bp, Homo sapiens
agaaaaataataaag

SEQ ID NO: 1655116 - DNA, 15 bp, Homo sapiens
cagaaaaataataaa

SEQ ID NO: 1655117 - DNA, 15 bp, Homo sapiens
ccagaaaaataataa

SEQ ID NO: 1655118 - DNA, 15 bp, Homo sapiens
tccagaaaaataata

SEQ ID NO: 1655119 - DNA, 15 bp, Homo sapiens
ttccagaaaaataat

SEQ ID NO: 1655120 - DNA, 15 bp, Homo sapiens
tttccagaaaaataa

SEQ ID NO: 1655121 - DNA, 15 bp, Homo sapiens
gtttccagaaaaata

SEQ ID NO: 1655122 - DNA, 15 bp, Homo sapiens
agtttccagaaaaat

SEQ ID NO: 1655123 - DNA, 15 bp, Homo sapiens
cagtttccagaaaaa

SEQ ID NO: 1655124 - DNA, 15 bp, Homo sapiens
tcagtttccagaaaa

SEQ ID NO: 1655125 - DNA, 15 bp, Homo sapiens
ttcagtttccagaaa

SEQ ID NO: 1655126 - DNA, 15 bp, Homo sapiens
cttcagtttccagaa

SEQ ID NO: 1655127 - DNA, 15 bp, Homo sapiens
tcttcagtttccaga

SEQ ID NO: 1655128 - DNA, 15 bp, Homo sapiens
ctcttcagtttccag

SEQ ID NO: 1655129 - DNA, 15 bp, Homo sapiens
gctcttcagtttcca

SEQ ID NO: 1655130 - DNA, 15 bp, Homo sapiens
tgctcttcagtttcc

SEQ ID NO: 1655131 - DNA, 15 bp, Homo sapiens
ttgctcttcagtttc

SEQ ID NO: 1655132 - DNA, 15 bp, Homo sapiens
cttgctcttcagttt

SEQ ID NO: 1655133 - DNA, 15 bp, Homo sapiens
gcttgctcttcagtt

SEQ ID NO: 1655134 - DNA, 15 bp, Homo sapiens
agcttgctcttcagt

SEQ ID NO: 1655135 - DNA, 15 bp, Homo sapiens
aagcttgctcttcag

SEQ ID NO: 1655136 - DNA, 15 bp, Homo sapiens
taagcttgctcttca

SEQ ID NO: 1655137 - DNA, 15 bp, Homo sapiens
gtaagcttgctcttc

SEQ ID NO: 1655138 - DNA, 15 bp, Homo sapiens
ggtaagcttgctctt

SEQ ID NO: 1655139 - DNA, 15 bp, Homo sapiens
aggtaagcttgctct

SEQ ID NO: 1655140 - DNA, 15 bp, Homo sapiens
caggtaagcttgctc

SEQ ID NO: 1655141 - DNA, 15 bp, Homo sapiens
tcaggtaagcttgct

SEQ ID NO: 1655142 - DNA, 15 bp, Homo sapiens
atcaggtaagcttgc

SEQ ID NO: 1655143 - DNA, 15 bp, Homo sapiens
tatcaggtaagcttg

SEQ ID NO: 1655144 - DNA, 15 bp, Homo sapiens
ctatcaggtaagctt

SEQ ID NO: 1655145 - DNA, 15 bp, Homo sapiens
tctatcaggtaagct

SEQ ID NO: 1655146 - DNA, 15 bp, Homo sapiens
atctatcaggtaagc

SEQ ID NO: 1655147 - DNA, 15 bp, Homo sapiens
aatctatcaggtaag

SEQ ID NO: 1655148 - DNA, 15 bp, Homo sapiens
aaatctatcaggtaa

SEQ ID NO: 1655149 - DNA, 15 bp, Homo sapiens
caaatctatcaggta

SEQ ID NO: 1655150 - DNA, 15 bp, Homo sapiens
ccaaatctatcaggt

SEQ ID NO: 1655151 - DNA, 15 bp, Homo sapiens
cccaaatctatcagg

SEQ ID NO: 1655152 - DNA, 15 bp, Homo sapiens
acccaaatctatcag

SEQ ID NO: 1655153 - DNA, 15 bp, Homo sapiens
gacccaaatctatca

SEQ ID NO: 1655154 - DNA, 15 bp, Homo sapiens
cgacccaaatctatc

SEQ ID NO: 1655155 - DNA, 15 bp, Homo sapiens
tcgacccaaatctat

SEQ ID NO: 1655156 - DNA, 15 bp, Homo sapiens
atcgacccaaatcta

SEQ ID NO: 1655157 - DNA, 15 bp, Homo sapiens
tatcgacccaaatct

SEQ ID NO: 1655158 - DNA, 15 bp, Homo sapiens
ctatcgacccaaatc

SEQ ID NO: 1655159 - DNA, 15 bp, Homo sapiens
actatcgacccaaat

SEQ ID NO: 1655160 - DNA, 15 bp, Homo sapiens
aactatcgacccaaa

SEQ ID NO: 1655161 - DNA, 15 bp, Homo sapiens
taactatcgacccaa

SEQ ID NO: 1655162 - DNA, 15 bp, Homo sapiens
gtaactatcgaccca

SEQ ID NO: 1655163 - DNA, 15 bp, Homo sapiens
tgtaactatcgaccc

SEQ ID NO: 1655164 - DNA, 15 bp, Homo sapiens
gtgtaactatcgacc

SEQ ID NO: 1655165 - DNA, 15 bp, Homo sapiens
agtgtaactatcgac

SEQ ID NO: 1655166 - DNA, 15 bp, Homo sapiens
aagtgtaactatcga

SEQ ID NO: 1655167 - DNA, 15 bp, Homo sapiens
aaagtgtaactatcg

SEQ ID NO: 1655168 - DNA, 15 bp, Homo sapiens
gaaagtgtaactatc

SEQ ID NO: 1655169 - DNA, 15 bp, Homo sapiens
ggaaagtgtaactat

SEQ ID NO: 1655170 - DNA, 15 bp, Homo sapiens
tggaaagtgtaacta

SEQ ID NO: 1655171 - DNA, 15 bp, Homo sapiens
ctggaaagtgtaact

SEQ ID NO: 1655172 - DNA, 15 bp, Homo sapiens
actggaaagtgtaac

SEQ ID NO: 1655173 - DNA, 15 bp, Homo sapiens
aactggaaagtgtaa

SEQ ID NO: 1655174 - DNA, 15 bp, Homo sapiens
gaactggaaagtgta

SEQ ID NO: 1655175 - DNA, 15 bp, Homo sapiens
tgaactggaaagtgt

SEQ ID NO: 1655176 - DNA, 15 bp, Homo sapiens
ctgaactggaaagtg

SEQ ID NO: 1655177 - DNA, 15 bp, Homo sapiens
gctgaactggaaagt

SEQ ID NO: 1655178 - DNA, 15 bp, Homo sapiens
ggctgaactggaaag

SEQ ID NO: 1655179 - DNA, 15 bp, Homo sapiens
tggctgaactggaaa

SEQ ID NO: 1655180 - DNA, 15 bp, Homo sapiens
ctggctgaactggaa

SEQ ID NO: 1655181 - DNA, 15 bp, Homo sapiens
actggctgaactgga

SEQ ID NO: 1655182 - DNA, 15 bp, Homo sapiens
cactggctgaactgg

SEQ ID NO: 1655183 - DNA, 15 bp, Homo sapiens
ccactggctgaactg

SEQ ID NO: 1655184 - DNA, 15 bp, Homo sapiens
cccactggctgaact

SEQ ID NO: 1655185 - DNA, 15 bp, Homo sapiens
tcccactggctgaac

SEQ ID NO: 1655186 - DNA, 15 bp, Homo sapiens
ctcccactggctgaa

SEQ ID NO: 1655187 - DNA, 15 bp, Homo sapiens
cctcccactggctga

SEQ ID NO: 1655188 - DNA, 15 bp, Homo sapiens
ccctcccactggctg

SEQ ID NO: 1655189 - DNA, 15 bp, Homo sapiens
accctcccactggct

SEQ ID NO: 1655190 - DNA, 15 bp, Homo sapiens
taccctcccactggc

SEQ ID NO: 1655191 - DNA, 15 bp, Homo sapiens
ttaccctcccactgg

SEQ ID NO: 1655192 - DNA, 15 bp, Homo sapiens
attaccctcccactg

SEQ ID NO: 1655193 - DNA, 15 bp, Homo sapiens
cattaccctcccact

SEQ ID NO: 1655194 - DNA, 15 bp, Homo sapiens
acattaccctcccac

SEQ ID NO: 1655195 - DNA, 15 bp, Homo sapiens
tacattaccctccca

SEQ ID NO: 1655196 - DNA, 15 bp, Homo sapiens
atacattaccctccc

SEQ ID NO: 1655197 - DNA, 15 bp, Homo sapiens
gatacattaccctcc

SEQ ID NO: 1655198 - DNA, 15 bp, Homo sapiens
ggatacattaccctc

SEQ ID NO: 1655199 - DNA, 15 bp, Homo sapiens
aggatacattaccct

SEQ ID NO: 1655200 - DNA, 15 bp, Homo sapiens
aaggatacattaccc

SEQ ID NO: 1655201 - DNA, 15 bp, Homo sapiens
aaaggatacattacc

SEQ ID NO: 1655202 - DNA, 15 bp, Homo sapiens
caaaggatacattac

SEQ ID NO: 1655203 - DNA, 15 bp, Homo sapiens
tcaaaggatacatta

SEQ ID NO: 1655204 - DNA, 15 bp, Homo sapiens
gtcaaaggatacatt

SEQ ID NO: 1655205 - DNA, 15 bp, Homo sapiens
agtcaaaggatacat

SEQ ID NO: 1655206 - DNA, 15 bp, Homo sapiens
aagtcaaaggataca

SEQ ID NO: 1655207 - DNA, 15 bp, Homo sapiens
aaagtcaaaggatac

SEQ ID NO: 1655208 - DNA, 15 bp, Homo sapiens
gaaagtcaaaggata

SEQ ID NO: 1655209 - DNA, 15 bp, Homo sapiens
agaaagtcaaaggat

SEQ ID NO: 1655210 - DNA, 15 bp, Homo sapiens
tagaaagtcaaagga

SEQ ID NO: 1655211 - DNA, 15 bp, Homo sapiens
ctagaaagtcaaagg

SEQ ID NO: 1655212 - DNA, 15 bp, Homo sapiens
tctagaaagtcaaag

SEQ ID NO: 1655213 - DNA, 15 bp, Homo sapiens
ttctagaaagtcaaa

SEQ ID NO: 1655214 - DNA, 15 bp, Homo sapiens
cttctagaaagtcaa

SEQ ID NO: 1655215 - DNA, 15 bp, Homo sapiens
acttctagaaagtca

SEQ ID NO: 1655216 - DNA, 15 bp, Homo sapiens
aacttctagaaagtc

SEQ ID NO: 1655217 - DNA, 15 bp, Homo sapiens
caacttctagaaagt

SEQ ID NO: 1655218 - DNA, 15 bp, Homo sapiens
gcaacttctagaaag

SEQ ID NO: 1655219 - DNA, 15 bp, Homo sapiens
agcaacttctagaaa

SEQ ID NO: 1655220 - DNA, 15 bp, Homo sapiens
gagcaacttctagaa

SEQ ID NO: 1655221 - DNA, 15 bp, Homo sapiens
agagcaacttctaga

SEQ ID NO: 1655222 - DNA, 15 bp, Homo sapiens
tagagcaacttctag

SEQ ID NO: 1655223 - DNA, 15 bp, Homo sapiens
atagagcaacttcta

SEQ ID NO: 1655224 - DNA, 15 bp, Homo sapiens
tatagagcaacttct

SEQ ID NO: 1655225 - DNA, 15 bp, Homo sapiens
ttatagagcaacttc

SEQ ID NO: 1655226 - DNA, 15 bp, Homo sapiens
attatagagcaactt

SEQ ID NO: 1655227 - DNA, 15 bp, Homo sapiens
tattatagagcaact

SEQ ID NO: 1655228 - DNA, 15 bp, Homo sapiens
gtattatagagcaac

SEQ ID NO: 1655229 - DNA, 15 bp, Homo sapiens
agtattatagagcaa

SEQ ID NO: 1655230 - DNA, 15 bp, Homo sapiens
aagtattatagagca

SEQ ID NO: 1655231 - DNA, 15 bp, Homo sapiens
taagtattatagagc

SEQ ID NO: 1655232 - DNA, 15 bp, Homo sapiens
ttaagtattatagag

SEQ ID NO: 1655233 - DNA, 15 bp, Homo sapiens
cttaagtattataga

SEQ ID NO: 1655234 - DNA, 15 bp, Homo sapiens
acttaagtattatag

SEQ ID NO: 1655235 - DNA, 15 bp, Homo sapiens
aacttaagtattata

SEQ ID NO: 1655236 - DNA, 15 bp, Homo sapiens
caacttaagtattat

SEQ ID NO: 1655237 - DNA, 15 bp, Homo sapiens
gcaacttaagtatta

SEQ ID NO: 1655238 - DNA, 15 bp, Homo sapiens
ggcaacttaagtatt

SEQ ID NO: 1655239 - DNA, 15 bp, Homo sapiens
tggcaacttaagtat

SEQ ID NO: 1655240 - DNA, 15 bp, Homo sapiens
atggcaacttaagta

SEQ ID NO: 1655241 - DNA, 15 bp, Homo sapiens
aatggcaacttaagt

SEQ ID NO: 1655242 - DNA, 15 bp, Homo sapiens
caatggcaacttaag

SEQ ID NO: 1655243 - DNA, 15 bp, Homo sapiens
acaatggcaacttaa

SEQ ID NO: 1655244 - DNA, 15 bp, Homo sapiens
gacaatggcaactta

SEQ ID NO: 1655245 - DNA, 15 bp, Homo sapiens
agacaatggcaactt

SEQ ID NO: 1655246 - DNA, 15 bp, Homo sapiens
gagacaatggcaact

SEQ ID NO: 1655247 - DNA, 15 bp, Homo sapiens
ggagacaatggcaac

SEQ ID NO: 1655248 - DNA, 15 bp, Homo sapiens
gggagacaatggcaa

SEQ ID NO: 1655249 - DNA, 15 bp, Homo sapiens
agggagacaatggca

SEQ ID NO: 1655250 - DNA, 15 bp, Homo sapiens
aagggagacaatggc

SEQ ID NO: 1655251 - DNA, 15 bp, Homo sapiens
gaagggagacaatgg

SEQ ID NO: 1655252 - DNA, 15 bp, Homo sapiens
agaagggagacaatg

SEQ ID NO: 1655253 - DNA, 15 bp, Homo sapiens
cagaagggagacaat

SEQ ID NO: 1655254 - DNA, 15 bp, Homo sapiens
ccagaagggagacaa

SEQ ID NO: 1655255 - DNA, 15 bp, Homo sapiens
accagaagggagaca

SEQ ID NO: 1655256 - DNA, 15 bp, Homo sapiens
aaccagaagggagac

SEQ ID NO: 1655257 - DNA, 15 bp, Homo sapiens
gaaccagaagggaga

SEQ ID NO: 1655258 - DNA, 15 bp, Homo sapiens
agaaccagaagggag

SEQ ID NO: 1655259 - DNA, 15 bp, Homo sapiens
gagaaccagaaggga

SEQ ID NO: 1655260 - DNA, 15 bp, Homo sapiens
agagaaccagaaggg

SEQ ID NO: 1655261 - DNA, 15 bp, Homo sapiens
cagagaaccagaagg

SEQ ID NO: 1655262 - DNA, 15 bp, Homo sapiens
acagagaaccagaag

SEQ ID NO: 1655263 - DNA, 15 bp, Homo sapiens
aacagagaaccagaa

SEQ ID NO: 1655264 - DNA, 15 bp, Homo sapiens
caacagagaaccaga

SEQ ID NO: 1655265 - DNA, 15 bp, Homo sapiens
acaacagagaaccag

SEQ ID NO: 1655266 - DNA, 15 bp, Homo sapiens
aacaacagagaacca

SEQ ID NO: 1655267 - DNA, 15 bp, Homo sapiens
aaacaacagagaacc

SEQ ID NO: 1655268 - DNA, 15 bp, Homo sapiens
gaaacaacagagaac

SEQ ID NO: 1655269 - DNA, 15 bp, Homo sapiens
agaaacaacagagaa

SEQ ID NO: 1655270 - DNA, 15 bp, Homo sapiens
gagaaacaacagaga

SEQ ID NO: 1655271 - DNA, 15 bp, Homo sapiens
cgagaaacaacagag

SEQ ID NO: 1655272 - DNA, 15 bp, Homo sapiens
tcgagaaacaacaga

SEQ ID NO: 1655273 - DNA, 15 bp, Homo sapiens
ttcgagaaacaacag

SEQ ID NO: 1655274 - DNA, 15 bp, Homo sapiens
attcgagaaacaaca

SEQ ID NO: 1655275 - DNA, 15 bp, Homo sapiens
cattcgagaaacaac

SEQ ID NO: 1655276 - DNA, 15 bp, Homo sapiens
tcattcgagaaacaa

SEQ ID NO: 1655277 - DNA, 15 bp, Homo sapiens
gtcattcgagaaaca

SEQ ID NO: 1655278 - DNA, 15 bp, Homo sapiens
tgtcattcgagaaac

SEQ ID NO: 1655279 - DNA, 15 bp, Homo sapiens
atgtcattcgagaaa

SEQ ID NO: 1655280 - DNA, 15 bp, Homo sapiens
tatgtcattcgagaa

SEQ ID NO: 1655281 - DNA, 15 bp, Homo sapiens
ctatgtcattcgaga

SEQ ID NO: 1655282 - DNA, 15 bp, Homo sapiens
tctatgtcattcgag

SEQ ID NO: 1655283 - DNA, 15 bp, Homo sapiens
ttctatgtcattcga

SEQ ID NO: 1655284 - DNA, 15 bp, Homo sapiens
cttctatgtcattcg

SEQ ID NO: 1655285 - DNA, 15 bp, Homo sapiens
tcttctatgtcattc

SEQ ID NO: 1655286 - DNA, 15 bp, Homo sapiens
ctcttctatgtcatt

SEQ ID NO: 1655287 - DNA, 15 bp, Homo sapiens
actcttctatgtcat

SEQ ID NO: 1655288 - DNA, 15 bp, Homo sapiens
aactcttctatgtca

SEQ ID NO: 1655289 - DNA, 15 bp, Homo sapiens
aaactcttctatgtc

SEQ ID NO: 1655290 - DNA, 15 bp, Homo sapiens
taaactcttctatgt

SEQ ID NO: 1655291 - DNA, 15 bp, Homo sapiens
ataaactcttctatg

SEQ ID NO: 1655292 - DNA, 15 bp, Homo sapiens
cataaactcttctat

SEQ ID NO: 1655293 - DNA, 15 bp, Homo sapiens
tcataaactcttcta

SEQ ID NO: 1655294 - DNA, 15 bp, Homo sapiens
ctcataaactcttct

SEQ ID NO: 1655295 - DNA, 15 bp, Homo sapiens
tctcataaactcttc

SEQ ID NO: 1655296 - DNA, 15 bp, Homo sapiens
atctcataaactctt

SEQ ID NO: 1655297 - DNA, 15 bp, Homo sapiens
aatctcataaactct

SEQ ID NO: 1655298 - DNA, 15 bp, Homo sapiens
taatctcataaactc

SEQ ID NO: 1655299 - DNA, 15 bp, Homo sapiens
ttaatctcataaact

SEQ ID NO: 1655300 - DNA, 15 bp, Homo sapiens
attaatctcataaac

SEQ ID NO: 1655301 - DNA, 15 bp, Homo sapiens
aattaatctcataaa

SEQ ID NO: 1655302 - DNA, 15 bp, Homo sapiens
caattaatctcataa

SEQ ID NO: 1655303 - DNA, 15 bp, Homo sapiens
gcaattaatctcata

SEQ ID NO: 1655304 - DNA, 15 bp, Homo sapiens
agcaattaatctcat

SEQ ID NO: 1655305 - DNA, 15 bp, Homo sapiens
aagcaattaatctca

SEQ ID NO: 1655306 - DNA, 15 bp, Homo sapiens
gaagcaattaatctc

SEQ ID NO: 1655307 - DNA, 15 bp, Homo sapiens
ggaagcaattaatct

SEQ ID NO: 1655308 - DNA, 15 bp, Homo sapiens
aggaagcaattaatc

SEQ ID NO: 1655309 - DNA, 15 bp, Homo sapiens
taggaagcaattaat

SEQ ID NO: 1655310 - DNA, 15 bp, Homo sapiens
gtaggaagcaattaa

SEQ ID NO: 1655311 - DNA, 15 bp, Homo sapiens
agtaggaagcaatta

SEQ ID NO: 1655312 - DNA, 15 bp, Homo sapiens
cagtaggaagcaatt

SEQ ID NO: 1655313 - DNA, 15 bp, Homo sapiens
tcagtaggaagcaat

SEQ ID NO: 1655314 - DNA, 15 bp, Homo sapiens
ttcagtaggaagcaa

SEQ ID NO: 1655315 - DNA, 15 bp, Homo sapiens
tttcagtaggaagca

SEQ ID NO: 1655316 - DNA, 15 bp, Homo sapiens
atttcagtaggaagc

SEQ ID NO: 1655317 - DNA, 15 bp, Homo sapiens
tatttcagtaggaag

SEQ ID NO: 1655318 - DNA, 15 bp, Homo sapiens
ctatttcagtaggaa

SEQ ID NO: 1655319 - DNA, 15 bp, Homo sapiens
gctatttcagtagga

SEQ ID NO: 1655320 - DNA, 15 bp, Homo sapiens
ggctatttcagtagg

SEQ ID NO: 1655321 - DNA, 15 bp, Homo sapiens
tggctatttcagtag

SEQ ID NO: 1655322 - DNA, 15 bp, Homo sapiens
ctggctatttcagta

SEQ ID NO: 1655323 - DNA, 15 bp, Homo sapiens
cctggctatttcagt

SEQ ID NO: 1655324 - DNA, 15 bp, Homo sapiens
acctggctatttcag

SEQ ID NO: 1655325 - DNA, 15 bp, Homo sapiens
aacctggctatttca

SEQ ID NO: 1655326 - DNA, 15 bp, Homo sapiens
aaacctggctatttc

SEQ ID NO: 1655327 - DNA, 15 bp, Homo sapiens
gaaacctggctattt

SEQ ID NO: 1655328 - DNA, 15 bp, Homo sapiens
agaaacctggctatt

SEQ ID NO: 1655329 - DNA, 15 bp, Homo sapiens
cagaaacctggctat

SEQ ID NO: 1655330 - DNA, 15 bp, Homo sapiens
tcagaaacctggcta

SEQ ID NO: 1655331 - DNA, 15 bp, Homo sapiens
ctcagaaacctggct

SEQ ID NO: 1655332 - DNA, 15 bp, Homo sapiens
cctcagaaacctggc

SEQ ID NO: 1655333 - DNA, 15 bp, Homo sapiens
ccctcagaaacctgg

SEQ ID NO: 1655334 - DNA, 15 bp, Homo sapiens
gccctcagaaacctg

SEQ ID NO: 1655335 - DNA, 15 bp, Homo sapiens
tgccctcagaaacct

SEQ ID NO: 1655336 - DNA, 15 bp, Homo sapiens
ctgccctcagaaacc

SEQ ID NO: 1655337 - DNA, 15 bp, Homo sapiens
gctgccctcagaaac

SEQ ID NO: 1655338 - DNA, 15 bp, Homo sapiens
agctgccctcagaaa

SEQ ID NO: 1655339 - DNA, 15 bp, Homo sapiens
aagctgccctcagaa

SEQ ID NO: 1655340 - DNA, 15 bp, Homo sapiens
aaagctgccctcaga

SEQ ID NO: 1655341 - DNA, 15 bp, Homo sapiens
caaagctgccctcag

SEQ ID NO: 1655342 - DNA, 15 bp, Homo sapiens
ccaaagctgccctca

SEQ ID NO: 1655343 - DNA, 15 bp, Homo sapiens
gccaaagctgccctc

SEQ ID NO: 1655344 - DNA, 15 bp, Homo sapiens
agccaaagctgccct

SEQ ID NO: 1655345 - DNA, 15 bp, Homo sapiens
aagccaaagctgccc

SEQ ID NO: 1655346 - DNA, 15 bp, Homo sapiens
aaagccaaagctgcc

SEQ ID NO: 1655347 - DNA, 15 bp, Homo sapiens
aaaagccaaagctgc

SEQ ID NO: 1655348 - DNA, 15 bp, Homo sapiens
taaaagccaaagctg

SEQ ID NO: 1655349 - DNA, 15 bp, Homo sapiens
ataaaagccaaagct

SEQ ID NO: 1655350 - DNA, 15 bp, Homo sapiens
tataaaagccaaagc

SEQ ID NO: 1655351 - DNA, 15 bp, Homo sapiens
atataaaagccaaag

SEQ ID NO: 1655352 - DNA, 15 bp, Homo sapiens
catataaaagccaaa

SEQ ID NO: 1655353 - DNA, 15 bp, Homo sapiens
tcatataaaagccaa

SEQ ID NO: 1655354 - DNA, 15 bp, Homo sapiens
ctcatataaaagcca

SEQ ID NO: 1655355 - DNA, 15 bp, Homo sapiens
gctcatataaaagcc

SEQ ID NO: 1655356 - DNA, 15 bp, Homo sapiens
agctcatataaaagc

SEQ ID NO: 1655357 - DNA, 15 bp, Homo sapiens
aagctcatataaaag

SEQ ID NO: 1655358 - DNA, 15 bp, Homo sapiens
aaagctcatataaaa

SEQ ID NO: 1655359 - DNA, 15 bp, Homo sapiens
aaaagctcatataaa

SEQ ID NO: 1655360 - DNA, 15 bp, Homo sapiens
aaaaagctcatataa

SEQ ID NO: 1655361 - DNA, 15 bp, Homo sapiens
gaaaaagctcatata

SEQ ID NO: 1655362 - DNA, 15 bp, Homo sapiens
agaaaaagctcatat

SEQ ID NO: 1655363 - DNA, 15 bp, Homo sapiens
aagaaaaagctcata

SEQ ID NO: 1655364 - DNA, 15 bp, Homo sapiens
gaagaaaaagctcat

SEQ ID NO: 1655365 - DNA, 15 bp, Homo sapiens
ggaagaaaaagctca

SEQ ID NO: 1655366 - DNA, 15 bp, Homo sapiens
aggaagaaaaagctc

SEQ ID NO: 1655367 - DNA, 15 bp, Homo sapiens
taggaagaaaaagct

SEQ ID NO: 1655368 - DNA, 15 bp, Homo sapiens
gtaggaagaaaaagc

SEQ ID NO: 1655369 - DNA, 15 bp, Homo sapiens
ggtaggaagaaaaag

SEQ ID NO: 1655370 - DNA, 15 bp, Homo sapiens
tggtaggaagaaaaa

SEQ ID NO: 1655371 - DNA, 15 bp, Homo sapiens
gtggtaggaagaaaa

SEQ ID NO: 1655372 - DNA, 15 bp, Homo sapiens
agtggtaggaagaaa

SEQ ID NO: 1655373 - DNA, 15 bp, Homo sapiens
aagtggtaggaagaa

SEQ ID NO: 1655374 - DNA, 15 bp, Homo sapiens
taagtggtaggaaga

SEQ ID NO: 1655375 - DNA, 15 bp, Homo sapiens
ataagtggtaggaag

SEQ ID NO: 1655376 - DNA, 15 bp, Homo sapiens
gataagtggtaggaa

SEQ ID NO: 1655377 - DNA, 15 bp, Homo sapiens
tgataagtggtagga

SEQ ID NO: 1655378 - DNA, 15 bp, Homo sapiens
ctgataagtggtagg

SEQ ID NO: 1655379 - DNA, 15 bp, Homo sapiens
actgataagtggtag

SEQ ID NO: 1655380 - DNA, 15 bp, Homo sapiens
aactgataagtggta

SEQ ID NO: 1655381 - DNA, 15 bp, Homo sapiens
taactgataagtggt

SEQ ID NO: 1655382 - DNA, 15 bp, Homo sapiens
gtaactgataagtgg

SEQ ID NO: 1655383 - DNA, 15 bp, Homo sapiens
agtaactgataagtg

SEQ ID NO: 1655384 - DNA, 15 bp, Homo sapiens
cagtaactgataagt

SEQ ID NO: 1655385 - DNA, 15 bp, Homo sapiens
tcagtaactgataag

SEQ ID NO: 1655386 - DNA, 15 bp, Homo sapiens
gtcagtaactgataa

SEQ ID NO: 1655387 - DNA, 15 bp, Homo sapiens
tgtcagtaactgata

SEQ ID NO: 1655388 - DNA, 15 bp, Homo sapiens
ctgtcagtaactgat

SEQ ID NO: 1655389 - DNA, 15 bp, Homo sapiens
tctgtcagtaactga

SEQ ID NO: 1655390 - DNA, 15 bp, Homo sapiens
ctctgtcagtaactg

SEQ ID NO: 1655391 - DNA, 15 bp, Homo sapiens
cctctgtcagtaact

SEQ ID NO: 1655392 - DNA, 15 bp, Homo sapiens
ccctctgtcagtaac

SEQ ID NO: 1655393 - DNA, 15 bp, Homo sapiens
accctctgtcagtaa

SEQ ID NO: 1655394 - DNA, 15 bp, Homo sapiens
gaccctctgtcagta

SEQ ID NO: 1655395 - DNA, 15 bp, Homo sapiens
tgaccctctgtcagt

SEQ ID NO: 1655396 - DNA, 15 bp, Homo sapiens
ttgaccctctgtcag

SEQ ID NO: 1655397 - DNA, 15 bp, Homo sapiens
gttgaccctctgtca

SEQ ID NO: 1655398 - DNA, 15 bp, Homo sapiens
agttgaccctctgtc

SEQ ID NO: 1655399 - DNA, 15 bp, Homo sapiens
aagttgaccctctgt

SEQ ID NO: 1655400 - DNA, 15 bp, Homo sapiens
gaagttgaccctctg

SEQ ID NO: 1655401 - DNA, 15 bp, Homo sapiens
tgaagttgaccctct

SEQ ID NO: 1655402 - DNA, 15 bp, Homo sapiens
gtgaagttgaccctc

SEQ ID NO: 1655403 - DNA, 15 bp, Homo sapiens
agtgaagttgaccct

SEQ ID NO: 1655404 - DNA, 15 bp, Homo sapiens
tagtgaagttgaccc

SEQ ID NO: 1655405 - DNA, 15 bp, Homo sapiens
gtagtgaagttgacc

SEQ ID NO: 1655406 - DNA, 15 bp, Homo sapiens
agtagtgaagttgac

SEQ ID NO: 1655407 - DNA, 15 bp, Homo sapiens
cagtagtgaagttga

SEQ ID NO: 1655408 - DNA, 15 bp, Homo sapiens
acagtagtgaagttg

SEQ ID NO: 1655409 - DNA, 15 bp, Homo sapiens
cacagtagtgaagtt

SEQ ID NO: 1655410 - DNA, 15 bp, Homo sapiens
acacagtagtgaagt

SEQ ID NO: 1655411 - DNA, 15 bp, Homo sapiens
gacacagtagtgaag

SEQ ID NO: 1655412 - DNA, 15 bp, Homo sapiens
tgacacagtagtgaa

SEQ ID NO: 1655413 - DNA, 15 bp, Homo sapiens
atgacacagtagtga

SEQ ID NO: 1655414 - DNA, 15 bp, Homo sapiens
tatgacacagtagtg

SEQ ID NO: 1655415 - DNA, 15 bp, Homo sapiens
atatgacacagtagt

SEQ ID NO: 1655416 - DNA, 15 bp, Homo sapiens
catatgacacagtag

SEQ ID NO: 1655417 - DNA, 15 bp, Homo sapiens
ccatatgacacagta

SEQ ID NO: 1655418 - DNA, 15 bp, Homo sapiens
accatatgacacagt

SEQ ID NO: 1655419 - DNA, 15 bp, Homo sapiens
aaccatatgacacag

SEQ ID NO: 1655420 - DNA, 15 bp, Homo sapiens
caaccatatgacaca

SEQ ID NO: 1655421 - DNA, 15 bp, Homo sapiens
ccaaccatatgacac

SEQ ID NO: 1655422 - DNA, 15 bp, Homo sapiens
accaaccatatgaca

SEQ ID NO: 1655423 - DNA, 15 bp, Homo sapiens
gaccaaccatatgac

SEQ ID NO: 1655424 - DNA, 15 bp, Homo sapiens
ggaccaaccatatga

SEQ ID NO: 1655425 - DNA, 15 bp, Homo sapiens
tggaccaaccatatg

SEQ ID NO: 1655426 - DNA, 15 bp, Homo sapiens
ttggaccaaccatat

SEQ ID NO: 1655427 - DNA, 15 bp, Homo sapiens
attggaccaaccata

SEQ ID NO: 1655428 - DNA, 15 bp, Homo sapiens
cattggaccaaccat

SEQ ID NO: 1655429 - DNA, 15 bp, Homo sapiens
acattggaccaacca

SEQ ID NO: 1655430 - DNA, 15 bp, Homo sapiens
aacattggaccaacc

SEQ ID NO: 1655431 - DNA, 15 bp, Homo sapiens
caacattggaccaac

SEQ ID NO: 1655432 - DNA, 15 bp, Homo sapiens
ccaacattggaccaa

SEQ ID NO: 1655433 - DNA, 15 bp, Homo sapiens
cccaacattggacca

SEQ ID NO: 1655434 - DNA, 15 bp, Homo sapiens
acccaacattggacc

SEQ ID NO: 1655435 - DNA, 15 bp, Homo sapiens
aacccaacattggac

SEQ ID NO: 1655436 - DNA, 15 bp, Homo sapiens
gaacccaacattgga

SEQ ID NO: 1655437 - DNA, 15 bp, Homo sapiens
ggaacccaacattgg

SEQ ID NO: 1655438 - DNA, 15 bp, Homo sapiens
aggaacccaacattg

SEQ ID NO: 1655439 - DNA, 15 bp, Homo sapiens
gaggaacccaacatt

SEQ ID NO: 1655440 - DNA, 15 bp, Homo sapiens
tgaggaacccaacat

SEQ ID NO: 1655441 - DNA, 15 bp, Homo sapiens
ctgaggaacccaaca

SEQ ID NO: 1655442 - DNA, 15 bp, Homo sapiens
tctgaggaacccaac

SEQ ID NO: 1655443 - DNA, 15 bp, Homo sapiens
atctgaggaacccaa

SEQ ID NO: 1655444 - DNA, 15 bp, Homo sapiens
aatctgaggaaccca

SEQ ID NO: 1655445 - DNA, 15 bp, Homo sapiens
gaatctgaggaaccc

SEQ ID NO: 1655446 - DNA, 15 bp, Homo sapiens
tgaatctgaggaacc

SEQ ID NO: 1655447 - DNA, 15 bp, Homo sapiens
atgaatctgaggaac

SEQ ID NO: 1655448 - DNA, 15 bp, Homo sapiens
catgaatctgaggaa

SEQ ID NO: 1655449 - DNA, 15 bp, Homo sapiens
ccatgaatctgagga

SEQ ID NO: 1655450 - DNA, 15 bp, Homo sapiens
tccatgaatctgagg

SEQ ID NO: 1655451 - DNA, 15 bp, Homo sapiens
ctccatgaatctgag

SEQ ID NO: 1655452 - DNA, 15 bp, Homo sapiens
cctccatgaatctga

SEQ ID NO: 1655453 - DNA, 15 bp, Homo sapiens
tcctccatgaatctg

SEQ ID NO: 1655454 - DNA, 15 bp, Homo sapiens
ttcctccatgaatct

SEQ ID NO: 1655455 - DNA, 15 bp, Homo sapiens
tttcctccatgaatc

SEQ ID NO: 1655456 - DNA, 15 bp, Homo sapiens
atttcctccatgaat

SEQ ID NO: 1655457 - DNA, 15 bp, Homo sapiens
tatttcctccatgaa

SEQ ID NO: 1655458 - DNA, 15 bp, Homo sapiens
ctatttcctccatga

SEQ ID NO: 1655459 - DNA, 15 bp, Homo sapiens
cctatttcctccatg

SEQ ID NO: 1655460 - DNA, 15 bp, Homo sapiens
tcctatttcctccat

SEQ ID NO: 1655461 - DNA, 15 bp, Homo sapiens
ttcctatttcctcca

SEQ ID NO: 1655462 - DNA, 15 bp, Homo sapiens
tttcctatttcctcc

SEQ ID NO: 1655463 - DNA, 15 bp, Homo sapiens
attttcctatttcct

SEQ ID NO: 1655464 - DNA, 15 bp, Homo sapiens
tattttcctatttcc

SEQ ID NO: 1655465 - DNA, 15 bp, Homo sapiens
ctattttcctatttc

SEQ ID NO: 1655466 - DNA, 15 bp, Homo sapiens
actattttcctattt

SEQ ID NO: 1655467 - DNA, 15 bp, Homo sapiens
tactattttcctatt

SEQ ID NO: 1655468 - DNA, 15 bp, Homo sapiens
ttactattttcctat

SEQ ID NO: 1655469 - DNA, 15 bp, Homo sapiens
tttactattttccta

SEQ ID NO: 1655470 - DNA, 15 bp, Homo sapiens
ctttactattttcct

SEQ ID NO: 1655471 - DNA, 15 bp, Homo sapiens
tctttactattttcc

SEQ ID NO: 1655472 - DNA, 15 bp, Homo sapiens
atctttactattttc

SEQ ID NO: 1655473 - DNA, 15 bp, Homo sapiens
aatctttactatttt

SEQ ID NO: 1655474 - DNA, 15 bp, Homo sapiens
taatctttactattt

SEQ ID NO: 1655475 - DNA, 15 bp, Homo sapiens
ttaatctttactatt

SEQ ID NO: 1655476 - DNA, 15 bp, Homo sapiens
cttaatctttactat

SEQ ID NO: 1655477 - DNA, 15 bp, Homo sapiens
ccttaatctttacta

SEQ ID NO: 1655478 - DNA, 15 bp, Homo sapiens
tccttaatctttact

SEQ ID NO: 1655479 - DNA, 15 bp, Homo sapiens
ctccttaatctttac

SEQ ID NO: 1655480 - DNA, 15 bp, Homo sapiens
actccttaatcttta

SEQ ID NO: 1655481 - DNA, 15 bp, Homo sapiens
gactccttaatcttt

SEQ ID NO: 1655482 - DNA, 15 bp, Homo sapiens
tgactccttaatctt

SEQ ID NO: 1655483 - DNA, 15 bp, Homo sapiens
atgactccttaatct

SEQ ID NO: 1655484 - DNA, 15 bp, Homo sapiens
tatgactccttaatc

SEQ ID NO: 1655485 - DNA, 15 bp, Homo sapiens
ctatgactccttaat

SEQ ID NO: 1655486 - DNA, 15 bp, Homo sapiens
actatgactccttaa

SEQ ID NO: 1655487 - DNA, 15 bp, Homo sapiens
aactatgactcctta

SEQ ID NO: 1655488 - DNA, 15 bp, Homo sapiens
taactatgactcctt

SEQ ID NO: 1655489 - DNA, 15 bp, Homo sapiens
ttaactatgactcct

SEQ ID NO: 1655490 - DNA, 15 bp, Homo sapiens
tttaactatgactcc

SEQ ID NO: 1655491 - DNA, 15 bp, Homo sapiens
ttttaactatgactc

SEQ ID NO: 1655492 - DNA, 15 bp, Homo sapiens
tttttaactatgact

SEQ ID NO: 1655493 - DNA, 15 bp, Homo sapiens
ttttttaactatgac

SEQ ID NO: 1655494 - DNA, 15 bp, Homo sapiens
attttttaactatga

SEQ ID NO: 1655495 - DNA, 15 bp, Homo sapiens
aattttttaactatg

SEQ ID NO: 1655496 - DNA, 15 bp, Homo sapiens
taattttttaactat

SEQ ID NO: 1655497 - DNA, 15 bp, Homo sapiens
gtaattttttaacta

SEQ ID NO: 1655498 - DNA, 15 bp, Homo sapiens
tgtaattttttaact

SEQ ID NO: 1655499 - DNA, 15 bp, Homo sapiens
ttgtaattttttaac

SEQ ID NO: 1655500 - DNA, 15 bp, Homo sapiens
tttgtaattttttaa

SEQ ID NO: 1655501 - DNA, 15 bp, Homo sapiens
gtttgtaatttttta

SEQ ID NO: 1655502 - DNA, 15 bp, Homo sapiens
tgtttgtaatttttt

SEQ ID NO: 1655503 - DNA, 15 bp, Homo sapiens
ctgtttgtaattttt

SEQ ID NO: 1655504 - DNA, 15 bp, Homo sapiens
cctgtttgtaatttt

SEQ ID NO: 1655505 - DNA, 15 bp, Homo sapiens
acctgtttgtaattt

SEQ ID NO: 1655506 - DNA, 15 bp, Homo sapiens
gacctgtttgtaatt

SEQ ID NO: 1655507 - DNA, 15 bp, Homo sapiens
tgacctgtttgtaat

SEQ ID NO: 1655508 - DNA, 15 bp, Homo sapiens
gtgacctgtttgtaa

SEQ ID NO: 1655509 - DNA, 15 bp, Homo sapiens
tgtgacctgtttgta

SEQ ID NO: 1655510 - DNA, 15 bp, Homo sapiens
ttgtgacctgtttgt

SEQ ID NO: 1655511 - DNA, 15 bp, Homo sapiens
tttgtgacctgtttg

SEQ ID NO: 1655512 - DNA, 15 bp, Homo sapiens
gtttgtgacctgttt

SEQ ID NO: 1655513 - DNA, 15 bp, Homo sapiens
tgtttgtgacctgtt

SEQ ID NO: 1655514 - DNA, 15 bp, Homo sapiens
ctgtttgtgacctgt

SEQ ID NO: 1655515 - DNA, 15 bp, Homo sapiens
actgtttgtgacctg

SEQ ID NO: 1655516 - DNA, 15 bp, Homo sapiens
tactgtttgtgacct

SEQ ID NO: 1655517 - DNA, 15 bp, Homo sapiens
gtactgtttgtgacc

SEQ ID NO: 1655518 - DNA, 15 bp, Homo sapiens
agtactgtttgtgac

SEQ ID NO: 1655519 - DNA, 15 bp, Homo sapiens
gagtactgtttgtga

SEQ ID NO: 1655520 - DNA, 15 bp, Homo sapiens
agagtactgtttgtg

SEQ ID NO: 1655521 - DNA, 15 bp, Homo sapiens
aagagtactgtttgt

SEQ ID NO: 1655522 - DNA, 15 bp, Homo sapiens
aaagagtactgtttg

SEQ ID NO: 1655523 - DNA, 15 bp, Homo sapiens
gaaagagtactgttt

SEQ ID NO: 1655524 - DNA, 15 bp, Homo sapiens
agaaagagtactgtt

SEQ ID NO: 1655525 - DNA, 15 bp, Homo sapiens
aagaaagagtactgt

SEQ ID NO: 1655526 - DNA, 15 bp, Homo sapiens
caagaaagagtactg

SEQ ID NO: 1655527 - DNA, 15 bp, Homo sapiens
tcaagaaagagtact

SEQ ID NO: 1655528 - DNA, 15 bp, Homo sapiens
atcaagaaagagtac

SEQ ID NO: 1655529 - DNA, 15 bp, Homo sapiens
aatcaagaaagagta

SEQ ID NO: 1655530 - DNA, 15 bp, Homo sapiens
taatcaagaaagagt

SEQ ID NO: 1655531 - DNA, 15 bp, Homo sapiens
ataatcaagaaagag

SEQ ID NO: 1655532 - DNA, 15 bp, Homo sapiens
aataatcaagaaaga

SEQ ID NO: 1655533 - DNA, 15 bp, Homo sapiens
aaataatcaagaaag

SEQ ID NO: 1655534 - DNA, 15 bp, Homo sapiens
taaataatcaagaaa

SEQ ID NO: 1655535 - DNA, 15 bp, Homo sapiens
ctaaataatcaagaa

SEQ ID NO: 1655536 - DNA, 15 bp, Homo sapiens
cctaaataatcaaga

SEQ ID NO: 1655537 - DNA, 15 bp, Homo sapiens
tcctaaataatcaag

SEQ ID NO: 1655538 - DNA, 15 bp, Homo sapiens
ttcctaaataatcaa

SEQ ID NO: 1655539 - DNA, 15 bp, Homo sapiens
gttcctaaataatca

SEQ ID NO: 1655540 - DNA, 15 bp, Homo sapiens
ggttcctaaataatc

SEQ ID NO: 1655541 - DNA, 15 bp, Homo sapiens
tggttcctaaataat

SEQ ID NO: 1655542 - DNA, 15 bp, Homo sapiens
ttggttcctaaataa

SEQ ID NO: 1655543 - DNA, 15 bp, Homo sapiens
tttggttcctaaata

SEQ ID NO: 1655544 - DNA, 15 bp, Homo sapiens
atttggttcctaaat

SEQ ID NO: 1655545 - DNA, 15 bp, Homo sapiens
tatttggttcctaaa

SEQ ID NO: 1655546 - DNA, 15 bp, Homo sapiens
ctatttggttcctaa

SEQ ID NO: 1655547 - DNA, 15 bp, Homo sapiens
gctatttggttccta

SEQ ID NO: 1655548 - DNA, 15 bp, Homo sapiens
ggctatttggttcct

SEQ ID NO: 1655549 - DNA, 15 bp, Homo sapiens
tggctatttggttcc

SEQ ID NO: 1655550 - DNA, 15 bp, Homo sapiens
atggctatttggttc

SEQ ID NO: 1655551 - DNA, 15 bp, Homo sapiens
aatggctatttggtt

SEQ ID NO: 1655552 - DNA, 15 bp, Homo sapiens
gaatggctatttggt

SEQ ID NO: 1655553 - DNA, 15 bp, Homo sapiens
agaatggctatttgg

SEQ ID NO: 1655554 - DNA, 15 bp, Homo sapiens
tagaatggctatttg

SEQ ID NO: 1655555 - DNA, 15 bp, Homo sapiens
atagaatggctattt

SEQ ID NO: 1655556 - DNA, 15 bp, Homo sapiens
catagaatggctatt

SEQ ID NO: 1655557 - DNA, 15 bp, Homo sapiens
tcatagaatggctat

SEQ ID NO: 1655558 - DNA, 15 bp, Homo sapiens
ttcatagaatggcta

SEQ ID NO: 1655559 - DNA, 15 bp, Homo sapiens
tttcatagaatggct

SEQ ID NO: 1655560 - DNA, 15 bp, Homo sapiens
atttcatagaatggc

SEQ ID NO: 1655561 - DNA, 15 bp, Homo sapiens
catttcatagaatgg

SEQ ID NO: 1655562 - DNA, 15 bp, Homo sapiens
acatttcatagaatg

SEQ ID NO: 1655563 - DNA, 15 bp, Homo sapiens
gacatttcatagaat

SEQ ID NO: 1655564 - DNA, 15 bp, Homo sapiens
agacatttcatagaa

SEQ ID NO: 1655565 - DNA, 15 bp, Homo sapiens
aagacatttcataga

SEQ ID NO: 1655566 - DNA, 15 bp, Homo sapiens
aaagacatttcatag

SEQ ID NO: 1655567 - DNA, 15 bp, Homo sapiens
gaaagacatttcata

SEQ ID NO: 1655568 - DNA, 15 bp, Homo sapiens
agaaagacatttcat

SEQ ID NO: 1655569 - DNA, 15 bp, Homo sapiens
aagaaagacatttca

SEQ ID NO: 1655570 - DNA, 15 bp, Homo sapiens
aaagaaagacatttc

SEQ ID NO: 1655571 - DNA, 15 bp, Homo sapiens
gaaagaaagacattt

SEQ ID NO: 1655572 - DNA, 15 bp, Homo sapiens
ggaaagaaagacatt

SEQ ID NO: 1655573 - DNA, 15 bp, Homo sapiens
aggaaagaaagacat

SEQ ID NO: 1655574 - DNA, 15 bp, Homo sapiens
aaggaaagaaagaca

SEQ ID NO: 1655575 - DNA, 15 bp, Homo sapiens
aaaggaaagaaagac

SEQ ID NO: 1655576 - DNA, 15 bp, Homo sapiens
aaaaggaaagaaaga

SEQ ID NO: 1655577 - DNA, 15 bp, Homo sapiens
aaaaaggaaagaaag

SEQ ID NO: 1655578 - DNA, 15 bp, Homo sapiens
gagaaaaaggaaaga

SEQ ID NO: 1655579 - DNA, 15 bp, Homo sapiens
agagaaaaaggaaag

SEQ ID NO: 1655580 - DNA, 15 bp, Homo sapiens
gagagaaaaaggaaa

SEQ ID NO: 1655581 - DNA, 15 bp, Homo sapiens
agagagaaaaaggaa

SEQ ID NO: 1655582 - DNA, 15 bp, Homo sapiens
aagagagaaaaagga

SEQ ID NO: 1655583 - DNA, 15 bp, Homo sapiens
caagagagaaaaagg

SEQ ID NO: 1655584 - DNA, 15 bp, Homo sapiens
gcaagagagaaaaag

SEQ ID NO: 1655585 - DNA, 15 bp, Homo sapiens
agcaagagagaaaaa

SEQ ID NO: 1655586 - DNA, 15 bp, Homo sapiens
gagcaagagagaaaa

SEQ ID NO: 1655587 - DNA, 15 bp, Homo sapiens
tgagcaagagagaaa

SEQ ID NO: 1655588 - DNA, 15 bp, Homo sapiens
gtgagcaagagagaa

SEQ ID NO: 1655589 - DNA, 15 bp, Homo sapiens
ggtgagcaagagaga

SEQ ID NO: 1655590 - DNA, 15 bp, Homo sapiens
tggtgagcaagagag

SEQ ID NO: 1655591 - DNA, 15 bp, Homo sapiens
ttggtgagcaagaga

SEQ ID NO: 1655592 - DNA, 15 bp, Homo sapiens
attggtgagcaagag

SEQ ID NO: 1655593 - DNA, 15 bp, Homo sapiens
aattggtgagcaaga

SEQ ID NO: 1655594 - DNA, 15 bp, Homo sapiens
caattggtgagcaag

SEQ ID NO: 1655595 - DNA, 15 bp, Homo sapiens
tcaattggtgagcaa

SEQ ID NO: 1655596 - DNA, 15 bp, Homo sapiens
gtcaattggtgagca

SEQ ID NO: 1655597 - DNA, 15 bp, Homo sapiens
agtcaattggtgagc

SEQ ID NO: 1655598 - DNA, 15 bp, Homo sapiens
gagtcaattggtgag

SEQ ID NO: 1655599 - DNA, 15 bp, Homo sapiens
cgagtcaattggtga

SEQ ID NO: 1655600 - DNA, 15 bp, Homo sapiens
acgagtcaattggtg

SEQ ID NO: 1655601 - DNA, 15 bp, Homo sapiens
tacgagtcaattggt

SEQ ID NO: 1655602 - DNA, 15 bp, Homo sapiens
ttacgagtcaattgg

SEQ ID NO: 1655603 - DNA, 15 bp, Homo sapiens
cttacgagtcaattg

SEQ ID NO: 1655604 - DNA, 15 bp, Homo sapiens
gcttacgagtcaatt

SEQ ID NO: 1655605 - DNA, 15 bp, Homo sapiens
tgcttacgagtcaat

SEQ ID NO: 1655606 - DNA, 15 bp, Homo sapiens
gtgcttacgagtcaa

SEQ ID NO: 1655607 - DNA, 15 bp, Homo sapiens
agtgcttacgagtca

SEQ ID NO: 1655608 - DNA, 15 bp, Homo sapiens
aagtgcttacgagtc

SEQ ID NO: 1655609 - DNA, 15 bp, Homo sapiens
gaagtgcttacgagt

SEQ ID NO: 1655610 - DNA, 15 bp, Homo sapiens
ggaagtgcttacgag

SEQ ID NO: 1655611 - DNA, 15 bp, Homo sapiens
cggaagtgcttacga

SEQ ID NO: 1655612 - DNA, 15 bp, Homo sapiens
acggaagtgcttacg

SEQ ID NO: 1655613 - DNA, 15 bp, Homo sapiens
aacggaagtgcttac

SEQ ID NO: 1655614 - DNA, 15 bp, Homo sapiens
gaacggaagtgctta

SEQ ID NO: 1655615 - DNA, 15 bp, Homo sapiens
agaacggaagtgctt

SEQ ID NO: 1655616 - DNA, 15 bp, Homo sapiens
gagaacggaagtgct

SEQ ID NO: 1655617 - DNA, 15 bp, Homo sapiens
agagaacggaagtgc

SEQ ID NO: 1655618 - DNA, 15 bp, Homo sapiens
aagagaacggaagtg

SEQ ID NO: 1655619 - DNA, 15 bp, Homo sapiens
taagagaacggaagt

SEQ ID NO: 1655620 - DNA, 15 bp, Homo sapiens
ataagagaacggaag

SEQ ID NO: 1655621 - DNA, 15 bp, Homo sapiens
cataagagaacggaa

SEQ ID NO: 1655622 - DNA, 15 bp, Homo sapiens
ccataagagaacgga

SEQ ID NO: 1655623 - DNA, 15 bp, Homo sapiens
accataagagaacgg

SEQ ID NO: 1655624 - DNA, 15 bp, Homo sapiens
aaccataagagaacg

SEQ ID NO: 1655625 - DNA, 15 bp, Homo sapiens
caaccataagagaac

SEQ ID NO: 1655626 - DNA, 15 bp, Homo sapiens
ccaaccataagagaa

SEQ ID NO: 1655627 - DNA, 15 bp, Homo sapiens
cccaaccataagaga

SEQ ID NO: 1655628 - DNA, 15 bp, Homo sapiens
tcccaaccataagag

SEQ ID NO: 1655629 - DNA, 15 bp, Homo sapiens
ctcccaaccataaga

SEQ ID NO: 1655630 - DNA, 15 bp, Homo sapiens
gctcccaaccataag

SEQ ID NO: 1655631 - DNA, 15 bp, Homo sapiens
ggctcccaaccataa

SEQ ID NO: 1655632 - DNA, 15 bp, Homo sapiens
tggctcccaaccata

SEQ ID NO: 1655633 - DNA, 15 bp, Homo sapiens
atggctcccaaccat

SEQ ID NO: 1655634 - DNA, 15 bp, Homo sapiens
tatggctcccaacca

SEQ ID NO: 1655635 - DNA, 15 bp, Homo sapiens
gtatggctcccaacc

SEQ ID NO: 1655636 - DNA, 15 bp, Homo sapiens
tgtatggctcccaac

SEQ ID NO: 1655637 - DNA, 15 bp, Homo sapiens
ttgtatggctcccaa

SEQ ID NO: 1655638 - DNA, 15 bp, Homo sapiens
cttgtatggctccca

SEQ ID NO: 1655639 - DNA, 15 bp, Homo sapiens
ccttgtatggctccc

SEQ ID NO: 1655640 - DNA, 15 bp, Homo sapiens
accttgtatggctcc

SEQ ID NO: 1655641 - DNA, 15 bp, Homo sapiens
taccttgtatggctc

SEQ ID NO: 1655642 - DNA, 15 bp, Homo sapiens
ctaccttgtatggct

SEQ ID NO: 1655643 - DNA, 15 bp, Homo sapiens
tctaccttgtatggc

SEQ ID NO: 1655644 - DNA, 15 bp, Homo sapiens
ctctaccttgtatgg

SEQ ID NO: 1655645 - DNA, 15 bp, Homo sapiens
actctaccttgtatg

SEQ ID NO: 1655646 - DNA, 15 bp, Homo sapiens
cactctaccttgtat

SEQ ID NO: 1655647 - DNA, 15 bp, Homo sapiens
acactctaccttgta

SEQ ID NO: 1655648 - DNA, 15 bp, Homo sapiens
aacactctaccttgt

SEQ ID NO: 1655649 - DNA, 15 bp, Homo sapiens
caacactctaccttg

SEQ ID NO: 1655650 - DNA, 15 bp, Homo sapiens
ccaacactctacctt

SEQ ID NO: 1655651 - DNA, 15 bp, Homo sapiens
tccaacactctacct

SEQ ID NO: 1655652 - DNA, 15 bp, Homo sapiens
ctccaacactctacc

SEQ ID NO: 1655653 - DNA, 15 bp, Homo sapiens
actccaacactctac

SEQ ID NO: 1655654 - DNA, 15 bp, Homo sapiens
tactccaacactcta

SEQ ID NO: 1655655 - DNA, 15 bp, Homo sapiens
ttactccaacactct

SEQ ID NO: 1655656 - DNA, 15 bp, Homo sapiens
tttactccaacactc

SEQ ID NO: 1655657 - DNA, 15 bp, Homo sapiens
ttttactccaacact

SEQ ID NO: 1655658 - DNA, 15 bp, Homo sapiens
tttttactccaacac

SEQ ID NO: 1655659 - DNA, 15 bp, Homo sapiens
gtttttactccaaca

SEQ ID NO: 1655660 - DNA, 15 bp, Homo sapiens
agtttttactccaac

SEQ ID NO: 1655661 - DNA, 15 bp, Homo sapiens
tagtttttactccaa

SEQ ID NO: 1655662 - DNA, 15 bp, Homo sapiens
gtagtttttactcca

SEQ ID NO: 1655663 - DNA, 15 bp, Homo sapiens
tgtagtttttactcc

SEQ ID NO: 1655664 - DNA, 15 bp, Homo sapiens
atgtagtttttactc

SEQ ID NO: 1655665 - DNA, 15 bp, Homo sapiens
aatgtagtttttact

SEQ ID NO: 1655666 - DNA, 15 bp, Homo sapiens
caatgtagtttttac

SEQ ID NO: 1655667 - DNA, 15 bp, Homo sapiens
tcaatgtagttttta

SEQ ID NO: 1655668 - DNA, 15 bp, Homo sapiens
gtcaatgtagttttt

SEQ ID NO: 1655669 - DNA, 15 bp, Homo sapiens
agtcaatgtagtttt

SEQ ID NO: 1655670 - DNA, 15 bp, Homo sapiens
gagtcaatgtagttt

SEQ ID NO: 1655671 - DNA, 15 bp, Homo sapiens
agagtcaatgtagtt

SEQ ID NO: 1655672 - DNA, 15 bp, Homo sapiens
cagagtcaatgtagt

SEQ ID NO: 1655673 - DNA, 15 bp, Homo sapiens
tcagagtcaatgtag

SEQ ID NO: 1655674 - DNA, 15 bp, Homo sapiens
ttcagagtcaatgta

SEQ ID NO: 1655675 - DNA, 15 bp, Homo sapiens
attcagagtcaatgt

SEQ ID NO: 1655676 - DNA, 15 bp, Homo sapiens
gattcagagtcaatg

SEQ ID NO: 1655677 - DNA, 15 bp, Homo sapiens
tgattcagagtcaat

SEQ ID NO: 1655678 - DNA, 15 bp, Homo sapiens
atgattcagagtcaa

SEQ ID NO: 1655679 - DNA, 15 bp, Homo sapiens
catgattcagagtca

SEQ ID NO: 1655680 - DNA, 15 bp, Homo sapiens
ccatgattcagagtc

SEQ ID NO: 1655681 - DNA, 15 bp, Homo sapiens
accatgattcagagt

SEQ ID NO: 1655682 - DNA, 15 bp, Homo sapiens
caccatgattcagag

SEQ ID NO: 1655683 - DNA, 15 bp, Homo sapiens
acaccatgattcaga

SEQ ID NO: 1655684 - DNA, 15 bp, Homo sapiens
cacaccatgattcag

SEQ ID NO: 1655685 - DNA, 15 bp, Homo sapiens
acacaccatgattca

SEQ ID NO: 1655686 - DNA, 15 bp, Homo sapiens
cacacaccatgattc

SEQ ID NO: 1655687 - DNA, 15 bp, Homo sapiens
tcacacaccatgatt

SEQ ID NO: 1655688 - DNA, 15 bp, Homo sapiens
gtcacacaccatgat

SEQ ID NO: 1655689 - DNA, 15 bp, Homo sapiens
ggtcacacaccatga

SEQ ID NO: 1655690 - DNA, 15 bp, Homo sapiens
aggtcacacaccatg

SEQ ID NO: 1655691 - DNA, 15 bp, Homo sapiens
gaggtcacacaccat

SEQ ID NO: 1655692 - DNA, 15 bp, Homo sapiens
cgaggtcacacacca

SEQ ID NO: 1655693 - DNA, 15 bp, Homo sapiens
ccgaggtcacacacc

SEQ ID NO: 1655694 - DNA, 15 bp, Homo sapiens
cccgaggtcacacac

SEQ ID NO: 1655695 - DNA, 15 bp, Homo sapiens
gcccgaggtcacaca

SEQ ID NO: 1655696 - DNA, 15 bp, Homo sapiens
tgcccgaggtcacac

SEQ ID NO: 1655697 - DNA, 15 bp, Homo sapiens
gtgcccgaggtcaca

SEQ ID NO: 1655698 - DNA, 15 bp, Homo sapiens
tgtgcccgaggtcac

SEQ ID NO: 1655699 - DNA, 15 bp, Homo sapiens
atgtgcccgaggtca

SEQ ID NO: 1655700 - DNA, 15 bp, Homo sapiens
catgtgcccgaggtc

SEQ ID NO: 1655701 - DNA, 15 bp, Homo sapiens
tcatgtgcccgaggt

SEQ ID NO: 1655702 - DNA, 15 bp, Homo sapiens
atcatgtgcccgagg

SEQ ID NO: 1655703 - DNA, 15 bp, Homo sapiens
catcatgtgcccgag

SEQ ID NO: 1655704 - DNA, 15 bp, Homo sapiens
acatcatgtgcccga

SEQ ID NO: 1655705 - DNA, 15 bp, Homo sapiens
tacatcatgtgcccg

SEQ ID NO: 1655706 - DNA, 15 bp, Homo sapiens
ttacatcatgtgccc

SEQ ID NO: 1655707 - DNA, 15 bp, Homo sapiens
gttacatcatgtgcc

SEQ ID NO: 1655708 - DNA, 15 bp, Homo sapiens
ggttacatcatgtgc

SEQ ID NO: 1655709 - DNA, 15 bp, Homo sapiens
aggttacatcatgtg

SEQ ID NO: 1655710 - DNA, 15 bp, Homo sapiens
gaggttacatcatgt

SEQ ID NO: 1655711 - DNA, 15 bp, Homo sapiens
agaggttacatcatg

SEQ ID NO: 1655712 - DNA, 15 bp, Homo sapiens
tagaggttacatcat

SEQ ID NO: 1655713 - DNA, 15 bp, Homo sapiens
atagaggttacatca

SEQ ID NO: 1655714 - DNA, 15 bp, Homo sapiens
tatagaggttacatc

SEQ ID NO: 1655715 - DNA, 15 bp, Homo sapiens
ctatagaggttacat

SEQ ID NO: 1655716 - DNA, 15 bp, Homo sapiens
cctatagaggttaca

SEQ ID NO: 1655717 - DNA, 15 bp, Homo sapiens
tcctatagaggttac

SEQ ID NO: 1655718 - DNA, 15 bp, Homo sapiens
gtcctatagaggtta

SEQ ID NO: 1655719 - DNA, 15 bp, Homo sapiens
agtcctatagaggtt

SEQ ID NO: 1655720 - DNA, 15 bp, Homo sapiens
gagtcctatagaggt

SEQ ID NO: 1655721 - DNA, 15 bp, Homo sapiens
agagtcctatagagg

SEQ ID NO: 1655722 - DNA, 15 bp, Homo sapiens
tagagtcctatagag

SEQ ID NO: 1655723 - DNA, 15 bp, Homo sapiens
atagagtcctataga

SEQ ID NO: 1655724 - DNA, 15 bp, Homo sapiens
aatagagtcctatag

SEQ ID NO: 1655725 - DNA, 15 bp, Homo sapiens
aaatagagtcctata

SEQ ID NO: 1655726 - DNA, 15 bp, Homo sapiens
aaaatagagtcctat

SEQ ID NO: 1655727 - DNA, 15 bp, Homo sapiens
taaaatagagtccta

SEQ ID NO: 1655728 - DNA, 15 bp, Homo sapiens
ttaaaatagagtcct

SEQ ID NO: 1655729 - DNA, 15 bp, Homo sapiens
attaaaatagagtcc

SEQ ID NO: 1655730 - DNA, 15 bp, Homo sapiens
cattaaaatagagtc

SEQ ID NO: 1655731 - DNA, 15 bp, Homo sapiens
acattaaaatagagt

SEQ ID NO: 1655732 - DNA, 15 bp, Homo sapiens
tacattaaaatagag

SEQ ID NO: 1655733 - DNA, 15 bp, Homo sapiens
atacattaaaataga

SEQ ID NO: 1655734 - DNA, 15 bp, Homo sapiens
tatacattaaaatag

SEQ ID NO: 1655735 - DNA, 15 bp, Homo sapiens
ttatacattaaaata

SEQ ID NO: 1655736 - DNA, 15 bp, Homo sapiens
tttatacattaaaat

SEQ ID NO: 1655737 - DNA, 15 bp, Homo sapiens
ttttatacattaaaa

SEQ ID NO: 1655738 - DNA, 15 bp, Homo sapiens
gttttatacattaaa

SEQ ID NO: 1655739 - DNA, 15 bp, Homo sapiens
tgttttatacattaa

SEQ ID NO: 1655740 - DNA, 15 bp, Homo sapiens
ctgttttatacatta

SEQ ID NO: 1655741 - DNA, 15 bp, Homo sapiens
cctgttttatacatt

SEQ ID NO: 1655742 - DNA, 15 bp, Homo sapiens
tcctgttttatacat

SEQ ID NO: 1655743 - DNA, 15 bp, Homo sapiens
ttcctgttttataca

SEQ ID NO: 1655744 - DNA, 15 bp, Homo sapiens
attcctgttttatac

SEQ ID NO: 1655745 - DNA, 15 bp, Homo sapiens
tattcctgttttata

SEQ ID NO: 1655746 - DNA, 15 bp, Homo sapiens
ttattcctgttttat

SEQ ID NO: 1655747 - DNA, 15 bp, Homo sapiens
attattcctgtttta

SEQ ID NO: 1655748 - DNA, 15 bp, Homo sapiens
gattattcctgtttt

SEQ ID NO: 1655749 - DNA, 15 bp, Homo sapiens
ggattattcctgttt

SEQ ID NO: 1655750 - DNA, 15 bp, Homo sapiens
aggattattcctgtt

SEQ ID NO: 1655751 - DNA, 15 bp, Homo sapiens
aaggattattcctgt

SEQ ID NO: 1655752 - DNA, 15 bp, Homo sapiens
aaaggattattcctg

SEQ ID NO: 1655753 - DNA, 15 bp, Homo sapiens
taaaggattattcct

SEQ ID NO: 1655754 - DNA, 15 bp, Homo sapiens
ataaaggattattcc

SEQ ID NO: 1655755 - DNA, 15 bp, Homo sapiens
aataaaggattattc

SEQ ID NO: 1655756 - DNA, 15 bp, Homo sapiens
taataaaggattatt

SEQ ID NO: 1655757 - DNA, 15 bp, Homo sapiens
ataataaaggattat

SEQ ID NO: 1655758 - DNA, 15 bp, Homo sapiens
aataataaaggatta

SEQ ID NO: 1655759 - DNA, 15 bp, Homo sapiens
taataataaaggatt

SEQ ID NO: 1655760 - DNA, 15 bp, Homo sapiens
ataataataaaggat

SEQ ID NO: 1655761 - DNA, 15 bp, Homo sapiens
gataataataaagga

SEQ ID NO: 1655762 - DNA, 15 bp, Homo sapiens
agataataataaagg

SEQ ID NO: 1655763 - DNA, 15 bp, Homo sapiens
tagataataataaag

SEQ ID NO: 1655764 - DNA, 15 bp, Homo sapiens
atagataataataaa

SEQ ID NO: 1655765 - DNA, 15 bp, Homo sapiens
catagataataataa

SEQ ID NO: 1655766 - DNA, 15 bp, Homo sapiens
gcatagataataata

SEQ ID NO: 1655767 - DNA, 15 bp, Homo sapiens
tgcatagataataat

SEQ ID NO: 1655768 - DNA, 15 bp, Homo sapiens
ttgcatagataataa

SEQ ID NO: 1655769 - DNA, 15 bp, Homo sapiens
attgcatagataata

SEQ ID NO: 1655770 - DNA, 15 bp, Homo sapiens
tattgcatagataat

SEQ ID NO: 1655771 - DNA, 15 bp, Homo sapiens
gtattgcatagataa

SEQ ID NO: 1655772 - DNA, 15 bp, Homo sapiens
tgtattgcatagata

SEQ ID NO: 1655773 - DNA, 15 bp, Homo sapiens
atgtattgcatagat

SEQ ID NO: 1655774 - DNA, 15 bp, Homo sapiens
tatgtattgcataga

SEQ ID NO: 1655775 - DNA, 15 bp, Homo sapiens
atatgtattgcatag

SEQ ID NO: 1655776 - DNA, 15 bp, Homo sapiens
aatatgtattgcata

SEQ ID NO: 1655777 - DNA, 15 bp, Homo sapiens
gaatatgtattgcat

SEQ ID NO: 1655778 - DNA, 15 bp, Homo sapiens
ggaatatgtattgca

SEQ ID NO: 1655779 - DNA, 15 bp, Homo sapiens
tggaatatgtattgc

SEQ ID NO: 1655780 - DNA, 15 bp, Homo sapiens
atggaatatgtattg

SEQ ID NO: 1655781 - DNA, 15 bp, Homo sapiens
aatggaatatgtatt

SEQ ID NO: 1655782 - DNA, 15 bp, Homo sapiens
taatggaatatgtat

SEQ ID NO: 1655783 - DNA, 15 bp, Homo sapiens
ataatggaatatgta

SEQ ID NO: 1655784 - DNA, 15 bp, Homo sapiens
gataatggaatatgt

SEQ ID NO: 1655785 - DNA, 15 bp, Homo sapiens
agataatggaatatg

SEQ ID NO: 1655786 - DNA, 15 bp, Homo sapiens
tagataatggaatat

SEQ ID NO: 1655787 - DNA, 15 bp, Homo sapiens
atagataatggaata

SEQ ID NO: 1655788 - DNA, 15 bp, Homo sapiens
aatagataatggaat

SEQ ID NO: 1655789 - DNA, 15 bp, Homo sapiens
taatagataatggaa

SEQ ID NO: 1655790 - DNA, 15 bp, Homo sapiens
gtaatagataatgga

SEQ ID NO: 1655791 - DNA, 15 bp, Homo sapiens
tgtaatagataatgg

SEQ ID NO: 1655792 - DNA, 15 bp, Homo sapiens
atgtaatagataatg

SEQ ID NO: 1655793 - DNA, 15 bp, Homo sapiens
catgtaatagataat

SEQ ID NO: 1655794 - DNA, 15 bp, Homo sapiens
ccatgtaatagataa

SEQ ID NO: 1655795 - DNA, 15 bp, Homo sapiens
cccatgtaatagata

SEQ ID NO: 1655796 - DNA, 15 bp, Homo sapiens
tcccatgtaatagat

SEQ ID NO: 1655797 - DNA, 15 bp, Homo sapiens
atcccatgtaataga

SEQ ID NO: 1655798 - DNA, 15 bp, Homo sapiens
tatcccatgtaatag

SEQ ID NO: 1655799 - DNA, 15 bp, Homo sapiens
ttatcccatgtaata

SEQ ID NO: 1655800 - DNA, 15 bp, Homo sapiens
attatcccatgtaat

SEQ ID NO: 1655801 - DNA, 15 bp, Homo sapiens
cattatcccatgtaa

SEQ ID NO: 1655802 - DNA, 15 bp, Homo sapiens
ccattatcccatgta

SEQ ID NO: 1655803 - DNA, 15 bp, Homo sapiens
tccattatcccatgt

SEQ ID NO: 1655804 - DNA, 15 bp, Homo sapiens
ttccattatcccatg

SEQ ID NO: 1655805 - DNA, 15 bp, Homo sapiens
attccattatcccat

SEQ ID NO: 1655806 - DNA, 15 bp, Homo sapiens
cattccattatccca

SEQ ID NO: 1655807 - DNA, 15 bp, Homo sapiens
ccattccattatccc

SEQ ID NO: 1655808 - DNA, 15 bp, Homo sapiens
cccattccattatcc

SEQ ID NO: 1655809 - DNA, 15 bp, Homo sapiens
tcccattccattatc

SEQ ID NO: 1655810 - DNA, 15 bp, Homo sapiens
ttcccattccattat

SEQ ID NO: 1655811 - DNA, 15 bp, Homo sapiens
cttcccattccatta

SEQ ID NO: 1655812 - DNA, 15 bp, Homo sapiens
acttcccattccatt

SEQ ID NO: 1655813 - DNA, 15 bp, Homo sapiens
gacttcccattccat

SEQ ID NO: 1655814 - DNA, 15 bp, Homo sapiens
ggacttcccattcca

SEQ ID NO: 1655815 - DNA, 15 bp, Homo sapiens
gggacttcccattcc

SEQ ID NO: 1655816 - DNA, 15 bp, Homo sapiens
agggacttcccattc

SEQ ID NO: 1655817 - DNA, 15 bp, Homo sapiens
aagggacttcccatt

SEQ ID NO: 1655818 - DNA, 15 bp, Homo sapiens
caagggacttcccat

SEQ ID NO: 1655819 - DNA, 15 bp, Homo sapiens
tcaagggacttccca

SEQ ID NO: 1655820 - DNA, 15 bp, Homo sapiens
ttcaagggacttccc

SEQ ID NO: 1655821 - DNA, 15 bp, Homo sapiens
cttcaagggacttcc

SEQ ID NO: 1655822 - DNA, 15 bp, Homo sapiens
tcttcaagggacttc

SEQ ID NO: 1655823 - DNA, 15 bp, Homo sapiens
atcttcaagggactt

SEQ ID NO: 1655824 - DNA, 15 bp, Homo sapiens
catcttcaagggact

SEQ ID NO: 1655825 - DNA, 15 bp, Homo sapiens
ccatcttcaagggac

SEQ ID NO: 1655826 - DNA, 15 bp, Homo sapiens
accatcttcaaggga

SEQ ID NO: 1655827 - DNA, 15 bp, Homo sapiens
taccatcttcaaggg

SEQ ID NO: 1655828 - DNA, 15 bp, Homo sapiens
gtaccatcttcaagg

SEQ ID NO: 1655829 - DNA, 15 bp, Homo sapiens
agtaccatcttcaag

SEQ ID NO: 1655830 - DNA, 15 bp, Homo sapiens
tagtaccatcttcaa

SEQ ID NO: 1655831 - DNA, 15 bp, Homo sapiens
ttagtaccatcttca

SEQ ID NO: 1655832 - DNA, 15 bp, Homo sapiens
gttagtaccatcttc

SEQ ID NO: 1655833 - DNA, 15 bp, Homo sapiens
ggttagtaccatctt

SEQ ID NO: 1655834 - DNA, 15 bp, Homo sapiens
aggttagtaccatct

SEQ ID NO: 1655835 - DNA, 15 bp, Homo sapiens
gaggttagtaccatc

SEQ ID NO: 1655836 - DNA, 15 bp, Homo sapiens
tgaggttagtaccat

SEQ ID NO: 1655837 - DNA, 15 bp, Homo sapiens
ttgaggttagtacca

SEQ ID NO: 1655838 - DNA, 15 bp, Homo sapiens
attgaggttagtacc

SEQ ID NO: 1655839 - DNA, 15 bp, Homo sapiens
cattgaggttagtac

SEQ ID NO: 1655840 - DNA, 15 bp, Homo sapiens
acattgaggttagta

SEQ ID NO: 1655841 - DNA, 15 bp, Homo sapiens
tacattgaggttagt

SEQ ID NO: 1655842 - DNA, 15 bp, Homo sapiens
atacattgaggttag

SEQ ID NO: 1655843 - DNA, 15 bp, Homo sapiens
aatacattgaggtta

SEQ ID NO: 1655844 - DNA, 15 bp, Homo sapiens
taatacattgaggtt

SEQ ID NO: 1655845 - DNA, 15 bp, Homo sapiens
gtaatacattgaggt

SEQ ID NO: 1655846 - DNA, 15 bp, Homo sapiens
agtaatacattgagg

SEQ ID NO: 1655847 - DNA, 15 bp, Homo sapiens
gagtaatacattgag

SEQ ID NO: 1655848 - DNA, 15 bp, Homo sapiens
ggagtaatacattga

SEQ ID NO: 1655849 - DNA, 15 bp, Homo sapiens
aggagtaatacattg

SEQ ID NO: 1655850 - DNA, 15 bp, Homo sapiens
aaggagtaatacatt

SEQ ID NO: 1655851 - DNA, 15 bp, Homo sapiens
aaaggagtaatacat

SEQ ID NO: 1655852 - DNA, 15 bp, Homo sapiens
gaaaggagtaataca

SEQ ID NO: 1655853 - DNA, 15 bp, Homo sapiens
agaaaggagtaatac

SEQ ID NO: 1655854 - DNA, 15 bp, Homo sapiens
tagaaaggagtaata

SEQ ID NO: 1655855 - DNA, 15 bp, Homo sapiens
ctagaaaggagtaat

SEQ ID NO: 1655856 - DNA, 15 bp, Homo sapiens
gctagaaaggagtaa

SEQ ID NO: 1655857 - DNA, 15 bp, Homo sapiens
agctagaaaggagta

SEQ ID NO: 1655858 - DNA, 15 bp, Homo sapiens
aagctagaaaggagt

SEQ ID NO: 1655859 - DNA, 15 bp, Homo sapiens
gaagctagaaaggag

SEQ ID NO: 1655860 - DNA, 15 bp, Homo sapiens
agaagctagaaagga

SEQ ID NO: 1655861 - DNA, 15 bp, Homo sapiens
aagaagctagaaagg

SEQ ID NO: 1655862 - DNA, 15 bp, Homo sapiens
aaagaagctagaaag

SEQ ID NO: 1655863 - DNA, 15 bp, Homo sapiens
caaagaagctagaaa

SEQ ID NO: 1655864 - DNA, 15 bp, Homo sapiens
ccaaagaagctagaa

SEQ ID NO: 1655865 - DNA, 15 bp, Homo sapiens
accaaagaagctaga

SEQ ID NO: 1655866 - DNA, 15 bp, Homo sapiens
aaccaaagaagctag

SEQ ID NO: 1655867 - DNA, 15 bp, Homo sapiens
gaaccaaagaagcta

SEQ ID NO: 1655868 - DNA, 15 bp, Homo sapiens
tgaaccaaagaagct

SEQ ID NO: 1655869 - DNA, 15 bp, Homo sapiens
ttgaaccaaagaagc

SEQ ID NO: 1655870 - DNA, 15 bp, Homo sapiens
tttgaaccaaagaag

SEQ ID NO: 1655871 - DNA, 15 bp, Homo sapiens
ttttgaaccaaagaa

SEQ ID NO: 1655872 - DNA, 15 bp, Homo sapiens
cttttgaaccaaaga

SEQ ID NO: 1655873 - DNA, 15 bp, Homo sapiens
acttttgaaccaaag

SEQ ID NO: 1655874 - DNA, 15 bp, Homo sapiens
aacttttgaaccaaa

SEQ ID NO: 1655875 - DNA, 15 bp, Homo sapiens
aaacttttgaaccaa

SEQ ID NO: 1655876 - DNA, 15 bp, Homo sapiens
caaacttttgaacca

SEQ ID NO: 1655877 - DNA, 15 bp, Homo sapiens
ccaaacttttgaacc

SEQ ID NO: 1655878 - DNA, 15 bp, Homo sapiens
accaaacttttgaac

SEQ ID NO: 1655879 - DNA, 15 bp, Homo sapiens
caccaaacttttgaa

SEQ ID NO: 1655880 - DNA, 15 bp, Homo sapiens
ccaccaaacttttga

SEQ ID NO: 1655881 - DNA, 15 bp, Homo sapiens
tccaccaaacttttg

SEQ ID NO: 1655882 - DNA, 15 bp, Homo sapiens
ctccaccaaactttt

SEQ ID NO: 1655883 - DNA, 15 bp, Homo sapiens
cctccaccaaacttt

SEQ ID NO: 1655884 - DNA, 15 bp, Homo sapiens
tcctccaccaaactt

SEQ ID NO: 1655885 - DNA, 15 bp, Homo sapiens
ctcctccaccaaact

SEQ ID NO: 1655886 - DNA, 15 bp, Homo sapiens
actcctccaccaaac

SEQ ID NO: 1655887 - DNA, 15 bp, Homo sapiens
aactcctccaccaaa

SEQ ID NO: 1655888 - DNA, 15 bp, Homo sapiens
taactcctccaccaa

SEQ ID NO: 1655889 - DNA, 15 bp, Homo sapiens
gtaactcctccacca

SEQ ID NO: 1655890 - DNA, 15 bp, Homo sapiens
tgtaactcctccacc

SEQ ID NO: 1655891 - DNA, 15 bp, Homo sapiens
ttgtaactcctccac

SEQ ID NO: 1655892 - DNA, 15 bp, Homo sapiens
tttgtaactcctcca

SEQ ID NO: 1655893 - DNA, 15 bp, Homo sapiens
atttgtaactcctcc

SEQ ID NO: 1655894 - DNA, 15 bp, Homo sapiens
aatttgtaactcctc

SEQ ID NO: 1655895 - DNA, 15 bp, Homo sapiens
gaatttgtaactcct

SEQ ID NO: 1655896 - DNA, 15 bp, Homo sapiens
agaatttgtaactcc

SEQ ID NO: 1655897 - DNA, 15 bp, Homo sapiens
cagaatttgtaactc

SEQ ID NO: 1655898 - DNA, 15 bp, Homo sapiens
ccagaatttgtaact

SEQ ID NO: 1655899 - DNA, 15 bp, Homo sapiens
accagaatttgtaac

SEQ ID NO: 1655900 - DNA, 15 bp, Homo sapiens
aaccagaatttgtaa

SEQ ID NO: 1655901 - DNA, 15 bp, Homo sapiens
aaaccagaatttgta

SEQ ID NO: 1655902 - DNA, 15 bp, Homo sapiens
caaaccagaatttgt

SEQ ID NO: 1655903 - DNA, 15 bp, Homo sapiens
tcaaaccagaatttg

SEQ ID NO: 1655904 - DNA, 15 bp, Homo sapiens
ttcaaaccagaattt

SEQ ID NO: 1655905 - DNA, 15 bp, Homo sapiens
attcaaaccagaatt

SEQ ID NO: 1655906 - DNA, 15 bp, Homo sapiens
cattcaaaccagaat

SEQ ID NO: 1655907 - DNA, 15 bp, Homo sapiens
tcattcaaaccagaa

SEQ ID NO: 1655908 - DNA, 15 bp, Homo sapiens
atcattcaaaccaga

SEQ ID NO: 1655909 - DNA, 15 bp, Homo sapiens
tatcattcaaaccag

SEQ ID NO: 1655910 - DNA, 15 bp, Homo sapiens
atatcattcaaacca

SEQ ID NO: 1655911 - DNA, 15 bp, Homo sapiens
tatatcattcaaacc

SEQ ID NO: 1655912 - DNA, 15 bp, Homo sapiens
atatatcattcaaac

SEQ ID NO: 1655913 - DNA, 15 bp, Homo sapiens
aatatatcattcaaa

SEQ ID NO: 1655914 - DNA, 15 bp, Homo sapiens
aaatatatcattcaa

SEQ ID NO: 1655915 - DNA, 15 bp, Homo sapiens
caaatatatcattca

SEQ ID NO: 1655916 - DNA, 15 bp, Homo sapiens
ccaaatatatcattc

SEQ ID NO: 1655917 - DNA, 15 bp, Homo sapiens
tccaaatatatcatt

SEQ ID NO: 1655918 - DNA, 15 bp, Homo sapiens
atccaaatatatcat

SEQ ID NO: 1655919 - DNA, 15 bp, Homo sapiens
tatccaaatatatca

SEQ ID NO: 1655920 - DNA, 15 bp, Homo sapiens
gtatccaaatatatc

SEQ ID NO: 1655921 - DNA, 15 bp, Homo sapiens
agtatccaaatatat

SEQ ID NO: 1655922 - DNA, 15 bp, Homo sapiens
aagtatccaaatata

SEQ ID NO: 1655923 - DNA, 15 bp, Homo sapiens
aaagtatccaaatat

SEQ ID NO: 1655924 - DNA, 15 bp, Homo sapiens
taaagtatccaaata

SEQ ID NO: 1655925 - DNA, 15 bp, Homo sapiens
ataaagtatccaaat

SEQ ID NO: 1655926 - DNA, 15 bp, Homo sapiens
gataaagtatccaaa

SEQ ID NO: 1655927 - DNA, 15 bp, Homo sapiens
tgataaagtatccaa

SEQ ID NO: 1655928 - DNA, 15 bp, Homo sapiens
ttgataaagtatcca

SEQ ID NO: 1655929 - DNA, 15 bp, Homo sapiens
gttgataaagtatcc

SEQ ID NO: 1655930 - DNA, 15 bp, Homo sapiens
tgttgataaagtatc

SEQ ID NO: 1655931 - DNA, 15 bp, Homo sapiens
gtgttgataaagtat

SEQ ID NO: 1655932 - DNA, 15 bp, Homo sapiens
tgtgttgataaagta

SEQ ID NO: 1655933 - DNA, 15 bp, Homo sapiens
atgtgttgataaagt

SEQ ID NO: 1655934 - DNA, 15 bp, Homo sapiens
gatgtgttgataaag

SEQ ID NO: 1655935 - DNA, 15 bp, Homo sapiens
tgatgtgttgataaa

SEQ ID NO: 1655936 - DNA, 15 bp, Homo sapiens
ttgatgtgttgataa

SEQ ID NO: 1655937 - DNA, 15 bp, Homo sapiens
tttgatgtgttgata

SEQ ID NO: 1655938 - DNA, 15 bp, Homo sapiens
ctttgatgtgttgat

SEQ ID NO: 1655939 - DNA, 15 bp, Homo sapiens
gctttgatgtgttga

SEQ ID NO: 1655940 - DNA, 15 bp, Homo sapiens
agctttgatgtgttg

SEQ ID NO: 1655941 - DNA, 15 bp, Homo sapiens
gagctttgatgtgtt

SEQ ID NO: 1655942 - DNA, 15 bp, Homo sapiens
agagctttgatgtgt

SEQ ID NO: 1655943 - DNA, 15 bp, Homo sapiens
tagagctttgatgtg

SEQ ID NO: 1655944 - DNA, 15 bp, Homo sapiens
gtagagctttgatgt

SEQ ID NO: 1655945 - DNA, 15 bp, Homo sapiens
ggtagagctttgatg

SEQ ID NO: 1655946 - DNA, 15 bp, Homo sapiens
aggtagagctttgat

SEQ ID NO: 1655947 - DNA, 15 bp, Homo sapiens
taggtagagctttga

SEQ ID NO: 1655948 - DNA, 15 bp, Homo sapiens
ataggtagagctttg

SEQ ID NO: 1655949 - DNA, 15 bp, Homo sapiens
gataggtagagcttt

SEQ ID NO: 1655950 - DNA, 15 bp, Homo sapiens
ggataggtagagctt

SEQ ID NO: 1655951 - DNA, 15 bp, Homo sapiens
gggataggtagagct

SEQ ID NO: 1655952 - DNA, 15 bp, Homo sapiens
agggataggtagagc

SEQ ID NO: 1655953 - DNA, 15 bp, Homo sapiens
aagggataggtagag

SEQ ID NO: 1655954 - DNA, 15 bp, Homo sapiens
gaagggataggtaga

SEQ ID NO: 1655955 - DNA, 15 bp, Homo sapiens
ggaagggataggtag

SEQ ID NO: 1655956 - DNA, 15 bp, Homo sapiens
gggaagggataggta

SEQ ID NO: 1655957 - DNA, 15 bp, Homo sapiens
ggggaagggataggt

SEQ ID NO: 1655958 - DNA, 15 bp, Homo sapiens
gggggaagggatagg

SEQ ID NO: 1655959 - DNA, 15 bp, Homo sapiens
tgggggaagggatag

SEQ ID NO: 1655960 - DNA, 15 bp, Homo sapiens
atgggggaagggata

SEQ ID NO: 1655961 - DNA, 15 bp, Homo sapiens
aatgggggaagggat

SEQ ID NO: 1655962 - DNA, 15 bp, Homo sapiens
gaatgggggaaggga

SEQ ID NO: 1655963 - DNA, 15 bp, Homo sapiens
agaatgggggaaggg

SEQ ID NO: 1655964 - DNA, 15 bp, Homo sapiens
gagaatgggggaagg

SEQ ID NO: 1655965 - DNA, 15 bp, Homo sapiens
tgagaatgggggaag

SEQ ID NO: 1655966 - DNA, 15 bp, Homo sapiens
ttgagaatgggggaa

SEQ ID NO: 1655967 - DNA, 15 bp, Homo sapiens
tttgagaatggggga

SEQ ID NO: 1655968 - DNA, 15 bp, Homo sapiens
ttttgagaatggggg

SEQ ID NO: 1655969 - DNA, 15 bp, Homo sapiens
gttttgagaatgggg

SEQ ID NO: 1655970 - DNA, 15 bp, Homo sapiens
ggttttgagaatggg

SEQ ID NO: 1655971 - DNA, 15 bp, Homo sapiens
tggttttgagaatgg

SEQ ID NO: 1655972 - DNA, 15 bp, Homo sapiens
ttggttttgagaatg

SEQ ID NO: 1655973 - DNA, 15 bp, Homo sapiens
cttggttttgagaat

SEQ ID NO: 1655974 - DNA, 15 bp, Homo sapiens
gcttggttttgagaa

SEQ ID NO: 1655975 - DNA, 15 bp, Homo sapiens
agcttggttttgaga

SEQ ID NO: 1655976 - DNA, 15 bp, Homo sapiens
cagcttggttttgag

SEQ ID NO: 1655977 - DNA, 15 bp, Homo sapiens
tcagcttggttttga

SEQ ID NO: 1655978 - DNA, 15 bp, Homo sapiens
ttcagcttggttttg

SEQ ID NO: 1655979 - DNA, 15 bp, Homo sapiens
attcagcttggtttt

SEQ ID NO: 1655980 - DNA, 15 bp, Homo sapiens
aattcagcttggttt

SEQ ID NO: 1655981 - DNA, 15 bp, Homo sapiens
taattcagcttggtt

SEQ ID NO: 1655982 - DNA, 15 bp, Homo sapiens
ttaattcagcttggt

SEQ ID NO: 1655983 - DNA, 15 bp, Homo sapiens
gttaattcagcttgg

SEQ ID NO: 1655984 - DNA, 15 bp, Homo sapiens
tgttaattcagcttg

SEQ ID NO: 1655985 - DNA, 15 bp, Homo sapiens
atgttaattcagctt

SEQ ID NO: 1655986 - DNA, 15 bp, Homo sapiens
gatgttaattcagct

SEQ ID NO: 1655987 - DNA, 15 bp, Homo sapiens
agatgttaattcagc

SEQ ID NO: 1655988 - DNA, 15 bp, Homo sapiens
aagatgttaattcag

SEQ ID NO: 1655989 - DNA, 15 bp, Homo sapiens
aaagatgttaattca

SEQ ID NO: 1655990 - DNA, 15 bp, Homo sapiens
taaagatgttaattc

SEQ ID NO: 1655991 - DNA, 15 bp, Homo sapiens
gtaaagatgttaatt

SEQ ID NO: 1655992 - DNA, 15 bp, Homo sapiens
tgtaaagatgttaat

SEQ ID NO: 1655993 - DNA, 15 bp, Homo sapiens
atgtaaagatgttaa

SEQ ID NO: 1655994 - DNA, 15 bp, Homo sapiens
aatgtaaagatgtta

SEQ ID NO: 1655995 - DNA, 15 bp, Homo sapiens
aaatgtaaagatgtt

SEQ ID NO: 1655996 - DNA, 15 bp, Homo sapiens
taaatgtaaagatgt

SEQ ID NO: 1655997 - DNA, 15 bp, Homo sapiens
ataaatgtaaagatg

SEQ ID NO: 1655998 - DNA, 15 bp, Homo sapiens
taataaatgtaaaga

SEQ ID NO: 1655999 - DNA, 15 bp, Homo sapiens
ataataaatgtaaag

SEQ ID NO: 1656000 - DNA, 15 bp, Homo sapiens
cataataaatgtaaa

SEQ ID NO: 1656001 - DNA, 15 bp, Homo sapiens
gcataataaatgtaa

SEQ ID NO: 1656002 - DNA, 15 bp, Homo sapiens
tgcataataaatgta

SEQ ID NO: 1656003 - DNA, 15 bp, Homo sapiens
ctgcataataaatgt

SEQ ID NO: 1656004 - DNA, 15 bp, Homo sapiens
actgcataataaatg

SEQ ID NO: 1656005 - DNA, 15 bp, Homo sapiens
aactgcataataaat

SEQ ID NO: 1656006 - DNA, 15 bp, Homo sapiens
aaactgcataataaa

SEQ ID NO: 1656007 - DNA, 15 bp, Homo sapiens
taaactgcataataa

SEQ ID NO: 1656008 - DNA, 15 bp, Homo sapiens
ataaactgcataata

SEQ ID NO: 1656009 - DNA, 15 bp, Homo sapiens
cataaactgcataat

SEQ ID NO: 1656010 - DNA, 15 bp, Homo sapiens
ccataaactgcataa

SEQ ID NO: 1656011 - DNA, 15 bp, Homo sapiens
tccataaactgcata

SEQ ID NO: 1656012 - DNA, 15 bp, Homo sapiens
ctccataaactgcat

SEQ ID NO: 1656013 - DNA, 15 bp, Homo sapiens
cctccataaactgca

SEQ ID NO: 1656014 - DNA, 15 bp, Homo sapiens
tcctccataaactgc

SEQ ID NO: 1656015 - DNA, 15 bp, Homo sapiens
atcctccataaactg

SEQ ID NO: 1656016 - DNA, 15 bp, Homo sapiens
aatcctccataaact

SEQ ID NO: 1656017 - DNA, 15 bp, Homo sapiens
aaatcctccataaac

SEQ ID NO: 1656018 - DNA, 15 bp, Homo sapiens
aaaatcctccataaa

SEQ ID NO: 1656019 - DNA, 15 bp, Homo sapiens
taaaatcctccataa

SEQ ID NO: 1656020 - DNA, 15 bp, Homo sapiens
ctaaaatcctccata

SEQ ID NO: 1656021 - DNA, 15 bp, Homo sapiens
gctaaaatcctccat

SEQ ID NO: 1656022 - DNA, 15 bp, Homo sapiens
tgctaaaatcctcca

SEQ ID NO: 1656023 - DNA, 15 bp, Homo sapiens
atgctaaaatcctcc

SEQ ID NO: 1656024 - DNA, 15 bp, Homo sapiens
aatgctaaaatcctc

SEQ ID NO: 1656025 - DNA, 15 bp, Homo sapiens
taatgctaaaatcct

SEQ ID NO: 1656026 - DNA, 15 bp, Homo sapiens
ttaatgctaaaatcc

SEQ ID NO: 1656027 - DNA, 15 bp, Homo sapiens
attaatgctaaaatc

SEQ ID NO: 1656028 - DNA, 15 bp, Homo sapiens
aattaatgctaaaat

SEQ ID NO: 1656029 - DNA, 15 bp, Homo sapiens
taattaatgctaaaa

SEQ ID NO: 1656030 - DNA, 15 bp, Homo sapiens
ataattaatgctaaa

SEQ ID NO: 1656031 - DNA, 15 bp, Homo sapiens
aataattaatgctaa

SEQ ID NO: 1656032 - DNA, 15 bp, Homo sapiens
caataattaatgcta

SEQ ID NO: 1656033 - DNA, 15 bp, Homo sapiens
gcaataattaatgct

SEQ ID NO: 1656034 - DNA, 15 bp, Homo sapiens
agcaataattaatgc

SEQ ID NO: 1656035 - DNA, 15 bp, Homo sapiens
aagcaataattaatg

SEQ ID NO: 1656036 - DNA, 15 bp, Homo sapiens
caagcaataattaat

SEQ ID NO: 1656037 - DNA, 15 bp, Homo sapiens
tcaagcaataattaa

SEQ ID NO: 1656038 - DNA, 15 bp, Homo sapiens
atcaagcaataatta

SEQ ID NO: 1656039 - DNA, 15 bp, Homo sapiens
aatcaagcaataatt

SEQ ID NO: 1656040 - DNA, 15 bp, Homo sapiens
aaatcaagcaataat

SEQ ID NO: 1656041 - DNA, 15 bp, Homo sapiens
taaatcaagcaataa

SEQ ID NO: 1656042 - DNA, 15 bp, Homo sapiens
gtaaatcaagcaata

SEQ ID NO: 1656043 - DNA, 15 bp, Homo sapiens
agtaaatcaagcaat

SEQ ID NO: 1656044 - DNA, 15 bp, Homo sapiens
gagtaaatcaagcaa

SEQ ID NO: 1656045 - DNA, 15 bp, Homo sapiens
tgagtaaatcaagca

SEQ ID NO: 1656046 - DNA, 15 bp, Homo sapiens
ttgagtaaatcaagc

SEQ ID NO: 1656047 - DNA, 15 bp, Homo sapiens
attgagtaaatcaag

SEQ ID NO: 1656048 - DNA, 15 bp, Homo sapiens
cattgagtaaatcaa

SEQ ID NO: 1656049 - DNA, 15 bp, Homo sapiens
acattgagtaaatca

SEQ ID NO: 1656050 - DNA, 15 bp, Homo sapiens
gacattgagtaaatc

SEQ ID NO: 1656051 - DNA, 15 bp, Homo sapiens
ggacattgagtaaat

SEQ ID NO: 1656052 - DNA, 15 bp, Homo sapiens
gggacattgagtaaa

SEQ ID NO: 1656053 - DNA, 15 bp, Homo sapiens
ggggacattgagtaa

SEQ ID NO: 1656054 - DNA, 15 bp, Homo sapiens
tggggacattgagta

SEQ ID NO: 1656055 - DNA, 15 bp, Homo sapiens
atggggacattgagt

SEQ ID NO: 1656056 - DNA, 15 bp, Homo sapiens
catggggacattgag

SEQ ID NO: 1656057 - DNA, 15 bp, Homo sapiens
acatggggacattga

SEQ ID NO: 1656058 - DNA, 15 bp, Homo sapiens
aacatggggacattg

SEQ ID NO: 1656059 - DNA, 15 bp, Homo sapiens
taacatggggacatt

SEQ ID NO: 1656060 - DNA, 15 bp, Homo sapiens
ataacatggggacat

SEQ ID NO: 1656061 - DNA, 15 bp, Homo sapiens
tataacatggggaca

SEQ ID NO: 1656062 - DNA, 15 bp, Homo sapiens
ctataacatggggac

SEQ ID NO: 1656063 - DNA, 15 bp, Homo sapiens
tctataacatgggga

SEQ ID NO: 1656064 - DNA, 15 bp, Homo sapiens
atctataacatgggg

SEQ ID NO: 1656065 - DNA, 15 bp, Homo sapiens
catctataacatggg

SEQ ID NO: 1656066 - DNA, 15 bp, Homo sapiens
tcatctataacatgg

SEQ ID NO: 1656067 - DNA, 15 bp, Homo sapiens
ctcatctataacatg

SEQ ID NO: 1656068 - DNA, 15 bp, Homo sapiens
tctcatctataacat

SEQ ID NO: 1656069 - DNA, 15 bp, Homo sapiens
ttctcatctataaca

SEQ ID NO: 1656070 - DNA, 15 bp, Homo sapiens
gttctcatctataac

SEQ ID NO: 1656071 - DNA, 15 bp, Homo sapiens
agttctcatctataa

SEQ ID NO: 1656072 - DNA, 15 bp, Homo sapiens
cagttctcatctata

SEQ ID NO: 1656073 - DNA, 15 bp, Homo sapiens
ccagttctcatctat

SEQ ID NO: 1656074 - DNA, 15 bp, Homo sapiens
tccagttctcatcta

SEQ ID NO: 1656075 - DNA, 15 bp, Homo sapiens
ttccagttctcatct

SEQ ID NO: 1656076 - DNA, 15 bp, Homo sapiens
tttccagttctcatc

SEQ ID NO: 1656077 - DNA, 15 bp, Homo sapiens
ttttccagttctcat

SEQ ID NO: 1656078 - DNA, 15 bp, Homo sapiens
gttttccagttctca

SEQ ID NO: 1656079 - DNA, 15 bp, Homo sapiens
ggttttccagttctc

SEQ ID NO: 1656080 - DNA, 15 bp, Homo sapiens
gggttttccagttct

SEQ ID NO: 1656081 - DNA, 15 bp, Homo sapiens
tgggttttccagttc

SEQ ID NO: 1656082 - DNA, 15 bp, Homo sapiens
atgggttttccagtt

SEQ ID NO: 1656083 - DNA, 15 bp, Homo sapiens
aatgggttttccagt

SEQ ID NO: 1656084 - DNA, 15 bp, Homo sapiens
tcaatgggttttcca

SEQ ID NO: 1656085 - DNA, 15 bp, Homo sapiens
ttcaatgggttttcc

SEQ ID NO: 1656086 - DNA, 15 bp, Homo sapiens
cttcaatgggttttc

SEQ ID NO: 1656087 - DNA, 15 bp, Homo sapiens
acttcaatgggtttt

SEQ ID NO: 1656088 - DNA, 15 bp, Homo sapiens
aacttcaatgggttt

SEQ ID NO: 1656089 - DNA, 15 bp, Homo sapiens
caacttcaatgggtt

SEQ ID NO: 1656090 - DNA, 15 bp, Homo sapiens
acaacttcaatgggt

SEQ ID NO: 1656091 - DNA, 15 bp, Homo sapiens
cacaacttcaatggg

SEQ ID NO: 1656092 - DNA, 15 bp, Homo sapiens
tcacaacttcaatgg

SEQ ID NO: 1656093 - DNA, 15 bp, Homo sapiens
gtcacaacttcaatg

SEQ ID NO: 1656094 - DNA, 15 bp, Homo sapiens
agtcacaacttcaat

SEQ ID NO: 1656095 - DNA, 15 bp, Homo sapiens
gagtcacaacttcaa

SEQ ID NO: 1656096 - DNA, 15 bp, Homo sapiens
ggagtcacaacttca

SEQ ID NO: 1656097 - DNA, 15 bp, Homo sapiens
aggagtcacaacttc

SEQ ID NO: 1656098 - DNA, 15 bp, Homo sapiens
caggagtcacaactt

SEQ ID NO: 1656099 - DNA, 15 bp, Homo sapiens
ccaggagtcacaact

SEQ ID NO: 1656100 - DNA, 15 bp, Homo sapiens
accaggagtcacaac

SEQ ID NO: 1656101 - DNA, 15 bp, Homo sapiens
gaccaggagtcacaa

SEQ ID NO: 1656102 - DNA, 15 bp, Homo sapiens
agaccaggagtcaca

SEQ ID NO: 1656103 - DNA, 15 bp, Homo sapiens
tagaccaggagtcac

SEQ ID NO: 1656104 - DNA, 15 bp, Homo sapiens
ctagaccaggagtca

SEQ ID NO: 1656105 - DNA, 15 bp, Homo sapiens
tctagaccaggagtc

SEQ ID NO: 1656106 - DNA, 15 bp, Homo sapiens
ttctagaccaggagt

SEQ ID NO: 1656107 - DNA, 15 bp, Homo sapiens
tttctagaccaggag

SEQ ID NO: 1656108 - DNA, 15 bp, Homo sapiens
atttctagaccagga

SEQ ID NO: 1656109 - DNA, 15 bp, Homo sapiens
catttctagaccagg

SEQ ID NO: 1656110 - DNA, 15 bp, Homo sapiens
tcatttctagaccag

SEQ ID NO: 1656111 - DNA, 15 bp, Homo sapiens
ttcatttctagacca

SEQ ID NO: 1656112 - DNA, 15 bp, Homo sapiens
cttcatttctagacc

SEQ ID NO: 1656113 - DNA, 15 bp, Homo sapiens
acttcatttctagac

SEQ ID NO: 1656114 - DNA, 15 bp, Homo sapiens
gacttcatttctaga

SEQ ID NO: 1656115 - DNA, 15 bp, Homo sapiens
agacttcatttctag

SEQ ID NO: 1656116 - DNA, 15 bp, Homo sapiens
tagacttcatttcta

SEQ ID NO: 1656117 - DNA, 15 bp, Homo sapiens
gtagacttcatttct

SEQ ID NO: 1656118 - DNA, 15 bp, Homo sapiens
agtagacttcatttc

SEQ ID NO: 1656119 - DNA, 15 bp, Homo sapiens
aagtagacttcattt

SEQ ID NO: 1656120 - DNA, 15 bp, Homo sapiens
gaagtagacttcatt

SEQ ID NO: 1656121 - DNA, 15 bp, Homo sapiens
ggaagtagacttcat

SEQ ID NO: 1656122 - DNA, 15 bp, Homo sapiens
tggaagtagacttca

SEQ ID NO: 1656123 - DNA, 15 bp, Homo sapiens
ctggaagtagacttc

SEQ ID NO: 1656124 - DNA, 15 bp, Homo sapiens
actggaagtagactt

SEQ ID NO: 1656125 - DNA, 15 bp, Homo sapiens
aactggaagtagact

SEQ ID NO: 1656126 - DNA, 15 bp, Homo sapiens
taactggaagtagac

SEQ ID NO: 1656127 - DNA, 15 bp, Homo sapiens
ttaactggaagtaga

SEQ ID NO: 1656128 - DNA, 15 bp, Homo sapiens
attaactggaagtag

SEQ ID NO: 1656129 - DNA, 15 bp, Homo sapiens
cattaactggaagta

SEQ ID NO: 1656130 - DNA, 15 bp, Homo sapiens
acattaactggaagt

SEQ ID NO: 1656131 - DNA, 15 bp, Homo sapiens
aacattaactggaag

SEQ ID NO: 1656132 - DNA, 15 bp, Homo sapiens
gaacattaactggaa

SEQ ID NO: 1656133 - DNA, 15 bp, Homo sapiens
agaacattaactgga

SEQ ID NO: 1656134 - DNA, 15 bp, Homo sapiens
aagaacattaactgg

SEQ ID NO: 1656135 - DNA, 15 bp, Homo sapiens
aaagaacattaactg

SEQ ID NO: 1656136 - DNA, 15 bp, Homo sapiens
gaaagaacattaact

SEQ ID NO: 1656137 - DNA, 15 bp, Homo sapiens
agaaagaacattaac

SEQ ID NO: 1656138 - DNA, 15 bp, Homo sapiens
cagaaagaacattaa

SEQ ID NO: 1656139 - DNA, 15 bp, Homo sapiens
ccagaaagaacatta

SEQ ID NO: 1656140 - DNA, 15 bp, Homo sapiens
accagaaagaacatt

SEQ ID NO: 1656141 - DNA, 15 bp, Homo sapiens
taccagaaagaacat

SEQ ID NO: 1656142 - DNA, 15 bp, Homo sapiens
ataccagaaagaaca

SEQ ID NO: 1656143 - DNA, 15 bp, Homo sapiens
cataccagaaagaac

SEQ ID NO: 1656144 - DNA, 15 bp, Homo sapiens
acataccagaaagaa

SEQ ID NO: 1656145 - DNA, 15 bp, Homo sapiens
gacataccagaaaga

SEQ ID NO: 1656146 - DNA, 15 bp, Homo sapiens
agacataccagaaag

SEQ ID NO: 1656147 - DNA, 15 bp, Homo sapiens
aagacataccagaaa

SEQ ID NO: 1656148 - DNA, 15 bp, Homo sapiens
aaagacataccagaa

SEQ ID NO: 1656149 - DNA, 15 bp, Homo sapiens
caaagacataccaga

SEQ ID NO: 1656150 - DNA, 15 bp, Homo sapiens
gcaaagacataccag

SEQ ID NO: 1656151 - DNA, 15 bp, Homo sapiens
agcaaagacatacca

SEQ ID NO: 1656152 - DNA, 15 bp, Homo sapiens
aagcaaagacatacc

SEQ ID NO: 1656153 - DNA, 15 bp, Homo sapiens
aaagcaaagacatac

SEQ ID NO: 1656154 - DNA, 15 bp, Homo sapiens
gaaagcaaagacata

SEQ ID NO: 1656155 - DNA, 15 bp, Homo sapiens
agaaagcaaagacat

SEQ ID NO: 1656156 - DNA, 15 bp, Homo sapiens
aagaaagcaaagaca

SEQ ID NO: 1656157 - DNA, 15 bp, Homo sapiens
caagaaagcaaagac

SEQ ID NO: 1656158 - DNA, 15 bp, Homo sapiens
tcaagaaagcaaaga

SEQ ID NO: 1656159 - DNA, 15 bp, Homo sapiens
ttcaagaaagcaaag

SEQ ID NO: 1656160 - DNA, 15 bp, Homo sapiens
tttcaagaaagcaaa

SEQ ID NO: 1656161 - DNA, 15 bp, Homo sapiens
atttcaagaaagcaa

SEQ ID NO: 1656162 - DNA, 15 bp, Homo sapiens
aatttcaagaaagca

SEQ ID NO: 1656163 - DNA, 15 bp, Homo sapiens
aaatttcaagaaagc

SEQ ID NO: 1656164 - DNA, 15 bp, Homo sapiens
gaaatttcaagaaag

SEQ ID NO: 1656165 - DNA, 15 bp, Homo sapiens
ggaaatttcaagaaa

SEQ ID NO: 1656166 - DNA, 15 bp, Homo sapiens
gggaaatttcaagaa

SEQ ID NO: 1656167 - DNA, 15 bp, Homo sapiens
agggaaatttcaaga

SEQ ID NO: 1656168 - DNA, 15 bp, Homo sapiens
aagggaaatttcaag

SEQ ID NO: 1656169 - DNA, 15 bp, Homo sapiens
aaagggaaatttcaa

SEQ ID NO: 1656170 - DNA, 15 bp, Homo sapiens
aaaagggaaatttca

SEQ ID NO: 1656171 - DNA, 15 bp, Homo sapiens
aaaaagggaaatttc

SEQ ID NO: 1656172 - DNA, 15 bp, Homo sapiens
aaaaaagggaaattt

SEQ ID NO: 1656173 - DNA, 15 bp, Homo sapiens
caaaaaagggaaatt

SEQ ID NO: 1656174 - DNA, 15 bp, Homo sapiens
acaaaaaagggaaat

SEQ ID NO: 1656175 - DNA, 15 bp, Homo sapiens
gacaaaaaagggaaa

SEQ ID NO: 1656176 - DNA, 15 bp, Homo sapiens
ggacaaaaaagggaa

SEQ ID NO: 1656177 - DNA, 15 bp, Homo sapiens
aggacaaaaaaggga

SEQ ID NO: 1656178 - DNA, 15 bp, Homo sapiens
aaggacaaaaaaggg

SEQ ID NO: 1656179 - DNA, 15 bp, Homo sapiens
taaggacaaaaaagg

SEQ ID NO: 1656180 - DNA, 15 bp, Homo sapiens
gtaaggacaaaaaag

SEQ ID NO: 1656181 - DNA, 15 bp, Homo sapiens
agtaaggacaaaaaa

SEQ ID NO: 1656182 - DNA, 15 bp, Homo sapiens
cagtaaggacaaaaa

SEQ ID NO: 1656183 - DNA, 15 bp, Homo sapiens
ccagtaaggacaaaa

SEQ ID NO: 1656184 - DNA, 15 bp, Homo sapiens
cccagtaaggacaaa

SEQ ID NO: 1656185 - DNA, 15 bp, Homo sapiens
acccagtaaggacaa

SEQ ID NO: 1656186 - DNA, 15 bp, Homo sapiens
tacccagtaaggaca

SEQ ID NO: 1656187 - DNA, 15 bp, Homo sapiens
ttacccagtaaggac

SEQ ID NO: 1656188 - DNA, 15 bp, Homo sapiens
tttacccagtaagga

SEQ ID NO: 1656189 - DNA, 15 bp, Homo sapiens
atttacccagtaagg

SEQ ID NO: 1656190 - DNA, 15 bp, Homo sapiens
aatttacccagtaag

SEQ ID NO: 1656191 - DNA, 15 bp, Homo sapiens
aaatttacccagtaa

SEQ ID NO: 1656192 - DNA, 15 bp, Homo sapiens
aaaatttacccagta

SEQ ID NO: 1656193 - DNA, 15 bp, Homo sapiens
caaaatttacccagt

SEQ ID NO: 1656194 - DNA, 15 bp, Homo sapiens
tcaaaatttacccag

SEQ ID NO: 1656195 - DNA, 15 bp, Homo sapiens
ttcaaaatttaccca

SEQ ID NO: 1656196 - DNA, 15 bp, Homo sapiens
gttcaaaatttaccc

SEQ ID NO: 1656197 - DNA, 15 bp, Homo sapiens
ggttcaaaatttacc

SEQ ID NO: 1656198 - DNA, 15 bp, Homo sapiens
tggttcaaaatttac

SEQ ID NO: 1656199 - DNA, 15 bp, Homo sapiens
ttggttcaaaattta

SEQ ID NO: 1656200 - DNA, 15 bp, Homo sapiens
gttggttcaaaattt

SEQ ID NO: 1656201 - DNA, 15 bp, Homo sapiens
ggttggttcaaaatt

SEQ ID NO: 1656202 - DNA, 15 bp, Homo sapiens
tggttggttcaaaat

SEQ ID NO: 1656203 - DNA, 15 bp, Homo sapiens
ttggttggttcaaaa

SEQ ID NO: 1656204 - DNA, 15 bp, Homo sapiens
tttggttggttcaaa

SEQ ID NO: 1656205 - DNA, 15 bp, Homo sapiens
atttggttggttcaa

SEQ ID NO: 1656206 - DNA, 15 bp, Homo sapiens
gatttggttggttca

SEQ ID NO: 1656207 - DNA, 15 bp, Homo sapiens
tgatttggttggttc

SEQ ID NO: 1656208 - DNA, 15 bp, Homo sapiens
gtgatttggttggtt

SEQ ID NO: 1656209 - DNA, 15 bp, Homo sapiens
tgtgatttggttggt

SEQ ID NO: 1656210 - DNA, 15 bp, Homo sapiens
ttgtgatttggttgg

SEQ ID NO: 1656211 - DNA, 15 bp, Homo sapiens
tttgtgatttggttg

SEQ ID NO: 1656212 - DNA, 15 bp, Homo sapiens
ctttgtgatttggtt

SEQ ID NO: 1656213 - DNA, 15 bp, Homo sapiens
tctttgtgatttggt

SEQ ID NO: 1656214 - DNA, 15 bp, Homo sapiens
atctttgtgatttgg

SEQ ID NO: 1656215 - DNA, 15 bp, Homo sapiens
catctttgtgatttg

SEQ ID NO: 1656216 - DNA, 15 bp, Homo sapiens
acatctttgtgattt

SEQ ID NO: 1656217 - DNA, 15 bp, Homo sapiens
gacatctttgtgatt

SEQ ID NO: 1656218 - DNA, 15 bp, Homo sapiens
ggacatctttgtgat

SEQ ID NO: 1656219 - DNA, 15 bp, Homo sapiens
cggacatctttgtga

SEQ ID NO: 1656220 - DNA, 15 bp, Homo sapiens
ccggacatctttgtg

SEQ ID NO: 1656221 - DNA, 15 bp, Homo sapiens
gccggacatctttgt

SEQ ID NO: 1656222 - DNA, 15 bp, Homo sapiens
agccggacatctttg

SEQ ID NO: 1656223 - DNA, 15 bp, Homo sapiens
aagccggacatcttt

SEQ ID NO: 1656224 - DNA, 15 bp, Homo sapiens
aaagccggacatctt

SEQ ID NO: 1656225 - DNA, 15 bp, Homo sapiens
gaaagccggacatct

SEQ ID NO: 1656226 - DNA, 15 bp, Homo sapiens
tgaaagccggacatc

SEQ ID NO: 1656227 - DNA, 15 bp, Homo sapiens
ttgaaagccggacat

SEQ ID NO: 1656228 - DNA, 15 bp, Homo sapiens
attgaaagccggaca

SEQ ID NO: 1656229 - DNA, 15 bp, Homo sapiens
gattgaaagccggac

SEQ ID NO: 1656230 - DNA, 15 bp, Homo sapiens
agattgaaagccgga

SEQ ID NO: 1656231 - DNA, 15 bp, Homo sapiens
aagattgaaagccgg

SEQ ID NO: 1656232 - DNA, 15 bp, Homo sapiens
gaagattgaaagccg

SEQ ID NO: 1656233 - DNA, 15 bp, Homo sapiens
agaagattgaaagcc

SEQ ID NO: 1656234 - DNA, 15 bp, Homo sapiens
tagaagattgaaagc

SEQ ID NO: 1656235 - DNA, 15 bp, Homo sapiens
ctagaagattgaaag

SEQ ID NO: 1656236 - DNA, 15 bp, Homo sapiens
cctagaagattgaaa

SEQ ID NO: 1656237 - DNA, 15 bp, Homo sapiens
ggcctagaagattga

SEQ ID NO: 1656238 - DNA, 15 bp, Homo sapiens
tggcctagaagattg

SEQ ID NO: 1656239 - DNA, 15 bp, Homo sapiens
gtggcctagaagatt

SEQ ID NO: 1656240 - DNA, 15 bp, Homo sapiens
cgtggcctagaagat

SEQ ID NO: 1656241 - DNA, 15 bp, Homo sapiens
gcgtggcctagaaga

SEQ ID NO: 1656242 - DNA, 15 bp, Homo sapiens
ggcgtggcctagaag

SEQ ID NO: 1656243 - DNA, 15 bp, Homo sapiens
aggcgtggcctagaa

SEQ ID NO: 1656244 - DNA, 15 bp, Homo sapiens
gaggcgtggcctaga

SEQ ID NO: 1656245 - DNA, 15 bp, Homo sapiens
agaggcgtggcctag

SEQ ID NO: 1656246 - DNA, 15 bp, Homo sapiens
aagaggcgtggccta

SEQ ID NO: 1656247 - DNA, 15 bp, Homo sapiens
taagaggcgtggcct

SEQ ID NO: 1656248 - DNA, 15 bp, Homo sapiens
ataagaggcgtggcc

SEQ ID NO: 1656249 - DNA, 15 bp, Homo sapiens
cataagaggcgtggc

SEQ ID NO: 1656250 - DNA, 15 bp, Homo sapiens
gcataagaggcgtgg

SEQ ID NO: 1656251 - DNA, 15 bp, Homo sapiens
agcataagaggcgtg

SEQ ID NO: 1656252 - DNA, 15 bp, Homo sapiens
gagcataagaggcgt

SEQ ID NO: 1656253 - DNA, 15 bp, Homo sapiens
agagcataagaggcg

SEQ ID NO: 1656254 - DNA, 15 bp, Homo sapiens
gagagcataagaggc

SEQ ID NO: 1656255 - DNA, 15 bp, Homo sapiens
agagagcataagagg

SEQ ID NO: 1656256 - DNA, 15 bp, Homo sapiens
gagagagcataagag

SEQ ID NO: 1656257 - DNA, 15 bp, Homo sapiens
ggagagagcataaga

SEQ ID NO: 1656258 - DNA, 15 bp, Homo sapiens
cggagagagcataag

SEQ ID NO: 1656259 - DNA, 15 bp, Homo sapiens
gcggagagagcataa

SEQ ID NO: 1656260 - DNA, 15 bp, Homo sapiens
ggcggagagagcata

SEQ ID NO: 1656261 - DNA, 15 bp, Homo sapiens
gggcggagagagcat

SEQ ID NO: 1656262 - DNA, 15 bp, Homo sapiens
agggcggagagagca

SEQ ID NO: 1656263 - DNA, 15 bp, Homo sapiens
gagggcggagagagc

SEQ ID NO: 1656264 - DNA, 15 bp, Homo sapiens
tgagggcggagagag

SEQ ID NO: 1656265 - DNA, 15 bp, Homo sapiens
ctgagggcggagaga

SEQ ID NO: 1656266 - DNA, 15 bp, Homo sapiens
gctgagggcggagag

SEQ ID NO: 1656267 - DNA, 15 bp, Homo sapiens
ggctgagggcggaga

SEQ ID NO: 1656268 - DNA, 15 bp, Homo sapiens
gggctgagggcggag

SEQ ID NO: 1656269 - DNA, 15 bp, Homo sapiens
ggggctgagggcgga

SEQ ID NO: 1656270 - DNA, 15 bp, Homo sapiens
gggggctgagggcgg

SEQ ID NO: 1656271 - DNA, 15 bp, Homo sapiens
ggggggctgagggcg

SEQ ID NO: 1656272 - DNA, 15 bp, Homo sapiens
gggggggctgagggc

SEQ ID NO: 1656273 - DNA, 15 bp, Homo sapiens
agggggggctgaggg

SEQ ID NO: 1656274 - DNA, 15 bp, Homo sapiens
aagggggggctgagg

SEQ ID NO: 1656275 - DNA, 15 bp, Homo sapiens
gaagggggggctgag

SEQ ID NO: 1656276 - DNA, 15 bp, Homo sapiens
tgaagggggggctga

SEQ ID NO: 1656277 - DNA, 15 bp, Homo sapiens
ctgaagggggggctg

SEQ ID NO: 1656278 - DNA, 15 bp, Homo sapiens
actgaagggggggct

SEQ ID NO: 1656279 - DNA, 15 bp, Homo sapiens
aactgaagggggggc

SEQ ID NO: 1656280 - DNA, 15 bp, Homo sapiens
gaactgaaggggggg

SEQ ID NO: 1656281 - DNA, 15 bp, Homo sapiens
agaactgaagggggg

SEQ ID NO: 1656282 - DNA, 15 bp, Homo sapiens
aagaactgaaggggg

SEQ ID NO: 1656283 - DNA, 15 bp, Homo sapiens
taagaactgaagggg

SEQ ID NO: 1656284 - DNA, 15 bp, Homo sapiens
ttaagaactgaaggg

SEQ ID NO: 1656285 - DNA, 15 bp, Homo sapiens
tttaagaactgaagg

SEQ ID NO: 1656286 - DNA, 15 bp, Homo sapiens
ctttaagaactgaag

SEQ ID NO: 1656287 - DNA, 15 bp, Homo sapiens
gctttaagaactgaa

SEQ ID NO: 1656288 - DNA, 15 bp, Homo sapiens
cgctttaagaactga

SEQ ID NO: 1656289 - DNA, 15 bp, Homo sapiens
gcgctttaagaactg

SEQ ID NO: 1656290 - DNA, 15 bp, Homo sapiens
agcgctttaagaact

SEQ ID NO: 1656291 - DNA, 15 bp, Homo sapiens
cagcgctttaagaac

SEQ ID NO: 1656292 - DNA, 15 bp, Homo sapiens
gcagcgctttaagaa

SEQ ID NO: 1656293 - DNA, 15 bp, Homo sapiens
tgcagcgctttaaga

SEQ ID NO: 1656294 - DNA, 15 bp, Homo sapiens
ttgcagcgctttaag

SEQ ID NO: 1656295 - DNA, 15 bp, Homo sapiens
attgcagcgctttaa

SEQ ID NO: 1656296 - DNA, 15 bp, Homo sapiens
aattgcagcgcttta

SEQ ID NO: 1656297 - DNA, 15 bp, Homo sapiens
gaattgcagcgcttt

SEQ ID NO: 1656298 - DNA, 15 bp, Homo sapiens
cgaattgcagcgctt

SEQ ID NO: 1656299 - DNA, 15 bp, Homo sapiens
gcgaattgcagcgct

SEQ ID NO: 1656300 - DNA, 15 bp, Homo sapiens
agcgaattgcagcgc

SEQ ID NO: 1656301 - DNA, 15 bp, Homo sapiens
cagcgaattgcagcg

SEQ ID NO: 1656302 - DNA, 15 bp, Homo sapiens
gcagcgaattgcagc

SEQ ID NO: 1656303 - DNA, 15 bp, Homo sapiens
agcagcgaattgcag

SEQ ID NO: 1656304 - DNA, 15 bp, Homo sapiens
cagcagcgaattgca

SEQ ID NO: 1656305 - DNA, 15 bp, Homo sapiens
gcagcagcgaattgc

SEQ ID NO: 1656306 - DNA, 15 bp, Homo sapiens
tgcagcagcgaattg

SEQ ID NO: 1656307 - DNA, 15 bp, Homo sapiens
ctgcagcagcgaatt

SEQ ID NO: 1656308 - DNA, 15 bp, Homo sapiens
gctgcagcagcgaat

SEQ ID NO: 1656309 - DNA, 15 bp, Homo sapiens
ggctgcagcagcgaa

SEQ ID NO: 1656310 - DNA, 15 bp, Homo sapiens
tggctgcagcagcga

SEQ ID NO: 1656311 - DNA, 15 bp, Homo sapiens
atggctgcagcagcg

SEQ ID NO: 1656312 - DNA, 15 bp, Homo sapiens
tatggctgcagcagc

SEQ ID NO: 1656313 - DNA, 15 bp, Homo sapiens
atatggctgcagcag

SEQ ID NO: 1656314 - DNA, 15 bp, Homo sapiens
aatatggctgcagca

SEQ ID NO: 1656315 - DNA, 15 bp, Homo sapiens
aaatatggctgcagc

SEQ ID NO: 1656316 - DNA, 15 bp, Homo sapiens
gaaatatggctgcag

SEQ ID NO: 1656317 - DNA, 15 bp, Homo sapiens
agaaatatggctgca

SEQ ID NO: 1656318 - DNA, 15 bp, Homo sapiens
aagaaatatggctgc

SEQ ID NO: 1656319 - DNA, 15 bp, Homo sapiens
taagaaatatggctg

SEQ ID NO: 1656320 - DNA, 15 bp, Homo sapiens
gtaagaaatatggct

SEQ ID NO: 1656321 - DNA, 15 bp, Homo sapiens
agtaagaaatatggc

SEQ ID NO: 1656322 - DNA, 15 bp, Homo sapiens
gagtaagaaatatgg

SEQ ID NO: 1656323 - DNA, 15 bp, Homo sapiens
agagtaagaaatatg

SEQ ID NO: 1656324 - DNA, 15 bp, Homo sapiens
gagagtaagaaatat

SEQ ID NO: 1656325 - DNA, 15 bp, Homo sapiens
agagagtaagaaata

SEQ ID NO: 1656326 - DNA, 15 bp, Homo sapiens
gagagagtaagaaat

SEQ ID NO: 1656327 - DNA, 15 bp, Homo sapiens
cgagagagtaagaaa

SEQ ID NO: 1656328 - DNA, 15 bp, Homo sapiens
ccgagagagtaagaa

SEQ ID NO: 1656329 - DNA, 15 bp, Homo sapiens
cccgagagagtaaga

SEQ ID NO: 1656330 - DNA, 15 bp, Homo sapiens
ccccgagagagtaag

SEQ ID NO: 1656331 - DNA, 15 bp, Homo sapiens
gccccgagagagtaa

SEQ ID NO: 1656332 - DNA, 15 bp, Homo sapiens
agccccgagagagta

SEQ ID NO: 1656333 - DNA, 15 bp, Homo sapiens
cagccccgagagagt

SEQ ID NO: 1656334 - DNA, 15 bp, Homo sapiens
ccagccccgagagag

SEQ ID NO: 1656335 - DNA, 15 bp, Homo sapiens
tccagccccgagaga

SEQ ID NO: 1656336 - DNA, 15 bp, Homo sapiens
ttccagccccgagag

SEQ ID NO: 1656337 - DNA, 15 bp, Homo sapiens
cttccagccccgaga

SEQ ID NO: 1656338 - DNA, 15 bp, Homo sapiens
gcttccagccccgag

SEQ ID NO: 1656339 - DNA, 15 bp, Homo sapiens
agcttccagccccga

SEQ ID NO: 1656340 - DNA, 15 bp, Homo sapiens
aagcttccagccccg

SEQ ID NO: 1656341 - DNA, 15 bp, Homo sapiens
gaagcttccagcccc

SEQ ID NO: 1656342 - DNA, 15 bp, Homo sapiens
ggaagcttccagccc

SEQ ID NO: 1656343 - DNA, 15 bp, Homo sapiens
aggaagcttccagcc

SEQ ID NO: 1656344 - DNA, 15 bp, Homo sapiens
caggaagcttccagc

SEQ ID NO: 1656345 - DNA, 15 bp, Homo sapiens
gtcaggaagcttcca

SEQ ID NO: 1656346 - DNA, 15 bp, Homo sapiens
agtcaggaagcttcc

SEQ ID NO: 1656347 - DNA, 15 bp, Homo sapiens
cagtcaggaagcttc

SEQ ID NO: 1656348 - DNA, 15 bp, Homo sapiens
tcagtcaggaagctt

SEQ ID NO: 1656349 - DNA, 15 bp, Homo sapiens
ttcagtcaggaagct

SEQ ID NO: 1656350 - DNA, 15 bp, Homo sapiens
cttcagtcaggaagc

SEQ ID NO: 1656351 - DNA, 15 bp, Homo sapiens
tcttcagtcaggaag

SEQ ID NO: 1656352 - DNA, 15 bp, Homo sapiens
atcttcagtcaggaa

SEQ ID NO: 1656353 - DNA, 15 bp, Homo sapiens
gatcttcagtcagga

SEQ ID NO: 1656354 - DNA, 15 bp, Homo sapiens
agatcttcagtcagg

SEQ ID NO: 1656355 - DNA, 15 bp, Homo sapiens
gagatcttcagtcag

SEQ ID NO: 1656356 - DNA, 15 bp, Homo sapiens
agagatcttcagtca

SEQ ID NO: 1656357 - DNA, 15 bp, Homo sapiens
gagagatcttcagtc

SEQ ID NO: 1656358 - DNA, 15 bp, Homo sapiens
agagagatcttcagt

SEQ ID NO: 1656359 - DNA, 15 bp, Homo sapiens
cagagagatcttcag

SEQ ID NO: 1656360 - DNA, 15 bp, Homo sapiens
gcagagagatcttca

SEQ ID NO: 1656361 - DNA, 15 bp, Homo sapiens
tgcagagagatcttc

SEQ ID NO: 1656362 - DNA, 15 bp, Homo sapiens
gtgcagagagatctt

SEQ ID NO: 1656363 - DNA, 15 bp, Homo sapiens
agtgcagagagatct

SEQ ID NO: 1656364 - DNA, 15 bp, Homo sapiens
aagtgcagagagatc

SEQ ID NO: 1656365 - DNA, 15 bp, Homo sapiens
caagtgcagagagat

SEQ ID NO: 1656366 - DNA, 15 bp, Homo sapiens
ccaagtgcagagaga

SEQ ID NO: 1656367 - DNA, 15 bp, Homo sapiens
cccaagtgcagagag

SEQ ID NO: 1656368 - DNA, 15 bp, Homo sapiens
ccccaagtgcagaga

SEQ ID NO: 1656369 - DNA, 15 bp, Homo sapiens
accccaagtgcagag

SEQ ID NO: 1656370 - DNA, 15 bp, Homo sapiens
aaccccaagtgcaga

SEQ ID NO: 1656371 - DNA, 15 bp, Homo sapiens
gaaccccaagtgcag

SEQ ID NO: 1656372 - DNA, 15 bp, Homo sapiens
agaaccccaagtgca

SEQ ID NO: 1656373 - DNA, 15 bp, Homo sapiens
aagaaccccaagtgc

SEQ ID NO: 1656374 - DNA, 15 bp, Homo sapiens
aaagaaccccaagtg

SEQ ID NO: 1656375 - DNA, 15 bp, Homo sapiens
gaaagaaccccaagt

SEQ ID NO: 1656376 - DNA, 15 bp, Homo sapiens
agaaagaaccccaag

SEQ ID NO: 1656377 - DNA, 15 bp, Homo sapiens
tagaaagaaccccaa

SEQ ID NO: 1656378 - DNA, 15 bp, Homo sapiens
ctagaaagaacccca

SEQ ID NO: 1656379 - DNA, 15 bp, Homo sapiens
tctagaaagaacccc

SEQ ID NO: 1656380 - DNA, 15 bp, Homo sapiens
ttctagaaagaaccc

SEQ ID NO: 1656381 - DNA, 15 bp, Homo sapiens
gttctagaaagaacc

SEQ ID NO: 1656382 - DNA, 15 bp, Homo sapiens
tgttctagaaagaac

SEQ ID NO: 1656383 - DNA, 15 bp, Homo sapiens
atgttctagaaagaa

SEQ ID NO: 1656384 - DNA, 15 bp, Homo sapiens
aatgttctagaaaga

SEQ ID NO: 1656385 - DNA, 15 bp, Homo sapiens
aaatgttctagaaag

SEQ ID NO: 1656386 - DNA, 15 bp, Homo sapiens
aaaatgttctagaaa

SEQ ID NO: 1656387 - DNA, 15 bp, Homo sapiens
gaaaatgttctagaa

SEQ ID NO: 1656388 - DNA, 15 bp, Homo sapiens
agaaaatgttctaga

SEQ ID NO: 1656389 - DNA, 15 bp, Homo sapiens
tagaaaatgttctag

SEQ ID NO: 1656390 - DNA, 15 bp, Homo sapiens
ctagaaaatgttcta

SEQ ID NO: 1656391 - DNA, 15 bp, Homo sapiens
actagaaaatgttct

SEQ ID NO: 1656392 - DNA, 15 bp, Homo sapiens
gactagaaaatgttc

SEQ ID NO: 1656393 - DNA, 15 bp, Homo sapiens
ggactagaaaatgtt

SEQ ID NO: 1656394 - DNA, 15 bp, Homo sapiens
gggactagaaaatgt

SEQ ID NO: 1656395 - DNA, 15 bp, Homo sapiens
ggggactagaaaatg

SEQ ID NO: 1656396 - DNA, 15 bp, Homo sapiens
gggggactagaaaat

SEQ ID NO: 1656397 - DNA, 15 bp, Homo sapiens
tgggggactagaaaa

SEQ ID NO: 1656398 - DNA, 15 bp, Homo sapiens
ttgggggactagaaa

SEQ ID NO: 1656399 - DNA, 15 bp, Homo sapiens
gttgggggactagaa

SEQ ID NO: 1656400 - DNA, 15 bp, Homo sapiens
tgttgggggactaga

SEQ ID NO: 1656401 - DNA, 15 bp, Homo sapiens
gtgttgggggactag

SEQ ID NO: 1656402 - DNA, 15 bp, Homo sapiens
ggtgttgggggacta

SEQ ID NO: 1656403 - DNA, 15 bp, Homo sapiens
gggtgttgggggact

SEQ ID NO: 1656404 - DNA, 15 bp, Homo sapiens
agggtgttgggggac

SEQ ID NO: 1656405 - DNA, 15 bp, Homo sapiens
aagggtgttggggga

SEQ ID NO: 1656406 - DNA, 15 bp, Homo sapiens
aaagggtgttggggg

SEQ ID NO: 1656407 - DNA, 15 bp, Homo sapiens
taaagggtgttgggg

SEQ ID NO: 1656408 - DNA, 15 bp, Homo sapiens
ataaagggtgttggg

SEQ ID NO: 1656409 - DNA, 15 bp, Homo sapiens
cataaagggtgttgg

SEQ ID NO: 1656410 - DNA, 15 bp, Homo sapiens
ccataaagggtgttg

SEQ ID NO: 1656411 - DNA, 15 bp, Homo sapiens
gccataaagggtgtt

SEQ ID NO: 1656412 - DNA, 15 bp, Homo sapiens
cgccataaagggtgt

SEQ ID NO: 1656413 - DNA, 15 bp, Homo sapiens
acgccataaagggtg

SEQ ID NO: 1656414 - DNA, 15 bp, Homo sapiens
tacgccataaagggt

SEQ ID NO: 1656415 - DNA, 15 bp, Homo sapiens
atacgccataaaggg

SEQ ID NO: 1656416 - DNA, 15 bp, Homo sapiens
aatacgccataaagg

SEQ ID NO: 1656417 - DNA, 15 bp, Homo sapiens
aaatacgccataaag

SEQ ID NO: 1656418 - DNA, 15 bp, Homo sapiens
gaaatacgccataaa

SEQ ID NO: 1656419 - DNA, 15 bp, Homo sapiens
agaaatacgccataa

SEQ ID NO: 1656420 - DNA, 15 bp, Homo sapiens
aagaaatacgccata

SEQ ID NO: 1656421 - DNA, 15 bp, Homo sapiens
aaagaaatacgccat

SEQ ID NO: 1656422 - DNA, 15 bp, Homo sapiens
taaagaaatacgcca

SEQ ID NO: 1656423 - DNA, 15 bp, Homo sapiens
ttaaagaaatacgcc

SEQ ID NO: 1656424 - DNA, 15 bp, Homo sapiens
tttaaagaaatacgc

SEQ ID NO: 1656425 - DNA, 15 bp, Homo sapiens
ttttaaagaaatacg

SEQ ID NO: 1656426 - DNA, 15 bp, Homo sapiens
tttttaaagaaatac

SEQ ID NO: 1656427 - DNA, 15 bp, Homo sapiens
ttttttaaagaaata

SEQ ID NO: 1656428 - DNA, 15 bp, Homo sapiens
tttttttaaagaaat

SEQ ID NO: 1656429 - DNA, 15 bp, Homo sapiens
gatttttttaaagaa

SEQ ID NO: 1656430 - DNA, 15 bp, Homo sapiens
tgatttttttaaaga

SEQ ID NO: 1656431 - DNA, 15 bp, Homo sapiens
gtgatttttttaaag

SEQ ID NO: 1656432 - DNA, 15 bp, Homo sapiens
ggtgatttttttaaa

SEQ ID NO: 1656433 - DNA, 15 bp, Homo sapiens
aggtgatttttttaa

SEQ ID NO: 1656434 - DNA, 15 bp, Homo sapiens
taggtgattttttta

SEQ ID NO: 1656435 - DNA, 15 bp, Homo sapiens
ttaggtgattttttt

SEQ ID NO: 1656436 - DNA, 15 bp, Homo sapiens
tttaggtgatttttt

SEQ ID NO: 1656437 - DNA, 15 bp, Homo sapiens
atttaggtgattttt

SEQ ID NO: 1656438 - DNA, 15 bp, Homo sapiens
aatttaggtgatttt

SEQ ID NO: 1656439 - DNA, 15 bp, Homo sapiens
gaatttaggtgattt

SEQ ID NO: 1656440 - DNA, 15 bp, Homo sapiens
ggaatttaggtgatt

SEQ ID NO: 1656441 - DNA, 15 bp, Homo sapiens
tggaatttaggtgat

SEQ ID NO: 1656442 - DNA, 15 bp, Homo sapiens
atggaatttaggtga

SEQ ID NO: 1656443 - DNA, 15 bp, Homo sapiens
tatggaatttaggtg

SEQ ID NO: 1656444 - DNA, 15 bp, Homo sapiens
ttatggaatttaggt

SEQ ID NO: 1656445 - DNA, 15 bp, Homo sapiens
tttatggaatttagg

SEQ ID NO: 1656446 - DNA, 15 bp, Homo sapiens
ttttatggaatttag

SEQ ID NO: 1656447 - DNA, 15 bp, Homo sapiens
attttatggaattta

SEQ ID NO: 1656448 - DNA, 15 bp, Homo sapiens
tattttatggaattt

SEQ ID NO: 1656449 - DNA, 15 bp, Homo sapiens
atattttatggaatt

SEQ ID NO: 1656450 - DNA, 15 bp, Homo sapiens
aaatattttatggaa

SEQ ID NO: 1656451 - DNA, 15 bp, Homo sapiens
aaaatattttatgga

SEQ ID NO: 1656452 - DNA, 15 bp, Homo sapiens
aaaaatattttatgg

SEQ ID NO: 1656453 - DNA, 15 bp, Homo sapiens
aaaaaatattttatg

SEQ ID NO: 1656454 - DNA, 15 bp, Homo sapiens
aaaaaaatattttat

SEQ ID NO: 1656455 - DNA, 15 bp, Homo sapiens
taaaaaaatatttta

SEQ ID NO: 1656456 - DNA, 15 bp, Homo sapiens
ttaaaaaaatatttt

SEQ ID NO: 1656457 - DNA, 15 bp, Homo sapiens
tttaaaaaaatattt

SEQ ID NO: 1656458 - DNA, 15 bp, Homo sapiens
atttaaaaaaatatt

SEQ ID NO: 1656459 - DNA, 15 bp, Homo sapiens
aatttaaaaaaatat

SEQ ID NO: 1656460 - DNA, 15 bp, Homo sapiens
gaatttaaaaaaata

SEQ ID NO: 1656461 - DNA, 15 bp, Homo sapiens
agaatttaaaaaaat

SEQ ID NO: 1656462 - DNA, 15 bp, Homo sapiens
tagaatttaaaaaaa

SEQ ID NO: 1656463 - DNA, 15 bp, Homo sapiens
atagaatttaaaaaa

SEQ ID NO: 1656464 - DNA, 15 bp, Homo sapiens
tatagaatttaaaaa

SEQ ID NO: 1656465 - DNA, 15 bp, Homo sapiens
gtatagaatttaaaa

SEQ ID NO: 1656466 - DNA, 15 bp, Homo sapiens
agtatagaatttaaa

SEQ ID NO: 1656467 - DNA, 15 bp, Homo sapiens
aagtatagaatttaa

SEQ ID NO: 1656468 - DNA, 15 bp, Homo sapiens
aaagtatagaattta

SEQ ID NO: 1656469 - DNA, 15 bp, Homo sapiens
gaaagtatagaattt

SEQ ID NO: 1656470 - DNA, 15 bp, Homo sapiens
agaaagtatagaatt

SEQ ID NO: 1656471 - DNA, 15 bp, Homo sapiens
gagaaagtatagaat

SEQ ID NO: 1656472 - DNA, 15 bp, Homo sapiens
ggagaaagtatagaa

SEQ ID NO: 1656473 - DNA, 15 bp, Homo sapiens
aggagaaagtataga

SEQ ID NO: 1656474 - DNA, 15 bp, Homo sapiens
taggagaaagtatag

SEQ ID NO: 1656475 - DNA, 15 bp, Homo sapiens
ctaggagaaagtata

SEQ ID NO: 1656476 - DNA, 15 bp, Homo sapiens
actaggagaaagtat

SEQ ID NO: 1656477 - DNA, 15 bp, Homo sapiens
cactaggagaaagta

SEQ ID NO: 1656478 - DNA, 15 bp, Homo sapiens
acactaggagaaagt

SEQ ID NO: 1656479 - DNA, 15 bp, Homo sapiens
gacactaggagaaag

SEQ ID NO: 1656480 - DNA, 15 bp, Homo sapiens
agacactaggagaaa

SEQ ID NO: 1656481 - DNA, 15 bp, Homo sapiens
aagacactaggagaa

SEQ ID NO: 1656482 - DNA, 15 bp, Homo sapiens
gaagacactaggaga

SEQ ID NO: 1656483 - DNA, 15 bp, Homo sapiens
agaagacactaggag

SEQ ID NO: 1656484 - DNA, 15 bp, Homo sapiens
aagaagacactagga

SEQ ID NO: 1656485 - DNA, 15 bp, Homo sapiens
caagaagacactagg

SEQ ID NO: 1656486 - DNA, 15 bp, Homo sapiens
tcaagaagacactag

SEQ ID NO: 1656487 - DNA, 15 bp, Homo sapiens
gtcaagaagacacta

SEQ ID NO: 1656488 - DNA, 15 bp, Homo sapiens
tgtcaagaagacact

SEQ ID NO: 1656489 - DNA, 15 bp, Homo sapiens
gtgtcaagaagacac

SEQ ID NO: 1656490 - DNA, 15 bp, Homo sapiens
cgtgtcaagaagaca

SEQ ID NO: 1656491 - DNA, 15 bp, Homo sapiens
acgtgtcaagaagac

SEQ ID NO: 1656492 - DNA, 15 bp, Homo sapiens
gacgtgtcaagaaga

SEQ ID NO: 1656493 - DNA, 15 bp, Homo sapiens
ggacgtgtcaagaag

SEQ ID NO: 1656494 - DNA, 15 bp, Homo sapiens
aggacgtgtcaagaa

SEQ ID NO: 1656495 - DNA, 15 bp, Homo sapiens
gaggacgtgtcaaga

SEQ ID NO: 1656496 - DNA, 15 bp, Homo sapiens
ggaggacgtgtcaag

SEQ ID NO: 1656497 - DNA, 15 bp, Homo sapiens
tggaggacgtgtcaa

SEQ ID NO: 1656498 - DNA, 15 bp, Homo sapiens
atggaggacgtgtca

SEQ ID NO: 1656499 - DNA, 15 bp, Homo sapiens
tatggaggacgtgtc

SEQ ID NO: 1656500 - DNA, 15 bp, Homo sapiens
atatggaggacgtgt

SEQ ID NO: 1656501 - DNA, 15 bp, Homo sapiens
aatatggaggacgtg

SEQ ID NO: 1656502 - DNA, 15 bp, Homo sapiens
aaatatggaggacgt

SEQ ID NO: 1656503 - DNA, 15 bp, Homo sapiens
aaaatatggaggacg

SEQ ID NO: 1656504 - DNA, 15 bp, Homo sapiens
aaaaatatggaggac

SEQ ID NO: 1656505 - DNA, 15 bp, Homo sapiens
aaaaaatatggagga

SEQ ID NO: 1656506 - DNA, 15 bp, Homo sapiens
aaaaaaatatggagg

SEQ ID NO: 1656507 - DNA, 15 bp, Homo sapiens
taaaaaaatatggag

SEQ ID NO: 1656508 - DNA, 15 bp, Homo sapiens
ttaaaaaaatatgga

SEQ ID NO: 1656509 - DNA, 15 bp, Homo sapiens
tttaaaaaaatatgg

SEQ ID NO: 1656510 - DNA, 15 bp, Homo sapiens
ctttaaaaaaatatg

SEQ ID NO: 1656511 - DNA, 15 bp, Homo sapiens
tctttaaaaaaatat

SEQ ID NO: 1656512 - DNA, 15 bp, Homo sapiens
ttctttaaaaaaata

SEQ ID NO: 1656513 - DNA, 15 bp, Homo sapiens
atactttctttaaaa

SEQ ID NO: 1656514 - DNA, 15 bp, Homo sapiens
aatactttctttaaa

SEQ ID NO: 1656515 - DNA, 15 bp, Homo sapiens
aaatactttctttaa

SEQ ID NO: 1656516 - DNA, 15 bp, Homo sapiens
caaatactttcttta

SEQ ID NO: 1656517 - DNA, 15 bp, Homo sapiens
ccaaatactttcttt

SEQ ID NO: 1656518 - DNA, 15 bp, Homo sapiens
tccaaatactttctt

SEQ ID NO: 1656519 - DNA, 15 bp, Homo sapiens
ttccaaatactttct

SEQ ID NO: 1656520 - DNA, 15 bp, Homo sapiens
attccaaatactttc

SEQ ID NO: 1656521 - DNA, 15 bp, Homo sapiens
tattccaaatacttt

SEQ ID NO: 1656522 - DNA, 15 bp, Homo sapiens
atattccaaatactt

SEQ ID NO: 1656523 - DNA, 15 bp, Homo sapiens
aatattccaaatact

SEQ ID NO: 1656524 - DNA, 15 bp, Homo sapiens
aaatattccaaatac

SEQ ID NO: 1656525 - DNA, 15 bp, Homo sapiens
aaaatattccaaata

SEQ ID NO: 1656526 - DNA, 15 bp, Homo sapiens
caaaatattccaaat

SEQ ID NO: 1656527 - DNA, 15 bp, Homo sapiens
tcaaaatattccaaa

SEQ ID NO: 1656528 - DNA, 15 bp, Homo sapiens
ctcaaaatattccaa

SEQ ID NO: 1656529 - DNA, 15 bp, Homo sapiens
cctcaaaatattcca

SEQ ID NO: 1656530 - DNA, 15 bp, Homo sapiens
gcctcaaaatattcc

SEQ ID NO: 1656531 - DNA, 15 bp, Homo sapiens
tgcctcaaaatattc

SEQ ID NO: 1656532 - DNA, 15 bp, Homo sapiens
ttgcctcaaaatatt

SEQ ID NO: 1656533 - DNA, 15 bp, Homo sapiens
attgcctcaaaatat

SEQ ID NO: 1656534 - DNA, 15 bp, Homo sapiens
aattgcctcaaaata

SEQ ID NO: 1656535 - DNA, 15 bp, Homo sapiens
aaattgcctcaaaat

SEQ ID NO: 1656536 - DNA, 15 bp, Homo sapiens
aaaattgcctcaaaa

SEQ ID NO: 1656537 - DNA, 15 bp, Homo sapiens
aaaaattgcctcaaa

SEQ ID NO: 1656538 - DNA, 15 bp, Homo sapiens
taaaaattgcctcaa

SEQ ID NO: 1656539 - DNA, 15 bp, Homo sapiens
ttaaaaattgcctca

SEQ ID NO: 1656540 - DNA, 15 bp, Homo sapiens
attaaaaattgcctc

SEQ ID NO: 1656541 - DNA, 15 bp, Homo sapiens
tattaaaaattgcct

SEQ ID NO: 1656542 - DNA, 15 bp, Homo sapiens
atattaaaaattgcc

SEQ ID NO: 1656543 - DNA, 15 bp, Homo sapiens
aatattaaaaattgc

SEQ ID NO: 1656544 - DNA, 15 bp, Homo sapiens
aaatattaaaaattg

SEQ ID NO: 1656545 - DNA, 15 bp, Homo sapiens
taaatattaaaaatt

SEQ ID NO: 1656546 - DNA, 15 bp, Homo sapiens
ttaaatattaaaaat

SEQ ID NO: 1656547 - DNA, 15 bp, Homo sapiens
cttaaatattaaaaa

SEQ ID NO: 1656548 - DNA, 15 bp, Homo sapiens
ccttaaatattaaaa

SEQ ID NO: 1656549 - DNA, 15 bp, Homo sapiens
tccttaaatattaaa

SEQ ID NO: 1656550 - DNA, 15 bp, Homo sapiens
ttccttaaatattaa

SEQ ID NO: 1656551 - DNA, 15 bp, Homo sapiens
attccttaaatatta

SEQ ID NO: 1656552 - DNA, 15 bp, Homo sapiens
aattccttaaatatt

SEQ ID NO: 1656553 - DNA, 15 bp, Homo sapiens
aaattccttaaatat

SEQ ID NO: 1656554 - DNA, 15 bp, Homo sapiens
aaaattccttaaata

SEQ ID NO: 1656555 - DNA, 15 bp, Homo sapiens
aaaaattccttaaat

SEQ ID NO: 1656556 - DNA, 15 bp, Homo sapiens
gaaaaattccttaaa

SEQ ID NO: 1656557 - DNA, 15 bp, Homo sapiens
agaaaaattccttaa

SEQ ID NO: 1656558 - DNA, 15 bp, Homo sapiens
aagaaaaattcctta

SEQ ID NO: 1656559 - DNA, 15 bp, Homo sapiens
aaagaaaaattcctt

SEQ ID NO: 1656560 - DNA, 15 bp, Homo sapiens
caaagaaaaattcct

SEQ ID NO: 1656561 - DNA, 15 bp, Homo sapiens
ccaaagaaaaattcc

SEQ ID NO: 1656562 - DNA, 15 bp, Homo sapiens
tccaaagaaaaattc

SEQ ID NO: 1656563 - DNA, 15 bp, Homo sapiens
ttccaaagaaaaatt

SEQ ID NO: 1656564 - DNA, 15 bp, Homo sapiens
attccaaagaaaaat

SEQ ID NO: 1656565 - DNA, 15 bp, Homo sapiens
gattccaaagaaaaa

SEQ ID NO: 1656566 - DNA, 15 bp, Homo sapiens
tgattccaaagaaaa

SEQ ID NO: 1656567 - DNA, 15 bp, Homo sapiens
atgattccaaagaaa

SEQ ID NO: 1656568 - DNA, 15 bp, Homo sapiens
aatgattccaaagaa

SEQ ID NO: 1656569 - DNA, 15 bp, Homo sapiens
aaatgattccaaaga

SEQ ID NO: 1656570 - DNA, 15 bp, Homo sapiens
aaaatgattccaaag

SEQ ID NO: 1656571 - DNA, 15 bp, Homo sapiens
aaaaatgattccaaa

SEQ ID NO: 1656572 - DNA, 15 bp, Homo sapiens
caaaaatgattccaa

SEQ ID NO: 1656573 - DNA, 15 bp, Homo sapiens
ccaaaaatgattcca

SEQ ID NO: 1656574 - DNA, 15 bp, Homo sapiens
accaaaaatgattcc

SEQ ID NO: 1656575 - DNA, 15 bp, Homo sapiens
aaccaaaaatgattc

SEQ ID NO: 1656576 - DNA, 15 bp, Homo sapiens
caaccaaaaatgatt

SEQ ID NO: 1656577 - DNA, 15 bp, Homo sapiens
tcaaccaaaaatgat

SEQ ID NO: 1656578 - DNA, 15 bp, Homo sapiens
gtcaaccaaaaatga

SEQ ID NO: 1656579 - DNA, 15 bp, Homo sapiens
tgtcaaccaaaaatg

SEQ ID NO: 1656580 - DNA, 15 bp, Homo sapiens
atgtcaaccaaaaat

SEQ ID NO: 1656581 - DNA, 15 bp, Homo sapiens
gatgtcaaccaaaaa

SEQ ID NO: 1656582 - DNA, 15 bp, Homo sapiens
agatgtcaaccaaaa

SEQ ID NO: 1656583 - DNA, 15 bp, Homo sapiens
gagatgtcaaccaaa

SEQ ID NO: 1656584 - DNA, 15 bp, Homo sapiens
agagatgtcaaccaa

SEQ ID NO: 1656585 - DNA, 15 bp, Homo sapiens
cagagatgtcaacca

SEQ ID NO: 1656586 - DNA, 15 bp, Homo sapiens
acagagatgtcaacc

SEQ ID NO: 1656587 - DNA, 15 bp, Homo sapiens
aacagagatgtcaac

SEQ ID NO: 1656588 - DNA, 15 bp, Homo sapiens
aaacagagatgtcaa

SEQ ID NO: 1656589 - DNA, 15 bp, Homo sapiens
aaaacagagatgtca

SEQ ID NO: 1656590 - DNA, 15 bp, Homo sapiens
aaaaacagagatgtc

SEQ ID NO: 1656591 - DNA, 15 bp, Homo sapiens
aaaaaacagagatgt

SEQ ID NO: 1656592 - DNA, 15 bp, Homo sapiens
caaaaaacagagatg

SEQ ID NO: 1656593 - DNA, 15 bp, Homo sapiens
acaaaaaacagagat

SEQ ID NO: 1656594 - DNA, 15 bp, Homo sapiens
cacaaaaaacagaga

SEQ ID NO: 1656595 - DNA, 15 bp, Homo sapiens
ccacaaaaaacagag

SEQ ID NO: 1656596 - DNA, 15 bp, Homo sapiens
tccacaaaaaacaga

SEQ ID NO: 1656597 - DNA, 15 bp, Homo sapiens
atccacaaaaaacag

SEQ ID NO: 1656598 - DNA, 15 bp, Homo sapiens
gatccacaaaaaaca

SEQ ID NO: 1656599 - DNA, 15 bp, Homo sapiens
tgatccacaaaaaac

SEQ ID NO: 1656600 - DNA, 15 bp, Homo sapiens
ctgatccacaaaaaa

SEQ ID NO: 1656601 - DNA, 15 bp, Homo sapiens
actgatccacaaaaa

SEQ ID NO: 1656602 - DNA, 15 bp, Homo sapiens
aactgatccacaaaa

SEQ ID NO: 1656603 - DNA, 15 bp, Homo sapiens
aaactgatccacaaa

SEQ ID NO: 1656604 - DNA, 15 bp, Homo sapiens
aaaactgatccacaa

SEQ ID NO: 1656605 - DNA, 15 bp, Homo sapiens
gcaaagaaaaaataa

SEQ ID NO: 1656606 - DNA, 15 bp, Homo sapiens
ggcaaagaaaaaata

SEQ ID NO: 1656607 - DNA, 15 bp, Homo sapiens
gggcaaagaaaaaat

SEQ ID NO: 1656608 - DNA, 15 bp, Homo sapiens
tgggcaaagaaaaaa

SEQ ID NO: 1656609 - DNA, 15 bp, Homo sapiens
ttgggcaaagaaaaa

SEQ ID NO: 1656610 - DNA, 15 bp, Homo sapiens
gttgggcaaagaaaa

SEQ ID NO: 1656611 - DNA, 15 bp, Homo sapiens
cgttgggcaaagaaa

SEQ ID NO: 1656612 - DNA, 15 bp, Homo sapiens
ccgttgggcaaagaa

SEQ ID NO: 1656613 - DNA, 15 bp, Homo sapiens
cccgttgggcaaaga

SEQ ID NO: 1656614 - DNA, 15 bp, Homo sapiens
ccccgttgggcaaag

SEQ ID NO: 1656615 - DNA, 15 bp, Homo sapiens
gccccgttgggcaaa

SEQ ID NO: 1656616 - DNA, 15 bp, Homo sapiens
ggccccgttgggcaa

SEQ ID NO: 1656617 - DNA, 15 bp, Homo sapiens
cggccccgttgggca

SEQ ID NO: 1656618 - DNA, 15 bp, Homo sapiens
acggccccgttgggc

SEQ ID NO: 1656619 - DNA, 15 bp, Homo sapiens
cacggccccgttggg

SEQ ID NO: 1656620 - DNA, 15 bp, Homo sapiens
ccacggccccgttgg

SEQ ID NO: 1656621 - DNA, 15 bp, Homo sapiens
tccacggccccgttg

SEQ ID NO: 1656622 - DNA, 15 bp, Homo sapiens
atccacggccccgtt

SEQ ID NO: 1656623 - DNA, 15 bp, Homo sapiens
tatccacggccccgt

SEQ ID NO: 1656624 - DNA, 15 bp, Homo sapiens
gtatccacggccccg

SEQ ID NO: 1656625 - DNA, 15 bp, Homo sapiens
ggtatccacggcccc

SEQ ID NO: 1656626 - DNA, 15 bp, Homo sapiens
aggtatccacggccc

SEQ ID NO: 1656627 - DNA, 15 bp, Homo sapiens
caggtatccacggcc

SEQ ID NO: 1656628 - DNA, 15 bp, Homo sapiens
gcaggtatccacggc

SEQ ID NO: 1656629 - DNA, 15 bp, Homo sapiens
ggcaggtatccacgg

SEQ ID NO: 1656630 - DNA, 15 bp, Homo sapiens
aggcaggtatccacg

SEQ ID NO: 1656631 - DNA, 15 bp, Homo sapiens
aaggcaggtatccac

SEQ ID NO: 1656632 - DNA, 15 bp, Homo sapiens
aaaggcaggtatcca

SEQ ID NO: 1656633 - DNA, 15 bp, Homo sapiens
aaaaggcaggtatcc

SEQ ID NO: 1656634 - DNA, 15 bp, Homo sapiens
taaaaggcaggtatc

SEQ ID NO: 1656635 - DNA, 15 bp, Homo sapiens
ttaaaaggcaggtat

SEQ ID NO: 1656636 - DNA, 15 bp, Homo sapiens
attaaaaggcaggta

SEQ ID NO: 1656637 - DNA, 15 bp, Homo sapiens
aattaaaaggcaggt

SEQ ID NO: 1656638 - DNA, 15 bp, Homo sapiens
gaattaaaaggcagg

SEQ ID NO: 1656639 - DNA, 15 bp, Homo sapiens
agaattaaaaggcag

SEQ ID NO: 1656640 - DNA, 15 bp, Homo sapiens
aagaattaaaaggca

SEQ ID NO: 1656641 - DNA, 15 bp, Homo sapiens
aaagaattaaaaggc

SEQ ID NO: 1656642 - DNA, 15 bp, Homo sapiens
aaaagaattaaaagg

SEQ ID NO: 1656643 - DNA, 15 bp, Homo sapiens
aaaaagaattaaaag

SEQ ID NO: 1656644 - DNA, 15 bp, Homo sapiens
aaaaaagaattaaaa

SEQ ID NO: 1656645 - DNA, 15 bp, Homo sapiens
taaaaaagaattaaa

SEQ ID NO: 1656646 - DNA, 15 bp, Homo sapiens
ataaaaaagaattaa

SEQ ID NO: 1656647 - DNA, 15 bp, Homo sapiens
aataaaaaagaatta

SEQ ID NO: 1656648 - DNA, 15 bp, Homo sapiens
gaataaaaaagaatt

SEQ ID NO: 1656649 - DNA, 15 bp, Homo sapiens
cgaataaaaaagaat

SEQ ID NO: 1656650 - DNA, 15 bp, Homo sapiens
gcgaataaaaaagaa

SEQ ID NO: 1656651 - DNA, 15 bp, Homo sapiens
ggcgaataaaaaaga

SEQ ID NO: 1656652 - DNA, 15 bp, Homo sapiens
gggcgaataaaaaag

SEQ ID NO: 1656653 - DNA, 15 bp, Homo sapiens
tgggcgaataaaaaa

SEQ ID NO: 1656654 - DNA, 15 bp, Homo sapiens
atgggcgaataaaaa

SEQ ID NO: 1656655 - DNA, 15 bp, Homo sapiens
gatgggcgaataaaa

SEQ ID NO: 1656656 - DNA, 15 bp, Homo sapiens
cgatgggcgaataaa

SEQ ID NO: 1656657 - DNA, 15 bp, Homo sapiens
ccgatgggcgaataa

SEQ ID NO: 1656658 - DNA, 15 bp, Homo sapiens
cccgatgggcgaata

SEQ ID NO: 1656659 - DNA, 15 bp, Homo sapiens
ccccgatgggcgaat

SEQ ID NO: 1656660 - DNA, 15 bp, Homo sapiens
gccccgatgggcgaa

SEQ ID NO: 1656661 - DNA, 15 bp, Homo sapiens
ggccccgatgggcga

SEQ ID NO: 1656662 - DNA, 15 bp, Homo sapiens
cggccccgatgggcg

SEQ ID NO: 1656663 - DNA, 15 bp, Homo sapiens
gcggccccgatgggc

SEQ ID NO: 1656664 - DNA, 15 bp, Homo sapiens
cgcggccccgatggg

SEQ ID NO: 1656665 - DNA, 15 bp, Homo sapiens
ccgcggccccgatgg

SEQ ID NO: 1656666 - DNA, 15 bp, Homo sapiens
tccgcggccccgatg

SEQ ID NO: 1656667 - DNA, 15 bp, Homo sapiens
atccgcggccccgat

SEQ ID NO: 1656668 - DNA, 15 bp, Homo sapiens
tatccgcggccccga

SEQ ID NO: 1656669 - DNA, 15 bp, Homo sapiens
gtatccgcggccccg

SEQ ID NO: 1656670 - DNA, 15 bp, Homo sapiens
ggtatccgcggcccc

SEQ ID NO: 1656671 - DNA, 15 bp, Homo sapiens
aggtatccgcggccc

SEQ ID NO: 1656672 - DNA, 15 bp, Homo sapiens
caggtatccgcggcc

SEQ ID NO: 1656673 - DNA, 15 bp, Homo sapiens
gcaggtatccgcggc

SEQ ID NO: 1656674 - DNA, 15 bp, Homo sapiens
agcaggtatccgcgg

SEQ ID NO: 1656675 - DNA, 15 bp, Homo sapiens
aagcaggtatccgcg

SEQ ID NO: 1656676 - DNA, 15 bp, Homo sapiens
aaagcaggtatccgc

SEQ ID NO: 1656677 - DNA, 15 bp, Homo sapiens
aaaagcaggtatccg

SEQ ID NO: 1656678 - DNA, 15 bp, Homo sapiens
aaaaagcaggtatcc

SEQ ID NO: 1656679 - DNA, 15 bp, Homo sapiens
taaaaagcaggtatc

SEQ ID NO: 1656680 - DNA, 15 bp, Homo sapiens
ataaaaagcaggtat

SEQ ID NO: 1656681 - DNA, 15 bp, Homo sapiens
aataaaaagcaggta

SEQ ID NO: 1656682 - DNA, 15 bp, Homo sapiens
aaataaaaagcaggt

SEQ ID NO: 1656683 - DNA, 15 bp, Homo sapiens
aaaataaaaagcagg

SEQ ID NO: 1656684 - DNA, 15 bp, Homo sapiens
aaaaataaaaagcag

SEQ ID NO: 1656685 - DNA, 15 bp, Homo sapiens
aaaaaataaaaagca

SEQ ID NO: 1656686 - DNA, 15 bp, Homo sapiens
aaaaaaataaaaagc

SEQ ID NO: 1656687 - DNA, 15 bp, Homo sapiens
aaaaaaaataaaaag

SEQ ID NO: 1656688 - DNA, 15 bp, Homo sapiens
gaaaaaaaaataaaa

SEQ ID NO: 1656689 - DNA, 15 bp, Homo sapiens
ggaaaaaaaaataaa

SEQ ID NO: 1656690 - DNA, 15 bp, Homo sapiens
aggaaaaaaaaataa

SEQ ID NO: 1656691 - DNA, 15 bp, Homo sapiens
aaggaaaaaaaaata

SEQ ID NO: 1656692 - DNA, 15 bp, Homo sapiens
taaggaaaaaaaaat

SEQ ID NO: 1656693 - DNA, 15 bp, Homo sapiens
ctaaggaaaaaaaaa

SEQ ID NO: 1656694 - DNA, 15 bp, Homo sapiens
gctaaggaaaaaaaa

SEQ ID NO: 1656695 - DNA, 15 bp, Homo sapiens
ggctaaggaaaaaaa

SEQ ID NO: 1656696 - DNA, 15 bp, Homo sapiens
gggctaaggaaaaaa

SEQ ID NO: 1656697 - DNA, 15 bp, Homo sapiens
tgggctaaggaaaaa

SEQ ID NO: 1656698 - DNA, 15 bp, Homo sapiens
atgggctaaggaaaa

SEQ ID NO: 1656699 - DNA, 15 bp, Homo sapiens
gatgggctaaggaaa

SEQ ID NO: 1656700 - DNA, 15 bp, Homo sapiens
cgatgggctaaggaa

SEQ ID NO: 1656701 - DNA, 15 bp, Homo sapiens
ccgatgggctaagga

SEQ ID NO: 1656702 - DNA, 15 bp, Homo sapiens
cccgatgggctaagg

SEQ ID NO: 1656703 - DNA, 15 bp, Homo sapiens
ccccgatgggctaag

SEQ ID NO: 1656704 - DNA, 15 bp, Homo sapiens
accccgatgggctaa

SEQ ID NO: 1656705 - DNA, 15 bp, Homo sapiens
taccccgatgggcta

SEQ ID NO: 1656706 - DNA, 15 bp, Homo sapiens
ataccccgatgggct

SEQ ID NO: 1656707 - DNA, 15 bp, Homo sapiens
gataccccgatgggc

SEQ ID NO: 1656708 - DNA, 15 bp, Homo sapiens
cgataccccgatggg

SEQ ID NO: 1656709 - DNA, 15 bp, Homo sapiens
ccgataccccgatgg

SEQ ID NO: 1656710 - DNA, 15 bp, Homo sapiens
tccgataccccgatg

SEQ ID NO: 1656711 - DNA, 15 bp, Homo sapiens
atccgataccccgat

SEQ ID NO: 1656712 - DNA, 15 bp, Homo sapiens
tatccgataccccga

SEQ ID NO: 1656713 - DNA, 15 bp, Homo sapiens
gtatccgataccccg

SEQ ID NO: 1656714 - DNA, 15 bp, Homo sapiens
ggtatccgatacccc

SEQ ID NO: 1656715 - DNA, 15 bp, Homo sapiens
aggtatccgataccc

SEQ ID NO: 1656716 - DNA, 15 bp, Homo sapiens
caggtatccgatacc

SEQ ID NO: 1656717 - DNA, 15 bp, Homo sapiens
gcaggtatccgatac

SEQ ID NO: 1656718 - DNA, 15 bp, Homo sapiens
agcaggtatccgata

SEQ ID NO: 1656719 - DNA, 15 bp, Homo sapiens
cagcaggtatccgat

SEQ ID NO: 1656720 - DNA, 15 bp, Homo sapiens
tcagcaggtatccga

SEQ ID NO: 1656721 - DNA, 15 bp, Homo sapiens
atcagcaggtatccg

SEQ ID NO: 1656722 - DNA, 15 bp, Homo sapiens
aatcagcaggtatcc

SEQ ID NO: 1656723 - DNA, 15 bp, Homo sapiens
gaatcagcaggtatc

SEQ ID NO: 1656724 - DNA, 15 bp, Homo sapiens
ggaatcagcaggtat

SEQ ID NO: 1656725 - DNA, 15 bp, Homo sapiens
gggaatcagcaggta

SEQ ID NO: 1656726 - DNA, 15 bp, Homo sapiens
agggaatcagcaggt

SEQ ID NO: 1656727 - DNA, 15 bp, Homo sapiens
aagggaatcagcagg

SEQ ID NO: 1656728 - DNA, 15 bp, Homo sapiens
gaagggaatcagcag

SEQ ID NO: 1656729 - DNA, 15 bp, Homo sapiens
ggaagggaatcagca

SEQ ID NO: 1656730 - DNA, 15 bp, Homo sapiens
gggaagggaatcagc

SEQ ID NO: 1656731 - DNA, 15 bp, Homo sapiens
ggggaagggaatcag

SEQ ID NO: 1656732 - DNA, 15 bp, Homo sapiens
aggggaagggaatca

SEQ ID NO: 1656733 - DNA, 15 bp, Homo sapiens
gaggggaagggaatc

SEQ ID NO: 1656734 - DNA, 15 bp, Homo sapiens
agaggggaagggaat

SEQ ID NO: 1656735 - DNA, 15 bp, Homo sapiens
cagaggggaagggaa

SEQ ID NO: 1656736 - DNA, 15 bp, Homo sapiens
tcagaggggaaggga

SEQ ID NO: 1656737 - DNA, 15 bp, Homo sapiens
ttcagaggggaaggg

SEQ ID NO: 1656738 - DNA, 15 bp, Homo sapiens
gttcagaggggaagg

SEQ ID NO: 1656739 - DNA, 15 bp, Homo sapiens
ggttcagaggggaag

SEQ ID NO: 1656740 - DNA, 15 bp, Homo sapiens
gggttcagaggggaa

SEQ ID NO: 1656741 - DNA, 15 bp, Homo sapiens
ggggttcagagggga

SEQ ID NO: 1656742 - DNA, 15 bp, Homo sapiens
gggggttcagagggg

SEQ ID NO: 1656743 - DNA, 15 bp, Homo sapiens
tgggggttcagaggg

SEQ ID NO: 1656744 - DNA, 15 bp, Homo sapiens
ttgggggttcagagg

SEQ ID NO: 1656745 - DNA, 15 bp, Homo sapiens
gttgggggttcagag

SEQ ID NO: 1656746 - DNA, 15 bp, Homo sapiens
tgttgggggttcaga

SEQ ID NO: 1656747 - DNA, 15 bp, Homo sapiens
gtgttgggggttcag

SEQ ID NO: 1656748 - DNA, 15 bp, Homo sapiens
agtgttgggggttca

SEQ ID NO: 1656749 - DNA, 15 bp, Homo sapiens
gagtgttgggggttc

SEQ ID NO: 1656750 - DNA, 15 bp, Homo sapiens
agagtgttgggggtt

SEQ ID NO: 1656751 - DNA, 15 bp, Homo sapiens
cagagtgttgggggt

SEQ ID NO: 1656752 - DNA, 15 bp, Homo sapiens
ccagagtgttggggg

SEQ ID NO: 1656753 - DNA, 15 bp, Homo sapiens
gccagagtgttgggg

SEQ ID NO: 1656754 - DNA, 15 bp, Homo sapiens
ggccagagtgttggg

SEQ ID NO: 1656755 - DNA, 15 bp, Homo sapiens
gggccagagtgttgg

SEQ ID NO: 1656756 - DNA, 15 bp, Homo sapiens
tgggccagagtgttg

SEQ ID NO: 1656757 - DNA, 15 bp, Homo sapiens
atgggccagagtgtt

SEQ ID NO: 1656758 - DNA, 15 bp, Homo sapiens
gatgggccagagtgt

SEQ ID NO: 1656759 - DNA, 15 bp, Homo sapiens
cgatgggccagagtg

SEQ ID NO: 1656760 - DNA, 15 bp, Homo sapiens
ccgatgggccagagt

SEQ ID NO: 1656761 - DNA, 15 bp, Homo sapiens
cccgatgggccagag

SEQ ID NO: 1656762 - DNA, 15 bp, Homo sapiens
ccccgatgggccaga

SEQ ID NO: 1656763 - DNA, 15 bp, Homo sapiens
accccgatgggccag

SEQ ID NO: 1656764 - DNA, 15 bp, Homo sapiens
caccccgatgggcca

SEQ ID NO: 1656765 - DNA, 15 bp, Homo sapiens
tcaccccgatgggcc

SEQ ID NO: 1656766 - DNA, 15 bp, Homo sapiens
gtcaccccgatgggc

SEQ ID NO: 1656767 - DNA, 15 bp, Homo sapiens
cgtcaccccgatggg

SEQ ID NO: 1656768 - DNA, 15 bp, Homo sapiens
ccgtcaccccgatgg

SEQ ID NO: 1656769 - DNA, 15 bp, Homo sapiens
tccgtcaccccgatg

SEQ ID NO: 1656770 - DNA, 15 bp, Homo sapiens
atccgtcaccccgat

SEQ ID NO: 1656771 - DNA, 15 bp, Homo sapiens
tatccgtcaccccga

SEQ ID NO: 1656772 - DNA, 15 bp, Homo sapiens
atatccgtcaccccg

SEQ ID NO: 1656773 - DNA, 15 bp, Homo sapiens
gatatccgtcacccc

SEQ ID NO: 1656774 - DNA, 15 bp, Homo sapiens
agatatccgtcaccc

SEQ ID NO: 1656775 - DNA, 15 bp, Homo sapiens
cagatatccgtcacc

SEQ ID NO: 1656776 - DNA, 15 bp, Homo sapiens
gcagatatccgtcac

SEQ ID NO: 1656777 - DNA, 15 bp, Homo sapiens
agcagatatccgtca

SEQ ID NO: 1656778 - DNA, 15 bp, Homo sapiens
aagcagatatccgtc

SEQ ID NO: 1656779 - DNA, 15 bp, Homo sapiens
aaagcagatatccgt

SEQ ID NO: 1656780 - DNA, 15 bp, Homo sapiens
aaaagcagatatccg

SEQ ID NO: 1656781 - DNA, 15 bp, Homo sapiens
aaaaagcagatatcc

SEQ ID NO: 1656782 - DNA, 15 bp, Homo sapiens
taaaaagcagatatc

SEQ ID NO: 1656783 - DNA, 15 bp, Homo sapiens
ttaaaaagcagatat

SEQ ID NO: 1656784 - DNA, 15 bp, Homo sapiens
tttaaaaagcagata

SEQ ID NO: 1656785 - DNA, 15 bp, Homo sapiens
ttttaaaaagcagat

SEQ ID NO: 1656786 - DNA, 15 bp, Homo sapiens
tttttaaaaagcaga

SEQ ID NO: 1656787 - DNA, 15 bp, Homo sapiens
atttttaaaaagcag

SEQ ID NO: 1656788 - DNA, 15 bp, Homo sapiens
aatttttaaaaagca

SEQ ID NO: 1656789 - DNA, 15 bp, Homo sapiens
aaatttttaaaaagc

SEQ ID NO: 1656790 - DNA, 15 bp, Homo sapiens
aaaatttttaaaaag

SEQ ID NO: 1656791 - DNA, 15 bp, Homo sapiens
gaaaatttttaaaaa

SEQ ID NO: 1656792 - DNA, 15 bp, Homo sapiens
agaaaatttttaaaa

SEQ ID NO: 1656793 - DNA, 15 bp, Homo sapiens
aagaaaatttttaaa

SEQ ID NO: 1656794 - DNA, 15 bp, Homo sapiens
aaagaaaatttttaa

SEQ ID NO: 1656795 - DNA, 15 bp, Homo sapiens
aaaagaaaattttta

SEQ ID NO: 1656796 - DNA, 15 bp, Homo sapiens
aaaaaagaaaatttt

SEQ ID NO: 1656797 - DNA, 15 bp, Homo sapiens
aaaaaaagaaaattt

SEQ ID NO: 1656798 - DNA, 15 bp, Homo sapiens
caaaaaaagaaaatt

SEQ ID NO: 1656799 - DNA, 15 bp, Homo sapiens
ccaaaaaaagaaaat

SEQ ID NO: 1656800 - DNA, 15 bp, Homo sapiens
gccaaaaaaagaaaa

SEQ ID NO: 1656801 - DNA, 15 bp, Homo sapiens
ggccaaaaaaagaaa

SEQ ID NO: 1656802 - DNA, 15 bp, Homo sapiens
gggccaaaaaaagaa

SEQ ID NO: 1656803 - DNA, 15 bp, Homo sapiens
tgggccaaaaaaaga

SEQ ID NO: 1656804 - DNA, 15 bp, Homo sapiens
atgggccaaaaaaag

SEQ ID NO: 1656805 - DNA, 15 bp, Homo sapiens
gatgggccaaaaaaa

SEQ ID NO: 1656806 - DNA, 15 bp, Homo sapiens
cgatgggccaaaaaa

SEQ ID NO: 1656807 - DNA, 15 bp, Homo sapiens
ccgatgggccaaaaa

SEQ ID NO: 1656808 - DNA, 15 bp, Homo sapiens
cccgatgggccaaaa

SEQ ID NO: 1656809 - DNA, 15 bp, Homo sapiens
ccccgatgggccaaa

SEQ ID NO: 1656810 - DNA, 15 bp, Homo sapiens
gccccgatgggccaa

SEQ ID NO: 1656811 - DNA, 15 bp, Homo sapiens
agccccgatgggcca

SEQ ID NO: 1656812 - DNA, 15 bp, Homo sapiens
aagccccgatgggcc

SEQ ID NO: 1656813 - DNA, 15 bp, Homo sapiens
gaagccccgatgggc

SEQ ID NO: 1656814 - DNA, 15 bp, Homo sapiens
cgaagccccgatggg

SEQ ID NO: 1656815 - DNA, 15 bp, Homo sapiens
ccgaagccccgatgg

SEQ ID NO: 1656816 - DNA, 15 bp, Homo sapiens
tccgaagccccgatg

SEQ ID NO: 1656817 - DNA, 15 bp, Homo sapiens
atccgaagccccgat

SEQ ID NO: 1656818 - DNA, 15 bp, Homo sapiens
tatccgaagccccga

SEQ ID NO: 1656819 - DNA, 15 bp, Homo sapiens
gtatccgaagccccg

SEQ ID NO: 1656820 - DNA, 15 bp, Homo sapiens
ggtatccgaagcccc

SEQ ID NO: 1656821 - DNA, 15 bp, Homo sapiens
aggtatccgaagccc

SEQ ID NO: 1656822 - DNA, 15 bp, Homo sapiens
caggtatccgaagcc

SEQ ID NO: 1656823 - DNA, 15 bp, Homo sapiens
gcaggtatccgaagc

SEQ ID NO: 1656824 - DNA, 15 bp, Homo sapiens
agcaggtatccgaag

SEQ ID NO: 1656825 - DNA, 15 bp, Homo sapiens
aagcaggtatccgaa

SEQ ID NO: 1656826 - DNA, 15 bp, Homo sapiens
aaagcaggtatccga

SEQ ID NO: 1656827 - DNA, 15 bp, Homo sapiens
aaaaaagcaggtatc

SEQ ID NO: 1656828 - DNA, 15 bp, Homo sapiens
aaaaaaagcaggtat

SEQ ID NO: 1656829 - DNA, 15 bp, Homo sapiens
aaaaaaaagcaggta

SEQ ID NO: 1656830 - DNA, 15 bp, Homo sapiens
aaaaaaaaagcaggt

SEQ ID NO: 1656831 - DNA, 15 bp, Homo sapiens
aaaaaaaaaagcagg

SEQ ID NO: 1656832 - DNA, 15 bp, Homo sapiens
aaaaaaaaaaagcag

SEQ ID NO: 1656833 - DNA, 15 bp, Homo sapiens
aaaaaaaaaaaagca

SEQ ID NO: 1656834 - DNA, 15 bp, Homo sapiens
aaataaaaaaaaaaa

SEQ ID NO: 1656835 - DNA, 15 bp, Homo sapiens
aaaataaaaaaaaaa

SEQ ID NO: 1656836 - DNA, 15 bp, Homo sapiens
gaaaaataaaaaaaa

SEQ ID NO: 1656837 - DNA, 15 bp, Homo sapiens
ggaaaaataaaaaaa

SEQ ID NO: 1656838 - DNA, 15 bp, Homo sapiens
aggaaaaataaaaaa

SEQ ID NO: 1656839 - DNA, 15 bp, Homo sapiens
aaggaaaaataaaaa

SEQ ID NO: 1656840 - DNA, 15 bp, Homo sapiens
caaggaaaaataaaa

SEQ ID NO: 1656841 - DNA, 15 bp, Homo sapiens
gcaaggaaaaataaa

SEQ ID NO: 1656842 - DNA, 15 bp, Homo sapiens
ggcaaggaaaaataa

SEQ ID NO: 1656843 - DNA, 15 bp, Homo sapiens
gggcaaggaaaaata

SEQ ID NO: 1656844 - DNA, 15 bp, Homo sapiens
tgggcaaggaaaaat

SEQ ID NO: 1656845 - DNA, 15 bp, Homo sapiens
atgggcaaggaaaaa

SEQ ID NO: 1656846 - DNA, 15 bp, Homo sapiens
gatgggcaaggaaaa

SEQ ID NO: 1656847 - DNA, 15 bp, Homo sapiens
cgatgggcaaggaaa

SEQ ID NO: 1656848 - DNA, 15 bp, Homo sapiens
ccgatgggcaaggaa

SEQ ID NO: 1656849 - DNA, 15 bp, Homo sapiens
cccgatgggcaagga

SEQ ID NO: 1656850 - DNA, 15 bp, Homo sapiens
ccccgatgggcaagg

SEQ ID NO: 1656851 - DNA, 15 bp, Homo sapiens
gccccgatgggcaag

SEQ ID NO: 1656852 - DNA, 15 bp, Homo sapiens
ggccccgatgggcaa

SEQ ID NO: 1656853 - DNA, 15 bp, Homo sapiens
aggccccgatgggca

SEQ ID NO: 1656854 - DNA, 15 bp, Homo sapiens
gaggccccgatgggc

SEQ ID NO: 1656855 - DNA, 15 bp, Homo sapiens
cgaggccccgatggg

SEQ ID NO: 1656856 - DNA, 15 bp, Homo sapiens
ccgaggccccgatgg

SEQ ID NO: 1656857 - DNA, 15 bp, Homo sapiens
tccgaggccccgatg

SEQ ID NO: 1656858 - DNA, 15 bp, Homo sapiens
atccgaggccccgat

SEQ ID NO: 1656859 - DNA, 15 bp, Homo sapiens
tatccgaggccccga

SEQ ID NO: 1656860 - DNA, 15 bp, Homo sapiens
gtatccgaggccccg

SEQ ID NO: 1656861 - DNA, 15 bp, Homo sapiens
ggtatccgaggcccc

SEQ ID NO: 1656862 - DNA, 15 bp, Homo sapiens
aggtatccgaggccc

SEQ ID NO: 1656863 - DNA, 15 bp, Homo sapiens
caggtatccgaggcc

SEQ ID NO: 1656864 - DNA, 15 bp, Homo sapiens
gcaggtatccgaggc

SEQ ID NO: 1656865 - DNA, 15 bp, Homo sapiens
agcaggtatccgagg

SEQ ID NO: 1656866 - DNA, 15 bp, Homo sapiens
aagcaggtatccgag

SEQ ID NO: 1656867 - DNA, 15 bp, Homo sapiens
taaagcaggtatccg

SEQ ID NO: 1656868 - DNA, 15 bp, Homo sapiens
ttaaagcaggtatcc

SEQ ID NO: 1656869 - DNA, 15 bp, Homo sapiens
attaaagcaggtatc

SEQ ID NO: 1656870 - DNA, 15 bp, Homo sapiens
aattaaagcaggtat

SEQ ID NO: 1656871 - DNA, 15 bp, Homo sapiens
aaattaaagcaggta

SEQ ID NO: 1656872 - DNA, 15 bp, Homo sapiens
aaaattaaagcaggt

SEQ ID NO: 1656873 - DNA, 15 bp, Homo sapiens
aaaaattaaagcagg

SEQ ID NO: 1656874 - DNA, 15 bp, Homo sapiens
caaaaattaaagcag

SEQ ID NO: 1656875 - DNA, 15 bp, Homo sapiens
acaaaaattaaagca

SEQ ID NO: 1656876 - DNA, 15 bp, Homo sapiens
aacaaaaattaaagc

SEQ ID NO: 1656877 - DNA, 15 bp, Homo sapiens
aaacaaaaattaaag

SEQ ID NO: 1656878 - DNA, 15 bp, Homo sapiens
gaacacgcccttagc

SEQ ID NO: 1656879 - DNA, 15 bp, Homo sapiens
tgaacacgcccttag

SEQ ID NO: 1656880 - DNA, 15 bp, Homo sapiens
ctgaacacgccctta

SEQ ID NO: 1656881 - DNA, 15 bp, Homo sapiens
tctgaacacgccctt

SEQ ID NO: 1656882 - DNA, 15 bp, Homo sapiens
atctgaacacgccct

SEQ ID NO: 1656883 - DNA, 15 bp, Homo sapiens
aatctgaacacgccc

SEQ ID NO: 1656884 - DNA, 15 bp, Homo sapiens
caatctgaacacgcc

SEQ ID NO: 1656885 - DNA, 15 bp, Homo sapiens
acaatctgaacacgc

SEQ ID NO: 1656886 - DNA, 15 bp, Homo sapiens
cacaatctgaacacg

SEQ ID NO: 1656887 - DNA, 15 bp, Homo sapiens
ccacaatctgaacac

SEQ ID NO: 1656888 - DNA, 15 bp, Homo sapiens
tccacaatctgaaca

SEQ ID NO: 1656889 - DNA, 15 bp, Homo sapiens
ctccacaatctgaac

SEQ ID NO: 1656890 - DNA, 15 bp, Homo sapiens
cctccacaatctgaa

SEQ ID NO: 1656891 - DNA, 15 bp, Homo sapiens
tcctccacaatctga

SEQ ID NO: 1656892 - DNA, 15 bp, Homo sapiens
ttcctccacaatctg

SEQ ID NO: 1656893 - DNA, 15 bp, Homo sapiens
tttcctccacaatct

SEQ ID NO: 1656894 - DNA, 15 bp, Homo sapiens
ttttcctccacaatc

SEQ ID NO: 1656895 - DNA, 15 bp, Homo sapiens
cttttcctccacaat

SEQ ID NO: 1656896 - DNA, 15 bp, Homo sapiens
acttttcctccacaa

SEQ ID NO: 1656897 - DNA, 15 bp, Homo sapiens
cacttttcctccaca

SEQ ID NO: 1656898 - DNA, 15 bp, Homo sapiens
ccacttttcctccac

SEQ ID NO: 1656899 - DNA, 15 bp, Homo sapiens
gccacttttcctcca

SEQ ID NO: 1656900 - DNA, 15 bp, Homo sapiens
ggccacttttcctcc

SEQ ID NO: 1656901 - DNA, 15 bp, Homo sapiens
cggccacttttcctc

SEQ ID NO: 1656902 - DNA, 15 bp, Homo sapiens
gcggccacttttcct

SEQ ID NO: 1656903 - DNA, 15 bp, Homo sapiens
ggcggccacttttcc

SEQ ID NO: 1656904 - DNA, 15 bp, Homo sapiens
tggcggccacttttc

SEQ ID NO: 1656905 - DNA, 15 bp, Homo sapiens
atggcggccactttt

SEQ ID NO: 1656906 - DNA, 15 bp, Homo sapiens
aatggcggccacttt

SEQ ID NO: 1656907 - DNA, 15 bp, Homo sapiens
aaatggcggccactt

SEQ ID NO: 1656908 - DNA, 15 bp, Homo sapiens
aaaatggcggccact

SEQ ID NO: 1656909 - DNA, 15 bp, Homo sapiens
taaaatggcggccac

SEQ ID NO: 1656910 - DNA, 15 bp, Homo sapiens
ctaaaatggcggcca

SEQ ID NO: 1656911 - DNA, 15 bp, Homo sapiens
tctaaaatggcggcc

SEQ ID NO: 1656912 - DNA, 15 bp, Homo sapiens
gtctaaaatggcggc

SEQ ID NO: 1656913 - DNA, 15 bp, Homo sapiens
agtctaaaatggcgg

SEQ ID NO: 1656914 - DNA, 15 bp, Homo sapiens
aagtctaaaatggcg

SEQ ID NO: 1656915 - DNA, 15 bp, Homo sapiens
caagtctaaaatggc

SEQ ID NO: 1656916 - DNA, 15 bp, Homo sapiens
gcaagtctaaaatgg

SEQ ID NO: 1656917 - DNA, 15 bp, Homo sapiens
ggcaagtctaaaatg

SEQ ID NO: 1656918 - DNA, 15 bp, Homo sapiens
cggcaagtctaaaat

SEQ ID NO: 1656919 - DNA, 15 bp, Homo sapiens
gcggcaagtctaaaa

SEQ ID NO: 1656920 - DNA, 15 bp, Homo sapiens
tgcggcaagtctaaa

SEQ ID NO: 1656921 - DNA, 15 bp, Homo sapiens
atgcggcaagtctaa

SEQ ID NO: 1656922 - DNA, 15 bp, Homo sapiens
tatgcggcaagtcta

SEQ ID NO: 1656923 - DNA, 15 bp, Homo sapiens
ttatgcggcaagtct

SEQ ID NO: 1656924 - DNA, 15 bp, Homo sapiens
gttatgcggcaagtc

SEQ ID NO: 1656925 - DNA, 15 bp, Homo sapiens
agttatgcggcaagt

SEQ ID NO: 1656926 - DNA, 15 bp, Homo sapiens
gagttatgcggcaag

SEQ ID NO: 1656927 - DNA, 15 bp, Homo sapiens
cgagttatgcggcaa

SEQ ID NO: 1656928 - DNA, 15 bp, Homo sapiens
ccgagttatgcggca

SEQ ID NO: 1656929 - DNA, 15 bp, Homo sapiens
gccgagttatgcggc

SEQ ID NO: 1656930 - DNA, 15 bp, Homo sapiens
agccgagttatgcgg

SEQ ID NO: 1656931 - DNA, 15 bp, Homo sapiens
aagccgagttatgcg

SEQ ID NO: 1656932 - DNA, 15 bp, Homo sapiens
taagccgagttatgc

SEQ ID NO: 1656933 - DNA, 15 bp, Homo sapiens
ctaagccgagttatg

SEQ ID NO: 1656934 - DNA, 15 bp, Homo sapiens
cctaagccgagttat

SEQ ID NO: 1656935 - DNA, 15 bp, Homo sapiens
ccctaagccgagtta

SEQ ID NO: 1656936 - DNA, 15 bp, Homo sapiens
gccctaagccgagtt

SEQ ID NO: 1656937 - DNA, 15 bp, Homo sapiens
agccctaagccgagt

SEQ ID NO: 1656938 - DNA, 15 bp, Homo sapiens
tagccctaagccgag

SEQ ID NO: 1656939 - DNA, 15 bp, Homo sapiens
ctagccctaagccga

SEQ ID NO: 1656940 - DNA, 15 bp, Homo sapiens
actagccctaagccg

SEQ ID NO: 1656941 - DNA, 15 bp, Homo sapiens
gactagccctaagcc

SEQ ID NO: 1656942 - DNA, 15 bp, Homo sapiens
cgactagccctaagc

SEQ ID NO: 1656943 - DNA, 15 bp, Homo sapiens
acgactagccctaag

SEQ ID NO: 1656944 - DNA, 15 bp, Homo sapiens
aacgactagccctaa

SEQ ID NO: 1656945 - DNA, 15 bp, Homo sapiens
aaacgactagcccta

SEQ ID NO: 1656946 - DNA, 15 bp, Homo sapiens
caaacgactagccct

SEQ ID NO: 1656947 - DNA, 15 bp, Homo sapiens
acaaacgactagccc

SEQ ID NO: 1656948 - DNA, 15 bp, Homo sapiens
cacaaacgactagcc

SEQ ID NO: 1656949 - DNA, 15 bp, Homo sapiens
gcacaaacgactagc

SEQ ID NO: 1656950 - DNA, 15 bp, Homo sapiens
agcacaaacgactag

SEQ ID NO: 1656951 - DNA, 15 bp, Homo sapiens
tagcacaaacgacta

SEQ ID NO: 1656952 - DNA, 15 bp, Homo sapiens
ttagcacaaacgact

SEQ ID NO: 1656953 - DNA, 15 bp, Homo sapiens
cttagcacaaacgac

SEQ ID NO: 1656954 - DNA, 15 bp, Homo sapiens
acttagcacaaacga

SEQ ID NO: 1656955 - DNA, 15 bp, Homo sapiens
aacttagcacaaacg

SEQ ID NO: 1656956 - DNA, 15 bp, Homo sapiens
taacttagcacaaac

SEQ ID NO: 1656957 - DNA, 15 bp, Homo sapiens
ttaacttagcacaaa

SEQ ID NO: 1656958 - DNA, 15 bp, Homo sapiens
tttaacttagcacaa

SEQ ID NO: 1656959 - DNA, 15 bp, Homo sapiens
gtttaacttagcaca

SEQ ID NO: 1656960 - DNA, 15 bp, Homo sapiens
agtttaacttagcac

SEQ ID NO: 1656961 - DNA, 15 bp, Homo sapiens
tagtttaacttagca

SEQ ID NO: 1656962 - DNA, 15 bp, Homo sapiens
ctagtttaacttagc

SEQ ID NO: 1656963 - DNA, 15 bp, Homo sapiens
cctagtttaacttag

SEQ ID NO: 1656964 - DNA, 15 bp, Homo sapiens
ccctagtttaactta

SEQ ID NO: 1656965 - DNA, 15 bp, Homo sapiens
tccctagtttaactt

SEQ ID NO: 1656966 - DNA, 15 bp, Homo sapiens
ctccctagtttaact

SEQ ID NO: 1656967 - DNA, 15 bp, Homo sapiens
cctccctagtttaac

SEQ ID NO: 1656968 - DNA, 15 bp, Homo sapiens
gcctccctagtttaa

SEQ ID NO: 1656969 - DNA, 15 bp, Homo sapiens
tgcctccctagttta

SEQ ID NO: 1656970 - DNA, 15 bp, Homo sapiens
ttgcctccctagttt

SEQ ID NO: 1656971 - DNA, 15 bp, Homo sapiens
cttgcctccctagtt

SEQ ID NO: 1656972 - DNA, 15 bp, Homo sapiens
tcttgcctccctagt

SEQ ID NO: 1656973 - DNA, 15 bp, Homo sapiens
atcttgcctccctag

SEQ ID NO: 1656974 - DNA, 15 bp, Homo sapiens
catcttgcctcccta

SEQ ID NO: 1656975 - DNA, 15 bp, Homo sapiens
ccatcttgcctccct

SEQ ID NO: 1656976 - DNA, 15 bp, Homo sapiens
tccatcttgcctccc

SEQ ID NO: 1656977 - DNA, 15 bp, Homo sapiens
atccatcttgcctcc

SEQ ID NO: 1656978 - DNA, 15 bp, Homo sapiens
catccatcttgcctc

SEQ ID NO: 1656979 - DNA, 15 bp, Homo sapiens
tcatccatcttgcct

SEQ ID NO: 1656980 - DNA, 15 bp, Homo sapiens
atcatccatcttgcc

SEQ ID NO: 1656981 - DNA, 15 bp, Homo sapiens
tatcatccatcttgc

SEQ ID NO: 1656982 - DNA, 15 bp, Homo sapiens
ctatcatccatcttg

SEQ ID NO: 1656983 - DNA, 15 bp, Homo sapiens
gctatcatccatctt

SEQ ID NO: 1656984 - DNA, 15 bp, Homo sapiens
tgctatcatccatct

SEQ ID NO: 1656985 - DNA, 15 bp, Homo sapiens
ctgctatcatccatc

SEQ ID NO: 1656986 - DNA, 15 bp, Homo sapiens
cctgctatcatccat

SEQ ID NO: 1656987 - DNA, 15 bp, Homo sapiens
acctgctatcatcca

SEQ ID NO: 1656988 - DNA, 15 bp, Homo sapiens
gacctgctatcatcc

SEQ ID NO: 1656989 - DNA, 15 bp, Homo sapiens
tgacctgctatcatc

SEQ ID NO: 1656990 - DNA, 15 bp, Homo sapiens
ctgacctgctatcat

SEQ ID NO: 1656991 - DNA, 15 bp, Homo sapiens
cctgacctgctatca

SEQ ID NO: 1656992 - DNA, 15 bp, Homo sapiens
gcctgacctgctatc

SEQ ID NO: 1656993 - DNA, 15 bp, Homo sapiens
tgcctgacctgctat

SEQ ID NO: 1656994 - DNA, 15 bp, Homo sapiens
ctgcctgacctgcta

SEQ ID NO: 1656995 - DNA, 15 bp, Homo sapiens
tctgcctgacctgct

SEQ ID NO: 1656996 - DNA, 15 bp, Homo sapiens
ctctgcctgacctgc

SEQ ID NO: 1656997 - DNA, 15 bp, Homo sapiens
cctctgcctgacctg

SEQ ID NO: 1656998 - DNA, 15 bp, Homo sapiens
tcctctgcctgacct

SEQ ID NO: 1656999 - DNA, 15 bp, Homo sapiens
ttcctctgcctgacc

SEQ ID NO: 1657000 - DNA, 15 bp, Homo sapiens
cttcctctgcctgac

SEQ ID NO: 1657001 - DNA, 15 bp, Homo sapiens
acttcctctgcctga

SEQ ID NO: 1657002 - DNA, 15 bp, Homo sapiens
gacttcctctgcctg

SEQ ID NO: 1657003 - DNA, 15 bp, Homo sapiens
tgacttcctctgcct

SEQ ID NO: 1657004 - DNA, 15 bp, Homo sapiens
atgacttcctctgcc

SEQ ID NO: 1657005 - DNA, 15 bp, Homo sapiens
catgacttcctctgc

SEQ ID NO: 1657006 - DNA, 15 bp, Homo sapiens
acatgacttcctctg

SEQ ID NO: 1657007 - DNA, 15 bp, Homo sapiens
cacatgacttcctct

SEQ ID NO: 1657008 - DNA, 15 bp, Homo sapiens
gcacatgacttcctc

SEQ ID NO: 1657009 - DNA, 15 bp, Homo sapiens
tgcacatgacttcct

SEQ ID NO: 1657010 - DNA, 15 bp, Homo sapiens
atgcacatgacttcc

SEQ ID NO: 1657011 - DNA, 15 bp, Homo sapiens
aatgcacatgacttc

SEQ ID NO: 1657012 - DNA, 15 bp, Homo sapiens
caatgcacatgactt

SEQ ID NO: 1657013 - DNA, 15 bp, Homo sapiens
gcaatgcacatgact

SEQ ID NO: 1657014 - DNA, 15 bp, Homo sapiens
tgcaatgcacatgac

SEQ ID NO: 1657015 - DNA, 15 bp, Homo sapiens
atgcaatgcacatga

SEQ ID NO: 1657016 - DNA, 15 bp, Homo sapiens
catgcaatgcacatg

SEQ ID NO: 1657017 - DNA, 15 bp, Homo sapiens
tcatgcaatgcacat

SEQ ID NO: 1657018 - DNA, 15 bp, Homo sapiens
ctcatgcaatgcaca

SEQ ID NO: 1657019 - DNA, 15 bp, Homo sapiens
gctcatgcaatgcac

SEQ ID NO: 1657020 - DNA, 15 bp, Homo sapiens
agctcatgcaatgca

SEQ ID NO: 1657021 - DNA, 15 bp, Homo sapiens
tagctcatgcaatgc

SEQ ID NO: 1657022 - DNA, 15 bp, Homo sapiens
ttagctcatgcaatg

SEQ ID NO: 1657023 - DNA, 15 bp, Homo sapiens
tttagctcatgcaat

SEQ ID NO: 1657024 - DNA, 15 bp, Homo sapiens
gtttagctcatgcaa

SEQ ID NO: 1657025 - DNA, 15 bp, Homo sapiens
ggtttagctcatgca

SEQ ID NO: 1657026 - DNA, 15 bp, Homo sapiens
aggtttagctcatgc

SEQ ID NO: 1657027 - DNA, 15 bp, Homo sapiens
taggtttagctcatg

SEQ ID NO: 1657028 - DNA, 15 bp, Homo sapiens
ataggtttagctcat

SEQ ID NO: 1657029 - DNA, 15 bp, Homo sapiens
gataggtttagctca

SEQ ID NO: 1657030 - DNA, 15 bp, Homo sapiens
agataggtttagctc

SEQ ID NO: 1657031 - DNA, 15 bp, Homo sapiens
cagataggtttagct

SEQ ID NO: 1657032 - DNA, 15 bp, Homo sapiens
tcagataggtttagc

SEQ ID NO: 1657033 - DNA, 15 bp, Homo sapiens
ttcagataggtttag

SEQ ID NO: 1657034 - DNA, 15 bp, Homo sapiens
attcagataggttta

SEQ ID NO: 1657035 - DNA, 15 bp, Homo sapiens
cattcagataggttt

SEQ ID NO: 1657036 - DNA, 15 bp, Homo sapiens
tcattcagataggtt

SEQ ID NO: 1657037 - DNA, 15 bp, Homo sapiens
ttcattcagataggt

SEQ ID NO: 1657038 - DNA, 15 bp, Homo sapiens
attcattcagatagg

SEQ ID NO: 1657039 - DNA, 15 bp, Homo sapiens
aattcattcagatag

SEQ ID NO: 1657040 - DNA, 15 bp, Homo sapiens
caattcattcagata

SEQ ID NO: 1657041 - DNA, 15 bp, Homo sapiens
tcaattcattcagat

SEQ ID NO: 1657042 - DNA, 15 bp, Homo sapiens
atcaattcattcaga

SEQ ID NO: 1657043 - DNA, 15 bp, Homo sapiens
aatcaattcattcag

SEQ ID NO: 1657044 - DNA, 15 bp, Homo sapiens
aaatcaattcattca

SEQ ID NO: 1657045 - DNA, 15 bp, Homo sapiens
caaatcaattcattc

SEQ ID NO: 1657046 - DNA, 15 bp, Homo sapiens
ccaaatcaattcatt

SEQ ID NO: 1657047 - DNA, 15 bp, Homo sapiens
cccaaatcaattcat

SEQ ID NO: 1657048 - DNA, 15 bp, Homo sapiens
ccccaaatcaattca

SEQ ID NO: 1657049 - DNA, 15 bp, Homo sapiens
gccccaaatcaattc

SEQ ID NO: 1657050 - DNA, 15 bp, Homo sapiens
agccccaaatcaatt

SEQ ID NO: 1657051 - DNA, 15 bp, Homo sapiens
aagccccaaatcaat

SEQ ID NO: 1657052 - DNA, 15 bp, Homo sapiens
caagccccaaatcaa

SEQ ID NO: 1657053 - DNA, 15 bp, Homo sapiens
acaagccccaaatca

SEQ ID NO: 1657054 - DNA, 15 bp, Homo sapiens
aacaagccccaaatc

SEQ ID NO: 1657055 - DNA, 15 bp, Homo sapiens
taacaagccccaaat

SEQ ID NO: 1657056 - DNA, 15 bp, Homo sapiens
ctaacaagccccaaa

SEQ ID NO: 1657057 - DNA, 15 bp, Homo sapiens
cctaacaagccccaa

SEQ ID NO: 1657058 - DNA, 15 bp, Homo sapiens
tcctaacaagcccca

SEQ ID NO: 1657059 - DNA, 15 bp, Homo sapiens
ctcctaacaagcccc

SEQ ID NO: 1657060 - DNA, 15 bp, Homo sapiens
gctcctaacaagccc

SEQ ID NO: 1657061 - DNA, 15 bp, Homo sapiens
agctcctaacaagcc

SEQ ID NO: 1657062 - DNA, 15 bp, Homo sapiens
aagctcctaacaagc

SEQ ID NO: 1657063 - DNA, 15 bp, Homo sapiens
aaagctcctaacaag

SEQ ID NO: 1657064 - DNA, 15 bp, Homo sapiens
caaagctcctaacaa

SEQ ID NO: 1657065 - DNA, 15 bp, Homo sapiens
gcaaagctcctaaca

SEQ ID NO: 1657066 - DNA, 15 bp, Homo sapiens
cgcaaagctcctaac

SEQ ID NO: 1657067 - DNA, 15 bp, Homo sapiens
acgcaaagctcctaa

SEQ ID NO: 1657068 - DNA, 15 bp, Homo sapiens
cacgcaaagctccta

SEQ ID NO: 1657069 - DNA, 15 bp, Homo sapiens
tcacgcaaagctcct

SEQ ID NO: 1657070 - DNA, 15 bp, Homo sapiens
atcacgcaaagctcc

SEQ ID NO: 1657071 - DNA, 15 bp, Homo sapiens
aatcacgcaaagctc

SEQ ID NO: 1657072 - DNA, 15 bp, Homo sapiens
caatcacgcaaagct

SEQ ID NO: 1657073 - DNA, 15 bp, Homo sapiens
acaatcacgcaaagc

SEQ ID NO: 1657074 - DNA, 15 bp, Homo sapiens
aacaatcacgcaaag

SEQ ID NO: 1657075 - DNA, 15 bp, Homo sapiens
caacaatcacgcaaa

SEQ ID NO: 1657076 - DNA, 15 bp, Homo sapiens
acaacaatcacgcaa

SEQ ID NO: 1657077 - DNA, 15 bp, Homo sapiens
tacaacaatcacgca

SEQ ID NO: 1657078 - DNA, 15 bp, Homo sapiens
atacaacaatcacgc

SEQ ID NO: 1657079 - DNA, 15 bp, Homo sapiens
gatacaacaatcacg

SEQ ID NO: 1657080 - DNA, 15 bp, Homo sapiens
cgatacaacaatcac

SEQ ID NO: 1657081 - DNA, 15 bp, Homo sapiens
ccgatacaacaatca

SEQ ID NO: 1657082 - DNA, 15 bp, Homo sapiens
cccgatacaacaatc

SEQ ID NO: 1657083 - DNA, 15 bp, Homo sapiens
tcccgatacaacaat

SEQ ID NO: 1657084 - DNA, 15 bp, Homo sapiens
ctcccgatacaacaa

SEQ ID NO: 1657085 - DNA, 15 bp, Homo sapiens
cctcccgatacaaca

SEQ ID NO: 1657086 - DNA, 15 bp, Homo sapiens
gcctcccgatacaac

SEQ ID NO: 1657087 - DNA, 15 bp, Homo sapiens
tgcctcccgatacaa

SEQ ID NO: 1657088 - DNA, 15 bp, Homo sapiens
ctgcctcccgataca

SEQ ID NO: 1657089 - DNA, 15 bp, Homo sapiens
actgcctcccgatac

SEQ ID NO: 1657090 - DNA, 15 bp, Homo sapiens
tactgcctcccgata

SEQ ID NO: 1657091 - DNA, 15 bp, Homo sapiens
ttactgcctcccgat

SEQ ID NO: 1657092 - DNA, 15 bp, Homo sapiens
cttactgcctcccga

SEQ ID NO: 1657093 - DNA, 15 bp, Homo sapiens
tcttactgcctcccg

SEQ ID NO: 1657094 - DNA, 15 bp, Homo sapiens
ttcttactgcctccc

SEQ ID NO: 1657095 - DNA, 15 bp, Homo sapiens
attcttactgcctcc

SEQ ID NO: 1657096 - DNA, 15 bp, Homo sapiens
gattcttactgcctc

SEQ ID NO: 1657097 - DNA, 15 bp, Homo sapiens
tgattcttactgcct

SEQ ID NO: 1657098 - DNA, 15 bp, Homo sapiens
atgattcttactgcc

SEQ ID NO: 1657099 - DNA, 15 bp, Homo sapiens
gatgattcttactgc

SEQ ID NO: 1657100 - DNA, 15 bp, Homo sapiens
agatgattcttactg

SEQ ID NO: 1657101 - DNA, 15 bp, Homo sapiens
aagatgattcttact

SEQ ID NO: 1657102 - DNA, 15 bp, Homo sapiens
aaagatgattcttac

SEQ ID NO: 1657103 - DNA, 15 bp, Homo sapiens
aaaagatgattctta

SEQ ID NO: 1657104 - DNA, 15 bp, Homo sapiens
taaaagatgattctt

SEQ ID NO: 1657105 - DNA, 15 bp, Homo sapiens
ataaaagatgattct

SEQ ID NO: 1657106 - DNA, 15 bp, Homo sapiens
gataaaagatgattc

SEQ ID NO: 1657107 - DNA, 15 bp, Homo sapiens
cattttaagccctgc

SEQ ID NO: 1657108 - DNA, 15 bp, Homo sapiens
ccattttaagccctg

SEQ ID NO: 1657109 - DNA, 15 bp, Homo sapiens
gccattttaagccct

SEQ ID NO: 1657110 - DNA, 15 bp, Homo sapiens
cgccattttaagccc

SEQ ID NO: 1657111 - DNA, 15 bp, Homo sapiens
tcgccattttaagcc

SEQ ID NO: 1657112 - DNA, 15 bp, Homo sapiens
atcgccattttaagc

SEQ ID NO: 1657113 - DNA, 15 bp, Homo sapiens
aatcgccattttaag

SEQ ID NO: 1657114 - DNA, 15 bp, Homo sapiens
aaatcgccattttaa

SEQ ID NO: 1657115 - DNA, 15 bp, Homo sapiens
aaaatcgccatttta

SEQ ID NO: 1657116 - DNA, 15 bp, Homo sapiens
caaaatcgccatttt

SEQ ID NO: 1657117 - DNA, 15 bp, Homo sapiens
tcaaaatcgccattt

SEQ ID NO: 1657118 - DNA, 15 bp, Homo sapiens
gtcaaaatcgccatt

SEQ ID NO: 1657119 - DNA, 15 bp, Homo sapiens
tgtcaaaatcgccat

SEQ ID NO: 1657120 - DNA, 15 bp, Homo sapiens
atgtcaaaatcgcca

SEQ ID NO: 1657121 - DNA, 15 bp, Homo sapiens
aatgtcaaaatcgcc

SEQ ID NO: 1657122 - DNA, 15 bp, Homo sapiens
caatgtcaaaatcgc

SEQ ID NO: 1657123 - DNA, 15 bp, Homo sapiens
gcaatgtcaaaatcg

SEQ ID NO: 1657124 - DNA, 15 bp, Homo sapiens
cgcaatgtcaaaatc

SEQ ID NO: 1657125 - DNA, 15 bp, Homo sapiens
ccgcaatgtcaaaat

SEQ ID NO: 1657126 - DNA, 15 bp, Homo sapiens
gccgcaatgtcaaaa

SEQ ID NO: 1657127 - DNA, 15 bp, Homo sapiens
tgccgcaatgtcaaa

SEQ ID NO: 1657128 - DNA, 15 bp, Homo sapiens
atgccgcaatgtcaa

SEQ ID NO: 1657129 - DNA, 15 bp, Homo sapiens
aatgccgcaatgtca

SEQ ID NO: 1657130 - DNA, 15 bp, Homo sapiens
caatgccgcaatgtc

SEQ ID NO: 1657131 - DNA, 15 bp, Homo sapiens
gcaatgccgcaatgt

SEQ ID NO: 1657132 - DNA, 15 bp, Homo sapiens
agcaatgccgcaatg

SEQ ID NO: 1657133 - DNA, 15 bp, Homo sapiens
gagcaatgccgcaat

SEQ ID NO: 1657134 - DNA, 15 bp, Homo sapiens
tgagcaatgccgcaa

SEQ ID NO: 1657135 - DNA, 15 bp, Homo sapiens
ctgagcaatgccgca

SEQ ID NO: 1657136 - DNA, 15 bp, Homo sapiens
gctgagcaatgccgc

SEQ ID NO: 1657137 - DNA, 15 bp, Homo sapiens
tgctgagcaatgccg

SEQ ID NO: 1657138 - DNA, 15 bp, Homo sapiens
atgctgagcaatgcc

SEQ ID NO: 1657139 - DNA, 15 bp, Homo sapiens
catgctgagcaatgc

SEQ ID NO: 1657140 - DNA, 15 bp, Homo sapiens
ccatgctgagcaatg

SEQ ID NO: 1657141 - DNA, 15 bp, Homo sapiens
gccatgctgagcaat

SEQ ID NO: 1657142 - DNA, 15 bp, Homo sapiens
cgccatgctgagcaa

SEQ ID NO: 1657143 - DNA, 15 bp, Homo sapiens
ccgccatgctgagca

SEQ ID NO: 1657144 - DNA, 15 bp, Homo sapiens
cccgccatgctgagc

SEQ ID NO: 1657145 - DNA, 15 bp, Homo sapiens
gcccgccatgctgag

SEQ ID NO: 1657146 - DNA, 15 bp, Homo sapiens
agcccgccatgctga

SEQ ID NO: 1657147 - DNA, 15 bp, Homo sapiens
cagcccgccatgctg

SEQ ID NO: 1657148 - DNA, 15 bp, Homo sapiens
acagcccgccatgct

SEQ ID NO: 1657149 - DNA, 15 bp, Homo sapiens
cacagcccgccatgc

SEQ ID NO: 1657150 - DNA, 15 bp, Homo sapiens
gcacagcccgccatg

SEQ ID NO: 1657151 - DNA, 15 bp, Homo sapiens
agcacagcccgccat

SEQ ID NO: 1657152 - DNA, 15 bp, Homo sapiens
aagcacagcccgcca

SEQ ID NO: 1657153 - DNA, 15 bp, Homo sapiens
aaagcacagcccgcc

SEQ ID NO: 1657154 - DNA, 15 bp, Homo sapiens
caaagcacagcccgc

SEQ ID NO: 1657155 - DNA, 15 bp, Homo sapiens
acaaagcacagcccg

SEQ ID NO: 1657156 - DNA, 15 bp, Homo sapiens
aacaaagcacagccc

SEQ ID NO: 1657157 - DNA, 15 bp, Homo sapiens
taacaaagcacagcc

SEQ ID NO: 1657158 - DNA, 15 bp, Homo sapiens
ctaacaaagcacagc

SEQ ID NO: 1657159 - DNA, 15 bp, Homo sapiens
cctaacaaagcacag

SEQ ID NO: 1657160 - DNA, 15 bp, Homo sapiens
acctaacaaagcaca

SEQ ID NO: 1657161 - DNA, 15 bp, Homo sapiens
aacctaacaaagcac

SEQ ID NO: 1657162 - DNA, 15 bp, Homo sapiens
caacctaacaaagca

SEQ ID NO: 1657163 - DNA, 15 bp, Homo sapiens
acaacctaacaaagc

SEQ ID NO: 1657164 - DNA, 15 bp, Homo sapiens
gacaacctaacaaag

SEQ ID NO: 1657165 - DNA, 15 bp, Homo sapiens
ggacaacctaacaaa

SEQ ID NO: 1657166 - DNA, 15 bp, Homo sapiens
tggacaacctaacaa

SEQ ID NO: 1657167 - DNA, 15 bp, Homo sapiens
ttggacaacctaaca

SEQ ID NO: 1657168 - DNA, 15 bp, Homo sapiens
tttggacaacctaac

SEQ ID NO: 1657169 - DNA, 15 bp, Homo sapiens
ttttggacaacctaa

SEQ ID NO: 1657170 - DNA, 15 bp, Homo sapiens
attttggacaaccta

SEQ ID NO: 1657171 - DNA, 15 bp, Homo sapiens
cattttggacaacct

SEQ ID NO: 1657172 - DNA, 15 bp, Homo sapiens
ccattttggacaacc

SEQ ID NO: 1657173 - DNA, 15 bp, Homo sapiens
gccattttggacaac

SEQ ID NO: 1657174 - DNA, 15 bp, Homo sapiens
cgccattttggacaa

SEQ ID NO: 1657175 - DNA, 15 bp, Homo sapiens
ccgccattttggaca

SEQ ID NO: 1657176 - DNA, 15 bp, Homo sapiens
tccgccattttggac

SEQ ID NO: 1657177 - DNA, 15 bp, Homo sapiens
atccgccattttgga

SEQ ID NO: 1657178 - DNA, 15 bp, Homo sapiens
gatccgccattttgg

SEQ ID NO: 1657179 - DNA, 15 bp, Homo sapiens
ggatccgccattttg

SEQ ID NO: 1657180 - DNA, 15 bp, Homo sapiens
tggatccgccatttt

SEQ ID NO: 1657181 - DNA, 15 bp, Homo sapiens
ctggatccgccattt

SEQ ID NO: 1657182 - DNA, 15 bp, Homo sapiens
actggatccgccatt

SEQ ID NO: 1657183 - DNA, 15 bp, Homo sapiens
aactggatccgccat

SEQ ID NO: 1657184 - DNA, 15 bp, Homo sapiens
gaactggatccgcca

SEQ ID NO: 1657185 - DNA, 15 bp, Homo sapiens
agaactggatccgcc

SEQ ID NO: 1657186 - DNA, 15 bp, Homo sapiens
cagaactggatccgc

SEQ ID NO: 1657187 - DNA, 15 bp, Homo sapiens
acagaactggatccg

SEQ ID NO: 1657188 - DNA, 15 bp, Homo sapiens
gacagaactggatcc

SEQ ID NO: 1657189 - DNA, 15 bp, Homo sapiens
cgacagaactggatc

SEQ ID NO: 1657190 - DNA, 15 bp, Homo sapiens
gcgacagaactggat

SEQ ID NO: 1657191 - DNA, 15 bp, Homo sapiens
tgcgacagaactgga

SEQ ID NO: 1657192 - DNA, 15 bp, Homo sapiens
ctgcgacagaactgg

SEQ ID NO: 1657193 - DNA, 15 bp, Homo sapiens
actgcgacagaactg

SEQ ID NO: 1657194 - DNA, 15 bp, Homo sapiens
cactgcgacagaact

SEQ ID NO: 1657195 - DNA, 15 bp, Homo sapiens
acactgcgacagaac

SEQ ID NO: 1657196 - DNA, 15 bp, Homo sapiens
aacactgcgacagaa

SEQ ID NO: 1657197 - DNA, 15 bp, Homo sapiens
gaacactgcgacaga

SEQ ID NO: 1657198 - DNA, 15 bp, Homo sapiens
tgaacactgcgacag

SEQ ID NO: 1657199 - DNA, 15 bp, Homo sapiens
ttgaacactgcgaca

SEQ ID NO: 1657200 - DNA, 15 bp, Homo sapiens
cttgaacactgcgac

SEQ ID NO: 1657201 - DNA, 15 bp, Homo sapiens
acttgaacactgcga

SEQ ID NO: 1657202 - DNA, 15 bp, Homo sapiens
cacttgaacactgcg

SEQ ID NO: 1657203 - DNA, 15 bp, Homo sapiens
ccacttgaacactgc

SEQ ID NO: 1657204 - DNA, 15 bp, Homo sapiens
gccacttgaacactg

SEQ ID NO: 1657205 - DNA, 15 bp, Homo sapiens
cgccacttgaacact

SEQ ID NO: 1657206 - DNA, 15 bp, Homo sapiens
ccgccacttgaacac

SEQ ID NO: 1657207 - DNA, 15 bp, Homo sapiens
cccgccacttgaaca

SEQ ID NO: 1657208 - DNA, 15 bp, Homo sapiens
tcccgccacttgaac

SEQ ID NO: 1657209 - DNA, 15 bp, Homo sapiens
ttcccgccacttgaa

SEQ ID NO: 1657210 - DNA, 15 bp, Homo sapiens
cttcccgccacttga

SEQ ID NO: 1657211 - DNA, 15 bp, Homo sapiens
ccttcccgccacttg

SEQ ID NO: 1657212 - DNA, 15 bp, Homo sapiens
gccttcccgccactt

SEQ ID NO: 1657213 - DNA, 15 bp, Homo sapiens
ggccttcccgccact

SEQ ID NO: 1657214 - DNA, 15 bp, Homo sapiens
tggccttcccgccac

SEQ ID NO: 1657215 - DNA, 15 bp, Homo sapiens
gtggccttcccgcca

SEQ ID NO: 1657216 - DNA, 15 bp, Homo sapiens
tgtggccttcccgcc

SEQ ID NO: 1657217 - DNA, 15 bp, Homo sapiens
atgtggccttcccgc

SEQ ID NO: 1657218 - DNA, 15 bp, Homo sapiens
gatgtggccttcccg

SEQ ID NO: 1657219 - DNA, 15 bp, Homo sapiens
tgatgtggccttccc

SEQ ID NO: 1657220 - DNA, 15 bp, Homo sapiens
atgatgtggccttcc

SEQ ID NO: 1657221 - DNA, 15 bp, Homo sapiens
catgatgtggccttc

SEQ ID NO: 1657222 - DNA, 15 bp, Homo sapiens
tcatgatgtggcctt

SEQ ID NO: 1657223 - DNA, 15 bp, Homo sapiens
atcatgatgtggcct

SEQ ID NO: 1657224 - DNA, 15 bp, Homo sapiens
catcatgatgtggcc

SEQ ID NO: 1657225 - DNA, 15 bp, Homo sapiens
ccatcatgatgtggc

SEQ ID NO: 1657226 - DNA, 15 bp, Homo sapiens
cccatcatgatgtgg

SEQ ID NO: 1657227 - DNA, 15 bp, Homo sapiens
gcccatcatgatgtg

SEQ ID NO: 1657228 - DNA, 15 bp, Homo sapiens
cgcccatcatgatgt

SEQ ID NO: 1657229 - DNA, 15 bp, Homo sapiens
tcgcccatcatgatg

SEQ ID NO: 1657230 - DNA, 15 bp, Homo sapiens
ctcgcccatcatgat

SEQ ID NO: 1657231 - DNA, 15 bp, Homo sapiens
cctcgcccatcatga

SEQ ID NO: 1657232 - DNA, 15 bp, Homo sapiens
gcctcgcccatcatg

SEQ ID NO: 1657233 - DNA, 15 bp, Homo sapiens
agcctcgcccatcat

SEQ ID NO: 1657234 - DNA, 15 bp, Homo sapiens
aagcctcgcccatca

SEQ ID NO: 1657235 - DNA, 15 bp, Homo sapiens
aaagcctcgcccatc

SEQ ID NO: 1657236 - DNA, 15 bp, Homo sapiens
caaagcctcgcccat

SEQ ID NO: 1657237 - DNA, 15 bp, Homo sapiens
acaaagcctcgccca

SEQ ID NO: 1657238 - DNA, 15 bp, Homo sapiens
aacaaagcctcgccc

SEQ ID NO: 1657239 - DNA, 15 bp, Homo sapiens
taacaaagcctcgcc

SEQ ID NO: 1657240 - DNA, 15 bp, Homo sapiens
ttaacaaagcctcgc

SEQ ID NO: 1657241 - DNA, 15 bp, Homo sapiens
cttaacaaagcctcg

SEQ ID NO: 1657242 - DNA, 15 bp, Homo sapiens
acttaacaaagcctc

SEQ ID NO: 1657243 - DNA, 15 bp, Homo sapiens
cacttaacaaagcct

SEQ ID NO: 1657244 - DNA, 15 bp, Homo sapiens
ccacttaacaaagcc

SEQ ID NO: 1657245 - DNA, 15 bp, Homo sapiens
accacttaacaaagc

SEQ ID NO: 1657246 - DNA, 15 bp, Homo sapiens
aaccacttaacaaag

SEQ ID NO: 1657247 - DNA, 15 bp, Homo sapiens
taaccacttaacaaa

SEQ ID NO: 1657248 - DNA, 15 bp, Homo sapiens
ctaaccacttaacaa

SEQ ID NO: 1657249 - DNA, 15 bp, Homo sapiens
gctaaccacttaaca

SEQ ID NO: 1657250 - DNA, 15 bp, Homo sapiens
tgctaaccacttaac

SEQ ID NO: 1657251 - DNA, 15 bp, Homo sapiens
atgctaaccacttaa

SEQ ID NO: 1657252 - DNA, 15 bp, Homo sapiens
catgctaaccactta

SEQ ID NO: 1657253 - DNA, 15 bp, Homo sapiens
ccatgctaaccactt

SEQ ID NO: 1657254 - DNA, 15 bp, Homo sapiens
accatgctaaccact

SEQ ID NO: 1657255 - DNA, 15 bp, Homo sapiens
caccatgctaaccac

SEQ ID NO: 1657256 - DNA, 15 bp, Homo sapiens
ccaccatgctaacca

SEQ ID NO: 1657257 - DNA, 15 bp, Homo sapiens
accaccatgctaacc

SEQ ID NO: 1657258 - DNA, 15 bp, Homo sapiens
caccaccatgctaac

SEQ ID NO: 1657259 - DNA, 15 bp, Homo sapiens
ccaccaccatgctaa

SEQ ID NO: 1657260 - DNA, 15 bp, Homo sapiens
tccaccaccatgcta

SEQ ID NO: 1657261 - DNA, 15 bp, Homo sapiens
gtccaccaccatgct

SEQ ID NO: 1657262 - DNA, 15 bp, Homo sapiens
tgtccaccaccatgc

SEQ ID NO: 1657263 - DNA, 15 bp, Homo sapiens
atgtccaccaccatg

SEQ ID NO: 1657264 - DNA, 15 bp, Homo sapiens
catgtccaccaccat

SEQ ID NO: 1657265 - DNA, 15 bp, Homo sapiens
acatgtccaccacca

SEQ ID NO: 1657266 - DNA, 15 bp, Homo sapiens
cacatgtccaccacc

SEQ ID NO: 1657267 - DNA, 15 bp, Homo sapiens
gcacatgtccaccac

SEQ ID NO: 1657268 - DNA, 15 bp, Homo sapiens
atcttttcctgtgtg

SEQ ID NO: 1657269 - DNA, 15 bp, Homo sapiens
catcttttcctgtgt

SEQ ID NO: 1657270 - DNA, 15 bp, Homo sapiens
ccatcttttcctgtg

SEQ ID NO: 1657271 - DNA, 15 bp, Homo sapiens
gccatcttttcctgt

SEQ ID NO: 1657272 - DNA, 15 bp, Homo sapiens
cgccatcttttcctg

SEQ ID NO: 1657273 - DNA, 15 bp, Homo sapiens
ccgccatcttttcct

SEQ ID NO: 1657274 - DNA, 15 bp, Homo sapiens
gccgccatcttttcc

SEQ ID NO: 1657275 - DNA, 15 bp, Homo sapiens
agccgccatcttttc

SEQ ID NO: 1657276 - DNA, 15 bp, Homo sapiens
cagccgccatctttt

SEQ ID NO: 1657277 - DNA, 15 bp, Homo sapiens
tcagccgccatcttt

SEQ ID NO: 1657278 - DNA, 15 bp, Homo sapiens
ttcagccgccatctt

SEQ ID NO: 1657279 - DNA, 15 bp, Homo sapiens
cttcagccgccatct

SEQ ID NO: 1657280 - DNA, 15 bp, Homo sapiens
ccttcagccgccatc

SEQ ID NO: 1657281 - DNA, 15 bp, Homo sapiens
accttcagccgccat

SEQ ID NO: 1657282 - DNA, 15 bp, Homo sapiens
gaccttcagccgcca

SEQ ID NO: 1657283 - DNA, 15 bp, Homo sapiens
agaccttcagccgcc

SEQ ID NO: 1657284 - DNA, 15 bp, Homo sapiens
aagaccttcagccgc

SEQ ID NO: 1657285 - DNA, 15 bp, Homo sapiens
caagaccttcagccg

SEQ ID NO: 1657286 - DNA, 15 bp, Homo sapiens
gcaagaccttcagcc

SEQ ID NO: 1657287 - DNA, 15 bp, Homo sapiens
ggcaagaccttcagc

SEQ ID NO: 1657288 - DNA, 15 bp, Homo sapiens
cggcaagaccttcag

SEQ ID NO: 1657289 - DNA, 15 bp, Homo sapiens
gcggcaagaccttca

SEQ ID NO: 1657290 - DNA, 15 bp, Homo sapiens
tgcggcaagaccttc

SEQ ID NO: 1657291 - DNA, 15 bp, Homo sapiens
ctgcggcaagacctt

SEQ ID NO: 1657292 - DNA, 15 bp, Homo sapiens
actgcggcaagacct

SEQ ID NO: 1657293 - DNA, 15 bp, Homo sapiens
cactgcggcaagacc

SEQ ID NO: 1657294 - DNA, 15 bp, Homo sapiens
acactgcggcaagac

SEQ ID NO: 1657295 - DNA, 15 bp, Homo sapiens
tacactgcggcaaga

SEQ ID NO: 1657296 - DNA, 15 bp, Homo sapiens
ttacactgcggcaag

SEQ ID NO: 1657297 - DNA, 15 bp, Homo sapiens
tttacactgcggcaa

SEQ ID NO: 1657298 - DNA, 15 bp, Homo sapiens
ttttacactgcggca

SEQ ID NO: 1657299 - DNA, 15 bp, Homo sapiens
gttttacactgcggc

SEQ ID NO: 1657300 - DNA, 15 bp, Homo sapiens
tgttttacactgcgg

SEQ ID NO: 1657301 - DNA, 15 bp, Homo sapiens
atgttttacactgcg

SEQ ID NO: 1657302 - DNA, 15 bp, Homo sapiens
catgttttacactgc

SEQ ID NO: 1657303 - DNA, 15 bp, Homo sapiens
ccatgttttacactg

SEQ ID NO: 1657304 - DNA, 15 bp, Homo sapiens
gccatgttttacact

SEQ ID NO: 1657305 - DNA, 15 bp, Homo sapiens
cgccatgttttacac

SEQ ID NO: 1657306 - DNA, 15 bp, Homo sapiens
ccgccatgttttaca

SEQ ID NO: 1657307 - DNA, 15 bp, Homo sapiens
cccgccatgttttac

SEQ ID NO: 1657308 - DNA, 15 bp, Homo sapiens
gcccgccatgtttta

SEQ ID NO: 1657309 - DNA, 15 bp, Homo sapiens
ggcccgccatgtttt

SEQ ID NO: 1657310 - DNA, 15 bp, Homo sapiens
aggcccgccatgttt

SEQ ID NO: 1657311 - DNA, 15 bp, Homo sapiens
gaggcccgccatgtt

SEQ ID NO: 1657312 - DNA, 15 bp, Homo sapiens
agaggcccgccatgt

SEQ ID NO: 1657313 - DNA, 15 bp, Homo sapiens
aagaggcccgccatg

SEQ ID NO: 1657314 - DNA, 15 bp, Homo sapiens
aaagaggcccgccat

SEQ ID NO: 1657315 - DNA, 15 bp, Homo sapiens
caaagaggcccgcca

SEQ ID NO: 1657316 - DNA, 15 bp, Homo sapiens
acaaagaggcccgcc

SEQ ID NO: 1657317 - DNA, 15 bp, Homo sapiens
gacaaagaggcccgc

SEQ ID NO: 1657318 - DNA, 15 bp, Homo sapiens
agacaaagaggcccg

SEQ ID NO: 1657319 - DNA, 15 bp, Homo sapiens
aagacaaagaggccc

SEQ ID NO: 1657320 - DNA, 15 bp, Homo sapiens
aaagacaaagaggcc

SEQ ID NO: 1657321 - DNA, 15 bp, Homo sapiens
caaagacaaagaggc

SEQ ID NO: 1657322 - DNA, 15 bp, Homo sapiens
gcaaagacaaagagg

SEQ ID NO: 1657323 - DNA, 15 bp, Homo sapiens
agcaaagacaaagag

SEQ ID NO: 1657324 - DNA, 15 bp, Homo sapiens
cagcaaagacaaaga

SEQ ID NO: 1657325 - DNA, 15 bp, Homo sapiens
acagcaaagacaaag

SEQ ID NO: 1657326 - DNA, 15 bp, Homo sapiens
cacagcaaagacaaa

SEQ ID NO: 1657327 - DNA, 15 bp, Homo sapiens
acacagcaaagacaa

SEQ ID NO: 1657328 - DNA, 15 bp, Homo sapiens
gcacacagcaaagac

SEQ ID NO: 1657329 - DNA, 15 bp, Homo sapiens
agcacacagcaaaga

SEQ ID NO: 1657330 - DNA, 15 bp, Homo sapiens
aagcacacagcaaag

SEQ ID NO: 1657331 - DNA, 15 bp, Homo sapiens
aaagcacacagcaaa

SEQ ID NO: 1657332 - DNA, 15 bp, Homo sapiens
aaaagcacacagcaa

SEQ ID NO: 1657333 - DNA, 15 bp, Homo sapiens
gaaaagcacacagca

SEQ ID NO: 1657334 - DNA, 15 bp, Homo sapiens
cgaaaagcacacagc

SEQ ID NO: 1657335 - DNA, 15 bp, Homo sapiens
acgaaaagcacacag

SEQ ID NO: 1657336 - DNA, 15 bp, Homo sapiens
cacgaaaagcacaca

SEQ ID NO: 1657337 - DNA, 15 bp, Homo sapiens
acacgaaaagcacac

SEQ ID NO: 1657338 - DNA, 15 bp, Homo sapiens
aacacgaaaagcaca

SEQ ID NO: 1657339 - DNA, 15 bp, Homo sapiens
caacacgaaaagcac

SEQ ID NO: 1657340 - DNA, 15 bp, Homo sapiens
ccaacacgaaaagca

SEQ ID NO: 1657341 - DNA, 15 bp, Homo sapiens
cccaacacgaaaagc

SEQ ID NO: 1657342 - DNA, 15 bp, Homo sapiens
acccaacacgaaaag

SEQ ID NO: 1657343 - DNA, 15 bp, Homo sapiens
aacccaacacgaaaa

SEQ ID NO: 1657344 - DNA, 15 bp, Homo sapiens
aaacccaacacgaaa

SEQ ID NO: 1657345 - DNA, 15 bp, Homo sapiens
aaaacccaacacgaa

SEQ ID NO: 1657346 - DNA, 15 bp, Homo sapiens
caaaacccaacacga

SEQ ID NO: 1657347 - DNA, 15 bp, Homo sapiens
gcaaaacccaacacg

SEQ ID NO: 1657348 - DNA, 15 bp, Homo sapiens
ggcaaaacccaacac

SEQ ID NO: 1657349 - DNA, 15 bp, Homo sapiens
cggcaaaacccaaca

SEQ ID NO: 1657350 - DNA, 15 bp, Homo sapiens
gcggcaaaacccaac

SEQ ID NO: 1657351 - DNA, 15 bp, Homo sapiens
tgcggcaaaacccaa

SEQ ID NO: 1657352 - DNA, 15 bp, Homo sapiens
ctgcggcaaaaccca

SEQ ID NO: 1657353 - DNA, 15 bp, Homo sapiens
cctgcggcaaaaccc

SEQ ID NO: 1657354 - DNA, 15 bp, Homo sapiens
ccctgcggcaaaacc

SEQ ID NO: 1657355 - DNA, 15 bp, Homo sapiens
tccctgcggcaaaac

SEQ ID NO: 1657356 - DNA, 15 bp, Homo sapiens
gtccctgcggcaaaa

SEQ ID NO: 1657357 - DNA, 15 bp, Homo sapiens
tgtccctgcggcaaa

SEQ ID NO: 1657358 - DNA, 15 bp, Homo sapiens
ttgtccctgcggcaa

SEQ ID NO: 1657359 - DNA, 15 bp, Homo sapiens
attgtccctgcggca

SEQ ID NO: 1657360 - DNA, 15 bp, Homo sapiens
tattgtccctgcggc

SEQ ID NO: 1657361 - DNA, 15 bp, Homo sapiens
atattgtccctgcgg

SEQ ID NO: 1657362 - DNA, 15 bp, Homo sapiens
catattgtccctgcg

SEQ ID NO: 1657363 - DNA, 15 bp, Homo sapiens
ccatattgtccctgc

SEQ ID NO: 1657364 - DNA, 15 bp, Homo sapiens
gccatattgtccctg

SEQ ID NO: 1657365 - DNA, 15 bp, Homo sapiens
tgccatattgtccct

SEQ ID NO: 1657366 - DNA, 15 bp, Homo sapiens
ctgccatattgtccc

SEQ ID NO: 1657367 - DNA, 15 bp, Homo sapiens
cctgccatattgtcc

SEQ ID NO: 1657368 - DNA, 15 bp, Homo sapiens
gcctgccatattgtc

SEQ ID NO: 1657369 - DNA, 15 bp, Homo sapiens
cgcctgccatattgt

SEQ ID NO: 1657370 - DNA, 15 bp, Homo sapiens
acgcctgccatattg

SEQ ID NO: 1657371 - DNA, 15 bp, Homo sapiens
aacgcctgccatatt

SEQ ID NO: 1657372 - DNA, 15 bp, Homo sapiens
caacgcctgccatat

SEQ ID NO: 1657373 - DNA, 15 bp, Homo sapiens
acaacgcctgccata

SEQ ID NO: 1657374 - DNA, 15 bp, Homo sapiens
gacaacgcctgccat

SEQ ID NO: 1657375 - DNA, 15 bp, Homo sapiens
tgacaacgcctgcca

SEQ ID NO: 1657376 - DNA, 15 bp, Homo sapiens
atgacaacgcctgcc

SEQ ID NO: 1657377 - DNA, 15 bp, Homo sapiens
tatgacaacgcctgc

SEQ ID NO: 1657378 - DNA, 15 bp, Homo sapiens
atatgacaacgcctg

SEQ ID NO: 1657379 - DNA, 15 bp, Homo sapiens
catatgacaacgcct

SEQ ID NO: 1657380 - DNA, 15 bp, Homo sapiens
acatatgacaacgcc

SEQ ID NO: 1657381 - DNA, 15 bp, Homo sapiens
tacatatgacaacgc

SEQ ID NO: 1657382 - DNA, 15 bp, Homo sapiens
atacatatgacaacg

SEQ ID NO: 1657383 - DNA, 15 bp, Homo sapiens
tatacatatgacaac

SEQ ID NO: 1657384 - DNA, 15 bp, Homo sapiens
atatacatatgacaa

SEQ ID NO: 1657385 - DNA, 15 bp, Homo sapiens
gatatacatatgaca

SEQ ID NO: 1657386 - DNA, 15 bp, Homo sapiens
tgatatacatatgac

SEQ ID NO: 1657387 - DNA, 15 bp, Homo sapiens
atgatatacatatga

SEQ ID NO: 1657388 - DNA, 15 bp, Homo sapiens
catgatatacatatg

SEQ ID NO: 1657389 - DNA, 15 bp, Homo sapiens
ccatgatatacatat

SEQ ID NO: 1657390 - DNA, 15 bp, Homo sapiens
gccatgatatacata

SEQ ID NO: 1657391 - DNA, 15 bp, Homo sapiens
agccatgatatacat

SEQ ID NO: 1657392 - DNA, 15 bp, Homo sapiens
aagccatgatataca

SEQ ID NO: 1657393 - DNA, 15 bp, Homo sapiens
aaagccatgatatac

SEQ ID NO: 1657394 - DNA, 15 bp, Homo sapiens
aaaagccatgatata

SEQ ID NO: 1657395 - DNA, 15 bp, Homo sapiens
caaaagccatgatat

SEQ ID NO: 1657396 - DNA, 15 bp, Homo sapiens
acaaaagccatgata

SEQ ID NO: 1657397 - DNA, 15 bp, Homo sapiens
gacaaaagccatgat

SEQ ID NO: 1657398 - DNA, 15 bp, Homo sapiens
tgacaaaagccatga

SEQ ID NO: 1657399 - DNA, 15 bp, Homo sapiens
gtgacaaaagccatg

SEQ ID NO: 1657400 - DNA, 15 bp, Homo sapiens
cgtgacaaaagccat

SEQ ID NO: 1657401 - DNA, 15 bp, Homo sapiens
acgtgacaaaagcca

SEQ ID NO: 1657402 - DNA, 15 bp, Homo sapiens
cacgtgacaaaagcc

SEQ ID NO: 1657403 - DNA, 15 bp, Homo sapiens
ccacgtgacaaaagc

SEQ ID NO: 1657404 - DNA, 15 bp, Homo sapiens
tccacgtgacaaaag

SEQ ID NO: 1657405 - DNA, 15 bp, Homo sapiens
gtccacgtgacaaaa

SEQ ID NO: 1657406 - DNA, 15 bp, Homo sapiens
tgtccacgtgacaaa

SEQ ID NO: 1657407 - DNA, 15 bp, Homo sapiens
atgtccacgtgacaa

SEQ ID NO: 1657408 - DNA, 15 bp, Homo sapiens
gatgtccacgtgaca

SEQ ID NO: 1657409 - DNA, 15 bp, Homo sapiens
tgatgtccacgtgac

SEQ ID NO: 1657410 - DNA, 15 bp, Homo sapiens
atgatgtccacgtga

SEQ ID NO: 1657411 - DNA, 15 bp, Homo sapiens
catgatgtccacgtg

SEQ ID NO: 1657412 - DNA, 15 bp, Homo sapiens
ccatgatgtccacgt

SEQ ID NO: 1657413 - DNA, 15 bp, Homo sapiens
gccatgatgtccacg

SEQ ID NO: 1657414 - DNA, 15 bp, Homo sapiens
cgccatgatgtccac

SEQ ID NO: 1657415 - DNA, 15 bp, Homo sapiens
ccgccatgatgtcca

SEQ ID NO: 1657416 - DNA, 15 bp, Homo sapiens
cccgccatgatgtcc

SEQ ID NO: 1657417 - DNA, 15 bp, Homo sapiens
gcccgccatgatgtc

SEQ ID NO: 1657418 - DNA, 15 bp, Homo sapiens
agcccgccatgatgt

SEQ ID NO: 1657419 - DNA, 15 bp, Homo sapiens
aagcccgccatgatg

SEQ ID NO: 1657420 - DNA, 15 bp, Homo sapiens
caagcccgccatgat

SEQ ID NO: 1657421 - DNA, 15 bp, Homo sapiens
gcaagcccgccatga

SEQ ID NO: 1657422 - DNA, 15 bp, Homo sapiens
ggcaagcccgccatg

SEQ ID NO: 1657423 - DNA, 15 bp, Homo sapiens
cggcaagcccgccat

SEQ ID NO: 1657424 - DNA, 15 bp, Homo sapiens
tatgcagcaatccag

SEQ ID NO: 1657425 - DNA, 15 bp, Homo sapiens
ttatgcagcaatcca

SEQ ID NO: 1657426 - DNA, 15 bp, Homo sapiens
gttatgcagcaatcc

SEQ ID NO: 1657427 - DNA, 15 bp, Homo sapiens
ggttatgcagcaatc

SEQ ID NO: 1657428 - DNA, 15 bp, Homo sapiens
gggttatgcagcaat

SEQ ID NO: 1657429 - DNA, 15 bp, Homo sapiens
tgggttatgcagcaa

SEQ ID NO: 1657430 - DNA, 15 bp, Homo sapiens
ttgggttatgcagca

SEQ ID NO: 1657431 - DNA, 15 bp, Homo sapiens
gttgggttatgcagc

SEQ ID NO: 1657432 - DNA, 15 bp, Homo sapiens
ggttgggttatgcag

SEQ ID NO: 1657433 - DNA, 15 bp, Homo sapiens
tggttgggttatgca

SEQ ID NO: 1657434 - DNA, 15 bp, Homo sapiens
ttggttgggttatgc

SEQ ID NO: 1657435 - DNA, 15 bp, Homo sapiens
attggttgggttatg

SEQ ID NO: 1657436 - DNA, 15 bp, Homo sapiens
aattggttgggttat

SEQ ID NO: 1657437 - DNA, 15 bp, Homo sapiens
taattggttgggtta

SEQ ID NO: 1657438 - DNA, 15 bp, Homo sapiens
ctaattggttgggtt

SEQ ID NO: 1657439 - DNA, 15 bp, Homo sapiens
tctaattggttgggt

SEQ ID NO: 1657440 - DNA, 15 bp, Homo sapiens
ttctaattggttggg

SEQ ID NO: 1657441 - DNA, 15 bp, Homo sapiens
tttctaattggttgg

SEQ ID NO: 1657442 - DNA, 15 bp, Homo sapiens
atttctaattggttg

SEQ ID NO: 1657443 - DNA, 15 bp, Homo sapiens
catttctaattggtt

SEQ ID NO: 1657444 - DNA, 15 bp, Homo sapiens
ccatttctaattggt

SEQ ID NO: 1657445 - DNA, 15 bp, Homo sapiens
cccatttctaattgg

SEQ ID NO: 1657446 - DNA, 15 bp, Homo sapiens
ccccatttctaattg

SEQ ID NO: 1657447 - DNA, 15 bp, Homo sapiens
cccccatttctaatt

SEQ ID NO: 1657448 - DNA, 15 bp, Homo sapiens
acccccatttctaat

SEQ ID NO: 1657449 - DNA, 15 bp, Homo sapiens
cacccccatttctaa

SEQ ID NO: 1657450 - DNA, 15 bp, Homo sapiens
ccacccccatttcta

SEQ ID NO: 1657451 - DNA, 15 bp, Homo sapiens
tccacccccatttct

SEQ ID NO: 1657452 - DNA, 15 bp, Homo sapiens
ttccacccccatttc

SEQ ID NO: 1657453 - DNA, 15 bp, Homo sapiens
attccacccccattt

SEQ ID NO: 1657454 - DNA, 15 bp, Homo sapiens
aattccacccccatt

SEQ ID NO: 1657455 - DNA, 15 bp, Homo sapiens
caattccacccccat

SEQ ID NO: 1657456 - DNA, 15 bp, Homo sapiens
tcaattccaccccca

SEQ ID NO: 1657457 - DNA, 15 bp, Homo sapiens
atcaattccaccccc

SEQ ID NO: 1657458 - DNA, 15 bp, Homo sapiens
gatcaattccacccc

SEQ ID NO: 1657459 - DNA, 15 bp, Homo sapiens
tgatcaattccaccc

SEQ ID NO: 1657460 - DNA, 15 bp, Homo sapiens
gtgatcaattccacc

SEQ ID NO: 1657461 - DNA, 15 bp, Homo sapiens
tgtgatcaattccac

SEQ ID NO: 1657462 - DNA, 15 bp, Homo sapiens
ctgtgatcaattcca

SEQ ID NO: 1657463 - DNA, 15 bp, Homo sapiens
gctgtgatcaattcc

SEQ ID NO: 1657464 - DNA, 15 bp, Homo sapiens
ggctgtgatcaattc

SEQ ID NO: 1657465 - DNA, 15 bp, Homo sapiens
tggctgtgatcaatt

SEQ ID NO: 1657466 - DNA, 15 bp, Homo sapiens
ttggctgtgatcaat

SEQ ID NO: 1657467 - DNA, 15 bp, Homo sapiens
attggctgtgatcaa

SEQ ID NO: 1657468 - DNA, 15 bp, Homo sapiens
aattggctgtgatca

SEQ ID NO: 1657469 - DNA, 15 bp, Homo sapiens
taattggctgtgatc

SEQ ID NO: 1657470 - DNA, 15 bp, Homo sapiens
ctaattggctgtgat

SEQ ID NO: 1657471 - DNA, 15 bp, Homo sapiens
tctaattggctgtga

SEQ ID NO: 1657472 - DNA, 15 bp, Homo sapiens
ctctaattggctgtg

SEQ ID NO: 1657473 - DNA, 15 bp, Homo sapiens
gctctaattggctgt

SEQ ID NO: 1657474 - DNA, 15 bp, Homo sapiens
tgctctaattggctg

SEQ ID NO: 1657475 - DNA, 15 bp, Homo sapiens
ctgctctaattggct

SEQ ID NO: 1657476 - DNA, 15 bp, Homo sapiens
tctgctctaattggc

SEQ ID NO: 1657477 - DNA, 15 bp, Homo sapiens
ttctgctctaattgg

SEQ ID NO: 1657478 - DNA, 15 bp, Homo sapiens
cttctgctctaattg

SEQ ID NO: 1657479 - DNA, 15 bp, Homo sapiens
tcttctgctctaatt

SEQ ID NO: 1657480 - DNA, 15 bp, Homo sapiens
atcttctgctctaat

SEQ ID NO: 1657481 - DNA, 15 bp, Homo sapiens
catcttctgctctaa

SEQ ID NO: 1657482 - DNA, 15 bp, Homo sapiens
ccatcttctgctcta

SEQ ID NO: 1657483 - DNA, 15 bp, Homo sapiens
tccatcttctgctct

SEQ ID NO: 1657484 - DNA, 15 bp, Homo sapiens
attccatcttctgct

SEQ ID NO: 1657485 - DNA, 15 bp, Homo sapiens
aattccatcttctgc

SEQ ID NO: 1657486 - DNA, 15 bp, Homo sapiens
taattccatcttctg

SEQ ID NO: 1657487 - DNA, 15 bp, Homo sapiens
ctaattccatcttct

SEQ ID NO: 1657488 - DNA, 15 bp, Homo sapiens
tctaattccatcttc

SEQ ID NO: 1657489 - DNA, 15 bp, Homo sapiens
gtctaattccatctt

SEQ ID NO: 1657490 - DNA, 15 bp, Homo sapiens
agtctaattccatct

SEQ ID NO: 1657491 - DNA, 15 bp, Homo sapiens
cagtctaattccatc

SEQ ID NO: 1657492 - DNA, 15 bp, Homo sapiens
tcagtctaattccat

SEQ ID NO: 1657493 - DNA, 15 bp, Homo sapiens
atcagtctaattcca

SEQ ID NO: 1657494 - DNA, 15 bp, Homo sapiens
catcagtctaattcc

SEQ ID NO: 1657495 - DNA, 15 bp, Homo sapiens
tcatcagtctaattc

SEQ ID NO: 1657496 - DNA, 15 bp, Homo sapiens
gtcatcagtctaatt

SEQ ID NO: 1657497 - DNA, 15 bp, Homo sapiens
tgtcatcagtctaat

SEQ ID NO: 1657498 - DNA, 15 bp, Homo sapiens
gtgtcatcagtctaa

SEQ ID NO: 1657499 - DNA, 15 bp, Homo sapiens
tgtgtcatcagtcta

SEQ ID NO: 1657500 - DNA, 15 bp, Homo sapiens
gtgtgtcatcagtct

SEQ ID NO: 1657501 - DNA, 15 bp, Homo sapiens
agtgtgtcatcagtc

SEQ ID NO: 1657502 - DNA, 15 bp, Homo sapiens
cagtgtgtcatcagt

SEQ ID NO: 1657503 - DNA, 15 bp, Homo sapiens
acagtgtgtcatcag

SEQ ID NO: 1657504 - DNA, 15 bp, Homo sapiens
gacagtgtgtcatca

SEQ ID NO: 1657505 - DNA, 15 bp, Homo sapiens
ggacagtgtgtcatc

SEQ ID NO: 1657506 - DNA, 15 bp, Homo sapiens
tggacagtgtgtcat

SEQ ID NO: 1657507 - DNA, 15 bp, Homo sapiens
ctggacagtgtgtca

SEQ ID NO: 1657508 - DNA, 15 bp, Homo sapiens
gctggacagtgtgtc

SEQ ID NO: 1657509 - DNA, 15 bp, Homo sapiens
agctggacagtgtgt

SEQ ID NO: 1657510 - DNA, 15 bp, Homo sapiens
tagctggacagtgtg

SEQ ID NO: 1657511 - DNA, 15 bp, Homo sapiens
gtagctggacagtgt

SEQ ID NO: 1657512 - DNA, 15 bp, Homo sapiens
agtagctggacagtg

SEQ ID NO: 1657513 - DNA, 15 bp, Homo sapiens
gagtagctggacagt

SEQ ID NO: 1657514 - DNA, 15 bp, Homo sapiens
tgagtagctggacag

SEQ ID NO: 1657515 - DNA, 15 bp, Homo sapiens
ctgagtagctggaca

SEQ ID NO: 1657516 - DNA, 15 bp, Homo sapiens
gctgagtagctggac

SEQ ID NO: 1657517 - DNA, 15 bp, Homo sapiens
cgctgagtagctgga

SEQ ID NO: 1657518 - DNA, 15 bp, Homo sapiens
tcgctgagtagctgg

SEQ ID NO: 1657519 - DNA, 15 bp, Homo sapiens
ttcgctgagtagctg

SEQ ID NO: 1657520 - DNA, 15 bp, Homo sapiens
cttcgctgagtagct

SEQ ID NO: 1657521 - DNA, 15 bp, Homo sapiens
tcttcgctgagtagc

SEQ ID NO: 1657522 - DNA, 15 bp, Homo sapiens
gtcttcgctgagtag

SEQ ID NO: 1657523 - DNA, 15 bp, Homo sapiens
ggtcttcgctgagta

SEQ ID NO: 1657524 - DNA, 15 bp, Homo sapiens
aggtcttcgctgagt

SEQ ID NO: 1657525 - DNA, 15 bp, Homo sapiens
caggtcttcgctgag

SEQ ID NO: 1657526 - DNA, 15 bp, Homo sapiens
ccaggtcttcgctga

SEQ ID NO: 1657527 - DNA, 15 bp, Homo sapiens
cccaggtcttcgctg

SEQ ID NO: 1657528 - DNA, 15 bp, Homo sapiens
acccaggtcttcgct

SEQ ID NO: 1657529 - DNA, 15 bp, Homo sapiens
cacccaggtcttcgc

SEQ ID NO: 1657530 - DNA, 15 bp, Homo sapiens
tcacccaggtcttcg

SEQ ID NO: 1657531 - DNA, 15 bp, Homo sapiens
ttcacccaggtcttc

SEQ ID NO: 1657532 - DNA, 15 bp, Homo sapiens
attcacccaggtctt

SEQ ID NO: 1657533 - DNA, 15 bp, Homo sapiens
aattcacccaggtct

SEQ ID NO: 1657534 - DNA, 15 bp, Homo sapiens
taattcacccaggtc

SEQ ID NO: 1657535 - DNA, 15 bp, Homo sapiens
ctaattcacccaggt

SEQ ID NO: 1657536 - DNA, 15 bp, Homo sapiens
gctaattcacccagg

SEQ ID NO: 1657537 - DNA, 15 bp, Homo sapiens
tgctaattcacccag

SEQ ID NO: 1657538 - DNA, 15 bp, Homo sapiens
atgctaattcaccca

SEQ ID NO: 1657539 - DNA, 15 bp, Homo sapiens
catgctaattcaccc

SEQ ID NO: 1657540 - DNA, 15 bp, Homo sapiens
ccatgctaattcacc

SEQ ID NO: 1657541 - DNA, 15 bp, Homo sapiens
gccatgctaattcac

SEQ ID NO: 1657542 - DNA, 15 bp, Homo sapiens
tgccatgctaattca

SEQ ID NO: 1657543 - DNA, 15 bp, Homo sapiens
gtgccatgctaattc

SEQ ID NO: 1657544 - DNA, 15 bp, Homo sapiens
agtgccatgctaatt

SEQ ID NO: 1657545 - DNA, 15 bp, Homo sapiens
aagtgccatgctaat

SEQ ID NO: 1657546 - DNA, 15 bp, Homo sapiens
gaagtgccatgctaa

SEQ ID NO: 1657547 - DNA, 15 bp, Homo sapiens
cgaagtgccatgcta

SEQ ID NO: 1657548 - DNA, 15 bp, Homo sapiens
gcgaagtgccatgct

SEQ ID NO: 1657549 - DNA, 15 bp, Homo sapiens
tgcgaagtgccatgc

SEQ ID NO: 1657550 - DNA, 15 bp, Homo sapiens
ctgcgaagtgccatg

SEQ ID NO: 1657551 - DNA, 15 bp, Homo sapiens
gctgcgaagtgccat

SEQ ID NO: 1657552 - DNA, 15 bp, Homo sapiens
agctgcgaagtgcca

SEQ ID NO: 1657553 - DNA, 15 bp, Homo sapiens
cagctgcgaagtgcc

SEQ ID NO: 1657554 - DNA, 15 bp, Homo sapiens
acagctgcgaagtgc

SEQ ID NO: 1657555 - DNA, 15 bp, Homo sapiens
gacagctgcgaagtg

SEQ ID NO: 1657556 - DNA, 15 bp, Homo sapiens
agacagctgcgaagt

SEQ ID NO: 1657557 - DNA, 15 bp, Homo sapiens
aagacagctgcgaag

SEQ ID NO: 1657558 - DNA, 15 bp, Homo sapiens
aaagacagctgcgaa

SEQ ID NO: 1657559 - DNA, 15 bp, Homo sapiens
taaagacagctgcga

SEQ ID NO: 1657560 - DNA, 15 bp, Homo sapiens
ctaaagacagctgcg

SEQ ID NO: 1657561 - DNA, 15 bp, Homo sapiens
gctaaagacagctgc

SEQ ID NO: 1657562 - DNA, 15 bp, Homo sapiens
ggctaaagacagctg

SEQ ID NO: 1657563 - DNA, 15 bp, Homo sapiens
tggctaaagacagct

SEQ ID NO: 1657564 - DNA, 15 bp, Homo sapiens
ctggctaaagacagc

SEQ ID NO: 1657565 - DNA, 15 bp, Homo sapiens
actggctaaagacag

SEQ ID NO: 1657566 - DNA, 15 bp, Homo sapiens
gactggctaaagaca

SEQ ID NO: 1657567 - DNA, 15 bp, Homo sapiens
tgactggctaaagac

SEQ ID NO: 1657568 - DNA, 15 bp, Homo sapiens
ctgactggctaaaga

SEQ ID NO: 1657569 - DNA, 15 bp, Homo sapiens
cctgactggctaaag

SEQ ID NO: 1657570 - DNA, 15 bp, Homo sapiens
tcctgactggctaaa

SEQ ID NO: 1657571 - DNA, 15 bp, Homo sapiens
ctcctgactggctaa

SEQ ID NO: 1657572 - DNA, 15 bp, Homo sapiens
tctcctgactggcta

SEQ ID NO: 1657573 - DNA, 15 bp, Homo sapiens
ttctcctgactggct

SEQ ID NO: 1657574 - DNA, 15 bp, Homo sapiens
tttctcctgactggc

SEQ ID NO: 1657575 - DNA, 15 bp, Homo sapiens
ctttctcctgactgg

SEQ ID NO: 1657576 - DNA, 15 bp, Homo sapiens
tctttctcctgactg

SEQ ID NO: 1657577 - DNA, 15 bp, Homo sapiens
ttctttctcctgact

SEQ ID NO: 1657578 - DNA, 15 bp, Homo sapiens
cttctttctcctgac

SEQ ID NO: 1657579 - DNA, 15 bp, Homo sapiens
acttctttctcctga

SEQ ID NO: 1657580 - DNA, 15 bp, Homo sapiens
cacttctttctcctg

SEQ ID NO: 1657581 - DNA, 15 bp, Homo sapiens
ccacttctttctcct

SEQ ID NO: 1657582 - DNA, 15 bp, Homo sapiens
tccacttctttctcc

SEQ ID NO: 1657583 - DNA, 15 bp, Homo sapiens
ctccacttctttctc

SEQ ID NO: 1657584 - DNA, 15 bp, Homo sapiens
cctccacttctttct

SEQ ID NO: 1657585 - DNA, 15 bp, Homo sapiens
ccctccacttctttc

SEQ ID NO: 1657586 - DNA, 15 bp, Homo sapiens
cccctccacttcttt

SEQ ID NO: 1657587 - DNA, 15 bp, Homo sapiens
gcccctccacttctt

SEQ ID NO: 1657588 - DNA, 15 bp, Homo sapiens
ggcccctccacttct

SEQ ID NO: 1657589 - DNA, 15 bp, Homo sapiens
tggcccctccacttc

SEQ ID NO: 1657590 - DNA, 15 bp, Homo sapiens
gtggcccctccactt

SEQ ID NO: 1657591 - DNA, 15 bp, Homo sapiens
cgtggcccctccact

SEQ ID NO: 1657592 - DNA, 15 bp, Homo sapiens
acgtggcccctccac

SEQ ID NO: 1657593 - DNA, 15 bp, Homo sapiens
cacgtggcccctcca

SEQ ID NO: 1657594 - DNA, 15 bp, Homo sapiens
acacgtggcccctcc

SEQ ID NO: 1657595 - DNA, 15 bp, Homo sapiens
tacacgtggcccctc

SEQ ID NO: 1657596 - DNA, 15 bp, Homo sapiens
atacacgtggcccct

SEQ ID NO: 1657597 - DNA, 15 bp, Homo sapiens
catacacgtggcccc

SEQ ID NO: 1657598 - DNA, 15 bp, Homo sapiens
acatacacgtggccc

SEQ ID NO: 1657599 - DNA, 15 bp, Homo sapiens
gacatacacgtggcc

SEQ ID NO: 1657600 - DNA, 15 bp, Homo sapiens
agacatacacgtggc

SEQ ID NO: 1657601 - DNA, 15 bp, Homo sapiens
gagacatacacgtgg

SEQ ID NO: 1657602 - DNA, 15 bp, Homo sapiens
ggagacatacacgtg

SEQ ID NO: 1657603 - DNA, 15 bp, Homo sapiens
gggagacatacacgt

SEQ ID NO: 1657604 - DNA, 15 bp, Homo sapiens
tgggagacatacacg

SEQ ID NO: 1657605 - DNA, 15 bp, Homo sapiens
ctgggagacatacac

SEQ ID NO: 1657606 - DNA, 15 bp, Homo sapiens
actgggagacataca

SEQ ID NO: 1657607 - DNA, 15 bp, Homo sapiens
cactgggagacatac

SEQ ID NO: 1657608 - DNA, 15 bp, Homo sapiens
ccactgggagacata

SEQ ID NO: 1657609 - DNA, 15 bp, Homo sapiens
cccactgggagacat

SEQ ID NO: 1657610 - DNA, 15 bp, Homo sapiens
gcccactgggagaca

SEQ ID NO: 1657611 - DNA, 15 bp, Homo sapiens
cgcccactgggagac

SEQ ID NO: 1657612 - DNA, 15 bp, Homo sapiens
ccgcccactgggaga

SEQ ID NO: 1657613 - DNA, 15 bp, Homo sapiens
accgcccactgggag

SEQ ID NO: 1657614 - DNA, 15 bp, Homo sapiens
taccgcccactggga

SEQ ID NO: 1657615 - DNA, 15 bp, Homo sapiens
gtaccgcccactggg

SEQ ID NO: 1657616 - DNA, 15 bp, Homo sapiens
tgtaccgcccactgg

SEQ ID NO: 1657617 - DNA, 15 bp, Homo sapiens
gtgtaccgcccactg

SEQ ID NO: 1657618 - DNA, 15 bp, Homo sapiens
ggtgtaccgcccact

SEQ ID NO: 1657619 - DNA, 15 bp, Homo sapiens
tggtgtaccgcccac

SEQ ID NO: 1657620 - DNA, 15 bp, Homo sapiens
ctggtgtaccgccca

SEQ ID NO: 1657621 - DNA, 15 bp, Homo sapiens
cctggtgtaccgccc

SEQ ID NO: 1657622 - DNA, 15 bp, Homo sapiens
acctggtgtaccgcc

SEQ ID NO: 1657623 - DNA, 15 bp, Homo sapiens
cacctggtgtaccgc

SEQ ID NO: 1657624 - DNA, 15 bp, Homo sapiens
acacctggtgtaccg

SEQ ID NO: 1657625 - DNA, 15 bp, Homo sapiens
aacacctggtgtacc

SEQ ID NO: 1657626 - DNA, 15 bp, Homo sapiens
aaacacctggtgtac

SEQ ID NO: 1657627 - DNA, 15 bp, Homo sapiens
aaaacacctggtgta

SEQ ID NO: 1657628 - DNA, 15 bp, Homo sapiens
gaaaacacctggtgt

SEQ ID NO: 1657629 - DNA, 15 bp, Homo sapiens
tgaaaacacctggtg

SEQ ID NO: 1657630 - DNA, 15 bp, Homo sapiens
ttgaaaacacctggt

SEQ ID NO: 1657631 - DNA, 15 bp, Homo sapiens
cttgaaaacacctgg

SEQ ID NO: 1657632 - DNA, 15 bp, Homo sapiens
ccttgaaaacacctg

SEQ ID NO: 1657633 - DNA, 15 bp, Homo sapiens
accttgaaaacacct

SEQ ID NO: 1657634 - DNA, 15 bp, Homo sapiens
gaccttgaaaacacc

SEQ ID NO: 1657635 - DNA, 15 bp, Homo sapiens
agaccttgaaaacac

SEQ ID NO: 1657636 - DNA, 15 bp, Homo sapiens
aagaccttgaaaaca

SEQ ID NO: 1657637 - DNA, 15 bp, Homo sapiens
aaagaccttgaaaac

SEQ ID NO: 1657638 - DNA, 15 bp, Homo sapiens
aaaagaccttgaaaa

SEQ ID NO: 1657639 - DNA, 15 bp, Homo sapiens
gaaaagaccttgaaa

SEQ ID NO: 1657640 - DNA, 15 bp, Homo sapiens
tgaaaagaccttgaa

SEQ ID NO: 1657641 - DNA, 15 bp, Homo sapiens
ttgaaaagaccttga

SEQ ID NO: 1657642 - DNA, 15 bp, Homo sapiens
cttgaaaagaccttg

SEQ ID NO: 1657643 - DNA, 15 bp, Homo sapiens
ccttgaaaagacctt

SEQ ID NO: 1657644 - DNA, 15 bp, Homo sapiens
tccttgaaaagacct

SEQ ID NO: 1657645 - DNA, 15 bp, Homo sapiens
gtccttgaaaagacc

SEQ ID NO: 1657646 - DNA, 15 bp, Homo sapiens
tgtccttgaaaagac

SEQ ID NO: 1657647 - DNA, 15 bp, Homo sapiens
atgtccttgaaaaga

SEQ ID NO: 1657648 - DNA, 15 bp, Homo sapiens
aatgtccttgaaaag

SEQ ID NO: 1657649 - DNA, 15 bp, Homo sapiens
aaatgtccttgaaaa

SEQ ID NO: 1657650 - DNA, 15 bp, Homo sapiens
taaatgtccttgaaa

SEQ ID NO: 1657651 - DNA, 15 bp, Homo sapiens
ctaaatgtccttgaa

SEQ ID NO: 1657652 - DNA, 15 bp, Homo sapiens
gctaaatgtccttga

SEQ ID NO: 1657653 - DNA, 15 bp, Homo sapiens
ggctaaatgtccttg

SEQ ID NO: 1657654 - DNA, 15 bp, Homo sapiens
aggctaaatgtcctt

SEQ ID NO: 1657655 - DNA, 15 bp, Homo sapiens
aaggctaaatgtcct

SEQ ID NO: 1657656 - DNA, 15 bp, Homo sapiens
aaaggctaaatgtcc

SEQ ID NO: 1657657 - DNA, 15 bp, Homo sapiens
gaaaggctaaatgtc

SEQ ID NO: 1657658 - DNA, 15 bp, Homo sapiens
ggaaaggctaaatgt

SEQ ID NO: 1657659 - DNA, 15 bp, Homo sapiens
tggaaaggctaaatg

SEQ ID NO: 1657660 - DNA, 15 bp, Homo sapiens
gtggaaaggctaaat

SEQ ID NO: 1657661 - DNA, 15 bp, Homo sapiens
ggtggaaaggctaaa

SEQ ID NO: 1657662 - DNA, 15 bp, Homo sapiens
aggtggaaaggctaa

SEQ ID NO: 1657663 - DNA, 15 bp, Homo sapiens
gaggtggaaaggcta

SEQ ID NO: 1657664 - DNA, 15 bp, Homo sapiens
agaggtggaaaggct

SEQ ID NO: 1657665 - DNA, 15 bp, Homo sapiens
cagaggtggaaaggc

SEQ ID NO: 1657666 - DNA, 15 bp, Homo sapiens
acagaggtggaaagg

SEQ ID NO: 1657667 - DNA, 15 bp, Homo sapiens
gacagaggtggaaag

SEQ ID NO: 1657668 - DNA, 15 bp, Homo sapiens
ggacagaggtggaaa

SEQ ID NO: 1657669 - DNA, 15 bp, Homo sapiens
gggacagaggtggaa

SEQ ID NO: 1657670 - DNA, 15 bp, Homo sapiens
ggggacagaggtgga

SEQ ID NO: 1657671 - DNA, 15 bp, Homo sapiens
aggggacagaggtgg

SEQ ID NO: 1657672 - DNA, 15 bp, Homo sapiens
gaggggacagaggtg

SEQ ID NO: 1657673 - DNA, 15 bp, Homo sapiens
agaggggacagaggt

SEQ ID NO: 1657674 - DNA, 15 bp, Homo sapiens
aagaggggacagagg

SEQ ID NO: 1657675 - DNA, 15 bp, Homo sapiens
taagaggggacagag

SEQ ID NO: 1657676 - DNA, 15 bp, Homo sapiens
ataagaggggacaga

SEQ ID NO: 1657677 - DNA, 15 bp, Homo sapiens
aataagaggggacag

SEQ ID NO: 1657678 - DNA, 15 bp, Homo sapiens
aaataagaggggaca

SEQ ID NO: 1657679 - DNA, 15 bp, Homo sapiens
caaataagaggggac

SEQ ID NO: 1657680 - DNA, 15 bp, Homo sapiens
acaaataagagggga

SEQ ID NO: 1657681 - DNA, 15 bp, Homo sapiens
gacaaataagagggg

SEQ ID NO: 1657682 - DNA, 15 bp, Homo sapiens
ggacaaataagaggg

SEQ ID NO: 1657683 - DNA, 15 bp, Homo sapiens
gggacaaataagagg

SEQ ID NO: 1657684 - DNA, 15 bp, Homo sapiens
ggggacaaataagag

SEQ ID NO: 1657685 - DNA, 15 bp, Homo sapiens
aggggacaaataaga

SEQ ID NO: 1657686 - DNA, 15 bp, Homo sapiens
gaggggacaaataag

SEQ ID NO: 1657687 - DNA, 15 bp, Homo sapiens
ggaggggacaaataa

SEQ ID NO: 1657688 - DNA, 15 bp, Homo sapiens
aggaggggacaaata

SEQ ID NO: 1657689 - DNA, 15 bp, Homo sapiens
caggaggggacaaat

SEQ ID NO: 1657690 - DNA, 15 bp, Homo sapiens
acaggaggggacaaa

SEQ ID NO: 1657691 - DNA, 15 bp, Homo sapiens
gacaggaggggacaa

SEQ ID NO: 1657692 - DNA, 15 bp, Homo sapiens
ggacaggaggggaca

SEQ ID NO: 1657693 - DNA, 15 bp, Homo sapiens
tggacaggaggggac

SEQ ID NO: 1657694 - DNA, 15 bp, Homo sapiens
ctggacaggagggga

SEQ ID NO: 1657695 - DNA, 15 bp, Homo sapiens
actggacaggagggg

SEQ ID NO: 1657696 - DNA, 15 bp, Homo sapiens
cactggacaggaggg

SEQ ID NO: 1657697 - DNA, 15 bp, Homo sapiens
gcactggacaggagg

SEQ ID NO: 1657698 - DNA, 15 bp, Homo sapiens
agcactggacaggag

SEQ ID NO: 1657699 - DNA, 15 bp, Homo sapiens
cagcactggacagga

SEQ ID NO: 1657700 - DNA, 15 bp, Homo sapiens
gcagcactggacagg

SEQ ID NO: 1657701 - DNA, 15 bp, Homo sapiens
ggcagcactggacag

SEQ ID NO: 1657702 - DNA, 15 bp, Homo sapiens
aggcagcactggaca

SEQ ID NO: 1657703 - DNA, 15 bp, Homo sapiens
gaggcagcactggac

SEQ ID NO: 1657704 - DNA, 15 bp, Homo sapiens
agaggcagcactgga

SEQ ID NO: 1657705 - DNA, 15 bp, Homo sapiens
aagaggcagcactgg

SEQ ID NO: 1657706 - DNA, 15 bp, Homo sapiens
caagaggcagcactg

SEQ ID NO: 1657707 - DNA, 15 bp, Homo sapiens
gcaagaggcagcact

SEQ ID NO: 1657708 - DNA, 15 bp, Homo sapiens
tgcaagaggcagcac

SEQ ID NO: 1657709 - DNA, 15 bp, Homo sapiens
ctgcaagaggcagca

SEQ ID NO: 1657710 - DNA, 15 bp, Homo sapiens
actgcaagaggcagc

SEQ ID NO: 1657711 - DNA, 15 bp, Homo sapiens
cactgcaagaggcag

SEQ ID NO: 1657712 - DNA, 15 bp, Homo sapiens
gcactgcaagaggca

SEQ ID NO: 1657713 - DNA, 15 bp, Homo sapiens
agcactgcaagaggc

SEQ ID NO: 1657714 - DNA, 15 bp, Homo sapiens
cagcactgcaagagg

SEQ ID NO: 1657715 - DNA, 15 bp, Homo sapiens
ccagcactgcaagag

SEQ ID NO: 1657716 - DNA, 15 bp, Homo sapiens
tccagcactgcaaga

SEQ ID NO: 1657717 - DNA, 15 bp, Homo sapiens
atccagcactgcaag

SEQ ID NO: 1657718 - DNA, 15 bp, Homo sapiens
tatccagcactgcaa

SEQ ID NO: 1657719 - DNA, 15 bp, Homo sapiens
atatccagcactgca

SEQ ID NO: 1657720 - DNA, 15 bp, Homo sapiens
gatatccagcactgc

SEQ ID NO: 1657721 - DNA, 15 bp, Homo sapiens
agatatccagcactg

SEQ ID NO: 1657722 - DNA, 15 bp, Homo sapiens
cagatatccagcact

SEQ ID NO: 1657723 - DNA, 15 bp, Homo sapiens
ccagatatccagcac

SEQ ID NO: 1657724 - DNA, 15 bp, Homo sapiens
gccagatatccagca

SEQ ID NO: 1657725 - DNA, 15 bp, Homo sapiens
agccagatatccagc

SEQ ID NO: 1657726 - DNA, 15 bp, Homo sapiens
cagccagatatccag

SEQ ID NO: 1657727 - DNA, 15 bp, Homo sapiens
acagccagatatcca

SEQ ID NO: 1657728 - DNA, 15 bp, Homo sapiens
cacagccagatatcc

SEQ ID NO: 1657729 - DNA, 15 bp, Homo sapiens
acacagccagatatc

SEQ ID NO: 1657730 - DNA, 15 bp, Homo sapiens
cacacagccagatat

SEQ ID NO: 1657731 - DNA, 15 bp, Homo sapiens
ccacacagccagata

SEQ ID NO: 1657732 - DNA, 15 bp, Homo sapiens
accacacagccagat

SEQ ID NO: 1657733 - DNA, 15 bp, Homo sapiens
gaccacacagccaga

SEQ ID NO: 1657734 - DNA, 15 bp, Homo sapiens
agaccacacagccag

SEQ ID NO: 1657735 - DNA, 15 bp, Homo sapiens
cagaccacacagcca

SEQ ID NO: 1657736 - DNA, 15 bp, Homo sapiens
tcagaccacacagcc

SEQ ID NO: 1657737 - DNA, 15 bp, Homo sapiens
ttcagaccacacagc

SEQ ID NO: 1657738 - DNA, 15 bp, Homo sapiens
gttcagaccacacag

SEQ ID NO: 1657739 - DNA, 15 bp, Homo sapiens
ggttcagaccacaca

SEQ ID NO: 1657740 - DNA, 15 bp, Homo sapiens
aggttcagaccacac

SEQ ID NO: 1657741 - DNA, 15 bp, Homo sapiens
gaggttcagaccaca

SEQ ID NO: 1657742 - DNA, 15 bp, Homo sapiens
ggaggttcagaccac

SEQ ID NO: 1657743 - DNA, 15 bp, Homo sapiens
gggaggttcagacca

SEQ ID NO: 1657744 - DNA, 15 bp, Homo sapiens
agggaggttcagacc

SEQ ID NO: 1657745 - DNA, 15 bp, Homo sapiens
gagggaggttcagac

SEQ ID NO: 1657746 - DNA, 15 bp, Homo sapiens
ggagggaggttcaga

SEQ ID NO: 1657747 - DNA, 15 bp, Homo sapiens
tggagggaggttcag

SEQ ID NO: 1657748 - DNA, 15 bp, Homo sapiens
atggagggaggttca

SEQ ID NO: 1657749 - DNA, 15 bp, Homo sapiens
aatggagggaggttc

SEQ ID NO: 1657750 - DNA, 15 bp, Homo sapiens
gaatggagggaggtt

SEQ ID NO: 1657751 - DNA, 15 bp, Homo sapiens
ggaatggagggaggt

SEQ ID NO: 1657752 - DNA, 15 bp, Homo sapiens
aggaatggagggagg

SEQ ID NO: 1657753 - DNA, 15 bp, Homo sapiens
gaggaatggagggag

SEQ ID NO: 1657754 - DNA, 15 bp, Homo sapiens
agaggaatggaggga

SEQ ID NO: 1657755 - DNA, 15 bp, Homo sapiens
cagaggaatggaggg

SEQ ID NO: 1657756 - DNA, 15 bp, Homo sapiens
acagaggaatggagg

SEQ ID NO: 1657757 - DNA, 15 bp, Homo sapiens
tacagaggaatggag

SEQ ID NO: 1657758 - DNA, 15 bp, Homo sapiens
atacagaggaatgga

SEQ ID NO: 1657759 - DNA, 15 bp, Homo sapiens
aatacagaggaatgg

SEQ ID NO: 1657760 - DNA, 15 bp, Homo sapiens
caatacagaggaatg

SEQ ID NO: 1657761 - DNA, 15 bp, Homo sapiens
ccaatacagaggaat

SEQ ID NO: 1657762 - DNA, 15 bp, Homo sapiens
accaatacagaggaa

SEQ ID NO: 1657763 - DNA, 15 bp, Homo sapiens
caccaatacagagga

SEQ ID NO: 1657764 - DNA, 15 bp, Homo sapiens
gcaccaatacagagg

SEQ ID NO: 1657765 - DNA, 15 bp, Homo sapiens
ggcaccaatacagag

SEQ ID NO: 1657766 - DNA, 15 bp, Homo sapiens
aggcaccaatacaga

SEQ ID NO: 1657767 - DNA, 15 bp, Homo sapiens
gaggcaccaatacag

SEQ ID NO: 1657768 - DNA, 15 bp, Homo sapiens
tgaggcaccaataca

SEQ ID NO: 1657769 - DNA, 15 bp, Homo sapiens
gtgaggcaccaatac

SEQ ID NO: 1657770 - DNA, 15 bp, Homo sapiens
ggtgaggcaccaata

SEQ ID NO: 1657771 - DNA, 15 bp, Homo sapiens
aggtgaggcaccaat

SEQ ID NO: 1657772 - DNA, 15 bp, Homo sapiens
taggtgaggcaccaa

SEQ ID NO: 1657773 - DNA, 15 bp, Homo sapiens
ttaggtgaggcacca

SEQ ID NO: 1657774 - DNA, 15 bp, Homo sapiens
cttaggtgaggcacc

SEQ ID NO: 1657775 - DNA, 15 bp, Homo sapiens
ccttaggtgaggcac

SEQ ID NO: 1657776 - DNA, 15 bp, Homo sapiens
gccttaggtgaggca

SEQ ID NO: 1657777 - DNA, 15 bp, Homo sapiens
agccttaggtgaggc

SEQ ID NO: 1657778 - DNA, 15 bp, Homo sapiens
tagccttaggtgagg

SEQ ID NO: 1657779 - DNA, 15 bp, Homo sapiens
ttagccttaggtgag

SEQ ID NO: 1657780 - DNA, 15 bp, Homo sapiens
cttagccttaggtga

SEQ ID NO: 1657781 - DNA, 15 bp, Homo sapiens
acttagccttaggtg

SEQ ID NO: 1657782 - DNA, 15 bp, Homo sapiens
tacttagccttaggt

SEQ ID NO: 1657783 - DNA, 15 bp, Homo sapiens
atacttagccttagg

SEQ ID NO: 1657784 - DNA, 15 bp, Homo sapiens
tatacttagccttag

SEQ ID NO: 1657785 - DNA, 15 bp, Homo sapiens
gtatacttagcctta

SEQ ID NO: 1657786 - DNA, 15 bp, Homo sapiens
ggtatacttagcctt

SEQ ID NO: 1657787 - DNA, 15 bp, Homo sapiens
aggtatacttagcct

SEQ ID NO: 1657788 - DNA, 15 bp, Homo sapiens
gaggtatacttagcc

SEQ ID NO: 1657789 - DNA, 15 bp, Homo sapiens
ggaggtatacttagc

SEQ ID NO: 1657790 - DNA, 15 bp, Homo sapiens
gggaggtatacttag

SEQ ID NO: 1657791 - DNA, 15 bp, Homo sapiens
ggggaggtatactta

SEQ ID NO: 1657792 - DNA, 15 bp, Homo sapiens
gggggaggtatactt

SEQ ID NO: 1657793 - DNA, 15 bp, Homo sapiens
ggggggaggtatact

SEQ ID NO: 1657794 - DNA, 15 bp, Homo sapiens
gggggggaggtatac

SEQ ID NO: 1657795 - DNA, 15 bp, Homo sapiens
ggggggggaggtata

SEQ ID NO: 1657796 - DNA, 15 bp, Homo sapiens
tggggggggaggtat

SEQ ID NO: 1657797 - DNA, 15 bp, Homo sapiens
gtggggggggaggta

SEQ ID NO: 1657798 - DNA, 15 bp, Homo sapiens
ggtggggggggaggt

SEQ ID NO: 1657799 - DNA, 15 bp, Homo sapiens
gggtggggggggagg

SEQ ID NO: 1657800 - DNA, 15 bp, Homo sapiens
ggggtggggggggag

SEQ ID NO: 1657801 - DNA, 15 bp, Homo sapiens
gggggtgggggggga

SEQ ID NO: 1657802 - DNA, 15 bp, Homo sapiens
ggggggtgggggggg

SEQ ID NO: 1657803 - DNA, 15 bp, Homo sapiens
tggggggtggggggg

SEQ ID NO: 1657804 - DNA, 15 bp, Homo sapiens
ttggggggtgggggg

SEQ ID NO: 1657805 - DNA, 15 bp, Homo sapiens
gttggggggtggggg

SEQ ID NO: 1657806 - DNA, 15 bp, Homo sapiens
ggttggggggtgggg

SEQ ID NO: 1657807 - DNA, 15 bp, Homo sapiens
gggttggggggtggg

SEQ ID NO: 1657808 - DNA, 15 bp, Homo sapiens
ggggttggggggtgg

SEQ ID NO: 1657809 - DNA, 15 bp, Homo sapiens
gggggttggggggtg

SEQ ID NO: 1657810 - DNA, 15 bp, Homo sapiens
ggggggttggggggt

SEQ ID NO: 1657811 - DNA, 15 bp, Homo sapiens
gggggggttgggggg

SEQ ID NO: 1657812 - DNA, 15 bp, Homo sapiens
tgggggggttggggg

SEQ ID NO: 1657813 - DNA, 15 bp, Homo sapiens
ttgggggggttgggg

SEQ ID NO: 1657814 - DNA, 15 bp, Homo sapiens
gttgggggggttggg

SEQ ID NO: 1657815 - DNA, 15 bp, Homo sapiens
agttgggggggttgg

SEQ ID NO: 1657816 - DNA, 15 bp, Homo sapiens
gagttgggggggttg

SEQ ID NO: 1657817 - DNA, 15 bp, Homo sapiens
ggagttgggggggtt

SEQ ID NO: 1657818 - DNA, 15 bp, Homo sapiens
gggagttgggggggt

SEQ ID NO: 1657819 - DNA, 15 bp, Homo sapiens
ggggagttggggggg

SEQ ID NO: 1657820 - DNA, 15 bp, Homo sapiens
tggggagttgggggg

SEQ ID NO: 1657821 - DNA, 15 bp, Homo sapiens
gtggggagttggggg

SEQ ID NO: 1657822 - DNA, 15 bp, Homo sapiens
ggtggggagttgggg

SEQ ID NO: 1657823 - DNA, 15 bp, Homo sapiens
gggtggggagttggg

SEQ ID NO: 1657824 - DNA, 15 bp, Homo sapiens
ggggtggggagttgg

SEQ ID NO: 1657825 - DNA, 15 bp, Homo sapiens
gggggtggggagttg

SEQ ID NO: 1657826 - DNA, 15 bp, Homo sapiens
tgggggtggggagtt

SEQ ID NO: 1657827 - DNA, 15 bp, Homo sapiens
gtgggggtggggagt

SEQ ID NO: 1657828 - DNA, 15 bp, Homo sapiens
ggtgggggtggggag

SEQ ID NO: 1657829 - DNA, 15 bp, Homo sapiens
gggtgggggtgggga

SEQ ID NO: 1657830 - DNA, 15 bp, Homo sapiens
ggggtgggggtgggg

SEQ ID NO: 1657831 - DNA, 15 bp, Homo sapiens
gggggtgggggtggg

SEQ ID NO: 1657832 - DNA, 15 bp, Homo sapiens
ggggggtgggggtgg

SEQ ID NO: 1657833 - DNA, 15 bp, Homo sapiens
tggggggtgggggtg

SEQ ID NO: 1657834 - DNA, 15 bp, Homo sapiens
gtggggggtgggggt

SEQ ID NO: 1657835 - DNA, 15 bp, Homo sapiens
ggtggggggtggggg

SEQ ID NO: 1657836 - DNA, 15 bp, Homo sapiens
gggtggggggtgggg

SEQ ID NO: 1657837 - DNA, 15 bp, Homo sapiens
ggggtggggggtggg

SEQ ID NO: 1657838 - DNA, 15 bp, Homo sapiens
gggggtggggggtgg

SEQ ID NO: 1657839 - DNA, 15 bp, Homo sapiens
ggggggtggggggtg

SEQ ID NO: 1657840 - DNA, 15 bp, Homo sapiens
tggggggtggggggt

SEQ ID NO: 1657841 - DNA, 15 bp, Homo sapiens
gtggggggtgggggg

SEQ ID NO: 1657842 - DNA, 15 bp, Homo sapiens
aggtggggggtgggg

SEQ ID NO: 1657843 - DNA, 15 bp, Homo sapiens
gaggtggggggtggg

SEQ ID NO: 1657844 - DNA, 15 bp, Homo sapiens
ggaggtggggggtgg

SEQ ID NO: 1657845 - DNA, 15 bp, Homo sapiens
gggaggtggggggtg

SEQ ID NO: 1657846 - DNA, 15 bp, Homo sapiens
ggggaggtggggggt

SEQ ID NO: 1657847 - DNA, 15 bp, Homo sapiens
tggggaggtgggggg

SEQ ID NO: 1657848 - DNA, 15 bp, Homo sapiens
gtggggaggtggggg

SEQ ID NO: 1657849 - DNA, 15 bp, Homo sapiens
ggtggggaggtgggg

SEQ ID NO: 1657850 - DNA, 15 bp, Homo sapiens
gggtggggaggtggg

SEQ ID NO: 1657851 - DNA, 15 bp, Homo sapiens
ggggtggggaggtgg

SEQ ID NO: 1657852 - DNA, 15 bp, Homo sapiens
gggggtggggaggtg

SEQ ID NO: 1657853 - DNA, 15 bp, Homo sapiens
ggggggtggggaggt

SEQ ID NO: 1657854 - DNA, 15 bp, Homo sapiens
aggggggtggggagg

SEQ ID NO: 1657855 - DNA, 15 bp, Homo sapiens
taggggggtggggag

SEQ ID NO: 1657856 - DNA, 15 bp, Homo sapiens
ggggtaggggggtgg

SEQ ID NO: 1657857 - DNA, 15 bp, Homo sapiens
gggggtaggggggtg

SEQ ID NO: 1657858 - DNA, 15 bp, Homo sapiens
ggggggtaggggggt

SEQ ID NO: 1657859 - DNA, 15 bp, Homo sapiens
aggggggtagggggg

SEQ ID NO: 1657860 - DNA, 15 bp, Homo sapiens
taggggggtaggggg

SEQ ID NO: 1657861 - DNA, 15 bp, Homo sapiens
gtaggggggtagggg

SEQ ID NO: 1657862 - DNA, 15 bp, Homo sapiens
ggtaggggggtaggg

SEQ ID NO: 1657863 - DNA, 15 bp, Homo sapiens
gggtaggggggtagg

SEQ ID NO: 1657864 - DNA, 15 bp, Homo sapiens
ggggtaggggggtag

SEQ ID NO: 1657865 - DNA, 15 bp, Homo sapiens
gggggtaggggggta

SEQ ID NO: 1657866 - DNA, 15 bp, Homo sapiens
gaggggggtaggggg

SEQ ID NO: 1657867 - DNA, 15 bp, Homo sapiens
agaggggggtagggg

SEQ ID NO: 1657868 - DNA, 15 bp, Homo sapiens
cagaggggggtaggg

SEQ ID NO: 1657869 - DNA, 15 bp, Homo sapiens
ccagaggggggtagg

SEQ ID NO: 1657870 - DNA, 15 bp, Homo sapiens
accagaggggggtag

SEQ ID NO: 1657871 - DNA, 15 bp, Homo sapiens
gaccagaggggggta

SEQ ID NO: 1657872 - DNA, 15 bp, Homo sapiens
agaccagaggggggt

SEQ ID NO: 1657873 - DNA, 15 bp, Homo sapiens
cagaccagagggggg

SEQ ID NO: 1657874 - DNA, 15 bp, Homo sapiens
gcagaccagaggggg

SEQ ID NO: 1657875 - DNA, 15 bp, Homo sapiens
ggcagaccagagggg

SEQ ID NO: 1657876 - DNA, 15 bp, Homo sapiens
gggcagaccagaggg

SEQ ID NO: 1657877 - DNA, 15 bp, Homo sapiens
agggcagaccagagg

SEQ ID NO: 1657878 - DNA, 15 bp, Homo sapiens
cagggcagaccagag

SEQ ID NO: 1657879 - DNA, 15 bp, Homo sapiens
gcagggcagaccaga

SEQ ID NO: 1657880 - DNA, 15 bp, Homo sapiens
tgcagggcagaccag

SEQ ID NO: 1657881 - DNA, 15 bp, Homo sapiens
gtgcagggcagacca

SEQ ID NO: 1657882 - DNA, 15 bp, Homo sapiens
agtgcagggcagacc

SEQ ID NO: 1657883 - DNA, 15 bp, Homo sapiens
cagtgcagggcagac

SEQ ID NO: 1657884 - DNA, 15 bp, Homo sapiens
gcagtgcagggcaga

SEQ ID NO: 1657885 - DNA, 15 bp, Homo sapiens
tgcagtgcagggcag

SEQ ID NO: 1657886 - DNA, 15 bp, Homo sapiens
gtgcagtgcagggca

SEQ ID NO: 1657887 - DNA, 15 bp, Homo sapiens
agtgcagtgcagggc

SEQ ID NO: 1657888 - DNA, 15 bp, Homo sapiens
cagtgcagtgcaggg

SEQ ID NO: 1657889 - DNA, 15 bp, Homo sapiens
acagtgcagtgcagg

SEQ ID NO: 1657890 - DNA, 15 bp, Homo sapiens
aacagtgcagtgcag

SEQ ID NO: 1657891 - DNA, 15 bp, Homo sapiens
caacagtgcagtgca

SEQ ID NO: 1657892 - DNA, 15 bp, Homo sapiens
gcaacagtgcagtgc

SEQ ID NO: 1657893 - DNA, 15 bp, Homo sapiens
ggcaacagtgcagtg

SEQ ID NO: 1657894 - DNA, 15 bp, Homo sapiens
tggcaacagtgcagt

SEQ ID NO: 1657895 - DNA, 15 bp, Homo sapiens
atggcaacagtgcag

SEQ ID NO: 1657896 - DNA, 15 bp, Homo sapiens
catggcaacagtgca

SEQ ID NO: 1657897 - DNA, 15 bp, Homo sapiens
ccatggcaacagtgc

SEQ ID NO: 1657898 - DNA, 15 bp, Homo sapiens
cccatggcaacagtg

SEQ ID NO: 1657899 - DNA, 15 bp, Homo sapiens
gcccatggcaacagt

SEQ ID NO: 1657900 - DNA, 15 bp, Homo sapiens
tgcccatggcaacag

SEQ ID NO: 1657901 - DNA, 15 bp, Homo sapiens
ctgcccatggcaaca

SEQ ID NO: 1657902 - DNA, 15 bp, Homo sapiens
actgcccatggcaac

SEQ ID NO: 1657903 - DNA, 15 bp, Homo sapiens
cactgcccatggcaa

SEQ ID NO: 1657904 - DNA, 15 bp, Homo sapiens
gcactgcccatggca

SEQ ID NO: 1657905 - DNA, 15 bp, Homo sapiens
agcactgcccatggc

SEQ ID NO: 1657906 - DNA, 15 bp, Homo sapiens
gagcactgcccatgg

SEQ ID NO: 1657907 - DNA, 15 bp, Homo sapiens
ggagcactgcccatg

SEQ ID NO: 1657908 - DNA, 15 bp, Homo sapiens
tggagcactgcccat

SEQ ID NO: 1657909 - DNA, 15 bp, Homo sapiens
ctggagcactgccca

SEQ ID NO: 1657910 - DNA, 15 bp, Homo sapiens
cctggagcactgccc

SEQ ID NO: 1657911 - DNA, 15 bp, Homo sapiens
gcctggagcactgcc

SEQ ID NO: 1657912 - DNA, 15 bp, Homo sapiens
ggcctggagcactgc

SEQ ID NO: 1657913 - DNA, 15 bp, Homo sapiens
aggcctggagcactg

SEQ ID NO: 1657914 - DNA, 15 bp, Homo sapiens
caggcctggagcact

SEQ ID NO: 1657915 - DNA, 15 bp, Homo sapiens
gcaggcctggagcac

SEQ ID NO: 1657916 - DNA, 15 bp, Homo sapiens
agcaggcctggagca

SEQ ID NO: 1657917 - DNA, 15 bp, Homo sapiens
aagcaggcctggagc

SEQ ID NO: 1657918 - DNA, 15 bp, Homo sapiens
caagcaggcctggag

SEQ ID NO: 1657919 - DNA, 15 bp, Homo sapiens
ccaagcaggcctgga

SEQ ID NO: 1657920 - DNA, 15 bp, Homo sapiens
accaagcaggcctgg

SEQ ID NO: 1657921 - DNA, 15 bp, Homo sapiens
caccaagcaggcctg

SEQ ID NO: 1657922 - DNA, 15 bp, Homo sapiens
acaccaagcaggcct

SEQ ID NO: 1657923 - DNA, 15 bp, Homo sapiens
cacaccaagcaggcc

SEQ ID NO: 1657924 - DNA, 15 bp, Homo sapiens
ccacaccaagcaggc

SEQ ID NO: 1657925 - DNA, 15 bp, Homo sapiens
tccacaccaagcagg

SEQ ID NO: 1657926 - DNA, 15 bp, Homo sapiens
gtccacaccaagcag

SEQ ID NO: 1657927 - DNA, 15 bp, Homo sapiens
tgtccacaccaagca

SEQ ID NO: 1657928 - DNA, 15 bp, Homo sapiens
atgtccacaccaagc

SEQ ID NO: 1657929 - DNA, 15 bp, Homo sapiens
catgtccacaccaag

SEQ ID NO: 1657930 - DNA, 15 bp, Homo sapiens
ccatgtccacaccaa

SEQ ID NO: 1657931 - DNA, 15 bp, Homo sapiens
accatgtccacacca

SEQ ID NO: 1657932 - DNA, 15 bp, Homo sapiens
caccatgtccacacc

SEQ ID NO: 1657933 - DNA, 15 bp, Homo sapiens
ccaccatgtccacac

SEQ ID NO: 1657934 - DNA, 15 bp, Homo sapiens
accaccatgtccaca

SEQ ID NO: 1657935 - DNA, 15 bp, Homo sapiens
caccaccatgtccac

SEQ ID NO: 1657936 - DNA, 15 bp, Homo sapiens
tcaccaccatgtcca

SEQ ID NO: 1657937 - DNA, 15 bp, Homo sapiens
ctcaccaccatgtcc

SEQ ID NO: 1657938 - DNA, 15 bp, Homo sapiens
gctcaccaccatgtc

SEQ ID NO: 1657939 - DNA, 15 bp, Homo sapiens
ggctcaccaccatgt

SEQ ID NO: 1657940 - DNA, 15 bp, Homo sapiens
cggctcaccaccatg

SEQ ID NO: 1657941 - DNA, 15 bp, Homo sapiens
acggctcaccaccat

SEQ ID NO: 1657942 - DNA, 15 bp, Homo sapiens
cacggctcaccacca

SEQ ID NO: 1657943 - DNA, 15 bp, Homo sapiens
ccacggctcaccacc

SEQ ID NO: 1657944 - DNA, 15 bp, Homo sapiens
gccacggctcaccac

SEQ ID NO: 1657945 - DNA, 15 bp, Homo sapiens
tgccacggctcacca

SEQ ID NO: 1657946 - DNA, 15 bp, Homo sapiens
ttgccacggctcacc

SEQ ID NO: 1657947 - DNA, 15 bp, Homo sapiens
cttgccacggctcac

SEQ ID NO: 1657948 - DNA, 15 bp, Homo sapiens
ccttgccacggctca

SEQ ID NO: 1657949 - DNA, 15 bp, Homo sapiens
tccttgccacggctc

SEQ ID NO: 1657950 - DNA, 15 bp, Homo sapiens
gtccttgccacggct

SEQ ID NO: 1657951 - DNA, 15 bp, Homo sapiens
ggtccttgccacggc

SEQ ID NO: 1657952 - DNA, 15 bp, Homo sapiens
tggtccttgccacgg

SEQ ID NO: 1657953 - DNA, 15 bp, Homo sapiens
ctggtccttgccacg

SEQ ID NO: 1657954 - DNA, 15 bp, Homo sapiens
tctggtccttgccac

SEQ ID NO: 1657955 - DNA, 15 bp, Homo sapiens
ttctggtccttgcca

SEQ ID NO: 1657956 - DNA, 15 bp, Homo sapiens
attctggtccttgcc

SEQ ID NO: 1657957 - DNA, 15 bp, Homo sapiens
cattctggtccttgc

SEQ ID NO: 1657958 - DNA, 15 bp, Homo sapiens
ccattctggtccttg

SEQ ID NO: 1657959 - DNA, 15 bp, Homo sapiens
tccattctggtcctt

SEQ ID NO: 1657960 - DNA, 15 bp, Homo sapiens
atccattctggtcct

SEQ ID NO: 1657961 - DNA, 15 bp, Homo sapiens
gatccattctggtcc

SEQ ID NO: 1657962 - DNA, 15 bp, Homo sapiens
tgatccattctggtc

SEQ ID NO: 1657963 - DNA, 15 bp, Homo sapiens
gtgatccattctggt

SEQ ID NO: 1657964 - DNA, 15 bp, Homo sapiens
tgtgatccattctgg

SEQ ID NO: 1657965 - DNA, 15 bp, Homo sapiens
ctgtgatccattctg

SEQ ID NO: 1657966 - DNA, 15 bp, Homo sapiens
tctgtgatccattct

SEQ ID NO: 1657967 - DNA, 15 bp, Homo sapiens
atctgtgatccattc

SEQ ID NO: 1657968 - DNA, 15 bp, Homo sapiens
catctgtgatccatt

SEQ ID NO: 1657969 - DNA, 15 bp, Homo sapiens
tcatctgtgatccat

SEQ ID NO: 1657970 - DNA, 15 bp, Homo sapiens
atcatctgtgatcca

SEQ ID NO: 1657971 - DNA, 15 bp, Homo sapiens
gatcatctgtgatcc

SEQ ID NO: 1657972 - DNA, 15 bp, Homo sapiens
cgatcatctgtgatc

SEQ ID NO: 1657973 - DNA, 15 bp, Homo sapiens
acgatcatctgtgat

SEQ ID NO: 1657974 - DNA, 15 bp, Homo sapiens
aacgatcatctgtga

SEQ ID NO: 1657975 - DNA, 15 bp, Homo sapiens
caacgatcatctgtg

SEQ ID NO: 1657976 - DNA, 15 bp, Homo sapiens
ccaacgatcatctgt

SEQ ID NO: 1657977 - DNA, 15 bp, Homo sapiens
gccaacgatcatctg

SEQ ID NO: 1657978 - DNA, 15 bp, Homo sapiens
ggccaacgatcatct

SEQ ID NO: 1657979 - DNA, 15 bp, Homo sapiens
tggccaacgatcatc

SEQ ID NO: 1657980 - DNA, 15 bp, Homo sapiens
ttggccaacgatcat

SEQ ID NO: 1657981 - DNA, 15 bp, Homo sapiens
gttggccaacgatca

SEQ ID NO: 1657982 - DNA, 15 bp, Homo sapiens
tgttggccaacgatc

SEQ ID NO: 1657983 - DNA, 15 bp, Homo sapiens
ctgttggccaacgat

SEQ ID NO: 1657984 - DNA, 15 bp, Homo sapiens
cctgttggccaacga

SEQ ID NO: 1657985 - DNA, 15 bp, Homo sapiens
acctgttggccaacg

SEQ ID NO: 1657986 - DNA, 15 bp, Homo sapiens
cacctgttggccaac

SEQ ID NO: 1657987 - DNA, 15 bp, Homo sapiens
ccacctgttggccaa

SEQ ID NO: 1657988 - DNA, 15 bp, Homo sapiens
gccacctgttggcca

SEQ ID NO: 1657989 - DNA, 15 bp, Homo sapiens
tgccacctgttggcc

SEQ ID NO: 1657990 - DNA, 15 bp, Homo sapiens
ctgccacctgttggc

SEQ ID NO: 1657991 - DNA, 15 bp, Homo sapiens
tctgccacctgttgg

SEQ ID NO: 1657992 - DNA, 15 bp, Homo sapiens
ttctgccacctgttg

SEQ ID NO: 1657993 - DNA, 15 bp, Homo sapiens
cttctgccacctgtt

SEQ ID NO: 1657994 - DNA, 15 bp, Homo sapiens
tcttctgccacctgt

SEQ ID NO: 1657995 - DNA, 15 bp, Homo sapiens
ctcttctgccacctg

SEQ ID NO: 1657996 - DNA, 15 bp, Homo sapiens
cctcttctgccacct

SEQ ID NO: 1657997 - DNA, 15 bp, Homo sapiens
tcctcttctgccacc

SEQ ID NO: 1657998 - DNA, 15 bp, Homo sapiens
ttcctcttctgccac

SEQ ID NO: 1657999 - DNA, 15 bp, Homo sapiens
attcctcttctgcca

SEQ ID NO: 1658000 - DNA, 15 bp, Homo sapiens
aattcctcttctgcc

SEQ ID NO: 1658001 - DNA, 15 bp, Homo sapiens
gaattcctcttctgc

SEQ ID NO: 1658002 - DNA, 15 bp, Homo sapiens
ggaattcctcttctg

SEQ ID NO: 1658003 - DNA, 15 bp, Homo sapiens
aggaattcctcttct

SEQ ID NO: 1658004 - DNA, 15 bp, Homo sapiens
caggaattcctcttc

SEQ ID NO: 1658005 - DNA, 15 bp, Homo sapiens
gcaggaattcctctt

SEQ ID NO: 1658006 - DNA, 15 bp, Homo sapiens
ggcaggaattcctct

SEQ ID NO: 1658007 - DNA, 15 bp, Homo sapiens
aggcaggaattcctc

SEQ ID NO: 1658008 - DNA, 15 bp, Homo sapiens
aaggcaggaattcct

SEQ ID NO: 1658009 - DNA, 15 bp, Homo sapiens
gaaggcaggaattcc

SEQ ID NO: 1658010 - DNA, 15 bp, Homo sapiens
ggaaggcaggaattc

SEQ ID NO: 1658011 - DNA, 15 bp, Homo sapiens
aggaaggcaggaatt

SEQ ID NO: 1658012 - DNA, 15 bp, Homo sapiens
gaggaaggcaggaat

SEQ ID NO: 1658013 - DNA, 15 bp, Homo sapiens
tgaggaaggcaggaa

SEQ ID NO: 1658014 - DNA, 15 bp, Homo sapiens
ttgaggaaggcagga

SEQ ID NO: 1658015 - DNA, 15 bp, Homo sapiens
cttgaggaaggcagg

SEQ ID NO: 1658016 - DNA, 15 bp, Homo sapiens
tcttgaggaaggcag

SEQ ID NO: 1658017 - DNA, 15 bp, Homo sapiens
ctcttgaggaaggca

SEQ ID NO: 1658018 - DNA, 15 bp, Homo sapiens
cctcttgaggaaggc

SEQ ID NO: 1658019 - DNA, 15 bp, Homo sapiens
tcctcttgaggaagg

SEQ ID NO: 1658020 - DNA, 15 bp, Homo sapiens
ttcctcttgaggaag

SEQ ID NO: 1658021 - DNA, 15 bp, Homo sapiens
gttcctcttgaggaa

SEQ ID NO: 1658022 - DNA, 15 bp, Homo sapiens
tgttcctcttgagga

SEQ ID NO: 1658023 - DNA, 15 bp, Homo sapiens
gtgttcctcttgagg

SEQ ID NO: 1658024 - DNA, 15 bp, Homo sapiens
ggtgttcctcttgag

SEQ ID NO: 1658025 - DNA, 15 bp, Homo sapiens
aggtgttcctcttga

SEQ ID NO: 1658026 - DNA, 15 bp, Homo sapiens
taggtgttcctcttg

SEQ ID NO: 1658027 - DNA, 15 bp, Homo sapiens
gtaggtgttcctctt

SEQ ID NO: 1658028 - DNA, 15 bp, Homo sapiens
ggtaggtgttcctct

SEQ ID NO: 1658029 - DNA, 15 bp, Homo sapiens
gggtaggtgttcctc

SEQ ID NO: 1658030 - DNA, 15 bp, Homo sapiens
ggggtaggtgttcct

SEQ ID NO: 1658031 - DNA, 15 bp, Homo sapiens
aggggtaggtgttcc

SEQ ID NO: 1658032 - DNA, 15 bp, Homo sapiens
aaggggtaggtgttc

SEQ ID NO: 1658033 - DNA, 15 bp, Homo sapiens
caaggggtaggtgtt

SEQ ID NO: 1658034 - DNA, 15 bp, Homo sapiens
ccaaggggtaggtgt

SEQ ID NO: 1658035 - DNA, 15 bp, Homo sapiens
gccaaggggtaggtg

SEQ ID NO: 1658036 - DNA, 15 bp, Homo sapiens
agccaaggggtaggt

SEQ ID NO: 1658037 - DNA, 15 bp, Homo sapiens
tagccaaggggtagg

SEQ ID NO: 1658038 - DNA, 15 bp, Homo sapiens
ttagccaaggggtag

SEQ ID NO: 1658039 - DNA, 15 bp, Homo sapiens
attagccaaggggta

SEQ ID NO: 1658040 - DNA, 15 bp, Homo sapiens
cattagccaaggggt

SEQ ID NO: 1658041 - DNA, 15 bp, Homo sapiens
gcattagccaagggg

SEQ ID NO: 1658042 - DNA, 15 bp, Homo sapiens
agcattagccaaggg

SEQ ID NO: 1658043 - DNA, 15 bp, Homo sapiens
cagcattagccaagg

SEQ ID NO: 1658044 - DNA, 15 bp, Homo sapiens
ccagcattagccaag

SEQ ID NO: 1658045 - DNA, 15 bp, Homo sapiens
cccagcattagccaa

SEQ ID NO: 1658046 - DNA, 15 bp, Homo sapiens
ccccagcattagcca

SEQ ID NO: 1658047 - DNA, 15 bp, Homo sapiens
accccagcattagcc

SEQ ID NO: 1658048 - DNA, 15 bp, Homo sapiens
gaccccagcattagc

SEQ ID NO: 1658049 - DNA, 15 bp, Homo sapiens
cgaccccagcattag

SEQ ID NO: 1658050 - DNA, 15 bp, Homo sapiens
ccgaccccagcatta

SEQ ID NO: 1658051 - DNA, 15 bp, Homo sapiens
tccgaccccagcatt

SEQ ID NO: 1658052 - DNA, 15 bp, Homo sapiens
atccgaccccagcat

SEQ ID NO: 1658053 - DNA, 15 bp, Homo sapiens
aatccgaccccagca

SEQ ID NO: 1658054 - DNA, 15 bp, Homo sapiens
aaatccgaccccagc

SEQ ID NO: 1658055 - DNA, 15 bp, Homo sapiens
aaaatccgaccccag

SEQ ID NO: 1658056 - DNA, 15 bp, Homo sapiens
caaaatccgacccca

SEQ ID NO: 1658057 - DNA, 15 bp, Homo sapiens
tcaaaatccgacccc

SEQ ID NO: 1658058 - DNA, 15 bp, Homo sapiens
atcaaaatccgaccc

SEQ ID NO: 1658059 - DNA, 15 bp, Homo sapiens
aatcaaaatccgacc

SEQ ID NO: 1658060 - DNA, 15 bp, Homo sapiens
aaatcaaaatccgac

SEQ ID NO: 1658061 - DNA, 15 bp, Homo sapiens
taaatcaaaatccga

SEQ ID NO: 1658062 - DNA, 15 bp, Homo sapiens
ataaatcaaaatccg

SEQ ID NO: 1658063 - DNA, 15 bp, Homo sapiens
tataaatcaaaatcc

SEQ ID NO: 1658064 - DNA, 15 bp, Homo sapiens
atataaatcaaaatc

SEQ ID NO: 1658065 - DNA, 15 bp, Homo sapiens
aatataaatcaaaat

SEQ ID NO: 1658066 - DNA, 15 bp, Homo sapiens
aaatataaatcaaaa

SEQ ID NO: 1658067 - DNA, 15 bp, Homo sapiens
taaatataaatcaaa

SEQ ID NO: 1658068 - DNA, 15 bp, Homo sapiens
ataaatataaatcaa

SEQ ID NO: 1658069 - DNA, 15 bp, Homo sapiens
gataaatataaatca

SEQ ID NO: 1658070 - DNA, 15 bp, Homo sapiens
agataaatataaatc

SEQ ID NO: 1658071 - DNA, 15 bp, Homo sapiens
aagataaatataaat

SEQ ID NO: 1658072 - DNA, 15 bp, Homo sapiens
aaagataaatataaa

SEQ ID NO: 1658073 - DNA, 15 bp, Homo sapiens
aaaagataaatataa

SEQ ID NO: 1658074 - DNA, 15 bp, Homo sapiens
caaaagataaatata

SEQ ID NO: 1658075 - DNA, 15 bp, Homo sapiens
ccaaaagataaatat

SEQ ID NO: 1658076 - DNA, 15 bp, Homo sapiens
tccaaaagataaata

SEQ ID NO: 1658077 - DNA, 15 bp, Homo sapiens
atccaaaagataaat

SEQ ID NO: 1658078 - DNA, 15 bp, Homo sapiens
catccaaaagataaa

SEQ ID NO: 1658079 - DNA, 15 bp, Homo sapiens
acatccaaaagataa

SEQ ID NO: 1658080 - DNA, 15 bp, Homo sapiens
gacatccaaaagata

SEQ ID NO: 1658081 - DNA, 15 bp, Homo sapiens
tgacatccaaaagat

SEQ ID NO: 1658082 - DNA, 15 bp, Homo sapiens
ctgacatccaaaaga

SEQ ID NO: 1658083 - DNA, 15 bp, Homo sapiens
actgacatccaaaag

SEQ ID NO: 1658084 - DNA, 15 bp, Homo sapiens
gactgacatccaaaa

SEQ ID NO: 1658085 - DNA, 15 bp, Homo sapiens
tgactgacatccaaa

SEQ ID NO: 1658086 - DNA, 15 bp, Homo sapiens
atgactgacatccaa

SEQ ID NO: 1658087 - DNA, 15 bp, Homo sapiens
tatgactgacatcca

SEQ ID NO: 1658088 - DNA, 15 bp, Homo sapiens
gtatgactgacatcc

SEQ ID NO: 1658089 - DNA, 15 bp, Homo sapiens
tgtatgactgacatc

SEQ ID NO: 1658090 - DNA, 15 bp, Homo sapiens
ctgtatgactgacat

SEQ ID NO: 1658091 - DNA, 15 bp, Homo sapiens
actgtatgactgaca

SEQ ID NO: 1658092 - DNA, 15 bp, Homo sapiens
gactgtatgactgac

SEQ ID NO: 1658093 - DNA, 15 bp, Homo sapiens
agactgtatgactga

SEQ ID NO: 1658094 - DNA, 15 bp, Homo sapiens
cagactgtatgactg

SEQ ID NO: 1658095 - DNA, 15 bp, Homo sapiens
tcagactgtatgact

SEQ ID NO: 1658096 - DNA, 15 bp, Homo sapiens
atcagactgtatgac

SEQ ID NO: 1658097 - DNA, 15 bp, Homo sapiens
aatcagactgtatga

SEQ ID NO: 1658098 - DNA, 15 bp, Homo sapiens
aaatcagactgtatg

SEQ ID NO: 1658099 - DNA, 15 bp, Homo sapiens
aaaatcagactgtat

SEQ ID NO: 1658100 - DNA, 15 bp, Homo sapiens
caaaatcagactgta

SEQ ID NO: 1658101 - DNA, 15 bp, Homo sapiens
acaaaatcagactgt

SEQ ID NO: 1658102 - DNA, 15 bp, Homo sapiens
cacaaaatcagactg

SEQ ID NO: 1658103 - DNA, 15 bp, Homo sapiens
ccacaaaatcagact

SEQ ID NO: 1658104 - DNA, 15 bp, Homo sapiens
accacaaaatcagac

SEQ ID NO: 1658105 - DNA, 15 bp, Homo sapiens
aaccacaaaatcaga

SEQ ID NO: 1658106 - DNA, 15 bp, Homo sapiens
aaaccacaaaatcag

SEQ ID NO: 1658107 - DNA, 15 bp, Homo sapiens
caaaccacaaaatca

SEQ ID NO: 1658108 - DNA, 15 bp, Homo sapiens
gcaaaccacaaaatc

SEQ ID NO: 1658109 - DNA, 15 bp, Homo sapiens
agcaaaccacaaaat

SEQ ID NO: 1658110 - DNA, 15 bp, Homo sapiens
tagcaaaccacaaaa

SEQ ID NO: 1658111 - DNA, 15 bp, Homo sapiens
ctagcaaaccacaaa

SEQ ID NO: 1658112 - DNA, 15 bp, Homo sapiens
actagcaaaccacaa

SEQ ID NO: 1658113 - DNA, 15 bp, Homo sapiens
cactagcaaaccaca

SEQ ID NO: 1658114 - DNA, 15 bp, Homo sapiens
acactagcaaaccac

SEQ ID NO: 1658115 - DNA, 15 bp, Homo sapiens
aacactagcaaacca

SEQ ID NO: 1658116 - DNA, 15 bp, Homo sapiens
aaacactagcaaacc

SEQ ID NO: 1658117 - DNA, 15 bp, Homo sapiens
caaacactagcaaac

SEQ ID NO: 1658118 - DNA, 15 bp, Homo sapiens
tcaaacactagcaaa

SEQ ID NO: 1658119 - DNA, 15 bp, Homo sapiens
ttcaaacactagcaa

SEQ ID NO: 1658120 - DNA, 15 bp, Homo sapiens
attcaaacactagca

SEQ ID NO: 1658121 - DNA, 15 bp, Homo sapiens
aattcaaacactagc

SEQ ID NO: 1658122 - DNA, 15 bp, Homo sapiens
aaattcaaacactag

SEQ ID NO: 1658123 - DNA, 15 bp, Homo sapiens
taaattcaaacacta

SEQ ID NO: 1658124 - DNA, 15 bp, Homo sapiens
ttaaattcaaacact

SEQ ID NO: 1658125 - DNA, 15 bp, Homo sapiens
cttaaattcaaacac

SEQ ID NO: 1658126 - DNA, 15 bp, Homo sapiens
acttaaattcaaaca

SEQ ID NO: 1658127 - DNA, 15 bp, Homo sapiens
gacttaaattcaaac

SEQ ID NO: 1658128 - DNA, 15 bp, Homo sapiens
agacttaaattcaaa

SEQ ID NO: 1658129 - DNA, 15 bp, Homo sapiens
aagacttaaattcaa

SEQ ID NO: 1658130 - DNA, 15 bp, Homo sapiens
taagacttaaattca

SEQ ID NO: 1658131 - DNA, 15 bp, Homo sapiens
ttaagacttaaattc

SEQ ID NO: 1658132 - DNA, 15 bp, Homo sapiens
cttaagacttaaatt

SEQ ID NO: 1658133 - DNA, 15 bp, Homo sapiens
acttaagacttaaat

SEQ ID NO: 1658134 - DNA, 15 bp, Homo sapiens
cacttaagacttaaa

SEQ ID NO: 1658135 - DNA, 15 bp, Homo sapiens
tcacttaagacttaa

SEQ ID NO: 1658136 - DNA, 15 bp, Homo sapiens
gtcacttaagactta

SEQ ID NO: 1658137 - DNA, 15 bp, Homo sapiens
agtcacttaagactt

SEQ ID NO: 1658138 - DNA, 15 bp, Homo sapiens
tagtcacttaagact

SEQ ID NO: 1658139 - DNA, 15 bp, Homo sapiens
atagtcacttaagac

SEQ ID NO: 1658140 - DNA, 15 bp, Homo sapiens
aatagtcacttaaga

SEQ ID NO: 1658141 - DNA, 15 bp, Homo sapiens
taatagtcacttaag

SEQ ID NO: 1658142 - DNA, 15 bp, Homo sapiens
ataatagtcacttaa

SEQ ID NO: 1658143 - DNA, 15 bp, Homo sapiens
tataatagtcactta

SEQ ID NO: 1658144 - DNA, 15 bp, Homo sapiens
ctataatagtcactt

SEQ ID NO: 1658145 - DNA, 15 bp, Homo sapiens
tctataatagtcact

SEQ ID NO: 1658146 - DNA, 15 bp, Homo sapiens
ttctataatagtcac

SEQ ID NO: 1658147 - DNA, 15 bp, Homo sapiens
tttctataatagtca

SEQ ID NO: 1658148 - DNA, 15 bp, Homo sapiens
atttctataatagtc

SEQ ID NO: 1658149 - DNA, 15 bp, Homo sapiens
catttctataatagt

SEQ ID NO: 1658150 - DNA, 15 bp, Homo sapiens
acatttctataatag

SEQ ID NO: 1658151 - DNA, 15 bp, Homo sapiens
tacatttctataata

SEQ ID NO: 1658152 - DNA, 15 bp, Homo sapiens
atacatttctataat

SEQ ID NO: 1658153 - DNA, 15 bp, Homo sapiens
aatacatttctataa

SEQ ID NO: 1658154 - DNA, 15 bp, Homo sapiens
taatacatttctata

SEQ ID NO: 1658155 - DNA, 15 bp, Homo sapiens
ttaatacatttctat

SEQ ID NO: 1658156 - DNA, 15 bp, Homo sapiens
cttaatacatttcta

SEQ ID NO: 1658157 - DNA, 15 bp, Homo sapiens
tcttaatacatttct

SEQ ID NO: 1658158 - DNA, 15 bp, Homo sapiens
ctcttaatacatttc

SEQ ID NO: 1658159 - DNA, 15 bp, Homo sapiens
cctcttaatacattt

SEQ ID NO: 1658160 - DNA, 15 bp, Homo sapiens
gcctcttaatacatt

SEQ ID NO: 1658161 - DNA, 15 bp, Homo sapiens
agcctcttaatacat

SEQ ID NO: 1658162 - DNA, 15 bp, Homo sapiens
aagcctcttaataca

SEQ ID NO: 1658163 - DNA, 15 bp, Homo sapiens
aaagcctcttaatac

SEQ ID NO: 1658164 - DNA, 15 bp, Homo sapiens
taaagcctcttaata

SEQ ID NO: 1658165 - DNA, 15 bp, Homo sapiens
ataaagcctcttaat

SEQ ID NO: 1658166 - DNA, 15 bp, Homo sapiens
aataaagcctcttaa

SEQ ID NO: 1658167 - DNA, 15 bp, Homo sapiens
aaataaagcctctta

SEQ ID NO: 1658168 - DNA, 15 bp, Homo sapiens
caaataaagcctctt

SEQ ID NO: 1658169 - DNA, 15 bp, Homo sapiens
acaaataaagcctct

SEQ ID NO: 1658170 - DNA, 15 bp, Homo sapiens
tacaaataaagcctc

SEQ ID NO: 1658171 - DNA, 15 bp, Homo sapiens
ctacaaataaagcct

SEQ ID NO: 1658172 - DNA, 15 bp, Homo sapiens
tctacaaataaagcc

SEQ ID NO: 1658173 - DNA, 15 bp, Homo sapiens
ttctacaaataaagc

SEQ ID NO: 1658174 - DNA, 15 bp, Homo sapiens
attctacaaataaag

SEQ ID NO: 1658175 - DNA, 15 bp, Homo sapiens
aattctacaaataaa

SEQ ID NO: 1658176 - DNA, 15 bp, Homo sapiens
gaattctacaaataa

SEQ ID NO: 1658177 - DNA, 15 bp, Homo sapiens
tgaattctacaaata

SEQ ID NO: 1658178 - DNA, 15 bp, Homo sapiens
gtgaattctacaaat

SEQ ID NO: 1658179 - DNA, 15 bp, Homo sapiens
agtgaattctacaaa

SEQ ID NO: 1658180 - DNA, 15 bp, Homo sapiens
aagtgaattctacaa

SEQ ID NO: 1658181 - DNA, 15 bp, Homo sapiens
aaagtgaattctaca

SEQ ID NO: 1658182 - DNA, 15 bp, Homo sapiens
taaagtgaattctac

SEQ ID NO: 1658183 - DNA, 15 bp, Homo sapiens
ttaaagtgaattcta

SEQ ID NO: 1658184 - DNA, 15 bp, Homo sapiens
attaaagtgaattct

SEQ ID NO: 1658185 - DNA, 15 bp, Homo sapiens
aattaaagtgaattc

SEQ ID NO: 1658186 - DNA, 15 bp, Homo sapiens
taattaaagtgaatt

SEQ ID NO: 1658187 - DNA, 15 bp, Homo sapiens
gtaattaaagtgaat

SEQ ID NO: 1658188 - DNA, 15 bp, Homo sapiens
tgtaattaaagtgaa

SEQ ID NO: 1658189 - DNA, 15 bp, Homo sapiens
atgtaattaaagtga

SEQ ID NO: 1658190 - DNA, 15 bp, Homo sapiens
aatgtaattaaagtg

SEQ ID NO: 1658191 - DNA, 15 bp, Homo sapiens
aaatgtaattaaagt

SEQ ID NO: 1658192 - DNA, 15 bp, Homo sapiens
taaatgtaattaaag

SEQ ID NO: 1658193 - DNA, 15 bp, Homo sapiens
ttaaatgtaattaaa

SEQ ID NO: 1658194 - DNA, 15 bp, Homo sapiens
attaaatgtaattaa

SEQ ID NO: 1658195 - DNA, 15 bp, Homo sapiens
cattaaatgtaatta

SEQ ID NO: 1658196 - DNA, 15 bp, Homo sapiens
tcattaaatgtaatt

SEQ ID NO: 1658197 - DNA, 15 bp, Homo sapiens
ctcattaaatgtaat

SEQ ID NO: 1658198 - DNA, 15 bp, Homo sapiens
actcattaaatgtaa

SEQ ID NO: 1658199 - DNA, 15 bp, Homo sapiens
aactcattaaatgta

SEQ ID NO: 1658200 - DNA, 15 bp, Homo sapiens
aaactcattaaatgt

SEQ ID NO: 1658201 - DNA, 15 bp, Homo sapiens
aaaactcattaaatg

SEQ ID NO: 1658202 - DNA, 15 bp, Homo sapiens
caaaaactcattaaa

SEQ ID NO: 1658203 - DNA, 15 bp, Homo sapiens
acaaaaactcattaa

SEQ ID NO: 1658204 - DNA, 15 bp, Homo sapiens
aacaaaaactcatta

SEQ ID NO: 1658205 - DNA, 15 bp, Homo sapiens
aaacaaaaactcatt

SEQ ID NO: 1658206 - DNA, 15 bp, Homo sapiens
aaaacaaaaactcat

SEQ ID NO: 1658207 - DNA, 15 bp, Homo sapiens
caaaacaaaaactca

SEQ ID NO: 1658208 - DNA, 15 bp, Homo sapiens
tcaaaacaaaaactc

SEQ ID NO: 1658209 - DNA, 15 bp, Homo sapiens
ctcaaaacaaaaact

SEQ ID NO: 1658210 - DNA, 15 bp, Homo sapiens
actcaaaacaaaaac

SEQ ID NO: 1658211 - DNA, 15 bp, Homo sapiens
aactcaaaacaaaaa

SEQ ID NO: 1658212 - DNA, 15 bp, Homo sapiens
gaactcaaaacaaaa

SEQ ID NO: 1658213 - DNA, 15 bp, Homo sapiens
ggaactcaaaacaaa

SEQ ID NO: 1658214 - DNA, 15 bp, Homo sapiens
aggaactcaaaacaa

SEQ ID NO: 1658215 - DNA, 15 bp, Homo sapiens
aaggaactcaaaaca

SEQ ID NO: 1658216 - DNA, 15 bp, Homo sapiens
taaggaactcaaaac

SEQ ID NO: 1658217 - DNA, 15 bp, Homo sapiens
ttaaggaactcaaaa

SEQ ID NO: 1658218 - DNA, 15 bp, Homo sapiens
tttaaggaactcaaa

SEQ ID NO: 1658219 - DNA, 15 bp, Homo sapiens
ttttaaggaactcaa

SEQ ID NO: 1658220 - DNA, 15 bp, Homo sapiens
attttaaggaactca

SEQ ID NO: 1658221 - DNA, 15 bp, Homo sapiens
aattttaaggaactc

SEQ ID NO: 1658222 - DNA, 15 bp, Homo sapiens
gaattttaaggaact

SEQ ID NO: 1658223 - DNA, 15 bp, Homo sapiens
ggaattttaaggaac

SEQ ID NO: 1658224 - DNA, 15 bp, Homo sapiens
aggaattttaaggaa

SEQ ID NO: 1658225 - DNA, 15 bp, Homo sapiens
aaggaattttaagga

SEQ ID NO: 1658226 - DNA, 15 bp, Homo sapiens
taaggaattttaagg

SEQ ID NO: 1658227 - DNA, 15 bp, Homo sapiens
ttaaggaattttaag

SEQ ID NO: 1658228 - DNA, 15 bp, Homo sapiens
tttaaggaattttaa

SEQ ID NO: 1658229 - DNA, 15 bp, Homo sapiens
ctttaaggaatttta

SEQ ID NO: 1658230 - DNA, 15 bp, Homo sapiens
actttaaggaatttt

SEQ ID NO: 1658231 - DNA, 15 bp, Homo sapiens
aactttaaggaattt

SEQ ID NO: 1658232 - DNA, 15 bp, Homo sapiens
aaactttaaggaatt

SEQ ID NO: 1658233 - DNA, 15 bp, Homo sapiens
aaaactttaaggaat

SEQ ID NO: 1658234 - DNA, 15 bp, Homo sapiens
aaaaactttaaggaa

SEQ ID NO: 1658235 - DNA, 15 bp, Homo sapiens
taaaaactttaagga

SEQ ID NO: 1658236 - DNA, 15 bp, Homo sapiens
ctaaaaactttaagg

SEQ ID NO: 1658237 - DNA, 15 bp, Homo sapiens
gctaaaaactttaag

SEQ ID NO: 1658238 - DNA, 15 bp, Homo sapiens
agctaaaaactttaa

SEQ ID NO: 1658239 - DNA, 15 bp, Homo sapiens
aagctaaaaacttta

SEQ ID NO: 1658240 - DNA, 15 bp, Homo sapiens
gaagctaaaaacttt

SEQ ID NO: 1658241 - DNA, 15 bp, Homo sapiens
agaagctaaaaactt

SEQ ID NO: 1658242 - DNA, 15 bp, Homo sapiens
gagaagctaaaaact

SEQ ID NO: 1658243 - DNA, 15 bp, Homo sapiens
tgagaagctaaaaac

SEQ ID NO: 1658244 - DNA, 15 bp, Homo sapiens
atgagaagctaaaaa

SEQ ID NO: 1658245 - DNA, 15 bp, Homo sapiens
aatgagaagctaaaa

SEQ ID NO: 1658246 - DNA, 15 bp, Homo sapiens
taatgagaagctaaa

SEQ ID NO: 1658247 - DNA, 15 bp, Homo sapiens
gtaatgagaagctaa

SEQ ID NO: 1658248 - DNA, 15 bp, Homo sapiens
tgtaatgagaagcta

SEQ ID NO: 1658249 - DNA, 15 bp, Homo sapiens
ttgtaatgagaagct

SEQ ID NO: 1658250 - DNA, 15 bp, Homo sapiens
tttgtaatgagaagc

SEQ ID NO: 1658251 - DNA, 15 bp, Homo sapiens
atttgtaatgagaag

SEQ ID NO: 1658252 - DNA, 15 bp, Homo sapiens
aatttgtaatgagaa

SEQ ID NO: 1658253 - DNA, 15 bp, Homo sapiens
gaatttgtaatgaga

SEQ ID NO: 1658254 - DNA, 15 bp, Homo sapiens
ggaatttgtaatgag

SEQ ID NO: 1658255 - DNA, 15 bp, Homo sapiens
aggaatttgtaatga

SEQ ID NO: 1658256 - DNA, 15 bp, Homo sapiens
aaggaatttgtaatg

SEQ ID NO: 1658257 - DNA, 15 bp, Homo sapiens
taaggaatttgtaat

SEQ ID NO: 1658258 - DNA, 15 bp, Homo sapiens
ttaaggaatttgtaa

SEQ ID NO: 1658259 - DNA, 15 bp, Homo sapiens
gttaaggaatttgta

SEQ ID NO: 1658260 - DNA, 15 bp, Homo sapiens
ggttaaggaatttgt

SEQ ID NO: 1658261 - DNA, 15 bp, Homo sapiens
aggttaaggaatttg

SEQ ID NO: 1658262 - DNA, 15 bp, Homo sapiens
aaggttaaggaattt

SEQ ID NO: 1658263 - DNA, 15 bp, Homo sapiens
aaaggttaaggaatt

SEQ ID NO: 1658264 - DNA, 15 bp, Homo sapiens
aaaaggttaaggaat

SEQ ID NO: 1658265 - DNA, 15 bp, Homo sapiens
aaaaaggttaaggaa

SEQ ID NO: 1658266 - DNA, 15 bp, Homo sapiens
aaaaaaggttaagga

SEQ ID NO: 1658267 - DNA, 15 bp, Homo sapiens
aaaaaaaggttaagg

SEQ ID NO: 1658268 - DNA, 15 bp, Homo sapiens
caaaaaaaggttaag

SEQ ID NO: 1658269 - DNA, 15 bp, Homo sapiens
ccaaaaaaaggttaa

SEQ ID NO: 1658270 - DNA, 15 bp, Homo sapiens
gccaaaaaaaggtta

SEQ ID NO: 1658271 - DNA, 15 bp, Homo sapiens
tgccaaaaaaaggtt

SEQ ID NO: 1658272 - DNA, 15 bp, Homo sapiens
ctgccaaaaaaaggt

SEQ ID NO: 1658273 - DNA, 15 bp, Homo sapiens
actgccaaaaaaagg

SEQ ID NO: 1658274 - DNA, 15 bp, Homo sapiens
tactgccaaaaaaag

SEQ ID NO: 1658275 - DNA, 15 bp, Homo sapiens
ctactgccaaaaaaa

SEQ ID NO: 1658276 - DNA, 15 bp, Homo sapiens
tctactgccaaaaaa

SEQ ID NO: 1658277 - DNA, 15 bp, Homo sapiens
atctactgccaaaaa

SEQ ID NO: 1658278 - DNA, 15 bp, Homo sapiens
tatctactgccaaaa

SEQ ID NO: 1658279 - DNA, 15 bp, Homo sapiens
ctatctactgccaaa

SEQ ID NO: 1658280 - DNA, 15 bp, Homo sapiens
actatctactgccaa

SEQ ID NO: 1658281 - DNA, 15 bp, Homo sapiens
gactatctactgcca

SEQ ID NO: 1658282 - DNA, 15 bp, Homo sapiens
tgactatctactgcc

SEQ ID NO: 1658283 - DNA, 15 bp, Homo sapiens
ttgactatctactgc

SEQ ID NO: 1658284 - DNA, 15 bp, Homo sapiens
tttgactatctactg

SEQ ID NO: 1658285 - DNA, 15 bp, Homo sapiens
ctttgactatctact

SEQ ID NO: 1658286 - DNA, 15 bp, Homo sapiens
actttgactatctac

SEQ ID NO: 1658287 - DNA, 15 bp, Homo sapiens
gactttgactatcta

SEQ ID NO: 1658288 - DNA, 15 bp, Homo sapiens
tgactttgactatct

SEQ ID NO: 1658289 - DNA, 15 bp, Homo sapiens
ttgactttgactatc

SEQ ID NO: 1658290 - DNA, 15 bp, Homo sapiens
tttgactttgactat

SEQ ID NO: 1658291 - DNA, 15 bp, Homo sapiens
atttgactttgacta

SEQ ID NO: 1658292 - DNA, 15 bp, Homo sapiens
gatttgactttgact

SEQ ID NO: 1658293 - DNA, 15 bp, Homo sapiens
tgatttgactttgac

SEQ ID NO: 1658294 - DNA, 15 bp, Homo sapiens
atgatttgactttga

SEQ ID NO: 1658295 - DNA, 15 bp, Homo sapiens
aatgatttgactttg

SEQ ID NO: 1658296 - DNA, 15 bp, Homo sapiens
aaatgatttgacttt

SEQ ID NO: 1658297 - DNA, 15 bp, Homo sapiens
gaaatgatttgactt

SEQ ID NO: 1658298 - DNA, 15 bp, Homo sapiens
agaaatgatttgact

SEQ ID NO: 1658299 - DNA, 15 bp, Homo sapiens
tagaaatgatttgac

SEQ ID NO: 1658300 - DNA, 15 bp, Homo sapiens
ttagaaatgatttga

SEQ ID NO: 1658301 - DNA, 15 bp, Homo sapiens
attagaaatgatttg

SEQ ID NO: 1658302 - DNA, 15 bp, Homo sapiens
cattagaaatgattt

SEQ ID NO: 1658303 - DNA, 15 bp, Homo sapiens
acattagaaatgatt

SEQ ID NO: 1658304 - DNA, 15 bp, Homo sapiens
aacattagaaatgat

SEQ ID NO: 1658305 - DNA, 15 bp, Homo sapiens
aaacattagaaatga

SEQ ID NO: 1658306 - DNA, 15 bp, Homo sapiens
aaaacattagaaatg

SEQ ID NO: 1658307 - DNA, 15 bp, Homo sapiens
taaaacattagaaat

SEQ ID NO: 1658308 - DNA, 15 bp, Homo sapiens
ttaaaacattagaaa

SEQ ID NO: 1658309 - DNA, 15 bp, Homo sapiens
tttaaaacattagaa

SEQ ID NO: 1658310 - DNA, 15 bp, Homo sapiens
ttttaaaacattaga

SEQ ID NO: 1658311 - DNA, 15 bp, Homo sapiens
tttttaaaacattag

SEQ ID NO: 1658312 - DNA, 15 bp, Homo sapiens
atttttaaaacatta

SEQ ID NO: 1658313 - DNA, 15 bp, Homo sapiens
catttttaaaacatt

SEQ ID NO: 1658314 - DNA, 15 bp, Homo sapiens
acatttttaaaacat

SEQ ID NO: 1658315 - DNA, 15 bp, Homo sapiens
cacatttttaaaaca

SEQ ID NO: 1658316 - DNA, 15 bp, Homo sapiens
gcacatttttaaaac

SEQ ID NO: 1658317 - DNA, 15 bp, Homo sapiens
agcacatttttaaaa

SEQ ID NO: 1658318 - DNA, 15 bp, Homo sapiens
cagcacatttttaaa

SEQ ID NO: 1658319 - DNA, 15 bp, Homo sapiens
ccagcacatttttaa

SEQ ID NO: 1658320 - DNA, 15 bp, Homo sapiens
accagcacattttta

SEQ ID NO: 1658321 - DNA, 15 bp, Homo sapiens
gaccagcacattttt

SEQ ID NO: 1658322 - DNA, 15 bp, Homo sapiens
tgaccagcacatttt

SEQ ID NO: 1658323 - DNA, 15 bp, Homo sapiens
atgaccagcacattt

SEQ ID NO: 1658324 - DNA, 15 bp, Homo sapiens
aatgaccagcacatt

SEQ ID NO: 1658325 - DNA, 15 bp, Homo sapiens
aaatgaccagcacat

SEQ ID NO: 1658326 - DNA, 15 bp, Homo sapiens
aaaatgaccagcaca

SEQ ID NO: 1658327 - DNA, 15 bp, Homo sapiens
gaaaatgaccagcac

SEQ ID NO: 1658328 - DNA, 15 bp, Homo sapiens
agaaaatgaccagca

SEQ ID NO: 1658329 - DNA, 15 bp, Homo sapiens
aagaaaatgaccagc

SEQ ID NO: 1658330 - DNA, 15 bp, Homo sapiens
aaagaaaatgaccag

SEQ ID NO: 1658331 - DNA, 15 bp, Homo sapiens
caaagaaaatgacca

SEQ ID NO: 1658332 - DNA, 15 bp, Homo sapiens
tcaaagaaaatgacc

SEQ ID NO: 1658333 - DNA, 15 bp, Homo sapiens
ttcaaagaaaatgac

SEQ ID NO: 1658334 - DNA, 15 bp, Homo sapiens
tttcaaagaaaatga

SEQ ID NO: 1658335 - DNA, 15 bp, Homo sapiens
atttcaaagaaaatg

SEQ ID NO: 1658336 - DNA, 15 bp, Homo sapiens
aatttcaaagaaaat

SEQ ID NO: 1658337 - DNA, 15 bp, Homo sapiens
caatttcaaagaaaa

SEQ ID NO: 1658338 - DNA, 15 bp, Homo sapiens
tcaatttcaaagaaa

SEQ ID NO: 1658339 - DNA, 15 bp, Homo sapiens
gtcaatttcaaagaa

SEQ ID NO: 1658340 - DNA, 15 bp, Homo sapiens
agtcaatttcaaaga

SEQ ID NO: 1658341 - DNA, 15 bp, Homo sapiens
aagtcaatttcaaag

SEQ ID NO: 1658342 - DNA, 15 bp, Homo sapiens
taagtcaatttcaaa

SEQ ID NO: 1658343 - DNA, 15 bp, Homo sapiens
ttaagtcaatttcaa

SEQ ID NO: 1658344 - DNA, 15 bp, Homo sapiens
gttaagtcaatttca

SEQ ID NO: 1658345 - DNA, 15 bp, Homo sapiens
agttaagtcaatttc

SEQ ID NO: 1658346 - DNA, 15 bp, Homo sapiens
tagttaagtcaattt

SEQ ID NO: 1658347 - DNA, 15 bp, Homo sapiens
atagttaagtcaatt

SEQ ID NO: 1658348 - DNA, 15 bp, Homo sapiens
aatagttaagtcaat

SEQ ID NO: 1658349 - DNA, 15 bp, Homo sapiens
aaatagttaagtcaa

SEQ ID NO: 1658350 - DNA, 15 bp, Homo sapiens
aaaatagttaagtca

SEQ ID NO: 1658351 - DNA, 15 bp, Homo sapiens
gaaaatagttaagtc

SEQ ID NO: 1658352 - DNA, 15 bp, Homo sapiens
ggaaaatagttaagt

SEQ ID NO: 1658353 - DNA, 15 bp, Homo sapiens
aggaaaatagttaag

SEQ ID NO: 1658354 - DNA, 15 bp, Homo sapiens
aaggaaaatagttaa

SEQ ID NO: 1658355 - DNA, 15 bp, Homo sapiens
aaaggaaaatagtta

SEQ ID NO: 1658356 - DNA, 15 bp, Homo sapiens
caaaggaaaatagtt

SEQ ID NO: 1658357 - DNA, 15 bp, Homo sapiens
tcaaaggaaaatagt

SEQ ID NO: 1658358 - DNA, 15 bp, Homo sapiens
ttcaaaggaaaatag

SEQ ID NO: 1658359 - DNA, 15 bp, Homo sapiens
cttcaaaggaaaata

SEQ ID NO: 1658360 - DNA, 15 bp, Homo sapiens
tcttcaaaggaaaat

SEQ ID NO: 1658361 - DNA, 15 bp, Homo sapiens
ctcttcaaaggaaaa

SEQ ID NO: 1658362 - DNA, 15 bp, Homo sapiens
actcttcaaaggaaa

SEQ ID NO: 1658363 - DNA, 15 bp, Homo sapiens
gactcttcaaaggaa

SEQ ID NO: 1658364 - DNA, 15 bp, Homo sapiens
agactcttcaaagga

SEQ ID NO: 1658365 - DNA, 15 bp, Homo sapiens
cagactcttcaaagg

SEQ ID NO: 1658366 - DNA, 15 bp, Homo sapiens
acagactcttcaaag

SEQ ID NO: 1658367 - DNA, 15 bp, Homo sapiens
tacagactcttcaaa

SEQ ID NO: 1658368 - DNA, 15 bp, Homo sapiens
ctacagactcttcaa

SEQ ID NO: 1658369 - DNA, 15 bp, Homo sapiens
gctacagactcttca

SEQ ID NO: 1658370 - DNA, 15 bp, Homo sapiens
tgctacagactcttc

SEQ ID NO: 1658371 - DNA, 15 bp, Homo sapiens
gtgctacagactctt

SEQ ID NO: 1658372 - DNA, 15 bp, Homo sapiens
tgtgctacagactct

SEQ ID NO: 1658373 - DNA, 15 bp, Homo sapiens
ctgtgctacagactc

SEQ ID NO: 1658374 - DNA, 15 bp, Homo sapiens
tctgtgctacagact

SEQ ID NO: 1658375 - DNA, 15 bp, Homo sapiens
ttctgtgctacagac

SEQ ID NO: 1658376 - DNA, 15 bp, Homo sapiens
tttctgtgctacaga

SEQ ID NO: 1658377 - DNA, 15 bp, Homo sapiens
gtttctgtgctacag

SEQ ID NO: 1658378 - DNA, 15 bp, Homo sapiens
tgtttctgtgctaca

SEQ ID NO: 1658379 - DNA, 15 bp, Homo sapiens
ctgtttctgtgctac

SEQ ID NO: 1658380 - DNA, 15 bp, Homo sapiens
actgtttctgtgcta

SEQ ID NO: 1658381 - DNA, 15 bp, Homo sapiens
tactgtttctgtgct

SEQ ID NO: 1658382 - DNA, 15 bp, Homo sapiens
ttactgtttctgtgc

SEQ ID NO: 1658383 - DNA, 15 bp, Homo sapiens
tttactgtttctgtg

SEQ ID NO: 1658384 - DNA, 15 bp, Homo sapiens
ttttactgtttctgt

SEQ ID NO: 1658385 - DNA, 15 bp, Homo sapiens
tttttactgtttctg

SEQ ID NO: 1658386 - DNA, 15 bp, Homo sapiens
ttttttactgtttct

SEQ ID NO: 1658387 - DNA, 15 bp, Homo sapiens
attttttactgtttc

SEQ ID NO: 1658388 - DNA, 15 bp, Homo sapiens
aattttttactgttt

SEQ ID NO: 1658389 - DNA, 15 bp, Homo sapiens
aaattttttactgtt

SEQ ID NO: 1658390 - DNA, 15 bp, Homo sapiens
taaattttttactgt

SEQ ID NO: 1658391 - DNA, 15 bp, Homo sapiens
ttaaattttttactg

SEQ ID NO: 1658392 - DNA, 15 bp, Homo sapiens
gttaaattttttact

SEQ ID NO: 1658393 - DNA, 15 bp, Homo sapiens
agttaaattttttac

SEQ ID NO: 1658394 - DNA, 15 bp, Homo sapiens
aagttaaatttttta

SEQ ID NO: 1658395 - DNA, 15 bp, Homo sapiens
gaagttaaatttttt

SEQ ID NO: 1658396 - DNA, 15 bp, Homo sapiens
tgaagttaaattttt

SEQ ID NO: 1658397 - DNA, 15 bp, Homo sapiens
atgaagttaaatttt

SEQ ID NO: 1658398 - DNA, 15 bp, Homo sapiens
catgaagttaaattt

SEQ ID NO: 1658399 - DNA, 15 bp, Homo sapiens
tcatgaagttaaatt

SEQ ID NO: 1658400 - DNA, 15 bp, Homo sapiens
gtcatgaagttaaat

SEQ ID NO: 1658401 - DNA, 15 bp, Homo sapiens
ggtcatgaagttaaa

SEQ ID NO: 1658402 - DNA, 15 bp, Homo sapiens
aggtcatgaagttaa

SEQ ID NO: 1658403 - DNA, 15 bp, Homo sapiens
taggtcatgaagtta

SEQ ID NO: 1658404 - DNA, 15 bp, Homo sapiens
ttaggtcatgaagtt

SEQ ID NO: 1658405 - DNA, 15 bp, Homo sapiens
attaggtcatgaagt

SEQ ID NO: 1658406 - DNA, 15 bp, Homo sapiens
cattaggtcatgaag

SEQ ID NO: 1658407 - DNA, 15 bp, Homo sapiens
acattaggtcatgaa

SEQ ID NO: 1658408 - DNA, 15 bp, Homo sapiens
tacattaggtcatga

SEQ ID NO: 1658409 - DNA, 15 bp, Homo sapiens
ttacattaggtcatg

SEQ ID NO: 1658410 - DNA, 15 bp, Homo sapiens
tttacattaggtcat

SEQ ID NO: 1658411 - DNA, 15 bp, Homo sapiens
ttttacattaggtca

SEQ ID NO: 1658412 - DNA, 15 bp, Homo sapiens
tttttacattaggtc

SEQ ID NO: 1658413 - DNA, 15 bp, Homo sapiens
ttttttacattaggt

SEQ ID NO: 1658414 - DNA, 15 bp, Homo sapiens
cttttttacattagg

SEQ ID NO: 1658415 - DNA, 15 bp, Homo sapiens
tcttttttacattag

SEQ ID NO: 1658416 - DNA, 15 bp, Homo sapiens
ctcttttttacatta

SEQ ID NO: 1658417 - DNA, 15 bp, Homo sapiens
actcttttttacatt

SEQ ID NO: 1658418 - DNA, 15 bp, Homo sapiens
cactcttttttacat

SEQ ID NO: 1658419 - DNA, 15 bp, Homo sapiens
acactcttttttaca

SEQ ID NO: 1658420 - DNA, 15 bp, Homo sapiens
aacactcttttttac

SEQ ID NO: 1658421 - DNA, 15 bp, Homo sapiens
aaacactctttttta

SEQ ID NO: 1658422 - DNA, 15 bp, Homo sapiens
caaacactctttttt

SEQ ID NO: 1658423 - DNA, 15 bp, Homo sapiens
tcaaacactcttttt

SEQ ID NO: 1658424 - DNA, 15 bp, Homo sapiens
ttcaaacactctttt

SEQ ID NO: 1658425 - DNA, 15 bp, Homo sapiens
cttcaaacactcttt

SEQ ID NO: 1658426 - DNA, 15 bp, Homo sapiens
ccttcaaacactctt

SEQ ID NO: 1658427 - DNA, 15 bp, Homo sapiens
accttcaaacactct

SEQ ID NO: 1658428 - DNA, 15 bp, Homo sapiens
aaccttcaaacactc

SEQ ID NO: 1658429 - DNA, 15 bp, Homo sapiens
aaaccttcaaacact

SEQ ID NO: 1658430 - DNA, 15 bp, Homo sapiens
taaaccttcaaacac

SEQ ID NO: 1658431 - DNA, 15 bp, Homo sapiens
gtaaaccttcaaaca

SEQ ID NO: 1658432 - DNA, 15 bp, Homo sapiens
tgtaaaccttcaaac

SEQ ID NO: 1658433 - DNA, 15 bp, Homo sapiens
gtgtaaaccttcaaa

SEQ ID NO: 1658434 - DNA, 15 bp, Homo sapiens
tgtgtaaaccttcaa

SEQ ID NO: 1658435 - DNA, 15 bp, Homo sapiens
ctgtgtaaaccttca

SEQ ID NO: 1658436 - DNA, 15 bp, Homo sapiens
cctgtgtaaaccttc

SEQ ID NO: 1658437 - DNA, 15 bp, Homo sapiens
acctgtgtaaacctt

SEQ ID NO: 1658438 - DNA, 15 bp, Homo sapiens
gacctgtgtaaacct

SEQ ID NO: 1658439 - DNA, 15 bp, Homo sapiens
ggacctgtgtaaacc

SEQ ID NO: 1658440 - DNA, 15 bp, Homo sapiens
tggacctgtgtaaac

SEQ ID NO: 1658441 - DNA, 15 bp, Homo sapiens
ctggacctgtgtaaa

SEQ ID NO: 1658442 - DNA, 15 bp, Homo sapiens
cctggacctgtgtaa

SEQ ID NO: 1658443 - DNA, 15 bp, Homo sapiens
gcctggacctgtgta

SEQ ID NO: 1658444 - DNA, 15 bp, Homo sapiens
ggcctggacctgtgt

SEQ ID NO: 1658445 - DNA, 15 bp, Homo sapiens
aggcctggacctgtg

SEQ ID NO: 1658446 - DNA, 15 bp, Homo sapiens
aaggcctggacctgt

SEQ ID NO: 1658447 - DNA, 15 bp, Homo sapiens
caaggcctggacctg

SEQ ID NO: 1658448 - DNA, 15 bp, Homo sapiens
gcaaggcctggacct

SEQ ID NO: 1658449 - DNA, 15 bp, Homo sapiens
agcaaggcctggacc

SEQ ID NO: 1658450 - DNA, 15 bp, Homo sapiens
aagcaaggcctggac

SEQ ID NO: 1658451 - DNA, 15 bp, Homo sapiens
aaagcaaggcctgga

SEQ ID NO: 1658452 - DNA, 15 bp, Homo sapiens
caaagcaaggcctgg

SEQ ID NO: 1658453 - DNA, 15 bp, Homo sapiens
acaaagcaaggcctg

SEQ ID NO: 1658454 - DNA, 15 bp, Homo sapiens
aacaaagcaaggcct

SEQ ID NO: 1658455 - DNA, 15 bp, Homo sapiens
gaacaaagcaaggcc

SEQ ID NO: 1658456 - DNA, 15 bp, Homo sapiens
ggaacaaagcaaggc

SEQ ID NO: 1658457 - DNA, 15 bp, Homo sapiens
gggaacaaagcaagg

SEQ ID NO: 1658458 - DNA, 15 bp, Homo sapiens
tgggaacaaagcaag

SEQ ID NO: 1658459 - DNA, 15 bp, Homo sapiens
atgggaacaaagcaa

SEQ ID NO: 1658460 - DNA, 15 bp, Homo sapiens
gatgggaacaaagca

SEQ ID NO: 1658461 - DNA, 15 bp, Homo sapiens
ggatgggaacaaagc

SEQ ID NO: 1658462 - DNA, 15 bp, Homo sapiens
aggatgggaacaaag

SEQ ID NO: 1658463 - DNA, 15 bp, Homo sapiens
aaggatgggaacaaa

SEQ ID NO: 1658464 - DNA, 15 bp, Homo sapiens
caaggatgggaacaa

SEQ ID NO: 1658465 - DNA, 15 bp, Homo sapiens
tcaaggatgggaaca

SEQ ID NO: 1658466 - DNA, 15 bp, Homo sapiens
atcaaggatgggaac

SEQ ID NO: 1658467 - DNA, 15 bp, Homo sapiens
catcaaggatgggaa

SEQ ID NO: 1658468 - DNA, 15 bp, Homo sapiens
gcatcaaggatggga

SEQ ID NO: 1658469 - DNA, 15 bp, Homo sapiens
agcatcaaggatggg

SEQ ID NO: 1658470 - DNA, 15 bp, Homo sapiens
cagcatcaaggatgg

SEQ ID NO: 1658471 - DNA, 15 bp, Homo sapiens
gcagcatcaaggatg

SEQ ID NO: 1658472 - DNA, 15 bp, Homo sapiens
tgcagcatcaaggat

SEQ ID NO: 1658473 - DNA, 15 bp, Homo sapiens
gtgcagcatcaagga

SEQ ID NO: 1658474 - DNA, 15 bp, Homo sapiens
agtgcagcatcaagg

SEQ ID NO: 1658475 - DNA, 15 bp, Homo sapiens
tagtgcagcatcaag

SEQ ID NO: 1658476 - DNA, 15 bp, Homo sapiens
ttagtgcagcatcaa

SEQ ID NO: 1658477 - DNA, 15 bp, Homo sapiens
attagtgcagcatca

SEQ ID NO: 1658478 - DNA, 15 bp, Homo sapiens
aattagtgcagcatc

SEQ ID NO: 1658479 - DNA, 15 bp, Homo sapiens
caattagtgcagcat

SEQ ID NO: 1658480 - DNA, 15 bp, Homo sapiens
tcaattagtgcagca

SEQ ID NO: 1658481 - DNA, 15 bp, Homo sapiens
gtcaattagtgcagc

SEQ ID NO: 1658482 - DNA, 15 bp, Homo sapiens
agtcaattagtgcag

SEQ ID NO: 1658483 - DNA, 15 bp, Homo sapiens
tagtcaattagtgca

SEQ ID NO: 1658484 - DNA, 15 bp, Homo sapiens
ttagtcaattagtgc

SEQ ID NO: 1658485 - DNA, 15 bp, Homo sapiens
attagtcaattagtg

SEQ ID NO: 1658486 - DNA, 15 bp, Homo sapiens
gattagtcaattagt

SEQ ID NO: 1658487 - DNA, 15 bp, Homo sapiens
tgattagtcaattag

SEQ ID NO: 1658488 - DNA, 15 bp, Homo sapiens
gtgattagtcaatta

SEQ ID NO: 1658489 - DNA, 15 bp, Homo sapiens
ggtgattagtcaatt

SEQ ID NO: 1658490 - DNA, 15 bp, Homo sapiens
aggtgattagtcaat

SEQ ID NO: 1658491 - DNA, 15 bp, Homo sapiens
taggtgattagtcaa

SEQ ID NO: 1658492 - DNA, 15 bp, Homo sapiens
gtaggtgattagtca

SEQ ID NO: 1658493 - DNA, 15 bp, Homo sapiens
agtaggtgattagtc

SEQ ID NO: 1658494 - DNA, 15 bp, Homo sapiens
aagtaggtgattagt

SEQ ID NO: 1658495 - DNA, 15 bp, Homo sapiens
taagtaggtgattag

SEQ ID NO: 1658496 - DNA, 15 bp, Homo sapiens
ataagtaggtgatta

SEQ ID NO: 1658497 - DNA, 15 bp, Homo sapiens
gataagtaggtgatt

SEQ ID NO: 1658498 - DNA, 15 bp, Homo sapiens
tgataagtaggtgat

SEQ ID NO: 1658499 - DNA, 15 bp, Homo sapiens
ctgataagtaggtga

SEQ ID NO: 1658500 - DNA, 15 bp, Homo sapiens
tctgataagtaggtg

SEQ ID NO: 1658501 - DNA, 15 bp, Homo sapiens
gtctgataagtaggt

SEQ ID NO: 1658502 - DNA, 15 bp, Homo sapiens
tgtctgataagtagg

SEQ ID NO: 1658503 - DNA, 15 bp, Homo sapiens
ctagggctggggggt

SEQ ID NO: 1658504 - DNA, 15 bp, Homo sapiens
gctagggctgggggg

SEQ ID NO: 1658505 - DNA, 15 bp, Homo sapiens
ggctagggctggggg

SEQ ID NO: 1658506 - DNA, 15 bp, Homo sapiens
gggctagggctgggg

SEQ ID NO: 1658507 - DNA, 15 bp, Homo sapiens
ggggctagggctggg

SEQ ID NO: 1658508 - DNA, 15 bp, Homo sapiens
tggggctagggctgg

SEQ ID NO: 1658509 - DNA, 15 bp, Homo sapiens
ctggggctagggctg

SEQ ID NO: 1658510 - DNA, 15 bp, Homo sapiens
actggggctagggct

SEQ ID NO: 1658511 - DNA, 15 bp, Homo sapiens
gactggggctagggc

SEQ ID NO: 1658512 - DNA, 15 bp, Homo sapiens
ggactggggctaggg

SEQ ID NO: 1658513 - DNA, 15 bp, Homo sapiens
gggactggggctagg

SEQ ID NO: 1658514 - DNA, 15 bp, Homo sapiens
tgggactggggctag

SEQ ID NO: 1658515 - DNA, 15 bp, Homo sapiens
ctgggactggggcta

SEQ ID NO: 1658516 - DNA, 15 bp, Homo sapiens
actgggactggggct

SEQ ID NO: 1658517 - DNA, 15 bp, Homo sapiens
gactgggactggggc

SEQ ID NO: 1658518 - DNA, 15 bp, Homo sapiens
ggactgggactgggg

SEQ ID NO: 1658519 - DNA, 15 bp, Homo sapiens
aggactgggactggg

SEQ ID NO: 1658520 - DNA, 15 bp, Homo sapiens
taggactgggactgg

SEQ ID NO: 1658521 - DNA, 15 bp, Homo sapiens
ctaggactgggactg

SEQ ID NO: 1658522 - DNA, 15 bp, Homo sapiens
actaggactgggact

SEQ ID NO: 1658523 - DNA, 15 bp, Homo sapiens
aactaggactgggac

SEQ ID NO: 1658524 - DNA, 15 bp, Homo sapiens
gaactaggactggga

SEQ ID NO: 1658525 - DNA, 15 bp, Homo sapiens
ggaactaggactggg

SEQ ID NO: 1658526 - DNA, 15 bp, Homo sapiens
aggaactaggactgg

SEQ ID NO: 1658527 - DNA, 15 bp, Homo sapiens
gaggaactaggactg

SEQ ID NO: 1658528 - DNA, 15 bp, Homo sapiens
tgaggaactaggact

SEQ ID NO: 1658529 - DNA, 15 bp, Homo sapiens
ctgaggaactaggac

SEQ ID NO: 1658530 - DNA, 15 bp, Homo sapiens
actgaggaactagga

SEQ ID NO: 1658531 - DNA, 15 bp, Homo sapiens
gactgaggaactagg

SEQ ID NO: 1658532 - DNA, 15 bp, Homo sapiens
ggactgaggaactag

SEQ ID NO: 1658533 - DNA, 15 bp, Homo sapiens
gggactgaggaacta

SEQ ID NO: 1658534 - DNA, 15 bp, Homo sapiens
cgggactgaggaact

SEQ ID NO: 1658535 - DNA, 15 bp, Homo sapiens
gcgggactgaggaac

SEQ ID NO: 1658536 - DNA, 15 bp, Homo sapiens
ggcgggactgaggaa

SEQ ID NO: 1658537 - DNA, 15 bp, Homo sapiens
gggcgggactgagga

SEQ ID NO: 1658538 - DNA, 15 bp, Homo sapiens
tgggcgggactgagg

SEQ ID NO: 1658539 - DNA, 15 bp, Homo sapiens
ctgggcgggactgag

SEQ ID NO: 1658540 - DNA, 15 bp, Homo sapiens
gctgggcgggactga

SEQ ID NO: 1658541 - DNA, 15 bp, Homo sapiens
agctgggcgggactg

SEQ ID NO: 1658542 - DNA, 15 bp, Homo sapiens
aagctgggcgggact

SEQ ID NO: 1658543 - DNA, 15 bp, Homo sapiens
gaagctgggcgggac

SEQ ID NO: 1658544 - DNA, 15 bp, Homo sapiens
agaagctgggcggga

SEQ ID NO: 1658545 - DNA, 15 bp, Homo sapiens
gagaagctgggcggg

SEQ ID NO: 1658546 - DNA, 15 bp, Homo sapiens
agagaagctgggcgg

SEQ ID NO: 1658547 - DNA, 15 bp, Homo sapiens
gagagaagctgggcg

SEQ ID NO: 1658548 - DNA, 15 bp, Homo sapiens
cgagagaagctgggc

SEQ ID NO: 1658549 - DNA, 15 bp, Homo sapiens
tcgagagaagctggg

SEQ ID NO: 1658550 - DNA, 15 bp, Homo sapiens
ttcgagagaagctgg

SEQ ID NO: 1658551 - DNA, 15 bp, Homo sapiens
tttcgagagaagctg

SEQ ID NO: 1658552 - DNA, 15 bp, Homo sapiens
ctttcgagagaagct

SEQ ID NO: 1658553 - DNA, 15 bp, Homo sapiens
actttcgagagaagc

SEQ ID NO: 1658554 - DNA, 15 bp, Homo sapiens
gactttcgagagaag

SEQ ID NO: 1658555 - DNA, 15 bp, Homo sapiens
tgactttcgagagaa

SEQ ID NO: 1658556 - DNA, 15 bp, Homo sapiens
gtgactttcgagaga

SEQ ID NO: 1658557 - DNA, 15 bp, Homo sapiens
agtgactttcgagag

SEQ ID NO: 1658558 - DNA, 15 bp, Homo sapiens
gagtgactttcgaga

SEQ ID NO: 1658559 - DNA, 15 bp, Homo sapiens
agagtgactttcgag

SEQ ID NO: 1658560 - DNA, 15 bp, Homo sapiens
tagagtgactttcga

SEQ ID NO: 1658561 - DNA, 15 bp, Homo sapiens
ttagagtgactttcg

SEQ ID NO: 1658562 - DNA, 15 bp, Homo sapiens
attagagtgactttc

SEQ ID NO: 1658563 - DNA, 15 bp, Homo sapiens
aattagagtgacttt

SEQ ID NO: 1658564 - DNA, 15 bp, Homo sapiens
aaattagagtgactt

SEQ ID NO: 1658565 - DNA, 15 bp, Homo sapiens
aaaattagagtgact

SEQ ID NO: 1658566 - DNA, 15 bp, Homo sapiens
gaaaattagagtgac

SEQ ID NO: 1658567 - DNA, 15 bp, Homo sapiens
tgaaaattagagtga

SEQ ID NO: 1658568 - DNA, 15 bp, Homo sapiens
atgaaaattagagtg

SEQ ID NO: 1658569 - DNA, 15 bp, Homo sapiens
aatgaaaattagagt

SEQ ID NO: 1658570 - DNA, 15 bp, Homo sapiens
caatgaaaattagag

SEQ ID NO: 1658571 - DNA, 15 bp, Homo sapiens
tcaatgaaaattaga

SEQ ID NO: 1658572 - DNA, 15 bp, Homo sapiens
atcaatgaaaattag

SEQ ID NO: 1658573 - DNA, 15 bp, Homo sapiens
aatcaatgaaaatta

SEQ ID NO: 1658574 - DNA, 15 bp, Homo sapiens
gaatcaatgaaaatt

SEQ ID NO: 1658575 - DNA, 15 bp, Homo sapiens
tgaatcaatgaaaat

SEQ ID NO: 1658576 - DNA, 15 bp, Homo sapiens
ctgaatcaatgaaaa

SEQ ID NO: 1658577 - DNA, 15 bp, Homo sapiens
actgaatcaatgaaa

SEQ ID NO: 1658578 - DNA, 15 bp, Homo sapiens
cactgaatcaatgaa

SEQ ID NO: 1658579 - DNA, 15 bp, Homo sapiens
gcactgaatcaatga

SEQ ID NO: 1658580 - DNA, 15 bp, Homo sapiens
agcactgaatcaatg

SEQ ID NO: 1658581 - DNA, 15 bp, Homo sapiens
gagcactgaatcaat

SEQ ID NO: 1658582 - DNA, 15 bp, Homo sapiens
tgagcactgaatcaa

SEQ ID NO: 1658583 - DNA, 15 bp, Homo sapiens
ttgagcactgaatca

SEQ ID NO: 1658584 - DNA, 15 bp, Homo sapiens
tttgagcactgaatc

SEQ ID NO: 1658585 - DNA, 15 bp, Homo sapiens
ttttgagcactgaat

SEQ ID NO: 1658586 - DNA, 15 bp, Homo sapiens
attttgagcactgaa

SEQ ID NO: 1658587 - DNA, 15 bp, Homo sapiens
tattttgagcactga

SEQ ID NO: 1658588 - DNA, 15 bp, Homo sapiens
ttattttgagcactg

SEQ ID NO: 1658589 - DNA, 15 bp, Homo sapiens
cttattttgagcact

SEQ ID NO: 1658590 - DNA, 15 bp, Homo sapiens
acttattttgagcac

SEQ ID NO: 1658591 - DNA, 15 bp, Homo sapiens
aacttattttgagca

SEQ ID NO: 1658592 - DNA, 15 bp, Homo sapiens
caacttattttgagc

SEQ ID NO: 1658593 - DNA, 15 bp, Homo sapiens
acaacttattttgag

SEQ ID NO: 1658594 - DNA, 15 bp, Homo sapiens
gacaacttattttga

SEQ ID NO: 1658595 - DNA, 15 bp, Homo sapiens
ggacaacttattttg

SEQ ID NO: 1658596 - DNA, 15 bp, Homo sapiens
tggacaacttatttt

SEQ ID NO: 1658597 - DNA, 15 bp, Homo sapiens
atggacaacttattt

SEQ ID NO: 1658598 - DNA, 15 bp, Homo sapiens
aatggacaacttatt

SEQ ID NO: 1658599 - DNA, 15 bp, Homo sapiens
caatggacaacttat

SEQ ID NO: 1658600 - DNA, 15 bp, Homo sapiens
gcaatggacaactta

SEQ ID NO: 1658601 - DNA, 15 bp, Homo sapiens
agcaatggacaactt

SEQ ID NO: 1658602 - DNA, 15 bp, Homo sapiens
aagcaatggacaact

SEQ ID NO: 1658603 - DNA, 15 bp, Homo sapiens
taagcaatggacaac

SEQ ID NO: 1658604 - DNA, 15 bp, Homo sapiens
ataagcaatggacaa

SEQ ID NO: 1658605 - DNA, 15 bp, Homo sapiens
gataagcaatggaca

SEQ ID NO: 1658606 - DNA, 15 bp, Homo sapiens
ggataagcaatggac

SEQ ID NO: 1658607 - DNA, 15 bp, Homo sapiens
aggataagcaatgga

SEQ ID NO: 1658608 - DNA, 15 bp, Homo sapiens
taggataagcaatgg

SEQ ID NO: 1658609 - DNA, 15 bp, Homo sapiens
ataggataagcaatg

SEQ ID NO: 1658610 - DNA, 15 bp, Homo sapiens
aataggataagcaat

SEQ ID NO: 1658611 - DNA, 15 bp, Homo sapiens
taataggataagcaa

SEQ ID NO: 1658612 - DNA, 15 bp, Homo sapiens
ataataggataagca

SEQ ID NO: 1658613 - DNA, 15 bp, Homo sapiens
tataataggataagc

SEQ ID NO: 1658614 - DNA, 15 bp, Homo sapiens
gtataataggataag

SEQ ID NO: 1658615 - DNA, 15 bp, Homo sapiens
agtataataggataa

SEQ ID NO: 1658616 - DNA, 15 bp, Homo sapiens
cagtataataggata

SEQ ID NO: 1658617 - DNA, 15 bp, Homo sapiens
ccagtataataggat

SEQ ID NO: 1658618 - DNA, 15 bp, Homo sapiens
cccagtataatagga

SEQ ID NO: 1658619 - DNA, 15 bp, Homo sapiens
tcccagtataatagg

SEQ ID NO: 1658620 - DNA, 15 bp, Homo sapiens
atcccagtataatag

SEQ ID NO: 1658621 - DNA, 15 bp, Homo sapiens
tatcccagtataata

SEQ ID NO: 1658622 - DNA, 15 bp, Homo sapiens
atatcccagtataat

SEQ ID NO: 1658623 - DNA, 15 bp, Homo sapiens
aatatcccagtataa

SEQ ID NO: 1658624 - DNA, 15 bp, Homo sapiens
gaatatcccagtata

SEQ ID NO: 1658625 - DNA, 15 bp, Homo sapiens
ggaatatcccagtat

SEQ ID NO: 1658626 - DNA, 15 bp, Homo sapiens
cggaatatcccagta

SEQ ID NO: 1658627 - DNA, 15 bp, Homo sapiens
acggaatatcccagt

SEQ ID NO: 1658628 - DNA, 15 bp, Homo sapiens
aacggaatatcccag

SEQ ID NO: 1658629 - DNA, 15 bp, Homo sapiens
aaacggaatatccca

SEQ ID NO: 1658630 - DNA, 15 bp, Homo sapiens
taaacggaatatccc

SEQ ID NO: 1658631 - DNA, 15 bp, Homo sapiens
gtaaacggaatatcc

SEQ ID NO: 1658632 - DNA, 15 bp, Homo sapiens
ggtaaacggaatatc

SEQ ID NO: 1658633 - DNA, 15 bp, Homo sapiens
gggtaaacggaatat

SEQ ID NO: 1658634 - DNA, 15 bp, Homo sapiens
agggtaaacggaata

SEQ ID NO: 1658635 - DNA, 15 bp, Homo sapiens
aagggtaaacggaat

SEQ ID NO: 1658636 - DNA, 15 bp, Homo sapiens
caagggtaaacggaa

SEQ ID NO: 1658637 - DNA, 15 bp, Homo sapiens
ccaagggtaaacgga

SEQ ID NO: 1658638 - DNA, 15 bp, Homo sapiens
gccaagggtaaacgg

SEQ ID NO: 1658639 - DNA, 15 bp, Homo sapiens
tgccaagggtaaacg

SEQ ID NO: 1658640 - DNA, 15 bp, Homo sapiens
atgccaagggtaaac

SEQ ID NO: 1658641 - DNA, 15 bp, Homo sapiens
aatgccaagggtaaa

SEQ ID NO: 1658642 - DNA, 15 bp, Homo sapiens
caatgccaagggtaa

SEQ ID NO: 1658643 - DNA, 15 bp, Homo sapiens
gcaatgccaagggta

SEQ ID NO: 1658644 - DNA, 15 bp, Homo sapiens
agcaatgccaagggt

SEQ ID NO: 1658645 - DNA, 15 bp, Homo sapiens
cagcaatgccaaggg

SEQ ID NO: 1658646 - DNA, 15 bp, Homo sapiens
tcagcaatgccaagg

SEQ ID NO: 1658647 - DNA, 15 bp, Homo sapiens
atcagcaatgccaag

SEQ ID NO: 1658648 - DNA, 15 bp, Homo sapiens
gatcagcaatgccaa

SEQ ID NO: 1658649 - DNA, 15 bp, Homo sapiens
agatcagcaatgcca

SEQ ID NO: 1658650 - DNA, 15 bp, Homo sapiens
aagatcagcaatgcc

SEQ ID NO: 1658651 - DNA, 15 bp, Homo sapiens
gaagatcagcaatgc

SEQ ID NO: 1658652 - DNA, 15 bp, Homo sapiens
tgaagatcagcaatg

SEQ ID NO: 1658653 - DNA, 15 bp, Homo sapiens
ctgaagatcagcaat

SEQ ID NO: 1658654 - DNA, 15 bp, Homo sapiens
actgaagatcagcaa

SEQ ID NO: 1658655 - DNA, 15 bp, Homo sapiens
tactgaagatcagca

SEQ ID NO: 1658656 - DNA, 15 bp, Homo sapiens
gtactgaagatcagc

SEQ ID NO: 1658657 - DNA, 15 bp, Homo sapiens
agtactgaagatcag

SEQ ID NO: 1658658 - DNA, 15 bp, Homo sapiens
cagtactgaagatca

SEQ ID NO: 1658659 - DNA, 15 bp, Homo sapiens
tcagtactgaagatc

SEQ ID NO: 1658660 - DNA, 15 bp, Homo sapiens
gtcagtactgaagat

SEQ ID NO: 1658661 - DNA, 15 bp, Homo sapiens
agtcagtactgaaga

SEQ ID NO: 1658662 - DNA, 15 bp, Homo sapiens
gagtcagtactgaag

SEQ ID NO: 1658663 - DNA, 15 bp, Homo sapiens
ggagtcagtactgaa

SEQ ID NO: 1658664 - DNA, 15 bp, Homo sapiens
aggagtcagtactga

SEQ ID NO: 1658665 - DNA, 15 bp, Homo sapiens
aaggagtcagtactg

SEQ ID NO: 1658666 - DNA, 15 bp, Homo sapiens
caaggagtcagtact

SEQ ID NO: 1658667 - DNA, 15 bp, Homo sapiens
tcaaggagtcagtac

SEQ ID NO: 1658668 - DNA, 15 bp, Homo sapiens
gtcaaggagtcagta

SEQ ID NO: 1658669 - DNA, 15 bp, Homo sapiens
ggtcaaggagtcagt

SEQ ID NO: 1658670 - DNA, 15 bp, Homo sapiens
tggtcaaggagtcag

SEQ ID NO: 1658671 - DNA, 15 bp, Homo sapiens
atggtcaaggagtca

SEQ ID NO: 1658672 - DNA, 15 bp, Homo sapiens
aatggtcaaggagtc

SEQ ID NO: 1658673 - DNA, 15 bp, Homo sapiens
aaatggtcaaggagt

SEQ ID NO: 1658674 - DNA, 15 bp, Homo sapiens
aaaatggtcaaggag

SEQ ID NO: 1658675 - DNA, 15 bp, Homo sapiens
gaaaatggtcaagga

SEQ ID NO: 1658676 - DNA, 15 bp, Homo sapiens
tgaaaatggtcaagg

SEQ ID NO: 1658677 - DNA, 15 bp, Homo sapiens
ctgaaaatggtcaag

SEQ ID NO: 1658678 - DNA, 15 bp, Homo sapiens
actgaaaatggtcaa

SEQ ID NO: 1658679 - DNA, 15 bp, Homo sapiens
aactgaaaatggtca

SEQ ID NO: 1658680 - DNA, 15 bp, Homo sapiens
taactgaaaatggtc

SEQ ID NO: 1658681 - DNA, 15 bp, Homo sapiens
ttaactgaaaatggt

SEQ ID NO: 1658682 - DNA, 15 bp, Homo sapiens
attaactgaaaatgg

SEQ ID NO: 1658683 - DNA, 15 bp, Homo sapiens
cattaactgaaaatg

SEQ ID NO: 1658684 - DNA, 15 bp, Homo sapiens
gcattaactgaaaat

SEQ ID NO: 1658685 - DNA, 15 bp, Homo sapiens
tgcattaactgaaaa

SEQ ID NO: 1658686 - DNA, 15 bp, Homo sapiens
atgcattaactgaaa

SEQ ID NO: 1658687 - DNA, 15 bp, Homo sapiens
tatgcattaactgaa

SEQ ID NO: 1658688 - DNA, 15 bp, Homo sapiens
gtatgcattaactga

SEQ ID NO: 1658689 - DNA, 15 bp, Homo sapiens
tgtatgcattaactg

SEQ ID NO: 1658690 - DNA, 15 bp, Homo sapiens
ttgtatgcattaact

SEQ ID NO: 1658691 - DNA, 15 bp, Homo sapiens
attgtatgcattaac

SEQ ID NO: 1658692 - DNA, 15 bp, Homo sapiens
gattgtatgcattaa

SEQ ID NO: 1658693 - DNA, 15 bp, Homo sapiens
ggattgtatgcatta

SEQ ID NO: 1658694 - DNA, 15 bp, Homo sapiens
gggattgtatgcatt

SEQ ID NO: 1658695 - DNA, 15 bp, Homo sapiens
tgggattgtatgcat

SEQ ID NO: 1658696 - DNA, 15 bp, Homo sapiens
atgggattgtatgca

SEQ ID NO: 1658697 - DNA, 15 bp, Homo sapiens
aatgggattgtatgc

SEQ ID NO: 1658698 - DNA, 15 bp, Homo sapiens
aaatgggattgtatg

SEQ ID NO: 1658699 - DNA, 15 bp, Homo sapiens
caaatgggattgtat

SEQ ID NO: 1658700 - DNA, 15 bp, Homo sapiens
acaaatgggattgta

SEQ ID NO: 1658701 - DNA, 15 bp, Homo sapiens
gacaaatgggattgt

SEQ ID NO: 1658702 - DNA, 15 bp, Homo sapiens
agacaaatgggattg

SEQ ID NO: 1658703 - DNA, 15 bp, Homo sapiens
cagacaaatgggatt

SEQ ID NO: 1658704 - DNA, 15 bp, Homo sapiens
acagacaaatgggat

SEQ ID NO: 1658705 - DNA, 15 bp, Homo sapiens
cacagacaaatggga

SEQ ID NO: 1658706 - DNA, 15 bp, Homo sapiens
tcacagacaaatggg

SEQ ID NO: 1658707 - DNA, 15 bp, Homo sapiens
atcacagacaaatgg

SEQ ID NO: 1658708 - DNA, 15 bp, Homo sapiens
gatcacagacaaatg

SEQ ID NO: 1658709 - DNA, 15 bp, Homo sapiens
agatcacagacaaat

SEQ ID NO: 1658710 - DNA, 15 bp, Homo sapiens
gagatcacagacaaa

SEQ ID NO: 1658711 - DNA, 15 bp, Homo sapiens
tgagatcacagacaa

SEQ ID NO: 1658712 - DNA, 15 bp, Homo sapiens
ctgagatcacagaca

SEQ ID NO: 1658713 - DNA, 15 bp, Homo sapiens
cctgagatcacagac

SEQ ID NO: 1658714 - DNA, 15 bp, Homo sapiens
tcctgagatcacaga

SEQ ID NO: 1658715 - DNA, 15 bp, Homo sapiens
gtcctgagatcacag

SEQ ID NO: 1658716 - DNA, 15 bp, Homo sapiens
tgtcctgagatcaca

SEQ ID NO: 1658717 - DNA, 15 bp, Homo sapiens
ttgtcctgagatcac

SEQ ID NO: 1658718 - DNA, 15 bp, Homo sapiens
tttgtcctgagatca

SEQ ID NO: 1658719 - DNA, 15 bp, Homo sapiens
ctttgtcctgagatc

SEQ ID NO: 1658720 - DNA, 15 bp, Homo sapiens
tctttgtcctgagat

SEQ ID NO: 1658721 - DNA, 15 bp, Homo sapiens
ttctttgtcctgaga

SEQ ID NO: 1658722 - DNA, 15 bp, Homo sapiens
attctttgtcctgag

SEQ ID NO: 1658723 - DNA, 15 bp, Homo sapiens
aattctttgtcctga

SEQ ID NO: 1658724 - DNA, 15 bp, Homo sapiens
aaattctttgtcctg

SEQ ID NO: 1658725 - DNA, 15 bp, Homo sapiens
gaaattctttgtcct

SEQ ID NO: 1658726 - DNA, 15 bp, Homo sapiens
ggaaattctttgtcc

SEQ ID NO: 1658727 - DNA, 15 bp, Homo sapiens
aggaaattctttgtc

SEQ ID NO: 1658728 - DNA, 15 bp, Homo sapiens
aaggaaattctttgt

SEQ ID NO: 1658729 - DNA, 15 bp, Homo sapiens
taaggaaattctttg

SEQ ID NO: 1658730 - DNA, 15 bp, Homo sapiens
gtaaggaaattcttt

SEQ ID NO: 1658731 - DNA, 15 bp, Homo sapiens
agtaaggaaattctt

SEQ ID NO: 1658732 - DNA, 15 bp, Homo sapiens
gagtaaggaaattct

SEQ ID NO: 1658733 - DNA, 15 bp, Homo sapiens
cgagtaaggaaattc

SEQ ID NO: 1658734 - DNA, 15 bp, Homo sapiens
ccgagtaaggaaatt

SEQ ID NO: 1658735 - DNA, 15 bp, Homo sapiens
accgagtaaggaaat

SEQ ID NO: 1658736 - DNA, 15 bp, Homo sapiens
taccgagtaaggaaa

SEQ ID NO: 1658737 - DNA, 15 bp, Homo sapiens
gtaccgagtaaggaa

SEQ ID NO: 1658738 - DNA, 15 bp, Homo sapiens
cgtaccgagtaagga

SEQ ID NO: 1658739 - DNA, 15 bp, Homo sapiens
acgtaccgagtaagg

SEQ ID NO: 1658740 - DNA, 15 bp, Homo sapiens
aacgtaccgagtaag

SEQ ID NO: 1658741 - DNA, 15 bp, Homo sapiens
caacgtaccgagtaa

SEQ ID NO: 1658742 - DNA, 15 bp, Homo sapiens
tcaacgtaccgagta

SEQ ID NO: 1658743 - DNA, 15 bp, Homo sapiens
ttcaacgtaccgagt

SEQ ID NO: 1658744 - DNA, 15 bp, Homo sapiens
cttcaacgtaccgag

SEQ ID NO: 1658745 - DNA, 15 bp, Homo sapiens
acttcaacgtaccga

SEQ ID NO: 1658746 - DNA, 15 bp, Homo sapiens
aacttcaacgtaccg

SEQ ID NO: 1658747 - DNA, 15 bp, Homo sapiens
taacttcaacgtacc

SEQ ID NO: 1658748 - DNA, 15 bp, Homo sapiens
ctaacttcaacgtac

SEQ ID NO: 1658749 - DNA, 15 bp, Homo sapiens
cctaacttcaacgta

SEQ ID NO: 1658750 - DNA, 15 bp, Homo sapiens
ccctaacttcaacgt

SEQ ID NO: 1658751 - DNA, 15 bp, Homo sapiens
tccctaacttcaacg

SEQ ID NO: 1658752 - DNA, 15 bp, Homo sapiens
ttccctaacttcaac

SEQ ID NO: 1658753 - DNA, 15 bp, Homo sapiens
attccctaacttcaa

SEQ ID NO: 1658754 - DNA, 15 bp, Homo sapiens
cattccctaacttca

SEQ ID NO: 1658755 - DNA, 15 bp, Homo sapiens
acattccctaacttc

SEQ ID NO: 1658756 - DNA, 15 bp, Homo sapiens
gacattccctaactt

SEQ ID NO: 1658757 - DNA, 15 bp, Homo sapiens
tgacattccctaact

SEQ ID NO: 1658758 - DNA, 15 bp, Homo sapiens
ttgacattccctaac

SEQ ID NO: 1658759 - DNA, 15 bp, Homo sapiens
attgacattccctaa

SEQ ID NO: 1658760 - DNA, 15 bp, Homo sapiens
aattgacattcccta

SEQ ID NO: 1658761 - DNA, 15 bp, Homo sapiens
caattgacattccct

SEQ ID NO: 1658762 - DNA, 15 bp, Homo sapiens
tcaattgacattccc

SEQ ID NO: 1658763 - DNA, 15 bp, Homo sapiens
ctcaattgacattcc

SEQ ID NO: 1658764 - DNA, 15 bp, Homo sapiens
tctcaattgacattc

SEQ ID NO: 1658765 - DNA, 15 bp, Homo sapiens
ctctcaattgacatt

SEQ ID NO: 1658766 - DNA, 15 bp, Homo sapiens
gctctcaattgacat

SEQ ID NO: 1658767 - DNA, 15 bp, Homo sapiens
agctctcaattgaca

SEQ ID NO: 1658768 - DNA, 15 bp, Homo sapiens
aagctctcaattgac

SEQ ID NO: 1658769 - DNA, 15 bp, Homo sapiens
aaagctctcaattga

SEQ ID NO: 1658770 - DNA, 15 bp, Homo sapiens
gaaagctctcaattg

SEQ ID NO: 1658771 - DNA, 15 bp, Homo sapiens
agaaagctctcaatt

SEQ ID NO: 1658772 - DNA, 15 bp, Homo sapiens
tagaaagctctcaat

SEQ ID NO: 1658773 - DNA, 15 bp, Homo sapiens
atagaaagctctcaa

SEQ ID NO: 1658774 - DNA, 15 bp, Homo sapiens
gatagaaagctctca

SEQ ID NO: 1658775 - DNA, 15 bp, Homo sapiens
tgatagaaagctctc

SEQ ID NO: 1658776 - DNA, 15 bp, Homo sapiens
ctgatagaaagctct

SEQ ID NO: 1658777 - DNA, 15 bp, Homo sapiens
tctgatagaaagctc

SEQ ID NO: 1658778 - DNA, 15 bp, Homo sapiens
ctctgatagaaagct

SEQ ID NO: 1658779 - DNA, 15 bp, Homo sapiens
gctctgatagaaagc

SEQ ID NO: 1658780 - DNA, 15 bp, Homo sapiens
tgctctgatagaaag

SEQ ID NO: 1658781 - DNA, 15 bp, Homo sapiens
atgctctgatagaaa

SEQ ID NO: 1658782 - DNA, 15 bp, Homo sapiens
aatgctctgatagaa

SEQ ID NO: 1658783 - DNA, 15 bp, Homo sapiens
taatgctctgataga

SEQ ID NO: 1658784 - DNA, 15 bp, Homo sapiens
ataatgctctgatag

SEQ ID NO: 1658785 - DNA, 15 bp, Homo sapiens
aataatgctctgata

SEQ ID NO: 1658786 - DNA, 15 bp, Homo sapiens
caataatgctctgat

SEQ ID NO: 1658787 - DNA, 15 bp, Homo sapiens
gcaataatgctctga

SEQ ID NO: 1658788 - DNA, 15 bp, Homo sapiens
ggcaataatgctctg

SEQ ID NO: 1658789 - DNA, 15 bp, Homo sapiens
gggcaataatgctct

SEQ ID NO: 1658790 - DNA, 15 bp, Homo sapiens
tgggcaataatgctc

SEQ ID NO: 1658791 - DNA, 15 bp, Homo sapiens
gtgggcaataatgct

SEQ ID NO: 1658792 - DNA, 15 bp, Homo sapiens
tgtgggcaataatgc

SEQ ID NO: 1658793 - DNA, 15 bp, Homo sapiens
ttgtgggcaataatg

SEQ ID NO: 1658794 - DNA, 15 bp, Homo sapiens
attgtgggcaataat

SEQ ID NO: 1658795 - DNA, 15 bp, Homo sapiens
aattgtgggcaataa

SEQ ID NO: 1658796 - DNA, 15 bp, Homo sapiens
aaattgtgggcaata

SEQ ID NO: 1658797 - DNA, 15 bp, Homo sapiens
caaattgtgggcaat

SEQ ID NO: 1658798 - DNA, 15 bp, Homo sapiens
tcaaattgtgggcaa

SEQ ID NO: 1658799 - DNA, 15 bp, Homo sapiens
ctcaaattgtgggca

SEQ ID NO: 1658800 - DNA, 15 bp, Homo sapiens
actcaaattgtgggc

SEQ ID NO: 1658801 - DNA, 15 bp, Homo sapiens
aactcaaattgtggg

SEQ ID NO: 1658802 - DNA, 15 bp, Homo sapiens
taactcaaattgtgg

SEQ ID NO: 1658803 - DNA, 15 bp, Homo sapiens
gtaactcaaattgtg

SEQ ID NO: 1658804 - DNA, 15 bp, Homo sapiens
agtaactcaaattgt

SEQ ID NO: 1658805 - DNA, 15 bp, Homo sapiens
aagtaactcaaattg

SEQ ID NO: 1658806 - DNA, 15 bp, Homo sapiens
taagtaactcaaatt

SEQ ID NO: 1658807 - DNA, 15 bp, Homo sapiens
ataagtaactcaaat

SEQ ID NO: 1658808 - DNA, 15 bp, Homo sapiens
gataagtaactcaaa

SEQ ID NO: 1658809 - DNA, 15 bp, Homo sapiens
tgataagtaactcaa

SEQ ID NO: 1658810 - DNA, 15 bp, Homo sapiens
atgataagtaactca

SEQ ID NO: 1658811 - DNA, 15 bp, Homo sapiens
aatgataagtaactc

SEQ ID NO: 1658812 - DNA, 15 bp, Homo sapiens
aaatgataagtaact

SEQ ID NO: 1658813 - DNA, 15 bp, Homo sapiens
aaaatgataagtaac

SEQ ID NO: 1658814 - DNA, 15 bp, Homo sapiens
gaaaatgataagtaa

SEQ ID NO: 1658815 - DNA, 15 bp, Homo sapiens
agaaaatgataagta

SEQ ID NO: 1658816 - DNA, 15 bp, Homo sapiens
gagaaaatgataagt

SEQ ID NO: 1658817 - DNA, 15 bp, Homo sapiens
cgagaaaatgataag

SEQ ID NO: 1658818 - DNA, 15 bp, Homo sapiens
tcgagaaaatgataa

SEQ ID NO: 1658819 - DNA, 15 bp, Homo sapiens
atcgagaaaatgata

SEQ ID NO: 1658820 - DNA, 15 bp, Homo sapiens
gatcgagaaaatgat

SEQ ID NO: 1658821 - DNA, 15 bp, Homo sapiens
ggatcgagaaaatga

SEQ ID NO: 1658822 - DNA, 15 bp, Homo sapiens
gggatcgagaaaatg

SEQ ID NO: 1658823 - DNA, 15 bp, Homo sapiens
ggggatcgagaaaat

SEQ ID NO: 1658824 - DNA, 15 bp, Homo sapiens
aggggatcgagaaaa

SEQ ID NO: 1658825 - DNA, 15 bp, Homo sapiens
caggggatcgagaaa

SEQ ID NO: 1658826 - DNA, 15 bp, Homo sapiens
gcaggggatcgagaa

SEQ ID NO: 1658827 - DNA, 15 bp, Homo sapiens
ggcaggggatcgaga

SEQ ID NO: 1658828 - DNA, 15 bp, Homo sapiens
gggcaggggatcgag

SEQ ID NO: 1658829 - DNA, 15 bp, Homo sapiens
agggcaggggatcga

SEQ ID NO: 1658830 - DNA, 15 bp, Homo sapiens
aagggcaggggatcg

SEQ ID NO: 1658831 - DNA, 15 bp, Homo sapiens
taagggcaggggatc

SEQ ID NO: 1658832 - DNA, 15 bp, Homo sapiens
ttaagggcaggggat

SEQ ID NO: 1658833 - DNA, 15 bp, Homo sapiens
tttaagggcagggga

SEQ ID NO: 1658834 - DNA, 15 bp, Homo sapiens
ctttaagggcagggg

SEQ ID NO: 1658835 - DNA, 15 bp, Homo sapiens
cctttaagggcaggg

SEQ ID NO: 1658836 - DNA, 15 bp, Homo sapiens
tcctttaagggcagg

SEQ ID NO: 1658837 - DNA, 15 bp, Homo sapiens
ctcctttaagggcag

SEQ ID NO: 1658838 - DNA, 15 bp, Homo sapiens
tctcctttaagggca

SEQ ID NO: 1658839 - DNA, 15 bp, Homo sapiens
ttctcctttaagggc

SEQ ID NO: 1658840 - DNA, 15 bp, Homo sapiens
tttctcctttaaggg

SEQ ID NO: 1658841 - DNA, 15 bp, Homo sapiens
gtttctcctttaagg

SEQ ID NO: 1658842 - DNA, 15 bp, Homo sapiens
ggtttctcctttaag

SEQ ID NO: 1658843 - DNA, 15 bp, Homo sapiens
tggtttctcctttaa

SEQ ID NO: 1658844 - DNA, 15 bp, Homo sapiens
atggtttctccttta

SEQ ID NO: 1658845 - DNA, 15 bp, Homo sapiens
aatggtttctccttt

SEQ ID NO: 1658846 - DNA, 15 bp, Homo sapiens
aaatggtttctcctt

SEQ ID NO: 1658847 - DNA, 15 bp, Homo sapiens
gaaatggtttctcct

SEQ ID NO: 1658848 - DNA, 15 bp, Homo sapiens
agaaatggtttctcc

SEQ ID NO: 1658849 - DNA, 15 bp, Homo sapiens
gagaaatggtttctc

SEQ ID NO: 1658850 - DNA, 15 bp, Homo sapiens
agagaaatggtttct

SEQ ID NO: 1658851 - DNA, 15 bp, Homo sapiens
cagagaaatggtttc

SEQ ID NO: 1658852 - DNA, 15 bp, Homo sapiens
acagagaaatggttt

SEQ ID NO: 1658853 - DNA, 15 bp, Homo sapiens
gacagagaaatggtt

SEQ ID NO: 1658854 - DNA, 15 bp, Homo sapiens
tgacagagaaatggt

SEQ ID NO: 1658855 - DNA, 15 bp, Homo sapiens
atgacagagaaatgg

SEQ ID NO: 1658856 - DNA, 15 bp, Homo sapiens
aatgacagagaaatg

SEQ ID NO: 1658857 - DNA, 15 bp, Homo sapiens
caatgacagagaaat

SEQ ID NO: 1658858 - DNA, 15 bp, Homo sapiens
gcaatgacagagaaa

SEQ ID NO: 1658859 - DNA, 15 bp, Homo sapiens
agcaatgacagagaa

SEQ ID NO: 1658860 - DNA, 15 bp, Homo sapiens
aagcaatgacagaga

SEQ ID NO: 1658861 - DNA, 15 bp, Homo sapiens
gaagcaatgacagag

SEQ ID NO: 1658862 - DNA, 15 bp, Homo sapiens
agaagcaatgacaga

SEQ ID NO: 1658863 - DNA, 15 bp, Homo sapiens
cagaagcaatgacag

SEQ ID NO: 1658864 - DNA, 15 bp, Homo sapiens
acagaagcaatgaca

SEQ ID NO: 1658865 - DNA, 15 bp, Homo sapiens
tacagaagcaatgac

SEQ ID NO: 1658866 - DNA, 15 bp, Homo sapiens
ctacagaagcaatga

SEQ ID NO: 1658867 - DNA, 15 bp, Homo sapiens
actacagaagcaatg

SEQ ID NO: 1658868 - DNA, 15 bp, Homo sapiens
gactacagaagcaat

SEQ ID NO: 1658869 - DNA, 15 bp, Homo sapiens
tgactacagaagcaa

SEQ ID NO: 1658870 - DNA, 15 bp, Homo sapiens
gtgactacagaagca

SEQ ID NO: 1658871 - DNA, 15 bp, Homo sapiens
tgtgactacagaagc

SEQ ID NO: 1658872 - DNA, 15 bp, Homo sapiens
ctgtgactacagaag

SEQ ID NO: 1658873 - DNA, 15 bp, Homo sapiens
actgtgactacagaa

SEQ ID NO: 1658874 - DNA, 15 bp, Homo sapiens
gactgtgactacaga

SEQ ID NO: 1658875 - DNA, 15 bp, Homo sapiens
ggactgtgactacag

SEQ ID NO: 1658876 - DNA, 15 bp, Homo sapiens
gggactgtgactaca

SEQ ID NO: 1658877 - DNA, 15 bp, Homo sapiens
tgggactgtgactac

SEQ ID NO: 1658878 - DNA, 15 bp, Homo sapiens
ttgggactgtgacta

SEQ ID NO: 1658879 - DNA, 15 bp, Homo sapiens
attgggactgtgact

SEQ ID NO: 1658880 - DNA, 15 bp, Homo sapiens
aattgggactgtgac

SEQ ID NO: 1658881 - DNA, 15 bp, Homo sapiens
aaattgggactgtga

SEQ ID NO: 1658882 - DNA, 15 bp, Homo sapiens
aaaattgggactgtg

SEQ ID NO: 1658883 - DNA, 15 bp, Homo sapiens
caaaattgggactgt

SEQ ID NO: 1658884 - DNA, 15 bp, Homo sapiens
tcaaaattgggactg

SEQ ID NO: 1658885 - DNA, 15 bp, Homo sapiens
ctcaaaattgggact

SEQ ID NO: 1658886 - DNA, 15 bp, Homo sapiens
actcaaaattgggac

SEQ ID NO: 1658887 - DNA, 15 bp, Homo sapiens
tactcaaaattggga

SEQ ID NO: 1658888 - DNA, 15 bp, Homo sapiens
ctactcaaaattggg

SEQ ID NO: 1658889 - DNA, 15 bp, Homo sapiens
actactcaaaattgg

SEQ ID NO: 1658890 - DNA, 15 bp, Homo sapiens
cactactcaaaattg

SEQ ID NO: 1658891 - DNA, 15 bp, Homo sapiens
tcactactcaaaatt

SEQ ID NO: 1658892 - DNA, 15 bp, Homo sapiens
atcactactcaaaat

SEQ ID NO: 1658893 - DNA, 15 bp, Homo sapiens
gatcactactcaaaa

SEQ ID NO: 1658894 - DNA, 15 bp, Homo sapiens
agatcactactcaaa

SEQ ID NO: 1658895 - DNA, 15 bp, Homo sapiens
aagatcactactcaa

SEQ ID NO: 1658896 - DNA, 15 bp, Homo sapiens
aaagatcactactca

SEQ ID NO: 1658897 - DNA, 15 bp, Homo sapiens
aaaagatcactactc

SEQ ID NO: 1658898 - DNA, 15 bp, Homo sapiens
gaaaagatcactact

SEQ ID NO: 1658899 - DNA, 15 bp, Homo sapiens
agaaaagatcactac

SEQ ID NO: 1658900 - DNA, 15 bp, Homo sapiens
aagaaaagatcacta

SEQ ID NO: 1658901 - DNA, 15 bp, Homo sapiens
caagaaaagatcact

SEQ ID NO: 1658902 - DNA, 15 bp, Homo sapiens
acaagaaaagatcac

SEQ ID NO: 1658903 - DNA, 15 bp, Homo sapiens
cacaagaaaagatca

SEQ ID NO: 1658904 - DNA, 15 bp, Homo sapiens
acacaagaaaagatc

SEQ ID NO: 1658905 - DNA, 15 bp, Homo sapiens
tacacaagaaaagat

SEQ ID NO: 1658906 - DNA, 15 bp, Homo sapiens
gtacacaagaaaaga

SEQ ID NO: 1658907 - DNA, 15 bp, Homo sapiens
agtacacaagaaaag

SEQ ID NO: 1658908 - DNA, 15 bp, Homo sapiens
cagtacacaagaaaa

SEQ ID NO: 1658909 - DNA, 15 bp, Homo sapiens
acagtacacaagaaa

SEQ ID NO: 1658910 - DNA, 15 bp, Homo sapiens
cacagtacacaagaa

SEQ ID NO: 1658911 - DNA, 15 bp, Homo sapiens
acacagtacacaaga

SEQ ID NO: 1658912 - DNA, 15 bp, Homo sapiens
aacacagtacacaag

SEQ ID NO: 1658913 - DNA, 15 bp, Homo sapiens
caacacagtacacaa

SEQ ID NO: 1658914 - DNA, 15 bp, Homo sapiens
ccaacacagtacaca

SEQ ID NO: 1658915 - DNA, 15 bp, Homo sapiens
gccaacacagtacac

SEQ ID NO: 1658916 - DNA, 15 bp, Homo sapiens
ggccaacacagtaca

SEQ ID NO: 1658917 - DNA, 15 bp, Homo sapiens
tggccaacacagtac

SEQ ID NO: 1658918 - DNA, 15 bp, Homo sapiens
gtggccaacacagta

SEQ ID NO: 1658919 - DNA, 15 bp, Homo sapiens
ggtggccaacacagt

SEQ ID NO: 1658920 - DNA, 15 bp, Homo sapiens
aggtggccaacacag

SEQ ID NO: 1658921 - DNA, 15 bp, Homo sapiens
taggtggccaacaca

SEQ ID NO: 1658922 - DNA, 15 bp, Homo sapiens
ttaggtggccaacac

SEQ ID NO: 1658923 - DNA, 15 bp, Homo sapiens
tttaggtggccaaca

SEQ ID NO: 1658924 - DNA, 15 bp, Homo sapiens
ttttaggtggccaac

SEQ ID NO: 1658925 - DNA, 15 bp, Homo sapiens
gttttaggtggccaa

SEQ ID NO: 1658926 - DNA, 15 bp, Homo sapiens
agttttaggtggcca

SEQ ID NO: 1658927 - DNA, 15 bp, Homo sapiens
gagttttaggtggcc

SEQ ID NO: 1658928 - DNA, 15 bp, Homo sapiens
agagttttaggtggc

SEQ ID NO: 1658929 - DNA, 15 bp, Homo sapiens
aagagttttaggtgg

SEQ ID NO: 1658930 - DNA, 15 bp, Homo sapiens
aaagagttttaggtg

SEQ ID NO: 1658931 - DNA, 15 bp, Homo sapiens
caaagagttttaggt

SEQ ID NO: 1658932 - DNA, 15 bp, Homo sapiens
gcaaagagttttagg

SEQ ID NO: 1658933 - DNA, 15 bp, Homo sapiens
tgcaaagagttttag

SEQ ID NO: 1658934 - DNA, 15 bp, Homo sapiens
atgcaaagagtttta

SEQ ID NO: 1658935 - DNA, 15 bp, Homo sapiens
aatgcaaagagtttt

SEQ ID NO: 1658936 - DNA, 15 bp, Homo sapiens
caatgcaaagagttt

SEQ ID NO: 1658937 - DNA, 15 bp, Homo sapiens
tcaatgcaaagagtt

SEQ ID NO: 1658938 - DNA, 15 bp, Homo sapiens
ctcaatgcaaagagt

SEQ ID NO: 1658939 - DNA, 15 bp, Homo sapiens
actcaatgcaaagag

SEQ ID NO: 1658940 - DNA, 15 bp, Homo sapiens
tactcaatgcaaaga

SEQ ID NO: 1658941 - DNA, 15 bp, Homo sapiens
ttactcaatgcaaag

SEQ ID NO: 1658942 - DNA, 15 bp, Homo sapiens
tttactcaatgcaaa

SEQ ID NO: 1658943 - DNA, 15 bp, Homo sapiens
ttttactcaatgcaa

SEQ ID NO: 1658944 - DNA, 15 bp, Homo sapiens
attttactcaatgca

SEQ ID NO: 1658945 - DNA, 15 bp, Homo sapiens
aattttactcaatgc

SEQ ID NO: 1658946 - DNA, 15 bp, Homo sapiens
gaattttactcaatg

SEQ ID NO: 1658947 - DNA, 15 bp, Homo sapiens
agaattttactcaat

SEQ ID NO: 1658948 - DNA, 15 bp, Homo sapiens
tagaattttactcaa

SEQ ID NO: 1658949 - DNA, 15 bp, Homo sapiens
ttagaattttactca

SEQ ID NO: 1658950 - DNA, 15 bp, Homo sapiens
attagaattttactc

SEQ ID NO: 1658951 - DNA, 15 bp, Homo sapiens
aattagaattttact

SEQ ID NO: 1658952 - DNA, 15 bp, Homo sapiens
caattagaattttac

SEQ ID NO: 1658953 - DNA, 15 bp, Homo sapiens
gcaattagaatttta

SEQ ID NO: 1658954 - DNA, 15 bp, Homo sapiens
ggcaattagaatttt

SEQ ID NO: 1658955 - DNA, 15 bp, Homo sapiens
tggcaattagaattt

SEQ ID NO: 1658956 - DNA, 15 bp, Homo sapiens
ttggcaattagaatt

SEQ ID NO: 1658957 - DNA, 15 bp, Homo sapiens
attggcaattagaat

SEQ ID NO: 1658958 - DNA, 15 bp, Homo sapiens
tattggcaattagaa

SEQ ID NO: 1658959 - DNA, 15 bp, Homo sapiens
ttattggcaattaga

SEQ ID NO: 1658960 - DNA, 15 bp, Homo sapiens
attattggcaattag

SEQ ID NO: 1658961 - DNA, 15 bp, Homo sapiens
gattattggcaatta

SEQ ID NO: 1658962 - DNA, 15 bp, Homo sapiens
ggattattggcaatt

SEQ ID NO: 1658963 - DNA, 15 bp, Homo sapiens
aggattattggcaat

SEQ ID NO: 1658964 - DNA, 15 bp, Homo sapiens
taggattattggcaa

SEQ ID NO: 1658965 - DNA, 15 bp, Homo sapiens
gtaggattattggca

SEQ ID NO: 1658966 - DNA, 15 bp, Homo sapiens
ggtaggattattggc

SEQ ID NO: 1658967 - DNA, 15 bp, Homo sapiens
gggtaggattattgg

SEQ ID NO: 1658968 - DNA, 15 bp, Homo sapiens
tgggtaggattattg

SEQ ID NO: 1658969 - DNA, 15 bp, Homo sapiens
atgggtaggattatt

SEQ ID NO: 1658970 - DNA, 15 bp, Homo sapiens
aatgggtaggattat

SEQ ID NO: 1658971 - DNA, 15 bp, Homo sapiens
caatgggtaggatta

SEQ ID NO: 1658972 - DNA, 15 bp, Homo sapiens
ccaatgggtaggatt

SEQ ID NO: 1658973 - DNA, 15 bp, Homo sapiens
tccaatgggtaggat

SEQ ID NO: 1658974 - DNA, 15 bp, Homo sapiens
atccaatgggtagga

SEQ ID NO: 1658975 - DNA, 15 bp, Homo sapiens
aatccaatgggtagg

SEQ ID NO: 1658976 - DNA, 15 bp, Homo sapiens
taatccaatgggtag

SEQ ID NO: 1658977 - DNA, 15 bp, Homo sapiens
ctaatccaatgggta

SEQ ID NO: 1658978 - DNA, 15 bp, Homo sapiens
tctaatccaatgggt

SEQ ID NO: 1658979 - DNA, 15 bp, Homo sapiens
gtctaatccaatggg

SEQ ID NO: 1658980 - DNA, 15 bp, Homo sapiens
tgtctaatccaatgg

SEQ ID NO: 1658981 - DNA, 15 bp, Homo sapiens
ctgtctaatccaatg

SEQ ID NO: 1658982 - DNA, 15 bp, Homo sapiens
gctgtctaatccaat

SEQ ID NO: 1658983 - DNA, 15 bp, Homo sapiens
tgctgtctaatccaa

SEQ ID NO: 1658984 - DNA, 15 bp, Homo sapiens
gtgctgtctaatcca

SEQ ID NO: 1658985 - DNA, 15 bp, Homo sapiens
agtgctgtctaatcc

SEQ ID NO: 1658986 - DNA, 15 bp, Homo sapiens
gagtgctgtctaatc

SEQ ID NO: 1658987 - DNA, 15 bp, Homo sapiens
agagtgctgtctaat

SEQ ID NO: 1658988 - DNA, 15 bp, Homo sapiens
cagagtgctgtctaa

SEQ ID NO: 1658989 - DNA, 15 bp, Homo sapiens
tcagagtgctgtcta

SEQ ID NO: 1658990 - DNA, 15 bp, Homo sapiens
ttcagagtgctgtct

SEQ ID NO: 1658991 - DNA, 15 bp, Homo sapiens
gttcagagtgctgtc

SEQ ID NO: 1658992 - DNA, 15 bp, Homo sapiens
ggttcagagtgctgt

SEQ ID NO: 1658993 - DNA, 15 bp, Homo sapiens
gggttcagagtgctg

SEQ ID NO: 1658994 - DNA, 15 bp, Homo sapiens
ggggttcagagtgct

SEQ ID NO: 1658995 - DNA, 15 bp, Homo sapiens
tggggttcagagtgc

SEQ ID NO: 1658996 - DNA, 15 bp, Homo sapiens
atggggttcagagtg

SEQ ID NO: 1658997 - DNA, 15 bp, Homo sapiens
aatggggttcagagt

SEQ ID NO: 1658998 - DNA, 15 bp, Homo sapiens
aaatggggttcagag

SEQ ID NO: 1658999 - DNA, 15 bp, Homo sapiens
caaatggggttcaga

SEQ ID NO: 1659000 - DNA, 15 bp, Homo sapiens
gcaaatggggttcag

SEQ ID NO: 1659001 - DNA, 15 bp, Homo sapiens
tgcaaatggggttca

SEQ ID NO: 1659002 - DNA, 15 bp, Homo sapiens
atgcaaatggggttc

SEQ ID NO: 1659003 - DNA, 15 bp, Homo sapiens
aatgcaaatggggtt

SEQ ID NO: 1659004 - DNA, 15 bp, Homo sapiens
gaatgcaaatggggt

SEQ ID NO: 1659005 - DNA, 15 bp, Homo sapiens
tgaatgcaaatgggg

SEQ ID NO: 1659006 - DNA, 15 bp, Homo sapiens
ctgaatgcaaatggg

SEQ ID NO: 1659007 - DNA, 15 bp, Homo sapiens
gctgaatgcaaatgg

SEQ ID NO: 1659008 - DNA, 15 bp, Homo sapiens
tgctgaatgcaaatg

SEQ ID NO: 1659009 - DNA, 15 bp, Homo sapiens
ctgctgaatgcaaat

SEQ ID NO: 1659010 - DNA, 15 bp, Homo sapiens
cctgctgaatgcaaa

SEQ ID NO: 1659011 - DNA, 15 bp, Homo sapiens
ccctgctgaatgcaa

SEQ ID NO: 1659012 - DNA, 15 bp, Homo sapiens
cccctgctgaatgca

SEQ ID NO: 1659013 - DNA, 15 bp, Homo sapiens
ccccctgctgaatgc

SEQ ID NO: 1659014 - DNA, 15 bp, Homo sapiens
accccctgctgaatg

SEQ ID NO: 1659015 - DNA, 15 bp, Homo sapiens
gaccccctgctgaat

SEQ ID NO: 1659016 - DNA, 15 bp, Homo sapiens
cgaccccctgctgaa

SEQ ID NO: 1659017 - DNA, 15 bp, Homo sapiens
gcgaccccctgctga

SEQ ID NO: 1659018 - DNA, 15 bp, Homo sapiens
tgcgaccccctgctg

SEQ ID NO: 1659019 - DNA, 15 bp, Homo sapiens
ctgcgaccccctgct

SEQ ID NO: 1659020 - DNA, 15 bp, Homo sapiens
tctgcgaccccctgc

SEQ ID NO: 1659021 - DNA, 15 bp, Homo sapiens
gtctgcgaccccctg

SEQ ID NO: 1659022 - DNA, 15 bp, Homo sapiens
tgtctgcgaccccct

SEQ ID NO: 1659023 - DNA, 15 bp, Homo sapiens
ttgtctgcgaccccc

SEQ ID NO: 1659024 - DNA, 15 bp, Homo sapiens
gttgtctgcgacccc

SEQ ID NO: 1659025 - DNA, 15 bp, Homo sapiens
ggttgtctgcgaccc

SEQ ID NO: 1659026 - DNA, 15 bp, Homo sapiens
gggttgtctgcgacc

SEQ ID NO: 1659027 - DNA, 15 bp, Homo sapiens
cgggttgtctgcgac

SEQ ID NO: 1659028 - DNA, 15 bp, Homo sapiens
acgggttgtctgcga

SEQ ID NO: 1659029 - DNA, 15 bp, Homo sapiens
gacgggttgtctgcg

SEQ ID NO: 1659030 - DNA, 15 bp, Homo sapiens
agacgggttgtctgc

SEQ ID NO: 1659031 - DNA, 15 bp, Homo sapiens
aagacgggttgtctg

SEQ ID NO: 1659032 - DNA, 15 bp, Homo sapiens
aaagacgggttgtct

SEQ ID NO: 1659033 - DNA, 15 bp, Homo sapiens
aaaagacgggttgtc

SEQ ID NO: 1659034 - DNA, 15 bp, Homo sapiens
caaaagacgggttgt

SEQ ID NO: 1659035 - DNA, 15 bp, Homo sapiens
acaaaagacgggttg

SEQ ID NO: 1659036 - DNA, 15 bp, Homo sapiens
aacaaaagacgggtt

SEQ ID NO: 1659037 - DNA, 15 bp, Homo sapiens
caacaaaagacgggt

SEQ ID NO: 1659038 - DNA, 15 bp, Homo sapiens
ccaacaaaagacggg

SEQ ID NO: 1659039 - DNA, 15 bp, Homo sapiens
tccaacaaaagacgg

SEQ ID NO: 1659040 - DNA, 15 bp, Homo sapiens
gtccaacaaaagacg

SEQ ID NO: 1659041 - DNA, 15 bp, Homo sapiens
tgtccaacaaaagac

SEQ ID NO: 1659042 - DNA, 15 bp, Homo sapiens
ctgtccaacaaaaga

SEQ ID NO: 1659043 - DNA, 15 bp, Homo sapiens
actgtccaacaaaag

SEQ ID NO: 1659044 - DNA, 15 bp, Homo sapiens
aactgtccaacaaaa

SEQ ID NO: 1659045 - DNA, 15 bp, Homo sapiens
taactgtccaacaaa

SEQ ID NO: 1659046 - DNA, 15 bp, Homo sapiens
ttaactgtccaacaa

SEQ ID NO: 1659047 - DNA, 15 bp, Homo sapiens
tttaactgtccaaca

SEQ ID NO: 1659048 - DNA, 15 bp, Homo sapiens
ttttaactgtccaac

SEQ ID NO: 1659049 - DNA, 15 bp, Homo sapiens
attttaactgtccaa

SEQ ID NO: 1659050 - DNA, 15 bp, Homo sapiens
cattttaactgtcca

SEQ ID NO: 1659051 - DNA, 15 bp, Homo sapiens
gcattttaactgtcc

SEQ ID NO: 1659052 - DNA, 15 bp, Homo sapiens
agcattttaactgtc

SEQ ID NO: 1659053 - DNA, 15 bp, Homo sapiens
gagcattttaactgt

SEQ ID NO: 1659054 - DNA, 15 bp, Homo sapiens
tgagcattttaactg

SEQ ID NO: 1659055 - DNA, 15 bp, Homo sapiens
ctgagcattttaact

SEQ ID NO: 1659056 - DNA, 15 bp, Homo sapiens
actgagcattttaac

SEQ ID NO: 1659057 - DNA, 15 bp, Homo sapiens
gactgagcattttaa

SEQ ID NO: 1659058 - DNA, 15 bp, Homo sapiens
ggactgagcatttta

SEQ ID NO: 1659059 - DNA, 15 bp, Homo sapiens
gggactgagcatttt

SEQ ID NO: 1659060 - DNA, 15 bp, Homo sapiens
tgggactgagcattt

SEQ ID NO: 1659061 - DNA, 15 bp, Homo sapiens
ttgggactgagcatt

SEQ ID NO: 1659062 - DNA, 15 bp, Homo sapiens
attgggactgagcat

SEQ ID NO: 1659063 - DNA, 15 bp, Homo sapiens
aattgggactgagca

SEQ ID NO: 1659064 - DNA, 15 bp, Homo sapiens
caattgggactgagc

SEQ ID NO: 1659065 - DNA, 15 bp, Homo sapiens
acaattgggactgag

SEQ ID NO: 1659066 - DNA, 15 bp, Homo sapiens
gacaattgggactga

SEQ ID NO: 1659067 - DNA, 15 bp, Homo sapiens
tgacaattgggactg

SEQ ID NO: 1659068 - DNA, 15 bp, Homo sapiens
atgacaattgggact

SEQ ID NO: 1659069 - DNA, 15 bp, Homo sapiens
tatgacaattgggac

SEQ ID NO: 1659070 - DNA, 15 bp, Homo sapiens
ctatgacaattggga

SEQ ID NO: 1659071 - DNA, 15 bp, Homo sapiens
gctatgacaattggg

SEQ ID NO: 1659072 - DNA, 15 bp, Homo sapiens
agctatgacaattgg

SEQ ID NO: 1659073 - DNA, 15 bp, Homo sapiens
aagctatgacaattg

SEQ ID NO: 1659074 - DNA, 15 bp, Homo sapiens
aaagctatgacaatt

SEQ ID NO: 1659075 - DNA, 15 bp, Homo sapiens
caaagctatgacaat

SEQ ID NO: 1659076 - DNA, 15 bp, Homo sapiens
gcaaagctatgacaa

SEQ ID NO: 1659077 - DNA, 15 bp, Homo sapiens
ggcaaagctatgaca

SEQ ID NO: 1659078 - DNA, 15 bp, Homo sapiens
aggcaaagctatgac

SEQ ID NO: 1659079 - DNA, 15 bp, Homo sapiens
taggcaaagctatga

SEQ ID NO: 1659080 - DNA, 15 bp, Homo sapiens
ataggcaaagctatg

SEQ ID NO: 1659081 - DNA, 15 bp, Homo sapiens
aataggcaaagctat

SEQ ID NO: 1659082 - DNA, 15 bp, Homo sapiens
taataggcaaagcta

SEQ ID NO: 1659083 - DNA, 15 bp, Homo sapiens
ttaataggcaaagct

SEQ ID NO: 1659084 - DNA, 15 bp, Homo sapiens
tttaataggcaaagc

SEQ ID NO: 1659085 - DNA, 15 bp, Homo sapiens
gtttaataggcaaag

SEQ ID NO: 1659086 - DNA, 15 bp, Homo sapiens
tgtttaataggcaaa

SEQ ID NO: 1659087 - DNA, 15 bp, Homo sapiens
ttgtttaataggcaa

SEQ ID NO: 1659088 - DNA, 15 bp, Homo sapiens
tttgtttaataggca

SEQ ID NO: 1659089 - DNA, 15 bp, Homo sapiens
ctttgtttaataggc

SEQ ID NO: 1659090 - DNA, 15 bp, Homo sapiens
cctttgtttaatagg

SEQ ID NO: 1659091 - DNA, 15 bp, Homo sapiens
gcctttgtttaatag

SEQ ID NO: 1659092 - DNA, 15 bp, Homo sapiens
tgcctttgtttaata

SEQ ID NO: 1659093 - DNA, 15 bp, Homo sapiens
gtgcctttgtttaat

SEQ ID NO: 1659094 - DNA, 15 bp, Homo sapiens
ggtgcctttgtttaa

SEQ ID NO: 1659095 - DNA, 15 bp, Homo sapiens
gggtgcctttgttta

SEQ ID NO: 1659096 - DNA, 15 bp, Homo sapiens
agggtgcctttgttt

SEQ ID NO: 1659097 - DNA, 15 bp, Homo sapiens
tagggtgcctttgtt

SEQ ID NO: 1659098 - DNA, 15 bp, Homo sapiens
gtagggtgcctttgt

SEQ ID NO: 1659099 - DNA, 15 bp, Homo sapiens
agtagggtgcctttg

SEQ ID NO: 1659100 - DNA, 15 bp, Homo sapiens
cagtagggtgccttt

SEQ ID NO: 1659101 - DNA, 15 bp, Homo sapiens
gcagtagggtgcctt

SEQ ID NO: 1659102 - DNA, 15 bp, Homo sapiens
cgcagtagggtgcct

SEQ ID NO: 1659103 - DNA, 15 bp, Homo sapiens
gcgcagtagggtgcc

SEQ ID NO: 1659104 - DNA, 15 bp, Homo sapiens
agcgcagtagggtgc

SEQ ID NO: 1659105 - DNA, 15 bp, Homo sapiens
aagcgcagtagggtg

SEQ ID NO: 1659106 - DNA, 15 bp, Homo sapiens
aaagcgcagtagggt

SEQ ID NO: 1659107 - DNA, 15 bp, Homo sapiens
aaaagcgcagtaggg

SEQ ID NO: 1659108 - DNA, 15 bp, Homo sapiens
aaaaagcgcagtagg

SEQ ID NO: 1659109 - DNA, 15 bp, Homo sapiens
caaaaagcgcagtag

SEQ ID NO: 1659110 - DNA, 15 bp, Homo sapiens
gcaaaaagcgcagta

SEQ ID NO: 1659111 - DNA, 15 bp, Homo sapiens
agcaaaaagcgcagt

SEQ ID NO: 1659112 - DNA, 15 bp, Homo sapiens
cagcaaaaagcgcag

SEQ ID NO: 1659113 - DNA, 15 bp, Homo sapiens
acagcaaaaagcgca

SEQ ID NO: 1659114 - DNA, 15 bp, Homo sapiens
cacagcaaaaagcgc

SEQ ID NO: 1659115 - DNA, 15 bp, Homo sapiens
gcacagcaaaaagcg

SEQ ID NO: 1659116 - DNA, 15 bp, Homo sapiens
agcacagcaaaaagc

SEQ ID NO: 1659117 - DNA, 15 bp, Homo sapiens
aagcacagcaaaaag

SEQ ID NO: 1659118 - DNA, 15 bp, Homo sapiens
gaagcacagcaaaaa

SEQ ID NO: 1659119 - DNA, 15 bp, Homo sapiens
agaagcacagcaaaa

SEQ ID NO: 1659120 - DNA, 15 bp, Homo sapiens
cagaagcacagcaaa

SEQ ID NO: 1659121 - DNA, 15 bp, Homo sapiens
ccagaagcacagcaa

SEQ ID NO: 1659122 - DNA, 15 bp, Homo sapiens
tccagaagcacagca

SEQ ID NO: 1659123 - DNA, 15 bp, Homo sapiens
ctccagaagcacagc

SEQ ID NO: 1659124 - DNA, 15 bp, Homo sapiens
tctccagaagcacag

SEQ ID NO: 1659125 - DNA, 15 bp, Homo sapiens
ttctccagaagcaca

SEQ ID NO: 1659126 - DNA, 15 bp, Homo sapiens
attctccagaagcac

SEQ ID NO: 1659127 - DNA, 15 bp, Homo sapiens
gattctccagaagca

SEQ ID NO: 1659128 - DNA, 15 bp, Homo sapiens
ggattctccagaagc

SEQ ID NO: 1659129 - DNA, 15 bp, Homo sapiens
aggattctccagaag

SEQ ID NO: 1659130 - DNA, 15 bp, Homo sapiens
caggattctccagaa

SEQ ID NO: 1659131 - DNA, 15 bp, Homo sapiens
gcaggattctccaga

SEQ ID NO: 1659132 - DNA, 15 bp, Homo sapiens
agcaggattctccag

SEQ ID NO: 1659133 - DNA, 15 bp, Homo sapiens
cagcaggattctcca

SEQ ID NO: 1659134 - DNA, 15 bp, Homo sapiens
acagcaggattctcc

SEQ ID NO: 1659135 - DNA, 15 bp, Homo sapiens
aacagcaggattctc

SEQ ID NO: 1659136 - DNA, 15 bp, Homo sapiens
gaacagcaggattct

SEQ ID NO: 1659137 - DNA, 15 bp, Homo sapiens
agaacagcaggattc

SEQ ID NO: 1659138 - DNA, 15 bp, Homo sapiens
aagaacagcaggatt

SEQ ID NO: 1659139 - DNA, 15 bp, Homo sapiens
caagaacagcaggat

SEQ ID NO: 1659140 - DNA, 15 bp, Homo sapiens
ccaagaacagcagga

SEQ ID NO: 1659141 - DNA, 15 bp, Homo sapiens
tccaagaacagcagg

SEQ ID NO: 1659142 - DNA, 15 bp, Homo sapiens
gtccaagaacagcag

SEQ ID NO: 1659143 - DNA, 15 bp, Homo sapiens
tgtccaagaacagca

SEQ ID NO: 1659144 - DNA, 15 bp, Homo sapiens
ttgtccaagaacagc

SEQ ID NO: 1659145 - DNA, 15 bp, Homo sapiens
attgtccaagaacag

SEQ ID NO: 1659146 - DNA, 15 bp, Homo sapiens
aattgtccaagaaca

SEQ ID NO: 1659147 - DNA, 15 bp, Homo sapiens
taattgtccaagaac

SEQ ID NO: 1659148 - DNA, 15 bp, Homo sapiens
ttaattgtccaagaa

SEQ ID NO: 1659149 - DNA, 15 bp, Homo sapiens
tttaattgtccaaga

SEQ ID NO: 1659150 - DNA, 15 bp, Homo sapiens
ctttaattgtccaag

SEQ ID NO: 1659151 - DNA, 15 bp, Homo sapiens
tctttaattgtccaa

SEQ ID NO: 1659152 - DNA, 15 bp, Homo sapiens
ttctttaattgtcca

SEQ ID NO: 1659153 - DNA, 15 bp, Homo sapiens
gttctttaattgtcc

SEQ ID NO: 1659154 - DNA, 15 bp, Homo sapiens
tgttctttaattgtc

SEQ ID NO: 1659155 - DNA, 15 bp, Homo sapiens
ttgttctttaattgt

SEQ ID NO: 1659156 - DNA, 15 bp, Homo sapiens
tttgttctttaattg

SEQ ID NO: 1659157 - DNA, 15 bp, Homo sapiens
ctttgttctttaatt

SEQ ID NO: 1659158 - DNA, 15 bp, Homo sapiens
actttgttctttaat

SEQ ID NO: 1659159 - DNA, 15 bp, Homo sapiens
tactttgttctttaa

SEQ ID NO: 1659160 - DNA, 15 bp, Homo sapiens
ctactttgttcttta

SEQ ID NO: 1659161 - DNA, 15 bp, Homo sapiens
actactttgttcttt

SEQ ID NO: 1659162 - DNA, 15 bp, Homo sapiens
tactactttgttctt

SEQ ID NO: 1659163 - DNA, 15 bp, Homo sapiens
ttactactttgttct

SEQ ID NO: 1659164 - DNA, 15 bp, Homo sapiens
attactactttgttc

SEQ ID NO: 1659165 - DNA, 15 bp, Homo sapiens
aattactactttgtt

SEQ ID NO: 1659166 - DNA, 15 bp, Homo sapiens
caattactactttgt

SEQ ID NO: 1659167 - DNA, 15 bp, Homo sapiens
gcaattactactttg

SEQ ID NO: 1659168 - DNA, 15 bp, Homo sapiens
agcaattactacttt

SEQ ID NO: 1659169 - DNA, 15 bp, Homo sapiens
tagcaattactactt

SEQ ID NO: 1659170 - DNA, 15 bp, Homo sapiens
ttagcaattactact

SEQ ID NO: 1659171 - DNA, 15 bp, Homo sapiens
attagcaattactac

SEQ ID NO: 1659172 - DNA, 15 bp, Homo sapiens
aattagcaattacta

SEQ ID NO: 1659173 - DNA, 15 bp, Homo sapiens
caattagcaattact

SEQ ID NO: 1659174 - DNA, 15 bp, Homo sapiens
acaattagcaattac

SEQ ID NO: 1659175 - DNA, 15 bp, Homo sapiens
gacaattagcaatta

SEQ ID NO: 1659176 - DNA, 15 bp, Homo sapiens
agacaattagcaatt

SEQ ID NO: 1659177 - DNA, 15 bp, Homo sapiens
gagacaattagcaat

SEQ ID NO: 1659178 - DNA, 15 bp, Homo sapiens
tgagacaattagcaa

SEQ ID NO: 1659179 - DNA, 15 bp, Homo sapiens
gtgagacaattagca

SEQ ID NO: 1659180 - DNA, 15 bp, Homo sapiens
ggtgagacaattagc

SEQ ID NO: 1659181 - DNA, 15 bp, Homo sapiens
gggtgagacaattag

SEQ ID NO: 1659182 - DNA, 15 bp, Homo sapiens
tgggtgagacaatta

SEQ ID NO: 1659183 - DNA, 15 bp, Homo sapiens
atgggtgagacaatt

SEQ ID NO: 1659184 - DNA, 15 bp, Homo sapiens
aatgggtgagacaat

SEQ ID NO: 1659185 - DNA, 15 bp, Homo sapiens
taatgggtgagacaa

SEQ ID NO: 1659186 - DNA, 15 bp, Homo sapiens
ttaatgggtgagaca

SEQ ID NO: 1659187 - DNA, 15 bp, Homo sapiens
attaatgggtgagac

SEQ ID NO: 1659188 - DNA, 15 bp, Homo sapiens
gattaatgggtgaga

SEQ ID NO: 1659189 - DNA, 15 bp, Homo sapiens
tgattaatgggtgag

SEQ ID NO: 1659190 - DNA, 15 bp, Homo sapiens
atgattaatgggtga

SEQ ID NO: 1659191 - DNA, 15 bp, Homo sapiens
catgattaatgggtg

SEQ ID NO: 1659192 - DNA, 15 bp, Homo sapiens
tcatgattaatgggt

SEQ ID NO: 1659193 - DNA, 15 bp, Homo sapiens
ttcatgattaatggg

SEQ ID NO: 1659194 - DNA, 15 bp, Homo sapiens
cttcatgattaatgg

SEQ ID NO: 1659195 - DNA, 15 bp, Homo sapiens
tcttcatgattaatg

SEQ ID NO: 1659196 - DNA, 15 bp, Homo sapiens
gtcttcatgattaat

SEQ ID NO: 1659197 - DNA, 15 bp, Homo sapiens
agtcttcatgattaa

SEQ ID NO: 1659198 - DNA, 15 bp, Homo sapiens
tagtcttcatgatta

SEQ ID NO: 1659199 - DNA, 15 bp, Homo sapiens
gtagtcttcatgatt

SEQ ID NO: 1659200 - DNA, 15 bp, Homo sapiens
ggtagtcttcatgat

SEQ ID NO: 1659201 - DNA, 15 bp, Homo sapiens
tggtagtcttcatga

SEQ ID NO: 1659202 - DNA, 15 bp, Homo sapiens
ctggtagtcttcatg

SEQ ID NO: 1659203 - DNA, 15 bp, Homo sapiens
actggtagtcttcat

SEQ ID NO: 1659204 - DNA, 15 bp, Homo sapiens
gactggtagtcttca

SEQ ID NO: 1659205 - DNA, 15 bp, Homo sapiens
cgactggtagtcttc

SEQ ID NO: 1659206 - DNA, 15 bp, Homo sapiens
gcgactggtagtctt

SEQ ID NO: 1659207 - DNA, 15 bp, Homo sapiens
ggcgactggtagtct

SEQ ID NO: 1659208 - DNA, 15 bp, Homo sapiens
gggcgactggtagtc

SEQ ID NO: 1659209 - DNA, 15 bp, Homo sapiens
agggcgactggtagt

SEQ ID NO: 1659210 - DNA, 15 bp, Homo sapiens
aagggcgactggtag

SEQ ID NO: 1659211 - DNA, 15 bp, Homo sapiens
caagggcgactggta

SEQ ID NO: 1659212 - DNA, 15 bp, Homo sapiens
gcaagggcgactggt

SEQ ID NO: 1659213 - DNA, 15 bp, Homo sapiens
tgcaagggcgactgg

SEQ ID NO: 1659214 - DNA, 15 bp, Homo sapiens
atgcaagggcgactg

SEQ ID NO: 1659215 - DNA, 15 bp, Homo sapiens
aatgcaagggcgact

SEQ ID NO: 1659216 - DNA, 15 bp, Homo sapiens
aaatgcaagggcgac

SEQ ID NO: 1659217 - DNA, 15 bp, Homo sapiens
caaatgcaagggcga

SEQ ID NO: 1659218 - DNA, 15 bp, Homo sapiens
gcaaatgcaagggcg

SEQ ID NO: 1659219 - DNA, 15 bp, Homo sapiens
ggcaaatgcaagggc

SEQ ID NO: 1659220 - DNA, 15 bp, Homo sapiens
aggcaaatgcaaggg

SEQ ID NO: 1659221 - DNA, 15 bp, Homo sapiens
aaggcaaatgcaagg

SEQ ID NO: 1659222 - DNA, 15 bp, Homo sapiens
caaggcaaatgcaag

SEQ ID NO: 1659223 - DNA, 15 bp, Homo sapiens
tcaaggcaaatgcaa

SEQ ID NO: 1659224 - DNA, 15 bp, Homo sapiens
ctcaaggcaaatgca

SEQ ID NO: 1659225 - DNA, 15 bp, Homo sapiens
cctcaaggcaaatgc

SEQ ID NO: 1659226 - DNA, 15 bp, Homo sapiens
gcctcaaggcaaatg

SEQ ID NO: 1659227 - DNA, 15 bp, Homo sapiens
tgcctcaaggcaaat

SEQ ID NO: 1659228 - DNA, 15 bp, Homo sapiens
ctgcctcaaggcaaa

SEQ ID NO: 1659229 - DNA, 15 bp, Homo sapiens
gctgcctcaaggcaa

SEQ ID NO: 1659230 - DNA, 15 bp, Homo sapiens
cgctgcctcaaggca

SEQ ID NO: 1659231 - DNA, 15 bp, Homo sapiens
gcgctgcctcaaggc

SEQ ID NO: 1659232 - DNA, 15 bp, Homo sapiens
agcgctgcctcaagg

SEQ ID NO: 1659233 - DNA, 15 bp, Homo sapiens
cagcgctgcctcaag

SEQ ID NO: 1659234 - DNA, 15 bp, Homo sapiens
tcagcgctgcctcaa

SEQ ID NO: 1659235 - DNA, 15 bp, Homo sapiens
gtcagcgctgcctca

SEQ ID NO: 1659236 - DNA, 15 bp, Homo sapiens
agtcagcgctgcctc

SEQ ID NO: 1659237 - DNA, 15 bp, Homo sapiens
tagtcagcgctgcct

SEQ ID NO: 1659238 - DNA, 15 bp, Homo sapiens
gtagtcagcgctgcc

SEQ ID NO: 1659239 - DNA, 15 bp, Homo sapiens
ggtagtcagcgctgc

SEQ ID NO: 1659240 - DNA, 15 bp, Homo sapiens
aggtagtcagcgctg

SEQ ID NO: 1659241 - DNA, 15 bp, Homo sapiens
caggtagtcagcgct

SEQ ID NO: 1659242 - DNA, 15 bp, Homo sapiens
tcaggtagtcagcgc

SEQ ID NO: 1659243 - DNA, 15 bp, Homo sapiens
ctcaggtagtcagcg

SEQ ID NO: 1659244 - DNA, 15 bp, Homo sapiens
tctcaggtagtcagc

SEQ ID NO: 1659245 - DNA, 15 bp, Homo sapiens
atctcaggtagtcag

SEQ ID NO: 1659246 - DNA, 15 bp, Homo sapiens
aatctcaggtagtca

SEQ ID NO: 1659247 - DNA, 15 bp, Homo sapiens
aaatctcaggtagtc

SEQ ID NO: 1659248 - DNA, 15 bp, Homo sapiens
taaatctcaggtagt

SEQ ID NO: 1659249 - DNA, 15 bp, Homo sapiens
ttaaatctcaggtag

SEQ ID NO: 1659250 - DNA, 15 bp, Homo sapiens
cttaaatctcaggta

SEQ ID NO: 1659251 - DNA, 15 bp, Homo sapiens
tcttaaatctcaggt

SEQ ID NO: 1659252 - DNA, 15 bp, Homo sapiens
ctcttaaatctcagg

SEQ ID NO: 1659253 - DNA, 15 bp, Homo sapiens
actcttaaatctcag

SEQ ID NO: 1659254 - DNA, 15 bp, Homo sapiens
aactcttaaatctca

SEQ ID NO: 1659255 - DNA, 15 bp, Homo sapiens
aaactcttaaatctc

SEQ ID NO: 1659256 - DNA, 15 bp, Homo sapiens
gaaactcttaaatct

SEQ ID NO: 1659257 - DNA, 15 bp, Homo sapiens
agaaactcttaaatc

SEQ ID NO: 1659258 - DNA, 15 bp, Homo sapiens
aagaaactcttaaat

SEQ ID NO: 1659259 - DNA, 15 bp, Homo sapiens
taagaaactcttaaa

SEQ ID NO: 1659260 - DNA, 15 bp, Homo sapiens
ttaagaaactcttaa

SEQ ID NO: 1659261 - DNA, 15 bp, Homo sapiens
tttaagaaactctta

SEQ ID NO: 1659262 - DNA, 15 bp, Homo sapiens
atttaagaaactctt

SEQ ID NO: 1659263 - DNA, 15 bp, Homo sapiens
aatttaagaaactct

SEQ ID NO: 1659264 - DNA, 15 bp, Homo sapiens
taatttaagaaactc

SEQ ID NO: 1659265 - DNA, 15 bp, Homo sapiens
ataatttaagaaact

SEQ ID NO: 1659266 - DNA, 15 bp, Homo sapiens
aataatttaagaaac

SEQ ID NO: 1659267 - DNA, 15 bp, Homo sapiens
caataatttaagaaa

SEQ ID NO: 1659268 - DNA, 15 bp, Homo sapiens
tcaataatttaagaa

SEQ ID NO: 1659269 - DNA, 15 bp, Homo sapiens
ctcaataatttaaga

SEQ ID NO: 1659270 - DNA, 15 bp, Homo sapiens
actcaataatttaag

SEQ ID NO: 1659271 - DNA, 15 bp, Homo sapiens
tactcaataatttaa

SEQ ID NO: 1659272 - DNA, 15 bp, Homo sapiens
ttactcaataattta

SEQ ID NO: 1659273 - DNA, 15 bp, Homo sapiens
tttactcaataattt

SEQ ID NO: 1659274 - DNA, 15 bp, Homo sapiens
ttttactcaataatt

SEQ ID NO: 1659275 - DNA, 15 bp, Homo sapiens
attttactcaataat

SEQ ID NO: 1659276 - DNA, 15 bp, Homo sapiens
gattttactcaataa

SEQ ID NO: 1659277 - DNA, 15 bp, Homo sapiens
ggattttactcaata

SEQ ID NO: 1659278 - DNA, 15 bp, Homo sapiens
gggattttactcaat

SEQ ID NO: 1659279 - DNA, 15 bp, Homo sapiens
tgggattttactcaa

SEQ ID NO: 1659280 - DNA, 15 bp, Homo sapiens
ttgggattttactca

SEQ ID NO: 1659281 - DNA, 15 bp, Homo sapiens
attgggattttactc

SEQ ID NO: 1659282 - DNA, 15 bp, Homo sapiens
aattgggattttact

SEQ ID NO: 1659283 - DNA, 15 bp, Homo sapiens
taattgggattttac

SEQ ID NO: 1659284 - DNA, 15 bp, Homo sapiens
ataattgggatttta

SEQ ID NO: 1659285 - DNA, 15 bp, Homo sapiens
gataattgggatttt

SEQ ID NO: 1659286 - DNA, 15 bp, Homo sapiens
ggataattgggattt

SEQ ID NO: 1659287 - DNA, 15 bp, Homo sapiens
tggataattgggatt

SEQ ID NO: 1659288 - DNA, 15 bp, Homo sapiens
atggataattgggat

SEQ ID NO: 1659289 - DNA, 15 bp, Homo sapiens
tatggataattggga

SEQ ID NO: 1659290 - DNA, 15 bp, Homo sapiens
ctatggataattggg

SEQ ID NO: 1659291 - DNA, 15 bp, Homo sapiens
actatggataattgg

SEQ ID NO: 1659292 - DNA, 15 bp, Homo sapiens
aactatggataattg

SEQ ID NO: 1659293 - DNA, 15 bp, Homo sapiens
gaactatggataatt

SEQ ID NO: 1659294 - DNA, 15 bp, Homo sapiens
agaactatggataat

SEQ ID NO: 1659295 - DNA, 15 bp, Homo sapiens
cagaactatggataa

SEQ ID NO: 1659296 - DNA, 15 bp, Homo sapiens
acagaactatggata

SEQ ID NO: 1659297 - DNA, 15 bp, Homo sapiens
aacagaactatggat

SEQ ID NO: 1659298 - DNA, 15 bp, Homo sapiens
taacagaactatgga

SEQ ID NO: 1659299 - DNA, 15 bp, Homo sapiens
ctaacagaactatgg

SEQ ID NO: 1659300 - DNA, 15 bp, Homo sapiens
actaacagaactatg

SEQ ID NO: 1659301 - DNA, 15 bp, Homo sapiens
aactaacagaactat

SEQ ID NO: 1659302 - DNA, 15 bp, Homo sapiens
taactaacagaacta

SEQ ID NO: 1659303 - DNA, 15 bp, Homo sapiens
gtaactaacagaact

SEQ ID NO: 1659304 - DNA, 15 bp, Homo sapiens
tgtaactaacagaac

SEQ ID NO: 1659305 - DNA, 15 bp, Homo sapiens
gtgtaactaacagaa

SEQ ID NO: 1659306 - DNA, 15 bp, Homo sapiens
agtgtaactaacaga

SEQ ID NO: 1659307 - DNA, 15 bp, Homo sapiens
tagtgtaactaacag

SEQ ID NO: 1659308 - DNA, 15 bp, Homo sapiens
atagtgtaactaaca

SEQ ID NO: 1659309 - DNA, 15 bp, Homo sapiens
catagtgtaactaac

SEQ ID NO: 1659310 - DNA, 15 bp, Homo sapiens
ccatagtgtaactaa

SEQ ID NO: 1659311 - DNA, 15 bp, Homo sapiens
gccatagtgtaacta

SEQ ID NO: 1659312 - DNA, 15 bp, Homo sapiens
ggccatagtgtaact

SEQ ID NO: 1659313 - DNA, 15 bp, Homo sapiens
aggccatagtgtaac

SEQ ID NO: 1659314 - DNA, 15 bp, Homo sapiens
aaggccatagtgtaa

SEQ ID NO: 1659315 - DNA, 15 bp, Homo sapiens
aaaggccatagtgta

SEQ ID NO: 1659316 - DNA, 15 bp, Homo sapiens
caaaggccatagtgt

SEQ ID NO: 1659317 - DNA, 15 bp, Homo sapiens
gcaaaggccatagtg

SEQ ID NO: 1659318 - DNA, 15 bp, Homo sapiens
tgcaaaggccatagt

SEQ ID NO: 1659319 - DNA, 15 bp, Homo sapiens
ttgcaaaggccatag

SEQ ID NO: 1659320 - DNA, 15 bp, Homo sapiens
tttgcaaaggccata

SEQ ID NO: 1659321 - DNA, 15 bp, Homo sapiens
gtttgcaaaggccat

SEQ ID NO: 1659322 - DNA, 15 bp, Homo sapiens
tgtttgcaaaggcca

SEQ ID NO: 1659323 - DNA, 15 bp, Homo sapiens
atgtttgcaaaggcc

SEQ ID NO: 1659324 - DNA, 15 bp, Homo sapiens
gatgtttgcaaaggc

SEQ ID NO: 1659325 - DNA, 15 bp, Homo sapiens
agatgtttgcaaagg

SEQ ID NO: 1659326 - DNA, 15 bp, Homo sapiens
aagatgtttgcaaag

SEQ ID NO: 1659327 - DNA, 15 bp, Homo sapiens
aaagatgtttgcaaa

SEQ ID NO: 1659328 - DNA, 15 bp, Homo sapiens
caaagatgtttgcaa

SEQ ID NO: 1659329 - DNA, 15 bp, Homo sapiens
gcaaagatgtttgca

SEQ ID NO: 1659330 - DNA, 15 bp, Homo sapiens
tgcaaagatgtttgc

SEQ ID NO: 1659331 - DNA, 15 bp, Homo sapiens
atgcaaagatgtttg

SEQ ID NO: 1659332 - DNA, 15 bp, Homo sapiens
tatgcaaagatgttt

SEQ ID NO: 1659333 - DNA, 15 bp, Homo sapiens
ttatgcaaagatgtt

SEQ ID NO: 1659334 - DNA, 15 bp, Homo sapiens
gttatgcaaagatgt

SEQ ID NO: 1659335 - DNA, 15 bp, Homo sapiens
tgttatgcaaagatg

SEQ ID NO: 1659336 - DNA, 15 bp, Homo sapiens
ctgttatgcaaagat

SEQ ID NO: 1659337 - DNA, 15 bp, Homo sapiens
gctgttatgcaaaga

SEQ ID NO: 1659338 - DNA, 15 bp, Homo sapiens
tgctgttatgcaaag

SEQ ID NO: 1659339 - DNA, 15 bp, Homo sapiens
ctgctgttatgcaaa

SEQ ID NO: 1659340 - DNA, 15 bp, Homo sapiens
actgctgttatgcaa

SEQ ID NO: 1659341 - DNA, 15 bp, Homo sapiens
cactgctgttatgca

SEQ ID NO: 1659342 - DNA, 15 bp, Homo sapiens
ccactgctgttatgc

SEQ ID NO: 1659343 - DNA, 15 bp, Homo sapiens
cccactgctgttatg

SEQ ID NO: 1659344 - DNA, 15 bp, Homo sapiens
tcccactgctgttat

SEQ ID NO: 1659345 - DNA, 15 bp, Homo sapiens
gtcccactgctgtta

SEQ ID NO: 1659346 - DNA, 15 bp, Homo sapiens
agtcccactgctgtt

SEQ ID NO: 1659347 - DNA, 15 bp, Homo sapiens
cagtcccactgctgt

SEQ ID NO: 1659348 - DNA, 15 bp, Homo sapiens
tcagtcccactgctg

SEQ ID NO: 1659349 - DNA, 15 bp, Homo sapiens
gtcagtcccactgct

SEQ ID NO: 1659350 - DNA, 15 bp, Homo sapiens
agtcagtcccactgc

SEQ ID NO: 1659351 - DNA, 15 bp, Homo sapiens
gagtcagtcccactg

SEQ ID NO: 1659352 - DNA, 15 bp, Homo sapiens
tgagtcagtcccact

SEQ ID NO: 1659353 - DNA, 15 bp, Homo sapiens
atgagtcagtcccac

SEQ ID NO: 1659354 - DNA, 15 bp, Homo sapiens
aatgagtcagtccca

SEQ ID NO: 1659355 - DNA, 15 bp, Homo sapiens
gaatgagtcagtccc

SEQ ID NO: 1659356 - DNA, 15 bp, Homo sapiens
agaatgagtcagtcc

SEQ ID NO: 1659357 - DNA, 15 bp, Homo sapiens
aagaatgagtcagtc

SEQ ID NO: 1659358 - DNA, 15 bp, Homo sapiens
taagaatgagtcagt

SEQ ID NO: 1659359 - DNA, 15 bp, Homo sapiens
ctaagaatgagtcag

SEQ ID NO: 1659360 - DNA, 15 bp, Homo sapiens
tctaagaatgagtca

SEQ ID NO: 1659361 - DNA, 15 bp, Homo sapiens
ctctaagaatgagtc

SEQ ID NO: 1659362 - DNA, 15 bp, Homo sapiens
gctctaagaatgagt

SEQ ID NO: 1659363 - DNA, 15 bp, Homo sapiens
ggctctaagaatgag

SEQ ID NO: 1659364 - DNA, 15 bp, Homo sapiens
gggctctaagaatga

SEQ ID NO: 1659365 - DNA, 15 bp, Homo sapiens
ggggctctaagaatg

SEQ ID NO: 1659366 - DNA, 15 bp, Homo sapiens
aggggctctaagaat

SEQ ID NO: 1659367 - DNA, 15 bp, Homo sapiens
aaggggctctaagaa

SEQ ID NO: 1659368 - DNA, 15 bp, Homo sapiens
gaaggggctctaaga

SEQ ID NO: 1659369 - DNA, 15 bp, Homo sapiens
ggaaggggctctaag

SEQ ID NO: 1659370 - DNA, 15 bp, Homo sapiens
gggaaggggctctaa

SEQ ID NO: 1659371 - DNA, 15 bp, Homo sapiens
agggaaggggctcta

SEQ ID NO: 1659372 - DNA, 15 bp, Homo sapiens
aagggaaggggctct

SEQ ID NO: 1659373 - DNA, 15 bp, Homo sapiens
caagggaaggggctc

SEQ ID NO: 1659374 - DNA, 15 bp, Homo sapiens
ccaagggaaggggct

SEQ ID NO: 1659375 - DNA, 15 bp, Homo sapiens
tccaagggaaggggc

SEQ ID NO: 1659376 - DNA, 15 bp, Homo sapiens
ttccaagggaagggg

SEQ ID NO: 1659377 - DNA, 15 bp, Homo sapiens
attccaagggaaggg

SEQ ID NO: 1659378 - DNA, 15 bp, Homo sapiens
tattccaagggaagg

SEQ ID NO: 1659379 - DNA, 15 bp, Homo sapiens
atattccaagggaag

SEQ ID NO: 1659380 - DNA, 15 bp, Homo sapiens
aatattccaagggaa

SEQ ID NO: 1659381 - DNA, 15 bp, Homo sapiens
taatattccaaggga

SEQ ID NO: 1659382 - DNA, 15 bp, Homo sapiens
ttaatattccaaggg

SEQ ID NO: 1659383 - DNA, 15 bp, Homo sapiens
attaatattccaagg

SEQ ID NO: 1659384 - DNA, 15 bp, Homo sapiens
cattaatattccaag

SEQ ID NO: 1659385 - DNA, 15 bp, Homo sapiens
ccattaatattccaa

SEQ ID NO: 1659386 - DNA, 15 bp, Homo sapiens
tccattaatattcca

SEQ ID NO: 1659387 - DNA, 15 bp, Homo sapiens
atccattaatattcc

SEQ ID NO: 1659388 - DNA, 15 bp, Homo sapiens
tatccattaatattc

SEQ ID NO: 1659389 - DNA, 15 bp, Homo sapiens
gtatccattaatatt

SEQ ID NO: 1659390 - DNA, 15 bp, Homo sapiens
tgtatccattaatat

SEQ ID NO: 1659391 - DNA, 15 bp, Homo sapiens
ttgtatccattaata

SEQ ID NO: 1659392 - DNA, 15 bp, Homo sapiens
attgtatccattaat

SEQ ID NO: 1659393 - DNA, 15 bp, Homo sapiens
tattgtatccattaa

SEQ ID NO: 1659394 - DNA, 15 bp, Homo sapiens
ctattgtatccatta

SEQ ID NO: 1659395 - DNA, 15 bp, Homo sapiens
actattgtatccatt

SEQ ID NO: 1659396 - DNA, 15 bp, Homo sapiens
tactattgtatccat

SEQ ID NO: 1659397 - DNA, 15 bp, Homo sapiens
ttactattgtatcca

SEQ ID NO: 1659398 - DNA, 15 bp, Homo sapiens
attactattgtatcc

SEQ ID NO: 1659399 - DNA, 15 bp, Homo sapiens
aattactattgtatc

SEQ ID NO: 1659400 - DNA, 15 bp, Homo sapiens
taattactattgtat

SEQ ID NO: 1659401 - DNA, 15 bp, Homo sapiens
ataattactattgta

SEQ ID NO: 1659402 - DNA, 15 bp, Homo sapiens
aataattactattgt

SEQ ID NO: 1659403 - DNA, 15 bp, Homo sapiens
gaataattactattg

SEQ ID NO: 1659404 - DNA, 15 bp, Homo sapiens
tgaataattactatt

SEQ ID NO: 1659405 - DNA, 15 bp, Homo sapiens
atgaataattactat

SEQ ID NO: 1659406 - DNA, 15 bp, Homo sapiens
catgaataattacta

SEQ ID NO: 1659407 - DNA, 15 bp, Homo sapiens
ccatgaataattact

SEQ ID NO: 1659408 - DNA, 15 bp, Homo sapiens
accatgaataattac

SEQ ID NO: 1659409 - DNA, 15 bp, Homo sapiens
aaccatgaataatta

SEQ ID NO: 1659410 - DNA, 15 bp, Homo sapiens
gaaccatgaataatt

SEQ ID NO: 1659411 - DNA, 15 bp, Homo sapiens
agaaccatgaataat

SEQ ID NO: 1659412 - DNA, 15 bp, Homo sapiens
cagaaccatgaataa

SEQ ID NO: 1659413 - DNA, 15 bp, Homo sapiens
gcagaaccatgaata

SEQ ID NO: 1659414 - DNA, 15 bp, Homo sapiens
cgcagaaccatgaat

SEQ ID NO: 1659415 - DNA, 15 bp, Homo sapiens
acgcagaaccatgaa

SEQ ID NO: 1659416 - DNA, 15 bp, Homo sapiens
tacgcagaaccatga

SEQ ID NO: 1659417 - DNA, 15 bp, Homo sapiens
ttacgcagaaccatg

SEQ ID NO: 1659418 - DNA, 15 bp, Homo sapiens
gttacgcagaaccat

SEQ ID NO: 1659419 - DNA, 15 bp, Homo sapiens
tgttacgcagaacca

SEQ ID NO: 1659420 - DNA, 15 bp, Homo sapiens
ctgttacgcagaacc

SEQ ID NO: 1659421 - DNA, 15 bp, Homo sapiens
tctgttacgcagaac

SEQ ID NO: 1659422 - DNA, 15 bp, Homo sapiens
ctctgttacgcagaa

SEQ ID NO: 1659423 - DNA, 15 bp, Homo sapiens
tctctgttacgcaga

SEQ ID NO: 1659424 - DNA, 15 bp, Homo sapiens
ttctctgttacgcag

SEQ ID NO: 1659425 - DNA, 15 bp, Homo sapiens
cttctctgttacgca

SEQ ID NO: 1659426 - DNA, 15 bp, Homo sapiens
tcttctctgttacgc

SEQ ID NO: 1659427 - DNA, 15 bp, Homo sapiens
gtcttctctgttacg

SEQ ID NO: 1659428 - DNA, 15 bp, Homo sapiens
ggtcttctctgttac

SEQ ID NO: 1659429 - DNA, 15 bp, Homo sapiens
gggtcttctctgtta

SEQ ID NO: 1659430 - DNA, 15 bp, Homo sapiens
tgggtcttctctgtt

SEQ ID NO: 1659431 - DNA, 15 bp, Homo sapiens
gtgggtcttctctgt

SEQ ID NO: 1659432 - DNA, 15 bp, Homo sapiens
agtgggtcttctctg

SEQ ID NO: 1659433 - DNA, 15 bp, Homo sapiens
aagtgggtcttctct

SEQ ID NO: 1659434 - DNA, 15 bp, Homo sapiens
taagtgggtcttctc

SEQ ID NO: 1659435 - DNA, 15 bp, Homo sapiens
ataagtgggtcttct

SEQ ID NO: 1659436 - DNA, 15 bp, Homo sapiens
cataagtgggtcttc

SEQ ID NO: 1659437 - DNA, 15 bp, Homo sapiens
acataagtgggtctt

SEQ ID NO: 1659438 - DNA, 15 bp, Homo sapiens
cacataagtgggtct

SEQ ID NO: 1659439 - DNA, 15 bp, Homo sapiens
acacataagtgggtc

SEQ ID NO: 1659440 - DNA, 15 bp, Homo sapiens
tacacataagtgggt

SEQ ID NO: 1659441 - DNA, 15 bp, Homo sapiens
atacacataagtggg

SEQ ID NO: 1659442 - DNA, 15 bp, Homo sapiens
catacacataagtgg

SEQ ID NO: 1659443 - DNA, 15 bp, Homo sapiens
gcatacacataagtg

SEQ ID NO: 1659444 - DNA, 15 bp, Homo sapiens
ggcatacacataagt

SEQ ID NO: 1659445 - DNA, 15 bp, Homo sapiens
aggcatacacataag

SEQ ID NO: 1659446 - DNA, 15 bp, Homo sapiens
aaggcatacacataa

SEQ ID NO: 1659447 - DNA, 15 bp, Homo sapiens
aaaggcatacacata

SEQ ID NO: 1659448 - DNA, 15 bp, Homo sapiens
taaaggcatacacat

SEQ ID NO: 1659449 - DNA, 15 bp, Homo sapiens
ataaaggcatacaca

SEQ ID NO: 1659450 - DNA, 15 bp, Homo sapiens
gataaaggcatacac

SEQ ID NO: 1659451 - DNA, 15 bp, Homo sapiens
tgataaaggcataca

SEQ ID NO: 1659452 - DNA, 15 bp, Homo sapiens
atgataaaggcatac

SEQ ID NO: 1659453 - DNA, 15 bp, Homo sapiens
aatgataaaggcata

SEQ ID NO: 1659454 - DNA, 15 bp, Homo sapiens
caatgataaaggcat

SEQ ID NO: 1659455 - DNA, 15 bp, Homo sapiens
gcaatgataaaggca

SEQ ID NO: 1659456 - DNA, 15 bp, Homo sapiens
agcaatgataaaggc

SEQ ID NO: 1659457 - DNA, 15 bp, Homo sapiens
gagcaatgataaagg

SEQ ID NO: 1659458 - DNA, 15 bp, Homo sapiens
ggagcaatgataaag

SEQ ID NO: 1659459 - DNA, 15 bp, Homo sapiens
aggagcaatgataaa

SEQ ID NO: 1659460 - DNA, 15 bp, Homo sapiens
taggagcaatgataa

SEQ ID NO: 1659461 - DNA, 15 bp, Homo sapiens
ctaggagcaatgata

SEQ ID NO: 1659462 - DNA, 15 bp, Homo sapiens
tctaggagcaatgat

SEQ ID NO: 1659463 - DNA, 15 bp, Homo sapiens
atctaggagcaatga

SEQ ID NO: 1659464 - DNA, 15 bp, Homo sapiens
tatctaggagcaatg

SEQ ID NO: 1659465 - DNA, 15 bp, Homo sapiens
ctatctaggagcaat

SEQ ID NO: 1659466 - DNA, 15 bp, Homo sapiens
actatctaggagcaa

SEQ ID NO: 1659467 - DNA, 15 bp, Homo sapiens
cactatctaggagca

SEQ ID NO: 1659468 - DNA, 15 bp, Homo sapiens
acactatctaggagc

SEQ ID NO: 1659469 - DNA, 15 bp, Homo sapiens
cacactatctaggag

SEQ ID NO: 1659470 - DNA, 15 bp, Homo sapiens
tcacactatctagga

SEQ ID NO: 1659471 - DNA, 15 bp, Homo sapiens
ttcacactatctagg

SEQ ID NO: 1659472 - DNA, 15 bp, Homo sapiens
gttcacactatctag

SEQ ID NO: 1659473 - DNA, 15 bp, Homo sapiens
agttcacactatcta

SEQ ID NO: 1659474 - DNA, 15 bp, Homo sapiens
tagttcacactatct

SEQ ID NO: 1659475 - DNA, 15 bp, Homo sapiens
gtagttcacactatc

SEQ ID NO: 1659476 - DNA, 15 bp, Homo sapiens
ggtagttcacactat

SEQ ID NO: 1659477 - DNA, 15 bp, Homo sapiens
aggtagttcacacta

SEQ ID NO: 1659478 - DNA, 15 bp, Homo sapiens
taggtagttcacact

SEQ ID NO: 1659479 - DNA, 15 bp, Homo sapiens
gtaggtagttcacac

SEQ ID NO: 1659480 - DNA, 15 bp, Homo sapiens
ggtaggtagttcaca

SEQ ID NO: 1659481 - DNA, 15 bp, Homo sapiens
tggtaggtagttcac

SEQ ID NO: 1659482 - DNA, 15 bp, Homo sapiens
gtggtaggtagttca

SEQ ID NO: 1659483 - DNA, 15 bp, Homo sapiens
ggtggtaggtagttc

SEQ ID NO: 1659484 - DNA, 15 bp, Homo sapiens
aggtggtaggtagtt

SEQ ID NO: 1659485 - DNA, 15 bp, Homo sapiens
aaggtggtaggtagt

SEQ ID NO: 1659486 - DNA, 15 bp, Homo sapiens
caaggtggtaggtag

SEQ ID NO: 1659487 - DNA, 15 bp, Homo sapiens
gcaaggtggtaggta

SEQ ID NO: 1659488 - DNA, 15 bp, Homo sapiens
tgcaaggtggtaggt

SEQ ID NO: 1659489 - DNA, 15 bp, Homo sapiens
atgcaaggtggtagg

SEQ ID NO: 1659490 - DNA, 15 bp, Homo sapiens
aatgcaaggtggtag

SEQ ID NO: 1659491 - DNA, 15 bp, Homo sapiens
taatgcaaggtggta

SEQ ID NO: 1659492 - DNA, 15 bp, Homo sapiens
ttaatgcaaggtggt

SEQ ID NO: 1659493 - DNA, 15 bp, Homo sapiens
attaatgcaaggtgg

SEQ ID NO: 1659494 - DNA, 15 bp, Homo sapiens
tattaatgcaaggtg

SEQ ID NO: 1659495 - DNA, 15 bp, Homo sapiens
atattaatgcaaggt

SEQ ID NO: 1659496 - DNA, 15 bp, Homo sapiens
catattaatgcaagg

SEQ ID NO: 1659497 - DNA, 15 bp, Homo sapiens
acatattaatgcaag

SEQ ID NO: 1659498 - DNA, 15 bp, Homo sapiens
tacatattaatgcaa

SEQ ID NO: 1659499 - DNA, 15 bp, Homo sapiens
ttacatattaatgca

SEQ ID NO: 1659500 - DNA, 15 bp, Homo sapiens
tttacatattaatgc

SEQ ID NO: 1659501 - DNA, 15 bp, Homo sapiens
ttttacatattaatg

SEQ ID NO: 1659502 - DNA, 15 bp, Homo sapiens
gttttacatattaat

SEQ ID NO: 1659503 - DNA, 15 bp, Homo sapiens
tgttttacatattaa

SEQ ID NO: 1659504 - DNA, 15 bp, Homo sapiens
gtgttttacatatta

SEQ ID NO: 1659505 - DNA, 15 bp, Homo sapiens
agtgttttacatatt

SEQ ID NO: 1659506 - DNA, 15 bp, Homo sapiens
tagtgttttacatat

SEQ ID NO: 1659507 - DNA, 15 bp, Homo sapiens
ttagtgttttacata

SEQ ID NO: 1659508 - DNA, 15 bp, Homo sapiens
attagtgttttacat

SEQ ID NO: 1659509 - DNA, 15 bp, Homo sapiens
aattagtgttttaca

SEQ ID NO: 1659510 - DNA, 15 bp, Homo sapiens
caattagtgttttac

SEQ ID NO: 1659511 - DNA, 15 bp, Homo sapiens
gcaattagtgtttta

SEQ ID NO: 1659512 - DNA, 15 bp, Homo sapiens
ggcaattagtgtttt

SEQ ID NO: 1659513 - DNA, 15 bp, Homo sapiens
gggcaattagtgttt

SEQ ID NO: 1659514 - DNA, 15 bp, Homo sapiens
tgggcaattagtgtt

SEQ ID NO: 1659515 - DNA, 15 bp, Homo sapiens
atgggcaattagtgt

SEQ ID NO: 1659516 - DNA, 15 bp, Homo sapiens
tatgggcaattagtg

SEQ ID NO: 1659517 - DNA, 15 bp, Homo sapiens
ctatgggcaattagt

SEQ ID NO: 1659518 - DNA, 15 bp, Homo sapiens
actatgggcaattag

SEQ ID NO: 1659519 - DNA, 15 bp, Homo sapiens
gactatgggcaatta

SEQ ID NO: 1659520 - DNA, 15 bp, Homo sapiens
ggactatgggcaatt

SEQ ID NO: 1659521 - DNA, 15 bp, Homo sapiens
gggactatgggcaat

SEQ ID NO: 1659522 - DNA, 15 bp, Homo sapiens
tgggactatgggcaa

SEQ ID NO: 1659523 - DNA, 15 bp, Homo sapiens
gtgggactatgggca

SEQ ID NO: 1659524 - DNA, 15 bp, Homo sapiens
agtgggactatgggc

SEQ ID NO: 1659525 - DNA, 15 bp, Homo sapiens
gagtgggactatggg

SEQ ID NO: 1659526 - DNA, 15 bp, Homo sapiens
tgagtgggactatgg

SEQ ID NO: 1659527 - DNA, 15 bp, Homo sapiens
atgagtgggactatg

SEQ ID NO: 1659528 - DNA, 15 bp, Homo sapiens
aatgagtgggactat

SEQ ID NO: 1659529 - DNA, 15 bp, Homo sapiens
taatgagtgggacta

SEQ ID NO: 1659530 - DNA, 15 bp, Homo sapiens
ctaatgagtgggact

SEQ ID NO: 1659531 - DNA, 15 bp, Homo sapiens
actaatgagtgggac

SEQ ID NO: 1659532 - DNA, 15 bp, Homo sapiens
gactaatgagtggga

SEQ ID NO: 1659533 - DNA, 15 bp, Homo sapiens
agactaatgagtggg

SEQ ID NO: 1659534 - DNA, 15 bp, Homo sapiens
tagactaatgagtgg

SEQ ID NO: 1659535 - DNA, 15 bp, Homo sapiens
ctagactaatgagtg

SEQ ID NO: 1659536 - DNA, 15 bp, Homo sapiens
cctagactaatgagt

SEQ ID NO: 1659537 - DNA, 15 bp, Homo sapiens
tcctagactaatgag

SEQ ID NO: 1659538 - DNA, 15 bp, Homo sapiens
atcctagactaatga

SEQ ID NO: 1659539 - DNA, 15 bp, Homo sapiens
catcctagactaatg

SEQ ID NO: 1659540 - DNA, 15 bp, Homo sapiens
acatcctagactaat

SEQ ID NO: 1659541 - DNA, 15 bp, Homo sapiens
gacatcctagactaa

SEQ ID NO: 1659542 - DNA, 15 bp, Homo sapiens
ggacatcctagacta

SEQ ID NO: 1659543 - DNA, 15 bp, Homo sapiens
aggacatcctagact

SEQ ID NO: 1659544 - DNA, 15 bp, Homo sapiens
gaggacatcctagac

SEQ ID NO: 1659545 - DNA, 15 bp, Homo sapiens
agaggacatcctaga

SEQ ID NO: 1659546 - DNA, 15 bp, Homo sapiens
aagaggacatcctag

SEQ ID NO: 1659547 - DNA, 15 bp, Homo sapiens
aaagaggacatccta

SEQ ID NO: 1659548 - DNA, 15 bp, Homo sapiens
caaagaggacatcct

SEQ ID NO: 1659549 - DNA, 15 bp, Homo sapiens
gcaaagaggacatcc

SEQ ID NO: 1659550 - DNA, 15 bp, Homo sapiens
ggcaaagaggacatc

SEQ ID NO: 1659551 - DNA, 15 bp, Homo sapiens
tggcaaagaggacat

SEQ ID NO: 1659552 - DNA, 15 bp, Homo sapiens
atggcaaagaggaca

SEQ ID NO: 1659553 - DNA, 15 bp, Homo sapiens
aatggcaaagaggac

SEQ ID NO: 1659554 - DNA, 15 bp, Homo sapiens
caatggcaaagagga

SEQ ID NO: 1659555 - DNA, 15 bp, Homo sapiens
gcaatggcaaagagg

SEQ ID NO: 1659556 - DNA, 15 bp, Homo sapiens
agcaatggcaaagag

SEQ ID NO: 1659557 - DNA, 15 bp, Homo sapiens
cagcaatggcaaaga

SEQ ID NO: 1659558 - DNA, 15 bp, Homo sapiens
gcagcaatggcaaag

SEQ ID NO: 1659559 - DNA, 15 bp, Homo sapiens
agcagcaatggcaaa

SEQ ID NO: 1659560 - DNA, 15 bp, Homo sapiens
cagcagcaatggcaa

SEQ ID NO: 1659561 - DNA, 15 bp, Homo sapiens
tcagcagcaatggca

SEQ ID NO: 1659562 - DNA, 15 bp, Homo sapiens
ctcagcagcaatggc

SEQ ID NO: 1659563 - DNA, 15 bp, Homo sapiens
actcagcagcaatgg

SEQ ID NO: 1659564 - DNA, 15 bp, Homo sapiens
aactcagcagcaatg

SEQ ID NO: 1659565 - DNA, 15 bp, Homo sapiens
gaactcagcagcaat

SEQ ID NO: 1659566 - DNA, 15 bp, Homo sapiens
agaactcagcagcaa

SEQ ID NO: 1659567 - DNA, 15 bp, Homo sapiens
cagaactcagcagca

SEQ ID NO: 1659568 - DNA, 15 bp, Homo sapiens
tcagaactcagcagc

SEQ ID NO: 1659569 - DNA, 15 bp, Homo sapiens
gtcagaactcagcag

SEQ ID NO: 1659570 - DNA, 15 bp, Homo sapiens
agtcagaactcagca

SEQ ID NO: 1659571 - DNA, 15 bp, Homo sapiens
tagtcagaactcagc

SEQ ID NO: 1659572 - DNA, 15 bp, Homo sapiens
gtagtcagaactcag

SEQ ID NO: 1659573 - DNA, 15 bp, Homo sapiens
ggtagtcagaactca

SEQ ID NO: 1659574 - DNA, 15 bp, Homo sapiens
gggtagtcagaactc

SEQ ID NO: 1659575 - DNA, 15 bp, Homo sapiens
tgggtagtcagaact

SEQ ID NO: 1659576 - DNA, 15 bp, Homo sapiens
ttgggtagtcagaac

SEQ ID NO: 1659577 - DNA, 15 bp, Homo sapiens
cttgggtagtcagaa

SEQ ID NO: 1659578 - DNA, 15 bp, Homo sapiens
acttgggtagtcaga

SEQ ID NO: 1659579 - DNA, 15 bp, Homo sapiens
aacttgggtagtcag

SEQ ID NO: 1659580 - DNA, 15 bp, Homo sapiens
aaacttgggtagtca

SEQ ID NO: 1659581 - DNA, 15 bp, Homo sapiens
gaaacttgggtagtc

SEQ ID NO: 1659582 - DNA, 15 bp, Homo sapiens
ggaaacttgggtagt

SEQ ID NO: 1659583 - DNA, 15 bp, Homo sapiens
aggaaacttgggtag

SEQ ID NO: 1659584 - DNA, 15 bp, Homo sapiens
aaggaaacttgggta

SEQ ID NO: 1659585 - DNA, 15 bp, Homo sapiens
gaaggaaacttgggt

SEQ ID NO: 1659586 - DNA, 15 bp, Homo sapiens
agaaggaaacttggg

SEQ ID NO: 1659587 - DNA, 15 bp, Homo sapiens
gagaaggaaacttgg

SEQ ID NO: 1659588 - DNA, 15 bp, Homo sapiens
agagaaggaaacttg

SEQ ID NO: 1659589 - DNA, 15 bp, Homo sapiens
aagagaaggaaactt

SEQ ID NO: 1659590 - DNA, 15 bp, Homo sapiens
taagagaaggaaact

SEQ ID NO: 1659591 - DNA, 15 bp, Homo sapiens
ttaagagaaggaaac

SEQ ID NO: 1659592 - DNA, 15 bp, Homo sapiens
tttaagagaaggaaa

SEQ ID NO: 1659593 - DNA, 15 bp, Homo sapiens
gtttaagagaaggaa

SEQ ID NO: 1659594 - DNA, 15 bp, Homo sapiens
tgtttaagagaagga

SEQ ID NO: 1659595 - DNA, 15 bp, Homo sapiens
ctgtttaagagaagg

SEQ ID NO: 1659596 - DNA, 15 bp, Homo sapiens
actgtttaagagaag

SEQ ID NO: 1659597 - DNA, 15 bp, Homo sapiens
aactgtttaagagaa

SEQ ID NO: 1659598 - DNA, 15 bp, Homo sapiens
caactgtttaagaga

SEQ ID NO: 1659599 - DNA, 15 bp, Homo sapiens
tcaactgtttaagag

SEQ ID NO: 1659600 - DNA, 15 bp, Homo sapiens
atcaactgtttaaga

SEQ ID NO: 1659601 - DNA, 15 bp, Homo sapiens
tatcaactgtttaag

SEQ ID NO: 1659602 - DNA, 15 bp, Homo sapiens
atatcaactgtttaa

SEQ ID NO: 1659603 - DNA, 15 bp, Homo sapiens
catatcaactgttta

SEQ ID NO: 1659604 - DNA, 15 bp, Homo sapiens
gcatatcaactgttt

SEQ ID NO: 1659605 - DNA, 15 bp, Homo sapiens
tgcatatcaactgtt

SEQ ID NO: 1659606 - DNA, 15 bp, Homo sapiens
atgcatatcaactgt

SEQ ID NO: 1659607 - DNA, 15 bp, Homo sapiens
tatgcatatcaactg

SEQ ID NO: 1659608 - DNA, 15 bp, Homo sapiens
ttatgcatatcaact

SEQ ID NO: 1659609 - DNA, 15 bp, Homo sapiens
attatgcatatcaac

SEQ ID NO: 1659610 - DNA, 15 bp, Homo sapiens
aattatgcatatcaa

SEQ ID NO: 1659611 - DNA, 15 bp, Homo sapiens
caattatgcatatca

SEQ ID NO: 1659612 - DNA, 15 bp, Homo sapiens
gcaattatgcatatc

SEQ ID NO: 1659613 - DNA, 15 bp, Homo sapiens
tgcaattatgcatat

SEQ ID NO: 1659614 - DNA, 15 bp, Homo sapiens
atgcaattatgcata

SEQ ID NO: 1659615 - DNA, 15 bp, Homo sapiens
tatgcaattatgcat

SEQ ID NO: 1659616 - DNA, 15 bp, Homo sapiens
atatgcaattatgca

SEQ ID NO: 1659617 - DNA, 15 bp, Homo sapiens
tatatgcaattatgc

SEQ ID NO: 1659618 - DNA, 15 bp, Homo sapiens
atatatgcaattatg

SEQ ID NO: 1659619 - DNA, 15 bp, Homo sapiens
aatatatgcaattat

SEQ ID NO: 1659620 - DNA, 15 bp, Homo sapiens
gaatatatgcaatta

SEQ ID NO: 1659621 - DNA, 15 bp, Homo sapiens
tgaatatatgcaatt

SEQ ID NO: 1659622 - DNA, 15 bp, Homo sapiens
atgaatatatgcaat

SEQ ID NO: 1659623 - DNA, 15 bp, Homo sapiens
catgaatatatgcaa

SEQ ID NO: 1659624 - DNA, 15 bp, Homo sapiens
ccatgaatatatgca

SEQ ID NO: 1659625 - DNA, 15 bp, Homo sapiens
accatgaatatatgc

SEQ ID NO: 1659626 - DNA, 15 bp, Homo sapiens
aaccatgaatatatg

SEQ ID NO: 1659627 - DNA, 15 bp, Homo sapiens
gaaccatgaatatat

SEQ ID NO: 1659628 - DNA, 15 bp, Homo sapiens
agaaccatgaatata

SEQ ID NO: 1659629 - DNA, 15 bp, Homo sapiens
cagaaccatgaatat

SEQ ID NO: 1659630 - DNA, 15 bp, Homo sapiens
acagaaccatgaata

SEQ ID NO: 1659631 - DNA, 15 bp, Homo sapiens
cacagaaccatgaat

SEQ ID NO: 1659632 - DNA, 15 bp, Homo sapiens
gcacagaaccatgaa

SEQ ID NO: 1659633 - DNA, 15 bp, Homo sapiens
tgcacagaaccatga

SEQ ID NO: 1659634 - DNA, 15 bp, Homo sapiens
ttgcacagaaccatg

SEQ ID NO: 1659635 - DNA, 15 bp, Homo sapiens
attgcacagaaccat

SEQ ID NO: 1659636 - DNA, 15 bp, Homo sapiens
tattgcacagaacca

SEQ ID NO: 1659637 - DNA, 15 bp, Homo sapiens
ttattgcacagaacc

SEQ ID NO: 1659638 - DNA, 15 bp, Homo sapiens
tttattgcacagaac

SEQ ID NO: 1659639 - DNA, 15 bp, Homo sapiens
ttttattgcacagaa

SEQ ID NO: 1659640 - DNA, 15 bp, Homo sapiens
tttttattgcacaga

SEQ ID NO: 1659641 - DNA, 15 bp, Homo sapiens
atttttattgcacag

SEQ ID NO: 1659642 - DNA, 15 bp, Homo sapiens
catttttattgcaca

SEQ ID NO: 1659643 - DNA, 15 bp, Homo sapiens
ccatttttattgcac

SEQ ID NO: 1659644 - DNA, 15 bp, Homo sapiens
tccatttttattgca

SEQ ID NO: 1659645 - DNA, 15 bp, Homo sapiens
atccatttttattgc

SEQ ID NO: 1659646 - DNA, 15 bp, Homo sapiens
aatccatttttattg

SEQ ID NO: 1659647 - DNA, 15 bp, Homo sapiens
gaatccatttttatt

SEQ ID NO: 1659648 - DNA, 15 bp, Homo sapiens
agaatccatttttat

SEQ ID NO: 1659649 - DNA, 15 bp, Homo sapiens
gagaatccattttta

SEQ ID NO: 1659650 - DNA, 15 bp, Homo sapiens
tgagaatccattttt

SEQ ID NO: 1659651 - DNA, 15 bp, Homo sapiens
gtgagaatccatttt

SEQ ID NO: 1659652 - DNA, 15 bp, Homo sapiens
ggtgagaatccattt

SEQ ID NO: 1659653 - DNA, 15 bp, Homo sapiens
gggtgagaatccatt

SEQ ID NO: 1659654 - DNA, 15 bp, Homo sapiens
ggggtgagaatccat

SEQ ID NO: 1659655 - DNA, 15 bp, Homo sapiens
tggggtgagaatcca

SEQ ID NO: 1659656 - DNA, 15 bp, Homo sapiens
atggggtgagaatcc

SEQ ID NO: 1659657 - DNA, 15 bp, Homo sapiens
gatggggtgagaatc

SEQ ID NO: 1659658 - DNA, 15 bp, Homo sapiens
ggatggggtgagaat

SEQ ID NO: 1659659 - DNA, 15 bp, Homo sapiens
gggatggggtgagaa

SEQ ID NO: 1659660 - DNA, 15 bp, Homo sapiens
tgggatggggtgaga

SEQ ID NO: 1659661 - DNA, 15 bp, Homo sapiens
gtgggatggggtgag

SEQ ID NO: 1659662 - DNA, 15 bp, Homo sapiens
ggtgggatggggtga

SEQ ID NO: 1659663 - DNA, 15 bp, Homo sapiens
aggtgggatggggtg

SEQ ID NO: 1659664 - DNA, 15 bp, Homo sapiens
aaggtgggatggggt

SEQ ID NO: 1659665 - DNA, 15 bp, Homo sapiens
gaaggtgggatgggg

SEQ ID NO: 1659666 - DNA, 15 bp, Homo sapiens
agaaggtgggatggg

SEQ ID NO: 1659667 - DNA, 15 bp, Homo sapiens
cagaaggtgggatgg

SEQ ID NO: 1659668 - DNA, 15 bp, Homo sapiens
acagaaggtgggatg

SEQ ID NO: 1659669 - DNA, 15 bp, Homo sapiens
cacagaaggtgggat

SEQ ID NO: 1659670 - DNA, 15 bp, Homo sapiens
ccacagaaggtggga

SEQ ID NO: 1659671 - DNA, 15 bp, Homo sapiens
cccacagaaggtggg

SEQ ID NO: 1659672 - DNA, 15 bp, Homo sapiens
tcccacagaaggtgg

SEQ ID NO: 1659673 - DNA, 15 bp, Homo sapiens
atcccacagaaggtg

SEQ ID NO: 1659674 - DNA, 15 bp, Homo sapiens
catcccacagaaggt

SEQ ID NO: 1659675 - DNA, 15 bp, Homo sapiens
acatcccacagaagg

SEQ ID NO: 1659676 - DNA, 15 bp, Homo sapiens
aacatcccacagaag

SEQ ID NO: 1659677 - DNA, 15 bp, Homo sapiens
caacatcccacagaa

SEQ ID NO: 1659678 - DNA, 15 bp, Homo sapiens
gcaacatcccacaga

SEQ ID NO: 1659679 - DNA, 15 bp, Homo sapiens
agcaacatcccacag

SEQ ID NO: 1659680 - DNA, 15 bp, Homo sapiens
tagcaacatcccaca

SEQ ID NO: 1659681 - DNA, 15 bp, Homo sapiens
ttagcaacatcccac

SEQ ID NO: 1659682 - DNA, 15 bp, Homo sapiens
gttagcaacatccca

SEQ ID NO: 1659683 - DNA, 15 bp, Homo sapiens
cgttagcaacatccc

SEQ ID NO: 1659684 - DNA, 15 bp, Homo sapiens
tcgttagcaacatcc

SEQ ID NO: 1659685 - DNA, 15 bp, Homo sapiens
ctcgttagcaacatc

SEQ ID NO: 1659686 - DNA, 15 bp, Homo sapiens
actcgttagcaacat

SEQ ID NO: 1659687 - DNA, 15 bp, Homo sapiens
cactcgttagcaaca

SEQ ID NO: 1659688 - DNA, 15 bp, Homo sapiens
gcactcgttagcaac

SEQ ID NO: 1659689 - DNA, 15 bp, Homo sapiens
tgcactcgttagcaa

SEQ ID NO: 1659690 - DNA, 15 bp, Homo sapiens
ctgcactcgttagca

SEQ ID NO: 1659691 - DNA, 15 bp, Homo sapiens
tctgcactcgttagc

SEQ ID NO: 1659692 - DNA, 15 bp, Homo sapiens
atctgcactcgttag

SEQ ID NO: 1659693 - DNA, 15 bp, Homo sapiens
aatctgcactcgtta

SEQ ID NO: 1659694 - DNA, 15 bp, Homo sapiens
taatctgcactcgtt

SEQ ID NO: 1659695 - DNA, 15 bp, Homo sapiens
ataatctgcactcgt

SEQ ID NO: 1659696 - DNA, 15 bp, Homo sapiens
aataatctgcactcg

SEQ ID NO: 1659697 - DNA, 15 bp, Homo sapiens
gaataatctgcactc

SEQ ID NO: 1659698 - DNA, 15 bp, Homo sapiens
tgaataatctgcact

SEQ ID NO: 1659699 - DNA, 15 bp, Homo sapiens
ttgaataatctgcac

SEQ ID NO: 1659700 - DNA, 15 bp, Homo sapiens
attgaataatctgca

SEQ ID NO: 1659701 - DNA, 15 bp, Homo sapiens
tattgaataatctgc

SEQ ID NO: 1659702 - DNA, 15 bp, Homo sapiens
ttattgaataatctg

SEQ ID NO: 1659703 - DNA, 15 bp, Homo sapiens
gttattgaataatct

SEQ ID NO: 1659704 - DNA, 15 bp, Homo sapiens
tgttattgaataatc

SEQ ID NO: 1659705 - DNA, 15 bp, Homo sapiens
ctgttattgaataat

SEQ ID NO: 1659706 - DNA, 15 bp, Homo sapiens
gctgttattgaataa

SEQ ID NO: 1659707 - DNA, 15 bp, Homo sapiens
agctgttattgaata

SEQ ID NO: 1659708 - DNA, 15 bp, Homo sapiens
gagctgttattgaat

SEQ ID NO: 1659709 - DNA, 15 bp, Homo sapiens
agagctgttattgaa

SEQ ID NO: 1659710 - DNA, 15 bp, Homo sapiens
aagagctgttattga

SEQ ID NO: 1659711 - DNA, 15 bp, Homo sapiens
caagagctgttattg

SEQ ID NO: 1659712 - DNA, 15 bp, Homo sapiens
tcaagagctgttatt

SEQ ID NO: 1659713 - DNA, 15 bp, Homo sapiens
ttcaagagctgttat

SEQ ID NO: 1659714 - DNA, 15 bp, Homo sapiens
gttcaagagctgtta

SEQ ID NO: 1659715 - DNA, 15 bp, Homo sapiens
tgttcaagagctgtt

SEQ ID NO: 1659716 - DNA, 15 bp, Homo sapiens
ctgttcaagagctgt

SEQ ID NO: 1659717 - DNA, 15 bp, Homo sapiens
actgttcaagagctg

SEQ ID NO: 1659718 - DNA, 15 bp, Homo sapiens
aactgttcaagagct

SEQ ID NO: 1659719 - DNA, 15 bp, Homo sapiens
taactgttcaagagc

SEQ ID NO: 1659720 - DNA, 15 bp, Homo sapiens
ttaactgttcaagag

SEQ ID NO: 1659721 - DNA, 15 bp, Homo sapiens
attaactgttcaaga

SEQ ID NO: 1659722 - DNA, 15 bp, Homo sapiens
aattaactgttcaag

SEQ ID NO: 1659723 - DNA, 15 bp, Homo sapiens
aaattaactgttcaa

SEQ ID NO: 1659724 - DNA, 15 bp, Homo sapiens
caaattaactgttca

SEQ ID NO: 1659725 - DNA, 15 bp, Homo sapiens
gcaaattaactgttc

SEQ ID NO: 1659726 - DNA, 15 bp, Homo sapiens
tgcaaattaactgtt

SEQ ID NO: 1659727 - DNA, 15 bp, Homo sapiens
gtgcaaattaactgt

SEQ ID NO: 1659728 - DNA, 15 bp, Homo sapiens
tgtgcaaattaactg

SEQ ID NO: 1659729 - DNA, 15 bp, Homo sapiens
ctgtgcaaattaact

SEQ ID NO: 1659730 - DNA, 15 bp, Homo sapiens
actgtgcaaattaac

SEQ ID NO: 1659731 - DNA, 15 bp, Homo sapiens
aactgtgcaaattaa

SEQ ID NO: 1659732 - DNA, 15 bp, Homo sapiens
caactgtgcaaatta

SEQ ID NO: 1659733 - DNA, 15 bp, Homo sapiens
gcaactgtgcaaatt

SEQ ID NO: 1659734 - DNA, 15 bp, Homo sapiens
tgcaactgtgcaaat

SEQ ID NO: 1659735 - DNA, 15 bp, Homo sapiens
ttgcaactgtgcaaa

SEQ ID NO: 1659736 - DNA, 15 bp, Homo sapiens
attgcaactgtgcaa

SEQ ID NO: 1659737 - DNA, 15 bp, Homo sapiens
aattgcaactgtgca

SEQ ID NO: 1659738 - DNA, 15 bp, Homo sapiens
caattgcaactgtgc

SEQ ID NO: 1659739 - DNA, 15 bp, Homo sapiens
acaattgcaactgtg

SEQ ID NO: 1659740 - DNA, 15 bp, Homo sapiens
gacaattgcaactgt

SEQ ID NO: 1659741 - DNA, 15 bp, Homo sapiens
ggacaattgcaactg

SEQ ID NO: 1659742 - DNA, 15 bp, Homo sapiens
tggacaattgcaact

SEQ ID NO: 1659743 - DNA, 15 bp, Homo sapiens
ctggacaattgcaac

SEQ ID NO: 1659744 - DNA, 15 bp, Homo sapiens
tctggacaattgcaa

SEQ ID NO: 1659745 - DNA, 15 bp, Homo sapiens
ctctggacaattgca

SEQ ID NO: 1659746 - DNA, 15 bp, Homo sapiens
actctggacaattgc

SEQ ID NO: 1659747 - DNA, 15 bp, Homo sapiens
gactctggacaattg

SEQ ID NO: 1659748 - DNA, 15 bp, Homo sapiens
ggactctggacaatt

SEQ ID NO: 1659749 - DNA, 15 bp, Homo sapiens
aggactctggacaat

SEQ ID NO: 1659750 - DNA, 15 bp, Homo sapiens
caggactctggacaa

SEQ ID NO: 1659751 - DNA, 15 bp, Homo sapiens
acaggactctggaca

SEQ ID NO: 1659752 - DNA, 15 bp, Homo sapiens
gacaggactctggac

SEQ ID NO: 1659753 - DNA, 15 bp, Homo sapiens
ggacaggactctgga

SEQ ID NO: 1659754 - DNA, 15 bp, Homo sapiens
tggacaggactctgg

SEQ ID NO: 1659755 - DNA, 15 bp, Homo sapiens
atggacaggactctg

SEQ ID NO: 1659756 - DNA, 15 bp, Homo sapiens
aatggacaggactct

SEQ ID NO: 1659757 - DNA, 15 bp, Homo sapiens
taatggacaggactc

SEQ ID NO: 1659758 - DNA, 15 bp, Homo sapiens
ctaatggacaggact

SEQ ID NO: 1659759 - DNA, 15 bp, Homo sapiens
tctaatggacaggac

SEQ ID NO: 1659760 - DNA, 15 bp, Homo sapiens
ttctaatggacagga

SEQ ID NO: 1659761 - DNA, 15 bp, Homo sapiens
tttctaatggacagg

SEQ ID NO: 1659762 - DNA, 15 bp, Homo sapiens
ctttctaatggacag

SEQ ID NO: 1659763 - DNA, 15 bp, Homo sapiens
cctttctaatggaca

SEQ ID NO: 1659764 - DNA, 15 bp, Homo sapiens
ccctttctaatggac

SEQ ID NO: 1659765 - DNA, 15 bp, Homo sapiens
tccctttctaatgga

SEQ ID NO: 1659766 - DNA, 15 bp, Homo sapiens
gtccctttctaatgg

SEQ ID NO: 1659767 - DNA, 15 bp, Homo sapiens
agtccctttctaatg

SEQ ID NO: 1659768 - DNA, 15 bp, Homo sapiens
gagtccctttctaat

SEQ ID NO: 1659769 - DNA, 15 bp, Homo sapiens
agagtccctttctaa

SEQ ID NO: 1659770 - DNA, 15 bp, Homo sapiens
cagagtccctttcta

SEQ ID NO: 1659771 - DNA, 15 bp, Homo sapiens
acagagtccctttct

SEQ ID NO: 1659772 - DNA, 15 bp, Homo sapiens
tacagagtccctttc

SEQ ID NO: 1659773 - DNA, 15 bp, Homo sapiens
atacagagtcccttt

SEQ ID NO: 1659774 - DNA, 15 bp, Homo sapiens
gatacagagtccctt

SEQ ID NO: 1659775 - DNA, 15 bp, Homo sapiens
ggatacagagtccct

SEQ ID NO: 1659776 - DNA, 15 bp, Homo sapiens
aggatacagagtccc

SEQ ID NO: 1659777 - DNA, 15 bp, Homo sapiens
taggatacagagtcc

SEQ ID NO: 1659778 - DNA, 15 bp, Homo sapiens
ataggatacagagtc

SEQ ID NO: 1659779 - DNA, 15 bp, Homo sapiens
aataggatacagagt

SEQ ID NO: 1659780 - DNA, 15 bp, Homo sapiens
aaataggatacagag

SEQ ID NO: 1659781 - DNA, 15 bp, Homo sapiens
caaataggatacaga

SEQ ID NO: 1659782 - DNA, 15 bp, Homo sapiens
gcaaataggatacag

SEQ ID NO: 1659783 - DNA, 15 bp, Homo sapiens
tgcaaataggataca

SEQ ID NO: 1659784 - DNA, 15 bp, Homo sapiens
gtgcaaataggatac

SEQ ID NO: 1659785 - DNA, 15 bp, Homo sapiens
cgtgcaaataggata

SEQ ID NO: 1659786 - DNA, 15 bp, Homo sapiens
gcgtgcaaataggat

SEQ ID NO: 1659787 - DNA, 15 bp, Homo sapiens
agcgtgcaaatagga

SEQ ID NO: 1659788 - DNA, 15 bp, Homo sapiens
tagcgtgcaaatagg

SEQ ID NO: 1659789 - DNA, 15 bp, Homo sapiens
gtagcgtgcaaatag

SEQ ID NO: 1659790 - DNA, 15 bp, Homo sapiens
tgtagcgtgcaaata

SEQ ID NO: 1659791 - DNA, 15 bp, Homo sapiens
ttgtagcgtgcaaat

SEQ ID NO: 1659792 - DNA, 15 bp, Homo sapiens
attgtagcgtgcaaa

SEQ ID NO: 1659793 - DNA, 15 bp, Homo sapiens
cattgtagcgtgcaa

SEQ ID NO: 1659794 - DNA, 15 bp, Homo sapiens
acattgtagcgtgca

SEQ ID NO: 1659795 - DNA, 15 bp, Homo sapiens
cacattgtagcgtgc

SEQ ID NO: 1659796 - DNA, 15 bp, Homo sapiens
ccacattgtagcgtg

SEQ ID NO: 1659797 - DNA, 15 bp, Homo sapiens
cccacattgtagcgt

SEQ ID NO: 1659798 - DNA, 15 bp, Homo sapiens
gcccacattgtagcg

SEQ ID NO: 1659799 - DNA, 15 bp, Homo sapiens
agcccacattgtagc

SEQ ID NO: 1659800 - DNA, 15 bp, Homo sapiens
cagcccacattgtag

SEQ ID NO: 1659801 - DNA, 15 bp, Homo sapiens
tcagcccacattgta

SEQ ID NO: 1659802 - DNA, 15 bp, Homo sapiens
atcagcccacattgt

SEQ ID NO: 1659803 - DNA, 15 bp, Homo sapiens
gatcagcccacattg

SEQ ID NO: 1659804 - DNA, 15 bp, Homo sapiens
tgatcagcccacatt

SEQ ID NO: 1659805 - DNA, 15 bp, Homo sapiens
gtgatcagcccacat

SEQ ID NO: 1659806 - DNA, 15 bp, Homo sapiens
ggtgatcagcccaca

SEQ ID NO: 1659807 - DNA, 15 bp, Homo sapiens
gggtgatcagcccac

SEQ ID NO: 1659808 - DNA, 15 bp, Homo sapiens
tgggtgatcagccca

SEQ ID NO: 1659809 - DNA, 15 bp, Homo sapiens
ttgggtgatcagccc

SEQ ID NO: 1659810 - DNA, 15 bp, Homo sapiens
cttgggtgatcagcc

SEQ ID NO: 1659811 - DNA, 15 bp, Homo sapiens
ccttgggtgatcagc

SEQ ID NO: 1659812 - DNA, 15 bp, Homo sapiens
tccttgggtgatcag

SEQ ID NO: 1659813 - DNA, 15 bp, Homo sapiens
gtccttgggtgatca

SEQ ID NO: 1659814 - DNA, 15 bp, Homo sapiens
agtccttgggtgatc

SEQ ID NO: 1659815 - DNA, 15 bp, Homo sapiens
gagtccttgggtgat

SEQ ID NO: 1659816 - DNA, 15 bp, Homo sapiens
agagtccttgggtga

SEQ ID NO: 1659817 - DNA, 15 bp, Homo sapiens
aagagtccttgggtg

SEQ ID NO: 1659818 - DNA, 15 bp, Homo sapiens
gaagagtccttgggt

SEQ ID NO: 1659819 - DNA, 15 bp, Homo sapiens
agaagagtccttggg

SEQ ID NO: 1659820 - DNA, 15 bp, Homo sapiens
aagaagagtccttgg

SEQ ID NO: 1659821 - DNA, 15 bp, Homo sapiens
caagaagagtccttg

SEQ ID NO: 1659822 - DNA, 15 bp, Homo sapiens
acaagaagagtcctt

SEQ ID NO: 1659823 - DNA, 15 bp, Homo sapiens
cacaagaagagtcct

SEQ ID NO: 1659824 - DNA, 15 bp, Homo sapiens
gcacaagaagagtcc

SEQ ID NO: 1659825 - DNA, 15 bp, Homo sapiens
tgcacaagaagagtc

SEQ ID NO: 1659826 - DNA, 15 bp, Homo sapiens
atgcacaagaagagt

SEQ ID NO: 1659827 - DNA, 15 bp, Homo sapiens
aatgcacaagaagag

SEQ ID NO: 1659828 - DNA, 15 bp, Homo sapiens
caatgcacaagaaga

SEQ ID NO: 1659829 - DNA, 15 bp, Homo sapiens
tcaatgcacaagaag

SEQ ID NO: 1659830 - DNA, 15 bp, Homo sapiens
atcaatgcacaagaa

SEQ ID NO: 1659831 - DNA, 15 bp, Homo sapiens
catcaatgcacaaga

SEQ ID NO: 1659832 - DNA, 15 bp, Homo sapiens
acatcaatgcacaag

SEQ ID NO: 1659833 - DNA, 15 bp, Homo sapiens
aacatcaatgcacaa

SEQ ID NO: 1659834 - DNA, 15 bp, Homo sapiens
gaacatcaatgcaca

SEQ ID NO: 1659835 - DNA, 15 bp, Homo sapiens
tgaacatcaatgcac

SEQ ID NO: 1659836 - DNA, 15 bp, Homo sapiens
atgaacatcaatgca

SEQ ID NO: 1659837 - DNA, 15 bp, Homo sapiens
tatgaacatcaatgc

SEQ ID NO: 1659838 - DNA, 15 bp, Homo sapiens
ttatgaacatcaatg

SEQ ID NO: 1659839 - DNA, 15 bp, Homo sapiens
attatgaacatcaat

SEQ ID NO: 1659840 - DNA, 15 bp, Homo sapiens
aattatgaacatcaa

SEQ ID NO: 1659841 - DNA, 15 bp, Homo sapiens
caattatgaacatca

SEQ ID NO: 1659842 - DNA, 15 bp, Homo sapiens
acaattatgaacatc

SEQ ID NO: 1659843 - DNA, 15 bp, Homo sapiens
tacaattatgaacat

SEQ ID NO: 1659844 - DNA, 15 bp, Homo sapiens
atacaattatgaaca

SEQ ID NO: 1659845 - DNA, 15 bp, Homo sapiens
aatacaattatgaac

SEQ ID NO: 1659846 - DNA, 15 bp, Homo sapiens
aaatacaattatgaa

SEQ ID NO: 1659847 - DNA, 15 bp, Homo sapiens
caaatacaattatga

SEQ ID NO: 1659848 - DNA, 15 bp, Homo sapiens
acaaatacaattatg

SEQ ID NO: 1659849 - DNA, 15 bp, Homo sapiens
gacaaatacaattat

SEQ ID NO: 1659850 - DNA, 15 bp, Homo sapiens
ggacaaatacaatta

SEQ ID NO: 1659851 - DNA, 15 bp, Homo sapiens
tggacaaatacaatt

SEQ ID NO: 1659852 - DNA, 15 bp, Homo sapiens
gtggacaaatacaat

SEQ ID NO: 1659853 - DNA, 15 bp, Homo sapiens
cgtggacaaatacaa

SEQ ID NO: 1659854 - DNA, 15 bp, Homo sapiens
tcgtggacaaataca

SEQ ID NO: 1659855 - DNA, 15 bp, Homo sapiens
atcgtggacaaatac

SEQ ID NO: 1659856 - DNA, 15 bp, Homo sapiens
gatcgtggacaaata

SEQ ID NO: 1659857 - DNA, 15 bp, Homo sapiens
agatcgtggacaaat

SEQ ID NO: 1659858 - DNA, 15 bp, Homo sapiens
aagatcgtggacaaa

SEQ ID NO: 1659859 - DNA, 15 bp, Homo sapiens
caagatcgtggacaa

SEQ ID NO: 1659860 - DNA, 15 bp, Homo sapiens
acaagatcgtggaca

SEQ ID NO: 1659861 - DNA, 15 bp, Homo sapiens
cacaagatcgtggac

SEQ ID NO: 1659862 - DNA, 15 bp, Homo sapiens
gcacaagatcgtgga

SEQ ID NO: 1659863 - DNA, 15 bp, Homo sapiens
tgcacaagatcgtgg

SEQ ID NO: 1659864 - DNA, 15 bp, Homo sapiens
gtgcacaagatcgtg

SEQ ID NO: 1659865 - DNA, 15 bp, Homo sapiens
agtgcacaagatcgt

SEQ ID NO: 1659866 - DNA, 15 bp, Homo sapiens
tagtgcacaagatcg

SEQ ID NO: 1659867 - DNA, 15 bp, Homo sapiens
ttagtgcacaagatc

SEQ ID NO: 1659868 - DNA, 15 bp, Homo sapiens
gttagtgcacaagat

SEQ ID NO: 1659869 - DNA, 15 bp, Homo sapiens
ggttagtgcacaaga

SEQ ID NO: 1659870 - DNA, 15 bp, Homo sapiens
gggttagtgcacaag

SEQ ID NO: 1659871 - DNA, 15 bp, Homo sapiens
agggttagtgcacaa

SEQ ID NO: 1659872 - DNA, 15 bp, Homo sapiens
aagggttagtgcaca

SEQ ID NO: 1659873 - DNA, 15 bp, Homo sapiens
gaagggttagtgcac

SEQ ID NO: 1659874 - DNA, 15 bp, Homo sapiens
ggaagggttagtgca

SEQ ID NO: 1659875 - DNA, 15 bp, Homo sapiens
tggaagggttagtgc

SEQ ID NO: 1659876 - DNA, 15 bp, Homo sapiens
gtggaagggttagtg

SEQ ID NO: 1659877 - DNA, 15 bp, Homo sapiens
agtggaagggttagt

SEQ ID NO: 1659878 - DNA, 15 bp, Homo sapiens
gagtggaagggttag

SEQ ID NO: 1659879 - DNA, 15 bp, Homo sapiens
ggagtggaagggtta

SEQ ID NO: 1659880 - DNA, 15 bp, Homo sapiens
gggagtggaagggtt

SEQ ID NO: 1659881 - DNA, 15 bp, Homo sapiens
agggagtggaagggt

SEQ ID NO: 1659882 - DNA, 15 bp, Homo sapiens
aagggagtggaaggg

SEQ ID NO: 1659883 - DNA, 15 bp, Homo sapiens
aaagggagtggaagg

SEQ ID NO: 1659884 - DNA, 15 bp, Homo sapiens
caaagggagtggaag

SEQ ID NO: 1659885 - DNA, 15 bp, Homo sapiens
acaaagggagtggaa

SEQ ID NO: 1659886 - DNA, 15 bp, Homo sapiens
tacaaagggagtgga

SEQ ID NO: 1659887 - DNA, 15 bp, Homo sapiens
atacaaagggagtgg

SEQ ID NO: 1659888 - DNA, 15 bp, Homo sapiens
aatacaaagggagtg

SEQ ID NO: 1659889 - DNA, 15 bp, Homo sapiens
gaatacaaagggagt

SEQ ID NO: 1659890 - DNA, 15 bp, Homo sapiens
ggaatacaaagggag

SEQ ID NO: 1659891 - DNA, 15 bp, Homo sapiens
tggaatacaaaggga

SEQ ID NO: 1659892 - DNA, 15 bp, Homo sapiens
ctggaatacaaaggg

SEQ ID NO: 1659893 - DNA, 15 bp, Homo sapiens
gctggaatacaaagg

SEQ ID NO: 1659894 - DNA, 15 bp, Homo sapiens
tgctggaatacaaag

SEQ ID NO: 1659895 - DNA, 15 bp, Homo sapiens
ctgctggaatacaaa

SEQ ID NO: 1659896 - DNA, 15 bp, Homo sapiens
cctgctggaatacaa

SEQ ID NO: 1659897 - DNA, 15 bp, Homo sapiens
ccctgctggaataca

SEQ ID NO: 1659898 - DNA, 15 bp, Homo sapiens
cccctgctggaatac

SEQ ID NO: 1659899 - DNA, 15 bp, Homo sapiens
tcccctgctggaata

SEQ ID NO: 1659900 - DNA, 15 bp, Homo sapiens
gtcccctgctggaat

SEQ ID NO: 1659901 - DNA, 15 bp, Homo sapiens
ggtcccctgctggaa

SEQ ID NO: 1659902 - DNA, 15 bp, Homo sapiens
gggtcccctgctgga

SEQ ID NO: 1659903 - DNA, 15 bp, Homo sapiens
agggtcccctgctgg

SEQ ID NO: 1659904 - DNA, 15 bp, Homo sapiens
aagggtcccctgctg

SEQ ID NO: 1659905 - DNA, 15 bp, Homo sapiens
taagggtcccctgct

SEQ ID NO: 1659906 - DNA, 15 bp, Homo sapiens
gtaagggtcccctgc

SEQ ID NO: 1659907 - DNA, 15 bp, Homo sapiens
agtaagggtcccctg

SEQ ID NO: 1659908 - DNA, 15 bp, Homo sapiens
tagtaagggtcccct

SEQ ID NO: 1659909 - DNA, 15 bp, Homo sapiens
gtagtaagggtcccc

SEQ ID NO: 1659910 - DNA, 15 bp, Homo sapiens
agtagtaagggtccc

SEQ ID NO: 1659911 - DNA, 15 bp, Homo sapiens
gagtagtaagggtcc

SEQ ID NO: 1659912 - DNA, 15 bp, Homo sapiens
tgagtagtaagggtc

SEQ ID NO: 1659913 - DNA, 15 bp, Homo sapiens
ttgagtagtaagggt

SEQ ID NO: 1659914 - DNA, 15 bp, Homo sapiens
cttgagtagtaaggg

SEQ ID NO: 1659915 - DNA, 15 bp, Homo sapiens
tcttgagtagtaagg

SEQ ID NO: 1659916 - DNA, 15 bp, Homo sapiens
gtcttgagtagtaag

SEQ ID NO: 1659917 - DNA, 15 bp, Homo sapiens
ggtcttgagtagtaa

SEQ ID NO: 1659918 - DNA, 15 bp, Homo sapiens
aggtcttgagtagta

SEQ ID NO: 1659919 - DNA, 15 bp, Homo sapiens
gaggtcttgagtagt

SEQ ID NO: 1659920 - DNA, 15 bp, Homo sapiens
agaggtcttgagtag

SEQ ID NO: 1659921 - DNA, 15 bp, Homo sapiens
cagaggtcttgagta

SEQ ID NO: 1659922 - DNA, 15 bp, Homo sapiens
acagaggtcttgagt

SEQ ID NO: 1659923 - DNA, 15 bp, Homo sapiens
tacagaggtcttgag

SEQ ID NO: 1659924 - DNA, 15 bp, Homo sapiens
gtacagaggtcttga

SEQ ID NO: 1659925 - DNA, 15 bp, Homo sapiens
agtacagaggtcttg

SEQ ID NO: 1659926 - DNA, 15 bp, Homo sapiens
tagtacagaggtctt

SEQ ID NO: 1659927 - DNA, 15 bp, Homo sapiens
ctagtacagaggtct

SEQ ID NO: 1659928 - DNA, 15 bp, Homo sapiens
cctagtacagaggtc

SEQ ID NO: 1659929 - DNA, 15 bp, Homo sapiens
tcctagtacagaggt

SEQ ID NO: 1659930 - DNA, 15 bp, Homo sapiens
gtcctagtacagagg

SEQ ID NO: 1659931 - DNA, 15 bp, Homo sapiens
tgtcctagtacagag

SEQ ID NO: 1659932 - DNA, 15 bp, Homo sapiens
ctgtcctagtacaga

SEQ ID NO: 1659933 - DNA, 15 bp, Homo sapiens
actgtcctagtacag

SEQ ID NO: 1659934 - DNA, 15 bp, Homo sapiens
aactgtcctagtaca

SEQ ID NO: 1659935 - DNA, 15 bp, Homo sapiens
aaactgtcctagtac

SEQ ID NO: 1659936 - DNA, 15 bp, Homo sapiens
taaactgtcctagta

SEQ ID NO: 1659937 - DNA, 15 bp, Homo sapiens
ataaactgtcctagt

SEQ ID NO: 1659938 - DNA, 15 bp, Homo sapiens
cataaactgtcctag

SEQ ID NO: 1659939 - DNA, 15 bp, Homo sapiens
acataaactgtccta

SEQ ID NO: 1659940 - DNA, 15 bp, Homo sapiens
cacataaactgtcct

SEQ ID NO: 1659941 - DNA, 15 bp, Homo sapiens
gcacataaactgtcc

SEQ ID NO: 1659942 - DNA, 15 bp, Homo sapiens
tgcacataaactgtc

SEQ ID NO: 1659943 - DNA, 15 bp, Homo sapiens
gtgcacataaactgt

SEQ ID NO: 1659944 - DNA, 15 bp, Homo sapiens
tgtgcacataaactg

SEQ ID NO: 1659945 - DNA, 15 bp, Homo sapiens
ttgtgcacataaact

SEQ ID NO: 1659946 - DNA, 15 bp, Homo sapiens
attgtgcacataaac

SEQ ID NO: 1659947 - DNA, 15 bp, Homo sapiens
gattgtgcacataaa

SEQ ID NO: 1659948 - DNA, 15 bp, Homo sapiens
ggattgtgcacataa

SEQ ID NO: 1659949 - DNA, 15 bp, Homo sapiens
aggattgtgcacata

SEQ ID NO: 1659950 - DNA, 15 bp, Homo sapiens
taggattgtgcacat

SEQ ID NO: 1659951 - DNA, 15 bp, Homo sapiens
ttaggattgtgcaca

SEQ ID NO: 1659952 - DNA, 15 bp, Homo sapiens
attaggattgtgcac

SEQ ID NO: 1659953 - DNA, 15 bp, Homo sapiens
aattaggattgtgca

SEQ ID NO: 1659954 - DNA, 15 bp, Homo sapiens
caattaggattgtgc

SEQ ID NO: 1659955 - DNA, 15 bp, Homo sapiens
tcaattaggattgtg

SEQ ID NO: 1659956 - DNA, 15 bp, Homo sapiens
atcaattaggattgt

SEQ ID NO: 1659957 - DNA, 15 bp, Homo sapiens
aatcaattaggattg

SEQ ID NO: 1659958 - DNA, 15 bp, Homo sapiens
taatcaattaggatt

SEQ ID NO: 1659959 - DNA, 15 bp, Homo sapiens
ctaatcaattaggat

SEQ ID NO: 1659960 - DNA, 15 bp, Homo sapiens
tctaatcaattagga

SEQ ID NO: 1659961 - DNA, 15 bp, Homo sapiens
ttctaatcaattagg

SEQ ID NO: 1659962 - DNA, 15 bp, Homo sapiens
gttctaatcaattag

SEQ ID NO: 1659963 - DNA, 15 bp, Homo sapiens
agttctaatcaatta

SEQ ID NO: 1659964 - DNA, 15 bp, Homo sapiens
cagttctaatcaatt

SEQ ID NO: 1659965 - DNA, 15 bp, Homo sapiens
tcagttctaatcaat

SEQ ID NO: 1659966 - DNA, 15 bp, Homo sapiens
ctcagttctaatcaa

SEQ ID NO: 1659967 - DNA, 15 bp, Homo sapiens
actcagttctaatca

SEQ ID NO: 1659968 - DNA, 15 bp, Homo sapiens
gactcagttctaatc

SEQ ID NO: 1659969 - DNA, 15 bp, Homo sapiens
agactcagttctaat

SEQ ID NO: 1659970 - DNA, 15 bp, Homo sapiens
aagactcagttctaa

SEQ ID NO: 1659971 - DNA, 15 bp, Homo sapiens
aaagactcagttcta

SEQ ID NO: 1659972 - DNA, 15 bp, Homo sapiens
aaaagactcagttct

SEQ ID NO: 1659973 - DNA, 15 bp, Homo sapiens
taaaagactcagttc

SEQ ID NO: 1659974 - DNA, 15 bp, Homo sapiens
ataaaagactcagtt

SEQ ID NO: 1659975 - DNA, 15 bp, Homo sapiens
tataaaagactcagt

SEQ ID NO: 1659976 - DNA, 15 bp, Homo sapiens
atataaaagactcag

SEQ ID NO: 1659977 - DNA, 15 bp, Homo sapiens
gatataaaagactca

SEQ ID NO: 1659978 - DNA, 15 bp, Homo sapiens
tgatataaaagactc

SEQ ID NO: 1659979 - DNA, 15 bp, Homo sapiens
ttgatataaaagact

SEQ ID NO: 1659980 - DNA, 15 bp, Homo sapiens
cttgatataaaagac

SEQ ID NO: 1659981 - DNA, 15 bp, Homo sapiens
ccttgatataaaaga

SEQ ID NO: 1659982 - DNA, 15 bp, Homo sapiens
accttgatataaaag

SEQ ID NO: 1659983 - DNA, 15 bp, Homo sapiens
gaccttgatataaaa

SEQ ID NO: 1659984 - DNA, 15 bp, Homo sapiens
ggaccttgatataaa

SEQ ID NO: 1659985 - DNA, 15 bp, Homo sapiens
gggaccttgatataa

SEQ ID NO: 1659986 - DNA, 15 bp, Homo sapiens
agggaccttgatata

SEQ ID NO: 1659987 - DNA, 15 bp, Homo sapiens
cagggaccttgatat

SEQ ID NO: 1659988 - DNA, 15 bp, Homo sapiens
gcagggaccttgata

SEQ ID NO: 1659989 - DNA, 15 bp, Homo sapiens
tgcagggaccttgat

SEQ ID NO: 1659990 - DNA, 15 bp, Homo sapiens
atgcagggaccttga

SEQ ID NO: 1659991 - DNA, 15 bp, Homo sapiens
gatgcagggaccttg

SEQ ID NO: 1659992 - DNA, 15 bp, Homo sapiens
tgatgcagggacctt

SEQ ID NO: 1659993 - DNA, 15 bp, Homo sapiens
atgatgcagggacct

SEQ ID NO: 1659994 - DNA, 15 bp, Homo sapiens
gatgatgcagggacc

SEQ ID NO: 1659995 - DNA, 15 bp, Homo sapiens
agatgatgcagggac

SEQ ID NO: 1659996 - DNA, 15 bp, Homo sapiens
aagatgatgcaggga

SEQ ID NO: 1659997 - DNA, 15 bp, Homo sapiens
aaagatgatgcaggg

SEQ ID NO: 1659998 - DNA, 15 bp, Homo sapiens
caaagatgatgcagg

SEQ ID NO: 1659999 - DNA, 15 bp, Homo sapiens
gcaaagatgatgcag

SEQ ID NO: 1660000 - DNA, 15 bp, Homo sapiens
agcaaagatgatgca

SEQ ID NO: 1660001 - DNA, 15 bp, Homo sapiens
aagcaaagatgatgc

SEQ ID NO: 1660002 - DNA, 15 bp, Homo sapiens
aaagcaaagatgatg

SEQ ID NO: 1660003 - DNA, 15 bp, Homo sapiens
taaagcaaagatgat

SEQ ID NO: 1660004 - DNA, 15 bp, Homo sapiens
gtaaagcaaagatga

SEQ ID NO: 1660005 - DNA, 15 bp, Homo sapiens
tgtaaagcaaagatg

SEQ ID NO: 1660006 - DNA, 15 bp, Homo sapiens
atgtaaagcaaagat

SEQ ID NO: 1660007 - DNA, 15 bp, Homo sapiens
gatgtaaagcaaaga

SEQ ID NO: 1660008 - DNA, 15 bp, Homo sapiens
tgatgtaaagcaaag

SEQ ID NO: 1660009 - DNA, 15 bp, Homo sapiens
ttgatgtaaagcaaa

SEQ ID NO: 1660010 - DNA, 15 bp, Homo sapiens
cttgatgtaaagcaa

SEQ ID NO: 1660011 - DNA, 15 bp, Homo sapiens
tcttgatgtaaagca

SEQ ID NO: 1660012 - DNA, 15 bp, Homo sapiens
ctcttgatgtaaagc

SEQ ID NO: 1660013 - DNA, 15 bp, Homo sapiens
cctcttgatgtaaag

SEQ ID NO: 1660014 - DNA, 15 bp, Homo sapiens
ccctcttgatgtaaa

SEQ ID NO: 1660015 - DNA, 15 bp, Homo sapiens
accctcttgatgtaa

SEQ ID NO: 1660016 - DNA, 15 bp, Homo sapiens
caccctcttgatgta

SEQ ID NO: 1660017 - DNA, 15 bp, Homo sapiens
gcaccctcttgatgt

SEQ ID NO: 1660018 - DNA, 15 bp, Homo sapiens
agcaccctcttgatg

SEQ ID NO: 1660019 - DNA, 15 bp, Homo sapiens
cagcaccctcttgat

SEQ ID NO: 1660020 - DNA, 15 bp, Homo sapiens
ccagcaccctcttga

SEQ ID NO: 1660021 - DNA, 15 bp, Homo sapiens
accagcaccctcttg

SEQ ID NO: 1660022 - DNA, 15 bp, Homo sapiens
aaccagcaccctctt

SEQ ID NO: 1660023 - DNA, 15 bp, Homo sapiens
taaccagcaccctct

SEQ ID NO: 1660024 - DNA, 15 bp, Homo sapiens
gtaaccagcaccctc

SEQ ID NO: 1660025 - DNA, 15 bp, Homo sapiens
ggtaaccagcaccct

SEQ ID NO: 1660026 - DNA, 15 bp, Homo sapiens
aggtaaccagcaccc

SEQ ID NO: 1660027 - DNA, 15 bp, Homo sapiens
taggtaaccagcacc

SEQ ID NO: 1660028 - DNA, 15 bp, Homo sapiens
ttaggtaaccagcac

SEQ ID NO: 1660029 - DNA, 15 bp, Homo sapiens
attaggtaaccagca

SEQ ID NO: 1660030 - DNA, 15 bp, Homo sapiens
cattaggtaaccagc

SEQ ID NO: 1660031 - DNA, 15 bp, Homo sapiens
gcattaggtaaccag

SEQ ID NO: 1660032 - DNA, 15 bp, Homo sapiens
ggcattaggtaacca

SEQ ID NO: 1660033 - DNA, 15 bp, Homo sapiens
gggcattaggtaacc

SEQ ID NO: 1660034 - DNA, 15 bp, Homo sapiens
ggggcattaggtaac

SEQ ID NO: 1660035 - DNA, 15 bp, Homo sapiens
aggggcattaggtaa

SEQ ID NO: 1660036 - DNA, 15 bp, Homo sapiens
gaggggcattaggta

SEQ ID NO: 1660037 - DNA, 15 bp, Homo sapiens
ggaggggcattaggt

SEQ ID NO: 1660038 - DNA, 15 bp, Homo sapiens
aggaggggcattagg

SEQ ID NO: 1660039 - DNA, 15 bp, Homo sapiens
gaggaggggcattag

SEQ ID NO: 1660040 - DNA, 15 bp, Homo sapiens
ggaggaggggcatta

SEQ ID NO: 1660041 - DNA, 15 bp, Homo sapiens
tggaggaggggcatt

SEQ ID NO: 1660042 - DNA, 15 bp, Homo sapiens
ctggaggaggggcat

SEQ ID NO: 1660043 - DNA, 15 bp, Homo sapiens
tctggaggaggggca

SEQ ID NO: 1660044 - DNA, 15 bp, Homo sapiens
ttctggaggaggggc

SEQ ID NO: 1660045 - DNA, 15 bp, Homo sapiens
tttctggaggagggg

SEQ ID NO: 1660046 - DNA, 15 bp, Homo sapiens
atttctggaggaggg

SEQ ID NO: 1660047 - DNA, 15 bp, Homo sapiens
aatttctggaggagg

SEQ ID NO: 1660048 - DNA, 15 bp, Homo sapiens
taatttctggaggag

SEQ ID NO: 1660049 - DNA, 15 bp, Homo sapiens
ataatttctggagga

SEQ ID NO: 1660050 - DNA, 15 bp, Homo sapiens
aataatttctggagg

SEQ ID NO: 1660051 - DNA, 15 bp, Homo sapiens
caataatttctggag

SEQ ID NO: 1660052 - DNA, 15 bp, Homo sapiens
tcaataatttctgga

SEQ ID NO: 1660053 - DNA, 15 bp, Homo sapiens
atcaataatttctgg

SEQ ID NO: 1660054 - DNA, 15 bp, Homo sapiens
catcaataatttctg

SEQ ID NO: 1660055 - DNA, 15 bp, Homo sapiens
acatcaataatttct

SEQ ID NO: 1660056 - DNA, 15 bp, Homo sapiens
cacatcaataatttc

SEQ ID NO: 1660057 - DNA, 15 bp, Homo sapiens
gcacatcaataattt

SEQ ID NO: 1660058 - DNA, 15 bp, Homo sapiens
tgcacatcaataatt

SEQ ID NO: 1660059 - DNA, 15 bp, Homo sapiens
ttgcacatcaataat

SEQ ID NO: 1660060 - DNA, 15 bp, Homo sapiens
tttgcacatcaataa

SEQ ID NO: 1660061 - DNA, 15 bp, Homo sapiens
ttttgcacatcaata

SEQ ID NO: 1660062 - DNA, 15 bp, Homo sapiens
attttgcacatcaat

SEQ ID NO: 1660063 - DNA, 15 bp, Homo sapiens
cattttgcacatcaa

SEQ ID NO: 1660064 - DNA, 15 bp, Homo sapiens
gcattttgcacatca

SEQ ID NO: 1660065 - DNA, 15 bp, Homo sapiens
tgcattttgcacatc

SEQ ID NO: 1660066 - DNA, 15 bp, Homo sapiens
ttgcattttgcacat

SEQ ID NO: 1660067 - DNA, 15 bp, Homo sapiens
attgcattttgcaca

SEQ ID NO: 1660068 - DNA, 15 bp, Homo sapiens
aattgcattttgcac

SEQ ID NO: 1660069 - DNA, 15 bp, Homo sapiens
aaattgcattttgca

SEQ ID NO: 1660070 - DNA, 15 bp, Homo sapiens
gaaattgcattttgc

SEQ ID NO: 1660071 - DNA, 15 bp, Homo sapiens
ggaaattgcattttg

SEQ ID NO: 1660072 - DNA, 15 bp, Homo sapiens
gggaaattgcatttt

SEQ ID NO: 1660073 - DNA, 15 bp, Homo sapiens
agggaaattgcattt

SEQ ID NO: 1660074 - DNA, 15 bp, Homo sapiens
tagggaaattgcatt

SEQ ID NO: 1660075 - DNA, 15 bp, Homo sapiens
atagggaaattgcat

SEQ ID NO: 1660076 - DNA, 15 bp, Homo sapiens
gatagggaaattgca

SEQ ID NO: 1660077 - DNA, 15 bp, Homo sapiens
agatagggaaattgc

SEQ ID NO: 1660078 - DNA, 15 bp, Homo sapiens
cagatagggaaattg

SEQ ID NO: 1660079 - DNA, 15 bp, Homo sapiens
gcagatagggaaatt

SEQ ID NO: 1660080 - DNA, 15 bp, Homo sapiens
agcagatagggaaat

SEQ ID NO: 1660081 - DNA, 15 bp, Homo sapiens
cagcagatagggaaa

SEQ ID NO: 1660082 - DNA, 15 bp, Homo sapiens
acagcagatagggaa

SEQ ID NO: 1660083 - DNA, 15 bp, Homo sapiens
aacagcagataggga

SEQ ID NO: 1660084 - DNA, 15 bp, Homo sapiens
taacagcagataggg

SEQ ID NO: 1660085 - DNA, 15 bp, Homo sapiens
ctaacagcagatagg

SEQ ID NO: 1660086 - DNA, 15 bp, Homo sapiens
actaacagcagatag

SEQ ID NO: 1660087 - DNA, 15 bp, Homo sapiens
gactaacagcagata

SEQ ID NO: 1660088 - DNA, 15 bp, Homo sapiens
agactaacagcagat

SEQ ID NO: 1660089 - DNA, 15 bp, Homo sapiens
cagactaacagcaga

SEQ ID NO: 1660090 - DNA, 15 bp, Homo sapiens
ccagactaacagcag

SEQ ID NO: 1660091 - DNA, 15 bp, Homo sapiens
cccagactaacagca

SEQ ID NO: 1660092 - DNA, 15 bp, Homo sapiens
ccccagactaacagc

SEQ ID NO: 1660093 - DNA, 15 bp, Homo sapiens
accccagactaacag

SEQ ID NO: 1660094 - DNA, 15 bp, Homo sapiens
gaccccagactaaca

SEQ ID NO: 1660095 - DNA, 15 bp, Homo sapiens
agaccccagactaac

SEQ ID NO: 1660096 - DNA, 15 bp, Homo sapiens
gagaccccagactaa

SEQ ID NO: 1660097 - DNA, 15 bp, Homo sapiens
tgagaccccagacta

SEQ ID NO: 1660098 - DNA, 15 bp, Homo sapiens
atgagaccccagact

SEQ ID NO: 1660099 - DNA, 15 bp, Homo sapiens
gatgagaccccagac

SEQ ID NO: 1660100 - DNA, 15 bp, Homo sapiens
ggatgagaccccaga

SEQ ID NO: 1660101 - DNA, 15 bp, Homo sapiens
gggatgagaccccag

SEQ ID NO: 1660102 - DNA, 15 bp, Homo sapiens
ggggatgagacccca

SEQ ID NO: 1660103 - DNA, 15 bp, Homo sapiens
aggggatgagacccc

SEQ ID NO: 1660104 - DNA, 15 bp, Homo sapiens
gaggggatgagaccc

SEQ ID NO: 1660105 - DNA, 15 bp, Homo sapiens
tgaggggatgagacc

SEQ ID NO: 1660106 - DNA, 15 bp, Homo sapiens
atgaggggatgagac

SEQ ID NO: 1660107 - DNA, 15 bp, Homo sapiens
tatgaggggatgaga

SEQ ID NO: 1660108 - DNA, 15 bp, Homo sapiens
atatgaggggatgag

SEQ ID NO: 1660109 - DNA, 15 bp, Homo sapiens
aatatgaggggatga

SEQ ID NO: 1660110 - DNA, 15 bp, Homo sapiens
gaatatgaggggatg

SEQ ID NO: 1660111 - DNA, 15 bp, Homo sapiens
ggaatatgaggggat

SEQ ID NO: 1660112 - DNA, 15 bp, Homo sapiens
aggaatatgagggga

SEQ ID NO: 1660113 - DNA, 15 bp, Homo sapiens
aaggaatatgagggg

SEQ ID NO: 1660114 - DNA, 15 bp, Homo sapiens
aaaggaatatgaggg

SEQ ID NO: 1660115 - DNA, 15 bp, Homo sapiens
aaaaggaatatgagg

SEQ ID NO: 1660116 - DNA, 15 bp, Homo sapiens
caaaaggaatatgag

SEQ ID NO: 1660117 - DNA, 15 bp, Homo sapiens
acaaaaggaatatga

SEQ ID NO: 1660118 - DNA, 15 bp, Homo sapiens
gacaaaaggaatatg

SEQ ID NO: 1660119 - DNA, 15 bp, Homo sapiens
agacaaaaggaatat

SEQ ID NO: 1660120 - DNA, 15 bp, Homo sapiens
aagacaaaaggaata

SEQ ID NO: 1660121 - DNA, 15 bp, Homo sapiens
taagacaaaaggaat

SEQ ID NO: 1660122 - DNA, 15 bp, Homo sapiens
gtaagacaaaaggaa

SEQ ID NO: 1660123 - DNA, 15 bp, Homo sapiens
tgtaagacaaaagga

SEQ ID NO: 1660124 - DNA, 15 bp, Homo sapiens
ctgtaagacaaaagg

SEQ ID NO: 1660125 - DNA, 15 bp, Homo sapiens
gctgtaagacaaaag

SEQ ID NO: 1660126 - DNA, 15 bp, Homo sapiens
tgctgtaagacaaaa

SEQ ID NO: 1660127 - DNA, 15 bp, Homo sapiens
ctgctgtaagacaaa

SEQ ID NO: 1660128 - DNA, 15 bp, Homo sapiens
cctgctgtaagacaa

SEQ ID NO: 1660129 - DNA, 15 bp, Homo sapiens
ccctgctgtaagaca

SEQ ID NO: 1660130 - DNA, 15 bp, Homo sapiens
cccctgctgtaagac

SEQ ID NO: 1660131 - DNA, 15 bp, Homo sapiens
ccccctgctgtaaga

SEQ ID NO: 1660132 - DNA, 15 bp, Homo sapiens
accccctgctgtaag

SEQ ID NO: 1660133 - DNA, 15 bp, Homo sapiens
taccccctgctgtaa

SEQ ID NO: 1660134 - DNA, 15 bp, Homo sapiens
gtaccccctgctgta

SEQ ID NO: 1660135 - DNA, 15 bp, Homo sapiens
agtaccccctgctgt

SEQ ID NO: 1660136 - DNA, 15 bp, Homo sapiens
aagtaccccctgctg

SEQ ID NO: 1660137 - DNA, 15 bp, Homo sapiens
caagtaccccctgct

SEQ ID NO: 1660138 - DNA, 15 bp, Homo sapiens
ccaagtaccccctgc

SEQ ID NO: 1660139 - DNA, 15 bp, Homo sapiens
cccaagtaccccctg

SEQ ID NO: 1660140 - DNA, 15 bp, Homo sapiens
tcccaagtaccccct

SEQ ID NO: 1660141 - DNA, 15 bp, Homo sapiens
gtcccaagtaccccc

SEQ ID NO: 1660142 - DNA, 15 bp, Homo sapiens
agtcccaagtacccc

SEQ ID NO: 1660143 - DNA, 15 bp, Homo sapiens
cagtcccaagtaccc

SEQ ID NO: 1660144 - DNA, 15 bp, Homo sapiens
acagtcccaagtacc

SEQ ID NO: 1660145 - DNA, 15 bp, Homo sapiens
aacagtcccaagtac

SEQ ID NO: 1660146 - DNA, 15 bp, Homo sapiens
taacagtcccaagta

SEQ ID NO: 1660147 - DNA, 15 bp, Homo sapiens
ttaacagtcccaagt

SEQ ID NO: 1660148 - DNA, 15 bp, Homo sapiens
attaacagtcccaag

SEQ ID NO: 1660149 - DNA, 15 bp, Homo sapiens
cattaacagtcccaa

SEQ ID NO: 1660150 - DNA, 15 bp, Homo sapiens
gcattaacagtccca

SEQ ID NO: 1660151 - DNA, 15 bp, Homo sapiens
cgcattaacagtccc

SEQ ID NO: 1660152 - DNA, 15 bp, Homo sapiens
gcgcattaacagtcc

SEQ ID NO: 1660153 - DNA, 15 bp, Homo sapiens
tgcgcattaacagtc

SEQ ID NO: 1660154 - DNA, 15 bp, Homo sapiens
atgcgcattaacagt

SEQ ID NO: 1660155 - DNA, 15 bp, Homo sapiens
tatgcgcattaacag

SEQ ID NO: 1660156 - DNA, 15 bp, Homo sapiens
ttatgcgcattaaca

SEQ ID NO: 1660157 - DNA, 15 bp, Homo sapiens
attatgcgcattaac

SEQ ID NO: 1660158 - DNA, 15 bp, Homo sapiens
aattatgcgcattaa

SEQ ID NO: 1660159 - DNA, 15 bp, Homo sapiens
caattatgcgcatta

SEQ ID NO: 1660160 - DNA, 15 bp, Homo sapiens
gcaattatgcgcatt

SEQ ID NO: 1660161 - DNA, 15 bp, Homo sapiens
tgcaattatgcgcat

SEQ ID NO: 1660162 - DNA, 15 bp, Homo sapiens
ttgcaattatgcgca

SEQ ID NO: 1660163 - DNA, 15 bp, Homo sapiens
attgcaattatgcgc

SEQ ID NO: 1660164 - DNA, 15 bp, Homo sapiens
aattgcaattatgcg

SEQ ID NO: 1660165 - DNA, 15 bp, Homo sapiens
taattgcaattatgc

SEQ ID NO: 1660166 - DNA, 15 bp, Homo sapiens
ccataattgcaatta

SEQ ID NO: 1660167 - DNA, 15 bp, Homo sapiens
accataattgcaatt

SEQ ID NO: 1660168 - DNA, 15 bp, Homo sapiens
gaccataattgcaat

SEQ ID NO: 1660169 - DNA, 15 bp, Homo sapiens
agaccataattgcaa

SEQ ID NO: 1660170 - DNA, 15 bp, Homo sapiens
aagaccataattgca

SEQ ID NO: 1660171 - DNA, 15 bp, Homo sapiens
aaagaccataattgc

SEQ ID NO: 1660172 - DNA, 15 bp, Homo sapiens
aaaagaccataattg

SEQ ID NO: 1660173 - DNA, 15 bp, Homo sapiens
gaaaagaccataatt

SEQ ID NO: 1660174 - DNA, 15 bp, Homo sapiens
ggaaaagaccataat

SEQ ID NO: 1660175 - DNA, 15 bp, Homo sapiens
tggaaaagaccataa

SEQ ID NO: 1660176 - DNA, 15 bp, Homo sapiens
atggaaaagaccata

SEQ ID NO: 1660177 - DNA, 15 bp, Homo sapiens
aatggaaaagaccat

SEQ ID NO: 1660178 - DNA, 15 bp, Homo sapiens
taatggaaaagacca

SEQ ID NO: 1660179 - DNA, 15 bp, Homo sapiens
ttaatggaaaagacc

SEQ ID NO: 1660180 - DNA, 15 bp, Homo sapiens
tttaatggaaaagac

SEQ ID NO: 1660181 - DNA, 15 bp, Homo sapiens
atttaatggaaaaga

SEQ ID NO: 1660182 - DNA, 15 bp, Homo sapiens
aatttaatggaaaag

SEQ ID NO: 1660183 - DNA, 15 bp, Homo sapiens
taatttaatggaaaa

SEQ ID NO: 1660184 - DNA, 15 bp, Homo sapiens
ttaatttaatggaaa

SEQ ID NO: 1660185 - DNA, 15 bp, Homo sapiens
cttaatttaatggaa

SEQ ID NO: 1660186 - DNA, 15 bp, Homo sapiens
tcttaatttaatgga

SEQ ID NO: 1660187 - DNA, 15 bp, Homo sapiens
atcttaatttaatgg

SEQ ID NO: 1660188 - DNA, 15 bp, Homo sapiens
gatcttaatttaatg

SEQ ID NO: 1660189 - DNA, 15 bp, Homo sapiens
ggatcttaatttaat

SEQ ID NO: 1660190 - DNA, 15 bp, Homo sapiens
gggatcttaatttaa

SEQ ID NO: 1660191 - DNA, 15 bp, Homo sapiens
tgggatcttaattta

SEQ ID NO: 1660192 - DNA, 15 bp, Homo sapiens
ttgggatcttaattt

SEQ ID NO: 1660193 - DNA, 15 bp, Homo sapiens
gttgggatcttaatt

SEQ ID NO: 1660194 - DNA, 15 bp, Homo sapiens
agttgggatcttaat

SEQ ID NO: 1660195 - DNA, 15 bp, Homo sapiens
cagttgggatcttaa

SEQ ID NO: 1660196 - DNA, 15 bp, Homo sapiens
gcagttgggatctta

SEQ ID NO: 1660197 - DNA, 15 bp, Homo sapiens
agcagttgggatctt

SEQ ID NO: 1660198 - DNA, 15 bp, Homo sapiens
gagcagttgggatct

SEQ ID NO: 1660199 - DNA, 15 bp, Homo sapiens
tgagcagttgggatc

SEQ ID NO: 1660200 - DNA, 15 bp, Homo sapiens
gtgagcagttgggat

SEQ ID NO: 1660201 - DNA, 15 bp, Homo sapiens
tgtgagcagttggga

SEQ ID NO: 1660202 - DNA, 15 bp, Homo sapiens
gtgtgagcagttggg

SEQ ID NO: 1660203 - DNA, 15 bp, Homo sapiens
ggtgtgagcagttgg

SEQ ID NO: 1660204 - DNA, 15 bp, Homo sapiens
gggtgtgagcagttg

SEQ ID NO: 1660205 - DNA, 15 bp, Homo sapiens
agggtgtgagcagtt

SEQ ID NO: 1660206 - DNA, 15 bp, Homo sapiens
gagggtgtgagcagt

SEQ ID NO: 1660207 - DNA, 15 bp, Homo sapiens
agagggtgtgagcag

SEQ ID NO: 1660208 - DNA, 15 bp, Homo sapiens
aagagggtgtgagca

SEQ ID NO: 1660209 - DNA, 15 bp, Homo sapiens
taagagggtgtgagc

SEQ ID NO: 1660210 - DNA, 15 bp, Homo sapiens
ctaagagggtgtgag

SEQ ID NO: 1660211 - DNA, 15 bp, Homo sapiens
gctaagagggtgtga

SEQ ID NO: 1660212 - DNA, 15 bp, Homo sapiens
tgctaagagggtgtg

SEQ ID NO: 1660213 - DNA, 15 bp, Homo sapiens
atgctaagagggtgt

SEQ ID NO: 1660214 - DNA, 15 bp, Homo sapiens
aatgctaagagggtg

SEQ ID NO: 1660215 - DNA, 15 bp, Homo sapiens
taatgctaagagggt

SEQ ID NO: 1660216 - DNA, 15 bp, Homo sapiens
gtaatgctaagaggg

SEQ ID NO: 1660217 - DNA, 15 bp, Homo sapiens
tgtaatgctaagagg

SEQ ID NO: 1660218 - DNA, 15 bp, Homo sapiens
ctgtaatgctaagag

SEQ ID NO: 1660219 - DNA, 15 bp, Homo sapiens
actgtaatgctaaga

SEQ ID NO: 1660220 - DNA, 15 bp, Homo sapiens
tactgtaatgctaag

SEQ ID NO: 1660221 - DNA, 15 bp, Homo sapiens
ctactgtaatgctaa

SEQ ID NO: 1660222 - DNA, 15 bp, Homo sapiens
tctactgtaatgcta

SEQ ID NO: 1660223 - DNA, 15 bp, Homo sapiens
ctctactgtaatgct

SEQ ID NO: 1660224 - DNA, 15 bp, Homo sapiens
cctctactgtaatgc

SEQ ID NO: 1660225 - DNA, 15 bp, Homo sapiens
ccctctactgtaatg

SEQ ID NO: 1660226 - DNA, 15 bp, Homo sapiens
accctctactgtaat

SEQ ID NO: 1660227 - DNA, 15 bp, Homo sapiens
caccctctactgtaa

SEQ ID NO: 1660228 - DNA, 15 bp, Homo sapiens
gcaccctctactgta

SEQ ID NO: 1660229 - DNA, 15 bp, Homo sapiens
agcaccctctactgt

SEQ ID NO: 1660230 - DNA, 15 bp, Homo sapiens
tagcaccctctactg

SEQ ID NO: 1660231 - DNA, 15 bp, Homo sapiens
ttagcaccctctact

SEQ ID NO: 1660232 - DNA, 15 bp, Homo sapiens
attagcaccctctac

SEQ ID NO: 1660233 - DNA, 15 bp, Homo sapiens
gattagcaccctcta

SEQ ID NO: 1660234 - DNA, 15 bp, Homo sapiens
tgattagcaccctct

SEQ ID NO: 1660235 - DNA, 15 bp, Homo sapiens
gtgattagcaccctc

SEQ ID NO: 1660236 - DNA, 15 bp, Homo sapiens
tgtgattagcaccct

SEQ ID NO: 1660237 - DNA, 15 bp, Homo sapiens
ttgtgattagcaccc

SEQ ID NO: 1660238 - DNA, 15 bp, Homo sapiens
cttgtgattagcacc

SEQ ID NO: 1660239 - DNA, 15 bp, Homo sapiens
ccttgtgattagcac

SEQ ID NO: 1660240 - DNA, 15 bp, Homo sapiens
tccttgtgattagca

SEQ ID NO: 1660241 - DNA, 15 bp, Homo sapiens
gtccttgtgattagc

SEQ ID NO: 1660242 - DNA, 15 bp, Homo sapiens
tgtccttgtgattag

SEQ ID NO: 1660243 - DNA, 15 bp, Homo sapiens
atgtccttgtgatta

SEQ ID NO: 1660244 - DNA, 15 bp, Homo sapiens
aatgtccttgtgatt

SEQ ID NO: 1660245 - DNA, 15 bp, Homo sapiens
aaatgtccttgtgat

SEQ ID NO: 1660246 - DNA, 15 bp, Homo sapiens
gaaatgtccttgtga

SEQ ID NO: 1660247 - DNA, 15 bp, Homo sapiens
agaaatgtccttgtg

SEQ ID NO: 1660248 - DNA, 15 bp, Homo sapiens
aagaaatgtccttgt

SEQ ID NO: 1660249 - DNA, 15 bp, Homo sapiens
aaagaaatgtccttg

SEQ ID NO: 1660250 - DNA, 15 bp, Homo sapiens
aaaagaaatgtcctt

SEQ ID NO: 1660251 - DNA, 15 bp, Homo sapiens
caaaagaaatgtcct

SEQ ID NO: 1660252 - DNA, 15 bp, Homo sapiens
acaaaagaaatgtcc

SEQ ID NO: 1660253 - DNA, 15 bp, Homo sapiens
tacaaaagaaatgtc

SEQ ID NO: 1660254 - DNA, 15 bp, Homo sapiens
gtacaaaagaaatgt

SEQ ID NO: 1660255 - DNA, 15 bp, Homo sapiens
agtacaaaagaaatg

SEQ ID NO: 1660256 - DNA, 15 bp, Homo sapiens
cagtacaaaagaaat

SEQ ID NO: 1660257 - DNA, 15 bp, Homo sapiens
acagtacaaaagaaa

SEQ ID NO: 1660258 - DNA, 15 bp, Homo sapiens
aacagtacaaaagaa

SEQ ID NO: 1660259 - DNA, 15 bp, Homo sapiens
taacagtacaaaaga

SEQ ID NO: 1660260 - DNA, 15 bp, Homo sapiens
ttaacagtacaaaag

SEQ ID NO: 1660261 - DNA, 15 bp, Homo sapiens
attaacagtacaaaa

SEQ ID NO: 1660262 - DNA, 15 bp, Homo sapiens
cattaacagtacaaa

SEQ ID NO: 1660263 - DNA, 15 bp, Homo sapiens
acattaacagtacaa

SEQ ID NO: 1660264 - DNA, 15 bp, Homo sapiens
cacattaacagtaca

SEQ ID NO: 1660265 - DNA, 15 bp, Homo sapiens
gcacattaacagtac

SEQ ID NO: 1660266 - DNA, 15 bp, Homo sapiens
agcacattaacagta

SEQ ID NO: 1660267 - DNA, 15 bp, Homo sapiens
tagcacattaacagt

SEQ ID NO: 1660268 - DNA, 15 bp, Homo sapiens
gtagcacattaacag

SEQ ID NO: 1660269 - DNA, 15 bp, Homo sapiens
agtagcacattaaca

SEQ ID NO: 1660270 - DNA, 15 bp, Homo sapiens
aagtagcacattaac

SEQ ID NO: 1660271 - DNA, 15 bp, Homo sapiens
caagtagcacattaa

SEQ ID NO: 1660272 - DNA, 15 bp, Homo sapiens
gcaagtagcacatta

SEQ ID NO: 1660273 - DNA, 15 bp, Homo sapiens
tgcaagtagcacatt

SEQ ID NO: 1660274 - DNA, 15 bp, Homo sapiens
atgcaagtagcacat

SEQ ID NO: 1660275 - DNA, 15 bp, Homo sapiens
aatgcaagtagcaca

SEQ ID NO: 1660276 - DNA, 15 bp, Homo sapiens
aaatgcaagtagcac

SEQ ID NO: 1660277 - DNA, 15 bp, Homo sapiens
caaatgcaagtagca

SEQ ID NO: 1660278 - DNA, 15 bp, Homo sapiens
acaaatgcaagtagc

SEQ ID NO: 1660279 - DNA, 15 bp, Homo sapiens
gacaaatgcaagtag

SEQ ID NO: 1660280 - DNA, 15 bp, Homo sapiens
ggacaaatgcaagta

SEQ ID NO: 1660281 - DNA, 15 bp, Homo sapiens
gggacaaatgcaagt

SEQ ID NO: 1660282 - DNA, 15 bp, Homo sapiens
agggacaaatgcaag

SEQ ID NO: 1660283 - DNA, 15 bp, Homo sapiens
gagggacaaatgcaa

SEQ ID NO: 1660284 - DNA, 15 bp, Homo sapiens
agagggacaaatgca

SEQ ID NO: 1660285 - DNA, 15 bp, Homo sapiens
aagagggacaaatgc

SEQ ID NO: 1660286 - DNA, 15 bp, Homo sapiens
gaagagggacaaatg

SEQ ID NO: 1660287 - DNA, 15 bp, Homo sapiens
ggaagagggacaaat

SEQ ID NO: 1660288 - DNA, 15 bp, Homo sapiens
aggaagagggacaaa

SEQ ID NO: 1660289 - DNA, 15 bp, Homo sapiens
caggaagagggacaa

SEQ ID NO: 1660290 - DNA, 15 bp, Homo sapiens
acaggaagagggaca

SEQ ID NO: 1660291 - DNA, 15 bp, Homo sapiens
cacaggaagagggac

SEQ ID NO: 1660292 - DNA, 15 bp, Homo sapiens
gcacaggaagaggga

SEQ ID NO: 1660293 - DNA, 15 bp, Homo sapiens
tgcacaggaagaggg

SEQ ID NO: 1660294 - DNA, 15 bp, Homo sapiens
gtgcacaggaagagg

SEQ ID NO: 1660295 - DNA, 15 bp, Homo sapiens
agtgcacaggaagag

SEQ ID NO: 1660296 - DNA, 15 bp, Homo sapiens
tagtgcacaggaaga

SEQ ID NO: 1660297 - DNA, 15 bp, Homo sapiens
ttagtgcacaggaag

SEQ ID NO: 1660298 - DNA, 15 bp, Homo sapiens
tttagtgcacaggaa

SEQ ID NO: 1660299 - DNA, 15 bp, Homo sapiens
ctttagtgcacagga

SEQ ID NO: 1660300 - DNA, 15 bp, Homo sapiens
tctttagtgcacagg

SEQ ID NO: 1660301 - DNA, 15 bp, Homo sapiens
gtctttagtgcacag

SEQ ID NO: 1660302 - DNA, 15 bp, Homo sapiens
ggtctttagtgcaca

SEQ ID NO: 1660303 - DNA, 15 bp, Homo sapiens
gggtctttagtgcac

SEQ ID NO: 1660304 - DNA, 15 bp, Homo sapiens
ggggtctttagtgca

SEQ ID NO: 1660305 - DNA, 15 bp, Homo sapiens
tggggtctttagtgc

SEQ ID NO: 1660306 - DNA, 15 bp, Homo sapiens
gtggggtctttagtg

SEQ ID NO: 1660307 - DNA, 15 bp, Homo sapiens
agtggggtctttagt

SEQ ID NO: 1660308 - DNA, 15 bp, Homo sapiens
gagtggggtctttag

SEQ ID NO: 1660309 - DNA, 15 bp, Homo sapiens
tgagtggggtcttta

SEQ ID NO: 1660310 - DNA, 15 bp, Homo sapiens
gtgagtggggtcttt

SEQ ID NO: 1660311 - DNA, 15 bp, Homo sapiens
agtgagtggggtctt

SEQ ID NO: 1660312 - DNA, 15 bp, Homo sapiens
aagtgagtggggtct

SEQ ID NO: 1660313 - DNA, 15 bp, Homo sapiens
gaagtgagtggggtc

SEQ ID NO: 1660314 - DNA, 15 bp, Homo sapiens
ggaagtgagtggggt

SEQ ID NO: 1660315 - DNA, 15 bp, Homo sapiens
gggaagtgagtgggg

SEQ ID NO: 1660316 - DNA, 15 bp, Homo sapiens
agggaagtgagtggg

SEQ ID NO: 1660317 - DNA, 15 bp, Homo sapiens
tagggaagtgagtgg

SEQ ID NO: 1660318 - DNA, 15 bp, Homo sapiens
ctagggaagtgagtg

SEQ ID NO: 1660319 - DNA, 15 bp, Homo sapiens
actagggaagtgagt

SEQ ID NO: 1660320 - DNA, 15 bp, Homo sapiens
cactagggaagtgag

SEQ ID NO: 1660321 - DNA, 15 bp, Homo sapiens
acactagggaagtga

SEQ ID NO: 1660322 - DNA, 15 bp, Homo sapiens
aacactagggaagtg

SEQ ID NO: 1660323 - DNA, 15 bp, Homo sapiens
gaacactagggaagt

SEQ ID NO: 1660324 - DNA, 15 bp, Homo sapiens
tgaacactagggaag

SEQ ID NO: 1660325 - DNA, 15 bp, Homo sapiens
ctgaacactagggaa

SEQ ID NO: 1660326 - DNA, 15 bp, Homo sapiens
gctgaacactaggga

SEQ ID NO: 1660327 - DNA, 15 bp, Homo sapiens
tgctgaacactaggg

SEQ ID NO: 1660328 - DNA, 15 bp, Homo sapiens
ctgctgaacactagg

SEQ ID NO: 1660329 - DNA, 15 bp, Homo sapiens
actgctgaacactag

SEQ ID NO: 1660330 - DNA, 15 bp, Homo sapiens
cactgctgaacacta

SEQ ID NO: 1660331 - DNA, 15 bp, Homo sapiens
ccactgctgaacact

SEQ ID NO: 1660332 - DNA, 15 bp, Homo sapiens
tccactgctgaacac

SEQ ID NO: 1660333 - DNA, 15 bp, Homo sapiens
atccactgctgaaca

SEQ ID NO: 1660334 - DNA, 15 bp, Homo sapiens
catccactgctgaac

SEQ ID NO: 1660335 - DNA, 15 bp, Homo sapiens
tcatccactgctgaa

SEQ ID NO: 1660336 - DNA, 15 bp, Homo sapiens
gtcatccactgctga

SEQ ID NO: 1660337 - DNA, 15 bp, Homo sapiens
ggtcatccactgctg

SEQ ID NO: 1660338 - DNA, 15 bp, Homo sapiens
aggtcatccactgct

SEQ ID NO: 1660339 - DNA, 15 bp, Homo sapiens
gaggtcatccactgc

SEQ ID NO: 1660340 - DNA, 15 bp, Homo sapiens
agaggtcatccactg

SEQ ID NO: 1660341 - DNA, 15 bp, Homo sapiens
tagaggtcatccact

SEQ ID NO: 1660342 - DNA, 15 bp, Homo sapiens
ctagaggtcatccac

SEQ ID NO: 1660343 - DNA, 15 bp, Homo sapiens
actagaggtcatcca

SEQ ID NO: 1660344 - DNA, 15 bp, Homo sapiens
gactagaggtcatcc

SEQ ID NO: 1660345 - DNA, 15 bp, Homo sapiens
tgactagaggtcatc

SEQ ID NO: 1660346 - DNA, 15 bp, Homo sapiens
ttgactagaggtcat

SEQ ID NO: 1660347 - DNA, 15 bp, Homo sapiens
cttgactagaggtca

SEQ ID NO: 1660348 - DNA, 15 bp, Homo sapiens
tcttgactagaggtc

SEQ ID NO: 1660349 - DNA, 15 bp, Homo sapiens
gtcttgactagaggt

SEQ ID NO: 1660350 - DNA, 15 bp, Homo sapiens
ggtcttgactagagg

SEQ ID NO: 1660351 - DNA, 15 bp, Homo sapiens
aggtcttgactagag

SEQ ID NO: 1660352 - DNA, 15 bp, Homo sapiens
aaggtcttgactaga

SEQ ID NO: 1660353 - DNA, 15 bp, Homo sapiens
aaaggtcttgactag

SEQ ID NO: 1660354 - DNA, 15 bp, Homo sapiens
caaaggtcttgacta

SEQ ID NO: 1660355 - DNA, 15 bp, Homo sapiens
gcaaaggtcttgact

SEQ ID NO: 1660356 - DNA, 15 bp, Homo sapiens
tgcaaaggtcttgac

SEQ ID NO: 1660357 - DNA, 15 bp, Homo sapiens
gtgcaaaggtcttga

SEQ ID NO: 1660358 - DNA, 15 bp, Homo sapiens
agtgcaaaggtcttg

SEQ ID NO: 1660359 - DNA, 15 bp, Homo sapiens
tagtgcaaaggtctt

SEQ ID NO: 1660360 - DNA, 15 bp, Homo sapiens
ctagtgcaaaggtct

SEQ ID NO: 1660361 - DNA, 15 bp, Homo sapiens
cctagtgcaaaggtc

SEQ ID NO: 1660362 - DNA, 15 bp, Homo sapiens
tcctagtgcaaaggt

SEQ ID NO: 1660363 - DNA, 15 bp, Homo sapiens
atcctagtgcaaagg

SEQ ID NO: 1660364 - DNA, 15 bp, Homo sapiens
tatcctagtgcaaag

SEQ ID NO: 1660365 - DNA, 15 bp, Homo sapiens
ctatcctagtgcaaa

SEQ ID NO: 1660366 - DNA, 15 bp, Homo sapiens
actatcctagtgcaa

SEQ ID NO: 1660367 - DNA, 15 bp, Homo sapiens
aactatcctagtgca

SEQ ID NO: 1660368 - DNA, 15 bp, Homo sapiens
taactatcctagtgc

SEQ ID NO: 1660369 - DNA, 15 bp, Homo sapiens
ttaactatcctagtg

SEQ ID NO: 1660370 - DNA, 15 bp, Homo sapiens
attaactatcctagt

SEQ ID NO: 1660371 - DNA, 15 bp, Homo sapiens
cattaactatcctag

SEQ ID NO: 1660372 - DNA, 15 bp, Homo sapiens
acattaactatccta

SEQ ID NO: 1660373 - DNA, 15 bp, Homo sapiens
cacattaactatcct

SEQ ID NO: 1660374 - DNA, 15 bp, Homo sapiens
tcacattaactatcc

SEQ ID NO: 1660375 - DNA, 15 bp, Homo sapiens
ttcacattaactatc

SEQ ID NO: 1660376 - DNA, 15 bp, Homo sapiens
gttcacattaactat

SEQ ID NO: 1660377 - DNA, 15 bp, Homo sapiens
ggttcacattaacta

SEQ ID NO: 1660378 - DNA, 15 bp, Homo sapiens
tggttcacattaact

SEQ ID NO: 1660379 - DNA, 15 bp, Homo sapiens
atggttcacattaac

SEQ ID NO: 1660380 - DNA, 15 bp, Homo sapiens
catggttcacattaa

SEQ ID NO: 1660381 - DNA, 15 bp, Homo sapiens
ccatggttcacatta

SEQ ID NO: 1660382 - DNA, 15 bp, Homo sapiens
gccatggttcacatt

SEQ ID NO: 1660383 - DNA, 15 bp, Homo sapiens
tgccatggttcacat

SEQ ID NO: 1660384 - DNA, 15 bp, Homo sapiens
ttgccatggttcaca

SEQ ID NO: 1660385 - DNA, 15 bp, Homo sapiens
gttgccatggttcac

SEQ ID NO: 1660386 - DNA, 15 bp, Homo sapiens
agttgccatggttca

SEQ ID NO: 1660387 - DNA, 15 bp, Homo sapiens
cagttgccatggttc

SEQ ID NO: 1660388 - DNA, 15 bp, Homo sapiens
tcagttgccatggtt

SEQ ID NO: 1660389 - DNA, 15 bp, Homo sapiens
atcagttgccatggt

SEQ ID NO: 1660390 - DNA, 15 bp, Homo sapiens
gatcagttgccatgg

SEQ ID NO: 1660391 - DNA, 15 bp, Homo sapiens
tgatcagttgccatg

SEQ ID NO: 1660392 - DNA, 15 bp, Homo sapiens
gtgatcagttgccat

SEQ ID NO: 1660393 - DNA, 15 bp, Homo sapiens
tgtgatcagttgcca

SEQ ID NO: 1660394 - DNA, 15 bp, Homo sapiens
ttgtgatcagttgcc

SEQ ID NO: 1660395 - DNA, 15 bp, Homo sapiens
gttgtgatcagttgc

SEQ ID NO: 1660396 - DNA, 15 bp, Homo sapiens
tgttgtgatcagttg

SEQ ID NO: 1660397 - DNA, 15 bp, Homo sapiens
ttgttgtgatcagtt

SEQ ID NO: 1660398 - DNA, 15 bp, Homo sapiens
attgttgtgatcagt

SEQ ID NO: 1660399 - DNA, 15 bp, Homo sapiens
cattgttgtgatcag

SEQ ID NO: 1660400 - DNA, 15 bp, Homo sapiens
acattgttgtgatca

SEQ ID NO: 1660401 - DNA, 15 bp, Homo sapiens
gacattgttgtgatc

SEQ ID NO: 1660402 - DNA, 15 bp, Homo sapiens
agacattgttgtgat

SEQ ID NO: 1660403 - DNA, 15 bp, Homo sapiens
aagacattgttgtga

SEQ ID NO: 1660404 - DNA, 15 bp, Homo sapiens
aaagacattgttgtg

SEQ ID NO: 1660405 - DNA, 15 bp, Homo sapiens
gaaagacattgttgt

SEQ ID NO: 1660406 - DNA, 15 bp, Homo sapiens
tgaaagacattgttg

SEQ ID NO: 1660407 - DNA, 15 bp, Homo sapiens
ctgaaagacattgtt

SEQ ID NO: 1660408 - DNA, 15 bp, Homo sapiens
tctgaaagacattgt

SEQ ID NO: 1660409 - DNA, 15 bp, Homo sapiens
atctgaaagacattg

SEQ ID NO: 1660410 - DNA, 15 bp, Homo sapiens
gatctgaaagacatt

SEQ ID NO: 1660411 - DNA, 15 bp, Homo sapiens
tgatctgaaagacat

SEQ ID NO: 1660412 - DNA, 15 bp, Homo sapiens
ctgatctgaaagaca

SEQ ID NO: 1660413 - DNA, 15 bp, Homo sapiens
tctgatctgaaagac

SEQ ID NO: 1660414 - DNA, 15 bp, Homo sapiens
atctgatctgaaaga

SEQ ID NO: 1660415 - DNA, 15 bp, Homo sapiens
gatctgatctgaaag

SEQ ID NO: 1660416 - DNA, 15 bp, Homo sapiens
ggatctgatctgaaa

SEQ ID NO: 1660417 - DNA, 15 bp, Homo sapiens
tggatctgatctgaa

SEQ ID NO: 1660418 - DNA, 15 bp, Homo sapiens
atggatctgatctga

SEQ ID NO: 1660419 - DNA, 15 bp, Homo sapiens
aatggatctgatctg

SEQ ID NO: 1660420 - DNA, 15 bp, Homo sapiens
aaatggatctgatct

SEQ ID NO: 1660421 - DNA, 15 bp, Homo sapiens
aaaatggatctgatc

SEQ ID NO: 1660422 - DNA, 15 bp, Homo sapiens
taaaatggatctgat

SEQ ID NO: 1660423 - DNA, 15 bp, Homo sapiens
ataaaatggatctga

SEQ ID NO: 1660424 - DNA, 15 bp, Homo sapiens
gataaaatggatctg

SEQ ID NO: 1660425 - DNA, 15 bp, Homo sapiens
ggataaaatggatct

SEQ ID NO: 1660426 - DNA, 15 bp, Homo sapiens
aggataaaatggatc

SEQ ID NO: 1660427 - DNA, 15 bp, Homo sapiens
gaggataaaatggat

SEQ ID NO: 1660428 - DNA, 15 bp, Homo sapiens
ggaggataaaatgga

SEQ ID NO: 1660429 - DNA, 15 bp, Homo sapiens
aggaggataaaatgg

SEQ ID NO: 1660430 - DNA, 15 bp, Homo sapiens
aaggaggataaaatg

SEQ ID NO: 1660431 - DNA, 15 bp, Homo sapiens
caaggaggataaaat

SEQ ID NO: 1660432 - DNA, 15 bp, Homo sapiens
acaaggaggataaaa

SEQ ID NO: 1660433 - DNA, 15 bp, Homo sapiens
aacaaggaggataaa

SEQ ID NO: 1660434 - DNA, 15 bp, Homo sapiens
aaacaaggaggataa

SEQ ID NO: 1660435 - DNA, 15 bp, Homo sapiens
aaaacaaggaggata

SEQ ID NO: 1660436 - DNA, 15 bp, Homo sapiens
taaaacaaggaggat

SEQ ID NO: 1660437 - DNA, 15 bp, Homo sapiens
gtaaaacaaggagga

SEQ ID NO: 1660438 - DNA, 15 bp, Homo sapiens
tgtaaaacaaggagg

SEQ ID NO: 1660439 - DNA, 15 bp, Homo sapiens
ctgtaaaacaaggag

SEQ ID NO: 1660440 - DNA, 15 bp, Homo sapiens
gctgtaaaacaagga

SEQ ID NO: 1660441 - DNA, 15 bp, Homo sapiens
tgctgtaaaacaagg

SEQ ID NO: 1660442 - DNA, 15 bp, Homo sapiens
ttgctgtaaaacaag

SEQ ID NO: 1660443 - DNA, 15 bp, Homo sapiens
cttgctgtaaaacaa

SEQ ID NO: 1660444 - DNA, 15 bp, Homo sapiens
ccttgctgtaaaaca

SEQ ID NO: 1660445 - DNA, 15 bp, Homo sapiens
cccttgctgtaaaac

SEQ ID NO: 1660446 - DNA, 15 bp, Homo sapiens
tcccttgctgtaaaa

SEQ ID NO: 1660447 - DNA, 15 bp, Homo sapiens
atcccttgctgtaaa

SEQ ID NO: 1660448 - DNA, 15 bp, Homo sapiens
tatcccttgctgtaa

SEQ ID NO: 1660449 - DNA, 15 bp, Homo sapiens
atatcccttgctgta

SEQ ID NO: 1660450 - DNA, 15 bp, Homo sapiens
aatatcccttgctgt

SEQ ID NO: 1660451 - DNA, 15 bp, Homo sapiens
taatatcccttgctg

SEQ ID NO: 1660452 - DNA, 15 bp, Homo sapiens
ttaatatcccttgct

SEQ ID NO: 1660453 - DNA, 15 bp, Homo sapiens
attaatatcccttgc

SEQ ID NO: 1660454 - DNA, 15 bp, Homo sapiens
aattaatatcccttg

SEQ ID NO: 1660455 - DNA, 15 bp, Homo sapiens
taattaatatccctt

SEQ ID NO: 1660456 - DNA, 15 bp, Homo sapiens
gtaattaatatccct

SEQ ID NO: 1660457 - DNA, 15 bp, Homo sapiens
ggtaattaatatccc

SEQ ID NO: 1660458 - DNA, 15 bp, Homo sapiens
aggtaattaatatcc

SEQ ID NO: 1660459 - DNA, 15 bp, Homo sapiens
taggtaattaatatc

SEQ ID NO: 1660460 - DNA, 15 bp, Homo sapiens
ataggtaattaatat

SEQ ID NO: 1660461 - DNA, 15 bp, Homo sapiens
cataggtaattaata

SEQ ID NO: 1660462 - DNA, 15 bp, Homo sapiens
acataggtaattaat

SEQ ID NO: 1660463 - DNA, 15 bp, Homo sapiens
aacataggtaattaa

SEQ ID NO: 1660464 - DNA, 15 bp, Homo sapiens
agcagcaatccaaag

SEQ ID NO: 1660465 - DNA, 15 bp, Homo sapiens
cagcagcaatccaaa

SEQ ID NO: 1660466 - DNA, 15 bp, Homo sapiens
tcagcagcaatccaa

SEQ ID NO: 1660467 - DNA, 15 bp, Homo sapiens
ctcagcagcaatcca

SEQ ID NO: 1660468 - DNA, 15 bp, Homo sapiens
tctcagcagcaatcc

SEQ ID NO: 1660469 - DNA, 15 bp, Homo sapiens
ttctcagcagcaatc

SEQ ID NO: 1660470 - DNA, 15 bp, Homo sapiens
cttctcagcagcaat

SEQ ID NO: 1660471 - DNA, 15 bp, Homo sapiens
acttctcagcagcaa

SEQ ID NO: 1660472 - DNA, 15 bp, Homo sapiens
cacttctcagcagca

SEQ ID NO: 1660473 - DNA, 15 bp, Homo sapiens
acacttctcagcagc

SEQ ID NO: 1660474 - DNA, 15 bp, Homo sapiens
aacacttctcagcag

SEQ ID NO: 1660475 - DNA, 15 bp, Homo sapiens
taacacttctcagca

SEQ ID NO: 1660476 - DNA, 15 bp, Homo sapiens
ttaacacttctcagc

SEQ ID NO: 1660477 - DNA, 15 bp, Homo sapiens
gttaacacttctcag

SEQ ID NO: 1660478 - DNA, 15 bp, Homo sapiens
agttaacacttctca

SEQ ID NO: 1660479 - DNA, 15 bp, Homo sapiens
tagttaacacttctc

SEQ ID NO: 1660480 - DNA, 15 bp, Homo sapiens
gtagttaacacttct

SEQ ID NO: 1660481 - DNA, 15 bp, Homo sapiens
agtagttaacacttc

SEQ ID NO: 1660482 - DNA, 15 bp, Homo sapiens
gagtagttaacactt

SEQ ID NO: 1660483 - DNA, 15 bp, Homo sapiens
tgagtagttaacact

SEQ ID NO: 1660484 - DNA, 15 bp, Homo sapiens
atgagtagttaacac

SEQ ID NO: 1660485 - DNA, 15 bp, Homo sapiens
tatgagtagttaaca

SEQ ID NO: 1660486 - DNA, 15 bp, Homo sapiens
ttatgagtagttaac

SEQ ID NO: 1660487 - DNA, 15 bp, Homo sapiens
attatgagtagttaa

SEQ ID NO: 1660488 - DNA, 15 bp, Homo sapiens
gattatgagtagtta

SEQ ID NO: 1660489 - DNA, 15 bp, Homo sapiens
agattatgagtagtt

SEQ ID NO: 1660490 - DNA, 15 bp, Homo sapiens
gagattatgagtagt

SEQ ID NO: 1660491 - DNA, 15 bp, Homo sapiens
tgagattatgagtag

SEQ ID NO: 1660492 - DNA, 15 bp, Homo sapiens
ctgagattatgagta

SEQ ID NO: 1660493 - DNA, 15 bp, Homo sapiens
gctgagattatgagt

SEQ ID NO: 1660494 - DNA, 15 bp, Homo sapiens
agctgagattatgag

SEQ ID NO: 1660495 - DNA, 15 bp, Homo sapiens
gagctgagattatga

SEQ ID NO: 1660496 - DNA, 15 bp, Homo sapiens
agagctgagattatg

SEQ ID NO: 1660497 - DNA, 15 bp, Homo sapiens
aagagctgagattat

SEQ ID NO: 1660498 - DNA, 15 bp, Homo sapiens
caagagctgagatta

SEQ ID NO: 1660499 - DNA, 15 bp, Homo sapiens
ccaagagctgagatt

SEQ ID NO: 1660500 - DNA, 15 bp, Homo sapiens
tccaagagctgagat

SEQ ID NO: 1660501 - DNA, 15 bp, Homo sapiens
gtccaagagctgaga

SEQ ID NO: 1660502 - DNA, 15 bp, Homo sapiens
tgtccaagagctgag

SEQ ID NO: 1660503 - DNA, 15 bp, Homo sapiens
ttgtccaagagctga

SEQ ID NO: 1660504 - DNA, 15 bp, Homo sapiens
attgtccaagagctg

SEQ ID NO: 1660505 - DNA, 15 bp, Homo sapiens
aattgtccaagagct

SEQ ID NO: 1660506 - DNA, 15 bp, Homo sapiens
taattgtccaagagc

SEQ ID NO: 1660507 - DNA, 15 bp, Homo sapiens
ttaattgtccaagag

SEQ ID NO: 1660508 - DNA, 15 bp, Homo sapiens
attaattgtccaaga

SEQ ID NO: 1660509 - DNA, 15 bp, Homo sapiens
tattaattgtccaag

SEQ ID NO: 1660510 - DNA, 15 bp, Homo sapiens
ctattaattgtccaa

SEQ ID NO: 1660511 - DNA, 15 bp, Homo sapiens
gctattaattgtcca

SEQ ID NO: 1660512 - DNA, 15 bp, Homo sapiens
tgctattaattgtcc

SEQ ID NO: 1660513 - DNA, 15 bp, Homo sapiens
atgctattaattgtc

SEQ ID NO: 1660514 - DNA, 15 bp, Homo sapiens
aatgctattaattgt

SEQ ID NO: 1660515 - DNA, 15 bp, Homo sapiens
taatgctattaattg

SEQ ID NO: 1660516 - DNA, 15 bp, Homo sapiens
ttaatgctattaatt

SEQ ID NO: 1660517 - DNA, 15 bp, Homo sapiens
attaatgctattaat

SEQ ID NO: 1660518 - DNA, 15 bp, Homo sapiens
tattaatgctattaa

SEQ ID NO: 1660519 - DNA, 15 bp, Homo sapiens
ttattaatgctatta

SEQ ID NO: 1660520 - DNA, 15 bp, Homo sapiens
gttattaatgctatt

SEQ ID NO: 1660521 - DNA, 15 bp, Homo sapiens
tgttattaatgctat

SEQ ID NO: 1660522 - DNA, 15 bp, Homo sapiens
ttgttattaatgcta

SEQ ID NO: 1660523 - DNA, 15 bp, Homo sapiens
attgttattaatgct

SEQ ID NO: 1660524 - DNA, 15 bp, Homo sapiens
aattgttattaatgc

SEQ ID NO: 1660525 - DNA, 15 bp, Homo sapiens
taattgttattaatg

SEQ ID NO: 1660526 - DNA, 15 bp, Homo sapiens
ataattgttattaat

SEQ ID NO: 1660527 - DNA, 15 bp, Homo sapiens
gataattgttattaa

SEQ ID NO: 1660528 - DNA, 15 bp, Homo sapiens
tgataattgttatta

SEQ ID NO: 1660529 - DNA, 15 bp, Homo sapiens
ttgataattgttatt

SEQ ID NO: 1660530 - DNA, 15 bp, Homo sapiens
cttgataattgttat

SEQ ID NO: 1660531 - DNA, 15 bp, Homo sapiens
ccttgataattgtta

SEQ ID NO: 1660532 - DNA, 15 bp, Homo sapiens
cccttgataattgtt

SEQ ID NO: 1660533 - DNA, 15 bp, Homo sapiens
gcccttgataattgt

SEQ ID NO: 1660534 - DNA, 15 bp, Homo sapiens
tgcccttgataattg

SEQ ID NO: 1660535 - DNA, 15 bp, Homo sapiens
gtgcccttgataatt

SEQ ID NO: 1660536 - DNA, 15 bp, Homo sapiens
agtgcccttgataat

SEQ ID NO: 1660537 - DNA, 15 bp, Homo sapiens
cagtgcccttgataa

SEQ ID NO: 1660538 - DNA, 15 bp, Homo sapiens
tcagtgcccttgata

SEQ ID NO: 1660539 - DNA, 15 bp, Homo sapiens
atcagtgcccttgat

SEQ ID NO: 1660540 - DNA, 15 bp, Homo sapiens
gatcagtgcccttga

SEQ ID NO: 1660541 - DNA, 15 bp, Homo sapiens
tgatcagtgcccttg

SEQ ID NO: 1660542 - DNA, 15 bp, Homo sapiens
atgatcagtgccctt

SEQ ID NO: 1660543 - DNA, 15 bp, Homo sapiens
aatgatcagtgccct

SEQ ID NO: 1660544 - DNA, 15 bp, Homo sapiens
taatgatcagtgccc

SEQ ID NO: 1660545 - DNA, 15 bp, Homo sapiens
ctaatgatcagtgcc

SEQ ID NO: 1660546 - DNA, 15 bp, Homo sapiens
tctaatgatcagtgc

SEQ ID NO: 1660547 - DNA, 15 bp, Homo sapiens
atctaatgatcagtg

SEQ ID NO: 1660548 - DNA, 15 bp, Homo sapiens
tatctaatgatcagt

SEQ ID NO: 1660549 - DNA, 15 bp, Homo sapiens
ttatctaatgatcag

SEQ ID NO: 1660550 - DNA, 15 bp, Homo sapiens
cttatctaatgatca

SEQ ID NO: 1660551 - DNA, 15 bp, Homo sapiens
tcttatctaatgatc

SEQ ID NO: 1660552 - DNA, 15 bp, Homo sapiens
gtcttatctaatgat

SEQ ID NO: 1660553 - DNA, 15 bp, Homo sapiens
agtcttatctaatga

SEQ ID NO: 1660554 - DNA, 15 bp, Homo sapiens
gagtcttatctaatg

SEQ ID NO: 1660555 - DNA, 15 bp, Homo sapiens
ggagtcttatctaat

SEQ ID NO: 1660556 - DNA, 15 bp, Homo sapiens
aggagtcttatctaa

SEQ ID NO: 1660557 - DNA, 15 bp, Homo sapiens
caggagtcttatcta

SEQ ID NO: 1660558 - DNA, 15 bp, Homo sapiens
gcaggagtcttatct

SEQ ID NO: 1660559 - DNA, 15 bp, Homo sapiens
agcaggagtcttatc

SEQ ID NO: 1660560 - DNA, 15 bp, Homo sapiens
aagcaggagtcttat

SEQ ID NO: 1660561 - DNA, 15 bp, Homo sapiens
gaagcaggagtctta

SEQ ID NO: 1660562 - DNA, 15 bp, Homo sapiens
ggaagcaggagtctt

SEQ ID NO: 1660563 - DNA, 15 bp, Homo sapiens
aggaagcaggagtct

SEQ ID NO: 1660564 - DNA, 15 bp, Homo sapiens
gaggaagcaggagtc

SEQ ID NO: 1660565 - DNA, 15 bp, Homo sapiens
cgaggaagcaggagt

SEQ ID NO: 1660566 - DNA, 15 bp, Homo sapiens
acgaggaagcaggag

SEQ ID NO: 1660567 - DNA, 15 bp, Homo sapiens
aacgaggaagcagga

SEQ ID NO: 1660568 - DNA, 15 bp, Homo sapiens
caacgaggaagcagg

SEQ ID NO: 1660569 - DNA, 15 bp, Homo sapiens
gcaacgaggaagcag

SEQ ID NO: 1660570 - DNA, 15 bp, Homo sapiens
agcaacgaggaagca

SEQ ID NO: 1660571 - DNA, 15 bp, Homo sapiens
aagcaacgaggaagc

SEQ ID NO: 1660572 - DNA, 15 bp, Homo sapiens
taagcaacgaggaag

SEQ ID NO: 1660573 - DNA, 15 bp, Homo sapiens
gtaagcaacgaggaa

SEQ ID NO: 1660574 - DNA, 15 bp, Homo sapiens
tgtaagcaacgagga

SEQ ID NO: 1660575 - DNA, 15 bp, Homo sapiens
atgtaagcaacgagg

SEQ ID NO: 1660576 - DNA, 15 bp, Homo sapiens
gatgtaagcaacgag

SEQ ID NO: 1660577 - DNA, 15 bp, Homo sapiens
cgatgtaagcaacga

SEQ ID NO: 1660578 - DNA, 15 bp, Homo sapiens
ccgatgtaagcaacg

SEQ ID NO: 1660579 - DNA, 15 bp, Homo sapiens
cccgatgtaagcaac

SEQ ID NO: 1660580 - DNA, 15 bp, Homo sapiens
ccccgatgtaagcaa

SEQ ID NO: 1660581 - DNA, 15 bp, Homo sapiens
cccccgatgtaagca

SEQ ID NO: 1660582 - DNA, 15 bp, Homo sapiens
acccccgatgtaagc

SEQ ID NO: 1660583 - DNA, 15 bp, Homo sapiens
tacccccgatgtaag

SEQ ID NO: 1660584 - DNA, 15 bp, Homo sapiens
gtacccccgatgtaa

SEQ ID NO: 1660585 - DNA, 15 bp, Homo sapiens
agtacccccgatgta

SEQ ID NO: 1660586 - DNA, 15 bp, Homo sapiens
cagtacccccgatgt

SEQ ID NO: 1660587 - DNA, 15 bp, Homo sapiens
tcagtacccccgatg

SEQ ID NO: 1660588 - DNA, 15 bp, Homo sapiens
gtcagtacccccgat

SEQ ID NO: 1660589 - DNA, 15 bp, Homo sapiens
ggtcagtacccccga

SEQ ID NO: 1660590 - DNA, 15 bp, Homo sapiens
gggtcagtacccccg

SEQ ID NO: 1660591 - DNA, 15 bp, Homo sapiens
tgggtcagtaccccc

SEQ ID NO: 1660592 - DNA, 15 bp, Homo sapiens
gtgggtcagtacccc

SEQ ID NO: 1660593 - DNA, 15 bp, Homo sapiens
agtgggtcagtaccc

SEQ ID NO: 1660594 - DNA, 15 bp, Homo sapiens
tagtgggtcagtacc

SEQ ID NO: 1660595 - DNA, 15 bp, Homo sapiens
ttagtgggtcagtac

SEQ ID NO: 1660596 - DNA, 15 bp, Homo sapiens
cttagtgggtcagta

SEQ ID NO: 1660597 - DNA, 15 bp, Homo sapiens
ccttagtgggtcagt

SEQ ID NO: 1660598 - DNA, 15 bp, Homo sapiens
gccttagtgggtcag

SEQ ID NO: 1660599 - DNA, 15 bp, Homo sapiens
ggccttagtgggtca

SEQ ID NO: 1660600 - DNA, 15 bp, Homo sapiens
gggccttagtgggtc

SEQ ID NO: 1660601 - DNA, 15 bp, Homo sapiens
ggggccttagtgggt

SEQ ID NO: 1660602 - DNA, 15 bp, Homo sapiens
aggggccttagtggg

SEQ ID NO: 1660603 - DNA, 15 bp, Homo sapiens
aaggggccttagtgg

SEQ ID NO: 1660604 - DNA, 15 bp, Homo sapiens
caaggggccttagtg

SEQ ID NO: 1660605 - DNA, 15 bp, Homo sapiens
acaaggggccttagt

SEQ ID NO: 1660606 - DNA, 15 bp, Homo sapiens
tacaaggggccttag

SEQ ID NO: 1660607 - DNA, 15 bp, Homo sapiens
gtacaaggggcctta

SEQ ID NO: 1660608 - DNA, 15 bp, Homo sapiens
agtacaaggggcctt

SEQ ID NO: 1660609 - DNA, 15 bp, Homo sapiens
cagtacaaggggcct

SEQ ID NO: 1660610 - DNA, 15 bp, Homo sapiens
acagtacaaggggcc

SEQ ID NO: 1660611 - DNA, 15 bp, Homo sapiens
aacagtacaaggggc

SEQ ID NO: 1660612 - DNA, 15 bp, Homo sapiens
taacagtacaagggg

SEQ ID NO: 1660613 - DNA, 15 bp, Homo sapiens
ttaacagtacaaggg

SEQ ID NO: 1660614 - DNA, 15 bp, Homo sapiens
attaacagtacaagg

SEQ ID NO: 1660615 - DNA, 15 bp, Homo sapiens
cattaacagtacaag

SEQ ID NO: 1660616 - DNA, 15 bp, Homo sapiens
tcacattaacagtac

SEQ ID NO: 1660617 - DNA, 15 bp, Homo sapiens
ttcacattaacagta

SEQ ID NO: 1660618 - DNA, 15 bp, Homo sapiens
attcacattaacagt

SEQ ID NO: 1660619 - DNA, 15 bp, Homo sapiens
tattcacattaacag

SEQ ID NO: 1660620 - DNA, 15 bp, Homo sapiens
atattcacattaaca

SEQ ID NO: 1660621 - DNA, 15 bp, Homo sapiens
aatattcacattaac

SEQ ID NO: 1660622 - DNA, 15 bp, Homo sapiens
aaatattcacattaa

SEQ ID NO: 1660623 - DNA, 15 bp, Homo sapiens
caaatattcacatta

SEQ ID NO: 1660624 - DNA, 15 bp, Homo sapiens
gcaaatattcacatt

SEQ ID NO: 1660625 - DNA, 15 bp, Homo sapiens
tgcaaatattcacat

SEQ ID NO: 1660626 - DNA, 15 bp, Homo sapiens
ttgcaaatattcaca

SEQ ID NO: 1660627 - DNA, 15 bp, Homo sapiens
attgcaaatattcac

SEQ ID NO: 1660628 - DNA, 15 bp, Homo sapiens
aattgcaaatattca

SEQ ID NO: 1660629 - DNA, 15 bp, Homo sapiens
taattgcaaatattc

SEQ ID NO: 1660630 - DNA, 15 bp, Homo sapiens
ataattgcaaatatt

SEQ ID NO: 1660631 - DNA, 15 bp, Homo sapiens
tataattgcaaatat

SEQ ID NO: 1660632 - DNA, 15 bp, Homo sapiens
atataattgcaaata

SEQ ID NO: 1660633 - DNA, 15 bp, Homo sapiens
tatataattgcaaat

SEQ ID NO: 1660634 - DNA, 15 bp, Homo sapiens
atatataattgcaaa

SEQ ID NO: 1660635 - DNA, 15 bp, Homo sapiens
catatataattgcaa

SEQ ID NO: 1660636 - DNA, 15 bp, Homo sapiens
acatatataattgca

SEQ ID NO: 1660637 - DNA, 15 bp, Homo sapiens
gacatatataattgc

SEQ ID NO: 1660638 - DNA, 15 bp, Homo sapiens
agacatatataattg

SEQ ID NO: 1660639 - DNA, 15 bp, Homo sapiens
gagacatatataatt

SEQ ID NO: 1660640 - DNA, 15 bp, Homo sapiens
ggagacatatataat

SEQ ID NO: 1660641 - DNA, 15 bp, Homo sapiens
aggagacatatataa

SEQ ID NO: 1660642 - DNA, 15 bp, Homo sapiens
aaggagacatatata

SEQ ID NO: 1660643 - DNA, 15 bp, Homo sapiens
gaaggagacatatat

SEQ ID NO: 1660644 - DNA, 15 bp, Homo sapiens
agaaggagacatata

SEQ ID NO: 1660645 - DNA, 15 bp, Homo sapiens
cagaaggagacatat

SEQ ID NO: 1660646 - DNA, 15 bp, Homo sapiens
ccagaaggagacata

SEQ ID NO: 1660647 - DNA, 15 bp, Homo sapiens
accagaaggagacat

SEQ ID NO: 1660648 - DNA, 15 bp, Homo sapiens
taccagaaggagaca

SEQ ID NO: 1660649 - DNA, 15 bp, Homo sapiens
ctaccagaaggagac

SEQ ID NO: 1660650 - DNA, 15 bp, Homo sapiens
tctaccagaaggaga

SEQ ID NO: 1660651 - DNA, 15 bp, Homo sapiens
ctctaccagaaggag

SEQ ID NO: 1660652 - DNA, 15 bp, Homo sapiens
actctaccagaagga

SEQ ID NO: 1660653 - DNA, 15 bp, Homo sapiens
cactctaccagaagg

SEQ ID NO: 1660654 - DNA, 15 bp, Homo sapiens
ccactctaccagaag

SEQ ID NO: 1660655 - DNA, 15 bp, Homo sapiens
cccactctaccagaa

SEQ ID NO: 1660656 - DNA, 15 bp, Homo sapiens
tcccactctaccaga

SEQ ID NO: 1660657 - DNA, 15 bp, Homo sapiens
atcccactctaccag

SEQ ID NO: 1660658 - DNA, 15 bp, Homo sapiens
tatcccactctacca

SEQ ID NO: 1660659 - DNA, 15 bp, Homo sapiens
atatcccactctacc

SEQ ID NO: 1660660 - DNA, 15 bp, Homo sapiens
aatatcccactctac

SEQ ID NO: 1660661 - DNA, 15 bp, Homo sapiens
taatatcccactcta

SEQ ID NO: 1660662 - DNA, 15 bp, Homo sapiens
ataatatcccactct

SEQ ID NO: 1660663 - DNA, 15 bp, Homo sapiens
cataatatcccactc

SEQ ID NO: 1660664 - DNA, 15 bp, Homo sapiens
gcataatatcccact

SEQ ID NO: 1660665 - DNA, 15 bp, Homo sapiens
ggcataatatcccac

SEQ ID NO: 1660666 - DNA, 15 bp, Homo sapiens
gggcataatatccca

SEQ ID NO: 1660667 - DNA, 15 bp, Homo sapiens
agggcataatatccc

SEQ ID NO: 1660668 - DNA, 15 bp, Homo sapiens
tagggcataatatcc

SEQ ID NO: 1660669 - DNA, 15 bp, Homo sapiens
ctagggcataatatc

SEQ ID NO: 1660670 - DNA, 15 bp, Homo sapiens
actagggcataatat

SEQ ID NO: 1660671 - DNA, 15 bp, Homo sapiens
tactagggcataata

SEQ ID NO: 1660672 - DNA, 15 bp, Homo sapiens
atactagggcataat

SEQ ID NO: 1660673 - DNA, 15 bp, Homo sapiens
gatactagggcataa

SEQ ID NO: 1660674 - DNA, 15 bp, Homo sapiens
ggatactagggcata

SEQ ID NO: 1660675 - DNA, 15 bp, Homo sapiens
gggatactagggcat

SEQ ID NO: 1660676 - DNA, 15 bp, Homo sapiens
ggggatactagggca

SEQ ID NO: 1660677 - DNA, 15 bp, Homo sapiens
aggggatactagggc

SEQ ID NO: 1660678 - DNA, 15 bp, Homo sapiens
aaggggatactaggg

SEQ ID NO: 1660679 - DNA, 15 bp, Homo sapiens
aaaggggatactagg

SEQ ID NO: 1660680 - DNA, 15 bp, Homo sapiens
caaaggggatactag

SEQ ID NO: 1660681 - DNA, 15 bp, Homo sapiens
gcaaaggggatacta

SEQ ID NO: 1660682 - DNA, 15 bp, Homo sapiens
tgcaaaggggatact

SEQ ID NO: 1660683 - DNA, 15 bp, Homo sapiens
atgcaaaggggatac

SEQ ID NO: 1660684 - DNA, 15 bp, Homo sapiens
aatgcaaaggggata

SEQ ID NO: 1660685 - DNA, 15 bp, Homo sapiens
taatgcaaaggggat

SEQ ID NO: 1660686 - DNA, 15 bp, Homo sapiens
gtaatgcaaagggga

SEQ ID NO: 1660687 - DNA, 15 bp, Homo sapiens
agtaatgcaaagggg

SEQ ID NO: 1660688 - DNA, 15 bp, Homo sapiens
cagtaatgcaaaggg

SEQ ID NO: 1660689 - DNA, 15 bp, Homo sapiens
gcagtaatgcaaagg

SEQ ID NO: 1660690 - DNA, 15 bp, Homo sapiens
tgcagtaatgcaaag

SEQ ID NO: 1660691 - DNA, 15 bp, Homo sapiens
ccctgcagtaatgca

SEQ ID NO: 1660692 - DNA, 15 bp, Homo sapiens
cccctgcagtaatgc

SEQ ID NO: 1660693 - DNA, 15 bp, Homo sapiens
gcccctgcagtaatg

SEQ ID NO: 1660694 - DNA, 15 bp, Homo sapiens
agcccctgcagtaat

SEQ ID NO: 1660695 - DNA, 15 bp, Homo sapiens
cagcccctgcagtaa

SEQ ID NO: 1660696 - DNA, 15 bp, Homo sapiens
gcagcccctgcagta

SEQ ID NO: 1660697 - DNA, 15 bp, Homo sapiens
agcagcccctgcagt

SEQ ID NO: 1660698 - DNA, 15 bp, Homo sapiens
cagcagcccctgcag

SEQ ID NO: 1660699 - DNA, 15 bp, Homo sapiens
tcagcagcccctgca

SEQ ID NO: 1660700 - DNA, 15 bp, Homo sapiens
gtcagcagcccctgc

SEQ ID NO: 1660701 - DNA, 15 bp, Homo sapiens
agtcagcagcccctg

SEQ ID NO: 1660702 - DNA, 15 bp, Homo sapiens
tagtcagcagcccct

SEQ ID NO: 1660703 - DNA, 15 bp, Homo sapiens
gtagtcagcagcccc

SEQ ID NO: 1660704 - DNA, 15 bp, Homo sapiens
agtagtcagcagccc

SEQ ID NO: 1660705 - DNA, 15 bp, Homo sapiens
gagtagtcagcagcc

SEQ ID NO: 1660706 - DNA, 15 bp, Homo sapiens
tgagtagtcagcagc

SEQ ID NO: 1660707 - DNA, 15 bp, Homo sapiens
ttgagtagtcagcag

SEQ ID NO: 1660708 - DNA, 15 bp, Homo sapiens
tttgagtagtcagca

SEQ ID NO: 1660709 - DNA, 15 bp, Homo sapiens
ttttgagtagtcagc

SEQ ID NO: 1660710 - DNA, 15 bp, Homo sapiens
gttttgagtagtcag

SEQ ID NO: 1660711 - DNA, 15 bp, Homo sapiens
agttttgagtagtca

SEQ ID NO: 1660712 - DNA, 15 bp, Homo sapiens
aagttttgagtagtc

SEQ ID NO: 1660713 - DNA, 15 bp, Homo sapiens
gaagttttgagtagt

SEQ ID NO: 1660714 - DNA, 15 bp, Homo sapiens
agaagttttgagtag

SEQ ID NO: 1660715 - DNA, 15 bp, Homo sapiens
gagaagttttgagta

SEQ ID NO: 1660716 - DNA, 15 bp, Homo sapiens
ggagaagttttgagt

SEQ ID NO: 1660717 - DNA, 15 bp, Homo sapiens
aggagaagttttgag

SEQ ID NO: 1660718 - DNA, 15 bp, Homo sapiens
caggagaagttttga

SEQ ID NO: 1660719 - DNA, 15 bp, Homo sapiens
ccaggagaagttttg

SEQ ID NO: 1660720 - DNA, 15 bp, Homo sapiens
cccaggagaagtttt

SEQ ID NO: 1660721 - DNA, 15 bp, Homo sapiens
tcccaggagaagttt

SEQ ID NO: 1660722 - DNA, 15 bp, Homo sapiens
gtcccaggagaagtt

SEQ ID NO: 1660723 - DNA, 15 bp, Homo sapiens
agtcccaggagaagt

SEQ ID NO: 1660724 - DNA, 15 bp, Homo sapiens
cagtcccaggagaag

SEQ ID NO: 1660725 - DNA, 15 bp, Homo sapiens
acagtcccaggagaa

SEQ ID NO: 1660726 - DNA, 15 bp, Homo sapiens
aacagtcccaggaga

SEQ ID NO: 1660727 - DNA, 15 bp, Homo sapiens
taacagtcccaggag

SEQ ID NO: 1660728 - DNA, 15 bp, Homo sapiens
ttaacagtcccagga

SEQ ID NO: 1660729 - DNA, 15 bp, Homo sapiens
attaacagtcccagg

SEQ ID NO: 1660730 - DNA, 15 bp, Homo sapiens
tattaacagtcccag

SEQ ID NO: 1660731 - DNA, 15 bp, Homo sapiens
ctattaacagtccca

SEQ ID NO: 1660732 - DNA, 15 bp, Homo sapiens
cctattaacagtccc

SEQ ID NO: 1660733 - DNA, 15 bp, Homo sapiens
gcctattaacagtcc

SEQ ID NO: 1660734 - DNA, 15 bp, Homo sapiens
tgcctattaacagtc

SEQ ID NO: 1660735 - DNA, 15 bp, Homo sapiens
gtgcctattaacagt

SEQ ID NO: 1660736 - DNA, 15 bp, Homo sapiens
tgtgcctattaacag

SEQ ID NO: 1660737 - DNA, 15 bp, Homo sapiens
ttgtgcctattaaca

SEQ ID NO: 1660738 - DNA, 15 bp, Homo sapiens
attgtgcctattaac

SEQ ID NO: 1660739 - DNA, 15 bp, Homo sapiens
cattgtgcctattaa

SEQ ID NO: 1660740 - DNA, 15 bp, Homo sapiens
ccattgtgcctatta

SEQ ID NO: 1660741 - DNA, 15 bp, Homo sapiens
gccattgtgcctatt

SEQ ID NO: 1660742 - DNA, 15 bp, Homo sapiens
tgccattgtgcctat

SEQ ID NO: 1660743 - DNA, 15 bp, Homo sapiens
ctgccattgtgccta

SEQ ID NO: 1660744 - DNA, 15 bp, Homo sapiens
actgccattgtgcct

SEQ ID NO: 1660745 - DNA, 15 bp, Homo sapiens
aactgccattgtgcc

SEQ ID NO: 1660746 - DNA, 15 bp, Homo sapiens
taactgccattgtgc

SEQ ID NO: 1660747 - DNA, 15 bp, Homo sapiens
ataactgccattgtg

SEQ ID NO: 1660748 - DNA, 15 bp, Homo sapiens
gataactgccattgt

SEQ ID NO: 1660749 - DNA, 15 bp, Homo sapiens
tgataactgccattg

SEQ ID NO: 1660750 - DNA, 15 bp, Homo sapiens
ttgataactgccatt

SEQ ID NO: 1660751 - DNA, 15 bp, Homo sapiens
attgataactgccat

SEQ ID NO: 1660752 - DNA, 15 bp, Homo sapiens
cattgataactgcca

SEQ ID NO: 1660753 - DNA, 15 bp, Homo sapiens
ccattgataactgcc

SEQ ID NO: 1660754 - DNA, 15 bp, Homo sapiens
accattgataactgc

SEQ ID NO: 1660755 - DNA, 15 bp, Homo sapiens
aaccattgataactg

SEQ ID NO: 1660756 - DNA, 15 bp, Homo sapiens
aaaccattgataact

SEQ ID NO: 1660757 - DNA, 15 bp, Homo sapiens
aaaaccattgataac

SEQ ID NO: 1660758 - DNA, 15 bp, Homo sapiens
gaaaaccattgataa

SEQ ID NO: 1660759 - DNA, 15 bp, Homo sapiens
agaaaaccattgata

SEQ ID NO: 1660760 - DNA, 15 bp, Homo sapiens
gagaaaaccattgat

SEQ ID NO: 1660761 - DNA, 15 bp, Homo sapiens
ggagaaaaccattga

SEQ ID NO: 1660762 - DNA, 15 bp, Homo sapiens
gggagaaaaccattg

SEQ ID NO: 1660763 - DNA, 15 bp, Homo sapiens
agggagaaaaccatt

SEQ ID NO: 1660764 - DNA, 15 bp, Homo sapiens
gagggagaaaaccat

SEQ ID NO: 1660765 - DNA, 15 bp, Homo sapiens
ggagggagaaaacca

SEQ ID NO: 1660766 - DNA, 15 bp, Homo sapiens
gggagggagaaaacc

SEQ ID NO: 1660767 - DNA, 15 bp, Homo sapiens
agggagggagaaaac

SEQ ID NO: 1660768 - DNA, 15 bp, Homo sapiens
cagggagggagaaaa

SEQ ID NO: 1660769 - DNA, 15 bp, Homo sapiens
tcagggagggagaaa

SEQ ID NO: 1660770 - DNA, 15 bp, Homo sapiens
gtcagggagggagaa

SEQ ID NO: 1660771 - DNA, 15 bp, Homo sapiens
ggtcagggagggaga

SEQ ID NO: 1660772 - DNA, 15 bp, Homo sapiens
aggtcagggagggag

SEQ ID NO: 1660773 - DNA, 15 bp, Homo sapiens
aaggtcagggaggga

SEQ ID NO: 1660774 - DNA, 15 bp, Homo sapiens
caaggtcagggaggg

SEQ ID NO: 1660775 - DNA, 15 bp, Homo sapiens
acaaggtcagggagg

SEQ ID NO: 1660776 - DNA, 15 bp, Homo sapiens
aacaaggtcagggag

SEQ ID NO: 1660777 - DNA, 15 bp, Homo sapiens
taacaaggtcaggga

SEQ ID NO: 1660778 - DNA, 15 bp, Homo sapiens
ttaacaaggtcaggg

SEQ ID NO: 1660779 - DNA, 15 bp, Homo sapiens
cttaacaaggtcagg

SEQ ID NO: 1660780 - DNA, 15 bp, Homo sapiens
gcttaacaaggtcag

SEQ ID NO: 1660781 - DNA, 15 bp, Homo sapiens
tgcttaacaaggtca

SEQ ID NO: 1660782 - DNA, 15 bp, Homo sapiens
ttgcttaacaaggtc

SEQ ID NO: 1660783 - DNA, 15 bp, Homo sapiens
cttgcttaacaaggt

SEQ ID NO: 1660784 - DNA, 15 bp, Homo sapiens
gcttgcttaacaagg

SEQ ID NO: 1660785 - DNA, 15 bp, Homo sapiens
cgcttgcttaacaag

SEQ ID NO: 1660786 - DNA, 15 bp, Homo sapiens
gcgcttgcttaacaa

SEQ ID NO: 1660787 - DNA, 15 bp, Homo sapiens
ggcgcttgcttaaca

SEQ ID NO: 1660788 - DNA, 15 bp, Homo sapiens
gggcgcttgcttaac

SEQ ID NO: 1660789 - DNA, 15 bp, Homo sapiens
ggggcgcttgcttaa

SEQ ID NO: 1660790 - DNA, 15 bp, Homo sapiens
tggggcgcttgctta

SEQ ID NO: 1660791 - DNA, 15 bp, Homo sapiens
gtggggcgcttgctt

SEQ ID NO: 1660792 - DNA, 15 bp, Homo sapiens
ggtggggcgcttgct

SEQ ID NO: 1660793 - DNA, 15 bp, Homo sapiens
gggtggggcgcttgc

SEQ ID NO: 1660794 - DNA, 15 bp, Homo sapiens
ggggtggggcgcttg

SEQ ID NO: 1660795 - DNA, 15 bp, Homo sapiens
tggggtggggcgctt

SEQ ID NO: 1660796 - DNA, 15 bp, Homo sapiens
gtggggtggggcgct

SEQ ID NO: 1660797 - DNA, 15 bp, Homo sapiens
ggtggggtggggcgc

SEQ ID NO: 1660798 - DNA, 15 bp, Homo sapiens
gggtggggtggggcg

SEQ ID NO: 1660799 - DNA, 15 bp, Homo sapiens
aagggtggggtgggg

SEQ ID NO: 1660800 - DNA, 15 bp, Homo sapiens
taagggtggggtggg

SEQ ID NO: 1660801 - DNA, 15 bp, Homo sapiens
ctaagggtggggtgg

SEQ ID NO: 1660802 - DNA, 15 bp, Homo sapiens
actaagggtggggtg

SEQ ID NO: 1660803 - DNA, 15 bp, Homo sapiens
aactaagggtggggt

SEQ ID NO: 1660804 - DNA, 15 bp, Homo sapiens
aaactaagggtgggg

SEQ ID NO: 1660805 - DNA, 15 bp, Homo sapiens
gaaactaagggtggg

SEQ ID NO: 1660806 - DNA, 15 bp, Homo sapiens
ggaaactaagggtgg

SEQ ID NO: 1660807 - DNA, 15 bp, Homo sapiens
gggaaactaagggtg

SEQ ID NO: 1660808 - DNA, 15 bp, Homo sapiens
tgggaaactaagggt

SEQ ID NO: 1660809 - DNA, 15 bp, Homo sapiens
atgggaaactaaggg

SEQ ID NO: 1660810 - DNA, 15 bp, Homo sapiens
catgggaaactaagg

SEQ ID NO: 1660811 - DNA, 15 bp, Homo sapiens
ccatgggaaactaag

SEQ ID NO: 1660812 - DNA, 15 bp, Homo sapiens
gccatgggaaactaa

SEQ ID NO: 1660813 - DNA, 15 bp, Homo sapiens
tgccatgggaaacta

SEQ ID NO: 1660814 - DNA, 15 bp, Homo sapiens
atgccatgggaaact

SEQ ID NO: 1660815 - DNA, 15 bp, Homo sapiens
tatgccatgggaaac

SEQ ID NO: 1660816 - DNA, 15 bp, Homo sapiens
ttatgccatgggaaa

SEQ ID NO: 1660817 - DNA, 15 bp, Homo sapiens
attatgccatgggaa

SEQ ID NO: 1660818 - DNA, 15 bp, Homo sapiens
tattatgccatggga

SEQ ID NO: 1660819 - DNA, 15 bp, Homo sapiens
ttattatgccatggg

SEQ ID NO: 1660820 - DNA, 15 bp, Homo sapiens
tttattatgccatgg

SEQ ID NO: 1660821 - DNA, 15 bp, Homo sapiens
ctttattatgccatg

SEQ ID NO: 1660822 - DNA, 15 bp, Homo sapiens
actttattatgccat

SEQ ID NO: 1660823 - DNA, 15 bp, Homo sapiens
tactttattatgcca

SEQ ID NO: 1660824 - DNA, 15 bp, Homo sapiens
atactttattatgcc

SEQ ID NO: 1660825 - DNA, 15 bp, Homo sapiens
tatactttattatgc

SEQ ID NO: 1660826 - DNA, 15 bp, Homo sapiens
ttatactttattatg

SEQ ID NO: 1660827 - DNA, 15 bp, Homo sapiens
cttatactttattat

SEQ ID NO: 1660828 - DNA, 15 bp, Homo sapiens
gcttatactttatta

SEQ ID NO: 1660829 - DNA, 15 bp, Homo sapiens
tgcttatactttatt

SEQ ID NO: 1660830 - DNA, 15 bp, Homo sapiens
atgcttatactttat

SEQ ID NO: 1660831 - DNA, 15 bp, Homo sapiens
aatgcttatacttta

SEQ ID NO: 1660832 - DNA, 15 bp, Homo sapiens
caatgcttatacttt

SEQ ID NO: 1660833 - DNA, 15 bp, Homo sapiens
ccaatgcttatactt

SEQ ID NO: 1660834 - DNA, 15 bp, Homo sapiens
tccaatgcttatact

SEQ ID NO: 1660835 - DNA, 15 bp, Homo sapiens
ctccaatgcttatac

SEQ ID NO: 1660836 - DNA, 15 bp, Homo sapiens
actccaatgcttata

SEQ ID NO: 1660837 - DNA, 15 bp, Homo sapiens
tactccaatgcttat

SEQ ID NO: 1660838 - DNA, 15 bp, Homo sapiens
atactccaatgctta

SEQ ID NO: 1660839 - DNA, 15 bp, Homo sapiens
aatactccaatgctt

SEQ ID NO: 1660840 - DNA, 15 bp, Homo sapiens
gaatactccaatgct

SEQ ID NO: 1660841 - DNA, 15 bp, Homo sapiens
ggaatactccaatgc

SEQ ID NO: 1660842 - DNA, 15 bp, Homo sapiens
tggaatactccaatg

SEQ ID NO: 1660843 - DNA, 15 bp, Homo sapiens
atggaatactccaat

SEQ ID NO: 1660844 - DNA, 15 bp, Homo sapiens
catggaatactccaa

SEQ ID NO: 1660845 - DNA, 15 bp, Homo sapiens
gcatggaatactcca

SEQ ID NO: 1660846 - DNA, 15 bp, Homo sapiens
tgcatggaatactcc

SEQ ID NO: 1660847 - DNA, 15 bp, Homo sapiens
gtgcatggaatactc

SEQ ID NO: 1660848 - DNA, 15 bp, Homo sapiens
agtgcatggaatact

SEQ ID NO: 1660849 - DNA, 15 bp, Homo sapiens
aagtgcatggaatac

SEQ ID NO: 1660850 - DNA, 15 bp, Homo sapiens
caagtgcatggaata

SEQ ID NO: 1660851 - DNA, 15 bp, Homo sapiens
acaagtgcatggaat

SEQ ID NO: 1660852 - DNA, 15 bp, Homo sapiens
gacaagtgcatggaa

SEQ ID NO: 1660853 - DNA, 15 bp, Homo sapiens
agacaagtgcatgga

SEQ ID NO: 1660854 - DNA, 15 bp, Homo sapiens
tagacaagtgcatgg

SEQ ID NO: 1660855 - DNA, 15 bp, Homo sapiens
atagacaagtgcatg

SEQ ID NO: 1660856 - DNA, 15 bp, Homo sapiens
gatagacaagtgcat

SEQ ID NO: 1660857 - DNA, 15 bp, Homo sapiens
tgatagacaagtgca

SEQ ID NO: 1660858 - DNA, 15 bp, Homo sapiens
ttgatagacaagtgc

SEQ ID NO: 1660859 - DNA, 15 bp, Homo sapiens
tttgatagacaagtg

SEQ ID NO: 1660860 - DNA, 15 bp, Homo sapiens
gtttgatagacaagt

SEQ ID NO: 1660861 - DNA, 15 bp, Homo sapiens
tgtttgatagacaag

SEQ ID NO: 1660862 - DNA, 15 bp, Homo sapiens
ctgtttgatagacaa

SEQ ID NO: 1660863 - DNA, 15 bp, Homo sapiens
actgtttgatagaca

SEQ ID NO: 1660864 - DNA, 15 bp, Homo sapiens
cactgtttgatagac

SEQ ID NO: 1660865 - DNA, 15 bp, Homo sapiens
ccactgtttgataga

SEQ ID NO: 1660866 - DNA, 15 bp, Homo sapiens
accactgtttgatag

SEQ ID NO: 1660867 - DNA, 15 bp, Homo sapiens
gaccactgtttgata

SEQ ID NO: 1660868 - DNA, 15 bp, Homo sapiens
ggaccactgtttgat

SEQ ID NO: 1660869 - DNA, 15 bp, Homo sapiens
tggaccactgtttga

SEQ ID NO: 1660870 - DNA, 15 bp, Homo sapiens
atggaccactgtttg

SEQ ID NO: 1660871 - DNA, 15 bp, Homo sapiens
tatggaccactgttt

SEQ ID NO: 1660872 - DNA, 15 bp, Homo sapiens
gtatggaccactgtt

SEQ ID NO: 1660873 - DNA, 15 bp, Homo sapiens
agtatggaccactgt

SEQ ID NO: 1660874 - DNA, 15 bp, Homo sapiens
gagtatggaccactg

SEQ ID NO: 1660875 - DNA, 15 bp, Homo sapiens
ggagtatggaccact

SEQ ID NO: 1660876 - DNA, 15 bp, Homo sapiens
gggagtatggaccac

SEQ ID NO: 1660877 - DNA, 15 bp, Homo sapiens
tgggagtatggacca

SEQ ID NO: 1660878 - DNA, 15 bp, Homo sapiens
ttgggagtatggacc

SEQ ID NO: 1660879 - DNA, 15 bp, Homo sapiens
gttgggagtatggac

SEQ ID NO: 1660880 - DNA, 15 bp, Homo sapiens
ggttgggagtatgga

SEQ ID NO: 1660881 - DNA, 15 bp, Homo sapiens
gggttgggagtatgg

SEQ ID NO: 1660882 - DNA, 15 bp, Homo sapiens
agggttgggagtatg

SEQ ID NO: 1660883 - DNA, 15 bp, Homo sapiens
aagggttgggagtat

SEQ ID NO: 1660884 - DNA, 15 bp, Homo sapiens
aaagggttgggagta

SEQ ID NO: 1660885 - DNA, 15 bp, Homo sapiens
aaaagggttgggagt

SEQ ID NO: 1660886 - DNA, 15 bp, Homo sapiens
caaaagggttgggag

SEQ ID NO: 1660887 - DNA, 15 bp, Homo sapiens
gcaaaagggttggga

SEQ ID NO: 1660888 - DNA, 15 bp, Homo sapiens
tgcaaaagggttggg

SEQ ID NO: 1660889 - DNA, 15 bp, Homo sapiens
atgcaaaagggttgg

SEQ ID NO: 1660890 - DNA, 15 bp, Homo sapiens
aatgcaaaagggttg

SEQ ID NO: 1660891 - DNA, 15 bp, Homo sapiens
caatgcaaaagggtt

SEQ ID NO: 1660892 - DNA, 15 bp, Homo sapiens
gcaatgcaaaagggt

SEQ ID NO: 1660893 - DNA, 15 bp, Homo sapiens
cgcaatgcaaaaggg

SEQ ID NO: 1660894 - DNA, 15 bp, Homo sapiens
gcgcaatgcaaaagg

SEQ ID NO: 1660895 - DNA, 15 bp, Homo sapiens
ggcgcaatgcaaaag

SEQ ID NO: 1660896 - DNA, 15 bp, Homo sapiens
tggcgcaatgcaaaa

SEQ ID NO: 1660897 - DNA, 15 bp, Homo sapiens
ctggcgcaatgcaaa

SEQ ID NO: 1660898 - DNA, 15 bp, Homo sapiens
actggcgcaatgcaa

SEQ ID NO: 1660899 - DNA, 15 bp, Homo sapiens
cactggcgcaatgca

SEQ ID NO: 1660900 - DNA, 15 bp, Homo sapiens
acactggcgcaatgc

SEQ ID NO: 1660901 - DNA, 15 bp, Homo sapiens
cacactggcgcaatg

SEQ ID NO: 1660902 - DNA, 15 bp, Homo sapiens
acacactggcgcaat

SEQ ID NO: 1660903 - DNA, 15 bp, Homo sapiens
tacacactggcgcaa

SEQ ID NO: 1660904 - DNA, 15 bp, Homo sapiens
ttacacactggcgca

SEQ ID NO: 1660905 - DNA, 15 bp, Homo sapiens
tttacacactggcgc

SEQ ID NO: 1660906 - DNA, 15 bp, Homo sapiens
ttttacacactggcg

SEQ ID NO: 1660907 - DNA, 15 bp, Homo sapiens
attttacacactggc

SEQ ID NO: 1660908 - DNA, 15 bp, Homo sapiens
gattttacacactgg

SEQ ID NO: 1660909 - DNA, 15 bp, Homo sapiens
tgattttacacactg

SEQ ID NO: 1660910 - DNA, 15 bp, Homo sapiens
gtgattttacacact

SEQ ID NO: 1660911 - DNA, 15 bp, Homo sapiens
tgtgattttacacac

SEQ ID NO: 1660912 - DNA, 15 bp, Homo sapiens
ctgtgattttacaca

SEQ ID NO: 1660913 - DNA, 15 bp, Homo sapiens
cctgtgattttacac

SEQ ID NO: 1660914 - DNA, 15 bp, Homo sapiens
acctgtgattttaca

SEQ ID NO: 1660915 - DNA, 15 bp, Homo sapiens
tacctgtgattttac

SEQ ID NO: 1660916 - DNA, 15 bp, Homo sapiens
ctacctgtgatttta

SEQ ID NO: 1660917 - DNA, 15 bp, Homo sapiens
gctacctgtgatttt

SEQ ID NO: 1660918 - DNA, 15 bp, Homo sapiens
ggctacctgtgattt

SEQ ID NO: 1660919 - DNA, 15 bp, Homo sapiens
tggctacctgtgatt

SEQ ID NO: 1660920 - DNA, 15 bp, Homo sapiens
atggctacctgtgat

SEQ ID NO: 1660921 - DNA, 15 bp, Homo sapiens
catggctacctgtga

SEQ ID NO: 1660922 - DNA, 15 bp, Homo sapiens
ccatggctacctgtg

SEQ ID NO: 1660923 - DNA, 15 bp, Homo sapiens
accatggctacctgt

SEQ ID NO: 1660924 - DNA, 15 bp, Homo sapiens
caccatggctacctg

SEQ ID NO: 1660925 - DNA, 15 bp, Homo sapiens
acaccatggctacct

SEQ ID NO: 1660926 - DNA, 15 bp, Homo sapiens
gacaccatggctacc

SEQ ID NO: 1660927 - DNA, 15 bp, Homo sapiens
tgacaccatggctac

SEQ ID NO: 1660928 - DNA, 15 bp, Homo sapiens
atgacaccatggcta

SEQ ID NO: 1660929 - DNA, 15 bp, Homo sapiens
catgacaccatggct

SEQ ID NO: 1660930 - DNA, 15 bp, Homo sapiens
gcatgacaccatggc

SEQ ID NO: 1660931 - DNA, 15 bp, Homo sapiens
agcatgacaccatgg

SEQ ID NO: 1660932 - DNA, 15 bp, Homo sapiens
aagcatgacaccatg

SEQ ID NO: 1660933 - DNA, 15 bp, Homo sapiens
aaagcatgacaccat

SEQ ID NO: 1660934 - DNA, 15 bp, Homo sapiens
taaagcatgacacca

SEQ ID NO: 1660935 - DNA, 15 bp, Homo sapiens
ataaagcatgacacc

SEQ ID NO: 1660936 - DNA, 15 bp, Homo sapiens
tataaagcatgacac

SEQ ID NO: 1660937 - DNA, 15 bp, Homo sapiens
atataaagcatgaca

SEQ ID NO: 1660938 - DNA, 15 bp, Homo sapiens
tatataaagcatgac

SEQ ID NO: 1660939 - DNA, 15 bp, Homo sapiens
gtatataaagcatga

SEQ ID NO: 1660940 - DNA, 15 bp, Homo sapiens
cgtatataaagcatg

SEQ ID NO: 1660941 - DNA, 15 bp, Homo sapiens
tcgtatataaagcat

SEQ ID NO: 1660942 - DNA, 15 bp, Homo sapiens
ttcgtatataaagca

SEQ ID NO: 1660943 - DNA, 15 bp, Homo sapiens
cttcgtatataaagc

SEQ ID NO: 1660944 - DNA, 15 bp, Homo sapiens
acttcgtatataaag

SEQ ID NO: 1660945 - DNA, 15 bp, Homo sapiens
gacttcgtatataaa

SEQ ID NO: 1660946 - DNA, 15 bp, Homo sapiens
agacttcgtatataa

SEQ ID NO: 1660947 - DNA, 15 bp, Homo sapiens
aagacttcgtatata

SEQ ID NO: 1660948 - DNA, 15 bp, Homo sapiens
gaagacttcgtatat

SEQ ID NO: 1660949 - DNA, 15 bp, Homo sapiens
ggaagacttcgtata

SEQ ID NO: 1660950 - DNA, 15 bp, Homo sapiens
gggaagacttcgtat

SEQ ID NO: 1660951 - DNA, 15 bp, Homo sapiens
agggaagacttcgta

SEQ ID NO: 1660952 - DNA, 15 bp, Homo sapiens
gagggaagacttcgt

SEQ ID NO: 1660953 - DNA, 15 bp, Homo sapiens
agagggaagacttcg

SEQ ID NO: 1660954 - DNA, 15 bp, Homo sapiens
gagagggaagacttc

SEQ ID NO: 1660955 - DNA, 15 bp, Homo sapiens
agagagggaagactt

SEQ ID NO: 1660956 - DNA, 15 bp, Homo sapiens
gagagagggaagact

SEQ ID NO: 1660957 - DNA, 15 bp, Homo sapiens
agagagagggaagac

SEQ ID NO: 1660958 - DNA, 15 bp, Homo sapiens
cagagagagggaaga

SEQ ID NO: 1660959 - DNA, 15 bp, Homo sapiens
gcagagagagggaag

SEQ ID NO: 1660960 - DNA, 15 bp, Homo sapiens
ggcagagagagggaa

SEQ ID NO: 1660961 - DNA, 15 bp, Homo sapiens
gggcagagagaggga

SEQ ID NO: 1660962 - DNA, 15 bp, Homo sapiens
ggggcagagagaggg

SEQ ID NO: 1660963 - DNA, 15 bp, Homo sapiens
aggggcagagagagg

SEQ ID NO: 1660964 - DNA, 15 bp, Homo sapiens
aaggggcagagagag

SEQ ID NO: 1660965 - DNA, 15 bp, Homo sapiens
caaggggcagagaga

SEQ ID NO: 1660966 - DNA, 15 bp, Homo sapiens
acaaggggcagagag

SEQ ID NO: 1660967 - DNA, 15 bp, Homo sapiens
cacaaggggcagaga

SEQ ID NO: 1660968 - DNA, 15 bp, Homo sapiens
acacaaggggcagag

SEQ ID NO: 1660969 - DNA, 15 bp, Homo sapiens
cacacaaggggcaga

SEQ ID NO: 1660970 - DNA, 15 bp, Homo sapiens
gcacacaaggggcag

SEQ ID NO: 1660971 - DNA, 15 bp, Homo sapiens
ggcacacaaggggca

SEQ ID NO: 1660972 - DNA, 15 bp, Homo sapiens
gggcacacaaggggc

SEQ ID NO: 1660973 - DNA, 15 bp, Homo sapiens
agggcacacaagggg

SEQ ID NO: 1660974 - DNA, 15 bp, Homo sapiens
aagggcacacaaggg

SEQ ID NO: 1660975 - DNA, 15 bp, Homo sapiens
caagggcacacaagg

SEQ ID NO: 1660976 - DNA, 15 bp, Homo sapiens
ccaagggcacacaag

SEQ ID NO: 1660977 - DNA, 15 bp, Homo sapiens
gccaagggcacacaa

SEQ ID NO: 1660978 - DNA, 15 bp, Homo sapiens
ggccaagggcacaca

SEQ ID NO: 1660979 - DNA, 15 bp, Homo sapiens
gggccaagggcacac

SEQ ID NO: 1660980 - DNA, 15 bp, Homo sapiens
ggggccaagggcaca

SEQ ID NO: 1660981 - DNA, 15 bp, Homo sapiens
aggggccaagggcac

SEQ ID NO: 1660982 - DNA, 15 bp, Homo sapiens
aaggggccaagggca

SEQ ID NO: 1660983 - DNA, 15 bp, Homo sapiens
aaaggggccaagggc

SEQ ID NO: 1660984 - DNA, 15 bp, Homo sapiens
aaaaggggccaaggg

SEQ ID NO: 1660985 - DNA, 15 bp, Homo sapiens
aaaaaggggccaagg

SEQ ID NO: 1660986 - DNA, 15 bp, Homo sapiens
taaaaaggggccaag

SEQ ID NO: 1660987 - DNA, 15 bp, Homo sapiens
gtaaaaaggggccaa

SEQ ID NO: 1660988 - DNA, 15 bp, Homo sapiens
ggaagagggagacag

SEQ ID NO: 1660989 - DNA, 15 bp, Homo sapiens
gggaagagggagaca

SEQ ID NO: 1660990 - DNA, 15 bp, Homo sapiens
agggaagagggagac

SEQ ID NO: 1660991 - DNA, 15 bp, Homo sapiens
aagggaagagggaga

SEQ ID NO: 1660992 - DNA, 15 bp, Homo sapiens
gaagggaagagggag

SEQ ID NO: 1660993 - DNA, 15 bp, Homo sapiens
ggaagggaagaggga

SEQ ID NO: 1660994 - DNA, 15 bp, Homo sapiens
gggaagggaagaggg

SEQ ID NO: 1660995 - DNA, 15 bp, Homo sapiens
agggaagggaagagg

SEQ ID NO: 1660996 - DNA, 15 bp, Homo sapiens
gagggaagggaagag

SEQ ID NO: 1660997 - DNA, 15 bp, Homo sapiens
agagggaagggaaga

SEQ ID NO: 1660998 - DNA, 15 bp, Homo sapiens
cagagggaagggaag

SEQ ID NO: 1660999 - DNA, 15 bp, Homo sapiens
gcagagggaagggaa

SEQ ID NO: 1661000 - DNA, 15 bp, Homo sapiens
gggcagagggaaggg

SEQ ID NO: 1661001 - DNA, 15 bp, Homo sapiens
agggcagagggaagg

SEQ ID NO: 1661002 - DNA, 15 bp, Homo sapiens
cagggcagagggaag

SEQ ID NO: 1661003 - DNA, 15 bp, Homo sapiens
gcagggcagagggaa

SEQ ID NO: 1661004 - DNA, 15 bp, Homo sapiens
gggcagggcagaggg

SEQ ID NO: 1661005 - DNA, 15 bp, Homo sapiens
ggggcagggcagagg

SEQ ID NO: 1661006 - DNA, 15 bp, Homo sapiens
aggggcagggcagag

SEQ ID NO: 1661007 - DNA, 15 bp, Homo sapiens
aaggggcagggcaga

SEQ ID NO: 1661008 - DNA, 15 bp, Homo sapiens
aaaggggcagggcag

SEQ ID NO: 1661009 - DNA, 15 bp, Homo sapiens
aaaaggggcagggca

SEQ ID NO: 1661010 - DNA, 15 bp, Homo sapiens
caaaaggggcagggc

SEQ ID NO: 1661011 - DNA, 15 bp, Homo sapiens
gcaaaaggggcaggg

SEQ ID NO: 1661012 - DNA, 15 bp, Homo sapiens
ggcaaaaggggcagg

SEQ ID NO: 1661013 - DNA, 15 bp, Homo sapiens
aggcaaaaggggcag

SEQ ID NO: 1661014 - DNA, 15 bp, Homo sapiens
gaggcaaaaggggca

SEQ ID NO: 1661015 - DNA, 15 bp, Homo sapiens
agaggcaaaaggggc

SEQ ID NO: 1661016 - DNA, 15 bp, Homo sapiens
aagaggcaaaagggg

SEQ ID NO: 1661017 - DNA, 15 bp, Homo sapiens
aaagaggcaaaaggg

SEQ ID NO: 1661018 - DNA, 15 bp, Homo sapiens
caaagaggcaaaagg

SEQ ID NO: 1661019 - DNA, 15 bp, Homo sapiens
gcaaagaggcaaaag

SEQ ID NO: 1661020 - DNA, 15 bp, Homo sapiens
agcaaagaggcaaaa

SEQ ID NO: 1661021 - DNA, 15 bp, Homo sapiens
cagcaaagaggcaaa

SEQ ID NO: 1661022 - DNA, 15 bp, Homo sapiens
ccagcaaagaggcaa

SEQ ID NO: 1661023 - DNA, 15 bp, Homo sapiens
cccagcaaagaggca

SEQ ID NO: 1661024 - DNA, 15 bp, Homo sapiens
acccagcaaagaggc

SEQ ID NO: 1661025 - DNA, 15 bp, Homo sapiens
tacccagcaaagagg

SEQ ID NO: 1661026 - DNA, 15 bp, Homo sapiens
ttacccagcaaagag

SEQ ID NO: 1661027 - DNA, 15 bp, Homo sapiens
attacccagcaaaga

SEQ ID NO: 1661028 - DNA, 15 bp, Homo sapiens
cattacccagcaaag

SEQ ID NO: 1661029 - DNA, 15 bp, Homo sapiens
acattacccagcaaa

SEQ ID NO: 1661030 - DNA, 15 bp, Homo sapiens
aacattacccagcaa

SEQ ID NO: 1661031 - DNA, 15 bp, Homo sapiens
caacattacccagca

SEQ ID NO: 1661032 - DNA, 15 bp, Homo sapiens
tcaacattacccagc

SEQ ID NO: 1661033 - DNA, 15 bp, Homo sapiens
gtcaacattacccag

SEQ ID NO: 1661034 - DNA, 15 bp, Homo sapiens
ggtcaacattaccca

SEQ ID NO: 1661035 - DNA, 15 bp, Homo sapiens
tggtcaacattaccc

SEQ ID NO: 1661036 - DNA, 15 bp, Homo sapiens
ctggtcaacattacc

SEQ ID NO: 1661037 - DNA, 15 bp, Homo sapiens
tctggtcaacattac

SEQ ID NO: 1661038 - DNA, 15 bp, Homo sapiens
gtctggtcaacatta

SEQ ID NO: 1661039 - DNA, 15 bp, Homo sapiens
tgtctggtcaacatt

SEQ ID NO: 1661040 - DNA, 15 bp, Homo sapiens
ttgtctggtcaacat

SEQ ID NO: 1661041 - DNA, 15 bp, Homo sapiens
cttgtctggtcaaca

SEQ ID NO: 1661042 - DNA, 15 bp, Homo sapiens
ccttgtctggtcaac

SEQ ID NO: 1661043 - DNA, 15 bp, Homo sapiens
gccttgtctggtcaa

SEQ ID NO: 1661044 - DNA, 15 bp, Homo sapiens
ggccttgtctggtca

SEQ ID NO: 1661045 - DNA, 15 bp, Homo sapiens
gggccttgtctggtc

SEQ ID NO: 1661046 - DNA, 15 bp, Homo sapiens
agggccttgtctggt

SEQ ID NO: 1661047 - DNA, 15 bp, Homo sapiens
aagggccttgtctgg

SEQ ID NO: 1661048 - DNA, 15 bp, Homo sapiens
aaagggccttgtctg

SEQ ID NO: 1661049 - DNA, 15 bp, Homo sapiens
gaaagggccttgtct

SEQ ID NO: 1661050 - DNA, 15 bp, Homo sapiens
agaaagggccttgtc

SEQ ID NO: 1661051 - DNA, 15 bp, Homo sapiens
gagaaagggccttgt

SEQ ID NO: 1661052 - DNA, 15 bp, Homo sapiens
agagaaagggccttg

SEQ ID NO: 1661053 - DNA, 15 bp, Homo sapiens
aagagaaagggcctt

SEQ ID NO: 1661054 - DNA, 15 bp, Homo sapiens
caagagaaagggcct

SEQ ID NO: 1661055 - DNA, 15 bp, Homo sapiens
ccaagagaaagggcc

SEQ ID NO: 1661056 - DNA, 15 bp, Homo sapiens
tccaagagaaagggc

SEQ ID NO: 1661057 - DNA, 15 bp, Homo sapiens
gtccaagagaaaggg

SEQ ID NO: 1661058 - DNA, 15 bp, Homo sapiens
agtccaagagaaagg

SEQ ID NO: 1661059 - DNA, 15 bp, Homo sapiens
aagtccaagagaaag

SEQ ID NO: 1661060 - DNA, 15 bp, Homo sapiens
taagtccaagagaaa

SEQ ID NO: 1661061 - DNA, 15 bp, Homo sapiens
ttaagtccaagagaa

SEQ ID NO: 1661062 - DNA, 15 bp, Homo sapiens
tttaagtccaagaga

SEQ ID NO: 1661063 - DNA, 15 bp, Homo sapiens
gtttaagtccaagag

SEQ ID NO: 1661064 - DNA, 15 bp, Homo sapiens
tgtttaagtccaaga

SEQ ID NO: 1661065 - DNA, 15 bp, Homo sapiens
ttgtttaagtccaag

SEQ ID NO: 1661066 - DNA, 15 bp, Homo sapiens
attgtttaagtccaa

SEQ ID NO: 1661067 - DNA, 15 bp, Homo sapiens
aattgtttaagtcca

SEQ ID NO: 1661068 - DNA, 15 bp, Homo sapiens
gaattgtttaagtcc

SEQ ID NO: 1661069 - DNA, 15 bp, Homo sapiens
agaattgtttaagtc

SEQ ID NO: 1661070 - DNA, 15 bp, Homo sapiens
gagaattgtttaagt

SEQ ID NO: 1661071 - DNA, 15 bp, Homo sapiens
tgagaattgtttaag

SEQ ID NO: 1661072 - DNA, 15 bp, Homo sapiens
ctgagaattgtttaa

SEQ ID NO: 1661073 - DNA, 15 bp, Homo sapiens
actgagaattgttta

SEQ ID NO: 1661074 - DNA, 15 bp, Homo sapiens
aactgagaattgttt

SEQ ID NO: 1661075 - DNA, 15 bp, Homo sapiens
caactgagaattgtt

SEQ ID NO: 1661076 - DNA, 15 bp, Homo sapiens
gcaactgagaattgt

SEQ ID NO: 1661077 - DNA, 15 bp, Homo sapiens
tgcaactgagaattg

SEQ ID NO: 1661078 - DNA, 15 bp, Homo sapiens
gtgcaactgagaatt

SEQ ID NO: 1661079 - DNA, 15 bp, Homo sapiens
agtgcaactgagaat

SEQ ID NO: 1661080 - DNA, 15 bp, Homo sapiens
aagtgcaactgagaa

SEQ ID NO: 1661081 - DNA, 15 bp, Homo sapiens
aaagtgcaactgaga

SEQ ID NO: 1661082 - DNA, 15 bp, Homo sapiens
gaaagtgcaactgag

SEQ ID NO: 1661083 - DNA, 15 bp, Homo sapiens
ggaaagtgcaactga

SEQ ID NO: 1661084 - DNA, 15 bp, Homo sapiens
aggaaagtgcaactg

SEQ ID NO: 1661085 - DNA, 15 bp, Homo sapiens
aaggaaagtgcaact

SEQ ID NO: 1661086 - DNA, 15 bp, Homo sapiens
caaggaaagtgcaac

SEQ ID NO: 1661087 - DNA, 15 bp, Homo sapiens
ccaaggaaagtgcaa

SEQ ID NO: 1661088 - DNA, 15 bp, Homo sapiens
accaaggaaagtgca

SEQ ID NO: 1661089 - DNA, 15 bp, Homo sapiens
gaccaaggaaagtgc

SEQ ID NO: 1661090 - DNA, 15 bp, Homo sapiens
ggaccaaggaaagtg

SEQ ID NO: 1661091 - DNA, 15 bp, Homo sapiens
gggaccaaggaaagt

SEQ ID NO: 1661092 - DNA, 15 bp, Homo sapiens
tgggaccaaggaaag

SEQ ID NO: 1661093 - DNA, 15 bp, Homo sapiens
gtgggaccaaggaaa

SEQ ID NO: 1661094 - DNA, 15 bp, Homo sapiens
ggtgggaccaaggaa

SEQ ID NO: 1661095 - DNA, 15 bp, Homo sapiens
gggtgggaccaagga

SEQ ID NO: 1661096 - DNA, 15 bp, Homo sapiens
tgggtgggaccaagg

SEQ ID NO: 1661097 - DNA, 15 bp, Homo sapiens
atgggtgggaccaag

SEQ ID NO: 1661098 - DNA, 15 bp, Homo sapiens
aatgggtgggaccaa

SEQ ID NO: 1661099 - DNA, 15 bp, Homo sapiens
taatgggtgggacca

SEQ ID NO: 1661100 - DNA, 15 bp, Homo sapiens
ataatgggtgggacc

SEQ ID NO: 1661101 - DNA, 15 bp, Homo sapiens
tataatgggtgggac

SEQ ID NO: 1661102 - DNA, 15 bp, Homo sapiens
gtataatgggtggga

SEQ ID NO: 1661103 - DNA, 15 bp, Homo sapiens
tgtataatgggtggg

SEQ ID NO: 1661104 - DNA, 15 bp, Homo sapiens
atgtataatgggtgg

SEQ ID NO: 1661105 - DNA, 15 bp, Homo sapiens
catgtataatgggtg

SEQ ID NO: 1661106 - DNA, 15 bp, Homo sapiens
tcatgtataatgggt

SEQ ID NO: 1661107 - DNA, 15 bp, Homo sapiens
ttcatgtataatggg

SEQ ID NO: 1661108 - DNA, 15 bp, Homo sapiens
gttcatgtataatgg

SEQ ID NO: 1661109 - DNA, 15 bp, Homo sapiens
ggttcatgtataatg

SEQ ID NO: 1661110 - DNA, 15 bp, Homo sapiens
gggttcatgtataat

SEQ ID NO: 1661111 - DNA, 15 bp, Homo sapiens
ggggttcatgtataa

SEQ ID NO: 1661112 - DNA, 15 bp, Homo sapiens
aggggttcatgtata

SEQ ID NO: 1661113 - DNA, 15 bp, Homo sapiens
gaggggttcatgtat

SEQ ID NO: 1661114 - DNA, 15 bp, Homo sapiens
agaggggttcatgta

SEQ ID NO: 1661115 - DNA, 15 bp, Homo sapiens
tagaggggttcatgt

SEQ ID NO: 1661116 - DNA, 15 bp, Homo sapiens
gtagaggggttcatg

SEQ ID NO: 1661117 - DNA, 15 bp, Homo sapiens
agtagaggggttcat

SEQ ID NO: 1661118 - DNA, 15 bp, Homo sapiens
aagtagaggggttca

SEQ ID NO: 1661119 - DNA, 15 bp, Homo sapiens
gaagtagaggggttc

SEQ ID NO: 1661120 - DNA, 15 bp, Homo sapiens
ggaagtagaggggtt

SEQ ID NO: 1661121 - DNA, 15 bp, Homo sapiens
aggaagtagaggggt

SEQ ID NO: 1661122 - DNA, 15 bp, Homo sapiens
aaggaagtagagggg

SEQ ID NO: 1661123 - DNA, 15 bp, Homo sapiens
aaaggaagtagaggg

SEQ ID NO: 1661124 - DNA, 15 bp, Homo sapiens
gaaaggaagtagagg

SEQ ID NO: 1661125 - DNA, 15 bp, Homo sapiens
cgaaaggaagtagag

SEQ ID NO: 1661126 - DNA, 15 bp, Homo sapiens
gcgaaaggaagtaga

SEQ ID NO: 1661127 - DNA, 15 bp, Homo sapiens
tgcgaaaggaagtag

SEQ ID NO: 1661128 - DNA, 15 bp, Homo sapiens
atgcgaaaggaagta

SEQ ID NO: 1661129 - DNA, 15 bp, Homo sapiens
aatgcgaaaggaagt

SEQ ID NO: 1661130 - DNA, 15 bp, Homo sapiens
caatgcgaaaggaag

SEQ ID NO: 1661131 - DNA, 15 bp, Homo sapiens
gcaatgcgaaaggaa

SEQ ID NO: 1661132 - DNA, 15 bp, Homo sapiens
agcaatgcgaaagga

SEQ ID NO: 1661133 - DNA, 15 bp, Homo sapiens
aagcaatgcgaaagg

SEQ ID NO: 1661134 - DNA, 15 bp, Homo sapiens
gaagcaatgcgaaag

SEQ ID NO: 1661135 - DNA, 15 bp, Homo sapiens
agaagcaatgcgaaa

SEQ ID NO: 1661136 - DNA, 15 bp, Homo sapiens
cagaagcaatgcgaa

SEQ ID NO: 1661137 - DNA, 15 bp, Homo sapiens
tcagaagcaatgcga

SEQ ID NO: 1661138 - DNA, 15 bp, Homo sapiens
ctcagaagcaatgcg

SEQ ID NO: 1661139 - DNA, 15 bp, Homo sapiens
actcagaagcaatgc

SEQ ID NO: 1661140 - DNA, 15 bp, Homo sapiens
tactcagaagcaatg

SEQ ID NO: 1661141 - DNA, 15 bp, Homo sapiens
atactcagaagcaat

SEQ ID NO: 1661142 - DNA, 15 bp, Homo sapiens
catactcagaagcaa

SEQ ID NO: 1661143 - DNA, 15 bp, Homo sapiens
gcatactcagaagca

SEQ ID NO: 1661144 - DNA, 15 bp, Homo sapiens
agcatactcagaagc

SEQ ID NO: 1661145 - DNA, 15 bp, Homo sapiens
cagcatactcagaag

SEQ ID NO: 1661146 - DNA, 15 bp, Homo sapiens
tcagcatactcagaa

SEQ ID NO: 1661147 - DNA, 15 bp, Homo sapiens
gtcagcatactcaga

SEQ ID NO: 1661148 - DNA, 15 bp, Homo sapiens
agtcagcatactcag

SEQ ID NO: 1661149 - DNA, 15 bp, Homo sapiens
tagtcagcatactca

SEQ ID NO: 1661150 - DNA, 15 bp, Homo sapiens
gtagtcagcatactc

SEQ ID NO: 1661151 - DNA, 15 bp, Homo sapiens
ggtagtcagcatact

SEQ ID NO: 1661152 - DNA, 15 bp, Homo sapiens
gggtagtcagcatac

SEQ ID NO: 1661153 - DNA, 15 bp, Homo sapiens
tgggtagtcagcata

SEQ ID NO: 1661154 - DNA, 15 bp, Homo sapiens
ttgggtagtcagcat

SEQ ID NO: 1661155 - DNA, 15 bp, Homo sapiens
tttgggtagtcagca

SEQ ID NO: 1661156 - DNA, 15 bp, Homo sapiens
ctttgggtagtcagc

SEQ ID NO: 1661157 - DNA, 15 bp, Homo sapiens
gctttgggtagtcag

SEQ ID NO: 1661158 - DNA, 15 bp, Homo sapiens
ggctttgggtagtca

SEQ ID NO: 1661159 - DNA, 15 bp, Homo sapiens
gggctttgggtagtc

SEQ ID NO: 1661160 - DNA, 15 bp, Homo sapiens
ggggctttgggtagt

SEQ ID NO: 1661161 - DNA, 15 bp, Homo sapiens
aggggctttgggtag

SEQ ID NO: 1661162 - DNA, 15 bp, Homo sapiens
aaggggctttgggta

SEQ ID NO: 1661163 - DNA, 15 bp, Homo sapiens
gaaggggctttgggt

SEQ ID NO: 1661164 - DNA, 15 bp, Homo sapiens
agaaggggctttggg

SEQ ID NO: 1661165 - DNA, 15 bp, Homo sapiens
cagaaggggctttgg

SEQ ID NO: 1661166 - DNA, 15 bp, Homo sapiens
acagaaggggctttg

SEQ ID NO: 1661167 - DNA, 15 bp, Homo sapiens
cacagaaggggcttt

SEQ ID NO: 1661168 - DNA, 15 bp, Homo sapiens
acacagaaggggctt

SEQ ID NO: 1661169 - DNA, 15 bp, Homo sapiens
aacacagaaggggct

SEQ ID NO: 1661170 - DNA, 15 bp, Homo sapiens
ttaataaatgaaaga

SEQ ID NO: 1661171 - DNA, 15 bp, Homo sapiens
attaataaatgaaag

SEQ ID NO: 1661172 - DNA, 15 bp, Homo sapiens
cattaataaatgaaa

SEQ ID NO: 1661173 - DNA, 15 bp, Homo sapiens
tcattaataaatgaa

SEQ ID NO: 1661174 - DNA, 15 bp, Homo sapiens
atcattaataaatga

SEQ ID NO: 1661175 - DNA, 15 bp, Homo sapiens
gatcattaataaatg

SEQ ID NO: 1661176 - DNA, 15 bp, Homo sapiens
ggatcattaataaat

SEQ ID NO: 1661177 - DNA, 15 bp, Homo sapiens
aggatcattaataaa

SEQ ID NO: 1661178 - DNA, 15 bp, Homo sapiens
taggatcattaataa

SEQ ID NO: 1661179 - DNA, 15 bp, Homo sapiens
ctaggatcattaata

SEQ ID NO: 1661180 - DNA, 15 bp, Homo sapiens
actaggatcattaat

SEQ ID NO: 1661181 - DNA, 15 bp, Homo sapiens
aactaggatcattaa

SEQ ID NO: 1661182 - DNA, 15 bp, Homo sapiens
aaactaggatcatta

SEQ ID NO: 1661183 - DNA, 15 bp, Homo sapiens
gaaactaggatcatt

SEQ ID NO: 1661184 - DNA, 15 bp, Homo sapiens
tgaaactaggatcat

SEQ ID NO: 1661185 - DNA, 15 bp, Homo sapiens
ttgaaactaggatca

SEQ ID NO: 1661186 - DNA, 15 bp, Homo sapiens
attgaaactaggatc

SEQ ID NO: 1661187 - DNA, 15 bp, Homo sapiens
aattgaaactaggat

SEQ ID NO: 1661188 - DNA, 15 bp, Homo sapiens
taattgaaactagga

SEQ ID NO: 1661189 - DNA, 15 bp, Homo sapiens
ataattgaaactagg

SEQ ID NO: 1661190 - DNA, 15 bp, Homo sapiens
aataattgaaactag

SEQ ID NO: 1661191 - DNA, 15 bp, Homo sapiens
caataattgaaacta

SEQ ID NO: 1661192 - DNA, 15 bp, Homo sapiens
acaataattgaaact

SEQ ID NO: 1661193 - DNA, 15 bp, Homo sapiens
gacaataattgaaac

SEQ ID NO: 1661194 - DNA, 15 bp, Homo sapiens
tgacaataattgaaa

SEQ ID NO: 1661195 - DNA, 15 bp, Homo sapiens
ctgacaataattgaa

SEQ ID NO: 1661196 - DNA, 15 bp, Homo sapiens
tctgacaataattga

SEQ ID NO: 1661197 - DNA, 15 bp, Homo sapiens
atctgacaataattg

SEQ ID NO: 1661198 - DNA, 15 bp, Homo sapiens
aatctgacaataatt

SEQ ID NO: 1661199 - DNA, 15 bp, Homo sapiens
gaatctgacaataat

SEQ ID NO: 1661200 - DNA, 15 bp, Homo sapiens
agaatctgacaataa

SEQ ID NO: 1661201 - DNA, 15 bp, Homo sapiens
cagaatctgacaata

SEQ ID NO: 1661202 - DNA, 15 bp, Homo sapiens
ccagaatctgacaat

SEQ ID NO: 1661203 - DNA, 15 bp, Homo sapiens
cccagaatctgacaa

SEQ ID NO: 1661204 - DNA, 15 bp, Homo sapiens
ccccagaatctgaca

SEQ ID NO: 1661205 - DNA, 15 bp, Homo sapiens
tccccagaatctgac

SEQ ID NO: 1661206 - DNA, 15 bp, Homo sapiens
gtccccagaatctga

SEQ ID NO: 1661207 - DNA, 15 bp, Homo sapiens
tgtccccagaatctg

SEQ ID NO: 1661208 - DNA, 15 bp, Homo sapiens
ttgtccccagaatct

SEQ ID NO: 1661209 - DNA, 15 bp, Homo sapiens
cttgtccccagaatc

SEQ ID NO: 1661210 - DNA, 15 bp, Homo sapiens
tcttgtccccagaat

SEQ ID NO: 1661211 - DNA, 15 bp, Homo sapiens
ttcttgtccccagaa

SEQ ID NO: 1661212 - DNA, 15 bp, Homo sapiens
gttcttgtccccaga

SEQ ID NO: 1661213 - DNA, 15 bp, Homo sapiens
ggttcttgtccccag

SEQ ID NO: 1661214 - DNA, 15 bp, Homo sapiens
tggttcttgtcccca

SEQ ID NO: 1661215 - DNA, 15 bp, Homo sapiens
atggttcttgtcccc

SEQ ID NO: 1661216 - DNA, 15 bp, Homo sapiens
aatggttcttgtccc

SEQ ID NO: 1661217 - DNA, 15 bp, Homo sapiens
gaatggttcttgtcc

SEQ ID NO: 1661218 - DNA, 15 bp, Homo sapiens
agaatggttcttgtc

SEQ ID NO: 1661219 - DNA, 15 bp, Homo sapiens
aagaatggttcttgt

SEQ ID NO: 1661220 - DNA, 15 bp, Homo sapiens
caagaatggttcttg

SEQ ID NO: 1661221 - DNA, 15 bp, Homo sapiens
gcaagaatggttctt

SEQ ID NO: 1661222 - DNA, 15 bp, Homo sapiens
ggcaagaatggttct

SEQ ID NO: 1661223 - DNA, 15 bp, Homo sapiens
gggcaagaatggttc

SEQ ID NO: 1661224 - DNA, 15 bp, Homo sapiens
tgggcaagaatggtt

SEQ ID NO: 1661225 - DNA, 15 bp, Homo sapiens
gtgggcaagaatggt

SEQ ID NO: 1661226 - DNA, 15 bp, Homo sapiens
ggtgggcaagaatgg

SEQ ID NO: 1661227 - DNA, 15 bp, Homo sapiens
aggtgggcaagaatg

SEQ ID NO: 1661228 - DNA, 15 bp, Homo sapiens
caggtgggcaagaat

SEQ ID NO: 1661229 - DNA, 15 bp, Homo sapiens
acaggtgggcaagaa

SEQ ID NO: 1661230 - DNA, 15 bp, Homo sapiens
cacaggtgggcaaga

SEQ ID NO: 1661231 - DNA, 15 bp, Homo sapiens
acacaggtgggcaag

SEQ ID NO: 1661232 - DNA, 15 bp, Homo sapiens
aacacaggtgggcaa

SEQ ID NO: 1661233 - DNA, 15 bp, Homo sapiens
taacacaggtgggca

SEQ ID NO: 1661234 - DNA, 15 bp, Homo sapiens
gtaacacaggtgggc

SEQ ID NO: 1661235 - DNA, 15 bp, Homo sapiens
agtaacacaggtggg

SEQ ID NO: 1661236 - DNA, 15 bp, Homo sapiens
cagtaacacaggtgg

SEQ ID NO: 1661237 - DNA, 15 bp, Homo sapiens
gcagtaacacaggtg

SEQ ID NO: 1661238 - DNA, 15 bp, Homo sapiens
agcagtaacacaggt

SEQ ID NO: 1661239 - DNA, 15 bp, Homo sapiens
aagcagtaacacagg

SEQ ID NO: 1661240 - DNA, 15 bp, Homo sapiens
aaagcagtaacacag

SEQ ID NO: 1661241 - DNA, 15 bp, Homo sapiens
taaagcagtaacaca

SEQ ID NO: 1661242 - DNA, 15 bp, Homo sapiens
gtaaagcagtaacac

SEQ ID NO: 1661243 - DNA, 15 bp, Homo sapiens
agtaaagcagtaaca

SEQ ID NO: 1661244 - DNA, 15 bp, Homo sapiens
cagtaaagcagtaac

SEQ ID NO: 1661245 - DNA, 15 bp, Homo sapiens
acagtaaagcagtaa

SEQ ID NO: 1661246 - DNA, 15 bp, Homo sapiens
cacagtaaagcagta

SEQ ID NO: 1661247 - DNA, 15 bp, Homo sapiens
gcacagtaaagcagt

SEQ ID NO: 1661248 - DNA, 15 bp, Homo sapiens
tgcacagtaaagcag

SEQ ID NO: 1661249 - DNA, 15 bp, Homo sapiens
ttgcacagtaaagca

SEQ ID NO: 1661250 - DNA, 15 bp, Homo sapiens
tttgcacagtaaagc

SEQ ID NO: 1661251 - DNA, 15 bp, Homo sapiens
ttttgcacagtaaag

SEQ ID NO: 1661252 - DNA, 15 bp, Homo sapiens
attttgcacagtaaa

SEQ ID NO: 1661253 - DNA, 15 bp, Homo sapiens
tattttgcacagtaa

SEQ ID NO: 1661254 - DNA, 15 bp, Homo sapiens
gtattttgcacagta

SEQ ID NO: 1661255 - DNA, 15 bp, Homo sapiens
agtattttgcacagt

SEQ ID NO: 1661256 - DNA, 15 bp, Homo sapiens
cagtattttgcacag

SEQ ID NO: 1661257 - DNA, 15 bp, Homo sapiens
tcagtattttgcaca

SEQ ID NO: 1661258 - DNA, 15 bp, Homo sapiens
ttcagtattttgcac

SEQ ID NO: 1661259 - DNA, 15 bp, Homo sapiens
cttcagtattttgca

SEQ ID NO: 1661260 - DNA, 15 bp, Homo sapiens
ccttcagtattttgc

SEQ ID NO: 1661261 - DNA, 15 bp, Homo sapiens
gccttcagtattttg

SEQ ID NO: 1661262 - DNA, 15 bp, Homo sapiens
tgccttcagtatttt

SEQ ID NO: 1661263 - DNA, 15 bp, Homo sapiens
ttgccttcagtattt

SEQ ID NO: 1661264 - DNA, 15 bp, Homo sapiens
cttgccttcagtatt

SEQ ID NO: 1661265 - DNA, 15 bp, Homo sapiens
acttgccttcagtat

SEQ ID NO: 1661266 - DNA, 15 bp, Homo sapiens
gacttgccttcagta

SEQ ID NO: 1661267 - DNA, 15 bp, Homo sapiens
tgacttgccttcagt

SEQ ID NO: 1661268 - DNA, 15 bp, Homo sapiens
ctgacttgccttcag

SEQ ID NO: 1661269 - DNA, 15 bp, Homo sapiens
tctgacttgccttca

SEQ ID NO: 1661270 - DNA, 15 bp, Homo sapiens
gtctgacttgccttc

SEQ ID NO: 1661271 - DNA, 15 bp, Homo sapiens
ggtctgacttgcctt

SEQ ID NO: 1661272 - DNA, 15 bp, Homo sapiens
gggtctgacttgcct

SEQ ID NO: 1661273 - DNA, 15 bp, Homo sapiens
tgggtctgacttgcc

SEQ ID NO: 1661274 - DNA, 15 bp, Homo sapiens
ctgggtctgacttgc

SEQ ID NO: 1661275 - DNA, 15 bp, Homo sapiens
cctgggtctgacttg

SEQ ID NO: 1661276 - DNA, 15 bp, Homo sapiens
ccctgggtctgactt

SEQ ID NO: 1661277 - DNA, 15 bp, Homo sapiens
tccctgggtctgact

SEQ ID NO: 1661278 - DNA, 15 bp, Homo sapiens
ctccctgggtctgac

SEQ ID NO: 1661279 - DNA, 15 bp, Homo sapiens
gctccctgggtctga

SEQ ID NO: 1661280 - DNA, 15 bp, Homo sapiens
agctccctgggtctg

SEQ ID NO: 1661281 - DNA, 15 bp, Homo sapiens
cagctccctgggtct

SEQ ID NO: 1661282 - DNA, 15 bp, Homo sapiens
ccagctccctgggtc

SEQ ID NO: 1661283 - DNA, 15 bp, Homo sapiens
tccagctccctgggt

SEQ ID NO: 1661284 - DNA, 15 bp, Homo sapiens
atccagctccctggg

SEQ ID NO: 1661285 - DNA, 15 bp, Homo sapiens
aatccagctccctgg

SEQ ID NO: 1661286 - DNA, 15 bp, Homo sapiens
caatccagctccctg

SEQ ID NO: 1661287 - DNA, 15 bp, Homo sapiens
gcaatccagctccct

SEQ ID NO: 1661288 - DNA, 15 bp, Homo sapiens
ggcaatccagctccc

SEQ ID NO: 1661289 - DNA, 15 bp, Homo sapiens
tggcaatccagctcc

SEQ ID NO: 1661290 - DNA, 15 bp, Homo sapiens
atggcaatccagctc

SEQ ID NO: 1661291 - DNA, 15 bp, Homo sapiens
gatggcaatccagct

SEQ ID NO: 1661292 - DNA, 15 bp, Homo sapiens
ggatggcaatccagc

SEQ ID NO: 1661293 - DNA, 15 bp, Homo sapiens
aggatggcaatccag

SEQ ID NO: 1661294 - DNA, 15 bp, Homo sapiens
aaggatggcaatcca

SEQ ID NO: 1661295 - DNA, 15 bp, Homo sapiens
aaaggatggcaatcc

SEQ ID NO: 1661296 - DNA, 15 bp, Homo sapiens
taaaggatggcaatc

SEQ ID NO: 1661297 - DNA, 15 bp, Homo sapiens
ataaaggatggcaat

SEQ ID NO: 1661298 - DNA, 15 bp, Homo sapiens
aataaaggatggcaa

SEQ ID NO: 1661299 - DNA, 15 bp, Homo sapiens
aaataaaggatggca

SEQ ID NO: 1661300 - DNA, 15 bp, Homo sapiens
aaaataaaggatggc

SEQ ID NO: 1661301 - DNA, 15 bp, Homo sapiens
caaaataaaggatgg

SEQ ID NO: 1661302 - DNA, 15 bp, Homo sapiens
acaaaataaaggatg

SEQ ID NO: 1661303 - DNA, 15 bp, Homo sapiens
cacaaaataaaggat

SEQ ID NO: 1661304 - DNA, 15 bp, Homo sapiens
acacaaaataaagga

SEQ ID NO: 1661305 - DNA, 15 bp, Homo sapiens
aacacaaaataaagg

SEQ ID NO: 1661306 - DNA, 15 bp, Homo sapiens
aaacacaaaataaag

SEQ ID NO: 1661307 - DNA, 15 bp, Homo sapiens
gaaacacaaaataaa

SEQ ID NO: 1661308 - DNA, 15 bp, Homo sapiens
ggaaacacaaaataa

SEQ ID NO: 1661309 - DNA, 15 bp, Homo sapiens
tggaaacacaaaata

SEQ ID NO: 1661310 - DNA, 15 bp, Homo sapiens
ctggaaacacaaaat

SEQ ID NO: 1661311 - DNA, 15 bp, Homo sapiens
actggaaacacaaaa

SEQ ID NO: 1661312 - DNA, 15 bp, Homo sapiens
cactggaaacacaaa

SEQ ID NO: 1661313 - DNA, 15 bp, Homo sapiens
acactggaaacacaa

SEQ ID NO: 1661314 - DNA, 15 bp, Homo sapiens
tacactggaaacaca

SEQ ID NO: 1661315 - DNA, 15 bp, Homo sapiens
gtacactggaaacac

SEQ ID NO: 1661316 - DNA, 15 bp, Homo sapiens
tgtacactggaaaca

SEQ ID NO: 1661317 - DNA, 15 bp, Homo sapiens
gtgtacactggaaac

SEQ ID NO: 1661318 - DNA, 15 bp, Homo sapiens
agtgtacactggaaa

SEQ ID NO: 1661319 - DNA, 15 bp, Homo sapiens
tagtgtacactggaa

SEQ ID NO: 1661320 - DNA, 15 bp, Homo sapiens
atagtgtacactgga

SEQ ID NO: 1661321 - DNA, 15 bp, Homo sapiens
tatagtgtacactgg

SEQ ID NO: 1661322 - DNA, 15 bp, Homo sapiens
ttatagtgtacactg

SEQ ID NO: 1661323 - DNA, 15 bp, Homo sapiens
tttatagtgtacact

SEQ ID NO: 1661324 - DNA, 15 bp, Homo sapiens
ttttatagtgtacac

SEQ ID NO: 1661325 - DNA, 15 bp, Homo sapiens
attttatagtgtaca

SEQ ID NO: 1661326 - DNA, 15 bp, Homo sapiens
aattttatagtgtac

SEQ ID NO: 1661327 - DNA, 15 bp, Homo sapiens
caattttatagtgta

SEQ ID NO: 1661328 - DNA, 15 bp, Homo sapiens
acaattttatagtgt

SEQ ID NO: 1661329 - DNA, 15 bp, Homo sapiens
gacaattttatagtg

SEQ ID NO: 1661330 - DNA, 15 bp, Homo sapiens
agacaattttatagt

SEQ ID NO: 1661331 - DNA, 15 bp, Homo sapiens
gagacaattttatag

SEQ ID NO: 1661332 - DNA, 15 bp, Homo sapiens
ggagacaattttata

SEQ ID NO: 1661333 - DNA, 15 bp, Homo sapiens
gggagacaattttat

SEQ ID NO: 1661334 - DNA, 15 bp, Homo sapiens
ggggagacaatttta

SEQ ID NO: 1661335 - DNA, 15 bp, Homo sapiens
tggggagacaatttt

SEQ ID NO: 1661336 - DNA, 15 bp, Homo sapiens
ctggggagacaattt

SEQ ID NO: 1661337 - DNA, 15 bp, Homo sapiens
cctggggagacaatt

SEQ ID NO: 1661338 - DNA, 15 bp, Homo sapiens
tcctggggagacaat

SEQ ID NO: 1661339 - DNA, 15 bp, Homo sapiens
ttcctggggagacaa

SEQ ID NO: 1661340 - DNA, 15 bp, Homo sapiens
cttcctggggagaca

SEQ ID NO: 1661341 - DNA, 15 bp, Homo sapiens
ccttcctggggagac

SEQ ID NO: 1661342 - DNA, 15 bp, Homo sapiens
tccttcctggggaga

SEQ ID NO: 1661343 - DNA, 15 bp, Homo sapiens
ttccttcctggggag

SEQ ID NO: 1661344 - DNA, 15 bp, Homo sapiens
cttccttcctgggga

SEQ ID NO: 1661345 - DNA, 15 bp, Homo sapiens
ccttccttcctgggg

SEQ ID NO: 1661346 - DNA, 15 bp, Homo sapiens
accttccttcctggg

SEQ ID NO: 1661347 - DNA, 15 bp, Homo sapiens
aaccttccttcctgg

SEQ ID NO: 1661348 - DNA, 15 bp, Homo sapiens
caaccttccttcctg

SEQ ID NO: 1661349 - DNA, 15 bp, Homo sapiens
ccaaccttccttcct

SEQ ID NO: 1661350 - DNA, 15 bp, Homo sapiens
gccaaccttccttcc

SEQ ID NO: 1661351 - DNA, 15 bp, Homo sapiens
tgccaaccttccttc

SEQ ID NO: 1661352 - DNA, 15 bp, Homo sapiens
gtgccaaccttcctt

SEQ ID NO: 1661353 - DNA, 15 bp, Homo sapiens
agtgccaaccttcct

SEQ ID NO: 1661354 - DNA, 15 bp, Homo sapiens
aagtgccaaccttcc

SEQ ID NO: 1661355 - DNA, 15 bp, Homo sapiens
aaagtgccaaccttc

SEQ ID NO: 1661356 - DNA, 15 bp, Homo sapiens
gaaagtgccaacctt

SEQ ID NO: 1661357 - DNA, 15 bp, Homo sapiens
agaaagtgccaacct

SEQ ID NO: 1661358 - DNA, 15 bp, Homo sapiens
gagaaagtgccaacc

SEQ ID NO: 1661359 - DNA, 15 bp, Homo sapiens
agagaaagtgccaac

SEQ ID NO: 1661360 - DNA, 15 bp, Homo sapiens
cagagaaagtgccaa

SEQ ID NO: 1661361 - DNA, 15 bp, Homo sapiens
gcagagaaagtgcca

SEQ ID NO: 1661362 - DNA, 15 bp, Homo sapiens
tgcagagaaagtgcc

SEQ ID NO: 1661363 - DNA, 15 bp, Homo sapiens
atgcagagaaagtgc

SEQ ID NO: 1661364 - DNA, 15 bp, Homo sapiens
aatgcagagaaagtg

SEQ ID NO: 1661365 - DNA, 15 bp, Homo sapiens
gaatgcagagaaagt

SEQ ID NO: 1661366 - DNA, 15 bp, Homo sapiens
agaatgcagagaaag

SEQ ID NO: 1661367 - DNA, 15 bp, Homo sapiens
aagaatgcagagaaa

SEQ ID NO: 1661368 - DNA, 15 bp, Homo sapiens
gaagaatgcagagaa

SEQ ID NO: 1661369 - DNA, 15 bp, Homo sapiens
agaagaatgcagaga

SEQ ID NO: 1661370 - DNA, 15 bp, Homo sapiens
aagaagaatgcagag

SEQ ID NO: 1661371 - DNA, 15 bp, Homo sapiens
aaagaagaatgcaga

SEQ ID NO: 1661372 - DNA, 15 bp, Homo sapiens
gaaagaagaatgcag

SEQ ID NO: 1661373 - DNA, 15 bp, Homo sapiens
ggaaagaagaatgca

SEQ ID NO: 1661374 - DNA, 15 bp, Homo sapiens
tggaaagaagaatgc

SEQ ID NO: 1661375 - DNA, 15 bp, Homo sapiens
ctggaaagaagaatg

SEQ ID NO: 1661376 - DNA, 15 bp, Homo sapiens
tctggaaagaagaat

SEQ ID NO: 1661377 - DNA, 15 bp, Homo sapiens
ctctggaaagaagaa

SEQ ID NO: 1661378 - DNA, 15 bp, Homo sapiens
gctctggaaagaaga

SEQ ID NO: 1661379 - DNA, 15 bp, Homo sapiens
tgctctggaaagaag

SEQ ID NO: 1661380 - DNA, 15 bp, Homo sapiens
ctgctctggaaagaa

SEQ ID NO: 1661381 - DNA, 15 bp, Homo sapiens
tctgctctggaaaga

SEQ ID NO: 1661382 - DNA, 15 bp, Homo sapiens
atctgctctggaaag

SEQ ID NO: 1661383 - DNA, 15 bp, Homo sapiens
aatctgctctggaaa

SEQ ID NO: 1661384 - DNA, 15 bp, Homo sapiens
caatctgctctggaa

SEQ ID NO: 1661385 - DNA, 15 bp, Homo sapiens
gcaatctgctctgga

SEQ ID NO: 1661386 - DNA, 15 bp, Homo sapiens
ggcaatctgctctgg

SEQ ID NO: 1661387 - DNA, 15 bp, Homo sapiens
aggcaatctgctctg

SEQ ID NO: 1661388 - DNA, 15 bp, Homo sapiens
caggcaatctgctct

SEQ ID NO: 1661389 - DNA, 15 bp, Homo sapiens
ccaggcaatctgctc

SEQ ID NO: 1661390 - DNA, 15 bp, Homo sapiens
accaggcaatctgct

SEQ ID NO: 1661391 - DNA, 15 bp, Homo sapiens
aaccaggcaatctgc

SEQ ID NO: 1661392 - DNA, 15 bp, Homo sapiens
taaccaggcaatctg

SEQ ID NO: 1661393 - DNA, 15 bp, Homo sapiens
ttaaccaggcaatct

SEQ ID NO: 1661394 - DNA, 15 bp, Homo sapiens
cttaaccaggcaatc

SEQ ID NO: 1661395 - DNA, 15 bp, Homo sapiens
tcttaaccaggcaat

SEQ ID NO: 1661396 - DNA, 15 bp, Homo sapiens
ttcttaaccaggcaa

SEQ ID NO: 1661397 - DNA, 15 bp, Homo sapiens
attcttaaccaggca

SEQ ID NO: 1661398 - DNA, 15 bp, Homo sapiens
gattcttaaccaggc

SEQ ID NO: 1661399 - DNA, 15 bp, Homo sapiens
agattcttaaccagg

SEQ ID NO: 1661400 - DNA, 15 bp, Homo sapiens
gagattcttaaccag

SEQ ID NO: 1661401 - DNA, 15 bp, Homo sapiens
agagattcttaacca

SEQ ID NO: 1661402 - DNA, 15 bp, Homo sapiens
aagagattcttaacc

SEQ ID NO: 1661403 - DNA, 15 bp, Homo sapiens
caagagattcttaac

SEQ ID NO: 1661404 - DNA, 15 bp, Homo sapiens
acaagagattcttaa

SEQ ID NO: 1661405 - DNA, 15 bp, Homo sapiens
aacaagagattctta

SEQ ID NO: 1661406 - DNA, 15 bp, Homo sapiens
caacaagagattctt

SEQ ID NO: 1661407 - DNA, 15 bp, Homo sapiens
acaacaagagattct

SEQ ID NO: 1661408 - DNA, 15 bp, Homo sapiens
gacaacaagagattc

SEQ ID NO: 1661409 - DNA, 15 bp, Homo sapiens
ggacaacaagagatt

SEQ ID NO: 1661410 - DNA, 15 bp, Homo sapiens
gggacaacaagagat

SEQ ID NO: 1661411 - DNA, 15 bp, Homo sapiens
ggggacaacaagaga

SEQ ID NO: 1661412 - DNA, 15 bp, Homo sapiens
aggggacaacaagag

SEQ ID NO: 1661413 - DNA, 15 bp, Homo sapiens
aaggggacaacaaga

SEQ ID NO: 1661414 - DNA, 15 bp, Homo sapiens
aaaggggacaacaag

SEQ ID NO: 1661415 - DNA, 15 bp, Homo sapiens
caaaggggacaacaa

SEQ ID NO: 1661416 - DNA, 15 bp, Homo sapiens
acaaaggggacaaca

SEQ ID NO: 1661417 - DNA, 15 bp, Homo sapiens
tacaaaggggacaac

SEQ ID NO: 1661418 - DNA, 15 bp, Homo sapiens
atacaaaggggacaa

SEQ ID NO: 1661419 - DNA, 15 bp, Homo sapiens
tatacaaaggggaca

SEQ ID NO: 1661420 - DNA, 15 bp, Homo sapiens
ttactataattaaat

SEQ ID NO: 1661421 - DNA, 15 bp, Homo sapiens
attactataattaaa

SEQ ID NO: 1661422 - DNA, 15 bp, Homo sapiens
tattactataattaa

SEQ ID NO: 1661423 - DNA, 15 bp, Homo sapiens
ttattactataatta

SEQ ID NO: 1661424 - DNA, 15 bp, Homo sapiens
attattactataatt

SEQ ID NO: 1661425 - DNA, 15 bp, Homo sapiens
aattattactataat

SEQ ID NO: 1661426 - DNA, 15 bp, Homo sapiens
aaattattactataa

SEQ ID NO: 1661427 - DNA, 15 bp, Homo sapiens
caaattattactata

SEQ ID NO: 1661428 - DNA, 15 bp, Homo sapiens
tcaaattattactat

SEQ ID NO: 1661429 - DNA, 15 bp, Homo sapiens
ttcaaattattacta

SEQ ID NO: 1661430 - DNA, 15 bp, Homo sapiens
cttcaaattattact

SEQ ID NO: 1661431 - DNA, 15 bp, Homo sapiens
acttcaaattattac

SEQ ID NO: 1661432 - DNA, 15 bp, Homo sapiens
tacttcaaattatta

SEQ ID NO: 1661433 - DNA, 15 bp, Homo sapiens
ctacttcaaattatt

SEQ ID NO: 1661434 - DNA, 15 bp, Homo sapiens
actacttcaaattat

SEQ ID NO: 1661435 - DNA, 15 bp, Homo sapiens
aactacttcaaatta

SEQ ID NO: 1661436 - DNA, 15 bp, Homo sapiens
aaactacttcaaatt

SEQ ID NO: 1661437 - DNA, 15 bp, Homo sapiens
caaactacttcaaat

SEQ ID NO: 1661438 - DNA, 15 bp, Homo sapiens
tcaaactacttcaaa

SEQ ID NO: 1661439 - DNA, 15 bp, Homo sapiens
ttcaaactacttcaa

SEQ ID NO: 1661440 - DNA, 15 bp, Homo sapiens
cttcaaactacttca

SEQ ID NO: 1661441 - DNA, 15 bp, Homo sapiens
acttcaaactacttc

SEQ ID NO: 1661442 - DNA, 15 bp, Homo sapiens
tacttcaaactactt

SEQ ID NO: 1661443 - DNA, 15 bp, Homo sapiens
gtacttcaaactact

SEQ ID NO: 1661444 - DNA, 15 bp, Homo sapiens
ggtacttcaaactac

SEQ ID NO: 1661445 - DNA, 15 bp, Homo sapiens
tggtacttcaaacta

SEQ ID NO: 1661446 - DNA, 15 bp, Homo sapiens
gtggtacttcaaact

SEQ ID NO: 1661447 - DNA, 15 bp, Homo sapiens
tgtggtacttcaaac

SEQ ID NO: 1661448 - DNA, 15 bp, Homo sapiens
gtgtggtacttcaaa

SEQ ID NO: 1661449 - DNA, 15 bp, Homo sapiens
agtgtggtacttcaa

SEQ ID NO: 1661450 - DNA, 15 bp, Homo sapiens
cagtgtggtacttca

SEQ ID NO: 1661451 - DNA, 15 bp, Homo sapiens
tcagtgtggtacttc

SEQ ID NO: 1661452 - DNA, 15 bp, Homo sapiens
ctcagtgtggtactt

SEQ ID NO: 1661453 - DNA, 15 bp, Homo sapiens
cctcagtgtggtact

SEQ ID NO: 1661454 - DNA, 15 bp, Homo sapiens
acctcagtgtggtac

SEQ ID NO: 1661455 - DNA, 15 bp, Homo sapiens
cacctcagtgtggta

SEQ ID NO: 1661456 - DNA, 15 bp, Homo sapiens
tcacctcagtgtggt

SEQ ID NO: 1661457 - DNA, 15 bp, Homo sapiens
ctcacctcagtgtgg

SEQ ID NO: 1661458 - DNA, 15 bp, Homo sapiens
cctcacctcagtgtg

SEQ ID NO: 1661459 - DNA, 15 bp, Homo sapiens
tcctcacctcagtgt

SEQ ID NO: 1661460 - DNA, 15 bp, Homo sapiens
gtcctcacctcagtg

SEQ ID NO: 1661461 - DNA, 15 bp, Homo sapiens
agtcctcacctcagt

SEQ ID NO: 1661462 - DNA, 15 bp, Homo sapiens
aagtcctcacctcag

SEQ ID NO: 1661463 - DNA, 15 bp, Homo sapiens
taagtcctcacctca

SEQ ID NO: 1661464 - DNA, 15 bp, Homo sapiens
ttaagtcctcacctc

SEQ ID NO: 1661465 - DNA, 15 bp, Homo sapiens
tttaagtcctcacct

SEQ ID NO: 1661466 - DNA, 15 bp, Homo sapiens
ttttaagtcctcacc

SEQ ID NO: 1661467 - DNA, 15 bp, Homo sapiens
tttttaagtcctcac

SEQ ID NO: 1661468 - DNA, 15 bp, Homo sapiens
atttttaagtcctca

SEQ ID NO: 1661469 - DNA, 15 bp, Homo sapiens
catttttaagtcctc

SEQ ID NO: 1661470 - DNA, 15 bp, Homo sapiens
tcatttttaagtcct

SEQ ID NO: 1661471 - DNA, 15 bp, Homo sapiens
atcatttttaagtcc

SEQ ID NO: 1661472 - DNA, 15 bp, Homo sapiens
tatcatttttaagtc

SEQ ID NO: 1661473 - DNA, 15 bp, Homo sapiens
ttatcatttttaagt

SEQ ID NO: 1661474 - DNA, 15 bp, Homo sapiens
cttatcatttttaag

SEQ ID NO: 1661475 - DNA, 15 bp, Homo sapiens
tcttatcatttttaa

SEQ ID NO: 1661476 - DNA, 15 bp, Homo sapiens
gtcttatcattttta

SEQ ID NO: 1661477 - DNA, 15 bp, Homo sapiens
cgtcttatcattttt

SEQ ID NO: 1661478 - DNA, 15 bp, Homo sapiens
tcgtcttatcatttt

SEQ ID NO: 1661479 - DNA, 15 bp, Homo sapiens
ctcgtcttatcattt

SEQ ID NO: 1661480 - DNA, 15 bp, Homo sapiens
actcgtcttatcatt

SEQ ID NO: 1661481 - DNA, 15 bp, Homo sapiens
aactcgtcttatcat

SEQ ID NO: 1661482 - DNA, 15 bp, Homo sapiens
gaactcgtcttatca

SEQ ID NO: 1661483 - DNA, 15 bp, Homo sapiens
ggaactcgtcttatc

SEQ ID NO: 1661484 - DNA, 15 bp, Homo sapiens
gggaactcgtcttat

SEQ ID NO: 1661485 - DNA, 15 bp, Homo sapiens
agggaactcgtctta

SEQ ID NO: 1661486 - DNA, 15 bp, Homo sapiens
tagggaactcgtctt

SEQ ID NO: 1661487 - DNA, 15 bp, Homo sapiens
atagggaactcgtct

SEQ ID NO: 1661488 - DNA, 15 bp, Homo sapiens
aatagggaactcgtc

SEQ ID NO: 1661489 - DNA, 15 bp, Homo sapiens
aaatagggaactcgt

SEQ ID NO: 1661490 - DNA, 15 bp, Homo sapiens
aaaatagggaactcg

SEQ ID NO: 1661491 - DNA, 15 bp, Homo sapiens
taaaatagggaactc

SEQ ID NO: 1661492 - DNA, 15 bp, Homo sapiens
ataaaatagggaact

SEQ ID NO: 1661493 - DNA, 15 bp, Homo sapiens
tataaaatagggaac

SEQ ID NO: 1661494 - DNA, 15 bp, Homo sapiens
ttataaaatagggaa

SEQ ID NO: 1661495 - DNA, 15 bp, Homo sapiens
cttataaaataggga

SEQ ID NO: 1661496 - DNA, 15 bp, Homo sapiens
tcttataaaataggg

SEQ ID NO: 1661497 - DNA, 15 bp, Homo sapiens
ttcttataaaatagg

SEQ ID NO: 1661498 - DNA, 15 bp, Homo sapiens
tttcttataaaatag

SEQ ID NO: 1661499 - DNA, 15 bp, Homo sapiens
ttttcttataaaata

SEQ ID NO: 1661500 - DNA, 15 bp, Homo sapiens
tttttcttataaaat

SEQ ID NO: 1661501 - DNA, 15 bp, Homo sapiens
atttttcttataaaa

SEQ ID NO: 1661502 - DNA, 15 bp, Homo sapiens
tatttttcttataaa

SEQ ID NO: 1661503 - DNA, 15 bp, Homo sapiens
ttatttttcttataa

SEQ ID NO: 1661504 - DNA, 15 bp, Homo sapiens
cttatttttcttata

SEQ ID NO: 1661505 - DNA, 15 bp, Homo sapiens
gcttatttttcttat

SEQ ID NO: 1661506 - DNA, 15 bp, Homo sapiens
ggcttatttttctta

SEQ ID NO: 1661507 - DNA, 15 bp, Homo sapiens
tggcttatttttctt

SEQ ID NO: 1661508 - DNA, 15 bp, Homo sapiens
ttggcttatttttct

SEQ ID NO: 1661509 - DNA, 15 bp, Homo sapiens
tttggcttatttttc

SEQ ID NO: 1661510 - DNA, 15 bp, Homo sapiens
ttttggcttattttt

SEQ ID NO: 1661511 - DNA, 15 bp, Homo sapiens
attttggcttatttt

SEQ ID NO: 1661512 - DNA, 15 bp, Homo sapiens
aattttggcttattt

SEQ ID NO: 1661513 - DNA, 15 bp, Homo sapiens
taattttggcttatt

SEQ ID NO: 1661514 - DNA, 15 bp, Homo sapiens
ttaattttggcttat

SEQ ID NO: 1661515 - DNA, 15 bp, Homo sapiens
tttaattttggctta

SEQ ID NO: 1661516 - DNA, 15 bp, Homo sapiens
atttaattttggctt

SEQ ID NO: 1661517 - DNA, 15 bp, Homo sapiens
tatttaattttggct

SEQ ID NO: 1661518 - DNA, 15 bp, Homo sapiens
atatttaattttggc

SEQ ID NO: 1661519 - DNA, 15 bp, Homo sapiens
aatatttaattttgg

SEQ ID NO: 1661520 - DNA, 15 bp, Homo sapiens
gaatatttaattttg

SEQ ID NO: 1661521 - DNA, 15 bp, Homo sapiens
agaatatttaatttt

SEQ ID NO: 1661522 - DNA, 15 bp, Homo sapiens
aagaatatttaattt

SEQ ID NO: 1661523 - DNA, 15 bp, Homo sapiens
aaagaatatttaatt

SEQ ID NO: 1661524 - DNA, 15 bp, Homo sapiens
aaaagaatatttaat

SEQ ID NO: 1661525 - DNA, 15 bp, Homo sapiens
caaaagaatatttaa

SEQ ID NO: 1661526 - DNA, 15 bp, Homo sapiens
ccaaaagaatattta

SEQ ID NO: 1661527 - DNA, 15 bp, Homo sapiens
tccaaaagaatattt

SEQ ID NO: 1661528 - DNA, 15 bp, Homo sapiens
atccaaaagaatatt

SEQ ID NO: 1661529 - DNA, 15 bp, Homo sapiens
tatccaaaagaatat

SEQ ID NO: 1661530 - DNA, 15 bp, Homo sapiens
atatccaaaagaata

SEQ ID NO: 1661531 - DNA, 15 bp, Homo sapiens
ttatatccaaaagaa

SEQ ID NO: 1661532 - DNA, 15 bp, Homo sapiens
tttatatccaaaaga

SEQ ID NO: 1661533 - DNA, 15 bp, Homo sapiens
atttatatccaaaag

SEQ ID NO: 1661534 - DNA, 15 bp, Homo sapiens
aatttatatccaaaa

SEQ ID NO: 1661535 - DNA, 15 bp, Homo sapiens
aaatttatatccaaa

SEQ ID NO: 1661536 - DNA, 15 bp, Homo sapiens
gaaatttatatccaa

SEQ ID NO: 1661537 - DNA, 15 bp, Homo sapiens
tgaaatttatatcca

SEQ ID NO: 1661538 - DNA, 15 bp, Homo sapiens
ttgaaatttatatcc

SEQ ID NO: 1661539 - DNA, 15 bp, Homo sapiens
gttgaaatttatatc

SEQ ID NO: 1661540 - DNA, 15 bp, Homo sapiens
tgttgaaatttatat

SEQ ID NO: 1661541 - DNA, 15 bp, Homo sapiens
ctgttgaaatttata

SEQ ID NO: 1661542 - DNA, 15 bp, Homo sapiens
actgttgaaatttat

SEQ ID NO: 1661543 - DNA, 15 bp, Homo sapiens
cactgttgaaattta

SEQ ID NO: 1661544 - DNA, 15 bp, Homo sapiens
tcactgttgaaattt

SEQ ID NO: 1661545 - DNA, 15 bp, Homo sapiens
ctcactgttgaaatt

SEQ ID NO: 1661546 - DNA, 15 bp, Homo sapiens
tctcactgttgaaat

SEQ ID NO: 1661547 - DNA, 15 bp, Homo sapiens
atctcactgttgaaa

SEQ ID NO: 1661548 - DNA, 15 bp, Homo sapiens
tatctcactgttgaa

SEQ ID NO: 1661549 - DNA, 15 bp, Homo sapiens
ctatctcactgttga

SEQ ID NO: 1661550 - DNA, 15 bp, Homo sapiens
gctatctcactgttg

SEQ ID NO: 1661551 - DNA, 15 bp, Homo sapiens
agctatctcactgtt

SEQ ID NO: 1661552 - DNA, 15 bp, Homo sapiens
cagctatctcactgt

SEQ ID NO: 1661553 - DNA, 15 bp, Homo sapiens
gcagctatctcactg

SEQ ID NO: 1661554 - DNA, 15 bp, Homo sapiens
ggcagctatctcact

SEQ ID NO: 1661555 - DNA, 15 bp, Homo sapiens
aggcagctatctcac

SEQ ID NO: 1661556 - DNA, 15 bp, Homo sapiens
taggcagctatctca

SEQ ID NO: 1661557 - DNA, 15 bp, Homo sapiens
ctaggcagctatctc

SEQ ID NO: 1661558 - DNA, 15 bp, Homo sapiens
actaggcagctatct

SEQ ID NO: 1661559 - DNA, 15 bp, Homo sapiens
cactaggcagctatc

SEQ ID NO: 1661560 - DNA, 15 bp, Homo sapiens
ccactaggcagctat

SEQ ID NO: 1661561 - DNA, 15 bp, Homo sapiens
tccactaggcagcta

SEQ ID NO: 1661562 - DNA, 15 bp, Homo sapiens
ttccactaggcagct

SEQ ID NO: 1661563 - DNA, 15 bp, Homo sapiens
tttccactaggcagc

SEQ ID NO: 1661564 - DNA, 15 bp, Homo sapiens
atttccactaggcag

SEQ ID NO: 1661565 - DNA, 15 bp, Homo sapiens
catttccactaggca

SEQ ID NO: 1661566 - DNA, 15 bp, Homo sapiens
tcatttccactaggc

SEQ ID NO: 1661567 - DNA, 15 bp, Homo sapiens
ttcatttccactagg

SEQ ID NO: 1661568 - DNA, 15 bp, Homo sapiens
attcatttccactag

SEQ ID NO: 1661569 - DNA, 15 bp, Homo sapiens
tattcatttccacta

SEQ ID NO: 1661570 - DNA, 15 bp, Homo sapiens
ttattcatttccact

SEQ ID NO: 1661571 - DNA, 15 bp, Homo sapiens
attattcatttccac

SEQ ID NO: 1661572 - DNA, 15 bp, Homo sapiens
tattattcatttcca

SEQ ID NO: 1661573 - DNA, 15 bp, Homo sapiens
atattattcatttcc

SEQ ID NO: 1661574 - DNA, 15 bp, Homo sapiens
gatattattcatttc

SEQ ID NO: 1661575 - DNA, 15 bp, Homo sapiens
ggatattattcattt

SEQ ID NO: 1661576 - DNA, 15 bp, Homo sapiens
gggatattattcatt

SEQ ID NO: 1661577 - DNA, 15 bp, Homo sapiens
tgggatattattcat

SEQ ID NO: 1661578 - DNA, 15 bp, Homo sapiens
ctgggatattattca

SEQ ID NO: 1661579 - DNA, 15 bp, Homo sapiens
gctgggatattattc

SEQ ID NO: 1661580 - DNA, 15 bp, Homo sapiens
ggctgggatattatt

SEQ ID NO: 1661581 - DNA, 15 bp, Homo sapiens
tggctgggatattat

SEQ ID NO: 1661582 - DNA, 15 bp, Homo sapiens
gtggctgggatatta

SEQ ID NO: 1661583 - DNA, 15 bp, Homo sapiens
agtggctgggatatt

SEQ ID NO: 1661584 - DNA, 15 bp, Homo sapiens
tagtggctgggatat

SEQ ID NO: 1661585 - DNA, 15 bp, Homo sapiens
ctagtggctgggata

SEQ ID NO: 1661586 - DNA, 15 bp, Homo sapiens
actagtggctgggat

SEQ ID NO: 1661587 - DNA, 15 bp, Homo sapiens
cactagtggctggga

SEQ ID NO: 1661588 - DNA, 15 bp, Homo sapiens
acactagtggctggg

SEQ ID NO: 1661589 - DNA, 15 bp, Homo sapiens
tacactagtggctgg

SEQ ID NO: 1661590 - DNA, 15 bp, Homo sapiens
gtacactagtggctg

SEQ ID NO: 1661591 - DNA, 15 bp, Homo sapiens
tgtacactagtggct

SEQ ID NO: 1661592 - DNA, 15 bp, Homo sapiens
ctgtacactagtggc

SEQ ID NO: 1661593 - DNA, 15 bp, Homo sapiens
cctgtacactagtgg

SEQ ID NO: 1661594 - DNA, 15 bp, Homo sapiens
ccctgtacactagtg

SEQ ID NO: 1661595 - DNA, 15 bp, Homo sapiens
accctgtacactagt

SEQ ID NO: 1661596 - DNA, 15 bp, Homo sapiens
caccctgtacactag

SEQ ID NO: 1661597 - DNA, 15 bp, Homo sapiens
acaccctgtacacta

SEQ ID NO: 1661598 - DNA, 15 bp, Homo sapiens
aacaccctgtacact

SEQ ID NO: 1661599 - DNA, 15 bp, Homo sapiens
aaacaccctgtacac

SEQ ID NO: 1661600 - DNA, 15 bp, Homo sapiens
aaaacaccctgtaca

SEQ ID NO: 1661601 - DNA, 15 bp, Homo sapiens
caaaacaccctgtac

SEQ ID NO: 1661602 - DNA, 15 bp, Homo sapiens
acaaaacaccctgta

SEQ ID NO: 1661603 - DNA, 15 bp, Homo sapiens
cacaaaacaccctgt

SEQ ID NO: 1661604 - DNA, 15 bp, Homo sapiens
ccacaaaacaccctg

SEQ ID NO: 1661605 - DNA, 15 bp, Homo sapiens
gccacaaaacaccct

SEQ ID NO: 1661606 - DNA, 15 bp, Homo sapiens
tgccacaaaacaccc

SEQ ID NO: 1661607 - DNA, 15 bp, Homo sapiens
gtgccacaaaacacc

SEQ ID NO: 1661608 - DNA, 15 bp, Homo sapiens
tgtgccacaaaacac

SEQ ID NO: 1661609 - DNA, 15 bp, Homo sapiens
ctgtgccacaaaaca

SEQ ID NO: 1661610 - DNA, 15 bp, Homo sapiens
cctgtgccacaaaac

SEQ ID NO: 1661611 - DNA, 15 bp, Homo sapiens
tcctgtgccacaaaa

SEQ ID NO: 1661612 - DNA, 15 bp, Homo sapiens
atcctgtgccacaaa

SEQ ID NO: 1661613 - DNA, 15 bp, Homo sapiens
aatcctgtgccacaa

SEQ ID NO: 1661614 - DNA, 15 bp, Homo sapiens
taatcctgtgccaca

SEQ ID NO: 1661615 - DNA, 15 bp, Homo sapiens
ataatcctgtgccac

SEQ ID NO: 1661616 - DNA, 15 bp, Homo sapiens
cataatcctgtgcca

SEQ ID NO: 1661617 - DNA, 15 bp, Homo sapiens
acataatcctgtgcc

SEQ ID NO: 1661618 - DNA, 15 bp, Homo sapiens
tacataatcctgtgc

SEQ ID NO: 1661619 - DNA, 15 bp, Homo sapiens
ttacataatcctgtg

SEQ ID NO: 1661620 - DNA, 15 bp, Homo sapiens
attacataatcctgt

SEQ ID NO: 1661621 - DNA, 15 bp, Homo sapiens
tattacataatcctg

SEQ ID NO: 1661622 - DNA, 15 bp, Homo sapiens
atattacataatcct

SEQ ID NO: 1661623 - DNA, 15 bp, Homo sapiens
catattacataatcc

SEQ ID NO: 1661624 - DNA, 15 bp, Homo sapiens
ccatattacataatc

SEQ ID NO: 1661625 - DNA, 15 bp, Homo sapiens
tccatattacataat

SEQ ID NO: 1661626 - DNA, 15 bp, Homo sapiens
ttccatattacataa

SEQ ID NO: 1661627 - DNA, 15 bp, Homo sapiens
gttccatattacata

SEQ ID NO: 1661628 - DNA, 15 bp, Homo sapiens
agttccatattacat

SEQ ID NO: 1661629 - DNA, 15 bp, Homo sapiens
cagttccatattaca

SEQ ID NO: 1661630 - DNA, 15 bp, Homo sapiens
gcagttccatattac

SEQ ID NO: 1661631 - DNA, 15 bp, Homo sapiens
agcagttccatatta

SEQ ID NO: 1661632 - DNA, 15 bp, Homo sapiens
gagcagttccatatt

SEQ ID NO: 1661633 - DNA, 15 bp, Homo sapiens
tgagcagttccatat

SEQ ID NO: 1661634 - DNA, 15 bp, Homo sapiens
ttgagcagttccata

SEQ ID NO: 1661635 - DNA, 15 bp, Homo sapiens
cttgagcagttccat

SEQ ID NO: 1661636 - DNA, 15 bp, Homo sapiens
gcttgagcagttcca

SEQ ID NO: 1661637 - DNA, 15 bp, Homo sapiens
tgcttgagcagttcc

SEQ ID NO: 1661638 - DNA, 15 bp, Homo sapiens
ttgcttgagcagttc

SEQ ID NO: 1661639 - DNA, 15 bp, Homo sapiens
tttgcttgagcagtt

SEQ ID NO: 1661640 - DNA, 15 bp, Homo sapiens
atttgcttgagcagt

SEQ ID NO: 1661641 - DNA, 15 bp, Homo sapiens
tatttgcttgagcag

SEQ ID NO: 1661642 - DNA, 15 bp, Homo sapiens
ttatttgcttgagca

SEQ ID NO: 1661643 - DNA, 15 bp, Homo sapiens
gttatttgcttgagc

SEQ ID NO: 1661644 - DNA, 15 bp, Homo sapiens
agttatttgcttgag

SEQ ID NO: 1661645 - DNA, 15 bp, Homo sapiens
tagttatttgcttga

SEQ ID NO: 1661646 - DNA, 15 bp, Homo sapiens
ctagttatttgcttg

SEQ ID NO: 1661647 - DNA, 15 bp, Homo sapiens
actagttatttgctt

SEQ ID NO: 1661648 - DNA, 15 bp, Homo sapiens
gactagttatttgct

SEQ ID NO: 1661649 - DNA, 15 bp, Homo sapiens
atgactagttatttg

SEQ ID NO: 1661650 - DNA, 15 bp, Homo sapiens
gatgactagttattt

SEQ ID NO: 1661651 - DNA, 15 bp, Homo sapiens
tgatgactagttatt

SEQ ID NO: 1661652 - DNA, 15 bp, Homo sapiens
gtgatgactagttat

SEQ ID NO: 1661653 - DNA, 15 bp, Homo sapiens
tgtgatgactagtta

SEQ ID NO: 1661654 - DNA, 15 bp, Homo sapiens
ttgtgatgactagtt

SEQ ID NO: 1661655 - DNA, 15 bp, Homo sapiens
gttgtgatgactagt

SEQ ID NO: 1661656 - DNA, 15 bp, Homo sapiens
tgttgtgatgactag

SEQ ID NO: 1661657 - DNA, 15 bp, Homo sapiens
ctgttgtgatgacta

SEQ ID NO: 1661658 - DNA, 15 bp, Homo sapiens
gctgttgtgatgact

SEQ ID NO: 1661659 - DNA, 15 bp, Homo sapiens
tgctgttgtgatgac

SEQ ID NO: 1661660 - DNA, 15 bp, Homo sapiens
ctgctgttgtgatga

SEQ ID NO: 1661661 - DNA, 15 bp, Homo sapiens
actgctgttgtgatg

SEQ ID NO: 1661662 - DNA, 15 bp, Homo sapiens
aactgctgttgtgat

SEQ ID NO: 1661663 - DNA, 15 bp, Homo sapiens
gaactgctgttgtga

SEQ ID NO: 1661664 - DNA, 15 bp, Homo sapiens
agaactgctgttgtg

SEQ ID NO: 1661665 - DNA, 15 bp, Homo sapiens
aagaactgctgttgt

SEQ ID NO: 1661666 - DNA, 15 bp, Homo sapiens
aaagaactgctgttg

SEQ ID NO: 1661667 - DNA, 15 bp, Homo sapiens
caaagaactgctgtt

SEQ ID NO: 1661668 - DNA, 15 bp, Homo sapiens
acaaagaactgctgt

SEQ ID NO: 1661669 - DNA, 15 bp, Homo sapiens
tacaaagaactgctg

SEQ ID NO: 1661670 - DNA, 15 bp, Homo sapiens
ttacaaagaactgct

SEQ ID NO: 1661671 - DNA, 15 bp, Homo sapiens
attacaaagaactgc

SEQ ID NO: 1661672 - DNA, 15 bp, Homo sapiens
tattacaaagaactg

SEQ ID NO: 1661673 - DNA, 15 bp, Homo sapiens
ttattacaaagaact

SEQ ID NO: 1661674 - DNA, 15 bp, Homo sapiens
gttattacaaagaac

SEQ ID NO: 1661675 - DNA, 15 bp, Homo sapiens
agttattacaaagaa

SEQ ID NO: 1661676 - DNA, 15 bp, Homo sapiens
cagttattacaaaga

SEQ ID NO: 1661677 - DNA, 15 bp, Homo sapiens
tcagttattacaaag

SEQ ID NO: 1661678 - DNA, 15 bp, Homo sapiens
ttcagttattacaaa

SEQ ID NO: 1661679 - DNA, 15 bp, Homo sapiens
tttcagttattacaa

SEQ ID NO: 1661680 - DNA, 15 bp, Homo sapiens
ttttcagttattaca

SEQ ID NO: 1661681 - DNA, 15 bp, Homo sapiens
tttttcagttattac

SEQ ID NO: 1661682 - DNA, 15 bp, Homo sapiens
ctttttcagttatta

SEQ ID NO: 1661683 - DNA, 15 bp, Homo sapiens
tctttttcagttatt

SEQ ID NO: 1661684 - DNA, 15 bp, Homo sapiens
ttctttttcagttat

SEQ ID NO: 1661685 - DNA, 15 bp, Homo sapiens
attctttttcagtta

SEQ ID NO: 1661686 - DNA, 15 bp, Homo sapiens
tattctttttcagtt

SEQ ID NO: 1661687 - DNA, 15 bp, Homo sapiens
atattctttttcagt

SEQ ID NO: 1661688 - DNA, 15 bp, Homo sapiens
aatattctttttcag

SEQ ID NO: 1661689 - DNA, 15 bp, Homo sapiens
caatattctttttca

SEQ ID NO: 1661690 - DNA, 15 bp, Homo sapiens
acaatattctttttc

SEQ ID NO: 1661691 - DNA, 15 bp, Homo sapiens
aacaatattcttttt

SEQ ID NO: 1661692 - DNA, 15 bp, Homo sapiens
aaacaatattctttt

SEQ ID NO: 1661693 - DNA, 15 bp, Homo sapiens
gaaacaatattcttt

SEQ ID NO: 1661694 - DNA, 15 bp, Homo sapiens
agaaacaatattctt

SEQ ID NO: 1661695 - DNA, 15 bp, Homo sapiens
gagaaacaatattct

SEQ ID NO: 1661696 - DNA, 15 bp, Homo sapiens
cgagaaacaatattc

SEQ ID NO: 1661697 - DNA, 15 bp, Homo sapiens
ccgagaaacaatatt

SEQ ID NO: 1661698 - DNA, 15 bp, Homo sapiens
tccgagaaacaatat

SEQ ID NO: 1661699 - DNA, 15 bp, Homo sapiens
ctccgagaaacaata

SEQ ID NO: 1661700 - DNA, 15 bp, Homo sapiens
tctccgagaaacaat

SEQ ID NO: 1661701 - DNA, 15 bp, Homo sapiens
ttctccgagaaacaa

SEQ ID NO: 1661702 - DNA, 15 bp, Homo sapiens
cttctccgagaaaca

SEQ ID NO: 1661703 - DNA, 15 bp, Homo sapiens
ccttctccgagaaac

SEQ ID NO: 1661704 - DNA, 15 bp, Homo sapiens
tccttctccgagaaa

SEQ ID NO: 1661705 - DNA, 15 bp, Homo sapiens
atccttctccgagaa

SEQ ID NO: 1661706 - DNA, 15 bp, Homo sapiens
catccttctccgaga

SEQ ID NO: 1661707 - DNA, 15 bp, Homo sapiens
acatccttctccgag

SEQ ID NO: 1661708 - DNA, 15 bp, Homo sapiens
gacatccttctccga

SEQ ID NO: 1661709 - DNA, 15 bp, Homo sapiens
tgacatccttctccg

SEQ ID NO: 1661710 - DNA, 15 bp, Homo sapiens
ttgacatccttctcc

SEQ ID NO: 1661711 - DNA, 15 bp, Homo sapiens
tttgacatccttctc

SEQ ID NO: 1661712 - DNA, 15 bp, Homo sapiens
ttttgacatccttct

SEQ ID NO: 1661713 - DNA, 15 bp, Homo sapiens
cttttgacatccttc

SEQ ID NO: 1661714 - DNA, 15 bp, Homo sapiens
tcttttgacatcctt

SEQ ID NO: 1661715 - DNA, 15 bp, Homo sapiens
atcttttgacatcct

SEQ ID NO: 1661716 - DNA, 15 bp, Homo sapiens
gatcttttgacatcc

SEQ ID NO: 1661717 - DNA, 15 bp, Homo sapiens
cgatcttttgacatc

SEQ ID NO: 1661718 - DNA, 15 bp, Homo sapiens
ccgatcttttgacat

SEQ ID NO: 1661719 - DNA, 15 bp, Homo sapiens
gccgatcttttgaca

SEQ ID NO: 1661720 - DNA, 15 bp, Homo sapiens
ggccgatcttttgac

SEQ ID NO: 1661721 - DNA, 15 bp, Homo sapiens
gggccgatcttttga

SEQ ID NO: 1661722 - DNA, 15 bp, Homo sapiens
tgggccgatcttttg

SEQ ID NO: 1661723 - DNA, 15 bp, Homo sapiens
ctgggccgatctttt

SEQ ID NO: 1661724 - DNA, 15 bp, Homo sapiens
gctgggccgatcttt

SEQ ID NO: 1661725 - DNA, 15 bp, Homo sapiens
agctgggccgatctt

SEQ ID NO: 1661726 - DNA, 15 bp, Homo sapiens
gagctgggccgatct

SEQ ID NO: 1661727 - DNA, 15 bp, Homo sapiens
tgagctgggccgatc

SEQ ID NO: 1661728 - DNA, 15 bp, Homo sapiens
ctgagctgggccgat

SEQ ID NO: 1661729 - DNA, 15 bp, Homo sapiens
cctgagctgggccga

SEQ ID NO: 1661730 - DNA, 15 bp, Homo sapiens
ccctgagctgggccg

SEQ ID NO: 1661731 - DNA, 15 bp, Homo sapiens
tccctgagctgggcc

SEQ ID NO: 1661732 - DNA, 15 bp, Homo sapiens
ctccctgagctgggc

SEQ ID NO: 1661733 - DNA, 15 bp, Homo sapiens
gctccctgagctggg

SEQ ID NO: 1661734 - DNA, 15 bp, Homo sapiens
tgctccctgagctgg

SEQ ID NO: 1661735 - DNA, 15 bp, Homo sapiens
ctgctccctgagctg

SEQ ID NO: 1661736 - DNA, 15 bp, Homo sapiens
actgctccctgagct

SEQ ID NO: 1661737 - DNA, 15 bp, Homo sapiens
aactgctccctgagc

SEQ ID NO: 1661738 - DNA, 15 bp, Homo sapiens
aaactgctccctgag

SEQ ID NO: 1661739 - DNA, 15 bp, Homo sapiens
caaactgctccctga

SEQ ID NO: 1661740 - DNA, 15 bp, Homo sapiens
gcaaactgctccctg

SEQ ID NO: 1661741 - DNA, 15 bp, Homo sapiens
ggcaaactgctccct

SEQ ID NO: 1661742 - DNA, 15 bp, Homo sapiens
gggcaaactgctccc

SEQ ID NO: 1661743 - DNA, 15 bp, Homo sapiens
agggcaaactgctcc

SEQ ID NO: 1661744 - DNA, 15 bp, Homo sapiens
tagggcaaactgctc

SEQ ID NO: 1661745 - DNA, 15 bp, Homo sapiens
gtagggcaaactgct

SEQ ID NO: 1661746 - DNA, 15 bp, Homo sapiens
agtagggcaaactgc

SEQ ID NO: 1661747 - DNA, 15 bp, Homo sapiens
tagtagggcaaactg

SEQ ID NO: 1661748 - DNA, 15 bp, Homo sapiens
ctagtagggcaaact

SEQ ID NO: 1661749 - DNA, 15 bp, Homo sapiens
gctagtagggcaaac

SEQ ID NO: 1661750 - DNA, 15 bp, Homo sapiens
agctagtagggcaaa

SEQ ID NO: 1661751 - DNA, 15 bp, Homo sapiens
gagctagtagggcaa

SEQ ID NO: 1661752 - DNA, 15 bp, Homo sapiens
ggagctagtagggca

SEQ ID NO: 1661753 - DNA, 15 bp, Homo sapiens
aggagctagtagggc

SEQ ID NO: 1661754 - DNA, 15 bp, Homo sapiens
gaggagctagtaggg

SEQ ID NO: 1661755 - DNA, 15 bp, Homo sapiens
cgaggagctagtagg

SEQ ID NO: 1661756 - DNA, 15 bp, Homo sapiens
ccgaggagctagtag

SEQ ID NO: 1661757 - DNA, 15 bp, Homo sapiens
tccgaggagctagta

SEQ ID NO: 1661758 - DNA, 15 bp, Homo sapiens
gtccgaggagctagt

SEQ ID NO: 1661759 - DNA, 15 bp, Homo sapiens
tgtccgaggagctag

SEQ ID NO: 1661760 - DNA, 15 bp, Homo sapiens
ctgtccgaggagcta

SEQ ID NO: 1661761 - DNA, 15 bp, Homo sapiens
gctgtccgaggagct

SEQ ID NO: 1661762 - DNA, 15 bp, Homo sapiens
agctgtccgaggagc

SEQ ID NO: 1661763 - DNA, 15 bp, Homo sapiens
cagctgtccgaggag

SEQ ID NO: 1661764 - DNA, 15 bp, Homo sapiens
acagctgtccgagga

SEQ ID NO: 1661765 - DNA, 15 bp, Homo sapiens
tacagctgtccgagg

SEQ ID NO: 1661766 - DNA, 15 bp, Homo sapiens
ttacagctgtccgag

SEQ ID NO: 1661767 - DNA, 15 bp, Homo sapiens
tttacagctgtccga

SEQ ID NO: 1661768 - DNA, 15 bp, Homo sapiens
ctttacagctgtccg

SEQ ID NO: 1661769 - DNA, 15 bp, Homo sapiens
tctttacagctgtcc

SEQ ID NO: 1661770 - DNA, 15 bp, Homo sapiens
ttctttacagctgtc

SEQ ID NO: 1661771 - DNA, 15 bp, Homo sapiens
cttctttacagctgt

SEQ ID NO: 1661772 - DNA, 15 bp, Homo sapiens
tcttctttacagctg

SEQ ID NO: 1661773 - DNA, 15 bp, Homo sapiens
ctcttctttacagct

SEQ ID NO: 1661774 - DNA, 15 bp, Homo sapiens
actcttctttacagc

SEQ ID NO: 1661775 - DNA, 15 bp, Homo sapiens
gactcttctttacag

SEQ ID NO: 1661776 - DNA, 15 bp, Homo sapiens
agactcttctttaca

SEQ ID NO: 1661777 - DNA, 15 bp, Homo sapiens
gagactcttctttac

SEQ ID NO: 1661778 - DNA, 15 bp, Homo sapiens
agagactcttcttta

SEQ ID NO: 1661779 - DNA, 15 bp, Homo sapiens
cagagactcttcttt

SEQ ID NO: 1661780 - DNA, 15 bp, Homo sapiens
ccagagactcttctt

SEQ ID NO: 1661781 - DNA, 15 bp, Homo sapiens
gccagagactcttct

SEQ ID NO: 1661782 - DNA, 15 bp, Homo sapiens
agccagagactcttc

SEQ ID NO: 1661783 - DNA, 15 bp, Homo sapiens
gagccagagactctt

SEQ ID NO: 1661784 - DNA, 15 bp, Homo sapiens
agagccagagactct

SEQ ID NO: 1661785 - DNA, 15 bp, Homo sapiens
aagagccagagactc

SEQ ID NO: 1661786 - DNA, 15 bp, Homo sapiens
aaagagccagagact

SEQ ID NO: 1661787 - DNA, 15 bp, Homo sapiens
taaagagccagagac

SEQ ID NO: 1661788 - DNA, 15 bp, Homo sapiens
ctaaagagccagaga

SEQ ID NO: 1661789 - DNA, 15 bp, Homo sapiens
tctaaagagccagag

SEQ ID NO: 1661790 - DNA, 15 bp, Homo sapiens
ttctaaagagccaga

SEQ ID NO: 1661791 - DNA, 15 bp, Homo sapiens
attctaaagagccag

SEQ ID NO: 1661792 - DNA, 15 bp, Homo sapiens
tattctaaagagcca

SEQ ID NO: 1661793 - DNA, 15 bp, Homo sapiens
gtattctaaagagcc

SEQ ID NO: 1661794 - DNA, 15 bp, Homo sapiens
agtattctaaagagc

SEQ ID NO: 1661795 - DNA, 15 bp, Homo sapiens
cagtattctaaagag

SEQ ID NO: 1661796 - DNA, 15 bp, Homo sapiens
acagtattctaaaga

SEQ ID NO: 1661797 - DNA, 15 bp, Homo sapiens
tacagtattctaaag

SEQ ID NO: 1661798 - DNA, 15 bp, Homo sapiens
ttacagtattctaaa

SEQ ID NO: 1661799 - DNA, 15 bp, Homo sapiens
cttacagtattctaa

SEQ ID NO: 1661800 - DNA, 15 bp, Homo sapiens
acttacagtattcta

SEQ ID NO: 1661801 - DNA, 15 bp, Homo sapiens
tacttacagtattct

SEQ ID NO: 1661802 - DNA, 15 bp, Homo sapiens
gtacttacagtattc

SEQ ID NO: 1661803 - DNA, 15 bp, Homo sapiens
agtacttacagtatt

SEQ ID NO: 1661804 - DNA, 15 bp, Homo sapiens
tagtacttacagtat

SEQ ID NO: 1661805 - DNA, 15 bp, Homo sapiens
gtagtacttacagta

SEQ ID NO: 1661806 - DNA, 15 bp, Homo sapiens
agtagtacttacagt

SEQ ID NO: 1661807 - DNA, 15 bp, Homo sapiens
aagtagtacttacag

SEQ ID NO: 1661808 - DNA, 15 bp, Homo sapiens
gaagtagtacttaca

SEQ ID NO: 1661809 - DNA, 15 bp, Homo sapiens
cgaagtagtacttac

SEQ ID NO: 1661810 - DNA, 15 bp, Homo sapiens
acgaagtagtactta

SEQ ID NO: 1661811 - DNA, 15 bp, Homo sapiens
tacgaagtagtactt

SEQ ID NO: 1661812 - DNA, 15 bp, Homo sapiens
ctacgaagtagtact

SEQ ID NO: 1661813 - DNA, 15 bp, Homo sapiens
gctacgaagtagtac

SEQ ID NO: 1661814 - DNA, 15 bp, Homo sapiens
agctacgaagtagta

SEQ ID NO: 1661815 - DNA, 15 bp, Homo sapiens
tagctacgaagtagt

SEQ ID NO: 1661816 - DNA, 15 bp, Homo sapiens
atagctacgaagtag

SEQ ID NO: 1661817 - DNA, 15 bp, Homo sapiens
aatagctacgaagta

SEQ ID NO: 1661818 - DNA, 15 bp, Homo sapiens
taatagctacgaagt

SEQ ID NO: 1661819 - DNA, 15 bp, Homo sapiens
ttaatagctacgaag

SEQ ID NO: 1661820 - DNA, 15 bp, Homo sapiens
cttaatagctacgaa

SEQ ID NO: 1661821 - DNA, 15 bp, Homo sapiens
acttaatagctacga

SEQ ID NO: 1661822 - DNA, 15 bp, Homo sapiens
tacttaatagctacg

SEQ ID NO: 1661823 - DNA, 15 bp, Homo sapiens
ttacttaatagctac

SEQ ID NO: 1661824 - DNA, 15 bp, Homo sapiens
attacttaatagcta

SEQ ID NO: 1661825 - DNA, 15 bp, Homo sapiens
gattacttaatagct

SEQ ID NO: 1661826 - DNA, 15 bp, Homo sapiens
agattacttaatagc

SEQ ID NO: 1661827 - DNA, 15 bp, Homo sapiens
aagattacttaatag

SEQ ID NO: 1661828 - DNA, 15 bp, Homo sapiens
aaagattacttaata

SEQ ID NO: 1661829 - DNA, 15 bp, Homo sapiens
aaaagattacttaat

SEQ ID NO: 1661830 - DNA, 15 bp, Homo sapiens
aaaaagattacttaa

SEQ ID NO: 1661831 - DNA, 15 bp, Homo sapiens
gaaaaagattactta

SEQ ID NO: 1661832 - DNA, 15 bp, Homo sapiens
ggaaaaagattactt

SEQ ID NO: 1661833 - DNA, 15 bp, Homo sapiens
aggaaaaagattact

SEQ ID NO: 1661834 - DNA, 15 bp, Homo sapiens
taggaaaaagattac

SEQ ID NO: 1661835 - DNA, 15 bp, Homo sapiens
ataggaaaaagatta

SEQ ID NO: 1661836 - DNA, 15 bp, Homo sapiens
aataggaaaaagatt

SEQ ID NO: 1661837 - DNA, 15 bp, Homo sapiens
gaataggaaaaagat

SEQ ID NO: 1661838 - DNA, 15 bp, Homo sapiens
agaataggaaaaaga

SEQ ID NO: 1661839 - DNA, 15 bp, Homo sapiens
tagaataggaaaaag

SEQ ID NO: 1661840 - DNA, 15 bp, Homo sapiens
atagaataggaaaaa

SEQ ID NO: 1661841 - DNA, 15 bp, Homo sapiens
aatagaataggaaaa

SEQ ID NO: 1661842 - DNA, 15 bp, Homo sapiens
aaatagaataggaaa

SEQ ID NO: 1661843 - DNA, 15 bp, Homo sapiens
aaaatagaataggaa

SEQ ID NO: 1661844 - DNA, 15 bp, Homo sapiens
gaaaatagaatagga

SEQ ID NO: 1661845 - DNA, 15 bp, Homo sapiens
agaaaatagaatagg

SEQ ID NO: 1661846 - DNA, 15 bp, Homo sapiens
aagaaaatagaatag

SEQ ID NO: 1661847 - DNA, 15 bp, Homo sapiens
aaagaaaatagaata

SEQ ID NO: 1661848 - DNA, 15 bp, Homo sapiens
gaaagaaaatagaat

SEQ ID NO: 1661849 - DNA, 15 bp, Homo sapiens
agaaagaaaatagaa

SEQ ID NO: 1661850 - DNA, 15 bp, Homo sapiens
gagaaagaaaataga

SEQ ID NO: 1661851 - DNA, 15 bp, Homo sapiens
agagaaagaaaatag

SEQ ID NO: 1661852 - DNA, 15 bp, Homo sapiens
aagagaaagaaaata

SEQ ID NO: 1661853 - DNA, 15 bp, Homo sapiens
taagagaaagaaaat

SEQ ID NO: 1661854 - DNA, 15 bp, Homo sapiens
ctaagagaaagaaaa

SEQ ID NO: 1661855 - DNA, 15 bp, Homo sapiens
tctaagagaaagaaa

SEQ ID NO: 1661856 - DNA, 15 bp, Homo sapiens
atctaagagaaagaa

SEQ ID NO: 1661857 - DNA, 15 bp, Homo sapiens
catctaagagaaaga

SEQ ID NO: 1661858 - DNA, 15 bp, Homo sapiens
gcatctaagagaaag

SEQ ID NO: 1661859 - DNA, 15 bp, Homo sapiens
ggcatctaagagaaa

SEQ ID NO: 1661860 - DNA, 15 bp, Homo sapiens
tggcatctaagagaa

SEQ ID NO: 1661861 - DNA, 15 bp, Homo sapiens
gtggcatctaagaga

SEQ ID NO: 1661862 - DNA, 15 bp, Homo sapiens
ggtggcatctaagag

SEQ ID NO: 1661863 - DNA, 15 bp, Homo sapiens
aggtggcatctaaga

SEQ ID NO: 1661864 - DNA, 15 bp, Homo sapiens
taggtggcatctaag

SEQ ID NO: 1661865 - DNA, 15 bp, Homo sapiens
ataggtggcatctaa

SEQ ID NO: 1661866 - DNA, 15 bp, Homo sapiens
tataggtggcatcta

SEQ ID NO: 1661867 - DNA, 15 bp, Homo sapiens
ctataggtggcatct

SEQ ID NO: 1661868 - DNA, 15 bp, Homo sapiens
tctataggtggcatc

SEQ ID NO: 1661869 - DNA, 15 bp, Homo sapiens
ttctataggtggcat

SEQ ID NO: 1661870 - DNA, 15 bp, Homo sapiens
tttctataggtggca

SEQ ID NO: 1661871 - DNA, 15 bp, Homo sapiens
ttttctataggtggc

SEQ ID NO: 1661872 - DNA, 15 bp, Homo sapiens
cttttctataggtgg

SEQ ID NO: 1661873 - DNA, 15 bp, Homo sapiens
acttttctataggtg

SEQ ID NO: 1661874 - DNA, 15 bp, Homo sapiens
gacttttctataggt

SEQ ID NO: 1661875 - DNA, 15 bp, Homo sapiens
tgacttttctatagg

SEQ ID NO: 1661876 - DNA, 15 bp, Homo sapiens
ctgacttttctatag

SEQ ID NO: 1661877 - DNA, 15 bp, Homo sapiens
tctgacttttctata

SEQ ID NO: 1661878 - DNA, 15 bp, Homo sapiens
ctctgacttttctat

SEQ ID NO: 1661879 - DNA, 15 bp, Homo sapiens
cctctgacttttcta

SEQ ID NO: 1661880 - DNA, 15 bp, Homo sapiens
ccctctgacttttct

SEQ ID NO: 1661881 - DNA, 15 bp, Homo sapiens
accctctgacttttc

SEQ ID NO: 1661882 - DNA, 15 bp, Homo sapiens
gaccctctgactttt

SEQ ID NO: 1661883 - DNA, 15 bp, Homo sapiens
ggaccctctgacttt

SEQ ID NO: 1661884 - DNA, 15 bp, Homo sapiens
tggaccctctgactt

SEQ ID NO: 1661885 - DNA, 15 bp, Homo sapiens
ctggaccctctgact

SEQ ID NO: 1661886 - DNA, 15 bp, Homo sapiens
actggaccctctgac

SEQ ID NO: 1661887 - DNA, 15 bp, Homo sapiens
tactggaccctctga

SEQ ID NO: 1661888 - DNA, 15 bp, Homo sapiens
ttactggaccctctg

SEQ ID NO: 1661889 - DNA, 15 bp, Homo sapiens
cttactggaccctct

SEQ ID NO: 1661890 - DNA, 15 bp, Homo sapiens
acttactggaccctc

SEQ ID NO: 1661891 - DNA, 15 bp, Homo sapiens
aacttactggaccct

SEQ ID NO: 1661892 - DNA, 15 bp, Homo sapiens
aaacttactggaccc

SEQ ID NO: 1661893 - DNA, 15 bp, Homo sapiens
gaaacttactggacc

SEQ ID NO: 1661894 - DNA, 15 bp, Homo sapiens
agaaacttactggac

SEQ ID NO: 1661895 - DNA, 15 bp, Homo sapiens
aagaaacttactgga

SEQ ID NO: 1661896 - DNA, 15 bp, Homo sapiens
aaagaaacttactgg

SEQ ID NO: 1661897 - DNA, 15 bp, Homo sapiens
gaaagaaacttactg

SEQ ID NO: 1661898 - DNA, 15 bp, Homo sapiens
ggaaagaaacttact

SEQ ID NO: 1661899 - DNA, 15 bp, Homo sapiens
aggaaagaaacttac

SEQ ID NO: 1661900 - DNA, 15 bp, Homo sapiens
aaggaaagaaactta

SEQ ID NO: 1661901 - DNA, 15 bp, Homo sapiens
gaaggaaagaaactt

SEQ ID NO: 1661902 - DNA, 15 bp, Homo sapiens
agaaggaaagaaact

SEQ ID NO: 1661903 - DNA, 15 bp, Homo sapiens
aagaaggaaagaaac

SEQ ID NO: 1661904 - DNA, 15 bp, Homo sapiens
gaagaaggaaagaaa

SEQ ID NO: 1661905 - DNA, 15 bp, Homo sapiens
ggaagaaggaaagaa

SEQ ID NO: 1661906 - DNA, 15 bp, Homo sapiens
gggaagaaggaaaga

SEQ ID NO: 1661907 - DNA, 15 bp, Homo sapiens
tgggaagaaggaaag

SEQ ID NO: 1661908 - DNA, 15 bp, Homo sapiens
gtgggaagaaggaaa

SEQ ID NO: 1661909 - DNA, 15 bp, Homo sapiens
ggtgggaagaaggaa

SEQ ID NO: 1661910 - DNA, 15 bp, Homo sapiens
aggtgggaagaagga

SEQ ID NO: 1661911 - DNA, 15 bp, Homo sapiens
gaggtgggaagaagg

SEQ ID NO: 1661912 - DNA, 15 bp, Homo sapiens
tgaggtgggaagaag

SEQ ID NO: 1661913 - DNA, 15 bp, Homo sapiens
atgaggtgggaagaa

SEQ ID NO: 1661914 - DNA, 15 bp, Homo sapiens
gatgaggtgggaaga

SEQ ID NO: 1661915 - DNA, 15 bp, Homo sapiens
agatgaggtgggaag

SEQ ID NO: 1661916 - DNA, 15 bp, Homo sapiens
cagatgaggtgggaa

SEQ ID NO: 1661917 - DNA, 15 bp, Homo sapiens
gcagatgaggtggga

SEQ ID NO: 1661918 - DNA, 15 bp, Homo sapiens
tgcagatgaggtggg

SEQ ID NO: 1661919 - DNA, 15 bp, Homo sapiens
ttgcagatgaggtgg

SEQ ID NO: 1661920 - DNA, 15 bp, Homo sapiens
attgcagatgaggtg

SEQ ID NO: 1661921 - DNA, 15 bp, Homo sapiens
tattgcagatgaggt

SEQ ID NO: 1661922 - DNA, 15 bp, Homo sapiens
atattgcagatgagg

SEQ ID NO: 1661923 - DNA, 15 bp, Homo sapiens
tatattgcagatgag

SEQ ID NO: 1661924 - DNA, 15 bp, Homo sapiens
atatattgcagatga

SEQ ID NO: 1661925 - DNA, 15 bp, Homo sapiens
tatatattgcagatg

SEQ ID NO: 1661926 - DNA, 15 bp, Homo sapiens
atatatattgcagat

SEQ ID NO: 1661927 - DNA, 15 bp, Homo sapiens
tatatatattgcaga

SEQ ID NO: 1661928 - DNA, 15 bp, Homo sapiens
atatatatattgcag

SEQ ID NO: 1661929 - DNA, 15 bp, Homo sapiens
tatatatatattgca

SEQ ID NO: 1661930 - DNA, 15 bp, Homo sapiens
atatatatatattgc

SEQ ID NO: 1661931 - DNA, 15 bp, Homo sapiens
tatatatatatattg

SEQ ID NO: 1661932 - DNA, 15 bp, Homo sapiens
ctatatatatatatt

SEQ ID NO: 1661933 - DNA, 15 bp, Homo sapiens
tctatatatatatat

SEQ ID NO: 1661934 - DNA, 15 bp, Homo sapiens
ctctatatatatata

SEQ ID NO: 1661935 - DNA, 15 bp, Homo sapiens
tctctatatatatat

SEQ ID NO: 1661936 - DNA, 15 bp, Homo sapiens
ctctctatatatata

SEQ ID NO: 1661937 - DNA, 15 bp, Homo sapiens
tctctctatatatat

SEQ ID NO: 1661938 - DNA, 15 bp, Homo sapiens
ctctctctatatata

SEQ ID NO: 1661939 - DNA, 15 bp, Homo sapiens
tctctctctatatat

SEQ ID NO: 1661940 - DNA, 15 bp, Homo sapiens
ttctctctctatata

SEQ ID NO: 1661941 - DNA, 15 bp, Homo sapiens
tttctctctctatat

SEQ ID NO: 1661942 - DNA, 15 bp, Homo sapiens
atttctctctctata

SEQ ID NO: 1661943 - DNA, 15 bp, Homo sapiens
tatttctctctctat

SEQ ID NO: 1661944 - DNA, 15 bp, Homo sapiens
ctatttctctctcta

SEQ ID NO: 1661945 - DNA, 15 bp, Homo sapiens
tctatttctctctct

SEQ ID NO: 1661946 - DNA, 15 bp, Homo sapiens
atctatttctctctc

SEQ ID NO: 1661947 - DNA, 15 bp, Homo sapiens
tatctatttctctct

SEQ ID NO: 1661948 - DNA, 15 bp, Homo sapiens
gtatctatttctctc

SEQ ID NO: 1661949 - DNA, 15 bp, Homo sapiens
tgtatctatttctct

SEQ ID NO: 1661950 - DNA, 15 bp, Homo sapiens
atgtatctatttctc

SEQ ID NO: 1661951 - DNA, 15 bp, Homo sapiens
tatgtatctatttct

SEQ ID NO: 1661952 - DNA, 15 bp, Homo sapiens
gtatgtatctatttc

SEQ ID NO: 1661953 - DNA, 15 bp, Homo sapiens
tgtatgtatctattt

SEQ ID NO: 1661954 - DNA, 15 bp, Homo sapiens
atgtatgtatctatt

SEQ ID NO: 1661955 - DNA, 15 bp, Homo sapiens
tatgtatgtatctat

SEQ ID NO: 1661956 - DNA, 15 bp, Homo sapiens
gtatgtatgtatcta

SEQ ID NO: 1661957 - DNA, 15 bp, Homo sapiens
tgtatgtatgtatct

SEQ ID NO: 1661958 - DNA, 15 bp, Homo sapiens
atgtatgtatgtatc

SEQ ID NO: 1661959 - DNA, 15 bp, Homo sapiens
catgtatgtatgtat

SEQ ID NO: 1661960 - DNA, 15 bp, Homo sapiens
gcatgtatgtatgta

SEQ ID NO: 1661961 - DNA, 15 bp, Homo sapiens
tgcatgtatgtatgt

SEQ ID NO: 1661962 - DNA, 15 bp, Homo sapiens
atgcatgtatgtatg

SEQ ID NO: 1661963 - DNA, 15 bp, Homo sapiens
tatgcatgtatgtat

SEQ ID NO: 1661964 - DNA, 15 bp, Homo sapiens
ttatgcatgtatgta

SEQ ID NO: 1661965 - DNA, 15 bp, Homo sapiens
tttatgcatgtatgt

SEQ ID NO: 1661966 - DNA, 15 bp, Homo sapiens
atttatgcatgtatg

SEQ ID NO: 1661967 - DNA, 15 bp, Homo sapiens
tatttatgcatgtat

SEQ ID NO: 1661968 - DNA, 15 bp, Homo sapiens
gtatttatgcatgta

SEQ ID NO: 1661969 - DNA, 15 bp, Homo sapiens
tgtatttatgcatgt

SEQ ID NO: 1661970 - DNA, 15 bp, Homo sapiens
gtgtatttatgcatg

SEQ ID NO: 1661971 - DNA, 15 bp, Homo sapiens
tgtgtatttatgcat

SEQ ID NO: 1661972 - DNA, 15 bp, Homo sapiens
atgtgtatttatgca

SEQ ID NO: 1661973 - DNA, 15 bp, Homo sapiens
tatgtgtatttatgc

SEQ ID NO: 1661974 - DNA, 15 bp, Homo sapiens
atatgtgtatttatg

SEQ ID NO: 1661975 - DNA, 15 bp, Homo sapiens
catatgtgtatttat

SEQ ID NO: 1661976 - DNA, 15 bp, Homo sapiens
acatatgtgtattta

SEQ ID NO: 1661977 - DNA, 15 bp, Homo sapiens
cacatatgtgtattt

SEQ ID NO: 1661978 - DNA, 15 bp, Homo sapiens
tcacatatgtgtatt

SEQ ID NO: 1661979 - DNA, 15 bp, Homo sapiens
ctcacatatgtgtat

SEQ ID NO: 1661980 - DNA, 15 bp, Homo sapiens
actcacatatgtgta

SEQ ID NO: 1661981 - DNA, 15 bp, Homo sapiens
aactcacatatgtgt

SEQ ID NO: 1661982 - DNA, 15 bp, Homo sapiens
taactcacatatgtg

SEQ ID NO: 1661983 - DNA, 15 bp, Homo sapiens
ttaactcacatatgt

SEQ ID NO: 1661984 - DNA, 15 bp, Homo sapiens
gttaactcacatatg

SEQ ID NO: 1661985 - DNA, 15 bp, Homo sapiens
ggttaactcacatat

SEQ ID NO: 1661986 - DNA, 15 bp, Homo sapiens
tggttaactcacata

SEQ ID NO: 1661987 - DNA, 15 bp, Homo sapiens
ctggttaactcacat

SEQ ID NO: 1661988 - DNA, 15 bp, Homo sapiens
gctggttaactcaca

SEQ ID NO: 1661989 - DNA, 15 bp, Homo sapiens
tgctggttaactcac

SEQ ID NO: 1661990 - DNA, 15 bp, Homo sapiens
ctgctggttaactca

SEQ ID NO: 1661991 - DNA, 15 bp, Homo sapiens
tctgctggttaactc

SEQ ID NO: 1661992 - DNA, 15 bp, Homo sapiens
ttctgctggttaact

SEQ ID NO: 1661993 - DNA, 15 bp, Homo sapiens
gttctgctggttaac

SEQ ID NO: 1661994 - DNA, 15 bp, Homo sapiens
agttctgctggttaa

SEQ ID NO: 1661995 - DNA, 15 bp, Homo sapiens
cagttctgctggtta

SEQ ID NO: 1661996 - DNA, 15 bp, Homo sapiens
acagttctgctggtt

SEQ ID NO: 1661997 - DNA, 15 bp, Homo sapiens
tacagttctgctggt

SEQ ID NO: 1661998 - DNA, 15 bp, Homo sapiens
ctacagttctgctgg

SEQ ID NO: 1661999 - DNA, 15 bp, Homo sapiens
tctacagttctgctg

SEQ ID NO: 1662000 - DNA, 15 bp, Homo sapiens
ttctacagttctgct

SEQ ID NO: 1662001 - DNA, 15 bp, Homo sapiens
attctacagttctgc

SEQ ID NO: 1662002 - DNA, 15 bp, Homo sapiens
aattctacagttctg

SEQ ID NO: 1662003 - DNA, 15 bp, Homo sapiens
taattctacagttct

SEQ ID NO: 1662004 - DNA, 15 bp, Homo sapiens
ttaattctacagttc

SEQ ID NO: 1662005 - DNA, 15 bp, Homo sapiens
attaattctacagtt

SEQ ID NO: 1662006 - DNA, 15 bp, Homo sapiens
tattaattctacagt

SEQ ID NO: 1662007 - DNA, 15 bp, Homo sapiens
atattaattctacag

SEQ ID NO: 1662008 - DNA, 15 bp, Homo sapiens
aatattaattctaca

SEQ ID NO: 1662009 - DNA, 15 bp, Homo sapiens
caatattaattctac

SEQ ID NO: 1662010 - DNA, 15 bp, Homo sapiens
acaatattaattcta

SEQ ID NO: 1662011 - DNA, 15 bp, Homo sapiens
cacaatattaattct

SEQ ID NO: 1662012 - DNA, 15 bp, Homo sapiens
ccacaatattaattc

SEQ ID NO: 1662013 - DNA, 15 bp, Homo sapiens
tccacaatattaatt

SEQ ID NO: 1662014 - DNA, 15 bp, Homo sapiens
gtccacaatattaat

SEQ ID NO: 1662015 - DNA, 15 bp, Homo sapiens
ggtccacaatattaa

SEQ ID NO: 1662016 - DNA, 15 bp, Homo sapiens
gggtccacaatatta

SEQ ID NO: 1662017 - DNA, 15 bp, Homo sapiens
tgggtccacaatatt

SEQ ID NO: 1662018 - DNA, 15 bp, Homo sapiens
ctgggtccacaatat

SEQ ID NO: 1662019 - DNA, 15 bp, Homo sapiens
gctgggtccacaata

SEQ ID NO: 1662020 - DNA, 15 bp, Homo sapiens
agctgggtccacaat

SEQ ID NO: 1662021 - DNA, 15 bp, Homo sapiens
gagctgggtccacaa

SEQ ID NO: 1662022 - DNA, 15 bp, Homo sapiens
agagctgggtccaca

SEQ ID NO: 1662023 - DNA, 15 bp, Homo sapiens
tagagctgggtccac

SEQ ID NO: 1662024 - DNA, 15 bp, Homo sapiens
atagagctgggtcca

SEQ ID NO: 1662025 - DNA, 15 bp, Homo sapiens
catagagctgggtcc

SEQ ID NO: 1662026 - DNA, 15 bp, Homo sapiens
gcatagagctgggtc

SEQ ID NO: 1662027 - DNA, 15 bp, Homo sapiens
agcatagagctgggt

SEQ ID NO: 1662028 - DNA, 15 bp, Homo sapiens
tagcatagagctggg

SEQ ID NO: 1662029 - DNA, 15 bp, Homo sapiens
ctagcatagagctgg

SEQ ID NO: 1662030 - DNA, 15 bp, Homo sapiens
cctagcatagagctg

SEQ ID NO: 1662031 - DNA, 15 bp, Homo sapiens
acctagcatagagct

SEQ ID NO: 1662032 - DNA, 15 bp, Homo sapiens
aacctagcatagagc

SEQ ID NO: 1662033 - DNA, 15 bp, Homo sapiens
taacctagcatagag

SEQ ID NO: 1662034 - DNA, 15 bp, Homo sapiens
gtaacctagcataga

SEQ ID NO: 1662035 - DNA, 15 bp, Homo sapiens
tgtaacctagcatag

SEQ ID NO: 1662036 - DNA, 15 bp, Homo sapiens
gtgtaacctagcata

SEQ ID NO: 1662037 - DNA, 15 bp, Homo sapiens
agtgtaacctagcat

SEQ ID NO: 1662038 - DNA, 15 bp, Homo sapiens
cagtgtaacctagca

SEQ ID NO: 1662039 - DNA, 15 bp, Homo sapiens
tcagtgtaacctagc

SEQ ID NO: 1662040 - DNA, 15 bp, Homo sapiens
atcagtgtaacctag

SEQ ID NO: 1662041 - DNA, 15 bp, Homo sapiens
tatcagtgtaaccta

SEQ ID NO: 1662042 - DNA, 15 bp, Homo sapiens
ttatcagtgtaacct

SEQ ID NO: 1662043 - DNA, 15 bp, Homo sapiens
gttatcagtgtaacc

SEQ ID NO: 1662044 - DNA, 15 bp, Homo sapiens
ggttatcagtgtaac

SEQ ID NO: 1662045 - DNA, 15 bp, Homo sapiens
aggttatcagtgtaa

SEQ ID NO: 1662046 - DNA, 15 bp, Homo sapiens
caggttatcagtgta

SEQ ID NO: 1662047 - DNA, 15 bp, Homo sapiens
ccaggttatcagtgt

SEQ ID NO: 1662048 - DNA, 15 bp, Homo sapiens
cccaggttatcagtg

SEQ ID NO: 1662049 - DNA, 15 bp, Homo sapiens
acccaggttatcagt

SEQ ID NO: 1662050 - DNA, 15 bp, Homo sapiens
tacccaggttatcag

SEQ ID NO: 1662051 - DNA, 15 bp, Homo sapiens
ctacccaggttatca

SEQ ID NO: 1662052 - DNA, 15 bp, Homo sapiens
cctacccaggttatc

SEQ ID NO: 1662053 - DNA, 15 bp, Homo sapiens
tcctacccaggttat

SEQ ID NO: 1662054 - DNA, 15 bp, Homo sapiens
ttcctacccaggtta

SEQ ID NO: 1662055 - DNA, 15 bp, Homo sapiens
attcctacccaggtt

SEQ ID NO: 1662056 - DNA, 15 bp, Homo sapiens
cattcctacccaggt

SEQ ID NO: 1662057 - DNA, 15 bp, Homo sapiens
tcattcctacccagg

SEQ ID NO: 1662058 - DNA, 15 bp, Homo sapiens
atcattcctacccag

SEQ ID NO: 1662059 - DNA, 15 bp, Homo sapiens
tatcattcctaccca

SEQ ID NO: 1662060 - DNA, 15 bp, Homo sapiens
atatcattcctaccc

SEQ ID NO: 1662061 - DNA, 15 bp, Homo sapiens
gatatcattcctacc

SEQ ID NO: 1662062 - DNA, 15 bp, Homo sapiens
tgatatcattcctac

SEQ ID NO: 1662063 - DNA, 15 bp, Homo sapiens
atgatatcattccta

SEQ ID NO: 1662064 - DNA, 15 bp, Homo sapiens
gatgatatcattcct

SEQ ID NO: 1662065 - DNA, 15 bp, Homo sapiens
ggatgatatcattcc

SEQ ID NO: 1662066 - DNA, 15 bp, Homo sapiens
aggatgatatcattc

SEQ ID NO: 1662067 - DNA, 15 bp, Homo sapiens
taggatgatatcatt

SEQ ID NO: 1662068 - DNA, 15 bp, Homo sapiens
ataggatgatatcat

SEQ ID NO: 1662069 - DNA, 15 bp, Homo sapiens
tataggatgatatca

SEQ ID NO: 1662070 - DNA, 15 bp, Homo sapiens
atataggatgatatc

SEQ ID NO: 1662071 - DNA, 15 bp, Homo sapiens
tatataggatgatat

SEQ ID NO: 1662072 - DNA, 15 bp, Homo sapiens
ttatataggatgata

SEQ ID NO: 1662073 - DNA, 15 bp, Homo sapiens
attatataggatgat

SEQ ID NO: 1662074 - DNA, 15 bp, Homo sapiens
aattatataggatga

SEQ ID NO: 1662075 - DNA, 15 bp, Homo sapiens
aaattatataggatg

SEQ ID NO: 1662076 - DNA, 15 bp, Homo sapiens
gaaattatataggat

SEQ ID NO: 1662077 - DNA, 15 bp, Homo sapiens
tgaaattatatagga

SEQ ID NO: 1662078 - DNA, 15 bp, Homo sapiens
atgaaattatatagg

SEQ ID NO: 1662079 - DNA, 15 bp, Homo sapiens
aatgaaattatatag

SEQ ID NO: 1662080 - DNA, 15 bp, Homo sapiens
gaatgaaattatata

SEQ ID NO: 1662081 - DNA, 15 bp, Homo sapiens
ggaatgaaattatat

SEQ ID NO: 1662082 - DNA, 15 bp, Homo sapiens
aggaatgaaattata

SEQ ID NO: 1662083 - DNA, 15 bp, Homo sapiens
caggaatgaaattat

SEQ ID NO: 1662084 - DNA, 15 bp, Homo sapiens
tcaggaatgaaatta

SEQ ID NO: 1662085 - DNA, 15 bp, Homo sapiens
ctcaggaatgaaatt

SEQ ID NO: 1662086 - DNA, 15 bp, Homo sapiens
tctcaggaatgaaat

SEQ ID NO: 1662087 - DNA, 15 bp, Homo sapiens
atctcaggaatgaaa

SEQ ID NO: 1662088 - DNA, 15 bp, Homo sapiens
catctcaggaatgaa

SEQ ID NO: 1662089 - DNA, 15 bp, Homo sapiens
tcatctcaggaatga

SEQ ID NO: 1662090 - DNA, 15 bp, Homo sapiens
atcatctcaggaatg

SEQ ID NO: 1662091 - DNA, 15 bp, Homo sapiens
aatcatctcaggaat

SEQ ID NO: 1662092 - DNA, 15 bp, Homo sapiens
tatgttccagatttt

SEQ ID NO: 1662093 - DNA, 15 bp, Homo sapiens
ctatgttccagattt

SEQ ID NO: 1662094 - DNA, 15 bp, Homo sapiens
tctatgttccagatt

SEQ ID NO: 1662095 - DNA, 15 bp, Homo sapiens
gtctatgttccagat

SEQ ID NO: 1662096 - DNA, 15 bp, Homo sapiens
agtctatgttccaga

SEQ ID NO: 1662097 - DNA, 15 bp, Homo sapiens
aagtctatgttccag

SEQ ID NO: 1662098 - DNA, 15 bp, Homo sapiens
taagtctatgttcca

SEQ ID NO: 1662099 - DNA, 15 bp, Homo sapiens
gtaagtctatgttcc

SEQ ID NO: 1662100 - DNA, 15 bp, Homo sapiens
ggtaagtctatgttc

SEQ ID NO: 1662101 - DNA, 15 bp, Homo sapiens
tggtaagtctatgtt

SEQ ID NO: 1662102 - DNA, 15 bp, Homo sapiens
ctggtaagtctatgt

SEQ ID NO: 1662103 - DNA, 15 bp, Homo sapiens
actggtaagtctatg

SEQ ID NO: 1662104 - DNA, 15 bp, Homo sapiens
aactggtaagtctat

SEQ ID NO: 1662105 - DNA, 15 bp, Homo sapiens
gaactggtaagtcta

SEQ ID NO: 1662106 - DNA, 15 bp, Homo sapiens
agaactggtaagtct

SEQ ID NO: 1662107 - DNA, 15 bp, Homo sapiens
aagaactggtaagtc

SEQ ID NO: 1662108 - DNA, 15 bp, Homo sapiens
taagaactggtaagt

SEQ ID NO: 1662109 - DNA, 15 bp, Homo sapiens
ctaagaactggtaag

SEQ ID NO: 1662110 - DNA, 15 bp, Homo sapiens
cctaagaactggtaa

SEQ ID NO: 1662111 - DNA, 15 bp, Homo sapiens
acctaagaactggta

SEQ ID NO: 1662112 - DNA, 15 bp, Homo sapiens
aacctaagaactggt

SEQ ID NO: 1662113 - DNA, 15 bp, Homo sapiens
gaacctaagaactgg

SEQ ID NO: 1662114 - DNA, 15 bp, Homo sapiens
ggaacctaagaactg

SEQ ID NO: 1662115 - DNA, 15 bp, Homo sapiens
tggaacctaagaact

SEQ ID NO: 1662116 - DNA, 15 bp, Homo sapiens
atggaacctaagaac

SEQ ID NO: 1662117 - DNA, 15 bp, Homo sapiens
aatggaacctaagaa

SEQ ID NO: 1662118 - DNA, 15 bp, Homo sapiens
aaatggaacctaaga

SEQ ID NO: 1662119 - DNA, 15 bp, Homo sapiens
aaaatggaacctaag

SEQ ID NO: 1662120 - DNA, 15 bp, Homo sapiens
caaaatggaacctaa

SEQ ID NO: 1662121 - DNA, 15 bp, Homo sapiens
gcaaaatggaaccta

SEQ ID NO: 1662122 - DNA, 15 bp, Homo sapiens
agcaaaatggaacct

SEQ ID NO: 1662123 - DNA, 15 bp, Homo sapiens
aagcaaaatggaacc

SEQ ID NO: 1662124 - DNA, 15 bp, Homo sapiens
caagcaaaatggaac

SEQ ID NO: 1662125 - DNA, 15 bp, Homo sapiens
gcaagcaaaatggaa

SEQ ID NO: 1662126 - DNA, 15 bp, Homo sapiens
agcaagcaaaatgga

SEQ ID NO: 1662127 - DNA, 15 bp, Homo sapiens
aagcaagcaaaatgg

SEQ ID NO: 1662128 - DNA, 15 bp, Homo sapiens
aaagcaagcaaaatg

SEQ ID NO: 1662129 - DNA, 15 bp, Homo sapiens
aaaagcaagcaaaat

SEQ ID NO: 1662130 - DNA, 15 bp, Homo sapiens
aaaaagcaagcaaaa

SEQ ID NO: 1662131 - DNA, 15 bp, Homo sapiens
taaaaagcaagcaaa

SEQ ID NO: 1662132 - DNA, 15 bp, Homo sapiens
ttaaaaagcaagcaa

SEQ ID NO: 1662133 - DNA, 15 bp, Homo sapiens
tttaaaaagcaagca

SEQ ID NO: 1662134 - DNA, 15 bp, Homo sapiens
ttttaaaaagcaagc

SEQ ID NO: 1662135 - DNA, 15 bp, Homo sapiens
tttttaaaaagcaag

SEQ ID NO: 1662136 - DNA, 15 bp, Homo sapiens
gtttttaaaaagcaa

SEQ ID NO: 1662137 - DNA, 15 bp, Homo sapiens
agtttttaaaaagca

SEQ ID NO: 1662138 - DNA, 15 bp, Homo sapiens
cagtttttaaaaagc

SEQ ID NO: 1662139 - DNA, 15 bp, Homo sapiens
acagtttttaaaaag

SEQ ID NO: 1662140 - DNA, 15 bp, Homo sapiens
cacagtttttaaaaa

SEQ ID NO: 1662141 - DNA, 15 bp, Homo sapiens
acacagtttttaaaa

SEQ ID NO: 1662142 - DNA, 15 bp, Homo sapiens
gacacagtttttaaa

SEQ ID NO: 1662143 - DNA, 15 bp, Homo sapiens
agacacagtttttaa

SEQ ID NO: 1662144 - DNA, 15 bp, Homo sapiens
aagacacagttttta

SEQ ID NO: 1662145 - DNA, 15 bp, Homo sapiens
taagacacagttttt

SEQ ID NO: 1662146 - DNA, 15 bp, Homo sapiens
ataagacacagtttt

SEQ ID NO: 1662147 - DNA, 15 bp, Homo sapiens
tataagacacagttt

SEQ ID NO: 1662148 - DNA, 15 bp, Homo sapiens
ttataagacacagtt

SEQ ID NO: 1662149 - DNA, 15 bp, Homo sapiens
cttataagacacagt

SEQ ID NO: 1662150 - DNA, 15 bp, Homo sapiens
acttataagacacag

SEQ ID NO: 1662151 - DNA, 15 bp, Homo sapiens
gacttataagacaca

SEQ ID NO: 1662152 - DNA, 15 bp, Homo sapiens
agacttataagacac

SEQ ID NO: 1662153 - DNA, 15 bp, Homo sapiens
aagacttataagaca

SEQ ID NO: 1662154 - DNA, 15 bp, Homo sapiens
gaagacttataagac

SEQ ID NO: 1662155 - DNA, 15 bp, Homo sapiens
tgaagacttataaga

SEQ ID NO: 1662156 - DNA, 15 bp, Homo sapiens
ctgaagacttataag

SEQ ID NO: 1662157 - DNA, 15 bp, Homo sapiens
gctgaagacttataa

SEQ ID NO: 1662158 - DNA, 15 bp, Homo sapiens
tgctgaagacttata

SEQ ID NO: 1662159 - DNA, 15 bp, Homo sapiens
ttgctgaagacttat

SEQ ID NO: 1662160 - DNA, 15 bp, Homo sapiens
gttgctgaagactta

SEQ ID NO: 1662161 - DNA, 15 bp, Homo sapiens
agttgctgaagactt

SEQ ID NO: 1662162 - DNA, 15 bp, Homo sapiens
cagttgctgaagact

SEQ ID NO: 1662163 - DNA, 15 bp, Homo sapiens
ccagttgctgaagac

SEQ ID NO: 1662164 - DNA, 15 bp, Homo sapiens
accagttgctgaaga

SEQ ID NO: 1662165 - DNA, 15 bp, Homo sapiens
aaccagttgctgaag

SEQ ID NO: 1662166 - DNA, 15 bp, Homo sapiens
caaccagttgctgaa

SEQ ID NO: 1662167 - DNA, 15 bp, Homo sapiens
ccaaccagttgctga

SEQ ID NO: 1662168 - DNA, 15 bp, Homo sapiens
cccaaccagttgctg

SEQ ID NO: 1662169 - DNA, 15 bp, Homo sapiens
tcccaaccagttgct

SEQ ID NO: 1662170 - DNA, 15 bp, Homo sapiens
ctcccaaccagttgc

SEQ ID NO: 1662171 - DNA, 15 bp, Homo sapiens
tctcccaaccagttg

SEQ ID NO: 1662172 - DNA, 15 bp, Homo sapiens
atctcccaaccagtt

SEQ ID NO: 1662173 - DNA, 15 bp, Homo sapiens
aatctcccaaccagt

SEQ ID NO: 1662174 - DNA, 15 bp, Homo sapiens
aaatctcccaaccag

SEQ ID NO: 1662175 - DNA, 15 bp, Homo sapiens
aaaatctcccaacca

SEQ ID NO: 1662176 - DNA, 15 bp, Homo sapiens
aaaaatctcccaacc

SEQ ID NO: 1662177 - DNA, 15 bp, Homo sapiens
taaaaatctcccaac

SEQ ID NO: 1662178 - DNA, 15 bp, Homo sapiens
ctaaaaatctcccaa

SEQ ID NO: 1662179 - DNA, 15 bp, Homo sapiens
tctaaaaatctccca

SEQ ID NO: 1662180 - DNA, 15 bp, Homo sapiens
ttctaaaaatctccc

SEQ ID NO: 1662181 - DNA, 15 bp, Homo sapiens
tttctaaaaatctcc

SEQ ID NO: 1662182 - DNA, 15 bp, Homo sapiens
ttttctaaaaatctc

SEQ ID NO: 1662183 - DNA, 15 bp, Homo sapiens
tttttctaaaaatct

SEQ ID NO: 1662184 - DNA, 15 bp, Homo sapiens
ttttttctaaaaatc

SEQ ID NO: 1662185 - DNA, 15 bp, Homo sapiens
attttttctaaaaat

SEQ ID NO: 1662186 - DNA, 15 bp, Homo sapiens
tattttttctaaaaa

SEQ ID NO: 1662187 - DNA, 15 bp, Homo sapiens
ttattttttctaaaa

SEQ ID NO: 1662188 - DNA, 15 bp, Homo sapiens
gttattttttctaaa

SEQ ID NO: 1662189 - DNA, 15 bp, Homo sapiens
ggttattttttctaa

SEQ ID NO: 1662190 - DNA, 15 bp, Homo sapiens
aggttattttttcta

SEQ ID NO: 1662191 - DNA, 15 bp, Homo sapiens
aaggttattttttct

SEQ ID NO: 1662192 - DNA, 15 bp, Homo sapiens
aaaggttattttttc

SEQ ID NO: 1662193 - DNA, 15 bp, Homo sapiens
aaaaggttatttttt

SEQ ID NO: 1662194 - DNA, 15 bp, Homo sapiens
taaaaggttattttt

SEQ ID NO: 1662195 - DNA, 15 bp, Homo sapiens
ttaaaaggttatttt

SEQ ID NO: 1662196 - DNA, 15 bp, Homo sapiens
attaaaaggttattt

SEQ ID NO: 1662197 - DNA, 15 bp, Homo sapiens
cattaaaaggttatt

SEQ ID NO: 1662198 - DNA, 15 bp, Homo sapiens
acattaaaaggttat

SEQ ID NO: 1662199 - DNA, 15 bp, Homo sapiens
aacattaaaaggtta

SEQ ID NO: 1662200 - DNA, 15 bp, Homo sapiens
taacattaaaaggtt

SEQ ID NO: 1662201 - DNA, 15 bp, Homo sapiens
ctaacattaaaaggt

SEQ ID NO: 1662202 - DNA, 15 bp, Homo sapiens
tctaacattaaaagg

SEQ ID NO: 1662203 - DNA, 15 bp, Homo sapiens
ttctaacattaaaag

SEQ ID NO: 1662204 - DNA, 15 bp, Homo sapiens
gttctaacattaaaa

SEQ ID NO: 1662205 - DNA, 15 bp, Homo sapiens
tgttctaacattaaa

SEQ ID NO: 1662206 - DNA, 15 bp, Homo sapiens
ctgttctaacattaa

SEQ ID NO: 1662207 - DNA, 15 bp, Homo sapiens
actgttctaacatta

SEQ ID NO: 1662208 - DNA, 15 bp, Homo sapiens
cactgttctaacatt

SEQ ID NO: 1662209 - DNA, 15 bp, Homo sapiens
acactgttctaacat

SEQ ID NO: 1662210 - DNA, 15 bp, Homo sapiens
tacactgttctaaca

SEQ ID NO: 1662211 - DNA, 15 bp, Homo sapiens
ctacactgttctaac

SEQ ID NO: 1662212 - DNA, 15 bp, Homo sapiens
tctacactgttctaa

SEQ ID NO: 1662213 - DNA, 15 bp, Homo sapiens
ctctacactgttcta

SEQ ID NO: 1662214 - DNA, 15 bp, Homo sapiens
tctctacactgttct

SEQ ID NO: 1662215 - DNA, 15 bp, Homo sapiens
atctctacactgttc

SEQ ID NO: 1662216 - DNA, 15 bp, Homo sapiens
aatctctacactgtt

SEQ ID NO: 1662217 - DNA, 15 bp, Homo sapiens
aaatctctacactgt

SEQ ID NO: 1662218 - DNA, 15 bp, Homo sapiens
taaatctctacactg

SEQ ID NO: 1662219 - DNA, 15 bp, Homo sapiens
gtaaatctctacact

SEQ ID NO: 1662220 - DNA, 15 bp, Homo sapiens
tgtaaatctctacac

SEQ ID NO: 1662221 - DNA, 15 bp, Homo sapiens
ctgtaaatctctaca

SEQ ID NO: 1662222 - DNA, 15 bp, Homo sapiens
tctgtaaatctctac

SEQ ID NO: 1662223 - DNA, 15 bp, Homo sapiens
ttctgtaaatctcta

SEQ ID NO: 1662224 - DNA, 15 bp, Homo sapiens
attctgtaaatctct

SEQ ID NO: 1662225 - DNA, 15 bp, Homo sapiens
cattctgtaaatctc

SEQ ID NO: 1662226 - DNA, 15 bp, Homo sapiens
tcattctgtaaatct

SEQ ID NO: 1662227 - DNA, 15 bp, Homo sapiens
atcattctgtaaatc

SEQ ID NO: 1662228 - DNA, 15 bp, Homo sapiens
aatcattctgtaaat

SEQ ID NO: 1662229 - DNA, 15 bp, Homo sapiens
gaatcattctgtaaa

SEQ ID NO: 1662230 - DNA, 15 bp, Homo sapiens
agaatcattctgtaa

SEQ ID NO: 1662231 - DNA, 15 bp, Homo sapiens
cagaatcattctgta

SEQ ID NO: 1662232 - DNA, 15 bp, Homo sapiens
tcagaatcattctgt

SEQ ID NO: 1662233 - DNA, 15 bp, Homo sapiens
ttcagaatcattctg

SEQ ID NO: 1662234 - DNA, 15 bp, Homo sapiens
cttcagaatcattct

SEQ ID NO: 1662235 - DNA, 15 bp, Homo sapiens
tcttcagaatcattc

SEQ ID NO: 1662236 - DNA, 15 bp, Homo sapiens
atcttcagaatcatt

SEQ ID NO: 1662237 - DNA, 15 bp, Homo sapiens
tatcttcagaatcat

SEQ ID NO: 1662238 - DNA, 15 bp, Homo sapiens
ctatcttcagaatca

SEQ ID NO: 1662239 - DNA, 15 bp, Homo sapiens
tctatcttcagaatc

SEQ ID NO: 1662240 - DNA, 15 bp, Homo sapiens
ctctatcttcagaat

SEQ ID NO: 1662241 - DNA, 15 bp, Homo sapiens
actctatcttcagaa

SEQ ID NO: 1662242 - DNA, 15 bp, Homo sapiens
aactctatcttcaga

SEQ ID NO: 1662243 - DNA, 15 bp, Homo sapiens
aaactctatcttcag

SEQ ID NO: 1662244 - DNA, 15 bp, Homo sapiens
gaaactctatcttca

SEQ ID NO: 1662245 - DNA, 15 bp, Homo sapiens
agaaactctatcttc

SEQ ID NO: 1662246 - DNA, 15 bp, Homo sapiens
cagaaactctatctt

SEQ ID NO: 1662247 - DNA, 15 bp, Homo sapiens
acagaaactctatct

SEQ ID NO: 1662248 - DNA, 15 bp, Homo sapiens
cacagaaactctatc

SEQ ID NO: 1662249 - DNA, 15 bp, Homo sapiens
acacagaaactctat

SEQ ID NO: 1662250 - DNA, 15 bp, Homo sapiens
tacacagaaactcta

SEQ ID NO: 1662251 - DNA, 15 bp, Homo sapiens
gtacacagaaactct

SEQ ID NO: 1662252 - DNA, 15 bp, Homo sapiens
agtacacagaaactc

SEQ ID NO: 1662253 - DNA, 15 bp, Homo sapiens
aagtacacagaaact

SEQ ID NO: 1662254 - DNA, 15 bp, Homo sapiens
gaagtacacagaaac

SEQ ID NO: 1662255 - DNA, 15 bp, Homo sapiens
tgaagtacacagaaa

SEQ ID NO: 1662256 - DNA, 15 bp, Homo sapiens
gtgaagtacacagaa

SEQ ID NO: 1662257 - DNA, 15 bp, Homo sapiens
tgtgaagtacacaga

SEQ ID NO: 1662258 - DNA, 15 bp, Homo sapiens
gtgtgaagtacacag

SEQ ID NO: 1662259 - DNA, 15 bp, Homo sapiens
ggtgtgaagtacaca

SEQ ID NO: 1662260 - DNA, 15 bp, Homo sapiens
gggtgtgaagtacac

SEQ ID NO: 1662261 - DNA, 15 bp, Homo sapiens
tgggtgtgaagtaca

SEQ ID NO: 1662262 - DNA, 15 bp, Homo sapiens
ctgggtgtgaagtac

SEQ ID NO: 1662263 - DNA, 15 bp, Homo sapiens
actgggtgtgaagta

SEQ ID NO: 1662264 - DNA, 15 bp, Homo sapiens
aactgggtgtgaagt

SEQ ID NO: 1662265 - DNA, 15 bp, Homo sapiens
aaactgggtgtgaag

SEQ ID NO: 1662266 - DNA, 15 bp, Homo sapiens
aaaactgggtgtgaa

SEQ ID NO: 1662267 - DNA, 15 bp, Homo sapiens
aaaaactgggtgtga

SEQ ID NO: 1662268 - DNA, 15 bp, Homo sapiens
gaaaaactgggtgtg

SEQ ID NO: 1662269 - DNA, 15 bp, Homo sapiens
ggaaaaactgggtgt

SEQ ID NO: 1662270 - DNA, 15 bp, Homo sapiens
gggaaaaactgggtg

SEQ ID NO: 1662271 - DNA, 15 bp, Homo sapiens
tgggaaaaactgggt

SEQ ID NO: 1662272 - DNA, 15 bp, Homo sapiens
ctgggaaaaactggg

SEQ ID NO: 1662273 - DNA, 15 bp, Homo sapiens
actgggaaaaactgg

SEQ ID NO: 1662274 - DNA, 15 bp, Homo sapiens
cactgggaaaaactg

SEQ ID NO: 1662275 - DNA, 15 bp, Homo sapiens
acactgggaaaaact

SEQ ID NO: 1662276 - DNA, 15 bp, Homo sapiens
aacactgggaaaaac

SEQ ID NO: 1662277 - DNA, 15 bp, Homo sapiens
taacactgggaaaaa

SEQ ID NO: 1662278 - DNA, 15 bp, Homo sapiens
ttaacactgggaaaa

SEQ ID NO: 1662279 - DNA, 15 bp, Homo sapiens
gttaacactgggaaa

SEQ ID NO: 1662280 - DNA, 15 bp, Homo sapiens
tgttaacactgggaa

SEQ ID NO: 1662281 - DNA, 15 bp, Homo sapiens
atgttaacactggga

SEQ ID NO: 1662282 - DNA, 15 bp, Homo sapiens
aatgttaacactggg

SEQ ID NO: 1662283 - DNA, 15 bp, Homo sapiens
aaatgttaacactgg

SEQ ID NO: 1662284 - DNA, 15 bp, Homo sapiens
aaaatgttaacactg

SEQ ID NO: 1662285 - DNA, 15 bp, Homo sapiens
taaaatgttaacact

SEQ ID NO: 1662286 - DNA, 15 bp, Homo sapiens
gtaaaatgttaacac

SEQ ID NO: 1662287 - DNA, 15 bp, Homo sapiens
tgtaaaatgttaaca

SEQ ID NO: 1662288 - DNA, 15 bp, Homo sapiens
atgtaaaatgttaac

SEQ ID NO: 1662289 - DNA, 15 bp, Homo sapiens
aatgtaaaatgttaa

SEQ ID NO: 1662290 - DNA, 15 bp, Homo sapiens
taatgtaaaatgtta

SEQ ID NO: 1662291 - DNA, 15 bp, Homo sapiens
ctaatgtaaaatgtt

SEQ ID NO: 1662292 - DNA, 15 bp, Homo sapiens
actaatgtaaaatgt

SEQ ID NO: 1662293 - DNA, 15 bp, Homo sapiens
aactaatgtaaaatg

SEQ ID NO: 1662294 - DNA, 15 bp, Homo sapiens
aaactaatgtaaaat

SEQ ID NO: 1662295 - DNA, 15 bp, Homo sapiens
caaactaatgtaaaa

SEQ ID NO: 1662296 - DNA, 15 bp, Homo sapiens
ccaaactaatgtaaa

SEQ ID NO: 1662297 - DNA, 15 bp, Homo sapiens
accaaactaatgtaa

SEQ ID NO: 1662298 - DNA, 15 bp, Homo sapiens
taccaaactaatgta

SEQ ID NO: 1662299 - DNA, 15 bp, Homo sapiens
gtaccaaactaatgt

SEQ ID NO: 1662300 - DNA, 15 bp, Homo sapiens
tgtaccaaactaatg

SEQ ID NO: 1662301 - DNA, 15 bp, Homo sapiens
atgtaccaaactaat

SEQ ID NO: 1662302 - DNA, 15 bp, Homo sapiens
aatgtaccaaactaa

SEQ ID NO: 1662303 - DNA, 15 bp, Homo sapiens
aaatgtaccaaacta

SEQ ID NO: 1662304 - DNA, 15 bp, Homo sapiens
caaatgtaccaaact

SEQ ID NO: 1662305 - DNA, 15 bp, Homo sapiens
acaaatgtaccaaac

SEQ ID NO: 1662306 - DNA, 15 bp, Homo sapiens
gacaaatgtaccaaa

SEQ ID NO: 1662307 - DNA, 15 bp, Homo sapiens
tgacaaatgtaccaa

SEQ ID NO: 1662308 - DNA, 15 bp, Homo sapiens
gtgacaaatgtacca

SEQ ID NO: 1662309 - DNA, 15 bp, Homo sapiens
tgtgacaaatgtacc

SEQ ID NO: 1662310 - DNA, 15 bp, Homo sapiens
ttgtgacaaatgtac

SEQ ID NO: 1662311 - DNA, 15 bp, Homo sapiens
gttgtgacaaatgta

SEQ ID NO: 1662312 - DNA, 15 bp, Homo sapiens
tgttgtgacaaatgt

SEQ ID NO: 1662313 - DNA, 15 bp, Homo sapiens
ttgttgtgacaaatg

SEQ ID NO: 1662314 - DNA, 15 bp, Homo sapiens
tttgttgtgacaaat

SEQ ID NO: 1662315 - DNA, 15 bp, Homo sapiens
gtttgttgtgacaaa

SEQ ID NO: 1662316 - DNA, 15 bp, Homo sapiens
ggtttgttgtgacaa

SEQ ID NO: 1662317 - DNA, 15 bp, Homo sapiens
tggtttgttgtgaca

SEQ ID NO: 1662318 - DNA, 15 bp, Homo sapiens
ttggtttgttgtgac

SEQ ID NO: 1662319 - DNA, 15 bp, Homo sapiens
attggtttgttgtga

SEQ ID NO: 1662320 - DNA, 15 bp, Homo sapiens
tattggtttgttgtg

SEQ ID NO: 1662321 - DNA, 15 bp, Homo sapiens
atattggtttgttgt

SEQ ID NO: 1662322 - DNA, 15 bp, Homo sapiens
aatattggtttgttg

SEQ ID NO: 1662323 - DNA, 15 bp, Homo sapiens
caatattggtttgtt

SEQ ID NO: 1662324 - DNA, 15 bp, Homo sapiens
tcaatattggtttgt

SEQ ID NO: 1662325 - DNA, 15 bp, Homo sapiens
atcaatattggtttg

SEQ ID NO: 1662326 - DNA, 15 bp, Homo sapiens
tatcaatattggttt

SEQ ID NO: 1662327 - DNA, 15 bp, Homo sapiens
gtatcaatattggtt

SEQ ID NO: 1662328 - DNA, 15 bp, Homo sapiens
tgtatcaatattggt

SEQ ID NO: 1662329 - DNA, 15 bp, Homo sapiens
atgtatcaatattgg

SEQ ID NO: 1662330 - DNA, 15 bp, Homo sapiens
aatgtatcaatattg

SEQ ID NO: 1662331 - DNA, 15 bp, Homo sapiens
taatgtatcaatatt

SEQ ID NO: 1662332 - DNA, 15 bp, Homo sapiens
ataatgtatcaatat

SEQ ID NO: 1662333 - DNA, 15 bp, Homo sapiens
aataatgtatcaata

SEQ ID NO: 1662334 - DNA, 15 bp, Homo sapiens
taataatgtatcaat

SEQ ID NO: 1662335 - DNA, 15 bp, Homo sapiens
ataataatgtatcaa

SEQ ID NO: 1662336 - DNA, 15 bp, Homo sapiens
aataataatgtatca

SEQ ID NO: 1662337 - DNA, 15 bp, Homo sapiens
taataataatgtatc

SEQ ID NO: 1662338 - DNA, 15 bp, Homo sapiens
ttaataataatgtat

SEQ ID NO: 1662339 - DNA, 15 bp, Homo sapiens
gttaataataatgta

SEQ ID NO: 1662340 - DNA, 15 bp, Homo sapiens
agttaataataatgt

SEQ ID NO: 1662341 - DNA, 15 bp, Homo sapiens
tagttaataataatg

SEQ ID NO: 1662342 - DNA, 15 bp, Homo sapiens
ctagttaataataat

SEQ ID NO: 1662343 - DNA, 15 bp, Homo sapiens
tctagttaataataa

SEQ ID NO: 1662344 - DNA, 15 bp, Homo sapiens
ctctagttaataata

SEQ ID NO: 1662345 - DNA, 15 bp, Homo sapiens
actctagttaataat

SEQ ID NO: 1662346 - DNA, 15 bp, Homo sapiens
gactctagttaataa

SEQ ID NO: 1662347 - DNA, 15 bp, Homo sapiens
ggactctagttaata

SEQ ID NO: 1662348 - DNA, 15 bp, Homo sapiens
tggactctagttaat

SEQ ID NO: 1662349 - DNA, 15 bp, Homo sapiens
atggactctagttaa

SEQ ID NO: 1662350 - DNA, 15 bp, Homo sapiens
tatggactctagtta

SEQ ID NO: 1662351 - DNA, 15 bp, Homo sapiens
atatggactctagtt

SEQ ID NO: 1662352 - DNA, 15 bp, Homo sapiens
aatatggactctagt

SEQ ID NO: 1662353 - DNA, 15 bp, Homo sapiens
aaatatggactctag

SEQ ID NO: 1662354 - DNA, 15 bp, Homo sapiens
aaaatatggactcta

SEQ ID NO: 1662355 - DNA, 15 bp, Homo sapiens
taaaatatggactct

SEQ ID NO: 1662356 - DNA, 15 bp, Homo sapiens
ataaaatatggactc

SEQ ID NO: 1662357 - DNA, 15 bp, Homo sapiens
aataaaatatggact

SEQ ID NO: 1662358 - DNA, 15 bp, Homo sapiens
gaataaaatatggac

SEQ ID NO: 1662359 - DNA, 15 bp, Homo sapiens
tgaataaaatatgga

SEQ ID NO: 1662360 - DNA, 15 bp, Homo sapiens
ctgaataaaatatgg

SEQ ID NO: 1662361 - DNA, 15 bp, Homo sapiens
tctgaataaaatatg

SEQ ID NO: 1662362 - DNA, 15 bp, Homo sapiens
atctgaataaaatat

SEQ ID NO: 1662363 - DNA, 15 bp, Homo sapiens
aatctgaataaaata

SEQ ID NO: 1662364 - DNA, 15 bp, Homo sapiens
aaatctgaataaaat

SEQ ID NO: 1662365 - DNA, 15 bp, Homo sapiens
gaaatctgaataaaa

SEQ ID NO: 1662366 - DNA, 15 bp, Homo sapiens
ggaaatctgaataaa

SEQ ID NO: 1662367 - DNA, 15 bp, Homo sapiens
aggaaatctgaataa

SEQ ID NO: 1662368 - DNA, 15 bp, Homo sapiens
aaggaaatctgaata

SEQ ID NO: 1662369 - DNA, 15 bp, Homo sapiens
taaggaaatctgaat

SEQ ID NO: 1662370 - DNA, 15 bp, Homo sapiens
ctaaggaaatctgaa

SEQ ID NO: 1662371 - DNA, 15 bp, Homo sapiens
actaaggaaatctga

SEQ ID NO: 1662372 - DNA, 15 bp, Homo sapiens
aactaaggaaatctg

SEQ ID NO: 1662373 - DNA, 15 bp, Homo sapiens
aaactaaggaaatct

SEQ ID NO: 1662374 - DNA, 15 bp, Homo sapiens
aaaactaaggaaatc

SEQ ID NO: 1662375 - DNA, 15 bp, Homo sapiens
aaaaactaaggaaat

SEQ ID NO: 1662376 - DNA, 15 bp, Homo sapiens
ggaaaaactaaggaa

SEQ ID NO: 1662377 - DNA, 15 bp, Homo sapiens
aggaaaaactaagga

SEQ ID NO: 1662378 - DNA, 15 bp, Homo sapiens
aaggaaaaactaagg

SEQ ID NO: 1662379 - DNA, 15 bp, Homo sapiens
taaggaaaaactaag

SEQ ID NO: 1662380 - DNA, 15 bp, Homo sapiens
ttaaggaaaaactaa

SEQ ID NO: 1662381 - DNA, 15 bp, Homo sapiens
attaaggaaaaacta

SEQ ID NO: 1662382 - DNA, 15 bp, Homo sapiens
cattaaggaaaaact

SEQ ID NO: 1662383 - DNA, 15 bp, Homo sapiens
acattaaggaaaaac

SEQ ID NO: 1662384 - DNA, 15 bp, Homo sapiens
aacattaaggaaaaa

SEQ ID NO: 1662385 - DNA, 15 bp, Homo sapiens
gaacattaaggaaaa

SEQ ID NO: 1662386 - DNA, 15 bp, Homo sapiens
agaacattaaggaaa

SEQ ID NO: 1662387 - DNA, 15 bp, Homo sapiens
aagaacattaaggaa

SEQ ID NO: 1662388 - DNA, 15 bp, Homo sapiens
aaagaacattaagga

SEQ ID NO: 1662389 - DNA, 15 bp, Homo sapiens
aaaagaacattaagg

SEQ ID NO: 1662390 - DNA, 15 bp, Homo sapiens
aaaaagaacattaag

SEQ ID NO: 1662391 - DNA, 15 bp, Homo sapiens
caaaaagaacattaa

SEQ ID NO: 1662392 - DNA, 15 bp, Homo sapiens
acaaaaagaacatta

SEQ ID NO: 1662393 - DNA, 15 bp, Homo sapiens
cacaaaaagaacatt

SEQ ID NO: 1662394 - DNA, 15 bp, Homo sapiens
acacaaaaagaacat

SEQ ID NO: 1662395 - DNA, 15 bp, Homo sapiens
aacacaaaaagaaca

SEQ ID NO: 1662396 - DNA, 15 bp, Homo sapiens
gaacacaaaaagaac

SEQ ID NO: 1662397 - DNA, 15 bp, Homo sapiens
ggaacacaaaaagaa

SEQ ID NO: 1662398 - DNA, 15 bp, Homo sapiens
tggaacacaaaaaga

SEQ ID NO: 1662399 - DNA, 15 bp, Homo sapiens
ctggaacacaaaaag

SEQ ID NO: 1662400 - DNA, 15 bp, Homo sapiens
cctggaacacaaaaa

SEQ ID NO: 1662401 - DNA, 15 bp, Homo sapiens
tcctggaacacaaaa

SEQ ID NO: 1662402 - DNA, 15 bp, Homo sapiens
atcctggaacacaaa

SEQ ID NO: 1662403 - DNA, 15 bp, Homo sapiens
gatcctggaacacaa

SEQ ID NO: 1662404 - DNA, 15 bp, Homo sapiens
ggatcctggaacaca

SEQ ID NO: 1662405 - DNA, 15 bp, Homo sapiens
gggatcctggaacac

SEQ ID NO: 1662406 - DNA, 15 bp, Homo sapiens
tgggatcctggaaca

SEQ ID NO: 1662407 - DNA, 15 bp, Homo sapiens
atgggatcctggaac

SEQ ID NO: 1662408 - DNA, 15 bp, Homo sapiens
aatgggatcctggaa

SEQ ID NO: 1662409 - DNA, 15 bp, Homo sapiens
caatgggatcctgga

SEQ ID NO: 1662410 - DNA, 15 bp, Homo sapiens
tcaatgggatcctgg

SEQ ID NO: 1662411 - DNA, 15 bp, Homo sapiens
ttcaatgggatcctg

SEQ ID NO: 1662412 - DNA, 15 bp, Homo sapiens
cttcaatgggatcct

SEQ ID NO: 1662413 - DNA, 15 bp, Homo sapiens
tcttcaatgggatcc

SEQ ID NO: 1662414 - DNA, 15 bp, Homo sapiens
atcttcaatgggatc

SEQ ID NO: 1662415 - DNA, 15 bp, Homo sapiens
tatcttcaatgggat

SEQ ID NO: 1662416 - DNA, 15 bp, Homo sapiens
gtatcttcaatggga

SEQ ID NO: 1662417 - DNA, 15 bp, Homo sapiens
ggtatcttcaatggg

SEQ ID NO: 1662418 - DNA, 15 bp, Homo sapiens
tggtatcttcaatgg

SEQ ID NO: 1662419 - DNA, 15 bp, Homo sapiens
gtggtatcttcaatg

SEQ ID NO: 1662420 - DNA, 15 bp, Homo sapiens
cgtggtatcttcaat

SEQ ID NO: 1662421 - DNA, 15 bp, Homo sapiens
gcgtggtatcttcaa

SEQ ID NO: 1662422 - DNA, 15 bp, Homo sapiens
agcgtggtatcttca

SEQ ID NO: 1662423 - DNA, 15 bp, Homo sapiens
cagcgtggtatcttc

SEQ ID NO: 1662424 - DNA, 15 bp, Homo sapiens
gcagcgtggtatctt

SEQ ID NO: 1662425 - DNA, 15 bp, Homo sapiens
tgcagcgtggtatct

SEQ ID NO: 1662426 - DNA, 15 bp, Homo sapiens
atgcagcgtggtatc

SEQ ID NO: 1662427 - DNA, 15 bp, Homo sapiens
catgcagcgtggtat

SEQ ID NO: 1662428 - DNA, 15 bp, Homo sapiens
acatgcagcgtggta

SEQ ID NO: 1662429 - DNA, 15 bp, Homo sapiens
cacatgcagcgtggt

SEQ ID NO: 1662430 - DNA, 15 bp, Homo sapiens
acacatgcagcgtgg

SEQ ID NO: 1662431 - DNA, 15 bp, Homo sapiens
gacacatgcagcgtg

SEQ ID NO: 1662432 - DNA, 15 bp, Homo sapiens
ggacacatgcagcgt

SEQ ID NO: 1662433 - DNA, 15 bp, Homo sapiens
aggacacatgcagcg

SEQ ID NO: 1662434 - DNA, 15 bp, Homo sapiens
aaggacacatgcagc

SEQ ID NO: 1662435 - DNA, 15 bp, Homo sapiens
taaggacacatgcag

SEQ ID NO: 1662436 - DNA, 15 bp, Homo sapiens
ctaaggacacatgca

SEQ ID NO: 1662437 - DNA, 15 bp, Homo sapiens
actaaggacacatgc

SEQ ID NO: 1662438 - DNA, 15 bp, Homo sapiens
tactaaggacacatg

SEQ ID NO: 1662439 - DNA, 15 bp, Homo sapiens
ctactaaggacacat

SEQ ID NO: 1662440 - DNA, 15 bp, Homo sapiens
actactaaggacaca

SEQ ID NO: 1662441 - DNA, 15 bp, Homo sapiens
gactactaaggacac

SEQ ID NO: 1662442 - DNA, 15 bp, Homo sapiens
tgactactaaggaca

SEQ ID NO: 1662443 - DNA, 15 bp, Homo sapiens
atgactactaaggac

SEQ ID NO: 1662444 - DNA, 15 bp, Homo sapiens
catgactactaagga

SEQ ID NO: 1662445 - DNA, 15 bp, Homo sapiens
acatgactactaagg

SEQ ID NO: 1662446 - DNA, 15 bp, Homo sapiens
gacatgactactaag

SEQ ID NO: 1662447 - DNA, 15 bp, Homo sapiens
agacatgactactaa

SEQ ID NO: 1662448 - DNA, 15 bp, Homo sapiens
gagacatgactacta

SEQ ID NO: 1662449 - DNA, 15 bp, Homo sapiens
ggagacatgactact

SEQ ID NO: 1662450 - DNA, 15 bp, Homo sapiens
aggagacatgactac

SEQ ID NO: 1662451 - DNA, 15 bp, Homo sapiens
aaggagacatgacta

SEQ ID NO: 1662452 - DNA, 15 bp, Homo sapiens
taaggagacatgact

SEQ ID NO: 1662453 - DNA, 15 bp, Homo sapiens
ctaaggagacatgac

SEQ ID NO: 1662454 - DNA, 15 bp, Homo sapiens
cctaaggagacatga

SEQ ID NO: 1662455 - DNA, 15 bp, Homo sapiens
gcctaaggagacatg

SEQ ID NO: 1662456 - DNA, 15 bp, Homo sapiens
agcctaaggagacat

SEQ ID NO: 1662457 - DNA, 15 bp, Homo sapiens
gagcctaaggagaca

SEQ ID NO: 1662458 - DNA, 15 bp, Homo sapiens
ggagcctaaggagac

SEQ ID NO: 1662459 - DNA, 15 bp, Homo sapiens
aggagcctaaggaga

SEQ ID NO: 1662460 - DNA, 15 bp, Homo sapiens
gaggagcctaaggag

SEQ ID NO: 1662461 - DNA, 15 bp, Homo sapiens
agaggagcctaagga

SEQ ID NO: 1662462 - DNA, 15 bp, Homo sapiens
aagaggagcctaagg

SEQ ID NO: 1662463 - DNA, 15 bp, Homo sapiens
caagaggagcctaag

SEQ ID NO: 1662464 - DNA, 15 bp, Homo sapiens
ccaagaggagcctaa

SEQ ID NO: 1662465 - DNA, 15 bp, Homo sapiens
accaagaggagccta

SEQ ID NO: 1662466 - DNA, 15 bp, Homo sapiens
taccaagaggagcct

SEQ ID NO: 1662467 - DNA, 15 bp, Homo sapiens
ttaccaagaggagcc

SEQ ID NO: 1662468 - DNA, 15 bp, Homo sapiens
attaccaagaggagc

SEQ ID NO: 1662469 - DNA, 15 bp, Homo sapiens
cattaccaagaggag

SEQ ID NO: 1662470 - DNA, 15 bp, Homo sapiens
tcattaccaagagga

SEQ ID NO: 1662471 - DNA, 15 bp, Homo sapiens
gtcattaccaagagg

SEQ ID NO: 1662472 - DNA, 15 bp, Homo sapiens
tgtcattaccaagag

SEQ ID NO: 1662473 - DNA, 15 bp, Homo sapiens
ctgtcattaccaaga

SEQ ID NO: 1662474 - DNA, 15 bp, Homo sapiens
actgtcattaccaag

SEQ ID NO: 1662475 - DNA, 15 bp, Homo sapiens
aactgtcattaccaa

SEQ ID NO: 1662476 - DNA, 15 bp, Homo sapiens
aaactgtcattacca

SEQ ID NO: 1662477 - DNA, 15 bp, Homo sapiens
gaaactgtcattacc

SEQ ID NO: 1662478 - DNA, 15 bp, Homo sapiens
agaaactgtcattac

SEQ ID NO: 1662479 - DNA, 15 bp, Homo sapiens
gagaaactgtcatta

SEQ ID NO: 1662480 - DNA, 15 bp, Homo sapiens
tgagaaactgtcatt

SEQ ID NO: 1662481 - DNA, 15 bp, Homo sapiens
ctgagaaactgtcat

SEQ ID NO: 1662482 - DNA, 15 bp, Homo sapiens
tctgagaaactgtca

SEQ ID NO: 1662483 - DNA, 15 bp, Homo sapiens
gtctgagaaactgtc

SEQ ID NO: 1662484 - DNA, 15 bp, Homo sapiens
agtctgagaaactgt

SEQ ID NO: 1662485 - DNA, 15 bp, Homo sapiens
gagtctgagaaactg

SEQ ID NO: 1662486 - DNA, 15 bp, Homo sapiens
agagtctgagaaact

SEQ ID NO: 1662487 - DNA, 15 bp, Homo sapiens
aagagtctgagaaac

SEQ ID NO: 1662488 - DNA, 15 bp, Homo sapiens
aaagagtctgagaaa

SEQ ID NO: 1662489 - DNA, 15 bp, Homo sapiens
caaagagtctgagaa

SEQ ID NO: 1662490 - DNA, 15 bp, Homo sapiens
acaaagagtctgaga

SEQ ID NO: 1662491 - DNA, 15 bp, Homo sapiens
aacaaagagtctgag

SEQ ID NO: 1662492 - DNA, 15 bp, Homo sapiens
aaacaaagagtctga

SEQ ID NO: 1662493 - DNA, 15 bp, Homo sapiens
aaaacaaagagtctg

SEQ ID NO: 1662494 - DNA, 15 bp, Homo sapiens
aaaaacaaagagtct

SEQ ID NO: 1662495 - DNA, 15 bp, Homo sapiens
caaaaacaaagagtc

SEQ ID NO: 1662496 - DNA, 15 bp, Homo sapiens
tcaaaaacaaagagt

SEQ ID NO: 1662497 - DNA, 15 bp, Homo sapiens
atcaaaaacaaagag

SEQ ID NO: 1662498 - DNA, 15 bp, Homo sapiens
catcaaaaacaaaga

SEQ ID NO: 1662499 - DNA, 15 bp, Homo sapiens
tcatcaaaaacaaag

SEQ ID NO: 1662500 - DNA, 15 bp, Homo sapiens
ttcatcaaaaacaaa

SEQ ID NO: 1662501 - DNA, 15 bp, Homo sapiens
gttcatcaaaaacaa

SEQ ID NO: 1662502 - DNA, 15 bp, Homo sapiens
agttcatcaaaaaca

SEQ ID NO: 1662503 - DNA, 15 bp, Homo sapiens
aagttcatcaaaaac

SEQ ID NO: 1662504 - DNA, 15 bp, Homo sapiens
gaagttcatcaaaaa

SEQ ID NO: 1662505 - DNA, 15 bp, Homo sapiens
tgaagttcatcaaaa

SEQ ID NO: 1662506 - DNA, 15 bp, Homo sapiens
gtgaagttcatcaaa

SEQ ID NO: 1662507 - DNA, 15 bp, Homo sapiens
tgtgaagttcatcaa

SEQ ID NO: 1662508 - DNA, 15 bp, Homo sapiens
ctgtgaagttcatca

SEQ ID NO: 1662509 - DNA, 15 bp, Homo sapiens
actgtgaagttcatc

SEQ ID NO: 1662510 - DNA, 15 bp, Homo sapiens
aactgtgaagttcat

SEQ ID NO: 1662511 - DNA, 15 bp, Homo sapiens
aaactgtgaagttca

SEQ ID NO: 1662512 - DNA, 15 bp, Homo sapiens
aaaactgtgaagttc

SEQ ID NO: 1662513 - DNA, 15 bp, Homo sapiens
caaaactgtgaagtt

SEQ ID NO: 1662514 - DNA, 15 bp, Homo sapiens
tcaaaactgtgaagt

SEQ ID NO: 1662515 - DNA, 15 bp, Homo sapiens
ctcaaaactgtgaag

SEQ ID NO: 1662516 - DNA, 15 bp, Homo sapiens
cctcaaaactgtgaa

SEQ ID NO: 1662517 - DNA, 15 bp, Homo sapiens
tcctcaaaactgtga

SEQ ID NO: 1662518 - DNA, 15 bp, Homo sapiens
gtcctcaaaactgtg

SEQ ID NO: 1662519 - DNA, 15 bp, Homo sapiens
agtcctcaaaactgt

SEQ ID NO: 1662520 - DNA, 15 bp, Homo sapiens
tagtcctcaaaactg

SEQ ID NO: 1662521 - DNA, 15 bp, Homo sapiens
ttagtcctcaaaact

SEQ ID NO: 1662522 - DNA, 15 bp, Homo sapiens
attagtcctcaaaac

SEQ ID NO: 1662523 - DNA, 15 bp, Homo sapiens
cattagtcctcaaaa

SEQ ID NO: 1662524 - DNA, 15 bp, Homo sapiens
ccattagtcctcaaa

SEQ ID NO: 1662525 - DNA, 15 bp, Homo sapiens
accattagtcctcaa

SEQ ID NO: 1662526 - DNA, 15 bp, Homo sapiens
gaccattagtcctca

SEQ ID NO: 1662527 - DNA, 15 bp, Homo sapiens
ggaccattagtcctc

SEQ ID NO: 1662528 - DNA, 15 bp, Homo sapiens
tggaccattagtcct

SEQ ID NO: 1662529 - DNA, 15 bp, Homo sapiens
ctggaccattagtcc

SEQ ID NO: 1662530 - DNA, 15 bp, Homo sapiens
actggaccattagtc

SEQ ID NO: 1662531 - DNA, 15 bp, Homo sapiens
tactggaccattagt

SEQ ID NO: 1662532 - DNA, 15 bp, Homo sapiens
atactggaccattag

SEQ ID NO: 1662533 - DNA, 15 bp, Homo sapiens
aatactggaccatta

SEQ ID NO: 1662534 - DNA, 15 bp, Homo sapiens
gaatactggaccatt

SEQ ID NO: 1662535 - DNA, 15 bp, Homo sapiens
agaatactggaccat

SEQ ID NO: 1662536 - DNA, 15 bp, Homo sapiens
tagaatactggacca

SEQ ID NO: 1662537 - DNA, 15 bp, Homo sapiens
atagaatactggacc

SEQ ID NO: 1662538 - DNA, 15 bp, Homo sapiens
tatagaatactggac

SEQ ID NO: 1662539 - DNA, 15 bp, Homo sapiens
ctatagaatactgga

SEQ ID NO: 1662540 - DNA, 15 bp, Homo sapiens
tctatagaatactgg

SEQ ID NO: 1662541 - DNA, 15 bp, Homo sapiens
ttctatagaatactg

SEQ ID NO: 1662542 - DNA, 15 bp, Homo sapiens
attctatagaatact

SEQ ID NO: 1662543 - DNA, 15 bp, Homo sapiens
cattctatagaatac

SEQ ID NO: 1662544 - DNA, 15 bp, Homo sapiens
acattctatagaata

SEQ ID NO: 1662545 - DNA, 15 bp, Homo sapiens
gacattctatagaat

SEQ ID NO: 1662546 - DNA, 15 bp, Homo sapiens
agacattctatagaa

SEQ ID NO: 1662547 - DNA, 15 bp, Homo sapiens
gagacattctataga

SEQ ID NO: 1662548 - DNA, 15 bp, Homo sapiens
agagacattctatag

SEQ ID NO: 1662549 - DNA, 15 bp, Homo sapiens
gagagacattctata

SEQ ID NO: 1662550 - DNA, 15 bp, Homo sapiens
agagagacattctat

SEQ ID NO: 1662551 - DNA, 15 bp, Homo sapiens
tagagagacattcta

SEQ ID NO: 1662552 - DNA, 15 bp, Homo sapiens
atagagagacattct

SEQ ID NO: 1662553 - DNA, 15 bp, Homo sapiens
aatagagagacattc

SEQ ID NO: 1662554 - DNA, 15 bp, Homo sapiens
caatagagagacatt

SEQ ID NO: 1662555 - DNA, 15 bp, Homo sapiens
ccaatagagagacat

SEQ ID NO: 1662556 - DNA, 15 bp, Homo sapiens
tccaatagagagaca

SEQ ID NO: 1662557 - DNA, 15 bp, Homo sapiens
ttccaatagagagac

SEQ ID NO: 1662558 - DNA, 15 bp, Homo sapiens
attccaatagagaga

SEQ ID NO: 1662559 - DNA, 15 bp, Homo sapiens
aattccaatagagag

SEQ ID NO: 1662560 - DNA, 15 bp, Homo sapiens
aaattccaatagaga

SEQ ID NO: 1662561 - DNA, 15 bp, Homo sapiens
caaattccaatagag

SEQ ID NO: 1662562 - DNA, 15 bp, Homo sapiens
acaaattccaataga

SEQ ID NO: 1662563 - DNA, 15 bp, Homo sapiens
gacaaattccaatag

SEQ ID NO: 1662564 - DNA, 15 bp, Homo sapiens
agacaaattccaata

SEQ ID NO: 1662565 - DNA, 15 bp, Homo sapiens
cagacaaattccaat

SEQ ID NO: 1662566 - DNA, 15 bp, Homo sapiens
tcagacaaattccaa

SEQ ID NO: 1662567 - DNA, 15 bp, Homo sapiens
atcagacaaattcca

SEQ ID NO: 1662568 - DNA, 15 bp, Homo sapiens
catcagacaaattcc

SEQ ID NO: 1662569 - DNA, 15 bp, Homo sapiens
acatcagacaaattc

SEQ ID NO: 1662570 - DNA, 15 bp, Homo sapiens
aacatcagacaaatt

SEQ ID NO: 1662571 - DNA, 15 bp, Homo sapiens
gaacatcagacaaat

SEQ ID NO: 1662572 - DNA, 15 bp, Homo sapiens
agaacatcagacaaa

SEQ ID NO: 1662573 - DNA, 15 bp, Homo sapiens
aagaacatcagacaa

SEQ ID NO: 1662574 - DNA, 15 bp, Homo sapiens
gaagaacatcagaca

SEQ ID NO: 1662575 - DNA, 15 bp, Homo sapiens
agaagaacatcagac

SEQ ID NO: 1662576 - DNA, 15 bp, Homo sapiens
gagaagaacatcaga

SEQ ID NO: 1662577 - DNA, 15 bp, Homo sapiens
tgagaagaacatcag

SEQ ID NO: 1662578 - DNA, 15 bp, Homo sapiens
atgagaagaacatca

SEQ ID NO: 1662579 - DNA, 15 bp, Homo sapiens
catgagaagaacatc

SEQ ID NO: 1662580 - DNA, 15 bp, Homo sapiens
tcatgagaagaacat

SEQ ID NO: 1662581 - DNA, 15 bp, Homo sapiens
gtcatgagaagaaca

SEQ ID NO: 1662582 - DNA, 15 bp, Homo sapiens
agtcatgagaagaac

SEQ ID NO: 1662583 - DNA, 15 bp, Homo sapiens
tagtcatgagaagaa

SEQ ID NO: 1662584 - DNA, 15 bp, Homo sapiens
ctagtcatgagaaga

SEQ ID NO: 1662585 - DNA, 15 bp, Homo sapiens
tctagtcatgagaag

SEQ ID NO: 1662586 - DNA, 15 bp, Homo sapiens
atctagtcatgagaa

SEQ ID NO: 1662587 - DNA, 15 bp, Homo sapiens
aatctagtcatgaga

SEQ ID NO: 1662588 - DNA, 15 bp, Homo sapiens
caatctagtcatgag

SEQ ID NO: 1662589 - DNA, 15 bp, Homo sapiens
ccaatctagtcatga

SEQ ID NO: 1662590 - DNA, 15 bp, Homo sapiens
cccaatctagtcatg

SEQ ID NO: 1662591 - DNA, 15 bp, Homo sapiens
acccaatctagtcat

SEQ ID NO: 1662592 - DNA, 15 bp, Homo sapiens
aacccaatctagtca

SEQ ID NO: 1662593 - DNA, 15 bp, Homo sapiens
aaacccaatctagtc

SEQ ID NO: 1662594 - DNA, 15 bp, Homo sapiens
taaacccaatctagt

SEQ ID NO: 1662595 - DNA, 15 bp, Homo sapiens
ataaacccaatctag

SEQ ID NO: 1662596 - DNA, 15 bp, Homo sapiens
cataaacccaatcta

SEQ ID NO: 1662597 - DNA, 15 bp, Homo sapiens
tcataaacccaatct

SEQ ID NO: 1662598 - DNA, 15 bp, Homo sapiens
ctcataaacccaatc

SEQ ID NO: 1662599 - DNA, 15 bp, Homo sapiens
actcataaacccaat

SEQ ID NO: 1662600 - DNA, 15 bp, Homo sapiens
cactcataaacccaa

SEQ ID NO: 1662601 - DNA, 15 bp, Homo sapiens
acactcataaaccca

SEQ ID NO: 1662602 - DNA, 15 bp, Homo sapiens
aacactcataaaccc

SEQ ID NO: 1662603 - DNA, 15 bp, Homo sapiens
aaacactcataaacc

SEQ ID NO: 1662604 - DNA, 15 bp, Homo sapiens
taaacactcataaac

SEQ ID NO: 1662605 - DNA, 15 bp, Homo sapiens
ctaaacactcataaa

SEQ ID NO: 1662606 - DNA, 15 bp, Homo sapiens
cctaaacactcataa

SEQ ID NO: 1662607 - DNA, 15 bp, Homo sapiens
tcctaaacactcata

SEQ ID NO: 1662608 - DNA, 15 bp, Homo sapiens
ctcctaaacactcat

SEQ ID NO: 1662609 - DNA, 15 bp, Homo sapiens
cctcctaaacactca

SEQ ID NO: 1662610 - DNA, 15 bp, Homo sapiens
tcctcctaaacactc

SEQ ID NO: 1662611 - DNA, 15 bp, Homo sapiens
ttcctcctaaacact

SEQ ID NO: 1662612 - DNA, 15 bp, Homo sapiens
tcttcctcctaaaca

SEQ ID NO: 1662613 - DNA, 15 bp, Homo sapiens
gtcttcctcctaaac

SEQ ID NO: 1662614 - DNA, 15 bp, Homo sapiens
ggtcttcctcctaaa

SEQ ID NO: 1662615 - DNA, 15 bp, Homo sapiens
tggtcttcctcctaa

SEQ ID NO: 1662616 - DNA, 15 bp, Homo sapiens
gtggtcttcctccta

SEQ ID NO: 1662617 - DNA, 15 bp, Homo sapiens
tgtggtcttcctcct

SEQ ID NO: 1662618 - DNA, 15 bp, Homo sapiens
ttgtggtcttcctcc

SEQ ID NO: 1662619 - DNA, 15 bp, Homo sapiens
tttgtggtcttcctc

SEQ ID NO: 1662620 - DNA, 15 bp, Homo sapiens
ctttgtggtcttcct

SEQ ID NO: 1662621 - DNA, 15 bp, Homo sapiens
cctttgtggtcttcc

SEQ ID NO: 1662622 - DNA, 15 bp, Homo sapiens
acctttgtggtcttc

SEQ ID NO: 1662623 - DNA, 15 bp, Homo sapiens
tacctttgtggtctt

SEQ ID NO: 1662624 - DNA, 15 bp, Homo sapiens
ctacctttgtggtct

SEQ ID NO: 1662625 - DNA, 15 bp, Homo sapiens
tctacctttgtggtc

SEQ ID NO: 1662626 - DNA, 15 bp, Homo sapiens
ctctacctttgtggt

SEQ ID NO: 1662627 - DNA, 15 bp, Homo sapiens
actctacctttgtgg

SEQ ID NO: 1662628 - DNA, 15 bp, Homo sapiens
cactctacctttgtg

SEQ ID NO: 1662629 - DNA, 15 bp, Homo sapiens
gcactctacctttgt

SEQ ID NO: 1662630 - DNA, 15 bp, Homo sapiens
ggcactctacctttg

SEQ ID NO: 1662631 - DNA, 15 bp, Homo sapiens
tggcactctaccttt

SEQ ID NO: 1662632 - DNA, 15 bp, Homo sapiens
atggcactctacctt

SEQ ID NO: 1662633 - DNA, 15 bp, Homo sapiens
aatggcactctacct

SEQ ID NO: 1662634 - DNA, 15 bp, Homo sapiens
gaatggcactctacc

SEQ ID NO: 1662635 - DNA, 15 bp, Homo sapiens
agaatggcactctac

SEQ ID NO: 1662636 - DNA, 15 bp, Homo sapiens
aagaatggcactcta

SEQ ID NO: 1662637 - DNA, 15 bp, Homo sapiens
taagaatggcactct

SEQ ID NO: 1662638 - DNA, 15 bp, Homo sapiens
ataagaatggcactc

SEQ ID NO: 1662639 - DNA, 15 bp, Homo sapiens
gataagaatggcact

SEQ ID NO: 1662640 - DNA, 15 bp, Homo sapiens
tgataagaatggcac

SEQ ID NO: 1662641 - DNA, 15 bp, Homo sapiens
gtgataagaatggca

SEQ ID NO: 1662642 - DNA, 15 bp, Homo sapiens
agtgataagaatggc

SEQ ID NO: 1662643 - DNA, 15 bp, Homo sapiens
aagtgataagaatgg

SEQ ID NO: 1662644 - DNA, 15 bp, Homo sapiens
taagtgataagaatg

SEQ ID NO: 1662645 - DNA, 15 bp, Homo sapiens
ataagtgataagaat

SEQ ID NO: 1662646 - DNA, 15 bp, Homo sapiens
tgataagtgataaga

SEQ ID NO: 1662647 - DNA, 15 bp, Homo sapiens
ttgataagtgataag

SEQ ID NO: 1662648 - DNA, 15 bp, Homo sapiens
cttgataagtgataa

SEQ ID NO: 1662649 - DNA, 15 bp, Homo sapiens
tcttgataagtgata

SEQ ID NO: 1662650 - DNA, 15 bp, Homo sapiens
ctcttgataagtgat

SEQ ID NO: 1662651 - DNA, 15 bp, Homo sapiens
actcttgataagtga

SEQ ID NO: 1662652 - DNA, 15 bp, Homo sapiens
tactcttgataagtg

SEQ ID NO: 1662653 - DNA, 15 bp, Homo sapiens
gtactcttgataagt

SEQ ID NO: 1662654 - DNA, 15 bp, Homo sapiens
tgtactcttgataag

SEQ ID NO: 1662655 - DNA, 15 bp, Homo sapiens
atgtactcttgataa

SEQ ID NO: 1662656 - DNA, 15 bp, Homo sapiens
tatgtactcttgata

SEQ ID NO: 1662657 - DNA, 15 bp, Homo sapiens
gtatgtactcttgat

SEQ ID NO: 1662658 - DNA, 15 bp, Homo sapiens
agtatgtactcttga

SEQ ID NO: 1662659 - DNA, 15 bp, Homo sapiens
tagtatgtactcttg

SEQ ID NO: 1662660 - DNA, 15 bp, Homo sapiens
atagtatgtactctt

SEQ ID NO: 1662661 - DNA, 15 bp, Homo sapiens
gatagtatgtactct

SEQ ID NO: 1662662 - DNA, 15 bp, Homo sapiens
tgatagtatgtactc

SEQ ID NO: 1662663 - DNA, 15 bp, Homo sapiens
ttgatagtatgtact

SEQ ID NO: 1662664 - DNA, 15 bp, Homo sapiens
gttgatagtatgtac

SEQ ID NO: 1662665 - DNA, 15 bp, Homo sapiens
tgttgatagtatgta

SEQ ID NO: 1662666 - DNA, 15 bp, Homo sapiens
atgttgatagtatgt

SEQ ID NO: 1662667 - DNA, 15 bp, Homo sapiens
catgttgatagtatg

SEQ ID NO: 1662668 - DNA, 15 bp, Homo sapiens
tcatgttgatagtat

SEQ ID NO: 1662669 - DNA, 15 bp, Homo sapiens
gtcatgttgatagta

SEQ ID NO: 1662670 - DNA, 15 bp, Homo sapiens
agtcatgttgatagt

SEQ ID NO: 1662671 - DNA, 15 bp, Homo sapiens
aagtcatgttgatag

SEQ ID NO: 1662672 - DNA, 15 bp, Homo sapiens
taagtcatgttgata

SEQ ID NO: 1662673 - DNA, 15 bp, Homo sapiens
ataagtcatgttgat

SEQ ID NO: 1662674 - DNA, 15 bp, Homo sapiens
gataagtcatgttga

SEQ ID NO: 1662675 - DNA, 15 bp, Homo sapiens
tgataagtcatgttg

SEQ ID NO: 1662676 - DNA, 15 bp, Homo sapiens
gtgataagtcatgtt

SEQ ID NO: 1662677 - DNA, 15 bp, Homo sapiens
agtgataagtcatgt

SEQ ID NO: 1662678 - DNA, 15 bp, Homo sapiens
cagtgataagtcatg

SEQ ID NO: 1662679 - DNA, 15 bp, Homo sapiens
acagtgataagtcat

SEQ ID NO: 1662680 - DNA, 15 bp, Homo sapiens
aacagtgataagtca

SEQ ID NO: 1662681 - DNA, 15 bp, Homo sapiens
aaacagtgataagtc

SEQ ID NO: 1662682 - DNA, 15 bp, Homo sapiens
taaacagtgataagt

SEQ ID NO: 1662683 - DNA, 15 bp, Homo sapiens
ataaacagtgataag

SEQ ID NO: 1662684 - DNA, 15 bp, Homo sapiens
cataaacagtgataa

SEQ ID NO: 1662685 - DNA, 15 bp, Homo sapiens
acataaacagtgata

SEQ ID NO: 1662686 - DNA, 15 bp, Homo sapiens
aacataaacagtgat

SEQ ID NO: 1662687 - DNA, 15 bp, Homo sapiens
taacataaacagtga

SEQ ID NO: 1662688 - DNA, 15 bp, Homo sapiens
ataacataaacagtg

SEQ ID NO: 1662689 - DNA, 15 bp, Homo sapiens
gataacataaacagt

SEQ ID NO: 1662690 - DNA, 15 bp, Homo sapiens
ggataacataaacag

SEQ ID NO: 1662691 - DNA, 15 bp, Homo sapiens
aggataacataaaca

SEQ ID NO: 1662692 - DNA, 15 bp, Homo sapiens
aaggataacataaac

SEQ ID NO: 1662693 - DNA, 15 bp, Homo sapiens
taaggataacataaa

SEQ ID NO: 1662694 - DNA, 15 bp, Homo sapiens
ttaaggataacataa

SEQ ID NO: 1662695 - DNA, 15 bp, Homo sapiens
attaaggataacata

SEQ ID NO: 1662696 - DNA, 15 bp, Homo sapiens
gattaaggataacat

SEQ ID NO: 1662697 - DNA, 15 bp, Homo sapiens
tgattaaggataaca

SEQ ID NO: 1662698 - DNA, 15 bp, Homo sapiens
gtgattaaggataac

SEQ ID NO: 1662699 - DNA, 15 bp, Homo sapiens
ggtgattaaggataa

SEQ ID NO: 1662700 - DNA, 15 bp, Homo sapiens
aggtgattaaggata

SEQ ID NO: 1662701 - DNA, 15 bp, Homo sapiens
caggtgattaaggat

SEQ ID NO: 1662702 - DNA, 15 bp, Homo sapiens
acaggtgattaagga

SEQ ID NO: 1662703 - DNA, 15 bp, Homo sapiens
gacaggtgattaagg

SEQ ID NO: 1662704 - DNA, 15 bp, Homo sapiens
agacaggtgattaag

SEQ ID NO: 1662705 - DNA, 15 bp, Homo sapiens
tcagacaggtgatta

SEQ ID NO: 1662706 - DNA, 15 bp, Homo sapiens
ctcagacaggtgatt

SEQ ID NO: 1662707 - DNA, 15 bp, Homo sapiens
cctcagacaggtgat

SEQ ID NO: 1662708 - DNA, 15 bp, Homo sapiens
acctcagacaggtga

SEQ ID NO: 1662709 - DNA, 15 bp, Homo sapiens
tacctcagacaggtg

SEQ ID NO: 1662710 - DNA, 15 bp, Homo sapiens
gtacctcagacaggt

SEQ ID NO: 1662711 - DNA, 15 bp, Homo sapiens
agtacctcagacagg

SEQ ID NO: 1662712 - DNA, 15 bp, Homo sapiens
tagtacctcagacag

SEQ ID NO: 1662713 - DNA, 15 bp, Homo sapiens
atagtacctcagaca

SEQ ID NO: 1662714 - DNA, 15 bp, Homo sapiens
aatagtacctcagac

SEQ ID NO: 1662715 - DNA, 15 bp, Homo sapiens
aaatagtacctcaga

SEQ ID NO: 1662716 - DNA, 15 bp, Homo sapiens
caaatagtacctcag

SEQ ID NO: 1662717 - DNA, 15 bp, Homo sapiens
acaaatagtacctca

SEQ ID NO: 1662718 - DNA, 15 bp, Homo sapiens
gacaaatagtacctc

SEQ ID NO: 1662719 - DNA, 15 bp, Homo sapiens
tgacaaatagtacct

SEQ ID NO: 1662720 - DNA, 15 bp, Homo sapiens
ctgacaaatagtacc

SEQ ID NO: 1662721 - DNA, 15 bp, Homo sapiens
cctgacaaatagtac

SEQ ID NO: 1662722 - DNA, 15 bp, Homo sapiens
acctgacaaatagta

SEQ ID NO: 1662723 - DNA, 15 bp, Homo sapiens
aacctgacaaatagt

SEQ ID NO: 1662724 - DNA, 15 bp, Homo sapiens
aaacctgacaaatag

SEQ ID NO: 1662725 - DNA, 15 bp, Homo sapiens
gaaacctgacaaata

SEQ ID NO: 1662726 - DNA, 15 bp, Homo sapiens
agaaacctgacaaat

SEQ ID NO: 1662727 - DNA, 15 bp, Homo sapiens
gagaaacctgacaaa

SEQ ID NO: 1662728 - DNA, 15 bp, Homo sapiens
ggagaaacctgacaa

SEQ ID NO: 1662729 - DNA, 15 bp, Homo sapiens
tggagaaacctgaca

SEQ ID NO: 1662730 - DNA, 15 bp, Homo sapiens
ctggagaaacctgac

SEQ ID NO: 1662731 - DNA, 15 bp, Homo sapiens
gctggagaaacctga

SEQ ID NO: 1662732 - DNA, 15 bp, Homo sapiens
cgctggagaaacctg

SEQ ID NO: 1662733 - DNA, 15 bp, Homo sapiens
acgctggagaaacct

SEQ ID NO: 1662734 - DNA, 15 bp, Homo sapiens
tacgctggagaaacc

SEQ ID NO: 1662735 - DNA, 15 bp, Homo sapiens
ttacgctggagaaac

SEQ ID NO: 1662736 - DNA, 15 bp, Homo sapiens
tttacgctggagaaa

SEQ ID NO: 1662737 - DNA, 15 bp, Homo sapiens
ttttacgctggagaa

SEQ ID NO: 1662738 - DNA, 15 bp, Homo sapiens
attttacgctggaga

SEQ ID NO: 1662739 - DNA, 15 bp, Homo sapiens
aattttacgctggag

SEQ ID NO: 1662740 - DNA, 15 bp, Homo sapiens
taattttacgctgga

SEQ ID NO: 1662741 - DNA, 15 bp, Homo sapiens
ctaattttacgctgg

SEQ ID NO: 1662742 - DNA, 15 bp, Homo sapiens
actaattttacgctg

SEQ ID NO: 1662743 - DNA, 15 bp, Homo sapiens
gactaattttacgct

SEQ ID NO: 1662744 - DNA, 15 bp, Homo sapiens
agactaattttacgc

SEQ ID NO: 1662745 - DNA, 15 bp, Homo sapiens
aagactaattttacg

SEQ ID NO: 1662746 - DNA, 15 bp, Homo sapiens
aaagactaattttac

SEQ ID NO: 1662747 - DNA, 15 bp, Homo sapiens
taaagactaatttta

SEQ ID NO: 1662748 - DNA, 15 bp, Homo sapiens
ataaagactaatttt

SEQ ID NO: 1662749 - DNA, 15 bp, Homo sapiens
aataaagactaattt

SEQ ID NO: 1662750 - DNA, 15 bp, Homo sapiens
aaataaagactaatt

SEQ ID NO: 1662751 - DNA, 15 bp, Homo sapiens
gaaataaagactaat

SEQ ID NO: 1662752 - DNA, 15 bp, Homo sapiens
agaaataaagactaa

SEQ ID NO: 1662753 - DNA, 15 bp, Homo sapiens
gagaaataaagacta

SEQ ID NO: 1662754 - DNA, 15 bp, Homo sapiens
ggagaaataaagact

SEQ ID NO: 1662755 - DNA, 15 bp, Homo sapiens
tggagaaataaagac

SEQ ID NO: 1662756 - DNA, 15 bp, Homo sapiens
atggagaaataaaga

SEQ ID NO: 1662757 - DNA, 15 bp, Homo sapiens
aatggagaaataaag

SEQ ID NO: 1662758 - DNA, 15 bp, Homo sapiens
aaatggagaaataaa

SEQ ID NO: 1662759 - DNA, 15 bp, Homo sapiens
gaaatggagaaataa

SEQ ID NO: 1662760 - DNA, 15 bp, Homo sapiens
ggaaatggagaaata

SEQ ID NO: 1662761 - DNA, 15 bp, Homo sapiens
gggaaatggagaaat

SEQ ID NO: 1662762 - DNA, 15 bp, Homo sapiens
agggaaatggagaaa

SEQ ID NO: 1662763 - DNA, 15 bp, Homo sapiens
tagggaaatggagaa

SEQ ID NO: 1662764 - DNA, 15 bp, Homo sapiens
gtagggaaatggaga

SEQ ID NO: 1662765 - DNA, 15 bp, Homo sapiens
agtagggaaatggag

SEQ ID NO: 1662766 - DNA, 15 bp, Homo sapiens
tagtagggaaatgga

SEQ ID NO: 1662767 - DNA, 15 bp, Homo sapiens
atagtagggaaatgg

SEQ ID NO: 1662768 - DNA, 15 bp, Homo sapiens
tatagtagggaaatg

SEQ ID NO: 1662769 - DNA, 15 bp, Homo sapiens
gtatagtagggaaat

SEQ ID NO: 1662770 - DNA, 15 bp, Homo sapiens
agtatagtagggaaa

SEQ ID NO: 1662771 - DNA, 15 bp, Homo sapiens
cagtatagtagggaa

SEQ ID NO: 1662772 - DNA, 15 bp, Homo sapiens
acagtatagtaggga

SEQ ID NO: 1662773 - DNA, 15 bp, Homo sapiens
aacagtatagtaggg

SEQ ID NO: 1662774 - DNA, 15 bp, Homo sapiens
gaacagtatagtagg

SEQ ID NO: 1662775 - DNA, 15 bp, Homo sapiens
tgaacagtatagtag

SEQ ID NO: 1662776 - DNA, 15 bp, Homo sapiens
gtgaacagtatagta

SEQ ID NO: 1662777 - DNA, 15 bp, Homo sapiens
tgtgaacagtatagt

SEQ ID NO: 1662778 - DNA, 15 bp, Homo sapiens
atgtgaacagtatag

SEQ ID NO: 1662779 - DNA, 15 bp, Homo sapiens
tatgtgaacagtata

SEQ ID NO: 1662780 - DNA, 15 bp, Homo sapiens
ctatgtgaacagtat

SEQ ID NO: 1662781 - DNA, 15 bp, Homo sapiens
cctatgtgaacagta

SEQ ID NO: 1662782 - DNA, 15 bp, Homo sapiens
tcctatgtgaacagt

SEQ ID NO: 1662783 - DNA, 15 bp, Homo sapiens
ttcctatgtgaacag

SEQ ID NO: 1662784 - DNA, 15 bp, Homo sapiens
cttcctatgtgaaca

SEQ ID NO: 1662785 - DNA, 15 bp, Homo sapiens
acttcctatgtgaac

SEQ ID NO: 1662786 - DNA, 15 bp, Homo sapiens
gacttcctatgtgaa

SEQ ID NO: 1662787 - DNA, 15 bp, Homo sapiens
tgacttcctatgtga

SEQ ID NO: 1662788 - DNA, 15 bp, Homo sapiens
gtgacttcctatgtg

SEQ ID NO: 1662789 - DNA, 15 bp, Homo sapiens
agtgacttcctatgt

SEQ ID NO: 1662790 - DNA, 15 bp, Homo sapiens
tagtgacttcctatg

SEQ ID NO: 1662791 - DNA, 15 bp, Homo sapiens
atagtgacttcctat

SEQ ID NO: 1662792 - DNA, 15 bp, Homo sapiens
catagtgacttccta

SEQ ID NO: 1662793 - DNA, 15 bp, Homo sapiens
acatagtgacttcct

SEQ ID NO: 1662794 - DNA, 15 bp, Homo sapiens
cacatagtgacttcc

SEQ ID NO: 1662795 - DNA, 15 bp, Homo sapiens
gcacatagtgacttc

SEQ ID NO: 1662796 - DNA, 15 bp, Homo sapiens
tgcacatagtgactt

SEQ ID NO: 1662797 - DNA, 15 bp, Homo sapiens
ctgcacatagtgact

SEQ ID NO: 1662798 - DNA, 15 bp, Homo sapiens
gctgcacatagtgac

SEQ ID NO: 1662799 - DNA, 15 bp, Homo sapiens
ggctgcacatagtga

SEQ ID NO: 1662800 - DNA, 15 bp, Homo sapiens
tggctgcacatagtg

SEQ ID NO: 1662801 - DNA, 15 bp, Homo sapiens
ctggctgcacatagt

SEQ ID NO: 1662802 - DNA, 15 bp, Homo sapiens
gctggctgcacatag

SEQ ID NO: 1662803 - DNA, 15 bp, Homo sapiens
tgctggctgcacata

SEQ ID NO: 1662804 - DNA, 15 bp, Homo sapiens
gtgctggctgcacat

SEQ ID NO: 1662805 - DNA, 15 bp, Homo sapiens
agtgctggctgcaca

SEQ ID NO: 1662806 - DNA, 15 bp, Homo sapiens
aagtgctggctgcac

SEQ ID NO: 1662807 - DNA, 15 bp, Homo sapiens
taagtgctggctgca

SEQ ID NO: 1662808 - DNA, 15 bp, Homo sapiens
ttaagtgctggctgc

SEQ ID NO: 1662809 - DNA, 15 bp, Homo sapiens
cttaagtgctggctg

SEQ ID NO: 1662810 - DNA, 15 bp, Homo sapiens
ccttaagtgctggct

SEQ ID NO: 1662811 - DNA, 15 bp, Homo sapiens
tccttaagtgctggc

SEQ ID NO: 1662812 - DNA, 15 bp, Homo sapiens
ttccttaagtgctgg

SEQ ID NO: 1662813 - DNA, 15 bp, Homo sapiens
attccttaagtgctg

SEQ ID NO: 1662814 - DNA, 15 bp, Homo sapiens
cattccttaagtgct

SEQ ID NO: 1662815 - DNA, 15 bp, Homo sapiens
ccattccttaagtgc

SEQ ID NO: 1662816 - DNA, 15 bp, Homo sapiens
cccattccttaagtg

SEQ ID NO: 1662817 - DNA, 15 bp, Homo sapiens
tcccattccttaagt

SEQ ID NO: 1662818 - DNA, 15 bp, Homo sapiens
ttcccattccttaag

SEQ ID NO: 1662819 - DNA, 15 bp, Homo sapiens
tttcccattccttaa

SEQ ID NO: 1662820 - DNA, 15 bp, Homo sapiens
atttcccattcctta

SEQ ID NO: 1662821 - DNA, 15 bp, Homo sapiens
aatttcccattcctt

SEQ ID NO: 1662822 - DNA, 15 bp, Homo sapiens
taatttcccattcct

SEQ ID NO: 1662823 - DNA, 15 bp, Homo sapiens
gtaatttcccattcc

SEQ ID NO: 1662824 - DNA, 15 bp, Homo sapiens
ggtaatttcccattc

SEQ ID NO: 1662825 - DNA, 15 bp, Homo sapiens
aggtaatttcccatt

SEQ ID NO: 1662826 - DNA, 15 bp, Homo sapiens
aaggtaatttcccat

SEQ ID NO: 1662827 - DNA, 15 bp, Homo sapiens
gaaggtaatttccca

SEQ ID NO: 1662828 - DNA, 15 bp, Homo sapiens
ggaaggtaatttccc

SEQ ID NO: 1662829 - DNA, 15 bp, Homo sapiens
tggaaggtaatttcc

SEQ ID NO: 1662830 - DNA, 15 bp, Homo sapiens
gtggaaggtaatttc

SEQ ID NO: 1662831 - DNA, 15 bp, Homo sapiens
ggtggaaggtaattt

SEQ ID NO: 1662832 - DNA, 15 bp, Homo sapiens
aggtggaaggtaatt

SEQ ID NO: 1662833 - DNA, 15 bp, Homo sapiens
gaggtggaaggtaat

SEQ ID NO: 1662834 - DNA, 15 bp, Homo sapiens
tgaggtggaaggtaa

SEQ ID NO: 1662835 - DNA, 15 bp, Homo sapiens
atgaggtggaaggta

SEQ ID NO: 1662836 - DNA, 15 bp, Homo sapiens
aatgaggtggaaggt

SEQ ID NO: 1662837 - DNA, 15 bp, Homo sapiens
caatgaggtggaagg

SEQ ID NO: 1662838 - DNA, 15 bp, Homo sapiens
tcaatgaggtggaag

SEQ ID NO: 1662839 - DNA, 15 bp, Homo sapiens
ctcaatgaggtggaa

SEQ ID NO: 1662840 - DNA, 15 bp, Homo sapiens
cctcaatgaggtgga

SEQ ID NO: 1662841 - DNA, 15 bp, Homo sapiens
ccctcaatgaggtgg

SEQ ID NO: 1662842 - DNA, 15 bp, Homo sapiens
gccctcaatgaggtg

SEQ ID NO: 1662843 - DNA, 15 bp, Homo sapiens
tgccctcaatgaggt

SEQ ID NO: 1662844 - DNA, 15 bp, Homo sapiens
ctgccctcaatgagg

SEQ ID NO: 1662845 - DNA, 15 bp, Homo sapiens
tctgccctcaatgag

SEQ ID NO: 1662846 - DNA, 15 bp, Homo sapiens
ctctgccctcaatga

SEQ ID NO: 1662847 - DNA, 15 bp, Homo sapiens
actctgccctcaatg

SEQ ID NO: 1662848 - DNA, 15 bp, Homo sapiens
tactctgccctcaat

SEQ ID NO: 1662849 - DNA, 15 bp, Homo sapiens
atactctgccctcaa

SEQ ID NO: 1662850 - DNA, 15 bp, Homo sapiens
aatactctgccctca

SEQ ID NO: 1662851 - DNA, 15 bp, Homo sapiens
aaatactctgccctc

SEQ ID NO: 1662852 - DNA, 15 bp, Homo sapiens
taaatactctgccct

SEQ ID NO: 1662853 - DNA, 15 bp, Homo sapiens
gtaaatactctgccc

SEQ ID NO: 1662854 - DNA, 15 bp, Homo sapiens
tgtaaatactctgcc

SEQ ID NO: 1662855 - DNA, 15 bp, Homo sapiens
atgtaaatactctgc

SEQ ID NO: 1662856 - DNA, 15 bp, Homo sapiens
tatgtaaatactctg

SEQ ID NO: 1662857 - DNA, 15 bp, Homo sapiens
ttatgtaaatactct

SEQ ID NO: 1662858 - DNA, 15 bp, Homo sapiens
tttatgtaaatactc

SEQ ID NO: 1662859 - DNA, 15 bp, Homo sapiens
atttatgtaaatact

SEQ ID NO: 1662860 - DNA, 15 bp, Homo sapiens
aatttatgtaaatac

SEQ ID NO: 1662861 - DNA, 15 bp, Homo sapiens
taatttatgtaaata

SEQ ID NO: 1662862 - DNA, 15 bp, Homo sapiens
ataatttatgtaaat

SEQ ID NO: 1662863 - DNA, 15 bp, Homo sapiens
aataatttatgtaaa

SEQ ID NO: 1662864 - DNA, 15 bp, Homo sapiens
aaataatttatgtaa

SEQ ID NO: 1662865 - DNA, 15 bp, Homo sapiens
caaataatttatgta

SEQ ID NO: 1662866 - DNA, 15 bp, Homo sapiens
ccaaataatttatgt

SEQ ID NO: 1662867 - DNA, 15 bp, Homo sapiens
tccaaataatttatg

SEQ ID NO: 1662868 - DNA, 15 bp, Homo sapiens
ttccaaataatttat

SEQ ID NO: 1662869 - DNA, 15 bp, Homo sapiens
attccaaataattta

SEQ ID NO: 1662870 - DNA, 15 bp, Homo sapiens
aattccaaataattt

SEQ ID NO: 1662871 - DNA, 15 bp, Homo sapiens
gaattccaaataatt

SEQ ID NO: 1662872 - DNA, 15 bp, Homo sapiens
agaattccaaataat

SEQ ID NO: 1662873 - DNA, 15 bp, Homo sapiens
aagaattccaaataa

SEQ ID NO: 1662874 - DNA, 15 bp, Homo sapiens
aaagaattccaaata

SEQ ID NO: 1662875 - DNA, 15 bp, Homo sapiens
aaaagaattccaaat

SEQ ID NO: 1662876 - DNA, 15 bp, Homo sapiens
caaaagaattccaaa

SEQ ID NO: 1662877 - DNA, 15 bp, Homo sapiens
gcaaaagaattccaa

SEQ ID NO: 1662878 - DNA, 15 bp, Homo sapiens
tgcaaaagaattcca

SEQ ID NO: 1662879 - DNA, 15 bp, Homo sapiens
gtgcaaaagaattcc

SEQ ID NO: 1662880 - DNA, 15 bp, Homo sapiens
tgtgcaaaagaattc

SEQ ID NO: 1662881 - DNA, 15 bp, Homo sapiens
ctgtgcaaaagaatt

SEQ ID NO: 1662882 - DNA, 15 bp, Homo sapiens
cctgtgcaaaagaat

SEQ ID NO: 1662883 - DNA, 15 bp, Homo sapiens
tcctgtgcaaaagaa

SEQ ID NO: 1662884 - DNA, 15 bp, Homo sapiens
atcctgtgcaaaaga

SEQ ID NO: 1662885 - DNA, 15 bp, Homo sapiens
catcctgtgcaaaag

SEQ ID NO: 1662886 - DNA, 15 bp, Homo sapiens
acatcctgtgcaaaa

SEQ ID NO: 1662887 - DNA, 15 bp, Homo sapiens
gacatcctgtgcaaa

SEQ ID NO: 1662888 - DNA, 15 bp, Homo sapiens
agacatcctgtgcaa

SEQ ID NO: 1662889 - DNA, 15 bp, Homo sapiens
aagacatcctgtgca

SEQ ID NO: 1662890 - DNA, 15 bp, Homo sapiens
aaagacatcctgtgc

SEQ ID NO: 1662891 - DNA, 15 bp, Homo sapiens
aaaagacatcctgtg

SEQ ID NO: 1662892 - DNA, 15 bp, Homo sapiens
gaaaagacatcctgt

SEQ ID NO: 1662893 - DNA, 15 bp, Homo sapiens
agaaaagacatcctg

SEQ ID NO: 1662894 - DNA, 15 bp, Homo sapiens
gagaaaagacatcct

SEQ ID NO: 1662895 - DNA, 15 bp, Homo sapiens
ggagaaaagacatcc

SEQ ID NO: 1662896 - DNA, 15 bp, Homo sapiens
tggagaaaagacatc

SEQ ID NO: 1662897 - DNA, 15 bp, Homo sapiens
gtggagaaaagacat

SEQ ID NO: 1662898 - DNA, 15 bp, Homo sapiens
tgtggagaaaagaca

SEQ ID NO: 1662899 - DNA, 15 bp, Homo sapiens
ttgtggagaaaagac

SEQ ID NO: 1662900 - DNA, 15 bp, Homo sapiens
attgtggagaaaaga

SEQ ID NO: 1662901 - DNA, 15 bp, Homo sapiens
cattgtggagaaaag

SEQ ID NO: 1662902 - DNA, 15 bp, Homo sapiens
acattgtggagaaaa

SEQ ID NO: 1662903 - DNA, 15 bp, Homo sapiens
tacattgtggagaaa

SEQ ID NO: 1662904 - DNA, 15 bp, Homo sapiens
atacattgtggagaa

SEQ ID NO: 1662905 - DNA, 15 bp, Homo sapiens
aatacattgtggaga

SEQ ID NO: 1662906 - DNA, 15 bp, Homo sapiens
caatacattgtggag

SEQ ID NO: 1662907 - DNA, 15 bp, Homo sapiens
acaatacattgtgga

SEQ ID NO: 1662908 - DNA, 15 bp, Homo sapiens
cacaatacattgtgg

SEQ ID NO: 1662909 - DNA, 15 bp, Homo sapiens
acacaatacattgtg

SEQ ID NO: 1662910 - DNA, 15 bp, Homo sapiens
aacacaatacattgt

SEQ ID NO: 1662911 - DNA, 15 bp, Homo sapiens
aaacacaatacattg

SEQ ID NO: 1662912 - DNA, 15 bp, Homo sapiens
taaacacaatacatt

SEQ ID NO: 1662913 - DNA, 15 bp, Homo sapiens
ataaacacaatacat

SEQ ID NO: 1662914 - DNA, 15 bp, Homo sapiens
aataaacacaataca

SEQ ID NO: 1662915 - DNA, 15 bp, Homo sapiens
gaataaacacaatac

SEQ ID NO: 1662916 - DNA, 15 bp, Homo sapiens
tgaataaacacaata

SEQ ID NO: 1662917 - DNA, 15 bp, Homo sapiens
ctgaataaacacaat

SEQ ID NO: 1662918 - DNA, 15 bp, Homo sapiens
actgaataaacacaa

SEQ ID NO: 1662919 - DNA, 15 bp, Homo sapiens
gactgaataaacaca

SEQ ID NO: 1662920 - DNA, 15 bp, Homo sapiens
tgactgaataaacac

SEQ ID NO: 1662921 - DNA, 15 bp, Homo sapiens
atgactgaataaaca

SEQ ID NO: 1662922 - DNA, 15 bp, Homo sapiens
aatgactgaataaac

SEQ ID NO: 1662923 - DNA, 15 bp, Homo sapiens
aaatgactgaataaa

SEQ ID NO: 1662924 - DNA, 15 bp, Homo sapiens
taaatgactgaataa

SEQ ID NO: 1662925 - DNA, 15 bp, Homo sapiens
ataaatgactgaata

SEQ ID NO: 1662926 - DNA, 15 bp, Homo sapiens
tataaatgactgaat

SEQ ID NO: 1662927 - DNA, 15 bp, Homo sapiens
atataaatgactgaa

SEQ ID NO: 1662928 - DNA, 15 bp, Homo sapiens
gatataaatgactga

SEQ ID NO: 1662929 - DNA, 15 bp, Homo sapiens
tgatataaatgactg

SEQ ID NO: 1662930 - DNA, 15 bp, Homo sapiens
ctgatataaatgact

SEQ ID NO: 1662931 - DNA, 15 bp, Homo sapiens
actgatataaatgac

SEQ ID NO: 1662932 - DNA, 15 bp, Homo sapiens
tactgatataaatga

SEQ ID NO: 1662933 - DNA, 15 bp, Homo sapiens
atactgatataaatg

SEQ ID NO: 1662934 - DNA, 15 bp, Homo sapiens
catactgatataaat

SEQ ID NO: 1662935 - DNA, 15 bp, Homo sapiens
tcatactgatataaa

SEQ ID NO: 1662936 - DNA, 15 bp, Homo sapiens
atcatactgatataa

SEQ ID NO: 1662937 - DNA, 15 bp, Homo sapiens
gatcatactgatata

SEQ ID NO: 1662938 - DNA, 15 bp, Homo sapiens
agatcatactgatat

SEQ ID NO: 1662939 - DNA, 15 bp, Homo sapiens
gagatcatactgata

SEQ ID NO: 1662940 - DNA, 15 bp, Homo sapiens
tgagatcatactgat

SEQ ID NO: 1662941 - DNA, 15 bp, Homo sapiens
ctgagatcatactga

SEQ ID NO: 1662942 - DNA, 15 bp, Homo sapiens
cctgagatcatactg

SEQ ID NO: 1662943 - DNA, 15 bp, Homo sapiens
ccctgagatcatact

SEQ ID NO: 1662944 - DNA, 15 bp, Homo sapiens
tccctgagatcatac

SEQ ID NO: 1662945 - DNA, 15 bp, Homo sapiens
atccctgagatcata

SEQ ID NO: 1662946 - DNA, 15 bp, Homo sapiens
tatccctgagatcat

SEQ ID NO: 1662947 - DNA, 15 bp, Homo sapiens
atatccctgagatca

SEQ ID NO: 1662948 - DNA, 15 bp, Homo sapiens
aatatccctgagatc

SEQ ID NO: 1662949 - DNA, 15 bp, Homo sapiens
aaatatccctgagat

SEQ ID NO: 1662950 - DNA, 15 bp, Homo sapiens
aaaatatccctgaga

SEQ ID NO: 1662951 - DNA, 15 bp, Homo sapiens
taaaatatccctgag

SEQ ID NO: 1662952 - DNA, 15 bp, Homo sapiens
ataaaatatccctga

SEQ ID NO: 1662953 - DNA, 15 bp, Homo sapiens
tataaaatatccctg

SEQ ID NO: 1662954 - DNA, 15 bp, Homo sapiens
gtataaaatatccct

SEQ ID NO: 1662955 - DNA, 15 bp, Homo sapiens
agtataaaatatccc

SEQ ID NO: 1662956 - DNA, 15 bp, Homo sapiens
gagtataaaatatcc

SEQ ID NO: 1662957 - DNA, 15 bp, Homo sapiens
agagtataaaatatc

SEQ ID NO: 1662958 - DNA, 15 bp, Homo sapiens
cagagtataaaatat

SEQ ID NO: 1662959 - DNA, 15 bp, Homo sapiens
ccagagtataaaata

SEQ ID NO: 1662960 - DNA, 15 bp, Homo sapiens
cccagagtataaaat

SEQ ID NO: 1662961 - DNA, 15 bp, Homo sapiens
acccagagtataaaa

SEQ ID NO: 1662962 - DNA, 15 bp, Homo sapiens
aacccagagtataaa

SEQ ID NO: 1662963 - DNA, 15 bp, Homo sapiens
taacccagagtataa

SEQ ID NO: 1662964 - DNA, 15 bp, Homo sapiens
ataacccagagtata

SEQ ID NO: 1662965 - DNA, 15 bp, Homo sapiens
tataacccagagtat

SEQ ID NO: 1662966 - DNA, 15 bp, Homo sapiens
ttataacccagagta

SEQ ID NO: 1662967 - DNA, 15 bp, Homo sapiens
attataacccagagt

SEQ ID NO: 1662968 - DNA, 15 bp, Homo sapiens
tattataacccagag

SEQ ID NO: 1662969 - DNA, 15 bp, Homo sapiens
gtattataacccaga

SEQ ID NO: 1662970 - DNA, 15 bp, Homo sapiens
tgtattataacccag

SEQ ID NO: 1662971 - DNA, 15 bp, Homo sapiens
ctgtattataaccca

SEQ ID NO: 1662972 - DNA, 15 bp, Homo sapiens
actgtattataaccc

SEQ ID NO: 1662973 - DNA, 15 bp, Homo sapiens
tactgtattataacc

SEQ ID NO: 1662974 - DNA, 15 bp, Homo sapiens
atactgtattataac

SEQ ID NO: 1662975 - DNA, 15 bp, Homo sapiens
aatactgtattataa

SEQ ID NO: 1662976 - DNA, 15 bp, Homo sapiens
taatactgtattata

SEQ ID NO: 1662977 - DNA, 15 bp, Homo sapiens
gtaatactgtattat

SEQ ID NO: 1662978 - DNA, 15 bp, Homo sapiens
agtaatactgtatta

SEQ ID NO: 1662979 - DNA, 15 bp, Homo sapiens
aagtaatactgtatt

SEQ ID NO: 1662980 - DNA, 15 bp, Homo sapiens
aaagtaatactgtat

SEQ ID NO: 1662981 - DNA, 15 bp, Homo sapiens
taaagtaatactgta

SEQ ID NO: 1662982 - DNA, 15 bp, Homo sapiens
ataaagtaatactgt

SEQ ID NO: 1662983 - DNA, 15 bp, Homo sapiens
aataaagtaatactg

SEQ ID NO: 1662984 - DNA, 15 bp, Homo sapiens
gaataaagtaatact

SEQ ID NO: 1662985 - DNA, 15 bp, Homo sapiens
agaataaagtaatac

SEQ ID NO: 1662986 - DNA, 15 bp, Homo sapiens
cagaataaagtaata

SEQ ID NO: 1662987 - DNA, 15 bp, Homo sapiens
acagaataaagtaat

SEQ ID NO: 1662988 - DNA, 15 bp, Homo sapiens
aacagaataaagtaa

SEQ ID NO: 1662989 - DNA, 15 bp, Homo sapiens
caacagaataaagta

SEQ ID NO: 1662990 - DNA, 15 bp, Homo sapiens
acaacagaataaagt

SEQ ID NO: 1662991 - DNA, 15 bp, Homo sapiens
aacaacagaataaag

SEQ ID NO: 1662992 - DNA, 15 bp, Homo sapiens
gaacaacagaataaa

SEQ ID NO: 1662993 - DNA, 15 bp, Homo sapiens
tgaacaacagaataa

SEQ ID NO: 1662994 - DNA, 15 bp, Homo sapiens
ttgaacaacagaata

SEQ ID NO: 1662995 - DNA, 15 bp, Homo sapiens
tttgaacaacagaat

SEQ ID NO: 1662996 - DNA, 15 bp, Homo sapiens
atttgaacaacagaa

SEQ ID NO: 1662997 - DNA, 15 bp, Homo sapiens
aatttgaacaacaga

SEQ ID NO: 1662998 - DNA, 15 bp, Homo sapiens
caatttgaacaacag

SEQ ID NO: 1662999 - DNA, 15 bp, Homo sapiens
acaatttgaacaaca

SEQ ID NO: 1663000 - DNA, 15 bp, Homo sapiens
aacaatttgaacaac

SEQ ID NO: 1663001 - DNA, 15 bp, Homo sapiens
gaacaatttgaacaa

SEQ ID NO: 1663002 - DNA, 15 bp, Homo sapiens
ggaacaatttgaaca

SEQ ID NO: 1663003 - DNA, 15 bp, Homo sapiens
tggaacaatttgaac

SEQ ID NO: 1663004 - DNA, 15 bp, Homo sapiens
ctggaacaatttgaa

SEQ ID NO: 1663005 - DNA, 15 bp, Homo sapiens
gctggaacaatttga

SEQ ID NO: 1663006 - DNA, 15 bp, Homo sapiens
agctggaacaatttg

SEQ ID NO: 1663007 - DNA, 15 bp, Homo sapiens
aagctggaacaattt

SEQ ID NO: 1663008 - DNA, 15 bp, Homo sapiens
aaagctggaacaatt

SEQ ID NO: 1663009 - DNA, 15 bp, Homo sapiens
caaagctggaacaat

SEQ ID NO: 1663010 - DNA, 15 bp, Homo sapiens
ccaaagctggaacaa

SEQ ID NO: 1663011 - DNA, 15 bp, Homo sapiens
gccaaagctggaaca

SEQ ID NO: 1663012 - DNA, 15 bp, Homo sapiens
ggccaaagctggaac

SEQ ID NO: 1663013 - DNA, 15 bp, Homo sapiens
tggccaaagctggaa

SEQ ID NO: 1663014 - DNA, 15 bp, Homo sapiens
atggccaaagctgga

SEQ ID NO: 1663015 - DNA, 15 bp, Homo sapiens
aatggccaaagctgg

SEQ ID NO: 1663016 - DNA, 15 bp, Homo sapiens
caatggccaaagctg

SEQ ID NO: 1663017 - DNA, 15 bp, Homo sapiens
ccaatggccaaagct

SEQ ID NO: 1663018 - DNA, 15 bp, Homo sapiens
cccaatggccaaagc

SEQ ID NO: 1663019 - DNA, 15 bp, Homo sapiens
tcccaatggccaaag

SEQ ID NO: 1663020 - DNA, 15 bp, Homo sapiens
ctcccaatggccaaa

SEQ ID NO: 1663021 - DNA, 15 bp, Homo sapiens
cctcccaatggccaa

SEQ ID NO: 1663022 - DNA, 15 bp, Homo sapiens
acctcccaatggcca

SEQ ID NO: 1663023 - DNA, 15 bp, Homo sapiens
gacctcccaatggcc

SEQ ID NO: 1663024 - DNA, 15 bp, Homo sapiens
agacctcccaatggc

SEQ ID NO: 1663025 - DNA, 15 bp, Homo sapiens
aagacctcccaatgg

SEQ ID NO: 1663026 - DNA, 15 bp, Homo sapiens
aaagacctcccaatg

SEQ ID NO: 1663027 - DNA, 15 bp, Homo sapiens
gaaagacctcccaat

SEQ ID NO: 1663028 - DNA, 15 bp, Homo sapiens
tgaaagacctcccaa

SEQ ID NO: 1663029 - DNA, 15 bp, Homo sapiens
atgaaagacctccca

SEQ ID NO: 1663030 - DNA, 15 bp, Homo sapiens
aatgaaagacctccc

SEQ ID NO: 1663031 - DNA, 15 bp, Homo sapiens
aaatgaaagacctcc

SEQ ID NO: 1663032 - DNA, 15 bp, Homo sapiens
caaatgaaagacctc

SEQ ID NO: 1663033 - DNA, 15 bp, Homo sapiens
ccaaatgaaagacct

SEQ ID NO: 1663034 - DNA, 15 bp, Homo sapiens
gccaaatgaaagacc

SEQ ID NO: 1663035 - DNA, 15 bp, Homo sapiens
agccaaatgaaagac

SEQ ID NO: 1663036 - DNA, 15 bp, Homo sapiens
aagccaaatgaaaga

SEQ ID NO: 1663037 - DNA, 15 bp, Homo sapiens
aaagccaaatgaaag

SEQ ID NO: 1663038 - DNA, 15 bp, Homo sapiens
caaagccaaatgaaa

SEQ ID NO: 1663039 - DNA, 15 bp, Homo sapiens
tcaaagccaaatgaa

SEQ ID NO: 1663040 - DNA, 15 bp, Homo sapiens
atcaaagccaaatga

SEQ ID NO: 1663041 - DNA, 15 bp, Homo sapiens
tatcaaagccaaatg

SEQ ID NO: 1663042 - DNA, 15 bp, Homo sapiens
atatcaaagccaaat

SEQ ID NO: 1663043 - DNA, 15 bp, Homo sapiens
tatatcaaagccaaa

SEQ ID NO: 1663044 - DNA, 15 bp, Homo sapiens
ttatatcaaagccaa

SEQ ID NO: 1663045 - DNA, 15 bp, Homo sapiens
gttatatcaaagcca

SEQ ID NO: 1663046 - DNA, 15 bp, Homo sapiens
ggttatatcaaagcc

SEQ ID NO: 1663047 - DNA, 15 bp, Homo sapiens
gggttatatcaaagc

SEQ ID NO: 1663048 - DNA, 15 bp, Homo sapiens
ggggttatatcaaag

SEQ ID NO: 1663049 - DNA, 15 bp, Homo sapiens
tggggttatatcaaa

SEQ ID NO: 1663050 - DNA, 15 bp, Homo sapiens
atggggttatatcaa

SEQ ID NO: 1663051 - DNA, 15 bp, Homo sapiens
catggggttatatca

SEQ ID NO: 1663052 - DNA, 15 bp, Homo sapiens
tcatggggttatatc

SEQ ID NO: 1663053 - DNA, 15 bp, Homo sapiens
ttcatggggttatat

SEQ ID NO: 1663054 - DNA, 15 bp, Homo sapiens
attcatggggttata

SEQ ID NO: 1663055 - DNA, 15 bp, Homo sapiens
cattcatggggttat

SEQ ID NO: 1663056 - DNA, 15 bp, Homo sapiens
acattcatggggtta

SEQ ID NO: 1663057 - DNA, 15 bp, Homo sapiens
cacattcatggggtt

SEQ ID NO: 1663058 - DNA, 15 bp, Homo sapiens
ccacattcatggggt

SEQ ID NO: 1663059 - DNA, 15 bp, Homo sapiens
cccacattcatgggg

SEQ ID NO: 1663060 - DNA, 15 bp, Homo sapiens
acccacattcatggg

SEQ ID NO: 1663061 - DNA, 15 bp, Homo sapiens
aacccacattcatgg

SEQ ID NO: 1663062 - DNA, 15 bp, Homo sapiens
aaacccacattcatg

SEQ ID NO: 1663063 - DNA, 15 bp, Homo sapiens
aaaacccacattcat

SEQ ID NO: 1663064 - DNA, 15 bp, Homo sapiens
aaaaacccacattca

SEQ ID NO: 1663065 - DNA, 15 bp, Homo sapiens
aaaaaacccacattc

SEQ ID NO: 1663066 - DNA, 15 bp, Homo sapiens
caaaaaacccacatt

SEQ ID NO: 1663067 - DNA, 15 bp, Homo sapiens
acaaaaaacccacat

SEQ ID NO: 1663068 - DNA, 15 bp, Homo sapiens
aacaaaaaacccaca

SEQ ID NO: 1663069 - DNA, 15 bp, Homo sapiens
aaacaaaaaacccac

SEQ ID NO: 1663070 - DNA, 15 bp, Homo sapiens
caaacaaaaaaccca

SEQ ID NO: 1663071 - DNA, 15 bp, Homo sapiens
tcaaacaaaaaaccc

SEQ ID NO: 1663072 - DNA, 15 bp, Homo sapiens
ctcaaacaaaaaacc

SEQ ID NO: 1663073 - DNA, 15 bp, Homo sapiens
gctcaaacaaaaaac

SEQ ID NO: 1663074 - DNA, 15 bp, Homo sapiens
tgctcaaacaaaaaa

SEQ ID NO: 1663075 - DNA, 15 bp, Homo sapiens
gtgctcaaacaaaaa

SEQ ID NO: 1663076 - DNA, 15 bp, Homo sapiens
agtgctcaaacaaaa

SEQ ID NO: 1663077 - DNA, 15 bp, Homo sapiens
aagtgctcaaacaaa

SEQ ID NO: 1663078 - DNA, 15 bp, Homo sapiens
aaagtgctcaaacaa

SEQ ID NO: 1663079 - DNA, 15 bp, Homo sapiens
gaaagtgctcaaaca

SEQ ID NO: 1663080 - DNA, 15 bp, Homo sapiens
agaaagtgctcaaac

SEQ ID NO: 1663081 - DNA, 15 bp, Homo sapiens
aagaaagtgctcaaa

SEQ ID NO: 1663082 - DNA, 15 bp, Homo sapiens
taagaaagtgctcaa

SEQ ID NO: 1663083 - DNA, 15 bp, Homo sapiens
ataagaaagtgctca

SEQ ID NO: 1663084 - DNA, 15 bp, Homo sapiens
aataagaaagtgctc

SEQ ID NO: 1663085 - DNA, 15 bp, Homo sapiens
aaataagaaagtgct

SEQ ID NO: 1663086 - DNA, 15 bp, Homo sapiens
aaaataagaaagtgc

SEQ ID NO: 1663087 - DNA, 15 bp, Homo sapiens
aaaaataagaaagtg

SEQ ID NO: 1663088 - DNA, 15 bp, Homo sapiens
caaaaataagaaagt

SEQ ID NO: 1663089 - DNA, 15 bp, Homo sapiens
ccaaaaataagaaag

SEQ ID NO: 1663090 - DNA, 15 bp, Homo sapiens
tccaaaaataagaaa

SEQ ID NO: 1663091 - DNA, 15 bp, Homo sapiens
ttccaaaaataagaa

SEQ ID NO: 1663092 - DNA, 15 bp, Homo sapiens
gttccaaaaataaga

SEQ ID NO: 1663093 - DNA, 15 bp, Homo sapiens
agttccaaaaataag

SEQ ID NO: 1663094 - DNA, 15 bp, Homo sapiens
tagttccaaaaataa

SEQ ID NO: 1663095 - DNA, 15 bp, Homo sapiens
gtagttccaaaaata

SEQ ID NO: 1663096 - DNA, 15 bp, Homo sapiens
tgtagttccaaaaat

SEQ ID NO: 1663097 - DNA, 15 bp, Homo sapiens
ttgtagttccaaaaa

SEQ ID NO: 1663098 - DNA, 15 bp, Homo sapiens
gttgtagttccaaaa

SEQ ID NO: 1663099 - DNA, 15 bp, Homo sapiens
tgttgtagttccaaa

SEQ ID NO: 1663100 - DNA, 15 bp, Homo sapiens
atgttgtagttccaa

SEQ ID NO: 1663101 - DNA, 15 bp, Homo sapiens
catgttgtagttcca

SEQ ID NO: 1663102 - DNA, 15 bp, Homo sapiens
gcatgttgtagttcc

SEQ ID NO: 1663103 - DNA, 15 bp, Homo sapiens
agcatgttgtagttc

SEQ ID NO: 1663104 - DNA, 15 bp, Homo sapiens
aagcatgttgtagtt

SEQ ID NO: 1663105 - DNA, 15 bp, Homo sapiens
gaagcatgttgtagt

SEQ ID NO: 1663106 - DNA, 15 bp, Homo sapiens
tgaagcatgttgtag

SEQ ID NO: 1663107 - DNA, 15 bp, Homo sapiens
ctgaagcatgttgta

SEQ ID NO: 1663108 - DNA, 15 bp, Homo sapiens
tctgaagcatgttgt

SEQ ID NO: 1663109 - DNA, 15 bp, Homo sapiens
gtctgaagcatgttg

SEQ ID NO: 1663110 - DNA, 15 bp, Homo sapiens
agtctgaagcatgtt

SEQ ID NO: 1663111 - DNA, 15 bp, Homo sapiens
gagtctgaagcatgt

SEQ ID NO: 1663112 - DNA, 15 bp, Homo sapiens
tgagtctgaagcatg

SEQ ID NO: 1663113 - DNA, 15 bp, Homo sapiens
atgagtctgaagcat

SEQ ID NO: 1663114 - DNA, 15 bp, Homo sapiens
aatgagtctgaagca

SEQ ID NO: 1663115 - DNA, 15 bp, Homo sapiens
aaatgagtctgaagc

SEQ ID NO: 1663116 - DNA, 15 bp, Homo sapiens
caaatgagtctgaag

SEQ ID NO: 1663117 - DNA, 15 bp, Homo sapiens
gcaaatgagtctgaa

SEQ ID NO: 1663118 - DNA, 15 bp, Homo sapiens
tgcaaatgagtctga

SEQ ID NO: 1663119 - DNA, 15 bp, Homo sapiens
atgcaaatgagtctg

SEQ ID NO: 1663120 - DNA, 15 bp, Homo sapiens
tatgcaaatgagtct

SEQ ID NO: 1663121 - DNA, 15 bp, Homo sapiens
atatgcaaatgagtc

SEQ ID NO: 1663122 - DNA, 15 bp, Homo sapiens
gatatgcaaatgagt

SEQ ID NO: 1663123 - DNA, 15 bp, Homo sapiens
agatatgcaaatgag

SEQ ID NO: 1663124 - DNA, 15 bp, Homo sapiens
gagatatgcaaatga

SEQ ID NO: 1663125 - DNA, 15 bp, Homo sapiens
ggagatatgcaaatg

SEQ ID NO: 1663126 - DNA, 15 bp, Homo sapiens
aggagatatgcaaat

SEQ ID NO: 1663127 - DNA, 15 bp, Homo sapiens
caggagatatgcaaa

SEQ ID NO: 1663128 - DNA, 15 bp, Homo sapiens
gcaggagatatgcaa

SEQ ID NO: 1663129 - DNA, 15 bp, Homo sapiens
ggcaggagatatgca

SEQ ID NO: 1663130 - DNA, 15 bp, Homo sapiens
aggcaggagatatgc

SEQ ID NO: 1663131 - DNA, 15 bp, Homo sapiens
caggcaggagatatg

SEQ ID NO: 1663132 - DNA, 15 bp, Homo sapiens
ccaggcaggagatat

SEQ ID NO: 1663133 - DNA, 15 bp, Homo sapiens
tccaggcaggagata

SEQ ID NO: 1663134 - DNA, 15 bp, Homo sapiens
gtccaggcaggagat

SEQ ID NO: 1663135 - DNA, 15 bp, Homo sapiens
ggtccaggcaggaga

SEQ ID NO: 1663136 - DNA, 15 bp, Homo sapiens
aggtccaggcaggag

SEQ ID NO: 1663137 - DNA, 15 bp, Homo sapiens
taggtccaggcagga

SEQ ID NO: 1663138 - DNA, 15 bp, Homo sapiens
ttaggtccaggcagg

SEQ ID NO: 1663139 - DNA, 15 bp, Homo sapiens
tttaggtccaggcag

SEQ ID NO: 1663140 - DNA, 15 bp, Homo sapiens
ttttaggtccaggca

SEQ ID NO: 1663141 - DNA, 15 bp, Homo sapiens
attttaggtccaggc

SEQ ID NO: 1663142 - DNA, 15 bp, Homo sapiens
cattttaggtccagg

SEQ ID NO: 1663143 - DNA, 15 bp, Homo sapiens
tcattttaggtccag

SEQ ID NO: 1663144 - DNA, 15 bp, Homo sapiens
atcattttaggtcca

SEQ ID NO: 1663145 - DNA, 15 bp, Homo sapiens
catcattttaggtcc

SEQ ID NO: 1663146 - DNA, 15 bp, Homo sapiens
acatcattttaggtc

SEQ ID NO: 1663147 - DNA, 15 bp, Homo sapiens
tacatcattttaggt

SEQ ID NO: 1663148 - DNA, 15 bp, Homo sapiens
atacatcattttagg

SEQ ID NO: 1663149 - DNA, 15 bp, Homo sapiens
aatacatcattttag

SEQ ID NO: 1663150 - DNA, 15 bp, Homo sapiens
aaatacatcatttta

SEQ ID NO: 1663151 - DNA, 15 bp, Homo sapiens
gaaatacatcatttt

SEQ ID NO: 1663152 - DNA, 15 bp, Homo sapiens
agaaatacatcattt

SEQ ID NO: 1663153 - DNA, 15 bp, Homo sapiens
cagaaatacatcatt

SEQ ID NO: 1663154 - DNA, 15 bp, Homo sapiens
gcagaaatacatcat

SEQ ID NO: 1663155 - DNA, 15 bp, Homo sapiens
tgcagaaatacatca

SEQ ID NO: 1663156 - DNA, 15 bp, Homo sapiens
ttgcagaaatacatc

SEQ ID NO: 1663157 - DNA, 15 bp, Homo sapiens
cttgcagaaatacat

SEQ ID NO: 1663158 - DNA, 15 bp, Homo sapiens
ccttgcagaaataca

SEQ ID NO: 1663159 - DNA, 15 bp, Homo sapiens
tccttgcagaaatac

SEQ ID NO: 1663160 - DNA, 15 bp, Homo sapiens
ctccttgcagaaata

SEQ ID NO: 1663161 - DNA, 15 bp, Homo sapiens
gctccttgcagaaat

SEQ ID NO: 1663162 - DNA, 15 bp, Homo sapiens
ggctccttgcagaaa

SEQ ID NO: 1663163 - DNA, 15 bp, Homo sapiens
aggctccttgcagaa

SEQ ID NO: 1663164 - DNA, 15 bp, Homo sapiens
aaggctccttgcaga

SEQ ID NO: 1663165 - DNA, 15 bp, Homo sapiens
caaggctccttgcag

SEQ ID NO: 1663166 - DNA, 15 bp, Homo sapiens
tcaaggctccttgca

SEQ ID NO: 1663167 - DNA, 15 bp, Homo sapiens
atcaaggctccttgc

SEQ ID NO: 1663168 - DNA, 15 bp, Homo sapiens
tatcaaggctccttg

SEQ ID NO: 1663169 - DNA, 15 bp, Homo sapiens
gtatcaaggctcctt

SEQ ID NO: 1663170 - DNA, 15 bp, Homo sapiens
agtatcaaggctcct

SEQ ID NO: 1663171 - DNA, 15 bp, Homo sapiens
aagtatcaaggctcc

SEQ ID NO: 1663172 - DNA, 15 bp, Homo sapiens
aaagtatcaaggctc

SEQ ID NO: 1663173 - DNA, 15 bp, Homo sapiens
aaaagtatcaaggct

SEQ ID NO: 1663174 - DNA, 15 bp, Homo sapiens
aaaaagtatcaaggc

SEQ ID NO: 1663175 - DNA, 15 bp, Homo sapiens
taaaaagtatcaagg

SEQ ID NO: 1663176 - DNA, 15 bp, Homo sapiens
ataaaaagtatcaag

SEQ ID NO: 1663177 - DNA, 15 bp, Homo sapiens
aataaaaagtatcaa

SEQ ID NO: 1663178 - DNA, 15 bp, Homo sapiens
caataaaaagtatca

SEQ ID NO: 1663179 - DNA, 15 bp, Homo sapiens
ccaataaaaagtatc

SEQ ID NO: 1663180 - DNA, 15 bp, Homo sapiens
tccaataaaaagtat

SEQ ID NO: 1663181 - DNA, 15 bp, Homo sapiens
ctccaataaaaagta

SEQ ID NO: 1663182 - DNA, 15 bp, Homo sapiens
tctccaataaaaagt

SEQ ID NO: 1663183 - DNA, 15 bp, Homo sapiens
ctctccaataaaaag

SEQ ID NO: 1663184 - DNA, 15 bp, Homo sapiens
actctccaataaaaa

SEQ ID NO: 1663185 - DNA, 15 bp, Homo sapiens
tactctccaataaaa

SEQ ID NO: 1663186 - DNA, 15 bp, Homo sapiens
ttactctccaataaa

SEQ ID NO: 1663187 - DNA, 15 bp, Homo sapiens
attactctccaataa

SEQ ID NO: 1663188 - DNA, 15 bp, Homo sapiens
tattactctccaata

SEQ ID NO: 1663189 - DNA, 15 bp, Homo sapiens
atattactctccaat

SEQ ID NO: 1663190 - DNA, 15 bp, Homo sapiens
aatattactctccaa

SEQ ID NO: 1663191 - DNA, 15 bp, Homo sapiens
taatattactctcca

SEQ ID NO: 1663192 - DNA, 15 bp, Homo sapiens
ctaatattactctcc

SEQ ID NO: 1663193 - DNA, 15 bp, Homo sapiens
tctaatattactctc

SEQ ID NO: 1663194 - DNA, 15 bp, Homo sapiens
ttctaatattactct

SEQ ID NO: 1663195 - DNA, 15 bp, Homo sapiens
tttctaatattactc

SEQ ID NO: 1663196 - DNA, 15 bp, Homo sapiens
atttctaatattact

SEQ ID NO: 1663197 - DNA, 15 bp, Homo sapiens
gatttctaatattac

SEQ ID NO: 1663198 - DNA, 15 bp, Homo sapiens
tgatttctaatatta

SEQ ID NO: 1663199 - DNA, 15 bp, Homo sapiens
ttgatttctaatatt

SEQ ID NO: 1663200 - DNA, 15 bp, Homo sapiens
cttgatttctaatat

SEQ ID NO: 1663201 - DNA, 15 bp, Homo sapiens
tcttgatttctaata

SEQ ID NO: 1663202 - DNA, 15 bp, Homo sapiens
ttcttgatttctaat

SEQ ID NO: 1663203 - DNA, 15 bp, Homo sapiens
cttcttgatttctaa

SEQ ID NO: 1663204 - DNA, 15 bp, Homo sapiens
acttcttgatttcta

SEQ ID NO: 1663205 - DNA, 15 bp, Homo sapiens
cacttcttgatttct

SEQ ID NO: 1663206 - DNA, 15 bp, Homo sapiens
tcacttcttgatttc

SEQ ID NO: 1663207 - DNA, 15 bp, Homo sapiens
ttcacttcttgattt

SEQ ID NO: 1663208 - DNA, 15 bp, Homo sapiens
attcacttcttgatt

SEQ ID NO: 1663209 - DNA, 15 bp, Homo sapiens
cattcacttcttgat

SEQ ID NO: 1663210 - DNA, 15 bp, Homo sapiens
gcattcacttcttga

SEQ ID NO: 1663211 - DNA, 15 bp, Homo sapiens
agcattcacttcttg

SEQ ID NO: 1663212 - DNA, 15 bp, Homo sapiens
tagcattcacttctt

SEQ ID NO: 1663213 - DNA, 15 bp, Homo sapiens
ctagcattcacttct

SEQ ID NO: 1663214 - DNA, 15 bp, Homo sapiens
cctagcattcacttc

SEQ ID NO: 1663215 - DNA, 15 bp, Homo sapiens
acctagcattcactt

SEQ ID NO: 1663216 - DNA, 15 bp, Homo sapiens
cacctagcattcact

SEQ ID NO: 1663217 - DNA, 15 bp, Homo sapiens
gcacctagcattcac

SEQ ID NO: 1663218 - DNA, 15 bp, Homo sapiens
cgcacctagcattca

SEQ ID NO: 1663219 - DNA, 15 bp, Homo sapiens
gcgcacctagcattc

SEQ ID NO: 1663220 - DNA, 15 bp, Homo sapiens
agcgcacctagcatt

SEQ ID NO: 1663221 - DNA, 15 bp, Homo sapiens
gagcgcacctagcat

SEQ ID NO: 1663222 - DNA, 15 bp, Homo sapiens
tgagcgcacctagca

SEQ ID NO: 1663223 - DNA, 15 bp, Homo sapiens
atgagcgcacctagc

SEQ ID NO: 1663224 - DNA, 15 bp, Homo sapiens
aatgagcgcacctag

SEQ ID NO: 1663225 - DNA, 15 bp, Homo sapiens
taatgagcgcaccta

SEQ ID NO: 1663226 - DNA, 15 bp, Homo sapiens
gtaatgagcgcacct

SEQ ID NO: 1663227 - DNA, 15 bp, Homo sapiens
agtaatgagcgcacc

SEQ ID NO: 1663228 - DNA, 15 bp, Homo sapiens
tagtaatgagcgcac

SEQ ID NO: 1663229 - DNA, 15 bp, Homo sapiens
gtagtaatgagcgca

SEQ ID NO: 1663230 - DNA, 15 bp, Homo sapiens
agtagtaatgagcgc

SEQ ID NO: 1663231 - DNA, 15 bp, Homo sapiens
cagtagtaatgagcg

SEQ ID NO: 1663232 - DNA, 15 bp, Homo sapiens
ccagtagtaatgagc

SEQ ID NO: 1663233 - DNA, 15 bp, Homo sapiens
tccagtagtaatgag

SEQ ID NO: 1663234 - DNA, 15 bp, Homo sapiens
ctccagtagtaatga

SEQ ID NO: 1663235 - DNA, 15 bp, Homo sapiens
actccagtagtaatg

SEQ ID NO: 1663236 - DNA, 15 bp, Homo sapiens
cactccagtagtaat

SEQ ID NO: 1663237 - DNA, 15 bp, Homo sapiens
acactccagtagtaa

SEQ ID NO: 1663238 - DNA, 15 bp, Homo sapiens
gacactccagtagta

SEQ ID NO: 1663239 - DNA, 15 bp, Homo sapiens
tgacactccagtagt

SEQ ID NO: 1663240 - DNA, 15 bp, Homo sapiens
atgacactccagtag

SEQ ID NO: 1663241 - DNA, 15 bp, Homo sapiens
aatgacactccagta

SEQ ID NO: 1663242 - DNA, 15 bp, Homo sapiens
gaatgacactccagt

SEQ ID NO: 1663243 - DNA, 15 bp, Homo sapiens
ggaatgacactccag

SEQ ID NO: 1663244 - DNA, 15 bp, Homo sapiens
aggaatgacactcca

SEQ ID NO: 1663245 - DNA, 15 bp, Homo sapiens
aaggaatgacactcc

SEQ ID NO: 1663246 - DNA, 15 bp, Homo sapiens
gaaggaatgacactc

SEQ ID NO: 1663247 - DNA, 15 bp, Homo sapiens
tgaaggaatgacact

SEQ ID NO: 1663248 - DNA, 15 bp, Homo sapiens
ttgaaggaatgacac

SEQ ID NO: 1663249 - DNA, 15 bp, Homo sapiens
cttgaaggaatgaca

SEQ ID NO: 1663250 - DNA, 15 bp, Homo sapiens
tcttgaaggaatgac

SEQ ID NO: 1663251 - DNA, 15 bp, Homo sapiens
gtcttgaaggaatga

SEQ ID NO: 1663252 - DNA, 15 bp, Homo sapiens
ggtcttgaaggaatg

SEQ ID NO: 1663253 - DNA, 15 bp, Homo sapiens
aggtcttgaaggaat

SEQ ID NO: 1663254 - DNA, 15 bp, Homo sapiens
aaggtcttgaaggaa

SEQ ID NO: 1663255 - DNA, 15 bp, Homo sapiens
aaaggtcttgaagga

SEQ ID NO: 1663256 - DNA, 15 bp, Homo sapiens
aaaaggtcttgaagg

SEQ ID NO: 1663257 - DNA, 15 bp, Homo sapiens
gaaaaggtcttgaag

SEQ ID NO: 1663258 - DNA, 15 bp, Homo sapiens
tgaaaaggtcttgaa

SEQ ID NO: 1663259 - DNA, 15 bp, Homo sapiens
ctgaaaaggtcttga

SEQ ID NO: 1663260 - DNA, 15 bp, Homo sapiens
actgaaaaggtcttg

SEQ ID NO: 1663261 - DNA, 15 bp, Homo sapiens
aactgaaaaggtctt

SEQ ID NO: 1663262 - DNA, 15 bp, Homo sapiens
caactgaaaaggtct

SEQ ID NO: 1663263 - DNA, 15 bp, Homo sapiens
tcaactgaaaaggtc

SEQ ID NO: 1663264 - DNA, 15 bp, Homo sapiens
gtcaactgaaaaggt

SEQ ID NO: 1663265 - DNA, 15 bp, Homo sapiens
tgtcaactgaaaagg

SEQ ID NO: 1663266 - DNA, 15 bp, Homo sapiens
ttgtcaactgaaaag

SEQ ID NO: 1663267 - DNA, 15 bp, Homo sapiens
cttgtcaactgaaaa

SEQ ID NO: 1663268 - DNA, 15 bp, Homo sapiens
tcttgtcaactgaaa

SEQ ID NO: 1663269 - DNA, 15 bp, Homo sapiens
ctcttgtcaactgaa

SEQ ID NO: 1663270 - DNA, 15 bp, Homo sapiens
gctcttgtcaactga

SEQ ID NO: 1663271 - DNA, 15 bp, Homo sapiens
tgctcttgtcaactg

SEQ ID NO: 1663272 - DNA, 15 bp, Homo sapiens
ttgctcttgtcaact

SEQ ID NO: 1663273 - DNA, 15 bp, Homo sapiens
cttgctcttgtcaac

SEQ ID NO: 1663274 - DNA, 15 bp, Homo sapiens
ccttgctcttgtcaa

SEQ ID NO: 1663275 - DNA, 15 bp, Homo sapiens
tccttgctcttgtca

SEQ ID NO: 1663276 - DNA, 15 bp, Homo sapiens
ctccttgctcttgtc

SEQ ID NO: 1663277 - DNA, 15 bp, Homo sapiens
tctccttgctcttgt

SEQ ID NO: 1663278 - DNA, 15 bp, Homo sapiens
atctccttgctcttg

SEQ ID NO: 1663279 - DNA, 15 bp, Homo sapiens
tatctccttgctctt

SEQ ID NO: 1663280 - DNA, 15 bp, Homo sapiens
atatctccttgctct

SEQ ID NO: 1663281 - DNA, 15 bp, Homo sapiens
tatatctccttgctc

SEQ ID NO: 1663282 - DNA, 15 bp, Homo sapiens
atatatctccttgct

SEQ ID NO: 1663283 - DNA, 15 bp, Homo sapiens
tatatatctccttgc

SEQ ID NO: 1663284 - DNA, 15 bp, Homo sapiens
atatatatctccttg

SEQ ID NO: 1663285 - DNA, 15 bp, Homo sapiens
aatatatatctcctt

SEQ ID NO: 1663286 - DNA, 15 bp, Homo sapiens
aaatatatatctcct

SEQ ID NO: 1663287 - DNA, 15 bp, Homo sapiens
caaatatatatctcc

SEQ ID NO: 1663288 - DNA, 15 bp, Homo sapiens
gcaaatatatatctc

SEQ ID NO: 1663289 - DNA, 15 bp, Homo sapiens
tgcaaatatatatct

SEQ ID NO: 1663290 - DNA, 15 bp, Homo sapiens
atgcaaatatatatc

SEQ ID NO: 1663291 - DNA, 15 bp, Homo sapiens
aatgcaaatatatat

SEQ ID NO: 1663292 - DNA, 15 bp, Homo sapiens
gaatgcaaatatata

SEQ ID NO: 1663293 - DNA, 15 bp, Homo sapiens
agaatgcaaatatat

SEQ ID NO: 1663294 - DNA, 15 bp, Homo sapiens
tagaatgcaaatata

SEQ ID NO: 1663295 - DNA, 15 bp, Homo sapiens
ttagaatgcaaatat

SEQ ID NO: 1663296 - DNA, 15 bp, Homo sapiens
gttagaatgcaaata

SEQ ID NO: 1663297 - DNA, 15 bp, Homo sapiens
cgttagaatgcaaat

SEQ ID NO: 1663298 - DNA, 15 bp, Homo sapiens
acgttagaatgcaaa

SEQ ID NO: 1663299 - DNA, 15 bp, Homo sapiens
cacgttagaatgcaa

SEQ ID NO: 1663300 - DNA, 15 bp, Homo sapiens
acacgttagaatgca

SEQ ID NO: 1663301 - DNA, 15 bp, Homo sapiens
cacacgttagaatgc

SEQ ID NO: 1663302 - DNA, 15 bp, Homo sapiens
acacacgttagaatg

SEQ ID NO: 1663303 - DNA, 15 bp, Homo sapiens
tacacacgttagaat

SEQ ID NO: 1663304 - DNA, 15 bp, Homo sapiens
atacacacgttagaa

SEQ ID NO: 1663305 - DNA, 15 bp, Homo sapiens
tatacacacgttaga

SEQ ID NO: 1663306 - DNA, 15 bp, Homo sapiens
atatacacacgttag

SEQ ID NO: 1663307 - DNA, 15 bp, Homo sapiens
catatacacacgtta

SEQ ID NO: 1663308 - DNA, 15 bp, Homo sapiens
gcatatacacacgtt

SEQ ID NO: 1663309 - DNA, 15 bp, Homo sapiens
tgcatatacacacgt

SEQ ID NO: 1663310 - DNA, 15 bp, Homo sapiens
gtgcatatacacacg

SEQ ID NO: 1663311 - DNA, 15 bp, Homo sapiens
tgtgcatatacacac

SEQ ID NO: 1663312 - DNA, 15 bp, Homo sapiens
atgtgcatatacaca

SEQ ID NO: 1663313 - DNA, 15 bp, Homo sapiens
tatgtgcatatacac

SEQ ID NO: 1663314 - DNA, 15 bp, Homo sapiens
ctatgtgcatataca

SEQ ID NO: 1663315 - DNA, 15 bp, Homo sapiens
gctatgtgcatatac

SEQ ID NO: 1663316 - DNA, 15 bp, Homo sapiens
agctatgtgcatata

SEQ ID NO: 1663317 - DNA, 15 bp, Homo sapiens
tagctatgtgcatat

SEQ ID NO: 1663318 - DNA, 15 bp, Homo sapiens
atagctatgtgcata

SEQ ID NO: 1663319 - DNA, 15 bp, Homo sapiens
tatagctatgtgcat

SEQ ID NO: 1663320 - DNA, 15 bp, Homo sapiens
ttatagctatgtgca

SEQ ID NO: 1663321 - DNA, 15 bp, Homo sapiens
tttatagctatgtgc

SEQ ID NO: 1663322 - DNA, 15 bp, Homo sapiens
atttatagctatgtg

SEQ ID NO: 1663323 - DNA, 15 bp, Homo sapiens
tatttatagctatgt

SEQ ID NO: 1663324 - DNA, 15 bp, Homo sapiens
atatttatagctatg

SEQ ID NO: 1663325 - DNA, 15 bp, Homo sapiens
tatatttatagctat

SEQ ID NO: 1663326 - DNA, 15 bp, Homo sapiens
atatatttatagcta

SEQ ID NO: 1663327 - DNA, 15 bp, Homo sapiens
tatatatttatagct

SEQ ID NO: 1663328 - DNA, 15 bp, Homo sapiens
atatatatttatagc

SEQ ID NO: 1663329 - DNA, 15 bp, Homo sapiens
tatatatatttatag

SEQ ID NO: 1663330 - DNA, 15 bp, Homo sapiens
ttatatatatttata

SEQ ID NO: 1663331 - DNA, 15 bp, Homo sapiens
gttatatatatttat

SEQ ID NO: 1663332 - DNA, 15 bp, Homo sapiens
ggttatatatattta

SEQ ID NO: 1663333 - DNA, 15 bp, Homo sapiens
tggttatatatattt

SEQ ID NO: 1663334 - DNA, 15 bp, Homo sapiens
atggttatatatatt

SEQ ID NO: 1663335 - DNA, 15 bp, Homo sapiens
gatggttatatatat

SEQ ID NO: 1663336 - DNA, 15 bp, Homo sapiens
agatggttatatata

SEQ ID NO: 1663337 - DNA, 15 bp, Homo sapiens
cagatggttatatat

SEQ ID NO: 1663338 - DNA, 15 bp, Homo sapiens
acagatggttatata

SEQ ID NO: 1663339 - DNA, 15 bp, Homo sapiens
tacagatggttatat

SEQ ID NO: 1663340 - DNA, 15 bp, Homo sapiens
atacagatggttata

SEQ ID NO: 1663341 - DNA, 15 bp, Homo sapiens
gatacagatggttat

SEQ ID NO: 1663342 - DNA, 15 bp, Homo sapiens
agatacagatggtta

SEQ ID NO: 1663343 - DNA, 15 bp, Homo sapiens
tagatacagatggtt

SEQ ID NO: 1663344 - DNA, 15 bp, Homo sapiens
atagatacagatggt

SEQ ID NO: 1663345 - DNA, 15 bp, Homo sapiens
tatagatacagatgg

SEQ ID NO: 1663346 - DNA, 15 bp, Homo sapiens
atatagatacagatg

SEQ ID NO: 1663347 - DNA, 15 bp, Homo sapiens
aatatagatacagat

SEQ ID NO: 1663348 - DNA, 15 bp, Homo sapiens
taatatagatacaga

SEQ ID NO: 1663349 - DNA, 15 bp, Homo sapiens
ttaatatagatacag

SEQ ID NO: 1663350 - DNA, 15 bp, Homo sapiens
tttaatatagataca

SEQ ID NO: 1663351 - DNA, 15 bp, Homo sapiens
gtttaatatagatac

SEQ ID NO: 1663352 - DNA, 15 bp, Homo sapiens
agtttaatatagata

SEQ ID NO: 1663353 - DNA, 15 bp, Homo sapiens
tagtttaatatagat

SEQ ID NO: 1663354 - DNA, 15 bp, Homo sapiens
ttagtttaatataga

SEQ ID NO: 1663355 - DNA, 15 bp, Homo sapiens
tttagtttaatatag

SEQ ID NO: 1663356 - DNA, 15 bp, Homo sapiens
atttagtttaatata

SEQ ID NO: 1663357 - DNA, 15 bp, Homo sapiens
catttagtttaatat

SEQ ID NO: 1663358 - DNA, 15 bp, Homo sapiens
acatttagtttaata

SEQ ID NO: 1663359 - DNA, 15 bp, Homo sapiens
cacatttagtttaat

SEQ ID NO: 1663360 - DNA, 15 bp, Homo sapiens
acacatttagtttaa

SEQ ID NO: 1663361 - DNA, 15 bp, Homo sapiens
aacacatttagttta

SEQ ID NO: 1663362 - DNA, 15 bp, Homo sapiens
aaacacatttagttt

SEQ ID NO: 1663363 - DNA, 15 bp, Homo sapiens
taaacacatttagtt

SEQ ID NO: 1663364 - DNA, 15 bp, Homo sapiens
ataaacacatttagt

SEQ ID NO: 1663365 - DNA, 15 bp, Homo sapiens
tataaacacatttag

SEQ ID NO: 1663366 - DNA, 15 bp, Homo sapiens
gtataaacacattta

SEQ ID NO: 1663367 - DNA, 15 bp, Homo sapiens
ggtataaacacattt

SEQ ID NO: 1663368 - DNA, 15 bp, Homo sapiens
aggtataaacacatt

SEQ ID NO: 1663369 - DNA, 15 bp, Homo sapiens
taggtataaacacat

SEQ ID NO: 1663370 - DNA, 15 bp, Homo sapiens
gtaggtataaacaca

SEQ ID NO: 1663371 - DNA, 15 bp, Homo sapiens
cgtaggtataaacac

SEQ ID NO: 1663372 - DNA, 15 bp, Homo sapiens
acgtaggtataaaca

SEQ ID NO: 1663373 - DNA, 15 bp, Homo sapiens
gacgtaggtataaac

SEQ ID NO: 1663374 - DNA, 15 bp, Homo sapiens
agacgtaggtataaa

SEQ ID NO: 1663375 - DNA, 15 bp, Homo sapiens
gagacgtaggtataa

SEQ ID NO: 1663376 - DNA, 15 bp, Homo sapiens
ggagacgtaggtata

SEQ ID NO: 1663377 - DNA, 15 bp, Homo sapiens
tggagacgtaggtat

SEQ ID NO: 1663378 - DNA, 15 bp, Homo sapiens
ttggagacgtaggta

SEQ ID NO: 1663379 - DNA, 15 bp, Homo sapiens
gttggagacgtaggt

SEQ ID NO: 1663380 - DNA, 15 bp, Homo sapiens
agttggagacgtagg

SEQ ID NO: 1663381 - DNA, 15 bp, Homo sapiens
gagttggagacgtag

SEQ ID NO: 1663382 - DNA, 15 bp, Homo sapiens
agagttggagacgta

SEQ ID NO: 1663383 - DNA, 15 bp, Homo sapiens
tagagttggagacgt

SEQ ID NO: 1663384 - DNA, 15 bp, Homo sapiens
ttagagttggagacg

SEQ ID NO: 1663385 - DNA, 15 bp, Homo sapiens
attagagttggagac

SEQ ID NO: 1663386 - DNA, 15 bp, Homo sapiens
gattagagttggaga

SEQ ID NO: 1663387 - DNA, 15 bp, Homo sapiens
tgattagagttggag

SEQ ID NO: 1663388 - DNA, 15 bp, Homo sapiens
atgattagagttgga

SEQ ID NO: 1663389 - DNA, 15 bp, Homo sapiens
aatgattagagttgg

SEQ ID NO: 1663390 - DNA, 15 bp, Homo sapiens
caatgattagagttg

SEQ ID NO: 1663391 - DNA, 15 bp, Homo sapiens
gcaatgattagagtt

SEQ ID NO: 1663392 - DNA, 15 bp, Homo sapiens
ggcaatgattagagt

SEQ ID NO: 1663393 - DNA, 15 bp, Homo sapiens
tggcaatgattagag

SEQ ID NO: 1663394 - DNA, 15 bp, Homo sapiens
gtggcaatgattaga

SEQ ID NO: 1663395 - DNA, 15 bp, Homo sapiens
tgtggcaatgattag

SEQ ID NO: 1663396 - DNA, 15 bp, Homo sapiens
atgtggcaatgatta

SEQ ID NO: 1663397 - DNA, 15 bp, Homo sapiens
catgtggcaatgatt

SEQ ID NO: 1663398 - DNA, 15 bp, Homo sapiens
ccatgtggcaatgat

SEQ ID NO: 1663399 - DNA, 15 bp, Homo sapiens
tccatgtggcaatga

SEQ ID NO: 1663400 - DNA, 15 bp, Homo sapiens
atccatgtggcaatg

SEQ ID NO: 1663401 - DNA, 15 bp, Homo sapiens
gatccatgtggcaat

SEQ ID NO: 1663402 - DNA, 15 bp, Homo sapiens
tgatccatgtggcaa

SEQ ID NO: 1663403 - DNA, 15 bp, Homo sapiens
atgatccatgtggca

SEQ ID NO: 1663404 - DNA, 15 bp, Homo sapiens
aatgatccatgtggc

SEQ ID NO: 1663405 - DNA, 15 bp, Homo sapiens
taatgatccatgtgg

SEQ ID NO: 1663406 - DNA, 15 bp, Homo sapiens
ataatgatccatgtg

SEQ ID NO: 1663407 - DNA, 15 bp, Homo sapiens
tataatgatccatgt

SEQ ID NO: 1663408 - DNA, 15 bp, Homo sapiens
ctataatgatccatg

SEQ ID NO: 1663409 - DNA, 15 bp, Homo sapiens
actataatgatccat

SEQ ID NO: 1663410 - DNA, 15 bp, Homo sapiens
gactataatgatcca

SEQ ID NO: 1663411 - DNA, 15 bp, Homo sapiens
agactataatgatcc

SEQ ID NO: 1663412 - DNA, 15 bp, Homo sapiens
gagactataatgatc

SEQ ID NO: 1663413 - DNA, 15 bp, Homo sapiens
tgagactataatgat

SEQ ID NO: 1663414 - DNA, 15 bp, Homo sapiens
gtgagactataatga

SEQ ID NO: 1663415 - DNA, 15 bp, Homo sapiens
ggtgagactataatg

SEQ ID NO: 1663416 - DNA, 15 bp, Homo sapiens
aggtgagactataat

SEQ ID NO: 1663417 - DNA, 15 bp, Homo sapiens
gaggtgagactataa

SEQ ID NO: 1663418 - DNA, 15 bp, Homo sapiens
ggaggtgagactata

SEQ ID NO: 1663419 - DNA, 15 bp, Homo sapiens
aggaggtgagactat

SEQ ID NO: 1663420 - DNA, 15 bp, Homo sapiens
aaggaggtgagacta

SEQ ID NO: 1663421 - DNA, 15 bp, Homo sapiens
caaggaggtgagact

SEQ ID NO: 1663422 - DNA, 15 bp, Homo sapiens
gcaaggaggtgagac

SEQ ID NO: 1663423 - DNA, 15 bp, Homo sapiens
agcaaggaggtgaga

SEQ ID NO: 1663424 - DNA, 15 bp, Homo sapiens
aagcaaggaggtgag

SEQ ID NO: 1663425 - DNA, 15 bp, Homo sapiens
taagcaaggaggtga

SEQ ID NO: 1663426 - DNA, 15 bp, Homo sapiens
ataagcaaggaggtg

SEQ ID NO: 1663427 - DNA, 15 bp, Homo sapiens
gataagcaaggaggt

SEQ ID NO: 1663428 - DNA, 15 bp, Homo sapiens
agataagcaaggagg

SEQ ID NO: 1663429 - DNA, 15 bp, Homo sapiens
cagataagcaaggag

SEQ ID NO: 1663430 - DNA, 15 bp, Homo sapiens
acagataagcaagga

SEQ ID NO: 1663431 - DNA, 15 bp, Homo sapiens
aacagataagcaagg

SEQ ID NO: 1663432 - DNA, 15 bp, Homo sapiens
taacagataagcaag

SEQ ID NO: 1663433 - DNA, 15 bp, Homo sapiens
gtaacagataagcaa

SEQ ID NO: 1663434 - DNA, 15 bp, Homo sapiens
ggtaacagataagca

SEQ ID NO: 1663435 - DNA, 15 bp, Homo sapiens
aggtaacagataagc

SEQ ID NO: 1663436 - DNA, 15 bp, Homo sapiens
gaggtaacagataag

SEQ ID NO: 1663437 - DNA, 15 bp, Homo sapiens
ggaggtaacagataa

SEQ ID NO: 1663438 - DNA, 15 bp, Homo sapiens
gggaggtaacagata

SEQ ID NO: 1663439 - DNA, 15 bp, Homo sapiens
tgggaggtaacagat

SEQ ID NO: 1663440 - DNA, 15 bp, Homo sapiens
atgggaggtaacaga

SEQ ID NO: 1663441 - DNA, 15 bp, Homo sapiens
aatgggaggtaacag

SEQ ID NO: 1663442 - DNA, 15 bp, Homo sapiens
aaatgggaggtaaca

SEQ ID NO: 1663443 - DNA, 15 bp, Homo sapiens
gaaatgggaggtaac

SEQ ID NO: 1663444 - DNA, 15 bp, Homo sapiens
agaaatgggaggtaa

SEQ ID NO: 1663445 - DNA, 15 bp, Homo sapiens
tagaaatgggaggta

SEQ ID NO: 1663446 - DNA, 15 bp, Homo sapiens
gtagaaatgggaggt

SEQ ID NO: 1663447 - DNA, 15 bp, Homo sapiens
tgtagaaatgggagg

SEQ ID NO: 1663448 - DNA, 15 bp, Homo sapiens
ctgtagaaatgggag

SEQ ID NO: 1663449 - DNA, 15 bp, Homo sapiens
actgtagaaatggga

SEQ ID NO: 1663450 - DNA, 15 bp, Homo sapiens
cactgtagaaatggg

SEQ ID NO: 1663451 - DNA, 15 bp, Homo sapiens
tcactgtagaaatgg

SEQ ID NO: 1663452 - DNA, 15 bp, Homo sapiens
ctcactgtagaaatg

SEQ ID NO: 1663453 - DNA, 15 bp, Homo sapiens
tctcactgtagaaat

SEQ ID NO: 1663454 - DNA, 15 bp, Homo sapiens
ttctcactgtagaaa

SEQ ID NO: 1663455 - DNA, 15 bp, Homo sapiens
tttctcactgtagaa

SEQ ID NO: 1663456 - DNA, 15 bp, Homo sapiens
gtttctcactgtaga

SEQ ID NO: 1663457 - DNA, 15 bp, Homo sapiens
ggtttctcactgtag

SEQ ID NO: 1663458 - DNA, 15 bp, Homo sapiens
aggtttctcactgta

SEQ ID NO: 1663459 - DNA, 15 bp, Homo sapiens
caggtttctcactgt

SEQ ID NO: 1663460 - DNA, 15 bp, Homo sapiens
ccaggtttctcactg

SEQ ID NO: 1663461 - DNA, 15 bp, Homo sapiens
gccaggtttctcact

SEQ ID NO: 1663462 - DNA, 15 bp, Homo sapiens
agccaggtttctcac

SEQ ID NO: 1663463 - DNA, 15 bp, Homo sapiens
aagccaggtttctca

SEQ ID NO: 1663464 - DNA, 15 bp, Homo sapiens
caagccaggtttctc

SEQ ID NO: 1663465 - DNA, 15 bp, Homo sapiens
ccaagccaggtttct

SEQ ID NO: 1663466 - DNA, 15 bp, Homo sapiens
accaagccaggtttc

SEQ ID NO: 1663467 - DNA, 15 bp, Homo sapiens
aaccaagccaggttt

SEQ ID NO: 1663468 - DNA, 15 bp, Homo sapiens
caaccaagccaggtt

SEQ ID NO: 1663469 - DNA, 15 bp, Homo sapiens
ccaaccaagccaggt

SEQ ID NO: 1663470 - DNA, 15 bp, Homo sapiens
cccaaccaagccagg

SEQ ID NO: 1663471 - DNA, 15 bp, Homo sapiens
tcccaaccaagccag

SEQ ID NO: 1663472 - DNA, 15 bp, Homo sapiens
ttcccaaccaagcca

SEQ ID NO: 1663473 - DNA, 15 bp, Homo sapiens
tttcccaaccaagcc

SEQ ID NO: 1663474 - DNA, 15 bp, Homo sapiens
atttcccaaccaagc

SEQ ID NO: 1663475 - DNA, 15 bp, Homo sapiens
aatttcccaaccaag

SEQ ID NO: 1663476 - DNA, 15 bp, Homo sapiens
aaatttcccaaccaa

SEQ ID NO: 1663477 - DNA, 15 bp, Homo sapiens
aaaatttcccaacca

SEQ ID NO: 1663478 - DNA, 15 bp, Homo sapiens
aaaaatttcccaacc

SEQ ID NO: 1663479 - DNA, 15 bp, Homo sapiens
gaaaaatttcccaac

SEQ ID NO: 1663480 - DNA, 15 bp, Homo sapiens
agaaaaatttcccaa

SEQ ID NO: 1663481 - DNA, 15 bp, Homo sapiens
cagaaaaatttccca

SEQ ID NO: 1663482 - DNA, 15 bp, Homo sapiens
acagaaaaatttccc

SEQ ID NO: 1663483 - DNA, 15 bp, Homo sapiens
aacagaaaaatttcc

SEQ ID NO: 1663484 - DNA, 15 bp, Homo sapiens
taacagaaaaatttc

SEQ ID NO: 1663485 - DNA, 15 bp, Homo sapiens
ttaacagaaaaattt

SEQ ID NO: 1663486 - DNA, 15 bp, Homo sapiens
attaacagaaaaatt

SEQ ID NO: 1663487 - DNA, 15 bp, Homo sapiens
tattaacagaaaaat

SEQ ID NO: 1663488 - DNA, 15 bp, Homo sapiens
atattaacagaaaaa

SEQ ID NO: 1663489 - DNA, 15 bp, Homo sapiens
aatattaacagaaaa

SEQ ID NO: 1663490 - DNA, 15 bp, Homo sapiens
taatattaacagaaa

SEQ ID NO: 1663491 - DNA, 15 bp, Homo sapiens
gtaatattaacagaa

SEQ ID NO: 1663492 - DNA, 15 bp, Homo sapiens
cgtaatattaacaga

SEQ ID NO: 1663493 - DNA, 15 bp, Homo sapiens
ccgtaatattaacag

SEQ ID NO: 1663494 - DNA, 15 bp, Homo sapiens
accgtaatattaaca

SEQ ID NO: 1663495 - DNA, 15 bp, Homo sapiens
taccgtaatattaac

SEQ ID NO: 1663496 - DNA, 15 bp, Homo sapiens
ctaccgtaatattaa

SEQ ID NO: 1663497 - DNA, 15 bp, Homo sapiens
actaccgtaatatta

SEQ ID NO: 1663498 - DNA, 15 bp, Homo sapiens
cactaccgtaatatt

SEQ ID NO: 1663499 - DNA, 15 bp, Homo sapiens
tcactaccgtaatat

SEQ ID NO: 1663500 - DNA, 15 bp, Homo sapiens
ctcactaccgtaata

SEQ ID NO: 1663501 - DNA, 15 bp, Homo sapiens
actcactaccgtaat

SEQ ID NO: 1663502 - DNA, 15 bp, Homo sapiens
cactcactaccgtaa

SEQ ID NO: 1663503 - DNA, 15 bp, Homo sapiens
acactcactaccgta

SEQ ID NO: 1663504 - DNA, 15 bp, Homo sapiens
aacactcactaccgt

SEQ ID NO: 1663505 - DNA, 15 bp, Homo sapiens
aaacactcactaccg

SEQ ID NO: 1663506 - DNA, 15 bp, Homo sapiens
caaacactcactacc

SEQ ID NO: 1663507 - DNA, 15 bp, Homo sapiens
tcaaacactcactac

SEQ ID NO: 1663508 - DNA, 15 bp, Homo sapiens
gtcaaacactcacta

SEQ ID NO: 1663509 - DNA, 15 bp, Homo sapiens
tgtcaaacactcact

SEQ ID NO: 1663510 - DNA, 15 bp, Homo sapiens
atgtcaaacactcac

SEQ ID NO: 1663511 - DNA, 15 bp, Homo sapiens
aatgtcaaacactca

SEQ ID NO: 1663512 - DNA, 15 bp, Homo sapiens
aaatgtcaaacactc

SEQ ID NO: 1663513 - DNA, 15 bp, Homo sapiens
caaatgtcaaacact

SEQ ID NO: 1663514 - DNA, 15 bp, Homo sapiens
gcaaatgtcaaacac

SEQ ID NO: 1663515 - DNA, 15 bp, Homo sapiens
agcaaatgtcaaaca

SEQ ID NO: 1663516 - DNA, 15 bp, Homo sapiens
aagcaaatgtcaaac

SEQ ID NO: 1663517 - DNA, 15 bp, Homo sapiens
gaagcaaatgtcaaa

SEQ ID NO: 1663518 - DNA, 15 bp, Homo sapiens
agaagcaaatgtcaa

SEQ ID NO: 1663519 - DNA, 15 bp, Homo sapiens
tagaagcaaatgtca

SEQ ID NO: 1663520 - DNA, 15 bp, Homo sapiens
atagaagcaaatgtc

SEQ ID NO: 1663521 - DNA, 15 bp, Homo sapiens
catagaagcaaatgt

SEQ ID NO: 1663522 - DNA, 15 bp, Homo sapiens
ccatagaagcaaatg

SEQ ID NO: 1663523 - DNA, 15 bp, Homo sapiens
accatagaagcaaat

SEQ ID NO: 1663524 - DNA, 15 bp, Homo sapiens
aaccatagaagcaaa

SEQ ID NO: 1663525 - DNA, 15 bp, Homo sapiens
taaccatagaagcaa

SEQ ID NO: 1663526 - DNA, 15 bp, Homo sapiens
ttaaccatagaagca

SEQ ID NO: 1663527 - DNA, 15 bp, Homo sapiens
cttaaccatagaagc

SEQ ID NO: 1663528 - DNA, 15 bp, Homo sapiens
acttaaccatagaag

SEQ ID NO: 1663529 - DNA, 15 bp, Homo sapiens
aacttaaccatagaa

SEQ ID NO: 1663530 - DNA, 15 bp, Homo sapiens
aaacttaaccataga

SEQ ID NO: 1663531 - DNA, 15 bp, Homo sapiens
taaacttaaccatag

SEQ ID NO: 1663532 - DNA, 15 bp, Homo sapiens
ctaaacttaaccata

SEQ ID NO: 1663533 - DNA, 15 bp, Homo sapiens
cctaaacttaaccat

SEQ ID NO: 1663534 - DNA, 15 bp, Homo sapiens
ccctaaacttaacca

SEQ ID NO: 1663535 - DNA, 15 bp, Homo sapiens
tccctaaacttaacc

SEQ ID NO: 1663536 - DNA, 15 bp, Homo sapiens
ctccctaaacttaac

SEQ ID NO: 1663537 - DNA, 15 bp, Homo sapiens
tctccctaaacttaa

SEQ ID NO: 1663538 - DNA, 15 bp, Homo sapiens
ctctccctaaactta

SEQ ID NO: 1663539 - DNA, 15 bp, Homo sapiens
actctccctaaactt

SEQ ID NO: 1663540 - DNA, 15 bp, Homo sapiens
aactctccctaaact

SEQ ID NO: 1663541 - DNA, 15 bp, Homo sapiens
aaactctccctaaac

SEQ ID NO: 1663542 - DNA, 15 bp, Homo sapiens
taaactctccctaaa

SEQ ID NO: 1663543 - DNA, 15 bp, Homo sapiens
ctaaactctccctaa

SEQ ID NO: 1663544 - DNA, 15 bp, Homo sapiens
gctaaactctcccta

SEQ ID NO: 1663545 - DNA, 15 bp, Homo sapiens
agctaaactctccct

SEQ ID NO: 1663546 - DNA, 15 bp, Homo sapiens
cagctaaactctccc

SEQ ID NO: 1663547 - DNA, 15 bp, Homo sapiens
acagctaaactctcc

SEQ ID NO: 1663548 - DNA, 15 bp, Homo sapiens
tacagctaaactctc

SEQ ID NO: 1663549 - DNA, 15 bp, Homo sapiens
ctacagctaaactct

SEQ ID NO: 1663550 - DNA, 15 bp, Homo sapiens
cctacagctaaactc

SEQ ID NO: 1663551 - DNA, 15 bp, Homo sapiens
ccctacagctaaact

SEQ ID NO: 1663552 - DNA, 15 bp, Homo sapiens
accctacagctaaac

SEQ ID NO: 1663553 - DNA, 15 bp, Homo sapiens
taccctacagctaaa

SEQ ID NO: 1663554 - DNA, 15 bp, Homo sapiens
ataccctacagctaa

SEQ ID NO: 1663555 - DNA, 15 bp, Homo sapiens
aataccctacagcta

SEQ ID NO: 1663556 - DNA, 15 bp, Homo sapiens
gaataccctacagct

SEQ ID NO: 1663557 - DNA, 15 bp, Homo sapiens
agaataccctacagc

SEQ ID NO: 1663558 - DNA, 15 bp, Homo sapiens
aagaataccctacag

SEQ ID NO: 1663559 - DNA, 15 bp, Homo sapiens
caagaataccctaca

SEQ ID NO: 1663560 - DNA, 15 bp, Homo sapiens
tcaagaataccctac

SEQ ID NO: 1663561 - DNA, 15 bp, Homo sapiens
ttcaagaatacccta

SEQ ID NO: 1663562 - DNA, 15 bp, Homo sapiens
tttcaagaataccct

SEQ ID NO: 1663563 - DNA, 15 bp, Homo sapiens
gtttcaagaataccc

SEQ ID NO: 1663564 - DNA, 15 bp, Homo sapiens
agtttcaagaatacc

SEQ ID NO: 1663565 - DNA, 15 bp, Homo sapiens
tagtttcaagaatac

SEQ ID NO: 1663566 - DNA, 15 bp, Homo sapiens
ctagtttcaagaata

SEQ ID NO: 1663567 - DNA, 15 bp, Homo sapiens
tctagtttcaagaat

SEQ ID NO: 1663568 - DNA, 15 bp, Homo sapiens
ttctagtttcaagaa

SEQ ID NO: 1663569 - DNA, 15 bp, Homo sapiens
tttctagtttcaaga

SEQ ID NO: 1663570 - DNA, 15 bp, Homo sapiens
atttctagtttcaag

SEQ ID NO: 1663571 - DNA, 15 bp, Homo sapiens
catttctagtttcaa

SEQ ID NO: 1663572 - DNA, 15 bp, Homo sapiens
tcatttctagtttca

SEQ ID NO: 1663573 - DNA, 15 bp, Homo sapiens
gtcatttctagtttc

SEQ ID NO: 1663574 - DNA, 15 bp, Homo sapiens
ggtcatttctagttt

SEQ ID NO: 1663575 - DNA, 15 bp, Homo sapiens
gggtcatttctagtt

SEQ ID NO: 1663576 - DNA, 15 bp, Homo sapiens
agggtcatttctagt

SEQ ID NO: 1663577 - DNA, 15 bp, Homo sapiens
aagggtcatttctag

SEQ ID NO: 1663578 - DNA, 15 bp, Homo sapiens
gaagggtcatttcta

SEQ ID NO: 1663579 - DNA, 15 bp, Homo sapiens
agaagggtcatttct

SEQ ID NO: 1663580 - DNA, 15 bp, Homo sapiens
cagaagggtcatttc

SEQ ID NO: 1663581 - DNA, 15 bp, Homo sapiens
gcagaagggtcattt

SEQ ID NO: 1663582 - DNA, 15 bp, Homo sapiens
ggcagaagggtcatt

SEQ ID NO: 1663583 - DNA, 15 bp, Homo sapiens
gggcagaagggtcat

SEQ ID NO: 1663584 - DNA, 15 bp, Homo sapiens
agggcagaagggtca

SEQ ID NO: 1663585 - DNA, 15 bp, Homo sapiens
tagggcagaagggtc

SEQ ID NO: 1663586 - DNA, 15 bp, Homo sapiens
ttagggcagaagggt

SEQ ID NO: 1663587 - DNA, 15 bp, Homo sapiens
tttagggcagaaggg

SEQ ID NO: 1663588 - DNA, 15 bp, Homo sapiens
atttagggcagaagg

SEQ ID NO: 1663589 - DNA, 15 bp, Homo sapiens
catttagggcagaag

SEQ ID NO: 1663590 - DNA, 15 bp, Homo sapiens
acatttagggcagaa

SEQ ID NO: 1663591 - DNA, 15 bp, Homo sapiens
aacatttagggcaga

SEQ ID NO: 1663592 - DNA, 15 bp, Homo sapiens
aaacatttagggcag

SEQ ID NO: 1663593 - DNA, 15 bp, Homo sapiens
gaaacatttagggca

SEQ ID NO: 1663594 - DNA, 15 bp, Homo sapiens
agaaacatttagggc

SEQ ID NO: 1663595 - DNA, 15 bp, Homo sapiens
cagaaacatttaggg

SEQ ID NO: 1663596 - DNA, 15 bp, Homo sapiens
gcagaaacatttagg

SEQ ID NO: 1663597 - DNA, 15 bp, Homo sapiens
ggcagaaacatttag

SEQ ID NO: 1663598 - DNA, 15 bp, Homo sapiens
tggcagaaacattta

SEQ ID NO: 1663599 - DNA, 15 bp, Homo sapiens
ctggcagaaacattt

SEQ ID NO: 1663600 - DNA, 15 bp, Homo sapiens
actggcagaaacatt

SEQ ID NO: 1663601 - DNA, 15 bp, Homo sapiens
aactggcagaaacat

SEQ ID NO: 1663602 - DNA, 15 bp, Homo sapiens
aaactggcagaaaca

SEQ ID NO: 1663603 - DNA, 15 bp, Homo sapiens
aaaactggcagaaac

SEQ ID NO: 1663604 - DNA, 15 bp, Homo sapiens
caaaactggcagaaa

SEQ ID NO: 1663605 - DNA, 15 bp, Homo sapiens
tcaaaactggcagaa

SEQ ID NO: 1663606 - DNA, 15 bp, Homo sapiens
ttcaaaactggcaga

SEQ ID NO: 1663607 - DNA, 15 bp, Homo sapiens
tttcaaaactggcag

SEQ ID NO: 1663608 - DNA, 15 bp, Homo sapiens
gtttcaaaactggca

SEQ ID NO: 1663609 - DNA, 15 bp, Homo sapiens
cgtttcaaaactggc

SEQ ID NO: 1663610 - DNA, 15 bp, Homo sapiens
acgtttcaaaactgg

SEQ ID NO: 1663611 - DNA, 15 bp, Homo sapiens
tacgtttcaaaactg

SEQ ID NO: 1663612 - DNA, 15 bp, Homo sapiens
ttacgtttcaaaact

SEQ ID NO: 1663613 - DNA, 15 bp, Homo sapiens
tttacgtttcaaaac

SEQ ID NO: 1663614 - DNA, 15 bp, Homo sapiens
ttttacgtttcaaaa

SEQ ID NO: 1663615 - DNA, 15 bp, Homo sapiens
attttacgtttcaaa

SEQ ID NO: 1663616 - DNA, 15 bp, Homo sapiens
tattttacgtttcaa

SEQ ID NO: 1663617 - DNA, 15 bp, Homo sapiens
ctattttacgtttca

SEQ ID NO: 1663618 - DNA, 15 bp, Homo sapiens
cctattttacgtttc

SEQ ID NO: 1663619 - DNA, 15 bp, Homo sapiens
acctattttacgttt

SEQ ID NO: 1663620 - DNA, 15 bp, Homo sapiens
aacctattttacgtt

SEQ ID NO: 1663621 - DNA, 15 bp, Homo sapiens
caacctattttacgt

SEQ ID NO: 1663622 - DNA, 15 bp, Homo sapiens
gcaacctattttacg

SEQ ID NO: 1663623 - DNA, 15 bp, Homo sapiens
tgcaacctattttac

SEQ ID NO: 1663624 - DNA, 15 bp, Homo sapiens
ctgcaacctatttta

SEQ ID NO: 1663625 - DNA, 15 bp, Homo sapiens
tctgcaacctatttt

SEQ ID NO: 1663626 - DNA, 15 bp, Homo sapiens
ttctgcaacctattt

SEQ ID NO: 1663627 - DNA, 15 bp, Homo sapiens
tttctgcaacctatt

SEQ ID NO: 1663628 - DNA, 15 bp, Homo sapiens
gtttctgcaacctat

SEQ ID NO: 1663629 - DNA, 15 bp, Homo sapiens
tgtttctgcaaccta

SEQ ID NO: 1663630 - DNA, 15 bp, Homo sapiens
ttgtttctgcaacct

SEQ ID NO: 1663631 - DNA, 15 bp, Homo sapiens
tttgtttctgcaacc

SEQ ID NO: 1663632 - DNA, 15 bp, Homo sapiens
gtttgtttctgcaac

SEQ ID NO: 1663633 - DNA, 15 bp, Homo sapiens
agtttgtttctgcaa

SEQ ID NO: 1663634 - DNA, 15 bp, Homo sapiens
aagtttgtttctgca

SEQ ID NO: 1663635 - DNA, 15 bp, Homo sapiens
aaagtttgtttctgc

SEQ ID NO: 1663636 - DNA, 15 bp, Homo sapiens
taaagtttgtttctg

SEQ ID NO: 1663637 - DNA, 15 bp, Homo sapiens
ataaagtttgtttct

SEQ ID NO: 1663638 - DNA, 15 bp, Homo sapiens
gataaagtttgtttc

SEQ ID NO: 1663639 - DNA, 15 bp, Homo sapiens
agataaagtttgttt

SEQ ID NO: 1663640 - DNA, 15 bp, Homo sapiens
aagataaagtttgtt

SEQ ID NO: 1663641 - DNA, 15 bp, Homo sapiens
taagataaagtttgt

SEQ ID NO: 1663642 - DNA, 15 bp, Homo sapiens
ttaagataaagtttg

SEQ ID NO: 1663643 - DNA, 15 bp, Homo sapiens
cttaagataaagttt

SEQ ID NO: 1663644 - DNA, 15 bp, Homo sapiens
tcttaagataaagtt

SEQ ID NO: 1663645 - DNA, 15 bp, Homo sapiens
ttcttaagataaagt

SEQ ID NO: 1663646 - DNA, 15 bp, Homo sapiens
gttcttaagataaag

SEQ ID NO: 1663647 - DNA, 15 bp, Homo sapiens
ggttcttaagataaa

SEQ ID NO: 1663648 - DNA, 15 bp, Homo sapiens
tggttcttaagataa

SEQ ID NO: 1663649 - DNA, 15 bp, Homo sapiens
ctggttcttaagata

SEQ ID NO: 1663650 - DNA, 15 bp, Homo sapiens
tctggttcttaagat

SEQ ID NO: 1663651 - DNA, 15 bp, Homo sapiens
ttctggttcttaaga

SEQ ID NO: 1663652 - DNA, 15 bp, Homo sapiens
attctggttcttaag

SEQ ID NO: 1663653 - DNA, 15 bp, Homo sapiens
aattctggttcttaa

SEQ ID NO: 1663654 - DNA, 15 bp, Homo sapiens
aaattctggttctta

SEQ ID NO: 1663655 - DNA, 15 bp, Homo sapiens
taaattctggttctt

SEQ ID NO: 1663656 - DNA, 15 bp, Homo sapiens
gtaaattctggttct

SEQ ID NO: 1663657 - DNA, 15 bp, Homo sapiens
agtaaattctggttc

SEQ ID NO: 1663658 - DNA, 15 bp, Homo sapiens
aagtaaattctggtt

SEQ ID NO: 1663659 - DNA, 15 bp, Homo sapiens
gaagtaaattctggt

SEQ ID NO: 1663660 - DNA, 15 bp, Homo sapiens
tgaagtaaattctgg

SEQ ID NO: 1663661 - DNA, 15 bp, Homo sapiens
ttgaagtaaattctg

SEQ ID NO: 1663662 - DNA, 15 bp, Homo sapiens
attgaagtaaattct

SEQ ID NO: 1663663 - DNA, 15 bp, Homo sapiens
gattgaagtaaattc

SEQ ID NO: 1663664 - DNA, 15 bp, Homo sapiens
ggattgaagtaaatt

SEQ ID NO: 1663665 - DNA, 15 bp, Homo sapiens
tggattgaagtaaat

SEQ ID NO: 1663666 - DNA, 15 bp, Homo sapiens
gtggattgaagtaaa

SEQ ID NO: 1663667 - DNA, 15 bp, Homo sapiens
tgtggattgaagtaa

SEQ ID NO: 1663668 - DNA, 15 bp, Homo sapiens
atgtggattgaagta

SEQ ID NO: 1663669 - DNA, 15 bp, Homo sapiens
aatgtggattgaagt

SEQ ID NO: 1663670 - DNA, 15 bp, Homo sapiens
aaatgtggattgaag

SEQ ID NO: 1663671 - DNA, 15 bp, Homo sapiens
aaaatgtggattgaa

SEQ ID NO: 1663672 - DNA, 15 bp, Homo sapiens
caaaatgtggattga

SEQ ID NO: 1663673 - DNA, 15 bp, Homo sapiens
tcaaaatgtggattg

SEQ ID NO: 1663674 - DNA, 15 bp, Homo sapiens
gtcaaaatgtggatt

SEQ ID NO: 1663675 - DNA, 15 bp, Homo sapiens
tgtcaaaatgtggat

SEQ ID NO: 1663676 - DNA, 15 bp, Homo sapiens
atgtcaaaatgtgga

SEQ ID NO: 1663677 - DNA, 15 bp, Homo sapiens
aatgtcaaaatgtgg

SEQ ID NO: 1663678 - DNA, 15 bp, Homo sapiens
caatgtcaaaatgtg

SEQ ID NO: 1663679 - DNA, 15 bp, Homo sapiens
tcaatgtcaaaatgt

SEQ ID NO: 1663680 - DNA, 15 bp, Homo sapiens
atcaatgtcaaaatg

SEQ ID NO: 1663681 - DNA, 15 bp, Homo sapiens
aatcaatgtcaaaat

SEQ ID NO: 1663682 - DNA, 15 bp, Homo sapiens
aaatcaatgtcaaaa

SEQ ID NO: 1663683 - DNA, 15 bp, Homo sapiens
aaaatcaatgtcaaa

SEQ ID NO: 1663684 - DNA, 15 bp, Homo sapiens
gaaaatcaatgtcaa

SEQ ID NO: 1663685 - DNA, 15 bp, Homo sapiens
tgaaaatcaatgtca

SEQ ID NO: 1663686 - DNA, 15 bp, Homo sapiens
ctgaaaatcaatgtc

SEQ ID NO: 1663687 - DNA, 15 bp, Homo sapiens
tctgaaaatcaatgt

SEQ ID NO: 1663688 - DNA, 15 bp, Homo sapiens
atctgaaaatcaatg

SEQ ID NO: 1663689 - DNA, 15 bp, Homo sapiens
aatctgaaaatcaat

SEQ ID NO: 1663690 - DNA, 15 bp, Homo sapiens
taatctgaaaatcaa

SEQ ID NO: 1663691 - DNA, 15 bp, Homo sapiens
ttaatctgaaaatca

SEQ ID NO: 1663692 - DNA, 15 bp, Homo sapiens
tttaatctgaaaatc

SEQ ID NO: 1663693 - DNA, 15 bp, Homo sapiens
atttaatctgaaaat

SEQ ID NO: 1663694 - DNA, 15 bp, Homo sapiens
aatttaatctgaaaa

SEQ ID NO: 1663695 - DNA, 15 bp, Homo sapiens
taatttaatctgaaa

SEQ ID NO: 1663696 - DNA, 15 bp, Homo sapiens
ataatttaatctgaa

SEQ ID NO: 1663697 - DNA, 15 bp, Homo sapiens
aataatttaatctga

SEQ ID NO: 1663698 - DNA, 15 bp, Homo sapiens
gaataatttaatctg

SEQ ID NO: 1663699 - DNA, 15 bp, Homo sapiens
agaataatttaatct

SEQ ID NO: 1663700 - DNA, 15 bp, Homo sapiens
cagaataatttaatc

SEQ ID NO: 1663701 - DNA, 15 bp, Homo sapiens
tcagaataatttaat

SEQ ID NO: 1663702 - DNA, 15 bp, Homo sapiens
atcagaataatttaa

SEQ ID NO: 1663703 - DNA, 15 bp, Homo sapiens
tatcagaataattta

SEQ ID NO: 1663704 - DNA, 15 bp, Homo sapiens
atatcagaataattt

SEQ ID NO: 1663705 - DNA, 15 bp, Homo sapiens
gatatcagaataatt

SEQ ID NO: 1663706 - DNA, 15 bp, Homo sapiens
cgatatcagaataat

SEQ ID NO: 1663707 - DNA, 15 bp, Homo sapiens
gcgatatcagaataa

SEQ ID NO: 1663708 - DNA, 15 bp, Homo sapiens
ggcgatatcagaata

SEQ ID NO: 1663709 - DNA, 15 bp, Homo sapiens
tggcgatatcagaat

SEQ ID NO: 1663710 - DNA, 15 bp, Homo sapiens
ctggcgatatcagaa

SEQ ID NO: 1663711 - DNA, 15 bp, Homo sapiens
cctggcgatatcaga

SEQ ID NO: 1663712 - DNA, 15 bp, Homo sapiens
acctggcgatatcag

SEQ ID NO: 1663713 - DNA, 15 bp, Homo sapiens
tacctggcgatatca

SEQ ID NO: 1663714 - DNA, 15 bp, Homo sapiens
ttacctggcgatatc

SEQ ID NO: 1663715 - DNA, 15 bp, Homo sapiens
cttacctggcgatat

SEQ ID NO: 1663716 - DNA, 15 bp, Homo sapiens
gcttacctggcgata

SEQ ID NO: 1663717 - DNA, 15 bp, Homo sapiens
agcttacctggcgat

SEQ ID NO: 1663718 - DNA, 15 bp, Homo sapiens
cagcttacctggcga

SEQ ID NO: 1663719 - DNA, 15 bp, Homo sapiens
acagcttacctggcg

SEQ ID NO: 1663720 - DNA, 15 bp, Homo sapiens
aacagcttacctggc

SEQ ID NO: 1663721 - DNA, 15 bp, Homo sapiens
gaacagcttacctgg

SEQ ID NO: 1663722 - DNA, 15 bp, Homo sapiens
ggaacagcttacctg

SEQ ID NO: 1663723 - DNA, 15 bp, Homo sapiens
aggaacagcttacct

SEQ ID NO: 1663724 - DNA, 15 bp, Homo sapiens
aaggaacagcttacc

SEQ ID NO: 1663725 - DNA, 15 bp, Homo sapiens
caaggaacagcttac

SEQ ID NO: 1663726 - DNA, 15 bp, Homo sapiens
ccaaggaacagctta

SEQ ID NO: 1663727 - DNA, 15 bp, Homo sapiens
cccaaggaacagctt

SEQ ID NO: 1663728 - DNA, 15 bp, Homo sapiens
acccaaggaacagct

SEQ ID NO: 1663729 - DNA, 15 bp, Homo sapiens
tacccaaggaacagc

SEQ ID NO: 1663730 - DNA, 15 bp, Homo sapiens
atacccaaggaacag

SEQ ID NO: 1663731 - DNA, 15 bp, Homo sapiens
catacccaaggaaca

SEQ ID NO: 1663732 - DNA, 15 bp, Homo sapiens
gcatacccaaggaac

SEQ ID NO: 1663733 - DNA, 15 bp, Homo sapiens
tgcatacccaaggaa

SEQ ID NO: 1663734 - DNA, 15 bp, Homo sapiens
atgcatacccaagga

SEQ ID NO: 1663735 - DNA, 15 bp, Homo sapiens
aatgcatacccaagg

SEQ ID NO: 1663736 - DNA, 15 bp, Homo sapiens
aaatgcatacccaag

SEQ ID NO: 1663737 - DNA, 15 bp, Homo sapiens
gaaatgcatacccaa

SEQ ID NO: 1663738 - DNA, 15 bp, Homo sapiens
agaaatgcataccca

SEQ ID NO: 1663739 - DNA, 15 bp, Homo sapiens
aagaaatgcataccc

SEQ ID NO: 1663740 - DNA, 15 bp, Homo sapiens
gaagaaatgcatacc

SEQ ID NO: 1663741 - DNA, 15 bp, Homo sapiens
agaagaaatgcatac

SEQ ID NO: 1663742 - DNA, 15 bp, Homo sapiens
aagaagaaatgcata

SEQ ID NO: 1663743 - DNA, 15 bp, Homo sapiens
aaagaagaaatgcat

SEQ ID NO: 1663744 - DNA, 15 bp, Homo sapiens
gaaagaagaaatgca

SEQ ID NO: 1663745 - DNA, 15 bp, Homo sapiens
ggaaagaagaaatgc

SEQ ID NO: 1663746 - DNA, 15 bp, Homo sapiens
cggaaagaagaaatg

SEQ ID NO: 1663747 - DNA, 15 bp, Homo sapiens
acggaaagaagaaat

SEQ ID NO: 1663748 - DNA, 15 bp, Homo sapiens
aacggaaagaagaaa

SEQ ID NO: 1663749 - DNA, 15 bp, Homo sapiens
aaacggaaagaagaa

SEQ ID NO: 1663750 - DNA, 15 bp, Homo sapiens
aaaacggaaagaaga

SEQ ID NO: 1663751 - DNA, 15 bp, Homo sapiens
aaaaacggaaagaag

SEQ ID NO: 1663752 - DNA, 15 bp, Homo sapiens
aaaaaacggaaagaa

SEQ ID NO: 1663753 - DNA, 15 bp, Homo sapiens
aaaaaaacggaaaga

SEQ ID NO: 1663754 - DNA, 15 bp, Homo sapiens
gaaaaaaacggaaag

SEQ ID NO: 1663755 - DNA, 15 bp, Homo sapiens
agaaaaaaacggaaa

SEQ ID NO: 1663756 - DNA, 15 bp, Homo sapiens
tagaaaaaaacggaa

SEQ ID NO: 1663757 - DNA, 15 bp, Homo sapiens
ttagaaaaaaacgga

SEQ ID NO: 1663758 - DNA, 15 bp, Homo sapiens
cttagaaaaaaacgg

SEQ ID NO: 1663759 - DNA, 15 bp, Homo sapiens
tcttagaaaaaaacg

SEQ ID NO: 1663760 - DNA, 15 bp, Homo sapiens
ctcttagaaaaaaac

SEQ ID NO: 1663761 - DNA, 15 bp, Homo sapiens
gctcttagaaaaaaa

SEQ ID NO: 1663762 - DNA, 15 bp, Homo sapiens
agctcttagaaaaaa

SEQ ID NO: 1663763 - DNA, 15 bp, Homo sapiens
tagctcttagaaaaa

SEQ ID NO: 1663764 - DNA, 15 bp, Homo sapiens
ttagctcttagaaaa

SEQ ID NO: 1663765 - DNA, 15 bp, Homo sapiens
tttagctcttagaaa

SEQ ID NO: 1663766 - DNA, 15 bp, Homo sapiens
ctttagctcttagaa

SEQ ID NO: 1663767 - DNA, 15 bp, Homo sapiens
cctttagctcttaga

SEQ ID NO: 1663768 - DNA, 15 bp, Homo sapiens
tcctttagctcttag

SEQ ID NO: 1663769 - DNA, 15 bp, Homo sapiens
gtcctttagctctta

SEQ ID NO: 1663770 - DNA, 15 bp, Homo sapiens
ggtcctttagctctt

SEQ ID NO: 1663771 - DNA, 15 bp, Homo sapiens
gggtcctttagctct

SEQ ID NO: 1663772 - DNA, 15 bp, Homo sapiens
agggtcctttagctc

SEQ ID NO: 1663773 - DNA, 15 bp, Homo sapiens
cagggtcctttagct

SEQ ID NO: 1663774 - DNA, 15 bp, Homo sapiens
tcagggtcctttagc

SEQ ID NO: 1663775 - DNA, 15 bp, Homo sapiens
ctcagggtcctttag

SEQ ID NO: 1663776 - DNA, 15 bp, Homo sapiens
tctcagggtccttta

SEQ ID NO: 1663777 - DNA, 15 bp, Homo sapiens
ttctcagggtccttt

SEQ ID NO: 1663778 - DNA, 15 bp, Homo sapiens
gttctcagggtcctt

SEQ ID NO: 1663779 - DNA, 15 bp, Homo sapiens
tgttctcagggtcct

SEQ ID NO: 1663780 - DNA, 15 bp, Homo sapiens
gtgttctcagggtcc

SEQ ID NO: 1663781 - DNA, 15 bp, Homo sapiens
agtgttctcagggtc

SEQ ID NO: 1663782 - DNA, 15 bp, Homo sapiens
cagtgttctcagggt

SEQ ID NO: 1663783 - DNA, 15 bp, Homo sapiens
ccagtgttctcaggg

SEQ ID NO: 1663784 - DNA, 15 bp, Homo sapiens
tccagtgttctcagg

SEQ ID NO: 1663785 - DNA, 15 bp, Homo sapiens
ctccagtgttctcag

SEQ ID NO: 1663786 - DNA, 15 bp, Homo sapiens
cctccagtgttctca

SEQ ID NO: 1663787 - DNA, 15 bp, Homo sapiens
acctccagtgttctc

SEQ ID NO: 1663788 - DNA, 15 bp, Homo sapiens
cacctccagtgttct

SEQ ID NO: 1663789 - DNA, 15 bp, Homo sapiens
ccacctccagtgttc

SEQ ID NO: 1663790 - DNA, 15 bp, Homo sapiens
cccacctccagtgtt

SEQ ID NO: 1663791 - DNA, 15 bp, Homo sapiens
tcccacctccagtgt

SEQ ID NO: 1663792 - DNA, 15 bp, Homo sapiens
ttcccacctccagtg

SEQ ID NO: 1663793 - DNA, 15 bp, Homo sapiens
ctttcccacctccag

SEQ ID NO: 1663794 - DNA, 15 bp, Homo sapiens
cctttcccacctcca

SEQ ID NO: 1663795 - DNA, 15 bp, Homo sapiens
tcctttcccacctcc

SEQ ID NO: 1663796 - DNA, 15 bp, Homo sapiens
ttcctttcccacctc

SEQ ID NO: 1663797 - DNA, 15 bp, Homo sapiens
cttcctttcccacct

SEQ ID NO: 1663798 - DNA, 15 bp, Homo sapiens
ccttcctttcccacc

SEQ ID NO: 1663799 - DNA, 15 bp, Homo sapiens
cccttcctttcccac

SEQ ID NO: 1663800 - DNA, 15 bp, Homo sapiens
tcccttcctttccca

SEQ ID NO: 1663801 - DNA, 15 bp, Homo sapiens
ttcccttcctttccc

SEQ ID NO: 1663802 - DNA, 15 bp, Homo sapiens
tttcccttcctttcc

SEQ ID NO: 1663803 - DNA, 15 bp, Homo sapiens
ctttcccttcctttc

SEQ ID NO: 1663804 - DNA, 15 bp, Homo sapiens
cctttcccttccttt

SEQ ID NO: 1663805 - DNA, 15 bp, Homo sapiens
gcctttcccttcctt

SEQ ID NO: 1663806 - DNA, 15 bp, Homo sapiens
tgcctttcccttcct

SEQ ID NO: 1663807 - DNA, 15 bp, Homo sapiens
atgcctttcccttcc

SEQ ID NO: 1663808 - DNA, 15 bp, Homo sapiens
catgcctttcccttc

SEQ ID NO: 1663809 - DNA, 15 bp, Homo sapiens
acatgcctttccctt

SEQ ID NO: 1663810 - DNA, 15 bp, Homo sapiens
aacatgcctttccct

SEQ ID NO: 1663811 - DNA, 15 bp, Homo sapiens
gaacatgcctttccc

SEQ ID NO: 1663812 - DNA, 15 bp, Homo sapiens
tgaacatgcctttcc

SEQ ID NO: 1663813 - DNA, 15 bp, Homo sapiens
gtgaacatgcctttc

SEQ ID NO: 1663814 - DNA, 15 bp, Homo sapiens
tgtgaacatgccttt

SEQ ID NO: 1663815 - DNA, 15 bp, Homo sapiens
gtgtgaacatgcctt

SEQ ID NO: 1663816 - DNA, 15 bp, Homo sapiens
cgtgtgaacatgcct

SEQ ID NO: 1663817 - DNA, 15 bp, Homo sapiens
acgtgtgaacatgcc

SEQ ID NO: 1663818 - DNA, 15 bp, Homo sapiens
cacgtgtgaacatgc

SEQ ID NO: 1663819 - DNA, 15 bp, Homo sapiens
ccacgtgtgaacatg

SEQ ID NO: 1663820 - DNA, 15 bp, Homo sapiens
cccacgtgtgaacat

SEQ ID NO: 1663821 - DNA, 15 bp, Homo sapiens
tcccacgtgtgaaca

SEQ ID NO: 1663822 - DNA, 15 bp, Homo sapiens
atcccacgtgtgaac

SEQ ID NO: 1663823 - DNA, 15 bp, Homo sapiens
tatcccacgtgtgaa

SEQ ID NO: 1663824 - DNA, 15 bp, Homo sapiens
ctatcccacgtgtga

SEQ ID NO: 1663825 - DNA, 15 bp, Homo sapiens
cctatcccacgtgtg

SEQ ID NO: 1663826 - DNA, 15 bp, Homo sapiens
tcctatcccacgtgt

SEQ ID NO: 1663827 - DNA, 15 bp, Homo sapiens
ttcctatcccacgtg

SEQ ID NO: 1663828 - DNA, 15 bp, Homo sapiens
tttcctatcccacgt

SEQ ID NO: 1663829 - DNA, 15 bp, Homo sapiens
ctttcctatcccacg

SEQ ID NO: 1663830 - DNA, 15 bp, Homo sapiens
cctttcctatcccac

SEQ ID NO: 1663831 - DNA, 15 bp, Homo sapiens
acctttcctatccca

SEQ ID NO: 1663832 - DNA, 15 bp, Homo sapiens
aacctttcctatccc

SEQ ID NO: 1663833 - DNA, 15 bp, Homo sapiens
gaacctttcctatcc

SEQ ID NO: 1663834 - DNA, 15 bp, Homo sapiens
tgaacctttcctatc

SEQ ID NO: 1663835 - DNA, 15 bp, Homo sapiens
atgaacctttcctat

SEQ ID NO: 1663836 - DNA, 15 bp, Homo sapiens
aatgaacctttccta

SEQ ID NO: 1663837 - DNA, 15 bp, Homo sapiens
aaatgaacctttcct

SEQ ID NO: 1663838 - DNA, 15 bp, Homo sapiens
taaatgaacctttcc

SEQ ID NO: 1663839 - DNA, 15 bp, Homo sapiens
gtaaatgaacctttc

SEQ ID NO: 1663840 - DNA, 15 bp, Homo sapiens
agtaaatgaaccttt

SEQ ID NO: 1663841 - DNA, 15 bp, Homo sapiens
cagtaaatgaacctt

SEQ ID NO: 1663842 - DNA, 15 bp, Homo sapiens
tcagtaaatgaacct

SEQ ID NO: 1663843 - DNA, 15 bp, Homo sapiens
gtcagtaaatgaacc

SEQ ID NO: 1663844 - DNA, 15 bp, Homo sapiens
ggtcagtaaatgaac

SEQ ID NO: 1663845 - DNA, 15 bp, Homo sapiens
aggtcagtaaatgaa

SEQ ID NO: 1663846 - DNA, 15 bp, Homo sapiens
gaggtcagtaaatga

SEQ ID NO: 1663847 - DNA, 15 bp, Homo sapiens
ggaggtcagtaaatg

SEQ ID NO: 1663848 - DNA, 15 bp, Homo sapiens
tggaggtcagtaaat

SEQ ID NO: 1663849 - DNA, 15 bp, Homo sapiens
ctggaggtcagtaaa

SEQ ID NO: 1663850 - DNA, 15 bp, Homo sapiens
gctggaggtcagtaa

SEQ ID NO: 1663851 - DNA, 15 bp, Homo sapiens
agctggaggtcagta

SEQ ID NO: 1663852 - DNA, 15 bp, Homo sapiens
tagctggaggtcagt

SEQ ID NO: 1663853 - DNA, 15 bp, Homo sapiens
ctagctggaggtcag

SEQ ID NO: 1663854 - DNA, 15 bp, Homo sapiens
gctagctggaggtca

SEQ ID NO: 1663855 - DNA, 15 bp, Homo sapiens
ggctagctggaggtc

SEQ ID NO: 1663856 - DNA, 15 bp, Homo sapiens
aggctagctggaggt

SEQ ID NO: 1663857 - DNA, 15 bp, Homo sapiens
aaggctagctggagg

SEQ ID NO: 1663858 - DNA, 15 bp, Homo sapiens
gaaggctagctggag

SEQ ID NO: 1663859 - DNA, 15 bp, Homo sapiens
ggaaggctagctgga

SEQ ID NO: 1663860 - DNA, 15 bp, Homo sapiens
tggaaggctagctgg

SEQ ID NO: 1663861 - DNA, 15 bp, Homo sapiens
ttggaaggctagctg

SEQ ID NO: 1663862 - DNA, 15 bp, Homo sapiens
tttggaaggctagct

SEQ ID NO: 1663863 - DNA, 15 bp, Homo sapiens
ctttggaaggctagc

SEQ ID NO: 1663864 - DNA, 15 bp, Homo sapiens
actttggaaggctag

SEQ ID NO: 1663865 - DNA, 15 bp, Homo sapiens
cactttggaaggcta

SEQ ID NO: 1663866 - DNA, 15 bp, Homo sapiens
ggcactttggaaggc

SEQ ID NO: 1663867 - DNA, 15 bp, Homo sapiens
aggcactttggaagg

SEQ ID NO: 1663868 - DNA, 15 bp, Homo sapiens
taggcactttggaag

SEQ ID NO: 1663869 - DNA, 15 bp, Homo sapiens
ataggcactttggaa

SEQ ID NO: 1663870 - DNA, 15 bp, Homo sapiens
aataggcactttgga

SEQ ID NO: 1663871 - DNA, 15 bp, Homo sapiens
aaataggcactttgg

SEQ ID NO: 1663872 - DNA, 15 bp, Homo sapiens
taaataggcactttg

SEQ ID NO: 1663873 - DNA, 15 bp, Homo sapiens
ttaaataggcacttt

SEQ ID NO: 1663874 - DNA, 15 bp, Homo sapiens
cttaaataggcactt

SEQ ID NO: 1663875 - DNA, 15 bp, Homo sapiens
tcttaaataggcact

SEQ ID NO: 1663876 - DNA, 15 bp, Homo sapiens
gtcttaaataggcac

SEQ ID NO: 1663877 - DNA, 15 bp, Homo sapiens
ggtcttaaataggca

SEQ ID NO: 1663878 - DNA, 15 bp, Homo sapiens
gggtcttaaataggc

SEQ ID NO: 1663879 - DNA, 15 bp, Homo sapiens
tgggtcttaaatagg

SEQ ID NO: 1663880 - DNA, 15 bp, Homo sapiens
ttgggtcttaaatag

SEQ ID NO: 1663881 - DNA, 15 bp, Homo sapiens
cttgggtcttaaata

SEQ ID NO: 1663882 - DNA, 15 bp, Homo sapiens
ccttgggtcttaaat

SEQ ID NO: 1663883 - DNA, 15 bp, Homo sapiens
tccttgggtcttaaa

SEQ ID NO: 1663884 - DNA, 15 bp, Homo sapiens
ctccttgggtcttaa

SEQ ID NO: 1663885 - DNA, 15 bp, Homo sapiens
actccttgggtctta

SEQ ID NO: 1663886 - DNA, 15 bp, Homo sapiens
tactccttgggtctt

SEQ ID NO: 1663887 - DNA, 15 bp, Homo sapiens
ctactccttgggtct

SEQ ID NO: 1663888 - DNA, 15 bp, Homo sapiens
tctactccttgggtc

SEQ ID NO: 1663889 - DNA, 15 bp, Homo sapiens
atctactccttgggt

SEQ ID NO: 1663890 - DNA, 15 bp, Homo sapiens
catctactccttggg

SEQ ID NO: 1663891 - DNA, 15 bp, Homo sapiens
acatctactccttgg

SEQ ID NO: 1663892 - DNA, 15 bp, Homo sapiens
gacatctactccttg

SEQ ID NO: 1663893 - DNA, 15 bp, Homo sapiens
agacatctactcctt

SEQ ID NO: 1663894 - DNA, 15 bp, Homo sapiens
aagacatctactcct

SEQ ID NO: 1663895 - DNA, 15 bp, Homo sapiens
gaagacatctactcc

SEQ ID NO: 1663896 - DNA, 15 bp, Homo sapiens
ggaagacatctactc

SEQ ID NO: 1663897 - DNA, 15 bp, Homo sapiens
aggaagacatctact

SEQ ID NO: 1663898 - DNA, 15 bp, Homo sapiens
aaggaagacatctac

SEQ ID NO: 1663899 - DNA, 15 bp, Homo sapiens
caaggaagacatcta

SEQ ID NO: 1663900 - DNA, 15 bp, Homo sapiens
ccaaggaagacatct

SEQ ID NO: 1663901 - DNA, 15 bp, Homo sapiens
gccaaggaagacatc

SEQ ID NO: 1663902 - DNA, 15 bp, Homo sapiens
tgccaaggaagacat

SEQ ID NO: 1663903 - DNA, 15 bp, Homo sapiens
ttgccaaggaagaca

SEQ ID NO: 1663904 - DNA, 15 bp, Homo sapiens
attgccaaggaagac

SEQ ID NO: 1663905 - DNA, 15 bp, Homo sapiens
aattgccaaggaaga

SEQ ID NO: 1663906 - DNA, 15 bp, Homo sapiens
caattgccaaggaag

SEQ ID NO: 1663907 - DNA, 15 bp, Homo sapiens
acaattgccaaggaa

SEQ ID NO: 1663908 - DNA, 15 bp, Homo sapiens
tacaattgccaagga

SEQ ID NO: 1663909 - DNA, 15 bp, Homo sapiens
ttacaattgccaagg

SEQ ID NO: 1663910 - DNA, 15 bp, Homo sapiens
gttacaattgccaag

SEQ ID NO: 1663911 - DNA, 15 bp, Homo sapiens
ggttacaattgccaa

SEQ ID NO: 1663912 - DNA, 15 bp, Homo sapiens
gggttacaattgcca

SEQ ID NO: 1663913 - DNA, 15 bp, Homo sapiens
tgggttacaattgcc

SEQ ID NO: 1663914 - DNA, 15 bp, Homo sapiens
ttgggttacaattgc

SEQ ID NO: 1663915 - DNA, 15 bp, Homo sapiens
tttgggttacaattg

SEQ ID NO: 1663916 - DNA, 15 bp, Homo sapiens
atttgggttacaatt

SEQ ID NO: 1663917 - DNA, 15 bp, Homo sapiens
tatttgggttacaat

SEQ ID NO: 1663918 - DNA, 15 bp, Homo sapiens
atatttgggttacaa

SEQ ID NO: 1663919 - DNA, 15 bp, Homo sapiens
tatatttgggttaca

SEQ ID NO: 1663920 - DNA, 15 bp, Homo sapiens
ttatatttgggttac

SEQ ID NO: 1663921 - DNA, 15 bp, Homo sapiens
attatatttgggtta

SEQ ID NO: 1663922 - DNA, 15 bp, Homo sapiens
aattatatttgggtt

SEQ ID NO: 1663923 - DNA, 15 bp, Homo sapiens
aaattatatttgggt

SEQ ID NO: 1663924 - DNA, 15 bp, Homo sapiens
aaaattatatttggg

SEQ ID NO: 1663925 - DNA, 15 bp, Homo sapiens
aaaaattatatttgg

SEQ ID NO: 1663926 - DNA, 15 bp, Homo sapiens
taaaaattatatttg

SEQ ID NO: 1663927 - DNA, 15 bp, Homo sapiens
ttaaaaattatattt

SEQ ID NO: 1663928 - DNA, 15 bp, Homo sapiens
gttaaaaattatatt

SEQ ID NO: 1663929 - DNA, 15 bp, Homo sapiens
ggttaaaaattatat

SEQ ID NO: 1663930 - DNA, 15 bp, Homo sapiens
aggttaaaaattata

SEQ ID NO: 1663931 - DNA, 15 bp, Homo sapiens
aaggttaaaaattat

SEQ ID NO: 1663932 - DNA, 15 bp, Homo sapiens
aaaggttaaaaatta

SEQ ID NO: 1663933 - DNA, 15 bp, Homo sapiens
gaaaggttaaaaatt

SEQ ID NO: 1663934 - DNA, 15 bp, Homo sapiens
tgaaaggttaaaaat

SEQ ID NO: 1663935 - DNA, 15 bp, Homo sapiens
ttgaaaggttaaaaa

SEQ ID NO: 1663936 - DNA, 15 bp, Homo sapiens
attgaaaggttaaaa

SEQ ID NO: 1663937 - DNA, 15 bp, Homo sapiens
aattgaaaggttaaa

SEQ ID NO: 1663938 - DNA, 15 bp, Homo sapiens
aaattgaaaggttaa

SEQ ID NO: 1663939 - DNA, 15 bp, Homo sapiens
aaaattgaaaggtta

SEQ ID NO: 1663940 - DNA, 15 bp, Homo sapiens
taaaattgaaaggtt

SEQ ID NO: 1663941 - DNA, 15 bp, Homo sapiens
ctaaaattgaaaggt

SEQ ID NO: 1663942 - DNA, 15 bp, Homo sapiens
actaaaattgaaagg

SEQ ID NO: 1663943 - DNA, 15 bp, Homo sapiens
gactaaaattgaaag

SEQ ID NO: 1663944 - DNA, 15 bp, Homo sapiens
tgactaaaattgaaa

SEQ ID NO: 1663945 - DNA, 15 bp, Homo sapiens
ttgactaaaattgaa

SEQ ID NO: 1663946 - DNA, 15 bp, Homo sapiens
cttgactaaaattga

SEQ ID NO: 1663947 - DNA, 15 bp, Homo sapiens
tcttgactaaaattg

SEQ ID NO: 1663948 - DNA, 15 bp, Homo sapiens
ttcttgactaaaatt

SEQ ID NO: 1663949 - DNA, 15 bp, Homo sapiens
tttcttgactaaaat

SEQ ID NO: 1663950 - DNA, 15 bp, Homo sapiens
ctttcttgactaaaa

SEQ ID NO: 1663951 - DNA, 15 bp, Homo sapiens
actttcttgactaaa

SEQ ID NO: 1663952 - DNA, 15 bp, Homo sapiens
aactttcttgactaa

SEQ ID NO: 1663953 - DNA, 15 bp, Homo sapiens
caactttcttgacta

SEQ ID NO: 1663954 - DNA, 15 bp, Homo sapiens
ccaactttcttgact

SEQ ID NO: 1663955 - DNA, 15 bp, Homo sapiens
accaactttcttgac

SEQ ID NO: 1663956 - DNA, 15 bp, Homo sapiens
caccaactttcttga

SEQ ID NO: 1663957 - DNA, 15 bp, Homo sapiens
acaccaactttcttg

SEQ ID NO: 1663958 - DNA, 15 bp, Homo sapiens
cacaccaactttctt

SEQ ID NO: 1663959 - DNA, 15 bp, Homo sapiens
gcacaccaactttct

SEQ ID NO: 1663960 - DNA, 15 bp, Homo sapiens
agcacaccaactttc

SEQ ID NO: 1663961 - DNA, 15 bp, Homo sapiens
cagcacaccaacttt

SEQ ID NO: 1663962 - DNA, 15 bp, Homo sapiens
acagcacaccaactt

SEQ ID NO: 1663963 - DNA, 15 bp, Homo sapiens
aacagcacaccaact

SEQ ID NO: 1663964 - DNA, 15 bp, Homo sapiens
taacagcacaccaac

SEQ ID NO: 1663965 - DNA, 15 bp, Homo sapiens
gtaacagcacaccaa

SEQ ID NO: 1663966 - DNA, 15 bp, Homo sapiens
tgtaacagcacacca

SEQ ID NO: 1663967 - DNA, 15 bp, Homo sapiens
ttgtaacagcacacc

SEQ ID NO: 1663968 - DNA, 15 bp, Homo sapiens
tttgtaacagcacac

SEQ ID NO: 1663969 - DNA, 15 bp, Homo sapiens
ttttgtaacagcaca

SEQ ID NO: 1663970 - DNA, 15 bp, Homo sapiens
tttttgtaacagcac

SEQ ID NO: 1663971 - DNA, 15 bp, Homo sapiens
ctttttgtaacagca

SEQ ID NO: 1663972 - DNA, 15 bp, Homo sapiens
actttttgtaacagc

SEQ ID NO: 1663973 - DNA, 15 bp, Homo sapiens
cactttttgtaacag

SEQ ID NO: 1663974 - DNA, 15 bp, Homo sapiens
gcactttttgtaaca

SEQ ID NO: 1663975 - DNA, 15 bp, Homo sapiens
ggcactttttgtaac

SEQ ID NO: 1663976 - DNA, 15 bp, Homo sapiens
gggcactttttgtaa

SEQ ID NO: 1663977 - DNA, 15 bp, Homo sapiens
agggcactttttgta

SEQ ID NO: 1663978 - DNA, 15 bp, Homo sapiens
cagggcactttttgt

SEQ ID NO: 1663979 - DNA, 15 bp, Homo sapiens
tcagggcactttttg

SEQ ID NO: 1663980 - DNA, 15 bp, Homo sapiens
atcagggcacttttt

SEQ ID NO: 1663981 - DNA, 15 bp, Homo sapiens
aatcagggcactttt

SEQ ID NO: 1663982 - DNA, 15 bp, Homo sapiens
taatcagggcacttt

SEQ ID NO: 1663983 - DNA, 15 bp, Homo sapiens
ttaatcagggcactt

SEQ ID NO: 1663984 - DNA, 15 bp, Homo sapiens
gttaatcagggcact

SEQ ID NO: 1663985 - DNA, 15 bp, Homo sapiens
tgttaatcagggcac

SEQ ID NO: 1663986 - DNA, 15 bp, Homo sapiens
ctgttaatcagggca

SEQ ID NO: 1663987 - DNA, 15 bp, Homo sapiens
gctgttaatcagggc

SEQ ID NO: 1663988 - DNA, 15 bp, Homo sapiens
tgctgttaatcaggg

SEQ ID NO: 1663989 - DNA, 15 bp, Homo sapiens
atgctgttaatcagg

SEQ ID NO: 1663990 - DNA, 15 bp, Homo sapiens
aatgctgttaatcag

SEQ ID NO: 1663991 - DNA, 15 bp, Homo sapiens
caatgctgttaatca

SEQ ID NO: 1663992 - DNA, 15 bp, Homo sapiens
acaatgctgttaatc

SEQ ID NO: 1663993 - DNA, 15 bp, Homo sapiens
gacaatgctgttaat

SEQ ID NO: 1663994 - DNA, 15 bp, Homo sapiens
tgacaatgctgttaa

SEQ ID NO: 1663995 - DNA, 15 bp, Homo sapiens
atgacaatgctgtta

SEQ ID NO: 1663996 - DNA, 15 bp, Homo sapiens
catgacaatgctgtt

SEQ ID NO: 1663997 - DNA, 15 bp, Homo sapiens
acatgacaatgctgt

SEQ ID NO: 1663998 - DNA, 15 bp, Homo sapiens
cacatgacaatgctg

SEQ ID NO: 1663999 - DNA, 15 bp, Homo sapiens
gcacatgacaatgct

SEQ ID NO: 1664000 - DNA, 15 bp, Homo sapiens
tgcacatgacaatgc

SEQ ID NO: 1664001 - DNA, 15 bp, Homo sapiens
atgcacatgacaatg

SEQ ID NO: 1664002 - DNA, 15 bp, Homo sapiens
aatgcacatgacaat

SEQ ID NO: 1664003 - DNA, 15 bp, Homo sapiens
caatgcacatgacaa

SEQ ID NO: 1664004 - DNA, 15 bp, Homo sapiens
gcaatgcacatgaca

SEQ ID NO: 1664005 - DNA, 15 bp, Homo sapiens
tatgcaatgcacatg

SEQ ID NO: 1664006 - DNA, 15 bp, Homo sapiens
atatgcaatgcacat

SEQ ID NO: 1664007 - DNA, 15 bp, Homo sapiens
aatatgcaatgcaca

SEQ ID NO: 1664008 - DNA, 15 bp, Homo sapiens
taatatgcaatgcac

SEQ ID NO: 1664009 - DNA, 15 bp, Homo sapiens
ttaatatgcaatgca

SEQ ID NO: 1664010 - DNA, 15 bp, Homo sapiens
attaatatgcaatgc

SEQ ID NO: 1664011 - DNA, 15 bp, Homo sapiens
gattaatatgcaatg

SEQ ID NO: 1664012 - DNA, 15 bp, Homo sapiens
tgattaatatgcaat

SEQ ID NO: 1664013 - DNA, 15 bp, Homo sapiens
ctgattaatatgcaa

SEQ ID NO: 1664014 - DNA, 15 bp, Homo sapiens
gctgattaatatgca

SEQ ID NO: 1664015 - DNA, 15 bp, Homo sapiens
tgctgattaatatgc

SEQ ID NO: 1664016 - DNA, 15 bp, Homo sapiens
ttgctgattaatatg

SEQ ID NO: 1664017 - DNA, 15 bp, Homo sapiens
attgctgattaatat

SEQ ID NO: 1664018 - DNA, 15 bp, Homo sapiens
aattgctgattaata

SEQ ID NO: 1664019 - DNA, 15 bp, Homo sapiens
aaattgctgattaat

SEQ ID NO: 1664020 - DNA, 15 bp, Homo sapiens
taaattgctgattaa

SEQ ID NO: 1664021 - DNA, 15 bp, Homo sapiens
ttaaattgctgatta

SEQ ID NO: 1664022 - DNA, 15 bp, Homo sapiens
tttaaattgctgatt

SEQ ID NO: 1664023 - DNA, 15 bp, Homo sapiens
ttttaaattgctgat

SEQ ID NO: 1664024 - DNA, 15 bp, Homo sapiens
attttaaattgctga

SEQ ID NO: 1664025 - DNA, 15 bp, Homo sapiens
tattttaaattgctg

SEQ ID NO: 1664026 - DNA, 15 bp, Homo sapiens
ttattttaaattgct

SEQ ID NO: 1664027 - DNA, 15 bp, Homo sapiens
gttattttaaattgc

SEQ ID NO: 1664028 - DNA, 15 bp, Homo sapiens
tgttattttaaattg

SEQ ID NO: 1664029 - DNA, 15 bp, Homo sapiens
atgttattttaaatt

SEQ ID NO: 1664030 - DNA, 15 bp, Homo sapiens
catgttattttaaat

SEQ ID NO: 1664031 - DNA, 15 bp, Homo sapiens
tcatgttattttaaa

SEQ ID NO: 1664032 - DNA, 15 bp, Homo sapiens
ttcatgttattttaa

SEQ ID NO: 1664033 - DNA, 15 bp, Homo sapiens
tttcatgttatttta

SEQ ID NO: 1664034 - DNA, 15 bp, Homo sapiens
atttcatgttatttt

SEQ ID NO: 1664035 - DNA, 15 bp, Homo sapiens
aatttcatgttattt

SEQ ID NO: 1664036 - DNA, 15 bp, Homo sapiens
taatttcatgttatt

SEQ ID NO: 1664037 - DNA, 15 bp, Homo sapiens
ataatttcatgttat

SEQ ID NO: 1664038 - DNA, 15 bp, Homo sapiens
cataatttcatgtta

SEQ ID NO: 1664039 - DNA, 15 bp, Homo sapiens
acataatttcatgtt

SEQ ID NO: 1664040 - DNA, 15 bp, Homo sapiens
aacataatttcatgt

SEQ ID NO: 1664041 - DNA, 15 bp, Homo sapiens
caacataatttcatg

SEQ ID NO: 1664042 - DNA, 15 bp, Homo sapiens
tcaacataatttcat

SEQ ID NO: 1664043 - DNA, 15 bp, Homo sapiens
ctcaacataatttca

SEQ ID NO: 1664044 - DNA, 15 bp, Homo sapiens
actcaacataatttc

SEQ ID NO: 1664045 - DNA, 15 bp, Homo sapiens
tactcaacataattt

SEQ ID NO: 1664046 - DNA, 15 bp, Homo sapiens
atactcaacataatt

SEQ ID NO: 1664047 - DNA, 15 bp, Homo sapiens
tatactcaacataat

SEQ ID NO: 1664048 - DNA, 15 bp, Homo sapiens
ttatactcaacataa

SEQ ID NO: 1664049 - DNA, 15 bp, Homo sapiens
attatactcaacata

SEQ ID NO: 1664050 - DNA, 15 bp, Homo sapiens
aattatactcaacat

SEQ ID NO: 1664051 - DNA, 15 bp, Homo sapiens
aaattatactcaaca

SEQ ID NO: 1664052 - DNA, 15 bp, Homo sapiens
aaaattatactcaac

SEQ ID NO: 1664053 - DNA, 15 bp, Homo sapiens
taaaattatactcaa

SEQ ID NO: 1664054 - DNA, 15 bp, Homo sapiens
ttaaaattatactca

SEQ ID NO: 1664055 - DNA, 15 bp, Homo sapiens
attaaaattatactc

SEQ ID NO: 1664056 - DNA, 15 bp, Homo sapiens
tattaaaattatact

SEQ ID NO: 1664057 - DNA, 15 bp, Homo sapiens
atattaaaattatac

SEQ ID NO: 1664058 - DNA, 15 bp, Homo sapiens
aatattaaaattata

SEQ ID NO: 1664059 - DNA, 15 bp, Homo sapiens
aaatattaaaattat

SEQ ID NO: 1664060 - DNA, 15 bp, Homo sapiens
aaaatattaaaatta

SEQ ID NO: 1664061 - DNA, 15 bp, Homo sapiens
taaaatattaaaatt

SEQ ID NO: 1664062 - DNA, 15 bp, Homo sapiens
tataaaatattaaaa

SEQ ID NO: 1664063 - DNA, 15 bp, Homo sapiens
atataaaatattaaa

SEQ ID NO: 1664064 - DNA, 15 bp, Homo sapiens
aatataaaatattaa

SEQ ID NO: 1664065 - DNA, 15 bp, Homo sapiens
taatataaaatatta

SEQ ID NO: 1664066 - DNA, 15 bp, Homo sapiens
ctaatataaaatatt

SEQ ID NO: 1664067 - DNA, 15 bp, Homo sapiens
tctaatataaaatat

SEQ ID NO: 1664068 - DNA, 15 bp, Homo sapiens
atctaatataaaata

SEQ ID NO: 1664069 - DNA, 15 bp, Homo sapiens
tatctaatataaaat

SEQ ID NO: 1664070 - DNA, 15 bp, Homo sapiens
atatctaatataaaa

SEQ ID NO: 1664071 - DNA, 15 bp, Homo sapiens
aatatctaatataaa

SEQ ID NO: 1664072 - DNA, 15 bp, Homo sapiens
taatatctaatataa

SEQ ID NO: 1664073 - DNA, 15 bp, Homo sapiens
ctaatatctaatata

SEQ ID NO: 1664074 - DNA, 15 bp, Homo sapiens
actaatatctaatat

SEQ ID NO: 1664075 - DNA, 15 bp, Homo sapiens
aactaatatctaata

SEQ ID NO: 1664076 - DNA, 15 bp, Homo sapiens
aaactaatatctaat

SEQ ID NO: 1664077 - DNA, 15 bp, Homo sapiens
caaactaatatctaa

SEQ ID NO: 1664078 - DNA, 15 bp, Homo sapiens
tcaaactaatatcta

SEQ ID NO: 1664079 - DNA, 15 bp, Homo sapiens
ctcaaactaatatct

SEQ ID NO: 1664080 - DNA, 15 bp, Homo sapiens
tctcaaactaatatc

SEQ ID NO: 1664081 - DNA, 15 bp, Homo sapiens
gtctcaaactaatat

SEQ ID NO: 1664082 - DNA, 15 bp, Homo sapiens
tgtctcaaactaata

SEQ ID NO: 1664083 - DNA, 15 bp, Homo sapiens
ctgtctcaaactaat

SEQ ID NO: 1664084 - DNA, 15 bp, Homo sapiens
actgtctcaaactaa

SEQ ID NO: 1664085 - DNA, 15 bp, Homo sapiens
cactgtctcaaacta

SEQ ID NO: 1664086 - DNA, 15 bp, Homo sapiens
acactgtctcaaact

SEQ ID NO: 1664087 - DNA, 15 bp, Homo sapiens
aacactgtctcaaac

SEQ ID NO: 1664088 - DNA, 15 bp, Homo sapiens
aaacactgtctcaaa

SEQ ID NO: 1664089 - DNA, 15 bp, Homo sapiens
gaaacactgtctcaa

SEQ ID NO: 1664090 - DNA, 15 bp, Homo sapiens
agaaacactgtctca

SEQ ID NO: 1664091 - DNA, 15 bp, Homo sapiens
gagaaacactgtctc

SEQ ID NO: 1664092 - DNA, 15 bp, Homo sapiens
tgagaaacactgtct

SEQ ID NO: 1664093 - DNA, 15 bp, Homo sapiens
ttgagaaacactgtc

SEQ ID NO: 1664094 - DNA, 15 bp, Homo sapiens
cttgagaaacactgt

SEQ ID NO: 1664095 - DNA, 15 bp, Homo sapiens
acttgagaaacactg

SEQ ID NO: 1664096 - DNA, 15 bp, Homo sapiens
gacttgagaaacact

SEQ ID NO: 1664097 - DNA, 15 bp, Homo sapiens
agacttgagaaacac

SEQ ID NO: 1664098 - DNA, 15 bp, Homo sapiens
cagacttgagaaaca

SEQ ID NO: 1664099 - DNA, 15 bp, Homo sapiens
acagacttgagaaac

SEQ ID NO: 1664100 - DNA, 15 bp, Homo sapiens
tacagacttgagaaa

SEQ ID NO: 1664101 - DNA, 15 bp, Homo sapiens
atacagacttgagaa

SEQ ID NO: 1664102 - DNA, 15 bp, Homo sapiens
tatacagacttgaga

SEQ ID NO: 1664103 - DNA, 15 bp, Homo sapiens
ttatacagacttgag

SEQ ID NO: 1664104 - DNA, 15 bp, Homo sapiens
attatacagacttga

SEQ ID NO: 1664105 - DNA, 15 bp, Homo sapiens
tattatacagacttg

SEQ ID NO: 1664106 - DNA, 15 bp, Homo sapiens
ttattatacagactt

SEQ ID NO: 1664107 - DNA, 15 bp, Homo sapiens
cttattatacagact

SEQ ID NO: 1664108 - DNA, 15 bp, Homo sapiens
acttattatacagac

SEQ ID NO: 1664109 - DNA, 15 bp, Homo sapiens
aacttattatacaga

SEQ ID NO: 1664110 - DNA, 15 bp, Homo sapiens
aaacttattatacag

SEQ ID NO: 1664111 - DNA, 15 bp, Homo sapiens
caaacttattataca

SEQ ID NO: 1664112 - DNA, 15 bp, Homo sapiens
tcaaacttattatac

SEQ ID NO: 1664113 - DNA, 15 bp, Homo sapiens
atcaaacttattata

SEQ ID NO: 1664114 - DNA, 15 bp, Homo sapiens
tatcaaacttattat

SEQ ID NO: 1664115 - DNA, 15 bp, Homo sapiens
ctatcaaacttatta

SEQ ID NO: 1664116 - DNA, 15 bp, Homo sapiens
actatcaaacttatt

SEQ ID NO: 1664117 - DNA, 15 bp, Homo sapiens
tactatcaaacttat

SEQ ID NO: 1664118 - DNA, 15 bp, Homo sapiens
ctactatcaaactta

SEQ ID NO: 1664119 - DNA, 15 bp, Homo sapiens
cctactatcaaactt

SEQ ID NO: 1664120 - DNA, 15 bp, Homo sapiens
ccctactatcaaact

SEQ ID NO: 1664121 - DNA, 15 bp, Homo sapiens
tccctactatcaaac

SEQ ID NO: 1664122 - DNA, 15 bp, Homo sapiens
ctccctactatcaaa

SEQ ID NO: 1664123 - DNA, 15 bp, Homo sapiens
cctccctactatcaa

SEQ ID NO: 1664124 - DNA, 15 bp, Homo sapiens
acctccctactatca

SEQ ID NO: 1664125 - DNA, 15 bp, Homo sapiens
aacctccctactatc

SEQ ID NO: 1664126 - DNA, 15 bp, Homo sapiens
aaacctccctactat

SEQ ID NO: 1664127 - DNA, 15 bp, Homo sapiens
aaaacctccctacta

SEQ ID NO: 1664128 - DNA, 15 bp, Homo sapiens
gaaaacctccctact

SEQ ID NO: 1664129 - DNA, 15 bp, Homo sapiens
agaaaacctccctac

SEQ ID NO: 1664130 - DNA, 15 bp, Homo sapiens
gagaaaacctcccta

SEQ ID NO: 1664131 - DNA, 15 bp, Homo sapiens
agagaaaacctccct

SEQ ID NO: 1664132 - DNA, 15 bp, Homo sapiens
gagagaaaacctccc

SEQ ID NO: 1664133 - DNA, 15 bp, Homo sapiens
tgagagaaaacctcc

SEQ ID NO: 1664134 - DNA, 15 bp, Homo sapiens
ttgagagaaaacctc

SEQ ID NO: 1664135 - DNA, 15 bp, Homo sapiens
cttgagagaaaacct

SEQ ID NO: 1664136 - DNA, 15 bp, Homo sapiens
tcttgagagaaaacc

SEQ ID NO: 1664137 - DNA, 15 bp, Homo sapiens
ttcttgagagaaaac

SEQ ID NO: 1664138 - DNA, 15 bp, Homo sapiens
tttcttgagagaaaa

SEQ ID NO: 1664139 - DNA, 15 bp, Homo sapiens
ttttcttgagagaaa

SEQ ID NO: 1664140 - DNA, 15 bp, Homo sapiens
cttttcttgagagaa

SEQ ID NO: 1664141 - DNA, 15 bp, Homo sapiens
tcttttcttgagaga

SEQ ID NO: 1664142 - DNA, 15 bp, Homo sapiens
ttcttttcttgagag

SEQ ID NO: 1664143 - DNA, 15 bp, Homo sapiens
attcttttcttgaga

SEQ ID NO: 1664144 - DNA, 15 bp, Homo sapiens
aattcttttcttgag

SEQ ID NO: 1664145 - DNA, 15 bp, Homo sapiens
taattcttttcttga

SEQ ID NO: 1664146 - DNA, 15 bp, Homo sapiens
ataattcttttcttg

SEQ ID NO: 1664147 - DNA, 15 bp, Homo sapiens
aataattcttttctt

SEQ ID NO: 1664148 - DNA, 15 bp, Homo sapiens
gaataattcttttct

SEQ ID NO: 1664149 - DNA, 15 bp, Homo sapiens
tgaataattcttttc

SEQ ID NO: 1664150 - DNA, 15 bp, Homo sapiens
ctgaataattctttt

SEQ ID NO: 1664151 - DNA, 15 bp, Homo sapiens
actgaataattcttt

SEQ ID NO: 1664152 - DNA, 15 bp, Homo sapiens
cactgaataattctt

SEQ ID NO: 1664153 - DNA, 15 bp, Homo sapiens
acactgaataattct

SEQ ID NO: 1664154 - DNA, 15 bp, Homo sapiens
cacactgaataattc

SEQ ID NO: 1664155 - DNA, 15 bp, Homo sapiens
gcacactgaataatt

SEQ ID NO: 1664156 - DNA, 15 bp, Homo sapiens
tgcacactgaataat

SEQ ID NO: 1664157 - DNA, 15 bp, Homo sapiens
gtgcacactgaataa

SEQ ID NO: 1664158 - DNA, 15 bp, Homo sapiens
ggtgcacactgaata

SEQ ID NO: 1664159 - DNA, 15 bp, Homo sapiens
aggtgcacactgaat

SEQ ID NO: 1664160 - DNA, 15 bp, Homo sapiens
taggtgcacactgaa

SEQ ID NO: 1664161 - DNA, 15 bp, Homo sapiens
gtaggtgcacactga

SEQ ID NO: 1664162 - DNA, 15 bp, Homo sapiens
tgtaggtgcacactg

SEQ ID NO: 1664163 - DNA, 15 bp, Homo sapiens
atgtaggtgcacact

SEQ ID NO: 1664164 - DNA, 15 bp, Homo sapiens
tatgtaggtgcacac

SEQ ID NO: 1664165 - DNA, 15 bp, Homo sapiens
ttatgtaggtgcaca

SEQ ID NO: 1664166 - DNA, 15 bp, Homo sapiens
attatgtaggtgcac

SEQ ID NO: 1664167 - DNA, 15 bp, Homo sapiens
gattatgtaggtgca

SEQ ID NO: 1664168 - DNA, 15 bp, Homo sapiens
tgattatgtaggtgc

SEQ ID NO: 1664169 - DNA, 15 bp, Homo sapiens
gtgattatgtaggtg

SEQ ID NO: 1664170 - DNA, 15 bp, Homo sapiens
agtgattatgtaggt

SEQ ID NO: 1664171 - DNA, 15 bp, Homo sapiens
cagtgattatgtagg

SEQ ID NO: 1664172 - DNA, 15 bp, Homo sapiens
gcagtgattatgtag

SEQ ID NO: 1664173 - DNA, 15 bp, Homo sapiens
agcagtgattatgta

SEQ ID NO: 1664174 - DNA, 15 bp, Homo sapiens
aagcagtgattatgt

SEQ ID NO: 1664175 - DNA, 15 bp, Homo sapiens
taagcagtgattatg

SEQ ID NO: 1664176 - DNA, 15 bp, Homo sapiens
ctaagcagtgattat

SEQ ID NO: 1664177 - DNA, 15 bp, Homo sapiens
tctaagcagtgatta

SEQ ID NO: 1664178 - DNA, 15 bp, Homo sapiens
atctaagcagtgatt

SEQ ID NO: 1664179 - DNA, 15 bp, Homo sapiens
aatctaagcagtgat

SEQ ID NO: 1664180 - DNA, 15 bp, Homo sapiens
gaatctaagcagtga

SEQ ID NO: 1664181 - DNA, 15 bp, Homo sapiens
agaatctaagcagtg

SEQ ID NO: 1664182 - DNA, 15 bp, Homo sapiens
tagaatctaagcagt

SEQ ID NO: 1664183 - DNA, 15 bp, Homo sapiens
gtagaatctaagcag

SEQ ID NO: 1664184 - DNA, 15 bp, Homo sapiens
tgtagaatctaagca

SEQ ID NO: 1664185 - DNA, 15 bp, Homo sapiens
ttgtagaatctaagc

SEQ ID NO: 1664186 - DNA, 15 bp, Homo sapiens
attgtagaatctaag

SEQ ID NO: 1664187 - DNA, 15 bp, Homo sapiens
aattgtagaatctaa

SEQ ID NO: 1664188 - DNA, 15 bp, Homo sapiens
taattgtagaatcta

SEQ ID NO: 1664189 - DNA, 15 bp, Homo sapiens
ttaattgtagaatct

SEQ ID NO: 1664190 - DNA, 15 bp, Homo sapiens
attaattgtagaatc

SEQ ID NO: 1664191 - DNA, 15 bp, Homo sapiens
tattaattgtagaat

SEQ ID NO: 1664192 - DNA, 15 bp, Homo sapiens
atattaattgtagaa

SEQ ID NO: 1664193 - DNA, 15 bp, Homo sapiens
aatattaattgtaga

SEQ ID NO: 1664194 - DNA, 15 bp, Homo sapiens
aaatattaattgtag

SEQ ID NO: 1664195 - DNA, 15 bp, Homo sapiens
aaaatattaattgta

SEQ ID NO: 1664196 - DNA, 15 bp, Homo sapiens
caaaatattaattgt

SEQ ID NO: 1664197 - DNA, 15 bp, Homo sapiens
gcaaaatattaattg

SEQ ID NO: 1664198 - DNA, 15 bp, Homo sapiens
agcaaaatattaatt

SEQ ID NO: 1664199 - DNA, 15 bp, Homo sapiens
tagcaaaatattaat

SEQ ID NO: 1664200 - DNA, 15 bp, Homo sapiens
atagcaaaatattaa

SEQ ID NO: 1664201 - DNA, 15 bp, Homo sapiens
tatagcaaaatatta

SEQ ID NO: 1664202 - DNA, 15 bp, Homo sapiens
atatagcaaaatatt

SEQ ID NO: 1664203 - DNA, 15 bp, Homo sapiens
aatatagcaaaatat

SEQ ID NO: 1664204 - DNA, 15 bp, Homo sapiens
aaatatagcaaaata

SEQ ID NO: 1664205 - DNA, 15 bp, Homo sapiens
caaatatagcaaaat

SEQ ID NO: 1664206 - DNA, 15 bp, Homo sapiens
tcaaatatagcaaaa

SEQ ID NO: 1664207 - DNA, 15 bp, Homo sapiens
atcaaatatagcaaa

SEQ ID NO: 1664208 - DNA, 15 bp, Homo sapiens
aatcaaatatagcaa

SEQ ID NO: 1664209 - DNA, 15 bp, Homo sapiens
taatcaaatatagca

SEQ ID NO: 1664210 - DNA, 15 bp, Homo sapiens
ttaatcaaatatagc

SEQ ID NO: 1664211 - DNA, 15 bp, Homo sapiens
tttaatcaaatatag

SEQ ID NO: 1664212 - DNA, 15 bp, Homo sapiens
gtttaatcaaatata

SEQ ID NO: 1664213 - DNA, 15 bp, Homo sapiens
cgtttaatcaaatat

SEQ ID NO: 1664214 - DNA, 15 bp, Homo sapiens
acgtttaatcaaata

SEQ ID NO: 1664215 - DNA, 15 bp, Homo sapiens
aacgtttaatcaaat

SEQ ID NO: 1664216 - DNA, 15 bp, Homo sapiens
aaacgtttaatcaaa

SEQ ID NO: 1664217 - DNA, 15 bp, Homo sapiens
aaaacgtttaatcaa

SEQ ID NO: 1664218 - DNA, 15 bp, Homo sapiens
gaaaacgtttaatca

SEQ ID NO: 1664219 - DNA, 15 bp, Homo sapiens
agaaaacgtttaatc

SEQ ID NO: 1664220 - DNA, 15 bp, Homo sapiens
cagaaaacgtttaat

SEQ ID NO: 1664221 - DNA, 15 bp, Homo sapiens
acagaaaacgtttaa

SEQ ID NO: 1664222 - DNA, 15 bp, Homo sapiens
tacagaaaacgttta

SEQ ID NO: 1664223 - DNA, 15 bp, Homo sapiens
ttacagaaaacgttt

SEQ ID NO: 1664224 - DNA, 15 bp, Homo sapiens
tttacagaaaacgtt

SEQ ID NO: 1664225 - DNA, 15 bp, Homo sapiens
ttttacagaaaacgt

SEQ ID NO: 1664226 - DNA, 15 bp, Homo sapiens
cttttacagaaaacg

SEQ ID NO: 1664227 - DNA, 15 bp, Homo sapiens
tcttttacagaaaac

SEQ ID NO: 1664228 - DNA, 15 bp, Homo sapiens
ttcttttacagaaaa

SEQ ID NO: 1664229 - DNA, 15 bp, Homo sapiens
tttcttttacagaaa

SEQ ID NO: 1664230 - DNA, 15 bp, Homo sapiens
ttttcttttacagaa

SEQ ID NO: 1664231 - DNA, 15 bp, Homo sapiens
tttttcttttacaga

SEQ ID NO: 1664232 - DNA, 15 bp, Homo sapiens
atttttcttttacag

SEQ ID NO: 1664233 - DNA, 15 bp, Homo sapiens
tatttttcttttaca

SEQ ID NO: 1664234 - DNA, 15 bp, Homo sapiens
atatttttcttttac

SEQ ID NO: 1664235 - DNA, 15 bp, Homo sapiens
aatatttttctttta

SEQ ID NO: 1664236 - DNA, 15 bp, Homo sapiens
taatatttttctttt

SEQ ID NO: 1664237 - DNA, 15 bp, Homo sapiens
ataatatttttcttt

SEQ ID NO: 1664238 - DNA, 15 bp, Homo sapiens
aataatatttttctt

SEQ ID NO: 1664239 - DNA, 15 bp, Homo sapiens
taataatatttttct

SEQ ID NO: 1664240 - DNA, 15 bp, Homo sapiens
ataataatatttttc

SEQ ID NO: 1664241 - DNA, 15 bp, Homo sapiens
cataataatattttt

SEQ ID NO: 1664242 - DNA, 15 bp, Homo sapiens
acataataatatttt

SEQ ID NO: 1664243 - DNA, 15 bp, Homo sapiens
tacataataatattt

SEQ ID NO: 1664244 - DNA, 15 bp, Homo sapiens
gtacataataatatt

SEQ ID NO: 1664245 - DNA, 15 bp, Homo sapiens
agtacataataatat

SEQ ID NO: 1664246 - DNA, 15 bp, Homo sapiens
tagtacataataata

SEQ ID NO: 1664247 - DNA, 15 bp, Homo sapiens
atagtacataataat

SEQ ID NO: 1664248 - DNA, 15 bp, Homo sapiens
aatagtacataataa

SEQ ID NO: 1664249 - DNA, 15 bp, Homo sapiens
aaatagtacataata

SEQ ID NO: 1664250 - DNA, 15 bp, Homo sapiens
taaatagtacataat

SEQ ID NO: 1664251 - DNA, 15 bp, Homo sapiens
ctaaatagtacataa

SEQ ID NO: 1664252 - DNA, 15 bp, Homo sapiens
cctaaatagtacata

SEQ ID NO: 1664253 - DNA, 15 bp, Homo sapiens
acctaaatagtacat

SEQ ID NO: 1664254 - DNA, 15 bp, Homo sapiens
aacctaaatagtaca

SEQ ID NO: 1664255 - DNA, 15 bp, Homo sapiens
aaacctaaatagtac

SEQ ID NO: 1664256 - DNA, 15 bp, Homo sapiens
taaacctaaatagta

SEQ ID NO: 1664257 - DNA, 15 bp, Homo sapiens
ataaacctaaatagt

SEQ ID NO: 1664258 - DNA, 15 bp, Homo sapiens
cataaacctaaatag

SEQ ID NO: 1664259 - DNA, 15 bp, Homo sapiens
ccataaacctaaata

SEQ ID NO: 1664260 - DNA, 15 bp, Homo sapiens
cccataaacctaaat

SEQ ID NO: 1664261 - DNA, 15 bp, Homo sapiens
tcccataaacctaaa

SEQ ID NO: 1664262 - DNA, 15 bp, Homo sapiens
ttcccataaacctaa

SEQ ID NO: 1664263 - DNA, 15 bp, Homo sapiens
attcccataaaccta

SEQ ID NO: 1664264 - DNA, 15 bp, Homo sapiens
tattcccataaacct

SEQ ID NO: 1664265 - DNA, 15 bp, Homo sapiens
ttattcccataaacc

SEQ ID NO: 1664266 - DNA, 15 bp, Homo sapiens
attattcccataaac

SEQ ID NO: 1664267 - DNA, 15 bp, Homo sapiens
aattattcccataaa

SEQ ID NO: 1664268 - DNA, 15 bp, Homo sapiens
caattattcccataa

SEQ ID NO: 1664269 - DNA, 15 bp, Homo sapiens
acaattattcccata

SEQ ID NO: 1664270 - DNA, 15 bp, Homo sapiens
aacaattattcccat

SEQ ID NO: 1664271 - DNA, 15 bp, Homo sapiens
taacaattattccca

SEQ ID NO: 1664272 - DNA, 15 bp, Homo sapiens
ttaacaattattccc

SEQ ID NO: 1664273 - DNA, 15 bp, Homo sapiens
cttaacaattattcc

SEQ ID NO: 1664274 - DNA, 15 bp, Homo sapiens
acttaacaattattc

SEQ ID NO: 1664275 - DNA, 15 bp, Homo sapiens
aacttaacaattatt

SEQ ID NO: 1664276 - DNA, 15 bp, Homo sapiens
taacttaacaattat

SEQ ID NO: 1664277 - DNA, 15 bp, Homo sapiens
ttaacttaacaatta

SEQ ID NO: 1664278 - DNA, 15 bp, Homo sapiens
tttaacttaacaatt

SEQ ID NO: 1664279 - DNA, 15 bp, Homo sapiens
ctttaacttaacaat

SEQ ID NO: 1664280 - DNA, 15 bp, Homo sapiens
actttaacttaacaa

SEQ ID NO: 1664281 - DNA, 15 bp, Homo sapiens
cactttaacttaaca

SEQ ID NO: 1664282 - DNA, 15 bp, Homo sapiens
acactttaacttaac

SEQ ID NO: 1664283 - DNA, 15 bp, Homo sapiens
tacactttaacttaa

SEQ ID NO: 1664284 - DNA, 15 bp, Homo sapiens
atacactttaactta

SEQ ID NO: 1664285 - DNA, 15 bp, Homo sapiens
catacactttaactt

SEQ ID NO: 1664286 - DNA, 15 bp, Homo sapiens
tcatacactttaact

SEQ ID NO: 1664287 - DNA, 15 bp, Homo sapiens
ttcatacactttaac

SEQ ID NO: 1664288 - DNA, 15 bp, Homo sapiens
gttcatacactttaa

SEQ ID NO: 1664289 - DNA, 15 bp, Homo sapiens
tgttcatacacttta

SEQ ID NO: 1664290 - DNA, 15 bp, Homo sapiens
ttgttcatacacttt

SEQ ID NO: 1664291 - DNA, 15 bp, Homo sapiens
tttgttcatacactt

SEQ ID NO: 1664292 - DNA, 15 bp, Homo sapiens
gtttgttcatacact

SEQ ID NO: 1664293 - DNA, 15 bp, Homo sapiens
ggtttgttcatacac

SEQ ID NO: 1664294 - DNA, 15 bp, Homo sapiens
aggtttgttcataca

SEQ ID NO: 1664295 - DNA, 15 bp, Homo sapiens
caggtttgttcatac

SEQ ID NO: 1664296 - DNA, 15 bp, Homo sapiens
ccaggtttgttcata

SEQ ID NO: 1664297 - DNA, 15 bp, Homo sapiens
tccaggtttgttcat

SEQ ID NO: 1664298 - DNA, 15 bp, Homo sapiens
ttccaggtttgttca

SEQ ID NO: 1664299 - DNA, 15 bp, Homo sapiens
attccaggtttgttc

SEQ ID NO: 1664300 - DNA, 15 bp, Homo sapiens
cattccaggtttgtt

SEQ ID NO: 1664301 - DNA, 15 bp, Homo sapiens
tcattccaggtttgt

SEQ ID NO: 1664302 - DNA, 15 bp, Homo sapiens
ttcattccaggtttg

SEQ ID NO: 1664303 - DNA, 15 bp, Homo sapiens
tttcattccaggttt

SEQ ID NO: 1664304 - DNA, 15 bp, Homo sapiens
atttcattccaggtt

SEQ ID NO: 1664305 - DNA, 15 bp, Homo sapiens
gatttcattccaggt

SEQ ID NO: 1664306 - DNA, 15 bp, Homo sapiens
agatttcattccagg

SEQ ID NO: 1664307 - DNA, 15 bp, Homo sapiens
cagatttcattccag

SEQ ID NO: 1664308 - DNA, 15 bp, Homo sapiens
acagatttcattcca

SEQ ID NO: 1664309 - DNA, 15 bp, Homo sapiens
aacagatttcattcc

SEQ ID NO: 1664310 - DNA, 15 bp, Homo sapiens
aaacagatttcattc

SEQ ID NO: 1664311 - DNA, 15 bp, Homo sapiens
caaacagatttcatt

SEQ ID NO: 1664312 - DNA, 15 bp, Homo sapiens
gcaaacagatttcat

SEQ ID NO: 1664313 - DNA, 15 bp, Homo sapiens
ggcaaacagatttca

SEQ ID NO: 1664314 - DNA, 15 bp, Homo sapiens
aggcaaacagatttc

SEQ ID NO: 1664315 - DNA, 15 bp, Homo sapiens
taggcaaacagattt

SEQ ID NO: 1664316 - DNA, 15 bp, Homo sapiens
gtaggcaaacagatt

SEQ ID NO: 1664317 - DNA, 15 bp, Homo sapiens
tgtaggcaaacagat

SEQ ID NO: 1664318 - DNA, 15 bp, Homo sapiens
atgtaggcaaacaga

SEQ ID NO: 1664319 - DNA, 15 bp, Homo sapiens
gatgtaggcaaacag

SEQ ID NO: 1664320 - DNA, 15 bp, Homo sapiens
agatgtaggcaaaca

SEQ ID NO: 1664321 - DNA, 15 bp, Homo sapiens
tagatgtaggcaaac

SEQ ID NO: 1664322 - DNA, 15 bp, Homo sapiens
atagatgtaggcaaa

SEQ ID NO: 1664323 - DNA, 15 bp, Homo sapiens
tatagatgtaggcaa

SEQ ID NO: 1664324 - DNA, 15 bp, Homo sapiens
ttatagatgtaggca

SEQ ID NO: 1664325 - DNA, 15 bp, Homo sapiens
attatagatgtaggc

SEQ ID NO: 1664326 - DNA, 15 bp, Homo sapiens
tattatagatgtagg

SEQ ID NO: 1664327 - DNA, 15 bp, Homo sapiens
gtattatagatgtag

SEQ ID NO: 1664328 - DNA, 15 bp, Homo sapiens
tgtattatagatgta

SEQ ID NO: 1664329 - DNA, 15 bp, Homo sapiens
ttgtattatagatgt

SEQ ID NO: 1664330 - DNA, 15 bp, Homo sapiens
gttgtattatagatg

SEQ ID NO: 1664331 - DNA, 15 bp, Homo sapiens
agttgtattatagat

SEQ ID NO: 1664332 - DNA, 15 bp, Homo sapiens
tagttgtattataga

SEQ ID NO: 1664333 - DNA, 15 bp, Homo sapiens
atagttgtattatag

SEQ ID NO: 1664334 - DNA, 15 bp, Homo sapiens
tatagttgtattata

SEQ ID NO: 1664335 - DNA, 15 bp, Homo sapiens
ttatagttgtattat

SEQ ID NO: 1664336 - DNA, 15 bp, Homo sapiens
tttatagttgtatta

SEQ ID NO: 1664337 - DNA, 15 bp, Homo sapiens
ttttatagttgtatt

SEQ ID NO: 1664338 - DNA, 15 bp, Homo sapiens
gttttatagttgtat

SEQ ID NO: 1664339 - DNA, 15 bp, Homo sapiens
tgttttatagttgta

SEQ ID NO: 1664340 - DNA, 15 bp, Homo sapiens
atgttttatagttgt

SEQ ID NO: 1664341 - DNA, 15 bp, Homo sapiens
tatgttttatagttg

SEQ ID NO: 1664342 - DNA, 15 bp, Homo sapiens
ctatgttttatagtt

SEQ ID NO: 1664343 - DNA, 15 bp, Homo sapiens
gctatgttttatagt

SEQ ID NO: 1664344 - DNA, 15 bp, Homo sapiens
tgctatgttttatag

SEQ ID NO: 1664345 - DNA, 15 bp, Homo sapiens
ctgctatgttttata

SEQ ID NO: 1664346 - DNA, 15 bp, Homo sapiens
tctgctatgttttat

SEQ ID NO: 1664347 - DNA, 15 bp, Homo sapiens
atctgctatgtttta

SEQ ID NO: 1664348 - DNA, 15 bp, Homo sapiens
catctgctatgtttt

SEQ ID NO: 1664349 - DNA, 15 bp, Homo sapiens
acatctgctatgttt

SEQ ID NO: 1664350 - DNA, 15 bp, Homo sapiens
tacatctgctatgtt

SEQ ID NO: 1664351 - DNA, 15 bp, Homo sapiens
gtacatctgctatgt

SEQ ID NO: 1664352 - DNA, 15 bp, Homo sapiens
tgtacatctgctatg

SEQ ID NO: 1664353 - DNA, 15 bp, Homo sapiens
ttgtacatctgctat

SEQ ID NO: 1664354 - DNA, 15 bp, Homo sapiens
tttgtacatctgcta

SEQ ID NO: 1664355 - DNA, 15 bp, Homo sapiens
atttgtacatctgct

SEQ ID NO: 1664356 - DNA, 15 bp, Homo sapiens
aatttgtacatctgc

SEQ ID NO: 1664357 - DNA, 15 bp, Homo sapiens
taatttgtacatctg

SEQ ID NO: 1664358 - DNA, 15 bp, Homo sapiens
ctaatttgtacatct

SEQ ID NO: 1664359 - DNA, 15 bp, Homo sapiens
actaatttgtacatc

SEQ ID NO: 1664360 - DNA, 15 bp, Homo sapiens
tactaatttgtacat

SEQ ID NO: 1664361 - DNA, 15 bp, Homo sapiens
ctactaatttgtaca

SEQ ID NO: 1664362 - DNA, 15 bp, Homo sapiens
actactaatttgtac

SEQ ID NO: 1664363 - DNA, 15 bp, Homo sapiens
aactactaatttgta

SEQ ID NO: 1664364 - DNA, 15 bp, Homo sapiens
taactactaatttgt

SEQ ID NO: 1664365 - DNA, 15 bp, Homo sapiens
ttaactactaatttg

SEQ ID NO: 1664366 - DNA, 15 bp, Homo sapiens
attaactactaattt

SEQ ID NO: 1664367 - DNA, 15 bp, Homo sapiens
tattaactactaatt

SEQ ID NO: 1664368 - DNA, 15 bp, Homo sapiens
ctattaactactaat

SEQ ID NO: 1664369 - DNA, 15 bp, Homo sapiens
tctattaactactaa

SEQ ID NO: 1664370 - DNA, 15 bp, Homo sapiens
atctattaactacta

SEQ ID NO: 1664371 - DNA, 15 bp, Homo sapiens
tatctattaactact

SEQ ID NO: 1664372 - DNA, 15 bp, Homo sapiens
ttatctattaactac

SEQ ID NO: 1664373 - DNA, 15 bp, Homo sapiens
gttatctattaacta

SEQ ID NO: 1664374 - DNA, 15 bp, Homo sapiens
agttatctattaact

SEQ ID NO: 1664375 - DNA, 15 bp, Homo sapiens
tagttatctattaac

SEQ ID NO: 1664376 - DNA, 15 bp, Homo sapiens
ttagttatctattaa

SEQ ID NO: 1664377 - DNA, 15 bp, Homo sapiens
tttagttatctatta

SEQ ID NO: 1664378 - DNA, 15 bp, Homo sapiens
ttttagttatctatt

SEQ ID NO: 1664379 - DNA, 15 bp, Homo sapiens
attttagttatctat

SEQ ID NO: 1664380 - DNA, 15 bp, Homo sapiens
cattttagttatcta

SEQ ID NO: 1664381 - DNA, 15 bp, Homo sapiens
gcattttagttatct

SEQ ID NO: 1664382 - DNA, 15 bp, Homo sapiens
tgcattttagttatc

SEQ ID NO: 1664383 - DNA, 15 bp, Homo sapiens
ttgcattttagttat

SEQ ID NO: 1664384 - DNA, 15 bp, Homo sapiens
tttgcattttagtta

SEQ ID NO: 1664385 - DNA, 15 bp, Homo sapiens
atttgcattttagtt

SEQ ID NO: 1664386 - DNA, 15 bp, Homo sapiens
tatttgcattttagt

SEQ ID NO: 1664387 - DNA, 15 bp, Homo sapiens
atatttgcattttag

SEQ ID NO: 1664388 - DNA, 15 bp, Homo sapiens
catatttgcatttta

SEQ ID NO: 1664389 - DNA, 15 bp, Homo sapiens
ccatatttgcatttt

SEQ ID NO: 1664390 - DNA, 15 bp, Homo sapiens
gccatatttgcattt

SEQ ID NO: 1664391 - DNA, 15 bp, Homo sapiens
tgccatatttgcatt

SEQ ID NO: 1664392 - DNA, 15 bp, Homo sapiens
gtgccatatttgcat

SEQ ID NO: 1664393 - DNA, 15 bp, Homo sapiens
agtgccatatttgca

SEQ ID NO: 1664394 - DNA, 15 bp, Homo sapiens
tagtgccatatttgc

SEQ ID NO: 1664395 - DNA, 15 bp, Homo sapiens
gtagtgccatatttg

SEQ ID NO: 1664396 - DNA, 15 bp, Homo sapiens
agtagtgccatattt

SEQ ID NO: 1664397 - DNA, 15 bp, Homo sapiens
tagtagtgccatatt

SEQ ID NO: 1664398 - DNA, 15 bp, Homo sapiens
atagtagtgccatat

SEQ ID NO: 1664399 - DNA, 15 bp, Homo sapiens
aatagtagtgccata

SEQ ID NO: 1664400 - DNA, 15 bp, Homo sapiens
taatagtagtgccat

SEQ ID NO: 1664401 - DNA, 15 bp, Homo sapiens
ataatagtagtgcca

SEQ ID NO: 1664402 - DNA, 15 bp, Homo sapiens
tataatagtagtgcc

SEQ ID NO: 1664403 - DNA, 15 bp, Homo sapiens
ctataatagtagtgc

SEQ ID NO: 1664404 - DNA, 15 bp, Homo sapiens
actataatagtagtg

SEQ ID NO: 1664405 - DNA, 15 bp, Homo sapiens
tactataatagtagt

SEQ ID NO: 1664406 - DNA, 15 bp, Homo sapiens
atactataatagtag

SEQ ID NO: 1664407 - DNA, 15 bp, Homo sapiens
aatactataatagta

SEQ ID NO: 1664408 - DNA, 15 bp, Homo sapiens
taatactataatagt

SEQ ID NO: 1664409 - DNA, 15 bp, Homo sapiens
ataatactataatag

SEQ ID NO: 1664410 - DNA, 15 bp, Homo sapiens
tataatactataata

SEQ ID NO: 1664411 - DNA, 15 bp, Homo sapiens
ctataatactataat

SEQ ID NO: 1664412 - DNA, 15 bp, Homo sapiens
actataatactataa

SEQ ID NO: 1664413 - DNA, 15 bp, Homo sapiens
aactataatactata

SEQ ID NO: 1664414 - DNA, 15 bp, Homo sapiens
aaactataatactat

SEQ ID NO: 1664415 - DNA, 15 bp, Homo sapiens
gaaactataatacta

SEQ ID NO: 1664416 - DNA, 15 bp, Homo sapiens
agaaactataatact

SEQ ID NO: 1664417 - DNA, 15 bp, Homo sapiens
aagaaactataatac

SEQ ID NO: 1664418 - DNA, 15 bp, Homo sapiens
aaagaaactataata

SEQ ID NO: 1664419 - DNA, 15 bp, Homo sapiens
aaaagaaactataat

SEQ ID NO: 1664420 - DNA, 15 bp, Homo sapiens
caaaagaaactataa

SEQ ID NO: 1664421 - DNA, 15 bp, Homo sapiens
tcaaaagaaactata

SEQ ID NO: 1664422 - DNA, 15 bp, Homo sapiens
ctcaaaagaaactat

SEQ ID NO: 1664423 - DNA, 15 bp, Homo sapiens
actcaaaagaaacta

SEQ ID NO: 1664424 - DNA, 15 bp, Homo sapiens
cactcaaaagaaact

SEQ ID NO: 1664425 - DNA, 15 bp, Homo sapiens
ccactcaaaagaaac

SEQ ID NO: 1664426 - DNA, 15 bp, Homo sapiens
gccactcaaaagaaa

SEQ ID NO: 1664427 - DNA, 15 bp, Homo sapiens
cgccactcaaaagaa

SEQ ID NO: 1664428 - DNA, 15 bp, Homo sapiens
acgccactcaaaaga

SEQ ID NO: 1664429 - DNA, 15 bp, Homo sapiens
cacgccactcaaaag

SEQ ID NO: 1664430 - DNA, 15 bp, Homo sapiens
acacgccactcaaaa

SEQ ID NO: 1664431 - DNA, 15 bp, Homo sapiens
gacacgccactcaaa

SEQ ID NO: 1664432 - DNA, 15 bp, Homo sapiens
agacacgccactcaa

SEQ ID NO: 1664433 - DNA, 15 bp, Homo sapiens
cagacacgccactca

SEQ ID NO: 1664434 - DNA, 15 bp, Homo sapiens
acagacacgccactc

SEQ ID NO: 1664435 - DNA, 15 bp, Homo sapiens
tacagacacgccact

SEQ ID NO: 1664436 - DNA, 15 bp, Homo sapiens
ttacagacacgccac

SEQ ID NO: 1664437 - DNA, 15 bp, Homo sapiens
attacagacacgcca

SEQ ID NO: 1664438 - DNA, 15 bp, Homo sapiens
tattacagacacgcc

SEQ ID NO: 1664439 - DNA, 15 bp, Homo sapiens
atattacagacacgc

SEQ ID NO: 1664440 - DNA, 15 bp, Homo sapiens
gatattacagacacg

SEQ ID NO: 1664441 - DNA, 15 bp, Homo sapiens
tgatattacagacac

SEQ ID NO: 1664442 - DNA, 15 bp, Homo sapiens
gtgatattacagaca

SEQ ID NO: 1664443 - DNA, 15 bp, Homo sapiens
tgtgatattacagac

SEQ ID NO: 1664444 - DNA, 15 bp, Homo sapiens
atgtgatattacaga

SEQ ID NO: 1664445 - DNA, 15 bp, Homo sapiens
catgtgatattacag

SEQ ID NO: 1664446 - DNA, 15 bp, Homo sapiens
gcatgtgatattaca

SEQ ID NO: 1664447 - DNA, 15 bp, Homo sapiens
agcatgtgatattac

SEQ ID NO: 1664448 - DNA, 15 bp, Homo sapiens
cagcatgtgatatta

SEQ ID NO: 1664449 - DNA, 15 bp, Homo sapiens
acagcatgtgatatt

SEQ ID NO: 1664450 - DNA, 15 bp, Homo sapiens
cacagcatgtgatat

SEQ ID NO: 1664451 - DNA, 15 bp, Homo sapiens
acacagcatgtgata

SEQ ID NO: 1664452 - DNA, 15 bp, Homo sapiens
aacacagcatgtgat

SEQ ID NO: 1664453 - DNA, 15 bp, Homo sapiens
caacacagcatgtga

SEQ ID NO: 1664454 - DNA, 15 bp, Homo sapiens
tcaacacagcatgtg

SEQ ID NO: 1664455 - DNA, 15 bp, Homo sapiens
atcaacacagcatgt

SEQ ID NO: 1664456 - DNA, 15 bp, Homo sapiens
catcaacacagcatg

SEQ ID NO: 1664457 - DNA, 15 bp, Homo sapiens
gcatcaacacagcat

SEQ ID NO: 1664458 - DNA, 15 bp, Homo sapiens
tgcatcaacacagca

SEQ ID NO: 1664459 - DNA, 15 bp, Homo sapiens
gtgcatcaacacagc

SEQ ID NO: 1664460 - DNA, 15 bp, Homo sapiens
agtgcatcaacacag

SEQ ID NO: 1664461 - DNA, 15 bp, Homo sapiens
aagtgcatcaacaca

SEQ ID NO: 1664462 - DNA, 15 bp, Homo sapiens
gaagtgcatcaacac

SEQ ID NO: 1664463 - DNA, 15 bp, Homo sapiens
tgaagtgcatcaaca

SEQ ID NO: 1664464 - DNA, 15 bp, Homo sapiens
gtgaagtgcatcaac

SEQ ID NO: 1664465 - DNA, 15 bp, Homo sapiens
ggtgaagtgcatcaa

SEQ ID NO: 1664466 - DNA, 15 bp, Homo sapiens
tggtgaagtgcatca

SEQ ID NO: 1664467 - DNA, 15 bp, Homo sapiens
ttggtgaagtgcatc

SEQ ID NO: 1664468 - DNA, 15 bp, Homo sapiens
tttggtgaagtgcat

SEQ ID NO: 1664469 - DNA, 15 bp, Homo sapiens
gtttggtgaagtgca

SEQ ID NO: 1664470 - DNA, 15 bp, Homo sapiens
agtttggtgaagtgc

SEQ ID NO: 1664471 - DNA, 15 bp, Homo sapiens
cagtttggtgaagtg

SEQ ID NO: 1664472 - DNA, 15 bp, Homo sapiens
gcagtttggtgaagt

SEQ ID NO: 1664473 - DNA, 15 bp, Homo sapiens
agcagtttggtgaag

SEQ ID NO: 1664474 - DNA, 15 bp, Homo sapiens
cagcagtttggtgaa

SEQ ID NO: 1664475 - DNA, 15 bp, Homo sapiens
acagcagtttggtga

SEQ ID NO: 1664476 - DNA, 15 bp, Homo sapiens
aacagcagtttggtg

SEQ ID NO: 1664477 - DNA, 15 bp, Homo sapiens
aaacagcagtttggt

SEQ ID NO: 1664478 - DNA, 15 bp, Homo sapiens
aaaacagcagtttgg

SEQ ID NO: 1664479 - DNA, 15 bp, Homo sapiens
gaaaacagcagtttg

SEQ ID NO: 1664480 - DNA, 15 bp, Homo sapiens
tgaaaacagcagttt

SEQ ID NO: 1664481 - DNA, 15 bp, Homo sapiens
ttgaaaacagcagtt

SEQ ID NO: 1664482 - DNA, 15 bp, Homo sapiens
tttgaaaacagcagt

SEQ ID NO: 1664483 - DNA, 15 bp, Homo sapiens
gtttgaaaacagcag

SEQ ID NO: 1664484 - DNA, 15 bp, Homo sapiens
agtttgaaaacagca

SEQ ID NO: 1664485 - DNA, 15 bp, Homo sapiens
cagtttgaaaacagc

SEQ ID NO: 1664486 - DNA, 15 bp, Homo sapiens
gcagtttgaaaacag

SEQ ID NO: 1664487 - DNA, 15 bp, Homo sapiens
agcagtttgaaaaca

SEQ ID NO: 1664488 - DNA, 15 bp, Homo sapiens
aagcagtttgaaaac

SEQ ID NO: 1664489 - DNA, 15 bp, Homo sapiens
aaagcagtttgaaaa

SEQ ID NO: 1664490 - DNA, 15 bp, Homo sapiens
taaagcagtttgaaa

SEQ ID NO: 1664491 - DNA, 15 bp, Homo sapiens
ttaaagcagtttgaa

SEQ ID NO: 1664492 - DNA, 15 bp, Homo sapiens
tttaaagcagtttga

SEQ ID NO: 1664493 - DNA, 15 bp, Homo sapiens
atttaaagcagtttg

SEQ ID NO: 1664494 - DNA, 15 bp, Homo sapiens
gatttaaagcagttt

SEQ ID NO: 1664495 - DNA, 15 bp, Homo sapiens
ggatttaaagcagtt

SEQ ID NO: 1664496 - DNA, 15 bp, Homo sapiens
aggatttaaagcagt

SEQ ID NO: 1664497 - DNA, 15 bp, Homo sapiens
caggatttaaagcag

SEQ ID NO: 1664498 - DNA, 15 bp, Homo sapiens
gcaggatttaaagca

SEQ ID NO: 1664499 - DNA, 15 bp, Homo sapiens
ggcaggatttaaagc

SEQ ID NO: 1664500 - DNA, 15 bp, Homo sapiens
tggcaggatttaaag

SEQ ID NO: 1664501 - DNA, 15 bp, Homo sapiens
atggcaggatttaaa

SEQ ID NO: 1664502 - DNA, 15 bp, Homo sapiens
aatggcaggatttaa

SEQ ID NO: 1664503 - DNA, 15 bp, Homo sapiens
taatggcaggattta

SEQ ID NO: 1664504 - DNA, 15 bp, Homo sapiens
ataatggcaggattt

SEQ ID NO: 1664505 - DNA, 15 bp, Homo sapiens
tataatggcaggatt

SEQ ID NO: 1664506 - DNA, 15 bp, Homo sapiens
ctataatggcaggat

SEQ ID NO: 1664507 - DNA, 15 bp, Homo sapiens
gctataatggcagga

SEQ ID NO: 1664508 - DNA, 15 bp, Homo sapiens
tgctataatggcagg

SEQ ID NO: 1664509 - DNA, 15 bp, Homo sapiens
gtgctataatggcag

SEQ ID NO: 1664510 - DNA, 15 bp, Homo sapiens
tgtgctataatggca

SEQ ID NO: 1664511 - DNA, 15 bp, Homo sapiens
atgtgctataatggc

SEQ ID NO: 1664512 - DNA, 15 bp, Homo sapiens
tatgtgctataatgg

SEQ ID NO: 1664513 - DNA, 15 bp, Homo sapiens
ctatgtgctataatg

SEQ ID NO: 1664514 - DNA, 15 bp, Homo sapiens
gctatgtgctataat

SEQ ID NO: 1664515 - DNA, 15 bp, Homo sapiens
tgctatgtgctataa

SEQ ID NO: 1664516 - DNA, 15 bp, Homo sapiens
ttgctatgtgctata

SEQ ID NO: 1664517 - DNA, 15 bp, Homo sapiens
attgctatgtgctat

SEQ ID NO: 1664518 - DNA, 15 bp, Homo sapiens
cattgctatgtgcta

SEQ ID NO: 1664519 - DNA, 15 bp, Homo sapiens
gcattgctatgtgct

SEQ ID NO: 1664520 - DNA, 15 bp, Homo sapiens
agcattgctatgtgc

SEQ ID NO: 1664521 - DNA, 15 bp, Homo sapiens
tagcattgctatgtg

SEQ ID NO: 1664522 - DNA, 15 bp, Homo sapiens
atagcattgctatgt

SEQ ID NO: 1664523 - DNA, 15 bp, Homo sapiens
aatagcattgctatg

SEQ ID NO: 1664524 - DNA, 15 bp, Homo sapiens
aaatagcattgctat

SEQ ID NO: 1664525 - DNA, 15 bp, Homo sapiens
gaaatagcattgcta

SEQ ID NO: 1664526 - DNA, 15 bp, Homo sapiens
tgaaatagcattgct

SEQ ID NO: 1664527 - DNA, 15 bp, Homo sapiens
gtgaaatagcattgc

SEQ ID NO: 1664528 - DNA, 15 bp, Homo sapiens
agtgaaatagcattg

SEQ ID NO: 1664529 - DNA, 15 bp, Homo sapiens
aagtgaaatagcatt

SEQ ID NO: 1664530 - DNA, 15 bp, Homo sapiens
aaagtgaaatagcat

SEQ ID NO: 1664531 - DNA, 15 bp, Homo sapiens
gaaagtgaaatagca

SEQ ID NO: 1664532 - DNA, 15 bp, Homo sapiens
tgaaagtgaaatagc

SEQ ID NO: 1664533 - DNA, 15 bp, Homo sapiens
atgaaagtgaaatag

SEQ ID NO: 1664534 - DNA, 15 bp, Homo sapiens
aatgaaagtgaaata

SEQ ID NO: 1664535 - DNA, 15 bp, Homo sapiens
aaatgaaagtgaaat

SEQ ID NO: 1664536 - DNA, 15 bp, Homo sapiens
caaatgaaagtgaaa

SEQ ID NO: 1664537 - DNA, 15 bp, Homo sapiens
ccaaatgaaagtgaa

SEQ ID NO: 1664538 - DNA, 15 bp, Homo sapiens
gccaaatgaaagtga

SEQ ID NO: 1664539 - DNA, 15 bp, Homo sapiens
tgccaaatgaaagtg

SEQ ID NO: 1664540 - DNA, 15 bp, Homo sapiens
gtgccaaatgaaagt

SEQ ID NO: 1664541 - DNA, 15 bp, Homo sapiens
tgtgccaaatgaaag

SEQ ID NO: 1664542 - DNA, 15 bp, Homo sapiens
ttgtgccaaatgaaa

SEQ ID NO: 1664543 - DNA, 15 bp, Homo sapiens
tttgtgccaaatgaa

SEQ ID NO: 1664544 - DNA, 15 bp, Homo sapiens
ttttgtgccaaatga

SEQ ID NO: 1664545 - DNA, 15 bp, Homo sapiens
gttttgtgccaaatg

SEQ ID NO: 1664546 - DNA, 15 bp, Homo sapiens
tgttttgtgccaaat

SEQ ID NO: 1664547 - DNA, 15 bp, Homo sapiens
gtgttttgtgccaaa

SEQ ID NO: 1664548 - DNA, 15 bp, Homo sapiens
tgtgttttgtgccaa

SEQ ID NO: 1664549 - DNA, 15 bp, Homo sapiens
atgtgttttgtgcca

SEQ ID NO: 1664550 - DNA, 15 bp, Homo sapiens
aatgtgttttgtgcc

SEQ ID NO: 1664551 - DNA, 15 bp, Homo sapiens
aaatgtgttttgtgc

SEQ ID NO: 1664552 - DNA, 15 bp, Homo sapiens
taaatgtgttttgtg

SEQ ID NO: 1664553 - DNA, 15 bp, Homo sapiens
ataaatgtgttttgt

SEQ ID NO: 1664554 - DNA, 15 bp, Homo sapiens
tataaatgtgttttg

SEQ ID NO: 1664555 - DNA, 15 bp, Homo sapiens
atataaatgtgtttt

SEQ ID NO: 1664556 - DNA, 15 bp, Homo sapiens
tatataaatgtgttt

SEQ ID NO: 1664557 - DNA, 15 bp, Homo sapiens
atatataaatgtgtt

SEQ ID NO: 1664558 - DNA, 15 bp, Homo sapiens
aatatataaatgtgt

SEQ ID NO: 1664559 - DNA, 15 bp, Homo sapiens
caatatataaatgtg

SEQ ID NO: 1664560 - DNA, 15 bp, Homo sapiens
acaatatataaatgt

SEQ ID NO: 1664561 - DNA, 15 bp, Homo sapiens
aacaatatataaatg

SEQ ID NO: 1664562 - DNA, 15 bp, Homo sapiens
aaacaatatataaat

SEQ ID NO: 1664563 - DNA, 15 bp, Homo sapiens
caaacaatatataaa

SEQ ID NO: 1664564 - DNA, 15 bp, Homo sapiens
gcaaacaatatataa

SEQ ID NO: 1664565 - DNA, 15 bp, Homo sapiens
agcaaacaatatata

SEQ ID NO: 1664566 - DNA, 15 bp, Homo sapiens
aagcaaacaatatat

SEQ ID NO: 1664567 - DNA, 15 bp, Homo sapiens
gaagcaaacaatata

SEQ ID NO: 1664568 - DNA, 15 bp, Homo sapiens
agaagcaaacaatat

SEQ ID NO: 1664569 - DNA, 15 bp, Homo sapiens
gagaagcaaacaata

SEQ ID NO: 1664570 - DNA, 15 bp, Homo sapiens
agagaagcaaacaat

SEQ ID NO: 1664571 - DNA, 15 bp, Homo sapiens
aagagaagcaaacaa

SEQ ID NO: 1664572 - DNA, 15 bp, Homo sapiens
gaagagaagcaaaca

SEQ ID NO: 1664573 - DNA, 15 bp, Homo sapiens
agaagagaagcaaac

SEQ ID NO: 1664574 - DNA, 15 bp, Homo sapiens
aagaagagaagcaaa

SEQ ID NO: 1664575 - DNA, 15 bp, Homo sapiens
aaagaagagaagcaa

SEQ ID NO: 1664576 - DNA, 15 bp, Homo sapiens
aaaagaagagaagca

SEQ ID NO: 1664577 - DNA, 15 bp, Homo sapiens
gaaaagaagagaagc

SEQ ID NO: 1664578 - DNA, 15 bp, Homo sapiens
agaaaagaagagaag

SEQ ID NO: 1664579 - DNA, 15 bp, Homo sapiens
cagaaaagaagagaa

SEQ ID NO: 1664580 - DNA, 15 bp, Homo sapiens
acagaaaagaagaga

SEQ ID NO: 1664581 - DNA, 15 bp, Homo sapiens
tacagaaaagaagag

SEQ ID NO: 1664582 - DNA, 15 bp, Homo sapiens
ttacagaaaagaaga

SEQ ID NO: 1664583 - DNA, 15 bp, Homo sapiens
attacagaaaagaag

SEQ ID NO: 1664584 - DNA, 15 bp, Homo sapiens
gattacagaaaagaa

SEQ ID NO: 1664585 - DNA, 15 bp, Homo sapiens
ggattacagaaaaga

SEQ ID NO: 1664586 - DNA, 15 bp, Homo sapiens
gggattacagaaaag

SEQ ID NO: 1664587 - DNA, 15 bp, Homo sapiens
ggggattacagaaaa

SEQ ID NO: 1664588 - DNA, 15 bp, Homo sapiens
tggggattacagaaa

SEQ ID NO: 1664589 - DNA, 15 bp, Homo sapiens
ctggggattacagaa

SEQ ID NO: 1664590 - DNA, 15 bp, Homo sapiens
cctggggattacaga

SEQ ID NO: 1664591 - DNA, 15 bp, Homo sapiens
gcctggggattacag

SEQ ID NO: 1664592 - DNA, 15 bp, Homo sapiens
tgcctggggattaca

SEQ ID NO: 1664593 - DNA, 15 bp, Homo sapiens
ttgcctggggattac

SEQ ID NO: 1664594 - DNA, 15 bp, Homo sapiens
gttgcctggggatta

SEQ ID NO: 1664595 - DNA, 15 bp, Homo sapiens
tgttgcctggggatt

SEQ ID NO: 1664596 - DNA, 15 bp, Homo sapiens
ttgttgcctggggat

SEQ ID NO: 1664597 - DNA, 15 bp, Homo sapiens
tttgttgcctgggga

SEQ ID NO: 1664598 - DNA, 15 bp, Homo sapiens
ttttgttgcctgggg

SEQ ID NO: 1664599 - DNA, 15 bp, Homo sapiens
gttttgttgcctggg

SEQ ID NO: 1664600 - DNA, 15 bp, Homo sapiens
agttttgttgcctgg

SEQ ID NO: 1664601 - DNA, 15 bp, Homo sapiens
tagttttgttgcctg

SEQ ID NO: 1664602 - DNA, 15 bp, Homo sapiens
ctagttttgttgcct

SEQ ID NO: 1664603 - DNA, 15 bp, Homo sapiens
tctagttttgttgcc

SEQ ID NO: 1664604 - DNA, 15 bp, Homo sapiens
ttctagttttgttgc

SEQ ID NO: 1664605 - DNA, 15 bp, Homo sapiens
gttctagttttgttg

SEQ ID NO: 1664606 - DNA, 15 bp, Homo sapiens
tgttctagttttgtt

SEQ ID NO: 1664607 - DNA, 15 bp, Homo sapiens
atgttctagttttgt

SEQ ID NO: 1664608 - DNA, 15 bp, Homo sapiens
aatgttctagttttg

SEQ ID NO: 1664609 - DNA, 15 bp, Homo sapiens
aaatgttctagtttt

SEQ ID NO: 1664610 - DNA, 15 bp, Homo sapiens
caaatgttctagttt

SEQ ID NO: 1664611 - DNA, 15 bp, Homo sapiens
gcaaatgttctagtt

SEQ ID NO: 1664612 - DNA, 15 bp, Homo sapiens
ggcaaatgttctagt

SEQ ID NO: 1664613 - DNA, 15 bp, Homo sapiens
tggcaaatgttctag

SEQ ID NO: 1664614 - DNA, 15 bp, Homo sapiens
gtggcaaatgttcta

SEQ ID NO: 1664615 - DNA, 15 bp, Homo sapiens
agtggcaaatgttct

SEQ ID NO: 1664616 - DNA, 15 bp, Homo sapiens
tagtggcaaatgttc

SEQ ID NO: 1664617 - DNA, 15 bp, Homo sapiens
ttagtggcaaatgtt

SEQ ID NO: 1664618 - DNA, 15 bp, Homo sapiens
attagtggcaaatgt

SEQ ID NO: 1664619 - DNA, 15 bp, Homo sapiens
gattagtggcaaatg

SEQ ID NO: 1664620 - DNA, 15 bp, Homo sapiens
agattagtggcaaat

SEQ ID NO: 1664621 - DNA, 15 bp, Homo sapiens
cagattagtggcaaa

SEQ ID NO: 1664622 - DNA, 15 bp, Homo sapiens
ccagattagtggcaa

SEQ ID NO: 1664623 - DNA, 15 bp, Homo sapiens
gccagattagtggca

SEQ ID NO: 1664624 - DNA, 15 bp, Homo sapiens
tgccagattagtggc

SEQ ID NO: 1664625 - DNA, 15 bp, Homo sapiens
ttgccagattagtgg

SEQ ID NO: 1664626 - DNA, 15 bp, Homo sapiens
gttgccagattagtg

SEQ ID NO: 1664627 - DNA, 15 bp, Homo sapiens
cgttgccagattagt

SEQ ID NO: 1664628 - DNA, 15 bp, Homo sapiens
acgttgccagattag

SEQ ID NO: 1664629 - DNA, 15 bp, Homo sapiens
cacgttgccagatta

SEQ ID NO: 1664630 - DNA, 15 bp, Homo sapiens
ccacgttgccagatt

SEQ ID NO: 1664631 - DNA, 15 bp, Homo sapiens
accacgttgccagat

SEQ ID NO: 1664632 - DNA, 15 bp, Homo sapiens
gaccacgttgccaga

SEQ ID NO: 1664633 - DNA, 15 bp, Homo sapiens
ggaccacgttgccag

SEQ ID NO: 1664634 - DNA, 15 bp, Homo sapiens
aggaccacgttgcca

SEQ ID NO: 1664635 - DNA, 15 bp, Homo sapiens
taggaccacgttgcc

SEQ ID NO: 1664636 - DNA, 15 bp, Homo sapiens
ataggaccacgttgc

SEQ ID NO: 1664637 - DNA, 15 bp, Homo sapiens
tataggaccacgttg

SEQ ID NO: 1664638 - DNA, 15 bp, Homo sapiens
atataggaccacgtt

SEQ ID NO: 1664639 - DNA, 15 bp, Homo sapiens
aatataggaccacgt

SEQ ID NO: 1664640 - DNA, 15 bp, Homo sapiens
taatataggaccacg

SEQ ID NO: 1664641 - DNA, 15 bp, Homo sapiens
ataatataggaccac

SEQ ID NO: 1664642 - DNA, 15 bp, Homo sapiens
cataatataggacca

SEQ ID NO: 1664643 - DNA, 15 bp, Homo sapiens
tcataatataggacc

SEQ ID NO: 1664644 - DNA, 15 bp, Homo sapiens
ttcataatataggac

SEQ ID NO: 1664645 - DNA, 15 bp, Homo sapiens
cttcataatatagga

SEQ ID NO: 1664646 - DNA, 15 bp, Homo sapiens
acttcataatatagg

SEQ ID NO: 1664647 - DNA, 15 bp, Homo sapiens
tacttcataatatag

SEQ ID NO: 1664648 - DNA, 15 bp, Homo sapiens
ctacttcataatata

SEQ ID NO: 1664649 - DNA, 15 bp, Homo sapiens
actacttcataatat

SEQ ID NO: 1664650 - DNA, 15 bp, Homo sapiens
gactacttcataata

SEQ ID NO: 1664651 - DNA, 15 bp, Homo sapiens
tgactacttcataat

SEQ ID NO: 1664652 - DNA, 15 bp, Homo sapiens
atgactacttcataa

SEQ ID NO: 1664653 - DNA, 15 bp, Homo sapiens
tatgactacttcata

SEQ ID NO: 1664654 - DNA, 15 bp, Homo sapiens
atatgactacttcat

SEQ ID NO: 1664655 - DNA, 15 bp, Homo sapiens
tatatgactacttca

SEQ ID NO: 1664656 - DNA, 15 bp, Homo sapiens
ctatatgactacttc

SEQ ID NO: 1664657 - DNA, 15 bp, Homo sapiens
gctatatgactactt

SEQ ID NO: 1664658 - DNA, 15 bp, Homo sapiens
agctatatgactact

SEQ ID NO: 1664659 - DNA, 15 bp, Homo sapiens
cagctatatgactac

SEQ ID NO: 1664660 - DNA, 15 bp, Homo sapiens
tcagctatatgacta

SEQ ID NO: 1664661 - DNA, 15 bp, Homo sapiens
atcagctatatgact

SEQ ID NO: 1664662 - DNA, 15 bp, Homo sapiens
gatcagctatatgac

SEQ ID NO: 1664663 - DNA, 15 bp, Homo sapiens
agatcagctatatga

SEQ ID NO: 1664664 - DNA, 15 bp, Homo sapiens
tagatcagctatatg

SEQ ID NO: 1664665 - DNA, 15 bp, Homo sapiens
ttagatcagctatat

SEQ ID NO: 1664666 - DNA, 15 bp, Homo sapiens
tttagatcagctata

SEQ ID NO: 1664667 - DNA, 15 bp, Homo sapiens
gtttagatcagctat

SEQ ID NO: 1664668 - DNA, 15 bp, Homo sapiens
agtttagatcagcta

SEQ ID NO: 1664669 - DNA, 15 bp, Homo sapiens
tagtttagatcagct

SEQ ID NO: 1664670 - DNA, 15 bp, Homo sapiens
atagtttagatcagc

SEQ ID NO: 1664671 - DNA, 15 bp, Homo sapiens
gatagtttagatcag

SEQ ID NO: 1664672 - DNA, 15 bp, Homo sapiens
ggatagtttagatca

SEQ ID NO: 1664673 - DNA, 15 bp, Homo sapiens
aggatagtttagatc

SEQ ID NO: 1664674 - DNA, 15 bp, Homo sapiens
aaggatagtttagat

SEQ ID NO: 1664675 - DNA, 15 bp, Homo sapiens
taaggatagtttaga

SEQ ID NO: 1664676 - DNA, 15 bp, Homo sapiens
gtaaggatagtttag

SEQ ID NO: 1664677 - DNA, 15 bp, Homo sapiens
tgtaaggatagttta

SEQ ID NO: 1664678 - DNA, 15 bp, Homo sapiens
ctgtaaggatagttt

SEQ ID NO: 1664679 - DNA, 15 bp, Homo sapiens
actgtaaggatagtt

SEQ ID NO: 1664680 - DNA, 15 bp, Homo sapiens
cactgtaaggatagt

SEQ ID NO: 1664681 - DNA, 15 bp, Homo sapiens
tcactgtaaggatag

SEQ ID NO: 1664682 - DNA, 15 bp, Homo sapiens
ttcactgtaaggata

SEQ ID NO: 1664683 - DNA, 15 bp, Homo sapiens
tttcactgtaaggat

SEQ ID NO: 1664684 - DNA, 15 bp, Homo sapiens
atttcactgtaagga

SEQ ID NO: 1664685 - DNA, 15 bp, Homo sapiens
catttcactgtaagg

SEQ ID NO: 1664686 - DNA, 15 bp, Homo sapiens
tcatttcactgtaag

SEQ ID NO: 1664687 - DNA, 15 bp, Homo sapiens
ctcatttcactgtaa

SEQ ID NO: 1664688 - DNA, 15 bp, Homo sapiens
tctcatttcactgta

SEQ ID NO: 1664689 - DNA, 15 bp, Homo sapiens
ctctcatttcactgt

SEQ ID NO: 1664690 - DNA, 15 bp, Homo sapiens
actctcatttcactg

SEQ ID NO: 1664691 - DNA, 15 bp, Homo sapiens
tactctcatttcact

SEQ ID NO: 1664692 - DNA, 15 bp, Homo sapiens
atactctcatttcac

SEQ ID NO: 1664693 - DNA, 15 bp, Homo sapiens
aatactctcatttca

SEQ ID NO: 1664694 - DNA, 15 bp, Homo sapiens
caatactctcatttc

SEQ ID NO: 1664695 - DNA, 15 bp, Homo sapiens
acaatactctcattt

SEQ ID NO: 1664696 - DNA, 15 bp, Homo sapiens
cacaatactctcatt

SEQ ID NO: 1664697 - DNA, 15 bp, Homo sapiens
tcacaatactctcat

SEQ ID NO: 1664698 - DNA, 15 bp, Homo sapiens
ttcacaatactctca

SEQ ID NO: 1664699 - DNA, 15 bp, Homo sapiens
tttcacaatactctc

SEQ ID NO: 1664700 - DNA, 15 bp, Homo sapiens
ctttcacaatactct

SEQ ID NO: 1664701 - DNA, 15 bp, Homo sapiens
actttcacaatactc

SEQ ID NO: 1664702 - DNA, 15 bp, Homo sapiens
aactttcacaatact

SEQ ID NO: 1664703 - DNA, 15 bp, Homo sapiens
aaactttcacaatac

SEQ ID NO: 1664704 - DNA, 15 bp, Homo sapiens
aaaactttcacaata

SEQ ID NO: 1664705 - DNA, 15 bp, Homo sapiens
caaaactttcacaat

SEQ ID NO: 1664706 - DNA, 15 bp, Homo sapiens
acaaaactttcacaa

SEQ ID NO: 1664707 - DNA, 15 bp, Homo sapiens
tacaaaactttcaca

SEQ ID NO: 1664708 - DNA, 15 bp, Homo sapiens
ctacaaaactttcac

SEQ ID NO: 1664709 - DNA, 15 bp, Homo sapiens
tctacaaaactttca

SEQ ID NO: 1664710 - DNA, 15 bp, Homo sapiens
ttctacaaaactttc

SEQ ID NO: 1664711 - DNA, 15 bp, Homo sapiens
tttctacaaaacttt

SEQ ID NO: 1664712 - DNA, 15 bp, Homo sapiens
ctttctacaaaactt

SEQ ID NO: 1664713 - DNA, 15 bp, Homo sapiens
gctttctacaaaact

SEQ ID NO: 1664714 - DNA, 15 bp, Homo sapiens
agctttctacaaaac

SEQ ID NO: 1664715 - DNA, 15 bp, Homo sapiens
gagctttctacaaaa

SEQ ID NO: 1664716 - DNA, 15 bp, Homo sapiens
ggagctttctacaaa

SEQ ID NO: 1664717 - DNA, 15 bp, Homo sapiens
gggagctttctacaa

SEQ ID NO: 1664718 - DNA, 15 bp, Homo sapiens
ggggagctttctaca

SEQ ID NO: 1664719 - DNA, 15 bp, Homo sapiens
tggggagctttctac

SEQ ID NO: 1664720 - DNA, 15 bp, Homo sapiens
atggggagctttcta

SEQ ID NO: 1664721 - DNA, 15 bp, Homo sapiens
tatggggagctttct

SEQ ID NO: 1664722 - DNA, 15 bp, Homo sapiens
atatggggagctttc

SEQ ID NO: 1664723 - DNA, 15 bp, Homo sapiens
catatggggagcttt

SEQ ID NO: 1664724 - DNA, 15 bp, Homo sapiens
acatatggggagctt

SEQ ID NO: 1664725 - DNA, 15 bp, Homo sapiens
gacatatggggagct

SEQ ID NO: 1664726 - DNA, 15 bp, Homo sapiens
ggacatatggggagc

SEQ ID NO: 1664727 - DNA, 15 bp, Homo sapiens
aggacatatggggag

SEQ ID NO: 1664728 - DNA, 15 bp, Homo sapiens
caggacatatgggga

SEQ ID NO: 1664729 - DNA, 15 bp, Homo sapiens
tcaggacatatgggg

SEQ ID NO: 1664730 - DNA, 15 bp, Homo sapiens
ctcaggacatatggg

SEQ ID NO: 1664731 - DNA, 15 bp, Homo sapiens
tctcaggacatatgg

SEQ ID NO: 1664732 - DNA, 15 bp, Homo sapiens
ttctcaggacatatg

SEQ ID NO: 1664733 - DNA, 15 bp, Homo sapiens
attctcaggacatat

SEQ ID NO: 1664734 - DNA, 15 bp, Homo sapiens
gattctcaggacata

SEQ ID NO: 1664735 - DNA, 15 bp, Homo sapiens
agattctcaggacat

SEQ ID NO: 1664736 - DNA, 15 bp, Homo sapiens
tagattctcaggaca

SEQ ID NO: 1664737 - DNA, 15 bp, Homo sapiens
atagattctcaggac

SEQ ID NO: 1664738 - DNA, 15 bp, Homo sapiens
catagattctcagga

SEQ ID NO: 1664739 - DNA, 15 bp, Homo sapiens
gcatagattctcagg

SEQ ID NO: 1664740 - DNA, 15 bp, Homo sapiens
tgcatagattctcag

SEQ ID NO: 1664741 - DNA, 15 bp, Homo sapiens
gtgcatagattctca

SEQ ID NO: 1664742 - DNA, 15 bp, Homo sapiens
tgtgcatagattctc

SEQ ID NO: 1664743 - DNA, 15 bp, Homo sapiens
ctgtgcatagattct

SEQ ID NO: 1664744 - DNA, 15 bp, Homo sapiens
tctgtgcatagattc

SEQ ID NO: 1664745 - DNA, 15 bp, Homo sapiens
gtctgtgcatagatt

SEQ ID NO: 1664746 - DNA, 15 bp, Homo sapiens
ggtctgtgcatagat

SEQ ID NO: 1664747 - DNA, 15 bp, Homo sapiens
gggtctgtgcataga

SEQ ID NO: 1664748 - DNA, 15 bp, Homo sapiens
ggggtctgtgcatag

SEQ ID NO: 1664749 - DNA, 15 bp, Homo sapiens
tggggtctgtgcata

SEQ ID NO: 1664750 - DNA, 15 bp, Homo sapiens
gtggggtctgtgcat

SEQ ID NO: 1664751 - DNA, 15 bp, Homo sapiens
tgtggggtctgtgca

SEQ ID NO: 1664752 - DNA, 15 bp, Homo sapiens
ctgtggggtctgtgc

SEQ ID NO: 1664753 - DNA, 15 bp, Homo sapiens
actgtggggtctgtg

SEQ ID NO: 1664754 - DNA, 15 bp, Homo sapiens
aactgtggggtctgt

SEQ ID NO: 1664755 - DNA, 15 bp, Homo sapiens
taactgtggggtctg

SEQ ID NO: 1664756 - DNA, 15 bp, Homo sapiens
ttaactgtggggtct

SEQ ID NO: 1664757 - DNA, 15 bp, Homo sapiens
tttaactgtggggtc

SEQ ID NO: 1664758 - DNA, 15 bp, Homo sapiens
ttttaactgtggggt

SEQ ID NO: 1664759 - DNA, 15 bp, Homo sapiens
cttttaactgtgggg

SEQ ID NO: 1664760 - DNA, 15 bp, Homo sapiens
gtcttttaactgtgg

SEQ ID NO: 1664761 - DNA, 15 bp, Homo sapiens
ggtcttttaactgtg

SEQ ID NO: 1664762 - DNA, 15 bp, Homo sapiens
aggtcttttaactgt

SEQ ID NO: 1664763 - DNA, 15 bp, Homo sapiens
aaggtcttttaactg

SEQ ID NO: 1664764 - DNA, 15 bp, Homo sapiens
aaaggtcttttaact

SEQ ID NO: 1664765 - DNA, 15 bp, Homo sapiens
caaaggtcttttaac

SEQ ID NO: 1664766 - DNA, 15 bp, Homo sapiens
tcaaaggtcttttaa

SEQ ID NO: 1664767 - DNA, 15 bp, Homo sapiens
ttcaaaggtctttta

SEQ ID NO: 1664768 - DNA, 15 bp, Homo sapiens
attcaaaggtctttt

SEQ ID NO: 1664769 - DNA, 15 bp, Homo sapiens
aattcaaaggtcttt

SEQ ID NO: 1664770 - DNA, 15 bp, Homo sapiens
caattcaaaggtctt

SEQ ID NO: 1664771 - DNA, 15 bp, Homo sapiens
acaattcaaaggtct

SEQ ID NO: 1664772 - DNA, 15 bp, Homo sapiens
cacaattcaaaggtc

SEQ ID NO: 1664773 - DNA, 15 bp, Homo sapiens
ccacaattcaaaggt

SEQ ID NO: 1664774 - DNA, 15 bp, Homo sapiens
cccacaattcaaagg

SEQ ID NO: 1664775 - DNA, 15 bp, Homo sapiens
tcccacaattcaaag

SEQ ID NO: 1664776 - DNA, 15 bp, Homo sapiens
ttcccacaattcaaa

SEQ ID NO: 1664777 - DNA, 15 bp, Homo sapiens
cttcccacaattcaa

SEQ ID NO: 1664778 - DNA, 15 bp, Homo sapiens
tcttcccacaattca

SEQ ID NO: 1664779 - DNA, 15 bp, Homo sapiens
gtcttcccacaattc

SEQ ID NO: 1664780 - DNA, 15 bp, Homo sapiens
tgtcttcccacaatt

SEQ ID NO: 1664781 - DNA, 15 bp, Homo sapiens
atgtcttcccacaat

SEQ ID NO: 1664782 - DNA, 15 bp, Homo sapiens
catgtcttcccacaa

SEQ ID NO: 1664783 - DNA, 15 bp, Homo sapiens
ccatgtcttcccaca

SEQ ID NO: 1664784 - DNA, 15 bp, Homo sapiens
cccatgtcttcccac

SEQ ID NO: 1664785 - DNA, 15 bp, Homo sapiens
acccatgtcttccca

SEQ ID NO: 1664786 - DNA, 15 bp, Homo sapiens
aacccatgtcttccc

SEQ ID NO: 1664787 - DNA, 15 bp, Homo sapiens
aaacccatgtcttcc

SEQ ID NO: 1664788 - DNA, 15 bp, Homo sapiens
taaacccatgtcttc

SEQ ID NO: 1664789 - DNA, 15 bp, Homo sapiens
ttaaacccatgtctt

SEQ ID NO: 1664790 - DNA, 15 bp, Homo sapiens
cttaaacccatgtct

SEQ ID NO: 1664791 - DNA, 15 bp, Homo sapiens
acttaaacccatgtc

SEQ ID NO: 1664792 - DNA, 15 bp, Homo sapiens
tacttaaacccatgt

SEQ ID NO: 1664793 - DNA, 15 bp, Homo sapiens
atacttaaacccatg

SEQ ID NO: 1664794 - DNA, 15 bp, Homo sapiens
gatacttaaacccat

SEQ ID NO: 1664795 - DNA, 15 bp, Homo sapiens
tgatacttaaaccca

SEQ ID NO: 1664796 - DNA, 15 bp, Homo sapiens
gtgatacttaaaccc

SEQ ID NO: 1664797 - DNA, 15 bp, Homo sapiens
agtgatacttaaacc

SEQ ID NO: 1664798 - DNA, 15 bp, Homo sapiens
aagtgatacttaaac

SEQ ID NO: 1664799 - DNA, 15 bp, Homo sapiens
caagtgatacttaaa

SEQ ID NO: 1664800 - DNA, 15 bp, Homo sapiens
ccaagtgatacttaa

SEQ ID NO: 1664801 - DNA, 15 bp, Homo sapiens
accaagtgatactta

SEQ ID NO: 1664802 - DNA, 15 bp, Homo sapiens
aaccaagtgatactt

SEQ ID NO: 1664803 - DNA, 15 bp, Homo sapiens
taaccaagtgatact

SEQ ID NO: 1664804 - DNA, 15 bp, Homo sapiens
gtaaccaagtgatac

SEQ ID NO: 1664805 - DNA, 15 bp, Homo sapiens
ggtaaccaagtgata

SEQ ID NO: 1664806 - DNA, 15 bp, Homo sapiens
aggtaaccaagtgat

SEQ ID NO: 1664807 - DNA, 15 bp, Homo sapiens
aaggtaaccaagtga

SEQ ID NO: 1664808 - DNA, 15 bp, Homo sapiens
gaaggtaaccaagtg

SEQ ID NO: 1664809 - DNA, 15 bp, Homo sapiens
agaaggtaaccaagt

SEQ ID NO: 1664810 - DNA, 15 bp, Homo sapiens
tagaaggtaaccaag

SEQ ID NO: 1664811 - DNA, 15 bp, Homo sapiens
atagaaggtaaccaa

SEQ ID NO: 1664812 - DNA, 15 bp, Homo sapiens
aatagaaggtaacca

SEQ ID NO: 1664813 - DNA, 15 bp, Homo sapiens
aaatagaaggtaacc

SEQ ID NO: 1664814 - DNA, 15 bp, Homo sapiens
caaatagaaggtaac

SEQ ID NO: 1664815 - DNA, 15 bp, Homo sapiens
acaaatagaaggtaa

SEQ ID NO: 1664816 - DNA, 15 bp, Homo sapiens
cacaaatagaaggta

SEQ ID NO: 1664817 - DNA, 15 bp, Homo sapiens
acacaaatagaaggt

SEQ ID NO: 1664818 - DNA, 15 bp, Homo sapiens
tacacaaatagaagg

SEQ ID NO: 1664819 - DNA, 15 bp, Homo sapiens
ttacacaaatagaag

SEQ ID NO: 1664820 - DNA, 15 bp, Homo sapiens
gttacacaaatagaa

SEQ ID NO: 1664821 - DNA, 15 bp, Homo sapiens
tgttacacaaataga

SEQ ID NO: 1664822 - DNA, 15 bp, Homo sapiens
atgttacacaaatag

SEQ ID NO: 1664823 - DNA, 15 bp, Homo sapiens
aatgttacacaaata

SEQ ID NO: 1664824 - DNA, 15 bp, Homo sapiens
caatgttacacaaat

SEQ ID NO: 1664825 - DNA, 15 bp, Homo sapiens
tcaatgttacacaaa

SEQ ID NO: 1664826 - DNA, 15 bp, Homo sapiens
ctcaatgttacacaa

SEQ ID NO: 1664827 - DNA, 15 bp, Homo sapiens
cctcaatgttacaca

SEQ ID NO: 1664828 - DNA, 15 bp, Homo sapiens
acctcaatgttacac

SEQ ID NO: 1664829 - DNA, 15 bp, Homo sapiens
tacctcaatgttaca

SEQ ID NO: 1664830 - DNA, 15 bp, Homo sapiens
ctacctcaatgttac

SEQ ID NO: 1664831 - DNA, 15 bp, Homo sapiens
actacctcaatgtta

SEQ ID NO: 1664832 - DNA, 15 bp, Homo sapiens
aactacctcaatgtt

SEQ ID NO: 1664833 - DNA, 15 bp, Homo sapiens
aaactacctcaatgt

SEQ ID NO: 1664834 - DNA, 15 bp, Homo sapiens
gaaactacctcaatg

SEQ ID NO: 1664835 - DNA, 15 bp, Homo sapiens
tgaaactacctcaat

SEQ ID NO: 1664836 - DNA, 15 bp, Homo sapiens
atgaaactacctcaa

SEQ ID NO: 1664837 - DNA, 15 bp, Homo sapiens
gatgaaactacctca

SEQ ID NO: 1664838 - DNA, 15 bp, Homo sapiens
agatgaaactacctc

SEQ ID NO: 1664839 - DNA, 15 bp, Homo sapiens
aagatgaaactacct

SEQ ID NO: 1664840 - DNA, 15 bp, Homo sapiens
gaagatgaaactacc

SEQ ID NO: 1664841 - DNA, 15 bp, Homo sapiens
agaagatgaaactac

SEQ ID NO: 1664842 - DNA, 15 bp, Homo sapiens
cagaagatgaaacta

SEQ ID NO: 1664843 - DNA, 15 bp, Homo sapiens
ccagaagatgaaact

SEQ ID NO: 1664844 - DNA, 15 bp, Homo sapiens
cccagaagatgaaac

SEQ ID NO: 1664845 - DNA, 15 bp, Homo sapiens
acccagaagatgaaa

SEQ ID NO: 1664846 - DNA, 15 bp, Homo sapiens
aacccagaagatgaa

SEQ ID NO: 1664847 - DNA, 15 bp, Homo sapiens
gaacccagaagatga

SEQ ID NO: 1664848 - DNA, 15 bp, Homo sapiens
ggaacccagaagatg

SEQ ID NO: 1664849 - DNA, 15 bp, Homo sapiens
gggaacccagaagat

SEQ ID NO: 1664850 - DNA, 15 bp, Homo sapiens
tgggaacccagaaga

SEQ ID NO: 1664851 - DNA, 15 bp, Homo sapiens
ctgggaacccagaag

SEQ ID NO: 1664852 - DNA, 15 bp, Homo sapiens
actgggaacccagaa

SEQ ID NO: 1664853 - DNA, 15 bp, Homo sapiens
aactgggaacccaga

SEQ ID NO: 1664854 - DNA, 15 bp, Homo sapiens
aaactgggaacccag

SEQ ID NO: 1664855 - DNA, 15 bp, Homo sapiens
gaaactgggaaccca

SEQ ID NO: 1664856 - DNA, 15 bp, Homo sapiens
ggaaactgggaaccc

SEQ ID NO: 1664857 - DNA, 15 bp, Homo sapiens
aggaaactgggaacc

SEQ ID NO: 1664858 - DNA, 15 bp, Homo sapiens
aaggaaactgggaac

SEQ ID NO: 1664859 - DNA, 15 bp, Homo sapiens
taaggaaactgggaa

SEQ ID NO: 1664860 - DNA, 15 bp, Homo sapiens
ctaaggaaactggga

SEQ ID NO: 1664861 - DNA, 15 bp, Homo sapiens
tctaaggaaactggg

SEQ ID NO: 1664862 - DNA, 15 bp, Homo sapiens
ctctaaggaaactgg

SEQ ID NO: 1664863 - DNA, 15 bp, Homo sapiens
tctctaaggaaactg

SEQ ID NO: 1664864 - DNA, 15 bp, Homo sapiens
ttctctaaggaaact

SEQ ID NO: 1664865 - DNA, 15 bp, Homo sapiens
attctctaaggaaac

SEQ ID NO: 1664866 - DNA, 15 bp, Homo sapiens
cattctctaaggaaa

SEQ ID NO: 1664867 - DNA, 15 bp, Homo sapiens
tcattctctaaggaa

SEQ ID NO: 1664868 - DNA, 15 bp, Homo sapiens
ttcattctctaagga

SEQ ID NO: 1664869 - DNA, 15 bp, Homo sapiens
tttcattctctaagg

SEQ ID NO: 1664870 - DNA, 15 bp, Homo sapiens
ttttcattctctaag

SEQ ID NO: 1664871 - DNA, 15 bp, Homo sapiens
attttcattctctaa

SEQ ID NO: 1664872 - DNA, 15 bp, Homo sapiens
cattttcattctcta

SEQ ID NO: 1664873 - DNA, 15 bp, Homo sapiens
acattttcattctct

SEQ ID NO: 1664874 - DNA, 15 bp, Homo sapiens
aacattttcattctc

SEQ ID NO: 1664875 - DNA, 15 bp, Homo sapiens
caacattttcattct

SEQ ID NO: 1664876 - DNA, 15 bp, Homo sapiens
tcaacattttcattc

SEQ ID NO: 1664877 - DNA, 15 bp, Homo sapiens
ttcaacattttcatt

SEQ ID NO: 1664878 - DNA, 15 bp, Homo sapiens
attcaacattttcat

SEQ ID NO: 1664879 - DNA, 15 bp, Homo sapiens
aattcaacattttca

SEQ ID NO: 1664880 - DNA, 15 bp, Homo sapiens
taattcaacattttc

SEQ ID NO: 1664881 - DNA, 15 bp, Homo sapiens
ataattcaacatttt

SEQ ID NO: 1664882 - DNA, 15 bp, Homo sapiens
cataattcaacattt

SEQ ID NO: 1664883 - DNA, 15 bp, Homo sapiens
acataattcaacatt

SEQ ID NO: 1664884 - DNA, 15 bp, Homo sapiens
cacataattcaacat

SEQ ID NO: 1664885 - DNA, 15 bp, Homo sapiens
tcacataattcaaca

SEQ ID NO: 1664886 - DNA, 15 bp, Homo sapiens
atcacataattcaac

SEQ ID NO: 1664887 - DNA, 15 bp, Homo sapiens
aatcacataattcaa

SEQ ID NO: 1664888 - DNA, 15 bp, Homo sapiens
aaatcacataattca

SEQ ID NO: 1664889 - DNA, 15 bp, Homo sapiens
aaaatcacataattc

SEQ ID NO: 1664890 - DNA, 15 bp, Homo sapiens
aaaaatcacataatt

SEQ ID NO: 1664891 - DNA, 15 bp, Homo sapiens
aaaaaatcacataat

SEQ ID NO: 1664892 - DNA, 15 bp, Homo sapiens
aaaaaaatcacataa

SEQ ID NO: 1664893 - DNA, 15 bp, Homo sapiens
aaaaaaaatcacata

SEQ ID NO: 1664894 - DNA, 15 bp, Homo sapiens
aaaaaaaaatcacat

SEQ ID NO: 1664895 - DNA, 15 bp, Homo sapiens
aaaaaaaaaatcaca

SEQ ID NO: 1664896 - DNA, 15 bp, Homo sapiens
aaaactccgtctcaa

SEQ ID NO: 1664897 - DNA, 15 bp, Homo sapiens
caaaactccgtctca

SEQ ID NO: 1664898 - DNA, 15 bp, Homo sapiens
gcaaaactccgtctc

SEQ ID NO: 1664899 - DNA, 15 bp, Homo sapiens
agcaaaactccgtct

SEQ ID NO: 1664900 - DNA, 15 bp, Homo sapiens
gagcaaaactccgtc

SEQ ID NO: 1664901 - DNA, 15 bp, Homo sapiens
agagcaaaactccgt

SEQ ID NO: 1664902 - DNA, 15 bp, Homo sapiens
aagagcaaaactccg

SEQ ID NO: 1664903 - DNA, 15 bp, Homo sapiens
aaagagcaaaactcc

SEQ ID NO: 1664904 - DNA, 15 bp, Homo sapiens
gaaagagcaaaactc

SEQ ID NO: 1664905 - DNA, 15 bp, Homo sapiens
cgaaagagcaaaact

SEQ ID NO: 1664906 - DNA, 15 bp, Homo sapiens
gcgaaagagcaaaac

SEQ ID NO: 1664907 - DNA, 15 bp, Homo sapiens
ggcgaaagagcaaaa

SEQ ID NO: 1664908 - DNA, 15 bp, Homo sapiens
gggcgaaagagcaaa

SEQ ID NO: 1664909 - DNA, 15 bp, Homo sapiens
tgggcgaaagagcaa

SEQ ID NO: 1664910 - DNA, 15 bp, Homo sapiens
ctgggcgaaagagca

SEQ ID NO: 1664911 - DNA, 15 bp, Homo sapiens
cctgggcgaaagagc

SEQ ID NO: 1664912 - DNA, 15 bp, Homo sapiens
gcctgggcgaaagag

SEQ ID NO: 1664913 - DNA, 15 bp, Homo sapiens
agcctgggcgaaaga

SEQ ID NO: 1664914 - DNA, 15 bp, Homo sapiens
cagcctgggcgaaag

SEQ ID NO: 1664915 - DNA, 15 bp, Homo sapiens
ccagcctgggcgaaa

SEQ ID NO: 1664916 - DNA, 15 bp, Homo sapiens
tccagcctgggcgaa

SEQ ID NO: 1664917 - DNA, 15 bp, Homo sapiens
tcactccagcctggg

SEQ ID NO: 1664918 - DNA, 15 bp, Homo sapiens
ttcactccagcctgg

SEQ ID NO: 1664919 - DNA, 15 bp, Homo sapiens
cttcactccagcctg

SEQ ID NO: 1664920 - DNA, 15 bp, Homo sapiens
acttcactccagcct

SEQ ID NO: 1664921 - DNA, 15 bp, Homo sapiens
tacttcactccagcc

SEQ ID NO: 1664922 - DNA, 15 bp, Homo sapiens
ctacttcactccagc

SEQ ID NO: 1664923 - DNA, 15 bp, Homo sapiens
gctacttcactccag

SEQ ID NO: 1664924 - DNA, 15 bp, Homo sapiens
tgctacttcactcca

SEQ ID NO: 1664925 - DNA, 15 bp, Homo sapiens
gtgctacttcactcc

SEQ ID NO: 1664926 - DNA, 15 bp, Homo sapiens
cgtgctacttcactc

SEQ ID NO: 1664927 - DNA, 15 bp, Homo sapiens
tcgtgctacttcact

SEQ ID NO: 1664928 - DNA, 15 bp, Homo sapiens
atcgtgctacttcac

SEQ ID NO: 1664929 - DNA, 15 bp, Homo sapiens
gatcgtgctacttca

SEQ ID NO: 1664930 - DNA, 15 bp, Homo sapiens
agatcgtgctacttc

SEQ ID NO: 1664931 - DNA, 15 bp, Homo sapiens
gagatcgtgctactt

SEQ ID NO: 1664932 - DNA, 15 bp, Homo sapiens
cgagatcgtgctact

SEQ ID NO: 1664933 - DNA, 15 bp, Homo sapiens
tcgagatcgtgctac

SEQ ID NO: 1664934 - DNA, 15 bp, Homo sapiens
gtcgagatcgtgcta

SEQ ID NO: 1664935 - DNA, 15 bp, Homo sapiens
agtcgagatcgtgct

SEQ ID NO: 1664936 - DNA, 15 bp, Homo sapiens
gagtcgagatcgtgc

SEQ ID NO: 1664937 - DNA, 15 bp, Homo sapiens
tgagtcgagatcgtg

SEQ ID NO: 1664938 - DNA, 15 bp, Homo sapiens
gtgagtcgagatcgt

SEQ ID NO: 1664939 - DNA, 15 bp, Homo sapiens
agtgagtcgagatcg

SEQ ID NO: 1664940 - DNA, 15 bp, Homo sapiens
cagtgagtcgagatc

SEQ ID NO: 1664941 - DNA, 15 bp, Homo sapiens
gcagtgagtcgagat

SEQ ID NO: 1664942 - DNA, 15 bp, Homo sapiens
tgcagtgagtcgaga

SEQ ID NO: 1664943 - DNA, 15 bp, Homo sapiens
ttgcagtgagtcgag

SEQ ID NO: 1664944 - DNA, 15 bp, Homo sapiens
gttgcagtgagtcga

SEQ ID NO: 1664945 - DNA, 15 bp, Homo sapiens
ggttgcagtgagtcg

SEQ ID NO: 1664946 - DNA, 15 bp, Homo sapiens
aaggaggttgcagtg

SEQ ID NO: 1664947 - DNA, 15 bp, Homo sapiens
gaaggaggttgcagt

SEQ ID NO: 1664948 - DNA, 15 bp, Homo sapiens
ggaaggaggttgcag

SEQ ID NO: 1664949 - DNA, 15 bp, Homo sapiens
gggaaggaggttgca

SEQ ID NO: 1664950 - DNA, 15 bp, Homo sapiens
ggggaaggaggttgc

SEQ ID NO: 1664951 - DNA, 15 bp, Homo sapiens
gggggaaggaggttg

SEQ ID NO: 1664952 - DNA, 15 bp, Homo sapiens
tgggggaaggaggtt

SEQ ID NO: 1664953 - DNA, 15 bp, Homo sapiens
atgggggaaggaggt

SEQ ID NO: 1664954 - DNA, 15 bp, Homo sapiens
catgggggaaggagg

SEQ ID NO: 1664955 - DNA, 15 bp, Homo sapiens
tcatgggggaaggag

SEQ ID NO: 1664956 - DNA, 15 bp, Homo sapiens
atcatgggggaagga

SEQ ID NO: 1664957 - DNA, 15 bp, Homo sapiens
gatcatgggggaagg

SEQ ID NO: 1664958 - DNA, 15 bp, Homo sapiens
tgatcatgggggaag

SEQ ID NO: 1664959 - DNA, 15 bp, Homo sapiens
ttgatcatgggggaa

SEQ ID NO: 1664960 - DNA, 15 bp, Homo sapiens
cttgatcatggggga

SEQ ID NO: 1664961 - DNA, 15 bp, Homo sapiens
gcttgatcatggggg

SEQ ID NO: 1664962 - DNA, 15 bp, Homo sapiens
tgcttgatcatgggg

SEQ ID NO: 1664963 - DNA, 15 bp, Homo sapiens
ttgcttgatcatggg

SEQ ID NO: 1664964 - DNA, 15 bp, Homo sapiens
attgcttgatcatgg

SEQ ID NO: 1664965 - DNA, 15 bp, Homo sapiens
aattgcttgatcatg

SEQ ID NO: 1664966 - DNA, 15 bp, Homo sapiens
gaattgcttgatcat

SEQ ID NO: 1664967 - DNA, 15 bp, Homo sapiens
agaattgcttgatca

SEQ ID NO: 1664968 - DNA, 15 bp, Homo sapiens
gagaattgcttgatc

SEQ ID NO: 1664969 - DNA, 15 bp, Homo sapiens
ggagaattgcttgat

SEQ ID NO: 1664970 - DNA, 15 bp, Homo sapiens
cgggtgcctgtaatc

SEQ ID NO: 1664971 - DNA, 15 bp, Homo sapiens
gcgggtgcctgtaat

SEQ ID NO: 1664972 - DNA, 15 bp, Homo sapiens
ggcgggtgcctgtaa

SEQ ID NO: 1664973 - DNA, 15 bp, Homo sapiens
gggcgggtgcctgta

SEQ ID NO: 1664974 - DNA, 15 bp, Homo sapiens
ggggcgggtgcctgt

SEQ ID NO: 1664975 - DNA, 15 bp, Homo sapiens
gggggcgggtgcctg

SEQ ID NO: 1664976 - DNA, 15 bp, Homo sapiens
ggggggcgggtgcct

SEQ ID NO: 1664977 - DNA, 15 bp, Homo sapiens
tggggggcgggtgcc

SEQ ID NO: 1664978 - DNA, 15 bp, Homo sapiens
gtggggggcgggtgc

SEQ ID NO: 1664979 - DNA, 15 bp, Homo sapiens
ggtggggggcgggtg

SEQ ID NO: 1664980 - DNA, 15 bp, Homo sapiens
gggtggggggcgggt

SEQ ID NO: 1664981 - DNA, 15 bp, Homo sapiens
ggggtggggggcggg

SEQ ID NO: 1664982 - DNA, 15 bp, Homo sapiens
gggggtggggggcgg

SEQ ID NO: 1664983 - DNA, 15 bp, Homo sapiens
ggggggtggggggcg

SEQ ID NO: 1664984 - DNA, 15 bp, Homo sapiens
cggggggtggggggc

SEQ ID NO: 1664985 - DNA, 15 bp, Homo sapiens
gcggggggtgggggg

SEQ ID NO: 1664986 - DNA, 15 bp, Homo sapiens
ggcggggggtggggg

SEQ ID NO: 1664987 - DNA, 15 bp, Homo sapiens
gggcggggggtgggg

SEQ ID NO: 1664988 - DNA, 15 bp, Homo sapiens
ggggcggggggtggg

SEQ ID NO: 1664989 - DNA, 15 bp, Homo sapiens
gggggcggggggtgg

SEQ ID NO: 1664990 - DNA, 15 bp, Homo sapiens
tgggggcggggggtg

SEQ ID NO: 1664991 - DNA, 15 bp, Homo sapiens
ctgggggcggggggt

SEQ ID NO: 1664992 - DNA, 15 bp, Homo sapiens
gctgggggcgggggg

SEQ ID NO: 1664993 - DNA, 15 bp, Homo sapiens
agctgggggcggggg

SEQ ID NO: 1664994 - DNA, 15 bp, Homo sapiens
tagctgggggcgggg

SEQ ID NO: 1664995 - DNA, 15 bp, Homo sapiens
ttagctgggggcggg

SEQ ID NO: 1664996 - DNA, 15 bp, Homo sapiens
attagctgggggcgg

SEQ ID NO: 1664997 - DNA, 15 bp, Homo sapiens
cattagctgggggcg

SEQ ID NO: 1664998 - DNA, 15 bp, Homo sapiens
acattagctgggggc

SEQ ID NO: 1664999 - DNA, 15 bp, Homo sapiens
aacattagctggggg

SEQ ID NO: 1665000 - DNA, 15 bp, Homo sapiens
aaacattagctgggg

SEQ ID NO: 1665001 - DNA, 15 bp, Homo sapiens
tccatctgtactaaa

SEQ ID NO: 1665002 - DNA, 15 bp, Homo sapiens
ctccatctgtactaa

SEQ ID NO: 1665003 - DNA, 15 bp, Homo sapiens
actccatctgtacta

SEQ ID NO: 1665004 - DNA, 15 bp, Homo sapiens
aactccatctgtact

SEQ ID NO: 1665005 - DNA, 15 bp, Homo sapiens
aaactccatctgtac

SEQ ID NO: 1665006 - DNA, 15 bp, Homo sapiens
aaaactccatctgta

SEQ ID NO: 1665007 - DNA, 15 bp, Homo sapiens
caaaactccatctgt

SEQ ID NO: 1665008 - DNA, 15 bp, Homo sapiens
gcaaaactccatctg

SEQ ID NO: 1665009 - DNA, 15 bp, Homo sapiens
ggcaaaactccatct

SEQ ID NO: 1665010 - DNA, 15 bp, Homo sapiens
cggcaaaactccatc

SEQ ID NO: 1665011 - DNA, 15 bp, Homo sapiens
acggcaaaactccat

SEQ ID NO: 1665012 - DNA, 15 bp, Homo sapiens
cacggcaaaactcca

SEQ ID NO: 1665013 - DNA, 15 bp, Homo sapiens
acacggcaaaactcc

SEQ ID NO: 1665014 - DNA, 15 bp, Homo sapiens
aacacggcaaaactc

SEQ ID NO: 1665015 - DNA, 15 bp, Homo sapiens
caacacggcaaaact

SEQ ID NO: 1665016 - DNA, 15 bp, Homo sapiens
ccaacacggcaaaac

SEQ ID NO: 1665017 - DNA, 15 bp, Homo sapiens
gccaacacggcaaaa

SEQ ID NO: 1665018 - DNA, 15 bp, Homo sapiens
ggccaacacggcaaa

SEQ ID NO: 1665019 - DNA, 15 bp, Homo sapiens
tggccaacacggcaa

SEQ ID NO: 1665020 - DNA, 15 bp, Homo sapiens
ctggccaacacggca

SEQ ID NO: 1665021 - DNA, 15 bp, Homo sapiens
cctggccaacacggc

SEQ ID NO: 1665022 - DNA, 15 bp, Homo sapiens
gaagttcgagaccag

SEQ ID NO: 1665023 - DNA, 15 bp, Homo sapiens
agaagttcgagacca

SEQ ID NO: 1665024 - DNA, 15 bp, Homo sapiens
cagaagttcgagacc

SEQ ID NO: 1665025 - DNA, 15 bp, Homo sapiens
tcagaagttcgagac

SEQ ID NO: 1665026 - DNA, 15 bp, Homo sapiens
gtcagaagttcgaga

SEQ ID NO: 1665027 - DNA, 15 bp, Homo sapiens
ggtcagaagttcgag

SEQ ID NO: 1665028 - DNA, 15 bp, Homo sapiens
aggtcagaagttcga

SEQ ID NO: 1665029 - DNA, 15 bp, Homo sapiens
gaggtcagaagttcg

SEQ ID NO: 1665030 - DNA, 15 bp, Homo sapiens
tgaggtcagaagttc

SEQ ID NO: 1665031 - DNA, 15 bp, Homo sapiens
ctgaggtcagaagtt

SEQ ID NO: 1665032 - DNA, 15 bp, Homo sapiens
cctgaggtcagaagt

SEQ ID NO: 1665033 - DNA, 15 bp, Homo sapiens
acctgaggtcagaag

SEQ ID NO: 1665034 - DNA, 15 bp, Homo sapiens
cacctgaggtcagaa

SEQ ID NO: 1665035 - DNA, 15 bp, Homo sapiens
tcacctgaggtcaga

SEQ ID NO: 1665036 - DNA, 15 bp, Homo sapiens
agtggatcacctgag

SEQ ID NO: 1665037 - DNA, 15 bp, Homo sapiens
gagtggatcacctga

SEQ ID NO: 1665038 - DNA, 15 bp, Homo sapiens
cgagtggatcacctg

SEQ ID NO: 1665039 - DNA, 15 bp, Homo sapiens
gcgagtggatcacct

SEQ ID NO: 1665040 - DNA, 15 bp, Homo sapiens
ggcgagtggatcacc

SEQ ID NO: 1665041 - DNA, 15 bp, Homo sapiens
aggcgagtggatcac

SEQ ID NO: 1665042 - DNA, 15 bp, Homo sapiens
aaggcgagtggatca

SEQ ID NO: 1665043 - DNA, 15 bp, Homo sapiens
caaggcgagtggatc

SEQ ID NO: 1665044 - DNA, 15 bp, Homo sapiens
ccaaggcgagtggat

SEQ ID NO: 1665045 - DNA, 15 bp, Homo sapiens
gccaaggcgagtgga

SEQ ID NO: 1665046 - DNA, 15 bp, Homo sapiens
ggccaaggcgagtgg

SEQ ID NO: 1665047 - DNA, 15 bp, Homo sapiens
aggccaaggcgagtg

SEQ ID NO: 1665048 - DNA, 15 bp, Homo sapiens
gaggccaaggcgagt

SEQ ID NO: 1665049 - DNA, 15 bp, Homo sapiens
ggaggccaaggcgag

SEQ ID NO: 1665050 - DNA, 15 bp, Homo sapiens
gggaggccaaggcga

SEQ ID NO: 1665051 - DNA, 15 bp, Homo sapiens
tagcactttgggagg

SEQ ID NO: 1665052 - DNA, 15 bp, Homo sapiens
ctagcactttgggag

SEQ ID NO: 1665053 - DNA, 15 bp, Homo sapiens
cctagcactttggga

SEQ ID NO: 1665054 - DNA, 15 bp, Homo sapiens
cgcagtggctcatgc

SEQ ID NO: 1665055 - DNA, 15 bp, Homo sapiens
gcgcagtggctcatg

SEQ ID NO: 1665056 - DNA, 15 bp, Homo sapiens
ggcgcagtggctcat

SEQ ID NO: 1665057 - DNA, 15 bp, Homo sapiens
aggcgcagtggctca

SEQ ID NO: 1665058 - DNA, 15 bp, Homo sapiens
caggcgcagtggctc

SEQ ID NO: 1665059 - DNA, 15 bp, Homo sapiens
ccaggcgcagtggct

SEQ ID NO: 1665060 - DNA, 15 bp, Homo sapiens
gccaggcgcagtggc

SEQ ID NO: 1665061 - DNA, 15 bp, Homo sapiens
ggccaggcgcagtgg

SEQ ID NO: 1665062 - DNA, 15 bp, Homo sapiens
aggccaggcgcagtg

SEQ ID NO: 1665063 - DNA, 15 bp, Homo sapiens
taggccaggcgcagt

SEQ ID NO: 1665064 - DNA, 15 bp, Homo sapiens
ataggccaggcgcag

SEQ ID NO: 1665065 - DNA, 15 bp, Homo sapiens
cataggccaggcgca

SEQ ID NO: 1665066 - DNA, 15 bp, Homo sapiens
acataggccaggcgc

SEQ ID NO: 1665067 - DNA, 15 bp, Homo sapiens
cacataggccaggcg

SEQ ID NO: 1665068 - DNA, 15 bp, Homo sapiens
tcacataggccaggc

SEQ ID NO: 1665069 - DNA, 15 bp, Homo sapiens
atcacataggccagg

SEQ ID NO: 1665070 - DNA, 15 bp, Homo sapiens
aatcacataggccag

SEQ ID NO: 1665071 - DNA, 15 bp, Homo sapiens
taatcacataggcca

SEQ ID NO: 1665072 - DNA, 15 bp, Homo sapiens
ataatcacataggcc

SEQ ID NO: 1665073 - DNA, 15 bp, Homo sapiens
aataatcacataggc

SEQ ID NO: 1665074 - DNA, 15 bp, Homo sapiens
taataatcacatagg

SEQ ID NO: 1665075 - DNA, 15 bp, Homo sapiens
ttaataatcacatag

SEQ ID NO: 1665076 - DNA, 15 bp, Homo sapiens
attaataatcacata

SEQ ID NO: 1665077 - DNA, 15 bp, Homo sapiens
tattaataatcacat

SEQ ID NO: 1665078 - DNA, 15 bp, Homo sapiens
atattaataatcaca

SEQ ID NO: 1665079 - DNA, 15 bp, Homo sapiens
gatattaataatcac

SEQ ID NO: 1665080 - DNA, 15 bp, Homo sapiens
tgatattaataatca

SEQ ID NO: 1665081 - DNA, 15 bp, Homo sapiens
gtgatattaataatc

SEQ ID NO: 1665082 - DNA, 15 bp, Homo sapiens
cgtgatattaataat

SEQ ID NO: 1665083 - DNA, 15 bp, Homo sapiens
acgtgatattaataa

SEQ ID NO: 1665084 - DNA, 15 bp, Homo sapiens
gacgtgatattaata

SEQ ID NO: 1665085 - DNA, 15 bp, Homo sapiens
agacgtgatattaat

SEQ ID NO: 1665086 - DNA, 15 bp, Homo sapiens
tagacgtgatattaa

SEQ ID NO: 1665087 - DNA, 15 bp, Homo sapiens
ctagacgtgatatta

SEQ ID NO: 1665088 - DNA, 15 bp, Homo sapiens
gctagacgtgatatt

SEQ ID NO: 1665089 - DNA, 15 bp, Homo sapiens
agctagacgtgatat

SEQ ID NO: 1665090 - DNA, 15 bp, Homo sapiens
cagctagacgtgata

SEQ ID NO: 1665091 - DNA, 15 bp, Homo sapiens
acagctagacgtgat

SEQ ID NO: 1665092 - DNA, 15 bp, Homo sapiens
cacagctagacgtga

SEQ ID NO: 1665093 - DNA, 15 bp, Homo sapiens
tcacagctagacgtg

SEQ ID NO: 1665094 - DNA, 15 bp, Homo sapiens
gtcacagctagacgt

SEQ ID NO: 1665095 - DNA, 15 bp, Homo sapiens
tgtcacagctagacg

SEQ ID NO: 1665096 - DNA, 15 bp, Homo sapiens
ttgtcacagctagac

SEQ ID NO: 1665097 - DNA, 15 bp, Homo sapiens
attgtcacagctaga

SEQ ID NO: 1665098 - DNA, 15 bp, Homo sapiens
aattgtcacagctag

SEQ ID NO: 1665099 - DNA, 15 bp, Homo sapiens
gaattgtcacagcta

SEQ ID NO: 1665100 - DNA, 15 bp, Homo sapiens
agaattgtcacagct

SEQ ID NO: 1665101 - DNA, 15 bp, Homo sapiens
cagaattgtcacagc

SEQ ID NO: 1665102 - DNA, 15 bp, Homo sapiens
acagaattgtcacag

SEQ ID NO: 1665103 - DNA, 15 bp, Homo sapiens
gacagaattgtcaca

SEQ ID NO: 1665104 - DNA, 15 bp, Homo sapiens
agacagaattgtcac

SEQ ID NO: 1665105 - DNA, 15 bp, Homo sapiens
cagacagaattgtca

SEQ ID NO: 1665106 - DNA, 15 bp, Homo sapiens
tcagacagaattgtc

SEQ ID NO: 1665107 - DNA, 15 bp, Homo sapiens
atcagacagaattgt

SEQ ID NO: 1665108 - DNA, 15 bp, Homo sapiens
catcagacagaattg

SEQ ID NO: 1665109 - DNA, 15 bp, Homo sapiens
gcatcagacagaatt

SEQ ID NO: 1665110 - DNA, 15 bp, Homo sapiens
agcatcagacagaat

SEQ ID NO: 1665111 - DNA, 15 bp, Homo sapiens
cagcatcagacagaa

SEQ ID NO: 1665112 - DNA, 15 bp, Homo sapiens
ccagcatcagacaga

SEQ ID NO: 1665113 - DNA, 15 bp, Homo sapiens
tccagcatcagacag

SEQ ID NO: 1665114 - DNA, 15 bp, Homo sapiens
ctccagcatcagaca

SEQ ID NO: 1665115 - DNA, 15 bp, Homo sapiens
actccagcatcagac

SEQ ID NO: 1665116 - DNA, 15 bp, Homo sapiens
tactccagcatcaga

SEQ ID NO: 1665117 - DNA, 15 bp, Homo sapiens
atactccagcatcag

SEQ ID NO: 1665118 - DNA, 15 bp, Homo sapiens
aatactccagcatca

SEQ ID NO: 1665119 - DNA, 15 bp, Homo sapiens
aaatactccagcatc

SEQ ID NO: 1665120 - DNA, 15 bp, Homo sapiens
caaatactccagcat

SEQ ID NO: 1665121 - DNA, 15 bp, Homo sapiens
tcaaatactccagca

SEQ ID NO: 1665122 - DNA, 15 bp, Homo sapiens
ttcaaatactccagc

SEQ ID NO: 1665123 - DNA, 15 bp, Homo sapiens
gttcaaatactccag

SEQ ID NO: 1665124 - DNA, 15 bp, Homo sapiens
ggttcaaatactcca

SEQ ID NO: 1665125 - DNA, 15 bp, Homo sapiens
tggttcaaatactcc

SEQ ID NO: 1665126 - DNA, 15 bp, Homo sapiens
ctggttcaaatactc

SEQ ID NO: 1665127 - DNA, 15 bp, Homo sapiens
tctggttcaaatact

SEQ ID NO: 1665128 - DNA, 15 bp, Homo sapiens
atctggttcaaatac

SEQ ID NO: 1665129 - DNA, 15 bp, Homo sapiens
catctggttcaaata

SEQ ID NO: 1665130 - DNA, 15 bp, Homo sapiens
ccatctggttcaaat

SEQ ID NO: 1665131 - DNA, 15 bp, Homo sapiens
gccatctggttcaaa

SEQ ID NO: 1665132 - DNA, 15 bp, Homo sapiens
agccatctggttcaa

SEQ ID NO: 1665133 - DNA, 15 bp, Homo sapiens
cagccatctggttca

SEQ ID NO: 1665134 - DNA, 15 bp, Homo sapiens
ccagccatctggttc

SEQ ID NO: 1665135 - DNA, 15 bp, Homo sapiens
gccagccatctggtt

SEQ ID NO: 1665136 - DNA, 15 bp, Homo sapiens
agccagccatctggt

SEQ ID NO: 1665137 - DNA, 15 bp, Homo sapiens
cagccagccatctgg

SEQ ID NO: 1665138 - DNA, 15 bp, Homo sapiens
acagccagccatctg

SEQ ID NO: 1665139 - DNA, 15 bp, Homo sapiens
cacagccagccatct

SEQ ID NO: 1665140 - DNA, 15 bp, Homo sapiens
gcacagccagccatc

SEQ ID NO: 1665141 - DNA, 15 bp, Homo sapiens
ggcacagccagccat

SEQ ID NO: 1665142 - DNA, 15 bp, Homo sapiens
tggcacagccagcca

SEQ ID NO: 1665143 - DNA, 15 bp, Homo sapiens
gtggcacagccagcc

SEQ ID NO: 1665144 - DNA, 15 bp, Homo sapiens
agtggcacagccagc

SEQ ID NO: 1665145 - DNA, 15 bp, Homo sapiens
gagtggcacagccag

SEQ ID NO: 1665146 - DNA, 15 bp, Homo sapiens
tgagtggcacagcca

SEQ ID NO: 1665147 - DNA, 15 bp, Homo sapiens
ctgagtggcacagcc

SEQ ID NO: 1665148 - DNA, 15 bp, Homo sapiens
actgagtggcacagc

SEQ ID NO: 1665149 - DNA, 15 bp, Homo sapiens
aactgagtggcacag

SEQ ID NO: 1665150 - DNA, 15 bp, Homo sapiens
taactgagtggcaca

SEQ ID NO: 1665151 - DNA, 15 bp, Homo sapiens
ataactgagtggcac

SEQ ID NO: 1665152 - DNA, 15 bp, Homo sapiens
aataactgagtggca

SEQ ID NO: 1665153 - DNA, 15 bp, Homo sapiens
gaataactgagtggc

SEQ ID NO: 1665154 - DNA, 15 bp, Homo sapiens
agaataactgagtgg

SEQ ID NO: 1665155 - DNA, 15 bp, Homo sapiens
gagaataactgagtg

SEQ ID NO: 1665156 - DNA, 15 bp, Homo sapiens
agagaataactgagt

SEQ ID NO: 1665157 - DNA, 15 bp, Homo sapiens
gagagaataactgag

SEQ ID NO: 1665158 - DNA, 15 bp, Homo sapiens
ggagagaataactga

SEQ ID NO: 1665159 - DNA, 15 bp, Homo sapiens
tggagagaataactg

SEQ ID NO: 1665160 - DNA, 15 bp, Homo sapiens
atggagagaataact

SEQ ID NO: 1665161 - DNA, 15 bp, Homo sapiens
tatggagagaataac

SEQ ID NO: 1665162 - DNA, 15 bp, Homo sapiens
ttatggagagaataa

SEQ ID NO: 1665163 - DNA, 15 bp, Homo sapiens
cttatggagagaata

SEQ ID NO: 1665164 - DNA, 15 bp, Homo sapiens
tcttatggagagaat

SEQ ID NO: 1665165 - DNA, 15 bp, Homo sapiens
gtcttatggagagaa

SEQ ID NO: 1665166 - DNA, 15 bp, Homo sapiens
agtcttatggagaga

SEQ ID NO: 1665167 - DNA, 15 bp, Homo sapiens
aagtcttatggagag

SEQ ID NO: 1665168 - DNA, 15 bp, Homo sapiens
aaagtcttatggaga

SEQ ID NO: 1665169 - DNA, 15 bp, Homo sapiens
caaagtcttatggag

SEQ ID NO: 1665170 - DNA, 15 bp, Homo sapiens
tcaaagtcttatgga

SEQ ID NO: 1665171 - DNA, 15 bp, Homo sapiens
atcaaagtcttatgg

SEQ ID NO: 1665172 - DNA, 15 bp, Homo sapiens
tatcaaagtcttatg

SEQ ID NO: 1665173 - DNA, 15 bp, Homo sapiens
atatcaaagtcttat

SEQ ID NO: 1665174 - DNA, 15 bp, Homo sapiens
aatatcaaagtctta

SEQ ID NO: 1665175 - DNA, 15 bp, Homo sapiens
aaatatcaaagtctt

SEQ ID NO: 1665176 - DNA, 15 bp, Homo sapiens
aaaatatcaaagtct

SEQ ID NO: 1665177 - DNA, 15 bp, Homo sapiens
caaaatatcaaagtc

SEQ ID NO: 1665178 - DNA, 15 bp, Homo sapiens
acaaaatatcaaagt

SEQ ID NO: 1665179 - DNA, 15 bp, Homo sapiens
aacaaaatatcaaag

SEQ ID NO: 1665180 - DNA, 15 bp, Homo sapiens
caacaaaatatcaaa

SEQ ID NO: 1665181 - DNA, 15 bp, Homo sapiens
ccaacaaaatatcaa

SEQ ID NO: 1665182 - DNA, 15 bp, Homo sapiens
accaacaaaatatca

SEQ ID NO: 1665183 - DNA, 15 bp, Homo sapiens
gaccaacaaaatatc

SEQ ID NO: 1665184 - DNA, 15 bp, Homo sapiens
agaccaacaaaatat

SEQ ID NO: 1665185 - DNA, 15 bp, Homo sapiens
cagaccaacaaaata

SEQ ID NO: 1665186 - DNA, 15 bp, Homo sapiens
gcagaccaacaaaat

SEQ ID NO: 1665187 - DNA, 15 bp, Homo sapiens
tgcagaccaacaaaa

SEQ ID NO: 1665188 - DNA, 15 bp, Homo sapiens
ttgcagaccaacaaa

SEQ ID NO: 1665189 - DNA, 15 bp, Homo sapiens
cttgcagaccaacaa

SEQ ID NO: 1665190 - DNA, 15 bp, Homo sapiens
tcttgcagaccaaca

SEQ ID NO: 1665191 - DNA, 15 bp, Homo sapiens
atcttgcagaccaac

SEQ ID NO: 1665192 - DNA, 15 bp, Homo sapiens
catcttgcagaccaa

SEQ ID NO: 1665193 - DNA, 15 bp, Homo sapiens
tcatcttgcagacca

SEQ ID NO: 1665194 - DNA, 15 bp, Homo sapiens
gtcatcttgcagacc

SEQ ID NO: 1665195 - DNA, 15 bp, Homo sapiens
cgtcatcttgcagac

SEQ ID NO: 1665196 - DNA, 15 bp, Homo sapiens
ccgtcatcttgcaga

SEQ ID NO: 1665197 - DNA, 15 bp, Homo sapiens
tccgtcatcttgcag

SEQ ID NO: 1665198 - DNA, 15 bp, Homo sapiens
atccgtcatcttgca

SEQ ID NO: 1665199 - DNA, 15 bp, Homo sapiens
aatccgtcatcttgc

SEQ ID NO: 1665200 - DNA, 15 bp, Homo sapiens
gaatccgtcatcttg

SEQ ID NO: 1665201 - DNA, 15 bp, Homo sapiens
agaatccgtcatctt

SEQ ID NO: 1665202 - DNA, 15 bp, Homo sapiens
gagaatccgtcatct

SEQ ID NO: 1665203 - DNA, 15 bp, Homo sapiens
tgagaatccgtcatc

SEQ ID NO: 1665204 - DNA, 15 bp, Homo sapiens
ttgagaatccgtcat

SEQ ID NO: 1665205 - DNA, 15 bp, Homo sapiens
tttgagaatccgtca

SEQ ID NO: 1665206 - DNA, 15 bp, Homo sapiens
ttttgagaatccgtc

SEQ ID NO: 1665207 - DNA, 15 bp, Homo sapiens
attttgagaatccgt

SEQ ID NO: 1665208 - DNA, 15 bp, Homo sapiens
aattttgagaatccg

SEQ ID NO: 1665209 - DNA, 15 bp, Homo sapiens
gaattttgagaatcc

SEQ ID NO: 1665210 - DNA, 15 bp, Homo sapiens
agaattttgagaatc

SEQ ID NO: 1665211 - DNA, 15 bp, Homo sapiens
aagaattttgagaat

SEQ ID NO: 1665212 - DNA, 15 bp, Homo sapiens
caagaattttgagaa

SEQ ID NO: 1665213 - DNA, 15 bp, Homo sapiens
acaagaattttgaga

SEQ ID NO: 1665214 - DNA, 15 bp, Homo sapiens
gacaagaattttgag

SEQ ID NO: 1665215 - DNA, 15 bp, Homo sapiens
tgacaagaattttga

SEQ ID NO: 1665216 - DNA, 15 bp, Homo sapiens
ctgacaagaattttg

SEQ ID NO: 1665217 - DNA, 15 bp, Homo sapiens
actgacaagaatttt

SEQ ID NO: 1665218 - DNA, 15 bp, Homo sapiens
cactgacaagaattt

SEQ ID NO: 1665219 - DNA, 15 bp, Homo sapiens
tcactgacaagaatt

SEQ ID NO: 1665220 - DNA, 15 bp, Homo sapiens
ttcactgacaagaat

SEQ ID NO: 1665221 - DNA, 15 bp, Homo sapiens
attcactgacaagaa

SEQ ID NO: 1665222 - DNA, 15 bp, Homo sapiens
tattcactgacaaga

SEQ ID NO: 1665223 - DNA, 15 bp, Homo sapiens
atattcactgacaag

SEQ ID NO: 1665224 - DNA, 15 bp, Homo sapiens
aatattcactgacaa

SEQ ID NO: 1665225 - DNA, 15 bp, Homo sapiens
caatattcactgaca

SEQ ID NO: 1665226 - DNA, 15 bp, Homo sapiens
tcaatattcactgac

SEQ ID NO: 1665227 - DNA, 15 bp, Homo sapiens
ttcaatattcactga

SEQ ID NO: 1665228 - DNA, 15 bp, Homo sapiens
gttcaatattcactg

SEQ ID NO: 1665229 - DNA, 15 bp, Homo sapiens
ggttcaatattcact

SEQ ID NO: 1665230 - DNA, 15 bp, Homo sapiens
gggttcaatattcac

SEQ ID NO: 1665231 - DNA, 15 bp, Homo sapiens
agggttcaatattca

SEQ ID NO: 1665232 - DNA, 15 bp, Homo sapiens
tagggttcaatattc

SEQ ID NO: 1665233 - DNA, 15 bp, Homo sapiens
ctagggttcaatatt

SEQ ID NO: 1665234 - DNA, 15 bp, Homo sapiens
actagggttcaatat

SEQ ID NO: 1665235 - DNA, 15 bp, Homo sapiens
cactagggttcaata

SEQ ID NO: 1665236 - DNA, 15 bp, Homo sapiens
tcactagggttcaat

SEQ ID NO: 1665237 - DNA, 15 bp, Homo sapiens
ttcactagggttcaa

SEQ ID NO: 1665238 - DNA, 15 bp, Homo sapiens
tttcactagggttca

SEQ ID NO: 1665239 - DNA, 15 bp, Homo sapiens
atttcactagggttc

SEQ ID NO: 1665240 - DNA, 15 bp, Homo sapiens
catttcactagggtt

SEQ ID NO: 1665241 - DNA, 15 bp, Homo sapiens
acatttcactagggt

SEQ ID NO: 1665242 - DNA, 15 bp, Homo sapiens
tacatttcactaggg

SEQ ID NO: 1665243 - DNA, 15 bp, Homo sapiens
atacatttcactagg

SEQ ID NO: 1665244 - DNA, 15 bp, Homo sapiens
catacatttcactag

SEQ ID NO: 1665245 - DNA, 15 bp, Homo sapiens
ccatacatttcacta

SEQ ID NO: 1665246 - DNA, 15 bp, Homo sapiens
accatacatttcact

SEQ ID NO: 1665247 - DNA, 15 bp, Homo sapiens
aaccatacatttcac

SEQ ID NO: 1665248 - DNA, 15 bp, Homo sapiens
gaaccatacatttca

SEQ ID NO: 1665249 - DNA, 15 bp, Homo sapiens
agaaccatacatttc

SEQ ID NO: 1665250 - DNA, 15 bp, Homo sapiens
cagaaccatacattt

SEQ ID NO: 1665251 - DNA, 15 bp, Homo sapiens
acagaaccatacatt

SEQ ID NO: 1665252 - DNA, 15 bp, Homo sapiens
tacagaaccatacat

SEQ ID NO: 1665253 - DNA, 15 bp, Homo sapiens
atacagaaccataca

SEQ ID NO: 1665254 - DNA, 15 bp, Homo sapiens
gatacagaaccatac

SEQ ID NO: 1665255 - DNA, 15 bp, Homo sapiens
tgatacagaaccata

SEQ ID NO: 1665256 - DNA, 15 bp, Homo sapiens
ctgatacagaaccat

SEQ ID NO: 1665257 - DNA, 15 bp, Homo sapiens
actgatacagaacca

SEQ ID NO: 1665258 - DNA, 15 bp, Homo sapiens
aactgatacagaacc

SEQ ID NO: 1665259 - DNA, 15 bp, Homo sapiens
gaactgatacagaac

SEQ ID NO: 1665260 - DNA, 15 bp, Homo sapiens
ggaactgatacagaa

SEQ ID NO: 1665261 - DNA, 15 bp, Homo sapiens
tggaactgatacaga

SEQ ID NO: 1665262 - DNA, 15 bp, Homo sapiens
ttggaactgatacag

SEQ ID NO: 1665263 - DNA, 15 bp, Homo sapiens
tttggaactgataca

SEQ ID NO: 1665264 - DNA, 15 bp, Homo sapiens
ttttggaactgatac

SEQ ID NO: 1665265 - DNA, 15 bp, Homo sapiens
attttggaactgata

SEQ ID NO: 1665266 - DNA, 15 bp, Homo sapiens
cattttggaactgat

SEQ ID NO: 1665267 - DNA, 15 bp, Homo sapiens
acattttggaactga

SEQ ID NO: 1665268 - DNA, 15 bp, Homo sapiens
tacattttggaactg

SEQ ID NO: 1665269 - DNA, 15 bp, Homo sapiens
ttacattttggaact

SEQ ID NO: 1665270 - DNA, 15 bp, Homo sapiens
gttacattttggaac

SEQ ID NO: 1665271 - DNA, 15 bp, Homo sapiens
ggttacattttggaa

SEQ ID NO: 1665272 - DNA, 15 bp, Homo sapiens
tggttacattttgga

SEQ ID NO: 1665273 - DNA, 15 bp, Homo sapiens
gtggttacattttgg

SEQ ID NO: 1665274 - DNA, 15 bp, Homo sapiens
agtggttacattttg

SEQ ID NO: 1665275 - DNA, 15 bp, Homo sapiens
gaaagtggttacatt

SEQ ID NO: 1665276 - DNA, 15 bp, Homo sapiens
agaaagtggttacat

SEQ ID NO: 1665277 - DNA, 15 bp, Homo sapiens
gagaaagtggttaca

SEQ ID NO: 1665278 - DNA, 15 bp, Homo sapiens
agagaaagtggttac

SEQ ID NO: 1665279 - DNA, 15 bp, Homo sapiens
ctagagaaagtggtt

SEQ ID NO: 1665280 - DNA, 15 bp, Homo sapiens
gctagagaaagtggt

SEQ ID NO: 1665281 - DNA, 15 bp, Homo sapiens
ggctagagaaagtgg

SEQ ID NO: 1665282 - DNA, 15 bp, Homo sapiens
aggctagagaaagtg

SEQ ID NO: 1665283 - DNA, 15 bp, Homo sapiens
aaggctagagaaagt

SEQ ID NO: 1665284 - DNA, 15 bp, Homo sapiens
taaggctagagaaag

SEQ ID NO: 1665285 - DNA, 15 bp, Homo sapiens
ctaaggctagagaaa

SEQ ID NO: 1665286 - DNA, 15 bp, Homo sapiens
tctaaggctagagaa

SEQ ID NO: 1665287 - DNA, 15 bp, Homo sapiens
atctaaggctagaga

SEQ ID NO: 1665288 - DNA, 15 bp, Homo sapiens
aatctaaggctagag

SEQ ID NO: 1665289 - DNA, 15 bp, Homo sapiens
gaatctaaggctaga

SEQ ID NO: 1665290 - DNA, 15 bp, Homo sapiens
ggaatctaaggctag

SEQ ID NO: 1665291 - DNA, 15 bp, Homo sapiens
gggaatctaaggcta

SEQ ID NO: 1665292 - DNA, 15 bp, Homo sapiens
tgggaatctaaggct

SEQ ID NO: 1665293 - DNA, 15 bp, Homo sapiens
ctgggaatctaaggc

SEQ ID NO: 1665294 - DNA, 15 bp, Homo sapiens
actgggaatctaagg

SEQ ID NO: 1665295 - DNA, 15 bp, Homo sapiens
aactgggaatctaag

SEQ ID NO: 1665296 - DNA, 15 bp, Homo sapiens
gaactgggaatctaa

SEQ ID NO: 1665297 - DNA, 15 bp, Homo sapiens
ggaactgggaatcta

SEQ ID NO: 1665298 - DNA, 15 bp, Homo sapiens
tggaactgggaatct

SEQ ID NO: 1665299 - DNA, 15 bp, Homo sapiens
ttggaactgggaatc

SEQ ID NO: 1665300 - DNA, 15 bp, Homo sapiens
tttggaactgggaat

SEQ ID NO: 1665301 - DNA, 15 bp, Homo sapiens
ttttggaactgggaa

SEQ ID NO: 1665302 - DNA, 15 bp, Homo sapiens
attttggaactggga

SEQ ID NO: 1665303 - DNA, 15 bp, Homo sapiens
cattttggaactggg

SEQ ID NO: 1665304 - DNA, 15 bp, Homo sapiens
acattttggaactgg

SEQ ID NO: 1665305 - DNA, 15 bp, Homo sapiens
atggttacattttgg

SEQ ID NO: 1665306 - DNA, 15 bp, Homo sapiens
aatggttacattttg

SEQ ID NO: 1665307 - DNA, 15 bp, Homo sapiens
aaatggttacatttt

SEQ ID NO: 1665308 - DNA, 15 bp, Homo sapiens
aaaatggttacattt

SEQ ID NO: 1665309 - DNA, 15 bp, Homo sapiens
gaaaatggttacatt

SEQ ID NO: 1665310 - DNA, 15 bp, Homo sapiens
agaaaatggttacat

SEQ ID NO: 1665311 - DNA, 15 bp, Homo sapiens
gagaaaatggttaca

SEQ ID NO: 1665312 - DNA, 15 bp, Homo sapiens
agagaaaatggttac

SEQ ID NO: 1665313 - DNA, 15 bp, Homo sapiens
tagagaaaatggtta

SEQ ID NO: 1665314 - DNA, 15 bp, Homo sapiens
ctagagaaaatggtt

SEQ ID NO: 1665315 - DNA, 15 bp, Homo sapiens
gctagagaaaatggt

SEQ ID NO: 1665316 - DNA, 15 bp, Homo sapiens
ggctagagaaaatgg

SEQ ID NO: 1665317 - DNA, 15 bp, Homo sapiens
aggctagagaaaatg

SEQ ID NO: 1665318 - DNA, 15 bp, Homo sapiens
aaggctagagaaaat

SEQ ID NO: 1665319 - DNA, 15 bp, Homo sapiens
taaggctagagaaaa

SEQ ID NO: 1665320 - DNA, 15 bp, Homo sapiens
cgggaatctaaggct

SEQ ID NO: 1665321 - DNA, 15 bp, Homo sapiens
acgggaatctaaggc

SEQ ID NO: 1665322 - DNA, 15 bp, Homo sapiens
aacgggaatctaagg

SEQ ID NO: 1665323 - DNA, 15 bp, Homo sapiens
taacgggaatctaag

SEQ ID NO: 1665324 - DNA, 15 bp, Homo sapiens
ttaacgggaatctaa

SEQ ID NO: 1665325 - DNA, 15 bp, Homo sapiens
cttaacgggaatcta

SEQ ID NO: 1665326 - DNA, 15 bp, Homo sapiens
ccttaacgggaatct

SEQ ID NO: 1665327 - DNA, 15 bp, Homo sapiens
cccttaacgggaatc

SEQ ID NO: 1665328 - DNA, 15 bp, Homo sapiens
tcccttaacgggaat

SEQ ID NO: 1665329 - DNA, 15 bp, Homo sapiens
ttcccttaacgggaa

SEQ ID NO: 1665330 - DNA, 15 bp, Homo sapiens
tttcccttaacggga

SEQ ID NO: 1665331 - DNA, 15 bp, Homo sapiens
ctttcccttaacggg

SEQ ID NO: 1665332 - DNA, 15 bp, Homo sapiens
cctttcccttaacgg

SEQ ID NO: 1665333 - DNA, 15 bp, Homo sapiens
ccctttcccttaacg

SEQ ID NO: 1665334 - DNA, 15 bp, Homo sapiens
tccctttcccttaac

SEQ ID NO: 1665335 - DNA, 15 bp, Homo sapiens
ttccctttcccttaa

SEQ ID NO: 1665336 - DNA, 15 bp, Homo sapiens
attccctttccctta

SEQ ID NO: 1665337 - DNA, 15 bp, Homo sapiens
cattccctttccctt

SEQ ID NO: 1665338 - DNA, 15 bp, Homo sapiens
gcattccctttccct

SEQ ID NO: 1665339 - DNA, 15 bp, Homo sapiens
agcattccctttccc

SEQ ID NO: 1665340 - DNA, 15 bp, Homo sapiens
gagcattccctttcc

SEQ ID NO: 1665341 - DNA, 15 bp, Homo sapiens
agagcattccctttc

SEQ ID NO: 1665342 - DNA, 15 bp, Homo sapiens
aagagcattcccttt

SEQ ID NO: 1665343 - DNA, 15 bp, Homo sapiens
aaagagcattccctt

SEQ ID NO: 1665344 - DNA, 15 bp, Homo sapiens
caaagagcattccct

SEQ ID NO: 1665345 - DNA, 15 bp, Homo sapiens
tcaaagagcattccc

SEQ ID NO: 1665346 - DNA, 15 bp, Homo sapiens
ctcaaagagcattcc

SEQ ID NO: 1665347 - DNA, 15 bp, Homo sapiens
actcaaagagcattc

SEQ ID NO: 1665348 - DNA, 15 bp, Homo sapiens
tactcaaagagcatt

SEQ ID NO: 1665349 - DNA, 15 bp, Homo sapiens
atactcaaagagcat

SEQ ID NO: 1665350 - DNA, 15 bp, Homo sapiens
catactcaaagagca

SEQ ID NO: 1665351 - DNA, 15 bp, Homo sapiens
acatactcaaagagc

SEQ ID NO: 1665352 - DNA, 15 bp, Homo sapiens
gacatactcaaagag

SEQ ID NO: 1665353 - DNA, 15 bp, Homo sapiens
tgacatactcaaaga

SEQ ID NO: 1665354 - DNA, 15 bp, Homo sapiens
atgacatactcaaag

SEQ ID NO: 1665355 - DNA, 15 bp, Homo sapiens
gatgacatactcaaa

SEQ ID NO: 1665356 - DNA, 15 bp, Homo sapiens
tgatgacatactcaa

SEQ ID NO: 1665357 - DNA, 15 bp, Homo sapiens
gtgatgacatactca

SEQ ID NO: 1665358 - DNA, 15 bp, Homo sapiens
ggtgatgacatactc

SEQ ID NO: 1665359 - DNA, 15 bp, Homo sapiens
tggtgatgacatact

SEQ ID NO: 1665360 - DNA, 15 bp, Homo sapiens
atggtgatgacatac

SEQ ID NO: 1665361 - DNA, 15 bp, Homo sapiens
tatggtgatgacata

SEQ ID NO: 1665362 - DNA, 15 bp, Homo sapiens
ctatggtgatgacat

SEQ ID NO: 1665363 - DNA, 15 bp, Homo sapiens
actatggtgatgaca

SEQ ID NO: 1665364 - DNA, 15 bp, Homo sapiens
tactatggtgatgac

SEQ ID NO: 1665365 - DNA, 15 bp, Homo sapiens
ttactatggtgatga

SEQ ID NO: 1665366 - DNA, 15 bp, Homo sapiens
gttactatggtgatg

SEQ ID NO: 1665367 - DNA, 15 bp, Homo sapiens
tgttactatggtgat

SEQ ID NO: 1665368 - DNA, 15 bp, Homo sapiens
ctgttactatggtga

SEQ ID NO: 1665369 - DNA, 15 bp, Homo sapiens
cctgttactatggtg

SEQ ID NO: 1665370 - DNA, 15 bp, Homo sapiens
gcctgttactatggt

SEQ ID NO: 1665371 - DNA, 15 bp, Homo sapiens
tgcctgttactatgg

SEQ ID NO: 1665372 - DNA, 15 bp, Homo sapiens
ttgcctgttactatg

SEQ ID NO: 1665373 - DNA, 15 bp, Homo sapiens
tttgcctgttactat

SEQ ID NO: 1665374 - DNA, 15 bp, Homo sapiens
ttttgcctgttacta

SEQ ID NO: 1665375 - DNA, 15 bp, Homo sapiens
gttttgcctgttact

SEQ ID NO: 1665376 - DNA, 15 bp, Homo sapiens
agttttgcctgttac

SEQ ID NO: 1665377 - DNA, 15 bp, Homo sapiens
tagttttgcctgtta

SEQ ID NO: 1665378 - DNA, 15 bp, Homo sapiens
ctagttttgcctgtt

SEQ ID NO: 1665379 - DNA, 15 bp, Homo sapiens
tctagttttgcctgt

SEQ ID NO: 1665380 - DNA, 15 bp, Homo sapiens
ctctagttttgcctg

SEQ ID NO: 1665381 - DNA, 15 bp, Homo sapiens
cctctagttttgcct

SEQ ID NO: 1665382 - DNA, 15 bp, Homo sapiens
ccctctagttttgcc

SEQ ID NO: 1665383 - DNA, 15 bp, Homo sapiens
gccctctagttttgc

SEQ ID NO: 1665384 - DNA, 15 bp, Homo sapiens
agccctctagttttg

SEQ ID NO: 1665385 - DNA, 15 bp, Homo sapiens
aagccctctagtttt

SEQ ID NO: 1665386 - DNA, 15 bp, Homo sapiens
aaagccctctagttt

SEQ ID NO: 1665387 - DNA, 15 bp, Homo sapiens
caaagccctctagtt

SEQ ID NO: 1665388 - DNA, 15 bp, Homo sapiens
tcaaagccctctagt

SEQ ID NO: 1665389 - DNA, 15 bp, Homo sapiens
atcaaagccctctag

SEQ ID NO: 1665390 - DNA, 15 bp, Homo sapiens
catcaaagccctcta

SEQ ID NO: 1665391 - DNA, 15 bp, Homo sapiens
gcatcaaagccctct

SEQ ID NO: 1665392 - DNA, 15 bp, Homo sapiens
agcatcaaagccctc

SEQ ID NO: 1665393 - DNA, 15 bp, Homo sapiens
tagcatcaaagccct

SEQ ID NO: 1665394 - DNA, 15 bp, Homo sapiens
ttagcatcaaagccc

SEQ ID NO: 1665395 - DNA, 15 bp, Homo sapiens
tttagcatcaaagcc

SEQ ID NO: 1665396 - DNA, 15 bp, Homo sapiens
ctttagcatcaaagc

SEQ ID NO: 1665397 - DNA, 15 bp, Homo sapiens
gctttagcatcaaag

SEQ ID NO: 1665398 - DNA, 15 bp, Homo sapiens
tgctttagcatcaaa

SEQ ID NO: 1665399 - DNA, 15 bp, Homo sapiens
ttgctttagcatcaa

SEQ ID NO: 1665400 - DNA, 15 bp, Homo sapiens
cttgctttagcatca

SEQ ID NO: 1665401 - DNA, 15 bp, Homo sapiens
tcttgctttagcatc

SEQ ID NO: 1665402 - DNA, 15 bp, Homo sapiens
atcttgctttagcat

SEQ ID NO: 1665403 - DNA, 15 bp, Homo sapiens
tatcttgctttagca

SEQ ID NO: 1665404 - DNA, 15 bp, Homo sapiens
gtatcttgctttagc

SEQ ID NO: 1665405 - DNA, 15 bp, Homo sapiens
agtatcttgctttag

SEQ ID NO: 1665406 - DNA, 15 bp, Homo sapiens
gagtatcttgcttta

SEQ ID NO: 1665407 - DNA, 15 bp, Homo sapiens
ggagtatcttgcttt

SEQ ID NO: 1665408 - DNA, 15 bp, Homo sapiens
tggagtatcttgctt

SEQ ID NO: 1665409 - DNA, 15 bp, Homo sapiens
atggagtatcttgct

SEQ ID NO: 1665410 - DNA, 15 bp, Homo sapiens
tatggagtatcttgc

SEQ ID NO: 1665411 - DNA, 15 bp, Homo sapiens
ttatggagtatcttg

SEQ ID NO: 1665412 - DNA, 15 bp, Homo sapiens
tttatggagtatctt

SEQ ID NO: 1665413 - DNA, 15 bp, Homo sapiens
atttatggagtatct

SEQ ID NO: 1665414 - DNA, 15 bp, Homo sapiens
tatttatggagtatc

SEQ ID NO: 1665415 - DNA, 15 bp, Homo sapiens
atatttatggagtat

SEQ ID NO: 1665416 - DNA, 15 bp, Homo sapiens
catatttatggagta

SEQ ID NO: 1665417 - DNA, 15 bp, Homo sapiens
gcatatttatggagt

SEQ ID NO: 1665418 - DNA, 15 bp, Homo sapiens
agcatatttatggag

SEQ ID NO: 1665419 - DNA, 15 bp, Homo sapiens
aagcatatttatgga

SEQ ID NO: 1665420 - DNA, 15 bp, Homo sapiens
taagcatatttatgg

SEQ ID NO: 1665421 - DNA, 15 bp, Homo sapiens
ttaagcatatttatg

SEQ ID NO: 1665422 - DNA, 15 bp, Homo sapiens
cttaagcatatttat

SEQ ID NO: 1665423 - DNA, 15 bp, Homo sapiens
tcttaagcatattta

SEQ ID NO: 1665424 - DNA, 15 bp, Homo sapiens
ttcttaagcatattt

SEQ ID NO: 1665425 - DNA, 15 bp, Homo sapiens
cttcttaagcatatt

SEQ ID NO: 1665426 - DNA, 15 bp, Homo sapiens
tcttcttaagcatat

SEQ ID NO: 1665427 - DNA, 15 bp, Homo sapiens
gtcttcttaagcata

SEQ ID NO: 1665428 - DNA, 15 bp, Homo sapiens
agtcttcttaagcat

SEQ ID NO: 1665429 - DNA, 15 bp, Homo sapiens
aagtcttcttaagca

SEQ ID NO: 1665430 - DNA, 15 bp, Homo sapiens
caagtcttcttaagc

SEQ ID NO: 1665431 - DNA, 15 bp, Homo sapiens
ccaagtcttcttaag

SEQ ID NO: 1665432 - DNA, 15 bp, Homo sapiens
cccaagtcttcttaa

SEQ ID NO: 1665433 - DNA, 15 bp, Homo sapiens
ccccaagtcttctta

SEQ ID NO: 1665434 - DNA, 15 bp, Homo sapiens
tccccaagtcttctt

SEQ ID NO: 1665435 - DNA, 15 bp, Homo sapiens
ctccccaagtcttct

SEQ ID NO: 1665436 - DNA, 15 bp, Homo sapiens
tctccccaagtcttc

SEQ ID NO: 1665437 - DNA, 15 bp, Homo sapiens
gtctccccaagtctt

SEQ ID NO: 1665438 - DNA, 15 bp, Homo sapiens
agtctccccaagtct

SEQ ID NO: 1665439 - DNA, 15 bp, Homo sapiens
cagtctccccaagtc

SEQ ID NO: 1665440 - DNA, 15 bp, Homo sapiens
ccagtctccccaagt

SEQ ID NO: 1665441 - DNA, 15 bp, Homo sapiens
tccagtctccccaag

SEQ ID NO: 1665442 - DNA, 15 bp, Homo sapiens
ttccagtctccccaa

SEQ ID NO: 1665443 - DNA, 15 bp, Homo sapiens
attccagtctcccca

SEQ ID NO: 1665444 - DNA, 15 bp, Homo sapiens
tattccagtctcccc

SEQ ID NO: 1665445 - DNA, 15 bp, Homo sapiens
ctattccagtctccc

SEQ ID NO: 1665446 - DNA, 15 bp, Homo sapiens
actattccagtctcc

SEQ ID NO: 1665447 - DNA, 15 bp, Homo sapiens
aactattccagtctc

SEQ ID NO: 1665448 - DNA, 15 bp, Homo sapiens
caactattccagtct

SEQ ID NO: 1665449 - DNA, 15 bp, Homo sapiens
acaactattccagtc

SEQ ID NO: 1665450 - DNA, 15 bp, Homo sapiens
aacaactattccagt

SEQ ID NO: 1665451 - DNA, 15 bp, Homo sapiens
gaacaactattccag

SEQ ID NO: 1665452 - DNA, 15 bp, Homo sapiens
ggaacaactattcca

SEQ ID NO: 1665453 - DNA, 15 bp, Homo sapiens
gggaacaactattcc

SEQ ID NO: 1665454 - DNA, 15 bp, Homo sapiens
agggaacaactattc

SEQ ID NO: 1665455 - DNA, 15 bp, Homo sapiens
aagggaacaactatt

SEQ ID NO: 1665456 - DNA, 15 bp, Homo sapiens
aaagggaacaactat

SEQ ID NO: 1665457 - DNA, 15 bp, Homo sapiens
aaaagggaacaacta

SEQ ID NO: 1665458 - DNA, 15 bp, Homo sapiens
taaaagggaacaact

SEQ ID NO: 1665459 - DNA, 15 bp, Homo sapiens
ctaaaagggaacaac

SEQ ID NO: 1665460 - DNA, 15 bp, Homo sapiens
tctaaaagggaacaa

SEQ ID NO: 1665461 - DNA, 15 bp, Homo sapiens
atctaaaagggaaca

SEQ ID NO: 1665462 - DNA, 15 bp, Homo sapiens
catctaaaagggaac

SEQ ID NO: 1665463 - DNA, 15 bp, Homo sapiens
gcatctaaaagggaa

SEQ ID NO: 1665464 - DNA, 15 bp, Homo sapiens
ggcatctaaaaggga

SEQ ID NO: 1665465 - DNA, 15 bp, Homo sapiens
tggcatctaaaaggg

SEQ ID NO: 1665466 - DNA, 15 bp, Homo sapiens
ctggcatctaaaagg

SEQ ID NO: 1665467 - DNA, 15 bp, Homo sapiens
actggcatctaaaag

SEQ ID NO: 1665468 - DNA, 15 bp, Homo sapiens
cactggcatctaaaa

SEQ ID NO: 1665469 - DNA, 15 bp, Homo sapiens
acactggcatctaaa

SEQ ID NO: 1665470 - DNA, 15 bp, Homo sapiens
tacactggcatctaa

SEQ ID NO: 1665471 - DNA, 15 bp, Homo sapiens
atacactggcatcta

SEQ ID NO: 1665472 - DNA, 15 bp, Homo sapiens
tatacactggcatct

SEQ ID NO: 1665473 - DNA, 15 bp, Homo sapiens
ttatacactggcatc

SEQ ID NO: 1665474 - DNA, 15 bp, Homo sapiens
tttatacactggcat

SEQ ID NO: 1665475 - DNA, 15 bp, Homo sapiens
atttatacactggca

SEQ ID NO: 1665476 - DNA, 15 bp, Homo sapiens
catttatacactggc

SEQ ID NO: 1665477 - DNA, 15 bp, Homo sapiens
tcatttatacactgg

SEQ ID NO: 1665478 - DNA, 15 bp, Homo sapiens
ttcatttatacactg

SEQ ID NO: 1665479 - DNA, 15 bp, Homo sapiens
attcatttatacact

SEQ ID NO: 1665480 - DNA, 15 bp, Homo sapiens
aattcatttatacac

SEQ ID NO: 1665481 - DNA, 15 bp, Homo sapiens
aaattcatttataca

SEQ ID NO: 1665482 - DNA, 15 bp, Homo sapiens
caaattcatttatac

SEQ ID NO: 1665483 - DNA, 15 bp, Homo sapiens
tcaaattcatttata

SEQ ID NO: 1665484 - DNA, 15 bp, Homo sapiens
ctcaaattcatttat

SEQ ID NO: 1665485 - DNA, 15 bp, Homo sapiens
gctcaaattcattta

SEQ ID NO: 1665486 - DNA, 15 bp, Homo sapiens
agctcaaattcattt

SEQ ID NO: 1665487 - DNA, 15 bp, Homo sapiens
tagctcaaattcatt

SEQ ID NO: 1665488 - DNA, 15 bp, Homo sapiens
ctagctcaaattcat

SEQ ID NO: 1665489 - DNA, 15 bp, Homo sapiens
cctagctcaaattca

SEQ ID NO: 1665490 - DNA, 15 bp, Homo sapiens
tcctagctcaaattc

SEQ ID NO: 1665491 - DNA, 15 bp, Homo sapiens
atcctagctcaaatt

SEQ ID NO: 1665492 - DNA, 15 bp, Homo sapiens
gatcctagctcaaat

SEQ ID NO: 1665493 - DNA, 15 bp, Homo sapiens
ggatcctagctcaaa

SEQ ID NO: 1665494 - DNA, 15 bp, Homo sapiens
cggatcctagctcaa

SEQ ID NO: 1665495 - DNA, 15 bp, Homo sapiens
acggatcctagctca

SEQ ID NO: 1665496 - DNA, 15 bp, Homo sapiens
aacggatcctagctc

SEQ ID NO: 1665497 - DNA, 15 bp, Homo sapiens
aaacggatcctagct

SEQ ID NO: 1665498 - DNA, 15 bp, Homo sapiens
taaacggatcctagc

SEQ ID NO: 1665499 - DNA, 15 bp, Homo sapiens
ataaacggatcctag

SEQ ID NO: 1665500 - DNA, 15 bp, Homo sapiens
aataaacggatccta

SEQ ID NO: 1665501 - DNA, 15 bp, Homo sapiens
aaataaacggatcct

SEQ ID NO: 1665502 - DNA, 15 bp, Homo sapiens
taaataaacggatcc

SEQ ID NO: 1665503 - DNA, 15 bp, Homo sapiens
ttaaataaacggatc

SEQ ID NO: 1665504 - DNA, 15 bp, Homo sapiens
tttaaataaacggat

SEQ ID NO: 1665505 - DNA, 15 bp, Homo sapiens
ttttaaataaacgga

SEQ ID NO: 1665506 - DNA, 15 bp, Homo sapiens
attttaaataaacgg

SEQ ID NO: 1665507 - DNA, 15 bp, Homo sapiens
aattttaaataaacg

SEQ ID NO: 1665508 - DNA, 15 bp, Homo sapiens
aaattttaaataaac

SEQ ID NO: 1665509 - DNA, 15 bp, Homo sapiens
gaaattttaaataaa

SEQ ID NO: 1665510 - DNA, 15 bp, Homo sapiens
agaaattttaaataa

SEQ ID NO: 1665511 - DNA, 15 bp, Homo sapiens
aagaaattttaaata

SEQ ID NO: 1665512 - DNA, 15 bp, Homo sapiens
aaagaaattttaaat

SEQ ID NO: 1665513 - DNA, 15 bp, Homo sapiens
taaagaaattttaaa

SEQ ID NO: 1665514 - DNA, 15 bp, Homo sapiens
ctaaagaaattttaa

SEQ ID NO: 1665515 - DNA, 15 bp, Homo sapiens
cctaaagaaatttta

SEQ ID NO: 1665516 - DNA, 15 bp, Homo sapiens
acctaaagaaatttt

SEQ ID NO: 1665517 - DNA, 15 bp, Homo sapiens
cacctaaagaaattt

SEQ ID NO: 1665518 - DNA, 15 bp, Homo sapiens
acacctaaagaaatt

SEQ ID NO: 1665519 - DNA, 15 bp, Homo sapiens
tacacctaaagaaat

SEQ ID NO: 1665520 - DNA, 15 bp, Homo sapiens
atacacctaaagaaa

SEQ ID NO: 1665521 - DNA, 15 bp, Homo sapiens
aatacacctaaagaa

SEQ ID NO: 1665522 - DNA, 15 bp, Homo sapiens
aaatacacctaaaga

SEQ ID NO: 1665523 - DNA, 15 bp, Homo sapiens
caaatacacctaaag

SEQ ID NO: 1665524 - DNA, 15 bp, Homo sapiens
gcaaatacacctaaa

SEQ ID NO: 1665525 - DNA, 15 bp, Homo sapiens
agcaaatacacctaa

SEQ ID NO: 1665526 - DNA, 15 bp, Homo sapiens
aagcaaatacaccta

SEQ ID NO: 1665527 - DNA, 15 bp, Homo sapiens
caagcaaatacacct

SEQ ID NO: 1665528 - DNA, 15 bp, Homo sapiens
gcaagcaaatacacc

SEQ ID NO: 1665529 - DNA, 15 bp, Homo sapiens
tgcaagcaaatacac

SEQ ID NO: 1665530 - DNA, 15 bp, Homo sapiens
atgcaagcaaataca

SEQ ID NO: 1665531 - DNA, 15 bp, Homo sapiens
tatgcaagcaaatac

SEQ ID NO: 1665532 - DNA, 15 bp, Homo sapiens
atatgcaagcaaata

SEQ ID NO: 1665533 - DNA, 15 bp, Homo sapiens
catatgcaagcaaat

SEQ ID NO: 1665534 - DNA, 15 bp, Homo sapiens
ccatatgcaagcaaa

SEQ ID NO: 1665535 - DNA, 15 bp, Homo sapiens
tccatatgcaagcaa

SEQ ID NO: 1665536 - DNA, 15 bp, Homo sapiens
ctccatatgcaagca

SEQ ID NO: 1665537 - DNA, 15 bp, Homo sapiens
actccatatgcaagc

SEQ ID NO: 1665538 - DNA, 15 bp, Homo sapiens
cactccatatgcaag

SEQ ID NO: 1665539 - DNA, 15 bp, Homo sapiens
gcactccatatgcaa

SEQ ID NO: 1665540 - DNA, 15 bp, Homo sapiens
tgcactccatatgca

SEQ ID NO: 1665541 - DNA, 15 bp, Homo sapiens
gtgcactccatatgc

SEQ ID NO: 1665542 - DNA, 15 bp, Homo sapiens
tgtgcactccatatg

SEQ ID NO: 1665543 - DNA, 15 bp, Homo sapiens
atgtgcactccatat

SEQ ID NO: 1665544 - DNA, 15 bp, Homo sapiens
aatgtgcactccata

SEQ ID NO: 1665545 - DNA, 15 bp, Homo sapiens
aaatgtgcactccat

SEQ ID NO: 1665546 - DNA, 15 bp, Homo sapiens
taaatgtgcactcca

SEQ ID NO: 1665547 - DNA, 15 bp, Homo sapiens
gtaaatgtgcactcc

SEQ ID NO: 1665548 - DNA, 15 bp, Homo sapiens
agtaaatgtgcactc

SEQ ID NO: 1665549 - DNA, 15 bp, Homo sapiens
gagtaaatgtgcact

SEQ ID NO: 1665550 - DNA, 15 bp, Homo sapiens
agagtaaatgtgcac

SEQ ID NO: 1665551 - DNA, 15 bp, Homo sapiens
gagagtaaatgtgca

SEQ ID NO: 1665552 - DNA, 15 bp, Homo sapiens
tgagagtaaatgtgc

SEQ ID NO: 1665553 - DNA, 15 bp, Homo sapiens
atgagagtaaatgtg

SEQ ID NO: 1665554 - DNA, 15 bp, Homo sapiens
aatgagagtaaatgt

SEQ ID NO: 1665555 - DNA, 15 bp, Homo sapiens
taatgagagtaaatg

SEQ ID NO: 1665556 - DNA, 15 bp, Homo sapiens
ttaatgagagtaaat

SEQ ID NO: 1665557 - DNA, 15 bp, Homo sapiens
attaatgagagtaaa

SEQ ID NO: 1665558 - DNA, 15 bp, Homo sapiens
cattaatgagagtaa

SEQ ID NO: 1665559 - DNA, 15 bp, Homo sapiens
ccattaatgagagta

SEQ ID NO: 1665560 - DNA, 15 bp, Homo sapiens
tccattaatgagagt

SEQ ID NO: 1665561 - DNA, 15 bp, Homo sapiens
ctccattaatgagag

SEQ ID NO: 1665562 - DNA, 15 bp, Homo sapiens
actccattaatgaga

SEQ ID NO: 1665563 - DNA, 15 bp, Homo sapiens
aactccattaatgag

SEQ ID NO: 1665564 - DNA, 15 bp, Homo sapiens
aaactccattaatga

SEQ ID NO: 1665565 - DNA, 15 bp, Homo sapiens
aaaactccattaatg

SEQ ID NO: 1665566 - DNA, 15 bp, Homo sapiens
taaaactccattaat

SEQ ID NO: 1665567 - DNA, 15 bp, Homo sapiens
ctaaaactccattaa

SEQ ID NO: 1665568 - DNA, 15 bp, Homo sapiens
cctaaaactccatta

SEQ ID NO: 1665569 - DNA, 15 bp, Homo sapiens
tcctaaaactccatt

SEQ ID NO: 1665570 - DNA, 15 bp, Homo sapiens
ttcctaaaactccat

SEQ ID NO: 1665571 - DNA, 15 bp, Homo sapiens
cttcctaaaactcca

SEQ ID NO: 1665572 - DNA, 15 bp, Homo sapiens
gcttcctaaaactcc

SEQ ID NO: 1665573 - DNA, 15 bp, Homo sapiens
tgcttcctaaaactc

SEQ ID NO: 1665574 - DNA, 15 bp, Homo sapiens
ctgcttcctaaaact

SEQ ID NO: 1665575 - DNA, 15 bp, Homo sapiens
actgcttcctaaaac

SEQ ID NO: 1665576 - DNA, 15 bp, Homo sapiens
tactgcttcctaaaa

SEQ ID NO: 1665577 - DNA, 15 bp, Homo sapiens
ctactgcttcctaaa

SEQ ID NO: 1665578 - DNA, 15 bp, Homo sapiens
tctactgcttcctaa

SEQ ID NO: 1665579 - DNA, 15 bp, Homo sapiens
ctctactgcttccta

SEQ ID NO: 1665580 - DNA, 15 bp, Homo sapiens
actctactgcttcct

SEQ ID NO: 1665581 - DNA, 15 bp, Homo sapiens
tactctactgcttcc

SEQ ID NO: 1665582 - DNA, 15 bp, Homo sapiens
ttactctactgcttc

SEQ ID NO: 1665583 - DNA, 15 bp, Homo sapiens
tttactctactgctt

SEQ ID NO: 1665584 - DNA, 15 bp, Homo sapiens
atttactctactgct

SEQ ID NO: 1665585 - DNA, 15 bp, Homo sapiens
catttactctactgc

SEQ ID NO: 1665586 - DNA, 15 bp, Homo sapiens
gcatttactctactg

SEQ ID NO: 1665587 - DNA, 15 bp, Homo sapiens
tgcatttactctact

SEQ ID NO: 1665588 - DNA, 15 bp, Homo sapiens
atgcatttactctac

SEQ ID NO: 1665589 - DNA, 15 bp, Homo sapiens
tatgcatttactcta

SEQ ID NO: 1665590 - DNA, 15 bp, Homo sapiens
ttatgcatttactct

SEQ ID NO: 1665591 - DNA, 15 bp, Homo sapiens
tttatgcatttactc

SEQ ID NO: 1665592 - DNA, 15 bp, Homo sapiens
gtttatgcatttact

SEQ ID NO: 1665593 - DNA, 15 bp, Homo sapiens
tgtttatgcatttac

SEQ ID NO: 1665594 - DNA, 15 bp, Homo sapiens
atgtttatgcattta

SEQ ID NO: 1665595 - DNA, 15 bp, Homo sapiens
catgtttatgcattt

SEQ ID NO: 1665596 - DNA, 15 bp, Homo sapiens
acatgtttatgcatt

SEQ ID NO: 1665597 - DNA, 15 bp, Homo sapiens
tacatgtttatgcat

SEQ ID NO: 1665598 - DNA, 15 bp, Homo sapiens
atacatgtttatgca

SEQ ID NO: 1665599 - DNA, 15 bp, Homo sapiens
catacatgtttatgc

SEQ ID NO: 1665600 - DNA, 15 bp, Homo sapiens
tcatacatgtttatg

SEQ ID NO: 1665601 - DNA, 15 bp, Homo sapiens
ttcatacatgtttat

SEQ ID NO: 1665602 - DNA, 15 bp, Homo sapiens
gttcatacatgttta

SEQ ID NO: 1665603 - DNA, 15 bp, Homo sapiens
ggttcatacatgttt

SEQ ID NO: 1665604 - DNA, 15 bp, Homo sapiens
cggttcatacatgtt

SEQ ID NO: 1665605 - DNA, 15 bp, Homo sapiens
gcggttcatacatgt

SEQ ID NO: 1665606 - DNA, 15 bp, Homo sapiens
ggcggttcatacatg

SEQ ID NO: 1665607 - DNA, 15 bp, Homo sapiens
tggcggttcatacat

SEQ ID NO: 1665608 - DNA, 15 bp, Homo sapiens
atggcggttcataca

SEQ ID NO: 1665609 - DNA, 15 bp, Homo sapiens
catggcggttcatac

SEQ ID NO: 1665610 - DNA, 15 bp, Homo sapiens
acatggcggttcata

SEQ ID NO: 1665611 - DNA, 15 bp, Homo sapiens
aacatggcggttcat

SEQ ID NO: 1665612 - DNA, 15 bp, Homo sapiens
aaacatggcggttca

SEQ ID NO: 1665613 - DNA, 15 bp, Homo sapiens
taaacatggcggttc

SEQ ID NO: 1665614 - DNA, 15 bp, Homo sapiens
ttaaacatggcggtt

SEQ ID NO: 1665615 - DNA, 15 bp, Homo sapiens
gttaaacatggcggt

SEQ ID NO: 1665616 - DNA, 15 bp, Homo sapiens
agttaaacatggcgg

SEQ ID NO: 1665617 - DNA, 15 bp, Homo sapiens
cagttaaacatggcg

SEQ ID NO: 1665618 - DNA, 15 bp, Homo sapiens
ccagttaaacatggc

SEQ ID NO: 1665619 - DNA, 15 bp, Homo sapiens
tccagttaaacatgg

SEQ ID NO: 1665620 - DNA, 15 bp, Homo sapiens
ttccagttaaacatg

SEQ ID NO: 1665621 - DNA, 15 bp, Homo sapiens
cttccagttaaacat

SEQ ID NO: 1665622 - DNA, 15 bp, Homo sapiens
gcttccagttaaaca

SEQ ID NO: 1665623 - DNA, 15 bp, Homo sapiens
ggcttccagttaaac

SEQ ID NO: 1665624 - DNA, 15 bp, Homo sapiens
aggcttccagttaaa

SEQ ID NO: 1665625 - DNA, 15 bp, Homo sapiens
caggcttccagttaa

SEQ ID NO: 1665626 - DNA, 15 bp, Homo sapiens
gcaggcttccagtta

SEQ ID NO: 1665627 - DNA, 15 bp, Homo sapiens
tgcaggcttccagtt

SEQ ID NO: 1665628 - DNA, 15 bp, Homo sapiens
atgcaggcttccagt

SEQ ID NO: 1665629 - DNA, 15 bp, Homo sapiens
aatgcaggcttccag

SEQ ID NO: 1665630 - DNA, 15 bp, Homo sapiens
aaatgcaggcttcca

SEQ ID NO: 1665631 - DNA, 15 bp, Homo sapiens
caaatgcaggcttcc

SEQ ID NO: 1665632 - DNA, 15 bp, Homo sapiens
ccaaatgcaggcttc

SEQ ID NO: 1665633 - DNA, 15 bp, Homo sapiens
tccaaatgcaggctt

SEQ ID NO: 1665634 - DNA, 15 bp, Homo sapiens
ttccaaatgcaggct

SEQ ID NO: 1665635 - DNA, 15 bp, Homo sapiens
cttccaaatgcaggc

SEQ ID NO: 1665636 - DNA, 15 bp, Homo sapiens
acttccaaatgcagg

SEQ ID NO: 1665637 - DNA, 15 bp, Homo sapiens
gacttccaaatgcag

SEQ ID NO: 1665638 - DNA, 15 bp, Homo sapiens
tgacttccaaatgca

SEQ ID NO: 1665639 - DNA, 15 bp, Homo sapiens
ttgacttccaaatgc

SEQ ID NO: 1665640 - DNA, 15 bp, Homo sapiens
cttgacttccaaatg

SEQ ID NO: 1665641 - DNA, 15 bp, Homo sapiens
acttgacttccaaat

SEQ ID NO: 1665642 - DNA, 15 bp, Homo sapiens
tacttgacttccaaa

SEQ ID NO: 1665643 - DNA, 15 bp, Homo sapiens
atacttgacttccaa

SEQ ID NO: 1665644 - DNA, 15 bp, Homo sapiens
gatacttgacttcca

SEQ ID NO: 1665645 - DNA, 15 bp, Homo sapiens
agatacttgacttcc

SEQ ID NO: 1665646 - DNA, 15 bp, Homo sapiens
tagatacttgacttc

SEQ ID NO: 1665647 - DNA, 15 bp, Homo sapiens
ttagatacttgactt

SEQ ID NO: 1665648 - DNA, 15 bp, Homo sapiens
attagatacttgact

SEQ ID NO: 1665649 - DNA, 15 bp, Homo sapiens
gattagatacttgac

SEQ ID NO: 1665650 - DNA, 15 bp, Homo sapiens
agattagatacttga

SEQ ID NO: 1665651 - DNA, 15 bp, Homo sapiens
aagattagatacttg

SEQ ID NO: 1665652 - DNA, 15 bp, Homo sapiens
taagattagatactt

SEQ ID NO: 1665653 - DNA, 15 bp, Homo sapiens
ctaagattagatact

SEQ ID NO: 1665654 - DNA, 15 bp, Homo sapiens
tctaagattagatac

SEQ ID NO: 1665655 - DNA, 15 bp, Homo sapiens
atctaagattagata

SEQ ID NO: 1665656 - DNA, 15 bp, Homo sapiens
aatctaagattagat

SEQ ID NO: 1665657 - DNA, 15 bp, Homo sapiens
taatctaagattaga

SEQ ID NO: 1665658 - DNA, 15 bp, Homo sapiens
ttaatctaagattag

SEQ ID NO: 1665659 - DNA, 15 bp, Homo sapiens
tttaatctaagatta

SEQ ID NO: 1665660 - DNA, 15 bp, Homo sapiens
atttaatctaagatt

SEQ ID NO: 1665661 - DNA, 15 bp, Homo sapiens
aatttaatctaagat

SEQ ID NO: 1665662 - DNA, 15 bp, Homo sapiens
taatttaatctaaga

SEQ ID NO: 1665663 - DNA, 15 bp, Homo sapiens
ctaatttaatctaag

SEQ ID NO: 1665664 - DNA, 15 bp, Homo sapiens
cctaatttaatctaa

SEQ ID NO: 1665665 - DNA, 15 bp, Homo sapiens
tcctaatttaatcta

SEQ ID NO: 1665666 - DNA, 15 bp, Homo sapiens
atcctaatttaatct

SEQ ID NO: 1665667 - DNA, 15 bp, Homo sapiens
catcctaatttaatc

SEQ ID NO: 1665668 - DNA, 15 bp, Homo sapiens
ccatcctaatttaat

SEQ ID NO: 1665669 - DNA, 15 bp, Homo sapiens
cccatcctaatttaa

SEQ ID NO: 1665670 - DNA, 15 bp, Homo sapiens
ccccatcctaattta

SEQ ID NO: 1665671 - DNA, 15 bp, Homo sapiens
tccccatcctaattt

SEQ ID NO: 1665672 - DNA, 15 bp, Homo sapiens
ttccccatcctaatt

SEQ ID NO: 1665673 - DNA, 15 bp, Homo sapiens
cttccccatcctaat

SEQ ID NO: 1665674 - DNA, 15 bp, Homo sapiens
ccttccccatcctaa

SEQ ID NO: 1665675 - DNA, 15 bp, Homo sapiens
tccttccccatccta

SEQ ID NO: 1665676 - DNA, 15 bp, Homo sapiens
atccttccccatcct

SEQ ID NO: 1665677 - DNA, 15 bp, Homo sapiens
catccttccccatcc

SEQ ID NO: 1665678 - DNA, 15 bp, Homo sapiens
acatccttccccatc

SEQ ID NO: 1665679 - DNA, 15 bp, Homo sapiens
aacatccttccccat

SEQ ID NO: 1665680 - DNA, 15 bp, Homo sapiens
caacatccttcccca

SEQ ID NO: 1665681 - DNA, 15 bp, Homo sapiens
ccaacatccttcccc

SEQ ID NO: 1665682 - DNA, 15 bp, Homo sapiens
gccaacatccttccc

SEQ ID NO: 1665683 - DNA, 15 bp, Homo sapiens
tgccaacatccttcc

SEQ ID NO: 1665684 - DNA, 15 bp, Homo sapiens
ttgccaacatccttc

SEQ ID NO: 1665685 - DNA, 15 bp, Homo sapiens
cttgccaacatcctt

SEQ ID NO: 1665686 - DNA, 15 bp, Homo sapiens
tcttgccaacatcct

SEQ ID NO: 1665687 - DNA, 15 bp, Homo sapiens
ctcttgccaacatcc

SEQ ID NO: 1665688 - DNA, 15 bp, Homo sapiens
tctcttgccaacatc

SEQ ID NO: 1665689 - DNA, 15 bp, Homo sapiens
atctcttgccaacat

SEQ ID NO: 1665690 - DNA, 15 bp, Homo sapiens
aatctcttgccaaca

SEQ ID NO: 1665691 - DNA, 15 bp, Homo sapiens
aaatctcttgccaac

SEQ ID NO: 1665692 - DNA, 15 bp, Homo sapiens
aaaatctcttgccaa

SEQ ID NO: 1665693 - DNA, 15 bp, Homo sapiens
caaaatctcttgcca

SEQ ID NO: 1665694 - DNA, 15 bp, Homo sapiens
tcaaaatctcttgcc

SEQ ID NO: 1665695 - DNA, 15 bp, Homo sapiens
ttcaaaatctcttgc

SEQ ID NO: 1665696 - DNA, 15 bp, Homo sapiens
cttcaaaatctcttg

SEQ ID NO: 1665697 - DNA, 15 bp, Homo sapiens
gcttcaaaatctctt

SEQ ID NO: 1665698 - DNA, 15 bp, Homo sapiens
agcttcaaaatctct

SEQ ID NO: 1665699 - DNA, 15 bp, Homo sapiens
aagcttcaaaatctc

SEQ ID NO: 1665700 - DNA, 15 bp, Homo sapiens
caagcttcaaaatct

SEQ ID NO: 1665701 - DNA, 15 bp, Homo sapiens
acaagcttcaaaatc

SEQ ID NO: 1665702 - DNA, 15 bp, Homo sapiens
aacaagcttcaaaat

SEQ ID NO: 1665703 - DNA, 15 bp, Homo sapiens
gaacaagcttcaaaa

SEQ ID NO: 1665704 - DNA, 15 bp, Homo sapiens
agaacaagcttcaaa

SEQ ID NO: 1665705 - DNA, 15 bp, Homo sapiens
cagaacaagcttcaa

SEQ ID NO: 1665706 - DNA, 15 bp, Homo sapiens
gcagaacaagcttca

SEQ ID NO: 1665707 - DNA, 15 bp, Homo sapiens
agcagaacaagcttc

SEQ ID NO: 1665708 - DNA, 15 bp, Homo sapiens
aagcagaacaagctt

SEQ ID NO: 1665709 - DNA, 15 bp, Homo sapiens
taagcagaacaagct

SEQ ID NO: 1665710 - DNA, 15 bp, Homo sapiens
ataagcagaacaagc

SEQ ID NO: 1665711 - DNA, 15 bp, Homo sapiens
tataagcagaacaag

SEQ ID NO: 1665712 - DNA, 15 bp, Homo sapiens
atataagcagaacaa

SEQ ID NO: 1665713 - DNA, 15 bp, Homo sapiens
aatataagcagaaca

SEQ ID NO: 1665714 - DNA, 15 bp, Homo sapiens
caatataagcagaac

SEQ ID NO: 1665715 - DNA, 15 bp, Homo sapiens
tcaatataagcagaa

SEQ ID NO: 1665716 - DNA, 15 bp, Homo sapiens
ctcaatataagcaga

SEQ ID NO: 1665717 - DNA, 15 bp, Homo sapiens
tctcaatataagcag

SEQ ID NO: 1665718 - DNA, 15 bp, Homo sapiens
ttctcaatataagca

SEQ ID NO: 1665719 - DNA, 15 bp, Homo sapiens
gttctcaatataagc

SEQ ID NO: 1665720 - DNA, 15 bp, Homo sapiens
tgttctcaatataag

SEQ ID NO: 1665721 - DNA, 15 bp, Homo sapiens
atgttctcaatataa

SEQ ID NO: 1665722 - DNA, 15 bp, Homo sapiens
tggcaacccatccaa

SEQ ID NO: 1665723 - DNA, 15 bp, Homo sapiens
ctggcaacccatcca

SEQ ID NO: 1665724 - DNA, 15 bp, Homo sapiens
gctggcaacccatcc

SEQ ID NO: 1665725 - DNA, 15 bp, Homo sapiens
agctggcaacccatc

SEQ ID NO: 1665726 - DNA, 15 bp, Homo sapiens
tagctggcaacccat

SEQ ID NO: 1665727 - DNA, 15 bp, Homo sapiens
atagctggcaaccca

SEQ ID NO: 1665728 - DNA, 15 bp, Homo sapiens
gatagctggcaaccc

SEQ ID NO: 1665729 - DNA, 15 bp, Homo sapiens
agatagctggcaacc

SEQ ID NO: 1665730 - DNA, 15 bp, Homo sapiens
cagatagctggcaac

SEQ ID NO: 1665731 - DNA, 15 bp, Homo sapiens
ccagatagctggcaa

SEQ ID NO: 1665732 - DNA, 15 bp, Homo sapiens
tccagatagctggca

SEQ ID NO: 1665733 - DNA, 15 bp, Homo sapiens
ctccagatagctggc

SEQ ID NO: 1665734 - DNA, 15 bp, Homo sapiens
tctccagatagctgg

SEQ ID NO: 1665735 - DNA, 15 bp, Homo sapiens
ttctccagatagctg

SEQ ID NO: 1665736 - DNA, 15 bp, Homo sapiens
tttctccagatagct

SEQ ID NO: 1665737 - DNA, 15 bp, Homo sapiens
ttttctccagatagc

SEQ ID NO: 1665738 - DNA, 15 bp, Homo sapiens
tttttctccagatag

SEQ ID NO: 1665739 - DNA, 15 bp, Homo sapiens
ctttttctccagata

SEQ ID NO: 1665740 - DNA, 15 bp, Homo sapiens
cctttttctccagat

SEQ ID NO: 1665741 - DNA, 15 bp, Homo sapiens
acctttttctccaga

SEQ ID NO: 1665742 - DNA, 15 bp, Homo sapiens
tacctttttctccag

SEQ ID NO: 1665743 - DNA, 15 bp, Homo sapiens
ctacctttttctcca

SEQ ID NO: 1665744 - DNA, 15 bp, Homo sapiens
actacctttttctcc

SEQ ID NO: 1665745 - DNA, 15 bp, Homo sapiens
aactacctttttctc

SEQ ID NO: 1665746 - DNA, 15 bp, Homo sapiens
aaactacctttttct

SEQ ID NO: 1665747 - DNA, 15 bp, Homo sapiens
caaactacctttttc

SEQ ID NO: 1665748 - DNA, 15 bp, Homo sapiens
ccaaactaccttttt

SEQ ID NO: 1665749 - DNA, 15 bp, Homo sapiens
cccaaactacctttt

SEQ ID NO: 1665750 - DNA, 15 bp, Homo sapiens
ccccaaactaccttt

SEQ ID NO: 1665751 - DNA, 15 bp, Homo sapiens
tccccaaactacctt

SEQ ID NO: 1665752 - DNA, 15 bp, Homo sapiens
ttccccaaactacct

SEQ ID NO: 1665753 - DNA, 15 bp, Homo sapiens
attccccaaactacc

SEQ ID NO: 1665754 - DNA, 15 bp, Homo sapiens
aattccccaaactac

SEQ ID NO: 1665755 - DNA, 15 bp, Homo sapiens
aaattccccaaacta

SEQ ID NO: 1665756 - DNA, 15 bp, Homo sapiens
taaattccccaaact

SEQ ID NO: 1665757 - DNA, 15 bp, Homo sapiens
ataaattccccaaac

SEQ ID NO: 1665758 - DNA, 15 bp, Homo sapiens
aataaattccccaaa

SEQ ID NO: 1665759 - DNA, 15 bp, Homo sapiens
caataaattccccaa

SEQ ID NO: 1665760 - DNA, 15 bp, Homo sapiens
acaataaattcccca

SEQ ID NO: 1665761 - DNA, 15 bp, Homo sapiens
aacaataaattcccc

SEQ ID NO: 1665762 - DNA, 15 bp, Homo sapiens
caacaataaattccc

SEQ ID NO: 1665763 - DNA, 15 bp, Homo sapiens
acaacaataaattcc

SEQ ID NO: 1665764 - DNA, 15 bp, Homo sapiens
tacaacaataaattc

SEQ ID NO: 1665765 - DNA, 15 bp, Homo sapiens
ctacaacaataaatt

SEQ ID NO: 1665766 - DNA, 15 bp, Homo sapiens
actacaacaataaat

SEQ ID NO: 1665767 - DNA, 15 bp, Homo sapiens
cactacaacaataaa

SEQ ID NO: 1665768 - DNA, 15 bp, Homo sapiens
gcactacaacaataa

SEQ ID NO: 1665769 - DNA, 15 bp, Homo sapiens
agcactacaacaata

SEQ ID NO: 1665770 - DNA, 15 bp, Homo sapiens
aagcactacaacaat

SEQ ID NO: 1665771 - DNA, 15 bp, Homo sapiens
gaagcactacaacaa

SEQ ID NO: 1665772 - DNA, 15 bp, Homo sapiens
agaagcactacaaca

SEQ ID NO: 1665773 - DNA, 15 bp, Homo sapiens
cagaagcactacaac

SEQ ID NO: 1665774 - DNA, 15 bp, Homo sapiens
acagaagcactacaa

SEQ ID NO: 1665775 - DNA, 15 bp, Homo sapiens
gacagaagcactaca

SEQ ID NO: 1665776 - DNA, 15 bp, Homo sapiens
agacagaagcactac

SEQ ID NO: 1665777 - DNA, 15 bp, Homo sapiens
aagacagaagcacta

SEQ ID NO: 1665778 - DNA, 15 bp, Homo sapiens
aaagacagaagcact

SEQ ID NO: 1665779 - DNA, 15 bp, Homo sapiens
caaagacagaagcac

SEQ ID NO: 1665780 - DNA, 15 bp, Homo sapiens
ccaaagacagaagca

SEQ ID NO: 1665781 - DNA, 15 bp, Homo sapiens
tccaaagacagaagc

SEQ ID NO: 1665782 - DNA, 15 bp, Homo sapiens
atccaaagacagaag

SEQ ID NO: 1665783 - DNA, 15 bp, Homo sapiens
aatccaaagacagaa

SEQ ID NO: 1665784 - DNA, 15 bp, Homo sapiens
caatccaaagacaga

SEQ ID NO: 1665785 - DNA, 15 bp, Homo sapiens
tcaatccaaagacag

SEQ ID NO: 1665786 - DNA, 15 bp, Homo sapiens
ttcaatccaaagaca

SEQ ID NO: 1665787 - DNA, 15 bp, Homo sapiens
gttcaatccaaagac

SEQ ID NO: 1665788 - DNA, 15 bp, Homo sapiens
agttcaatccaaaga

SEQ ID NO: 1665789 - DNA, 15 bp, Homo sapiens
aagttcaatccaaag

SEQ ID NO: 1665790 - DNA, 15 bp, Homo sapiens
gaagttcaatccaaa

SEQ ID NO: 1665791 - DNA, 15 bp, Homo sapiens
ggaagttcaatccaa

SEQ ID NO: 1665792 - DNA, 15 bp, Homo sapiens
gggaagttcaatcca

SEQ ID NO: 1665793 - DNA, 15 bp, Homo sapiens
tgggaagttcaatcc

SEQ ID NO: 1665794 - DNA, 15 bp, Homo sapiens
gtgggaagttcaatc

SEQ ID NO: 1665795 - DNA, 15 bp, Homo sapiens
tgtgggaagttcaat

SEQ ID NO: 1665796 - DNA, 15 bp, Homo sapiens
ttgtgggaagttcaa

SEQ ID NO: 1665797 - DNA, 15 bp, Homo sapiens
gttgtgggaagttca

SEQ ID NO: 1665798 - DNA, 15 bp, Homo sapiens
agttgtgggaagttc

SEQ ID NO: 1665799 - DNA, 15 bp, Homo sapiens
gagttgtgggaagtt

SEQ ID NO: 1665800 - DNA, 15 bp, Homo sapiens
agagttgtgggaagt

SEQ ID NO: 1665801 - DNA, 15 bp, Homo sapiens
gagagttgtgggaag

SEQ ID NO: 1665802 - DNA, 15 bp, Homo sapiens
ggagagttgtgggaa

SEQ ID NO: 1665803 - DNA, 15 bp, Homo sapiens
aggagagttgtggga

SEQ ID NO: 1665804 - DNA, 15 bp, Homo sapiens
aaggagagttgtggg

SEQ ID NO: 1665805 - DNA, 15 bp, Homo sapiens
aaaggagagttgtgg

SEQ ID NO: 1665806 - DNA, 15 bp, Homo sapiens
aaaaggagagttgtg

SEQ ID NO: 1665807 - DNA, 15 bp, Homo sapiens
aaaaaggagagttgt

SEQ ID NO: 1665808 - DNA, 15 bp, Homo sapiens
taaaaaggagagttg

SEQ ID NO: 1665809 - DNA, 15 bp, Homo sapiens
ttaaaaaggagagtt

SEQ ID NO: 1665810 - DNA, 15 bp, Homo sapiens
tttaaaaaggagagt

SEQ ID NO: 1665811 - DNA, 15 bp, Homo sapiens
ctttaaaaaggagag

SEQ ID NO: 1665812 - DNA, 15 bp, Homo sapiens
gctttaaaaaggaga

SEQ ID NO: 1665813 - DNA, 15 bp, Homo sapiens
tgctttaaaaaggag

SEQ ID NO: 1665814 - DNA, 15 bp, Homo sapiens
ctgctttaaaaagga

SEQ ID NO: 1665815 - DNA, 15 bp, Homo sapiens
tctgctttaaaaagg

SEQ ID NO: 1665816 - DNA, 15 bp, Homo sapiens
ttctgctttaaaaag

SEQ ID NO: 1665817 - DNA, 15 bp, Homo sapiens
gttctgctttaaaaa

SEQ ID NO: 1665818 - DNA, 15 bp, Homo sapiens
tgttctgctttaaaa

SEQ ID NO: 1665819 - DNA, 15 bp, Homo sapiens
gtgttctgctttaaa

SEQ ID NO: 1665820 - DNA, 15 bp, Homo sapiens
tgtgttctgctttaa

SEQ ID NO: 1665821 - DNA, 15 bp, Homo sapiens
ctgtgttctgcttta

SEQ ID NO: 1665822 - DNA, 15 bp, Homo sapiens
gctgtgttctgcttt

SEQ ID NO: 1665823 - DNA, 15 bp, Homo sapiens
agctgtgttctgctt

SEQ ID NO: 1665824 - DNA, 15 bp, Homo sapiens
cagctgtgttctgct

SEQ ID NO: 1665825 - DNA, 15 bp, Homo sapiens
ccagctgtgttctgc

SEQ ID NO: 1665826 - DNA, 15 bp, Homo sapiens
cccagctgtgttctg

SEQ ID NO: 1665827 - DNA, 15 bp, Homo sapiens
gcccagctgtgttct

SEQ ID NO: 1665828 - DNA, 15 bp, Homo sapiens
tgcccagctgtgttc

SEQ ID NO: 1665829 - DNA, 15 bp, Homo sapiens
atgcccagctgtgtt

SEQ ID NO: 1665830 - DNA, 15 bp, Homo sapiens
ggagccaccatgccc

SEQ ID NO: 1665831 - DNA, 15 bp, Homo sapiens
aggagccaccatgcc

SEQ ID NO: 1665832 - DNA, 15 bp, Homo sapiens
caggagccaccatgc

SEQ ID NO: 1665833 - DNA, 15 bp, Homo sapiens
gcaggagccaccatg

SEQ ID NO: 1665834 - DNA, 15 bp, Homo sapiens
agcaggagccaccat

SEQ ID NO: 1665835 - DNA, 15 bp, Homo sapiens
aagcaggagccacca

SEQ ID NO: 1665836 - DNA, 15 bp, Homo sapiens
caagcaggagccacc

SEQ ID NO: 1665837 - DNA, 15 bp, Homo sapiens
acaagcaggagccac

SEQ ID NO: 1665838 - DNA, 15 bp, Homo sapiens
tacaagcaggagcca

SEQ ID NO: 1665839 - DNA, 15 bp, Homo sapiens
ttacaagcaggagcc

SEQ ID NO: 1665840 - DNA, 15 bp, Homo sapiens
attacaagcaggagc

SEQ ID NO: 1665841 - DNA, 15 bp, Homo sapiens
aattacaagcaggag

SEQ ID NO: 1665842 - DNA, 15 bp, Homo sapiens
gaattacaagcagga

SEQ ID NO: 1665843 - DNA, 15 bp, Homo sapiens
ggaattacaagcagg

SEQ ID NO: 1665844 - DNA, 15 bp, Homo sapiens
tggaattacaagcag

SEQ ID NO: 1665845 - DNA, 15 bp, Homo sapiens
ctggaattacaagca

SEQ ID NO: 1665846 - DNA, 15 bp, Homo sapiens
cctggaattacaagc

SEQ ID NO: 1665847 - DNA, 15 bp, Homo sapiens
ccctggaattacaag

SEQ ID NO: 1665848 - DNA, 15 bp, Homo sapiens
gccctggaattacaa

SEQ ID NO: 1665849 - DNA, 15 bp, Homo sapiens
agccctggaattaca

SEQ ID NO: 1665850 - DNA, 15 bp, Homo sapiens
aagccctggaattac

SEQ ID NO: 1665851 - DNA, 15 bp, Homo sapiens
aaagccctggaatta

SEQ ID NO: 1665852 - DNA, 15 bp, Homo sapiens
caaagccctggaatt

SEQ ID NO: 1665853 - DNA, 15 bp, Homo sapiens
ccaaagccctggaat

SEQ ID NO: 1665854 - DNA, 15 bp, Homo sapiens
cccaaagccctggaa

SEQ ID NO: 1665855 - DNA, 15 bp, Homo sapiens
tcccaaagccctgga

SEQ ID NO: 1665856 - DNA, 15 bp, Homo sapiens
ctcccaaagccctgg

SEQ ID NO: 1665857 - DNA, 15 bp, Homo sapiens
cctcccaaagccctg

SEQ ID NO: 1665858 - DNA, 15 bp, Homo sapiens
acctcccaaagccct

SEQ ID NO: 1665859 - DNA, 15 bp, Homo sapiens
aacctcccaaagccc

SEQ ID NO: 1665860 - DNA, 15 bp, Homo sapiens
caacctcccaaagcc

SEQ ID NO: 1665861 - DNA, 15 bp, Homo sapiens
tcaacctcccaaagc

SEQ ID NO: 1665862 - DNA, 15 bp, Homo sapiens
ccccacctcaacctc

SEQ ID NO: 1665863 - DNA, 15 bp, Homo sapiens
cccccacctcaacct

SEQ ID NO: 1665864 - DNA, 15 bp, Homo sapiens
ccccccacctcaacc

SEQ ID NO: 1665865 - DNA, 15 bp, Homo sapiens
tccccccacctcaac

SEQ ID NO: 1665866 - DNA, 15 bp, Homo sapiens
atccccccacctcaa

SEQ ID NO: 1665867 - DNA, 15 bp, Homo sapiens
gatccccccacctca

SEQ ID NO: 1665868 - DNA, 15 bp, Homo sapiens
tgatccccccacctc

SEQ ID NO: 1665869 - DNA, 15 bp, Homo sapiens
gtgatccccccacct

SEQ ID NO: 1665870 - DNA, 15 bp, Homo sapiens
agtgatccccccacc

SEQ ID NO: 1665871 - DNA, 15 bp, Homo sapiens
aagtgatccccccac

SEQ ID NO: 1665872 - DNA, 15 bp, Homo sapiens
caagtgatcccccca

SEQ ID NO: 1665873 - DNA, 15 bp, Homo sapiens
tcaagtgatcccccc

SEQ ID NO: 1665874 - DNA, 15 bp, Homo sapiens
cctcaagtgatcccc

SEQ ID NO: 1665875 - DNA, 15 bp, Homo sapiens
caactcctggcctca

SEQ ID NO: 1665876 - DNA, 15 bp, Homo sapiens
tcaactcctggcctc

SEQ ID NO: 1665877 - DNA, 15 bp, Homo sapiens
ttcaactcctggcct

SEQ ID NO: 1665878 - DNA, 15 bp, Homo sapiens
cttcaactcctggcc

SEQ ID NO: 1665879 - DNA, 15 bp, Homo sapiens
tcttcaactcctggc

SEQ ID NO: 1665880 - DNA, 15 bp, Homo sapiens
gtcttcaactcctgg

SEQ ID NO: 1665881 - DNA, 15 bp, Homo sapiens
ggtcttcaactcctg

SEQ ID NO: 1665882 - DNA, 15 bp, Homo sapiens
gggtcttcaactcct

SEQ ID NO: 1665883 - DNA, 15 bp, Homo sapiens
tgggtcttcaactcc

SEQ ID NO: 1665884 - DNA, 15 bp, Homo sapiens
atgggtcttcaactc

SEQ ID NO: 1665885 - DNA, 15 bp, Homo sapiens
catgggtcttcaact

SEQ ID NO: 1665886 - DNA, 15 bp, Homo sapiens
acatgggtcttcaac

SEQ ID NO: 1665887 - DNA, 15 bp, Homo sapiens
gacatgggtcttcaa

SEQ ID NO: 1665888 - DNA, 15 bp, Homo sapiens
agacatgggtcttca

SEQ ID NO: 1665889 - DNA, 15 bp, Homo sapiens
gagacatgggtcttc

SEQ ID NO: 1665890 - DNA, 15 bp, Homo sapiens
agagacatgggtctt

SEQ ID NO: 1665891 - DNA, 15 bp, Homo sapiens
tagagacatgggtct

SEQ ID NO: 1665892 - DNA, 15 bp, Homo sapiens
gtagagacatgggtc

SEQ ID NO: 1665893 - DNA, 15 bp, Homo sapiens
tgtagagacatgggt

SEQ ID NO: 1665894 - DNA, 15 bp, Homo sapiens
ttgtagagacatggg

SEQ ID NO: 1665895 - DNA, 15 bp, Homo sapiens
attgtagagacatgg

SEQ ID NO: 1665896 - DNA, 15 bp, Homo sapiens
tattgtagagacatg

SEQ ID NO: 1665897 - DNA, 15 bp, Homo sapiens
ttattgtagagacat

SEQ ID NO: 1665898 - DNA, 15 bp, Homo sapiens
tttattgtagagaca

SEQ ID NO: 1665899 - DNA, 15 bp, Homo sapiens
ttttattgtagagac

SEQ ID NO: 1665900 - DNA, 15 bp, Homo sapiens
attttattgtagaga

SEQ ID NO: 1665901 - DNA, 15 bp, Homo sapiens
tattttattgtagag

SEQ ID NO: 1665902 - DNA, 15 bp, Homo sapiens
ttattttattgtaga

SEQ ID NO: 1665903 - DNA, 15 bp, Homo sapiens
tttattttattgtag

SEQ ID NO: 1665904 - DNA, 15 bp, Homo sapiens
ttttattttattgta

SEQ ID NO: 1665905 - DNA, 15 bp, Homo sapiens
ctaattttattttat

SEQ ID NO: 1665906 - DNA, 15 bp, Homo sapiens
actaattttatttta

SEQ ID NO: 1665907 - DNA, 15 bp, Homo sapiens
aactaattttatttt

SEQ ID NO: 1665908 - DNA, 15 bp, Homo sapiens
caactaattttattt

SEQ ID NO: 1665909 - DNA, 15 bp, Homo sapiens
ccaactaattttatt

SEQ ID NO: 1665910 - DNA, 15 bp, Homo sapiens
cccaactaattttat

SEQ ID NO: 1665911 - DNA, 15 bp, Homo sapiens
gcccaactaatttta

SEQ ID NO: 1665912 - DNA, 15 bp, Homo sapiens
tgcccaactaatttt

SEQ ID NO: 1665913 - DNA, 15 bp, Homo sapiens
atgcccaactaattt

SEQ ID NO: 1665914 - DNA, 15 bp, Homo sapiens
catgcccaactaatt

SEQ ID NO: 1665915 - DNA, 15 bp, Homo sapiens
ccatgcccaactaat

SEQ ID NO: 1665916 - DNA, 15 bp, Homo sapiens
accatgcccaactaa

SEQ ID NO: 1665917 - DNA, 15 bp, Homo sapiens
caccatgcccaacta

SEQ ID NO: 1665918 - DNA, 15 bp, Homo sapiens
ccaccatgcccaact

SEQ ID NO: 1665919 - DNA, 15 bp, Homo sapiens
accaccatgcccaac

SEQ ID NO: 1665920 - DNA, 15 bp, Homo sapiens
taccaccatgcccaa

SEQ ID NO: 1665921 - DNA, 15 bp, Homo sapiens
gtaccaccatgccca

SEQ ID NO: 1665922 - DNA, 15 bp, Homo sapiens
cgtaccaccatgccc

SEQ ID NO: 1665923 - DNA, 15 bp, Homo sapiens
acgtaccaccatgcc

SEQ ID NO: 1665924 - DNA, 15 bp, Homo sapiens
cacgtaccaccatgc

SEQ ID NO: 1665925 - DNA, 15 bp, Homo sapiens
gcacgtaccaccatg

SEQ ID NO: 1665926 - DNA, 15 bp, Homo sapiens
ggcacgtaccaccat

SEQ ID NO: 1665927 - DNA, 15 bp, Homo sapiens
aggcacgtaccacca

SEQ ID NO: 1665928 - DNA, 15 bp, Homo sapiens
caggcacgtaccacc

SEQ ID NO: 1665929 - DNA, 15 bp, Homo sapiens
acaggcacgtaccac

SEQ ID NO: 1665930 - DNA, 15 bp, Homo sapiens
tacaggcacgtacca

SEQ ID NO: 1665931 - DNA, 15 bp, Homo sapiens
ctacaggcacgtacc

SEQ ID NO: 1665932 - DNA, 15 bp, Homo sapiens
actacaggcacgtac

SEQ ID NO: 1665933 - DNA, 15 bp, Homo sapiens
gactacaggcacgta

SEQ ID NO: 1665934 - DNA, 15 bp, Homo sapiens
ggactacaggcacgt

SEQ ID NO: 1665935 - DNA, 15 bp, Homo sapiens
aggactacaggcacg

SEQ ID NO: 1665936 - DNA, 15 bp, Homo sapiens
taggactacaggcac

SEQ ID NO: 1665937 - DNA, 15 bp, Homo sapiens
gtaggactacaggca

SEQ ID NO: 1665938 - DNA, 15 bp, Homo sapiens
ggtaggactacaggc

SEQ ID NO: 1665939 - DNA, 15 bp, Homo sapiens
aggtaggactacagg

SEQ ID NO: 1665940 - DNA, 15 bp, Homo sapiens
taggtaggactacag

SEQ ID NO: 1665941 - DNA, 15 bp, Homo sapiens
gtaggtaggactaca

SEQ ID NO: 1665942 - DNA, 15 bp, Homo sapiens
agtaggtaggactac

SEQ ID NO: 1665943 - DNA, 15 bp, Homo sapiens
gagtaggtaggacta

SEQ ID NO: 1665944 - DNA, 15 bp, Homo sapiens
agagtaggtaggact

SEQ ID NO: 1665945 - DNA, 15 bp, Homo sapiens
cagagtaggtaggac

SEQ ID NO: 1665946 - DNA, 15 bp, Homo sapiens
ccagagtaggtagga

SEQ ID NO: 1665947 - DNA, 15 bp, Homo sapiens
tccagagtaggtagg

SEQ ID NO: 1665948 - DNA, 15 bp, Homo sapiens
ctccagagtaggtag

SEQ ID NO: 1665949 - DNA, 15 bp, Homo sapiens
cctccagagtaggta

SEQ ID NO: 1665950 - DNA, 15 bp, Homo sapiens
gcctccagagtaggt

SEQ ID NO: 1665951 - DNA, 15 bp, Homo sapiens
agcctccagagtagg

SEQ ID NO: 1665952 - DNA, 15 bp, Homo sapiens
gcctcagcctccaga

SEQ ID NO: 1665953 - DNA, 15 bp, Homo sapiens
tgcctcagcctccag

SEQ ID NO: 1665954 - DNA, 15 bp, Homo sapiens
ctgcctcagcctcca

SEQ ID NO: 1665955 - DNA, 15 bp, Homo sapiens
gctgcctcagcctcc

SEQ ID NO: 1665956 - DNA, 15 bp, Homo sapiens
tgctgcctcagcctc

SEQ ID NO: 1665957 - DNA, 15 bp, Homo sapiens
ctgctgcctcagcct

SEQ ID NO: 1665958 - DNA, 15 bp, Homo sapiens
cctgctgcctcagcc

SEQ ID NO: 1665959 - DNA, 15 bp, Homo sapiens
tcctgctgcctcagc

SEQ ID NO: 1665960 - DNA, 15 bp, Homo sapiens
atcctgctgcctcag

SEQ ID NO: 1665961 - DNA, 15 bp, Homo sapiens
aatcctgctgcctca

SEQ ID NO: 1665962 - DNA, 15 bp, Homo sapiens
caatcctgctgcctc

SEQ ID NO: 1665963 - DNA, 15 bp, Homo sapiens
gatggctcactgcag

SEQ ID NO: 1665964 - DNA, 15 bp, Homo sapiens
tgatggctcactgca

SEQ ID NO: 1665965 - DNA, 15 bp, Homo sapiens
atgatggctcactgc

SEQ ID NO: 1665966 - DNA, 15 bp, Homo sapiens
aatgatggctcactg

SEQ ID NO: 1665967 - DNA, 15 bp, Homo sapiens
taatgatggctcact

SEQ ID NO: 1665968 - DNA, 15 bp, Homo sapiens
ctaatgatggctcac

SEQ ID NO: 1665969 - DNA, 15 bp, Homo sapiens
gctaatgatggctca

SEQ ID NO: 1665970 - DNA, 15 bp, Homo sapiens
ggctaatgatggctc

SEQ ID NO: 1665971 - DNA, 15 bp, Homo sapiens
tggctaatgatggct

SEQ ID NO: 1665972 - DNA, 15 bp, Homo sapiens
gtggctaatgatggc

SEQ ID NO: 1665973 - DNA, 15 bp, Homo sapiens
agtggctaatgatgg

SEQ ID NO: 1665974 - DNA, 15 bp, Homo sapiens
cagtggctaatgatg

SEQ ID NO: 1665975 - DNA, 15 bp, Homo sapiens
gcagtggctaatgat

SEQ ID NO: 1665976 - DNA, 15 bp, Homo sapiens
tgcagtggctaatga

SEQ ID NO: 1665977 - DNA, 15 bp, Homo sapiens
gtgcagtggctaatg

SEQ ID NO: 1665978 - DNA, 15 bp, Homo sapiens
agtgcagtggctaat

SEQ ID NO: 1665979 - DNA, 15 bp, Homo sapiens
gagtgcagtggctaa

SEQ ID NO: 1665980 - DNA, 15 bp, Homo sapiens
ggagtgcagtggcta

SEQ ID NO: 1665981 - DNA, 15 bp, Homo sapiens
tggagtgcagtggct

SEQ ID NO: 1665982 - DNA, 15 bp, Homo sapiens
taggctggagtgcag

SEQ ID NO: 1665983 - DNA, 15 bp, Homo sapiens
ctaggctggagtgca

SEQ ID NO: 1665984 - DNA, 15 bp, Homo sapiens
cctaggctggagtgc

SEQ ID NO: 1665985 - DNA, 15 bp, Homo sapiens
acctaggctggagtg

SEQ ID NO: 1665986 - DNA, 15 bp, Homo sapiens
cacctaggctggagt

SEQ ID NO: 1665987 - DNA, 15 bp, Homo sapiens
ccacctaggctggag

SEQ ID NO: 1665988 - DNA, 15 bp, Homo sapiens
gccacctaggctgga

SEQ ID NO: 1665989 - DNA, 15 bp, Homo sapiens
tgccacctaggctgg

SEQ ID NO: 1665990 - DNA, 15 bp, Homo sapiens
ctgccacctaggctg

SEQ ID NO: 1665991 - DNA, 15 bp, Homo sapiens
tctgccacctaggct

SEQ ID NO: 1665992 - DNA, 15 bp, Homo sapiens
ctctgccacctaggc

SEQ ID NO: 1665993 - DNA, 15 bp, Homo sapiens
gctctgccacctagg

SEQ ID NO: 1665994 - DNA, 15 bp, Homo sapiens
cgctctgccacctag

SEQ ID NO: 1665995 - DNA, 15 bp, Homo sapiens
ccgctctgccaccta

SEQ ID NO: 1665996 - DNA, 15 bp, Homo sapiens
cccgctctgccacct

SEQ ID NO: 1665997 - DNA, 15 bp, Homo sapiens
tcccgctctgccacc

SEQ ID NO: 1665998 - DNA, 15 bp, Homo sapiens
gtcccgctctgccac

SEQ ID NO: 1665999 - DNA, 15 bp, Homo sapiens
ggtcccgctctgcca

SEQ ID NO: 1666000 - DNA, 15 bp, Homo sapiens
gggtcccgctctgcc

SEQ ID NO: 1666001 - DNA, 15 bp, Homo sapiens
tgggtcccgctctgc

SEQ ID NO: 1666002 - DNA, 15 bp, Homo sapiens
ctgggtcccgctctg

SEQ ID NO: 1666003 - DNA, 15 bp, Homo sapiens
actgggtcccgctct

SEQ ID NO: 1666004 - DNA, 15 bp, Homo sapiens
gactgggtcccgctc

SEQ ID NO: 1666005 - DNA, 15 bp, Homo sapiens
agactgggtcccgct

SEQ ID NO: 1666006 - DNA, 15 bp, Homo sapiens
gagactgggtcccgc

SEQ ID NO: 1666007 - DNA, 15 bp, Homo sapiens
agagactgggtcccg

SEQ ID NO: 1666008 - DNA, 15 bp, Homo sapiens
aagagactgggtccc

SEQ ID NO: 1666009 - DNA, 15 bp, Homo sapiens
taagagactgggtcc

SEQ ID NO: 1666010 - DNA, 15 bp, Homo sapiens
ttaagagactgggtc

SEQ ID NO: 1666011 - DNA, 15 bp, Homo sapiens
tttaagagactgggt

SEQ ID NO: 1666012 - DNA, 15 bp, Homo sapiens
ttttaagagactggg

SEQ ID NO: 1666013 - DNA, 15 bp, Homo sapiens
tttttaagagactgg

SEQ ID NO: 1666014 - DNA, 15 bp, Homo sapiens
ctttttaagagactg

SEQ ID NO: 1666015 - DNA, 15 bp, Homo sapiens
tctttttaagagact

SEQ ID NO: 1666016 - DNA, 15 bp, Homo sapiens
ttctttttaagagac

SEQ ID NO: 1666017 - DNA, 15 bp, Homo sapiens
tttctttttaagaga

SEQ ID NO: 1666018 - DNA, 15 bp, Homo sapiens
ctttctttttaagag

SEQ ID NO: 1666019 - DNA, 15 bp, Homo sapiens
tctttctttttaaga

SEQ ID NO: 1666020 - DNA, 15 bp, Homo sapiens
ttctttctttttaag

SEQ ID NO: 1666021 - DNA, 15 bp, Homo sapiens
ttttctttcttttta

SEQ ID NO: 1666022 - DNA, 15 bp, Homo sapiens
gcttttctttctttt

SEQ ID NO: 1666023 - DNA, 15 bp, Homo sapiens
tgcttttctttcttt

SEQ ID NO: 1666024 - DNA, 15 bp, Homo sapiens
ctgcttttctttctt

SEQ ID NO: 1666025 - DNA, 15 bp, Homo sapiens
tctgcttttctttct

SEQ ID NO: 1666026 - DNA, 15 bp, Homo sapiens
ttctgcttttctttc

SEQ ID NO: 1666027 - DNA, 15 bp, Homo sapiens
gttctgcttttcttt

SEQ ID NO: 1666028 - DNA, 15 bp, Homo sapiens
cgttctgcttttctt

SEQ ID NO: 1666029 - DNA, 15 bp, Homo sapiens
acgttctgcttttct

SEQ ID NO: 1666030 - DNA, 15 bp, Homo sapiens
cacgttctgcttttc

SEQ ID NO: 1666031 - DNA, 15 bp, Homo sapiens
tcacgttctgctttt

SEQ ID NO: 1666032 - DNA, 15 bp, Homo sapiens
ctcacgttctgcttt

SEQ ID NO: 1666033 - DNA, 15 bp, Homo sapiens
gctcacgttctgctt

SEQ ID NO: 1666034 - DNA, 15 bp, Homo sapiens
ggctcacgttctgct

SEQ ID NO: 1666035 - DNA, 15 bp, Homo sapiens
tggctcacgttctgc

SEQ ID NO: 1666036 - DNA, 15 bp, Homo sapiens
ctggctcacgttctg

SEQ ID NO: 1666037 - DNA, 15 bp, Homo sapiens
actggctcacgttct

SEQ ID NO: 1666038 - DNA, 15 bp, Homo sapiens
aactggctcacgttc

SEQ ID NO: 1666039 - DNA, 15 bp, Homo sapiens
aaactggctcacgtt

SEQ ID NO: 1666040 - DNA, 15 bp, Homo sapiens
aaaactggctcacgt

SEQ ID NO: 1666041 - DNA, 15 bp, Homo sapiens
gaaaactggctcacg

SEQ ID NO: 1666042 - DNA, 15 bp, Homo sapiens
tgaaaactggctcac

SEQ ID NO: 1666043 - DNA, 15 bp, Homo sapiens
atgaaaactggctca

SEQ ID NO: 1666044 - DNA, 15 bp, Homo sapiens
gatgaaaactggctc

SEQ ID NO: 1666045 - DNA, 15 bp, Homo sapiens
tgatgaaaactggct

SEQ ID NO: 1666046 - DNA, 15 bp, Homo sapiens
ttgatgaaaactggc

SEQ ID NO: 1666047 - DNA, 15 bp, Homo sapiens
attgatgaaaactgg

SEQ ID NO: 1666048 - DNA, 15 bp, Homo sapiens
aattgatgaaaactg

SEQ ID NO: 1666049 - DNA, 15 bp, Homo sapiens
gaattgatgaaaact

SEQ ID NO: 1666050 - DNA, 15 bp, Homo sapiens
ggaattgatgaaaac

SEQ ID NO: 1666051 - DNA, 15 bp, Homo sapiens
aggaattgatgaaaa

SEQ ID NO: 1666052 - DNA, 15 bp, Homo sapiens
taggaattgatgaaa

SEQ ID NO: 1666053 - DNA, 15 bp, Homo sapiens
ataggaattgatgaa

SEQ ID NO: 1666054 - DNA, 15 bp, Homo sapiens
tataggaattgatga

SEQ ID NO: 1666055 - DNA, 15 bp, Homo sapiens
gtataggaattgatg

SEQ ID NO: 1666056 - DNA, 15 bp, Homo sapiens
agtataggaattgat

SEQ ID NO: 1666057 - DNA, 15 bp, Homo sapiens
aagtataggaattga

SEQ ID NO: 1666058 - DNA, 15 bp, Homo sapiens
aaagtataggaattg

SEQ ID NO: 1666059 - DNA, 15 bp, Homo sapiens
aaaagtataggaatt

SEQ ID NO: 1666060 - DNA, 15 bp, Homo sapiens
aaaaagtataggaat

SEQ ID NO: 1666061 - DNA, 15 bp, Homo sapiens
gaaaaagtataggaa

SEQ ID NO: 1666062 - DNA, 15 bp, Homo sapiens
agaaaaagtatagga

SEQ ID NO: 1666063 - DNA, 15 bp, Homo sapiens
aagaaaaagtatagg

SEQ ID NO: 1666064 - DNA, 15 bp, Homo sapiens
aaagaaaaagtatag

SEQ ID NO: 1666065 - DNA, 15 bp, Homo sapiens
aaaagaaaaagtata

SEQ ID NO: 1666066 - DNA, 15 bp, Homo sapiens
caaaagaaaaagtat

SEQ ID NO: 1666067 - DNA, 15 bp, Homo sapiens
gcaaaagaaaaagta

SEQ ID NO: 1666068 - DNA, 15 bp, Homo sapiens
tgcaaaagaaaaagt

SEQ ID NO: 1666069 - DNA, 15 bp, Homo sapiens
atgcaaaagaaaaag

SEQ ID NO: 1666070 - DNA, 15 bp, Homo sapiens
catgcaaaagaaaaa

SEQ ID NO: 1666071 - DNA, 15 bp, Homo sapiens
acatgcaaaagaaaa

SEQ ID NO: 1666072 - DNA, 15 bp, Homo sapiens
tacatgcaaaagaaa

SEQ ID NO: 1666073 - DNA, 15 bp, Homo sapiens
gtacatgcaaaagaa

SEQ ID NO: 1666074 - DNA, 15 bp, Homo sapiens
tgtacatgcaaaaga

SEQ ID NO: 1666075 - DNA, 15 bp, Homo sapiens
gtgtacatgcaaaag

SEQ ID NO: 1666076 - DNA, 15 bp, Homo sapiens
tgtgtacatgcaaaa

SEQ ID NO: 1666077 - DNA, 15 bp, Homo sapiens
atgtgtacatgcaaa

SEQ ID NO: 1666078 - DNA, 15 bp, Homo sapiens
tatgtgtacatgcaa

SEQ ID NO: 1666079 - DNA, 15 bp, Homo sapiens
gtatgtgtacatgca

SEQ ID NO: 1666080 - DNA, 15 bp, Homo sapiens
tgtatgtgtacatgc

SEQ ID NO: 1666081 - DNA, 15 bp, Homo sapiens
atgtatgtgtacatg

SEQ ID NO: 1666082 - DNA, 15 bp, Homo sapiens
aatgtatgtgtacat

SEQ ID NO: 1666083 - DNA, 15 bp, Homo sapiens
aaatgtatgtgtaca

SEQ ID NO: 1666084 - DNA, 15 bp, Homo sapiens
aaaatgtatgtgtac

SEQ ID NO: 1666085 - DNA, 15 bp, Homo sapiens
taaaatgtatgtgta

SEQ ID NO: 1666086 - DNA, 15 bp, Homo sapiens
ttaaaatgtatgtgt

SEQ ID NO: 1666087 - DNA, 15 bp, Homo sapiens
gttaaaatgtatgtg

SEQ ID NO: 1666088 - DNA, 15 bp, Homo sapiens
agttaaaatgtatgt

SEQ ID NO: 1666089 - DNA, 15 bp, Homo sapiens
aagttaaaatgtatg

SEQ ID NO: 1666090 - DNA, 15 bp, Homo sapiens
aaagttaaaatgtat

SEQ ID NO: 1666091 - DNA, 15 bp, Homo sapiens
taaagttaaaatgta

SEQ ID NO: 1666092 - DNA, 15 bp, Homo sapiens
gtaaagttaaaatgt

SEQ ID NO: 1666093 - DNA, 15 bp, Homo sapiens
tgtaaagttaaaatg

SEQ ID NO: 1666094 - DNA, 15 bp, Homo sapiens
atgtaaagttaaaat

SEQ ID NO: 1666095 - DNA, 15 bp, Homo sapiens
tatgtaaagttaaaa

SEQ ID NO: 1666096 - DNA, 15 bp, Homo sapiens
ttatgtaaagttaaa

SEQ ID NO: 1666097 - DNA, 15 bp, Homo sapiens
attatgtaaagttaa

SEQ ID NO: 1666098 - DNA, 15 bp, Homo sapiens
cattatgtaaagtta

SEQ ID NO: 1666099 - DNA, 15 bp, Homo sapiens
tcattatgtaaagtt

SEQ ID NO: 1666100 - DNA, 15 bp, Homo sapiens
ctcattatgtaaagt

SEQ ID NO: 1666101 - DNA, 15 bp, Homo sapiens
actcattatgtaaag

SEQ ID NO: 1666102 - DNA, 15 bp, Homo sapiens
aactcattatgtaaa

SEQ ID NO: 1666103 - DNA, 15 bp, Homo sapiens
gaactcattatgtaa

SEQ ID NO: 1666104 - DNA, 15 bp, Homo sapiens
cgaactcattatgta

SEQ ID NO: 1666105 - DNA, 15 bp, Homo sapiens
ccgaactcattatgt

SEQ ID NO: 1666106 - DNA, 15 bp, Homo sapiens
gccgaactcattatg

SEQ ID NO: 1666107 - DNA, 15 bp, Homo sapiens
ggccgaactcattat

SEQ ID NO: 1666108 - DNA, 15 bp, Homo sapiens
aggccgaactcatta

SEQ ID NO: 1666109 - DNA, 15 bp, Homo sapiens
caggccgaactcatt

SEQ ID NO: 1666110 - DNA, 15 bp, Homo sapiens
acaggccgaactcat

SEQ ID NO: 1666111 - DNA, 15 bp, Homo sapiens
aacaggccgaactca

SEQ ID NO: 1666112 - DNA, 15 bp, Homo sapiens
aaacaggccgaactc

SEQ ID NO: 1666113 - DNA, 15 bp, Homo sapiens
gaaacaggccgaact

SEQ ID NO: 1666114 - DNA, 15 bp, Homo sapiens
tgaaacaggccgaac

SEQ ID NO: 1666115 - DNA, 15 bp, Homo sapiens
atgaaacaggccgaa

SEQ ID NO: 1666116 - DNA, 15 bp, Homo sapiens
aatgaaacaggccga

SEQ ID NO: 1666117 - DNA, 15 bp, Homo sapiens
aaatgaaacaggccg

SEQ ID NO: 1666118 - DNA, 15 bp, Homo sapiens
taaatgaaacaggcc

SEQ ID NO: 1666119 - DNA, 15 bp, Homo sapiens
ataaatgaaacaggc

SEQ ID NO: 1666120 - DNA, 15 bp, Homo sapiens
gataaatgaaacagg

SEQ ID NO: 1666121 - DNA, 15 bp, Homo sapiens
ggataaatgaaacag

SEQ ID NO: 1666122 - DNA, 15 bp, Homo sapiens
gggataaatgaaaca

SEQ ID NO: 1666123 - DNA, 15 bp, Homo sapiens
agggataaatgaaac

SEQ ID NO: 1666124 - DNA, 15 bp, Homo sapiens
gagggataaatgaaa

SEQ ID NO: 1666125 - DNA, 15 bp, Homo sapiens
tgagggataaatgaa

SEQ ID NO: 1666126 - DNA, 15 bp, Homo sapiens
ctgagggataaatga

SEQ ID NO: 1666127 - DNA, 15 bp, Homo sapiens
tctgagggataaatg

SEQ ID NO: 1666128 - DNA, 15 bp, Homo sapiens
ctctgagggataaat

SEQ ID NO: 1666129 - DNA, 15 bp, Homo sapiens
gctctgagggataaa

SEQ ID NO: 1666130 - DNA, 15 bp, Homo sapiens
agctctgagggataa

SEQ ID NO: 1666131 - DNA, 15 bp, Homo sapiens
cagctctgagggata

SEQ ID NO: 1666132 - DNA, 15 bp, Homo sapiens
ccagctctgagggat

SEQ ID NO: 1666133 - DNA, 15 bp, Homo sapiens
cccagctctgaggga

SEQ ID NO: 1666134 - DNA, 15 bp, Homo sapiens
gcccagctctgaggg

SEQ ID NO: 1666135 - DNA, 15 bp, Homo sapiens
agcccagctctgagg

SEQ ID NO: 1666136 - DNA, 15 bp, Homo sapiens
gagcccagctctgag

SEQ ID NO: 1666137 - DNA, 15 bp, Homo sapiens
ggagcccagctctga

SEQ ID NO: 1666138 - DNA, 15 bp, Homo sapiens
tggagcccagctctg

SEQ ID NO: 1666139 - DNA, 15 bp, Homo sapiens
ctggagcccagctct

SEQ ID NO: 1666140 - DNA, 15 bp, Homo sapiens
actggagcccagctc

SEQ ID NO: 1666141 - DNA, 15 bp, Homo sapiens
cactggagcccagct

SEQ ID NO: 1666142 - DNA, 15 bp, Homo sapiens
tcactggagcccagc

SEQ ID NO: 1666143 - DNA, 15 bp, Homo sapiens
ctcactggagcccag

SEQ ID NO: 1666144 - DNA, 15 bp, Homo sapiens
cctcactggagccca

SEQ ID NO: 1666145 - DNA, 15 bp, Homo sapiens
acctcactggagccc

SEQ ID NO: 1666146 - DNA, 15 bp, Homo sapiens
gacctcactggagcc

SEQ ID NO: 1666147 - DNA, 15 bp, Homo sapiens
agacctcactggagc

SEQ ID NO: 1666148 - DNA, 15 bp, Homo sapiens
cagacctcactggag

SEQ ID NO: 1666149 - DNA, 15 bp, Homo sapiens
acagacctcactgga

SEQ ID NO: 1666150 - DNA, 15 bp, Homo sapiens
tacagacctcactgg

SEQ ID NO: 1666151 - DNA, 15 bp, Homo sapiens
ttacagacctcactg

SEQ ID NO: 1666152 - DNA, 15 bp, Homo sapiens
cttacagacctcact

SEQ ID NO: 1666153 - DNA, 15 bp, Homo sapiens
ccttacagacctcac

SEQ ID NO: 1666154 - DNA, 15 bp, Homo sapiens
cccttacagacctca

SEQ ID NO: 1666155 - DNA, 15 bp, Homo sapiens
gcccttacagacctc

SEQ ID NO: 1666156 - DNA, 15 bp, Homo sapiens
tgcccttacagacct

SEQ ID NO: 1666157 - DNA, 15 bp, Homo sapiens
ttgcccttacagacc

SEQ ID NO: 1666158 - DNA, 15 bp, Homo sapiens
cttgcccttacagac

SEQ ID NO: 1666159 - DNA, 15 bp, Homo sapiens
gcttgcccttacaga

SEQ ID NO: 1666160 - DNA, 15 bp, Homo sapiens
tgcttgcccttacag

SEQ ID NO: 1666161 - DNA, 15 bp, Homo sapiens
atgcttgcccttaca

SEQ ID NO: 1666162 - DNA, 15 bp, Homo sapiens
tatgcttgcccttac

SEQ ID NO: 1666163 - DNA, 15 bp, Homo sapiens
gtatgcttgccctta

SEQ ID NO: 1666164 - DNA, 15 bp, Homo sapiens
agtatgcttgccctt

SEQ ID NO: 1666165 - DNA, 15 bp, Homo sapiens
aagtatgcttgccct

SEQ ID NO: 1666166 - DNA, 15 bp, Homo sapiens
caagtatgcttgccc

SEQ ID NO: 1666167 - DNA, 15 bp, Homo sapiens
tcaagtatgcttgcc

SEQ ID NO: 1666168 - DNA, 15 bp, Homo sapiens
atcaagtatgcttgc

SEQ ID NO: 1666169 - DNA, 15 bp, Homo sapiens
gatcaagtatgcttg

SEQ ID NO: 1666170 - DNA, 15 bp, Homo sapiens
ggatcaagtatgctt

SEQ ID NO: 1666171 - DNA, 15 bp, Homo sapiens
gggatcaagtatgct

SEQ ID NO: 1666172 - DNA, 15 bp, Homo sapiens
ggggatcaagtatgc

SEQ ID NO: 1666173 - DNA, 15 bp, Homo sapiens
tggggatcaagtatg

SEQ ID NO: 1666174 - DNA, 15 bp, Homo sapiens
ttggggatcaagtat

SEQ ID NO: 1666175 - DNA, 15 bp, Homo sapiens
attggggatcaagta

SEQ ID NO: 1666176 - DNA, 15 bp, Homo sapiens
cattggggatcaagt

SEQ ID NO: 1666177 - DNA, 15 bp, Homo sapiens
tcattggggatcaag

SEQ ID NO: 1666178 - DNA, 15 bp, Homo sapiens
ttcattggggatcaa

SEQ ID NO: 1666179 - DNA, 15 bp, Homo sapiens
cttcattggggatca

SEQ ID NO: 1666180 - DNA, 15 bp, Homo sapiens
tcttcattggggatc

SEQ ID NO: 1666181 - DNA, 15 bp, Homo sapiens
ttcttcattggggat

SEQ ID NO: 1666182 - DNA, 15 bp, Homo sapiens
attcttcattgggga

SEQ ID NO: 1666183 - DNA, 15 bp, Homo sapiens
cattcttcattgggg

SEQ ID NO: 1666184 - DNA, 15 bp, Homo sapiens
tcattcttcattggg

SEQ ID NO: 1666185 - DNA, 15 bp, Homo sapiens
ctcattcttcattgg

SEQ ID NO: 1666186 - DNA, 15 bp, Homo sapiens
tctcattcttcattg

SEQ ID NO: 1666187 - DNA, 15 bp, Homo sapiens
ctctcattcttcatt

SEQ ID NO: 1666188 - DNA, 15 bp, Homo sapiens
tctctcattcttcat

SEQ ID NO: 1666189 - DNA, 15 bp, Homo sapiens
atctctcattcttca

SEQ ID NO: 1666190 - DNA, 15 bp, Homo sapiens
catctctcattcttc

SEQ ID NO: 1666191 - DNA, 15 bp, Homo sapiens
gcatctctcattctt

SEQ ID NO: 1666192 - DNA, 15 bp, Homo sapiens
tgcatctctcattct

SEQ ID NO: 1666193 - DNA, 15 bp, Homo sapiens
ttgcatctctcattc

SEQ ID NO: 1666194 - DNA, 15 bp, Homo sapiens
tttgcatctctcatt

SEQ ID NO: 1666195 - DNA, 15 bp, Homo sapiens
ctttgcatctctcat

SEQ ID NO: 1666196 - DNA, 15 bp, Homo sapiens
gctttgcatctctca

SEQ ID NO: 1666197 - DNA, 15 bp, Homo sapiens
tgctttgcatctctc

SEQ ID NO: 1666198 - DNA, 15 bp, Homo sapiens
gtgctttgcatctct

SEQ ID NO: 1666199 - DNA, 15 bp, Homo sapiens
agtgctttgcatctc

SEQ ID NO: 1666200 - DNA, 15 bp, Homo sapiens
tagtgctttgcatct

SEQ ID NO: 1666201 - DNA, 15 bp, Homo sapiens
ttagtgctttgcatc

SEQ ID NO: 1666202 - DNA, 15 bp, Homo sapiens
tttagtgctttgcat

SEQ ID NO: 1666203 - DNA, 15 bp, Homo sapiens
atttagtgctttgca

SEQ ID NO: 1666204 - DNA, 15 bp, Homo sapiens
aatttagtgctttgc

SEQ ID NO: 1666205 - DNA, 15 bp, Homo sapiens
taatttagtgctttg

SEQ ID NO: 1666206 - DNA, 15 bp, Homo sapiens
ataatttagtgcttt

SEQ ID NO: 1666207 - DNA, 15 bp, Homo sapiens
aataatttagtgctt

SEQ ID NO: 1666208 - DNA, 15 bp, Homo sapiens
aaataatttagtgct

SEQ ID NO: 1666209 - DNA, 15 bp, Homo sapiens
gaaataatttagtgc

SEQ ID NO: 1666210 - DNA, 15 bp, Homo sapiens
agaaataatttagtg

SEQ ID NO: 1666211 - DNA, 15 bp, Homo sapiens
aagaaataatttagt

SEQ ID NO: 1666212 - DNA, 15 bp, Homo sapiens
aaagaaataatttag

SEQ ID NO: 1666213 - DNA, 15 bp, Homo sapiens
aaaagaaataattta

SEQ ID NO: 1666214 - DNA, 15 bp, Homo sapiens
gaaaagaaataattt

SEQ ID NO: 1666215 - DNA, 15 bp, Homo sapiens
agaaaagaaataatt

SEQ ID NO: 1666216 - DNA, 15 bp, Homo sapiens
gagaaaagaaataat

SEQ ID NO: 1666217 - DNA, 15 bp, Homo sapiens
tgagaaaagaaataa

SEQ ID NO: 1666218 - DNA, 15 bp, Homo sapiens
gtgagaaaagaaata

SEQ ID NO: 1666219 - DNA, 15 bp, Homo sapiens
ggtgagaaaagaaat

SEQ ID NO: 1666220 - DNA, 15 bp, Homo sapiens
tggtgagaaaagaaa

SEQ ID NO: 1666221 - DNA, 15 bp, Homo sapiens
gtggtgagaaaagaa

SEQ ID NO: 1666222 - DNA, 15 bp, Homo sapiens
tgtggtgagaaaaga

SEQ ID NO: 1666223 - DNA, 15 bp, Homo sapiens
gtgtggtgagaaaag

SEQ ID NO: 1666224 - DNA, 15 bp, Homo sapiens
tgtgtggtgagaaaa

SEQ ID NO: 1666225 - DNA, 15 bp, Homo sapiens
ctgtgtggtgagaaa

SEQ ID NO: 1666226 - DNA, 15 bp, Homo sapiens
gctgtgtggtgagaa

SEQ ID NO: 1666227 - DNA, 15 bp, Homo sapiens
tgctgtgtggtgaga

SEQ ID NO: 1666228 - DNA, 15 bp, Homo sapiens
ttgctgtgtggtgag

SEQ ID NO: 1666229 - DNA, 15 bp, Homo sapiens
cttgctgtgtggtga

SEQ ID NO: 1666230 - DNA, 15 bp, Homo sapiens
tcttgctgtgtggtg

SEQ ID NO: 1666231 - DNA, 15 bp, Homo sapiens
atcttgctgtgtggt

SEQ ID NO: 1666232 - DNA, 15 bp, Homo sapiens
tatcttgctgtgtgg

SEQ ID NO: 1666233 - DNA, 15 bp, Homo sapiens
ctatcttgctgtgtg

SEQ ID NO: 1666234 - DNA, 15 bp, Homo sapiens
tctatcttgctgtgt

SEQ ID NO: 1666235 - DNA, 15 bp, Homo sapiens
atctatcttgctgtg

SEQ ID NO: 1666236 - DNA, 15 bp, Homo sapiens
aatctatcttgctgt

SEQ ID NO: 1666237 - DNA, 15 bp, Homo sapiens
aaatctatcttgctg

SEQ ID NO: 1666238 - DNA, 15 bp, Homo sapiens
taaatctatcttgct

SEQ ID NO: 1666239 - DNA, 15 bp, Homo sapiens
ttaaatctatcttgc

SEQ ID NO: 1666240 - DNA, 15 bp, Homo sapiens
attaaatctatcttg

SEQ ID NO: 1666241 - DNA, 15 bp, Homo sapiens
cattaaatctatctt

SEQ ID NO: 1666242 - DNA, 15 bp, Homo sapiens
tcattaaatctatct

SEQ ID NO: 1666243 - DNA, 15 bp, Homo sapiens
ttcattaaatctatc

SEQ ID NO: 1666244 - DNA, 15 bp, Homo sapiens
gttcattaaatctat

SEQ ID NO: 1666245 - DNA, 15 bp, Homo sapiens
agttcattaaatcta

SEQ ID NO: 1666246 - DNA, 15 bp, Homo sapiens
aagttcattaaatct

SEQ ID NO: 1666247 - DNA, 15 bp, Homo sapiens
taagttcattaaatc

SEQ ID NO: 1666248 - DNA, 15 bp, Homo sapiens
ttaagttcattaaat

SEQ ID NO: 1666249 - DNA, 15 bp, Homo sapiens
gttaagttcattaaa

SEQ ID NO: 1666250 - DNA, 15 bp, Homo sapiens
tgttaagttcattaa

SEQ ID NO: 1666251 - DNA, 15 bp, Homo sapiens
gtgttaagttcatta

SEQ ID NO: 1666252 - DNA, 15 bp, Homo sapiens
ggtgttaagttcatt

SEQ ID NO: 1666253 - DNA, 15 bp, Homo sapiens
aggtgttaagttcat

SEQ ID NO: 1666254 - DNA, 15 bp, Homo sapiens
aaggtgttaagttca

SEQ ID NO: 1666255 - DNA, 15 bp, Homo sapiens
aaaggtgttaagttc

SEQ ID NO: 1666256 - DNA, 15 bp, Homo sapiens
aaaaggtgttaagtt

SEQ ID NO: 1666257 - DNA, 15 bp, Homo sapiens
caaaaggtgttaagt

SEQ ID NO: 1666258 - DNA, 15 bp, Homo sapiens
tcaaaaggtgttaag

SEQ ID NO: 1666259 - DNA, 15 bp, Homo sapiens
atcaaaaggtgttaa

SEQ ID NO: 1666260 - DNA, 15 bp, Homo sapiens
aatcaaaaggtgtta

SEQ ID NO: 1666261 - DNA, 15 bp, Homo sapiens
taatcaaaaggtgtt

SEQ ID NO: 1666262 - DNA, 15 bp, Homo sapiens
ctaatcaaaaggtgt

SEQ ID NO: 1666263 - DNA, 15 bp, Homo sapiens
actaatcaaaaggtg

SEQ ID NO: 1666264 - DNA, 15 bp, Homo sapiens
cactaatcaaaaggt

SEQ ID NO: 1666265 - DNA, 15 bp, Homo sapiens
ccactaatcaaaagg

SEQ ID NO: 1666266 - DNA, 15 bp, Homo sapiens
gccactaatcaaaag

SEQ ID NO: 1666267 - DNA, 15 bp, Homo sapiens
ggccactaatcaaaa

SEQ ID NO: 1666268 - DNA, 15 bp, Homo sapiens
aggccactaatcaaa

SEQ ID NO: 1666269 - DNA, 15 bp, Homo sapiens
aaggccactaatcaa

SEQ ID NO: 1666270 - DNA, 15 bp, Homo sapiens
aaaggccactaatca

SEQ ID NO: 1666271 - DNA, 15 bp, Homo sapiens
aaaaggccactaatc

SEQ ID NO: 1666272 - DNA, 15 bp, Homo sapiens
taaaaggccactaat

SEQ ID NO: 1666273 - DNA, 15 bp, Homo sapiens
ttaaaaggccactaa

SEQ ID NO: 1666274 - DNA, 15 bp, Homo sapiens
tttaaaaggccacta

SEQ ID NO: 1666275 - DNA, 15 bp, Homo sapiens
atttaaaaggccact

SEQ ID NO: 1666276 - DNA, 15 bp, Homo sapiens
aatttaaaaggccac

SEQ ID NO: 1666277 - DNA, 15 bp, Homo sapiens
taatttaaaaggcca

SEQ ID NO: 1666278 - DNA, 15 bp, Homo sapiens
ataatttaaaaggcc

SEQ ID NO: 1666279 - DNA, 15 bp, Homo sapiens
aataatttaaaaggc

SEQ ID NO: 1666280 - DNA, 15 bp, Homo sapiens
gaataatttaaaagg

SEQ ID NO: 1666281 - DNA, 15 bp, Homo sapiens
ggaataatttaaaag

SEQ ID NO: 1666282 - DNA, 15 bp, Homo sapiens
gggaataatttaaaa

SEQ ID NO: 1666283 - DNA, 15 bp, Homo sapiens
tgggaataatttaaa

SEQ ID NO: 1666284 - DNA, 15 bp, Homo sapiens
gtgggaataatttaa

SEQ ID NO: 1666285 - DNA, 15 bp, Homo sapiens
agtgggaataattta

SEQ ID NO: 1666286 - DNA, 15 bp, Homo sapiens
aagtgggaataattt

SEQ ID NO: 1666287 - DNA, 15 bp, Homo sapiens
aaagtgggaataatt

SEQ ID NO: 1666288 - DNA, 15 bp, Homo sapiens
gaaagtgggaataat

SEQ ID NO: 1666289 - DNA, 15 bp, Homo sapiens
ggaaagtgggaataa

SEQ ID NO: 1666290 - DNA, 15 bp, Homo sapiens
aggaaagtgggaata

SEQ ID NO: 1666291 - DNA, 15 bp, Homo sapiens
aaggaaagtgggaat

SEQ ID NO: 1666292 - DNA, 15 bp, Homo sapiens
aaaggaaagtgggaa

SEQ ID NO: 1666293 - DNA, 15 bp, Homo sapiens
caaaggaaagtggga

SEQ ID NO: 1666294 - DNA, 15 bp, Homo sapiens
ccaaaggaaagtggg

SEQ ID NO: 1666295 - DNA, 15 bp, Homo sapiens
gccaaaggaaagtgg

SEQ ID NO: 1666296 - DNA, 15 bp, Homo sapiens
tgccaaaggaaagtg

SEQ ID NO: 1666297 - DNA, 15 bp, Homo sapiens
ctgccaaaggaaagt

SEQ ID NO: 1666298 - DNA, 15 bp, Homo sapiens
tctgccaaaggaaag

SEQ ID NO: 1666299 - DNA, 15 bp, Homo sapiens
atctgccaaaggaaa

SEQ ID NO: 1666300 - DNA, 15 bp, Homo sapiens
catctgccaaaggaa

SEQ ID NO: 1666301 - DNA, 15 bp, Homo sapiens
ccatctgccaaagga

SEQ ID NO: 1666302 - DNA, 15 bp, Homo sapiens
cccatctgccaaagg

SEQ ID NO: 1666303 - DNA, 15 bp, Homo sapiens
acccatctgccaaag

SEQ ID NO: 1666304 - DNA, 15 bp, Homo sapiens
tacccatctgccaaa

SEQ ID NO: 1666305 - DNA, 15 bp, Homo sapiens
atacccatctgccaa

SEQ ID NO: 1666306 - DNA, 15 bp, Homo sapiens
aatacccatctgcca

SEQ ID NO: 1666307 - DNA, 15 bp, Homo sapiens
taatacccatctgcc

SEQ ID NO: 1666308 - DNA, 15 bp, Homo sapiens
ttaatacccatctgc

SEQ ID NO: 1666309 - DNA, 15 bp, Homo sapiens
cttaatacccatctg

SEQ ID NO: 1666310 - DNA, 15 bp, Homo sapiens
acttaatacccatct

SEQ ID NO: 1666311 - DNA, 15 bp, Homo sapiens
aacttaatacccatc

SEQ ID NO: 1666312 - DNA, 15 bp, Homo sapiens
gaacttaatacccat

SEQ ID NO: 1666313 - DNA, 15 bp, Homo sapiens
agaacttaataccca

SEQ ID NO: 1666314 - DNA, 15 bp, Homo sapiens
gagaacttaataccc

SEQ ID NO: 1666315 - DNA, 15 bp, Homo sapiens
tgagaacttaatacc

SEQ ID NO: 1666316 - DNA, 15 bp, Homo sapiens
ctgagaacttaatac

SEQ ID NO: 1666317 - DNA, 15 bp, Homo sapiens
cctgagaacttaata

SEQ ID NO: 1666318 - DNA, 15 bp, Homo sapiens
tcctgagaacttaat

SEQ ID NO: 1666319 - DNA, 15 bp, Homo sapiens
atcctgagaacttaa

SEQ ID NO: 1666320 - DNA, 15 bp, Homo sapiens
aatcctgagaactta

SEQ ID NO: 1666321 - DNA, 15 bp, Homo sapiens
aaatcctgagaactt

SEQ ID NO: 1666322 - DNA, 15 bp, Homo sapiens
caaatcctgagaact

SEQ ID NO: 1666323 - DNA, 15 bp, Homo sapiens
acaaatcctgagaac

SEQ ID NO: 1666324 - DNA, 15 bp, Homo sapiens
aacaaatcctgagaa

SEQ ID NO: 1666325 - DNA, 15 bp, Homo sapiens
aaacaaatcctgaga

SEQ ID NO: 1666326 - DNA, 15 bp, Homo sapiens
taaacaaatcctgag

SEQ ID NO: 1666327 - DNA, 15 bp, Homo sapiens
gtaaacaaatcctga

SEQ ID NO: 1666328 - DNA, 15 bp, Homo sapiens
tgtaaacaaatcctg

SEQ ID NO: 1666329 - DNA, 15 bp, Homo sapiens
ttgtaaacaaatcct

SEQ ID NO: 1666330 - DNA, 15 bp, Homo sapiens
tttgtaaacaaatcc

SEQ ID NO: 1666331 - DNA, 15 bp, Homo sapiens
atttgtaaacaaatc

SEQ ID NO: 1666332 - DNA, 15 bp, Homo sapiens
tatttgtaaacaaat

SEQ ID NO: 1666333 - DNA, 15 bp, Homo sapiens
ttatttgtaaacaaa

SEQ ID NO: 1666334 - DNA, 15 bp, Homo sapiens
cttatttgtaaacaa

SEQ ID NO: 1666335 - DNA, 15 bp, Homo sapiens
tcttatttgtaaaca

SEQ ID NO: 1666336 - DNA, 15 bp, Homo sapiens
gtcttatttgtaaac

SEQ ID NO: 1666337 - DNA, 15 bp, Homo sapiens
agtcttatttgtaaa

SEQ ID NO: 1666338 - DNA, 15 bp, Homo sapiens
tagtcttatttgtaa

SEQ ID NO: 1666339 - DNA, 15 bp, Homo sapiens
ttagtcttatttgta

SEQ ID NO: 1666340 - DNA, 15 bp, Homo sapiens
gttagtcttatttgt

SEQ ID NO: 1666341 - DNA, 15 bp, Homo sapiens
agttagtcttatttg

SEQ ID NO: 1666342 - DNA, 15 bp, Homo sapiens
gaagttagtcttatt

SEQ ID NO: 1666343 - DNA, 15 bp, Homo sapiens
tgaagttagtcttat

SEQ ID NO: 1666344 - DNA, 15 bp, Homo sapiens
atgaagttagtctta

SEQ ID NO: 1666345 - DNA, 15 bp, Homo sapiens
gatgaagttagtctt

SEQ ID NO: 1666346 - DNA, 15 bp, Homo sapiens
agatgaagttagtct

SEQ ID NO: 1666347 - DNA, 15 bp, Homo sapiens
cagatgaagttagtc

SEQ ID NO: 1666348 - DNA, 15 bp, Homo sapiens
acagatgaagttagt

SEQ ID NO: 1666349 - DNA, 15 bp, Homo sapiens
tacagatgaagttag

SEQ ID NO: 1666350 - DNA, 15 bp, Homo sapiens
atacagatgaagtta

SEQ ID NO: 1666351 - DNA, 15 bp, Homo sapiens
aatacagatgaagtt

SEQ ID NO: 1666352 - DNA, 15 bp, Homo sapiens
taatacagatgaagt

SEQ ID NO: 1666353 - DNA, 15 bp, Homo sapiens
ctaatacagatgaag

SEQ ID NO: 1666354 - DNA, 15 bp, Homo sapiens
gctaatacagatgaa

SEQ ID NO: 1666355 - DNA, 15 bp, Homo sapiens
agctaatacagatga

SEQ ID NO: 1666356 - DNA, 15 bp, Homo sapiens
gagctaatacagatg

SEQ ID NO: 1666357 - DNA, 15 bp, Homo sapiens
tgagctaatacagat

SEQ ID NO: 1666358 - DNA, 15 bp, Homo sapiens
ctgagctaatacaga

SEQ ID NO: 1666359 - DNA, 15 bp, Homo sapiens
actgagctaatacag

SEQ ID NO: 1666360 - DNA, 15 bp, Homo sapiens
aactgagctaataca

SEQ ID NO: 1666361 - DNA, 15 bp, Homo sapiens
aaactgagctaatac

SEQ ID NO: 1666362 - DNA, 15 bp, Homo sapiens
aaaactgagctaata

SEQ ID NO: 1666363 - DNA, 15 bp, Homo sapiens
caaaactgagctaat

SEQ ID NO: 1666364 - DNA, 15 bp, Homo sapiens
ccaaaactgagctaa

SEQ ID NO: 1666365 - DNA, 15 bp, Homo sapiens
accaaaactgagcta

SEQ ID NO: 1666366 - DNA, 15 bp, Homo sapiens
taccaaaactgagct

SEQ ID NO: 1666367 - DNA, 15 bp, Homo sapiens
ctaccaaaactgagc

SEQ ID NO: 1666368 - DNA, 15 bp, Homo sapiens
cctaccaaaactgag

SEQ ID NO: 1666369 - DNA, 15 bp, Homo sapiens
gcctaccaaaactga

SEQ ID NO: 1666370 - DNA, 15 bp, Homo sapiens
ggcctaccaaaactg

SEQ ID NO: 1666371 - DNA, 15 bp, Homo sapiens
aggcctaccaaaact

SEQ ID NO: 1666372 - DNA, 15 bp, Homo sapiens
taggcctaccaaaac

SEQ ID NO: 1666373 - DNA, 15 bp, Homo sapiens
ttaggcctaccaaaa

SEQ ID NO: 1666374 - DNA, 15 bp, Homo sapiens
attaggcctaccaaa

SEQ ID NO: 1666375 - DNA, 15 bp, Homo sapiens
aattaggcctaccaa

SEQ ID NO: 1666376 - DNA, 15 bp, Homo sapiens
gaattaggcctacca

SEQ ID NO: 1666377 - DNA, 15 bp, Homo sapiens
ggaattaggcctacc

SEQ ID NO: 1666378 - DNA, 15 bp, Homo sapiens
tggaattaggcctac

SEQ ID NO: 1666379 - DNA, 15 bp, Homo sapiens
atggaattaggccta

SEQ ID NO: 1666380 - DNA, 15 bp, Homo sapiens
aatggaattaggcct

SEQ ID NO: 1666381 - DNA, 15 bp, Homo sapiens
taatggaattaggcc

SEQ ID NO: 1666382 - DNA, 15 bp, Homo sapiens
ataatggaattaggc

SEQ ID NO: 1666383 - DNA, 15 bp, Homo sapiens
gataatggaattagg

SEQ ID NO: 1666384 - DNA, 15 bp, Homo sapiens
tgataatggaattag

SEQ ID NO: 1666385 - DNA, 15 bp, Homo sapiens
gtgataatggaatta

SEQ ID NO: 1666386 - DNA, 15 bp, Homo sapiens
agtgataatggaatt

SEQ ID NO: 1666387 - DNA, 15 bp, Homo sapiens
cagtgataatggaat

SEQ ID NO: 1666388 - DNA, 15 bp, Homo sapiens
gcagtgataatggaa

SEQ ID NO: 1666389 - DNA, 15 bp, Homo sapiens
ggcagtgataatgga

SEQ ID NO: 1666390 - DNA, 15 bp, Homo sapiens
tggcagtgataatgg

SEQ ID NO: 1666391 - DNA, 15 bp, Homo sapiens
atggcagtgataatg

SEQ ID NO: 1666392 - DNA, 15 bp, Homo sapiens
aatggcagtgataat

SEQ ID NO: 1666393 - DNA, 15 bp, Homo sapiens
aaatggcagtgataa

SEQ ID NO: 1666394 - DNA, 15 bp, Homo sapiens
gaaatggcagtgata

SEQ ID NO: 1666395 - DNA, 15 bp, Homo sapiens
ggaaatggcagtgat

SEQ ID NO: 1666396 - DNA, 15 bp, Homo sapiens
aggaaatggcagtga

SEQ ID NO: 1666397 - DNA, 15 bp, Homo sapiens
aaggaaatggcagtg

SEQ ID NO: 1666398 - DNA, 15 bp, Homo sapiens
caaggaaatggcagt

SEQ ID NO: 1666399 - DNA, 15 bp, Homo sapiens
acaaggaaatggcag

SEQ ID NO: 1666400 - DNA, 15 bp, Homo sapiens
aacaaggaaatggca

SEQ ID NO: 1666401 - DNA, 15 bp, Homo sapiens
aaacaaggaaatggc

SEQ ID NO: 1666402 - DNA, 15 bp, Homo sapiens
aaaacaaggaaatgg

SEQ ID NO: 1666403 - DNA, 15 bp, Homo sapiens
taaaacaaggaaatg

SEQ ID NO: 1666404 - DNA, 15 bp, Homo sapiens
ttaaaacaaggaaat

SEQ ID NO: 1666405 - DNA, 15 bp, Homo sapiens
cttaaaacaaggaaa

SEQ ID NO: 1666406 - DNA, 15 bp, Homo sapiens
tcttaaaacaaggaa

SEQ ID NO: 1666407 - DNA, 15 bp, Homo sapiens
ttcttaaaacaagga

SEQ ID NO: 1666408 - DNA, 15 bp, Homo sapiens
tttcttaaaacaagg

SEQ ID NO: 1666409 - DNA, 15 bp, Homo sapiens
atttcttaaaacaag

SEQ ID NO: 1666410 - DNA, 15 bp, Homo sapiens
gatttcttaaaacaa

SEQ ID NO: 1666411 - DNA, 15 bp, Homo sapiens
tgatttcttaaaaca

SEQ ID NO: 1666412 - DNA, 15 bp, Homo sapiens
ttgatttcttaaaac

SEQ ID NO: 1666413 - DNA, 15 bp, Homo sapiens
tttgatttcttaaaa

SEQ ID NO: 1666414 - DNA, 15 bp, Homo sapiens
ttttgatttcttaaa

SEQ ID NO: 1666415 - DNA, 15 bp, Homo sapiens
attttgatttcttaa

SEQ ID NO: 1666416 - DNA, 15 bp, Homo sapiens
aattttgatttctta

SEQ ID NO: 1666417 - DNA, 15 bp, Homo sapiens
aaattttgatttctt

SEQ ID NO: 1666418 - DNA, 15 bp, Homo sapiens
gaaattttgatttct

SEQ ID NO: 1666419 - DNA, 15 bp, Homo sapiens
agaaattttgatttc

SEQ ID NO: 1666420 - DNA, 15 bp, Homo sapiens
aagaaattttgattt

SEQ ID NO: 1666421 - DNA, 15 bp, Homo sapiens
taagaaattttgatt

SEQ ID NO: 1666422 - DNA, 15 bp, Homo sapiens
ctaagaaattttgat

SEQ ID NO: 1666423 - DNA, 15 bp, Homo sapiens
gctaagaaattttga

SEQ ID NO: 1666424 - DNA, 15 bp, Homo sapiens
agctaagaaattttg

SEQ ID NO: 1666425 - DNA, 15 bp, Homo sapiens
aagctaagaaatttt

SEQ ID NO: 1666426 - DNA, 15 bp, Homo sapiens
caagctaagaaattt

SEQ ID NO: 1666427 - DNA, 15 bp, Homo sapiens
tcaagctaagaaatt

SEQ ID NO: 1666428 - DNA, 15 bp, Homo sapiens
ttcaagctaagaaat

SEQ ID NO: 1666429 - DNA, 15 bp, Homo sapiens
tttcaagctaagaaa

SEQ ID NO: 1666430 - DNA, 15 bp, Homo sapiens
ttttcaagctaagaa

SEQ ID NO: 1666431 - DNA, 15 bp, Homo sapiens
tttttcaagctaaga

SEQ ID NO: 1666432 - DNA, 15 bp, Homo sapiens
gtttttcaagctaag

SEQ ID NO: 1666433 - DNA, 15 bp, Homo sapiens
tgtttttcaagctaa

SEQ ID NO: 1666434 - DNA, 15 bp, Homo sapiens
ttgtttttcaagcta

SEQ ID NO: 1666435 - DNA, 15 bp, Homo sapiens
attgtttttcaagct

SEQ ID NO: 1666436 - DNA, 15 bp, Homo sapiens
aattgtttttcaagc

SEQ ID NO: 1666437 - DNA, 15 bp, Homo sapiens
caattgtttttcaag

SEQ ID NO: 1666438 - DNA, 15 bp, Homo sapiens
tcaattgtttttcaa

SEQ ID NO: 1666439 - DNA, 15 bp, Homo sapiens
ttcaattgtttttca

SEQ ID NO: 1666440 - DNA, 15 bp, Homo sapiens
tttcaattgtttttc

SEQ ID NO: 1666441 - DNA, 15 bp, Homo sapiens
atttcaattgttttt

SEQ ID NO: 1666442 - DNA, 15 bp, Homo sapiens
aatttcaattgtttt

SEQ ID NO: 1666443 - DNA, 15 bp, Homo sapiens
caatttcaattgttt

SEQ ID NO: 1666444 - DNA, 15 bp, Homo sapiens
acaatttcaattgtt

SEQ ID NO: 1666445 - DNA, 15 bp, Homo sapiens
aacaatttcaattgt

SEQ ID NO: 1666446 - DNA, 15 bp, Homo sapiens
taacaatttcaattg

SEQ ID NO: 1666447 - DNA, 15 bp, Homo sapiens
ttaacaatttcaatt

SEQ ID NO: 1666448 - DNA, 15 bp, Homo sapiens
tttaacaatttcaat

SEQ ID NO: 1666449 - DNA, 15 bp, Homo sapiens
ttttaacaatttcaa

SEQ ID NO: 1666450 - DNA, 15 bp, Homo sapiens
tttttaacaatttca

SEQ ID NO: 1666451 - DNA, 15 bp, Homo sapiens
ctttttaacaatttc

SEQ ID NO: 1666452 - DNA, 15 bp, Homo sapiens
actttttaacaattt

SEQ ID NO: 1666453 - DNA, 15 bp, Homo sapiens
cactttttaacaatt

SEQ ID NO: 1666454 - DNA, 15 bp, Homo sapiens
ccactttttaacaat

SEQ ID NO: 1666455 - DNA, 15 bp, Homo sapiens
tccactttttaacaa

SEQ ID NO: 1666456 - DNA, 15 bp, Homo sapiens
ttccactttttaaca

SEQ ID NO: 1666457 - DNA, 15 bp, Homo sapiens
attccactttttaac

SEQ ID NO: 1666458 - DNA, 15 bp, Homo sapiens
tattccactttttaa

SEQ ID NO: 1666459 - DNA, 15 bp, Homo sapiens
ctattccacttttta

SEQ ID NO: 1666460 - DNA, 15 bp, Homo sapiens
cctattccacttttt

SEQ ID NO: 1666461 - DNA, 15 bp, Homo sapiens
tcctattccactttt

SEQ ID NO: 1666462 - DNA, 15 bp, Homo sapiens
ctcctattccacttt

SEQ ID NO: 1666463 - DNA, 15 bp, Homo sapiens
tctcctattccactt

SEQ ID NO: 1666464 - DNA, 15 bp, Homo sapiens
ctctcctattccact

SEQ ID NO: 1666465 - DNA, 15 bp, Homo sapiens
gctctcctattccac

SEQ ID NO: 1666466 - DNA, 15 bp, Homo sapiens
ggctctcctattcca

SEQ ID NO: 1666467 - DNA, 15 bp, Homo sapiens
gggctctcctattcc

SEQ ID NO: 1666468 - DNA, 15 bp, Homo sapiens
ggggctctcctattc

SEQ ID NO: 1666469 - DNA, 15 bp, Homo sapiens
cggggctctcctatt

SEQ ID NO: 1666470 - DNA, 15 bp, Homo sapiens
ccggggctctcctat

SEQ ID NO: 1666471 - DNA, 15 bp, Homo sapiens
cccggggctctccta

SEQ ID NO: 1666472 - DNA, 15 bp, Homo sapiens
ccccggggctctcct

SEQ ID NO: 1666473 - DNA, 15 bp, Homo sapiens
cccccggggctctcc

SEQ ID NO: 1666474 - DNA, 15 bp, Homo sapiens
gcccccggggctctc

SEQ ID NO: 1666475 - DNA, 15 bp, Homo sapiens
ggcccccggggctct

SEQ ID NO: 1666476 - DNA, 15 bp, Homo sapiens
aggcccccggggctc

SEQ ID NO: 1666477 - DNA, 15 bp, Homo sapiens
caggcccccggggct

SEQ ID NO: 1666478 - DNA, 15 bp, Homo sapiens
acaggcccccggggc

SEQ ID NO: 1666479 - DNA, 15 bp, Homo sapiens
tacaggcccccgggg

SEQ ID NO: 1666480 - DNA, 15 bp, Homo sapiens
atacaggcccccggg

SEQ ID NO: 1666481 - DNA, 15 bp, Homo sapiens
tatacaggcccccgg

SEQ ID NO: 1666482 - DNA, 15 bp, Homo sapiens
ttatacaggcccccg

SEQ ID NO: 1666483 - DNA, 15 bp, Homo sapiens
cttatacaggccccc

SEQ ID NO: 1666484 - DNA, 15 bp, Homo sapiens
ccttatacaggcccc

SEQ ID NO: 1666485 - DNA, 15 bp, Homo sapiens
tccttatacaggccc

SEQ ID NO: 1666486 - DNA, 15 bp, Homo sapiens
ttccttatacaggcc

SEQ ID NO: 1666487 - DNA, 15 bp, Homo sapiens
attccttatacaggc

SEQ ID NO: 1666488 - DNA, 15 bp, Homo sapiens
aattccttatacagg

SEQ ID NO: 1666489 - DNA, 15 bp, Homo sapiens
aaattccttatacag

SEQ ID NO: 1666490 - DNA, 15 bp, Homo sapiens
taaattccttataca

SEQ ID NO: 1666491 - DNA, 15 bp, Homo sapiens
gtaaattccttatac

SEQ ID NO: 1666492 - DNA, 15 bp, Homo sapiens
agtaaattccttata

SEQ ID NO: 1666493 - DNA, 15 bp, Homo sapiens
cagtaaattccttat

SEQ ID NO: 1666494 - DNA, 15 bp, Homo sapiens
tcagtaaattcctta

SEQ ID NO: 1666495 - DNA, 15 bp, Homo sapiens
ttcagtaaattcctt

SEQ ID NO: 1666496 - DNA, 15 bp, Homo sapiens
attcagtaaattcct

SEQ ID NO: 1666497 - DNA, 15 bp, Homo sapiens
gattcagtaaattcc

SEQ ID NO: 1666498 - DNA, 15 bp, Homo sapiens
ggattcagtaaattc

SEQ ID NO: 1666499 - DNA, 15 bp, Homo sapiens
gggattcagtaaatt

SEQ ID NO: 1666500 - DNA, 15 bp, Homo sapiens
agggattcagtaaat

SEQ ID NO: 1666501 - DNA, 15 bp, Homo sapiens
cagggattcagtaaa

SEQ ID NO: 1666502 - DNA, 15 bp, Homo sapiens
ccagggattcagtaa

SEQ ID NO: 1666503 - DNA, 15 bp, Homo sapiens
accagggattcagta

SEQ ID NO: 1666504 - DNA, 15 bp, Homo sapiens
aaccagggattcagt

SEQ ID NO: 1666505 - DNA, 15 bp, Homo sapiens
aaaccagggattcag

SEQ ID NO: 1666506 - DNA, 15 bp, Homo sapiens
aaaaccagggattca

SEQ ID NO: 1666507 - DNA, 15 bp, Homo sapiens
gaaaaccagggattc

SEQ ID NO: 1666508 - DNA, 15 bp, Homo sapiens
agaaaaccagggatt

SEQ ID NO: 1666509 - DNA, 15 bp, Homo sapiens
cagaaaaccagggat

SEQ ID NO: 1666510 - DNA, 15 bp, Homo sapiens
acagaaaaccaggga

SEQ ID NO: 1666511 - DNA, 15 bp, Homo sapiens
tacagaaaaccaggg

SEQ ID NO: 1666512 - DNA, 15 bp, Homo sapiens
gtacagaaaaccagg

SEQ ID NO: 1666513 - DNA, 15 bp, Homo sapiens
ggtacagaaaaccag

SEQ ID NO: 1666514 - DNA, 15 bp, Homo sapiens
aggtacagaaaacca

SEQ ID NO: 1666515 - DNA, 15 bp, Homo sapiens
aaggtacagaaaacc

SEQ ID NO: 1666516 - DNA, 15 bp, Homo sapiens
caaggtacagaaaac

SEQ ID NO: 1666517 - DNA, 15 bp, Homo sapiens
acaaggtacagaaaa

SEQ ID NO: 1666518 - DNA, 15 bp, Homo sapiens
aacaaggtacagaaa

SEQ ID NO: 1666519 - DNA, 15 bp, Homo sapiens
aaacaaggtacagaa

SEQ ID NO: 1666520 - DNA, 15 bp, Homo sapiens
aaaacaaggtacaga

SEQ ID NO: 1666521 - DNA, 15 bp, Homo sapiens
aaaaacaaggtacag

SEQ ID NO: 1666522 - DNA, 15 bp, Homo sapiens
gaaaaacaaggtaca

SEQ ID NO: 1666523 - DNA, 15 bp, Homo sapiens
ggaaaaacaaggtac

SEQ ID NO: 1666524 - DNA, 15 bp, Homo sapiens
aggaaaaacaaggta

SEQ ID NO: 1666525 - DNA, 15 bp, Homo sapiens
aaggaaaaacaaggt

SEQ ID NO: 1666526 - DNA, 15 bp, Homo sapiens
gaaggaaaaacaagg

SEQ ID NO: 1666527 - DNA, 15 bp, Homo sapiens
agaaggaaaaacaag

SEQ ID NO: 1666528 - DNA, 15 bp, Homo sapiens
cagaaggaaaaacaa

SEQ ID NO: 1666529 - DNA, 15 bp, Homo sapiens
gcagaaggaaaaaca

SEQ ID NO: 1666530 - DNA, 15 bp, Homo sapiens
tgcagaaggaaaaac

SEQ ID NO: 1666531 - DNA, 15 bp, Homo sapiens
atgcagaaggaaaaa

SEQ ID NO: 1666532 - DNA, 15 bp, Homo sapiens
tatgcagaaggaaaa

SEQ ID NO: 1666533 - DNA, 15 bp, Homo sapiens
ctatgcagaaggaaa

SEQ ID NO: 1666534 - DNA, 15 bp, Homo sapiens
tctatgcagaaggaa

SEQ ID NO: 1666535 - DNA, 15 bp, Homo sapiens
atctatgcagaagga

SEQ ID NO: 1666536 - DNA, 15 bp, Homo sapiens
aatctatgcagaagg

SEQ ID NO: 1666537 - DNA, 15 bp, Homo sapiens
aaatctatgcagaag

SEQ ID NO: 1666538 - DNA, 15 bp, Homo sapiens
caaatctatgcagaa

SEQ ID NO: 1666539 - DNA, 15 bp, Homo sapiens
gcaaatctatgcaga

SEQ ID NO: 1666540 - DNA, 15 bp, Homo sapiens
agcaaatctatgcag

SEQ ID NO: 1666541 - DNA, 15 bp, Homo sapiens
aagcaaatctatgca

SEQ ID NO: 1666542 - DNA, 15 bp, Homo sapiens
taagcaaatctatgc

SEQ ID NO: 1666543 - DNA, 15 bp, Homo sapiens
ttaagcaaatctatg

SEQ ID NO: 1666544 - DNA, 15 bp, Homo sapiens
gttaagcaaatctat

SEQ ID NO: 1666545 - DNA, 15 bp, Homo sapiens
agttaagcaaatcta

SEQ ID NO: 1666546 - DNA, 15 bp, Homo sapiens
cagttaagcaaatct

SEQ ID NO: 1666547 - DNA, 15 bp, Homo sapiens
acagttaagcaaatc

SEQ ID NO: 1666548 - DNA, 15 bp, Homo sapiens
aacagttaagcaaat

SEQ ID NO: 1666549 - DNA, 15 bp, Homo sapiens
aaacagttaagcaaa

SEQ ID NO: 1666550 - DNA, 15 bp, Homo sapiens
aaaacagttaagcaa

SEQ ID NO: 1666551 - DNA, 15 bp, Homo sapiens
aaaaacagttaagca

SEQ ID NO: 1666552 - DNA, 15 bp, Homo sapiens
caaaaacagttaagc

SEQ ID NO: 1666553 - DNA, 15 bp, Homo sapiens
acaaaaacagttaag

SEQ ID NO: 1666554 - DNA, 15 bp, Homo sapiens
cacaaaaacagttaa

SEQ ID NO: 1666555 - DNA, 15 bp, Homo sapiens
ccacaaaaacagtta

SEQ ID NO: 1666556 - DNA, 15 bp, Homo sapiens
gccacaaaaacagtt

SEQ ID NO: 1666557 - DNA, 15 bp, Homo sapiens
cgccacaaaaacagt

SEQ ID NO: 1666558 - DNA, 15 bp, Homo sapiens
acgccacaaaaacag

SEQ ID NO: 1666559 - DNA, 15 bp, Homo sapiens
cacgccacaaaaaca

SEQ ID NO: 1666560 - DNA, 15 bp, Homo sapiens
acacgccacaaaaac

SEQ ID NO: 1666561 - DNA, 15 bp, Homo sapiens
tacacgccacaaaaa

SEQ ID NO: 1666562 - DNA, 15 bp, Homo sapiens
atacacgccacaaaa

SEQ ID NO: 1666563 - DNA, 15 bp, Homo sapiens
aatacacgccacaaa

SEQ ID NO: 1666564 - DNA, 15 bp, Homo sapiens
aaatacacgccacaa

SEQ ID NO: 1666565 - DNA, 15 bp, Homo sapiens
aaaatacacgccaca

SEQ ID NO: 1666566 - DNA, 15 bp, Homo sapiens
aaaaatacacgccac

SEQ ID NO: 1666567 - DNA, 15 bp, Homo sapiens
aaaaaatacacgcca

SEQ ID NO: 1666568 - DNA, 15 bp, Homo sapiens
aaaaaaatacacgcc

SEQ ID NO: 1666569 - DNA, 15 bp, Homo sapiens
aaaaaaaatacacgc

SEQ ID NO: 1666570 - DNA, 15 bp, Homo sapiens
aaaaaaaaatacacg

SEQ ID NO: 1666571 - DNA, 15 bp, Homo sapiens
gaaaaaaaaaaaata

SEQ ID NO: 1666572 - DNA, 15 bp, Homo sapiens
cgaaaaaaaaaaaat

SEQ ID NO: 1666573 - DNA, 15 bp, Homo sapiens
gcgaaaaaaaaaaaa

SEQ ID NO: 1666574 - DNA, 15 bp, Homo sapiens
tgcgaaaaaaaaaaa

SEQ ID NO: 1666575 - DNA, 15 bp, Homo sapiens
ctgcgaaaaaaaaaa

SEQ ID NO: 1666576 - DNA, 15 bp, Homo sapiens
actgcgaaaaaaaaa

SEQ ID NO: 1666577 - DNA, 15 bp, Homo sapiens
aactgcgaaaaaaaa

SEQ ID NO: 1666578 - DNA, 15 bp, Homo sapiens
aaactgcgaaaaaaa

SEQ ID NO: 1666579 - DNA, 15 bp, Homo sapiens
gaaactgcgaaaaaa

SEQ ID NO: 1666580 - DNA, 15 bp, Homo sapiens
cgaaactgcgaaaaa

SEQ ID NO: 1666581 - DNA, 15 bp, Homo sapiens
gcgaaactgcgaaaa

SEQ ID NO: 1666582 - DNA, 15 bp, Homo sapiens
agcgaaactgcgaaa

SEQ ID NO: 1666583 - DNA, 15 bp, Homo sapiens
gagcgaaactgcgaa

SEQ ID NO: 1666584 - DNA, 15 bp, Homo sapiens
agagcgaaactgcga

SEQ ID NO: 1666585 - DNA, 15 bp, Homo sapiens
aagagcgaaactgcg

SEQ ID NO: 1666586 - DNA, 15 bp, Homo sapiens
caagagcgaaactgc

SEQ ID NO: 1666587 - DNA, 15 bp, Homo sapiens
acaagagcgaaactg

SEQ ID NO: 1666588 - DNA, 15 bp, Homo sapiens
gcgccattgcactcc

SEQ ID NO: 1666589 - DNA, 15 bp, Homo sapiens
tgcgccattgcactc

SEQ ID NO: 1666590 - DNA, 15 bp, Homo sapiens
ttgcgccattgcact

SEQ ID NO: 1666591 - DNA, 15 bp, Homo sapiens
attgcgccattgcac

SEQ ID NO: 1666592 - DNA, 15 bp, Homo sapiens
gattgcgccattgca

SEQ ID NO: 1666593 - DNA, 15 bp, Homo sapiens
agattgcgccattgc

SEQ ID NO: 1666594 - DNA, 15 bp, Homo sapiens
gagattgcgccattg

SEQ ID NO: 1666595 - DNA, 15 bp, Homo sapiens
tgagattgcgccatt

SEQ ID NO: 1666596 - DNA, 15 bp, Homo sapiens
ctgagattgcgccat

SEQ ID NO: 1666597 - DNA, 15 bp, Homo sapiens
gctgagattgcgcca

SEQ ID NO: 1666598 - DNA, 15 bp, Homo sapiens
agctgagattgcgcc

SEQ ID NO: 1666599 - DNA, 15 bp, Homo sapiens
gagctgagattgcgc

SEQ ID NO: 1666600 - DNA, 15 bp, Homo sapiens
tgagctgagattgcg

SEQ ID NO: 1666601 - DNA, 15 bp, Homo sapiens
acagaggttgcagtg

SEQ ID NO: 1666602 - DNA, 15 bp, Homo sapiens
gacagaggttgcagt

SEQ ID NO: 1666603 - DNA, 15 bp, Homo sapiens
agacagaggttgcag

SEQ ID NO: 1666604 - DNA, 15 bp, Homo sapiens
gagacagaggttgca

SEQ ID NO: 1666605 - DNA, 15 bp, Homo sapiens
ggagacagaggttgc

SEQ ID NO: 1666606 - DNA, 15 bp, Homo sapiens
aggagacagaggttg

SEQ ID NO: 1666607 - DNA, 15 bp, Homo sapiens
caggagacagaggtt

SEQ ID NO: 1666608 - DNA, 15 bp, Homo sapiens
ccaggagacagaggt

SEQ ID NO: 1666609 - DNA, 15 bp, Homo sapiens
cccaggagacagagg

SEQ ID NO: 1666610 - DNA, 15 bp, Homo sapiens
acccaggagacagag

SEQ ID NO: 1666611 - DNA, 15 bp, Homo sapiens
aacccaggagacaga

SEQ ID NO: 1666612 - DNA, 15 bp, Homo sapiens
gaacccaggagacag

SEQ ID NO: 1666613 - DNA, 15 bp, Homo sapiens
tgaacccaggagaca

SEQ ID NO: 1666614 - DNA, 15 bp, Homo sapiens
ttgaacccaggagac

SEQ ID NO: 1666615 - DNA, 15 bp, Homo sapiens
cttgaacccaggaga

SEQ ID NO: 1666616 - DNA, 15 bp, Homo sapiens
aacttgaacccagga

SEQ ID NO: 1666617 - DNA, 15 bp, Homo sapiens
taacttgaacccagg

SEQ ID NO: 1666618 - DNA, 15 bp, Homo sapiens
ataacttgaacccag

SEQ ID NO: 1666619 - DNA, 15 bp, Homo sapiens
aataacttgaaccca

SEQ ID NO: 1666620 - DNA, 15 bp, Homo sapiens
gaataacttgaaccc

SEQ ID NO: 1666621 - DNA, 15 bp, Homo sapiens
agaataacttgaacc

SEQ ID NO: 1666622 - DNA, 15 bp, Homo sapiens
gagaataacttgaac

SEQ ID NO: 1666623 - DNA, 15 bp, Homo sapiens
ggagaataacttgaa

SEQ ID NO: 1666624 - DNA, 15 bp, Homo sapiens
aggagaataacttga

SEQ ID NO: 1666625 - DNA, 15 bp, Homo sapiens
caggagaataacttg

SEQ ID NO: 1666626 - DNA, 15 bp, Homo sapiens
gcaggagaataactt

SEQ ID NO: 1666627 - DNA, 15 bp, Homo sapiens
ggcaggagaataact

SEQ ID NO: 1666628 - DNA, 15 bp, Homo sapiens
aggcaggagaataac

SEQ ID NO: 1666629 - DNA, 15 bp, Homo sapiens
gaggcaggagaataa

SEQ ID NO: 1666630 - DNA, 15 bp, Homo sapiens
agaggctgaggcagg

SEQ ID NO: 1666631 - DNA, 15 bp, Homo sapiens
gagaggctgaggcag

SEQ ID NO: 1666632 - DNA, 15 bp, Homo sapiens
cgagaggctgaggca

SEQ ID NO: 1666633 - DNA, 15 bp, Homo sapiens
tcgagaggctgaggc

SEQ ID NO: 1666634 - DNA, 15 bp, Homo sapiens
ctcgagaggctgagg

SEQ ID NO: 1666635 - DNA, 15 bp, Homo sapiens
actcgagaggctgag

SEQ ID NO: 1666636 - DNA, 15 bp, Homo sapiens
tactcgagaggctga

SEQ ID NO: 1666637 - DNA, 15 bp, Homo sapiens
ctactcgagaggctg

SEQ ID NO: 1666638 - DNA, 15 bp, Homo sapiens
gctactcgagaggct

SEQ ID NO: 1666639 - DNA, 15 bp, Homo sapiens
agctactcgagaggc

SEQ ID NO: 1666640 - DNA, 15 bp, Homo sapiens
cagctactcgagagg

SEQ ID NO: 1666641 - DNA, 15 bp, Homo sapiens
tcagctactcgagag

SEQ ID NO: 1666642 - DNA, 15 bp, Homo sapiens
ctcagctactcgaga

SEQ ID NO: 1666643 - DNA, 15 bp, Homo sapiens
tctcagctactcgag

SEQ ID NO: 1666644 - DNA, 15 bp, Homo sapiens
atctcagctactcga

SEQ ID NO: 1666645 - DNA, 15 bp, Homo sapiens
aatctcagctactcg

SEQ ID NO: 1666646 - DNA, 15 bp, Homo sapiens
taatctcagctactc

SEQ ID NO: 1666647 - DNA, 15 bp, Homo sapiens
gtaatctcagctact

SEQ ID NO: 1666648 - DNA, 15 bp, Homo sapiens
tgtaatctcagctac

SEQ ID NO: 1666649 - DNA, 15 bp, Homo sapiens
ctgtaatctcagcta

SEQ ID NO: 1666650 - DNA, 15 bp, Homo sapiens
cctgtaatctcagct

SEQ ID NO: 1666651 - DNA, 15 bp, Homo sapiens
gcatgcctgtaatct

SEQ ID NO: 1666652 - DNA, 15 bp, Homo sapiens
cgcgcatgcctgtaa

SEQ ID NO: 1666653 - DNA, 15 bp, Homo sapiens
tcgcgcatgcctgta

SEQ ID NO: 1666654 - DNA, 15 bp, Homo sapiens
gtcgcgcatgcctgt

SEQ ID NO: 1666655 - DNA, 15 bp, Homo sapiens
ggtcgcgcatgcctg

SEQ ID NO: 1666656 - DNA, 15 bp, Homo sapiens
tggtcgcgcatgcct

SEQ ID NO: 1666657 - DNA, 15 bp, Homo sapiens
gtggtcgcgcatgcc

SEQ ID NO: 1666658 - DNA, 15 bp, Homo sapiens
cgtggtcgcgcatgc

SEQ ID NO: 1666659 - DNA, 15 bp, Homo sapiens
gcgtggtcgcgcatg

SEQ ID NO: 1666660 - DNA, 15 bp, Homo sapiens
ggcgtggtcgcgcat

SEQ ID NO: 1666661 - DNA, 15 bp, Homo sapiens
tggcgtggtcgcgca

SEQ ID NO: 1666662 - DNA, 15 bp, Homo sapiens
ctggcgtggtcgcgc

SEQ ID NO: 1666663 - DNA, 15 bp, Homo sapiens
cctggcgtggtcgcg

SEQ ID NO: 1666664 - DNA, 15 bp, Homo sapiens
gcctggcgtggtcgc

SEQ ID NO: 1666665 - DNA, 15 bp, Homo sapiens
agcctggcgtggtcg

SEQ ID NO: 1666666 - DNA, 15 bp, Homo sapiens
tagcctggcgtggtc

SEQ ID NO: 1666667 - DNA, 15 bp, Homo sapiens
ttagcctggcgtggt

SEQ ID NO: 1666668 - DNA, 15 bp, Homo sapiens
attagcctggcgtgg

SEQ ID NO: 1666669 - DNA, 15 bp, Homo sapiens
aattagcctggcgtg

SEQ ID NO: 1666670 - DNA, 15 bp, Homo sapiens
aaattagcctggcgt

SEQ ID NO: 1666671 - DNA, 15 bp, Homo sapiens
aaaattagcctggcg

SEQ ID NO: 1666672 - DNA, 15 bp, Homo sapiens
caaaattagcctggc

SEQ ID NO: 1666673 - DNA, 15 bp, Homo sapiens
acaaaattagcctgg

SEQ ID NO: 1666674 - DNA, 15 bp, Homo sapiens
tacaaaattagcctg

SEQ ID NO: 1666675 - DNA, 15 bp, Homo sapiens
atacaaaattagcct

SEQ ID NO: 1666676 - DNA, 15 bp, Homo sapiens
atggagaaaccccgt

SEQ ID NO: 1666677 - DNA, 15 bp, Homo sapiens
catggagaaaccccg

SEQ ID NO: 1666678 - DNA, 15 bp, Homo sapiens
tgaatcacctgaggt

SEQ ID NO: 1666679 - DNA, 15 bp, Homo sapiens
gtgaatcacctgagg

SEQ ID NO: 1666680 - DNA, 15 bp, Homo sapiens
ggtgaatcacctgag

SEQ ID NO: 1666681 - DNA, 15 bp, Homo sapiens
gggtgaatcacctga

SEQ ID NO: 1666682 - DNA, 15 bp, Homo sapiens
cgggtgaatcacctg

SEQ ID NO: 1666683 - DNA, 15 bp, Homo sapiens
gcgggtgaatcacct

SEQ ID NO: 1666684 - DNA, 15 bp, Homo sapiens
ggcgggtgaatcacc

SEQ ID NO: 1666685 - DNA, 15 bp, Homo sapiens
aggcgggtgaatcac

SEQ ID NO: 1666686 - DNA, 15 bp, Homo sapiens
gaggcgggtgaatca

SEQ ID NO: 1666687 - DNA, 15 bp, Homo sapiens
cgaggcgggtgaatc

SEQ ID NO: 1666688 - DNA, 15 bp, Homo sapiens
tcgaggcgggtgaat

SEQ ID NO: 1666689 - DNA, 15 bp, Homo sapiens
gtcgaggcgggtgaa

SEQ ID NO: 1666690 - DNA, 15 bp, Homo sapiens
ggtcgaggcgggtga

SEQ ID NO: 1666691 - DNA, 15 bp, Homo sapiens
aggtcgaggcgggtg

SEQ ID NO: 1666692 - DNA, 15 bp, Homo sapiens
gaggtcgaggcgggt

SEQ ID NO: 1666693 - DNA, 15 bp, Homo sapiens
ggaggtcgaggcggg

SEQ ID NO: 1666694 - DNA, 15 bp, Homo sapiens
gggaggtcgaggcgg

SEQ ID NO: 1666695 - DNA, 15 bp, Homo sapiens
tgggaggtcgaggcg

SEQ ID NO: 1666696 - DNA, 15 bp, Homo sapiens
gtttgggaggtcgag

SEQ ID NO: 1666697 - DNA, 15 bp, Homo sapiens
agtttgggaggtcga

SEQ ID NO: 1666698 - DNA, 15 bp, Homo sapiens
cagtttgggaggtcg

SEQ ID NO: 1666699 - DNA, 15 bp, Homo sapiens
gcagtttgggaggtc

SEQ ID NO: 1666700 - DNA, 15 bp, Homo sapiens
agcagtttgggaggt

SEQ ID NO: 1666701 - DNA, 15 bp, Homo sapiens
cagcagtttgggagg

SEQ ID NO: 1666702 - DNA, 15 bp, Homo sapiens
ccagcagtttgggag

SEQ ID NO: 1666703 - DNA, 15 bp, Homo sapiens
cccagcagtttggga

SEQ ID NO: 1666704 - DNA, 15 bp, Homo sapiens
tcccagcagtttggg

SEQ ID NO: 1666705 - DNA, 15 bp, Homo sapiens
atcccagcagtttgg

SEQ ID NO: 1666706 - DNA, 15 bp, Homo sapiens
aatcccagcagtttg

SEQ ID NO: 1666707 - DNA, 15 bp, Homo sapiens
taatcccagcagttt

SEQ ID NO: 1666708 - DNA, 15 bp, Homo sapiens
gtaatcccagcagtt

SEQ ID NO: 1666709 - DNA, 15 bp, Homo sapiens
tgtaatcccagcagt

SEQ ID NO: 1666710 - DNA, 15 bp, Homo sapiens
ctgtaatcccagcag

SEQ ID NO: 1666711 - DNA, 15 bp, Homo sapiens
aggcgtggtggctca

SEQ ID NO: 1666712 - DNA, 15 bp, Homo sapiens
caggcgtggtggctc

SEQ ID NO: 1666713 - DNA, 15 bp, Homo sapiens
ccaggcgtggtggct

SEQ ID NO: 1666714 - DNA, 15 bp, Homo sapiens
ggccaggcgtggtgg

SEQ ID NO: 1666715 - DNA, 15 bp, Homo sapiens
tggccaggcgtggtg

SEQ ID NO: 1666716 - DNA, 15 bp, Homo sapiens
ctggccaggcgtggt

SEQ ID NO: 1666717 - DNA, 15 bp, Homo sapiens
gctggccaggcgtgg

SEQ ID NO: 1666718 - DNA, 15 bp, Homo sapiens
agctggccaggcgtg

SEQ ID NO: 1666719 - DNA, 15 bp, Homo sapiens
cagctggccaggcgt

SEQ ID NO: 1666720 - DNA, 15 bp, Homo sapiens
acagctggccaggcg

SEQ ID NO: 1666721 - DNA, 15 bp, Homo sapiens
aacagctggccaggc

SEQ ID NO: 1666722 - DNA, 15 bp, Homo sapiens
caacagctggccagg

SEQ ID NO: 1666723 - DNA, 15 bp, Homo sapiens
acaacagctggccag

SEQ ID NO: 1666724 - DNA, 15 bp, Homo sapiens
aacaacagctggcca

SEQ ID NO: 1666725 - DNA, 15 bp, Homo sapiens
taacaacagctggcc

SEQ ID NO: 1666726 - DNA, 15 bp, Homo sapiens
ataacaacagctggc

SEQ ID NO: 1666727 - DNA, 15 bp, Homo sapiens
tataacaacagctgg

SEQ ID NO: 1666728 - DNA, 15 bp, Homo sapiens
ttataacaacagctg

SEQ ID NO: 1666729 - DNA, 15 bp, Homo sapiens
gttataacaacagct

SEQ ID NO: 1666730 - DNA, 15 bp, Homo sapiens
agttataacaacagc

SEQ ID NO: 1666731 - DNA, 15 bp, Homo sapiens
cagttataacaacag

SEQ ID NO: 1666732 - DNA, 15 bp, Homo sapiens
ccagttataacaaca

SEQ ID NO: 1666733 - DNA, 15 bp, Homo sapiens
tccagttataacaac

SEQ ID NO: 1666734 - DNA, 15 bp, Homo sapiens
ctccagttataacaa

SEQ ID NO: 1666735 - DNA, 15 bp, Homo sapiens
actccagttataaca

SEQ ID NO: 1666736 - DNA, 15 bp, Homo sapiens
aactccagttataac

SEQ ID NO: 1666737 - DNA, 15 bp, Homo sapiens
gaactccagttataa

SEQ ID NO: 1666738 - DNA, 15 bp, Homo sapiens
agaactccagttata

SEQ ID NO: 1666739 - DNA, 15 bp, Homo sapiens
tagaactccagttat

SEQ ID NO: 1666740 - DNA, 15 bp, Homo sapiens
atagaactccagtta

SEQ ID NO: 1666741 - DNA, 15 bp, Homo sapiens
catagaactccagtt

SEQ ID NO: 1666742 - DNA, 15 bp, Homo sapiens
acatagaactccagt

SEQ ID NO: 1666743 - DNA, 15 bp, Homo sapiens
cacatagaactccag

SEQ ID NO: 1666744 - DNA, 15 bp, Homo sapiens
gcacatagaactcca

SEQ ID NO: 1666745 - DNA, 15 bp, Homo sapiens
agcacatagaactcc

SEQ ID NO: 1666746 - DNA, 15 bp, Homo sapiens
aagcacatagaactc

SEQ ID NO: 1666747 - DNA, 15 bp, Homo sapiens
caagcacatagaact

SEQ ID NO: 1666748 - DNA, 15 bp, Homo sapiens
acaagcacatagaac

SEQ ID NO: 1666749 - DNA, 15 bp, Homo sapiens
cacaagcacatagaa

SEQ ID NO: 1666750 - DNA, 15 bp, Homo sapiens
tcacaagcacataga

SEQ ID NO: 1666751 - DNA, 15 bp, Homo sapiens
gtcacaagcacatag

SEQ ID NO: 1666752 - DNA, 15 bp, Homo sapiens
ggtcacaagcacata

SEQ ID NO: 1666753 - DNA, 15 bp, Homo sapiens
tggtcacaagcacat

SEQ ID NO: 1666754 - DNA, 15 bp, Homo sapiens
atggtcacaagcaca

SEQ ID NO: 1666755 - DNA, 15 bp, Homo sapiens
aatggtcacaagcac

SEQ ID NO: 1666756 - DNA, 15 bp, Homo sapiens
gaatggtcacaagca

SEQ ID NO: 1666757 - DNA, 15 bp, Homo sapiens
agaatggtcacaagc

SEQ ID NO: 1666758 - DNA, 15 bp, Homo sapiens
aagaatggtcacaag

SEQ ID NO: 1666759 - DNA, 15 bp, Homo sapiens
caagaatggtcacaa

SEQ ID NO: 1666760 - DNA, 15 bp, Homo sapiens
ccaagaatggtcaca

SEQ ID NO: 1666761 - DNA, 15 bp, Homo sapiens
accaagaatggtcac

SEQ ID NO: 1666762 - DNA, 15 bp, Homo sapiens
aaccaagaatggtca

SEQ ID NO: 1666763 - DNA, 15 bp, Homo sapiens
aaaccaagaatggtc

SEQ ID NO: 1666764 - DNA, 15 bp, Homo sapiens
gaaaccaagaatggt

SEQ ID NO: 1666765 - DNA, 15 bp, Homo sapiens
agaaaccaagaatgg

SEQ ID NO: 1666766 - DNA, 15 bp, Homo sapiens
gagaaaccaagaatg

SEQ ID NO: 1666767 - DNA, 15 bp, Homo sapiens
ggagaaaccaagaat

SEQ ID NO: 1666768 - DNA, 15 bp, Homo sapiens
cggagaaaccaagaa

SEQ ID NO: 1666769 - DNA, 15 bp, Homo sapiens
tcggagaaaccaaga

SEQ ID NO: 1666770 - DNA, 15 bp, Homo sapiens
ttcggagaaaccaag

SEQ ID NO: 1666771 - DNA, 15 bp, Homo sapiens
attcggagaaaccaa

SEQ ID NO: 1666772 - DNA, 15 bp, Homo sapiens
tattcggagaaacca

SEQ ID NO: 1666773 - DNA, 15 bp, Homo sapiens
atattcggagaaacc

SEQ ID NO: 1666774 - DNA, 15 bp, Homo sapiens
gatattcggagaaac

SEQ ID NO: 1666775 - DNA, 15 bp, Homo sapiens
ggatattcggagaaa

SEQ ID NO: 1666776 - DNA, 15 bp, Homo sapiens
aggatattcggagaa

SEQ ID NO: 1666777 - DNA, 15 bp, Homo sapiens
taggatattcggaga

SEQ ID NO: 1666778 - DNA, 15 bp, Homo sapiens
ctaggatattcggag

SEQ ID NO: 1666779 - DNA, 15 bp, Homo sapiens
tctaggatattcgga

SEQ ID NO: 1666780 - DNA, 15 bp, Homo sapiens
ttctaggatattcgg

SEQ ID NO: 1666781 - DNA, 15 bp, Homo sapiens
gttctaggatattcg

SEQ ID NO: 1666782 - DNA, 15 bp, Homo sapiens
agttctaggatattc

SEQ ID NO: 1666783 - DNA, 15 bp, Homo sapiens
aagttctaggatatt

SEQ ID NO: 1666784 - DNA, 15 bp, Homo sapiens
aaagttctaggatat

SEQ ID NO: 1666785 - DNA, 15 bp, Homo sapiens
caaagttctaggata

SEQ ID NO: 1666786 - DNA, 15 bp, Homo sapiens
ccaaagttctaggat

SEQ ID NO: 1666787 - DNA, 15 bp, Homo sapiens
accaaagttctagga

SEQ ID NO: 1666788 - DNA, 15 bp, Homo sapiens
caccaaagttctagg

SEQ ID NO: 1666789 - DNA, 15 bp, Homo sapiens
ccaccaaagttctag

SEQ ID NO: 1666790 - DNA, 15 bp, Homo sapiens
gccaccaaagttcta

SEQ ID NO: 1666791 - DNA, 15 bp, Homo sapiens
cgccaccaaagttct

SEQ ID NO: 1666792 - DNA, 15 bp, Homo sapiens
gcgccaccaaagttc

SEQ ID NO: 1666793 - DNA, 15 bp, Homo sapiens
ggcgccaccaaagtt

SEQ ID NO: 1666794 - DNA, 15 bp, Homo sapiens
gggcgccaccaaagt

SEQ ID NO: 1666795 - DNA, 15 bp, Homo sapiens
agggcgccaccaaag

SEQ ID NO: 1666796 - DNA, 15 bp, Homo sapiens
tagggcgccaccaaa

SEQ ID NO: 1666797 - DNA, 15 bp, Homo sapiens
atagggcgccaccaa

SEQ ID NO: 1666798 - DNA, 15 bp, Homo sapiens
aatagggcgccacca

SEQ ID NO: 1666799 - DNA, 15 bp, Homo sapiens
taatagggcgccacc

SEQ ID NO: 1666800 - DNA, 15 bp, Homo sapiens
ataatagggcgccac

SEQ ID NO: 1666801 - DNA, 15 bp, Homo sapiens
tataatagggcgcca

SEQ ID NO: 1666802 - DNA, 15 bp, Homo sapiens
gtataatagggcgcc

SEQ ID NO: 1666803 - DNA, 15 bp, Homo sapiens
tgtataatagggcgc

SEQ ID NO: 1666804 - DNA, 15 bp, Homo sapiens
ctgtataatagggcg

SEQ ID NO: 1666805 - DNA, 15 bp, Homo sapiens
cctgtataatagggc

SEQ ID NO: 1666806 - DNA, 15 bp, Homo sapiens
acctgtataataggg

SEQ ID NO: 1666807 - DNA, 15 bp, Homo sapiens
aacctgtataatagg

SEQ ID NO: 1666808 - DNA, 15 bp, Homo sapiens
caacctgtataatag

SEQ ID NO: 1666809 - DNA, 15 bp, Homo sapiens
acaacctgtataata

SEQ ID NO: 1666810 - DNA, 15 bp, Homo sapiens
aacaacctgtataat

SEQ ID NO: 1666811 - DNA, 15 bp, Homo sapiens
caacaacctgtataa

SEQ ID NO: 1666812 - DNA, 15 bp, Homo sapiens
tcaacaacctgtata

SEQ ID NO: 1666813 - DNA, 15 bp, Homo sapiens
ttcaacaacctgtat

SEQ ID NO: 1666814 - DNA, 15 bp, Homo sapiens
cttcaacaacctgta

SEQ ID NO: 1666815 - DNA, 15 bp, Homo sapiens
tcttcaacaacctgt

SEQ ID NO: 1666816 - DNA, 15 bp, Homo sapiens
ttcttcaacaacctg

SEQ ID NO: 1666817 - DNA, 15 bp, Homo sapiens
tttcttcaacaacct

SEQ ID NO: 1666818 - DNA, 15 bp, Homo sapiens
atttcttcaacaacc

SEQ ID NO: 1666819 - DNA, 15 bp, Homo sapiens
catttcttcaacaac

SEQ ID NO: 1666820 - DNA, 15 bp, Homo sapiens
acatttcttcaacaa

SEQ ID NO: 1666821 - DNA, 15 bp, Homo sapiens
aacatttcttcaaca

SEQ ID NO: 1666822 - DNA, 15 bp, Homo sapiens
taacatttcttcaac

SEQ ID NO: 1666823 - DNA, 15 bp, Homo sapiens
gtaacatttcttcaa

SEQ ID NO: 1666824 - DNA, 15 bp, Homo sapiens
ggtaacatttcttca

SEQ ID NO: 1666825 - DNA, 15 bp, Homo sapiens
tggtaacatttcttc

SEQ ID NO: 1666826 - DNA, 15 bp, Homo sapiens
atggtaacatttctt

SEQ ID NO: 1666827 - DNA, 15 bp, Homo sapiens
catggtaacatttct

SEQ ID NO: 1666828 - DNA, 15 bp, Homo sapiens
acatggtaacatttc

SEQ ID NO: 1666829 - DNA, 15 bp, Homo sapiens
cacatggtaacattt

SEQ ID NO: 1666830 - DNA, 15 bp, Homo sapiens
ccacatggtaacatt

SEQ ID NO: 1666831 - DNA, 15 bp, Homo sapiens
tccacatggtaacat

SEQ ID NO: 1666832 - DNA, 15 bp, Homo sapiens
atccacatggtaaca

SEQ ID NO: 1666833 - DNA, 15 bp, Homo sapiens
aatccacatggtaac

SEQ ID NO: 1666834 - DNA, 15 bp, Homo sapiens
caatccacatggtaa

SEQ ID NO: 1666835 - DNA, 15 bp, Homo sapiens
tcaatccacatggta

SEQ ID NO: 1666836 - DNA, 15 bp, Homo sapiens
ctcaatccacatggt

SEQ ID NO: 1666837 - DNA, 15 bp, Homo sapiens
actcaatccacatgg

SEQ ID NO: 1666838 - DNA, 15 bp, Homo sapiens
tactcaatccacatg

SEQ ID NO: 1666839 - DNA, 15 bp, Homo sapiens
ctactcaatccacat

SEQ ID NO: 1666840 - DNA, 15 bp, Homo sapiens
cctactcaatccaca

SEQ ID NO: 1666841 - DNA, 15 bp, Homo sapiens
tcctactcaatccac

SEQ ID NO: 1666842 - DNA, 15 bp, Homo sapiens
ttcctactcaatcca

SEQ ID NO: 1666843 - DNA, 15 bp, Homo sapiens
tttcctactcaatcc

SEQ ID NO: 1666844 - DNA, 15 bp, Homo sapiens
gtttcctactcaatc

SEQ ID NO: 1666845 - DNA, 15 bp, Homo sapiens
tgtttcctactcaat

SEQ ID NO: 1666846 - DNA, 15 bp, Homo sapiens
ttgtttcctactcaa

SEQ ID NO: 1666847 - DNA, 15 bp, Homo sapiens
attgtttcctactca

SEQ ID NO: 1666848 - DNA, 15 bp, Homo sapiens
aattgtttcctactc

SEQ ID NO: 1666849 - DNA, 15 bp, Homo sapiens
gaattgtttcctact

SEQ ID NO: 1666850 - DNA, 15 bp, Homo sapiens
agaattgtttcctac

SEQ ID NO: 1666851 - DNA, 15 bp, Homo sapiens
gagaattgtttccta

SEQ ID NO: 1666852 - DNA, 15 bp, Homo sapiens
agagaattgtttcct

SEQ ID NO: 1666853 - DNA, 15 bp, Homo sapiens
aagagaattgtttcc

SEQ ID NO: 1666854 - DNA, 15 bp, Homo sapiens
aaagagaattgtttc

SEQ ID NO: 1666855 - DNA, 15 bp, Homo sapiens
taaagagaattgttt

SEQ ID NO: 1666856 - DNA, 15 bp, Homo sapiens
ataaagagaattgtt

SEQ ID NO: 1666857 - DNA, 15 bp, Homo sapiens
gataaagagaattgt

SEQ ID NO: 1666858 - DNA, 15 bp, Homo sapiens
agataaagagaattg

SEQ ID NO: 1666859 - DNA, 15 bp, Homo sapiens
aagataaagagaatt

SEQ ID NO: 1666860 - DNA, 15 bp, Homo sapiens
caagataaagagaat

SEQ ID NO: 1666861 - DNA, 15 bp, Homo sapiens
ccaagataaagagaa

SEQ ID NO: 1666862 - DNA, 15 bp, Homo sapiens
gccaagataaagaga

SEQ ID NO: 1666863 - DNA, 15 bp, Homo sapiens
tgccaagataaagag

SEQ ID NO: 1666864 - DNA, 15 bp, Homo sapiens
ttgccaagataaaga

SEQ ID NO: 1666865 - DNA, 15 bp, Homo sapiens
attgccaagataaag

SEQ ID NO: 1666866 - DNA, 15 bp, Homo sapiens
tattgccaagataaa

SEQ ID NO: 1666867 - DNA, 15 bp, Homo sapiens
atattgccaagataa

SEQ ID NO: 1666868 - DNA, 15 bp, Homo sapiens
aatattgccaagata

SEQ ID NO: 1666869 - DNA, 15 bp, Homo sapiens
taatattgccaagat

SEQ ID NO: 1666870 - DNA, 15 bp, Homo sapiens
ataatattgccaaga

SEQ ID NO: 1666871 - DNA, 15 bp, Homo sapiens
cataatattgccaag

SEQ ID NO: 1666872 - DNA, 15 bp, Homo sapiens
ccataatattgccaa

SEQ ID NO: 1666873 - DNA, 15 bp, Homo sapiens
gccataatattgcca

SEQ ID NO: 1666874 - DNA, 15 bp, Homo sapiens
tgccataatattgcc

SEQ ID NO: 1666875 - DNA, 15 bp, Homo sapiens
atgccataatattgc

SEQ ID NO: 1666876 - DNA, 15 bp, Homo sapiens
catgccataatattg

SEQ ID NO: 1666877 - DNA, 15 bp, Homo sapiens
ccatgccataatatt

SEQ ID NO: 1666878 - DNA, 15 bp, Homo sapiens
gccatgccataatat

SEQ ID NO: 1666879 - DNA, 15 bp, Homo sapiens
tgccatgccataata

SEQ ID NO: 1666880 - DNA, 15 bp, Homo sapiens
gtgccatgccataat

SEQ ID NO: 1666881 - DNA, 15 bp, Homo sapiens
agtgccatgccataa

SEQ ID NO: 1666882 - DNA, 15 bp, Homo sapiens
tagtgccatgccata

SEQ ID NO: 1666883 - DNA, 15 bp, Homo sapiens
gtagtgccatgccat

SEQ ID NO: 1666884 - DNA, 15 bp, Homo sapiens
agtagtgccatgcca

SEQ ID NO: 1666885 - DNA, 15 bp, Homo sapiens
aagtagtgccatgcc

SEQ ID NO: 1666886 - DNA, 15 bp, Homo sapiens
taagtagtgccatgc

SEQ ID NO: 1666887 - DNA, 15 bp, Homo sapiens
ttaagtagtgccatg

SEQ ID NO: 1666888 - DNA, 15 bp, Homo sapiens
tttaagtagtgccat

SEQ ID NO: 1666889 - DNA, 15 bp, Homo sapiens
ctttaagtagtgcca

SEQ ID NO: 1666890 - DNA, 15 bp, Homo sapiens
actttaagtagtgcc

SEQ ID NO: 1666891 - DNA, 15 bp, Homo sapiens
tactttaagtagtgc

SEQ ID NO: 1666892 - DNA, 15 bp, Homo sapiens
gtactttaagtagtg

SEQ ID NO: 1666893 - DNA, 15 bp, Homo sapiens
tgtactttaagtagt

SEQ ID NO: 1666894 - DNA, 15 bp, Homo sapiens
ttgtactttaagtag

SEQ ID NO: 1666895 - DNA, 15 bp, Homo sapiens
tttgtactttaagta

SEQ ID NO: 1666896 - DNA, 15 bp, Homo sapiens
atttgtactttaagt

SEQ ID NO: 1666897 - DNA, 15 bp, Homo sapiens
aatttgtactttaag

SEQ ID NO: 1666898 - DNA, 15 bp, Homo sapiens
taatttgtactttaa

SEQ ID NO: 1666899 - DNA, 15 bp, Homo sapiens
ttaatttgtacttta

SEQ ID NO: 1666900 - DNA, 15 bp, Homo sapiens
tttaatttgtacttt

SEQ ID NO: 1666901 - DNA, 15 bp, Homo sapiens
ttttaatttgtactt

SEQ ID NO: 1666902 - DNA, 15 bp, Homo sapiens
cttttaatttgtact

SEQ ID NO: 1666903 - DNA, 15 bp, Homo sapiens
tcttttaatttgtac

SEQ ID NO: 1666904 - DNA, 15 bp, Homo sapiens
ctcttttaatttgta

SEQ ID NO: 1666905 - DNA, 15 bp, Homo sapiens
cctcttttaatttgt

SEQ ID NO: 1666906 - DNA, 15 bp, Homo sapiens
ccctcttttaatttg

SEQ ID NO: 1666907 - DNA, 15 bp, Homo sapiens
cccctcttttaattt

SEQ ID NO: 1666908 - DNA, 15 bp, Homo sapiens
ccccctcttttaatt

SEQ ID NO: 1666909 - DNA, 15 bp, Homo sapiens
tccccctcttttaat

SEQ ID NO: 1666910 - DNA, 15 bp, Homo sapiens
atccccctcttttaa

SEQ ID NO: 1666911 - DNA, 15 bp, Homo sapiens
catccccctctttta

SEQ ID NO: 1666912 - DNA, 15 bp, Homo sapiens
gcatccccctctttt

SEQ ID NO: 1666913 - DNA, 15 bp, Homo sapiens
agcatccccctcttt

SEQ ID NO: 1666914 - DNA, 15 bp, Homo sapiens
tagcatccccctctt

SEQ ID NO: 1666915 - DNA, 15 bp, Homo sapiens
gtagcatccccctct

SEQ ID NO: 1666916 - DNA, 15 bp, Homo sapiens
tgtagcatccccctc

SEQ ID NO: 1666917 - DNA, 15 bp, Homo sapiens
ctgtagcatccccct

SEQ ID NO: 1666918 - DNA, 15 bp, Homo sapiens
tctgtagcatccccc

SEQ ID NO: 1666919 - DNA, 15 bp, Homo sapiens
ttctgtagcatcccc

SEQ ID NO: 1666920 - DNA, 15 bp, Homo sapiens
gttctgtagcatccc

SEQ ID NO: 1666921 - DNA, 15 bp, Homo sapiens
agttctgtagcatcc

SEQ ID NO: 1666922 - DNA, 15 bp, Homo sapiens
tagttctgtagcatc

SEQ ID NO: 1666923 - DNA, 15 bp, Homo sapiens
ctagttctgtagcat

SEQ ID NO: 1666924 - DNA, 15 bp, Homo sapiens
gctagttctgtagca

SEQ ID NO: 1666925 - DNA, 15 bp, Homo sapiens
agctagttctgtagc

SEQ ID NO: 1666926 - DNA, 15 bp, Homo sapiens
cagctagttctgtag

SEQ ID NO: 1666927 - DNA, 15 bp, Homo sapiens
tcagctagttctgta

SEQ ID NO: 1666928 - DNA, 15 bp, Homo sapiens
gtcagctagttctgt

SEQ ID NO: 1666929 - DNA, 15 bp, Homo sapiens
tgtcagctagttctg

SEQ ID NO: 1666930 - DNA, 15 bp, Homo sapiens
ctgtcagctagttct

SEQ ID NO: 1666931 - DNA, 15 bp, Homo sapiens
cctgtcagctagttc

SEQ ID NO: 1666932 - DNA, 15 bp, Homo sapiens
gcctgtcagctagtt

SEQ ID NO: 1666933 - DNA, 15 bp, Homo sapiens
tgcctgtcagctagt

SEQ ID NO: 1666934 - DNA, 15 bp, Homo sapiens
gtgcctgtcagctag

SEQ ID NO: 1666935 - DNA, 15 bp, Homo sapiens
agtgcctgtcagcta

SEQ ID NO: 1666936 - DNA, 15 bp, Homo sapiens
aagtgcctgtcagct

SEQ ID NO: 1666937 - DNA, 15 bp, Homo sapiens
aaagtgcctgtcagc

SEQ ID NO: 1666938 - DNA, 15 bp, Homo sapiens
caaagtgcctgtcag

SEQ ID NO: 1666939 - DNA, 15 bp, Homo sapiens
tcaaagtgcctgtca

SEQ ID NO: 1666940 - DNA, 15 bp, Homo sapiens
atcaaagtgcctgtc

SEQ ID NO: 1666941 - DNA, 15 bp, Homo sapiens
tatcaaagtgcctgt

SEQ ID NO: 1666942 - DNA, 15 bp, Homo sapiens
ctatcaaagtgcctg

SEQ ID NO: 1666943 - DNA, 15 bp, Homo sapiens
tctatcaaagtgcct

SEQ ID NO: 1666944 - DNA, 15 bp, Homo sapiens
ctctatcaaagtgcc

SEQ ID NO: 1666945 - DNA, 15 bp, Homo sapiens
cctctatcaaagtgc

SEQ ID NO: 1666946 - DNA, 15 bp, Homo sapiens
acctctatcaaagtg

SEQ ID NO: 1666947 - DNA, 15 bp, Homo sapiens
cacctctatcaaagt

SEQ ID NO: 1666948 - DNA, 15 bp, Homo sapiens
ccacctctatcaaag

SEQ ID NO: 1666949 - DNA, 15 bp, Homo sapiens
tccacctctatcaaa

SEQ ID NO: 1666950 - DNA, 15 bp, Homo sapiens
atccacctctatcaa

SEQ ID NO: 1666951 - DNA, 15 bp, Homo sapiens
aatccacctctatca

SEQ ID NO: 1666952 - DNA, 15 bp, Homo sapiens
aaatccacctctatc

SEQ ID NO: 1666953 - DNA, 15 bp, Homo sapiens
gaaatccacctctat

SEQ ID NO: 1666954 - DNA, 15 bp, Homo sapiens
agaaatccacctcta

SEQ ID NO: 1666955 - DNA, 15 bp, Homo sapiens
gagaaatccacctct

SEQ ID NO: 1666956 - DNA, 15 bp, Homo sapiens
tgagaaatccacctc

SEQ ID NO: 1666957 - DNA, 15 bp, Homo sapiens
ctgagaaatccacct

SEQ ID NO: 1666958 - DNA, 15 bp, Homo sapiens
actgagaaatccacc

SEQ ID NO: 1666959 - DNA, 15 bp, Homo sapiens
aactgagaaatccac

SEQ ID NO: 1666960 - DNA, 15 bp, Homo sapiens
gaactgagaaatcca

SEQ ID NO: 1666961 - DNA, 15 bp, Homo sapiens
agaactgagaaatcc

SEQ ID NO: 1666962 - DNA, 15 bp, Homo sapiens
aagaactgagaaatc

SEQ ID NO: 1666963 - DNA, 15 bp, Homo sapiens
taagaactgagaaat

SEQ ID NO: 1666964 - DNA, 15 bp, Homo sapiens
ttaagaactgagaaa

SEQ ID NO: 1666965 - DNA, 15 bp, Homo sapiens
tttaagaactgagaa

SEQ ID NO: 1666966 - DNA, 15 bp, Homo sapiens
ttttaagaactgaga

SEQ ID NO: 1666967 - DNA, 15 bp, Homo sapiens
attttaagaactgag

SEQ ID NO: 1666968 - DNA, 15 bp, Homo sapiens
tattttaagaactga

SEQ ID NO: 1666969 - DNA, 15 bp, Homo sapiens
ctattttaagaactg

SEQ ID NO: 1666970 - DNA, 15 bp, Homo sapiens
gctattttaagaact

SEQ ID NO: 1666971 - DNA, 15 bp, Homo sapiens
agctattttaagaac

SEQ ID NO: 1666972 - DNA, 15 bp, Homo sapiens
gagctattttaagaa

SEQ ID NO: 1666973 - DNA, 15 bp, Homo sapiens
agagctattttaaga

SEQ ID NO: 1666974 - DNA, 15 bp, Homo sapiens
aagagctattttaag

SEQ ID NO: 1666975 - DNA, 15 bp, Homo sapiens
aaagagctattttaa

SEQ ID NO: 1666976 - DNA, 15 bp, Homo sapiens
taaagagctatttta

SEQ ID NO: 1666977 - DNA, 15 bp, Homo sapiens
ataaagagctatttt

SEQ ID NO: 1666978 - DNA, 15 bp, Homo sapiens
tataaagagctattt

SEQ ID NO: 1666979 - DNA, 15 bp, Homo sapiens
ttataaagagctatt

SEQ ID NO: 1666980 - DNA, 15 bp, Homo sapiens
tttataaagagctat

SEQ ID NO: 1666981 - DNA, 15 bp, Homo sapiens
ctttataaagagcta

SEQ ID NO: 1666982 - DNA, 15 bp, Homo sapiens
cctttataaagagct

SEQ ID NO: 1666983 - DNA, 15 bp, Homo sapiens
tcctttataaagagc

SEQ ID NO: 1666984 - DNA, 15 bp, Homo sapiens
ttcctttataaagag

SEQ ID NO: 1666985 - DNA, 15 bp, Homo sapiens
cttcctttataaaga

SEQ ID NO: 1666986 - DNA, 15 bp, Homo sapiens
gcttcctttataaag

SEQ ID NO: 1666987 - DNA, 15 bp, Homo sapiens
ggcttcctttataaa

SEQ ID NO: 1666988 - DNA, 15 bp, Homo sapiens
tggcttcctttataa

SEQ ID NO: 1666989 - DNA, 15 bp, Homo sapiens
ctggcttcctttata

SEQ ID NO: 1666990 - DNA, 15 bp, Homo sapiens
tctggcttcctttat

SEQ ID NO: 1666991 - DNA, 15 bp, Homo sapiens
ctctggcttccttta

SEQ ID NO: 1666992 - DNA, 15 bp, Homo sapiens
cctctggcttccttt

SEQ ID NO: 1666993 - DNA, 15 bp, Homo sapiens
gcctctggcttcctt

SEQ ID NO: 1666994 - DNA, 15 bp, Homo sapiens
tgcctctggcttcct

SEQ ID NO: 1666995 - DNA, 15 bp, Homo sapiens
atgcctctggcttcc

SEQ ID NO: 1666996 - DNA, 15 bp, Homo sapiens
aatgcctctggcttc

SEQ ID NO: 1666997 - DNA, 15 bp, Homo sapiens
caatgcctctggctt

SEQ ID NO: 1666998 - DNA, 15 bp, Homo sapiens
acaatgcctctggct

SEQ ID NO: 1666999 - DNA, 15 bp, Homo sapiens
cacaatgcctctggc

SEQ ID NO: 1667000 - DNA, 15 bp, Homo sapiens
ccacaatgcctctgg

SEQ ID NO: 1667001 - DNA, 15 bp, Homo sapiens
tccacaatgcctctg

SEQ ID NO: 1667002 - DNA, 15 bp, Homo sapiens
ctccacaatgcctct

SEQ ID NO: 1667003 - DNA, 15 bp, Homo sapiens
cctccacaatgcctc

SEQ ID NO: 1667004 - DNA, 15 bp, Homo sapiens
tcctccacaatgcct

SEQ ID NO: 1667005 - DNA, 15 bp, Homo sapiens
ctcctccacaatgcc

SEQ ID NO: 1667006 - DNA, 15 bp, Homo sapiens
tctcctccacaatgc

SEQ ID NO: 1667007 - DNA, 15 bp, Homo sapiens
ttctcctccacaatg

SEQ ID NO: 1667008 - DNA, 15 bp, Homo sapiens
attctcctccacaat

SEQ ID NO: 1667009 - DNA, 15 bp, Homo sapiens
aattctcctccacaa

SEQ ID NO: 1667010 - DNA, 15 bp, Homo sapiens
gaattctcctccaca

SEQ ID NO: 1667011 - DNA, 15 bp, Homo sapiens
agaattctcctccac

SEQ ID NO: 1667012 - DNA, 15 bp, Homo sapiens
aagaattctcctcca

SEQ ID NO: 1667013 - DNA, 15 bp, Homo sapiens
taagaattctcctcc

SEQ ID NO: 1667014 - DNA, 15 bp, Homo sapiens
gtaagaattctcctc

SEQ ID NO: 1667015 - DNA, 15 bp, Homo sapiens
tgtaagaattctcct

SEQ ID NO: 1667016 - DNA, 15 bp, Homo sapiens
atgtaagaattctcc

SEQ ID NO: 1667017 - DNA, 15 bp, Homo sapiens
tatgtaagaattctc

SEQ ID NO: 1667018 - DNA, 15 bp, Homo sapiens
ttatgtaagaattct

SEQ ID NO: 1667019 - DNA, 15 bp, Homo sapiens
gttatgtaagaattc

SEQ ID NO: 1667020 - DNA, 15 bp, Homo sapiens
agttatgtaagaatt

SEQ ID NO: 1667021 - DNA, 15 bp, Homo sapiens
gagttatgtaagaat

SEQ ID NO: 1667022 - DNA, 15 bp, Homo sapiens
tgagttatgtaagaa

SEQ ID NO: 1667023 - DNA, 15 bp, Homo sapiens
atgagttatgtaaga

SEQ ID NO: 1667024 - DNA, 15 bp, Homo sapiens
tatgagttatgtaag

SEQ ID NO: 1667025 - DNA, 15 bp, Homo sapiens
ctatgagttatgtaa

SEQ ID NO: 1667026 - DNA, 15 bp, Homo sapiens
cctatgagttatgta

SEQ ID NO: 1667027 - DNA, 15 bp, Homo sapiens
ccctatgagttatgt

SEQ ID NO: 1667028 - DNA, 15 bp, Homo sapiens
accctatgagttatg

SEQ ID NO: 1667029 - DNA, 15 bp, Homo sapiens
aaccctatgagttat

SEQ ID NO: 1667030 - DNA, 15 bp, Homo sapiens
taaccctatgagtta

SEQ ID NO: 1667031 - DNA, 15 bp, Homo sapiens
ctaaccctatgagtt

SEQ ID NO: 1667032 - DNA, 15 bp, Homo sapiens
tctaaccctatgagt

SEQ ID NO: 1667033 - DNA, 15 bp, Homo sapiens
gtctaaccctatgag

SEQ ID NO: 1667034 - DNA, 15 bp, Homo sapiens
ggtctaaccctatga

SEQ ID NO: 1667035 - DNA, 15 bp, Homo sapiens
tggtctaaccctatg

SEQ ID NO: 1667036 - DNA, 15 bp, Homo sapiens
gtggtctaaccctat

SEQ ID NO: 1667037 - DNA, 15 bp, Homo sapiens
tgtggtctaacccta

SEQ ID NO: 1667038 - DNA, 15 bp, Homo sapiens
atgtggtctaaccct

SEQ ID NO: 1667039 - DNA, 15 bp, Homo sapiens
gatgtggtctaaccc

SEQ ID NO: 1667040 - DNA, 15 bp, Homo sapiens
ggatgtggtctaacc

SEQ ID NO: 1667041 - DNA, 15 bp, Homo sapiens
cggatgtggtctaac

SEQ ID NO: 1667042 - DNA, 15 bp, Homo sapiens
tcggatgtggtctaa

SEQ ID NO: 1667043 - DNA, 15 bp, Homo sapiens
gtcggatgtggtcta

SEQ ID NO: 1667044 - DNA, 15 bp, Homo sapiens
ggtcggatgtggtct

SEQ ID NO: 1667045 - DNA, 15 bp, Homo sapiens
aggtcggatgtggtc

SEQ ID NO: 1667046 - DNA, 15 bp, Homo sapiens
aaggtcggatgtggt

SEQ ID NO: 1667047 - DNA, 15 bp, Homo sapiens
aaaggtcggatgtgg

SEQ ID NO: 1667048 - DNA, 15 bp, Homo sapiens
aaaaggtcggatgtg

SEQ ID NO: 1667049 - DNA, 15 bp, Homo sapiens
gaaaaggtcggatgt

SEQ ID NO: 1667050 - DNA, 15 bp, Homo sapiens
agaaaaggtcggatg

SEQ ID NO: 1667051 - DNA, 15 bp, Homo sapiens
cagaaaaggtcggat

SEQ ID NO: 1667052 - DNA, 15 bp, Homo sapiens
acagaaaaggtcgga

SEQ ID NO: 1667053 - DNA, 15 bp, Homo sapiens
cacagaaaaggtcgg

SEQ ID NO: 1667054 - DNA, 15 bp, Homo sapiens
acacagaaaaggtcg

SEQ ID NO: 1667055 - DNA, 15 bp, Homo sapiens
cacacagaaaaggtc

SEQ ID NO: 1667056 - DNA, 15 bp, Homo sapiens
ccacacagaaaaggt

SEQ ID NO: 1667057 - DNA, 15 bp, Homo sapiens
gccacacagaaaagg

SEQ ID NO: 1667058 - DNA, 15 bp, Homo sapiens
agccacacagaaaag

SEQ ID NO: 1667059 - DNA, 15 bp, Homo sapiens
aagccacacagaaaa

SEQ ID NO: 1667060 - DNA, 15 bp, Homo sapiens
gaagccacacagaaa

SEQ ID NO: 1667061 - DNA, 15 bp, Homo sapiens
tgaagccacacagaa

SEQ ID NO: 1667062 - DNA, 15 bp, Homo sapiens
atgaagccacacaga

SEQ ID NO: 1667063 - DNA, 15 bp, Homo sapiens
catgaagccacacag

SEQ ID NO: 1667064 - DNA, 15 bp, Homo sapiens
ccatgaagccacaca

SEQ ID NO: 1667065 - DNA, 15 bp, Homo sapiens
gccatgaagccacac

SEQ ID NO: 1667066 - DNA, 15 bp, Homo sapiens
agccatgaagccaca

SEQ ID NO: 1667067 - DNA, 15 bp, Homo sapiens
gagccatgaagccac

SEQ ID NO: 1667068 - DNA, 15 bp, Homo sapiens
agagccatgaagcca

SEQ ID NO: 1667069 - DNA, 15 bp, Homo sapiens
gagagccatgaagcc

SEQ ID NO: 1667070 - DNA, 15 bp, Homo sapiens
agagagccatgaagc

SEQ ID NO: 1667071 - DNA, 15 bp, Homo sapiens
aagagagccatgaag

SEQ ID NO: 1667072 - DNA, 15 bp, Homo sapiens
caagagagccatgaa

SEQ ID NO: 1667073 - DNA, 15 bp, Homo sapiens
ccaagagagccatga

SEQ ID NO: 1667074 - DNA, 15 bp, Homo sapiens
accaagagagccatg

SEQ ID NO: 1667075 - DNA, 15 bp, Homo sapiens
aaccaagagagccat

SEQ ID NO: 1667076 - DNA, 15 bp, Homo sapiens
caaccaagagagcca

SEQ ID NO: 1667077 - DNA, 15 bp, Homo sapiens
tcaaccaagagagcc

SEQ ID NO: 1667078 - DNA, 15 bp, Homo sapiens
ctcaaccaagagagc

SEQ ID NO: 1667079 - DNA, 15 bp, Homo sapiens
tctcaaccaagagag

SEQ ID NO: 1667080 - DNA, 15 bp, Homo sapiens
ttctcaaccaagaga

SEQ ID NO: 1667081 - DNA, 15 bp, Homo sapiens
tttctcaaccaagag

SEQ ID NO: 1667082 - DNA, 15 bp, Homo sapiens
ctttctcaaccaaga

SEQ ID NO: 1667083 - DNA, 15 bp, Homo sapiens
gctttctcaaccaag

SEQ ID NO: 1667084 - DNA, 15 bp, Homo sapiens
tgctttctcaaccaa

SEQ ID NO: 1667085 - DNA, 15 bp, Homo sapiens
atgctttctcaacca

SEQ ID NO: 1667086 - DNA, 15 bp, Homo sapiens
aatgctttctcaacc

SEQ ID NO: 1667087 - DNA, 15 bp, Homo sapiens
taatgctttctcaac

SEQ ID NO: 1667088 - DNA, 15 bp, Homo sapiens
ctaatgctttctcaa

SEQ ID NO: 1667089 - DNA, 15 bp, Homo sapiens
actaatgctttctca

SEQ ID NO: 1667090 - DNA, 15 bp, Homo sapiens
aactaatgctttctc

SEQ ID NO: 1667091 - DNA, 15 bp, Homo sapiens
aaactaatgctttct

SEQ ID NO: 1667092 - DNA, 15 bp, Homo sapiens
gaaactaatgctttc

SEQ ID NO: 1667093 - DNA, 15 bp, Homo sapiens
agaaactaatgcttt

SEQ ID NO: 1667094 - DNA, 15 bp, Homo sapiens
gagaaactaatgctt

SEQ ID NO: 1667095 - DNA, 15 bp, Homo sapiens
ggagaaactaatgct

SEQ ID NO: 1667096 - DNA, 15 bp, Homo sapiens
aggagaaactaatgc

SEQ ID NO: 1667097 - DNA, 15 bp, Homo sapiens
aaggagaaactaatg

SEQ ID NO: 1667098 - DNA, 15 bp, Homo sapiens
gaaggagaaactaat

SEQ ID NO: 1667099 - DNA, 15 bp, Homo sapiens
ggaaggagaaactaa

SEQ ID NO: 1667100 - DNA, 15 bp, Homo sapiens
tggaaggagaaacta

SEQ ID NO: 1667101 - DNA, 15 bp, Homo sapiens
atggaaggagaaact

SEQ ID NO: 1667102 - DNA, 15 bp, Homo sapiens
aatggaaggagaaac

SEQ ID NO: 1667103 - DNA, 15 bp, Homo sapiens
taatggaaggagaaa

SEQ ID NO: 1667104 - DNA, 15 bp, Homo sapiens
ctaatggaaggagaa

SEQ ID NO: 1667105 - DNA, 15 bp, Homo sapiens
actaatggaaggaga

SEQ ID NO: 1667106 - DNA, 15 bp, Homo sapiens
aactaatggaaggag

SEQ ID NO: 1667107 - DNA, 15 bp, Homo sapiens
aaactaatggaagga

SEQ ID NO: 1667108 - DNA, 15 bp, Homo sapiens
gaaactaatggaagg

SEQ ID NO: 1667109 - DNA, 15 bp, Homo sapiens
tgaaactaatggaag

SEQ ID NO: 1667110 - DNA, 15 bp, Homo sapiens
ttgaaactaatggaa

SEQ ID NO: 1667111 - DNA, 15 bp, Homo sapiens
gttgaaactaatgga

SEQ ID NO: 1667112 - DNA, 15 bp, Homo sapiens
ggttgaaactaatgg

SEQ ID NO: 1667113 - DNA, 15 bp, Homo sapiens
aggttgaaactaatg

SEQ ID NO: 1667114 - DNA, 15 bp, Homo sapiens
gaggttgaaactaat

SEQ ID NO: 1667115 - DNA, 15 bp, Homo sapiens
agaggttgaaactaa

SEQ ID NO: 1667116 - DNA, 15 bp, Homo sapiens
aagaggttgaaacta

SEQ ID NO: 1667117 - DNA, 15 bp, Homo sapiens
caagaggttgaaact

SEQ ID NO: 1667118 - DNA, 15 bp, Homo sapiens
tcaagaggttgaaac

SEQ ID NO: 1667119 - DNA, 15 bp, Homo sapiens
atcaagaggttgaaa

SEQ ID NO: 1667120 - DNA, 15 bp, Homo sapiens
aatcaagaggttgaa

SEQ ID NO: 1667121 - DNA, 15 bp, Homo sapiens
aaatcaagaggttga

SEQ ID NO: 1667122 - DNA, 15 bp, Homo sapiens
gaaatcaagaggttg

SEQ ID NO: 1667123 - DNA, 15 bp, Homo sapiens
agaaatcaagaggtt

SEQ ID NO: 1667124 - DNA, 15 bp, Homo sapiens
aagaaatcaagaggt

SEQ ID NO: 1667125 - DNA, 15 bp, Homo sapiens
caagaaatcaagagg

SEQ ID NO: 1667126 - DNA, 15 bp, Homo sapiens
tcaagaaatcaagag

SEQ ID NO: 1667127 - DNA, 15 bp, Homo sapiens
gtcaagaaatcaaga

SEQ ID NO: 1667128 - DNA, 15 bp, Homo sapiens
ggtcaagaaatcaag

SEQ ID NO: 1667129 - DNA, 15 bp, Homo sapiens
gggtcaagaaatcaa

SEQ ID NO: 1667130 - DNA, 15 bp, Homo sapiens
ggggtcaagaaatca

SEQ ID NO: 1667131 - DNA, 15 bp, Homo sapiens
gggggtcaagaaatc

SEQ ID NO: 1667132 - DNA, 15 bp, Homo sapiens
ggggggtcaagaaat

SEQ ID NO: 1667133 - DNA, 15 bp, Homo sapiens
aggggggtcaagaaa

SEQ ID NO: 1667134 - DNA, 15 bp, Homo sapiens
taggggggtcaagaa

SEQ ID NO: 1667135 - DNA, 15 bp, Homo sapiens
gtaggggggtcaaga

SEQ ID NO: 1667136 - DNA, 15 bp, Homo sapiens
agtaggggggtcaag

SEQ ID NO: 1667137 - DNA, 15 bp, Homo sapiens
tagtaggggggtcaa

SEQ ID NO: 1667138 - DNA, 15 bp, Homo sapiens
atagtaggggggtca

SEQ ID NO: 1667139 - DNA, 15 bp, Homo sapiens
tatagtaggggggtc

SEQ ID NO: 1667140 - DNA, 15 bp, Homo sapiens
atatagtaggggggt

SEQ ID NO: 1667141 - DNA, 15 bp, Homo sapiens
aatatagtagggggg

SEQ ID NO: 1667142 - DNA, 15 bp, Homo sapiens
aaatatagtaggggg

SEQ ID NO: 1667143 - DNA, 15 bp, Homo sapiens
aaaatatagtagggg

SEQ ID NO: 1667144 - DNA, 15 bp, Homo sapiens
caaaatatagtaggg

SEQ ID NO: 1667145 - DNA, 15 bp, Homo sapiens
acaaaatatagtagg

SEQ ID NO: 1667146 - DNA, 15 bp, Homo sapiens
cacaaaatatagtag

SEQ ID NO: 1667147 - DNA, 15 bp, Homo sapiens
gcacaaaatatagta

SEQ ID NO: 1667148 - DNA, 15 bp, Homo sapiens
agcacaaaatatagt

SEQ ID NO: 1667149 - DNA, 15 bp, Homo sapiens
cagcacaaaatatag

SEQ ID NO: 1667150 - DNA, 15 bp, Homo sapiens
tcagcacaaaatata

SEQ ID NO: 1667151 - DNA, 15 bp, Homo sapiens
ctcagcacaaaatat

SEQ ID NO: 1667152 - DNA, 15 bp, Homo sapiens
tctcagcacaaaata

SEQ ID NO: 1667153 - DNA, 15 bp, Homo sapiens
ttctcagcacaaaat

SEQ ID NO: 1667154 - DNA, 15 bp, Homo sapiens
gttctcagcacaaaa

SEQ ID NO: 1667155 - DNA, 15 bp, Homo sapiens
tgttctcagcacaaa

SEQ ID NO: 1667156 - DNA, 15 bp, Homo sapiens
gtgttctcagcacaa

SEQ ID NO: 1667157 - DNA, 15 bp, Homo sapiens
tgtgttctcagcaca

SEQ ID NO: 1667158 - DNA, 15 bp, Homo sapiens
ttgtgttctcagcac

SEQ ID NO: 1667159 - DNA, 15 bp, Homo sapiens
cttgtgttctcagca

SEQ ID NO: 1667160 - DNA, 15 bp, Homo sapiens
ccttgtgttctcagc

SEQ ID NO: 1667161 - DNA, 15 bp, Homo sapiens
cccttgtgttctcag

SEQ ID NO: 1667162 - DNA, 15 bp, Homo sapiens
acccttgtgttctca

SEQ ID NO: 1667163 - DNA, 15 bp, Homo sapiens
tacccttgtgttctc

SEQ ID NO: 1667164 - DNA, 15 bp, Homo sapiens
atacccttgtgttct

SEQ ID NO: 1667165 - DNA, 15 bp, Homo sapiens
aatacccttgtgttc

SEQ ID NO: 1667166 - DNA, 15 bp, Homo sapiens
taatacccttgtgtt

SEQ ID NO: 1667167 - DNA, 15 bp, Homo sapiens
ttaatacccttgtgt

SEQ ID NO: 1667168 - DNA, 15 bp, Homo sapiens
gttaatacccttgtg

SEQ ID NO: 1667169 - DNA, 15 bp, Homo sapiens
tgttaatacccttgt

SEQ ID NO: 1667170 - DNA, 15 bp, Homo sapiens
ttgttaatacccttg

SEQ ID NO: 1667171 - DNA, 15 bp, Homo sapiens
gttgttaataccctt

SEQ ID NO: 1667172 - DNA, 15 bp, Homo sapiens
ggttgttaataccct

SEQ ID NO: 1667173 - DNA, 15 bp, Homo sapiens
gggttgttaataccc

SEQ ID NO: 1667174 - DNA, 15 bp, Homo sapiens
tgggttgttaatacc

SEQ ID NO: 1667175 - DNA, 15 bp, Homo sapiens
gtgggttgttaatac

SEQ ID NO: 1667176 - DNA, 15 bp, Homo sapiens
tgtgggttgttaata

SEQ ID NO: 1667177 - DNA, 15 bp, Homo sapiens
atgtgggttgttaat

SEQ ID NO: 1667178 - DNA, 15 bp, Homo sapiens
aatgtgggttgttaa

SEQ ID NO: 1667179 - DNA, 15 bp, Homo sapiens
caatgtgggttgtta

SEQ ID NO: 1667180 - DNA, 15 bp, Homo sapiens
acaatgtgggttgtt

SEQ ID NO: 1667181 - DNA, 15 bp, Homo sapiens
tacaatgtgggttgt

SEQ ID NO: 1667182 - DNA, 15 bp, Homo sapiens
ctacaatgtgggttg

SEQ ID NO: 1667183 - DNA, 15 bp, Homo sapiens
tctacaatgtgggtt

SEQ ID NO: 1667184 - DNA, 15 bp, Homo sapiens
ctctacaatgtgggt

SEQ ID NO: 1667185 - DNA, 15 bp, Homo sapiens
cctctacaatgtggg

SEQ ID NO: 1667186 - DNA, 15 bp, Homo sapiens
tcctctacaatgtgg

SEQ ID NO: 1667187 - DNA, 15 bp, Homo sapiens
atcctctacaatgtg

SEQ ID NO: 1667188 - DNA, 15 bp, Homo sapiens
gatcctctacaatgt

SEQ ID NO: 1667189 - DNA, 15 bp, Homo sapiens
cgatcctctacaatg

SEQ ID NO: 1667190 - DNA, 15 bp, Homo sapiens
gcgatcctctacaat

SEQ ID NO: 1667191 - DNA, 15 bp, Homo sapiens
agcgatcctctacaa

SEQ ID NO: 1667192 - DNA, 15 bp, Homo sapiens
gagcgatcctctaca

SEQ ID NO: 1667193 - DNA, 15 bp, Homo sapiens
tgagcgatcctctac

SEQ ID NO: 1667194 - DNA, 15 bp, Homo sapiens
ctgagcgatcctcta

SEQ ID NO: 1667195 - DNA, 15 bp, Homo sapiens
actgagcgatcctct

SEQ ID NO: 1667196 - DNA, 15 bp, Homo sapiens
tactgagcgatcctc

SEQ ID NO: 1667197 - DNA, 15 bp, Homo sapiens
ttactgagcgatcct

SEQ ID NO: 1667198 - DNA, 15 bp, Homo sapiens
attactgagcgatcc

SEQ ID NO: 1667199 - DNA, 15 bp, Homo sapiens
tattactgagcgatc

SEQ ID NO: 1667200 - DNA, 15 bp, Homo sapiens
ttattactgagcgat

SEQ ID NO: 1667201 - DNA, 15 bp, Homo sapiens
tttattactgagcga

SEQ ID NO: 1667202 - DNA, 15 bp, Homo sapiens
ctttattactgagcg

SEQ ID NO: 1667203 - DNA, 15 bp, Homo sapiens
tctttattactgagc

SEQ ID NO: 1667204 - DNA, 15 bp, Homo sapiens
gtctttattactgag

SEQ ID NO: 1667205 - DNA, 15 bp, Homo sapiens
agtctttattactga

SEQ ID NO: 1667206 - DNA, 15 bp, Homo sapiens
cagtctttattactg

SEQ ID NO: 1667207 - DNA, 15 bp, Homo sapiens
ccagtctttattact

SEQ ID NO: 1667208 - DNA, 15 bp, Homo sapiens
tccagtctttattac

SEQ ID NO: 1667209 - DNA, 15 bp, Homo sapiens
ctccagtctttatta

SEQ ID NO: 1667210 - DNA, 15 bp, Homo sapiens
tctccagtctttatt

SEQ ID NO: 1667211 - DNA, 15 bp, Homo sapiens
ttctccagtctttat

SEQ ID NO: 1667212 - DNA, 15 bp, Homo sapiens
attctccagtcttta

SEQ ID NO: 1667213 - DNA, 15 bp, Homo sapiens
tattctccagtcttt

SEQ ID NO: 1667214 - DNA, 15 bp, Homo sapiens
ttattctccagtctt

SEQ ID NO: 1667215 - DNA, 15 bp, Homo sapiens
tttattctccagtct

SEQ ID NO: 1667216 - DNA, 15 bp, Homo sapiens
ttttattctccagtc

SEQ ID NO: 1667217 - DNA, 15 bp, Homo sapiens
attttattctccagt

SEQ ID NO: 1667218 - DNA, 15 bp, Homo sapiens
cattttattctccag

SEQ ID NO: 1667219 - DNA, 15 bp, Homo sapiens
gcattttattctcca

SEQ ID NO: 1667220 - DNA, 15 bp, Homo sapiens
tgcattttattctcc

SEQ ID NO: 1667221 - DNA, 15 bp, Homo sapiens
ctgcattttattctc

SEQ ID NO: 1667222 - DNA, 15 bp, Homo sapiens
gctgcattttattct

SEQ ID NO: 1667223 - DNA, 15 bp, Homo sapiens
tgctgcattttattc

SEQ ID NO: 1667224 - DNA, 15 bp, Homo sapiens
atgctgcattttatt

SEQ ID NO: 1667225 - DNA, 15 bp, Homo sapiens
catgctgcattttat

SEQ ID NO: 1667226 - DNA, 15 bp, Homo sapiens
ccatgctgcatttta

SEQ ID NO: 1667227 - DNA, 15 bp, Homo sapiens
cccatgctgcatttt

SEQ ID NO: 1667228 - DNA, 15 bp, Homo sapiens
tcccatgctgcattt

SEQ ID NO: 1667229 - DNA, 15 bp, Homo sapiens
ttcccatgctgcatt

SEQ ID NO: 1667230 - DNA, 15 bp, Homo sapiens
attcccatgctgcat

SEQ ID NO: 1667231 - DNA, 15 bp, Homo sapiens
tattcccatgctgca

SEQ ID NO: 1667232 - DNA, 15 bp, Homo sapiens
atattcccatgctgc

SEQ ID NO: 1667233 - DNA, 15 bp, Homo sapiens
aatattcccatgctg

SEQ ID NO: 1667234 - DNA, 15 bp, Homo sapiens
caatattcccatgct

SEQ ID NO: 1667235 - DNA, 15 bp, Homo sapiens
ccaatattcccatgc

SEQ ID NO: 1667236 - DNA, 15 bp, Homo sapiens
gccaatattcccatg

SEQ ID NO: 1667237 - DNA, 15 bp, Homo sapiens
tgccaatattcccat

SEQ ID NO: 1667238 - DNA, 15 bp, Homo sapiens
ttgccaatattccca

SEQ ID NO: 1667239 - DNA, 15 bp, Homo sapiens
attgccaatattccc

SEQ ID NO: 1667240 - DNA, 15 bp, Homo sapiens
aattgccaatattcc

SEQ ID NO: 1667241 - DNA, 15 bp, Homo sapiens
taattgccaatattc

SEQ ID NO: 1667242 - DNA, 15 bp, Homo sapiens
gtaattgccaatatt

SEQ ID NO: 1667243 - DNA, 15 bp, Homo sapiens
agtaattgccaatat

SEQ ID NO: 1667244 - DNA, 15 bp, Homo sapiens
gagtaattgccaata

SEQ ID NO: 1667245 - DNA, 15 bp, Homo sapiens
tgagtaattgccaat

SEQ ID NO: 1667246 - DNA, 15 bp, Homo sapiens
ctgagtaattgccaa

SEQ ID NO: 1667247 - DNA, 15 bp, Homo sapiens
actgagtaattgcca

SEQ ID NO: 1667248 - DNA, 15 bp, Homo sapiens
aactgagtaattgcc

SEQ ID NO: 1667249 - DNA, 15 bp, Homo sapiens
gaactgagtaattgc

SEQ ID NO: 1667250 - DNA, 15 bp, Homo sapiens
agaactgagtaattg

SEQ ID NO: 1667251 - DNA, 15 bp, Homo sapiens
tagaactgagtaatt

SEQ ID NO: 1667252 - DNA, 15 bp, Homo sapiens
ttagaactgagtaat

SEQ ID NO: 1667253 - DNA, 15 bp, Homo sapiens
tttagaactgagtaa

SEQ ID NO: 1667254 - DNA, 15 bp, Homo sapiens
atttagaactgagta

SEQ ID NO: 1667255 - DNA, 15 bp, Homo sapiens
aatttagaactgagt

SEQ ID NO: 1667256 - DNA, 15 bp, Homo sapiens
aaatttagaactgag

SEQ ID NO: 1667257 - DNA, 15 bp, Homo sapiens
gaaatttagaactga

SEQ ID NO: 1667258 - DNA, 15 bp, Homo sapiens
agaaatttagaactg

SEQ ID NO: 1667259 - DNA, 15 bp, Homo sapiens
gagaaatttagaact

SEQ ID NO: 1667260 - DNA, 15 bp, Homo sapiens
agagaaatttagaac

SEQ ID NO: 1667261 - DNA, 15 bp, Homo sapiens
aagagaaatttagaa

SEQ ID NO: 1667262 - DNA, 15 bp, Homo sapiens
caagagaaatttaga

SEQ ID NO: 1667263 - DNA, 15 bp, Homo sapiens
ccaagagaaatttag

SEQ ID NO: 1667264 - DNA, 15 bp, Homo sapiens
tccaagagaaattta

SEQ ID NO: 1667265 - DNA, 15 bp, Homo sapiens
ttccaagagaaattt

SEQ ID NO: 1667266 - DNA, 15 bp, Homo sapiens
tttccaagagaaatt

SEQ ID NO: 1667267 - DNA, 15 bp, Homo sapiens
atttccaagagaaat

SEQ ID NO: 1667268 - DNA, 15 bp, Homo sapiens
catttccaagagaaa

SEQ ID NO: 1667269 - DNA, 15 bp, Homo sapiens
tcatttccaagagaa

SEQ ID NO: 1667270 - DNA, 15 bp, Homo sapiens
ctcatttccaagaga

SEQ ID NO: 1667271 - DNA, 15 bp, Homo sapiens
cctcatttccaagag

SEQ ID NO: 1667272 - DNA, 15 bp, Homo sapiens
ccctcatttccaaga

SEQ ID NO: 1667273 - DNA, 15 bp, Homo sapiens
tccctcatttccaag

SEQ ID NO: 1667274 - DNA, 15 bp, Homo sapiens
ttccctcatttccaa

SEQ ID NO: 1667275 - DNA, 15 bp, Homo sapiens
tttccctcatttcca

SEQ ID NO: 1667276 - DNA, 15 bp, Homo sapiens
ctttccctcatttcc

SEQ ID NO: 1667277 - DNA, 15 bp, Homo sapiens
gctttccctcatttc

SEQ ID NO: 1667278 - DNA, 15 bp, Homo sapiens
tgctttccctcattt

SEQ ID NO: 1667279 - DNA, 15 bp, Homo sapiens
atgctttccctcatt

SEQ ID NO: 1667280 - DNA, 15 bp, Homo sapiens
tatgctttccctcat

SEQ ID NO: 1667281 - DNA, 15 bp, Homo sapiens
gtatgctttccctca

SEQ ID NO: 1667282 - DNA, 15 bp, Homo sapiens
tgtatgctttccctc

SEQ ID NO: 1667283 - DNA, 15 bp, Homo sapiens
ctgtatgctttccct

SEQ ID NO: 1667284 - DNA, 15 bp, Homo sapiens
tctgtatgctttccc

SEQ ID NO: 1667285 - DNA, 15 bp, Homo sapiens
ttctgtatgctttcc

SEQ ID NO: 1667286 - DNA, 15 bp, Homo sapiens
attctgtatgctttc

SEQ ID NO: 1667287 - DNA, 15 bp, Homo sapiens
tattctgtatgcttt

SEQ ID NO: 1667288 - DNA, 15 bp, Homo sapiens
ctattctgtatgctt

SEQ ID NO: 1667289 - DNA, 15 bp, Homo sapiens
tctattctgtatgct

SEQ ID NO: 1667290 - DNA, 15 bp, Homo sapiens
ctctattctgtatgc

SEQ ID NO: 1667291 - DNA, 15 bp, Homo sapiens
gctctattctgtatg

SEQ ID NO: 1667292 - DNA, 15 bp, Homo sapiens
agctctattctgtat

SEQ ID NO: 1667293 - DNA, 15 bp, Homo sapiens
cagctctattctgta

SEQ ID NO: 1667294 - DNA, 15 bp, Homo sapiens
ccagctctattctgt

SEQ ID NO: 1667295 - DNA, 15 bp, Homo sapiens
tccagctctattctg

SEQ ID NO: 1667296 - DNA, 15 bp, Homo sapiens
ttccagctctattct

SEQ ID NO: 1667297 - DNA, 15 bp, Homo sapiens
attccagctctattc

SEQ ID NO: 1667298 - DNA, 15 bp, Homo sapiens
cattccagctctatt

SEQ ID NO: 1667299 - DNA, 15 bp, Homo sapiens
tcattccagctctat

SEQ ID NO: 1667300 - DNA, 15 bp, Homo sapiens
ttcattccagctcta

SEQ ID NO: 1667301 - DNA, 15 bp, Homo sapiens
attcattccagctct

SEQ ID NO: 1667302 - DNA, 15 bp, Homo sapiens
tattcattccagctc

SEQ ID NO: 1667303 - DNA, 15 bp, Homo sapiens
ctattcattccagct

SEQ ID NO: 1667304 - DNA, 15 bp, Homo sapiens
cctattcattccagc

SEQ ID NO: 1667305 - DNA, 15 bp, Homo sapiens
tcctattcattccag

SEQ ID NO: 1667306 - DNA, 15 bp, Homo sapiens
atcctattcattcca

SEQ ID NO: 1667307 - DNA, 15 bp, Homo sapiens
tatcctattcattcc

SEQ ID NO: 1667308 - DNA, 15 bp, Homo sapiens
ttatcctattcattc

SEQ ID NO: 1667309 - DNA, 15 bp, Homo sapiens
attatcctattcatt

SEQ ID NO: 1667310 - DNA, 15 bp, Homo sapiens
aattatcctattcat

SEQ ID NO: 1667311 - DNA, 15 bp, Homo sapiens
aaattatcctattca

SEQ ID NO: 1667312 - DNA, 15 bp, Homo sapiens
aaaattatcctattc

SEQ ID NO: 1667313 - DNA, 15 bp, Homo sapiens
aaaaattatcctatt

SEQ ID NO: 1667314 - DNA, 15 bp, Homo sapiens
aaaaaattatcctat

SEQ ID NO: 1667315 - DNA, 15 bp, Homo sapiens
aaaaaaattatccta

SEQ ID NO: 1667316 - DNA, 15 bp, Homo sapiens
aaaaaaaattatcct

SEQ ID NO: 1667317 - DNA, 15 bp, Homo sapiens
aaaaaaaaattatcc

SEQ ID NO: 1667318 - DNA, 15 bp, Homo sapiens
tagcaaaaaaaaaaa

SEQ ID NO: 1667319 - DNA, 15 bp, Homo sapiens
ttagcaaaaaaaaaa

SEQ ID NO: 1667320 - DNA, 15 bp, Homo sapiens
cttagcaaaaaaaaa

SEQ ID NO: 1667321 - DNA, 15 bp, Homo sapiens
acttagcaaaaaaaa

SEQ ID NO: 1667322 - DNA, 15 bp, Homo sapiens
aacttagcaaaaaaa

SEQ ID NO: 1667323 - DNA, 15 bp, Homo sapiens
caacttagcaaaaaa

SEQ ID NO: 1667324 - DNA, 15 bp, Homo sapiens
ccaacttagcaaaaa

SEQ ID NO: 1667325 - DNA, 15 bp, Homo sapiens
accaacttagcaaaa

SEQ ID NO: 1667326 - DNA, 15 bp, Homo sapiens
taccaacttagcaaa

SEQ ID NO: 1667327 - DNA, 15 bp, Homo sapiens
ctaccaacttagcaa

SEQ ID NO: 1667328 - DNA, 15 bp, Homo sapiens
gctaccaacttagca

SEQ ID NO: 1667329 - DNA, 15 bp, Homo sapiens
ggctaccaacttagc

SEQ ID NO: 1667330 - DNA, 15 bp, Homo sapiens
tggctaccaacttag

SEQ ID NO: 1667331 - DNA, 15 bp, Homo sapiens
ctggctaccaactta

SEQ ID NO: 1667332 - DNA, 15 bp, Homo sapiens
tctggctaccaactt

SEQ ID NO: 1667333 - DNA, 15 bp, Homo sapiens
ttctggctaccaact

SEQ ID NO: 1667334 - DNA, 15 bp, Homo sapiens
attctggctaccaac

SEQ ID NO: 1667335 - DNA, 15 bp, Homo sapiens
tattctggctaccaa

SEQ ID NO: 1667336 - DNA, 15 bp, Homo sapiens
atattctggctacca

SEQ ID NO: 1667337 - DNA, 15 bp, Homo sapiens
tatattctggctacc

SEQ ID NO: 1667338 - DNA, 15 bp, Homo sapiens
ttatattctggctac

SEQ ID NO: 1667339 - DNA, 15 bp, Homo sapiens
gttatattctggcta

SEQ ID NO: 1667340 - DNA, 15 bp, Homo sapiens
tgttatattctggct

SEQ ID NO: 1667341 - DNA, 15 bp, Homo sapiens
ctgttatattctggc

SEQ ID NO: 1667342 - DNA, 15 bp, Homo sapiens
gctgttatattctgg

SEQ ID NO: 1667343 - DNA, 15 bp, Homo sapiens
agctgttatattctg

SEQ ID NO: 1667344 - DNA, 15 bp, Homo sapiens
gagctgttatattct

SEQ ID NO: 1667345 - DNA, 15 bp, Homo sapiens
ggagctgttatattc

SEQ ID NO: 1667346 - DNA, 15 bp, Homo sapiens
cggagctgttatatt

SEQ ID NO: 1667347 - DNA, 15 bp, Homo sapiens
gcggagctgttatat

SEQ ID NO: 1667348 - DNA, 15 bp, Homo sapiens
tgcggagctgttata

SEQ ID NO: 1667349 - DNA, 15 bp, Homo sapiens
gtgcggagctgttat

SEQ ID NO: 1667350 - DNA, 15 bp, Homo sapiens
tgtgcggagctgtta

SEQ ID NO: 1667351 - DNA, 15 bp, Homo sapiens
ttgtgcggagctgtt

SEQ ID NO: 1667352 - DNA, 15 bp, Homo sapiens
gttgtgcggagctgt

SEQ ID NO: 1667353 - DNA, 15 bp, Homo sapiens
agttgtgcggagctg

SEQ ID NO: 1667354 - DNA, 15 bp, Homo sapiens
cagttgtgcggagct

SEQ ID NO: 1667355 - DNA, 15 bp, Homo sapiens
acagttgtgcggagc

SEQ ID NO: 1667356 - DNA, 15 bp, Homo sapiens
tacagttgtgcggag

SEQ ID NO: 1667357 - DNA, 15 bp, Homo sapiens
ttacagttgtgcgga

SEQ ID NO: 1667358 - DNA, 15 bp, Homo sapiens
tttacagttgtgcgg

SEQ ID NO: 1667359 - DNA, 15 bp, Homo sapiens
atttacagttgtgcg

SEQ ID NO: 1667360 - DNA, 15 bp, Homo sapiens
catttacagttgtgc

SEQ ID NO: 1667361 - DNA, 15 bp, Homo sapiens
acatttacagttgtg

SEQ ID NO: 1667362 - DNA, 15 bp, Homo sapiens
gacatttacagttgt

SEQ ID NO: 1667363 - DNA, 15 bp, Homo sapiens
ggacatttacagttg

SEQ ID NO: 1667364 - DNA, 15 bp, Homo sapiens
tggacatttacagtt

SEQ ID NO: 1667365 - DNA, 15 bp, Homo sapiens
gtggacatttacagt

SEQ ID NO: 1667366 - DNA, 15 bp, Homo sapiens
agtggacatttacag

SEQ ID NO: 1667367 - DNA, 15 bp, Homo sapiens
gagtggacatttaca

SEQ ID NO: 1667368 - DNA, 15 bp, Homo sapiens
agagtggacatttac

SEQ ID NO: 1667369 - DNA, 15 bp, Homo sapiens
aagagtggacattta

SEQ ID NO: 1667370 - DNA, 15 bp, Homo sapiens
gaagagtggacattt

SEQ ID NO: 1667371 - DNA, 15 bp, Homo sapiens
tgaagagtggacatt

SEQ ID NO: 1667372 - DNA, 15 bp, Homo sapiens
ttgaagagtggacat

SEQ ID NO: 1667373 - DNA, 15 bp, Homo sapiens
attgaagagtggaca

SEQ ID NO: 1667374 - DNA, 15 bp, Homo sapiens
gattgaagagtggac

SEQ ID NO: 1667375 - DNA, 15 bp, Homo sapiens
ggattgaagagtgga

SEQ ID NO: 1667376 - DNA, 15 bp, Homo sapiens
tggattgaagagtgg

SEQ ID NO: 1667377 - DNA, 15 bp, Homo sapiens
gtggattgaagagtg

SEQ ID NO: 1667378 - DNA, 15 bp, Homo sapiens
tgtggattgaagagt

SEQ ID NO: 1667379 - DNA, 15 bp, Homo sapiens
atgtggattgaagag

SEQ ID NO: 1667380 - DNA, 15 bp, Homo sapiens
catgtggattgaaga

SEQ ID NO: 1667381 - DNA, 15 bp, Homo sapiens
tcatgtggattgaag

SEQ ID NO: 1667382 - DNA, 15 bp, Homo sapiens
ttcatgtggattgaa

SEQ ID NO: 1667383 - DNA, 15 bp, Homo sapiens
cttcatgtggattga

SEQ ID NO: 1667384 - DNA, 15 bp, Homo sapiens
tcttcatgtggattg

SEQ ID NO: 1667385 - DNA, 15 bp, Homo sapiens
ttcttcatgtggatt

SEQ ID NO: 1667386 - DNA, 15 bp, Homo sapiens
tttcttcatgtggat

SEQ ID NO: 1667387 - DNA, 15 bp, Homo sapiens
ttttcttcatgtgga

SEQ ID NO: 1667388 - DNA, 15 bp, Homo sapiens
cttttcttcatgtgg

SEQ ID NO: 1667389 - DNA, 15 bp, Homo sapiens
ccttttcttcatgtg

SEQ ID NO: 1667390 - DNA, 15 bp, Homo sapiens
cccttttcttcatgt

SEQ ID NO: 1667391 - DNA, 15 bp, Homo sapiens
acccttttcttcatg

SEQ ID NO: 1667392 - DNA, 15 bp, Homo sapiens
tacccttttcttcat

SEQ ID NO: 1667393 - DNA, 15 bp, Homo sapiens
ttacccttttcttca

SEQ ID NO: 1667394 - DNA, 15 bp, Homo sapiens
tttacccttttcttc

SEQ ID NO: 1667395 - DNA, 15 bp, Homo sapiens
ttttacccttttctt

SEQ ID NO: 1667396 - DNA, 15 bp, Homo sapiens
tttttacccttttct

SEQ ID NO: 1667397 - DNA, 15 bp, Homo sapiens
atttttacccttttc

SEQ ID NO: 1667398 - DNA, 15 bp, Homo sapiens
tatttttaccctttt

SEQ ID NO: 1667399 - DNA, 15 bp, Homo sapiens
atatttttacccttt

SEQ ID NO: 1667400 - DNA, 15 bp, Homo sapiens
catatttttaccctt

SEQ ID NO: 1667401 - DNA, 15 bp, Homo sapiens
ccatatttttaccct

SEQ ID NO: 1667402 - DNA, 15 bp, Homo sapiens
accatatttttaccc

SEQ ID NO: 1667403 - DNA, 15 bp, Homo sapiens
aaccatatttttacc

SEQ ID NO: 1667404 - DNA, 15 bp, Homo sapiens
caaccatatttttac

SEQ ID NO: 1667405 - DNA, 15 bp, Homo sapiens
tcaaccatattttta

SEQ ID NO: 1667406 - DNA, 15 bp, Homo sapiens
ttcaaccatattttt

SEQ ID NO: 1667407 - DNA, 15 bp, Homo sapiens
gttcaaccatatttt

SEQ ID NO: 1667408 - DNA, 15 bp, Homo sapiens
agttcaaccatattt

SEQ ID NO: 1667409 - DNA, 15 bp, Homo sapiens
gagttcaaccatatt

SEQ ID NO: 1667410 - DNA, 15 bp, Homo sapiens
tgagttcaaccatat

SEQ ID NO: 1667411 - DNA, 15 bp, Homo sapiens
ttgagttcaaccata

SEQ ID NO: 1667412 - DNA, 15 bp, Homo sapiens
gttgagttcaaccat

SEQ ID NO: 1667413 - DNA, 15 bp, Homo sapiens
ggttgagttcaacca

SEQ ID NO: 1667414 - DNA, 15 bp, Homo sapiens
tggttgagttcaacc

SEQ ID NO: 1667415 - DNA, 15 bp, Homo sapiens
gtggttgagttcaac

SEQ ID NO: 1667416 - DNA, 15 bp, Homo sapiens
agtggttgagttcaa

SEQ ID NO: 1667417 - DNA, 15 bp, Homo sapiens
tagtggttgagttca

SEQ ID NO: 1667418 - DNA, 15 bp, Homo sapiens
ctagtggttgagttc

SEQ ID NO: 1667419 - DNA, 15 bp, Homo sapiens
actagtggttgagtt

SEQ ID NO: 1667420 - DNA, 15 bp, Homo sapiens
aactagtggttgagt

SEQ ID NO: 1667421 - DNA, 15 bp, Homo sapiens
caactagtggttgag

SEQ ID NO: 1667422 - DNA, 15 bp, Homo sapiens
gcaactagtggttga

SEQ ID NO: 1667423 - DNA, 15 bp, Homo sapiens
ggcaactagtggttg

SEQ ID NO: 1667424 - DNA, 15 bp, Homo sapiens
gggcaactagtggtt

SEQ ID NO: 1667425 - DNA, 15 bp, Homo sapiens
tgggcaactagtggt

SEQ ID NO: 1667426 - DNA, 15 bp, Homo sapiens
atgggcaactagtgg

SEQ ID NO: 1667427 - DNA, 15 bp, Homo sapiens
aatgggcaactagtg

SEQ ID NO: 1667428 - DNA, 15 bp, Homo sapiens
taatgggcaactagt

SEQ ID NO: 1667429 - DNA, 15 bp, Homo sapiens
ctaatgggcaactag

SEQ ID NO: 1667430 - DNA, 15 bp, Homo sapiens
tctaatgggcaacta

SEQ ID NO: 1667431 - DNA, 15 bp, Homo sapiens
ttctaatgggcaact

SEQ ID NO: 1667432 - DNA, 15 bp, Homo sapiens
gttctaatgggcaac

SEQ ID NO: 1667433 - DNA, 15 bp, Homo sapiens
tgttctaatgggcaa

SEQ ID NO: 1667434 - DNA, 15 bp, Homo sapiens
ctgttctaatgggca

SEQ ID NO: 1667435 - DNA, 15 bp, Homo sapiens
tctgttctaatgggc

SEQ ID NO: 1667436 - DNA, 15 bp, Homo sapiens
gtctgttctaatggg

SEQ ID NO: 1667437 - DNA, 15 bp, Homo sapiens
agtctgttctaatgg

SEQ ID NO: 1667438 - DNA, 15 bp, Homo sapiens
aagtctgttctaatg

SEQ ID NO: 1667439 - DNA, 15 bp, Homo sapiens
aaagtctgttctaat

SEQ ID NO: 1667440 - DNA, 15 bp, Homo sapiens
gaaagtctgttctaa

SEQ ID NO: 1667441 - DNA, 15 bp, Homo sapiens
ggaaagtctgttcta

SEQ ID NO: 1667442 - DNA, 15 bp, Homo sapiens
gggaaagtctgttct

SEQ ID NO: 1667443 - DNA, 15 bp, Homo sapiens
tgggaaagtctgttc

SEQ ID NO: 1667444 - DNA, 15 bp, Homo sapiens
ctgggaaagtctgtt

SEQ ID NO: 1667445 - DNA, 15 bp, Homo sapiens
actgggaaagtctgt

SEQ ID NO: 1667446 - DNA, 15 bp, Homo sapiens
cactgggaaagtctg

SEQ ID NO: 1667447 - DNA, 15 bp, Homo sapiens
acactgggaaagtct

SEQ ID NO: 1667448 - DNA, 15 bp, Homo sapiens
tacactgggaaagtc

SEQ ID NO: 1667449 - DNA, 15 bp, Homo sapiens
gtacactgggaaagt

SEQ ID NO: 1667450 - DNA, 15 bp, Homo sapiens
agtacactgggaaag

SEQ ID NO: 1667451 - DNA, 15 bp, Homo sapiens
cagtacactgggaaa

SEQ ID NO: 1667452 - DNA, 15 bp, Homo sapiens
gcagtacactgggaa

SEQ ID NO: 1667453 - DNA, 15 bp, Homo sapiens
tgcagtacactggga

SEQ ID NO: 1667454 - DNA, 15 bp, Homo sapiens
atgcagtacactggg

SEQ ID NO: 1667455 - DNA, 15 bp, Homo sapiens
aatgcagtacactgg

SEQ ID NO: 1667456 - DNA, 15 bp, Homo sapiens
aaatgcagtacactg

SEQ ID NO: 1667457 - DNA, 15 bp, Homo sapiens
gaaatgcagtacact

SEQ ID NO: 1667458 - DNA, 15 bp, Homo sapiens
tgaaatgcagtacac

SEQ ID NO: 1667459 - DNA, 15 bp, Homo sapiens
ttgaaatgcagtaca

SEQ ID NO: 1667460 - DNA, 15 bp, Homo sapiens
attgaaatgcagtac

SEQ ID NO: 1667461 - DNA, 15 bp, Homo sapiens
tattgaaatgcagta

SEQ ID NO: 1667462 - DNA, 15 bp, Homo sapiens
gtattgaaatgcagt

SEQ ID NO: 1667463 - DNA, 15 bp, Homo sapiens
agtattgaaatgcag

SEQ ID NO: 1667464 - DNA, 15 bp, Homo sapiens
aagtattgaaatgca

SEQ ID NO: 1667465 - DNA, 15 bp, Homo sapiens
aaagtattgaaatgc

SEQ ID NO: 1667466 - DNA, 15 bp, Homo sapiens
aaaagtattgaaatg

SEQ ID NO: 1667467 - DNA, 15 bp, Homo sapiens
aaaaagtattgaaat

SEQ ID NO: 1667468 - DNA, 15 bp, Homo sapiens
gaaaaagtattgaaa

SEQ ID NO: 1667469 - DNA, 15 bp, Homo sapiens
agaaaaagtattgaa

SEQ ID NO: 1667470 - DNA, 15 bp, Homo sapiens
aagaaaaagtattga

SEQ ID NO: 1667471 - DNA, 15 bp, Homo sapiens
aaagaaaaagtattg

SEQ ID NO: 1667472 - DNA, 15 bp, Homo sapiens
aaaagaaaaagtatt

SEQ ID NO: 1667473 - DNA, 15 bp, Homo sapiens
taaaagaaaaagtat

SEQ ID NO: 1667474 - DNA, 15 bp, Homo sapiens
ataaaagaaaaagta

SEQ ID NO: 1667475 - DNA, 15 bp, Homo sapiens
gataaaagaaaaagt

SEQ ID NO: 1667476 - DNA, 15 bp, Homo sapiens
agataaaagaaaaag

SEQ ID NO: 1667477 - DNA, 15 bp, Homo sapiens
gagataaaagaaaaa

SEQ ID NO: 1667478 - DNA, 15 bp, Homo sapiens
agagataaaagaaaa

SEQ ID NO: 1667479 - DNA, 15 bp, Homo sapiens
aagagataaaagaaa

SEQ ID NO: 1667480 - DNA, 15 bp, Homo sapiens
gaaaagagataaaag

SEQ ID NO: 1667481 - DNA, 15 bp, Homo sapiens
tgaaaagagataaaa

SEQ ID NO: 1667482 - DNA, 15 bp, Homo sapiens
ctgaaaagagataaa

SEQ ID NO: 1667483 - DNA, 15 bp, Homo sapiens
tctgaaaagagataa

SEQ ID NO: 1667484 - DNA, 15 bp, Homo sapiens
atctgaaaagagata

SEQ ID NO: 1667485 - DNA, 15 bp, Homo sapiens
gatctgaaaagagat

SEQ ID NO: 1667486 - DNA, 15 bp, Homo sapiens
agatctgaaaagaga

SEQ ID NO: 1667487 - DNA, 15 bp, Homo sapiens
aagatctgaaaagag

SEQ ID NO: 1667488 - DNA, 15 bp, Homo sapiens
gaagatctgaaaaga

SEQ ID NO: 1667489 - DNA, 15 bp, Homo sapiens
ggaagatctgaaaag

SEQ ID NO: 1667490 - DNA, 15 bp, Homo sapiens
aggaagatctgaaaa

SEQ ID NO: 1667491 - DNA, 15 bp, Homo sapiens
gaggaagatctgaaa

SEQ ID NO: 1667492 - DNA, 15 bp, Homo sapiens
tgaggaagatctgaa

SEQ ID NO: 1667493 - DNA, 15 bp, Homo sapiens
ctgaggaagatctga

SEQ ID NO: 1667494 - DNA, 15 bp, Homo sapiens
tctgaggaagatctg

SEQ ID NO: 1667495 - DNA, 15 bp, Homo sapiens
ttctgaggaagatct

SEQ ID NO: 1667496 - DNA, 15 bp, Homo sapiens
cttctgaggaagatc

SEQ ID NO: 1667497 - DNA, 15 bp, Homo sapiens
tcttctgaggaagat

SEQ ID NO: 1667498 - DNA, 15 bp, Homo sapiens
ttcttctgaggaaga

SEQ ID NO: 1667499 - DNA, 15 bp, Homo sapiens
attcttctgaggaag

SEQ ID NO: 1667500 - DNA, 15 bp, Homo sapiens
tattcttctgaggaa

SEQ ID NO: 1667501 - DNA, 15 bp, Homo sapiens
ctattcttctgagga

SEQ ID NO: 1667502 - DNA, 15 bp, Homo sapiens
cctattcttctgagg

SEQ ID NO: 1667503 - DNA, 15 bp, Homo sapiens
gcctattcttctgag

SEQ ID NO: 1667504 - DNA, 15 bp, Homo sapiens
agcctattcttctga

SEQ ID NO: 1667505 - DNA, 15 bp, Homo sapiens
aagcctattcttctg

SEQ ID NO: 1667506 - DNA, 15 bp, Homo sapiens
caagcctattcttct

SEQ ID NO: 1667507 - DNA, 15 bp, Homo sapiens
acaagcctattcttc

SEQ ID NO: 1667508 - DNA, 15 bp, Homo sapiens
aacaagcctattctt

SEQ ID NO: 1667509 - DNA, 15 bp, Homo sapiens
caacaagcctattct

SEQ ID NO: 1667510 - DNA, 15 bp, Homo sapiens
acaacaagcctattc

SEQ ID NO: 1667511 - DNA, 15 bp, Homo sapiens
aacaacaagcctatt

SEQ ID NO: 1667512 - DNA, 15 bp, Homo sapiens
aaacaacaagcctat

SEQ ID NO: 1667513 - DNA, 15 bp, Homo sapiens
aaaacaacaagccta

SEQ ID NO: 1667514 - DNA, 15 bp, Homo sapiens
taaaacaacaagcct

SEQ ID NO: 1667515 - DNA, 15 bp, Homo sapiens
gtaaaacaacaagcc

SEQ ID NO: 1667516 - DNA, 15 bp, Homo sapiens
tcctatctgggacca

SEQ ID NO: 1667517 - DNA, 15 bp, Homo sapiens
ttcctatctgggacc

SEQ ID NO: 1667518 - DNA, 15 bp, Homo sapiens
cttcctatctgggac

SEQ ID NO: 1667519 - DNA, 15 bp, Homo sapiens
tcttcctatctggga

SEQ ID NO: 1667520 - DNA, 15 bp, Homo sapiens
atcttcctatctggg

SEQ ID NO: 1667521 - DNA, 15 bp, Homo sapiens
tatcttcctatctgg

SEQ ID NO: 1667522 - DNA, 15 bp, Homo sapiens
ttatcttcctatctg

SEQ ID NO: 1667523 - DNA, 15 bp, Homo sapiens
tttatcttcctatct

SEQ ID NO: 1667524 - DNA, 15 bp, Homo sapiens
ctttatcttcctatc

SEQ ID NO: 1667525 - DNA, 15 bp, Homo sapiens
actttatcttcctat

SEQ ID NO: 1667526 - DNA, 15 bp, Homo sapiens
gactttatcttccta

SEQ ID NO: 1667527 - DNA, 15 bp, Homo sapiens
agactttatcttcct

SEQ ID NO: 1667528 - DNA, 15 bp, Homo sapiens
gagactttatcttcc

SEQ ID NO: 1667529 - DNA, 15 bp, Homo sapiens
tgagactttatcttc

SEQ ID NO: 1667530 - DNA, 15 bp, Homo sapiens
ttttgagactttatc

SEQ ID NO: 1667531 - DNA, 15 bp, Homo sapiens
tttttgagactttat

SEQ ID NO: 1667532 - DNA, 15 bp, Homo sapiens
gtttttgagacttta

SEQ ID NO: 1667533 - DNA, 15 bp, Homo sapiens
tgtttttgagacttt

SEQ ID NO: 1667534 - DNA, 15 bp, Homo sapiens
ttgtttttgagactt

SEQ ID NO: 1667535 - DNA, 15 bp, Homo sapiens
gttgtttttgagact

SEQ ID NO: 1667536 - DNA, 15 bp, Homo sapiens
ggttgtttttgagac

SEQ ID NO: 1667537 - DNA, 15 bp, Homo sapiens
tggttgtttttgaga

SEQ ID NO: 1667538 - DNA, 15 bp, Homo sapiens
gtggttgtttttgag

SEQ ID NO: 1667539 - DNA, 15 bp, Homo sapiens
ggtggttgtttttga

SEQ ID NO: 1667540 - DNA, 15 bp, Homo sapiens
tggtggttgtttttg

SEQ ID NO: 1667541 - DNA, 15 bp, Homo sapiens
gtggtggttgttttt

SEQ ID NO: 1667542 - DNA, 15 bp, Homo sapiens
tgtggtggttgtttt

SEQ ID NO: 1667543 - DNA, 15 bp, Homo sapiens
gtgtggtggttgttt

SEQ ID NO: 1667544 - DNA, 15 bp, Homo sapiens
cgtgtggtggttgtt

SEQ ID NO: 1667545 - DNA, 15 bp, Homo sapiens
acgtgtggtggttgt

SEQ ID NO: 1667546 - DNA, 15 bp, Homo sapiens
gacgtgtggtggttg

SEQ ID NO: 1667547 - DNA, 15 bp, Homo sapiens
tgacgtgtggtggtt

SEQ ID NO: 1667548 - DNA, 15 bp, Homo sapiens
ttgacgtgtggtggt

SEQ ID NO: 1667549 - DNA, 15 bp, Homo sapiens
cttgacgtgtggtgg

SEQ ID NO: 1667550 - DNA, 15 bp, Homo sapiens
ccttgacgtgtggtg

SEQ ID NO: 1667551 - DNA, 15 bp, Homo sapiens
accttgacgtgtggt

SEQ ID NO: 1667552 - DNA, 15 bp, Homo sapiens
caccttgacgtgtgg

SEQ ID NO: 1667553 - DNA, 15 bp, Homo sapiens
gcaccttgacgtgtg

SEQ ID NO: 1667554 - DNA, 15 bp, Homo sapiens
cgcaccttgacgtgt

SEQ ID NO: 1667555 - DNA, 15 bp, Homo sapiens
acgcaccttgacgtg

SEQ ID NO: 1667556 - DNA, 15 bp, Homo sapiens
tacgcaccttgacgt

SEQ ID NO: 1667557 - DNA, 15 bp, Homo sapiens
ttacgcaccttgacg

SEQ ID NO: 1667558 - DNA, 15 bp, Homo sapiens
cttacgcaccttgac

SEQ ID NO: 1667559 - DNA, 15 bp, Homo sapiens
gcttacgcaccttga

SEQ ID NO: 1667560 - DNA, 15 bp, Homo sapiens
agcttacgcaccttg

SEQ ID NO: 1667561 - DNA, 15 bp, Homo sapiens
cagcttacgcacctt

SEQ ID NO: 1667562 - DNA, 15 bp, Homo sapiens
acagcttacgcacct

SEQ ID NO: 1667563 - DNA, 15 bp, Homo sapiens
gacagcttacgcacc

SEQ ID NO: 1667564 - DNA, 15 bp, Homo sapiens
ggacagcttacgcac

SEQ ID NO: 1667565 - DNA, 15 bp, Homo sapiens
gggacagcttacgca

SEQ ID NO: 1667566 - DNA, 15 bp, Homo sapiens
agggacagcttacgc

SEQ ID NO: 1667567 - DNA, 15 bp, Homo sapiens
tagggacagcttacg

SEQ ID NO: 1667568 - DNA, 15 bp, Homo sapiens
ttagggacagcttac

SEQ ID NO: 1667569 - DNA, 15 bp, Homo sapiens
tttagggacagctta

SEQ ID NO: 1667570 - DNA, 15 bp, Homo sapiens
ttttagggacagctt

SEQ ID NO: 1667571 - DNA, 15 bp, Homo sapiens
cttttagggacagct

SEQ ID NO: 1667572 - DNA, 15 bp, Homo sapiens
gcttttagggacagc

SEQ ID NO: 1667573 - DNA, 15 bp, Homo sapiens
tgcttttagggacag

SEQ ID NO: 1667574 - DNA, 15 bp, Homo sapiens
atgcttttagggaca

SEQ ID NO: 1667575 - DNA, 15 bp, Homo sapiens
tatgcttttagggac

SEQ ID NO: 1667576 - DNA, 15 bp, Homo sapiens
ttatgcttttaggga

SEQ ID NO: 1667577 - DNA, 15 bp, Homo sapiens
attatgcttttaggg

SEQ ID NO: 1667578 - DNA, 15 bp, Homo sapiens
tattatgcttttagg

SEQ ID NO: 1667579 - DNA, 15 bp, Homo sapiens
ttattatgcttttag

SEQ ID NO: 1667580 - DNA, 15 bp, Homo sapiens
cttattatgctttta

SEQ ID NO: 1667581 - DNA, 15 bp, Homo sapiens
acttattatgctttt

SEQ ID NO: 1667582 - DNA, 15 bp, Homo sapiens
tacttattatgcttt

SEQ ID NO: 1667583 - DNA, 15 bp, Homo sapiens
ctacttattatgctt

SEQ ID NO: 1667584 - DNA, 15 bp, Homo sapiens
actacttattatgct

SEQ ID NO: 1667585 - DNA, 15 bp, Homo sapiens
gactacttattatgc

SEQ ID NO: 1667586 - DNA, 15 bp, Homo sapiens
agactacttattatg

SEQ ID NO: 1667587 - DNA, 15 bp, Homo sapiens
aagactacttattat

SEQ ID NO: 1667588 - DNA, 15 bp, Homo sapiens
taagactacttatta

SEQ ID NO: 1667589 - DNA, 15 bp, Homo sapiens
ttaagactacttatt

SEQ ID NO: 1667590 - DNA, 15 bp, Homo sapiens
attaagactacttat

SEQ ID NO: 1667591 - DNA, 15 bp, Homo sapiens
aattaagactactta

SEQ ID NO: 1667592 - DNA, 15 bp, Homo sapiens
aaattaagactactt

SEQ ID NO: 1667593 - DNA, 15 bp, Homo sapiens
aaaattaagactact

SEQ ID NO: 1667594 - DNA, 15 bp, Homo sapiens
caaaattaagactac

SEQ ID NO: 1667595 - DNA, 15 bp, Homo sapiens
tcaaaattaagacta

SEQ ID NO: 1667596 - DNA, 15 bp, Homo sapiens
atcaaaattaagact

SEQ ID NO: 1667597 - DNA, 15 bp, Homo sapiens
aatcaaaattaagac

SEQ ID NO: 1667598 - DNA, 15 bp, Homo sapiens
aaatcaaaattaaga

SEQ ID NO: 1667599 - DNA, 15 bp, Homo sapiens
aaaatcaaaattaag

SEQ ID NO: 1667600 - DNA, 15 bp, Homo sapiens
caaaatcaaaattaa

SEQ ID NO: 1667601 - DNA, 15 bp, Homo sapiens
acaaaatcaaaatta

SEQ ID NO: 1667602 - DNA, 15 bp, Homo sapiens
aacaaaatcaaaatt

SEQ ID NO: 1667603 - DNA, 15 bp, Homo sapiens
aaacaaaatcaaaat

SEQ ID NO: 1667604 - DNA, 15 bp, Homo sapiens
aaaacaaaatcaaaa

SEQ ID NO: 1667605 - DNA, 15 bp, Homo sapiens
gaaaacaaaatcaaa

SEQ ID NO: 1667606 - DNA, 15 bp, Homo sapiens
ggaaaacaaaatcaa

SEQ ID NO: 1667607 - DNA, 15 bp, Homo sapiens
tggaaaacaaaatca

SEQ ID NO: 1667608 - DNA, 15 bp, Homo sapiens
ctggaaaacaaaatc

SEQ ID NO: 1667609 - DNA, 15 bp, Homo sapiens
actggaaaacaaaat

SEQ ID NO: 1667610 - DNA, 15 bp, Homo sapiens
tactggaaaacaaaa

SEQ ID NO: 1667611 - DNA, 15 bp, Homo sapiens
atactggaaaacaaa

SEQ ID NO: 1667612 - DNA, 15 bp, Homo sapiens
tatactggaaaacaa

SEQ ID NO: 1667613 - DNA, 15 bp, Homo sapiens
gtatactggaaaaca

SEQ ID NO: 1667614 - DNA, 15 bp, Homo sapiens
tgtatactggaaaac

SEQ ID NO: 1667615 - DNA, 15 bp, Homo sapiens
atgtatactggaaaa

SEQ ID NO: 1667616 - DNA, 15 bp, Homo sapiens
aatgtatactggaaa

SEQ ID NO: 1667617 - DNA, 15 bp, Homo sapiens
caatgtatactggaa

SEQ ID NO: 1667618 - DNA, 15 bp, Homo sapiens
gcaatgtatactgga

SEQ ID NO: 1667619 - DNA, 15 bp, Homo sapiens
tgcaatgtatactgg

SEQ ID NO: 1667620 - DNA, 15 bp, Homo sapiens
gtgcaatgtatactg

SEQ ID NO: 1667621 - DNA, 15 bp, Homo sapiens
agtgcaatgtatact

SEQ ID NO: 1667622 - DNA, 15 bp, Homo sapiens
aagtgcaatgtatac

SEQ ID NO: 1667623 - DNA, 15 bp, Homo sapiens
taagtgcaatgtata

SEQ ID NO: 1667624 - DNA, 15 bp, Homo sapiens
ctaagtgcaatgtat

SEQ ID NO: 1667625 - DNA, 15 bp, Homo sapiens
actaagtgcaatgta

SEQ ID NO: 1667626 - DNA, 15 bp, Homo sapiens
cactaagtgcaatgt

SEQ ID NO: 1667627 - DNA, 15 bp, Homo sapiens
acactaagtgcaatg

SEQ ID NO: 1667628 - DNA, 15 bp, Homo sapiens
aacactaagtgcaat

SEQ ID NO: 1667629 - DNA, 15 bp, Homo sapiens
aaacactaagtgcaa

SEQ ID NO: 1667630 - DNA, 15 bp, Homo sapiens
gaaacactaagtgca

SEQ ID NO: 1667631 - DNA, 15 bp, Homo sapiens
tgaaacactaagtgc

SEQ ID NO: 1667632 - DNA, 15 bp, Homo sapiens
gtgaaacactaagtg

SEQ ID NO: 1667633 - DNA, 15 bp, Homo sapiens
agtgaaacactaagt

SEQ ID NO: 1667634 - DNA, 15 bp, Homo sapiens
cagtgaaacactaag

SEQ ID NO: 1667635 - DNA, 15 bp, Homo sapiens
tcagtgaaacactaa

SEQ ID NO: 1667636 - DNA, 15 bp, Homo sapiens
ctcagtgaaacacta

SEQ ID NO: 1667637 - DNA, 15 bp, Homo sapiens
cctcagtgaaacact

SEQ ID NO: 1667638 - DNA, 15 bp, Homo sapiens
acctcagtgaaacac

SEQ ID NO: 1667639 - DNA, 15 bp, Homo sapiens
gacctcagtgaaaca

SEQ ID NO: 1667640 - DNA, 15 bp, Homo sapiens
cgacctcagtgaaac

SEQ ID NO: 1667641 - DNA, 15 bp, Homo sapiens
acgacctcagtgaaa

SEQ ID NO: 1667642 - DNA, 15 bp, Homo sapiens
tacgacctcagtgaa

SEQ ID NO: 1667643 - DNA, 15 bp, Homo sapiens
atacgacctcagtga

SEQ ID NO: 1667644 - DNA, 15 bp, Homo sapiens
aatacgacctcagtg

SEQ ID NO: 1667645 - DNA, 15 bp, Homo sapiens
gaatacgacctcagt

SEQ ID NO: 1667646 - DNA, 15 bp, Homo sapiens
tgaatacgacctcag

SEQ ID NO: 1667647 - DNA, 15 bp, Homo sapiens
atgaatacgacctca

SEQ ID NO: 1667648 - DNA, 15 bp, Homo sapiens
gatgaatacgacctc

SEQ ID NO: 1667649 - DNA, 15 bp, Homo sapiens
tgatgaatacgacct

SEQ ID NO: 1667650 - DNA, 15 bp, Homo sapiens
atgatgaatacgacc

SEQ ID NO: 1667651 - DNA, 15 bp, Homo sapiens
aatgatgaatacgac

SEQ ID NO: 1667652 - DNA, 15 bp, Homo sapiens
taatgatgaatacga

SEQ ID NO: 1667653 - DNA, 15 bp, Homo sapiens
ataatgatgaatacg

SEQ ID NO: 1667654 - DNA, 15 bp, Homo sapiens
aataatgatgaatac

SEQ ID NO: 1667655 - DNA, 15 bp, Homo sapiens
gaataatgatgaata

SEQ ID NO: 1667656 - DNA, 15 bp, Homo sapiens
agaataatgatgaat

SEQ ID NO: 1667657 - DNA, 15 bp, Homo sapiens
cagaataatgatgaa

SEQ ID NO: 1667658 - DNA, 15 bp, Homo sapiens
gcagaataatgatga

SEQ ID NO: 1667659 - DNA, 15 bp, Homo sapiens
tgcagaataatgatg

SEQ ID NO: 1667660 - DNA, 15 bp, Homo sapiens
atgcagaataatgat

SEQ ID NO: 1667661 - DNA, 15 bp, Homo sapiens
tatgcagaataatga

SEQ ID NO: 1667662 - DNA, 15 bp, Homo sapiens
atatgcagaataatg

SEQ ID NO: 1667663 - DNA, 15 bp, Homo sapiens
catatgcagaataat

SEQ ID NO: 1667664 - DNA, 15 bp, Homo sapiens
tcatatgcagaataa

SEQ ID NO: 1667665 - DNA, 15 bp, Homo sapiens
atcatatgcagaata

SEQ ID NO: 1667666 - DNA, 15 bp, Homo sapiens
aatcatatgcagaat

SEQ ID NO: 1667667 - DNA, 15 bp, Homo sapiens
aaatcatatgcagaa

SEQ ID NO: 1667668 - DNA, 15 bp, Homo sapiens
caaatcatatgcaga

SEQ ID NO: 1667669 - DNA, 15 bp, Homo sapiens
ccaaatcatatgcag

SEQ ID NO: 1667670 - DNA, 15 bp, Homo sapiens
accaaatcatatgca

SEQ ID NO: 1667671 - DNA, 15 bp, Homo sapiens
taccaaatcatatgc

SEQ ID NO: 1667672 - DNA, 15 bp, Homo sapiens
ttaccaaatcatatg

SEQ ID NO: 1667673 - DNA, 15 bp, Homo sapiens
tttaccaaatcatat

SEQ ID NO: 1667674 - DNA, 15 bp, Homo sapiens
ttttaccaaatcata

SEQ ID NO: 1667675 - DNA, 15 bp, Homo sapiens
tttttaccaaatcat

SEQ ID NO: 1667676 - DNA, 15 bp, Homo sapiens
gtttttaccaaatca

SEQ ID NO: 1667677 - DNA, 15 bp, Homo sapiens
tgtttttaccaaatc

SEQ ID NO: 1667678 - DNA, 15 bp, Homo sapiens
ctgtttttaccaaat

SEQ ID NO: 1667679 - DNA, 15 bp, Homo sapiens
gctgtttttaccaaa

SEQ ID NO: 1667680 - DNA, 15 bp, Homo sapiens
agctgtttttaccaa

SEQ ID NO: 1667681 - DNA, 15 bp, Homo sapiens
aagctgtttttacca

SEQ ID NO: 1667682 - DNA, 15 bp, Homo sapiens
gaagctgtttttacc

SEQ ID NO: 1667683 - DNA, 15 bp, Homo sapiens
ggaagctgtttttac

SEQ ID NO: 1667684 - DNA, 15 bp, Homo sapiens
aggaagctgttttta

SEQ ID NO: 1667685 - DNA, 15 bp, Homo sapiens
taggaagctgttttt

SEQ ID NO: 1667686 - DNA, 15 bp, Homo sapiens
ttaggaagctgtttt

SEQ ID NO: 1667687 - DNA, 15 bp, Homo sapiens
gttaggaagctgttt

SEQ ID NO: 1667688 - DNA, 15 bp, Homo sapiens
agttaggaagctgtt

SEQ ID NO: 1667689 - DNA, 15 bp, Homo sapiens
tagttaggaagctgt

SEQ ID NO: 1667690 - DNA, 15 bp, Homo sapiens
ttagttaggaagctg

SEQ ID NO: 1667691 - DNA, 15 bp, Homo sapiens
gttagttaggaagct

SEQ ID NO: 1667692 - DNA, 15 bp, Homo sapiens
ggttagttaggaagc

SEQ ID NO: 1667693 - DNA, 15 bp, Homo sapiens
aggttagttaggaag

SEQ ID NO: 1667694 - DNA, 15 bp, Homo sapiens
caggttagttaggaa

SEQ ID NO: 1667695 - DNA, 15 bp, Homo sapiens
ccaggttagttagga

SEQ ID NO: 1667696 - DNA, 15 bp, Homo sapiens
cccaggttagttagg

SEQ ID NO: 1667697 - DNA, 15 bp, Homo sapiens
tcccaggttagttag

SEQ ID NO: 1667698 - DNA, 15 bp, Homo sapiens
ttcccaggttagtta

SEQ ID NO: 1667699 - DNA, 15 bp, Homo sapiens
cttcccaggttagtt

SEQ ID NO: 1667700 - DNA, 15 bp, Homo sapiens
gcttcccaggttagt

SEQ ID NO: 1667701 - DNA, 15 bp, Homo sapiens
tgcttcccaggttag

SEQ ID NO: 1667702 - DNA, 15 bp, Homo sapiens
ttgcttcccaggtta

SEQ ID NO: 1667703 - DNA, 15 bp, Homo sapiens
gttgcttcccaggtt

SEQ ID NO: 1667704 - DNA, 15 bp, Homo sapiens
agttgcttcccaggt

SEQ ID NO: 1667705 - DNA, 15 bp, Homo sapiens
cagttgcttcccagg

SEQ ID NO: 1667706 - DNA, 15 bp, Homo sapiens
ccagttgcttcccag

SEQ ID NO: 1667707 - DNA, 15 bp, Homo sapiens
cccagttgcttccca

SEQ ID NO: 1667708 - DNA, 15 bp, Homo sapiens
acccagttgcttccc

SEQ ID NO: 1667709 - DNA, 15 bp, Homo sapiens
cacccagttgcttcc

SEQ ID NO: 1667710 - DNA, 15 bp, Homo sapiens
acacccagttgcttc

SEQ ID NO: 1667711 - DNA, 15 bp, Homo sapiens
cacacccagttgctt

SEQ ID NO: 1667712 - DNA, 15 bp, Homo sapiens
tcacacccagttgct

SEQ ID NO: 1667713 - DNA, 15 bp, Homo sapiens
ctcacacccagttgc

SEQ ID NO: 1667714 - DNA, 15 bp, Homo sapiens
tctcacacccagttg

SEQ ID NO: 1667715 - DNA, 15 bp, Homo sapiens
atctcacacccagtt

SEQ ID NO: 1667716 - DNA, 15 bp, Homo sapiens
aatctcacacccagt

SEQ ID NO: 1667717 - DNA, 15 bp, Homo sapiens
taatctcacacccag

SEQ ID NO: 1667718 - DNA, 15 bp, Homo sapiens
ttaatctcacaccca

SEQ ID NO: 1667719 - DNA, 15 bp, Homo sapiens
gttaatctcacaccc

SEQ ID NO: 1667720 - DNA, 15 bp, Homo sapiens
agttaatctcacacc

SEQ ID NO: 1667721 - DNA, 15 bp, Homo sapiens
cagttaatctcacac

SEQ ID NO: 1667722 - DNA, 15 bp, Homo sapiens
ccagttaatctcaca

SEQ ID NO: 1667723 - DNA, 15 bp, Homo sapiens
accagttaatctcac

SEQ ID NO: 1667724 - DNA, 15 bp, Homo sapiens
aaccagttaatctca

SEQ ID NO: 1667725 - DNA, 15 bp, Homo sapiens
taaccagttaatctc

SEQ ID NO: 1667726 - DNA, 15 bp, Homo sapiens
ttaaccagttaatct

SEQ ID NO: 1667727 - DNA, 15 bp, Homo sapiens
tttaaccagttaatc

SEQ ID NO: 1667728 - DNA, 15 bp, Homo sapiens
ctttaaccagttaat

SEQ ID NO: 1667729 - DNA, 15 bp, Homo sapiens
actttaaccagttaa

SEQ ID NO: 1667730 - DNA, 15 bp, Homo sapiens
cactttaaccagtta

SEQ ID NO: 1667731 - DNA, 15 bp, Homo sapiens
tcactttaaccagtt

SEQ ID NO: 1667732 - DNA, 15 bp, Homo sapiens
atcactttaaccagt

SEQ ID NO: 1667733 - DNA, 15 bp, Homo sapiens
catcactttaaccag

SEQ ID NO: 1667734 - DNA, 15 bp, Homo sapiens
tcatcactttaacca

SEQ ID NO: 1667735 - DNA, 15 bp, Homo sapiens
atcatcactttaacc

SEQ ID NO: 1667736 - DNA, 15 bp, Homo sapiens
catcatcactttaac

SEQ ID NO: 1667737 - DNA, 15 bp, Homo sapiens
acatcatcactttaa

SEQ ID NO: 1667738 - DNA, 15 bp, Homo sapiens
tacatcatcacttta

SEQ ID NO: 1667739 - DNA, 15 bp, Homo sapiens
ttacatcatcacttt

SEQ ID NO: 1667740 - DNA, 15 bp, Homo sapiens
tttacatcatcactt

SEQ ID NO: 1667741 - DNA, 15 bp, Homo sapiens
ctttacatcatcact

SEQ ID NO: 1667742 - DNA, 15 bp, Homo sapiens
tctttacatcatcac

SEQ ID NO: 1667743 - DNA, 15 bp, Homo sapiens
ctctttacatcatca

SEQ ID NO: 1667744 - DNA, 15 bp, Homo sapiens
cctctttacatcatc

SEQ ID NO: 1667745 - DNA, 15 bp, Homo sapiens
ccctctttacatcat

SEQ ID NO: 1667746 - DNA, 15 bp, Homo sapiens
accctctttacatca

SEQ ID NO: 1667747 - DNA, 15 bp, Homo sapiens
taccctctttacatc

SEQ ID NO: 1667748 - DNA, 15 bp, Homo sapiens
ctaccctctttacat

SEQ ID NO: 1667749 - DNA, 15 bp, Homo sapiens
gctaccctctttaca

SEQ ID NO: 1667750 - DNA, 15 bp, Homo sapiens
cgctaccctctttac

SEQ ID NO: 1667751 - DNA, 15 bp, Homo sapiens
ccgctaccctcttta

SEQ ID NO: 1667752 - DNA, 15 bp, Homo sapiens
cccgctaccctcttt

SEQ ID NO: 1667753 - DNA, 15 bp, Homo sapiens
acccgctaccctctt

SEQ ID NO: 1667754 - DNA, 15 bp, Homo sapiens
aacccgctaccctct

SEQ ID NO: 1667755 - DNA, 15 bp, Homo sapiens
caacccgctaccctc

SEQ ID NO: 1667756 - DNA, 15 bp, Homo sapiens
gcaacccgctaccct

SEQ ID NO: 1667757 - DNA, 15 bp, Homo sapiens
tgcaacccgctaccc

SEQ ID NO: 1667758 - DNA, 15 bp, Homo sapiens
atgcaacccgctacc

SEQ ID NO: 1667759 - DNA, 15 bp, Homo sapiens
catgcaacccgctac

SEQ ID NO: 1667760 - DNA, 15 bp, Homo sapiens
acatgcaacccgcta

SEQ ID NO: 1667761 - DNA, 15 bp, Homo sapiens
cacatgcaacccgct

SEQ ID NO: 1667762 - DNA, 15 bp, Homo sapiens
acacatgcaacccgc

SEQ ID NO: 1667763 - DNA, 15 bp, Homo sapiens
aacacatgcaacccg

SEQ ID NO: 1667764 - DNA, 15 bp, Homo sapiens
gaacacatgcaaccc

SEQ ID NO: 1667765 - DNA, 15 bp, Homo sapiens
cgaacacatgcaacc

SEQ ID NO: 1667766 - DNA, 15 bp, Homo sapiens
ccgaacacatgcaac

SEQ ID NO: 1667767 - DNA, 15 bp, Homo sapiens
cccgaacacatgcaa

SEQ ID NO: 1667768 - DNA, 15 bp, Homo sapiens
acccgaacacatgca

SEQ ID NO: 1667769 - DNA, 15 bp, Homo sapiens
cacccgaacacatgc

SEQ ID NO: 1667770 - DNA, 15 bp, Homo sapiens
acacccgaacacatg

SEQ ID NO: 1667771 - DNA, 15 bp, Homo sapiens
aacacccgaacacat

SEQ ID NO: 1667772 - DNA, 15 bp, Homo sapiens
aaacacccgaacaca

SEQ ID NO: 1667773 - DNA, 15 bp, Homo sapiens
caaacacccgaacac

SEQ ID NO: 1667774 - DNA, 15 bp, Homo sapiens
ccaaacacccgaaca

SEQ ID NO: 1667775 - DNA, 15 bp, Homo sapiens
tccaaacacccgaac

SEQ ID NO: 1667776 - DNA, 15 bp, Homo sapiens
ctccaaacacccgaa

SEQ ID NO: 1667777 - DNA, 15 bp, Homo sapiens
actccaaacacccga

SEQ ID NO: 1667778 - DNA, 15 bp, Homo sapiens
cactccaaacacccg

SEQ ID NO: 1667779 - DNA, 15 bp, Homo sapiens
ccactccaaacaccc

SEQ ID NO: 1667780 - DNA, 15 bp, Homo sapiens
cccactccaaacacc

SEQ ID NO: 1667781 - DNA, 15 bp, Homo sapiens
tcccactccaaacac

SEQ ID NO: 1667782 - DNA, 15 bp, Homo sapiens
gtcccactccaaaca

SEQ ID NO: 1667783 - DNA, 15 bp, Homo sapiens
agtcccactccaaac

SEQ ID NO: 1667784 - DNA, 15 bp, Homo sapiens
tagtcccactccaaa

SEQ ID NO: 1667785 - DNA, 15 bp, Homo sapiens
atagtcccactccaa

SEQ ID NO: 1667786 - DNA, 15 bp, Homo sapiens
tatagtcccactcca

SEQ ID NO: 1667787 - DNA, 15 bp, Homo sapiens
ctatagtcccactcc

SEQ ID NO: 1667788 - DNA, 15 bp, Homo sapiens
gctatagtcccactc

SEQ ID NO: 1667789 - DNA, 15 bp, Homo sapiens
tgctatagtcccact

SEQ ID NO: 1667790 - DNA, 15 bp, Homo sapiens
catttttagtcaggt

SEQ ID NO: 1667791 - DNA, 15 bp, Homo sapiens
ccatttttagtcagg

SEQ ID NO: 1667792 - DNA, 15 bp, Homo sapiens
gccatttttagtcag

SEQ ID NO: 1667793 - DNA, 15 bp, Homo sapiens
tgccatttttagtca

SEQ ID NO: 1667794 - DNA, 15 bp, Homo sapiens
gtgccatttttagtc

SEQ ID NO: 1667795 - DNA, 15 bp, Homo sapiens
tgtgccatttttagt

SEQ ID NO: 1667796 - DNA, 15 bp, Homo sapiens
ttgtgccatttttag

SEQ ID NO: 1667797 - DNA, 15 bp, Homo sapiens
tttgtgccattttta

SEQ ID NO: 1667798 - DNA, 15 bp, Homo sapiens
ctttgtgccattttt

SEQ ID NO: 1667799 - DNA, 15 bp, Homo sapiens
actttgtgccatttt

SEQ ID NO: 1667800 - DNA, 15 bp, Homo sapiens
aactttgtgccattt

SEQ ID NO: 1667801 - DNA, 15 bp, Homo sapiens
taactttgtgccatt

SEQ ID NO: 1667802 - DNA, 15 bp, Homo sapiens
ataactttgtgccat

SEQ ID NO: 1667803 - DNA, 15 bp, Homo sapiens
gataactttgtgcca

SEQ ID NO: 1667804 - DNA, 15 bp, Homo sapiens
agataactttgtgcc

SEQ ID NO: 1667805 - DNA, 15 bp, Homo sapiens
cagataactttgtgc

SEQ ID NO: 1667806 - DNA, 15 bp, Homo sapiens
acagataactttgtg

SEQ ID NO: 1667807 - DNA, 15 bp, Homo sapiens
gacagataactttgt

SEQ ID NO: 1667808 - DNA, 15 bp, Homo sapiens
tgacagataactttg

SEQ ID NO: 1667809 - DNA, 15 bp, Homo sapiens
atgacagataacttt

SEQ ID NO: 1667810 - DNA, 15 bp, Homo sapiens
gatgacagataactt

SEQ ID NO: 1667811 - DNA, 15 bp, Homo sapiens
tgatgacagataact

SEQ ID NO: 1667812 - DNA, 15 bp, Homo sapiens
ctgatgacagataac

SEQ ID NO: 1667813 - DNA, 15 bp, Homo sapiens
cctgatgacagataa

SEQ ID NO: 1667814 - DNA, 15 bp, Homo sapiens
gcctgatgacagata

SEQ ID NO: 1667815 - DNA, 15 bp, Homo sapiens
tgcctgatgacagat

SEQ ID NO: 1667816 - DNA, 15 bp, Homo sapiens
ctgcctgatgacaga

SEQ ID NO: 1667817 - DNA, 15 bp, Homo sapiens
cctgcctgatgacag

SEQ ID NO: 1667818 - DNA, 15 bp, Homo sapiens
tcctgcctgatgaca

SEQ ID NO: 1667819 - DNA, 15 bp, Homo sapiens
ctcctgcctgatgac

SEQ ID NO: 1667820 - DNA, 15 bp, Homo sapiens
gctcctgcctgatga

SEQ ID NO: 1667821 - DNA, 15 bp, Homo sapiens
agctcctgcctgatg

SEQ ID NO: 1667822 - DNA, 15 bp, Homo sapiens
tagctcctgcctgat

SEQ ID NO: 1667823 - DNA, 15 bp, Homo sapiens
ttagctcctgcctga

SEQ ID NO: 1667824 - DNA, 15 bp, Homo sapiens
tttagctcctgcctg

SEQ ID NO: 1667825 - DNA, 15 bp, Homo sapiens
ctttagctcctgcct

SEQ ID NO: 1667826 - DNA, 15 bp, Homo sapiens
tctttagctcctgcc

SEQ ID NO: 1667827 - DNA, 15 bp, Homo sapiens
ttctttagctcctgc

SEQ ID NO: 1667828 - DNA, 15 bp, Homo sapiens
gttctttagctcctg

SEQ ID NO: 1667829 - DNA, 15 bp, Homo sapiens
ggttctttagctcct

SEQ ID NO: 1667830 - DNA, 15 bp, Homo sapiens
tggttctttagctcc

SEQ ID NO: 1667831 - DNA, 15 bp, Homo sapiens
ctggttctttagctc

SEQ ID NO: 1667832 - DNA, 15 bp, Homo sapiens
cctggttctttagct

SEQ ID NO: 1667833 - DNA, 15 bp, Homo sapiens
tcctggttctttagc

SEQ ID NO: 1667834 - DNA, 15 bp, Homo sapiens
gtcctggttctttag

SEQ ID NO: 1667835 - DNA, 15 bp, Homo sapiens
ggtcctggttcttta

SEQ ID NO: 1667836 - DNA, 15 bp, Homo sapiens
gggtcctggttcttt

SEQ ID NO: 1667837 - DNA, 15 bp, Homo sapiens
agggtcctggttctt

SEQ ID NO: 1667838 - DNA, 15 bp, Homo sapiens
tagggtcctggttct

SEQ ID NO: 1667839 - DNA, 15 bp, Homo sapiens
gtagggtcctggttc

SEQ ID NO: 1667840 - DNA, 15 bp, Homo sapiens
tgtagggtcctggtt

SEQ ID NO: 1667841 - DNA, 15 bp, Homo sapiens
atgtagggtcctggt

SEQ ID NO: 1667842 - DNA, 15 bp, Homo sapiens
aatgtagggtcctgg

SEQ ID NO: 1667843 - DNA, 15 bp, Homo sapiens
gaatgtagggtcctg

SEQ ID NO: 1667844 - DNA, 15 bp, Homo sapiens
agaatgtagggtcct

SEQ ID NO: 1667845 - DNA, 15 bp, Homo sapiens
gagaatgtagggtcc

SEQ ID NO: 1667846 - DNA, 15 bp, Homo sapiens
agagaatgtagggtc

SEQ ID NO: 1667847 - DNA, 15 bp, Homo sapiens
tagagaatgtagggt

SEQ ID NO: 1667848 - DNA, 15 bp, Homo sapiens
ctagagaatgtaggg

SEQ ID NO: 1667849 - DNA, 15 bp, Homo sapiens
cctagagaatgtagg

SEQ ID NO: 1667850 - DNA, 15 bp, Homo sapiens
acctagagaatgtag

SEQ ID NO: 1667851 - DNA, 15 bp, Homo sapiens
gacctagagaatgta

SEQ ID NO: 1667852 - DNA, 15 bp, Homo sapiens
tgacctagagaatgt

SEQ ID NO: 1667853 - DNA, 15 bp, Homo sapiens
ctgacctagagaatg

SEQ ID NO: 1667854 - DNA, 15 bp, Homo sapiens
actgacctagagaat

SEQ ID NO: 1667855 - DNA, 15 bp, Homo sapiens
cactgacctagagaa

SEQ ID NO: 1667856 - DNA, 15 bp, Homo sapiens
acactgacctagaga

SEQ ID NO: 1667857 - DNA, 15 bp, Homo sapiens
aacactgacctagag

SEQ ID NO: 1667858 - DNA, 15 bp, Homo sapiens
caacactgacctaga

SEQ ID NO: 1667859 - DNA, 15 bp, Homo sapiens
ccaacactgacctag

SEQ ID NO: 1667860 - DNA, 15 bp, Homo sapiens
cccaacactgaccta

SEQ ID NO: 1667861 - DNA, 15 bp, Homo sapiens
tcccaacactgacct

SEQ ID NO: 1667862 - DNA, 15 bp, Homo sapiens
ctcccaacactgacc

SEQ ID NO: 1667863 - DNA, 15 bp, Homo sapiens
tctcccaacactgac

SEQ ID NO: 1667864 - DNA, 15 bp, Homo sapiens
ctctcccaacactga

SEQ ID NO: 1667865 - DNA, 15 bp, Homo sapiens
cctctcccaacactg

SEQ ID NO: 1667866 - DNA, 15 bp, Homo sapiens
gcctctcccaacact

SEQ ID NO: 1667867 - DNA, 15 bp, Homo sapiens
agcctctcccaacac

SEQ ID NO: 1667868 - DNA, 15 bp, Homo sapiens
cagcctctcccaaca

SEQ ID NO: 1667869 - DNA, 15 bp, Homo sapiens
tcagcctctcccaac

SEQ ID NO: 1667870 - DNA, 15 bp, Homo sapiens
atcagcctctcccaa

SEQ ID NO: 1667871 - DNA, 15 bp, Homo sapiens
aatcagcctctccca

SEQ ID NO: 1667872 - DNA, 15 bp, Homo sapiens
taatcagcctctccc

SEQ ID NO: 1667873 - DNA, 15 bp, Homo sapiens
ctaatcagcctctcc

SEQ ID NO: 1667874 - DNA, 15 bp, Homo sapiens
gctaatcagcctctc

SEQ ID NO: 1667875 - DNA, 15 bp, Homo sapiens
cgctaatcagcctct

SEQ ID NO: 1667876 - DNA, 15 bp, Homo sapiens
tcgctaatcagcctc

SEQ ID NO: 1667877 - DNA, 15 bp, Homo sapiens
ctcgctaatcagcct

SEQ ID NO: 1667878 - DNA, 15 bp, Homo sapiens
actcgctaatcagcc

SEQ ID NO: 1667879 - DNA, 15 bp, Homo sapiens
cactcgctaatcagc

SEQ ID NO: 1667880 - DNA, 15 bp, Homo sapiens
tcactcgctaatcag

SEQ ID NO: 1667881 - DNA, 15 bp, Homo sapiens
ctcactcgctaatca

SEQ ID NO: 1667882 - DNA, 15 bp, Homo sapiens
tctcactcgctaatc

SEQ ID NO: 1667883 - DNA, 15 bp, Homo sapiens
ttctcactcgctaat

SEQ ID NO: 1667884 - DNA, 15 bp, Homo sapiens
attctcactcgctaa

SEQ ID NO: 1667885 - DNA, 15 bp, Homo sapiens
aattctcactcgcta

SEQ ID NO: 1667886 - DNA, 15 bp, Homo sapiens
caattctcactcgct

SEQ ID NO: 1667887 - DNA, 15 bp, Homo sapiens
ccaattctcactcgc

SEQ ID NO: 1667888 - DNA, 15 bp, Homo sapiens
gccaattctcactcg

SEQ ID NO: 1667889 - DNA, 15 bp, Homo sapiens
tgccaattctcactc

SEQ ID NO: 1667890 - DNA, 15 bp, Homo sapiens
ctgccaattctcact

SEQ ID NO: 1667891 - DNA, 15 bp, Homo sapiens
tctgccaattctcac

SEQ ID NO: 1667892 - DNA, 15 bp, Homo sapiens
atctgccaattctca

SEQ ID NO: 1667893 - DNA, 15 bp, Homo sapiens
tatctgccaattctc

SEQ ID NO: 1667894 - DNA, 15 bp, Homo sapiens
ttatctgccaattct

SEQ ID NO: 1667895 - DNA, 15 bp, Homo sapiens
tttatctgccaattc

SEQ ID NO: 1667896 - DNA, 15 bp, Homo sapiens
ctttatctgccaatt

SEQ ID NO: 1667897 - DNA, 15 bp, Homo sapiens
cctttatctgccaat

SEQ ID NO: 1667898 - DNA, 15 bp, Homo sapiens
acctttatctgccaa

SEQ ID NO: 1667899 - DNA, 15 bp, Homo sapiens
cacctttatctgcca

SEQ ID NO: 1667900 - DNA, 15 bp, Homo sapiens
tcacctttatctgcc

SEQ ID NO: 1667901 - DNA, 15 bp, Homo sapiens
gtcacctttatctgc

SEQ ID NO: 1667902 - DNA, 15 bp, Homo sapiens
ggtcacctttatctg

SEQ ID NO: 1667903 - DNA, 15 bp, Homo sapiens
tggtcacctttatct

SEQ ID NO: 1667904 - DNA, 15 bp, Homo sapiens
atggtcacctttatc

SEQ ID NO: 1667905 - DNA, 15 bp, Homo sapiens
aatggtcacctttat

SEQ ID NO: 1667906 - DNA, 15 bp, Homo sapiens
gaatggtcaccttta

SEQ ID NO: 1667907 - DNA, 15 bp, Homo sapiens
cgaatggtcaccttt

SEQ ID NO: 1667908 - DNA, 15 bp, Homo sapiens
ccgaatggtcacctt

SEQ ID NO: 1667909 - DNA, 15 bp, Homo sapiens
accgaatggtcacct

SEQ ID NO: 1667910 - DNA, 15 bp, Homo sapiens
caccgaatggtcacc

SEQ ID NO: 1667911 - DNA, 15 bp, Homo sapiens
gcaccgaatggtcac

SEQ ID NO: 1667912 - DNA, 15 bp, Homo sapiens
tgcaccgaatggtca

SEQ ID NO: 1667913 - DNA, 15 bp, Homo sapiens
ttgcaccgaatggtc

SEQ ID NO: 1667914 - DNA, 15 bp, Homo sapiens
attgcaccgaatggt

SEQ ID NO: 1667915 - DNA, 15 bp, Homo sapiens
tattgcaccgaatgg

SEQ ID NO: 1667916 - DNA, 15 bp, Homo sapiens
ttattgcaccgaatg

SEQ ID NO: 1667917 - DNA, 15 bp, Homo sapiens
tttattgcaccgaat

SEQ ID NO: 1667918 - DNA, 15 bp, Homo sapiens
atttattgcaccgaa

SEQ ID NO: 1667919 - DNA, 15 bp, Homo sapiens
gatttattgcaccga

SEQ ID NO: 1667920 - DNA, 15 bp, Homo sapiens
ggatttattgcaccg

SEQ ID NO: 1667921 - DNA, 15 bp, Homo sapiens
aggatttattgcacc

SEQ ID NO: 1667922 - DNA, 15 bp, Homo sapiens
caggatttattgcac

SEQ ID NO: 1667923 - DNA, 15 bp, Homo sapiens
tcaggatttattgca

SEQ ID NO: 1667924 - DNA, 15 bp, Homo sapiens
ttcaggatttattgc

SEQ ID NO: 1667925 - DNA, 15 bp, Homo sapiens
gttcaggatttattg

SEQ ID NO: 1667926 - DNA, 15 bp, Homo sapiens
cgttcaggatttatt

SEQ ID NO: 1667927 - DNA, 15 bp, Homo sapiens
acgttcaggatttat

SEQ ID NO: 1667928 - DNA, 15 bp, Homo sapiens
tacgttcaggattta

SEQ ID NO: 1667929 - DNA, 15 bp, Homo sapiens
atacgttcaggattt

SEQ ID NO: 1667930 - DNA, 15 bp, Homo sapiens
tatacgttcaggatt

SEQ ID NO: 1667931 - DNA, 15 bp, Homo sapiens
ctatacgttcaggat

SEQ ID NO: 1667932 - DNA, 15 bp, Homo sapiens
cctatacgttcagga

SEQ ID NO: 1667933 - DNA, 15 bp, Homo sapiens
gcctatacgttcagg

SEQ ID NO: 1667934 - DNA, 15 bp, Homo sapiens
agcctatacgttcag

SEQ ID NO: 1667935 - DNA, 15 bp, Homo sapiens
aagcctatacgttca

SEQ ID NO: 1667936 - DNA, 15 bp, Homo sapiens
aaagcctatacgttc

SEQ ID NO: 1667937 - DNA, 15 bp, Homo sapiens
caaagcctatacgtt

SEQ ID NO: 1667938 - DNA, 15 bp, Homo sapiens
gcaaagcctatacgt

SEQ ID NO: 1667939 - DNA, 15 bp, Homo sapiens
ggcaaagcctatacg

SEQ ID NO: 1667940 - DNA, 15 bp, Homo sapiens
gggcaaagcctatac

SEQ ID NO: 1667941 - DNA, 15 bp, Homo sapiens
tgggcaaagcctata

SEQ ID NO: 1667942 - DNA, 15 bp, Homo sapiens
ctgggcaaagcctat

SEQ ID NO: 1667943 - DNA, 15 bp, Homo sapiens
gctgggcaaagccta

SEQ ID NO: 1667944 - DNA, 15 bp, Homo sapiens
tgctgggcaaagcct

SEQ ID NO: 1667945 - DNA, 15 bp, Homo sapiens
atgctgggcaaagcc

SEQ ID NO: 1667946 - DNA, 15 bp, Homo sapiens
aatgctgggcaaagc

SEQ ID NO: 1667947 - DNA, 15 bp, Homo sapiens
gaatgctgggcaaag

SEQ ID NO: 1667948 - DNA, 15 bp, Homo sapiens
agaatgctgggcaaa

SEQ ID NO: 1667949 - DNA, 15 bp, Homo sapiens
aagaatgctgggcaa

SEQ ID NO: 1667950 - DNA, 15 bp, Homo sapiens
gaagaatgctgggca

SEQ ID NO: 1667951 - DNA, 15 bp, Homo sapiens
cgaagaatgctgggc

SEQ ID NO: 1667952 - DNA, 15 bp, Homo sapiens
acgaagaatgctggg

SEQ ID NO: 1667953 - DNA, 15 bp, Homo sapiens
tacgaagaatgctgg

SEQ ID NO: 1667954 - DNA, 15 bp, Homo sapiens
ttacgaagaatgctg

SEQ ID NO: 1667955 - DNA, 15 bp, Homo sapiens
tttacgaagaatgct

SEQ ID NO: 1667956 - DNA, 15 bp, Homo sapiens
atttacgaagaatgc

SEQ ID NO: 1667957 - DNA, 15 bp, Homo sapiens
tatttacgaagaatg

SEQ ID NO: 1667958 - DNA, 15 bp, Homo sapiens
ctatttacgaagaat

SEQ ID NO: 1667959 - DNA, 15 bp, Homo sapiens
actatttacgaagaa

SEQ ID NO: 1667960 - DNA, 15 bp, Homo sapiens
cactatttacgaaga

SEQ ID NO: 1667961 - DNA, 15 bp, Homo sapiens
ccactatttacgaag

SEQ ID NO: 1667962 - DNA, 15 bp, Homo sapiens
cccactatttacgaa

SEQ ID NO: 1667963 - DNA, 15 bp, Homo sapiens
acccactatttacga

SEQ ID NO: 1667964 - DNA, 15 bp, Homo sapiens
tacccactatttacg

SEQ ID NO: 1667965 - DNA, 15 bp, Homo sapiens
ctacccactatttac

SEQ ID NO: 1667966 - DNA, 15 bp, Homo sapiens
gctacccactattta

SEQ ID NO: 1667967 - DNA, 15 bp, Homo sapiens
agctacccactattt

SEQ ID NO: 1667968 - DNA, 15 bp, Homo sapiens
tagctacccactatt

SEQ ID NO: 1667969 - DNA, 15 bp, Homo sapiens
atagctacccactat

SEQ ID NO: 1667970 - DNA, 15 bp, Homo sapiens
tatagctacccacta

SEQ ID NO: 1667971 - DNA, 15 bp, Homo sapiens
ttatagctacccact

SEQ ID NO: 1667972 - DNA, 15 bp, Homo sapiens
tttatagctacccac

SEQ ID NO: 1667973 - DNA, 15 bp, Homo sapiens
atttatagctaccca

SEQ ID NO: 1667974 - DNA, 15 bp, Homo sapiens
aatttatagctaccc

SEQ ID NO: 1667975 - DNA, 15 bp, Homo sapiens
aaatttatagctacc

SEQ ID NO: 1667976 - DNA, 15 bp, Homo sapiens
gaaatttatagctac

SEQ ID NO: 1667977 - DNA, 15 bp, Homo sapiens
tgaaatttatagcta

SEQ ID NO: 1667978 - DNA, 15 bp, Homo sapiens
atgaaatttatagct

SEQ ID NO: 1667979 - DNA, 15 bp, Homo sapiens
catgaaatttatagc

SEQ ID NO: 1667980 - DNA, 15 bp, Homo sapiens
tcatgaaatttatag

SEQ ID NO: 1667981 - DNA, 15 bp, Homo sapiens
ttcatgaaatttata

SEQ ID NO: 1667982 - DNA, 15 bp, Homo sapiens
tttcatgaaatttat

SEQ ID NO: 1667983 - DNA, 15 bp, Homo sapiens
atttcatgaaattta

SEQ ID NO: 1667984 - DNA, 15 bp, Homo sapiens
tatttcatgaaattt

SEQ ID NO: 1667985 - DNA, 15 bp, Homo sapiens
atatttcatgaaatt

SEQ ID NO: 1667986 - DNA, 15 bp, Homo sapiens
aatatttcatgaaat

SEQ ID NO: 1667987 - DNA, 15 bp, Homo sapiens
aaatatttcatgaaa

SEQ ID NO: 1667988 - DNA, 15 bp, Homo sapiens
aaaatatttcatgaa

SEQ ID NO: 1667989 - DNA, 15 bp, Homo sapiens
gaaaatatttcatga

SEQ ID NO: 1667990 - DNA, 15 bp, Homo sapiens
tgaaaatatttcatg

SEQ ID NO: 1667991 - DNA, 15 bp, Homo sapiens
atgaaaatatttcat

SEQ ID NO: 1667992 - DNA, 15 bp, Homo sapiens
catgaaaatatttca

SEQ ID NO: 1667993 - DNA, 15 bp, Homo sapiens
ccatgaaaatatttc

SEQ ID NO: 1667994 - DNA, 15 bp, Homo sapiens
cccatgaaaatattt

SEQ ID NO: 1667995 - DNA, 15 bp, Homo sapiens
acccatgaaaatatt

SEQ ID NO: 1667996 - DNA, 15 bp, Homo sapiens
tacccatgaaaatat

SEQ ID NO: 1667997 - DNA, 15 bp, Homo sapiens
ttacccatgaaaata

SEQ ID NO: 1667998 - DNA, 15 bp, Homo sapiens
cttacccatgaaaat

SEQ ID NO: 1667999 - DNA, 15 bp, Homo sapiens
tcttacccatgaaaa

SEQ ID NO: 1668000 - DNA, 15 bp, Homo sapiens
ttcttacccatgaaa

SEQ ID NO: 1668001 - DNA, 15 bp, Homo sapiens
gttcttacccatgaa

SEQ ID NO: 1668002 - DNA, 15 bp, Homo sapiens
agttcttacccatga

SEQ ID NO: 1668003 - DNA, 15 bp, Homo sapiens
gagttcttacccatg

SEQ ID NO: 1668004 - DNA, 15 bp, Homo sapiens
agagttcttacccat

SEQ ID NO: 1668005 - DNA, 15 bp, Homo sapiens
aagagttcttaccca

SEQ ID NO: 1668006 - DNA, 15 bp, Homo sapiens
caagagttcttaccc

SEQ ID NO: 1668007 - DNA, 15 bp, Homo sapiens
tcaagagttcttacc

SEQ ID NO: 1668008 - DNA, 15 bp, Homo sapiens
ttcaagagttcttac

SEQ ID NO: 1668009 - DNA, 15 bp, Homo sapiens
tttcaagagttctta

SEQ ID NO: 1668010 - DNA, 15 bp, Homo sapiens
atttcaagagttctt

SEQ ID NO: 1668011 - DNA, 15 bp, Homo sapiens
catttcaagagttct

SEQ ID NO: 1668012 - DNA, 15 bp, Homo sapiens
acatttcaagagttc

SEQ ID NO: 1668013 - DNA, 15 bp, Homo sapiens
aacatttcaagagtt

SEQ ID NO: 1668014 - DNA, 15 bp, Homo sapiens
taacatttcaagagt

SEQ ID NO: 1668015 - DNA, 15 bp, Homo sapiens
ataacatttcaagag

SEQ ID NO: 1668016 - DNA, 15 bp, Homo sapiens
tataacatttcaaga

SEQ ID NO: 1668017 - DNA, 15 bp, Homo sapiens
ttataacatttcaag

SEQ ID NO: 1668018 - DNA, 15 bp, Homo sapiens
attataacatttcaa

SEQ ID NO: 1668019 - DNA, 15 bp, Homo sapiens
aattataacatttca

SEQ ID NO: 1668020 - DNA, 15 bp, Homo sapiens
caattataacatttc

SEQ ID NO: 1668021 - DNA, 15 bp, Homo sapiens
tcaattataacattt

SEQ ID NO: 1668022 - DNA, 15 bp, Homo sapiens
gtcaattataacatt

SEQ ID NO: 1668023 - DNA, 15 bp, Homo sapiens
agtcaattataacat

SEQ ID NO: 1668024 - DNA, 15 bp, Homo sapiens
tagtcaattataaca

SEQ ID NO: 1668025 - DNA, 15 bp, Homo sapiens
ctagtcaattataac

SEQ ID NO: 1668026 - DNA, 15 bp, Homo sapiens
tctagtcaattataa

SEQ ID NO: 1668027 - DNA, 15 bp, Homo sapiens
ttctagtcaattata

SEQ ID NO: 1668028 - DNA, 15 bp, Homo sapiens
tttctagtcaattat

SEQ ID NO: 1668029 - DNA, 15 bp, Homo sapiens
atttctagtcaatta

SEQ ID NO: 1668030 - DNA, 15 bp, Homo sapiens
gatttctagtcaatt

SEQ ID NO: 1668031 - DNA, 15 bp, Homo sapiens
agatttctagtcaat

SEQ ID NO: 1668032 - DNA, 15 bp, Homo sapiens
gagatttctagtcaa

SEQ ID NO: 1668033 - DNA, 15 bp, Homo sapiens
agagatttctagtca

SEQ ID NO: 1668034 - DNA, 15 bp, Homo sapiens
cagagatttctagtc

SEQ ID NO: 1668035 - DNA, 15 bp, Homo sapiens
acagagatttctagt

SEQ ID NO: 1668036 - DNA, 15 bp, Homo sapiens
tacagagatttctag

SEQ ID NO: 1668037 - DNA, 15 bp, Homo sapiens
ctacagagatttcta

SEQ ID NO: 1668038 - DNA, 15 bp, Homo sapiens
tctacagagatttct

SEQ ID NO: 1668039 - DNA, 15 bp, Homo sapiens
atctacagagatttc

SEQ ID NO: 1668040 - DNA, 15 bp, Homo sapiens
aatctacagagattt

SEQ ID NO: 1668041 - DNA, 15 bp, Homo sapiens
aaatctacagagatt

SEQ ID NO: 1668042 - DNA, 15 bp, Homo sapiens
taaatctacagagat

SEQ ID NO: 1668043 - DNA, 15 bp, Homo sapiens
ctaaatctacagaga

SEQ ID NO: 1668044 - DNA, 15 bp, Homo sapiens
tctaaatctacagag

SEQ ID NO: 1668045 - DNA, 15 bp, Homo sapiens
ttctaaatctacaga

SEQ ID NO: 1668046 - DNA, 15 bp, Homo sapiens
tttctaaatctacag

SEQ ID NO: 1668047 - DNA, 15 bp, Homo sapiens
atttctaaatctaca

SEQ ID NO: 1668048 - DNA, 15 bp, Homo sapiens
tatttctaaatctac

SEQ ID NO: 1668049 - DNA, 15 bp, Homo sapiens
ctatttctaaatcta

SEQ ID NO: 1668050 - DNA, 15 bp, Homo sapiens
tctatttctaaatct

SEQ ID NO: 1668051 - DNA, 15 bp, Homo sapiens
ctctatttctaaatc

SEQ ID NO: 1668052 - DNA, 15 bp, Homo sapiens
tctctatttctaaat

SEQ ID NO: 1668053 - DNA, 15 bp, Homo sapiens
ctctctatttctaaa

SEQ ID NO: 1668054 - DNA, 15 bp, Homo sapiens
actctctatttctaa

SEQ ID NO: 1668055 - DNA, 15 bp, Homo sapiens
aactctctatttcta

SEQ ID NO: 1668056 - DNA, 15 bp, Homo sapiens
taactctctatttct

SEQ ID NO: 1668057 - DNA, 15 bp, Homo sapiens
gtaactctctatttc

SEQ ID NO: 1668058 - DNA, 15 bp, Homo sapiens
agtaactctctattt

SEQ ID NO: 1668059 - DNA, 15 bp, Homo sapiens
tagtaactctctatt

SEQ ID NO: 1668060 - DNA, 15 bp, Homo sapiens
ttagtaactctctat

SEQ ID NO: 1668061 - DNA, 15 bp, Homo sapiens
gttagtaactctcta

SEQ ID NO: 1668062 - DNA, 15 bp, Homo sapiens
tgttagtaactctct

SEQ ID NO: 1668063 - DNA, 15 bp, Homo sapiens
ttgttagtaactctc

SEQ ID NO: 1668064 - DNA, 15 bp, Homo sapiens
tttgttagtaactct

SEQ ID NO: 1668065 - DNA, 15 bp, Homo sapiens
atttgttagtaactc

SEQ ID NO: 1668066 - DNA, 15 bp, Homo sapiens
aatttgttagtaact

SEQ ID NO: 1668067 - DNA, 15 bp, Homo sapiens
caatttgttagtaac

SEQ ID NO: 1668068 - DNA, 15 bp, Homo sapiens
acaatttgttagtaa

SEQ ID NO: 1668069 - DNA, 15 bp, Homo sapiens
aacaatttgttagta

SEQ ID NO: 1668070 - DNA, 15 bp, Homo sapiens
taacaatttgttagt

SEQ ID NO: 1668071 - DNA, 15 bp, Homo sapiens
ctaacaatttgttag

SEQ ID NO: 1668072 - DNA, 15 bp, Homo sapiens
tctaacaatttgtta

SEQ ID NO: 1668073 - DNA, 15 bp, Homo sapiens
ttctaacaatttgtt

SEQ ID NO: 1668074 - DNA, 15 bp, Homo sapiens
tttctaacaatttgt

SEQ ID NO: 1668075 - DNA, 15 bp, Homo sapiens
ctttctaacaatttg

SEQ ID NO: 1668076 - DNA, 15 bp, Homo sapiens
actttctaacaattt

SEQ ID NO: 1668077 - DNA, 15 bp, Homo sapiens
gactttctaacaatt

SEQ ID NO: 1668078 - DNA, 15 bp, Homo sapiens
agactttctaacaat

SEQ ID NO: 1668079 - DNA, 15 bp, Homo sapiens
tagactttctaacaa

SEQ ID NO: 1668080 - DNA, 15 bp, Homo sapiens
ctagactttctaaca

SEQ ID NO: 1668081 - DNA, 15 bp, Homo sapiens
cctagactttctaac

SEQ ID NO: 1668082 - DNA, 15 bp, Homo sapiens
tcctagactttctaa

SEQ ID NO: 1668083 - DNA, 15 bp, Homo sapiens
ttcctagactttcta

SEQ ID NO: 1668084 - DNA, 15 bp, Homo sapiens
gttcctagactttct

SEQ ID NO: 1668085 - DNA, 15 bp, Homo sapiens
agttcctagactttc

SEQ ID NO: 1668086 - DNA, 15 bp, Homo sapiens
tagttcctagacttt

SEQ ID NO: 1668087 - DNA, 15 bp, Homo sapiens
ctagttcctagactt

SEQ ID NO: 1668088 - DNA, 15 bp, Homo sapiens
tctagttcctagact

SEQ ID NO: 1668089 - DNA, 15 bp, Homo sapiens
ttctagttcctagac

SEQ ID NO: 1668090 - DNA, 15 bp, Homo sapiens
tttctagttcctaga

SEQ ID NO: 1668091 - DNA, 15 bp, Homo sapiens
ctttctagttcctag

SEQ ID NO: 1668092 - DNA, 15 bp, Homo sapiens
gctttctagttccta

SEQ ID NO: 1668093 - DNA, 15 bp, Homo sapiens
agctttctagttcct

SEQ ID NO: 1668094 - DNA, 15 bp, Homo sapiens
tagctttctagttcc

SEQ ID NO: 1668095 - DNA, 15 bp, Homo sapiens
ttagctttctagttc

SEQ ID NO: 1668096 - DNA, 15 bp, Homo sapiens
cttagctttctagtt

SEQ ID NO: 1668097 - DNA, 15 bp, Homo sapiens
acttagctttctagt

SEQ ID NO: 1668098 - DNA, 15 bp, Homo sapiens
aacttagctttctag

SEQ ID NO: 1668099 - DNA, 15 bp, Homo sapiens
caacttagctttcta

SEQ ID NO: 1668100 - DNA, 15 bp, Homo sapiens
tcaacttagctttct

SEQ ID NO: 1668101 - DNA, 15 bp, Homo sapiens
ctcaacttagctttc

SEQ ID NO: 1668102 - DNA, 15 bp, Homo sapiens
tctcaacttagcttt

SEQ ID NO: 1668103 - DNA, 15 bp, Homo sapiens
ctctcaacttagctt

SEQ ID NO: 1668104 - DNA, 15 bp, Homo sapiens
actctcaacttagct

SEQ ID NO: 1668105 - DNA, 15 bp, Homo sapiens
aactctcaacttagc

SEQ ID NO: 1668106 - DNA, 15 bp, Homo sapiens
taactctcaacttag

SEQ ID NO: 1668107 - DNA, 15 bp, Homo sapiens
ataactctcaactta

SEQ ID NO: 1668108 - DNA, 15 bp, Homo sapiens
gataactctcaactt

SEQ ID NO: 1668109 - DNA, 15 bp, Homo sapiens
agataactctcaact

SEQ ID NO: 1668110 - DNA, 15 bp, Homo sapiens
tagataactctcaac

SEQ ID NO: 1668111 - DNA, 15 bp, Homo sapiens
ctagataactctcaa

SEQ ID NO: 1668112 - DNA, 15 bp, Homo sapiens
cctagataactctca

SEQ ID NO: 1668113 - DNA, 15 bp, Homo sapiens
tcctagataactctc

SEQ ID NO: 1668114 - DNA, 15 bp, Homo sapiens
ttcctagataactct

SEQ ID NO: 1668115 - DNA, 15 bp, Homo sapiens
cttcctagataactc

SEQ ID NO: 1668116 - DNA, 15 bp, Homo sapiens
tcttcctagataact

SEQ ID NO: 1668117 - DNA, 15 bp, Homo sapiens
atcttcctagataac

SEQ ID NO: 1668118 - DNA, 15 bp, Homo sapiens
gatcttcctagataa

SEQ ID NO: 1668119 - DNA, 15 bp, Homo sapiens
agatcttcctagata

SEQ ID NO: 1668120 - DNA, 15 bp, Homo sapiens
tagatcttcctagat

SEQ ID NO: 1668121 - DNA, 15 bp, Homo sapiens
gatagatcttcctag

SEQ ID NO: 1668122 - DNA, 15 bp, Homo sapiens
agatagatcttccta

SEQ ID NO: 1668123 - DNA, 15 bp, Homo sapiens
tagatagatcttcct

SEQ ID NO: 1668124 - DNA, 15 bp, Homo sapiens
atagatagatcttcc

SEQ ID NO: 1668125 - DNA, 15 bp, Homo sapiens
aatagatagatcttc

SEQ ID NO: 1668126 - DNA, 15 bp, Homo sapiens
caatagatagatctt

SEQ ID NO: 1668127 - DNA, 15 bp, Homo sapiens
acaatagatagatct

SEQ ID NO: 1668128 - DNA, 15 bp, Homo sapiens
tacaatagatagatc

SEQ ID NO: 1668129 - DNA, 15 bp, Homo sapiens
gtacaatagatagat

SEQ ID NO: 1668130 - DNA, 15 bp, Homo sapiens
agtacaatagataga

SEQ ID NO: 1668131 - DNA, 15 bp, Homo sapiens
gagtacaatagatag

SEQ ID NO: 1668132 - DNA, 15 bp, Homo sapiens
tgagtacaatagata

SEQ ID NO: 1668133 - DNA, 15 bp, Homo sapiens
atgagtacaatagat

SEQ ID NO: 1668134 - DNA, 15 bp, Homo sapiens
tatgagtacaataga

SEQ ID NO: 1668135 - DNA, 15 bp, Homo sapiens
ttatgagtacaatag

SEQ ID NO: 1668136 - DNA, 15 bp, Homo sapiens
attatgagtacaata

SEQ ID NO: 1668137 - DNA, 15 bp, Homo sapiens
gattatgagtacaat

SEQ ID NO: 1668138 - DNA, 15 bp, Homo sapiens
agattatgagtacaa

SEQ ID NO: 1668139 - DNA, 15 bp, Homo sapiens
aagattatgagtaca

SEQ ID NO: 1668140 - DNA, 15 bp, Homo sapiens
aaagattatgagtac

SEQ ID NO: 1668141 - DNA, 15 bp, Homo sapiens
taaagattatgagta

SEQ ID NO: 1668142 - DNA, 15 bp, Homo sapiens
ctaaagattatgagt

SEQ ID NO: 1668143 - DNA, 15 bp, Homo sapiens
tctaaagattatgag

SEQ ID NO: 1668144 - DNA, 15 bp, Homo sapiens
atctaaagattatga

SEQ ID NO: 1668145 - DNA, 15 bp, Homo sapiens
tatctaaagattatg

SEQ ID NO: 1668146 - DNA, 15 bp, Homo sapiens
ttatctaaagattat

SEQ ID NO: 1668147 - DNA, 15 bp, Homo sapiens
tttatctaaagatta

SEQ ID NO: 1668148 - DNA, 15 bp, Homo sapiens
atttatctaaagatt

SEQ ID NO: 1668149 - DNA, 15 bp, Homo sapiens
aatttatctaaagat

SEQ ID NO: 1668150 - DNA, 15 bp, Homo sapiens
gaatttatctaaaga

SEQ ID NO: 1668151 - DNA, 15 bp, Homo sapiens
agaatttatctaaag

SEQ ID NO: 1668152 - DNA, 15 bp, Homo sapiens
gagaatttatctaaa

SEQ ID NO: 1668153 - DNA, 15 bp, Homo sapiens
ggagaatttatctaa

SEQ ID NO: 1668154 - DNA, 15 bp, Homo sapiens
aggagaatttatcta

SEQ ID NO: 1668155 - DNA, 15 bp, Homo sapiens
taggagaatttatct

SEQ ID NO: 1668156 - DNA, 15 bp, Homo sapiens
ctaggagaatttatc

SEQ ID NO: 1668157 - DNA, 15 bp, Homo sapiens
cctaggagaatttat

SEQ ID NO: 1668158 - DNA, 15 bp, Homo sapiens
ccctaggagaattta

SEQ ID NO: 1668159 - DNA, 15 bp, Homo sapiens
gccctaggagaattt

SEQ ID NO: 1668160 - DNA, 15 bp, Homo sapiens
ggccctaggagaatt

SEQ ID NO: 1668161 - DNA, 15 bp, Homo sapiens
tggccctaggagaat

SEQ ID NO: 1668162 - DNA, 15 bp, Homo sapiens
ctggccctaggagaa

SEQ ID NO: 1668163 - DNA, 15 bp, Homo sapiens
actggccctaggaga

SEQ ID NO: 1668164 - DNA, 15 bp, Homo sapiens
tactggccctaggag

SEQ ID NO: 1668165 - DNA, 15 bp, Homo sapiens
ctactggccctagga

SEQ ID NO: 1668166 - DNA, 15 bp, Homo sapiens
actactggccctagg

SEQ ID NO: 1668167 - DNA, 15 bp, Homo sapiens
gactactggccctag

SEQ ID NO: 1668168 - DNA, 15 bp, Homo sapiens
agactactggcccta

SEQ ID NO: 1668169 - DNA, 15 bp, Homo sapiens
tagactactggccct

SEQ ID NO: 1668170 - DNA, 15 bp, Homo sapiens
atagactactggccc

SEQ ID NO: 1668171 - DNA, 15 bp, Homo sapiens
catagactactggcc

SEQ ID NO: 1668172 - DNA, 15 bp, Homo sapiens
acatagactactggc

SEQ ID NO: 1668173 - DNA, 15 bp, Homo sapiens
cacatagactactgg

SEQ ID NO: 1668174 - DNA, 15 bp, Homo sapiens
tcacatagactactg

SEQ ID NO: 1668175 - DNA, 15 bp, Homo sapiens
ttcacatagactact

SEQ ID NO: 1668176 - DNA, 15 bp, Homo sapiens
attcacatagactac

SEQ ID NO: 1668177 - DNA, 15 bp, Homo sapiens
aattcacatagacta

SEQ ID NO: 1668178 - DNA, 15 bp, Homo sapiens
aaattcacatagact

SEQ ID NO: 1668179 - DNA, 15 bp, Homo sapiens
aaaattcacatagac

SEQ ID NO: 1668180 - DNA, 15 bp, Homo sapiens
gaaaattcacataga

SEQ ID NO: 1668181 - DNA, 15 bp, Homo sapiens
agaaaattcacatag

SEQ ID NO: 1668182 - DNA, 15 bp, Homo sapiens
aagaaaattcacata

SEQ ID NO: 1668183 - DNA, 15 bp, Homo sapiens
aaagaaaattcacat

SEQ ID NO: 1668184 - DNA, 15 bp, Homo sapiens
aaaagaaaattcaca

SEQ ID NO: 1668185 - DNA, 15 bp, Homo sapiens
aaaaagaaaattcac

SEQ ID NO: 1668186 - DNA, 15 bp, Homo sapiens
gaaaaagaaaattca

SEQ ID NO: 1668187 - DNA, 15 bp, Homo sapiens
agaaaaagaaaattc

SEQ ID NO: 1668188 - DNA, 15 bp, Homo sapiens
aagaaaaagaaaatt

SEQ ID NO: 1668189 - DNA, 15 bp, Homo sapiens
gaagaaaaagaaaat

SEQ ID NO: 1668190 - DNA, 15 bp, Homo sapiens
agaagaaaaagaaaa

SEQ ID NO: 1668191 - DNA, 15 bp, Homo sapiens
aagaagaaaaagaaa

SEQ ID NO: 1668192 - DNA, 15 bp, Homo sapiens
gaagaagaaaaagaa

SEQ ID NO: 1668193 - DNA, 15 bp, Homo sapiens
agaagaagaaaaaga

SEQ ID NO: 1668194 - DNA, 15 bp, Homo sapiens
aagaagaagaaaaag

SEQ ID NO: 1668195 - DNA, 15 bp, Homo sapiens
gaagaagaagaaaaa

SEQ ID NO: 1668196 - DNA, 15 bp, Homo sapiens
agaagaagaagaaaa

SEQ ID NO: 1668197 - DNA, 15 bp, Homo sapiens
gaagaagaagaagaa

SEQ ID NO: 1668198 - DNA, 15 bp, Homo sapiens
agaagaagaagaaga

SEQ ID NO: 1668199 - DNA, 15 bp, Homo sapiens
aagaagaagaagaag

SEQ ID NO: 1668200 - DNA, 15 bp, Homo sapiens
aaaaaaaaagaagaa

SEQ ID NO: 1668201 - DNA, 15 bp, Homo sapiens
caaaaaaaaagaaga

SEQ ID NO: 1668202 - DNA, 15 bp, Homo sapiens
acaaaaaaaaagaag

SEQ ID NO: 1668203 - DNA, 15 bp, Homo sapiens
tacaaaaaaaaagaa

SEQ ID NO: 1668204 - DNA, 15 bp, Homo sapiens
atacaaaaaaaaaga

SEQ ID NO: 1668205 - DNA, 15 bp, Homo sapiens
aatacaaaaaaaaag

SEQ ID NO: 1668206 - DNA, 15 bp, Homo sapiens
taaaatacaaaaaaa

SEQ ID NO: 1668207 - DNA, 15 bp, Homo sapiens
ctaaaatacaaaaaa

SEQ ID NO: 1668208 - DNA, 15 bp, Homo sapiens
gctaaaatacaaaaa

SEQ ID NO: 1668209 - DNA, 15 bp, Homo sapiens
agctaaaatacaaaa

SEQ ID NO: 1668210 - DNA, 15 bp, Homo sapiens
cagctaaaatacaaa

SEQ ID NO: 1668211 - DNA, 15 bp, Homo sapiens
gcagctaaaatacaa

SEQ ID NO: 1668212 - DNA, 15 bp, Homo sapiens
tgcagctaaaataca

SEQ ID NO: 1668213 - DNA, 15 bp, Homo sapiens
ttgcagctaaaatac

SEQ ID NO: 1668214 - DNA, 15 bp, Homo sapiens
attgcagctaaaata

SEQ ID NO: 1668215 - DNA, 15 bp, Homo sapiens
cattgcagctaaaat

SEQ ID NO: 1668216 - DNA, 15 bp, Homo sapiens
acattgcagctaaaa

SEQ ID NO: 1668217 - DNA, 15 bp, Homo sapiens
aacattgcagctaaa

SEQ ID NO: 1668218 - DNA, 15 bp, Homo sapiens
taacattgcagctaa

SEQ ID NO: 1668219 - DNA, 15 bp, Homo sapiens
ttaacattgcagcta

SEQ ID NO: 1668220 - DNA, 15 bp, Homo sapiens
tttaacattgcagct

SEQ ID NO: 1668221 - DNA, 15 bp, Homo sapiens
gtttaacattgcagc

SEQ ID NO: 1668222 - DNA, 15 bp, Homo sapiens
tgtttaacattgcag

SEQ ID NO: 1668223 - DNA, 15 bp, Homo sapiens
ttgtttaacattgca

SEQ ID NO: 1668224 - DNA, 15 bp, Homo sapiens
gttgtttaacattgc

SEQ ID NO: 1668225 - DNA, 15 bp, Homo sapiens
ggttgtttaacattg

SEQ ID NO: 1668226 - DNA, 15 bp, Homo sapiens
aggttgtttaacatt

SEQ ID NO: 1668227 - DNA, 15 bp, Homo sapiens
taggttgtttaacat

SEQ ID NO: 1668228 - DNA, 15 bp, Homo sapiens
ataggttgtttaaca

SEQ ID NO: 1668229 - DNA, 15 bp, Homo sapiens
cataggttgtttaac

SEQ ID NO: 1668230 - DNA, 15 bp, Homo sapiens
acataggttgtttaa

SEQ ID NO: 1668231 - DNA, 15 bp, Homo sapiens
cacataggttgttta

SEQ ID NO: 1668232 - DNA, 15 bp, Homo sapiens
tcacataggttgttt

SEQ ID NO: 1668233 - DNA, 15 bp, Homo sapiens
ttcacataggttgtt

SEQ ID NO: 1668234 - DNA, 15 bp, Homo sapiens
attcacataggttgt

SEQ ID NO: 1668235 - DNA, 15 bp, Homo sapiens
aattcacataggttg

SEQ ID NO: 1668236 - DNA, 15 bp, Homo sapiens
aaattcacataggtt

SEQ ID NO: 1668237 - DNA, 15 bp, Homo sapiens
aaaattcacataggt

SEQ ID NO: 1668238 - DNA, 15 bp, Homo sapiens
gaaaattcacatagg

SEQ ID NO: 1668239 - DNA, 15 bp, Homo sapiens
taagaaaattcacat

SEQ ID NO: 1668240 - DNA, 15 bp, Homo sapiens
ataagaaaattcaca

SEQ ID NO: 1668241 - DNA, 15 bp, Homo sapiens
aataagaaaattcac

SEQ ID NO: 1668242 - DNA, 15 bp, Homo sapiens
caataagaaaattca

SEQ ID NO: 1668243 - DNA, 15 bp, Homo sapiens
acaataagaaaattc

SEQ ID NO: 1668244 - DNA, 15 bp, Homo sapiens
cacaataagaaaatt

SEQ ID NO: 1668245 - DNA, 15 bp, Homo sapiens
tcacaataagaaaat

SEQ ID NO: 1668246 - DNA, 15 bp, Homo sapiens
ctcacaataagaaaa

SEQ ID NO: 1668247 - DNA, 15 bp, Homo sapiens
tctcacaataagaaa

SEQ ID NO: 1668248 - DNA, 15 bp, Homo sapiens
ttctcacaataagaa

SEQ ID NO: 1668249 - DNA, 15 bp, Homo sapiens
attctcacaataaga

SEQ ID NO: 1668250 - DNA, 15 bp, Homo sapiens
tattctcacaataag

SEQ ID NO: 1668251 - DNA, 15 bp, Homo sapiens
atattctcacaataa

SEQ ID NO: 1668252 - DNA, 15 bp, Homo sapiens
aatattctcacaata

SEQ ID NO: 1668253 - DNA, 15 bp, Homo sapiens
aaatattctcacaat

SEQ ID NO: 1668254 - DNA, 15 bp, Homo sapiens
caaatattctcacaa

SEQ ID NO: 1668255 - DNA, 15 bp, Homo sapiens
gcaaatattctcaca

SEQ ID NO: 1668256 - DNA, 15 bp, Homo sapiens
ggcaaatattctcac

SEQ ID NO: 1668257 - DNA, 15 bp, Homo sapiens
aggcaaatattctca

SEQ ID NO: 1668258 - DNA, 15 bp, Homo sapiens
aaggcaaatattctc

SEQ ID NO: 1668259 - DNA, 15 bp, Homo sapiens
gaaggcaaatattct

SEQ ID NO: 1668260 - DNA, 15 bp, Homo sapiens
ggaaggcaaatattc

SEQ ID NO: 1668261 - DNA, 15 bp, Homo sapiens
tggaaggcaaatatt

SEQ ID NO: 1668262 - DNA, 15 bp, Homo sapiens
ctggaaggcaaatat

SEQ ID NO: 1668263 - DNA, 15 bp, Homo sapiens
tctggaaggcaaata

SEQ ID NO: 1668264 - DNA, 15 bp, Homo sapiens
ctctggaaggcaaat

SEQ ID NO: 1668265 - DNA, 15 bp, Homo sapiens
actctggaaggcaaa

SEQ ID NO: 1668266 - DNA, 15 bp, Homo sapiens
cactctggaaggcaa

SEQ ID NO: 1668267 - DNA, 15 bp, Homo sapiens
tcactctggaaggca

SEQ ID NO: 1668268 - DNA, 15 bp, Homo sapiens
gtcactctggaaggc

SEQ ID NO: 1668269 - DNA, 15 bp, Homo sapiens
agtcactctggaagg

SEQ ID NO: 1668270 - DNA, 15 bp, Homo sapiens
gagtcactctggaag

SEQ ID NO: 1668271 - DNA, 15 bp, Homo sapiens
tgagtcactctggaa

SEQ ID NO: 1668272 - DNA, 15 bp, Homo sapiens
gtgagtcactctgga

SEQ ID NO: 1668273 - DNA, 15 bp, Homo sapiens
ggtgagtcactctgg

SEQ ID NO: 1668274 - DNA, 15 bp, Homo sapiens
aggtgagtcactctg

SEQ ID NO: 1668275 - DNA, 15 bp, Homo sapiens
aaggtgagtcactct

SEQ ID NO: 1668276 - DNA, 15 bp, Homo sapiens
aaaggtgagtcactc

SEQ ID NO: 1668277 - DNA, 15 bp, Homo sapiens
taaaggtgagtcact

SEQ ID NO: 1668278 - DNA, 15 bp, Homo sapiens
ataaaggtgagtcac

SEQ ID NO: 1668279 - DNA, 15 bp, Homo sapiens
gataaaggtgagtca

SEQ ID NO: 1668280 - DNA, 15 bp, Homo sapiens
agataaaggtgagtc

SEQ ID NO: 1668281 - DNA, 15 bp, Homo sapiens
gagataaaggtgagt

SEQ ID NO: 1668282 - DNA, 15 bp, Homo sapiens
tgagataaaggtgag

SEQ ID NO: 1668283 - DNA, 15 bp, Homo sapiens
ttgagataaaggtga

SEQ ID NO: 1668284 - DNA, 15 bp, Homo sapiens
tttgagataaaggtg

SEQ ID NO: 1668285 - DNA, 15 bp, Homo sapiens
ctttgagataaaggt

SEQ ID NO: 1668286 - DNA, 15 bp, Homo sapiens
tctttgagataaagg

SEQ ID NO: 1668287 - DNA, 15 bp, Homo sapiens
ctctttgagataaag

SEQ ID NO: 1668288 - DNA, 15 bp, Homo sapiens
gctctttgagataaa

SEQ ID NO: 1668289 - DNA, 15 bp, Homo sapiens
tgctctttgagataa

SEQ ID NO: 1668290 - DNA, 15 bp, Homo sapiens
ttgctctttgagata

SEQ ID NO: 1668291 - DNA, 15 bp, Homo sapiens
attgctctttgagat

SEQ ID NO: 1668292 - DNA, 15 bp, Homo sapiens
tattgctctttgaga

SEQ ID NO: 1668293 - DNA, 15 bp, Homo sapiens
atattgctctttgag

SEQ ID NO: 1668294 - DNA, 15 bp, Homo sapiens
aatattgctctttga

SEQ ID NO: 1668295 - DNA, 15 bp, Homo sapiens
caatattgctctttg

SEQ ID NO: 1668296 - DNA, 15 bp, Homo sapiens
acaatattgctcttt

SEQ ID NO: 1668297 - DNA, 15 bp, Homo sapiens
cacaatattgctctt

SEQ ID NO: 1668298 - DNA, 15 bp, Homo sapiens
tcacaatattgctct

SEQ ID NO: 1668299 - DNA, 15 bp, Homo sapiens
ctcacaatattgctc

SEQ ID NO: 1668300 - DNA, 15 bp, Homo sapiens
actcacaatattgct

SEQ ID NO: 1668301 - DNA, 15 bp, Homo sapiens
aactcacaatattgc

SEQ ID NO: 1668302 - DNA, 15 bp, Homo sapiens
aaactcacaatattg

SEQ ID NO: 1668303 - DNA, 15 bp, Homo sapiens
aaaactcacaatatt

SEQ ID NO: 1668304 - DNA, 15 bp, Homo sapiens
caaaactcacaatat

SEQ ID NO: 1668305 - DNA, 15 bp, Homo sapiens
tcaaaactcacaata

SEQ ID NO: 1668306 - DNA, 15 bp, Homo sapiens
ttcaaaactcacaat

SEQ ID NO: 1668307 - DNA, 15 bp, Homo sapiens
tttcaaaactcacaa

SEQ ID NO: 1668308 - DNA, 15 bp, Homo sapiens
ttttcaaaactcaca

SEQ ID NO: 1668309 - DNA, 15 bp, Homo sapiens
attttcaaaactcac

SEQ ID NO: 1668310 - DNA, 15 bp, Homo sapiens
cattttcaaaactca

SEQ ID NO: 1668311 - DNA, 15 bp, Homo sapiens
gcattttcaaaactc

SEQ ID NO: 1668312 - DNA, 15 bp, Homo sapiens
agcattttcaaaact

SEQ ID NO: 1668313 - DNA, 15 bp, Homo sapiens
cagcattttcaaaac

SEQ ID NO: 1668314 - DNA, 15 bp, Homo sapiens
gcagcattttcaaaa

SEQ ID NO: 1668315 - DNA, 15 bp, Homo sapiens
agcagcattttcaaa

SEQ ID NO: 1668316 - DNA, 15 bp, Homo sapiens
gagcagcattttcaa

SEQ ID NO: 1668317 - DNA, 15 bp, Homo sapiens
agagcagcattttca

SEQ ID NO: 1668318 - DNA, 15 bp, Homo sapiens
tagagcagcattttc

SEQ ID NO: 1668319 - DNA, 15 bp, Homo sapiens
ttagagcagcatttt

SEQ ID NO: 1668320 - DNA, 15 bp, Homo sapiens
cttagagcagcattt

SEQ ID NO: 1668321 - DNA, 15 bp, Homo sapiens
ccttagagcagcatt

SEQ ID NO: 1668322 - DNA, 15 bp, Homo sapiens
gccttagagcagcat

SEQ ID NO: 1668323 - DNA, 15 bp, Homo sapiens
agccttagagcagca

SEQ ID NO: 1668324 - DNA, 15 bp, Homo sapiens
cagccttagagcagc

SEQ ID NO: 1668325 - DNA, 15 bp, Homo sapiens
acagccttagagcag

SEQ ID NO: 1668326 - DNA, 15 bp, Homo sapiens
cacagccttagagca

SEQ ID NO: 1668327 - DNA, 15 bp, Homo sapiens
acacagccttagagc

SEQ ID NO: 1668328 - DNA, 15 bp, Homo sapiens
aacacagccttagag

SEQ ID NO: 1668329 - DNA, 15 bp, Homo sapiens
aaacacagccttaga

SEQ ID NO: 1668330 - DNA, 15 bp, Homo sapiens
aaaacacagccttag

SEQ ID NO: 1668331 - DNA, 15 bp, Homo sapiens
caaaacacagcctta

SEQ ID NO: 1668332 - DNA, 15 bp, Homo sapiens
acaaaacacagcctt

SEQ ID NO: 1668333 - DNA, 15 bp, Homo sapiens
aacaaaacacagcct

SEQ ID NO: 1668334 - DNA, 15 bp, Homo sapiens
taacaaaacacagcc

SEQ ID NO: 1668335 - DNA, 15 bp, Homo sapiens
ctaacaaaacacagc

SEQ ID NO: 1668336 - DNA, 15 bp, Homo sapiens
actaacaaaacacag

SEQ ID NO: 1668337 - DNA, 15 bp, Homo sapiens
gactaacaaaacaca

SEQ ID NO: 1668338 - DNA, 15 bp, Homo sapiens
ggactaacaaaacac

SEQ ID NO: 1668339 - DNA, 15 bp, Homo sapiens
aggactaacaaaaca

SEQ ID NO: 1668340 - DNA, 15 bp, Homo sapiens
caggactaacaaaac

SEQ ID NO: 1668341 - DNA, 15 bp, Homo sapiens
tcaggactaacaaaa

SEQ ID NO: 1668342 - DNA, 15 bp, Homo sapiens
ctcaggactaacaaa

SEQ ID NO: 1668343 - DNA, 15 bp, Homo sapiens
gctcaggactaacaa

SEQ ID NO: 1668344 - DNA, 15 bp, Homo sapiens
ggctcaggactaaca

SEQ ID NO: 1668345 - DNA, 15 bp, Homo sapiens
tggctcaggactaac

SEQ ID NO: 1668346 - DNA, 15 bp, Homo sapiens
ctggctcaggactaa

SEQ ID NO: 1668347 - DNA, 15 bp, Homo sapiens
cctggctcaggacta

SEQ ID NO: 1668348 - DNA, 15 bp, Homo sapiens
tcctggctcaggact

SEQ ID NO: 1668349 - DNA, 15 bp, Homo sapiens
ctcctggctcaggac

SEQ ID NO: 1668350 - DNA, 15 bp, Homo sapiens
tctcctggctcagga

SEQ ID NO: 1668351 - DNA, 15 bp, Homo sapiens
gtctcctggctcagg

SEQ ID NO: 1668352 - DNA, 15 bp, Homo sapiens
agtctcctggctcag

SEQ ID NO: 1668353 - DNA, 15 bp, Homo sapiens
aagtctcctggctca

SEQ ID NO: 1668354 - DNA, 15 bp, Homo sapiens
taagtctcctggctc

SEQ ID NO: 1668355 - DNA, 15 bp, Homo sapiens
ttaagtctcctggct

SEQ ID NO: 1668356 - DNA, 15 bp, Homo sapiens
tttaagtctcctggc

SEQ ID NO: 1668357 - DNA, 15 bp, Homo sapiens
ctttaagtctcctgg

SEQ ID NO: 1668358 - DNA, 15 bp, Homo sapiens
gctttaagtctcctg

SEQ ID NO: 1668359 - DNA, 15 bp, Homo sapiens
tgctttaagtctcct

SEQ ID NO: 1668360 - DNA, 15 bp, Homo sapiens
ttgctttaagtctcc

SEQ ID NO: 1668361 - DNA, 15 bp, Homo sapiens
tttgctttaagtctc

SEQ ID NO: 1668362 - DNA, 15 bp, Homo sapiens
gtttgctttaagtct

SEQ ID NO: 1668363 - DNA, 15 bp, Homo sapiens
agtttgctttaagtc

SEQ ID NO: 1668364 - DNA, 15 bp, Homo sapiens
aagtttgctttaagt

SEQ ID NO: 1668365 - DNA, 15 bp, Homo sapiens
caagtttgctttaag

SEQ ID NO: 1668366 - DNA, 15 bp, Homo sapiens
tcaagtttgctttaa

SEQ ID NO: 1668367 - DNA, 15 bp, Homo sapiens
ctcaagtttgcttta

SEQ ID NO: 1668368 - DNA, 15 bp, Homo sapiens
cctcaagtttgcttt

SEQ ID NO: 1668369 - DNA, 15 bp, Homo sapiens
ccctcaagtttgctt

SEQ ID NO: 1668370 - DNA, 15 bp, Homo sapiens
cccctcaagtttgct

SEQ ID NO: 1668371 - DNA, 15 bp, Homo sapiens
acccctcaagtttgc

SEQ ID NO: 1668372 - DNA, 15 bp, Homo sapiens
gacccctcaagtttg

SEQ ID NO: 1668373 - DNA, 15 bp, Homo sapiens
agacccctcaagttt

SEQ ID NO: 1668374 - DNA, 15 bp, Homo sapiens
aagacccctcaagtt

SEQ ID NO: 1668375 - DNA, 15 bp, Homo sapiens
taagacccctcaagt

SEQ ID NO: 1668376 - DNA, 15 bp, Homo sapiens
ttaagacccctcaag

SEQ ID NO: 1668377 - DNA, 15 bp, Homo sapiens
tttaagacccctcaa

SEQ ID NO: 1668378 - DNA, 15 bp, Homo sapiens
ttttaagacccctca

SEQ ID NO: 1668379 - DNA, 15 bp, Homo sapiens
gttttaagacccctc

SEQ ID NO: 1668380 - DNA, 15 bp, Homo sapiens
tgttttaagacccct

SEQ ID NO: 1668381 - DNA, 15 bp, Homo sapiens
atgttttaagacccc

SEQ ID NO: 1668382 - DNA, 15 bp, Homo sapiens
gatgttttaagaccc

SEQ ID NO: 1668383 - DNA, 15 bp, Homo sapiens
cgatgttttaagacc

SEQ ID NO: 1668384 - DNA, 15 bp, Homo sapiens
tcgatgttttaagac

SEQ ID NO: 1668385 - DNA, 15 bp, Homo sapiens
ttcgatgttttaaga

SEQ ID NO: 1668386 - DNA, 15 bp, Homo sapiens
cttcgatgttttaag

SEQ ID NO: 1668387 - DNA, 15 bp, Homo sapiens
acttcgatgttttaa

SEQ ID NO: 1668388 - DNA, 15 bp, Homo sapiens
cacttcgatgtttta

SEQ ID NO: 1668389 - DNA, 15 bp, Homo sapiens
tcacttcgatgtttt

SEQ ID NO: 1668390 - DNA, 15 bp, Homo sapiens
ctcacttcgatgttt

SEQ ID NO: 1668391 - DNA, 15 bp, Homo sapiens
gctcacttcgatgtt

SEQ ID NO: 1668392 - DNA, 15 bp, Homo sapiens
ggctcacttcgatgt

SEQ ID NO: 1668393 - DNA, 15 bp, Homo sapiens
aggctcacttcgatg

SEQ ID NO: 1668394 - DNA, 15 bp, Homo sapiens
aaggctcacttcgat

SEQ ID NO: 1668395 - DNA, 15 bp, Homo sapiens
taaggctcacttcga

SEQ ID NO: 1668396 - DNA, 15 bp, Homo sapiens
ttaaggctcacttcg

SEQ ID NO: 1668397 - DNA, 15 bp, Homo sapiens
tttaaggctcacttc

SEQ ID NO: 1668398 - DNA, 15 bp, Homo sapiens
gtttaaggctcactt

SEQ ID NO: 1668399 - DNA, 15 bp, Homo sapiens
tgtttaaggctcact

SEQ ID NO: 1668400 - DNA, 15 bp, Homo sapiens
atgtttaaggctcac

SEQ ID NO: 1668401 - DNA, 15 bp, Homo sapiens
aatgtttaaggctca

SEQ ID NO: 1668402 - DNA, 15 bp, Homo sapiens
caatgtttaaggctc

SEQ ID NO: 1668403 - DNA, 15 bp, Homo sapiens
ccaatgtttaaggct

SEQ ID NO: 1668404 - DNA, 15 bp, Homo sapiens
cccaatgtttaaggc

SEQ ID NO: 1668405 - DNA, 15 bp, Homo sapiens
tcccaatgtttaagg

SEQ ID NO: 1668406 - DNA, 15 bp, Homo sapiens
ttcccaatgtttaag

SEQ ID NO: 1668407 - DNA, 15 bp, Homo sapiens
cttcccaatgtttaa

SEQ ID NO: 1668408 - DNA, 15 bp, Homo sapiens
tcttcccaatgttta

SEQ ID NO: 1668409 - DNA, 15 bp, Homo sapiens
gtcttcccaatgttt

SEQ ID NO: 1668410 - DNA, 15 bp, Homo sapiens
ggtcttcccaatgtt

SEQ ID NO: 1668411 - DNA, 15 bp, Homo sapiens
aggtcttcccaatgt

SEQ ID NO: 1668412 - DNA, 15 bp, Homo sapiens
aaggtcttcccaatg

SEQ ID NO: 1668413 - DNA, 15 bp, Homo sapiens
taaggtcttcccaat

SEQ ID NO: 1668414 - DNA, 15 bp, Homo sapiens
ataaggtcttcccaa

SEQ ID NO: 1668415 - DNA, 15 bp, Homo sapiens
cataaggtcttccca

SEQ ID NO: 1668416 - DNA, 15 bp, Homo sapiens
acataaggtcttccc

SEQ ID NO: 1668417 - DNA, 15 bp, Homo sapiens
aacataaggtcttcc

SEQ ID NO: 1668418 - DNA, 15 bp, Homo sapiens
aaacataaggtcttc

SEQ ID NO: 1668419 - DNA, 15 bp, Homo sapiens
aaaacataaggtctt

SEQ ID NO: 1668420 - DNA, 15 bp, Homo sapiens
aaaaacataaggtct

SEQ ID NO: 1668421 - DNA, 15 bp, Homo sapiens
gaaaaacataaggtc

SEQ ID NO: 1668422 - DNA, 15 bp, Homo sapiens
ggaaaaacataaggt

SEQ ID NO: 1668423 - DNA, 15 bp, Homo sapiens
gggaaaaacataagg

SEQ ID NO: 1668424 - DNA, 15 bp, Homo sapiens
agggaaaaacataag

SEQ ID NO: 1668425 - DNA, 15 bp, Homo sapiens
gagggaaaaacataa

SEQ ID NO: 1668426 - DNA, 15 bp, Homo sapiens
agagggaaaaacata

SEQ ID NO: 1668427 - DNA, 15 bp, Homo sapiens
gagagggaaaaacat

SEQ ID NO: 1668428 - DNA, 15 bp, Homo sapiens
tgagagggaaaaaca

SEQ ID NO: 1668429 - DNA, 15 bp, Homo sapiens
atgagagggaaaaac

SEQ ID NO: 1668430 - DNA, 15 bp, Homo sapiens
tatgagagggaaaaa

SEQ ID NO: 1668431 - DNA, 15 bp, Homo sapiens
atatgagagggaaaa

SEQ ID NO: 1668432 - DNA, 15 bp, Homo sapiens
gatatgagagggaaa

SEQ ID NO: 1668433 - DNA, 15 bp, Homo sapiens
agatatgagagggaa

SEQ ID NO: 1668434 - DNA, 15 bp, Homo sapiens
tagatatgagaggga

SEQ ID NO: 1668435 - DNA, 15 bp, Homo sapiens
atagatatgagaggg

SEQ ID NO: 1668436 - DNA, 15 bp, Homo sapiens
aatagatatgagagg

SEQ ID NO: 1668437 - DNA, 15 bp, Homo sapiens
taatagatatgagag

SEQ ID NO: 1668438 - DNA, 15 bp, Homo sapiens
ataatagatatgaga

SEQ ID NO: 1668439 - DNA, 15 bp, Homo sapiens
aataatagatatgag

SEQ ID NO: 1668440 - DNA, 15 bp, Homo sapiens
aaataatagatatga

SEQ ID NO: 1668441 - DNA, 15 bp, Homo sapiens
aaaataatagatatg

SEQ ID NO: 1668442 - DNA, 15 bp, Homo sapiens
aaaaataatagatat

SEQ ID NO: 1668443 - DNA, 15 bp, Homo sapiens
caaaaataatagata

SEQ ID NO: 1668444 - DNA, 15 bp, Homo sapiens
acaaaaataatagat

SEQ ID NO: 1668445 - DNA, 15 bp, Homo sapiens
cacaaaaataataga

SEQ ID NO: 1668446 - DNA, 15 bp, Homo sapiens
tcacaaaaataatag

SEQ ID NO: 1668447 - DNA, 15 bp, Homo sapiens
atcacaaaaataata

SEQ ID NO: 1668448 - DNA, 15 bp, Homo sapiens
gatcacaaaaataat

SEQ ID NO: 1668449 - DNA, 15 bp, Homo sapiens
agatcacaaaaataa

SEQ ID NO: 1668450 - DNA, 15 bp, Homo sapiens
gagatcacaaaaata

SEQ ID NO: 1668451 - DNA, 15 bp, Homo sapiens
tgagatcacaaaaat

SEQ ID NO: 1668452 - DNA, 15 bp, Homo sapiens
ctgagatcacaaaaa

SEQ ID NO: 1668453 - DNA, 15 bp, Homo sapiens
actgagatcacaaaa

SEQ ID NO: 1668454 - DNA, 15 bp, Homo sapiens
aactgagatcacaaa

SEQ ID NO: 1668455 - DNA, 15 bp, Homo sapiens
taactgagatcacaa

SEQ ID NO: 1668456 - DNA, 15 bp, Homo sapiens
ataactgagatcaca

SEQ ID NO: 1668457 - DNA, 15 bp, Homo sapiens
aataactgagatcac

SEQ ID NO: 1668458 - DNA, 15 bp, Homo sapiens
taataactgagatca

SEQ ID NO: 1668459 - DNA, 15 bp, Homo sapiens
ttaataactgagatc

SEQ ID NO: 1668460 - DNA, 15 bp, Homo sapiens
attaataactgagat

SEQ ID NO: 1668461 - DNA, 15 bp, Homo sapiens
gattaataactgaga

SEQ ID NO: 1668462 - DNA, 15 bp, Homo sapiens
tgattaataactgag

SEQ ID NO: 1668463 - DNA, 15 bp, Homo sapiens
atgattaataactga

SEQ ID NO: 1668464 - DNA, 15 bp, Homo sapiens
aatgattaataactg

SEQ ID NO: 1668465 - DNA, 15 bp, Homo sapiens
aaatgattaataact

SEQ ID NO: 1668466 - DNA, 15 bp, Homo sapiens
taaatgattaataac

SEQ ID NO: 1668467 - DNA, 15 bp, Homo sapiens
ttaaatgattaataa

SEQ ID NO: 1668468 - DNA, 15 bp, Homo sapiens
tttaaatgattaata

SEQ ID NO: 1668469 - DNA, 15 bp, Homo sapiens
ctttaaatgattaat

SEQ ID NO: 1668470 - DNA, 15 bp, Homo sapiens
cctttaaatgattaa

SEQ ID NO: 1668471 - DNA, 15 bp, Homo sapiens
ccctttaaatgatta

SEQ ID NO: 1668472 - DNA, 15 bp, Homo sapiens
tccctttaaatgatt

SEQ ID NO: 1668473 - DNA, 15 bp, Homo sapiens
gtccctttaaatgat

SEQ ID NO: 1668474 - DNA, 15 bp, Homo sapiens
agtccctttaaatga

SEQ ID NO: 1668475 - DNA, 15 bp, Homo sapiens
gagtccctttaaatg

SEQ ID NO: 1668476 - DNA, 15 bp, Homo sapiens
agagtccctttaaat

SEQ ID NO: 1668477 - DNA, 15 bp, Homo sapiens
aagagtccctttaaa

SEQ ID NO: 1668478 - DNA, 15 bp, Homo sapiens
aaagagtccctttaa

SEQ ID NO: 1668479 - DNA, 15 bp, Homo sapiens
gaaagagtcccttta

SEQ ID NO: 1668480 - DNA, 15 bp, Homo sapiens
ggaaagagtcccttt

SEQ ID NO: 1668481 - DNA, 15 bp, Homo sapiens
aggaaagagtccctt

SEQ ID NO: 1668482 - DNA, 15 bp, Homo sapiens
taggaaagagtccct

SEQ ID NO: 1668483 - DNA, 15 bp, Homo sapiens
ctaggaaagagtccc

SEQ ID NO: 1668484 - DNA, 15 bp, Homo sapiens
gctaggaaagagtcc

SEQ ID NO: 1668485 - DNA, 15 bp, Homo sapiens
agctaggaaagagtc

SEQ ID NO: 1668486 - DNA, 15 bp, Homo sapiens
cagctaggaaagagt

SEQ ID NO: 1668487 - DNA, 15 bp, Homo sapiens
tcagctaggaaagag

SEQ ID NO: 1668488 - DNA, 15 bp, Homo sapiens
atcagctaggaaaga

SEQ ID NO: 1668489 - DNA, 15 bp, Homo sapiens
aatcagctaggaaag

SEQ ID NO: 1668490 - DNA, 15 bp, Homo sapiens
caatcagctaggaaa

SEQ ID NO: 1668491 - DNA, 15 bp, Homo sapiens
ccaatcagctaggaa

SEQ ID NO: 1668492 - DNA, 15 bp, Homo sapiens
gccaatcagctagga

SEQ ID NO: 1668493 - DNA, 15 bp, Homo sapiens
tgccaatcagctagg

SEQ ID NO: 1668494 - DNA, 15 bp, Homo sapiens
gtgccaatcagctag

SEQ ID NO: 1668495 - DNA, 15 bp, Homo sapiens
agtgccaatcagcta

SEQ ID NO: 1668496 - DNA, 15 bp, Homo sapiens
aagtgccaatcagct

SEQ ID NO: 1668497 - DNA, 15 bp, Homo sapiens
taagtgccaatcagc

SEQ ID NO: 1668498 - DNA, 15 bp, Homo sapiens
ttaagtgccaatcag

SEQ ID NO: 1668499 - DNA, 15 bp, Homo sapiens
tttaagtgccaatca

SEQ ID NO: 1668500 - DNA, 15 bp, Homo sapiens
ttttaagtgccaatc

SEQ ID NO: 1668501 - DNA, 15 bp, Homo sapiens
gttttaagtgccaat

SEQ ID NO: 1668502 - DNA, 15 bp, Homo sapiens
tgttttaagtgccaa

SEQ ID NO: 1668503 - DNA, 15 bp, Homo sapiens
ctgttttaagtgcca

SEQ ID NO: 1668504 - DNA, 15 bp, Homo sapiens
cctgttttaagtgcc

SEQ ID NO: 1668505 - DNA, 15 bp, Homo sapiens
tcctgttttaagtgc

SEQ ID NO: 1668506 - DNA, 15 bp, Homo sapiens
atcctgttttaagtg

SEQ ID NO: 1668507 - DNA, 15 bp, Homo sapiens
catcctgttttaagt

SEQ ID NO: 1668508 - DNA, 15 bp, Homo sapiens
ccatcctgttttaag

SEQ ID NO: 1668509 - DNA, 15 bp, Homo sapiens
tccatcctgttttaa

SEQ ID NO: 1668510 - DNA, 15 bp, Homo sapiens
ttccatcctgtttta

SEQ ID NO: 1668511 - DNA, 15 bp, Homo sapiens
cttccatcctgtttt

SEQ ID NO: 1668512 - DNA, 15 bp, Homo sapiens
acttccatcctgttt

SEQ ID NO: 1668513 - DNA, 15 bp, Homo sapiens
gacttccatcctgtt

SEQ ID NO: 1668514 - DNA, 15 bp, Homo sapiens
agacttccatcctgt

SEQ ID NO: 1668515 - DNA, 15 bp, Homo sapiens
aagacttccatcctg

SEQ ID NO: 1668516 - DNA, 15 bp, Homo sapiens
aaagacttccatcct

SEQ ID NO: 1668517 - DNA, 15 bp, Homo sapiens
aaaagacttccatcc

SEQ ID NO: 1668518 - DNA, 15 bp, Homo sapiens
aaaaagacttccatc

SEQ ID NO: 1668519 - DNA, 15 bp, Homo sapiens
aaaaaagacttccat

SEQ ID NO: 1668520 - DNA, 15 bp, Homo sapiens
aaaaaaagacttcca

SEQ ID NO: 1668521 - DNA, 15 bp, Homo sapiens
aaaaaaaagacttcc

SEQ ID NO: 1668522 - DNA, 15 bp, Homo sapiens
aaaaaaaaagacttc

SEQ ID NO: 1668523 - DNA, 15 bp, Homo sapiens
aaaaaaaaaagactt

SEQ ID NO: 1668524 - DNA, 15 bp, Homo sapiens
aaaaaaaaaaagact

SEQ ID NO: 1668525 - DNA, 15 bp, Homo sapiens
acaagagcaaaactc

SEQ ID NO: 1668526 - DNA, 15 bp, Homo sapiens
aacaagagcaaaact

SEQ ID NO: 1668527 - DNA, 15 bp, Homo sapiens
caacaagagcaaaac

SEQ ID NO: 1668528 - DNA, 15 bp, Homo sapiens
gcaacaagagcaaaa

SEQ ID NO: 1668529 - DNA, 15 bp, Homo sapiens
ggcaacaagagcaaa

SEQ ID NO: 1668530 - DNA, 15 bp, Homo sapiens
gggcaacaagagcaa

SEQ ID NO: 1668531 - DNA, 15 bp, Homo sapiens
tgggcaacaagagca

SEQ ID NO: 1668532 - DNA, 15 bp, Homo sapiens
ctgagattgcaccat

SEQ ID NO: 1668533 - DNA, 15 bp, Homo sapiens
ccgggaggcagaggt

SEQ ID NO: 1668534 - DNA, 15 bp, Homo sapiens
cccgggaggcagagg

SEQ ID NO: 1668535 - DNA, 15 bp, Homo sapiens
cgggcgtggtggtgc

SEQ ID NO: 1668536 - DNA, 15 bp, Homo sapiens
ttaaaaatacaaaat

SEQ ID NO: 1668537 - DNA, 15 bp, Homo sapiens
tattaaaaatacaaa

SEQ ID NO: 1668538 - DNA, 15 bp, Homo sapiens
ctattaaaaatacaa

SEQ ID NO: 1668539 - DNA, 15 bp, Homo sapiens
tctattaaaaataca

SEQ ID NO: 1668540 - DNA, 15 bp, Homo sapiens
ctctattaaaaatac

SEQ ID NO: 1668541 - DNA, 15 bp, Homo sapiens
tctctattaaaaata

SEQ ID NO: 1668542 - DNA, 15 bp, Homo sapiens
gtctctattaaaaat

SEQ ID NO: 1668543 - DNA, 15 bp, Homo sapiens
cgtctctattaaaaa

SEQ ID NO: 1668544 - DNA, 15 bp, Homo sapiens
ccgtctctattaaaa

SEQ ID NO: 1668545 - DNA, 15 bp, Homo sapiens
accgtctctattaaa

SEQ ID NO: 1668546 - DNA, 15 bp, Homo sapiens
caccgtctctattaa

SEQ ID NO: 1668547 - DNA, 15 bp, Homo sapiens
acaccgtctctatta

SEQ ID NO: 1668548 - DNA, 15 bp, Homo sapiens
aacaccgtctctatt

SEQ ID NO: 1668549 - DNA, 15 bp, Homo sapiens
aaacaccgtctctat

SEQ ID NO: 1668550 - DNA, 15 bp, Homo sapiens
gaaacaccgtctcta

SEQ ID NO: 1668551 - DNA, 15 bp, Homo sapiens
agaaacaccgtctct

SEQ ID NO: 1668552 - DNA, 15 bp, Homo sapiens
gagaaacaccgtctc

SEQ ID NO: 1668553 - DNA, 15 bp, Homo sapiens
ggagaaacaccgtct

SEQ ID NO: 1668554 - DNA, 15 bp, Homo sapiens
tggagaaacaccgtc

SEQ ID NO: 1668555 - DNA, 15 bp, Homo sapiens
atggagaaacaccgt

SEQ ID NO: 1668556 - DNA, 15 bp, Homo sapiens
catggagaaacaccg

SEQ ID NO: 1668557 - DNA, 15 bp, Homo sapiens
acatggagaaacacc

SEQ ID NO: 1668558 - DNA, 15 bp, Homo sapiens
aacatggagaaacac

SEQ ID NO: 1668559 - DNA, 15 bp, Homo sapiens
caacatggagaaaca

SEQ ID NO: 1668560 - DNA, 15 bp, Homo sapiens
ttgaggtgggcggat

SEQ ID NO: 1668561 - DNA, 15 bp, Homo sapiens
gttgaggtgggcgga

SEQ ID NO: 1668562 - DNA, 15 bp, Homo sapiens
ggttgaggtgggcgg

SEQ ID NO: 1668563 - DNA, 15 bp, Homo sapiens
aggttgaggtgggcg

SEQ ID NO: 1668564 - DNA, 15 bp, Homo sapiens
gaggttgaggtgggc

SEQ ID NO: 1668565 - DNA, 15 bp, Homo sapiens
gcactttgggaggtt

SEQ ID NO: 1668566 - DNA, 15 bp, Homo sapiens
gcccataatcccagc

SEQ ID NO: 1668567 - DNA, 15 bp, Homo sapiens
cgcccataatcccag

SEQ ID NO: 1668568 - DNA, 15 bp, Homo sapiens
acgcccataatccca

SEQ ID NO: 1668569 - DNA, 15 bp, Homo sapiens
cacgcccataatccc

SEQ ID NO: 1668570 - DNA, 15 bp, Homo sapiens
tcacgcccataatcc

SEQ ID NO: 1668571 - DNA, 15 bp, Homo sapiens
ctcacgcccataatc

SEQ ID NO: 1668572 - DNA, 15 bp, Homo sapiens
gctcacgcccataat

SEQ ID NO: 1668573 - DNA, 15 bp, Homo sapiens
ggctcacgcccataa

SEQ ID NO: 1668574 - DNA, 15 bp, Homo sapiens
tggctcacgcccata

SEQ ID NO: 1668575 - DNA, 15 bp, Homo sapiens
gtggctcacgcccat

SEQ ID NO: 1668576 - DNA, 15 bp, Homo sapiens
ggtggctcacgccca

SEQ ID NO: 1668577 - DNA, 15 bp, Homo sapiens
cggtggctcacgccc

SEQ ID NO: 1668578 - DNA, 15 bp, Homo sapiens
tgccgggcgcggtgg

SEQ ID NO: 1668579 - DNA, 15 bp, Homo sapiens
ctgccgggcgcggtg

SEQ ID NO: 1668580 - DNA, 15 bp, Homo sapiens
actgccgggcgcggt

SEQ ID NO: 1668581 - DNA, 15 bp, Homo sapiens
aactgccgggcgcgg

SEQ ID NO: 1668582 - DNA, 15 bp, Homo sapiens
gaactgccgggcgcg

SEQ ID NO: 1668583 - DNA, 15 bp, Homo sapiens
agaactgccgggcgc

SEQ ID NO: 1668584 - DNA, 15 bp, Homo sapiens
cagaactgccgggcg

SEQ ID NO: 1668585 - DNA, 15 bp, Homo sapiens
ccagaactgccgggc

SEQ ID NO: 1668586 - DNA, 15 bp, Homo sapiens
accagaactgccggg

SEQ ID NO: 1668587 - DNA, 15 bp, Homo sapiens
gaccagaactgccgg

SEQ ID NO: 1668588 - DNA, 15 bp, Homo sapiens
agaccagaactgccg

SEQ ID NO: 1668589 - DNA, 15 bp, Homo sapiens
aagaccagaactgcc

SEQ ID NO: 1668590 - DNA, 15 bp, Homo sapiens
aaagaccagaactgc

SEQ ID NO: 1668591 - DNA, 15 bp, Homo sapiens
taaagaccagaactg

SEQ ID NO: 1668592 - DNA, 15 bp, Homo sapiens
ttaaagaccagaact

SEQ ID NO: 1668593 - DNA, 15 bp, Homo sapiens
gttaaagaccagaac

SEQ ID NO: 1668594 - DNA, 15 bp, Homo sapiens
agttaaagaccagaa

SEQ ID NO: 1668595 - DNA, 15 bp, Homo sapiens
tagttaaagaccaga

SEQ ID NO: 1668596 - DNA, 15 bp, Homo sapiens
ttagttaaagaccag

SEQ ID NO: 1668597 - DNA, 15 bp, Homo sapiens
cttagttaaagacca

SEQ ID NO: 1668598 - DNA, 15 bp, Homo sapiens
ccttagttaaagacc

SEQ ID NO: 1668599 - DNA, 15 bp, Homo sapiens
accttagttaaagac

SEQ ID NO: 1668600 - DNA, 15 bp, Homo sapiens
taccttagttaaaga

SEQ ID NO: 1668601 - DNA, 15 bp, Homo sapiens
ataccttagttaaag

SEQ ID NO: 1668602 - DNA, 15 bp, Homo sapiens
tataccttagttaaa

SEQ ID NO: 1668603 - DNA, 15 bp, Homo sapiens
ttataccttagttaa

SEQ ID NO: 1668604 - DNA, 15 bp, Homo sapiens
cttataccttagtta

SEQ ID NO: 1668605 - DNA, 15 bp, Homo sapiens
ccttataccttagtt

SEQ ID NO: 1668606 - DNA, 15 bp, Homo sapiens
gccttataccttagt

SEQ ID NO: 1668607 - DNA, 15 bp, Homo sapiens
tagccttatacctta

SEQ ID NO: 1668608 - DNA, 15 bp, Homo sapiens
atagccttatacctt

SEQ ID NO: 1668609 - DNA, 15 bp, Homo sapiens
catagccttatacct

SEQ ID NO: 1668610 - DNA, 15 bp, Homo sapiens
tcatagccttatacc

SEQ ID NO: 1668611 - DNA, 15 bp, Homo sapiens
gtcatagccttatac

SEQ ID NO: 1668612 - DNA, 15 bp, Homo sapiens
agtcatagccttata

SEQ ID NO: 1668613 - DNA, 15 bp, Homo sapiens
cagtcatagccttat

SEQ ID NO: 1668614 - DNA, 15 bp, Homo sapiens
ccagtcatagcctta

SEQ ID NO: 1668615 - DNA, 15 bp, Homo sapiens
accagtcatagcctt

SEQ ID NO: 1668616 - DNA, 15 bp, Homo sapiens
taccagtcatagcct

SEQ ID NO: 1668617 - DNA, 15 bp, Homo sapiens
ctaccagtcatagcc

SEQ ID NO: 1668618 - DNA, 15 bp, Homo sapiens
actaccagtcatagc

SEQ ID NO: 1668619 - DNA, 15 bp, Homo sapiens
cactaccagtcatag

SEQ ID NO: 1668620 - DNA, 15 bp, Homo sapiens
ccactaccagtcata

SEQ ID NO: 1668621 - DNA, 15 bp, Homo sapiens
accactaccagtcat

SEQ ID NO: 1668622 - DNA, 15 bp, Homo sapiens
caccactaccagtca

SEQ ID NO: 1668623 - DNA, 15 bp, Homo sapiens
acaccactaccagtc

SEQ ID NO: 1668624 - DNA, 15 bp, Homo sapiens
gacaccactaccagt

SEQ ID NO: 1668625 - DNA, 15 bp, Homo sapiens
agacaccactaccag

SEQ ID NO: 1668626 - DNA, 15 bp, Homo sapiens
gagacaccactacca

SEQ ID NO: 1668627 - DNA, 15 bp, Homo sapiens
agagacaccactacc

SEQ ID NO: 1668628 - DNA, 15 bp, Homo sapiens
tagagacaccactac

SEQ ID NO: 1668629 - DNA, 15 bp, Homo sapiens
ctagagacaccacta

SEQ ID NO: 1668630 - DNA, 15 bp, Homo sapiens
actagagacaccact

SEQ ID NO: 1668631 - DNA, 15 bp, Homo sapiens
cactagagacaccac

SEQ ID NO: 1668632 - DNA, 15 bp, Homo sapiens
tcactagagacacca

SEQ ID NO: 1668633 - DNA, 15 bp, Homo sapiens
gtcactagagacacc

SEQ ID NO: 1668634 - DNA, 15 bp, Homo sapiens
agtcactagagacac

SEQ ID NO: 1668635 - DNA, 15 bp, Homo sapiens
gagtcactagagaca

SEQ ID NO: 1668636 - DNA, 15 bp, Homo sapiens
tgagtcactagagac

SEQ ID NO: 1668637 - DNA, 15 bp, Homo sapiens
atgagtcactagaga

SEQ ID NO: 1668638 - DNA, 15 bp, Homo sapiens
gatgagtcactagag

SEQ ID NO: 1668639 - DNA, 15 bp, Homo sapiens
tgatgagtcactaga

SEQ ID NO: 1668640 - DNA, 15 bp, Homo sapiens
ttgatgagtcactag

SEQ ID NO: 1668641 - DNA, 15 bp, Homo sapiens
cttgatgagtcacta

SEQ ID NO: 1668642 - DNA, 15 bp, Homo sapiens
acttgatgagtcact

SEQ ID NO: 1668643 - DNA, 15 bp, Homo sapiens
cacttgatgagtcac

SEQ ID NO: 1668644 - DNA, 15 bp, Homo sapiens
tcacttgatgagtca

SEQ ID NO: 1668645 - DNA, 15 bp, Homo sapiens
atcacttgatgagtc

SEQ ID NO: 1668646 - DNA, 15 bp, Homo sapiens
tatcacttgatgagt

SEQ ID NO: 1668647 - DNA, 15 bp, Homo sapiens
atatcacttgatgag

SEQ ID NO: 1668648 - DNA, 15 bp, Homo sapiens
aatatcacttgatga

SEQ ID NO: 1668649 - DNA, 15 bp, Homo sapiens
aaatatcacttgatg

SEQ ID NO: 1668650 - DNA, 15 bp, Homo sapiens
caaatatcacttgat

SEQ ID NO: 1668651 - DNA, 15 bp, Homo sapiens
ccaaatatcacttga

SEQ ID NO: 1668652 - DNA, 15 bp, Homo sapiens
gccaaatatcacttg

SEQ ID NO: 1668653 - DNA, 15 bp, Homo sapiens
tgccaaatatcactt

SEQ ID NO: 1668654 - DNA, 15 bp, Homo sapiens
ttgccaaatatcact

SEQ ID NO: 1668655 - DNA, 15 bp, Homo sapiens
tcttgccaaatatca

SEQ ID NO: 1668656 - DNA, 15 bp, Homo sapiens
gtcttgccaaatatc

SEQ ID NO: 1668657 - DNA, 15 bp, Homo sapiens
tgtcttgccaaatat

SEQ ID NO: 1668658 - DNA, 15 bp, Homo sapiens
atgtcttgccaaata

SEQ ID NO: 1668659 - DNA, 15 bp, Homo sapiens
aatgtcttgccaaat

SEQ ID NO: 1668660 - DNA, 15 bp, Homo sapiens
aaatgtcttgccaaa

SEQ ID NO: 1668661 - DNA, 15 bp, Homo sapiens
aaaatgtcttgccaa

SEQ ID NO: 1668662 - DNA, 15 bp, Homo sapiens
gaaaatgtcttgcca

SEQ ID NO: 1668663 - DNA, 15 bp, Homo sapiens
ggaaaatgtcttgcc

SEQ ID NO: 1668664 - DNA, 15 bp, Homo sapiens
gggaaaatgtcttgc

SEQ ID NO: 1668665 - DNA, 15 bp, Homo sapiens
tgggaaaatgtcttg

SEQ ID NO: 1668666 - DNA, 15 bp, Homo sapiens
atgggaaaatgtctt

SEQ ID NO: 1668667 - DNA, 15 bp, Homo sapiens
aatgggaaaatgtct

SEQ ID NO: 1668668 - DNA, 15 bp, Homo sapiens
aaatgggaaaatgtc

SEQ ID NO: 1668669 - DNA, 15 bp, Homo sapiens
taaatgggaaaatgt

SEQ ID NO: 1668670 - DNA, 15 bp, Homo sapiens
ataaatgggaaaatg

SEQ ID NO: 1668671 - DNA, 15 bp, Homo sapiens
cataaatgggaaaat

SEQ ID NO: 1668672 - DNA, 15 bp, Homo sapiens
gcataaatgggaaaa

SEQ ID NO: 1668673 - DNA, 15 bp, Homo sapiens
ggcataaatgggaaa

SEQ ID NO: 1668674 - DNA, 15 bp, Homo sapiens
tggcataaatgggaa

SEQ ID NO: 1668675 - DNA, 15 bp, Homo sapiens
ctggcataaatggga

SEQ ID NO: 1668676 - DNA, 15 bp, Homo sapiens
actggcataaatggg

SEQ ID NO: 1668677 - DNA, 15 bp, Homo sapiens
aactggcataaatgg

SEQ ID NO: 1668678 - DNA, 15 bp, Homo sapiens
aaactggcataaatg

SEQ ID NO: 1668679 - DNA, 15 bp, Homo sapiens
gaaactggcataaat

SEQ ID NO: 1668680 - DNA, 15 bp, Homo sapiens
ggaaactggcataaa

SEQ ID NO: 1668681 - DNA, 15 bp, Homo sapiens
aggaaactggcataa

SEQ ID NO: 1668682 - DNA, 15 bp, Homo sapiens
taggaaactggcata

SEQ ID NO: 1668683 - DNA, 15 bp, Homo sapiens
ataggaaactggcat

SEQ ID NO: 1668684 - DNA, 15 bp, Homo sapiens
aataggaaactggca

SEQ ID NO: 1668685 - DNA, 15 bp, Homo sapiens
gaataggaaactggc

SEQ ID NO: 1668686 - DNA, 15 bp, Homo sapiens
agaataggaaactgg

SEQ ID NO: 1668687 - DNA, 15 bp, Homo sapiens
cagaataggaaactg

SEQ ID NO: 1668688 - DNA, 15 bp, Homo sapiens
acagaataggaaact

SEQ ID NO: 1668689 - DNA, 15 bp, Homo sapiens
aacagaataggaaac

SEQ ID NO: 1668690 - DNA, 15 bp, Homo sapiens
caacagaataggaaa

SEQ ID NO: 1668691 - DNA, 15 bp, Homo sapiens
tcaacagaataggaa

SEQ ID NO: 1668692 - DNA, 15 bp, Homo sapiens
ttcaacagaatagga

SEQ ID NO: 1668693 - DNA, 15 bp, Homo sapiens
attcaacagaatagg

SEQ ID NO: 1668694 - DNA, 15 bp, Homo sapiens
cattcaacagaatag

SEQ ID NO: 1668695 - DNA, 15 bp, Homo sapiens
tcattcaacagaata

SEQ ID NO: 1668696 - DNA, 15 bp, Homo sapiens
ctcattcaacagaat

SEQ ID NO: 1668697 - DNA, 15 bp, Homo sapiens
cctcattcaacagaa

SEQ ID NO: 1668698 - DNA, 15 bp, Homo sapiens
tcctcattcaacaga

SEQ ID NO: 1668699 - DNA, 15 bp, Homo sapiens
ttcctcattcaacag

SEQ ID NO: 1668700 - DNA, 15 bp, Homo sapiens
tttcctcattcaaca

SEQ ID NO: 1668701 - DNA, 15 bp, Homo sapiens
atttcctcattcaac

SEQ ID NO: 1668702 - DNA, 15 bp, Homo sapiens
aatttcctcattcaa

SEQ ID NO: 1668703 - DNA, 15 bp, Homo sapiens
aaatttcctcattca

SEQ ID NO: 1668704 - DNA, 15 bp, Homo sapiens
aaaatttcctcattc

SEQ ID NO: 1668705 - DNA, 15 bp, Homo sapiens
gaaaatttcctcatt

SEQ ID NO: 1668706 - DNA, 15 bp, Homo sapiens
agaaaatttcctcat

SEQ ID NO: 1668707 - DNA, 15 bp, Homo sapiens
gagaaaatttcctca

SEQ ID NO: 1668708 - DNA, 15 bp, Homo sapiens
agagaaaatttcctc

SEQ ID NO: 1668709 - DNA, 15 bp, Homo sapiens
gagagaaaatttcct

SEQ ID NO: 1668710 - DNA, 15 bp, Homo sapiens
agagagaaaatttcc

SEQ ID NO: 1668711 - DNA, 15 bp, Homo sapiens
tagagagaaaatttc

SEQ ID NO: 1668712 - DNA, 15 bp, Homo sapiens
ttagagagaaaattt

SEQ ID NO: 1668713 - DNA, 15 bp, Homo sapiens
tttagagagaaaatt

SEQ ID NO: 1668714 - DNA, 15 bp, Homo sapiens
ctttagagagaaaat

SEQ ID NO: 1668715 - DNA, 15 bp, Homo sapiens
tctttagagagaaaa

SEQ ID NO: 1668716 - DNA, 15 bp, Homo sapiens
gtctttagagagaaa

SEQ ID NO: 1668717 - DNA, 15 bp, Homo sapiens
ggtctttagagagaa

SEQ ID NO: 1668718 - DNA, 15 bp, Homo sapiens
aggtctttagagaga

SEQ ID NO: 1668719 - DNA, 15 bp, Homo sapiens
taggtctttagagag

SEQ ID NO: 1668720 - DNA, 15 bp, Homo sapiens
ttaggtctttagaga

SEQ ID NO: 1668721 - DNA, 15 bp, Homo sapiens
tttaggtctttagag

SEQ ID NO: 1668722 - DNA, 15 bp, Homo sapiens
ttttaggtctttaga

SEQ ID NO: 1668723 - DNA, 15 bp, Homo sapiens
cttttaggtctttag

SEQ ID NO: 1668724 - DNA, 15 bp, Homo sapiens
acttttaggtcttta

SEQ ID NO: 1668725 - DNA, 15 bp, Homo sapiens
aacttttaggtcttt

SEQ ID NO: 1668726 - DNA, 15 bp, Homo sapiens
aaacttttaggtctt

SEQ ID NO: 1668727 - DNA, 15 bp, Homo sapiens
aaaacttttaggtct

SEQ ID NO: 1668728 - DNA, 15 bp, Homo sapiens
caaaacttttaggtc

SEQ ID NO: 1668729 - DNA, 15 bp, Homo sapiens
tcaaaacttttaggt

SEQ ID NO: 1668730 - DNA, 15 bp, Homo sapiens
gtcaaaacttttagg

SEQ ID NO: 1668731 - DNA, 15 bp, Homo sapiens
agtcaaaacttttag

SEQ ID NO: 1668732 - DNA, 15 bp, Homo sapiens
aagtcaaaactttta

SEQ ID NO: 1668733 - DNA, 15 bp, Homo sapiens
aaagtcaaaactttt

SEQ ID NO: 1668734 - DNA, 15 bp, Homo sapiens
taaagtcaaaacttt

SEQ ID NO: 1668735 - DNA, 15 bp, Homo sapiens
ataaagtcaaaactt

SEQ ID NO: 1668736 - DNA, 15 bp, Homo sapiens
tataaagtcaaaact

SEQ ID NO: 1668737 - DNA, 15 bp, Homo sapiens
ctataaagtcaaaac

SEQ ID NO: 1668738 - DNA, 15 bp, Homo sapiens
cctataaagtcaaaa

SEQ ID NO: 1668739 - DNA, 15 bp, Homo sapiens
acctataaagtcaaa

SEQ ID NO: 1668740 - DNA, 15 bp, Homo sapiens
aacctataaagtcaa

SEQ ID NO: 1668741 - DNA, 15 bp, Homo sapiens
aaacctataaagtca

SEQ ID NO: 1668742 - DNA, 15 bp, Homo sapiens
gaaacctataaagtc

SEQ ID NO: 1668743 - DNA, 15 bp, Homo sapiens
tgaaacctataaagt

SEQ ID NO: 1668744 - DNA, 15 bp, Homo sapiens
ttgaaacctataaag

SEQ ID NO: 1668745 - DNA, 15 bp, Homo sapiens
tttgaaacctataaa

SEQ ID NO: 1668746 - DNA, 15 bp, Homo sapiens
ctttgaaacctataa

SEQ ID NO: 1668747 - DNA, 15 bp, Homo sapiens
actttgaaacctata

SEQ ID NO: 1668748 - DNA, 15 bp, Homo sapiens
aactttgaaacctat

SEQ ID NO: 1668749 - DNA, 15 bp, Homo sapiens
gaactttgaaaccta

SEQ ID NO: 1668750 - DNA, 15 bp, Homo sapiens
agaactttgaaacct

SEQ ID NO: 1668751 - DNA, 15 bp, Homo sapiens
cagaactttgaaacc

SEQ ID NO: 1668752 - DNA, 15 bp, Homo sapiens
acagaactttgaaac

SEQ ID NO: 1668753 - DNA, 15 bp, Homo sapiens
cacagaactttgaaa

SEQ ID NO: 1668754 - DNA, 15 bp, Homo sapiens
ccacagaactttgaa

SEQ ID NO: 1668755 - DNA, 15 bp, Homo sapiens
tccacagaactttga

SEQ ID NO: 1668756 - DNA, 15 bp, Homo sapiens
ttccacagaactttg

SEQ ID NO: 1668757 - DNA, 15 bp, Homo sapiens
tttccacagaacttt

SEQ ID NO: 1668758 - DNA, 15 bp, Homo sapiens
gtttccacagaactt

SEQ ID NO: 1668759 - DNA, 15 bp, Homo sapiens
tgtttccacagaact

SEQ ID NO: 1668760 - DNA, 15 bp, Homo sapiens
atgtttccacagaac

SEQ ID NO: 1668761 - DNA, 15 bp, Homo sapiens
aatgtttccacagaa

SEQ ID NO: 1668762 - DNA, 15 bp, Homo sapiens
aaatgtttccacaga

SEQ ID NO: 1668763 - DNA, 15 bp, Homo sapiens
aaaatgtttccacag

SEQ ID NO: 1668764 - DNA, 15 bp, Homo sapiens
gaaaatgtttccaca

SEQ ID NO: 1668765 - DNA, 15 bp, Homo sapiens
agaaaatgtttccac

SEQ ID NO: 1668766 - DNA, 15 bp, Homo sapiens
tagaaaatgtttcca

SEQ ID NO: 1668767 - DNA, 15 bp, Homo sapiens
atagaaaatgtttcc

SEQ ID NO: 1668768 - DNA, 15 bp, Homo sapiens
aatagaaaatgtttc

SEQ ID NO: 1668769 - DNA, 15 bp, Homo sapiens
caatagaaaatgttt

SEQ ID NO: 1668770 - DNA, 15 bp, Homo sapiens
gcaatagaaaatgtt

SEQ ID NO: 1668771 - DNA, 15 bp, Homo sapiens
agcaatagaaaatgt

SEQ ID NO: 1668772 - DNA, 15 bp, Homo sapiens
aagcaatagaaaatg

SEQ ID NO: 1668773 - DNA, 15 bp, Homo sapiens
taagcaatagaaaat

SEQ ID NO: 1668774 - DNA, 15 bp, Homo sapiens
ataagcaatagaaaa

SEQ ID NO: 1668775 - DNA, 15 bp, Homo sapiens
aataagcaatagaaa

SEQ ID NO: 1668776 - DNA, 15 bp, Homo sapiens
taataagcaatagaa

SEQ ID NO: 1668777 - DNA, 15 bp, Homo sapiens
ttaataagcaataga

SEQ ID NO: 1668778 - DNA, 15 bp, Homo sapiens
attaataagcaatag

SEQ ID NO: 1668779 - DNA, 15 bp, Homo sapiens
aattaataagcaata

SEQ ID NO: 1668780 - DNA, 15 bp, Homo sapiens
aaattaataagcaat

SEQ ID NO: 1668781 - DNA, 15 bp, Homo sapiens
caaattaataagcaa

SEQ ID NO: 1668782 - DNA, 15 bp, Homo sapiens
tcaaattaataagca

SEQ ID NO: 1668783 - DNA, 15 bp, Homo sapiens
ttcaaattaataagc

SEQ ID NO: 1668784 - DNA, 15 bp, Homo sapiens
attcaaattaataag

SEQ ID NO: 1668785 - DNA, 15 bp, Homo sapiens
gattcaaattaataa

SEQ ID NO: 1668786 - DNA, 15 bp, Homo sapiens
agattcaaattaata

SEQ ID NO: 1668787 - DNA, 15 bp, Homo sapiens
aagattcaaattaat

SEQ ID NO: 1668788 - DNA, 15 bp, Homo sapiens
taagattcaaattaa

SEQ ID NO: 1668789 - DNA, 15 bp, Homo sapiens
ataagattcaaatta

SEQ ID NO: 1668790 - DNA, 15 bp, Homo sapiens
cataagattcaaatt

SEQ ID NO: 1668791 - DNA, 15 bp, Homo sapiens
acataagattcaaat

SEQ ID NO: 1668792 - DNA, 15 bp, Homo sapiens
tacataagattcaaa

SEQ ID NO: 1668793 - DNA, 15 bp, Homo sapiens
ttacataagattcaa

SEQ ID NO: 1668794 - DNA, 15 bp, Homo sapiens
gttacataagattca

SEQ ID NO: 1668795 - DNA, 15 bp, Homo sapiens
agttacataagattc

SEQ ID NO: 1668796 - DNA, 15 bp, Homo sapiens
gagttacataagatt

SEQ ID NO: 1668797 - DNA, 15 bp, Homo sapiens
agagttacataagat

SEQ ID NO: 1668798 - DNA, 15 bp, Homo sapiens
tagagttacataaga

SEQ ID NO: 1668799 - DNA, 15 bp, Homo sapiens
ctagagttacataag

SEQ ID NO: 1668800 - DNA, 15 bp, Homo sapiens
gctagagttacataa

SEQ ID NO: 1668801 - DNA, 15 bp, Homo sapiens
tgctagagttacata

SEQ ID NO: 1668802 - DNA, 15 bp, Homo sapiens
gtgctagagttacat

SEQ ID NO: 1668803 - DNA, 15 bp, Homo sapiens
tgtgctagagttaca

SEQ ID NO: 1668804 - DNA, 15 bp, Homo sapiens
ctgtgctagagttac

SEQ ID NO: 1668805 - DNA, 15 bp, Homo sapiens
actgtgctagagtta

SEQ ID NO: 1668806 - DNA, 15 bp, Homo sapiens
tactgtgctagagtt

SEQ ID NO: 1668807 - DNA, 15 bp, Homo sapiens
gtactgtgctagagt

SEQ ID NO: 1668808 - DNA, 15 bp, Homo sapiens
agtactgtgctagag

SEQ ID NO: 1668809 - DNA, 15 bp, Homo sapiens
gagtactgtgctaga

SEQ ID NO: 1668810 - DNA, 15 bp, Homo sapiens
tgagtactgtgctag

SEQ ID NO: 1668811 - DNA, 15 bp, Homo sapiens
ttgagtactgtgcta

SEQ ID NO: 1668812 - DNA, 15 bp, Homo sapiens
attgagtactgtgct

SEQ ID NO: 1668813 - DNA, 15 bp, Homo sapiens
tattgagtactgtgc

SEQ ID NO: 1668814 - DNA, 15 bp, Homo sapiens
atattgagtactgtg

SEQ ID NO: 1668815 - DNA, 15 bp, Homo sapiens
aatattgagtactgt

SEQ ID NO: 1668816 - DNA, 15 bp, Homo sapiens
aaatattgagtactg

SEQ ID NO: 1668817 - DNA, 15 bp, Homo sapiens
taaatattgagtact

SEQ ID NO: 1668818 - DNA, 15 bp, Homo sapiens
ataaatattgagtac

SEQ ID NO: 1668819 - DNA, 15 bp, Homo sapiens
cataaatattgagta

SEQ ID NO: 1668820 - DNA, 15 bp, Homo sapiens
ccataaatattgagt

SEQ ID NO: 1668821 - DNA, 15 bp, Homo sapiens
gccataaatattgag

SEQ ID NO: 1668822 - DNA, 15 bp, Homo sapiens
tgccataaatattga

SEQ ID NO: 1668823 - DNA, 15 bp, Homo sapiens
atgccataaatattg

SEQ ID NO: 1668824 - DNA, 15 bp, Homo sapiens
aatgccataaatatt

SEQ ID NO: 1668825 - DNA, 15 bp, Homo sapiens
aaatgccataaatat

SEQ ID NO: 1668826 - DNA, 15 bp, Homo sapiens
taaatgccataaata

SEQ ID NO: 1668827 - DNA, 15 bp, Homo sapiens
gtaaatgccataaat

SEQ ID NO: 1668828 - DNA, 15 bp, Homo sapiens
tgtaaatgccataaa

SEQ ID NO: 1668829 - DNA, 15 bp, Homo sapiens
atgtaaatgccataa

SEQ ID NO: 1668830 - DNA, 15 bp, Homo sapiens
catgtaaatgccata

SEQ ID NO: 1668831 - DNA, 15 bp, Homo sapiens
ccatgtaaatgccat

SEQ ID NO: 1668832 - DNA, 15 bp, Homo sapiens
accatgtaaatgcca

SEQ ID NO: 1668833 - DNA, 15 bp, Homo sapiens
aaccatgtaaatgcc

SEQ ID NO: 1668834 - DNA, 15 bp, Homo sapiens
aaaccatgtaaatgc

SEQ ID NO: 1668835 - DNA, 15 bp, Homo sapiens
taaaccatgtaaatg

SEQ ID NO: 1668836 - DNA, 15 bp, Homo sapiens
ataaaccatgtaaat

SEQ ID NO: 1668837 - DNA, 15 bp, Homo sapiens
gataaaccatgtaaa

SEQ ID NO: 1668838 - DNA, 15 bp, Homo sapiens
agataaaccatgtaa

SEQ ID NO: 1668839 - DNA, 15 bp, Homo sapiens
gagataaaccatgta

SEQ ID NO: 1668840 - DNA, 15 bp, Homo sapiens
tgagataaaccatgt

SEQ ID NO: 1668841 - DNA, 15 bp, Homo sapiens
atgagataaaccatg

SEQ ID NO: 1668842 - DNA, 15 bp, Homo sapiens
catgagataaaccat

SEQ ID NO: 1668843 - DNA, 15 bp, Homo sapiens
acatgagataaacca

SEQ ID NO: 1668844 - DNA, 15 bp, Homo sapiens
aacatgagataaacc

SEQ ID NO: 1668845 - DNA, 15 bp, Homo sapiens
aaacatgagataaac

SEQ ID NO: 1668846 - DNA, 15 bp, Homo sapiens
aaaacatgagataaa

SEQ ID NO: 1668847 - DNA, 15 bp, Homo sapiens
aaaaacatgagataa

SEQ ID NO: 1668848 - DNA, 15 bp, Homo sapiens
aaaaaacatgagata

SEQ ID NO: 1668849 - DNA, 15 bp, Homo sapiens
aaaaaaacatgagat

SEQ ID NO: 1668850 - DNA, 15 bp, Homo sapiens
taaaaaaacatgaga

SEQ ID NO: 1668851 - DNA, 15 bp, Homo sapiens
ataaaaaaacatgag

SEQ ID NO: 1668852 - DNA, 15 bp, Homo sapiens
tataaaaaaacatga

SEQ ID NO: 1668853 - DNA, 15 bp, Homo sapiens
ctataaaaaaacatg

SEQ ID NO: 1668854 - DNA, 15 bp, Homo sapiens
gctataaaaaaacat

SEQ ID NO: 1668855 - DNA, 15 bp, Homo sapiens
agctataaaaaaaca

SEQ ID NO: 1668856 - DNA, 15 bp, Homo sapiens
gagctataaaaaaac

SEQ ID NO: 1668857 - DNA, 15 bp, Homo sapiens
agagctataaaaaaa

SEQ ID NO: 1668858 - DNA, 15 bp, Homo sapiens
aagagctataaaaaa

SEQ ID NO: 1668859 - DNA, 15 bp, Homo sapiens
gaagagctataaaaa

SEQ ID NO: 1668860 - DNA, 15 bp, Homo sapiens
tgaagagctataaaa

SEQ ID NO: 1668861 - DNA, 15 bp, Homo sapiens
atgaagagctataaa

SEQ ID NO: 1668862 - DNA, 15 bp, Homo sapiens
aatgaagagctataa

SEQ ID NO: 1668863 - DNA, 15 bp, Homo sapiens
caatgaagagctata

SEQ ID NO: 1668864 - DNA, 15 bp, Homo sapiens
acaatgaagagctat

SEQ ID NO: 1668865 - DNA, 15 bp, Homo sapiens
aacaatgaagagcta

SEQ ID NO: 1668866 - DNA, 15 bp, Homo sapiens
gaacaatgaagagct

SEQ ID NO: 1668867 - DNA, 15 bp, Homo sapiens
ggaacaatgaagagc

SEQ ID NO: 1668868 - DNA, 15 bp, Homo sapiens
aggaacaatgaagag

SEQ ID NO: 1668869 - DNA, 15 bp, Homo sapiens
taggaacaatgaaga

SEQ ID NO: 1668870 - DNA, 15 bp, Homo sapiens
ataggaacaatgaag

SEQ ID NO: 1668871 - DNA, 15 bp, Homo sapiens
gataggaacaatgaa

SEQ ID NO: 1668872 - DNA, 15 bp, Homo sapiens
agataggaacaatga

SEQ ID NO: 1668873 - DNA, 15 bp, Homo sapiens
cagataggaacaatg

SEQ ID NO: 1668874 - DNA, 15 bp, Homo sapiens
gcagataggaacaat

SEQ ID NO: 1668875 - DNA, 15 bp, Homo sapiens
ggcagataggaacaa

SEQ ID NO: 1668876 - DNA, 15 bp, Homo sapiens
tggcagataggaaca

SEQ ID NO: 1668877 - DNA, 15 bp, Homo sapiens
ttggcagataggaac

SEQ ID NO: 1668878 - DNA, 15 bp, Homo sapiens
tttggcagataggaa

SEQ ID NO: 1668879 - DNA, 15 bp, Homo sapiens
atttggcagatagga

SEQ ID NO: 1668880 - DNA, 15 bp, Homo sapiens
gatttggcagatagg

SEQ ID NO: 1668881 - DNA, 15 bp, Homo sapiens
tgatttggcagatag

SEQ ID NO: 1668882 - DNA, 15 bp, Homo sapiens
atgatttggcagata

SEQ ID NO: 1668883 - DNA, 15 bp, Homo sapiens
aatgatttggcagat

SEQ ID NO: 1668884 - DNA, 15 bp, Homo sapiens
taatgatttggcaga

SEQ ID NO: 1668885 - DNA, 15 bp, Homo sapiens
ataatgatttggcag

SEQ ID NO: 1668886 - DNA, 15 bp, Homo sapiens
tataatgatttggca

SEQ ID NO: 1668887 - DNA, 15 bp, Homo sapiens
gtataatgatttggc

SEQ ID NO: 1668888 - DNA, 15 bp, Homo sapiens
agtataatgatttgg

SEQ ID NO: 1668889 - DNA, 15 bp, Homo sapiens
aagtataatgatttg

SEQ ID NO: 1668890 - DNA, 15 bp, Homo sapiens
gaagtataatgattt

SEQ ID NO: 1668891 - DNA, 15 bp, Homo sapiens
ggaagtataatgatt

SEQ ID NO: 1668892 - DNA, 15 bp, Homo sapiens
aggaagtataatgat

SEQ ID NO: 1668893 - DNA, 15 bp, Homo sapiens
taggaagtataatga

SEQ ID NO: 1668894 - DNA, 15 bp, Homo sapiens
gtaggaagtataatg

SEQ ID NO: 1668895 - DNA, 15 bp, Homo sapiens
tgtaggaagtataat

SEQ ID NO: 1668896 - DNA, 15 bp, Homo sapiens
ttgtaggaagtataa

SEQ ID NO: 1668897 - DNA, 15 bp, Homo sapiens
cttgtaggaagtata

SEQ ID NO: 1668898 - DNA, 15 bp, Homo sapiens
gcttgtaggaagtat

SEQ ID NO: 1668899 - DNA, 15 bp, Homo sapiens
tgcttgtaggaagta

SEQ ID NO: 1668900 - DNA, 15 bp, Homo sapiens
ctgcttgtaggaagt

SEQ ID NO: 1668901 - DNA, 15 bp, Homo sapiens
actgcttgtaggaag

SEQ ID NO: 1668902 - DNA, 15 bp, Homo sapiens
cactgcttgtaggaa

SEQ ID NO: 1668903 - DNA, 15 bp, Homo sapiens
gcactgcttgtagga

SEQ ID NO: 1668904 - DNA, 15 bp, Homo sapiens
tgcactgcttgtagg

SEQ ID NO: 1668905 - DNA, 15 bp, Homo sapiens
ctgcactgcttgtag

SEQ ID NO: 1668906 - DNA, 15 bp, Homo sapiens
tctgcactgcttgta

SEQ ID NO: 1668907 - DNA, 15 bp, Homo sapiens
ctctgcactgcttgt

SEQ ID NO: 1668908 - DNA, 15 bp, Homo sapiens
tctctgcactgcttg

SEQ ID NO: 1668909 - DNA, 15 bp, Homo sapiens
ctctctgcactgctt

SEQ ID NO: 1668910 - DNA, 15 bp, Homo sapiens
gctctctgcactgct

SEQ ID NO: 1668911 - DNA, 15 bp, Homo sapiens
agctctctgcactgc

SEQ ID NO: 1668912 - DNA, 15 bp, Homo sapiens
cagctctctgcactg

SEQ ID NO: 1668913 - DNA, 15 bp, Homo sapiens
tcagctctctgcact

SEQ ID NO: 1668914 - DNA, 15 bp, Homo sapiens
ctcagctctctgcac

SEQ ID NO: 1668915 - DNA, 15 bp, Homo sapiens
actcagctctctgca

SEQ ID NO: 1668916 - DNA, 15 bp, Homo sapiens
gactcagctctctgc

SEQ ID NO: 1668917 - DNA, 15 bp, Homo sapiens
agactcagctctctg

SEQ ID NO: 1668918 - DNA, 15 bp, Homo sapiens
aagactcagctctct

SEQ ID NO: 1668919 - DNA, 15 bp, Homo sapiens
gaagactcagctctc

SEQ ID NO: 1668920 - DNA, 15 bp, Homo sapiens
tgaagactcagctct

SEQ ID NO: 1668921 - DNA, 15 bp, Homo sapiens
ctgaagactcagctc

SEQ ID NO: 1668922 - DNA, 15 bp, Homo sapiens
gctgaagactcagct

SEQ ID NO: 1668923 - DNA, 15 bp, Homo sapiens
tgctgaagactcagc

SEQ ID NO: 1668924 - DNA, 15 bp, Homo sapiens
ctgctgaagactcag

SEQ ID NO: 1668925 - DNA, 15 bp, Homo sapiens
cctgctgaagactca

SEQ ID NO: 1668926 - DNA, 15 bp, Homo sapiens
acctgctgaagactc

SEQ ID NO: 1668927 - DNA, 15 bp, Homo sapiens
gacctgctgaagact

SEQ ID NO: 1668928 - DNA, 15 bp, Homo sapiens
ggacctgctgaagac

SEQ ID NO: 1668929 - DNA, 15 bp, Homo sapiens
tggacctgctgaaga

SEQ ID NO: 1668930 - DNA, 15 bp, Homo sapiens
ttggacctgctgaag

SEQ ID NO: 1668931 - DNA, 15 bp, Homo sapiens
cttggacctgctgaa

SEQ ID NO: 1668932 - DNA, 15 bp, Homo sapiens
tcttggacctgctga

SEQ ID NO: 1668933 - DNA, 15 bp, Homo sapiens
ttcttggacctgctg

SEQ ID NO: 1668934 - DNA, 15 bp, Homo sapiens
tttcttggacctgct

SEQ ID NO: 1668935 - DNA, 15 bp, Homo sapiens
atttcttggacctgc

SEQ ID NO: 1668936 - DNA, 15 bp, Homo sapiens
aatttcttggacctg

SEQ ID NO: 1668937 - DNA, 15 bp, Homo sapiens
aaatttcttggacct

SEQ ID NO: 1668938 - DNA, 15 bp, Homo sapiens
caaatttcttggacc

SEQ ID NO: 1668939 - DNA, 15 bp, Homo sapiens
tcaaatttcttggac

SEQ ID NO: 1668940 - DNA, 15 bp, Homo sapiens
ttcaaatttcttgga

SEQ ID NO: 1668941 - DNA, 15 bp, Homo sapiens
gttcaaatttcttgg

SEQ ID NO: 1668942 - DNA, 15 bp, Homo sapiens
tgttcaaatttcttg

SEQ ID NO: 1668943 - DNA, 15 bp, Homo sapiens
gtgttcaaatttctt

SEQ ID NO: 1668944 - DNA, 15 bp, Homo sapiens
tgtgttcaaatttct

SEQ ID NO: 1668945 - DNA, 15 bp, Homo sapiens
gtgtgttcaaatttc

SEQ ID NO: 1668946 - DNA, 15 bp, Homo sapiens
agtgtgttcaaattt

SEQ ID NO: 1668947 - DNA, 15 bp, Homo sapiens
cagtgtgttcaaatt

SEQ ID NO: 1668948 - DNA, 15 bp, Homo sapiens
tcagtgtgttcaaat

SEQ ID NO: 1668949 - DNA, 15 bp, Homo sapiens
ttcagtgtgttcaaa

SEQ ID NO: 1668950 - DNA, 15 bp, Homo sapiens
cttcagtgtgttcaa

SEQ ID NO: 1668951 - DNA, 15 bp, Homo sapiens
ccttcagtgtgttca

SEQ ID NO: 1668952 - DNA, 15 bp, Homo sapiens
tccttcagtgtgttc

SEQ ID NO: 1668953 - DNA, 15 bp, Homo sapiens
ttccttcagtgtgtt

SEQ ID NO: 1668954 - DNA, 15 bp, Homo sapiens
cttccttcagtgtgt

SEQ ID NO: 1668955 - DNA, 15 bp, Homo sapiens
acttccttcagtgtg

SEQ ID NO: 1668956 - DNA, 15 bp, Homo sapiens
gacttccttcagtgt

SEQ ID NO: 1668957 - DNA, 15 bp, Homo sapiens
tgacttccttcagtg

SEQ ID NO: 1668958 - DNA, 15 bp, Homo sapiens
ctgacttccttcagt

SEQ ID NO: 1668959 - DNA, 15 bp, Homo sapiens
gctgacttccttcag

SEQ ID NO: 1668960 - DNA, 15 bp, Homo sapiens
ggctgacttccttca

SEQ ID NO: 1668961 - DNA, 15 bp, Homo sapiens
aggctgacttccttc

SEQ ID NO: 1668962 - DNA, 15 bp, Homo sapiens
aaggctgacttcctt

SEQ ID NO: 1668963 - DNA, 15 bp, Homo sapiens
gaaggctgacttcct

SEQ ID NO: 1668964 - DNA, 15 bp, Homo sapiens
ggaaggctgacttcc

SEQ ID NO: 1668965 - DNA, 15 bp, Homo sapiens
gggaaggctgacttc

SEQ ID NO: 1668966 - DNA, 15 bp, Homo sapiens
tgggaaggctgactt

SEQ ID NO: 1668967 - DNA, 15 bp, Homo sapiens
gtgggaaggctgact

SEQ ID NO: 1668968 - DNA, 15 bp, Homo sapiens
ggtgggaaggctgac

SEQ ID NO: 1668969 - DNA, 15 bp, Homo sapiens
aggtgggaaggctga

SEQ ID NO: 1668970 - DNA, 15 bp, Homo sapiens
caggtgggaaggctg

SEQ ID NO: 1668971 - DNA, 15 bp, Homo sapiens
tcaggtgggaaggct

SEQ ID NO: 1668972 - DNA, 15 bp, Homo sapiens
ttcaggtgggaaggc

SEQ ID NO: 1668973 - DNA, 15 bp, Homo sapiens
cttcaggtgggaagg

SEQ ID NO: 1668974 - DNA, 15 bp, Homo sapiens
tcttcaggtgggaag

SEQ ID NO: 1668975 - DNA, 15 bp, Homo sapiens
atcttcaggtgggaa

SEQ ID NO: 1668976 - DNA, 15 bp, Homo sapiens
gatcttcaggtggga

SEQ ID NO: 1668977 - DNA, 15 bp, Homo sapiens
tgatcttcaggtggg

SEQ ID NO: 1668978 - DNA, 15 bp, Homo sapiens
ttgatcttcaggtgg

SEQ ID NO: 1668979 - DNA, 15 bp, Homo sapiens
gttgatcttcaggtg

SEQ ID NO: 1668980 - DNA, 15 bp, Homo sapiens
tgttgatcttcaggt

SEQ ID NO: 1668981 - DNA, 15 bp, Homo sapiens
atgttgatcttcagg

SEQ ID NO: 1668982 - DNA, 15 bp, Homo sapiens
catgttgatcttcag

SEQ ID NO: 1668983 - DNA, 15 bp, Homo sapiens
gcatgttgatcttca

SEQ ID NO: 1668984 - DNA, 15 bp, Homo sapiens
ggcatgttgatcttc

SEQ ID NO: 1668985 - DNA, 15 bp, Homo sapiens
aggcatgttgatctt

SEQ ID NO: 1668986 - DNA, 15 bp, Homo sapiens
caggcatgttgatct

SEQ ID NO: 1668987 - DNA, 15 bp, Homo sapiens
ccaggcatgttgatc

SEQ ID NO: 1668988 - DNA, 15 bp, Homo sapiens
gccaggcatgttgat

SEQ ID NO: 1668989 - DNA, 15 bp, Homo sapiens
tgccaggcatgttga

SEQ ID NO: 1668990 - DNA, 15 bp, Homo sapiens
gtgccaggcatgttg

SEQ ID NO: 1668991 - DNA, 15 bp, Homo sapiens
agtgccaggcatgtt

SEQ ID NO: 1668992 - DNA, 15 bp, Homo sapiens
gagtgccaggcatgt

SEQ ID NO: 1668993 - DNA, 15 bp, Homo sapiens
agagtgccaggcatg

SEQ ID NO: 1668994 - DNA, 15 bp, Homo sapiens
tagagtgccaggcat

SEQ ID NO: 1668995 - DNA, 15 bp, Homo sapiens
ctagagtgccaggca

SEQ ID NO: 1668996 - DNA, 15 bp, Homo sapiens
gctagagtgccaggc

SEQ ID NO: 1668997 - DNA, 15 bp, Homo sapiens
tgctagagtgccagg

SEQ ID NO: 1668998 - DNA, 15 bp, Homo sapiens
gtgctagagtgccag

SEQ ID NO: 1668999 - DNA, 15 bp, Homo sapiens
agtgctagagtgcca

SEQ ID NO: 1669000 - DNA, 15 bp, Homo sapiens
aagtgctagagtgcc

SEQ ID NO: 1669001 - DNA, 15 bp, Homo sapiens
caagtgctagagtgc

SEQ ID NO: 1669002 - DNA, 15 bp, Homo sapiens
tcaagtgctagagtg

SEQ ID NO: 1669003 - DNA, 15 bp, Homo sapiens
ctcaagtgctagagt

SEQ ID NO: 1669004 - DNA, 15 bp, Homo sapiens
cctcaagtgctagag

SEQ ID NO: 1669005 - DNA, 15 bp, Homo sapiens
tcctcaagtgctaga

SEQ ID NO: 1669006 - DNA, 15 bp, Homo sapiens
atcctcaagtgctag

SEQ ID NO: 1669007 - DNA, 15 bp, Homo sapiens
tatcctcaagtgcta

SEQ ID NO: 1669008 - DNA, 15 bp, Homo sapiens
ctatcctcaagtgct

SEQ ID NO: 1669009 - DNA, 15 bp, Homo sapiens
gctatcctcaagtgc

SEQ ID NO: 1669010 - DNA, 15 bp, Homo sapiens
agctatcctcaagtg

SEQ ID NO: 1669011 - DNA, 15 bp, Homo sapiens
cagctatcctcaagt

SEQ ID NO: 1669012 - DNA, 15 bp, Homo sapiens
tcagctatcctcaag

SEQ ID NO: 1669013 - DNA, 15 bp, Homo sapiens
ttcagctatcctcaa

SEQ ID NO: 1669014 - DNA, 15 bp, Homo sapiens
attcagctatcctca

SEQ ID NO: 1669015 - DNA, 15 bp, Homo sapiens
cattcagctatcctc

SEQ ID NO: 1669016 - DNA, 15 bp, Homo sapiens
tcattcagctatcct

SEQ ID NO: 1669017 - DNA, 15 bp, Homo sapiens
ttcattcagctatcc

SEQ ID NO: 1669018 - DNA, 15 bp, Homo sapiens
cttcattcagctatc

SEQ ID NO: 1669019 - DNA, 15 bp, Homo sapiens
acttcattcagctat

SEQ ID NO: 1669020 - DNA, 15 bp, Homo sapiens
tacttcattcagcta

SEQ ID NO: 1669021 - DNA, 15 bp, Homo sapiens
ttacttcattcagct

SEQ ID NO: 1669022 - DNA, 15 bp, Homo sapiens
cttacttcattcagc

SEQ ID NO: 1669023 - DNA, 15 bp, Homo sapiens
acttacttcattcag

SEQ ID NO: 1669024 - DNA, 15 bp, Homo sapiens
aacttacttcattca

SEQ ID NO: 1669025 - DNA, 15 bp, Homo sapiens
caacttacttcattc

SEQ ID NO: 1669026 - DNA, 15 bp, Homo sapiens
acaacttacttcatt

SEQ ID NO: 1669027 - DNA, 15 bp, Homo sapiens
aacaacttacttcat

SEQ ID NO: 1669028 - DNA, 15 bp, Homo sapiens
caacaacttacttca

SEQ ID NO: 1669029 - DNA, 15 bp, Homo sapiens
tcaacaacttacttc

SEQ ID NO: 1669030 - DNA, 15 bp, Homo sapiens
atcaacaacttactt

SEQ ID NO: 1669031 - DNA, 15 bp, Homo sapiens
catcaacaacttact

SEQ ID NO: 1669032 - DNA, 15 bp, Homo sapiens
acatcaacaacttac

SEQ ID NO: 1669033 - DNA, 15 bp, Homo sapiens
aacatcaacaactta

SEQ ID NO: 1669034 - DNA, 15 bp, Homo sapiens
caacatcaacaactt

SEQ ID NO: 1669035 - DNA, 15 bp, Homo sapiens
gcaacatcaacaact

SEQ ID NO: 1669036 - DNA, 15 bp, Homo sapiens
tgcaacatcaacaac

SEQ ID NO: 1669037 - DNA, 15 bp, Homo sapiens
ctgcaacatcaacaa

SEQ ID NO: 1669038 - DNA, 15 bp, Homo sapiens
actgcaacatcaaca

SEQ ID NO: 1669039 - DNA, 15 bp, Homo sapiens
gactgcaacatcaac

SEQ ID NO: 1669040 - DNA, 15 bp, Homo sapiens
ggactgcaacatcaa

SEQ ID NO: 1669041 - DNA, 15 bp, Homo sapiens
aggactgcaacatca

SEQ ID NO: 1669042 - DNA, 15 bp, Homo sapiens
caggactgcaacatc

SEQ ID NO: 1669043 - DNA, 15 bp, Homo sapiens
acaggactgcaacat

SEQ ID NO: 1669044 - DNA, 15 bp, Homo sapiens
cacaggactgcaaca

SEQ ID NO: 1669045 - DNA, 15 bp, Homo sapiens
tcacaggactgcaac

SEQ ID NO: 1669046 - DNA, 15 bp, Homo sapiens
ctcacaggactgcaa

SEQ ID NO: 1669047 - DNA, 15 bp, Homo sapiens
cctcacaggactgca

SEQ ID NO: 1669048 - DNA, 15 bp, Homo sapiens
tcctcacaggactgc

SEQ ID NO: 1669049 - DNA, 15 bp, Homo sapiens
atcctcacaggactg

SEQ ID NO: 1669050 - DNA, 15 bp, Homo sapiens
gatcctcacaggact

SEQ ID NO: 1669051 - DNA, 15 bp, Homo sapiens
tgatcctcacaggac

SEQ ID NO: 1669052 - DNA, 15 bp, Homo sapiens
gtgatcctcacagga

SEQ ID NO: 1669053 - DNA, 15 bp, Homo sapiens
agtgatcctcacagg

SEQ ID NO: 1669054 - DNA, 15 bp, Homo sapiens
aagtgatcctcacag

SEQ ID NO: 1669055 - DNA, 15 bp, Homo sapiens
gaagtgatcctcaca

SEQ ID NO: 1669056 - DNA, 15 bp, Homo sapiens
tgaagtgatcctcac

SEQ ID NO: 1669057 - DNA, 15 bp, Homo sapiens
ctgaagtgatcctca

SEQ ID NO: 1669058 - DNA, 15 bp, Homo sapiens
tctgaagtgatcctc

SEQ ID NO: 1669059 - DNA, 15 bp, Homo sapiens
ttctgaagtgatcct

SEQ ID NO: 1669060 - DNA, 15 bp, Homo sapiens
gttctgaagtgatcc

SEQ ID NO: 1669061 - DNA, 15 bp, Homo sapiens
agttctgaagtgatc

SEQ ID NO: 1669062 - DNA, 15 bp, Homo sapiens
cagttctgaagtgat

SEQ ID NO: 1669063 - DNA, 15 bp, Homo sapiens
acagttctgaagtga

SEQ ID NO: 1669064 - DNA, 15 bp, Homo sapiens
aacagttctgaagtg

SEQ ID NO: 1669065 - DNA, 15 bp, Homo sapiens
taacagttctgaagt

SEQ ID NO: 1669066 - DNA, 15 bp, Homo sapiens
ataacagttctgaag

SEQ ID NO: 1669067 - DNA, 15 bp, Homo sapiens
tataacagttctgaa

SEQ ID NO: 1669068 - DNA, 15 bp, Homo sapiens
ttataacagttctga

SEQ ID NO: 1669069 - DNA, 15 bp, Homo sapiens
gttataacagttctg

SEQ ID NO: 1669070 - DNA, 15 bp, Homo sapiens
tgttataacagttct

SEQ ID NO: 1669071 - DNA, 15 bp, Homo sapiens
ctgttataacagttc

SEQ ID NO: 1669072 - DNA, 15 bp, Homo sapiens
gctgttataacagtt

SEQ ID NO: 1669073 - DNA, 15 bp, Homo sapiens
agctgttataacagt

SEQ ID NO: 1669074 - DNA, 15 bp, Homo sapiens
cagctgttataacag

SEQ ID NO: 1669075 - DNA, 15 bp, Homo sapiens
acagctgttataaca

SEQ ID NO: 1669076 - DNA, 15 bp, Homo sapiens
aacagctgttataac

SEQ ID NO: 1669077 - DNA, 15 bp, Homo sapiens
aaacagctgttataa

SEQ ID NO: 1669078 - DNA, 15 bp, Homo sapiens
aaaacagctgttata

SEQ ID NO: 1669079 - DNA, 15 bp, Homo sapiens
aaaaacagctgttat

SEQ ID NO: 1669080 - DNA, 15 bp, Homo sapiens
aaaaaacagctgtta

SEQ ID NO: 1669081 - DNA, 15 bp, Homo sapiens
caaaaaacagctgtt

SEQ ID NO: 1669082 - DNA, 15 bp, Homo sapiens
ccaaaaaacagctgt

SEQ ID NO: 1669083 - DNA, 15 bp, Homo sapiens
cccaaaaaacagctg

SEQ ID NO: 1669084 - DNA, 15 bp, Homo sapiens
tcccaaaaaacagct

SEQ ID NO: 1669085 - DNA, 15 bp, Homo sapiens
ctcccaaaaaacagc

SEQ ID NO: 1669086 - DNA, 15 bp, Homo sapiens
gctcccaaaaaacag

SEQ ID NO: 1669087 - DNA, 15 bp, Homo sapiens
agctcccaaaaaaca

SEQ ID NO: 1669088 - DNA, 15 bp, Homo sapiens
cagctcccaaaaaac

SEQ ID NO: 1669089 - DNA, 15 bp, Homo sapiens
ccagctcccaaaaaa

SEQ ID NO: 1669090 - DNA, 15 bp, Homo sapiens
accagctcccaaaaa

SEQ ID NO: 1669091 - DNA, 15 bp, Homo sapiens
caccagctcccaaaa

SEQ ID NO: 1669092 - DNA, 15 bp, Homo sapiens
acaccagctcccaaa

SEQ ID NO: 1669093 - DNA, 15 bp, Homo sapiens
aacaccagctcccaa

SEQ ID NO: 1669094 - DNA, 15 bp, Homo sapiens
caacaccagctccca

SEQ ID NO: 1669095 - DNA, 15 bp, Homo sapiens
ccaacaccagctccc

SEQ ID NO: 1669096 - DNA, 15 bp, Homo sapiens
tccaacaccagctcc

SEQ ID NO: 1669097 - DNA, 15 bp, Homo sapiens
atccaacaccagctc

SEQ ID NO: 1669098 - DNA, 15 bp, Homo sapiens
catccaacaccagct

SEQ ID NO: 1669099 - DNA, 15 bp, Homo sapiens
ccatccaacaccagc

SEQ ID NO: 1669100 - DNA, 15 bp, Homo sapiens
cccatccaacaccag

SEQ ID NO: 1669101 - DNA, 15 bp, Homo sapiens
ccccatccaacacca

SEQ ID NO: 1669102 - DNA, 15 bp, Homo sapiens
accccatccaacacc

SEQ ID NO: 1669103 - DNA, 15 bp, Homo sapiens
caccccatccaacac

SEQ ID NO: 1669104 - DNA, 15 bp, Homo sapiens
acaccccatccaaca

SEQ ID NO: 1669105 - DNA, 15 bp, Homo sapiens
cacaccccatccaac

SEQ ID NO: 1669106 - DNA, 15 bp, Homo sapiens
acacaccccatccaa

SEQ ID NO: 1669107 - DNA, 15 bp, Homo sapiens
aacacaccccatcca

SEQ ID NO: 1669108 - DNA, 15 bp, Homo sapiens
caacacaccccatcc

SEQ ID NO: 1669109 - DNA, 15 bp, Homo sapiens
ccaacacaccccatc

SEQ ID NO: 1669110 - DNA, 15 bp, Homo sapiens
accaacacaccccat

SEQ ID NO: 1669111 - DNA, 15 bp, Homo sapiens
gaccaacacacccca

SEQ ID NO: 1669112 - DNA, 15 bp, Homo sapiens
agaccaacacacccc

SEQ ID NO: 1669113 - DNA, 15 bp, Homo sapiens
tagaccaacacaccc

SEQ ID NO: 1669114 - DNA, 15 bp, Homo sapiens
ttagaccaacacacc

SEQ ID NO: 1669115 - DNA, 15 bp, Homo sapiens
attagaccaacacac

SEQ ID NO: 1669116 - DNA, 15 bp, Homo sapiens
cattagaccaacaca

SEQ ID NO: 1669117 - DNA, 15 bp, Homo sapiens
acattagaccaacac

SEQ ID NO: 1669118 - DNA, 15 bp, Homo sapiens
cacattagaccaaca

SEQ ID NO: 1669119 - DNA, 15 bp, Homo sapiens
tcacattagaccaac

SEQ ID NO: 1669120 - DNA, 15 bp, Homo sapiens
ttcacattagaccaa

SEQ ID NO: 1669121 - DNA, 15 bp, Homo sapiens
cttcacattagacca

SEQ ID NO: 1669122 - DNA, 15 bp, Homo sapiens
acttcacattagacc

SEQ ID NO: 1669123 - DNA, 15 bp, Homo sapiens
cacttcacattagac

SEQ ID NO: 1669124 - DNA, 15 bp, Homo sapiens
ccacttcacattaga

SEQ ID NO: 1669125 - DNA, 15 bp, Homo sapiens
cccacttcacattag

SEQ ID NO: 1669126 - DNA, 15 bp, Homo sapiens
ccccacttcacatta

SEQ ID NO: 1669127 - DNA, 15 bp, Homo sapiens
gccccacttcacatt

SEQ ID NO: 1669128 - DNA, 15 bp, Homo sapiens
agccccacttcacat

SEQ ID NO: 1669129 - DNA, 15 bp, Homo sapiens
tagccccacttcaca

SEQ ID NO: 1669130 - DNA, 15 bp, Homo sapiens
ttagccccacttcac

SEQ ID NO: 1669131 - DNA, 15 bp, Homo sapiens
tttagccccacttca

SEQ ID NO: 1669132 - DNA, 15 bp, Homo sapiens
atttagccccacttc

SEQ ID NO: 1669133 - DNA, 15 bp, Homo sapiens
catttagccccactt

SEQ ID NO: 1669134 - DNA, 15 bp, Homo sapiens
acatttagccccact

SEQ ID NO: 1669135 - DNA, 15 bp, Homo sapiens
cacatttagccccac

SEQ ID NO: 1669136 - DNA, 15 bp, Homo sapiens
tcacatttagcccca

SEQ ID NO: 1669137 - DNA, 15 bp, Homo sapiens
ctcacatttagcccc

SEQ ID NO: 1669138 - DNA, 15 bp, Homo sapiens
tctcacatttagccc

SEQ ID NO: 1669139 - DNA, 15 bp, Homo sapiens
atctcacatttagcc

SEQ ID NO: 1669140 - DNA, 15 bp, Homo sapiens
catctcacatttagc

SEQ ID NO: 1669141 - DNA, 15 bp, Homo sapiens
ccatctcacatttag

SEQ ID NO: 1669142 - DNA, 15 bp, Homo sapiens
tccatctcacattta

SEQ ID NO: 1669143 - DNA, 15 bp, Homo sapiens
ttccatctcacattt

SEQ ID NO: 1669144 - DNA, 15 bp, Homo sapiens
tttccatctcacatt

SEQ ID NO: 1669145 - DNA, 15 bp, Homo sapiens
ctttccatctcacat

SEQ ID NO: 1669146 - DNA, 15 bp, Homo sapiens
tctttccatctcaca

SEQ ID NO: 1669147 - DNA, 15 bp, Homo sapiens
atctttccatctcac

SEQ ID NO: 1669148 - DNA, 15 bp, Homo sapiens
catctttccatctca

SEQ ID NO: 1669149 - DNA, 15 bp, Homo sapiens
tcatctttccatctc

SEQ ID NO: 1669150 - DNA, 15 bp, Homo sapiens
gtcatctttccatct

SEQ ID NO: 1669151 - DNA, 15 bp, Homo sapiens
ggtcatctttccatc

SEQ ID NO: 1669152 - DNA, 15 bp, Homo sapiens
tggtcatctttccat

SEQ ID NO: 1669153 - DNA, 15 bp, Homo sapiens
ctggtcatctttcca

SEQ ID NO: 1669154 - DNA, 15 bp, Homo sapiens
actggtcatctttcc

SEQ ID NO: 1669155 - DNA, 15 bp, Homo sapiens
gactggtcatctttc

SEQ ID NO: 1669156 - DNA, 15 bp, Homo sapiens
agactggtcatcttt

SEQ ID NO: 1669157 - DNA, 15 bp, Homo sapiens
aagactggtcatctt

SEQ ID NO: 1669158 - DNA, 15 bp, Homo sapiens
gaagactggtcatct

SEQ ID NO: 1669159 - DNA, 15 bp, Homo sapiens
aaccaccaataccaa

SEQ ID NO: 1669160 - DNA, 15 bp, Homo sapiens
caaccaccaatacca

SEQ ID NO: 1669161 - DNA, 15 bp, Homo sapiens
acaaccaccaatacc

SEQ ID NO: 1669162 - DNA, 15 bp, Homo sapiens
aacaaccaccaatac

SEQ ID NO: 1669163 - DNA, 15 bp, Homo sapiens
taacaaccaccaata

SEQ ID NO: 1669164 - DNA, 15 bp, Homo sapiens
ataacaaccaccaat

SEQ ID NO: 1669165 - DNA, 15 bp, Homo sapiens
aataacaaccaccaa

SEQ ID NO: 1669166 - DNA, 15 bp, Homo sapiens
taataacaaccacca

SEQ ID NO: 1669167 - DNA, 15 bp, Homo sapiens
ataataacaaccacc

SEQ ID NO: 1669168 - DNA, 15 bp, Homo sapiens
aataataacaaccac

SEQ ID NO: 1669169 - DNA, 15 bp, Homo sapiens
caataataacaacca

SEQ ID NO: 1669170 - DNA, 15 bp, Homo sapiens
acaataataacaacc

SEQ ID NO: 1669171 - DNA, 15 bp, Homo sapiens
tacaataataacaac

SEQ ID NO: 1669172 - DNA, 15 bp, Homo sapiens
ctacaataataacaa

SEQ ID NO: 1669173 - DNA, 15 bp, Homo sapiens
actacaataataaca

SEQ ID NO: 1669174 - DNA, 15 bp, Homo sapiens
tactacaataataac

SEQ ID NO: 1669175 - DNA, 15 bp, Homo sapiens
gtactacaataataa

SEQ ID NO: 1669176 - DNA, 15 bp, Homo sapiens
agtactacaataata

SEQ ID NO: 1669177 - DNA, 15 bp, Homo sapiens
tagtactacaataat

SEQ ID NO: 1669178 - DNA, 15 bp, Homo sapiens
atagtactacaataa

SEQ ID NO: 1669179 - DNA, 15 bp, Homo sapiens
tatagtactacaata

SEQ ID NO: 1669180 - DNA, 15 bp, Homo sapiens
ttatagtactacaat

SEQ ID NO: 1669181 - DNA, 15 bp, Homo sapiens
cttatagtactacaa

SEQ ID NO: 1669182 - DNA, 15 bp, Homo sapiens
acttatagtactaca

SEQ ID NO: 1669183 - DNA, 15 bp, Homo sapiens
tacttatagtactac

SEQ ID NO: 1669184 - DNA, 15 bp, Homo sapiens
ctacttatagtacta

SEQ ID NO: 1669185 - DNA, 15 bp, Homo sapiens
actacttatagtact

SEQ ID NO: 1669186 - DNA, 15 bp, Homo sapiens
tactacttatagtac

SEQ ID NO: 1669187 - DNA, 15 bp, Homo sapiens
atactacttatagta

SEQ ID NO: 1669188 - DNA, 15 bp, Homo sapiens
aatactacttatagt

SEQ ID NO: 1669189 - DNA, 15 bp, Homo sapiens
gaatactacttatag

SEQ ID NO: 1669190 - DNA, 15 bp, Homo sapiens
cgaatactacttata

SEQ ID NO: 1669191 - DNA, 15 bp, Homo sapiens
acgaatactacttat

SEQ ID NO: 1669192 - DNA, 15 bp, Homo sapiens
tacgaatactactta

SEQ ID NO: 1669193 - DNA, 15 bp, Homo sapiens
ctacgaatactactt

SEQ ID NO: 1669194 - DNA, 15 bp, Homo sapiens
actacgaatactact

SEQ ID NO: 1669195 - DNA, 15 bp, Homo sapiens
tactacgaatactac

SEQ ID NO: 1669196 - DNA, 15 bp, Homo sapiens
ttactacgaatacta

SEQ ID NO: 1669197 - DNA, 15 bp, Homo sapiens
gttactacgaatact

SEQ ID NO: 1669198 - DNA, 15 bp, Homo sapiens
tgttactacgaatac

SEQ ID NO: 1669199 - DNA, 15 bp, Homo sapiens
ttgttactacgaata

SEQ ID NO: 1669200 - DNA, 15 bp, Homo sapiens
attgttactacgaat

SEQ ID NO: 1669201 - DNA, 15 bp, Homo sapiens
tattgttactacgaa

SEQ ID NO: 1669202 - DNA, 15 bp, Homo sapiens
ctattgttactacga

SEQ ID NO: 1669203 - DNA, 15 bp, Homo sapiens
actattgttactacg

SEQ ID NO: 1669204 - DNA, 15 bp, Homo sapiens
aactattgttactac

SEQ ID NO: 1669205 - DNA, 15 bp, Homo sapiens
aaactattgttacta

SEQ ID NO: 1669206 - DNA, 15 bp, Homo sapiens
taaactattgttact

SEQ ID NO: 1669207 - DNA, 15 bp, Homo sapiens
ataaactattgttac

SEQ ID NO: 1669208 - DNA, 15 bp, Homo sapiens
aataaactattgtta

SEQ ID NO: 1669209 - DNA, 15 bp, Homo sapiens
taataaactattgtt

SEQ ID NO: 1669210 - DNA, 15 bp, Homo sapiens
ataataaactattgt

SEQ ID NO: 1669211 - DNA, 15 bp, Homo sapiens
tataataaactattg

SEQ ID NO: 1669212 - DNA, 15 bp, Homo sapiens
ttataataaactatt

SEQ ID NO: 1669213 - DNA, 15 bp, Homo sapiens
attataataaactat

SEQ ID NO: 1669214 - DNA, 15 bp, Homo sapiens
aattataataaacta

SEQ ID NO: 1669215 - DNA, 15 bp, Homo sapiens
taattataataaact

SEQ ID NO: 1669216 - DNA, 15 bp, Homo sapiens
gtaattataataaac

SEQ ID NO: 1669217 - DNA, 15 bp, Homo sapiens
agtaattataataaa

SEQ ID NO: 1669218 - DNA, 15 bp, Homo sapiens
tagtaattataataa

SEQ ID NO: 1669219 - DNA, 15 bp, Homo sapiens
ttagtaattataata

SEQ ID NO: 1669220 - DNA, 15 bp, Homo sapiens
attagtaattataat

SEQ ID NO: 1669221 - DNA, 15 bp, Homo sapiens
cattagtaattataa

SEQ ID NO: 1669222 - DNA, 15 bp, Homo sapiens
tcattagtaattata

SEQ ID NO: 1669223 - DNA, 15 bp, Homo sapiens
gtcattagtaattat

SEQ ID NO: 1669224 - DNA, 15 bp, Homo sapiens
tgtcattagtaatta

SEQ ID NO: 1669225 - DNA, 15 bp, Homo sapiens
gtgtcattagtaatt

SEQ ID NO: 1669226 - DNA, 15 bp, Homo sapiens
agtgtcattagtaat

SEQ ID NO: 1669227 - DNA, 15 bp, Homo sapiens
aagtgtcattagtaa

SEQ ID NO: 1669228 - DNA, 15 bp, Homo sapiens
aaagtgtcattagta

SEQ ID NO: 1669229 - DNA, 15 bp, Homo sapiens
aaaagtgtcattagt

SEQ ID NO: 1669230 - DNA, 15 bp, Homo sapiens
aaaaagtgtcattag

SEQ ID NO: 1669231 - DNA, 15 bp, Homo sapiens
caaaaagtgtcatta

SEQ ID NO: 1669232 - DNA, 15 bp, Homo sapiens
tcaaaaagtgtcatt

SEQ ID NO: 1669233 - DNA, 15 bp, Homo sapiens
atcaaaaagtgtcat

SEQ ID NO: 1669234 - DNA, 15 bp, Homo sapiens
aatcaaaaagtgtca

SEQ ID NO: 1669235 - DNA, 15 bp, Homo sapiens
aaatcaaaaagtgtc

SEQ ID NO: 1669236 - DNA, 15 bp, Homo sapiens
aaaatcaaaaagtgt

SEQ ID NO: 1669237 - DNA, 15 bp, Homo sapiens
aaaaatcaaaaagtg

SEQ ID NO: 1669238 - DNA, 15 bp, Homo sapiens
aaaaaatcaaaaagt

SEQ ID NO: 1669239 - DNA, 15 bp, Homo sapiens
aaaaaaatcaaaaag

SEQ ID NO: 1669240 - DNA, 15 bp, Homo sapiens
aaaaaaaatcaaaaa

SEQ ID NO: 1669241 - DNA, 15 bp, Homo sapiens
taaaaaaaatcaaaa

SEQ ID NO: 1669242 - DNA, 15 bp, Homo sapiens
ataaaaaaaatcaaa

SEQ ID NO: 1669243 - DNA, 15 bp, Homo sapiens
gataaaaaaaatcaa

SEQ ID NO: 1669244 - DNA, 15 bp, Homo sapiens
agataaaaaaaatca

SEQ ID NO: 1669245 - DNA, 15 bp, Homo sapiens
aagataaaaaaaatc

SEQ ID NO: 1669246 - DNA, 15 bp, Homo sapiens
aaagataaaaaaaat

SEQ ID NO: 1669247 - DNA, 15 bp, Homo sapiens
gaaagataaaaaaaa

SEQ ID NO: 1669248 - DNA, 15 bp, Homo sapiens
agaaagataaaaaaa

SEQ ID NO: 1669249 - DNA, 15 bp, Homo sapiens
cagaaagataaaaaa

SEQ ID NO: 1669250 - DNA, 15 bp, Homo sapiens
acagaaagataaaaa

SEQ ID NO: 1669251 - DNA, 15 bp, Homo sapiens
cacagaaagataaaa

SEQ ID NO: 1669252 - DNA, 15 bp, Homo sapiens
tcacagaaagataaa

SEQ ID NO: 1669253 - DNA, 15 bp, Homo sapiens
atcacagaaagataa

SEQ ID NO: 1669254 - DNA, 15 bp, Homo sapiens
catcacagaaagata

SEQ ID NO: 1669255 - DNA, 15 bp, Homo sapiens
gcatcacagaaagat

SEQ ID NO: 1669256 - DNA, 15 bp, Homo sapiens
agcatcacagaaaga

SEQ ID NO: 1669257 - DNA, 15 bp, Homo sapiens
aagcatcacagaaag

SEQ ID NO: 1669258 - DNA, 15 bp, Homo sapiens
aaagcatcacagaaa

SEQ ID NO: 1669259 - DNA, 15 bp, Homo sapiens
aaaagcatcacagaa

SEQ ID NO: 1669260 - DNA, 15 bp, Homo sapiens
gaaaagcatcacaga

SEQ ID NO: 1669261 - DNA, 15 bp, Homo sapiens
tgaaaagcatcacag

SEQ ID NO: 1669262 - DNA, 15 bp, Homo sapiens
atgaaaagcatcaca

SEQ ID NO: 1669263 - DNA, 15 bp, Homo sapiens
catgaaaagcatcac

SEQ ID NO: 1669264 - DNA, 15 bp, Homo sapiens
gcatgaaaagcatca

SEQ ID NO: 1669265 - DNA, 15 bp, Homo sapiens
ggcatgaaaagcatc

SEQ ID NO: 1669266 - DNA, 15 bp, Homo sapiens
aggcatgaaaagcat

SEQ ID NO: 1669267 - DNA, 15 bp, Homo sapiens
gaggcatgaaaagca

SEQ ID NO: 1669268 - DNA, 15 bp, Homo sapiens
agaggcatgaaaagc

SEQ ID NO: 1669269 - DNA, 15 bp, Homo sapiens
aagaggcatgaaaag

SEQ ID NO: 1669270 - DNA, 15 bp, Homo sapiens
caagaggcatgaaaa

SEQ ID NO: 1669271 - DNA, 15 bp, Homo sapiens
ggcacaagaggcatg

SEQ ID NO: 1669272 - DNA, 15 bp, Homo sapiens
gggcacaagaggcat

SEQ ID NO: 1669273 - DNA, 15 bp, Homo sapiens
ggggcacaagaggca

SEQ ID NO: 1669274 - DNA, 15 bp, Homo sapiens
aggggcacaagaggc

SEQ ID NO: 1669275 - DNA, 15 bp, Homo sapiens
gaggggcacaagagg

SEQ ID NO: 1669276 - DNA, 15 bp, Homo sapiens
tgaggggcacaagag

SEQ ID NO: 1669277 - DNA, 15 bp, Homo sapiens
gtgaggggcacaaga

SEQ ID NO: 1669278 - DNA, 15 bp, Homo sapiens
agtgaggggcacaag

SEQ ID NO: 1669279 - DNA, 15 bp, Homo sapiens
cagtgaggggcacaa

SEQ ID NO: 1669280 - DNA, 15 bp, Homo sapiens
acagtgaggggcaca

SEQ ID NO: 1669281 - DNA, 15 bp, Homo sapiens
tacagtgaggggcac

SEQ ID NO: 1669282 - DNA, 15 bp, Homo sapiens
gatacagtgaggggc

SEQ ID NO: 1669283 - DNA, 15 bp, Homo sapiens
agatacagtgagggg

SEQ ID NO: 1669284 - DNA, 15 bp, Homo sapiens
aagatacagtgaggg

SEQ ID NO: 1669285 - DNA, 15 bp, Homo sapiens
caagatacagtgagg

SEQ ID NO: 1669286 - DNA, 15 bp, Homo sapiens
gcaagatacagtgag

SEQ ID NO: 1669287 - DNA, 15 bp, Homo sapiens
ggcaagatacagtga

SEQ ID NO: 1669288 - DNA, 15 bp, Homo sapiens
aggcaagatacagtg

SEQ ID NO: 1669289 - DNA, 15 bp, Homo sapiens
gaggcaagatacagt

SEQ ID NO: 1669290 - DNA, 15 bp, Homo sapiens
agaggcaagatacag

SEQ ID NO: 1669291 - DNA, 15 bp, Homo sapiens
aagaggcaagataca

SEQ ID NO: 1669292 - DNA, 15 bp, Homo sapiens
gaagaggcaagatac

SEQ ID NO: 1669293 - DNA, 15 bp, Homo sapiens
agaagaggcaagata

SEQ ID NO: 1669294 - DNA, 15 bp, Homo sapiens
tagaagaggcaagat

SEQ ID NO: 1669295 - DNA, 15 bp, Homo sapiens
gtagaagaggcaaga

SEQ ID NO: 1669296 - DNA, 15 bp, Homo sapiens
agtagaagaggcaag

SEQ ID NO: 1669297 - DNA, 15 bp, Homo sapiens
tagtagaagaggcaa

SEQ ID NO: 1669298 - DNA, 15 bp, Homo sapiens
gtagtagaagaggca

SEQ ID NO: 1669299 - DNA, 15 bp, Homo sapiens
agtagtagaagaggc

SEQ ID NO: 1669300 - DNA, 15 bp, Homo sapiens
aagtagtagaagagg

SEQ ID NO: 1669301 - DNA, 15 bp, Homo sapiens
taagtagtagaagag

SEQ ID NO: 1669302 - DNA, 15 bp, Homo sapiens
gtaagtagtagaaga

SEQ ID NO: 1669303 - DNA, 15 bp, Homo sapiens
agtaagtagtagaag

SEQ ID NO: 1669304 - DNA, 15 bp, Homo sapiens
aagtaagtagtagaa

SEQ ID NO: 1669305 - DNA, 15 bp, Homo sapiens
gaagtaagtagtaga

SEQ ID NO: 1669306 - DNA, 15 bp, Homo sapiens
ggaagtaagtagtag

SEQ ID NO: 1669307 - DNA, 15 bp, Homo sapiens
aggaagtaagtagta

SEQ ID NO: 1669308 - DNA, 15 bp, Homo sapiens
gaggaagtaagtagt

SEQ ID NO: 1669309 - DNA, 15 bp, Homo sapiens
agaggaagtaagtag

SEQ ID NO: 1669310 - DNA, 15 bp, Homo sapiens
cagaggaagtaagta

SEQ ID NO: 1669311 - DNA, 15 bp, Homo sapiens
tcagaggaagtaagt

SEQ ID NO: 1669312 - DNA, 15 bp, Homo sapiens
ttcagaggaagtaag

SEQ ID NO: 1669313 - DNA, 15 bp, Homo sapiens
attcagaggaagtaa

SEQ ID NO: 1669314 - DNA, 15 bp, Homo sapiens
cattcagaggaagta

SEQ ID NO: 1669315 - DNA, 15 bp, Homo sapiens
acattcagaggaagt

SEQ ID NO: 1669316 - DNA, 15 bp, Homo sapiens
gacattcagaggaag

SEQ ID NO: 1669317 - DNA, 15 bp, Homo sapiens
agacattcagaggaa

SEQ ID NO: 1669318 - DNA, 15 bp, Homo sapiens
cagacattcagagga

SEQ ID NO: 1669319 - DNA, 15 bp, Homo sapiens
gcagacattcagagg

SEQ ID NO: 1669320 - DNA, 15 bp, Homo sapiens
ggcagacattcagag

SEQ ID NO: 1669321 - DNA, 15 bp, Homo sapiens
aggcagacattcaga

SEQ ID NO: 1669322 - DNA, 15 bp, Homo sapiens
aaggcagacattcag

SEQ ID NO: 1669323 - DNA, 15 bp, Homo sapiens
aaaggcagacattca

SEQ ID NO: 1669324 - DNA, 15 bp, Homo sapiens
caaaggcagacattc

SEQ ID NO: 1669325 - DNA, 15 bp, Homo sapiens
gcaaaggcagacatt

SEQ ID NO: 1669326 - DNA, 15 bp, Homo sapiens
agcaaaggcagacat

SEQ ID NO: 1669327 - DNA, 15 bp, Homo sapiens
aagcaaaggcagaca

SEQ ID NO: 1669328 - DNA, 15 bp, Homo sapiens
taagcaaaggcagac

SEQ ID NO: 1669329 - DNA, 15 bp, Homo sapiens
ataagcaaaggcaga

SEQ ID NO: 1669330 - DNA, 15 bp, Homo sapiens
gataagcaaaggcag

SEQ ID NO: 1669331 - DNA, 15 bp, Homo sapiens
agataagcaaaggca

SEQ ID NO: 1669332 - DNA, 15 bp, Homo sapiens
gagataagcaaaggc

SEQ ID NO: 1669333 - DNA, 15 bp, Homo sapiens
agagataagcaaagg

SEQ ID NO: 1669334 - DNA, 15 bp, Homo sapiens
aagagataagcaaag

SEQ ID NO: 1669335 - DNA, 15 bp, Homo sapiens
caagagataagcaaa

SEQ ID NO: 1669336 - DNA, 15 bp, Homo sapiens
gcaagagataagcaa

SEQ ID NO: 1669337 - DNA, 15 bp, Homo sapiens
tgcaagagataagca

SEQ ID NO: 1669338 - DNA, 15 bp, Homo sapiens
gtgcaagagataagc

SEQ ID NO: 1669339 - DNA, 15 bp, Homo sapiens
agtgcaagagataag

SEQ ID NO: 1669340 - DNA, 15 bp, Homo sapiens
gagtgcaagagataa

SEQ ID NO: 1669341 - DNA, 15 bp, Homo sapiens
tgagtgcaagagata

SEQ ID NO: 1669342 - DNA, 15 bp, Homo sapiens
ttgagtgcaagagat

SEQ ID NO: 1669343 - DNA, 15 bp, Homo sapiens
cttgagtgcaagaga

SEQ ID NO: 1669344 - DNA, 15 bp, Homo sapiens
acttgagtgcaagag

SEQ ID NO: 1669345 - DNA, 15 bp, Homo sapiens
cacttgagtgcaaga

SEQ ID NO: 1669346 - DNA, 15 bp, Homo sapiens
acacttgagtgcaag

SEQ ID NO: 1669347 - DNA, 15 bp, Homo sapiens
cacacttgagtgcaa

SEQ ID NO: 1669348 - DNA, 15 bp, Homo sapiens
acacacttgagtgca

SEQ ID NO: 1669349 - DNA, 15 bp, Homo sapiens
tacacacttgagtgc

SEQ ID NO: 1669350 - DNA, 15 bp, Homo sapiens
atacacacttgagtg

SEQ ID NO: 1669351 - DNA, 15 bp, Homo sapiens
aatacacacttgagt

SEQ ID NO: 1669352 - DNA, 15 bp, Homo sapiens
aaatacacacttgag

SEQ ID NO: 1669353 - DNA, 15 bp, Homo sapiens
gaaatacacacttga

SEQ ID NO: 1669354 - DNA, 15 bp, Homo sapiens
agaaatacacacttg

SEQ ID NO: 1669355 - DNA, 15 bp, Homo sapiens
aagaaatacacactt

SEQ ID NO: 1669356 - DNA, 15 bp, Homo sapiens
aaagaaatacacact

SEQ ID NO: 1669357 - DNA, 15 bp, Homo sapiens
caaagaaatacacac

SEQ ID NO: 1669358 - DNA, 15 bp, Homo sapiens
acaaagaaatacaca

SEQ ID NO: 1669359 - DNA, 15 bp, Homo sapiens
gacaaagaaatacac

SEQ ID NO: 1669360 - DNA, 15 bp, Homo sapiens
agacaaagaaataca

SEQ ID NO: 1669361 - DNA, 15 bp, Homo sapiens
gagacaaagaaatac

SEQ ID NO: 1669362 - DNA, 15 bp, Homo sapiens
agagacaaagaaata

SEQ ID NO: 1669363 - DNA, 15 bp, Homo sapiens
aagagacaaagaaat

SEQ ID NO: 1669364 - DNA, 15 bp, Homo sapiens
aaagagacaaagaaa

SEQ ID NO: 1669365 - DNA, 15 bp, Homo sapiens
gaaagagacaaagaa

SEQ ID NO: 1669366 - DNA, 15 bp, Homo sapiens
agaaagagacaaaga

SEQ ID NO: 1669367 - DNA, 15 bp, Homo sapiens
aagaaagagacaaag

SEQ ID NO: 1669368 - DNA, 15 bp, Homo sapiens
aaagaaagagacaaa

SEQ ID NO: 1669369 - DNA, 15 bp, Homo sapiens
gaaagaaagagacaa

SEQ ID NO: 1669370 - DNA, 15 bp, Homo sapiens
agaaagaaagagaca

SEQ ID NO: 1669371 - DNA, 15 bp, Homo sapiens
aagaaagaaagagac

SEQ ID NO: 1669372 - DNA, 15 bp, Homo sapiens
caagaaagaaagaga

SEQ ID NO: 1669373 - DNA, 15 bp, Homo sapiens
acaagaaagaaagag

SEQ ID NO: 1669374 - DNA, 15 bp, Homo sapiens
gacaagaaagaaaga

SEQ ID NO: 1669375 - DNA, 15 bp, Homo sapiens
agacaagaaagaaag

SEQ ID NO: 1669376 - DNA, 15 bp, Homo sapiens
aagacaagaaagaaa

SEQ ID NO: 1669377 - DNA, 15 bp, Homo sapiens
aaagacaagaaagaa

SEQ ID NO: 1669378 - DNA, 15 bp, Homo sapiens
caaagacaagaaaga

SEQ ID NO: 1669379 - DNA, 15 bp, Homo sapiens
gcaaagacaagaaag

SEQ ID NO: 1669380 - DNA, 15 bp, Homo sapiens
agcaaagacaagaaa

SEQ ID NO: 1669381 - DNA, 15 bp, Homo sapiens
gagcaaagacaagaa

SEQ ID NO: 1669382 - DNA, 15 bp, Homo sapiens
agagcaaagacaaga

SEQ ID NO: 1669383 - DNA, 15 bp, Homo sapiens
aagagcaaagacaag

SEQ ID NO: 1669384 - DNA, 15 bp, Homo sapiens
aaagagcaaagacaa

SEQ ID NO: 1669385 - DNA, 15 bp, Homo sapiens
caaagagcaaagaca

SEQ ID NO: 1669386 - DNA, 15 bp, Homo sapiens
acaaagagcaaagac

SEQ ID NO: 1669387 - DNA, 15 bp, Homo sapiens
aacaaagagcaaaga

SEQ ID NO: 1669388 - DNA, 15 bp, Homo sapiens
gaacaaagagcaaag

SEQ ID NO: 1669389 - DNA, 15 bp, Homo sapiens
agaacaaagagcaaa

SEQ ID NO: 1669390 - DNA, 15 bp, Homo sapiens
gagaacaaagagcaa

SEQ ID NO: 1669391 - DNA, 15 bp, Homo sapiens
agagaacaaagagca

SEQ ID NO: 1669392 - DNA, 15 bp, Homo sapiens
tagagaacaaagagc

SEQ ID NO: 1669393 - DNA, 15 bp, Homo sapiens
atagagaacaaagag

SEQ ID NO: 1669394 - DNA, 15 bp, Homo sapiens
gatagagaacaaaga

SEQ ID NO: 1669395 - DNA, 15 bp, Homo sapiens
agatagagaacaaag

SEQ ID NO: 1669396 - DNA, 15 bp, Homo sapiens
tagatagagaacaaa

SEQ ID NO: 1669397 - DNA, 15 bp, Homo sapiens
ttagatagagaacaa

SEQ ID NO: 1669398 - DNA, 15 bp, Homo sapiens
tttagatagagaaca

SEQ ID NO: 1669399 - DNA, 15 bp, Homo sapiens
ctttagatagagaac

SEQ ID NO: 1669400 - DNA, 15 bp, Homo sapiens
actttagatagagaa

SEQ ID NO: 1669401 - DNA, 15 bp, Homo sapiens
cactttagatagaga

SEQ ID NO: 1669402 - DNA, 15 bp, Homo sapiens
acactttagatagag

SEQ ID NO: 1669403 - DNA, 15 bp, Homo sapiens
cacactttagataga

SEQ ID NO: 1669404 - DNA, 15 bp, Homo sapiens
acacactttagatag

SEQ ID NO: 1669405 - DNA, 15 bp, Homo sapiens
gacacactttagata

SEQ ID NO: 1669406 - DNA, 15 bp, Homo sapiens
agacacactttagat

SEQ ID NO: 1669407 - DNA, 15 bp, Homo sapiens
aagacacactttaga

SEQ ID NO: 1669408 - DNA, 15 bp, Homo sapiens
taagacacactttag

SEQ ID NO: 1669409 - DNA, 15 bp, Homo sapiens
gtaagacacacttta

SEQ ID NO: 1669410 - DNA, 15 bp, Homo sapiens
ggtaagacacacttt

SEQ ID NO: 1669411 - DNA, 15 bp, Homo sapiens
gggtaagacacactt

SEQ ID NO: 1669412 - DNA, 15 bp, Homo sapiens
tgggtaagacacact

SEQ ID NO: 1669413 - DNA, 15 bp, Homo sapiens
atgggtaagacacac

SEQ ID NO: 1669414 - DNA, 15 bp, Homo sapiens
aatgggtaagacaca

SEQ ID NO: 1669415 - DNA, 15 bp, Homo sapiens
aaatgggtaagacac

SEQ ID NO: 1669416 - DNA, 15 bp, Homo sapiens
gaaatgggtaagaca

SEQ ID NO: 1669417 - DNA, 15 bp, Homo sapiens
ggaaatgggtaagac

SEQ ID NO: 1669418 - DNA, 15 bp, Homo sapiens
tggaaatgggtaaga

SEQ ID NO: 1669419 - DNA, 15 bp, Homo sapiens
atggaaatgggtaag

SEQ ID NO: 1669420 - DNA, 15 bp, Homo sapiens
catggaaatgggtaa

SEQ ID NO: 1669421 - DNA, 15 bp, Homo sapiens
acatggaaatgggta

SEQ ID NO: 1669422 - DNA, 15 bp, Homo sapiens
aacatggaaatgggt

SEQ ID NO: 1669423 - DNA, 15 bp, Homo sapiens
aaacatggaaatggg

SEQ ID NO: 1669424 - DNA, 15 bp, Homo sapiens
gaaacatggaaatgg

SEQ ID NO: 1669425 - DNA, 15 bp, Homo sapiens
agaaacatggaaatg

SEQ ID NO: 1669426 - DNA, 15 bp, Homo sapiens
gagaaacatggaaat

SEQ ID NO: 1669427 - DNA, 15 bp, Homo sapiens
agagaaacatggaaa

SEQ ID NO: 1669428 - DNA, 15 bp, Homo sapiens
aagagaaacatggaa

SEQ ID NO: 1669429 - DNA, 15 bp, Homo sapiens
caagagaaacatgga

SEQ ID NO: 1669430 - DNA, 15 bp, Homo sapiens
gcaagagaaacatgg

SEQ ID NO: 1669431 - DNA, 15 bp, Homo sapiens
tagcaagagaaacat

SEQ ID NO: 1669432 - DNA, 15 bp, Homo sapiens
ttagcaagagaaaca

SEQ ID NO: 1669433 - DNA, 15 bp, Homo sapiens
attagcaagagaaac

SEQ ID NO: 1669434 - DNA, 15 bp, Homo sapiens
aattagcaagagaaa

SEQ ID NO: 1669435 - DNA, 15 bp, Homo sapiens
aaattagcaagagaa

SEQ ID NO: 1669436 - DNA, 15 bp, Homo sapiens
gaaattagcaagaga

SEQ ID NO: 1669437 - DNA, 15 bp, Homo sapiens
agaaattagcaagag

SEQ ID NO: 1669438 - DNA, 15 bp, Homo sapiens
aagaaattagcaaga

SEQ ID NO: 1669439 - DNA, 15 bp, Homo sapiens
aaagaaattagcaag

SEQ ID NO: 1669440 - DNA, 15 bp, Homo sapiens
gaaagaaattagcaa

SEQ ID NO: 1669441 - DNA, 15 bp, Homo sapiens
cgaaagaaattagca

SEQ ID NO: 1669442 - DNA, 15 bp, Homo sapiens
acgaaagaaattagc

SEQ ID NO: 1669443 - DNA, 15 bp, Homo sapiens
cacgaaagaaattag

SEQ ID NO: 1669444 - DNA, 15 bp, Homo sapiens
acacgaaagaaatta

SEQ ID NO: 1669445 - DNA, 15 bp, Homo sapiens
cacacgaaagaaatt

SEQ ID NO: 1669446 - DNA, 15 bp, Homo sapiens
acacacgaaagaaat

SEQ ID NO: 1669447 - DNA, 15 bp, Homo sapiens
cacacacgaaagaaa

SEQ ID NO: 1669448 - DNA, 15 bp, Homo sapiens
gcacacacgaaagaa

SEQ ID NO: 1669449 - DNA, 15 bp, Homo sapiens
ggcacacacgaaaga

SEQ ID NO: 1669450 - DNA, 15 bp, Homo sapiens
aggcacacacgaaag

SEQ ID NO: 1669451 - DNA, 15 bp, Homo sapiens
aaggcacacacgaaa

SEQ ID NO: 1669452 - DNA, 15 bp, Homo sapiens
aaaggcacacacgaa

SEQ ID NO: 1669453 - DNA, 15 bp, Homo sapiens
caaaggcacacacga

SEQ ID NO: 1669454 - DNA, 15 bp, Homo sapiens
gcaaaggcacacacg

SEQ ID NO: 1669455 - DNA, 15 bp, Homo sapiens
ggcaaaggcacacac

SEQ ID NO: 1669456 - DNA, 15 bp, Homo sapiens
aggcaaaggcacaca

SEQ ID NO: 1669457 - DNA, 15 bp, Homo sapiens
gaggcaaaggcacac

SEQ ID NO: 1669458 - DNA, 15 bp, Homo sapiens
tgaggcaaaggcaca

SEQ ID NO: 1669459 - DNA, 15 bp, Homo sapiens
atgaggcaaaggcac

SEQ ID NO: 1669460 - DNA, 15 bp, Homo sapiens
aatgaggcaaaggca

SEQ ID NO: 1669461 - DNA, 15 bp, Homo sapiens
aaatgaggcaaaggc

SEQ ID NO: 1669462 - DNA, 15 bp, Homo sapiens
aaaatgaggcaaagg

SEQ ID NO: 1669463 - DNA, 15 bp, Homo sapiens
gaaaatgaggcaaag

SEQ ID NO: 1669464 - DNA, 15 bp, Homo sapiens
agaaaatgaggcaaa

SEQ ID NO: 1669465 - DNA, 15 bp, Homo sapiens
gagaaaatgaggcaa

SEQ ID NO: 1669466 - DNA, 15 bp, Homo sapiens
agagaaaatgaggca

SEQ ID NO: 1669467 - DNA, 15 bp, Homo sapiens
aagagaaaatgaggc

SEQ ID NO: 1669468 - DNA, 15 bp, Homo sapiens
aaagagaaaatgagg

SEQ ID NO: 1669469 - DNA, 15 bp, Homo sapiens
aaaagagaaaatgag

SEQ ID NO: 1669470 - DNA, 15 bp, Homo sapiens
aaaaagagaaaatga

SEQ ID NO: 1669471 - DNA, 15 bp, Homo sapiens
caaaaagagaaaatg

SEQ ID NO: 1669472 - DNA, 15 bp, Homo sapiens
acaaaaagagaaaat

SEQ ID NO: 1669473 - DNA, 15 bp, Homo sapiens
aacaaaaagagaaaa

SEQ ID NO: 1669474 - DNA, 15 bp, Homo sapiens
gaacaaaaagagaaa

SEQ ID NO: 1669475 - DNA, 15 bp, Homo sapiens
tgaacaaaaagagaa

SEQ ID NO: 1669476 - DNA, 15 bp, Homo sapiens
gtgaacaaaaagaga

SEQ ID NO: 1669477 - DNA, 15 bp, Homo sapiens
tgtgaacaaaaagag

SEQ ID NO: 1669478 - DNA, 15 bp, Homo sapiens
ttgtgaacaaaaaga

SEQ ID NO: 1669479 - DNA, 15 bp, Homo sapiens
cttgtgaacaaaaag

SEQ ID NO: 1669480 - DNA, 15 bp, Homo sapiens
tcttgtgaacaaaaa

SEQ ID NO: 1669481 - DNA, 15 bp, Homo sapiens
ctcttgtgaacaaaa

SEQ ID NO: 1669482 - DNA, 15 bp, Homo sapiens
actcttgtgaacaaa

SEQ ID NO: 1669483 - DNA, 15 bp, Homo sapiens
cactcttgtgaacaa

SEQ ID NO: 1669484 - DNA, 15 bp, Homo sapiens
ccactcttgtgaaca

SEQ ID NO: 1669485 - DNA, 15 bp, Homo sapiens
accactcttgtgaac

SEQ ID NO: 1669486 - DNA, 15 bp, Homo sapiens
gaccactcttgtgaa

SEQ ID NO: 1669487 - DNA, 15 bp, Homo sapiens
agaccactcttgtga

SEQ ID NO: 1669488 - DNA, 15 bp, Homo sapiens
cagaccactcttgtg

SEQ ID NO: 1669489 - DNA, 15 bp, Homo sapiens
acagaccactcttgt

SEQ ID NO: 1669490 - DNA, 15 bp, Homo sapiens
cacagaccactcttg

SEQ ID NO: 1669491 - DNA, 15 bp, Homo sapiens
acacagaccactctt

SEQ ID NO: 1669492 - DNA, 15 bp, Homo sapiens
gacacagaccactct

SEQ ID NO: 1669493 - DNA, 15 bp, Homo sapiens
agacacagaccactc

SEQ ID NO: 1669494 - DNA, 15 bp, Homo sapiens
aagacacagaccact

SEQ ID NO: 1669495 - DNA, 15 bp, Homo sapiens
caagacacagaccac

SEQ ID NO: 1669496 - DNA, 15 bp, Homo sapiens
acaagacacagacca

SEQ ID NO: 1669497 - DNA, 15 bp, Homo sapiens
gacaagacacagacc

SEQ ID NO: 1669498 - DNA, 15 bp, Homo sapiens
agacaagacacagac

SEQ ID NO: 1669499 - DNA, 15 bp, Homo sapiens
aagacaagacacaga

SEQ ID NO: 1669500 - DNA, 15 bp, Homo sapiens
taagacaagacacag

SEQ ID NO: 1669501 - DNA, 15 bp, Homo sapiens
ctaagacaagacaca

SEQ ID NO: 1669502 - DNA, 15 bp, Homo sapiens
tctaagacaagacac

SEQ ID NO: 1669503 - DNA, 15 bp, Homo sapiens
gtctaagacaagaca

SEQ ID NO: 1669504 - DNA, 15 bp, Homo sapiens
tgtctaagacaagac

SEQ ID NO: 1669505 - DNA, 15 bp, Homo sapiens
atgtctaagacaaga

SEQ ID NO: 1669506 - DNA, 15 bp, Homo sapiens
tatgtctaagacaag

SEQ ID NO: 1669507 - DNA, 15 bp, Homo sapiens
atatgtctaagacaa

SEQ ID NO: 1669508 - DNA, 15 bp, Homo sapiens
gatatgtctaagaca

SEQ ID NO: 1669509 - DNA, 15 bp, Homo sapiens
agatatgtctaagac

SEQ ID NO: 1669510 - DNA, 15 bp, Homo sapiens
gagatatgtctaaga

SEQ ID NO: 1669511 - DNA, 15 bp, Homo sapiens
agagatatgtctaag

SEQ ID NO: 1669512 - DNA, 15 bp, Homo sapiens
gagagatatgtctaa

SEQ ID NO: 1669513 - DNA, 15 bp, Homo sapiens
tgagagatatgtcta

SEQ ID NO: 1669514 - DNA, 15 bp, Homo sapiens
atgagagatatgtct

SEQ ID NO: 1669515 - DNA, 15 bp, Homo sapiens
aatgagagatatgtc

SEQ ID NO: 1669516 - DNA, 15 bp, Homo sapiens
aaatgagagatatgt

SEQ ID NO: 1669517 - DNA, 15 bp, Homo sapiens
aaaatgagagatatg

SEQ ID NO: 1669518 - DNA, 15 bp, Homo sapiens
aaaaatgagagatat

SEQ ID NO: 1669519 - DNA, 15 bp, Homo sapiens
gaaaaatgagagata

SEQ ID NO: 1669520 - DNA, 15 bp, Homo sapiens
tgaaaaatgagagat

SEQ ID NO: 1669521 - DNA, 15 bp, Homo sapiens
atgaaaaatgagaga

SEQ ID NO: 1669522 - DNA, 15 bp, Homo sapiens
aatgaaaaatgagag

SEQ ID NO: 1669523 - DNA, 15 bp, Homo sapiens
aaatgaaaaatgaga

SEQ ID NO: 1669524 - DNA, 15 bp, Homo sapiens
aaaatgaaaaatgag

SEQ ID NO: 1669525 - DNA, 15 bp, Homo sapiens
caaaatgaaaaatga

SEQ ID NO: 1669526 - DNA, 15 bp, Homo sapiens
acaaaatgaaaaatg

SEQ ID NO: 1669527 - DNA, 15 bp, Homo sapiens
aacaaaatgaaaaat

SEQ ID NO: 1669528 - DNA, 15 bp, Homo sapiens
caacaaaatgaaaaa

SEQ ID NO: 1669529 - DNA, 15 bp, Homo sapiens
gcaacaaaatgaaaa

SEQ ID NO: 1669530 - DNA, 15 bp, Homo sapiens
agcaacaaaatgaaa

SEQ ID NO: 1669531 - DNA, 15 bp, Homo sapiens
tagcaacaaaatgaa

SEQ ID NO: 1669532 - DNA, 15 bp, Homo sapiens
atagcaacaaaatga

SEQ ID NO: 1669533 - DNA, 15 bp, Homo sapiens
aatagcaacaaaatg

SEQ ID NO: 1669534 - DNA, 15 bp, Homo sapiens
aaatagcaacaaaat

SEQ ID NO: 1669535 - DNA, 15 bp, Homo sapiens
gaaatagcaacaaaa

SEQ ID NO: 1669536 - DNA, 15 bp, Homo sapiens
agaaatagcaacaaa

SEQ ID NO: 1669537 - DNA, 15 bp, Homo sapiens
gagaaatagcaacaa

SEQ ID NO: 1669538 - DNA, 15 bp, Homo sapiens
agagaaatagcaaca

SEQ ID NO: 1669539 - DNA, 15 bp, Homo sapiens
aagagaaatagcaac

SEQ ID NO: 1669540 - DNA, 15 bp, Homo sapiens
aaagagaaatagcaa

SEQ ID NO: 1669541 - DNA, 15 bp, Homo sapiens
caaagagaaatagca

SEQ ID NO: 1669542 - DNA, 15 bp, Homo sapiens
gcaaagagaaatagc

SEQ ID NO: 1669543 - DNA, 15 bp, Homo sapiens
agcaaagagaaatag

SEQ ID NO: 1669544 - DNA, 15 bp, Homo sapiens
gagcaaagagaaata

SEQ ID NO: 1669545 - DNA, 15 bp, Homo sapiens
agagcaaagagaaat

SEQ ID NO: 1669546 - DNA, 15 bp, Homo sapiens
gagagcaaagagaaa

SEQ ID NO: 1669547 - DNA, 15 bp, Homo sapiens
ggagagcaaagagaa

SEQ ID NO: 1669548 - DNA, 15 bp, Homo sapiens
aggagagcaaagaga

SEQ ID NO: 1669549 - DNA, 15 bp, Homo sapiens
taggagagcaaagag

SEQ ID NO: 1669550 - DNA, 15 bp, Homo sapiens
ctaggagagcaaaga

SEQ ID NO: 1669551 - DNA, 15 bp, Homo sapiens
tctaggagagcaaag

SEQ ID NO: 1669552 - DNA, 15 bp, Homo sapiens
atctaggagagcaaa

SEQ ID NO: 1669553 - DNA, 15 bp, Homo sapiens
catctaggagagcaa

SEQ ID NO: 1669554 - DNA, 15 bp, Homo sapiens
acatctaggagagca

SEQ ID NO: 1669555 - DNA, 15 bp, Homo sapiens
cacatctaggagagc

SEQ ID NO: 1669556 - DNA, 15 bp, Homo sapiens
ccacatctaggagag

SEQ ID NO: 1669557 - DNA, 15 bp, Homo sapiens
gccacatctaggaga

SEQ ID NO: 1669558 - DNA, 15 bp, Homo sapiens
agccacatctaggag

SEQ ID NO: 1669559 - DNA, 15 bp, Homo sapiens
gagccacatctagga

SEQ ID NO: 1669560 - DNA, 15 bp, Homo sapiens
agagccacatctagg

SEQ ID NO: 1669561 - DNA, 15 bp, Homo sapiens
aagagccacatctag

SEQ ID NO: 1669562 - DNA, 15 bp, Homo sapiens
gaagagccacatcta

SEQ ID NO: 1669563 - DNA, 15 bp, Homo sapiens
agaagagccacatct

SEQ ID NO: 1669564 - DNA, 15 bp, Homo sapiens
aagaagagccacatc

SEQ ID NO: 1669565 - DNA, 15 bp, Homo sapiens
aaagaagagccacat

SEQ ID NO: 1669566 - DNA, 15 bp, Homo sapiens
gaaagaagagccaca

SEQ ID NO: 1669567 - DNA, 15 bp, Homo sapiens
tgaaagaagagccac

SEQ ID NO: 1669568 - DNA, 15 bp, Homo sapiens
gtgaaagaagagcca

SEQ ID NO: 1669569 - DNA, 15 bp, Homo sapiens
cgtgaaagaagagcc

SEQ ID NO: 1669570 - DNA, 15 bp, Homo sapiens
gcgtgaaagaagagc

SEQ ID NO: 1669571 - DNA, 15 bp, Homo sapiens
agcgtgaaagaagag

SEQ ID NO: 1669572 - DNA, 15 bp, Homo sapiens
aagcgtgaaagaaga

SEQ ID NO: 1669573 - DNA, 15 bp, Homo sapiens
aaagcgtgaaagaag

SEQ ID NO: 1669574 - DNA, 15 bp, Homo sapiens
taaagcgtgaaagaa

SEQ ID NO: 1669575 - DNA, 15 bp, Homo sapiens
ataaagcgtgaaaga

SEQ ID NO: 1669576 - DNA, 15 bp, Homo sapiens
aataaagcgtgaaag

SEQ ID NO: 1669577 - DNA, 15 bp, Homo sapiens
aaataaagcgtgaaa

SEQ ID NO: 1669578 - DNA, 15 bp, Homo sapiens
gaaataaagcgtgaa

SEQ ID NO: 1669579 - DNA, 15 bp, Homo sapiens
tgaaataaagcgtga

SEQ ID NO: 1669580 - DNA, 15 bp, Homo sapiens
atgaaataaagcgtg

SEQ ID NO: 1669581 - DNA, 15 bp, Homo sapiens
catgaaataaagcgt

SEQ ID NO: 1669582 - DNA, 15 bp, Homo sapiens
acatgaaataaagcg

SEQ ID NO: 1669583 - DNA, 15 bp, Homo sapiens
gacatgaaataaagc

SEQ ID NO: 1669584 - DNA, 15 bp, Homo sapiens
agacatgaaataaag

SEQ ID NO: 1669585 - DNA, 15 bp, Homo sapiens
gagacatgaaataaa

SEQ ID NO: 1669586 - DNA, 15 bp, Homo sapiens
ggagacatgaaataa

SEQ ID NO: 1669587 - DNA, 15 bp, Homo sapiens
aggagacatgaaata

SEQ ID NO: 1669588 - DNA, 15 bp, Homo sapiens
aaggagacatgaaat

SEQ ID NO: 1669589 - DNA, 15 bp, Homo sapiens
aaaggagacatgaaa

SEQ ID NO: 1669590 - DNA, 15 bp, Homo sapiens
aaaaggagacatgaa

SEQ ID NO: 1669591 - DNA, 15 bp, Homo sapiens
aaaaaggagacatga

SEQ ID NO: 1669592 - DNA, 15 bp, Homo sapiens
caaaaaggagacatg

SEQ ID NO: 1669593 - DNA, 15 bp, Homo sapiens
ccaaaaaggagacat

SEQ ID NO: 1669594 - DNA, 15 bp, Homo sapiens
cccaaaaaggagaca

SEQ ID NO: 1669595 - DNA, 15 bp, Homo sapiens
acccaaaaaggagac

SEQ ID NO: 1669596 - DNA, 15 bp, Homo sapiens
gacccaaaaaggaga

SEQ ID NO: 1669597 - DNA, 15 bp, Homo sapiens
tgacccaaaaaggag

SEQ ID NO: 1669598 - DNA, 15 bp, Homo sapiens
gtgacccaaaaagga

SEQ ID NO: 1669599 - DNA, 15 bp, Homo sapiens
tgtgacccaaaaagg

SEQ ID NO: 1669600 - DNA, 15 bp, Homo sapiens
atgtgacccaaaaag

SEQ ID NO: 1669601 - DNA, 15 bp, Homo sapiens
catgtgacccaaaaa

SEQ ID NO: 1669602 - DNA, 15 bp, Homo sapiens
gcatgtgacccaaaa

SEQ ID NO: 1669603 - DNA, 15 bp, Homo sapiens
agcatgtgacccaaa

SEQ ID NO: 1669604 - DNA, 15 bp, Homo sapiens
cagcatgtgacccaa

SEQ ID NO: 1669605 - DNA, 15 bp, Homo sapiens
acagcatgtgaccca

SEQ ID NO: 1669606 - DNA, 15 bp, Homo sapiens
cacagcatgtgaccc

SEQ ID NO: 1669607 - DNA, 15 bp, Homo sapiens
acacagcatgtgacc

SEQ ID NO: 1669608 - DNA, 15 bp, Homo sapiens
cacacagcatgtgac

SEQ ID NO: 1669609 - DNA, 15 bp, Homo sapiens
gcacacagcatgtga

SEQ ID NO: 1669610 - DNA, 15 bp, Homo sapiens
agcacacagcatgtg

SEQ ID NO: 1669611 - DNA, 15 bp, Homo sapiens
aagcacacagcatgt

SEQ ID NO: 1669612 - DNA, 15 bp, Homo sapiens
aaagcacacagcatg

SEQ ID NO: 1669613 - DNA, 15 bp, Homo sapiens
aaaagcacacagcat

SEQ ID NO: 1669614 - DNA, 15 bp, Homo sapiens
aaaaagcacacagca

SEQ ID NO: 1669615 - DNA, 15 bp, Homo sapiens
caaaaagcacacagc

SEQ ID NO: 1669616 - DNA, 15 bp, Homo sapiens
acaaaaagcacacag

SEQ ID NO: 1669617 - DNA, 15 bp, Homo sapiens
gacaaaaagcacaca

SEQ ID NO: 1669618 - DNA, 15 bp, Homo sapiens
ggacaaaaagcacac

SEQ ID NO: 1669619 - DNA, 15 bp, Homo sapiens
aggacaaaaagcaca

SEQ ID NO: 1669620 - DNA, 15 bp, Homo sapiens
aaggacaaaaagcac

SEQ ID NO: 1669621 - DNA, 15 bp, Homo sapiens
aaaggacaaaaagca

SEQ ID NO: 1669622 - DNA, 15 bp, Homo sapiens
aaaaggacaaaaagc

SEQ ID NO: 1669623 - DNA, 15 bp, Homo sapiens
gaaaaggacaaaaag

SEQ ID NO: 1669624 - DNA, 15 bp, Homo sapiens
agaaaaggacaaaaa

SEQ ID NO: 1669625 - DNA, 15 bp, Homo sapiens
aagaaaaggacaaaa

SEQ ID NO: 1669626 - DNA, 15 bp, Homo sapiens
caagaaaaggacaaa

SEQ ID NO: 1669627 - DNA, 15 bp, Homo sapiens
acaagaaaaggacaa

SEQ ID NO: 1669628 - DNA, 15 bp, Homo sapiens
aacaagaaaaggaca

SEQ ID NO: 1669629 - DNA, 15 bp, Homo sapiens
gaacaagaaaaggac

SEQ ID NO: 1669630 - DNA, 15 bp, Homo sapiens
agaacaagaaaagga

SEQ ID NO: 1669631 - DNA, 15 bp, Homo sapiens
cagaacaagaaaagg

SEQ ID NO: 1669632 - DNA, 15 bp, Homo sapiens
acagaacaagaaaag

SEQ ID NO: 1669633 - DNA, 15 bp, Homo sapiens
gacagaacaagaaaa

SEQ ID NO: 1669634 - DNA, 15 bp, Homo sapiens
agacagaacaagaaa

SEQ ID NO: 1669635 - DNA, 15 bp, Homo sapiens
tagacagaacaagaa

SEQ ID NO: 1669636 - DNA, 15 bp, Homo sapiens
gtagacagaacaaga

SEQ ID NO: 1669637 - DNA, 15 bp, Homo sapiens
ggtagacagaacaag

SEQ ID NO: 1669638 - DNA, 15 bp, Homo sapiens
aggtagacagaacaa

SEQ ID NO: 1669639 - DNA, 15 bp, Homo sapiens
gaggtagacagaaca

SEQ ID NO: 1669640 - DNA, 15 bp, Homo sapiens
agaggtagacagaac

SEQ ID NO: 1669641 - DNA, 15 bp, Homo sapiens
gagaggtagacagaa

SEQ ID NO: 1669642 - DNA, 15 bp, Homo sapiens
ggagaggtagacaga

SEQ ID NO: 1669643 - DNA, 15 bp, Homo sapiens
aggagaggtagacag

SEQ ID NO: 1669644 - DNA, 15 bp, Homo sapiens
aaggagaggtagaca

SEQ ID NO: 1669645 - DNA, 15 bp, Homo sapiens
aaaggagaggtagac

SEQ ID NO: 1669646 - DNA, 15 bp, Homo sapiens
gaaaggagaggtaga

SEQ ID NO: 1669647 - DNA, 15 bp, Homo sapiens
agaaaggagaggtag

SEQ ID NO: 1669648 - DNA, 15 bp, Homo sapiens
gagaaaggagaggta

SEQ ID NO: 1669649 - DNA, 15 bp, Homo sapiens
agagaaaggagaggt

SEQ ID NO: 1669650 - DNA, 15 bp, Homo sapiens
cagagaaaggagagg

SEQ ID NO: 1669651 - DNA, 15 bp, Homo sapiens
gcagagaaaggagag

SEQ ID NO: 1669652 - DNA, 15 bp, Homo sapiens
ggcagagaaaggaga

SEQ ID NO: 1669653 - DNA, 15 bp, Homo sapiens
aggcagagaaaggag

SEQ ID NO: 1669654 - DNA, 15 bp, Homo sapiens
taggcagagaaagga

SEQ ID NO: 1669655 - DNA, 15 bp, Homo sapiens
gtaggcagagaaagg

SEQ ID NO: 1669656 - DNA, 15 bp, Homo sapiens
ggtaggcagagaaag

SEQ ID NO: 1669657 - DNA, 15 bp, Homo sapiens
aggtaggcagagaaa

SEQ ID NO: 1669658 - DNA, 15 bp, Homo sapiens
gaggtaggcagagaa

SEQ ID NO: 1669659 - DNA, 15 bp, Homo sapiens
agaggtaggcagaga

SEQ ID NO: 1669660 - DNA, 15 bp, Homo sapiens
gagaggtaggcagag

SEQ ID NO: 1669661 - DNA, 15 bp, Homo sapiens
agagaggtaggcaga

SEQ ID NO: 1669662 - DNA, 15 bp, Homo sapiens
aagagaggtaggcag

SEQ ID NO: 1669663 - DNA, 15 bp, Homo sapiens
aaagagaggtaggca

SEQ ID NO: 1669664 - DNA, 15 bp, Homo sapiens
aaaagagaggtaggc

SEQ ID NO: 1669665 - DNA, 15 bp, Homo sapiens
gaaaagagaggtagg

SEQ ID NO: 1669666 - DNA, 15 bp, Homo sapiens
agaaaagagaggtag

SEQ ID NO: 1669667 - DNA, 15 bp, Homo sapiens
gagaaaagagaggta

SEQ ID NO: 1669668 - DNA, 15 bp, Homo sapiens
agagaaaagagaggt

SEQ ID NO: 1669669 - DNA, 15 bp, Homo sapiens
aagagaaaagagagg

SEQ ID NO: 1669670 - DNA, 15 bp, Homo sapiens
aaagagaaaagagag

SEQ ID NO: 1669671 - DNA, 15 bp, Homo sapiens
caaagagaaaagaga

SEQ ID NO: 1669672 - DNA, 15 bp, Homo sapiens
acaaagagaaaagag

SEQ ID NO: 1669673 - DNA, 15 bp, Homo sapiens
cacaaagagaaaaga

SEQ ID NO: 1669674 - DNA, 15 bp, Homo sapiens
tcacaaagagaaaag

SEQ ID NO: 1669675 - DNA, 15 bp, Homo sapiens
ttcacaaagagaaaa

SEQ ID NO: 1669676 - DNA, 15 bp, Homo sapiens
gttcacaaagagaaa

SEQ ID NO: 1669677 - DNA, 15 bp, Homo sapiens
agttcacaaagagaa

SEQ ID NO: 1669678 - DNA, 15 bp, Homo sapiens
cagttcacaaagaga

SEQ ID NO: 1669679 - DNA, 15 bp, Homo sapiens
acagttcacaaagag

SEQ ID NO: 1669680 - DNA, 15 bp, Homo sapiens
cacagttcacaaaga

SEQ ID NO: 1669681 - DNA, 15 bp, Homo sapiens
tcacagttcacaaag

SEQ ID NO: 1669682 - DNA, 15 bp, Homo sapiens
atcacagttcacaaa

SEQ ID NO: 1669683 - DNA, 15 bp, Homo sapiens
aatcacagttcacaa

SEQ ID NO: 1669684 - DNA, 15 bp, Homo sapiens
taatcacagttcaca

SEQ ID NO: 1669685 - DNA, 15 bp, Homo sapiens
ataatcacagttcac

SEQ ID NO: 1669686 - DNA, 15 bp, Homo sapiens
aataatcacagttca

SEQ ID NO: 1669687 - DNA, 15 bp, Homo sapiens
aaataatcacagttc

SEQ ID NO: 1669688 - DNA, 15 bp, Homo sapiens
caaataatcacagtt

SEQ ID NO: 1669689 - DNA, 15 bp, Homo sapiens
acaaataatcacagt

SEQ ID NO: 1669690 - DNA, 15 bp, Homo sapiens
aacaaataatcacag

SEQ ID NO: 1669691 - DNA, 15 bp, Homo sapiens
taacaaataatcaca

SEQ ID NO: 1669692 - DNA, 15 bp, Homo sapiens
gtaacaaataatcac

SEQ ID NO: 1669693 - DNA, 15 bp, Homo sapiens
ggtaacaaataatca

SEQ ID NO: 1669694 - DNA, 15 bp, Homo sapiens
gggtaacaaataatc

SEQ ID NO: 1669695 - DNA, 15 bp, Homo sapiens
ggggtaacaaataat

SEQ ID NO: 1669696 - DNA, 15 bp, Homo sapiens
aggggtaacaaataa

SEQ ID NO: 1669697 - DNA, 15 bp, Homo sapiens
aaggggtaacaaata

SEQ ID NO: 1669698 - DNA, 15 bp, Homo sapiens
gaaggggtaacaaat

SEQ ID NO: 1669699 - DNA, 15 bp, Homo sapiens
ggaaggggtaacaaa

SEQ ID NO: 1669700 - DNA, 15 bp, Homo sapiens
gggaaggggtaacaa

SEQ ID NO: 1669701 - DNA, 15 bp, Homo sapiens
ggggaaggggtaaca

SEQ ID NO: 1669702 - DNA, 15 bp, Homo sapiens
aggggaaggggtaac

SEQ ID NO: 1669703 - DNA, 15 bp, Homo sapiens
aaggggaaggggtaa

SEQ ID NO: 1669704 - DNA, 15 bp, Homo sapiens
gaaggggaaggggta

SEQ ID NO: 1669705 - DNA, 15 bp, Homo sapiens
agaaggggaaggggt

SEQ ID NO: 1669706 - DNA, 15 bp, Homo sapiens
gagaaggggaagggg

SEQ ID NO: 1669707 - DNA, 15 bp, Homo sapiens
cgagaaggggaaggg

SEQ ID NO: 1669708 - DNA, 15 bp, Homo sapiens
acgagaaggggaagg

SEQ ID NO: 1669709 - DNA, 15 bp, Homo sapiens
aacgagaaggggaag

SEQ ID NO: 1669710 - DNA, 15 bp, Homo sapiens
gaacgagaaggggaa

SEQ ID NO: 1669711 - DNA, 15 bp, Homo sapiens
cgaacgagaagggga

SEQ ID NO: 1669712 - DNA, 15 bp, Homo sapiens
acgaacgagaagggg

SEQ ID NO: 1669713 - DNA, 15 bp, Homo sapiens
aacgaacgagaaggg

SEQ ID NO: 1669714 - DNA, 15 bp, Homo sapiens
aaacgaacgagaagg

SEQ ID NO: 1669715 - DNA, 15 bp, Homo sapiens
aaaacgaacgagaag

SEQ ID NO: 1669716 - DNA, 15 bp, Homo sapiens
taaaacgaacgagaa

SEQ ID NO: 1669717 - DNA, 15 bp, Homo sapiens
ttaaaacgaacgaga

SEQ ID NO: 1669718 - DNA, 15 bp, Homo sapiens
tttaaaacgaacgag

SEQ ID NO: 1669719 - DNA, 15 bp, Homo sapiens
atttaaaacgaacga

SEQ ID NO: 1669720 - DNA, 15 bp, Homo sapiens
aatttaaaacgaacg

SEQ ID NO: 1669721 - DNA, 15 bp, Homo sapiens
aaatttaaaacgaac

SEQ ID NO: 1669722 - DNA, 15 bp, Homo sapiens
gaaatttaaaacgaa

SEQ ID NO: 1669723 - DNA, 15 bp, Homo sapiens
tgaaatttaaaacga

SEQ ID NO: 1669724 - DNA, 15 bp, Homo sapiens
gtgaaatttaaaacg

SEQ ID NO: 1669725 - DNA, 15 bp, Homo sapiens
ggtgaaatttaaaac

SEQ ID NO: 1669726 - DNA, 15 bp, Homo sapiens
aggtgaaatttaaaa

SEQ ID NO: 1669727 - DNA, 15 bp, Homo sapiens
aaggtgaaatttaaa

SEQ ID NO: 1669728 - DNA, 15 bp, Homo sapiens
aaaggtgaaatttaa

SEQ ID NO: 1669729 - DNA, 15 bp, Homo sapiens
aaaaggtgaaattta

SEQ ID NO: 1669730 - DNA, 15 bp, Homo sapiens
aaaaaggtgaaattt

SEQ ID NO: 1669731 - DNA, 15 bp, Homo sapiens
aaaaaaggtgaaatt

SEQ ID NO: 1669732 - DNA, 15 bp, Homo sapiens
gaaaaaaggtgaaat

SEQ ID NO: 1669733 - DNA, 15 bp, Homo sapiens
agaaaaaaggtgaaa

SEQ ID NO: 1669734 - DNA, 15 bp, Homo sapiens
cagaaaaaaggtgaa

SEQ ID NO: 1669735 - DNA, 15 bp, Homo sapiens
tcagaaaaaaggtga

SEQ ID NO: 1669736 - DNA, 15 bp, Homo sapiens
ctcagaaaaaaggtg

SEQ ID NO: 1669737 - DNA, 15 bp, Homo sapiens
actcagaaaaaaggt

SEQ ID NO: 1669738 - DNA, 15 bp, Homo sapiens
gactcagaaaaaagg

SEQ ID NO: 1669739 - DNA, 15 bp, Homo sapiens
agactcagaaaaaag

SEQ ID NO: 1669740 - DNA, 15 bp, Homo sapiens
cagactcagaaaaaa

SEQ ID NO: 1669741 - DNA, 15 bp, Homo sapiens
ccagactcagaaaaa

SEQ ID NO: 1669742 - DNA, 15 bp, Homo sapiens
gccagactcagaaaa

SEQ ID NO: 1669743 - DNA, 15 bp, Homo sapiens
ggccagactcagaaa

SEQ ID NO: 1669744 - DNA, 15 bp, Homo sapiens
aggccagactcagaa

SEQ ID NO: 1669745 - DNA, 15 bp, Homo sapiens
gaggccagactcaga

SEQ ID NO: 1669746 - DNA, 15 bp, Homo sapiens
ggaggccagactcag

SEQ ID NO: 1669747 - DNA, 15 bp, Homo sapiens
aggaggccagactca

SEQ ID NO: 1669748 - DNA, 15 bp, Homo sapiens
aaggaggccagactc

SEQ ID NO: 1669749 - DNA, 15 bp, Homo sapiens
aaaggaggccagact

SEQ ID NO: 1669750 - DNA, 15 bp, Homo sapiens
gaaaggaggccagac

SEQ ID NO: 1669751 - DNA, 15 bp, Homo sapiens
agaaaggaggccaga

SEQ ID NO: 1669752 - DNA, 15 bp, Homo sapiens
cagaaaggaggccag

SEQ ID NO: 1669753 - DNA, 15 bp, Homo sapiens
gcagaaaggaggcca

SEQ ID NO: 1669754 - DNA, 15 bp, Homo sapiens
agcagaaaggaggcc

SEQ ID NO: 1669755 - DNA, 15 bp, Homo sapiens
cagcagaaaggaggc

SEQ ID NO: 1669756 - DNA, 15 bp, Homo sapiens
acagcagaaaggagg

SEQ ID NO: 1669757 - DNA, 15 bp, Homo sapiens
aacagcagaaaggag

SEQ ID NO: 1669758 - DNA, 15 bp, Homo sapiens
aaacagcagaaagga

SEQ ID NO: 1669759 - DNA, 15 bp, Homo sapiens
gaaacagcagaaagg

SEQ ID NO: 1669760 - DNA, 15 bp, Homo sapiens
agaaacagcagaaag

SEQ ID NO: 1669761 - DNA, 15 bp, Homo sapiens
tagaaacagcagaaa

SEQ ID NO: 1669762 - DNA, 15 bp, Homo sapiens
gtagaaacagcagaa

SEQ ID NO: 1669763 - DNA, 15 bp, Homo sapiens
agtagaaacagcaga

SEQ ID NO: 1669764 - DNA, 15 bp, Homo sapiens
aagtagaaacagcag

SEQ ID NO: 1669765 - DNA, 15 bp, Homo sapiens
aaagtagaaacagca

SEQ ID NO: 1669766 - DNA, 15 bp, Homo sapiens
aaaagtagaaacagc

SEQ ID NO: 1669767 - DNA, 15 bp, Homo sapiens
aaaaagtagaaacag

SEQ ID NO: 1669768 - DNA, 15 bp, Homo sapiens
taaaaagtagaaaca

SEQ ID NO: 1669769 - DNA, 15 bp, Homo sapiens
ataaaaagtagaaac

SEQ ID NO: 1669770 - DNA, 15 bp, Homo sapiens
gataaaaagtagaaa

SEQ ID NO: 1669771 - DNA, 15 bp, Homo sapiens
agataaaaagtagaa

SEQ ID NO: 1669772 - DNA, 15 bp, Homo sapiens
gagataaaaagtaga

SEQ ID NO: 1669773 - DNA, 15 bp, Homo sapiens
tgagataaaaagtag

SEQ ID NO: 1669774 - DNA, 15 bp, Homo sapiens
gtgagataaaaagta

SEQ ID NO: 1669775 - DNA, 15 bp, Homo sapiens
tgtgagataaaaagt

SEQ ID NO: 1669776 - DNA, 15 bp, Homo sapiens
atgtgagataaaaag

SEQ ID NO: 1669777 - DNA, 15 bp, Homo sapiens
aatgtgagataaaaa

SEQ ID NO: 1669778 - DNA, 15 bp, Homo sapiens
aaatgtgagataaaa

SEQ ID NO: 1669779 - DNA, 15 bp, Homo sapiens
gaaatgtgagataaa

SEQ ID NO: 1669780 - DNA, 15 bp, Homo sapiens
agaaatgtgagataa

SEQ ID NO: 1669781 - DNA, 15 bp, Homo sapiens
gagaaatgtgagata

SEQ ID NO: 1669782 - DNA, 15 bp, Homo sapiens
tgagaaatgtgagat

SEQ ID NO: 1669783 - DNA, 15 bp, Homo sapiens
atgagaaatgtgaga

SEQ ID NO: 1669784 - DNA, 15 bp, Homo sapiens
aatgagaaatgtgag

SEQ ID NO: 1669785 - DNA, 15 bp, Homo sapiens
aaatgagaaatgtga

SEQ ID NO: 1669786 - DNA, 15 bp, Homo sapiens
gaaatgagaaatgtg

SEQ ID NO: 1669787 - DNA, 15 bp, Homo sapiens
agaaatgagaaatgt

SEQ ID NO: 1669788 - DNA, 15 bp, Homo sapiens
cagaaatgagaaatg

SEQ ID NO: 1669789 - DNA, 15 bp, Homo sapiens
gcagaaatgagaaat

SEQ ID NO: 1669790 - DNA, 15 bp, Homo sapiens
tgcagaaatgagaaa

SEQ ID NO: 1669791 - DNA, 15 bp, Homo sapiens
atgcagaaatgagaa

SEQ ID NO: 1669792 - DNA, 15 bp, Homo sapiens
aatgcagaaatgaga

SEQ ID NO: 1669793 - DNA, 15 bp, Homo sapiens
aaatgcagaaatgag

SEQ ID NO: 1669794 - DNA, 15 bp, Homo sapiens
gaaatgcagaaatga

SEQ ID NO: 1669795 - DNA, 15 bp, Homo sapiens
ggaaatgcagaaatg

SEQ ID NO: 1669796 - DNA, 15 bp, Homo sapiens
aaggaaatgcagaaa

SEQ ID NO: 1669797 - DNA, 15 bp, Homo sapiens
aaaggaaatgcagaa

SEQ ID NO: 1669798 - DNA, 15 bp, Homo sapiens
gaaaggaaatgcaga

SEQ ID NO: 1669799 - DNA, 15 bp, Homo sapiens
ggcagaaaggaaatg

SEQ ID NO: 1669800 - DNA, 15 bp, Homo sapiens
aggcagaaaggaaat

SEQ ID NO: 1669801 - DNA, 15 bp, Homo sapiens
gaggcagaaaggaaa

SEQ ID NO: 1669802 - DNA, 15 bp, Homo sapiens
agaggcagaaaggaa

SEQ ID NO: 1669803 - DNA, 15 bp, Homo sapiens
gagaggcagaaagga

SEQ ID NO: 1669804 - DNA, 15 bp, Homo sapiens
agagaggcagaaagg

SEQ ID NO: 1669805 - DNA, 15 bp, Homo sapiens
aagagaggcagaaag

SEQ ID NO: 1669806 - DNA, 15 bp, Homo sapiens
caagagaggcagaaa

SEQ ID NO: 1669807 - DNA, 15 bp, Homo sapiens
ccaagagaggcagaa

SEQ ID NO: 1669808 - DNA, 15 bp, Homo sapiens
cccaagagaggcaga

SEQ ID NO: 1669809 - DNA, 15 bp, Homo sapiens
gcccaagagaggcag

SEQ ID NO: 1669810 - DNA, 15 bp, Homo sapiens
agcccaagagaggca

SEQ ID NO: 1669811 - DNA, 15 bp, Homo sapiens
tagcccaagagaggc

SEQ ID NO: 1669812 - DNA, 15 bp, Homo sapiens
atagcccaagagagg

SEQ ID NO: 1669813 - DNA, 15 bp, Homo sapiens
aatagcccaagagag

SEQ ID NO: 1669814 - DNA, 15 bp, Homo sapiens
gaatagcccaagaga

SEQ ID NO: 1669815 - DNA, 15 bp, Homo sapiens
agaatagcccaagag

SEQ ID NO: 1669816 - DNA, 15 bp, Homo sapiens
gagaatagcccaaga

SEQ ID NO: 1669817 - DNA, 15 bp, Homo sapiens
agagaatagcccaag

SEQ ID NO: 1669818 - DNA, 15 bp, Homo sapiens
gagagaatagcccaa

SEQ ID NO: 1669819 - DNA, 15 bp, Homo sapiens
agagagaatagccca

SEQ ID NO: 1669820 - DNA, 15 bp, Homo sapiens
gagagagaatagccc

SEQ ID NO: 1669821 - DNA, 15 bp, Homo sapiens
agagagagaatagcc

SEQ ID NO: 1669822 - DNA, 15 bp, Homo sapiens
gagagagagaatagc

SEQ ID NO: 1669823 - DNA, 15 bp, Homo sapiens
ggagagagagaatag

SEQ ID NO: 1669824 - DNA, 15 bp, Homo sapiens
aggagagagagaata

SEQ ID NO: 1669825 - DNA, 15 bp, Homo sapiens
gaggagagagagaat

SEQ ID NO: 1669826 - DNA, 15 bp, Homo sapiens
ggaggagagagagaa

SEQ ID NO: 1669827 - DNA, 15 bp, Homo sapiens
gggaggagagagaga

SEQ ID NO: 1669828 - DNA, 15 bp, Homo sapiens
ggggaggagagagag

SEQ ID NO: 1669829 - DNA, 15 bp, Homo sapiens
aggggaggagagaga

SEQ ID NO: 1669830 - DNA, 15 bp, Homo sapiens
caggggaggagagag

SEQ ID NO: 1669831 - DNA, 15 bp, Homo sapiens
gcaggggaggagaga

SEQ ID NO: 1669832 - DNA, 15 bp, Homo sapiens
cgcaggggaggagag

SEQ ID NO: 1669833 - DNA, 15 bp, Homo sapiens
acgcaggggaggaga

SEQ ID NO: 1669834 - DNA, 15 bp, Homo sapiens
cacgcaggggaggag

SEQ ID NO: 1669835 - DNA, 15 bp, Homo sapiens
gcacgcaggggagga

SEQ ID NO: 1669836 - DNA, 15 bp, Homo sapiens
ggcacgcaggggagg

SEQ ID NO: 1669837 - DNA, 15 bp, Homo sapiens
aggcacgcaggggag

SEQ ID NO: 1669838 - DNA, 15 bp, Homo sapiens
gaggcacgcagggga

SEQ ID NO: 1669839 - DNA, 15 bp, Homo sapiens
tgaggcacgcagggg

SEQ ID NO: 1669840 - DNA, 15 bp, Homo sapiens
ctgaggcacgcaggg

SEQ ID NO: 1669841 - DNA, 15 bp, Homo sapiens
gctgaggcacgcagg

SEQ ID NO: 1669842 - DNA, 15 bp, Homo sapiens
tgctgaggcacgcag

SEQ ID NO: 1669843 - DNA, 15 bp, Homo sapiens
atgctgaggcacgca

SEQ ID NO: 1669844 - DNA, 15 bp, Homo sapiens
gatgctgaggcacgc

SEQ ID NO: 1669845 - DNA, 15 bp, Homo sapiens
agatgctgaggcacg

SEQ ID NO: 1669846 - DNA, 15 bp, Homo sapiens
gagatgctgaggcac

SEQ ID NO: 1669847 - DNA, 15 bp, Homo sapiens
agagatgctgaggca

SEQ ID NO: 1669848 - DNA, 15 bp, Homo sapiens
aagagatgctgaggc

SEQ ID NO: 1669849 - DNA, 15 bp, Homo sapiens
caagagatgctgagg

SEQ ID NO: 1669850 - DNA, 15 bp, Homo sapiens
gcaagagatgctgag

SEQ ID NO: 1669851 - DNA, 15 bp, Homo sapiens
agcaagagatgctga

SEQ ID NO: 1669852 - DNA, 15 bp, Homo sapiens
cagcaagagatgctg

SEQ ID NO: 1669853 - DNA, 15 bp, Homo sapiens
acagcaagagatgct

SEQ ID NO: 1669854 - DNA, 15 bp, Homo sapiens
aacagcaagagatgc

SEQ ID NO: 1669855 - DNA, 15 bp, Homo sapiens
aaacagcaagagatg

SEQ ID NO: 1669856 - DNA, 15 bp, Homo sapiens
caaacagcaagagat

SEQ ID NO: 1669857 - DNA, 15 bp, Homo sapiens
acaaacagcaagaga

SEQ ID NO: 1669858 - DNA, 15 bp, Homo sapiens
cacaaacagcaagag

SEQ ID NO: 1669859 - DNA, 15 bp, Homo sapiens
tcacaaacagcaaga

SEQ ID NO: 1669860 - DNA, 15 bp, Homo sapiens
atcacaaacagcaag

SEQ ID NO: 1669861 - DNA, 15 bp, Homo sapiens
aatcacaaacagcaa

SEQ ID NO: 1669862 - DNA, 15 bp, Homo sapiens
aaatcacaaacagca

SEQ ID NO: 1669863 - DNA, 15 bp, Homo sapiens
aaaatcacaaacagc

SEQ ID NO: 1669864 - DNA, 15 bp, Homo sapiens
gaaaatcacaaacag

SEQ ID NO: 1669865 - DNA, 15 bp, Homo sapiens
agaaaatcacaaaca

SEQ ID NO: 1669866 - DNA, 15 bp, Homo sapiens
tagaaaatcacaaac

SEQ ID NO: 1669867 - DNA, 15 bp, Homo sapiens
atagaaaatcacaaa

SEQ ID NO: 1669868 - DNA, 15 bp, Homo sapiens
aatagaaaatcacaa

SEQ ID NO: 1669869 - DNA, 15 bp, Homo sapiens
aaatagaaaatcaca

SEQ ID NO: 1669870 - DNA, 15 bp, Homo sapiens
gaaatagaaaatcac

SEQ ID NO: 1669871 - DNA, 15 bp, Homo sapiens
tgaaatagaaaatca

SEQ ID NO: 1669872 - DNA, 15 bp, Homo sapiens
ctgaaatagaaaatc

SEQ ID NO: 1669873 - DNA, 15 bp, Homo sapiens
actgaaatagaaaat

SEQ ID NO: 1669874 - DNA, 15 bp, Homo sapiens
tactgaaatagaaaa

SEQ ID NO: 1669875 - DNA, 15 bp, Homo sapiens
atactgaaatagaaa

SEQ ID NO: 1669876 - DNA, 15 bp, Homo sapiens
aatactgaaatagaa

SEQ ID NO: 1669877 - DNA, 15 bp, Homo sapiens
taatactgaaataga

SEQ ID NO: 1669878 - DNA, 15 bp, Homo sapiens
ttaatactgaaatag

SEQ ID NO: 1669879 - DNA, 15 bp, Homo sapiens
attaatactgaaata

SEQ ID NO: 1669880 - DNA, 15 bp, Homo sapiens
gattaatactgaaat

SEQ ID NO: 1669881 - DNA, 15 bp, Homo sapiens
agattaatactgaaa

SEQ ID NO: 1669882 - DNA, 15 bp, Homo sapiens
gagattaatactgaa

SEQ ID NO: 1669883 - DNA, 15 bp, Homo sapiens
agagattaatactga

SEQ ID NO: 1669884 - DNA, 15 bp, Homo sapiens
cagagattaatactg

SEQ ID NO: 1669885 - DNA, 15 bp, Homo sapiens
acagagattaatact

SEQ ID NO: 1669886 - DNA, 15 bp, Homo sapiens
aacagagattaatac

SEQ ID NO: 1669887 - DNA, 15 bp, Homo sapiens
caacagagattaata

SEQ ID NO: 1669888 - DNA, 15 bp, Homo sapiens
ccaacagagattaat

SEQ ID NO: 1669889 - DNA, 15 bp, Homo sapiens
gccaacagagattaa

SEQ ID NO: 1669890 - DNA, 15 bp, Homo sapiens
agccaacagagatta

SEQ ID NO: 1669891 - DNA, 15 bp, Homo sapiens
aagccaacagagatt

SEQ ID NO: 1669892 - DNA, 15 bp, Homo sapiens
caagccaacagagat

SEQ ID NO: 1669893 - DNA, 15 bp, Homo sapiens
acaagccaacagaga

SEQ ID NO: 1669894 - DNA, 15 bp, Homo sapiens
tacaagccaacagag

SEQ ID NO: 1669895 - DNA, 15 bp, Homo sapiens
atacaagccaacaga

SEQ ID NO: 1669896 - DNA, 15 bp, Homo sapiens
aatacaagccaacag

SEQ ID NO: 1669897 - DNA, 15 bp, Homo sapiens
aaatacaagccaaca

SEQ ID NO: 1669898 - DNA, 15 bp, Homo sapiens
caaatacaagccaac

SEQ ID NO: 1669899 - DNA, 15 bp, Homo sapiens
acaaatacaagccaa

SEQ ID NO: 1669900 - DNA, 15 bp, Homo sapiens
aacaaatacaagcca

SEQ ID NO: 1669901 - DNA, 15 bp, Homo sapiens
gaacaaatacaagcc

SEQ ID NO: 1669902 - DNA, 15 bp, Homo sapiens
agaacaaatacaagc

SEQ ID NO: 1669903 - DNA, 15 bp, Homo sapiens
gagaacaaatacaag

SEQ ID NO: 1669904 - DNA, 15 bp, Homo sapiens
agagaacaaatacaa

SEQ ID NO: 1669905 - DNA, 15 bp, Homo sapiens
cagagaacaaataca

SEQ ID NO: 1669906 - DNA, 15 bp, Homo sapiens
gcagagaacaaatac

SEQ ID NO: 1669907 - DNA, 15 bp, Homo sapiens
agcagagaacaaata

SEQ ID NO: 1669908 - DNA, 15 bp, Homo sapiens
aagcagagaacaaat

SEQ ID NO: 1669909 - DNA, 15 bp, Homo sapiens
gaagcagagaacaaa

SEQ ID NO: 1669910 - DNA, 15 bp, Homo sapiens
agaagcagagaacaa

SEQ ID NO: 1669911 - DNA, 15 bp, Homo sapiens
aagaagcagagaaca

SEQ ID NO: 1669912 - DNA, 15 bp, Homo sapiens
gaagaagcagagaac

SEQ ID NO: 1669913 - DNA, 15 bp, Homo sapiens
ggaagaagcagagaa

SEQ ID NO: 1669914 - DNA, 15 bp, Homo sapiens
gggaagaagcagaga

SEQ ID NO: 1669915 - DNA, 15 bp, Homo sapiens
agggaagaagcagag

SEQ ID NO: 1669916 - DNA, 15 bp, Homo sapiens
aagggaagaagcaga

SEQ ID NO: 1669917 - DNA, 15 bp, Homo sapiens
aaagggaagaagcag

SEQ ID NO: 1669918 - DNA, 15 bp, Homo sapiens
gaaagggaagaagca

SEQ ID NO: 1669919 - DNA, 15 bp, Homo sapiens
agaaagggaagaagc

SEQ ID NO: 1669920 - DNA, 15 bp, Homo sapiens
tagaaagggaagaag

SEQ ID NO: 1669921 - DNA, 15 bp, Homo sapiens
gtagaaagggaagaa

SEQ ID NO: 1669922 - DNA, 15 bp, Homo sapiens
agtagaaagggaaga

SEQ ID NO: 1669923 - DNA, 15 bp, Homo sapiens
gagtagaaagggaag

SEQ ID NO: 1669924 - DNA, 15 bp, Homo sapiens
tgagtagaaagggaa

SEQ ID NO: 1669925 - DNA, 15 bp, Homo sapiens
gtgagtagaaaggga

SEQ ID NO: 1669926 - DNA, 15 bp, Homo sapiens
ggtgagtagaaaggg

SEQ ID NO: 1669927 - DNA, 15 bp, Homo sapiens
aggtgagtagaaagg

SEQ ID NO: 1669928 - DNA, 15 bp, Homo sapiens
aaggtgagtagaaag

SEQ ID NO: 1669929 - DNA, 15 bp, Homo sapiens
aaaggtgagtagaaa

SEQ ID NO: 1669930 - DNA, 15 bp, Homo sapiens
caaaggtgagtagaa

SEQ ID NO: 1669931 - DNA, 15 bp, Homo sapiens
tcaaaggtgagtaga

SEQ ID NO: 1669932 - DNA, 15 bp, Homo sapiens
ctcaaaggtgagtag

SEQ ID NO: 1669933 - DNA, 15 bp, Homo sapiens
actcaaaggtgagta

SEQ ID NO: 1669934 - DNA, 15 bp, Homo sapiens
tactcaaaggtgagt

SEQ ID NO: 1669935 - DNA, 15 bp, Homo sapiens
atactcaaaggtgag

SEQ ID NO: 1669936 - DNA, 15 bp, Homo sapiens
aatactcaaaggtga

SEQ ID NO: 1669937 - DNA, 15 bp, Homo sapiens
aaatactcaaaggtg

SEQ ID NO: 1669938 - DNA, 15 bp, Homo sapiens
gaaatactcaaaggt

SEQ ID NO: 1669939 - DNA, 15 bp, Homo sapiens
tgaaatactcaaagg

SEQ ID NO: 1669940 - DNA, 15 bp, Homo sapiens
ctgaaatactcaaag

SEQ ID NO: 1669941 - DNA, 15 bp, Homo sapiens
gctgaaatactcaaa

SEQ ID NO: 1669942 - DNA, 15 bp, Homo sapiens
ggctgaaatactcaa

SEQ ID NO: 1669943 - DNA, 15 bp, Homo sapiens
aggctgaaatactca

SEQ ID NO: 1669944 - DNA, 15 bp, Homo sapiens
gaggctgaaatactc

SEQ ID NO: 1669945 - DNA, 15 bp, Homo sapiens
agaggctgaaatact

SEQ ID NO: 1669946 - DNA, 15 bp, Homo sapiens
aagaggctgaaatac

SEQ ID NO: 1669947 - DNA, 15 bp, Homo sapiens
gaagaggctgaaata

SEQ ID NO: 1669948 - DNA, 15 bp, Homo sapiens
tgaagaggctgaaat

SEQ ID NO: 1669949 - DNA, 15 bp, Homo sapiens
atgaagaggctgaaa

SEQ ID NO: 1669950 - DNA, 15 bp, Homo sapiens
catgaagaggctgaa

SEQ ID NO: 1669951 - DNA, 15 bp, Homo sapiens
tcatgaagaggctga

SEQ ID NO: 1669952 - DNA, 15 bp, Homo sapiens
ttcatgaagaggctg

SEQ ID NO: 1669953 - DNA, 15 bp, Homo sapiens
attcatgaagaggct

SEQ ID NO: 1669954 - DNA, 15 bp, Homo sapiens
gattcatgaagaggc

SEQ ID NO: 1669955 - DNA, 15 bp, Homo sapiens
agattcatgaagagg

SEQ ID NO: 1669956 - DNA, 15 bp, Homo sapiens
tagattcatgaagag

SEQ ID NO: 1669957 - DNA, 15 bp, Homo sapiens
atagattcatgaaga

SEQ ID NO: 1669958 - DNA, 15 bp, Homo sapiens
gatagattcatgaag

SEQ ID NO: 1669959 - DNA, 15 bp, Homo sapiens
agatagattcatgaa

SEQ ID NO: 1669960 - DNA, 15 bp, Homo sapiens
gagatagattcatga

SEQ ID NO: 1669961 - DNA, 15 bp, Homo sapiens
ggagatagattcatg

SEQ ID NO: 1669962 - DNA, 15 bp, Homo sapiens
gggagatagattcat

SEQ ID NO: 1669963 - DNA, 15 bp, Homo sapiens
agggagatagattca

SEQ ID NO: 1669964 - DNA, 15 bp, Homo sapiens
gagggagatagattc

SEQ ID NO: 1669965 - DNA, 15 bp, Homo sapiens
agagggagatagatt

SEQ ID NO: 1669966 - DNA, 15 bp, Homo sapiens
gagagggagatagat

SEQ ID NO: 1669967 - DNA, 15 bp, Homo sapiens
agagagggagataga

SEQ ID NO: 1669968 - DNA, 15 bp, Homo sapiens
aagagagggagatag

SEQ ID NO: 1669969 - DNA, 15 bp, Homo sapiens
aaagagagggagata

SEQ ID NO: 1669970 - DNA, 15 bp, Homo sapiens
caaagagagggagat

SEQ ID NO: 1669971 - DNA, 15 bp, Homo sapiens
tcaaagagagggaga

SEQ ID NO: 1669972 - DNA, 15 bp, Homo sapiens
atcaaagagagggag

SEQ ID NO: 1669973 - DNA, 15 bp, Homo sapiens
aatcaaagagaggga

SEQ ID NO: 1669974 - DNA, 15 bp, Homo sapiens
aaatcaaagagaggg

SEQ ID NO: 1669975 - DNA, 15 bp, Homo sapiens
gaaatcaaagagagg

SEQ ID NO: 1669976 - DNA, 15 bp, Homo sapiens
tgaaatcaaagagag

SEQ ID NO: 1669977 - DNA, 15 bp, Homo sapiens
atgaaatcaaagaga

SEQ ID NO: 1669978 - DNA, 15 bp, Homo sapiens
catgaaatcaaagag

SEQ ID NO: 1669979 - DNA, 15 bp, Homo sapiens
acatgaaatcaaaga

SEQ ID NO: 1669980 - DNA, 15 bp, Homo sapiens
tacatgaaatcaaag

SEQ ID NO: 1669981 - DNA, 15 bp, Homo sapiens
ttacatgaaatcaaa

SEQ ID NO: 1669982 - DNA, 15 bp, Homo sapiens
attacatgaaatcaa

SEQ ID NO: 1669983 - DNA, 15 bp, Homo sapiens
gattacatgaaatca

SEQ ID NO: 1669984 - DNA, 15 bp, Homo sapiens
agattacatgaaatc

SEQ ID NO: 1669985 - DNA, 15 bp, Homo sapiens
gagattacatgaaat

SEQ ID NO: 1669986 - DNA, 15 bp, Homo sapiens
agagattacatgaaa

SEQ ID NO: 1669987 - DNA, 15 bp, Homo sapiens
gagagattacatgaa

SEQ ID NO: 1669988 - DNA, 15 bp, Homo sapiens
ggagagattacatga

SEQ ID NO: 1669989 - DNA, 15 bp, Homo sapiens
aggagagattacatg

SEQ ID NO: 1669990 - DNA, 15 bp, Homo sapiens
aaggagagattacat

SEQ ID NO: 1669991 - DNA, 15 bp, Homo sapiens
taaggagagattaca

SEQ ID NO: 1669992 - DNA, 15 bp, Homo sapiens
ttaaggagagattac

SEQ ID NO: 1669993 - DNA, 15 bp, Homo sapiens
tttaaggagagatta

SEQ ID NO: 1669994 - DNA, 15 bp, Homo sapiens
atttaaggagagatt

SEQ ID NO: 1669995 - DNA, 15 bp, Homo sapiens
tatttaaggagagat

SEQ ID NO: 1669996 - DNA, 15 bp, Homo sapiens
atatttaaggagaga

SEQ ID NO: 1669997 - DNA, 15 bp, Homo sapiens
aatatttaaggagag

SEQ ID NO: 1669998 - DNA, 15 bp, Homo sapiens
aaatatttaaggaga

SEQ ID NO: 1669999 - DNA, 15 bp, Homo sapiens
gaaatatttaaggag

SEQ ID NO: 1670000 - DNA, 15 bp, Homo sapiens
agaaatatttaagga

SEQ ID NO: 1670001 - DNA, 15 bp, Homo sapiens
aagaaatatttaagg

SEQ ID NO: 1670002 - DNA, 15 bp, Homo sapiens
aaagaaatatttaag

SEQ ID NO: 1670003 - DNA, 15 bp, Homo sapiens
caaagaaatatttaa

SEQ ID NO: 1670004 - DNA, 15 bp, Homo sapiens
gcaaagaaatattta

SEQ ID NO: 1670005 - DNA, 15 bp, Homo sapiens
tgcaaagaaatattt

SEQ ID NO: 1670006 - DNA, 15 bp, Homo sapiens
atgcaaagaaatatt

SEQ ID NO: 1670007 - DNA, 15 bp, Homo sapiens
tatgcaaagaaatat

SEQ ID NO: 1670008 - DNA, 15 bp, Homo sapiens
atatgcaaagaaata

SEQ ID NO: 1670009 - DNA, 15 bp, Homo sapiens
catatgcaaagaaat

SEQ ID NO: 1670010 - DNA, 15 bp, Homo sapiens
acatatgcaaagaaa

SEQ ID NO: 1670011 - DNA, 15 bp, Homo sapiens
cacatatgcaaagaa

SEQ ID NO: 1670012 - DNA, 15 bp, Homo sapiens
ccacatatgcaaaga

SEQ ID NO: 1670013 - DNA, 15 bp, Homo sapiens
cccacatatgcaaag

SEQ ID NO: 1670014 - DNA, 15 bp, Homo sapiens
aggtaaaagctgtga

SEQ ID NO: 1670015 - DNA, 15 bp, Homo sapiens
taggtaaaagctgtg

SEQ ID NO: 1670016 - DNA, 15 bp, Homo sapiens
ataggtaaaagctgt

SEQ ID NO: 1670017 - DNA, 15 bp, Homo sapiens
aataggtaaaagctg

SEQ ID NO: 1670018 - DNA, 15 bp, Homo sapiens
aaataggtaaaagct

SEQ ID NO: 1670019 - DNA, 15 bp, Homo sapiens
caaataggtaaaagc

SEQ ID NO: 1670020 - DNA, 15 bp, Homo sapiens
acaaataggtaaaag

SEQ ID NO: 1670021 - DNA, 15 bp, Homo sapiens
aacaaataggtaaaa

SEQ ID NO: 1670022 - DNA, 15 bp, Homo sapiens
taacaaataggtaaa

SEQ ID NO: 1670023 - DNA, 15 bp, Homo sapiens
ctaacaaataggtaa

SEQ ID NO: 1670024 - DNA, 15 bp, Homo sapiens
cctaacaaataggta

SEQ ID NO: 1670025 - DNA, 15 bp, Homo sapiens
gcctaacaaataggt

SEQ ID NO: 1670026 - DNA, 15 bp, Homo sapiens
agcctaacaaatagg

SEQ ID NO: 1670027 - DNA, 15 bp, Homo sapiens
tagcctaacaaatag

SEQ ID NO: 1670028 - DNA, 15 bp, Homo sapiens
atagcctaacaaata

SEQ ID NO: 1670029 - DNA, 15 bp, Homo sapiens
tatagcctaacaaat

SEQ ID NO: 1670030 - DNA, 15 bp, Homo sapiens
ctatagcctaacaaa

SEQ ID NO: 1670031 - DNA, 15 bp, Homo sapiens
actatagcctaacaa

SEQ ID NO: 1670032 - DNA, 15 bp, Homo sapiens
cactatagcctaaca

SEQ ID NO: 1670033 - DNA, 15 bp, Homo sapiens
acactatagcctaac

SEQ ID NO: 1670034 - DNA, 15 bp, Homo sapiens
aacactatagcctaa

SEQ ID NO: 1670035 - DNA, 15 bp, Homo sapiens
aaacactatagccta

SEQ ID NO: 1670036 - DNA, 15 bp, Homo sapiens
aaaacactatagcct

SEQ ID NO: 1670037 - DNA, 15 bp, Homo sapiens
caaaacactatagcc

SEQ ID NO: 1670038 - DNA, 15 bp, Homo sapiens
acaaaacactatagc

SEQ ID NO: 1670039 - DNA, 15 bp, Homo sapiens
tacaaaacactatag

SEQ ID NO: 1670040 - DNA, 15 bp, Homo sapiens
ttacaaaacactata

SEQ ID NO: 1670041 - DNA, 15 bp, Homo sapiens
tttacaaaacactat

SEQ ID NO: 1670042 - DNA, 15 bp, Homo sapiens
gtttacaaaacacta

SEQ ID NO: 1670043 - DNA, 15 bp, Homo sapiens
agtttacaaaacact

SEQ ID NO: 1670044 - DNA, 15 bp, Homo sapiens
aagtttacaaaacac

SEQ ID NO: 1670045 - DNA, 15 bp, Homo sapiens
gaagtttacaaaaca

SEQ ID NO: 1670046 - DNA, 15 bp, Homo sapiens
agaagtttacaaaac

SEQ ID NO: 1670047 - DNA, 15 bp, Homo sapiens
cagaagtttacaaaa

SEQ ID NO: 1670048 - DNA, 15 bp, Homo sapiens
acagaagtttacaaa

SEQ ID NO: 1670049 - DNA, 15 bp, Homo sapiens
aacagaagtttacaa

SEQ ID NO: 1670050 - DNA, 15 bp, Homo sapiens
aaacagaagtttaca

SEQ ID NO: 1670051 - DNA, 15 bp, Homo sapiens
gaaacagaagtttac

SEQ ID NO: 1670052 - DNA, 15 bp, Homo sapiens
agaaacagaagttta

SEQ ID NO: 1670053 - DNA, 15 bp, Homo sapiens
tagaaacagaagttt

SEQ ID NO: 1670054 - DNA, 15 bp, Homo sapiens
atagaaacagaagtt

SEQ ID NO: 1670055 - DNA, 15 bp, Homo sapiens
aatagaaacagaagt

SEQ ID NO: 1670056 - DNA, 15 bp, Homo sapiens
gaatagaaacagaag

SEQ ID NO: 1670057 - DNA, 15 bp, Homo sapiens
tgaatagaaacagaa

SEQ ID NO: 1670058 - DNA, 15 bp, Homo sapiens
gtgaatagaaacaga

SEQ ID NO: 1670059 - DNA, 15 bp, Homo sapiens
tgtgaatagaaacag

SEQ ID NO: 1670060 - DNA, 15 bp, Homo sapiens
atgtgaatagaaaca

SEQ ID NO: 1670061 - DNA, 15 bp, Homo sapiens
gatgtgaatagaaac

SEQ ID NO: 1670062 - DNA, 15 bp, Homo sapiens
agatgtgaatagaaa

SEQ ID NO: 1670063 - DNA, 15 bp, Homo sapiens
aagatgtgaatagaa

SEQ ID NO: 1670064 - DNA, 15 bp, Homo sapiens
gaagatgtgaataga

SEQ ID NO: 1670065 - DNA, 15 bp, Homo sapiens
agaagatgtgaatag

SEQ ID NO: 1670066 - DNA, 15 bp, Homo sapiens
gagaagatgtgaata

SEQ ID NO: 1670067 - DNA, 15 bp, Homo sapiens
ggagaagatgtgaat

SEQ ID NO: 1670068 - DNA, 15 bp, Homo sapiens
tggagaagatgtgaa

SEQ ID NO: 1670069 - DNA, 15 bp, Homo sapiens
gtggagaagatgtga

SEQ ID NO: 1670070 - DNA, 15 bp, Homo sapiens
agtggagaagatgtg

SEQ ID NO: 1670071 - DNA, 15 bp, Homo sapiens
aagtggagaagatgt

SEQ ID NO: 1670072 - DNA, 15 bp, Homo sapiens
caagtggagaagatg

SEQ ID NO: 1670073 - DNA, 15 bp, Homo sapiens
tcaagtggagaagat

SEQ ID NO: 1670074 - DNA, 15 bp, Homo sapiens
ctcaagtggagaaga

SEQ ID NO: 1670075 - DNA, 15 bp, Homo sapiens
tctcaagtggagaag

SEQ ID NO: 1670076 - DNA, 15 bp, Homo sapiens
ctctcaagtggagaa

SEQ ID NO: 1670077 - DNA, 15 bp, Homo sapiens
tctctcaagtggaga

SEQ ID NO: 1670078 - DNA, 15 bp, Homo sapiens
ctctctcaagtggag

SEQ ID NO: 1670079 - DNA, 15 bp, Homo sapiens
tctctctcaagtgga

SEQ ID NO: 1670080 - DNA, 15 bp, Homo sapiens
gtctctctcaagtgg

SEQ ID NO: 1670081 - DNA, 15 bp, Homo sapiens
tgtctctctcaagtg

SEQ ID NO: 1670082 - DNA, 15 bp, Homo sapiens
gtgtctctctcaagt

SEQ ID NO: 1670083 - DNA, 15 bp, Homo sapiens
ggtgtctctctcaag

SEQ ID NO: 1670084 - DNA, 15 bp, Homo sapiens
tggtgtctctctcaa

SEQ ID NO: 1670085 - DNA, 15 bp, Homo sapiens
ttggtgtctctctca

SEQ ID NO: 1670086 - DNA, 15 bp, Homo sapiens
tttggtgtctctctc

SEQ ID NO: 1670087 - DNA, 15 bp, Homo sapiens
ttttggtgtctctct

SEQ ID NO: 1670088 - DNA, 15 bp, Homo sapiens
attttggtgtctctc

SEQ ID NO: 1670089 - DNA, 15 bp, Homo sapiens
gattttggtgtctct

SEQ ID NO: 1670090 - DNA, 15 bp, Homo sapiens
ggattttggtgtctc

SEQ ID NO: 1670091 - DNA, 15 bp, Homo sapiens
tggattttggtgtct

SEQ ID NO: 1670092 - DNA, 15 bp, Homo sapiens
ctggattttggtgtc

SEQ ID NO: 1670093 - DNA, 15 bp, Homo sapiens
actggattttggtgt

SEQ ID NO: 1670094 - DNA, 15 bp, Homo sapiens
gactggattttggtg

SEQ ID NO: 1670095 - DNA, 15 bp, Homo sapiens
tgactggattttggt

SEQ ID NO: 1670096 - DNA, 15 bp, Homo sapiens
ctgactggattttgg

SEQ ID NO: 1670097 - DNA, 15 bp, Homo sapiens
actgactggattttg

SEQ ID NO: 1670098 - DNA, 15 bp, Homo sapiens
tactgactggatttt

SEQ ID NO: 1670099 - DNA, 15 bp, Homo sapiens
atactgactggattt

SEQ ID NO: 1670100 - DNA, 15 bp, Homo sapiens
gatactgactggatt

SEQ ID NO: 1670101 - DNA, 15 bp, Homo sapiens
agatactgactggat

SEQ ID NO: 1670102 - DNA, 15 bp, Homo sapiens
tagatactgactgga

SEQ ID NO: 1670103 - DNA, 15 bp, Homo sapiens
ttagatactgactgg

SEQ ID NO: 1670104 - DNA, 15 bp, Homo sapiens
attagatactgactg

SEQ ID NO: 1670105 - DNA, 15 bp, Homo sapiens
gattagatactgact

SEQ ID NO: 1670106 - DNA, 15 bp, Homo sapiens
agattagatactgac

SEQ ID NO: 1670107 - DNA, 15 bp, Homo sapiens
cagattagatactga

SEQ ID NO: 1670108 - DNA, 15 bp, Homo sapiens
ccagattagatactg

SEQ ID NO: 1670109 - DNA, 15 bp, Homo sapiens
gccagattagatact

SEQ ID NO: 1670110 - DNA, 15 bp, Homo sapiens
agccagattagatac

SEQ ID NO: 1670111 - DNA, 15 bp, Homo sapiens
aagccagattagata

SEQ ID NO: 1670112 - DNA, 15 bp, Homo sapiens
aaagccagattagat

SEQ ID NO: 1670113 - DNA, 15 bp, Homo sapiens
aaaagccagattaga

SEQ ID NO: 1670114 - DNA, 15 bp, Homo sapiens
caaaagccagattag

SEQ ID NO: 1670115 - DNA, 15 bp, Homo sapiens
acaaaagccagatta

SEQ ID NO: 1670116 - DNA, 15 bp, Homo sapiens
aacaaaagccagatt

SEQ ID NO: 1670117 - DNA, 15 bp, Homo sapiens
taacaaaagccagat

SEQ ID NO: 1670118 - DNA, 15 bp, Homo sapiens
ttaacaaaagccaga

SEQ ID NO: 1670119 - DNA, 15 bp, Homo sapiens
gttaacaaaagccag

SEQ ID NO: 1670120 - DNA, 15 bp, Homo sapiens
agttaacaaaagcca

SEQ ID NO: 1670121 - DNA, 15 bp, Homo sapiens
aagttaacaaaagcc

SEQ ID NO: 1670122 - DNA, 15 bp, Homo sapiens
gaagttaacaaaagc

SEQ ID NO: 1670123 - DNA, 15 bp, Homo sapiens
ggaagttaacaaaag

SEQ ID NO: 1670124 - DNA, 15 bp, Homo sapiens
gggaagttaacaaaa

SEQ ID NO: 1670125 - DNA, 15 bp, Homo sapiens
agggaagttaacaaa

SEQ ID NO: 1670126 - DNA, 15 bp, Homo sapiens
gagggaagttaacaa

SEQ ID NO: 1670127 - DNA, 15 bp, Homo sapiens
tgagggaagttaaca

SEQ ID NO: 1670128 - DNA, 15 bp, Homo sapiens
ctgagggaagttaac

SEQ ID NO: 1670129 - DNA, 15 bp, Homo sapiens
cctgagggaagttaa

SEQ ID NO: 1670130 - DNA, 15 bp, Homo sapiens
tcctgagggaagtta

SEQ ID NO: 1670131 - DNA, 15 bp, Homo sapiens
ctcctgagggaagtt

SEQ ID NO: 1670132 - DNA, 15 bp, Homo sapiens
gctcctgagggaagt

SEQ ID NO: 1670133 - DNA, 15 bp, Homo sapiens
tgctcctgagggaag

SEQ ID NO: 1670134 - DNA, 15 bp, Homo sapiens
ctgctcctgagggaa

SEQ ID NO: 1670135 - DNA, 15 bp, Homo sapiens
tctgctcctgaggga

SEQ ID NO: 1670136 - DNA, 15 bp, Homo sapiens
gtctgctcctgaggg

SEQ ID NO: 1670137 - DNA, 15 bp, Homo sapiens
tgtctgctcctgagg

SEQ ID NO: 1670138 - DNA, 15 bp, Homo sapiens
atgtctgctcctgag

SEQ ID NO: 1670139 - DNA, 15 bp, Homo sapiens
aatgtctgctcctga

SEQ ID NO: 1670140 - DNA, 15 bp, Homo sapiens
gaatgtctgctcctg

SEQ ID NO: 1670141 - DNA, 15 bp, Homo sapiens
tgaatgtctgctcct

SEQ ID NO: 1670142 - DNA, 15 bp, Homo sapiens
atgaatgtctgctcc

SEQ ID NO: 1670143 - DNA, 15 bp, Homo sapiens
tatgaatgtctgctc

SEQ ID NO: 1670144 - DNA, 15 bp, Homo sapiens
atatgaatgtctgct

SEQ ID NO: 1670145 - DNA, 15 bp, Homo sapiens
tatatgaatgtctgc

SEQ ID NO: 1670146 - DNA, 15 bp, Homo sapiens
ctatatgaatgtctg

SEQ ID NO: 1670147 - DNA, 15 bp, Homo sapiens
cctatatgaatgtct

SEQ ID NO: 1670148 - DNA, 15 bp, Homo sapiens
acctatatgaatgtc

SEQ ID NO: 1670149 - DNA, 15 bp, Homo sapiens
cacctatatgaatgt

SEQ ID NO: 1670150 - DNA, 15 bp, Homo sapiens
tcacctatatgaatg

SEQ ID NO: 1670151 - DNA, 15 bp, Homo sapiens
atcacctatatgaat

SEQ ID NO: 1670152 - DNA, 15 bp, Homo sapiens
tatcacctatatgaa

SEQ ID NO: 1670153 - DNA, 15 bp, Homo sapiens
gtatcacctatatga

SEQ ID NO: 1670154 - DNA, 15 bp, Homo sapiens
agtatcacctatatg

SEQ ID NO: 1670155 - DNA, 15 bp, Homo sapiens
cagtatcacctatat

SEQ ID NO: 1670156 - DNA, 15 bp, Homo sapiens
acagtatcacctata

SEQ ID NO: 1670157 - DNA, 15 bp, Homo sapiens
tacagtatcacctat

SEQ ID NO: 1670158 - DNA, 15 bp, Homo sapiens
atacagtatcaccta

SEQ ID NO: 1670159 - DNA, 15 bp, Homo sapiens
aatacagtatcacct

SEQ ID NO: 1670160 - DNA, 15 bp, Homo sapiens
aaatacagtatcacc

SEQ ID NO: 1670161 - DNA, 15 bp, Homo sapiens
gaaatacagtatcac

SEQ ID NO: 1670162 - DNA, 15 bp, Homo sapiens
tgaaatacagtatca

SEQ ID NO: 1670163 - DNA, 15 bp, Homo sapiens
ctgaaatacagtatc

SEQ ID NO: 1670164 - DNA, 15 bp, Homo sapiens
actgaaatacagtat

SEQ ID NO: 1670165 - DNA, 15 bp, Homo sapiens
gactgaaatacagta

SEQ ID NO: 1670166 - DNA, 15 bp, Homo sapiens
ggactgaaatacagt

SEQ ID NO: 1670167 - DNA, 15 bp, Homo sapiens
aggactgaaatacag

SEQ ID NO: 1670168 - DNA, 15 bp, Homo sapiens
aaggactgaaataca

SEQ ID NO: 1670169 - DNA, 15 bp, Homo sapiens
aaaggactgaaatac

SEQ ID NO: 1670170 - DNA, 15 bp, Homo sapiens
gaaaggactgaaata

SEQ ID NO: 1670171 - DNA, 15 bp, Homo sapiens
agaaaggactgaaat

SEQ ID NO: 1670172 - DNA, 15 bp, Homo sapiens
aagaaaggactgaaa

SEQ ID NO: 1670173 - DNA, 15 bp, Homo sapiens
aaagaaaggactgaa

SEQ ID NO: 1670174 - DNA, 15 bp, Homo sapiens
aaaagaaaggactga

SEQ ID NO: 1670175 - DNA, 15 bp, Homo sapiens
caaaagaaaggactg

SEQ ID NO: 1670176 - DNA, 15 bp, Homo sapiens
tcaaaagaaaggact

SEQ ID NO: 1670177 - DNA, 15 bp, Homo sapiens
gtcaaaagaaaggac

SEQ ID NO: 1670178 - DNA, 15 bp, Homo sapiens
ggtcaaaagaaagga

SEQ ID NO: 1670179 - DNA, 15 bp, Homo sapiens
gggtcaaaagaaagg

SEQ ID NO: 1670180 - DNA, 15 bp, Homo sapiens
ggggtcaaaagaaag

SEQ ID NO: 1670181 - DNA, 15 bp, Homo sapiens
tggggtcaaaagaaa

SEQ ID NO: 1670182 - DNA, 15 bp, Homo sapiens
ctggggtcaaaagaa

SEQ ID NO: 1670183 - DNA, 15 bp, Homo sapiens
tctggggtcaaaaga

SEQ ID NO: 1670184 - DNA, 15 bp, Homo sapiens
ttctggggtcaaaag

SEQ ID NO: 1670185 - DNA, 15 bp, Homo sapiens
cttctggggtcaaaa

SEQ ID NO: 1670186 - DNA, 15 bp, Homo sapiens
gcttctggggtcaaa

SEQ ID NO: 1670187 - DNA, 15 bp, Homo sapiens
ggcttctggggtcaa

SEQ ID NO: 1670188 - DNA, 15 bp, Homo sapiens
gggcttctggggtca

SEQ ID NO: 1670189 - DNA, 15 bp, Homo sapiens
agggcttctggggtc

SEQ ID NO: 1670190 - DNA, 15 bp, Homo sapiens
tagggcttctggggt

SEQ ID NO: 1670191 - DNA, 15 bp, Homo sapiens
ctagggcttctgggg

SEQ ID NO: 1670192 - DNA, 15 bp, Homo sapiens
tctagggcttctggg

SEQ ID NO: 1670193 - DNA, 15 bp, Homo sapiens
gtctagggcttctgg

SEQ ID NO: 1670194 - DNA, 15 bp, Homo sapiens
agtctagggcttctg

SEQ ID NO: 1670195 - DNA, 15 bp, Homo sapiens
cagtctagggcttct

SEQ ID NO: 1670196 - DNA, 15 bp, Homo sapiens
tcagtctagggcttc

SEQ ID NO: 1670197 - DNA, 15 bp, Homo sapiens
ctcagtctagggctt

SEQ ID NO: 1670198 - DNA, 15 bp, Homo sapiens
tctcagtctagggct

SEQ ID NO: 1670199 - DNA, 15 bp, Homo sapiens
ttctcagtctagggc

SEQ ID NO: 1670200 - DNA, 15 bp, Homo sapiens
cttctcagtctaggg

SEQ ID NO: 1670201 - DNA, 15 bp, Homo sapiens
tcttctcagtctagg

SEQ ID NO: 1670202 - DNA, 15 bp, Homo sapiens
atcttctcagtctag

SEQ ID NO: 1670203 - DNA, 15 bp, Homo sapiens
tatcttctcagtcta

SEQ ID NO: 1670204 - DNA, 15 bp, Homo sapiens
ttatcttctcagtct

SEQ ID NO: 1670205 - DNA, 15 bp, Homo sapiens
tttatcttctcagtc

SEQ ID NO: 1670206 - DNA, 15 bp, Homo sapiens
ttttatcttctcagt

SEQ ID NO: 1670207 - DNA, 15 bp, Homo sapiens
attttatcttctcag

SEQ ID NO: 1670208 - DNA, 15 bp, Homo sapiens
cattttatcttctca

SEQ ID NO: 1670209 - DNA, 15 bp, Homo sapiens
ccattttatcttctc

SEQ ID NO: 1670210 - DNA, 15 bp, Homo sapiens
accattttatcttct

SEQ ID NO: 1670211 - DNA, 15 bp, Homo sapiens
gaccattttatcttc

SEQ ID NO: 1670212 - DNA, 15 bp, Homo sapiens
tgaccattttatctt

SEQ ID NO: 1670213 - DNA, 15 bp, Homo sapiens
ctgaccattttatct

SEQ ID NO: 1670214 - DNA, 15 bp, Homo sapiens
cctgaccattttatc

SEQ ID NO: 1670215 - DNA, 15 bp, Homo sapiens
acctgaccattttat

SEQ ID NO: 1670216 - DNA, 15 bp, Homo sapiens
aacctgaccatttta

SEQ ID NO: 1670217 - DNA, 15 bp, Homo sapiens
caacctgaccatttt

SEQ ID NO: 1670218 - DNA, 15 bp, Homo sapiens
acaacctgaccattt

SEQ ID NO: 1670219 - DNA, 15 bp, Homo sapiens
aacaacctgaccatt

SEQ ID NO: 1670220 - DNA, 15 bp, Homo sapiens
caacaacctgaccat

SEQ ID NO: 1670221 - DNA, 15 bp, Homo sapiens
ccaacaacctgacca

SEQ ID NO: 1670222 - DNA, 15 bp, Homo sapiens
cccaacaacctgacc

SEQ ID NO: 1670223 - DNA, 15 bp, Homo sapiens
ccccaacaacctgac

SEQ ID NO: 1670224 - DNA, 15 bp, Homo sapiens
tccccaacaacctga

SEQ ID NO: 1670225 - DNA, 15 bp, Homo sapiens
ttccccaacaacctg

SEQ ID NO: 1670226 - DNA, 15 bp, Homo sapiens
tttccccaacaacct

SEQ ID NO: 1670227 - DNA, 15 bp, Homo sapiens
ttttccccaacaacc

SEQ ID NO: 1670228 - DNA, 15 bp, Homo sapiens
tttttccccaacaac

SEQ ID NO: 1670229 - DNA, 15 bp, Homo sapiens
ttttttccccaacaa

SEQ ID NO: 1670230 - DNA, 15 bp, Homo sapiens
tttttttccccaaca

SEQ ID NO: 1670231 - DNA, 15 bp, Homo sapiens
ttttttttccccaac

SEQ ID NO: 1670232 - DNA, 15 bp, Homo sapiens
cttttttttccccaa

SEQ ID NO: 1670233 - DNA, 15 bp, Homo sapiens
acttttttttcccca

SEQ ID NO: 1670234 - DNA, 15 bp, Homo sapiens
cacttttttttcccc

SEQ ID NO: 1670235 - DNA, 15 bp, Homo sapiens
gcacttttttttccc

SEQ ID NO: 1670236 - DNA, 15 bp, Homo sapiens
ggcacttttttttcc

SEQ ID NO: 1670237 - DNA, 15 bp, Homo sapiens
tggcacttttttttc

SEQ ID NO: 1670238 - DNA, 15 bp, Homo sapiens
ctggcactttttttt

SEQ ID NO: 1670239 - DNA, 15 bp, Homo sapiens
cctggcacttttttt

SEQ ID NO: 1670240 - DNA, 15 bp, Homo sapiens
gcctggcactttttt

SEQ ID NO: 1670241 - DNA, 15 bp, Homo sapiens
agcctggcacttttt

SEQ ID NO: 1670242 - DNA, 15 bp, Homo sapiens
gagcctggcactttt

SEQ ID NO: 1670243 - DNA, 15 bp, Homo sapiens
agagcctggcacttt

SEQ ID NO: 1670244 - DNA, 15 bp, Homo sapiens
gagagcctggcactt

SEQ ID NO: 1670245 - DNA, 15 bp, Homo sapiens
agagagcctggcact

SEQ ID NO: 1670246 - DNA, 15 bp, Homo sapiens
tagagagcctggcac

SEQ ID NO: 1670247 - DNA, 15 bp, Homo sapiens
ctagagagcctggca

SEQ ID NO: 1670248 - DNA, 15 bp, Homo sapiens
tctagagagcctggc

SEQ ID NO: 1670249 - DNA, 15 bp, Homo sapiens
ctctagagagcctgg

SEQ ID NO: 1670250 - DNA, 15 bp, Homo sapiens
tctctagagagcctg

SEQ ID NO: 1670251 - DNA, 15 bp, Homo sapiens
ttctctagagagcct

SEQ ID NO: 1670252 - DNA, 15 bp, Homo sapiens
tttctctagagagcc

SEQ ID NO: 1670253 - DNA, 15 bp, Homo sapiens
ttttctctagagagc

SEQ ID NO: 1670254 - DNA, 15 bp, Homo sapiens
tttttctctagagag

SEQ ID NO: 1670255 - DNA, 15 bp, Homo sapiens
atttttctctagaga

SEQ ID NO: 1670256 - DNA, 15 bp, Homo sapiens
catttttctctagag

SEQ ID NO: 1670257 - DNA, 15 bp, Homo sapiens
acatttttctctaga

SEQ ID NO: 1670258 - DNA, 15 bp, Homo sapiens
cacatttttctctag

SEQ ID NO: 1670259 - DNA, 15 bp, Homo sapiens
tcacatttttctcta

SEQ ID NO: 1670260 - DNA, 15 bp, Homo sapiens
ttcacatttttctct

SEQ ID NO: 1670261 - DNA, 15 bp, Homo sapiens
cttcacatttttctc

SEQ ID NO: 1670262 - DNA, 15 bp, Homo sapiens
tcttcacatttttct

SEQ ID NO: 1670263 - DNA, 15 bp, Homo sapiens
ctcttcacatttttc

SEQ ID NO: 1670264 - DNA, 15 bp, Homo sapiens
tctcttcacattttt

SEQ ID NO: 1670265 - DNA, 15 bp, Homo sapiens
atctcttcacatttt

SEQ ID NO: 1670266 - DNA, 15 bp, Homo sapiens
catctcttcacattt

SEQ ID NO: 1670267 - DNA, 15 bp, Homo sapiens
gcatctcttcacatt

SEQ ID NO: 1670268 - DNA, 15 bp, Homo sapiens
agcatctcttcacat

SEQ ID NO: 1670269 - DNA, 15 bp, Homo sapiens
gagcatctcttcaca

SEQ ID NO: 1670270 - DNA, 15 bp, Homo sapiens
ggagcatctcttcac

SEQ ID NO: 1670271 - DNA, 15 bp, Homo sapiens
tggagcatctcttca

SEQ ID NO: 1670272 - DNA, 15 bp, Homo sapiens
ctggagcatctcttc

SEQ ID NO: 1670273 - DNA, 15 bp, Homo sapiens
cctggagcatctctt

SEQ ID NO: 1670274 - DNA, 15 bp, Homo sapiens
gcctggagcatctct

SEQ ID NO: 1670275 - DNA, 15 bp, Homo sapiens
ggcctggagcatctc

SEQ ID NO: 1670276 - DNA, 15 bp, Homo sapiens
tggcctggagcatct

SEQ ID NO: 1670277 - DNA, 15 bp, Homo sapiens
ttggcctggagcatc

SEQ ID NO: 1670278 - DNA, 15 bp, Homo sapiens
attggcctggagcat

SEQ ID NO: 1670279 - DNA, 15 bp, Homo sapiens
cattggcctggagca

SEQ ID NO: 1670280 - DNA, 15 bp, Homo sapiens
tcattggcctggagc

SEQ ID NO: 1670281 - DNA, 15 bp, Homo sapiens
ctcattggcctggag

SEQ ID NO: 1670282 - DNA, 15 bp, Homo sapiens
tctcattggcctgga

SEQ ID NO: 1670283 - DNA, 15 bp, Homo sapiens
ttctcattggcctgg

SEQ ID NO: 1670284 - DNA, 15 bp, Homo sapiens
cttctcattggcctg

SEQ ID NO: 1670285 - DNA, 15 bp, Homo sapiens
tcttctcattggcct

SEQ ID NO: 1670286 - DNA, 15 bp, Homo sapiens
ttcttctcattggcc

SEQ ID NO: 1670287 - DNA, 15 bp, Homo sapiens
attcttctcattggc

SEQ ID NO: 1670288 - DNA, 15 bp, Homo sapiens
aattcttctcattgg

SEQ ID NO: 1670289 - DNA, 15 bp, Homo sapiens
taattcttctcattg

SEQ ID NO: 1670290 - DNA, 15 bp, Homo sapiens
ctaattcttctcatt

SEQ ID NO: 1670291 - DNA, 15 bp, Homo sapiens
tctaattcttctcat

SEQ ID NO: 1670292 - DNA, 15 bp, Homo sapiens
gtctaattcttctca

SEQ ID NO: 1670293 - DNA, 15 bp, Homo sapiens
tgtctaattcttctc

SEQ ID NO: 1670294 - DNA, 15 bp, Homo sapiens
ttgtctaattcttct

SEQ ID NO: 1670295 - DNA, 15 bp, Homo sapiens
cttgtctaattcttc

SEQ ID NO: 1670296 - DNA, 15 bp, Homo sapiens
tcttgtctaattctt

SEQ ID NO: 1670297 - DNA, 15 bp, Homo sapiens
ttcttgtctaattct

SEQ ID NO: 1670298 - DNA, 15 bp, Homo sapiens
tttcttgtctaattc

SEQ ID NO: 1670299 - DNA, 15 bp, Homo sapiens
atttcttgtctaatt

SEQ ID NO: 1670300 - DNA, 15 bp, Homo sapiens
tatttcttgtctaat

SEQ ID NO: 1670301 - DNA, 15 bp, Homo sapiens
gtatttcttgtctaa

SEQ ID NO: 1670302 - DNA, 15 bp, Homo sapiens
tgtatttcttgtcta

SEQ ID NO: 1670303 - DNA, 15 bp, Homo sapiens
gtgtatttcttgtct

SEQ ID NO: 1670304 - DNA, 15 bp, Homo sapiens
tgtgtatttcttgtc

SEQ ID NO: 1670305 - DNA, 15 bp, Homo sapiens
ctgtgtatttcttgt

SEQ ID NO: 1670306 - DNA, 15 bp, Homo sapiens
tctgtgtatttcttg

SEQ ID NO: 1670307 - DNA, 15 bp, Homo sapiens
atctgtgtatttctt

SEQ ID NO: 1670308 - DNA, 15 bp, Homo sapiens
catctgtgtatttct

SEQ ID NO: 1670309 - DNA, 15 bp, Homo sapiens
acatctgtgtatttc

SEQ ID NO: 1670310 - DNA, 15 bp, Homo sapiens
cacatctgtgtattt

SEQ ID NO: 1670311 - DNA, 15 bp, Homo sapiens
gcacatctgtgtatt

SEQ ID NO: 1670312 - DNA, 15 bp, Homo sapiens
ggcacatctgtgtat

SEQ ID NO: 1670313 - DNA, 15 bp, Homo sapiens
tggcacatctgtgta

SEQ ID NO: 1670314 - DNA, 15 bp, Homo sapiens
ctggcacatctgtgt

SEQ ID NO: 1670315 - DNA, 15 bp, Homo sapiens
tctggcacatctgtg

SEQ ID NO: 1670316 - DNA, 15 bp, Homo sapiens
gtctggcacatctgt

SEQ ID NO: 1670317 - DNA, 15 bp, Homo sapiens
agtctggcacatctg

SEQ ID NO: 1670318 - DNA, 15 bp, Homo sapiens
aagtctggcacatct

SEQ ID NO: 1670319 - DNA, 15 bp, Homo sapiens
gaagtctggcacatc

SEQ ID NO: 1670320 - DNA, 15 bp, Homo sapiens
agaagtctggcacat

SEQ ID NO: 1670321 - DNA, 15 bp, Homo sapiens
cagaagtctggcaca

SEQ ID NO: 1670322 - DNA, 15 bp, Homo sapiens
tcagaagtctggcac

SEQ ID NO: 1670323 - DNA, 15 bp, Homo sapiens
ctcagaagtctggca

SEQ ID NO: 1670324 - DNA, 15 bp, Homo sapiens
tctcagaagtctggc

SEQ ID NO: 1670325 - DNA, 15 bp, Homo sapiens
ttctcagaagtctgg

SEQ ID NO: 1670326 - DNA, 15 bp, Homo sapiens
cttctcagaagtctg

SEQ ID NO: 1670327 - DNA, 15 bp, Homo sapiens
gcttctcagaagtct

SEQ ID NO: 1670328 - DNA, 15 bp, Homo sapiens
tgcttctcagaagtc

SEQ ID NO: 1670329 - DNA, 15 bp, Homo sapiens
gtgcttctcagaagt

SEQ ID NO: 1670330 - DNA, 15 bp, Homo sapiens
ggtgcttctcagaag

SEQ ID NO: 1670331 - DNA, 15 bp, Homo sapiens
aggtgcttctcagaa

SEQ ID NO: 1670332 - DNA, 15 bp, Homo sapiens
caggtgcttctcaga

SEQ ID NO: 1670333 - DNA, 15 bp, Homo sapiens
gcaggtgcttctcag

SEQ ID NO: 1670334 - DNA, 15 bp, Homo sapiens
ggcaggtgcttctca

SEQ ID NO: 1670335 - DNA, 15 bp, Homo sapiens
tggcaggtgcttctc

SEQ ID NO: 1670336 - DNA, 15 bp, Homo sapiens
ctggcaggtgcttct

SEQ ID NO: 1670337 - DNA, 15 bp, Homo sapiens
gctggcaggtgcttc

SEQ ID NO: 1670338 - DNA, 15 bp, Homo sapiens
tgctggcaggtgctt

SEQ ID NO: 1670339 - DNA, 15 bp, Homo sapiens
ttgctggcaggtgct

SEQ ID NO: 1670340 - DNA, 15 bp, Homo sapiens
gttgctggcaggtgc

SEQ ID NO: 1670341 - DNA, 15 bp, Homo sapiens
tgttgctggcaggtg

SEQ ID NO: 1670342 - DNA, 15 bp, Homo sapiens
ctgttgctggcaggt

SEQ ID NO: 1670343 - DNA, 15 bp, Homo sapiens
gctgttgctggcagg

SEQ ID NO: 1670344 - DNA, 15 bp, Homo sapiens
agctgttgctggcag

SEQ ID NO: 1670345 - DNA, 15 bp, Homo sapiens
aagctgttgctggca

SEQ ID NO: 1670346 - DNA, 15 bp, Homo sapiens
gaagctgttgctggc

SEQ ID NO: 1670347 - DNA, 15 bp, Homo sapiens
ggaagctgttgctgg

SEQ ID NO: 1670348 - DNA, 15 bp, Homo sapiens
aggaagctgttgctg

SEQ ID NO: 1670349 - DNA, 15 bp, Homo sapiens
aaggaagctgttgct

SEQ ID NO: 1670350 - DNA, 15 bp, Homo sapiens
gaaggaagctgttgc

SEQ ID NO: 1670351 - DNA, 15 bp, Homo sapiens
agaaggaagctgttg

SEQ ID NO: 1670352 - DNA, 15 bp, Homo sapiens
aagaaggaagctgtt

SEQ ID NO: 1670353 - DNA, 15 bp, Homo sapiens
aaagaaggaagctgt

SEQ ID NO: 1670354 - DNA, 15 bp, Homo sapiens
caaagaaggaagctg

SEQ ID NO: 1670355 - DNA, 15 bp, Homo sapiens
tcaaagaaggaagct

SEQ ID NO: 1670356 - DNA, 15 bp, Homo sapiens
ctcaaagaaggaagc

SEQ ID NO: 1670357 - DNA, 15 bp, Homo sapiens
gctcaaagaaggaag

SEQ ID NO: 1670358 - DNA, 15 bp, Homo sapiens
agctcaaagaaggaa

SEQ ID NO: 1670359 - DNA, 15 bp, Homo sapiens
aagctcaaagaagga

SEQ ID NO: 1670360 - DNA, 15 bp, Homo sapiens
taagctcaaagaagg

SEQ ID NO: 1670361 - DNA, 15 bp, Homo sapiens
ctaagctcaaagaag

SEQ ID NO: 1670362 - DNA, 15 bp, Homo sapiens
cctaagctcaaagaa

SEQ ID NO: 1670363 - DNA, 15 bp, Homo sapiens
acctaagctcaaaga

SEQ ID NO: 1670364 - DNA, 15 bp, Homo sapiens
cacctaagctcaaag

SEQ ID NO: 1670365 - DNA, 15 bp, Homo sapiens
tcacctaagctcaaa

SEQ ID NO: 1670366 - DNA, 15 bp, Homo sapiens
ctcacctaagctcaa

SEQ ID NO: 1670367 - DNA, 15 bp, Homo sapiens
gctcacctaagctca

SEQ ID NO: 1670368 - DNA, 15 bp, Homo sapiens
tgctcacctaagctc

SEQ ID NO: 1670369 - DNA, 15 bp, Homo sapiens
ctgctcacctaagct

SEQ ID NO: 1670370 - DNA, 15 bp, Homo sapiens
cctgctcacctaagc

SEQ ID NO: 1670371 - DNA, 15 bp, Homo sapiens
tcctgctcacctaag

SEQ ID NO: 1670372 - DNA, 15 bp, Homo sapiens
atcctgctcacctaa

SEQ ID NO: 1670373 - DNA, 15 bp, Homo sapiens
aatcctgctcaccta

SEQ ID NO: 1670374 - DNA, 15 bp, Homo sapiens
gaatcctgctcacct

SEQ ID NO: 1670375 - DNA, 15 bp, Homo sapiens
agaatcctgctcacc

SEQ ID NO: 1670376 - DNA, 15 bp, Homo sapiens
cagaatcctgctcac

SEQ ID NO: 1670377 - DNA, 15 bp, Homo sapiens
ccagaatcctgctca

SEQ ID NO: 1670378 - DNA, 15 bp, Homo sapiens
cccagaatcctgctc

SEQ ID NO: 1670379 - DNA, 15 bp, Homo sapiens
ccccagaatcctgct

SEQ ID NO: 1670380 - DNA, 15 bp, Homo sapiens
accccagaatcctgc

SEQ ID NO: 1670381 - DNA, 15 bp, Homo sapiens
aaccccagaatcctg

SEQ ID NO: 1670382 - DNA, 15 bp, Homo sapiens
aaaccccagaatcct

SEQ ID NO: 1670383 - DNA, 15 bp, Homo sapiens
caaaccccagaatcc

SEQ ID NO: 1670384 - DNA, 15 bp, Homo sapiens
ccaaaccccagaatc

SEQ ID NO: 1670385 - DNA, 15 bp, Homo sapiens
cccaaaccccagaat

SEQ ID NO: 1670386 - DNA, 15 bp, Homo sapiens
tcccaaaccccagaa

SEQ ID NO: 1670387 - DNA, 15 bp, Homo sapiens
atcccaaaccccaga

SEQ ID NO: 1670388 - DNA, 15 bp, Homo sapiens
aatcccaaaccccag

SEQ ID NO: 1670389 - DNA, 15 bp, Homo sapiens
aaatcccaaacccca

SEQ ID NO: 1670390 - DNA, 15 bp, Homo sapiens
gaaatcccaaacccc

SEQ ID NO: 1670391 - DNA, 15 bp, Homo sapiens
agaaatcccaaaccc

SEQ ID NO: 1670392 - DNA, 15 bp, Homo sapiens
tagaaatcccaaacc

SEQ ID NO: 1670393 - DNA, 15 bp, Homo sapiens
ctagaaatcccaaac

SEQ ID NO: 1670394 - DNA, 15 bp, Homo sapiens
actagaaatcccaaa

SEQ ID NO: 1670395 - DNA, 15 bp, Homo sapiens
cactagaaatcccaa

SEQ ID NO: 1670396 - DNA, 15 bp, Homo sapiens
tcactagaaatccca

SEQ ID NO: 1670397 - DNA, 15 bp, Homo sapiens
atcactagaaatccc

SEQ ID NO: 1670398 - DNA, 15 bp, Homo sapiens
catcactagaaatcc

SEQ ID NO: 1670399 - DNA, 15 bp, Homo sapiens
ccatcactagaaatc

SEQ ID NO: 1670400 - DNA, 15 bp, Homo sapiens
accatcactagaaat

SEQ ID NO: 1670401 - DNA, 15 bp, Homo sapiens
aaccatcactagaaa

SEQ ID NO: 1670402 - DNA, 15 bp, Homo sapiens
taaccatcactagaa

SEQ ID NO: 1670403 - DNA, 15 bp, Homo sapiens
ataaccatcactaga

SEQ ID NO: 1670404 - DNA, 15 bp, Homo sapiens
cataaccatcactag

SEQ ID NO: 1670405 - DNA, 15 bp, Homo sapiens
ccataaccatcacta

SEQ ID NO: 1670406 - DNA, 15 bp, Homo sapiens
tccataaccatcact

SEQ ID NO: 1670407 - DNA, 15 bp, Homo sapiens
ttccataaccatcac

SEQ ID NO: 1670408 - DNA, 15 bp, Homo sapiens
tttccataaccatca

SEQ ID NO: 1670409 - DNA, 15 bp, Homo sapiens
ctttccataaccatc

SEQ ID NO: 1670410 - DNA, 15 bp, Homo sapiens
cctttccataaccat

SEQ ID NO: 1670411 - DNA, 15 bp, Homo sapiens
ccctttccataacca

SEQ ID NO: 1670412 - DNA, 15 bp, Homo sapiens
accctttccataacc

SEQ ID NO: 1670413 - DNA, 15 bp, Homo sapiens
caccctttccataac

SEQ ID NO: 1670414 - DNA, 15 bp, Homo sapiens
tcaccctttccataa

SEQ ID NO: 1670415 - DNA, 15 bp, Homo sapiens
gtcaccctttccata

SEQ ID NO: 1670416 - DNA, 15 bp, Homo sapiens
agtcaccctttccat

SEQ ID NO: 1670417 - DNA, 15 bp, Homo sapiens
cagtcaccctttcca

SEQ ID NO: 1670418 - DNA, 15 bp, Homo sapiens
acagtcaccctttcc

SEQ ID NO: 1670419 - DNA, 15 bp, Homo sapiens
cacagtcaccctttc

SEQ ID NO: 1670420 - DNA, 15 bp, Homo sapiens
gcacagtcacccttt

SEQ ID NO: 1670421 - DNA, 15 bp, Homo sapiens
ggcacagtcaccctt

SEQ ID NO: 1670422 - DNA, 15 bp, Homo sapiens
aggcacagtcaccct

SEQ ID NO: 1670423 - DNA, 15 bp, Homo sapiens
caggcacagtcaccc

SEQ ID NO: 1670424 - DNA, 15 bp, Homo sapiens
ccaggcacagtcacc

SEQ ID NO: 1670425 - DNA, 15 bp, Homo sapiens
cccaggcacagtcac

SEQ ID NO: 1670426 - DNA, 15 bp, Homo sapiens
tcccaggcacagtca

SEQ ID NO: 1670427 - DNA, 15 bp, Homo sapiens
gtcccaggcacagtc

SEQ ID NO: 1670428 - DNA, 15 bp, Homo sapiens
tgtcccaggcacagt

SEQ ID NO: 1670429 - DNA, 15 bp, Homo sapiens
ttgtcccaggcacag

SEQ ID NO: 1670430 - DNA, 15 bp, Homo sapiens
tttgtcccaggcaca

SEQ ID NO: 1670431 - DNA, 15 bp, Homo sapiens
ctttgtcccaggcac

SEQ ID NO: 1670432 - DNA, 15 bp, Homo sapiens
gctttgtcccaggca

SEQ ID NO: 1670433 - DNA, 15 bp, Homo sapiens
cgctttgtcccaggc

SEQ ID NO: 1670434 - DNA, 15 bp, Homo sapiens
tcgctttgtcccagg

SEQ ID NO: 1670435 - DNA, 15 bp, Homo sapiens
ctcgctttgtcccag

SEQ ID NO: 1670436 - DNA, 15 bp, Homo sapiens
cctcgctttgtccca

SEQ ID NO: 1670437 - DNA, 15 bp, Homo sapiens
acctcgctttgtccc

SEQ ID NO: 1670438 - DNA, 15 bp, Homo sapiens
gacctcgctttgtcc

SEQ ID NO: 1670439 - DNA, 15 bp, Homo sapiens
ggacctcgctttgtc

SEQ ID NO: 1670440 - DNA, 15 bp, Homo sapiens
gggacctcgctttgt

SEQ ID NO: 1670441 - DNA, 15 bp, Homo sapiens
tgggacctcgctttg

SEQ ID NO: 1670442 - DNA, 15 bp, Homo sapiens
ttgggacctcgcttt

SEQ ID NO: 1670443 - DNA, 15 bp, Homo sapiens
cttgggacctcgctt

SEQ ID NO: 1670444 - DNA, 15 bp, Homo sapiens
ccttgggacctcgct

SEQ ID NO: 1670445 - DNA, 15 bp, Homo sapiens
cccttgggacctcgc

SEQ ID NO: 1670446 - DNA, 15 bp, Homo sapiens
ccccttgggacctcg

SEQ ID NO: 1670447 - DNA, 15 bp, Homo sapiens
tccccttgggacctc

SEQ ID NO: 1670448 - DNA, 15 bp, Homo sapiens
gtccccttgggacct

SEQ ID NO: 1670449 - DNA, 15 bp, Homo sapiens
tgtccccttgggacc

SEQ ID NO: 1670450 - DNA, 15 bp, Homo sapiens
ctgtccccttgggac

SEQ ID NO: 1670451 - DNA, 15 bp, Homo sapiens
gctgtccccttggga

SEQ ID NO: 1670452 - DNA, 15 bp, Homo sapiens
ggctgtccccttggg

SEQ ID NO: 1670453 - DNA, 15 bp, Homo sapiens
aggctgtccccttgg

SEQ ID NO: 1670454 - DNA, 15 bp, Homo sapiens
caggctgtccccttg

SEQ ID NO: 1670455 - DNA, 15 bp, Homo sapiens
tcaggctgtcccctt

SEQ ID NO: 1670456 - DNA, 15 bp, Homo sapiens
ttcaggctgtcccct

SEQ ID NO: 1670457 - DNA, 15 bp, Homo sapiens
gttcaggctgtcccc

SEQ ID NO: 1670458 - DNA, 15 bp, Homo sapiens
agttcaggctgtccc

SEQ ID NO: 1670459 - DNA, 15 bp, Homo sapiens
gagttcaggctgtcc

SEQ ID NO: 1670460 - DNA, 15 bp, Homo sapiens
ggagttcaggctgtc

SEQ ID NO: 1670461 - DNA, 15 bp, Homo sapiens
gggagttcaggctgt

SEQ ID NO: 1670462 - DNA, 15 bp, Homo sapiens
agggagttcaggctg

SEQ ID NO: 1670463 - DNA, 15 bp, Homo sapiens
cagggagttcaggct

SEQ ID NO: 1670464 - DNA, 15 bp, Homo sapiens
gcagggagttcaggc

SEQ ID NO: 1670465 - DNA, 15 bp, Homo sapiens
agcagggagttcagg

SEQ ID NO: 1670466 - DNA, 15 bp, Homo sapiens
gagcagggagttcag

SEQ ID NO: 1670467 - DNA, 15 bp, Homo sapiens
tgagcagggagttca

SEQ ID NO: 1670468 - DNA, 15 bp, Homo sapiens
atgagcagggagttc

SEQ ID NO: 1670469 - DNA, 15 bp, Homo sapiens
tatgagcagggagtt

SEQ ID NO: 1670470 - DNA, 15 bp, Homo sapiens
ctatgagcagggagt

SEQ ID NO: 1670471 - DNA, 15 bp, Homo sapiens
actatgagcagggag

SEQ ID NO: 1670472 - DNA, 15 bp, Homo sapiens
tactatgagcaggga

SEQ ID NO: 1670473 - DNA, 15 bp, Homo sapiens
ctactatgagcaggg

SEQ ID NO: 1670474 - DNA, 15 bp, Homo sapiens
actactatgagcagg

SEQ ID NO: 1670475 - DNA, 15 bp, Homo sapiens
cactactatgagcag

SEQ ID NO: 1670476 - DNA, 15 bp, Homo sapiens
ccactactatgagca

SEQ ID NO: 1670477 - DNA, 15 bp, Homo sapiens
gccactactatgagc

SEQ ID NO: 1670478 - DNA, 15 bp, Homo sapiens
ggccactactatgag

SEQ ID NO: 1670479 - DNA, 15 bp, Homo sapiens
tggccactactatga

SEQ ID NO: 1670480 - DNA, 15 bp, Homo sapiens
ttggccactactatg

SEQ ID NO: 1670481 - DNA, 15 bp, Homo sapiens
tttggccactactat

SEQ ID NO: 1670482 - DNA, 15 bp, Homo sapiens
atttggccactacta

SEQ ID NO: 1670483 - DNA, 15 bp, Homo sapiens
tatttggccactact

SEQ ID NO: 1670484 - DNA, 15 bp, Homo sapiens
ttatttggccactac

SEQ ID NO: 1670485 - DNA, 15 bp, Homo sapiens
attatttggccacta

SEQ ID NO: 1670486 - DNA, 15 bp, Homo sapiens
aattatttggccact

SEQ ID NO: 1670487 - DNA, 15 bp, Homo sapiens
aaattatttggccac

SEQ ID NO: 1670488 - DNA, 15 bp, Homo sapiens
caaattatttggcca

SEQ ID NO: 1670489 - DNA, 15 bp, Homo sapiens
ccaaattatttggcc

SEQ ID NO: 1670490 - DNA, 15 bp, Homo sapiens
accaaattatttggc

SEQ ID NO: 1670491 - DNA, 15 bp, Homo sapiens
caccaaattatttgg

SEQ ID NO: 1670492 - DNA, 15 bp, Homo sapiens
ccaccaaattatttg

SEQ ID NO: 1670493 - DNA, 15 bp, Homo sapiens
tccaccaaattattt

SEQ ID NO: 1670494 - DNA, 15 bp, Homo sapiens
gtccaccaaattatt

SEQ ID NO: 1670495 - DNA, 15 bp, Homo sapiens
agtccaccaaattat

SEQ ID NO: 1670496 - DNA, 15 bp, Homo sapiens
cagtccaccaaatta

SEQ ID NO: 1670497 - DNA, 15 bp, Homo sapiens
acagtccaccaaatt

SEQ ID NO: 1670498 - DNA, 15 bp, Homo sapiens
cacagtccaccaaat

SEQ ID NO: 1670499 - DNA, 15 bp, Homo sapiens
gcacagtccaccaaa

SEQ ID NO: 1670500 - DNA, 15 bp, Homo sapiens
ggcacagtccaccaa

SEQ ID NO: 1670501 - DNA, 15 bp, Homo sapiens
tggcacagtccacca

SEQ ID NO: 1670502 - DNA, 15 bp, Homo sapiens
ttggcacagtccacc

SEQ ID NO: 1670503 - DNA, 15 bp, Homo sapiens
gttggcacagtccac

SEQ ID NO: 1670504 - DNA, 15 bp, Homo sapiens
cgttggcacagtcca

SEQ ID NO: 1670505 - DNA, 15 bp, Homo sapiens
gcgttggcacagtcc

SEQ ID NO: 1670506 - DNA, 15 bp, Homo sapiens
agcgttggcacagtc

SEQ ID NO: 1670507 - DNA, 15 bp, Homo sapiens
tagcgttggcacagt

SEQ ID NO: 1670508 - DNA, 15 bp, Homo sapiens
gtagcgttggcacag

SEQ ID NO: 1670509 - DNA, 15 bp, Homo sapiens
agtagcgttggcaca

SEQ ID NO: 1670510 - DNA, 15 bp, Homo sapiens
gagtagcgttggcac

SEQ ID NO: 1670511 - DNA, 15 bp, Homo sapiens
ggagtagcgttggca

SEQ ID NO: 1670512 - DNA, 15 bp, Homo sapiens
aggagtagcgttggc

SEQ ID NO: 1670513 - DNA, 15 bp, Homo sapiens
caggagtagcgttgg

SEQ ID NO: 1670514 - DNA, 15 bp, Homo sapiens
ccaggagtagcgttg

SEQ ID NO: 1670515 - DNA, 15 bp, Homo sapiens
cccaggagtagcgtt

SEQ ID NO: 1670516 - DNA, 15 bp, Homo sapiens
acccaggagtagcgt

SEQ ID NO: 1670517 - DNA, 15 bp, Homo sapiens
aacccaggagtagcg

SEQ ID NO: 1670518 - DNA, 15 bp, Homo sapiens
aaacccaggagtagc

SEQ ID NO: 1670519 - DNA, 15 bp, Homo sapiens
taaacccaggagtag

SEQ ID NO: 1670520 - DNA, 15 bp, Homo sapiens
ttaaacccaggagta

SEQ ID NO: 1670521 - DNA, 15 bp, Homo sapiens
attaaacccaggagt

SEQ ID NO: 1670522 - DNA, 15 bp, Homo sapiens
tattaaacccaggag

SEQ ID NO: 1670523 - DNA, 15 bp, Homo sapiens
gtattaaacccagga

SEQ ID NO: 1670524 - DNA, 15 bp, Homo sapiens
ggtattaaacccagg

SEQ ID NO: 1670525 - DNA, 15 bp, Homo sapiens
gggtattaaacccag

SEQ ID NO: 1670526 - DNA, 15 bp, Homo sapiens
tgggtattaaaccca

SEQ ID NO: 1670527 - DNA, 15 bp, Homo sapiens
atgggtattaaaccc

SEQ ID NO: 1670528 - DNA, 15 bp, Homo sapiens
gatgggtattaaacc

SEQ ID NO: 1670529 - DNA, 15 bp, Homo sapiens
agatgggtattaaac

SEQ ID NO: 1670530 - DNA, 15 bp, Homo sapiens
gagatgggtattaaa

SEQ ID NO: 1670531 - DNA, 15 bp, Homo sapiens
agagatgggtattaa

SEQ ID NO: 1670532 - DNA, 15 bp, Homo sapiens
tagagatgggtatta

SEQ ID NO: 1670533 - DNA, 15 bp, Homo sapiens
ctagagatgggtatt

SEQ ID NO: 1670534 - DNA, 15 bp, Homo sapiens
cctagagatgggtat

SEQ ID NO: 1670535 - DNA, 15 bp, Homo sapiens
gcctagagatgggta

SEQ ID NO: 1670536 - DNA, 15 bp, Homo sapiens
agcctagagatgggt

SEQ ID NO: 1670537 - DNA, 15 bp, Homo sapiens
aagcctagagatggg

SEQ ID NO: 1670538 - DNA, 15 bp, Homo sapiens
taagcctagagatgg

SEQ ID NO: 1670539 - DNA, 15 bp, Homo sapiens
ttaagcctagagatg

SEQ ID NO: 1670540 - DNA, 15 bp, Homo sapiens
tttaagcctagagat

SEQ ID NO: 1670541 - DNA, 15 bp, Homo sapiens
ctttaagcctagaga

SEQ ID NO: 1670542 - DNA, 15 bp, Homo sapiens
tctttaagcctagag

SEQ ID NO: 1670543 - DNA, 15 bp, Homo sapiens
atctttaagcctaga

SEQ ID NO: 1670544 - DNA, 15 bp, Homo sapiens
catctttaagcctag

SEQ ID NO: 1670545 - DNA, 15 bp, Homo sapiens
tcatctttaagccta

SEQ ID NO: 1670546 - DNA, 15 bp, Homo sapiens
ctcatctttaagcct

SEQ ID NO: 1670547 - DNA, 15 bp, Homo sapiens
tctcatctttaagcc

SEQ ID NO: 1670548 - DNA, 15 bp, Homo sapiens
ctctcatctttaagc

SEQ ID NO: 1670549 - DNA, 15 bp, Homo sapiens
tctctcatctttaag

SEQ ID NO: 1670550 - DNA, 15 bp, Homo sapiens
ttctctcatctttaa

SEQ ID NO: 1670551 - DNA, 15 bp, Homo sapiens
gttctctcatcttta

SEQ ID NO: 1670552 - DNA, 15 bp, Homo sapiens
ggttctctcatcttt

SEQ ID NO: 1670553 - DNA, 15 bp, Homo sapiens
aggttctctcatctt

SEQ ID NO: 1670554 - DNA, 15 bp, Homo sapiens
caggttctctcatct

SEQ ID NO: 1670555 - DNA, 15 bp, Homo sapiens
ccaggttctctcatc

SEQ ID NO: 1670556 - DNA, 15 bp, Homo sapiens
cccaggttctctcat

SEQ ID NO: 1670557 - DNA, 15 bp, Homo sapiens
tcccaggttctctca

SEQ ID NO: 1670558 - DNA, 15 bp, Homo sapiens
gtcccaggttctctc

SEQ ID NO: 1670559 - DNA, 15 bp, Homo sapiens
agtcccaggttctct

SEQ ID NO: 1670560 - DNA, 15 bp, Homo sapiens
cagtcccaggttctc

SEQ ID NO: 1670561 - DNA, 15 bp, Homo sapiens
acagtcccaggttct

SEQ ID NO: 1670562 - DNA, 15 bp, Homo sapiens
aacagtcccaggttc

SEQ ID NO: 1670563 - DNA, 15 bp, Homo sapiens
caacagtcccaggtt

SEQ ID NO: 1670564 - DNA, 15 bp, Homo sapiens
tcaacagtcccaggt

SEQ ID NO: 1670565 - DNA, 15 bp, Homo sapiens
ctcaacagtcccagg

SEQ ID NO: 1670566 - DNA, 15 bp, Homo sapiens
gctcaacagtcccag

SEQ ID NO: 1670567 - DNA, 15 bp, Homo sapiens
tgctcaacagtccca

SEQ ID NO: 1670568 - DNA, 15 bp, Homo sapiens
atgctcaacagtccc

SEQ ID NO: 1670569 - DNA, 15 bp, Homo sapiens
catgctcaacagtcc

SEQ ID NO: 1670570 - DNA, 15 bp, Homo sapiens
acatgctcaacagtc

SEQ ID NO: 1670571 - DNA, 15 bp, Homo sapiens
aacatgctcaacagt

SEQ ID NO: 1670572 - DNA, 15 bp, Homo sapiens
aaacatgctcaacag

SEQ ID NO: 1670573 - DNA, 15 bp, Homo sapiens
taaacatgctcaaca

SEQ ID NO: 1670574 - DNA, 15 bp, Homo sapiens
ttaaacatgctcaac

SEQ ID NO: 1670575 - DNA, 15 bp, Homo sapiens
attaaacatgctcaa

SEQ ID NO: 1670576 - DNA, 15 bp, Homo sapiens
tattaaacatgctca

SEQ ID NO: 1670577 - DNA, 15 bp, Homo sapiens
gtattaaacatgctc

SEQ ID NO: 1670578 - DNA, 15 bp, Homo sapiens
agtattaaacatgct

SEQ ID NO: 1670579 - DNA, 15 bp, Homo sapiens
aagtattaaacatgc

SEQ ID NO: 1670580 - DNA, 15 bp, Homo sapiens
aaagtattaaacatg

SEQ ID NO: 1670581 - DNA, 15 bp, Homo sapiens
gaaagtattaaacat

SEQ ID NO: 1670582 - DNA, 15 bp, Homo sapiens
ggaaagtattaaaca

SEQ ID NO: 1670583 - DNA, 15 bp, Homo sapiens
aggaaagtattaaac

SEQ ID NO: 1670584 - DNA, 15 bp, Homo sapiens
aaggaaagtattaaa

SEQ ID NO: 1670585 - DNA, 15 bp, Homo sapiens
caaggaaagtattaa

SEQ ID NO: 1670586 - DNA, 15 bp, Homo sapiens
tcaaggaaagtatta

SEQ ID NO: 1670587 - DNA, 15 bp, Homo sapiens
atcaaggaaagtatt

SEQ ID NO: 1670588 - DNA, 15 bp, Homo sapiens
aatcaaggaaagtat

SEQ ID NO: 1670589 - DNA, 15 bp, Homo sapiens
aaatcaaggaaagta

SEQ ID NO: 1670590 - DNA, 15 bp, Homo sapiens
aaaatcaaggaaagt

SEQ ID NO: 1670591 - DNA, 15 bp, Homo sapiens
aaaaatcaaggaaag

SEQ ID NO: 1670592 - DNA, 15 bp, Homo sapiens
aaaaaatcaaggaaa

SEQ ID NO: 1670593 - DNA, 15 bp, Homo sapiens
aaaaaaatcaaggaa

SEQ ID NO: 1670594 - DNA, 15 bp, Homo sapiens
gaaaaaaatcaagga

SEQ ID NO: 1670595 - DNA, 15 bp, Homo sapiens
agaaaaaaatcaagg

SEQ ID NO: 1670596 - DNA, 15 bp, Homo sapiens
aagaaaaaaatcaag

SEQ ID NO: 1670597 - DNA, 15 bp, Homo sapiens
gaagaaaaaaatcaa

SEQ ID NO: 1670598 - DNA, 15 bp, Homo sapiens
ggaagaaaaaaatca

SEQ ID NO: 1670599 - DNA, 15 bp, Homo sapiens
aggaagaaaaaaatc

SEQ ID NO: 1670600 - DNA, 15 bp, Homo sapiens
caggaagaaaaaaat

SEQ ID NO: 1670601 - DNA, 15 bp, Homo sapiens
acaggaagaaaaaaa

SEQ ID NO: 1670602 - DNA, 15 bp, Homo sapiens
aacaggaagaaaaaa

SEQ ID NO: 1670603 - DNA, 15 bp, Homo sapiens
aaacaggaagaaaaa

SEQ ID NO: 1670604 - DNA, 15 bp, Homo sapiens
taaacaggaagaaaa

SEQ ID NO: 1670605 - DNA, 15 bp, Homo sapiens
ataaacaggaagaaa

SEQ ID NO: 1670606 - DNA, 15 bp, Homo sapiens
cataaacaggaagaa

SEQ ID NO: 1670607 - DNA, 15 bp, Homo sapiens
acataaacaggaaga

SEQ ID NO: 1670608 - DNA, 15 bp, Homo sapiens
cacataaacaggaag

SEQ ID NO: 1670609 - DNA, 15 bp, Homo sapiens
ccacataaacaggaa

SEQ ID NO: 1670610 - DNA, 15 bp, Homo sapiens
cccacataaacagga

SEQ ID NO: 1670611 - DNA, 15 bp, Homo sapiens
tcccacataaacagg

SEQ ID NO: 1670612 - DNA, 15 bp, Homo sapiens
ttcccacataaacag

SEQ ID NO: 1670613 - DNA, 15 bp, Homo sapiens
cttcccacataaaca

SEQ ID NO: 1670614 - DNA, 15 bp, Homo sapiens
acttcccacataaac

SEQ ID NO: 1670615 - DNA, 15 bp, Homo sapiens
aacttcccacataaa

SEQ ID NO: 1670616 - DNA, 15 bp, Homo sapiens
caacttcccacataa

SEQ ID NO: 1670617 - DNA, 15 bp, Homo sapiens
tcaacttcccacata

SEQ ID NO: 1670618 - DNA, 15 bp, Homo sapiens
atcaacttcccacat

SEQ ID NO: 1670619 - DNA, 15 bp, Homo sapiens
aatcaacttcccaca

SEQ ID NO: 1670620 - DNA, 15 bp, Homo sapiens
aaatcaacttcccac

SEQ ID NO: 1670621 - DNA, 15 bp, Homo sapiens
taaatcaacttccca

SEQ ID NO: 1670622 - DNA, 15 bp, Homo sapiens
ttaaatcaacttccc

SEQ ID NO: 1670623 - DNA, 15 bp, Homo sapiens
tttaaatcaacttcc

SEQ ID NO: 1670624 - DNA, 15 bp, Homo sapiens
atttaaatcaacttc

SEQ ID NO: 1670625 - DNA, 15 bp, Homo sapiens
catttaaatcaactt

SEQ ID NO: 1670626 - DNA, 15 bp, Homo sapiens
tcatttaaatcaact

SEQ ID NO: 1670627 - DNA, 15 bp, Homo sapiens
gtcatttaaatcaac

SEQ ID NO: 1670628 - DNA, 15 bp, Homo sapiens
agtcatttaaatcaa

SEQ ID NO: 1670629 - DNA, 15 bp, Homo sapiens
cagtcatttaaatca

SEQ ID NO: 1670630 - DNA, 15 bp, Homo sapiens
tcagtcatttaaatc

SEQ ID NO: 1670631 - DNA, 15 bp, Homo sapiens
atcagtcatttaaat

SEQ ID NO: 1670632 - DNA, 15 bp, Homo sapiens
tatcagtcatttaaa

SEQ ID NO: 1670633 - DNA, 15 bp, Homo sapiens
ttatcagtcatttaa

SEQ ID NO: 1670634 - DNA, 15 bp, Homo sapiens
attatcagtcattta

SEQ ID NO: 1670635 - DNA, 15 bp, Homo sapiens
cattatcagtcattt

SEQ ID NO: 1670636 - DNA, 15 bp, Homo sapiens
acattatcagtcatt

SEQ ID NO: 1670637 - DNA, 15 bp, Homo sapiens
cacattatcagtcat

SEQ ID NO: 1670638 - DNA, 15 bp, Homo sapiens
acacattatcagtca

SEQ ID NO: 1670639 - DNA, 15 bp, Homo sapiens
tacacattatcagtc

SEQ ID NO: 1670640 - DNA, 15 bp, Homo sapiens
atacacattatcagt

SEQ ID NO: 1670641 - DNA, 15 bp, Homo sapiens
catacacattatcag

SEQ ID NO: 1670642 - DNA, 15 bp, Homo sapiens
tcatacacattatca

SEQ ID NO: 1670643 - DNA, 15 bp, Homo sapiens
ttcatacacattatc

SEQ ID NO: 1670644 - DNA, 15 bp, Homo sapiens
tttcatacacattat

SEQ ID NO: 1670645 - DNA, 15 bp, Homo sapiens
ctttcatacacatta

SEQ ID NO: 1670646 - DNA, 15 bp, Homo sapiens
gctttcatacacatt

SEQ ID NO: 1670647 - DNA, 15 bp, Homo sapiens
tgctttcatacacat

SEQ ID NO: 1670648 - DNA, 15 bp, Homo sapiens
gtgctttcatacaca

SEQ ID NO: 1670649 - DNA, 15 bp, Homo sapiens
agtgctttcatacac

SEQ ID NO: 1670650 - DNA, 15 bp, Homo sapiens
cagtgctttcataca

SEQ ID NO: 1670651 - DNA, 15 bp, Homo sapiens
acagtgctttcatac

SEQ ID NO: 1670652 - DNA, 15 bp, Homo sapiens
tacagtgctttcata

SEQ ID NO: 1670653 - DNA, 15 bp, Homo sapiens
ttacagtgctttcat

SEQ ID NO: 1670654 - DNA, 15 bp, Homo sapiens
tttacagtgctttca

SEQ ID NO: 1670655 - DNA, 15 bp, Homo sapiens
tgttttacagtgctt

SEQ ID NO: 1670656 - DNA, 15 bp, Homo sapiens
atgttttacagtgct

SEQ ID NO: 1670657 - DNA, 15 bp, Homo sapiens
tatgttttacagtgc

SEQ ID NO: 1670658 - DNA, 15 bp, Homo sapiens
ttatgttttacagtg

SEQ ID NO: 1670659 - DNA, 15 bp, Homo sapiens
cttatgttttacagt

SEQ ID NO: 1670660 - DNA, 15 bp, Homo sapiens
tcttatgttttacag

SEQ ID NO: 1670661 - DNA, 15 bp, Homo sapiens
ctcttatgttttaca

SEQ ID NO: 1670662 - DNA, 15 bp, Homo sapiens
tctcttatgttttac

SEQ ID NO: 1670663 - DNA, 15 bp, Homo sapiens
ttctcttatgtttta

SEQ ID NO: 1670664 - DNA, 15 bp, Homo sapiens
tttctcttatgtttt

SEQ ID NO: 1670665 - DNA, 15 bp, Homo sapiens
ttttctcttatgttt

SEQ ID NO: 1670666 - DNA, 15 bp, Homo sapiens
tttttctcttatgtt

SEQ ID NO: 1670667 - DNA, 15 bp, Homo sapiens
gtttttctcttatgt

SEQ ID NO: 1670668 - DNA, 15 bp, Homo sapiens
ggtttttctcttatg

SEQ ID NO: 1670669 - DNA, 15 bp, Homo sapiens
tggtttttctcttat

SEQ ID NO: 1670670 - DNA, 15 bp, Homo sapiens
ttggtttttctctta

SEQ ID NO: 1670671 - DNA, 15 bp, Homo sapiens
attggtttttctctt

SEQ ID NO: 1670672 - DNA, 15 bp, Homo sapiens
aattggtttttctct

SEQ ID NO: 1670673 - DNA, 15 bp, Homo sapiens
taattggtttttctc

SEQ ID NO: 1670674 - DNA, 15 bp, Homo sapiens
ctaattggtttttct

SEQ ID NO: 1670675 - DNA, 15 bp, Homo sapiens
actaattggtttttc

SEQ ID NO: 1670676 - DNA, 15 bp, Homo sapiens
cactaattggttttt

SEQ ID NO: 1670677 - DNA, 15 bp, Homo sapiens
acactaattggtttt

SEQ ID NO: 1670678 - DNA, 15 bp, Homo sapiens
tacactaattggttt

SEQ ID NO: 1670679 - DNA, 15 bp, Homo sapiens
atacactaattggtt

SEQ ID NO: 1670680 - DNA, 15 bp, Homo sapiens
aatacactaattggt

SEQ ID NO: 1670681 - DNA, 15 bp, Homo sapiens
caatacactaattgg

SEQ ID NO: 1670682 - DNA, 15 bp, Homo sapiens
ccaatacactaattg

SEQ ID NO: 1670683 - DNA, 15 bp, Homo sapiens
gccaatacactaatt

SEQ ID NO: 1670684 - DNA, 15 bp, Homo sapiens
tgccaatacactaat

SEQ ID NO: 1670685 - DNA, 15 bp, Homo sapiens
ttgccaatacactaa

SEQ ID NO: 1670686 - DNA, 15 bp, Homo sapiens
attgccaatacacta

SEQ ID NO: 1670687 - DNA, 15 bp, Homo sapiens
gattgccaatacact

SEQ ID NO: 1670688 - DNA, 15 bp, Homo sapiens
tgattgccaatacac

SEQ ID NO: 1670689 - DNA, 15 bp, Homo sapiens
atgattgccaataca

SEQ ID NO: 1670690 - DNA, 15 bp, Homo sapiens
catgattgccaatac

SEQ ID NO: 1670691 - DNA, 15 bp, Homo sapiens
gcatgattgccaata

SEQ ID NO: 1670692 - DNA, 15 bp, Homo sapiens
tgcatgattgccaat

SEQ ID NO: 1670693 - DNA, 15 bp, Homo sapiens
ctgcatgattgccaa

SEQ ID NO: 1670694 - DNA, 15 bp, Homo sapiens
actgcatgattgcca

SEQ ID NO: 1670695 - DNA, 15 bp, Homo sapiens
aactgcatgattgcc

SEQ ID NO: 1670696 - DNA, 15 bp, Homo sapiens
taactgcatgattgc

SEQ ID NO: 1670697 - DNA, 15 bp, Homo sapiens
ttaactgcatgattg

SEQ ID NO: 1670698 - DNA, 15 bp, Homo sapiens
gttaactgcatgatt

SEQ ID NO: 1670699 - DNA, 15 bp, Homo sapiens
tgttaactgcatgat

SEQ ID NO: 1670700 - DNA, 15 bp, Homo sapiens
atgttaactgcatga

SEQ ID NO: 1670701 - DNA, 15 bp, Homo sapiens
aatgttaactgcatg

SEQ ID NO: 1670702 - DNA, 15 bp, Homo sapiens
aaatgttaactgcat

SEQ ID NO: 1670703 - DNA, 15 bp, Homo sapiens
caaatgttaactgca

SEQ ID NO: 1670704 - DNA, 15 bp, Homo sapiens
tcaaatgttaactgc

SEQ ID NO: 1670705 - DNA, 15 bp, Homo sapiens
ttcaaatgttaactg

SEQ ID NO: 1670706 - DNA, 15 bp, Homo sapiens
tttcaaatgttaact

SEQ ID NO: 1670707 - DNA, 15 bp, Homo sapiens
ctttcaaatgttaac

SEQ ID NO: 1670708 - DNA, 15 bp, Homo sapiens
actttcaaatgttaa

SEQ ID NO: 1670709 - DNA, 15 bp, Homo sapiens
cactttcaaatgtta

SEQ ID NO: 1670710 - DNA, 15 bp, Homo sapiens
gcactttcaaatgtt

SEQ ID NO: 1670711 - DNA, 15 bp, Homo sapiens
tgcactttcaaatgt

SEQ ID NO: 1670712 - DNA, 15 bp, Homo sapiens
ctgcactttcaaatg

SEQ ID NO: 1670713 - DNA, 15 bp, Homo sapiens
actgcactttcaaat

SEQ ID NO: 1670714 - DNA, 15 bp, Homo sapiens
cactgcactttcaaa

SEQ ID NO: 1670715 - DNA, 15 bp, Homo sapiens
acactgcactttcaa

SEQ ID NO: 1670716 - DNA, 15 bp, Homo sapiens
tacactgcactttca

SEQ ID NO: 1670717 - DNA, 15 bp, Homo sapiens
ttacactgcactttc

SEQ ID NO: 1670718 - DNA, 15 bp, Homo sapiens
tttacactgcacttt

SEQ ID NO: 1670719 - DNA, 15 bp, Homo sapiens
atttacactgcactt

SEQ ID NO: 1670720 - DNA, 15 bp, Homo sapiens
aatttacactgcact

SEQ ID NO: 1670721 - DNA, 15 bp, Homo sapiens
caatttacactgcac

SEQ ID NO: 1670722 - DNA, 15 bp, Homo sapiens
acaatttacactgca

SEQ ID NO: 1670723 - DNA, 15 bp, Homo sapiens
cacaatttacactgc

SEQ ID NO: 1670724 - DNA, 15 bp, Homo sapiens
tcacaatttacactg

SEQ ID NO: 1670725 - DNA, 15 bp, Homo sapiens
ttcacaatttacact

SEQ ID NO: 1670726 - DNA, 15 bp, Homo sapiens
cttcacaatttacac

SEQ ID NO: 1670727 - DNA, 15 bp, Homo sapiens
gcttcacaatttaca

SEQ ID NO: 1670728 - DNA, 15 bp, Homo sapiens
tgcttcacaatttac

SEQ ID NO: 1670729 - DNA, 15 bp, Homo sapiens
atgcttcacaattta

SEQ ID NO: 1670730 - DNA, 15 bp, Homo sapiens
aatgcttcacaattt

SEQ ID NO: 1670731 - DNA, 15 bp, Homo sapiens
taatgcttcacaatt

SEQ ID NO: 1670732 - DNA, 15 bp, Homo sapiens
ataatgcttcacaat

SEQ ID NO: 1670733 - DNA, 15 bp, Homo sapiens
cataatgcttcacaa

SEQ ID NO: 1670734 - DNA, 15 bp, Homo sapiens
acataatgcttcaca

SEQ ID NO: 1670735 - DNA, 15 bp, Homo sapiens
tttctttgtatccac

SEQ ID NO: 1670736 - DNA, 15 bp, Homo sapiens
ctttctttgtatcca

SEQ ID NO: 1670737 - DNA, 15 bp, Homo sapiens
cctttctttgtatcc

SEQ ID NO: 1670738 - DNA, 15 bp, Homo sapiens
tcctttctttgtatc

SEQ ID NO: 1670739 - DNA, 15 bp, Homo sapiens
ctcctttctttgtat

SEQ ID NO: 1670740 - DNA, 15 bp, Homo sapiens
gctcctttctttgta

SEQ ID NO: 1670741 - DNA, 15 bp, Homo sapiens
tgctcctttctttgt

SEQ ID NO: 1670742 - DNA, 15 bp, Homo sapiens
ttgctcctttctttg

SEQ ID NO: 1670743 - DNA, 15 bp, Homo sapiens
cttgctcctttcttt

SEQ ID NO: 1670744 - DNA, 15 bp, Homo sapiens
gcttgctcctttctt

SEQ ID NO: 1670745 - DNA, 15 bp, Homo sapiens
tgcttgctcctttct

SEQ ID NO: 1670746 - DNA, 15 bp, Homo sapiens
atgcttgctcctttc

SEQ ID NO: 1670747 - DNA, 15 bp, Homo sapiens
tatgcttgctccttt

SEQ ID NO: 1670748 - DNA, 15 bp, Homo sapiens
ttatgcttgctcctt

SEQ ID NO: 1670749 - DNA, 15 bp, Homo sapiens
tttatgcttgctcct

SEQ ID NO: 1670750 - DNA, 15 bp, Homo sapiens
ttttatgcttgctcc

SEQ ID NO: 1670751 - DNA, 15 bp, Homo sapiens
tttttatgcttgctc

SEQ ID NO: 1670752 - DNA, 15 bp, Homo sapiens
ttttttatgcttgct

SEQ ID NO: 1670753 - DNA, 15 bp, Homo sapiens
cttttttatgcttgc

SEQ ID NO: 1670754 - DNA, 15 bp, Homo sapiens
acttttttatgcttg

SEQ ID NO: 1670755 - DNA, 15 bp, Homo sapiens
cacttttttatgctt

SEQ ID NO: 1670756 - DNA, 15 bp, Homo sapiens
gcacttttttatgct

SEQ ID NO: 1670757 - DNA, 15 bp, Homo sapiens
agcacttttttatgc

SEQ ID NO: 1670758 - DNA, 15 bp, Homo sapiens
gagcacttttttatg

SEQ ID NO: 1670759 - DNA, 15 bp, Homo sapiens
agagcacttttttat

SEQ ID NO: 1670760 - DNA, 15 bp, Homo sapiens
aagagcactttttta

SEQ ID NO: 1670761 - DNA, 15 bp, Homo sapiens
aaagagcactttttt

SEQ ID NO: 1670762 - DNA, 15 bp, Homo sapiens
gaaagagcacttttt

SEQ ID NO: 1670763 - DNA, 15 bp, Homo sapiens
tgaaagagcactttt

SEQ ID NO: 1670764 - DNA, 15 bp, Homo sapiens
ttgaaagagcacttt

SEQ ID NO: 1670765 - DNA, 15 bp, Homo sapiens
tttgaaagagcactt

SEQ ID NO: 1670766 - DNA, 15 bp, Homo sapiens
ttttgaaagagcact

SEQ ID NO: 1670767 - DNA, 15 bp, Homo sapiens
cttttgaaagagcac

SEQ ID NO: 1670768 - DNA, 15 bp, Homo sapiens
ccttttgaaagagca

SEQ ID NO: 1670769 - DNA, 15 bp, Homo sapiens
tccttttgaaagagc

SEQ ID NO: 1670770 - DNA, 15 bp, Homo sapiens
atccttttgaaagag

SEQ ID NO: 1670771 - DNA, 15 bp, Homo sapiens
tatccttttgaaaga

SEQ ID NO: 1670772 - DNA, 15 bp, Homo sapiens
atatccttttgaaag

SEQ ID NO: 1670773 - DNA, 15 bp, Homo sapiens
tatatccttttgaaa

SEQ ID NO: 1670774 - DNA, 15 bp, Homo sapiens
ctatatccttttgaa

SEQ ID NO: 1670775 - DNA, 15 bp, Homo sapiens
actatatccttttga

SEQ ID NO: 1670776 - DNA, 15 bp, Homo sapiens
tactatatccttttg

SEQ ID NO: 1670777 - DNA, 15 bp, Homo sapiens
gtactatatcctttt

SEQ ID NO: 1670778 - DNA, 15 bp, Homo sapiens
agtactatatccttt

SEQ ID NO: 1670779 - DNA, 15 bp, Homo sapiens
tagtactatatcctt

SEQ ID NO: 1670780 - DNA, 15 bp, Homo sapiens
atagtactatatcct

SEQ ID NO: 1670781 - DNA, 15 bp, Homo sapiens
catagtactatatcc

SEQ ID NO: 1670782 - DNA, 15 bp, Homo sapiens
gcatagtactatatc

SEQ ID NO: 1670783 - DNA, 15 bp, Homo sapiens
tgcatagtactatat

SEQ ID NO: 1670784 - DNA, 15 bp, Homo sapiens
ctgcatagtactata

SEQ ID NO: 1670785 - DNA, 15 bp, Homo sapiens
tctgcatagtactat

SEQ ID NO: 1670786 - DNA, 15 bp, Homo sapiens
gtctgcatagtacta

SEQ ID NO: 1670787 - DNA, 15 bp, Homo sapiens
tgtctgcatagtact

SEQ ID NO: 1670788 - DNA, 15 bp, Homo sapiens
gtgtctgcatagtac

SEQ ID NO: 1670789 - DNA, 15 bp, Homo sapiens
tgtgtctgcatagta

SEQ ID NO: 1670790 - DNA, 15 bp, Homo sapiens
ttgtgtctgcatagt

SEQ ID NO: 1670791 - DNA, 15 bp, Homo sapiens
cttgtgtctgcatag

SEQ ID NO: 1670792 - DNA, 15 bp, Homo sapiens
ccttgtgtctgcata

SEQ ID NO: 1670793 - DNA, 15 bp, Homo sapiens
tccttgtgtctgcat

SEQ ID NO: 1670794 - DNA, 15 bp, Homo sapiens
ttccttgtgtctgca

SEQ ID NO: 1670795 - DNA, 15 bp, Homo sapiens
attccttgtgtctgc

SEQ ID NO: 1670796 - DNA, 15 bp, Homo sapiens
aattccttgtgtctg

SEQ ID NO: 1670797 - DNA, 15 bp, Homo sapiens
caattccttgtgtct

SEQ ID NO: 1670798 - DNA, 15 bp, Homo sapiens
acaattccttgtgtc

SEQ ID NO: 1670799 - DNA, 15 bp, Homo sapiens
caaacaattccttgt

SEQ ID NO: 1670800 - DNA, 15 bp, Homo sapiens
tcaaacaattccttg

SEQ ID NO: 1670801 - DNA, 15 bp, Homo sapiens
atcaaacaattcctt

SEQ ID NO: 1670802 - DNA, 15 bp, Homo sapiens
tatcaaacaattcct

SEQ ID NO: 1670803 - DNA, 15 bp, Homo sapiens
ttatcaaacaattcc

SEQ ID NO: 1670804 - DNA, 15 bp, Homo sapiens
tttatcaaacaattc

SEQ ID NO: 1670805 - DNA, 15 bp, Homo sapiens
atttatcaaacaatt

SEQ ID NO: 1670806 - DNA, 15 bp, Homo sapiens
catttatcaaacaat

SEQ ID NO: 1670807 - DNA, 15 bp, Homo sapiens
tcatttatcaaacaa

SEQ ID NO: 1670808 - DNA, 15 bp, Homo sapiens
ttcatttatcaaaca

SEQ ID NO: 1670809 - DNA, 15 bp, Homo sapiens
attcatttatcaaac

SEQ ID NO: 1670810 - DNA, 15 bp, Homo sapiens
tattcatttatcaaa

SEQ ID NO: 1670811 - DNA, 15 bp, Homo sapiens
ttattcatttatcaa

SEQ ID NO: 1670812 - DNA, 15 bp, Homo sapiens
tttattcatttatca

SEQ ID NO: 1670813 - DNA, 15 bp, Homo sapiens
atttattcatttatc

SEQ ID NO: 1670814 - DNA, 15 bp, Homo sapiens
aatttattcatttat

SEQ ID NO: 1670815 - DNA, 15 bp, Homo sapiens
taatttattcattta

SEQ ID NO: 1670816 - DNA, 15 bp, Homo sapiens
ataatttattcattt

SEQ ID NO: 1670817 - DNA, 15 bp, Homo sapiens
tataatttattcatt

SEQ ID NO: 1670818 - DNA, 15 bp, Homo sapiens
atataatttattcat

SEQ ID NO: 1670819 - DNA, 15 bp, Homo sapiens
catataatttattca

SEQ ID NO: 1670820 - DNA, 15 bp, Homo sapiens
acatataatttattc

SEQ ID NO: 1670821 - DNA, 15 bp, Homo sapiens
tacatataatttatt

SEQ ID NO: 1670822 - DNA, 15 bp, Homo sapiens
atacatataatttat

SEQ ID NO: 1670823 - DNA, 15 bp, Homo sapiens
tatacatataattta

SEQ ID NO: 1670824 - DNA, 15 bp, Homo sapiens
atatacatataattt

SEQ ID NO: 1670825 - DNA, 15 bp, Homo sapiens
aatatacatataatt

SEQ ID NO: 1670826 - DNA, 15 bp, Homo sapiens
aaatatacatataat

SEQ ID NO: 1670827 - DNA, 15 bp, Homo sapiens
caaatatacatataa

SEQ ID NO: 1670828 - DNA, 15 bp, Homo sapiens
tcaaatatacatata

SEQ ID NO: 1670829 - DNA, 15 bp, Homo sapiens
ctcaaatatacatat

SEQ ID NO: 1670830 - DNA, 15 bp, Homo sapiens
cctcaaatatacata

SEQ ID NO: 1670831 - DNA, 15 bp, Homo sapiens
gcctcaaatatacat

SEQ ID NO: 1670832 - DNA, 15 bp, Homo sapiens
ggcctcaaatataca

SEQ ID NO: 1670833 - DNA, 15 bp, Homo sapiens
tggcctcaaatatac

SEQ ID NO: 1670834 - DNA, 15 bp, Homo sapiens
ttggcctcaaatata

SEQ ID NO: 1670835 - DNA, 15 bp, Homo sapiens
attggcctcaaatat

SEQ ID NO: 1670836 - DNA, 15 bp, Homo sapiens
aattggcctcaaata

SEQ ID NO: 1670837 - DNA, 15 bp, Homo sapiens
aaattggcctcaaat

SEQ ID NO: 1670838 - DNA, 15 bp, Homo sapiens
caaattggcctcaaa

SEQ ID NO: 1670839 - DNA, 15 bp, Homo sapiens
acaaattggcctcaa

SEQ ID NO: 1670840 - DNA, 15 bp, Homo sapiens
cacaaattggcctca

SEQ ID NO: 1670841 - DNA, 15 bp, Homo sapiens
acacaaattggcctc

SEQ ID NO: 1670842 - DNA, 15 bp, Homo sapiens
aacacaaattggcct

SEQ ID NO: 1670843 - DNA, 15 bp, Homo sapiens
aaacacaaattggcc

SEQ ID NO: 1670844 - DNA, 15 bp, Homo sapiens
caaacacaaattggc

SEQ ID NO: 1670845 - DNA, 15 bp, Homo sapiens
gcaaacacaaattgg

SEQ ID NO: 1670846 - DNA, 15 bp, Homo sapiens
agcaaacacaaattg

SEQ ID NO: 1670847 - DNA, 15 bp, Homo sapiens
cagcaaacacaaatt

SEQ ID NO: 1670848 - DNA, 15 bp, Homo sapiens
gcagcaaacacaaat

SEQ ID NO: 1670849 - DNA, 15 bp, Homo sapiens
agcagcaaacacaaa

SEQ ID NO: 1670850 - DNA, 15 bp, Homo sapiens
gagcagcaaacacaa

SEQ ID NO: 1670851 - DNA, 15 bp, Homo sapiens
agagcagcaaacaca

SEQ ID NO: 1670852 - DNA, 15 bp, Homo sapiens
cagagcagcaaacac

SEQ ID NO: 1670853 - DNA, 15 bp, Homo sapiens
ccagagcagcaaaca

SEQ ID NO: 1670854 - DNA, 15 bp, Homo sapiens
accagagcagcaaac

SEQ ID NO: 1670855 - DNA, 15 bp, Homo sapiens
taccagagcagcaaa

SEQ ID NO: 1670856 - DNA, 15 bp, Homo sapiens
ttaccagagcagcaa

SEQ ID NO: 1670857 - DNA, 15 bp, Homo sapiens
attaccagagcagca

SEQ ID NO: 1670858 - DNA, 15 bp, Homo sapiens
aattaccagagcagc

SEQ ID NO: 1670859 - DNA, 15 bp, Homo sapiens
aaattaccagagcag

SEQ ID NO: 1670860 - DNA, 15 bp, Homo sapiens
aaaattaccagagca

SEQ ID NO: 1670861 - DNA, 15 bp, Homo sapiens
caaaattaccagagc

SEQ ID NO: 1670862 - DNA, 15 bp, Homo sapiens
tcaaaattaccagag

SEQ ID NO: 1670863 - DNA, 15 bp, Homo sapiens
ctcaaaattaccaga

SEQ ID NO: 1670864 - DNA, 15 bp, Homo sapiens
actcaaaattaccag

SEQ ID NO: 1670865 - DNA, 15 bp, Homo sapiens
tactcaaaattacca

SEQ ID NO: 1670866 - DNA, 15 bp, Homo sapiens
ttactcaaaattacc

SEQ ID NO: 1670867 - DNA, 15 bp, Homo sapiens
tttactcaaaattac

SEQ ID NO: 1670868 - DNA, 15 bp, Homo sapiens
ttttactcaaaatta

SEQ ID NO: 1670869 - DNA, 15 bp, Homo sapiens
tttttactcaaaatt

SEQ ID NO: 1670870 - DNA, 15 bp, Homo sapiens
atttttactcaaaat

SEQ ID NO: 1670871 - DNA, 15 bp, Homo sapiens
catttttactcaaaa

SEQ ID NO: 1670872 - DNA, 15 bp, Homo sapiens
gcatttttactcaaa

SEQ ID NO: 1670873 - DNA, 15 bp, Homo sapiens
tgcatttttactcaa

SEQ ID NO: 1670874 - DNA, 15 bp, Homo sapiens
ctgcatttttactca

SEQ ID NO: 1670875 - DNA, 15 bp, Homo sapiens
actgcatttttactc

SEQ ID NO: 1670876 - DNA, 15 bp, Homo sapiens
tactgcatttttact

SEQ ID NO: 1670877 - DNA, 15 bp, Homo sapiens
atactgcatttttac

SEQ ID NO: 1670878 - DNA, 15 bp, Homo sapiens
aatactgcattttta

SEQ ID NO: 1670879 - DNA, 15 bp, Homo sapiens
gaatactgcattttt

SEQ ID NO: 1670880 - DNA, 15 bp, Homo sapiens
ggaatactgcatttt

SEQ ID NO: 1670881 - DNA, 15 bp, Homo sapiens
tggaatactgcattt

SEQ ID NO: 1670882 - DNA, 15 bp, Homo sapiens
ctggaatactgcatt

SEQ ID NO: 1670883 - DNA, 15 bp, Homo sapiens
cctggaatactgcat

SEQ ID NO: 1670884 - DNA, 15 bp, Homo sapiens
acctggaatactgca

SEQ ID NO: 1670885 - DNA, 15 bp, Homo sapiens
tacctggaatactgc

SEQ ID NO: 1670886 - DNA, 15 bp, Homo sapiens
atacctggaatactg

SEQ ID NO: 1670887 - DNA, 15 bp, Homo sapiens
gatacctggaatact

SEQ ID NO: 1670888 - DNA, 15 bp, Homo sapiens
tgatacctggaatac

SEQ ID NO: 1670889 - DNA, 15 bp, Homo sapiens
ctgatacctggaata

SEQ ID NO: 1670890 - DNA, 15 bp, Homo sapiens
tctgatacctggaat

SEQ ID NO: 1670891 - DNA, 15 bp, Homo sapiens
ttctgatacctggaa

SEQ ID NO: 1670892 - DNA, 15 bp, Homo sapiens
tttctgatacctgga

SEQ ID NO: 1670893 - DNA, 15 bp, Homo sapiens
gtttctgatacctgg

SEQ ID NO: 1670894 - DNA, 15 bp, Homo sapiens
cgtttctgatacctg

SEQ ID NO: 1670895 - DNA, 15 bp, Homo sapiens
tcgtttctgatacct

SEQ ID NO: 1670896 - DNA, 15 bp, Homo sapiens
ttcgtttctgatacc

SEQ ID NO: 1670897 - DNA, 15 bp, Homo sapiens
tttcgtttctgatac

SEQ ID NO: 1670898 - DNA, 15 bp, Homo sapiens
ttttcgtttctgata

SEQ ID NO: 1670899 - DNA, 15 bp, Homo sapiens
gttttcgtttctgat

SEQ ID NO: 1670900 - DNA, 15 bp, Homo sapiens
tgttttcgtttctga

SEQ ID NO: 1670901 - DNA, 15 bp, Homo sapiens
gtgttttcgtttctg

SEQ ID NO: 1670902 - DNA, 15 bp, Homo sapiens
tgtgttttcgtttct

SEQ ID NO: 1670903 - DNA, 15 bp, Homo sapiens
atgtgttttcgtttc

SEQ ID NO: 1670904 - DNA, 15 bp, Homo sapiens
catgtgttttcgttt

SEQ ID NO: 1670905 - DNA, 15 bp, Homo sapiens
ccatgtgttttcgtt

SEQ ID NO: 1670906 - DNA, 15 bp, Homo sapiens
tccatgtgttttcgt

SEQ ID NO: 1670907 - DNA, 15 bp, Homo sapiens
ttccatgtgttttcg

SEQ ID NO: 1670908 - DNA, 15 bp, Homo sapiens
tttccatgtgttttc

SEQ ID NO: 1670909 - DNA, 15 bp, Homo sapiens
gtttccatgtgtttt

SEQ ID NO: 1670910 - DNA, 15 bp, Homo sapiens
agtttccatgtgttt

SEQ ID NO: 1670911 - DNA, 15 bp, Homo sapiens
cagtttccatgtgtt

SEQ ID NO: 1670912 - DNA, 15 bp, Homo sapiens
gcagtttccatgtgt

SEQ ID NO: 1670913 - DNA, 15 bp, Homo sapiens
agcagtttccatgtg

SEQ ID NO: 1670914 - DNA, 15 bp, Homo sapiens
aagcagtttccatgt

SEQ ID NO: 1670915 - DNA, 15 bp, Homo sapiens
aaagcagtttccatg

SEQ ID NO: 1670916 - DNA, 15 bp, Homo sapiens
aaaagcagtttccat

SEQ ID NO: 1670917 - DNA, 15 bp, Homo sapiens
taaaagcagtttcca

SEQ ID NO: 1670918 - DNA, 15 bp, Homo sapiens
ttaaaagcagtttcc

SEQ ID NO: 1670919 - DNA, 15 bp, Homo sapiens
tttaaaagcagtttc

SEQ ID NO: 1670920 - DNA, 15 bp, Homo sapiens
gtttaaaagcagttt

SEQ ID NO: 1670921 - DNA, 15 bp, Homo sapiens
agtttaaaagcagtt

SEQ ID NO: 1670922 - DNA, 15 bp, Homo sapiens
aagtttaaaagcagt

SEQ ID NO: 1670923 - DNA, 15 bp, Homo sapiens
aaagtttaaaagcag

SEQ ID NO: 1670924 - DNA, 15 bp, Homo sapiens
taaagtttaaaagca

SEQ ID NO: 1670925 - DNA, 15 bp, Homo sapiens
ttaaagtttaaaagc

SEQ ID NO: 1670926 - DNA, 15 bp, Homo sapiens
tttaaagtttaaaag

SEQ ID NO: 1670927 - DNA, 15 bp, Homo sapiens
ttttaaagtttaaaa

SEQ ID NO: 1670928 - DNA, 15 bp, Homo sapiens
attttaaagtttaaa

SEQ ID NO: 1670929 - DNA, 15 bp, Homo sapiens
tattttaaagtttaa

SEQ ID NO: 1670930 - DNA, 15 bp, Homo sapiens
atattttaaagttta

SEQ ID NO: 1670931 - DNA, 15 bp, Homo sapiens
tatattttaaagttt

SEQ ID NO: 1670932 - DNA, 15 bp, Homo sapiens
gtatattttaaagtt

SEQ ID NO: 1670933 - DNA, 15 bp, Homo sapiens
agtatattttaaagt

SEQ ID NO: 1670934 - DNA, 15 bp, Homo sapiens
cagtatattttaaag

SEQ ID NO: 1670935 - DNA, 15 bp, Homo sapiens
tcagtatattttaaa

SEQ ID NO: 1670936 - DNA, 15 bp, Homo sapiens
ttcagtatattttaa

SEQ ID NO: 1670937 - DNA, 15 bp, Homo sapiens
tttcagtatatttta

SEQ ID NO: 1670938 - DNA, 15 bp, Homo sapiens
ttttcagtatatttt

SEQ ID NO: 1670939 - DNA, 15 bp, Homo sapiens
gttttcagtatattt

SEQ ID NO: 1670940 - DNA, 15 bp, Homo sapiens
tgttttcagtatatt

SEQ ID NO: 1670941 - DNA, 15 bp, Homo sapiens
atgttttcagtatat

SEQ ID NO: 1670942 - DNA, 15 bp, Homo sapiens
tatgttttcagtata

SEQ ID NO: 1670943 - DNA, 15 bp, Homo sapiens
ttatgttttcagtat

SEQ ID NO: 1670944 - DNA, 15 bp, Homo sapiens
cttatgttttcagta

SEQ ID NO: 1670945 - DNA, 15 bp, Homo sapiens
ccttatgttttcagt

SEQ ID NO: 1670946 - DNA, 15 bp, Homo sapiens
cccttatgttttcag

SEQ ID NO: 1670947 - DNA, 15 bp, Homo sapiens
tcccttatgttttca

SEQ ID NO: 1670948 - DNA, 15 bp, Homo sapiens
gtcccttatgttttc

SEQ ID NO: 1670949 - DNA, 15 bp, Homo sapiens
agtcccttatgtttt

SEQ ID NO: 1670950 - DNA, 15 bp, Homo sapiens
tagtcccttatgttt

SEQ ID NO: 1670951 - DNA, 15 bp, Homo sapiens
ttagtcccttatgtt

SEQ ID NO: 1670952 - DNA, 15 bp, Homo sapiens
cttagtcccttatgt

SEQ ID NO: 1670953 - DNA, 15 bp, Homo sapiens
gcttagtcccttatg

SEQ ID NO: 1670954 - DNA, 15 bp, Homo sapiens
agcttagtcccttat

SEQ ID NO: 1670955 - DNA, 15 bp, Homo sapiens
aagcttagtccctta

SEQ ID NO: 1670956 - DNA, 15 bp, Homo sapiens
caagcttagtccctt

SEQ ID NO: 1670957 - DNA, 15 bp, Homo sapiens
acaagcttagtccct

SEQ ID NO: 1670958 - DNA, 15 bp, Homo sapiens
aacaagcttagtccc

SEQ ID NO: 1670959 - DNA, 15 bp, Homo sapiens
caacaagcttagtcc

SEQ ID NO: 1670960 - DNA, 15 bp, Homo sapiens
acaacaagcttagtc

SEQ ID NO: 1670961 - DNA, 15 bp, Homo sapiens
cacaacaagcttagt

SEQ ID NO: 1670962 - DNA, 15 bp, Homo sapiens
ccacaacaagcttag

SEQ ID NO: 1670963 - DNA, 15 bp, Homo sapiens
accacaacaagctta

SEQ ID NO: 1670964 - DNA, 15 bp, Homo sapiens
gaccacaacaagctt

SEQ ID NO: 1670965 - DNA, 15 bp, Homo sapiens
tgaccacaacaagct

SEQ ID NO: 1670966 - DNA, 15 bp, Homo sapiens
gtgaccacaacaagc

SEQ ID NO: 1670967 - DNA, 15 bp, Homo sapiens
ggtgaccacaacaag

SEQ ID NO: 1670968 - DNA, 15 bp, Homo sapiens
aggtgaccacaacaa

SEQ ID NO: 1670969 - DNA, 15 bp, Homo sapiens
taggtgaccacaaca

SEQ ID NO: 1670970 - DNA, 15 bp, Homo sapiens
ataggtgaccacaac

SEQ ID NO: 1670971 - DNA, 15 bp, Homo sapiens
tataggtgaccacaa

SEQ ID NO: 1670972 - DNA, 15 bp, Homo sapiens
ttataggtgaccaca

SEQ ID NO: 1670973 - DNA, 15 bp, Homo sapiens
attataggtgaccac

SEQ ID NO: 1670974 - DNA, 15 bp, Homo sapiens
cattataggtgacca

SEQ ID NO: 1670975 - DNA, 15 bp, Homo sapiens
acattataggtgacc

SEQ ID NO: 1670976 - DNA, 15 bp, Homo sapiens
cacattataggtgac

SEQ ID NO: 1670977 - DNA, 15 bp, Homo sapiens
gcacattataggtga

SEQ ID NO: 1670978 - DNA, 15 bp, Homo sapiens
ggcacattataggtg

SEQ ID NO: 1670979 - DNA, 15 bp, Homo sapiens
tggcacattataggt

SEQ ID NO: 1670980 - DNA, 15 bp, Homo sapiens
ctggcacattatagg

SEQ ID NO: 1670981 - DNA, 15 bp, Homo sapiens
tctggcacattatag

SEQ ID NO: 1670982 - DNA, 15 bp, Homo sapiens
atctggcacattata

SEQ ID NO: 1670983 - DNA, 15 bp, Homo sapiens
tatctggcacattat

SEQ ID NO: 1670984 - DNA, 15 bp, Homo sapiens
gtatctggcacatta

SEQ ID NO: 1670985 - DNA, 15 bp, Homo sapiens
ggtatctggcacatt

SEQ ID NO: 1670986 - DNA, 15 bp, Homo sapiens
tggtatctggcacat

SEQ ID NO: 1670987 - DNA, 15 bp, Homo sapiens
atggtatctggcaca

SEQ ID NO: 1670988 - DNA, 15 bp, Homo sapiens
catggtatctggcac

SEQ ID NO: 1670989 - DNA, 15 bp, Homo sapiens
gcatggtatctggca

SEQ ID NO: 1670990 - DNA, 15 bp, Homo sapiens
agcatggtatctggc

SEQ ID NO: 1670991 - DNA, 15 bp, Homo sapiens
cagcatggtatctgg

SEQ ID NO: 1670992 - DNA, 15 bp, Homo sapiens
ccagcatggtatctg

SEQ ID NO: 1670993 - DNA, 15 bp, Homo sapiens
cccagcatggtatct

SEQ ID NO: 1670994 - DNA, 15 bp, Homo sapiens
acccagcatggtatc

SEQ ID NO: 1670995 - DNA, 15 bp, Homo sapiens
cacccagcatggtat

SEQ ID NO: 1670996 - DNA, 15 bp, Homo sapiens
gcacccagcatggta

SEQ ID NO: 1670997 - DNA, 15 bp, Homo sapiens
agcacccagcatggt

SEQ ID NO: 1670998 - DNA, 15 bp, Homo sapiens
tagcacccagcatgg

SEQ ID NO: 1670999 - DNA, 15 bp, Homo sapiens
ctagcacccagcatg

SEQ ID NO: 1671000 - DNA, 15 bp, Homo sapiens
tctagcacccagcat

SEQ ID NO: 1671001 - DNA, 15 bp, Homo sapiens
ctctagcacccagca

SEQ ID NO: 1671002 - DNA, 15 bp, Homo sapiens
gctctagcacccagc

SEQ ID NO: 1671003 - DNA, 15 bp, Homo sapiens
agctctagcacccag

SEQ ID NO: 1671004 - DNA, 15 bp, Homo sapiens
tagctctagcaccca

SEQ ID NO: 1671005 - DNA, 15 bp, Homo sapiens
gtagctctagcaccc

SEQ ID NO: 1671006 - DNA, 15 bp, Homo sapiens
ggtagctctagcacc

SEQ ID NO: 1671007 - DNA, 15 bp, Homo sapiens
tggtagctctagcac

SEQ ID NO: 1671008 - DNA, 15 bp, Homo sapiens
ttggtagctctagca

SEQ ID NO: 1671009 - DNA, 15 bp, Homo sapiens
tttggtagctctagc

SEQ ID NO: 1671010 - DNA, 15 bp, Homo sapiens
ctttggtagctctag

SEQ ID NO: 1671011 - DNA, 15 bp, Homo sapiens
cctttggtagctcta

SEQ ID NO: 1671012 - DNA, 15 bp, Homo sapiens
ccctttggtagctct

SEQ ID NO: 1671013 - DNA, 15 bp, Homo sapiens
cccctttggtagctc

SEQ ID NO: 1671014 - DNA, 15 bp, Homo sapiens
ccccctttggtagct

SEQ ID NO: 1671015 - DNA, 15 bp, Homo sapiens
tccccctttggtagc

SEQ ID NO: 1671016 - DNA, 15 bp, Homo sapiens
ttccccctttggtag

SEQ ID NO: 1671017 - DNA, 15 bp, Homo sapiens
tttccccctttggta

SEQ ID NO: 1671018 - DNA, 15 bp, Homo sapiens
ttttccccctttggt

SEQ ID NO: 1671019 - DNA, 15 bp, Homo sapiens
cttttccccctttgg

SEQ ID NO: 1671020 - DNA, 15 bp, Homo sapiens
acttttccccctttg

SEQ ID NO: 1671021 - DNA, 15 bp, Homo sapiens
tacttttcccccttt

SEQ ID NO: 1671022 - DNA, 15 bp, Homo sapiens
atacttttccccctt

SEQ ID NO: 1671023 - DNA, 15 bp, Homo sapiens
aatacttttccccct

SEQ ID NO: 1671024 - DNA, 15 bp, Homo sapiens
gaatacttttccccc

SEQ ID NO: 1671025 - DNA, 15 bp, Homo sapiens
agaatacttttcccc

SEQ ID NO: 1671026 - DNA, 15 bp, Homo sapiens
gagaatacttttccc

SEQ ID NO: 1671027 - DNA, 15 bp, Homo sapiens
tgagaatacttttcc

SEQ ID NO: 1671028 - DNA, 15 bp, Homo sapiens
atgagaatacttttc

SEQ ID NO: 1671029 - DNA, 15 bp, Homo sapiens
tatgagaatactttt

SEQ ID NO: 1671030 - DNA, 15 bp, Homo sapiens
ctatgagaatacttt

SEQ ID NO: 1671031 - DNA, 15 bp, Homo sapiens
tctatgagaatactt

SEQ ID NO: 1671032 - DNA, 15 bp, Homo sapiens
ttctatgagaatact

SEQ ID NO: 1671033 - DNA, 15 bp, Homo sapiens
gttctatgagaatac

SEQ ID NO: 1671034 - DNA, 15 bp, Homo sapiens
tgttctatgagaata

SEQ ID NO: 1671035 - DNA, 15 bp, Homo sapiens
ttgttctatgagaat

SEQ ID NO: 1671036 - DNA, 15 bp, Homo sapiens
tttgttctatgagaa

SEQ ID NO: 1671037 - DNA, 15 bp, Homo sapiens
ttttgttctatgaga

SEQ ID NO: 1671038 - DNA, 15 bp, Homo sapiens
tttttgttctatgag

SEQ ID NO: 1671039 - DNA, 15 bp, Homo sapiens
ttttttgttctatga

SEQ ID NO: 1671040 - DNA, 15 bp, Homo sapiens
attttttgttctatg

SEQ ID NO: 1671041 - DNA, 15 bp, Homo sapiens
aattttttgttctat

SEQ ID NO: 1671042 - DNA, 15 bp, Homo sapiens
aaattttttgttcta

SEQ ID NO: 1671043 - DNA, 15 bp, Homo sapiens
gaaattttttgttct

SEQ ID NO: 1671044 - DNA, 15 bp, Homo sapiens
tgaaattttttgttc

SEQ ID NO: 1671045 - DNA, 15 bp, Homo sapiens
ctgaaattttttgtt

SEQ ID NO: 1671046 - DNA, 15 bp, Homo sapiens
tctgaaattttttgt

SEQ ID NO: 1671047 - DNA, 15 bp, Homo sapiens
ttctgaaattttttg

SEQ ID NO: 1671048 - DNA, 15 bp, Homo sapiens
tttctgaaatttttt

SEQ ID NO: 1671049 - DNA, 15 bp, Homo sapiens
ctttctgaaattttt

SEQ ID NO: 1671050 - DNA, 15 bp, Homo sapiens
cctttctgaaatttt

SEQ ID NO: 1671051 - DNA, 15 bp, Homo sapiens
acctttctgaaattt

SEQ ID NO: 1671052 - DNA, 15 bp, Homo sapiens
cacctttctgaaatt

SEQ ID NO: 1671053 - DNA, 15 bp, Homo sapiens
gcacctttctgaaat

SEQ ID NO: 1671054 - DNA, 15 bp, Homo sapiens
tgcacctttctgaaa

SEQ ID NO: 1671055 - DNA, 15 bp, Homo sapiens
atgcacctttctgaa

SEQ ID NO: 1671056 - DNA, 15 bp, Homo sapiens
tatgcacctttctga

SEQ ID NO: 1671057 - DNA, 15 bp, Homo sapiens
atatgcacctttctg

SEQ ID NO: 1671058 - DNA, 15 bp, Homo sapiens
aatatgcacctttct

SEQ ID NO: 1671059 - DNA, 15 bp, Homo sapiens
taatatgcacctttc

SEQ ID NO: 1671060 - DNA, 15 bp, Homo sapiens
ttaatatgcaccttt

SEQ ID NO: 1671061 - DNA, 15 bp, Homo sapiens
tttaatatgcacctt

SEQ ID NO: 1671062 - DNA, 15 bp, Homo sapiens
ctttaatatgcacct

SEQ ID NO: 1671063 - DNA, 15 bp, Homo sapiens
actttaatatgcacc

SEQ ID NO: 1671064 - DNA, 15 bp, Homo sapiens
cactttaatatgcac

SEQ ID NO: 1671065 - DNA, 15 bp, Homo sapiens
gcactttaatatgca

SEQ ID NO: 1671066 - DNA, 15 bp, Homo sapiens
agcactttaatatgc

SEQ ID NO: 1671067 - DNA, 15 bp, Homo sapiens
aagcactttaatatg

SEQ ID NO: 1671068 - DNA, 15 bp, Homo sapiens
aaagcactttaatat

SEQ ID NO: 1671069 - DNA, 15 bp, Homo sapiens
caaagcactttaata

SEQ ID NO: 1671070 - DNA, 15 bp, Homo sapiens
acaaagcactttaat

SEQ ID NO: 1671071 - DNA, 15 bp, Homo sapiens
tacaaagcactttaa

SEQ ID NO: 1671072 - DNA, 15 bp, Homo sapiens
ttacaaagcacttta

SEQ ID NO: 1671073 - DNA, 15 bp, Homo sapiens
tttacaaagcacttt

SEQ ID NO: 1671074 - DNA, 15 bp, Homo sapiens
gtttacaaagcactt

SEQ ID NO: 1671075 - DNA, 15 bp, Homo sapiens
agtttacaaagcact

SEQ ID NO: 1671076 - DNA, 15 bp, Homo sapiens
tagtttacaaagcac

SEQ ID NO: 1671077 - DNA, 15 bp, Homo sapiens
ttagtttacaaagca

SEQ ID NO: 1671078 - DNA, 15 bp, Homo sapiens
tttagtttacaaagc

SEQ ID NO: 1671079 - DNA, 15 bp, Homo sapiens
ctttagtttacaaag

SEQ ID NO: 1671080 - DNA, 15 bp, Homo sapiens
gctttagtttacaaa

SEQ ID NO: 1671081 - DNA, 15 bp, Homo sapiens
tgctttagtttacaa

SEQ ID NO: 1671082 - DNA, 15 bp, Homo sapiens
atgctttagtttaca

SEQ ID NO: 1671083 - DNA, 15 bp, Homo sapiens
catgctttagtttac

SEQ ID NO: 1671084 - DNA, 15 bp, Homo sapiens
tcatgctttagttta

SEQ ID NO: 1671085 - DNA, 15 bp, Homo sapiens
atcatgctttagttt

SEQ ID NO: 1671086 - DNA, 15 bp, Homo sapiens
tatcatgctttagtt

SEQ ID NO: 1671087 - DNA, 15 bp, Homo sapiens
gtatcatgctttagt

SEQ ID NO: 1671088 - DNA, 15 bp, Homo sapiens
tgtatcatgctttag

SEQ ID NO: 1671089 - DNA, 15 bp, Homo sapiens
ttgtatcatgcttta

SEQ ID NO: 1671090 - DNA, 15 bp, Homo sapiens
tttgtatcatgcttt

SEQ ID NO: 1671091 - DNA, 15 bp, Homo sapiens
atttgtatcatgctt

SEQ ID NO: 1671092 - DNA, 15 bp, Homo sapiens
catttgtatcatgct

SEQ ID NO: 1671093 - DNA, 15 bp, Homo sapiens
acatttgtatcatgc

SEQ ID NO: 1671094 - DNA, 15 bp, Homo sapiens
gacatttgtatcatg

SEQ ID NO: 1671095 - DNA, 15 bp, Homo sapiens
tgacatttgtatcat

SEQ ID NO: 1671096 - DNA, 15 bp, Homo sapiens
ttgacatttgtatca

SEQ ID NO: 1671097 - DNA, 15 bp, Homo sapiens
attgacatttgtatc

SEQ ID NO: 1671098 - DNA, 15 bp, Homo sapiens
cattgacatttgtat

SEQ ID NO: 1671099 - DNA, 15 bp, Homo sapiens
ccattgacatttgta

SEQ ID NO: 1671100 - DNA, 15 bp, Homo sapiens
cccattgacatttgt

SEQ ID NO: 1671101 - DNA, 15 bp, Homo sapiens
gcccattgacatttg

SEQ ID NO: 1671102 - DNA, 15 bp, Homo sapiens
agcccattgacattt

SEQ ID NO: 1671103 - DNA, 15 bp, Homo sapiens
tagcccattgacatt

SEQ ID NO: 1671104 - DNA, 15 bp, Homo sapiens
gtagcccattgacat

SEQ ID NO: 1671105 - DNA, 15 bp, Homo sapiens
tgtagcccattgaca

SEQ ID NO: 1671106 - DNA, 15 bp, Homo sapiens
atgtagcccattgac

SEQ ID NO: 1671107 - DNA, 15 bp, Homo sapiens
tatgtagcccattga

SEQ ID NO: 1671108 - DNA, 15 bp, Homo sapiens
atatgtagcccattg

SEQ ID NO: 1671109 - DNA, 15 bp, Homo sapiens
aatatgtagcccatt

SEQ ID NO: 1671110 - DNA, 15 bp, Homo sapiens
aaatatgtagcccat

SEQ ID NO: 1671111 - DNA, 15 bp, Homo sapiens
taaatatgtagccca

SEQ ID NO: 1671112 - DNA, 15 bp, Homo sapiens
ataaatatgtagccc

SEQ ID NO: 1671113 - DNA, 15 bp, Homo sapiens
cataaatatgtagcc

SEQ ID NO: 1671114 - DNA, 15 bp, Homo sapiens
tcataaatatgtagc

SEQ ID NO: 1671115 - DNA, 15 bp, Homo sapiens
ttcataaatatgtag

SEQ ID NO: 1671116 - DNA, 15 bp, Homo sapiens
attcataaatatgta

SEQ ID NO: 1671117 - DNA, 15 bp, Homo sapiens
cattcataaatatgt

SEQ ID NO: 1671118 - DNA, 15 bp, Homo sapiens
tcattcataaatatg

SEQ ID NO: 1671119 - DNA, 15 bp, Homo sapiens
ttcattcataaatat

SEQ ID NO: 1671120 - DNA, 15 bp, Homo sapiens
attcattcataaata

SEQ ID NO: 1671121 - DNA, 15 bp, Homo sapiens
cattcattcataaat

SEQ ID NO: 1671122 - DNA, 15 bp, Homo sapiens
tcattcattcataaa

SEQ ID NO: 1671123 - DNA, 15 bp, Homo sapiens
ttcattcattcataa

SEQ ID NO: 1671124 - DNA, 15 bp, Homo sapiens
attcattcattcata

SEQ ID NO: 1671125 - DNA, 15 bp, Homo sapiens
ccattcattcattca

SEQ ID NO: 1671126 - DNA, 15 bp, Homo sapiens
tccattcattcattc

SEQ ID NO: 1671127 - DNA, 15 bp, Homo sapiens
catccattcattcat

SEQ ID NO: 1671128 - DNA, 15 bp, Homo sapiens
tcatccattcattca

SEQ ID NO: 1671129 - DNA, 15 bp, Homo sapiens
ttcatccattcattc

SEQ ID NO: 1671130 - DNA, 15 bp, Homo sapiens
attcatccattcatt

SEQ ID NO: 1671131 - DNA, 15 bp, Homo sapiens
cattcatccattcat

SEQ ID NO: 1671132 - DNA, 15 bp, Homo sapiens
tcattcatccattca

SEQ ID NO: 1671133 - DNA, 15 bp, Homo sapiens
ttcattcatccattc

SEQ ID NO: 1671134 - DNA, 15 bp, Homo sapiens
attcattcatccatt

SEQ ID NO: 1671135 - DNA, 15 bp, Homo sapiens
tattcattcatccat

SEQ ID NO: 1671136 - DNA, 15 bp, Homo sapiens
atattcattcatcca

SEQ ID NO: 1671137 - DNA, 15 bp, Homo sapiens
aatattcattcatcc

SEQ ID NO: 1671138 - DNA, 15 bp, Homo sapiens
taatattcattcatc

SEQ ID NO: 1671139 - DNA, 15 bp, Homo sapiens
ttaatattcattcat

SEQ ID NO: 1671140 - DNA, 15 bp, Homo sapiens
cttaatattcattca

SEQ ID NO: 1671141 - DNA, 15 bp, Homo sapiens
acttaatattcattc

SEQ ID NO: 1671142 - DNA, 15 bp, Homo sapiens
cacttaatattcatt

SEQ ID NO: 1671143 - DNA, 15 bp, Homo sapiens
gcacttaatattcat

SEQ ID NO: 1671144 - DNA, 15 bp, Homo sapiens
ggcacttaatattca

SEQ ID NO: 1671145 - DNA, 15 bp, Homo sapiens
aggcacttaatattc

SEQ ID NO: 1671146 - DNA, 15 bp, Homo sapiens
gaggcacttaatatt

SEQ ID NO: 1671147 - DNA, 15 bp, Homo sapiens
agaggcacttaatat

SEQ ID NO: 1671148 - DNA, 15 bp, Homo sapiens
aagaggcacttaata

SEQ ID NO: 1671149 - DNA, 15 bp, Homo sapiens
taagaggcacttaat

SEQ ID NO: 1671150 - DNA, 15 bp, Homo sapiens
gtaagaggcacttaa

SEQ ID NO: 1671151 - DNA, 15 bp, Homo sapiens
tgtaagaggcactta

SEQ ID NO: 1671152 - DNA, 15 bp, Homo sapiens
atgtaagaggcactt

SEQ ID NO: 1671153 - DNA, 15 bp, Homo sapiens
tatgtaagaggcact

SEQ ID NO: 1671154 - DNA, 15 bp, Homo sapiens
gtatgtaagaggcac

SEQ ID NO: 1671155 - DNA, 15 bp, Homo sapiens
ggtatgtaagaggca

SEQ ID NO: 1671156 - DNA, 15 bp, Homo sapiens
tggtatgtaagaggc

SEQ ID NO: 1671157 - DNA, 15 bp, Homo sapiens
ctggtatgtaagagg

SEQ ID NO: 1671158 - DNA, 15 bp, Homo sapiens
gctggtatgtaagag

SEQ ID NO: 1671159 - DNA, 15 bp, Homo sapiens
agctggtatgtaaga

SEQ ID NO: 1671160 - DNA, 15 bp, Homo sapiens
tagctggtatgtaag

SEQ ID NO: 1671161 - DNA, 15 bp, Homo sapiens
atagctggtatgtaa

SEQ ID NO: 1671162 - DNA, 15 bp, Homo sapiens
aatagctggtatgta

SEQ ID NO: 1671163 - DNA, 15 bp, Homo sapiens
aaatagctggtatgt

SEQ ID NO: 1671164 - DNA, 15 bp, Homo sapiens
aaaatagctggtatg

SEQ ID NO: 1671165 - DNA, 15 bp, Homo sapiens
caaaatagctggtat

SEQ ID NO: 1671166 - DNA, 15 bp, Homo sapiens
ccaaaatagctggta

SEQ ID NO: 1671167 - DNA, 15 bp, Homo sapiens
ttacacatattttct

SEQ ID NO: 1671168 - DNA, 15 bp, Homo sapiens
tttacacatattttc

SEQ ID NO: 1671169 - DNA, 15 bp, Homo sapiens
ttttacacatatttt

SEQ ID NO: 1671170 - DNA, 15 bp, Homo sapiens
attttacacatattt

SEQ ID NO: 1671171 - DNA, 15 bp, Homo sapiens
gattttacacatatt

SEQ ID NO: 1671172 - DNA, 15 bp, Homo sapiens
tgattttacacatat

SEQ ID NO: 1671173 - DNA, 15 bp, Homo sapiens
ttgattttacacata

SEQ ID NO: 1671174 - DNA, 15 bp, Homo sapiens
attgattttacacat

SEQ ID NO: 1671175 - DNA, 15 bp, Homo sapiens
aattgattttacaca

SEQ ID NO: 1671176 - DNA, 15 bp, Homo sapiens
aaattgattttacac

SEQ ID NO: 1671177 - DNA, 15 bp, Homo sapiens
taaattgattttaca

SEQ ID NO: 1671178 - DNA, 15 bp, Homo sapiens
ataaattgattttac

SEQ ID NO: 1671179 - DNA, 15 bp, Homo sapiens
tataaattgatttta

SEQ ID NO: 1671180 - DNA, 15 bp, Homo sapiens
ttataaattgatttt

SEQ ID NO: 1671181 - DNA, 15 bp, Homo sapiens
attataaattgattt

SEQ ID NO: 1671182 - DNA, 15 bp, Homo sapiens
aattataaattgatt

SEQ ID NO: 1671183 - DNA, 15 bp, Homo sapiens
aaattataaattgat

SEQ ID NO: 1671184 - DNA, 15 bp, Homo sapiens
caaattataaattga

SEQ ID NO: 1671185 - DNA, 15 bp, Homo sapiens
acaaattataaattg

SEQ ID NO: 1671186 - DNA, 15 bp, Homo sapiens
tacaaattataaatt

SEQ ID NO: 1671187 - DNA, 15 bp, Homo sapiens
ttacaaattataaat

SEQ ID NO: 1671188 - DNA, 15 bp, Homo sapiens
tttacaaattataaa

SEQ ID NO: 1671189 - DNA, 15 bp, Homo sapiens
gtttacaaattataa

SEQ ID NO: 1671190 - DNA, 15 bp, Homo sapiens
agtttacaaattata

SEQ ID NO: 1671191 - DNA, 15 bp, Homo sapiens
cagtttacaaattat

SEQ ID NO: 1671192 - DNA, 15 bp, Homo sapiens
gcagtttacaaatta

SEQ ID NO: 1671193 - DNA, 15 bp, Homo sapiens
ggcagtttacaaatt

SEQ ID NO: 1671194 - DNA, 15 bp, Homo sapiens
tggcagtttacaaat

SEQ ID NO: 1671195 - DNA, 15 bp, Homo sapiens
gtggcagtttacaaa

SEQ ID NO: 1671196 - DNA, 15 bp, Homo sapiens
ggtggcagtttacaa

SEQ ID NO: 1671197 - DNA, 15 bp, Homo sapiens
gggtggcagtttaca

SEQ ID NO: 1671198 - DNA, 15 bp, Homo sapiens
tgggtggcagtttac

SEQ ID NO: 1671199 - DNA, 15 bp, Homo sapiens
atgggtggcagttta

SEQ ID NO: 1671200 - DNA, 15 bp, Homo sapiens
tatgggtggcagttt

SEQ ID NO: 1671201 - DNA, 15 bp, Homo sapiens
atatgggtggcagtt

SEQ ID NO: 1671202 - DNA, 15 bp, Homo sapiens
tatatgggtggcagt

SEQ ID NO: 1671203 - DNA, 15 bp, Homo sapiens
atatatgggtggcag

SEQ ID NO: 1671204 - DNA, 15 bp, Homo sapiens
tatatatgggtggca

SEQ ID NO: 1671205 - DNA, 15 bp, Homo sapiens
ttatatatgggtggc

SEQ ID NO: 1671206 - DNA, 15 bp, Homo sapiens
cttatatatgggtgg

SEQ ID NO: 1671207 - DNA, 15 bp, Homo sapiens
gcttatatatgggtg

SEQ ID NO: 1671208 - DNA, 15 bp, Homo sapiens
agcttatatatgggt

SEQ ID NO: 1671209 - DNA, 15 bp, Homo sapiens
tagcttatatatggg

SEQ ID NO: 1671210 - DNA, 15 bp, Homo sapiens
atagcttatatatgg

SEQ ID NO: 1671211 - DNA, 15 bp, Homo sapiens
tatagcttatatatg

SEQ ID NO: 1671212 - DNA, 15 bp, Homo sapiens
atatagcttatatat

SEQ ID NO: 1671213 - DNA, 15 bp, Homo sapiens
gatatagcttatata

SEQ ID NO: 1671214 - DNA, 15 bp, Homo sapiens
agatatagcttatat

SEQ ID NO: 1671215 - DNA, 15 bp, Homo sapiens
cagatatagcttata

SEQ ID NO: 1671216 - DNA, 15 bp, Homo sapiens
gcagatatagcttat

SEQ ID NO: 1671217 - DNA, 15 bp, Homo sapiens
agcagatatagctta

SEQ ID NO: 1671218 - DNA, 15 bp, Homo sapiens
cagcagatatagctt

SEQ ID NO: 1671219 - DNA, 15 bp, Homo sapiens
tcagcagatatagct

SEQ ID NO: 1671220 - DNA, 15 bp, Homo sapiens
ttcagcagatatagc

SEQ ID NO: 1671221 - DNA, 15 bp, Homo sapiens
attcagcagatatag

SEQ ID NO: 1671222 - DNA, 15 bp, Homo sapiens
cattcagcagatata

SEQ ID NO: 1671223 - DNA, 15 bp, Homo sapiens
tcattcagcagatat

SEQ ID NO: 1671224 - DNA, 15 bp, Homo sapiens
atcattcagcagata

SEQ ID NO: 1671225 - DNA, 15 bp, Homo sapiens
gatcattcagcagat

SEQ ID NO: 1671226 - DNA, 15 bp, Homo sapiens
tgatcattcagcaga

SEQ ID NO: 1671227 - DNA, 15 bp, Homo sapiens
atgatcattcagcag

SEQ ID NO: 1671228 - DNA, 15 bp, Homo sapiens
aatgatcattcagca

SEQ ID NO: 1671229 - DNA, 15 bp, Homo sapiens
caatgatcattcagc

SEQ ID NO: 1671230 - DNA, 15 bp, Homo sapiens
tcaatgatcattcag

SEQ ID NO: 1671231 - DNA, 15 bp, Homo sapiens
atcaatgatcattca

SEQ ID NO: 1671232 - DNA, 15 bp, Homo sapiens
aatcaatgatcattc

SEQ ID NO: 1671233 - DNA, 15 bp, Homo sapiens
taatcaatgatcatt

SEQ ID NO: 1671234 - DNA, 15 bp, Homo sapiens
gtaatcaatgatcat

SEQ ID NO: 1671235 - DNA, 15 bp, Homo sapiens
agtaatcaatgatca

SEQ ID NO: 1671236 - DNA, 15 bp, Homo sapiens
gagtaatcaatgatc

SEQ ID NO: 1671237 - DNA, 15 bp, Homo sapiens
agagtaatcaatgat

SEQ ID NO: 1671238 - DNA, 15 bp, Homo sapiens
aagagtaatcaatga

SEQ ID NO: 1671239 - DNA, 15 bp, Homo sapiens
taagagtaatcaatg

SEQ ID NO: 1671240 - DNA, 15 bp, Homo sapiens
ataagagtaatcaat

SEQ ID NO: 1671241 - DNA, 15 bp, Homo sapiens
gataagagtaatcaa

SEQ ID NO: 1671242 - DNA, 15 bp, Homo sapiens
ggataagagtaatca

SEQ ID NO: 1671243 - DNA, 15 bp, Homo sapiens
aggataagagtaatc

SEQ ID NO: 1671244 - DNA, 15 bp, Homo sapiens
aaggataagagtaat

SEQ ID NO: 1671245 - DNA, 15 bp, Homo sapiens
taaggataagagtaa

SEQ ID NO: 1671246 - DNA, 15 bp, Homo sapiens
ctaaggataagagta

SEQ ID NO: 1671247 - DNA, 15 bp, Homo sapiens
tctaaggataagagt

SEQ ID NO: 1671248 - DNA, 15 bp, Homo sapiens
ctctaaggataagag

SEQ ID NO: 1671249 - DNA, 15 bp, Homo sapiens
tctctaaggataaga

SEQ ID NO: 1671250 - DNA, 15 bp, Homo sapiens
atctctaaggataag

SEQ ID NO: 1671251 - DNA, 15 bp, Homo sapiens
tatctctaaggataa

SEQ ID NO: 1671252 - DNA, 15 bp, Homo sapiens
ttatctctaaggata

SEQ ID NO: 1671253 - DNA, 15 bp, Homo sapiens
gttatctctaaggat

SEQ ID NO: 1671254 - DNA, 15 bp, Homo sapiens
tgttatctctaagga

SEQ ID NO: 1671255 - DNA, 15 bp, Homo sapiens
ttgttatctctaagg

SEQ ID NO: 1671256 - DNA, 15 bp, Homo sapiens
gttgttatctctaag

SEQ ID NO: 1671257 - DNA, 15 bp, Homo sapiens
agttgttatctctaa

SEQ ID NO: 1671258 - DNA, 15 bp, Homo sapiens
cagttgttatctcta

SEQ ID NO: 1671259 - DNA, 15 bp, Homo sapiens
ccagttgttatctct

SEQ ID NO: 1671260 - DNA, 15 bp, Homo sapiens
cccagttgttatctc

SEQ ID NO: 1671261 - DNA, 15 bp, Homo sapiens
ccccagttgttatct

SEQ ID NO: 1671262 - DNA, 15 bp, Homo sapiens
cccccagttgttatc

SEQ ID NO: 1671263 - DNA, 15 bp, Homo sapiens
gcccccagttgttat

SEQ ID NO: 1671264 - DNA, 15 bp, Homo sapiens
tgcccccagttgtta

SEQ ID NO: 1671265 - DNA, 15 bp, Homo sapiens
gtgcccccagttgtt

SEQ ID NO: 1671266 - DNA, 15 bp, Homo sapiens
tgtgcccccagttgt

SEQ ID NO: 1671267 - DNA, 15 bp, Homo sapiens
ttgtgcccccagttg

SEQ ID NO: 1671268 - DNA, 15 bp, Homo sapiens
tttgtgcccccagtt

SEQ ID NO: 1671269 - DNA, 15 bp, Homo sapiens
gtttgtgcccccagt

SEQ ID NO: 1671270 - DNA, 15 bp, Homo sapiens
tgtttgtgcccccag

SEQ ID NO: 1671271 - DNA, 15 bp, Homo sapiens
atgtttgtgccccca

SEQ ID NO: 1671272 - DNA, 15 bp, Homo sapiens
aatgtttgtgccccc

SEQ ID NO: 1671273 - DNA, 15 bp, Homo sapiens
aaatgtttgtgcccc

SEQ ID NO: 1671274 - DNA, 15 bp, Homo sapiens
taaatgtttgtgccc

SEQ ID NO: 1671275 - DNA, 15 bp, Homo sapiens
ataaatgtttgtgcc

SEQ ID NO: 1671276 - DNA, 15 bp, Homo sapiens
aataaatgtttgtgc

SEQ ID NO: 1671277 - DNA, 15 bp, Homo sapiens
taataaatgtttgtg

SEQ ID NO: 1671278 - DNA, 15 bp, Homo sapiens
ataataaatgtttgt

SEQ ID NO: 1671279 - DNA, 15 bp, Homo sapiens
gataataaatgtttg

SEQ ID NO: 1671280 - DNA, 15 bp, Homo sapiens
tgataataaatgttt

SEQ ID NO: 1671281 - DNA, 15 bp, Homo sapiens
atgataataaatgtt

SEQ ID NO: 1671282 - DNA, 15 bp, Homo sapiens
aatgataataaatgt

SEQ ID NO: 1671283 - DNA, 15 bp, Homo sapiens
taatgataataaatg

SEQ ID NO: 1671284 - DNA, 15 bp, Homo sapiens
ataatgataataaat

SEQ ID NO: 1671285 - DNA, 15 bp, Homo sapiens
aataatgataataaa

SEQ ID NO: 1671286 - DNA, 15 bp, Homo sapiens
caataatgataataa

SEQ ID NO: 1671287 - DNA, 15 bp, Homo sapiens
tcaataatgataata

SEQ ID NO: 1671288 - DNA, 15 bp, Homo sapiens
ttcaataatgataat

SEQ ID NO: 1671289 - DNA, 15 bp, Homo sapiens
gttcaataatgataa

SEQ ID NO: 1671290 - DNA, 15 bp, Homo sapiens
ggttcaataatgata

SEQ ID NO: 1671291 - DNA, 15 bp, Homo sapiens
aggttcaataatgat

SEQ ID NO: 1671292 - DNA, 15 bp, Homo sapiens
taggttcaataatga

SEQ ID NO: 1671293 - DNA, 15 bp, Homo sapiens
gtaggttcaataatg

SEQ ID NO: 1671294 - DNA, 15 bp, Homo sapiens
tgtaggttcaataat

SEQ ID NO: 1671295 - DNA, 15 bp, Homo sapiens
ttgtaggttcaataa

SEQ ID NO: 1671296 - DNA, 15 bp, Homo sapiens
gttgtaggttcaata

SEQ ID NO: 1671297 - DNA, 15 bp, Homo sapiens
tgttgtaggttcaat

SEQ ID NO: 1671298 - DNA, 15 bp, Homo sapiens
ctgttgtaggttcaa

SEQ ID NO: 1671299 - DNA, 15 bp, Homo sapiens
tctgttgtaggttca

SEQ ID NO: 1671300 - DNA, 15 bp, Homo sapiens
ctctgttgtaggttc

SEQ ID NO: 1671301 - DNA, 15 bp, Homo sapiens
tctctgttgtaggtt

SEQ ID NO: 1671302 - DNA, 15 bp, Homo sapiens
atctctgttgtaggt

SEQ ID NO: 1671303 - DNA, 15 bp, Homo sapiens
gatctctgttgtagg

SEQ ID NO: 1671304 - DNA, 15 bp, Homo sapiens
agatctctgttgtag

SEQ ID NO: 1671305 - DNA, 15 bp, Homo sapiens
tagatctctgttgta

SEQ ID NO: 1671306 - DNA, 15 bp, Homo sapiens
atagatctctgttgt

SEQ ID NO: 1671307 - DNA, 15 bp, Homo sapiens
catagatctctgttg

SEQ ID NO: 1671308 - DNA, 15 bp, Homo sapiens
acatagatctctgtt

SEQ ID NO: 1671309 - DNA, 15 bp, Homo sapiens
cacatagatctctgt

SEQ ID NO: 1671310 - DNA, 15 bp, Homo sapiens
acacatagatctctg

SEQ ID NO: 1671311 - DNA, 15 bp, Homo sapiens
tacacatagatctct

SEQ ID NO: 1671312 - DNA, 15 bp, Homo sapiens
ctacacatagatctc

SEQ ID NO: 1671313 - DNA, 15 bp, Homo sapiens
tctacacatagatct

SEQ ID NO: 1671314 - DNA, 15 bp, Homo sapiens
atctacacatagatc

SEQ ID NO: 1671315 - DNA, 15 bp, Homo sapiens
aatctacacatagat

SEQ ID NO: 1671316 - DNA, 15 bp, Homo sapiens
aaatctacacataga

SEQ ID NO: 1671317 - DNA, 15 bp, Homo sapiens
taaatctacacatag

SEQ ID NO: 1671318 - DNA, 15 bp, Homo sapiens
gtaaatctacacata

SEQ ID NO: 1671319 - DNA, 15 bp, Homo sapiens
tgtaaatctacacat

SEQ ID NO: 1671320 - DNA, 15 bp, Homo sapiens
ttgtaaatctacaca

SEQ ID NO: 1671321 - DNA, 15 bp, Homo sapiens
tttgtaaatctacac

SEQ ID NO: 1671322 - DNA, 15 bp, Homo sapiens
ctttgtaaatctaca

SEQ ID NO: 1671323 - DNA, 15 bp, Homo sapiens
gctttgtaaatctac

SEQ ID NO: 1671324 - DNA, 15 bp, Homo sapiens
ggctttgtaaatcta

SEQ ID NO: 1671325 - DNA, 15 bp, Homo sapiens
aggctttgtaaatct

SEQ ID NO: 1671326 - DNA, 15 bp, Homo sapiens
taggctttgtaaatc

SEQ ID NO: 1671327 - DNA, 15 bp, Homo sapiens
gtaggctttgtaaat

SEQ ID NO: 1671328 - DNA, 15 bp, Homo sapiens
tgtaggctttgtaaa

SEQ ID NO: 1671329 - DNA, 15 bp, Homo sapiens
ctgtaggctttgtaa

SEQ ID NO: 1671330 - DNA, 15 bp, Homo sapiens
actgtaggctttgta

SEQ ID NO: 1671331 - DNA, 15 bp, Homo sapiens
aactgtaggctttgt

SEQ ID NO: 1671332 - DNA, 15 bp, Homo sapiens
gaactgtaggctttg

SEQ ID NO: 1671333 - DNA, 15 bp, Homo sapiens
agaactgtaggcttt

SEQ ID NO: 1671334 - DNA, 15 bp, Homo sapiens
tagaactgtaggctt

SEQ ID NO: 1671335 - DNA, 15 bp, Homo sapiens
atagaactgtaggct

SEQ ID NO: 1671336 - DNA, 15 bp, Homo sapiens
tatagaactgtaggc

SEQ ID NO: 1671337 - DNA, 15 bp, Homo sapiens
gtatagaactgtagg

SEQ ID NO: 1671338 - DNA, 15 bp, Homo sapiens
tgtatagaactgtag

SEQ ID NO: 1671339 - DNA, 15 bp, Homo sapiens
ctgtatagaactgta

SEQ ID NO: 1671340 - DNA, 15 bp, Homo sapiens
tctgtatagaactgt

SEQ ID NO: 1671341 - DNA, 15 bp, Homo sapiens
atctgtatagaactg

SEQ ID NO: 1671342 - DNA, 15 bp, Homo sapiens
tatctgtatagaact

SEQ ID NO: 1671343 - DNA, 15 bp, Homo sapiens
ctatctgtatagaac

SEQ ID NO: 1671344 - DNA, 15 bp, Homo sapiens
cctatctgtatagaa

SEQ ID NO: 1671345 - DNA, 15 bp, Homo sapiens
tcctatctgtataga

SEQ ID NO: 1671346 - DNA, 15 bp, Homo sapiens
ttcctatctgtatag

SEQ ID NO: 1671347 - DNA, 15 bp, Homo sapiens
attcctatctgtata

SEQ ID NO: 1671348 - DNA, 15 bp, Homo sapiens
cattcctatctgtat

SEQ ID NO: 1671349 - DNA, 15 bp, Homo sapiens
tcattcctatctgta

SEQ ID NO: 1671350 - DNA, 15 bp, Homo sapiens
ttcattcctatctgt

SEQ ID NO: 1671351 - DNA, 15 bp, Homo sapiens
gttcattcctatctg

SEQ ID NO: 1671352 - DNA, 15 bp, Homo sapiens
agttcattcctatct

SEQ ID NO: 1671353 - DNA, 15 bp, Homo sapiens
tagttcattcctatc

SEQ ID NO: 1671354 - DNA, 15 bp, Homo sapiens
atagttcattcctat

SEQ ID NO: 1671355 - DNA, 15 bp, Homo sapiens
aatagttcattccta

SEQ ID NO: 1671356 - DNA, 15 bp, Homo sapiens
caatagttcattcct

SEQ ID NO: 1671357 - DNA, 15 bp, Homo sapiens
ccaatagttcattcc

SEQ ID NO: 1671358 - DNA, 15 bp, Homo sapiens
gccaatagttcattc

SEQ ID NO: 1671359 - DNA, 15 bp, Homo sapiens
agccaatagttcatt

SEQ ID NO: 1671360 - DNA, 15 bp, Homo sapiens
aagccaatagttcat

SEQ ID NO: 1671361 - DNA, 15 bp, Homo sapiens
taagccaatagttca

SEQ ID NO: 1671362 - DNA, 15 bp, Homo sapiens
gtaagccaatagttc

SEQ ID NO: 1671363 - DNA, 15 bp, Homo sapiens
agtaagccaatagtt

SEQ ID NO: 1671364 - DNA, 15 bp, Homo sapiens
cagtaagccaatagt

SEQ ID NO: 1671365 - DNA, 15 bp, Homo sapiens
tcagtaagccaatag

SEQ ID NO: 1671366 - DNA, 15 bp, Homo sapiens
ttcagtaagccaata

SEQ ID NO: 1671367 - DNA, 15 bp, Homo sapiens
attcagtaagccaat

SEQ ID NO: 1671368 - DNA, 15 bp, Homo sapiens
cattcagtaagccaa

SEQ ID NO: 1671369 - DNA, 15 bp, Homo sapiens
ccattcagtaagcca

SEQ ID NO: 1671370 - DNA, 15 bp, Homo sapiens
accattcagtaagcc

SEQ ID NO: 1671371 - DNA, 15 bp, Homo sapiens
caccattcagtaagc

SEQ ID NO: 1671372 - DNA, 15 bp, Homo sapiens
tcaccattcagtaag

SEQ ID NO: 1671373 - DNA, 15 bp, Homo sapiens
atcaccattcagtaa

SEQ ID NO: 1671374 - DNA, 15 bp, Homo sapiens
aatcaccattcagta

SEQ ID NO: 1671375 - DNA, 15 bp, Homo sapiens
taatcaccattcagt

SEQ ID NO: 1671376 - DNA, 15 bp, Homo sapiens
gtaatcaccattcag

SEQ ID NO: 1671377 - DNA, 15 bp, Homo sapiens
agtaatcaccattca

SEQ ID NO: 1671378 - DNA, 15 bp, Homo sapiens
aagtaatcaccattc

SEQ ID NO: 1671379 - DNA, 15 bp, Homo sapiens
aaagtaatcaccatt

SEQ ID NO: 1671380 - DNA, 15 bp, Homo sapiens
gaaagtaatcaccat

SEQ ID NO: 1671381 - DNA, 15 bp, Homo sapiens
agaaagtaatcacca

SEQ ID NO: 1671382 - DNA, 15 bp, Homo sapiens
cagaaagtaatcacc

SEQ ID NO: 1671383 - DNA, 15 bp, Homo sapiens
acagaaagtaatcac

SEQ ID NO: 1671384 - DNA, 15 bp, Homo sapiens
cacagaaagtaatca

SEQ ID NO: 1671385 - DNA, 15 bp, Homo sapiens
ccacagaaagtaatc

SEQ ID NO: 1671386 - DNA, 15 bp, Homo sapiens
cccacagaaagtaat

SEQ ID NO: 1671387 - DNA, 15 bp, Homo sapiens
ccccacagaaagtaa

SEQ ID NO: 1671388 - DNA, 15 bp, Homo sapiens
gccccacagaaagta

SEQ ID NO: 1671389 - DNA, 15 bp, Homo sapiens
agccccacagaaagt

SEQ ID NO: 1671390 - DNA, 15 bp, Homo sapiens
gagccccacagaaag

SEQ ID NO: 1671391 - DNA, 15 bp, Homo sapiens
cgagccccacagaaa

SEQ ID NO: 1671392 - DNA, 15 bp, Homo sapiens
ccgagccccacagaa

SEQ ID NO: 1671393 - DNA, 15 bp, Homo sapiens
tccgagccccacaga

SEQ ID NO: 1671394 - DNA, 15 bp, Homo sapiens
ttccgagccccacag

SEQ ID NO: 1671395 - DNA, 15 bp, Homo sapiens
gttccgagccccaca

SEQ ID NO: 1671396 - DNA, 15 bp, Homo sapiens
agttccgagccccac

SEQ ID NO: 1671397 - DNA, 15 bp, Homo sapiens
tagttccgagcccca

SEQ ID NO: 1671398 - DNA, 15 bp, Homo sapiens
gtagttccgagcccc

SEQ ID NO: 1671399 - DNA, 15 bp, Homo sapiens
tgtagttccgagccc

SEQ ID NO: 1671400 - DNA, 15 bp, Homo sapiens
atgtagttccgagcc

SEQ ID NO: 1671401 - DNA, 15 bp, Homo sapiens
catgtagttccgagc

SEQ ID NO: 1671402 - DNA, 15 bp, Homo sapiens
gcatgtagttccgag

SEQ ID NO: 1671403 - DNA, 15 bp, Homo sapiens
ggcatgtagttccga

SEQ ID NO: 1671404 - DNA, 15 bp, Homo sapiens
gggcatgtagttccg

SEQ ID NO: 1671405 - DNA, 15 bp, Homo sapiens
agggcatgtagttcc

SEQ ID NO: 1671406 - DNA, 15 bp, Homo sapiens
tagggcatgtagttc

SEQ ID NO: 1671407 - DNA, 15 bp, Homo sapiens
ctagggcatgtagtt

SEQ ID NO: 1671408 - DNA, 15 bp, Homo sapiens
cctagggcatgtagt

SEQ ID NO: 1671409 - DNA, 15 bp, Homo sapiens
tcctagggcatgtag

SEQ ID NO: 1671410 - DNA, 15 bp, Homo sapiens
atcctagggcatgta

SEQ ID NO: 1671411 - DNA, 15 bp, Homo sapiens
tatcctagggcatgt

SEQ ID NO: 1671412 - DNA, 15 bp, Homo sapiens
atatcctagggcatg

SEQ ID NO: 1671413 - DNA, 15 bp, Homo sapiens
tatatcctagggcat

SEQ ID NO: 1671414 - DNA, 15 bp, Homo sapiens
ttatatcctagggca

SEQ ID NO: 1671415 - DNA, 15 bp, Homo sapiens
tttatatcctagggc

SEQ ID NO: 1671416 - DNA, 15 bp, Homo sapiens
ttttatatcctaggg

SEQ ID NO: 1671417 - DNA, 15 bp, Homo sapiens
tttttatatcctagg

SEQ ID NO: 1671418 - DNA, 15 bp, Homo sapiens
atttttatatcctag

SEQ ID NO: 1671419 - DNA, 15 bp, Homo sapiens
catttttatatccta

SEQ ID NO: 1671420 - DNA, 15 bp, Homo sapiens
tcatttttatatcct

SEQ ID NO: 1671421 - DNA, 15 bp, Homo sapiens
atcatttttatatcc

SEQ ID NO: 1671422 - DNA, 15 bp, Homo sapiens
catcatttttatatc

SEQ ID NO: 1671423 - DNA, 15 bp, Homo sapiens
acatcatttttatat

SEQ ID NO: 1671424 - DNA, 15 bp, Homo sapiens
aacatcatttttata

SEQ ID NO: 1671425 - DNA, 15 bp, Homo sapiens
taacatcatttttat

SEQ ID NO: 1671426 - DNA, 15 bp, Homo sapiens
ataacatcattttta

SEQ ID NO: 1671427 - DNA, 15 bp, Homo sapiens
gataacatcattttt

SEQ ID NO: 1671428 - DNA, 15 bp, Homo sapiens
tgataacatcatttt

SEQ ID NO: 1671429 - DNA, 15 bp, Homo sapiens
atgataacatcattt

SEQ ID NO: 1671430 - DNA, 15 bp, Homo sapiens
aatgataacatcatt

SEQ ID NO: 1671431 - DNA, 15 bp, Homo sapiens
taatgataacatcat

SEQ ID NO: 1671432 - DNA, 15 bp, Homo sapiens
ataatgataacatca

SEQ ID NO: 1671433 - DNA, 15 bp, Homo sapiens
tataatgataacatc

SEQ ID NO: 1671434 - DNA, 15 bp, Homo sapiens
ctataatgataacat

SEQ ID NO: 1671435 - DNA, 15 bp, Homo sapiens
tctataatgataaca

SEQ ID NO: 1671436 - DNA, 15 bp, Homo sapiens
ctctataatgataac

SEQ ID NO: 1671437 - DNA, 15 bp, Homo sapiens
actctataatgataa

SEQ ID NO: 1671438 - DNA, 15 bp, Homo sapiens
cactctataatgata

SEQ ID NO: 1671439 - DNA, 15 bp, Homo sapiens
gcactctataatgat

SEQ ID NO: 1671440 - DNA, 15 bp, Homo sapiens
agcactctataatga

SEQ ID NO: 1671441 - DNA, 15 bp, Homo sapiens
gagcactctataatg

SEQ ID NO: 1671442 - DNA, 15 bp, Homo sapiens
tgagcactctataat

SEQ ID NO: 1671443 - DNA, 15 bp, Homo sapiens
gtgagcactctataa

SEQ ID NO: 1671444 - DNA, 15 bp, Homo sapiens
tgtgagcactctata

SEQ ID NO: 1671445 - DNA, 15 bp, Homo sapiens
ctgtgagcactctat

SEQ ID NO: 1671446 - DNA, 15 bp, Homo sapiens
tctgtgagcactcta

SEQ ID NO: 1671447 - DNA, 15 bp, Homo sapiens
ttctgtgagcactct

SEQ ID NO: 1671448 - DNA, 15 bp, Homo sapiens
cttctgtgagcactc

SEQ ID NO: 1671449 - DNA, 15 bp, Homo sapiens
ccttctgtgagcact

SEQ ID NO: 1671450 - DNA, 15 bp, Homo sapiens
tccttctgtgagcac

SEQ ID NO: 1671451 - DNA, 15 bp, Homo sapiens
ttccttctgtgagca

SEQ ID NO: 1671452 - DNA, 15 bp, Homo sapiens
tttccttctgtgagc

SEQ ID NO: 1671453 - DNA, 15 bp, Homo sapiens
atttccttctgtgag

SEQ ID NO: 1671454 - DNA, 15 bp, Homo sapiens
catttccttctgtga

SEQ ID NO: 1671455 - DNA, 15 bp, Homo sapiens
tcatttccttctgtg

SEQ ID NO: 1671456 - DNA, 15 bp, Homo sapiens
ttcatttccttctgt

SEQ ID NO: 1671457 - DNA, 15 bp, Homo sapiens
cttcatttccttctg

SEQ ID NO: 1671458 - DNA, 15 bp, Homo sapiens
acttcatttccttct

SEQ ID NO: 1671459 - DNA, 15 bp, Homo sapiens
tacttcatttccttc

SEQ ID NO: 1671460 - DNA, 15 bp, Homo sapiens
ttacttcatttcctt

SEQ ID NO: 1671461 - DNA, 15 bp, Homo sapiens
atattacttcatttc

SEQ ID NO: 1671462 - DNA, 15 bp, Homo sapiens
tatattacttcattt

SEQ ID NO: 1671463 - DNA, 15 bp, Homo sapiens
ctatattacttcatt

SEQ ID NO: 1671464 - DNA, 15 bp, Homo sapiens
cctatattacttcat

SEQ ID NO: 1671465 - DNA, 15 bp, Homo sapiens
acctatattacttca

SEQ ID NO: 1671466 - DNA, 15 bp, Homo sapiens
cacctatattacttc

SEQ ID NO: 1671467 - DNA, 15 bp, Homo sapiens
acacctatattactt

SEQ ID NO: 1671468 - DNA, 15 bp, Homo sapiens
cacacctatattact

SEQ ID NO: 1671469 - DNA, 15 bp, Homo sapiens
tcacacctatattac

SEQ ID NO: 1671470 - DNA, 15 bp, Homo sapiens
ctcacacctatatta

SEQ ID NO: 1671471 - DNA, 15 bp, Homo sapiens
tctcacacctatatt

SEQ ID NO: 1671472 - DNA, 15 bp, Homo sapiens
atctcacacctatat

SEQ ID NO: 1671473 - DNA, 15 bp, Homo sapiens
gatctcacacctata

SEQ ID NO: 1671474 - DNA, 15 bp, Homo sapiens
ggatctcacacctat

SEQ ID NO: 1671475 - DNA, 15 bp, Homo sapiens
tggatctcacaccta

SEQ ID NO: 1671476 - DNA, 15 bp, Homo sapiens
ctggatctcacacct

SEQ ID NO: 1671477 - DNA, 15 bp, Homo sapiens
tctggatctcacacc

SEQ ID NO: 1671478 - DNA, 15 bp, Homo sapiens
gtctggatctcacac

SEQ ID NO: 1671479 - DNA, 15 bp, Homo sapiens
tggtctggatctcac

SEQ ID NO: 1671480 - DNA, 15 bp, Homo sapiens
ttggtctggatctca

SEQ ID NO: 1671481 - DNA, 15 bp, Homo sapiens
tttggtctggatctc

SEQ ID NO: 1671482 - DNA, 15 bp, Homo sapiens
ttttggtctggatct

SEQ ID NO: 1671483 - DNA, 15 bp, Homo sapiens
cttttggtctggatc

SEQ ID NO: 1671484 - DNA, 15 bp, Homo sapiens
acttttggtctggat

SEQ ID NO: 1671485 - DNA, 15 bp, Homo sapiens
gacttttggtctgga

SEQ ID NO: 1671486 - DNA, 15 bp, Homo sapiens
tgacttttggtctgg

SEQ ID NO: 1671487 - DNA, 15 bp, Homo sapiens
atgacttttggtctg

SEQ ID NO: 1671488 - DNA, 15 bp, Homo sapiens
aatgacttttggtct

SEQ ID NO: 1671489 - DNA, 15 bp, Homo sapiens
aaatgacttttggtc

SEQ ID NO: 1671490 - DNA, 15 bp, Homo sapiens
taaatgacttttggt

SEQ ID NO: 1671491 - DNA, 15 bp, Homo sapiens
ttaaatgacttttgg

SEQ ID NO: 1671492 - DNA, 15 bp, Homo sapiens
gttaaatgacttttg

SEQ ID NO: 1671493 - DNA, 15 bp, Homo sapiens
tgttaaatgactttt

SEQ ID NO: 1671494 - DNA, 15 bp, Homo sapiens
ttgttaaatgacttt

SEQ ID NO: 1671495 - DNA, 15 bp, Homo sapiens
cttgttaaatgactt

SEQ ID NO: 1671496 - DNA, 15 bp, Homo sapiens
acttgttaaatgact

SEQ ID NO: 1671497 - DNA, 15 bp, Homo sapiens
aacttgttaaatgac

SEQ ID NO: 1671498 - DNA, 15 bp, Homo sapiens
aaacttgttaaatga

SEQ ID NO: 1671499 - DNA, 15 bp, Homo sapiens
taaacttgttaaatg

SEQ ID NO: 1671500 - DNA, 15 bp, Homo sapiens
ataaacttgttaaat

SEQ ID NO: 1671501 - DNA, 15 bp, Homo sapiens
aataaacttgttaaa

SEQ ID NO: 1671502 - DNA, 15 bp, Homo sapiens
gaataaacttgttaa

SEQ ID NO: 1671503 - DNA, 15 bp, Homo sapiens
tgaataaacttgtta

SEQ ID NO: 1671504 - DNA, 15 bp, Homo sapiens
ctgaataaacttgtt

SEQ ID NO: 1671505 - DNA, 15 bp, Homo sapiens
actgaataaacttgt

SEQ ID NO: 1671506 - DNA, 15 bp, Homo sapiens
cactgaataaacttg

SEQ ID NO: 1671507 - DNA, 15 bp, Homo sapiens
tcactgaataaactt

SEQ ID NO: 1671508 - DNA, 15 bp, Homo sapiens
atcactgaataaact

SEQ ID NO: 1671509 - DNA, 15 bp, Homo sapiens
catcactgaataaac

SEQ ID NO: 1671510 - DNA, 15 bp, Homo sapiens
tcatcactgaataaa

SEQ ID NO: 1671511 - DNA, 15 bp, Homo sapiens
ttcatcactgaataa

SEQ ID NO: 1671512 - DNA, 15 bp, Homo sapiens
tttcatcactgaata

SEQ ID NO: 1671513 - DNA, 15 bp, Homo sapiens
ttttcatcactgaat

SEQ ID NO: 1671514 - DNA, 15 bp, Homo sapiens
gttttcatcactgaa

SEQ ID NO: 1671515 - DNA, 15 bp, Homo sapiens
tgttttcatcactga

SEQ ID NO: 1671516 - DNA, 15 bp, Homo sapiens
atgttttcatcactg

SEQ ID NO: 1671517 - DNA, 15 bp, Homo sapiens
catgttttcatcact

SEQ ID NO: 1671518 - DNA, 15 bp, Homo sapiens
ccatgttttcatcac

SEQ ID NO: 1671519 - DNA, 15 bp, Homo sapiens
cccatgttttcatca

SEQ ID NO: 1671520 - DNA, 15 bp, Homo sapiens
tcccatgttttcatc

SEQ ID NO: 1671521 - DNA, 15 bp, Homo sapiens
gtcccatgttttcat

SEQ ID NO: 1671522 - DNA, 15 bp, Homo sapiens
tgtcccatgttttca

SEQ ID NO: 1671523 - DNA, 15 bp, Homo sapiens
ttgtcccatgttttc

SEQ ID NO: 1671524 - DNA, 15 bp, Homo sapiens
tttgtcccatgtttt

SEQ ID NO: 1671525 - DNA, 15 bp, Homo sapiens
atttgtcccatgttt

SEQ ID NO: 1671526 - DNA, 15 bp, Homo sapiens
catttgtcccatgtt

SEQ ID NO: 1671527 - DNA, 15 bp, Homo sapiens
ccatttgtcccatgt

SEQ ID NO: 1671528 - DNA, 15 bp, Homo sapiens
tccatttgtcccatg

SEQ ID NO: 1671529 - DNA, 15 bp, Homo sapiens
gtccatttgtcccat

SEQ ID NO: 1671530 - DNA, 15 bp, Homo sapiens
agtccatttgtccca

SEQ ID NO: 1671531 - DNA, 15 bp, Homo sapiens
tagtccatttgtccc

SEQ ID NO: 1671532 - DNA, 15 bp, Homo sapiens
ttagtccatttgtcc

SEQ ID NO: 1671533 - DNA, 15 bp, Homo sapiens
attagtccatttgtc

SEQ ID NO: 1671534 - DNA, 15 bp, Homo sapiens
tattagtccatttgt

SEQ ID NO: 1671535 - DNA, 15 bp, Homo sapiens
atattagtccatttg

SEQ ID NO: 1671536 - DNA, 15 bp, Homo sapiens
tatattagtccattt

SEQ ID NO: 1671537 - DNA, 15 bp, Homo sapiens
ttatattagtccatt

SEQ ID NO: 1671538 - DNA, 15 bp, Homo sapiens
cttatattagtccat

SEQ ID NO: 1671539 - DNA, 15 bp, Homo sapiens
ccttatattagtcca

SEQ ID NO: 1671540 - DNA, 15 bp, Homo sapiens
gccttatattagtcc

SEQ ID NO: 1671541 - DNA, 15 bp, Homo sapiens
tgccttatattagtc

SEQ ID NO: 1671542 - DNA, 15 bp, Homo sapiens
ctgccttatattagt

SEQ ID NO: 1671543 - DNA, 15 bp, Homo sapiens
actgccttatattag

SEQ ID NO: 1671544 - DNA, 15 bp, Homo sapiens
cactgccttatatta

SEQ ID NO: 1671545 - DNA, 15 bp, Homo sapiens
acactgccttatatt

SEQ ID NO: 1671546 - DNA, 15 bp, Homo sapiens
tacactgccttatat

SEQ ID NO: 1671547 - DNA, 15 bp, Homo sapiens
gtacactgccttata

SEQ ID NO: 1671548 - DNA, 15 bp, Homo sapiens
agtacactgccttat

SEQ ID NO: 1671549 - DNA, 15 bp, Homo sapiens
tagtacactgcctta

SEQ ID NO: 1671550 - DNA, 15 bp, Homo sapiens
ttagtacactgcctt

SEQ ID NO: 1671551 - DNA, 15 bp, Homo sapiens
cttagtacactgcct

SEQ ID NO: 1671552 - DNA, 15 bp, Homo sapiens
gcttagtacactgcc

SEQ ID NO: 1671553 - DNA, 15 bp, Homo sapiens
agcttagtacactgc

SEQ ID NO: 1671554 - DNA, 15 bp, Homo sapiens
cagcttagtacactg

SEQ ID NO: 1671555 - DNA, 15 bp, Homo sapiens
tcagcttagtacact

SEQ ID NO: 1671556 - DNA, 15 bp, Homo sapiens
ctcagcttagtacac

SEQ ID NO: 1671557 - DNA, 15 bp, Homo sapiens
actcagcttagtaca

SEQ ID NO: 1671558 - DNA, 15 bp, Homo sapiens
tactcagcttagtac

SEQ ID NO: 1671559 - DNA, 15 bp, Homo sapiens
ctactcagcttagta

SEQ ID NO: 1671560 - DNA, 15 bp, Homo sapiens
tctactcagcttagt

SEQ ID NO: 1671561 - DNA, 15 bp, Homo sapiens
ctctactcagcttag

SEQ ID NO: 1671562 - DNA, 15 bp, Homo sapiens
tctctactcagctta

SEQ ID NO: 1671563 - DNA, 15 bp, Homo sapiens
ctctctactcagctt

SEQ ID NO: 1671564 - DNA, 15 bp, Homo sapiens
tctctctactcagct

SEQ ID NO: 1671565 - DNA, 15 bp, Homo sapiens
atctctctactcagc

SEQ ID NO: 1671566 - DNA, 15 bp, Homo sapiens
tatctctctactcag

SEQ ID NO: 1671567 - DNA, 15 bp, Homo sapiens
ttatctctctactca

SEQ ID NO: 1671568 - DNA, 15 bp, Homo sapiens
tttatctctctactc

SEQ ID NO: 1671569 - DNA, 15 bp, Homo sapiens
ctttatctctctact

SEQ ID NO: 1671570 - DNA, 15 bp, Homo sapiens
actttatctctctac

SEQ ID NO: 1671571 - DNA, 15 bp, Homo sapiens
gactttatctctcta

SEQ ID NO: 1671572 - DNA, 15 bp, Homo sapiens
ggactttatctctct

SEQ ID NO: 1671573 - DNA, 15 bp, Homo sapiens
aggactttatctctc

SEQ ID NO: 1671574 - DNA, 15 bp, Homo sapiens
caggactttatctct

SEQ ID NO: 1671575 - DNA, 15 bp, Homo sapiens
acaggactttatctc

SEQ ID NO: 1671576 - DNA, 15 bp, Homo sapiens
gacaggactttatct

SEQ ID NO: 1671577 - DNA, 15 bp, Homo sapiens
ggacaggactttatc

SEQ ID NO: 1671578 - DNA, 15 bp, Homo sapiens
tggacaggactttat

SEQ ID NO: 1671579 - DNA, 15 bp, Homo sapiens
ctggacaggacttta

SEQ ID NO: 1671580 - DNA, 15 bp, Homo sapiens
tctggacaggacttt

SEQ ID NO: 1671581 - DNA, 15 bp, Homo sapiens
ttctggacaggactt

SEQ ID NO: 1671582 - DNA, 15 bp, Homo sapiens
cttctggacaggact

SEQ ID NO: 1671583 - DNA, 15 bp, Homo sapiens
tcttctggacaggac

SEQ ID NO: 1671584 - DNA, 15 bp, Homo sapiens
atcttctggacagga

SEQ ID NO: 1671585 - DNA, 15 bp, Homo sapiens
tatcttctggacagg

SEQ ID NO: 1671586 - DNA, 15 bp, Homo sapiens
gtatcttctggacag

SEQ ID NO: 1671587 - DNA, 15 bp, Homo sapiens
tgtatcttctggaca

SEQ ID NO: 1671588 - DNA, 15 bp, Homo sapiens
atgtatcttctggac

SEQ ID NO: 1671589 - DNA, 15 bp, Homo sapiens
catgtatcttctgga

SEQ ID NO: 1671590 - DNA, 15 bp, Homo sapiens
gcatgtatcttctgg

SEQ ID NO: 1671591 - DNA, 15 bp, Homo sapiens
agcatgtatcttctg

SEQ ID NO: 1671592 - DNA, 15 bp, Homo sapiens
aagcatgtatcttct

SEQ ID NO: 1671593 - DNA, 15 bp, Homo sapiens
gaagcatgtatcttc

SEQ ID NO: 1671594 - DNA, 15 bp, Homo sapiens
ggaagcatgtatctt

SEQ ID NO: 1671595 - DNA, 15 bp, Homo sapiens
aggaagcatgtatct

SEQ ID NO: 1671596 - DNA, 15 bp, Homo sapiens
caggaagcatgtatc

SEQ ID NO: 1671597 - DNA, 15 bp, Homo sapiens
ccaggaagcatgtat

SEQ ID NO: 1671598 - DNA, 15 bp, Homo sapiens
gccaggaagcatgta

SEQ ID NO: 1671599 - DNA, 15 bp, Homo sapiens
ggccaggaagcatgt

SEQ ID NO: 1671600 - DNA, 15 bp, Homo sapiens
aggccaggaagcatg

SEQ ID NO: 1671601 - DNA, 15 bp, Homo sapiens
caggccaggaagcat

SEQ ID NO: 1671602 - DNA, 15 bp, Homo sapiens
tcaggccaggaagca

SEQ ID NO: 1671603 - DNA, 15 bp, Homo sapiens
atcaggccaggaagc

SEQ ID NO: 1671604 - DNA, 15 bp, Homo sapiens
aatcaggccaggaag

SEQ ID NO: 1671605 - DNA, 15 bp, Homo sapiens
caatcaggccaggaa

SEQ ID NO: 1671606 - DNA, 15 bp, Homo sapiens
tcaatcaggccagga

SEQ ID NO: 1671607 - DNA, 15 bp, Homo sapiens
ctcaatcaggccagg

SEQ ID NO: 1671608 - DNA, 15 bp, Homo sapiens
cctcaatcaggccag

SEQ ID NO: 1671609 - DNA, 15 bp, Homo sapiens
tcctcaatcaggcca

SEQ ID NO: 1671610 - DNA, 15 bp, Homo sapiens
ctcctcaatcaggcc

SEQ ID NO: 1671611 - DNA, 15 bp, Homo sapiens
tctcctcaatcaggc

SEQ ID NO: 1671612 - DNA, 15 bp, Homo sapiens
atctcctcaatcagg

SEQ ID NO: 1671613 - DNA, 15 bp, Homo sapiens
catctcctcaatcag

SEQ ID NO: 1671614 - DNA, 15 bp, Homo sapiens
ccatctcctcaatca

SEQ ID NO: 1671615 - DNA, 15 bp, Homo sapiens
tccatctcctcaatc

SEQ ID NO: 1671616 - DNA, 15 bp, Homo sapiens
ttccatctcctcaat

SEQ ID NO: 1671617 - DNA, 15 bp, Homo sapiens
tttccatctcctcaa

SEQ ID NO: 1671618 - DNA, 15 bp, Homo sapiens
ttttccatctcctca

SEQ ID NO: 1671619 - DNA, 15 bp, Homo sapiens
attttccatctcctc

SEQ ID NO: 1671620 - DNA, 15 bp, Homo sapiens
aattttccatctcct

SEQ ID NO: 1671621 - DNA, 15 bp, Homo sapiens
aaattttccatctcc

SEQ ID NO: 1671622 - DNA, 15 bp, Homo sapiens
aaaattttccatctc

SEQ ID NO: 1671623 - DNA, 15 bp, Homo sapiens
aaaaattttccatct

SEQ ID NO: 1671624 - DNA, 15 bp, Homo sapiens
caaaaattttccatc

SEQ ID NO: 1671625 - DNA, 15 bp, Homo sapiens
gcaaaaattttccat

SEQ ID NO: 1671626 - DNA, 15 bp, Homo sapiens
tgcaaaaattttcca

SEQ ID NO: 1671627 - DNA, 15 bp, Homo sapiens
ttgcaaaaattttcc

SEQ ID NO: 1671628 - DNA, 15 bp, Homo sapiens
tttgcaaaaattttc

SEQ ID NO: 1671629 - DNA, 15 bp, Homo sapiens
ttttgcaaaaatttt

SEQ ID NO: 1671630 - DNA, 15 bp, Homo sapiens
tttttgcaaaaattt

SEQ ID NO: 1671631 - DNA, 15 bp, Homo sapiens
ttttttgcaaaaatt

SEQ ID NO: 1671632 - DNA, 15 bp, Homo sapiens
gttttttgcaaaaat

SEQ ID NO: 1671633 - DNA, 15 bp, Homo sapiens
tgttttttgcaaaaa

SEQ ID NO: 1671634 - DNA, 15 bp, Homo sapiens
ttgttttttgcaaaa

SEQ ID NO: 1671635 - DNA, 15 bp, Homo sapiens
cttgttttttgcaaa

SEQ ID NO: 1671636 - DNA, 15 bp, Homo sapiens
ccttgttttttgcaa

SEQ ID NO: 1671637 - DNA, 15 bp, Homo sapiens
accttgttttttgca

SEQ ID NO: 1671638 - DNA, 15 bp, Homo sapiens
caccttgttttttgc

SEQ ID NO: 1671639 - DNA, 15 bp, Homo sapiens
acaccttgttttttg

SEQ ID NO: 1671640 - DNA, 15 bp, Homo sapiens
aacaccttgtttttt

SEQ ID NO: 1671641 - DNA, 15 bp, Homo sapiens
caacaccttgttttt

SEQ ID NO: 1671642 - DNA, 15 bp, Homo sapiens
acaacaccttgtttt

SEQ ID NO: 1671643 - DNA, 15 bp, Homo sapiens
cacaacaccttgttt

SEQ ID NO: 1671644 - DNA, 15 bp, Homo sapiens
accacaacaccttgt

SEQ ID NO: 1671645 - DNA, 15 bp, Homo sapiens
gaccacaacaccttg

SEQ ID NO: 1671646 - DNA, 15 bp, Homo sapiens
agaccacaacacctt

SEQ ID NO: 1671647 - DNA, 15 bp, Homo sapiens
aagaccacaacacct

SEQ ID NO: 1671648 - DNA, 15 bp, Homo sapiens
gaagaccacaacacc

SEQ ID NO: 1671649 - DNA, 15 bp, Homo sapiens
ggaagaccacaacac

SEQ ID NO: 1671650 - DNA, 15 bp, Homo sapiens
tggaagaccacaaca

SEQ ID NO: 1671651 - DNA, 15 bp, Homo sapiens
atggaagaccacaac

SEQ ID NO: 1671652 - DNA, 15 bp, Homo sapiens
gatggaagaccacaa

SEQ ID NO: 1671653 - DNA, 15 bp, Homo sapiens
ggatggaagaccaca

SEQ ID NO: 1671654 - DNA, 15 bp, Homo sapiens
tggatggaagaccac

SEQ ID NO: 1671655 - DNA, 15 bp, Homo sapiens
ctggatggaagacca

SEQ ID NO: 1671656 - DNA, 15 bp, Homo sapiens
actggatggaagacc

SEQ ID NO: 1671657 - DNA, 15 bp, Homo sapiens
aactggatggaagac

SEQ ID NO: 1671658 - DNA, 15 bp, Homo sapiens
aaactggatggaaga

SEQ ID NO: 1671659 - DNA, 15 bp, Homo sapiens
gaaactggatggaag

SEQ ID NO: 1671660 - DNA, 15 bp, Homo sapiens
agaaactggatggaa

SEQ ID NO: 1671661 - DNA, 15 bp, Homo sapiens
aagaaactggatgga

SEQ ID NO: 1671662 - DNA, 15 bp, Homo sapiens
taagaaactggatgg

SEQ ID NO: 1671663 - DNA, 15 bp, Homo sapiens
ttaagaaactggatg

SEQ ID NO: 1671664 - DNA, 15 bp, Homo sapiens
cttaagaaactggat

SEQ ID NO: 1671665 - DNA, 15 bp, Homo sapiens
acttaagaaactgga

SEQ ID NO: 1671666 - DNA, 15 bp, Homo sapiens
cacttaagaaactgg

SEQ ID NO: 1671667 - DNA, 15 bp, Homo sapiens
gcacttaagaaactg

SEQ ID NO: 1671668 - DNA, 15 bp, Homo sapiens
agcacttaagaaact

SEQ ID NO: 1671669 - DNA, 15 bp, Homo sapiens
cagcacttaagaaac

SEQ ID NO: 1671670 - DNA, 15 bp, Homo sapiens
tcagcacttaagaaa

SEQ ID NO: 1671671 - DNA, 15 bp, Homo sapiens
atcagcacttaagaa

SEQ ID NO: 1671672 - DNA, 15 bp, Homo sapiens
catcagcacttaaga

SEQ ID NO: 1671673 - DNA, 15 bp, Homo sapiens
tcatcagcacttaag

SEQ ID NO: 1671674 - DNA, 15 bp, Homo sapiens
atcatcagcacttaa

SEQ ID NO: 1671675 - DNA, 15 bp, Homo sapiens
tatcatcagcactta

SEQ ID NO: 1671676 - DNA, 15 bp, Homo sapiens
ttatcatcagcactt

SEQ ID NO: 1671677 - DNA, 15 bp, Homo sapiens
tttatcatcagcact

SEQ ID NO: 1671678 - DNA, 15 bp, Homo sapiens
ttttatcatcagcac

SEQ ID NO: 1671679 - DNA, 15 bp, Homo sapiens
cttttatcatcagca

SEQ ID NO: 1671680 - DNA, 15 bp, Homo sapiens
acttttatcatcagc

SEQ ID NO: 1671681 - DNA, 15 bp, Homo sapiens
cacttttatcatcag

SEQ ID NO: 1671682 - DNA, 15 bp, Homo sapiens
tcacttttatcatca

SEQ ID NO: 1671683 - DNA, 15 bp, Homo sapiens
ttcacttttatcatc

SEQ ID NO: 1671684 - DNA, 15 bp, Homo sapiens
attcacttttatcat

SEQ ID NO: 1671685 - DNA, 15 bp, Homo sapiens
aattcacttttatca

SEQ ID NO: 1671686 - DNA, 15 bp, Homo sapiens
taattcacttttatc

SEQ ID NO: 1671687 - DNA, 15 bp, Homo sapiens
ctaattcacttttat

SEQ ID NO: 1671688 - DNA, 15 bp, Homo sapiens
tctaattcactttta

SEQ ID NO: 1671689 - DNA, 15 bp, Homo sapiens
gtctaattcactttt

SEQ ID NO: 1671690 - DNA, 15 bp, Homo sapiens
ggtctaattcacttt

SEQ ID NO: 1671691 - DNA, 15 bp, Homo sapiens
gggtctaattcactt

SEQ ID NO: 1671692 - DNA, 15 bp, Homo sapiens
tgggtctaattcact

SEQ ID NO: 1671693 - DNA, 15 bp, Homo sapiens
gtgggtctaattcac

SEQ ID NO: 1671694 - DNA, 15 bp, Homo sapiens
ggtgggtctaattca

SEQ ID NO: 1671695 - DNA, 15 bp, Homo sapiens
aggtgggtctaattc

SEQ ID NO: 1671696 - DNA, 15 bp, Homo sapiens
aaggtgggtctaatt

SEQ ID NO: 1671697 - DNA, 15 bp, Homo sapiens
caaggtgggtctaat

SEQ ID NO: 1671698 - DNA, 15 bp, Homo sapiens
tcaaggtgggtctaa

SEQ ID NO: 1671699 - DNA, 15 bp, Homo sapiens
gtcaaggtgggtcta

SEQ ID NO: 1671700 - DNA, 15 bp, Homo sapiens
ggtcaaggtgggtct

SEQ ID NO: 1671701 - DNA, 15 bp, Homo sapiens
aggtcaaggtgggtc

SEQ ID NO: 1671702 - DNA, 15 bp, Homo sapiens
caggtcaaggtgggt

SEQ ID NO: 1671703 - DNA, 15 bp, Homo sapiens
ccaggtcaaggtggg

SEQ ID NO: 1671704 - DNA, 15 bp, Homo sapiens
gccaggtcaaggtgg

SEQ ID NO: 1671705 - DNA, 15 bp, Homo sapiens
ggccaggtcaaggtg

SEQ ID NO: 1671706 - DNA, 15 bp, Homo sapiens
aggccaggtcaaggt

SEQ ID NO: 1671707 - DNA, 15 bp, Homo sapiens
taggccaggtcaagg

SEQ ID NO: 1671708 - DNA, 15 bp, Homo sapiens
gtaggccaggtcaag

SEQ ID NO: 1671709 - DNA, 15 bp, Homo sapiens
tgtaggccaggtcaa

SEQ ID NO: 1671710 - DNA, 15 bp, Homo sapiens
ctgtaggccaggtca

SEQ ID NO: 1671711 - DNA, 15 bp, Homo sapiens
tctgtaggccaggtc

SEQ ID NO: 1671712 - DNA, 15 bp, Homo sapiens
ttctgtaggccaggt

SEQ ID NO: 1671713 - DNA, 15 bp, Homo sapiens
cttctgtaggccagg

SEQ ID NO: 1671714 - DNA, 15 bp, Homo sapiens
acttctgtaggccag

SEQ ID NO: 1671715 - DNA, 15 bp, Homo sapiens
tacttctgtaggcca

SEQ ID NO: 1671716 - DNA, 15 bp, Homo sapiens
ttacttctgtaggcc

SEQ ID NO: 1671717 - DNA, 15 bp, Homo sapiens
tttacttctgtaggc

SEQ ID NO: 1671718 - DNA, 15 bp, Homo sapiens
ctttacttctgtagg

SEQ ID NO: 1671719 - DNA, 15 bp, Homo sapiens
cctttacttctgtag

SEQ ID NO: 1671720 - DNA, 15 bp, Homo sapiens
tcctttacttctgta

SEQ ID NO: 1671721 - DNA, 15 bp, Homo sapiens
ctcctttacttctgt

SEQ ID NO: 1671722 - DNA, 15 bp, Homo sapiens
actcctttacttctg

SEQ ID NO: 1671723 - DNA, 15 bp, Homo sapiens
tactcctttacttct

SEQ ID NO: 1671724 - DNA, 15 bp, Homo sapiens
ttactcctttacttc

SEQ ID NO: 1671725 - DNA, 15 bp, Homo sapiens
tttactcctttactt

SEQ ID NO: 1671726 - DNA, 15 bp, Homo sapiens
ttttactcctttact

SEQ ID NO: 1671727 - DNA, 15 bp, Homo sapiens
tttttactcctttac

SEQ ID NO: 1671728 - DNA, 15 bp, Homo sapiens
tatttttactccttt

SEQ ID NO: 1671729 - DNA, 15 bp, Homo sapiens
ttatttttactcctt

SEQ ID NO: 1671730 - DNA, 15 bp, Homo sapiens
tttatttttactcct

SEQ ID NO: 1671731 - DNA, 15 bp, Homo sapiens
atttatttttactcc

SEQ ID NO: 1671732 - DNA, 15 bp, Homo sapiens
catttatttttactc

SEQ ID NO: 1671733 - DNA, 15 bp, Homo sapiens
gcatttatttttact

SEQ ID NO: 1671734 - DNA, 15 bp, Homo sapiens
ggcatttatttttac

SEQ ID NO: 1671735 - DNA, 15 bp, Homo sapiens
aggcatttattttta

SEQ ID NO: 1671736 - DNA, 15 bp, Homo sapiens
gaggcatttattttt

SEQ ID NO: 1671737 - DNA, 15 bp, Homo sapiens
tgaggcatttatttt

SEQ ID NO: 1671738 - DNA, 15 bp, Homo sapiens
ctgaggcatttattt

SEQ ID NO: 1671739 - DNA, 15 bp, Homo sapiens
cctgaggcatttatt

SEQ ID NO: 1671740 - DNA, 15 bp, Homo sapiens
gcctgaggcatttat

SEQ ID NO: 1671741 - DNA, 15 bp, Homo sapiens
cgcctgaggcattta

SEQ ID NO: 1671742 - DNA, 15 bp, Homo sapiens
acgcctgaggcattt

SEQ ID NO: 1671743 - DNA, 15 bp, Homo sapiens
cacgcctgaggcatt

SEQ ID NO: 1671744 - DNA, 15 bp, Homo sapiens
gcacgcctgaggcat

SEQ ID NO: 1671745 - DNA, 15 bp, Homo sapiens
agcacgcctgaggca

SEQ ID NO: 1671746 - DNA, 15 bp, Homo sapiens
aagcacgcctgaggc

SEQ ID NO: 1671747 - DNA, 15 bp, Homo sapiens
aaagcacgcctgagg

SEQ ID NO: 1671748 - DNA, 15 bp, Homo sapiens
aaaagcacgcctgag

SEQ ID NO: 1671749 - DNA, 15 bp, Homo sapiens
aaaaagcacgcctga

SEQ ID NO: 1671750 - DNA, 15 bp, Homo sapiens
caaaaagcacgcctg

SEQ ID NO: 1671751 - DNA, 15 bp, Homo sapiens
tcaaaaagcacgcct

SEQ ID NO: 1671752 - DNA, 15 bp, Homo sapiens
atcaaaaagcacgcc

SEQ ID NO: 1671753 - DNA, 15 bp, Homo sapiens
aatcaaaaagcacgc

SEQ ID NO: 1671754 - DNA, 15 bp, Homo sapiens
gaatcaaaaagcacg

SEQ ID NO: 1671755 - DNA, 15 bp, Homo sapiens
tgaatcaaaaagcac

SEQ ID NO: 1671756 - DNA, 15 bp, Homo sapiens
atgaatcaaaaagca

SEQ ID NO: 1671757 - DNA, 15 bp, Homo sapiens
aatgaatcaaaaagc

SEQ ID NO: 1671758 - DNA, 15 bp, Homo sapiens
aaatgaatcaaaaag

SEQ ID NO: 1671759 - DNA, 15 bp, Homo sapiens
caaatgaatcaaaaa

SEQ ID NO: 1671760 - DNA, 15 bp, Homo sapiens
tcaaatgaatcaaaa

SEQ ID NO: 1671761 - DNA, 15 bp, Homo sapiens
atcaaatgaatcaaa

SEQ ID NO: 1671762 - DNA, 15 bp, Homo sapiens
tatcaaatgaatcaa

SEQ ID NO: 1671763 - DNA, 15 bp, Homo sapiens
ttatcaaatgaatca

SEQ ID NO: 1671764 - DNA, 15 bp, Homo sapiens
tttatcaaatgaatc

SEQ ID NO: 1671765 - DNA, 15 bp, Homo sapiens
gtttatcaaatgaat

SEQ ID NO: 1671766 - DNA, 15 bp, Homo sapiens
tgtttatcaaatgaa

SEQ ID NO: 1671767 - DNA, 15 bp, Homo sapiens
ttgtttatcaaatga

SEQ ID NO: 1671768 - DNA, 15 bp, Homo sapiens
tttgtttatcaaatg

SEQ ID NO: 1671769 - DNA, 15 bp, Homo sapiens
ctttgtttatcaaat

SEQ ID NO: 1671770 - DNA, 15 bp, Homo sapiens
gctttgtttatcaaa

SEQ ID NO: 1671771 - DNA, 15 bp, Homo sapiens
tgctttgtttatcaa

SEQ ID NO: 1671772 - DNA, 15 bp, Homo sapiens
atgctttgtttatca

SEQ ID NO: 1671773 - DNA, 15 bp, Homo sapiens
gatgctttgtttatc

SEQ ID NO: 1671774 - DNA, 15 bp, Homo sapiens
agatgctttgtttat

SEQ ID NO: 1671775 - DNA, 15 bp, Homo sapiens
aagatgctttgttta

SEQ ID NO: 1671776 - DNA, 15 bp, Homo sapiens
aaagatgctttgttt

SEQ ID NO: 1671777 - DNA, 15 bp, Homo sapiens
aaaagatgctttgtt

SEQ ID NO: 1671778 - DNA, 15 bp, Homo sapiens
taaaagatgctttgt

SEQ ID NO: 1671779 - DNA, 15 bp, Homo sapiens
ataaaagatgctttg

SEQ ID NO: 1671780 - DNA, 15 bp, Homo sapiens
cataaaagatgcttt

SEQ ID NO: 1671781 - DNA, 15 bp, Homo sapiens
acataaaagatgctt

SEQ ID NO: 1671782 - DNA, 15 bp, Homo sapiens
cacataaaagatgct

SEQ ID NO: 1671783 - DNA, 15 bp, Homo sapiens
ccacataaaagatgc

SEQ ID NO: 1671784 - DNA, 15 bp, Homo sapiens
tccacataaaagatg

SEQ ID NO: 1671785 - DNA, 15 bp, Homo sapiens
ttccacataaaagat

SEQ ID NO: 1671786 - DNA, 15 bp, Homo sapiens
attccacataaaaga

SEQ ID NO: 1671787 - DNA, 15 bp, Homo sapiens
tattccacataaaag

SEQ ID NO: 1671788 - DNA, 15 bp, Homo sapiens
atattccacataaaa

SEQ ID NO: 1671789 - DNA, 15 bp, Homo sapiens
tatattccacataaa

SEQ ID NO: 1671790 - DNA, 15 bp, Homo sapiens
gtatattccacataa

SEQ ID NO: 1671791 - DNA, 15 bp, Homo sapiens
ggtatattccacata

SEQ ID NO: 1671792 - DNA, 15 bp, Homo sapiens
tggtatattccacat

SEQ ID NO: 1671793 - DNA, 15 bp, Homo sapiens
atggtatattccaca

SEQ ID NO: 1671794 - DNA, 15 bp, Homo sapiens
aatggtatattccac

SEQ ID NO: 1671795 - DNA, 15 bp, Homo sapiens
gaatggtatattcca

SEQ ID NO: 1671796 - DNA, 15 bp, Homo sapiens
agaatggtatattcc

SEQ ID NO: 1671797 - DNA, 15 bp, Homo sapiens
cagaatggtatattc

SEQ ID NO: 1671798 - DNA, 15 bp, Homo sapiens
ccagaatggtatatt

SEQ ID NO: 1671799 - DNA, 15 bp, Homo sapiens
cccagaatggtatat

SEQ ID NO: 1671800 - DNA, 15 bp, Homo sapiens
acccagaatggtata

SEQ ID NO: 1671801 - DNA, 15 bp, Homo sapiens
gacccagaatggtat

SEQ ID NO: 1671802 - DNA, 15 bp, Homo sapiens
ggacccagaatggta

SEQ ID NO: 1671803 - DNA, 15 bp, Homo sapiens
aggacccagaatggt

SEQ ID NO: 1671804 - DNA, 15 bp, Homo sapiens
caggacccagaatgg

SEQ ID NO: 1671805 - DNA, 15 bp, Homo sapiens
tcaggacccagaatg

SEQ ID NO: 1671806 - DNA, 15 bp, Homo sapiens
ctcaggacccagaat

SEQ ID NO: 1671807 - DNA, 15 bp, Homo sapiens
cctcaggacccagaa

SEQ ID NO: 1671808 - DNA, 15 bp, Homo sapiens
tcctcaggacccaga

SEQ ID NO: 1671809 - DNA, 15 bp, Homo sapiens
atcctcaggacccag

SEQ ID NO: 1671810 - DNA, 15 bp, Homo sapiens
tatcctcaggaccca

SEQ ID NO: 1671811 - DNA, 15 bp, Homo sapiens
ttatcctcaggaccc

SEQ ID NO: 1671812 - DNA, 15 bp, Homo sapiens
cttatcctcaggacc

SEQ ID NO: 1671813 - DNA, 15 bp, Homo sapiens
tcttatcctcaggac

SEQ ID NO: 1671814 - DNA, 15 bp, Homo sapiens
ctcttatcctcagga

SEQ ID NO: 1671815 - DNA, 15 bp, Homo sapiens
tctcttatcctcagg

SEQ ID NO: 1671816 - DNA, 15 bp, Homo sapiens
ctctcttatcctcag

SEQ ID NO: 1671817 - DNA, 15 bp, Homo sapiens
tctctcttatcctca

SEQ ID NO: 1671818 - DNA, 15 bp, Homo sapiens
atctctcttatcctc

SEQ ID NO: 1671819 - DNA, 15 bp, Homo sapiens
catctctcttatcct

SEQ ID NO: 1671820 - DNA, 15 bp, Homo sapiens
tcatctctcttatcc

SEQ ID NO: 1671821 - DNA, 15 bp, Homo sapiens
ctcatctctcttatc

SEQ ID NO: 1671822 - DNA, 15 bp, Homo sapiens
cctcatctctcttat

SEQ ID NO: 1671823 - DNA, 15 bp, Homo sapiens
ccctcatctctctta

SEQ ID NO: 1671824 - DNA, 15 bp, Homo sapiens
gccctcatctctctt

SEQ ID NO: 1671825 - DNA, 15 bp, Homo sapiens
tgccctcatctctct

SEQ ID NO: 1671826 - DNA, 15 bp, Homo sapiens
atgccctcatctctc

SEQ ID NO: 1671827 - DNA, 15 bp, Homo sapiens
aatgccctcatctct

SEQ ID NO: 1671828 - DNA, 15 bp, Homo sapiens
taatgccctcatctc

SEQ ID NO: 1671829 - DNA, 15 bp, Homo sapiens
ctaatgccctcatct

SEQ ID NO: 1671830 - DNA, 15 bp, Homo sapiens
tctaatgccctcatc

SEQ ID NO: 1671831 - DNA, 15 bp, Homo sapiens
atctaatgccctcat

SEQ ID NO: 1671832 - DNA, 15 bp, Homo sapiens
gatctaatgccctca

SEQ ID NO: 1671833 - DNA, 15 bp, Homo sapiens
tgatctaatgccctc

SEQ ID NO: 1671834 - DNA, 15 bp, Homo sapiens
gtgatctaatgccct

SEQ ID NO: 1671835 - DNA, 15 bp, Homo sapiens
agtgatctaatgccc

SEQ ID NO: 1671836 - DNA, 15 bp, Homo sapiens
cagtgatctaatgcc

SEQ ID NO: 1671837 - DNA, 15 bp, Homo sapiens
tcagtgatctaatgc

SEQ ID NO: 1671838 - DNA, 15 bp, Homo sapiens
gtcagtgatctaatg

SEQ ID NO: 1671839 - DNA, 15 bp, Homo sapiens
tgtcagtgatctaat

SEQ ID NO: 1671840 - DNA, 15 bp, Homo sapiens
ctgtcagtgatctaa

SEQ ID NO: 1671841 - DNA, 15 bp, Homo sapiens
gctgtcagtgatcta

SEQ ID NO: 1671842 - DNA, 15 bp, Homo sapiens
agctgtcagtgatct

SEQ ID NO: 1671843 - DNA, 15 bp, Homo sapiens
cagctgtcagtgatc

SEQ ID NO: 1671844 - DNA, 15 bp, Homo sapiens
tcagctgtcagtgat

SEQ ID NO: 1671845 - DNA, 15 bp, Homo sapiens
ttcagctgtcagtga

SEQ ID NO: 1671846 - DNA, 15 bp, Homo sapiens
cttcagctgtcagtg

SEQ ID NO: 1671847 - DNA, 15 bp, Homo sapiens
tcttcagctgtcagt

SEQ ID NO: 1671848 - DNA, 15 bp, Homo sapiens
atcttcagctgtcag

SEQ ID NO: 1671849 - DNA, 15 bp, Homo sapiens
tatcttcagctgtca

SEQ ID NO: 1671850 - DNA, 15 bp, Homo sapiens
ctatcttcagctgtc

SEQ ID NO: 1671851 - DNA, 15 bp, Homo sapiens
tctatcttcagctgt

SEQ ID NO: 1671852 - DNA, 15 bp, Homo sapiens
ttctatcttcagctg

SEQ ID NO: 1671853 - DNA, 15 bp, Homo sapiens
cttctatcttcagct

SEQ ID NO: 1671854 - DNA, 15 bp, Homo sapiens
tcttctatcttcagc

SEQ ID NO: 1671855 - DNA, 15 bp, Homo sapiens
ttcttctatcttcag

SEQ ID NO: 1671856 - DNA, 15 bp, Homo sapiens
gttcttctatcttca

SEQ ID NO: 1671857 - DNA, 15 bp, Homo sapiens
tgttcttctatcttc

SEQ ID NO: 1671858 - DNA, 15 bp, Homo sapiens
atgttcttctatctt

SEQ ID NO: 1671859 - DNA, 15 bp, Homo sapiens
gatgttcttctatct

SEQ ID NO: 1671860 - DNA, 15 bp, Homo sapiens
agatgttcttctatc

SEQ ID NO: 1671861 - DNA, 15 bp, Homo sapiens
aagatgttcttctat

SEQ ID NO: 1671862 - DNA, 15 bp, Homo sapiens
aaagatgttcttcta

SEQ ID NO: 1671863 - DNA, 15 bp, Homo sapiens
caaagatgttcttct

SEQ ID NO: 1671864 - DNA, 15 bp, Homo sapiens
ccaaagatgttcttc

SEQ ID NO: 1671865 - DNA, 15 bp, Homo sapiens
accaaagatgttctt

SEQ ID NO: 1671866 - DNA, 15 bp, Homo sapiens
aaccaaagatgttct

SEQ ID NO: 1671867 - DNA, 15 bp, Homo sapiens
aaaccaaagatgttc

SEQ ID NO: 1671868 - DNA, 15 bp, Homo sapiens
caaaccaaagatgtt

SEQ ID NO: 1671869 - DNA, 15 bp, Homo sapiens
tcaaaccaaagatgt

SEQ ID NO: 1671870 - DNA, 15 bp, Homo sapiens
atcaaaccaaagatg

SEQ ID NO: 1671871 - DNA, 15 bp, Homo sapiens
aatcaaaccaaagat

SEQ ID NO: 1671872 - DNA, 15 bp, Homo sapiens
caatcaaaccaaaga

SEQ ID NO: 1671873 - DNA, 15 bp, Homo sapiens
acaatcaaaccaaag

SEQ ID NO: 1671874 - DNA, 15 bp, Homo sapiens
aacaatcaaaccaaa

SEQ ID NO: 1671875 - DNA, 15 bp, Homo sapiens
aaacaatcaaaccaa

SEQ ID NO: 1671876 - DNA, 15 bp, Homo sapiens
taaacaatcaaacca

SEQ ID NO: 1671877 - DNA, 15 bp, Homo sapiens
ttaaacaatcaaacc

SEQ ID NO: 1671878 - DNA, 15 bp, Homo sapiens
tttaaacaatcaaac

SEQ ID NO: 1671879 - DNA, 15 bp, Homo sapiens
atttaaacaatcaaa

SEQ ID NO: 1671880 - DNA, 15 bp, Homo sapiens
tatttaaacaatcaa

SEQ ID NO: 1671881 - DNA, 15 bp, Homo sapiens
ttatttaaacaatca

SEQ ID NO: 1671882 - DNA, 15 bp, Homo sapiens
attatttaaacaatc

SEQ ID NO: 1671883 - DNA, 15 bp, Homo sapiens
tattatttaaacaat

SEQ ID NO: 1671884 - DNA, 15 bp, Homo sapiens
atattatttaaacaa

SEQ ID NO: 1671885 - DNA, 15 bp, Homo sapiens
aatattatttaaaca

SEQ ID NO: 1671886 - DNA, 15 bp, Homo sapiens
aaatattatttaaac

SEQ ID NO: 1671887 - DNA, 15 bp, Homo sapiens
gaaatattatttaaa

SEQ ID NO: 1671888 - DNA, 15 bp, Homo sapiens
tgaaatattatttaa

SEQ ID NO: 1671889 - DNA, 15 bp, Homo sapiens
ttgaaatattattta

SEQ ID NO: 1671890 - DNA, 15 bp, Homo sapiens
attgaaatattattt

SEQ ID NO: 1671891 - DNA, 15 bp, Homo sapiens
cattgaaatattatt

SEQ ID NO: 1671892 - DNA, 15 bp, Homo sapiens
gcattgaaatattat

SEQ ID NO: 1671893 - DNA, 15 bp, Homo sapiens
ggcattgaaatatta

SEQ ID NO: 1671894 - DNA, 15 bp, Homo sapiens
aggcattgaaatatt

SEQ ID NO: 1671895 - DNA, 15 bp, Homo sapiens
taggcattgaaatat

SEQ ID NO: 1671896 - DNA, 15 bp, Homo sapiens
ataggcattgaaata

SEQ ID NO: 1671897 - DNA, 15 bp, Homo sapiens
aataggcattgaaat

SEQ ID NO: 1671898 - DNA, 15 bp, Homo sapiens
gaataggcattgaaa

SEQ ID NO: 1671899 - DNA, 15 bp, Homo sapiens
agaataggcattgaa

SEQ ID NO: 1671900 - DNA, 15 bp, Homo sapiens
gagaataggcattga

SEQ ID NO: 1671901 - DNA, 15 bp, Homo sapiens
agagaataggcattg

SEQ ID NO: 1671902 - DNA, 15 bp, Homo sapiens
cagagaataggcatt

SEQ ID NO: 1671903 - DNA, 15 bp, Homo sapiens
gcagagaataggcat

SEQ ID NO: 1671904 - DNA, 15 bp, Homo sapiens
tgcagagaataggca

SEQ ID NO: 1671905 - DNA, 15 bp, Homo sapiens
ttgcagagaataggc

SEQ ID NO: 1671906 - DNA, 15 bp, Homo sapiens
cttgcagagaatagg

SEQ ID NO: 1671907 - DNA, 15 bp, Homo sapiens
ccttgcagagaatag

SEQ ID NO: 1671908 - DNA, 15 bp, Homo sapiens
accttgcagagaata

SEQ ID NO: 1671909 - DNA, 15 bp, Homo sapiens
taccttgcagagaat

SEQ ID NO: 1671910 - DNA, 15 bp, Homo sapiens
gtaccttgcagagaa

SEQ ID NO: 1671911 - DNA, 15 bp, Homo sapiens
agtaccttgcagaga

SEQ ID NO: 1671912 - DNA, 15 bp, Homo sapiens
tagtaccttgcagag

SEQ ID NO: 1671913 - DNA, 15 bp, Homo sapiens
atagtaccttgcaga

SEQ ID NO: 1671914 - DNA, 15 bp, Homo sapiens
catagtaccttgcag

SEQ ID NO: 1671915 - DNA, 15 bp, Homo sapiens
acatagtaccttgca

SEQ ID NO: 1671916 - DNA, 15 bp, Homo sapiens
aacatagtaccttgc

SEQ ID NO: 1671917 - DNA, 15 bp, Homo sapiens
aaacatagtaccttg

SEQ ID NO: 1671918 - DNA, 15 bp, Homo sapiens
gaaacatagtacctt

SEQ ID NO: 1671919 - DNA, 15 bp, Homo sapiens
cgaaacatagtacct

SEQ ID NO: 1671920 - DNA, 15 bp, Homo sapiens
acgaaacatagtacc

SEQ ID NO: 1671921 - DNA, 15 bp, Homo sapiens
tacgaaacatagtac

SEQ ID NO: 1671922 - DNA, 15 bp, Homo sapiens
ttacgaaacatagta

SEQ ID NO: 1671923 - DNA, 15 bp, Homo sapiens
tttacgaaacatagt

SEQ ID NO: 1671924 - DNA, 15 bp, Homo sapiens
atttacgaaacatag

SEQ ID NO: 1671925 - DNA, 15 bp, Homo sapiens
aatttacgaaacata

SEQ ID NO: 1671926 - DNA, 15 bp, Homo sapiens
taatttacgaaacat

SEQ ID NO: 1671927 - DNA, 15 bp, Homo sapiens
ttaatttacgaaaca

SEQ ID NO: 1671928 - DNA, 15 bp, Homo sapiens
tttaatttacgaaac

SEQ ID NO: 1671929 - DNA, 15 bp, Homo sapiens
atttaatttacgaaa

SEQ ID NO: 1671930 - DNA, 15 bp, Homo sapiens
tatttaatttacgaa

SEQ ID NO: 1671931 - DNA, 15 bp, Homo sapiens
ctatttaatttacga

SEQ ID NO: 1671932 - DNA, 15 bp, Homo sapiens
cctatttaatttacg

SEQ ID NO: 1671933 - DNA, 15 bp, Homo sapiens
acctatttaatttac

SEQ ID NO: 1671934 - DNA, 15 bp, Homo sapiens
gacctatttaattta

SEQ ID NO: 1671935 - DNA, 15 bp, Homo sapiens
agacctatttaattt

SEQ ID NO: 1671936 - DNA, 15 bp, Homo sapiens
cagacctatttaatt

SEQ ID NO: 1671937 - DNA, 15 bp, Homo sapiens
ccagacctatttaat

SEQ ID NO: 1671938 - DNA, 15 bp, Homo sapiens
gccagacctatttaa

SEQ ID NO: 1671939 - DNA, 15 bp, Homo sapiens
ggccagacctattta

SEQ ID NO: 1671940 - DNA, 15 bp, Homo sapiens
gggccagacctattt

SEQ ID NO: 1671941 - DNA, 15 bp, Homo sapiens
tgggccagacctatt

SEQ ID NO: 1671942 - DNA, 15 bp, Homo sapiens
ctgggccagacctat

SEQ ID NO: 1671943 - DNA, 15 bp, Homo sapiens
tctgggccagaccta

SEQ ID NO: 1671944 - DNA, 15 bp, Homo sapiens
ttctgggccagacct

SEQ ID NO: 1671945 - DNA, 15 bp, Homo sapiens
cttctgggccagacc

SEQ ID NO: 1671946 - DNA, 15 bp, Homo sapiens
tcttctgggccagac

SEQ ID NO: 1671947 - DNA, 15 bp, Homo sapiens
gtcttctgggccaga

SEQ ID NO: 1671948 - DNA, 15 bp, Homo sapiens
ggtcttctgggccag

SEQ ID NO: 1671949 - DNA, 15 bp, Homo sapiens
gggtcttctgggcca

SEQ ID NO: 1671950 - DNA, 15 bp, Homo sapiens
tgggtcttctgggcc

SEQ ID NO: 1671951 - DNA, 15 bp, Homo sapiens
gtgggtcttctgggc

SEQ ID NO: 1671952 - DNA, 15 bp, Homo sapiens
agtgggtcttctggg

SEQ ID NO: 1671953 - DNA, 15 bp, Homo sapiens
gagtgggtcttctgg

SEQ ID NO: 1671954 - DNA, 15 bp, Homo sapiens
tgagtgggtcttctg

SEQ ID NO: 1671955 - DNA, 15 bp, Homo sapiens
ttgagtgggtcttct

SEQ ID NO: 1671956 - DNA, 15 bp, Homo sapiens
attgagtgggtcttc

SEQ ID NO: 1671957 - DNA, 15 bp, Homo sapiens
aattgagtgggtctt

SEQ ID NO: 1671958 - DNA, 15 bp, Homo sapiens
caattgagtgggtct

SEQ ID NO: 1671959 - DNA, 15 bp, Homo sapiens
gcaattgagtgggtc

SEQ ID NO: 1671960 - DNA, 15 bp, Homo sapiens
ggcaattgagtgggt

SEQ ID NO: 1671961 - DNA, 15 bp, Homo sapiens
aggcaattgagtggg

SEQ ID NO: 1671962 - DNA, 15 bp, Homo sapiens
aaggcaattgagtgg

SEQ ID NO: 1671963 - DNA, 15 bp, Homo sapiens
aaaggcaattgagtg

SEQ ID NO: 1671964 - DNA, 15 bp, Homo sapiens
caaaggcaattgagt

SEQ ID NO: 1671965 - DNA, 15 bp, Homo sapiens
tcaaaggcaattgag

SEQ ID NO: 1671966 - DNA, 15 bp, Homo sapiens
ctcaaaggcaattga

SEQ ID NO: 1671967 - DNA, 15 bp, Homo sapiens
tctcaaaggcaattg

SEQ ID NO: 1671968 - DNA, 15 bp, Homo sapiens
atctcaaaggcaatt

SEQ ID NO: 1671969 - DNA, 15 bp, Homo sapiens
aatctcaaaggcaat

SEQ ID NO: 1671970 - DNA, 15 bp, Homo sapiens
taatctcaaaggcaa

SEQ ID NO: 1671971 - DNA, 15 bp, Homo sapiens
ttaatctcaaaggca

SEQ ID NO: 1671972 - DNA, 15 bp, Homo sapiens
tttaatctcaaaggc

SEQ ID NO: 1671973 - DNA, 15 bp, Homo sapiens
ttttaatctcaaagg

SEQ ID NO: 1671974 - DNA, 15 bp, Homo sapiens
tttttaatctcaaag

SEQ ID NO: 1671975 - DNA, 15 bp, Homo sapiens
ttttttaatctcaaa

SEQ ID NO: 1671976 - DNA, 15 bp, Homo sapiens
tttttttaatctcaa

SEQ ID NO: 1671977 - DNA, 15 bp, Homo sapiens
ttttttttaatctca

SEQ ID NO: 1671978 - DNA, 15 bp, Homo sapiens
tttttttttaatctc

SEQ ID NO: 1671979 - DNA, 15 bp, Homo sapiens
tttttttttttaatc

SEQ ID NO: 1671980 - DNA, 15 bp, Homo sapiens
atttttctttctttt

SEQ ID NO: 1671981 - DNA, 15 bp, Homo sapiens
catttttctttcttt

SEQ ID NO: 1671982 - DNA, 15 bp, Homo sapiens
gcatttttctttctt

SEQ ID NO: 1671983 - DNA, 15 bp, Homo sapiens
tgcatttttctttct

SEQ ID NO: 1671984 - DNA, 15 bp, Homo sapiens
ttgcatttttctttc

SEQ ID NO: 1671985 - DNA, 15 bp, Homo sapiens
cttgcatttttcttt

SEQ ID NO: 1671986 - DNA, 15 bp, Homo sapiens
acttgcatttttctt

SEQ ID NO: 1671987 - DNA, 15 bp, Homo sapiens
aacttgcatttttct

SEQ ID NO: 1671988 - DNA, 15 bp, Homo sapiens
aaacttgcatttttc

SEQ ID NO: 1671989 - DNA, 15 bp, Homo sapiens
gaaacttgcattttt

SEQ ID NO: 1671990 - DNA, 15 bp, Homo sapiens
agaaacttgcatttt

SEQ ID NO: 1671991 - DNA, 15 bp, Homo sapiens
aagaaacttgcattt

SEQ ID NO: 1671992 - DNA, 15 bp, Homo sapiens
aaagaaacttgcatt

SEQ ID NO: 1671993 - DNA, 15 bp, Homo sapiens
gaaagaaacttgcat

SEQ ID NO: 1671994 - DNA, 15 bp, Homo sapiens
tgaaagaaacttgca

SEQ ID NO: 1671995 - DNA, 15 bp, Homo sapiens
ttgaaagaaacttgc

SEQ ID NO: 1671996 - DNA, 15 bp, Homo sapiens
tttgaaagaaacttg

SEQ ID NO: 1671997 - DNA, 15 bp, Homo sapiens
ttttgaaagaaactt

SEQ ID NO: 1671998 - DNA, 15 bp, Homo sapiens
attttgaaagaaact

SEQ ID NO: 1671999 - DNA, 15 bp, Homo sapiens
tattttgaaagaaac

SEQ ID NO: 1672000 - DNA, 15 bp, Homo sapiens
ttattttgaaagaaa

SEQ ID NO: 1672001 - DNA, 15 bp, Homo sapiens
tttattttgaaagaa

SEQ ID NO: 1672002 - DNA, 15 bp, Homo sapiens
ctttattttgaaaga

SEQ ID NO: 1672003 - DNA, 15 bp, Homo sapiens
tctttattttgaaag

SEQ ID NO: 1672004 - DNA, 15 bp, Homo sapiens
ctctttattttgaaa

SEQ ID NO: 1672005 - DNA, 15 bp, Homo sapiens
tctctttattttgaa

SEQ ID NO: 1672006 - DNA, 15 bp, Homo sapiens
gtctctttattttga

SEQ ID NO: 1672007 - DNA, 15 bp, Homo sapiens
tgtctctttattttg

SEQ ID NO: 1672008 - DNA, 15 bp, Homo sapiens
atgtctctttatttt

SEQ ID NO: 1672009 - DNA, 15 bp, Homo sapiens
aatgtctctttattt

SEQ ID NO: 1672010 - DNA, 15 bp, Homo sapiens
aaatgtctctttatt

SEQ ID NO: 1672011 - DNA, 15 bp, Homo sapiens
aaaatgtctctttat

SEQ ID NO: 1672012 - DNA, 15 bp, Homo sapiens
aaaaatgtctcttta

SEQ ID NO: 1672013 - DNA, 15 bp, Homo sapiens
gaaaaatgtctcttt
